United States Patent Application Publication US 2011/0183924 A1 - sequence listing, part 293

SEQ ID NO: 962222 - protein, 261 aa, Homo sapiens
MAGSRQGGNRTRMHHGLGRRGGNLPAMAMRPFFGIVPVLMDEKGSVVEGSNVSGALCISQAWPGMARTIYELTTSDLWTPTYKAYPGYYFTGDCGLTRTEGGYYQITVAVDDVINISWPTVLGNREDLERPLSGRTLLEQQESCCRVGYPQLNQEEKLPSPSVVVKRSGGDLTMWWCTDTSSPWMATKIAKMAVPDEILGGETVFQKTRSGKVMRPAPEEDHHLVRPRSLGDNYHLGGTPAIIAGDLSVYQKVQDKQAVLS

SEQ ID NO: 962223 - protein, 69 aa, Homo sapiens
MGSPYSPELLHQVLLAPLTPAEETKDGQTVSPCPLLPIPDTHGLPRLPQEKVTAVEEVHIDGAIRATYQ

SEQ ID NO: 962224 - protein, 314 aa, Homo sapiens
MTHICAGTVDSAWCSNGETKNGGGGVLVTICMMTPPMCGYVEHYVGATVEIPLMASVTFNDCHFAGAHHVMNARVRFYKNWPYTLTQNGRITKLLHTPHGRMRHGQDRSWSKALQHAHEECTAKSYRVIAHTQDAPASSWRKNQRAHLMEIQCERMHLWPHAAWPGPRLRQCLQHSGPCDPRVLAPAALLRRPRGAPGPGLHTVYTGDWHTKTADHARRHECLRTVPVLGACNQQIVASCATHGPKGYLSPPCDSHDTYTDCTVEANHGTDVTENLTTDICNNRQSANPWLYDPSVRPKNLYSDVFGQNVYHNT

SEQ ID NO: 962225 - protein, 104 aa, Homo sapiens
MSSSRLQVETLYLDSPAVIHLLSPTFLPPSSLPPFLQIVDSSSSACTLDSFFPFLAPWDSPQDCGFKDHQPLTLQALTVESGRCSDPPVFSLAMYHGFSFWSCS

SEQ ID NO: 962226 - protein, 252 aa, Homo sapiens
EAPWVGSDSLGQRNGHNDDEQYAWRVSCWRYLHCCVLTMVSPLAGEYQKMILHLKEDQKEYLEERRVIRSSELKHSRWFIGYPISPLLWRRNEEEWKVSDDEAEEEQWVRKKREDKDDEEIARTVIEDVGSDEEDDCGKDRRRRKTNEDQEMKYHLSGHELNYSKPIGTRKTLMTITRKRSMDEFYKMPHYMTGDRSDLDSSNGTFAVSKGPVGNVTGQQRIYFLVGLPVDRLRGTELSKNDIKLYVRRVSS

SEQ ID NO: 962227 - protein, 304 aa, Homo sapiens
MVLVSWPHVVRPWWASCSWLAGKIVEMEDVGLLFARLGKYILCCLLGHADPWRSWYCPSSTSSCTRNRNPYRFLWGIVTPLATAFGTSFHVSAHAAADLMMCVEENIGVGKRIRRFILPIGANVTWTGSQRSSICWWSAVFIALAHVQQILCDFLKIITILVYGHERPSVRGEPRASLLGRCPHSGPSSSKQSNLPVDHISLILAVDWLIDGPVTVLKCRKVTLCGQGVLQNPVDRRMSRSPILIDPVKSELPWIRALPWGRNPFCPLVAGDASGTRGNPVPGIHLGVWPVRNRDTLVLPGRPR

SEQ ID NO: 962228 - protein, 109 aa, Homo sapiens
MRVYEYPDLQTLGIRYTSYRATAAVLPEVDDASRGHGGVEGWRAGHTIEGCIFFKTAIISHFKGGMYLCSVHVHVFERVCVVCKWVLGYVYCEHVVHSVKPVHVHVVGA

SEQ ID NO: 962229 - protein, 290 aa, Homo sapiens
MTSHSTITAVTMNYHLPTMAYQHMEATHFLLSHYPPATPGTPSSVTFAFADPLCPVTLLCRRTCPTTSAYLFTVSARGIPLPNTRSMPSLLSWAPHPVSLALAWTPSTPLLPFGNPLCFQTNRLHILHAHHLASAACCTVTGPAIAHLWHLAHLSPPTRLGGPPTGTIPPFGIPPLALHYTLNALAYPEATFAAASSRTCPLLPPPPSPWSVPSYPYATGALLNTCVPLMAPPLPCPRSCTFIRRSPSLRPLPQFSTPAHPRESSSTGSPPIACVVSPPLISATCPSRHI

SEQ ID NO: 962230 - protein, 77 aa, Homo sapiens
MLYGQKKFGVIEERGSGNLHTGSQYLWSFEGCWGPLLSETCLVWTREQKEMSSLLLHSVLSPRAALDQMKTTRVRRG

SEQ ID NO: 962231 - protein, 128 aa, Homo sapiens
GHKVVDEGPLERDFLKYGQRGIPRLLALPRGLWHAGDGHHCCPRGYSTAVQTGRSCFQRSWCNNSVGAIHGALIVMFECPGLLPLLLVLLCLMCSCVVCLPRCPPVLPCCWKTLGCTSLSCNCGCLLA

SEQ ID NO: 962232 - protein, 196 aa, Homo sapiens
KLIKGPIKGYEAGFESERAASCCSNRSWSPDPELHPRHGLVPSAILHNGSAGGRRAHQQHYAACLPLPRGHRCCAYGQASMRHRLHALPSSHYSPPTTGFFYPGRTCPAAPDTGFAALRAKGSCFMDNCLETNPAKAGGCRRRAFPHVEFLAKAFAHHVFWSGFLTRRFLSNKIKFQFPVGKVHRFKTLRVLVPDG

SEQ ID NO: 962233 - protein, 221 aa, Homo sapiens
MLSGTRGRPRWRSCIECGSRYKQSNMLSSHHDKRAAAVTCPKSCQTAPAQLHPVVKTVEGLWQPRRMGSRRYVMQCFKPKDGQAAVNSSADSCHPEPLQVTGRCASSAHEGSSQEDLLYSTVECIRDLLVDHDIGAACEPWLTSYKKALRNWINSCPDQGNADEAPSLGQLLGVAEKTLAPSISRRSVSEMVATCYKVPAAFGYWTRRVTRLYGTEMCAWA

SEQ ID NO: 962234 - protein, 172 aa, Homo sapiens
MCWGRVLVSRVSISHSVVSPVGISLCGGRGVVAFLLLSVAFFFSLLSRNRGSCGDSLVLIAQSVGGQRNVGGSGCGRGKPEAPHVCSPPRGNRGRAPPAGPSQCYLCSQEVAKNPQCGSRTREYLPELAARPFFFRGGHIFISDFHSFPDPCLLHFYSEGVNRKFEPGQSDG

SEQ ID NO: 962235 - protein, 165 aa, Homo sapiens
MAGGAGEKKREKKKRQREGTRGHAAQARENRERTTEGAHHTKRGRTKNIQAPTNRDIPPRILCPPARDQQEQKKKTKKEQKRRKTRKTTKQGPKKRERTKRARKKAPPAESEGREQARRQEGEQKQRATRTRTKDTRKPKTRKGKGKPKKTEHTEKREQGETKNK

SEQ ID NO: 962236 - protein, 134 aa, Homo sapiens
  misc_feature (134)..(134): Xaa can be any naturally occurring amino acid
MTLCPCDMCRGVEAVPSLTTCVCVTLDATALVCISKSACSFLPPPLSVGEMCEIVRNTTTSHLRDVLWPGMCLIDPTCAHSVISSHLYVCVRGRGVGVGIRASPLLFSSVAIFLLISLSTEATLFCVSLSYTIX

SEQ ID NO: 962237 - protein, 235 aa, Homo sapiens
WKGSLALSPGGRAGAQSRHTSAFGVQAILRPQPPELRGTMGACATMCPANFCVFLVESGVFTSVGQEWSRSPDLSDSTHLRPSQRCVGSQGVSHCGPGQPVCVSFQRTSAPGEVADLTSHVVSLEITPPSPGDSLFPCSLVLGGVRGSTVQVTRAPMTWARQDDLQSPYGGESSGDQPSPIRSQVGAGANFAGLSQDHQSASSPLGVGLASGTHQALVSSLGRGVWSRLLVFRGA

SEQ ID NO: 962238 - protein, 148 aa, Homo sapiens
MRIQGGNGIYKGFCLDVIRNNYECELQGAKQHLESEKLLLYYTLQGELQERIQRLEEDRRAVDLSSEWWDDTTAATRVRAPESWDSLPPARSEEGTLWFLAHNIVVLLQEIEILGGLASIKEVCHLCPLREKLFGLDLLYQPGDLKDT

SEQ ID NO: 962239 - protein, 410 aa, Homo sapiens
GSRLHGVAICGGRTVQMKASFNTICENATVVRRYQGKADAPEALVVHMAPDICDYVDSRYQQWMERFEDLTPSTLDPGMRTVPQYHNLRSHKIQTTAQTSSTPDIFPHDSPGIPADKKEGPTISDAHGFRVNASITVPESDPRREMAEEDAIYYYADPEEFIVEAAADFPTFQQTRAGVQEECAGRHQTPAEKSKSEPEIIYHWKQDLTSRCTTRMSDAHTCHTEAPERLLHNMNMMNEGHIYGTNCARQKREDQVEKGTMKKPGMQVQGGPNMTRTISPHGDRQRNHAAKDDSGTRRLQGKTVTTIARQDAHNPVKHGPTDHTQRPEAEPHYTIGHNASRTWPQPQTSRKKANKEHDTEQRQPKEAHTQTMKYQPEEKAQQANYEDQQRDTEQHERILTASRITQNNSR

SEQ ID NO: 962240 - protein, 140 aa, Homo sapiens
MRTTFAAQDSFEVPASVLPGISYSASLKEEGLTVASYEVCQGERSSNGRNENDPVTVFAEGRVIDVQVKEMAKVRYVVSEPHQIPSVDSTPVSVLSMSEEEHERVRKKYHYSVVEGDWYPHHPVKSFKEMRFPCSHPDEA

SEQ ID NO: 962241 - protein, 260 aa, Homo sapiens
MIRAGRIPDGRKHCSETQMEYLENCIGGKHSDFCRHITVDVPLTGYFSWCLQDLQANMCGDPGGTGEQESLLQAPLKDCCLGKGWERTGALGEEECTLPWRVVGEQEPGNLNELQALSCCCGETLVPVYEEMTAEDCLLLVAFGYTLVVCRQQKQAATNAKSFFADQEPWTVSCLVDDEMKPRADRKVKYQSHQRWDQGVLHEDWGEQRRGSQKAFLLPGADGRNGTVQALGGPEKCAPEGFGPENVLFVERPPFGSFHT

SEQ ID NO: 962242 - protein, 108 aa, Homo sapiens
GYPEKERDLPRDTQPPPSRGHQKPDRQIRIPGSVTERLLDLGGVTKCEPWSCYPEKRPVERPPLGVVKVKLGRRAPGPGWVGPGRPREAAAHVRSLAGQNLARHASDY

SEQ ID NO: 962243 - protein, 36 aa, Homo sapiens
AVWGRVRSRLRAFPERLAACGAEAAAEDRCVQASTA

SEQ ID NO: 962244 - protein, 94 aa, Homo sapiens
PPPISTLRTLAPSNSSILTASARESSARLLESSSAALPQDCKNKPTMKRSGLCAVHSLPTTAGAVKHCAHEFLWVGFSTVSVVVPSLEIQLGSS

SEQ ID NO: 962245 - protein, 45 aa, Homo sapiens
GGKLTGGGTDCLGDNYLEGALTDSGRSDLGGTGRLGAGSERRAAA

SEQ ID NO: 962246 - protein, 61 aa, Homo sapiens
  misc_feature (18)..(18): Xaa can be any naturally occurring amino acid
  misc_feature (30)..(30): Xaa can be any naturally occurring amino acid
  misc_feature (55)..(55): Xaa can be any naturally occurring amino acid
DINLLCVPAQPTLIIMSXQAIYSLMGNNTXTNGPECTALLGFGVCFRGNTTKTCXPVRLVL

SEQ ID NO: 962247 - protein, 139 aa, Homo sapiens
DYAGAGEKENLERHCVNQVEKFMELWNKNDEFRKEYLRCNMKSTLRRFRTLDGRALGPDEEPPYVGNFSDNRVNASAKVNSVDTTSALESDFPLIAKKAEESSKKVIELKNKTALVQNQKQSEITSKSSLAEPSGRIET

SEQ ID NO: 962248 - protein, 108 aa, Homo sapiens
GPLCFRLAACELEGQSPRPGGLGGSGCAVGCASLLQVGTQRGWGHEAEVGLKQEWAVGTSCFSCIRAVAGMPGDYRRHLSRLRFRERCGVSRRSPQCARRFRLAFQSP

SEQ ID NO: 962249 - protein, 53 aa, Homo sapiens
PAGSASLGALMAAQCEDFRAPSLWLSFTPQFMVAPVFAGSTSADSTIKITIQQ

SEQ ID NO: 962250 - protein, 100 aa, Homo sapiens
  misc_feature (25)..(25): Xaa can be any naturally occurring amino acid
QLQFRKNKRPSNSSHATGEADNGPXCWEPLNRPLRDFDCCFAETAPPVSRKQLRSVFVLILILILMAVRCISLEGAMRQPGGKGSPEKLQPAHWEECALG

SEQ ID NO: 962251 - protein, 102 aa, Homo sapiens
MSQRQSGFLGQKDQLTVVQQVSLKDATDLGDTKEILSFSHLRSEADDRGYLHFTFPFRGGHSGDVRLQNPPPEPPKVVNDKPPQIPRSLLSRSPSAVMSVPG

SEQ ID NO: 962252 - protein, 78 aa, Homo sapiens
LTELGRTVFMGKKLDAAGDCTTSCMELKVQHPVYSCRVRPVLPGEPTPPLCSSCFPLALVWASDPPTRLASPGLTSGV

SEQ ID NO: 962253 - protein, 241 aa, Homo sapiens
SGTVGECREKDPNARDSLSVHKNVTGERVMCNDAGTAVMPRVMMCVDVCCNECLSLNPCRCMLPCACGHVDMGVWVPCLLGWLCFCPRNPLRSPWLCHTHASITMHACMHGRSNLVMHRHVVVEVVMACTCALMDFVVTCDILYEDIELECSGGPLTRIRHESAGLRQCQLRAREQYKYFPSSALTSDCPSDVPCQGPCLAHLPANSRATMPSQKLGRIREDEGAVAGHQQSTEPPESYKA

SEQ ID NO: 962254 - protein, 65 aa, Homo sapiens
  misc_feature (65)..(65): Xaa can be any naturally occurring amino acid
MTPPTNEGETDTRTNEGTRTTNTGAHTQLSTASDTPHPHETATNQKSTRANGTNPHNRTPPVPTX

SEQ ID NO: 962255 - protein, 131 aa, Homo sapiens
MGQQHHSRLSLYHLKSITSRRRTGKAAYYRVATLNKSGGHEGPQRETTQTREGGESKGGNQIVGPHEVFNDSNGGHSVETTTTQKSPLPEDPIRRDTCQRQYWLGGGGNPGTLVYNTVRQGSRGSGRGLEK

SEQ ID NO: 962256 - protein, 151 aa, Homo sapiens
MCETKKHSVLCADPQLTASKVDLTPKVCRAGHRALDMLLPCAVPSLLLAVCPCSHLPAPQVAELLSAVQCVVERSVYGVPALLVSSPKSFPFKETNMFRGPVFCPHLSGDSIRCMMWMPSLLSSSLFGPPCGERQKGRAPDAPLFHALGAQ

SEQ ID NO: 962257 - protein, 105 aa, Homo sapiens
MRWCDELRRARCKFQGGTTVLVEADSLTSISCGICKQQFNNLGYAFCSYTSKVACQLTWHIRSSPQQLVQFVIGGNMCLQPDSDQHQKHHLGDPDNHSSAPEFVL

SEQ ID NO: 962258 - protein, 237 aa, Homo sapiens
HRHPLVCPALPVTAAVAIQLPVGAVVCVAPAVCLVPRVILPCRFPWGCLLLQMPVLGAPGALASCPLVQQECACLLYILSSPASQSWENVHGWGVWKNKMENVLAPCRSASPTLASLACAWWTSQSACHEREHAEVRELRWARVQIPGWHNVCWWMLDSRHPYLACIFKQQFNNLDAFVAHKQSGYPADRHILQQAPARSSLYRRKHVPATQTQTTPEPSPRRARQSQFQLQNLSLG

SEQ ID NO: 962259 - protein, 96 aa, Homo sapiens
MMCPKPLVHWAQGPQFLHYCGRRTHWPYLTCLSQIPSEDQQDQGAYKGTITGSLTESTRGLNRGTVGTTGGPISRELTQELGQTVQNPEVTHRPAM

SEQ ID NO: 962260 - protein, 333 aa, Homo sapiens
PPFFFLCASSLLFFPLPGGGGPGGPLGGGPQGCPPFFKEKPHPRVPSKKRGGVAQKSTGKKRLPTTLRHSPHPLSYRETGKTEQKRRTYERVDQGQREKKTGSPTTQPENTNTQCTAKQKNAHEHHTNRVGGPHHEWRRRDVTRPHKRNNRQASKITYKTNISPQKENITNVTHTRKYTTYQRERPTTPLYVRDPRKNPAESEETLTPPQRGAFCGTHITYTQNSPLTSKDKRGDKKHPTRGATSTQTTFTHENDNDGTDWGDKYDAGQTGTIHKTTPYDDEQGPRPVSTPFGSDSTKNKTERHSTYQNTFDSAAAGSELTPADNTRDIELKK

SEQ ID NO: 962261 - protein, 278 aa, Homo sapiens
NCCAPPQEYRLEILEVDVYPGLALMQDRFMLTDKGSQAEVKIQLNVRTLGHCNAVCCAAPSMIHGAPSDGAVSRAAAGMLKLLAVMCDPVARIPLREPALIWVLLVCIGAVSGGTVGVTAPVVEVTEAVAWVWEPLRLAPVCAAVIVVLEVAQEVRIACAPLVPMLAPFLEAKQSVDWAVGQCLCQGPKGRRMKLAGALPRQRARRVLPKLARAYDTEYFAQACSTGLLLGAADISSLRPEAAVWALPVSTSLSWRLQVYDDELGDCARPGLLNRGPF

SEQ ID NO: 962262 - protein, 33 aa, Homo sapiens
MPYKVIGIMTPRLRFDFTGAVRFSKSEPGLSVP

SEQ ID NO: 962263 - protein, 175 aa, Homo sapiens
MLVTASELSSMLAANCKEQQLLACVQRAAPASPLAEAPLRAWLSAGGLPRAAAAHSEAASRDRHEGHLTRVSHPRTASDACERRFCFYQRVSKVTSEAMAWHPPGLVGPMPQLAPTDWRTPPVLHTVAFRQAHSPSPWLVSSSCWWSHEAFRVPPFWTGTPEGGRTALTAPSRVV

SEQ ID NO: 962264 - protein, 118 aa, Homo sapiens
MAVTYSQYSPRGQYVTAQIEGSYRGASGAYSTPQPCPDRSGSYYNGTADITLRLHLGTIQRDLAKGGTVEYSQREAHAGPGPNSTSTGQLASYSGHSDRQRSSQFFPKYIVPQGPKHP

SEQ ID NO: 962265 - protein, 102 aa, Homo sapiens
ALPPPPPPPPPPPPPPPPPPPPLNFGRSRPGFCAPSLGSALSLLVCDKASVRHCGENCGLLCLSVPMCVLVHLHCWSGVAHFPAAGVPVRNLGILCVLDTLP

SEQ ID NO: 962266 - protein, 211 aa, Homo sapiens
MRLQRSFVEHSAAVTAVQAGTGTGRPLESRGPRSCSSRELRAGCAPPVQKDDPVSVLVGPTQPVRRYVAGPAFLGNGAGFANVLRDLRTRTPRRCSRARLVPKSLLLKPHQREKMSIGKSIHRSLAHQHVVGFHGFFEDNDYRVSWVEELCRRRSLLELHKRRKALTEALRPDTTYVQIVLGCQYLHRNRVIHRDLKLGNLFLNEDLAGDT

SEQ ID NO: 962267 - protein, 257 aa, Homo sapiens
MGKVKVGVNGLMVDIGRLVEPVSAFNSGKVDMLPSMTPIIDLNYMVIHVSNMIPPMANSMDTVKAENGKLVIKGNTHHHTSRSEIPPKSSGAMHGAEYVAGRSTGRLQPPLEKAGGSISTGQEPKRDNHSYMTPICLECPHCTTWRVDTSEKYRQTAIKITQQMPPDTTQHDDRHPVANGTSHEQTIDEIRKNASSMTNSTMPQHIAPRKDLVDRTPPRKTEDRCTSGAHPEHHHDTLRKTPKAYETKPTTKETREH

SEQ ID NO: 962268 - protein, 213 aa, Homo sapiens
MHAGHSSPGDCHLRHAEFSGEACMARAMVAVQAVQGHEAVSVCGTWTLRGCAEHSMAMRSGAHLADSLVHAAFICSVLGMAVVLAGSRHATCNHRGRRPGASRLCLLVPCALTWMMQQGSPACLECVSSFRSTSPGTYAYRPPKRAMEALLKGGSRIAQTDLAPEACVSRSRHRRGHIRTRAAGLSQSPWLAIRQSVPLGSMWSGGNCCPVVG

SEQ ID NO: 962269 - protein, 33 aa, Homo sapiens
MAPITRTQTLDLGKVNKHRYRESRGPQVNNDGA

SEQ ID NO: 962270 - protein, 103 aa, Homo sapiens
MVHIHQTRNQRVSQVGRVCGVKERGGIKPTQWAQCARGDTPLGGIYKRGWGGSVCLQMKARNICDDEWVTTHQRRGGNIISERSERKKHSCLSERKPHNVCFV

SEQ ID NO: 962271 - protein, 151 aa, Homo sapiens
SILSIYGRNQSGVKKKGNEVWGQRGGGCERSPSPVRGWWVGGEGEGVTGKTHGSGSSFWMTVWYGFLEVLGQDNGSGFLTGQPTFHSPDRWEVNISSGKSYLGRGHIVFQVNLLREVHLARDRGENQSTIWAGGARKGEIQFNGRQHVQGL

SEQ ID NO: 962272 - protein, 211 aa, Homo sapiens
MTWRSPVPGLEDVMPELRPEENLSPVLNVDAGAACLACVALVCCPAAMAVPECDMLVCREAGGCCAVLPVPNDVLACSLSARDTTPKRLCAPRRCRCDADAPEPTNGCREYLGWGLAAELQPEELRVYPVCGGLSNLLFLLLCSRTTCPAFGEEPREVLLAAVRSHLAVLLDSLVLESVMFAILAERSLGPQLYGVFPGGPAGTVHPSRAL

SEQ ID NO: 962273 - protein, 86 aa, Homo sapiens
AFHVPTPTVSEIWLAACECWSPENDEYDAVALELLLANGCWSSAPTCPVVFIECLVNAWMLCVAMTYTHVACPTDLVLSDVPCWHY

SEQ ID NO: 962274 - protein, 229 aa, Homo sapiens
  misc_feature (59)..(59): Xaa can be any naturally occurring amino acid
QCKYPMKRKFVAAWHLQSLKLYSEFLTRELAEDGYSGVEVQSYTNQAQKSLSLAHQNYXNCFLRAEGPGGIRAHCTCCCSVTVRFGFPEGQLLEPLYACNKGGHLRGLVCHSAQCSRSLRLNSTSLGRALAVAARAVLVDVRARSISGRSWGQKAARLVAGSVEDSDGQHGLDSMTGLVGWPDASTSGGPWLLYSRLTLAVRHVLAQTGCAGAHGGLIMLPWDPAGTIG

SEQ ID NO: 962275 - protein, 124 aa, Homo sapiens
RKLFAAGNLDLQQKSIAWPTQTVSLEAVTGWCTGFSLFQQGSGQAWLQQLLARVDFFSFSLANHTGYIKGGLDNELEKDMNETPSQQLKIRYTSNQIPTEVRSNAEEVCPSVKNKCLVTGDTRP

SEQ ID NO: 962276 - protein, 99 aa, Homo sapiens
GGSGTVVLQCCWSLPGACAAGAQPVPLWPGCSVSPCCSCASSQLLPLCSVCLCPDGGVLPDCACCVCLCGLMCLMLQANPYLLTCYLLTMIHACLLHVS

SEQ ID NO: 962277 - protein, 257 aa, Homo sapiens
GYPTISLDILLQVRSHLFPPSGQISLSLDGFPSNGRRCHTTQVPSSGYPVSWRLPMRPWEVIQPLEAIHGCTHRPGASTIHIPEIIQRQGIRRSHTGWRAELNHGVIHQTHFTGHYGQVDQQQSYQLPWRLYLEDRCHNSDILEDTTLLHHSQPCHRDIRVTQRNISRTSVPNIQQTTKRSHENFLTTKATTNGSQRDQTATHATGTCRQANPDPTDHDRQTHIHASHHKPTQCPGSYQTLNHSHAELDHLHPPIRP

SEQ ID NO: 962278 - protein, 116 aa, Homo sapiens
SKRQNRLGGGPLVNAGRGFPMGVVAVIAIYSGKDVLVLWRTWQRAEPLQHATSAAGARWSRVDLRSSSPVAHVARPLPDLATLDSLPPVERVTVCEYLRYLRSIIALVLAICVVVS

SEQ ID NO: 962279 - protein, 299 aa, Homo sapiens
KTQATIRLRDENGRRQEEASAASLKHGCVCMPALVGQPRAWLPIMWPQPIHGDEGGLLDWRPLEPDGKRVTAFHFTVCTLSSNFRQKWMPRGLPTLAWRSMNTDSNELEGPLGALEACRSIESLTLALALTCYRLDYSRSSSRYSTLFPSPPLSLSCRQTLHPSTFHFPPAYCRTSRPACYRAYLYVNTDPAAARPPHNHEQQPNHQPADNTPHTQDPPPNKRKGRRANHHKPPKYAKPTRNTQNDEDTPPDKHSCQRRNRRTPTAQKNNRKNSHKTGHERPQRHPNIATMQYRTKRDR

SEQ ID NO: 962280 - protein, 106 aa, Homo sapiens
MLLQNTSPGLCLHASTGSDEKLRNPEIACKIQHRPEQNIHNADARKPSDRTMEREPGSGSKVSLKTTKQQGTQAKKGEVQTRKQEKRRAGLTRRDETVKRRQLTGT

SEQ ID NO: 962281 - protein, 131 aa, Homo sapiens
MATPVSHDTSVPCSSRLLEDWSCYYYSWAVAGEENPGGQKEKTCEVGEERKGKESEKELALVKRVKPLFNKSFESTVGQGSDTIHLHLQGVPGELANRHYRGAGRGAKSTISNGKETVEGDSNETHIFDGS

SEQ ID NO: 962282 - protein, 125 aa, Homo sapiens
  misc_feature (117)..(117): Xaa can be any naturally occurring amino acid
MRKGPIIIEGETIIMSRPGLRKKEDEHAHQHKEVISWSGGVVETMVVVVAMSWCITSIVVEDRSSFVVRESRQLQLLMGEVVVCEERMNKKHEERGRRDRVSEYVGTRQDGGQLNIXCISKKAST

SEQ ID NO: 962283 - protein, 137 aa, Homo sapiens
MVANAILAACPIAVCKAGAALTKGVPLYRHIADLAGNFCKSSCQSRRFNAHQLAVLTAGNKLATAGASRSSQSVQQTSGKPCALGAEVYHNLTRMSSNGRNYWDKMPTNVGDEGGFAPNILAELRRPGAAEDCLWES

SEQ ID NO: 962284 - protein, 306 aa, Homo sapiens
ATVLKTPHGTARNADFAHLHALDPRPRPRTAAMWASTPRDHRAATYSGLLPEAEEDLLRWLAPEITQRAMTTKISILGDSPCLLIDIMMLYYSKANIYLVIFEITRQKPLMKRRHLYHDPKIKPEEATPRDAPPNGANACGERNDILRQRPRSTSKLTSSLGRPYGQSTRQNRAHGNKHHHNAPKDHTPHHPNDTARRRAPHREPVDRKQNHQTAQYTNKKHYYTRHHVTRTMARTQQNQLPHQTKEKPNAMAQLQLRPIPSINHKKRTHTTAPTTPPGKDERTNITPPTSRKQETTNEGNQAPTH

SEQ ID NO: 962285 - protein, 135 aa, Homo sapiens
MGRTIWVLQLRNFLYGGLVVERYYINAGETIGDIRESPLAVISSLQLWWKILIYTHGVKPLYRFSKCGRLYSKGGINTGCYWKGIFATIAWGAPKGCCWGGEKARMQGSWVWCRLSWLFTHKTGYLGKVWGNSNR

SEQ ID NO: 962286 - protein, 169 aa, Homo sapiens
PLYTTLLGYFSLVGLLRLHSLLSEHYYQAINGCWTNIELNNEELCTSRCCQKCQVTTLLLCFGLCTILTDCRSLTQDSHSRVFCHTSSIYTPRCDQLTHCFPAGPQYKYDDDFNTRRTEHDCTCRCLAIKPLTDKYPQCRYSTEEHFTIRACREHQHYLGDHMQCFAAT

SEQ ID NO: 962287 - protein, 168 aa, Homo sapiens
MQEITNCPTPGQEGMAGWLLESSELGQSKRCDTSQRRALTLIPTRSLDSHPLQPPRPWYRTQATQEHNTQPKDQAPTQANTAKGRNKTNNTHDTGHELYRQDSNQTETPPHRNTAAPHHTNHERGPTRAHNHTNTPTYNTHPRNQREETPTKQKHTDKQHKTPDWPPT

SEQ ID NO: 962288 - protein, 51 aa, Homo sapiens
NSVLRGGTGNNQGCRDHRKRSTPTTEASLKTGQTEPEPRTPGRHPGKQEDT

SEQ ID NO: 962289 - protein, 191 aa, Homo sapiens
LGRLVSSARDARGKTCLLAMVTPPCLRLAVDCEPLGRVSFELFADMVPKTAEKFSCSEHWHEANQDLVHEGSCSSQNYSRFMCQGGDFHTPEWHMVAIPSMAEKFAPDVELLSYTCNAVLAILSYVLNAGPNTEWFPVFHPALPSTEWLDGKHVVFGNVIEIGHEVIVRRPWLRFARPGLRETIYDISPFA

SEQ ID NO: 962290 - protein, 332 aa, Homo sapiens
MGVGEQQEGNYVGRAAGPPEHTIQPYTPTGHMKAPKTNLDRTETPQNRTNTTIRRTRQRKSHNDKRRREQQPDPRQKHQTQHTKGDNKQQAAGQPPPHKQPSKPRDRRARHQANAAPDAHGAAHRQDKGNKATQQQPTTRTPRAHRAQQKPTRTPARTEKKTEQQEQRTRTRRRRSETRTHNNTTPTPKTKTTHKQQQGTTRPTDARRKTGRTKERKKETQGNKARKGQTRKRQKGEERTEGTRRKRQRGKQRKNRKQEEARGKDKRRDQRRQPGSEKGAGNERAKRATTSATGGEQHATENRDPNTPRRQQAKLLTAHPNGKRRPRSDRSQ

SEQ ID NO: 962291 - protein, 604 aa, Homo sapiens
STRKEPPSVMHSLGQVLAFLNFRDSYLEGGEQGCSLPQPAFPTPTPTVIQGPIMPAIHRLEATGPEDVGARDAISDHLWIFRPSTSDPQDSGVRMADIHHHDPSVEKTALKSHTHRHSPIHTAPNAKMGHREDIAQRSDRRPHKVITKTMEDAGVQMEANGSDTGKRLIHGTTCHKIDIRKMIEDGYTDGIERDREEDKIDHVKQDDHHGRHIVRCSEVERRFSWIDAGLFEQAGRGIVSRRSRDTDRSIDHIQQKQHTNRTEGNWTGGGTEEPSPVTRGQSKSNKIDPPYHKRNTTTIHQDDKWKQHSNQSPVVHTTPPKIQYLMTALGQRKSETQRTRKSEAPSKETKSGEAEWAWATEGQPQRATVRQEWEELERRHKNPIRRRYQQKTTGTTQEDIKGQKRHHDTSTPGPTYPRTTEPIHTPNTAWTAGGNNSKTNTREGTEKIEETQGEHSNNYELEEKIPPKKHDSTNTTHKNTRKQQQKKRDQANEDMKQQQSKNNGKTKRSELTPEMNTTHRESSERTDDYKCLRRTINDHEAEPIAQCTSAQHTKSEYTNTDDKHGLPTTESKHKESRADHDRLLLSLAASIDQTRPSHSKQQRN

SEQ ID NO: 962292 - protein, 231 aa, Homo sapiens
DEYVANLTELVRQHQGCPGRHRRKRRERNKKKAEDAEKDTTPAIGPDGEPLDETSQMSDLPSEGGIHVESGIDPHRLADAPKAGQLEAWLEYEPVGMNVSVRGLIADRKWLRRRGRGGGGKSSRLASDECSHPARGREKKKIPTIRDQQMTSSEVDARDIIENAKQDVMMNMAVSRGPWHVAVQSYYAVAHAVTERVDKQSALMVNGVLEQYQIDRLGAGWVSLYNKDLNG

SEQ ID NO: 962293 - protein, 186 aa, Homo sapiens
MPPKDNKKKKDAGNVGQKRQRPSEQFRGQRPKKKESVVSKKAKFREQASITLVSWFGQQSFTLVNNTSCRGKSPTYKHFIHPERGGSSGEDTWKNLGGLRVAPRGQPLLEESPPYSIRGLYLKAVVSQEPNEKPSEYNLYTQKYSPEGVEEVASQGVRGCDRYCQMCIIEVSNTEGVGYLLCANKV

SEQ ID NO: 962294 - protein, 135 aa, Homo sapiens
LHLGFRFPPFPFPGSEGDIAPAPRGVAWCTPRRTPQLCRPPICRVWFVPPPCFPPDQPLRVRMRVALPGVQLSVCVGPALRAFLDHCGWGPASALSSCVAVAFSLAGLPAPWTLWSGSSLVLVTDRSDARLQYGS

SEQ ID NO: 962295 - protein, 107 aa, Homo sapiens
GRRRVCPGSTPALHQPPSEPSGPSPITRPASIPGPGPSRVSGLPRPAFPERRPAETSPEDQANYYILETHISIKQDNNNKSASTTLKDTIDQHITSHTIEWNYNRST

SEQ ID NO: 962296 - protein, 109 aa, Homo sapiens
MGSCYVAWAGIELRASSKSILCASASQRAGITGRATHTQTEVQRRLGETSLVLQSLGGGLETESGSVAQAGVQWHDLGSLQPLPLGFKQFWCLSLLSSWDSRVLATLPG

SEQ ID NO: 962297 - protein, 144 aa, Homo sapiens
MPDPKHLNLNTVQDTHTEVWPDNLIPISALLHGAPSTCCLDLAYTTPGRLAHCHMDVVAINPLCGNTTPLVTSTSHHWGDLGTNTGPADQELTPPISVTFPFGRPTFTLEMQARLERPIQQTLGWTHVGPHFGGKEAEDARNSG

SEQ ID NO: 962298 - protein, 82 aa, Homo sapiens
SGMEVLMRLLYEHWTALSGRRGHGTFPSNMAATASPQTTRHSGCRSENSSFYYYEYLDEVAFMLCQEDAVVSFGKVFLPVIL

SEQ ID NO: 962299 - protein, 237 aa, Homo sapiens
LRQRRERAEEYAAALELSVGLRLVEVEEVIEESRAERIKRSGLRRVDDFKKAFSKEKMEKTKVRTRENLEKTRLKTKENLEKTLAHLLEKLQNKLVHCCLCALPSWREKLKTVAGTMLRKSFTPDHSGVRRCSKTAVYKCATLHLPLSRRSSRGASVEVLKATEMVEVGADRQTRAARMREGGPADRACAVDAGPQNGGNSRQCIGKESARRKVRGTAGALGVEQKKRTSRDWRHDT

SEQ ID NO: 962300 - protein, 186 aa, Homo sapiens
MPPSQAAGTTPGPDPKAYQLLSVPQCLPAGPVGRTQRADQWRAACPCSSFFRAYPTGVWPTTWLCVLGQVLPIPLACFPGPWLCCAGPWPRAGGARLCWAVCGGYLMALAVLRPLPALVCTSGGVGLGVLSVGCCDLGVFSLREGGSSPAAWGGPAGIAGQPGGLQGGSWRRLWFFPPTGLFTCSQ

SEQ ID NO: 962301 - protein, 186 aa, Homo sapiens
KQRREGGDGEELERGRCRPVCCSVVLHVSEKPRSSVQSVVSPEVRECAGPYIVGAVGAEAMDLQAGNALKRFLSSQTKLHEDLCEKRTVATLATHELRAVKGPLLYCARAPHGPQDCPLVCRKEAKAKERGCGQACQLWGGPEGKHEGNAMKERGEKLCSGLRQHTFTCWLDNENYPGLVDCRRCM

SEQ ID NO: 962302 - protein, 108 aa, Homo sapiens
RYSGSYVELKAPDDDTSQLKILSYKRDQIELCKCLVTIRGVTTKQPFENVYDELEAKIDAREGYSVADAREDDLKSAKADAKVMKDAKTTKVVESRERKAVQRLVWNS

SEQ ID NO: 962303 - protein, 32 aa, Homo sapiens
MGGCAARGALFGFEGEETSRSPGSLCWTISAP

SEQ ID NO: 962304 - protein, 221 aa, Homo sapiens
MSGGADSGPGLLDNAVMLSVGVPDGRRVSAWKAFVADLSVKWRLLVPFVAGAAPGRPPQRGCGFLFTTPGAGKWGLATATPFCEARWQRLALLGWAPQLVATRLRPVGEPPCGPEVVVFTTAGRSHPQIPTFPCWCFTTRPQERMRQRTTILSPPVWGVGRPSGYKEDTPSGGTRRVELTKLTQLERRAATESGPLNDCLGENPLYNRPGGNNYRPNEKCI

SEQ ID NO: 962305 - protein, 80 aa, Homo sapiens
RWEPESRRGGLEVEGPGEAWMKPMREDQAALCWASPWDECFQAAVQLSAAGRTRIIRKALTEEQNVSQTKNISLQIFVTR

SEQ ID NO: 962306 - protein, 204 aa, Homo sapiens
DEYLTGPFGLIAQYSLLKEHEVEKMFTLKGNRLPAADVKNISGKDVHTVKEIRMPAADVKQPIIYLIQTQARVDGYNRVKTCSGERIDEAQRESFHMSVLCHAVTCCANSGCKDSGCLGILVFTGRSTAYDLIPFDGDLLIHGNQRVRSTECYLEGDQTSLYHAGQGLMTLPALCGTMPPDIFGKRRMRSATWPIMIDQDGRES

SEQ ID NO: 962307 - protein, 70 aa, Homo sapiens
KSAQGGLRLPDCTHIYSNKGFYSIYNWDGGKGRCRRGRKKEGKNIPPTPPPQKRGKKKNPTTGRLYVAKA

SEQ ID NO: 962308 - protein, 411 aa, Homo sapiens
CAAVGGAREALVGPGDGGTCWWLPAGGFLASGIRGPGVAGPLDGGLGPDVPREASPDVAMGLRHKGVDSPGHQWLGRLVFNGTMWMYQGPLARRTLYSYFPCRIYSELMTIDLAVLLSVAGPSSSKCIEAFRATHFMPSCHDMHDPCLPGPSGPPRRFQRGHLMTAALPRESDLTRSGDPPLPRPQRLAHNRLGFPTTARARAPTAGTPPPMWRAQYQSRGAQTAFFTNSCMPPMADKHAANLASGQPQTSEPNSPTTTWVASFVHIASRTCWPRPVRAITCWPLAVYRRHHILPLCRPHGGGPLVPDSGPSAHPLCCPLIYNALPHKAERAPRTKTPQRNTVSVNKPPSSDTPDERRPTHGRHPPTLGAQTHYRAHTMQPPTHYSECAHHLPNNDRPKRYNLYEAPAAEH

SEQ ID NO: 962309 - protein, 106 aa, Homo sapiens
MGLVASVQSPLLTPAPPTVLSCGTVASPSSPVTQPTQGTGNIPSPVESLPMWSSHTPLARHLASGLIAFFANQIPRQSEESTGLQWIVIQFVQERLHRPHGWKADI

SEQ ID NO: 962310 - protein, 186 aa, Homo sapiens
RRVRPFWTSPDSDGLCLKLTQLHWDYEETRSKTQEPLQSSRPSPSKRPYGASPARELEVEKSALGGGKLPGGARRSSPGRIPNLKKRKGLELKVVAKTLLDPFQFVRNSLAQLREEVHELQARWFPSRTTLSIAIFVANSTWVTFSKLFENDRHFSHLSSLEREMTFRTKMGLYYSYFKTIIEAPS

SEQ ID NO: 962311 - protein, 277 aa, Homo sapiens
AHRVTTHEAYDREGGEAMTYCIRFVPLKMVTHDSQRAVLSGSATLPWEPLPMLQPMRAPRVERGMPRRSDARRALACRELKSGCASRIQYLAREAGAGGLAIAVEGPSKVEISFEDRKDGSCGVAFYVVQEPGDYGSLSQTFNEEHDSRQPLSVVPVAFFRLADGPAWPQLFLSLQGVPGLEGQPASLFEAVSLKGAKVGDRMPKGATAPSGALGGSAMSRTLAHDSIACALHALGKLGGLPGLTSSSSGPTFPWKPLRDPGWGAWALGGPRLRGSV

SEQ ID NO: 962312 - protein, 266 aa, Homo sapiens
  misc_feature (104)..(104): Xaa can be any naturally occurring amino acid
MTGSGPIDSNALHTSQQLGDQHFNEDAYGGGHETAPTTIVDYCFFLPAGLAPTLQSFTFCLAPHSRPRCGGSCDGAGCLLCPVGEHETERSNVVVPRVCLLLDXTLSWAIDLPQAVISQRPYTFLDAQCVRLASSVLCTLYRGSLRNVLWLSCRLTDTSPLCLSVPSPLSLFPPIHLLSLDCVPDFPSFSSPPLHLLWGGALSTVATLVAPPEQQNFSGRLRIHPRWAPPIPAPGCVLHLSASLFSHPNCRFPGLGTACAFTKNPC

SEQ ID NO: 962313 - protein, 195 aa, Homo sapiens
SLTRLLHAVRQMNPHIRVTSHQNRVGPDDCTRSECMTIFSKKLAWRGHMLRGQTLGVPRHVTMDRLGVSYFTREGHCLESRHTWGTERGNCASVVIPFLTKSCTDSSQDPPEKSIPICTLKNFPYMPSMHNLHVGLGECRLNGLFKQPAENVNQYLTDPKFVERTLRLAGTQPLEGAGGLCMAQAWCWRDHSTLC

SEQ ID NO: 962314 - protein, 263 aa, Homo sapiens
  misc_feature (100)..(100): Xaa can be any naturally occurring amino acid
MHPQIAPRAMHLVAGMDRYPRKVTAAHWPMKKIAKRSKINIFGESCIPYNHLIAHKVLLWISPCGQKLSFNKDVSQKILAPETVRRPRTGKCPRSKVSEXAAYKDQVIETKLVPSRNPWRFLSNALGPPSTFNKLSPPQKTILQHLMDDIPPVAISQTCAKTTYVISQHALNITYTQRQGRASPRKPMNIRCPTLLDNGLSYSHASSEDTTAEPQHCSTNTGGLASPILNRDPRLLLSNDATAPPEAVPMLIPHNSGTSYVAK

SEQ ID NO: 962315 - protein, 162 aa, Homo sapiens
MIQTPDADLDVTNIIQADEPTILVHSNALGLDIPGALGRITGALERTVVIKAKAPDSPSPLPVVVVAPGLALVMPLRGVLSTVCTTRILFGTKERCLEKTYLQGALGKKKELNKNKATAKNISAGNSTLKLGKNGAEGLQIEVSIPEDVPHRRAQGTFDVPV

SEQ ID NO: 962316 - protein, 300 aa, Homo sapiens
RASAFLNTLGWCGLRQESGSVSLLPPRSSAHYALPSGLPESTSMQRNGAYPSSSLGLRIRTQNPLAWQSEVCCTLQPLHYLTQDIGSGKAERYEEPDLISPTSKTPSATAAPAATHPSTVRLPSSCASPLRPERMTIQSRTSSSVAELLPAGDDRRSPSTFPSYLPVVHPFCSTYAYLSLCLSLSLVLPERLRERVHDFLLFPPGPLSEILSFAPKAQFATWLAKFWRDERAFDASSGYRRLLPLHVVEAKPWALKLALGAGDPGPGPFRSLGPAVALWSRPALLLPEGSFALCPSAIVC

SEQ ID NO: 962317 - protein, 324 aa, Homo sapiens
AGGKTRSYTKDYTEGWVEFRDKRIAKRVAGSLHNTPMGCPQASAPSVMIFGTSSTCTGFTWFPPQRATSPLSGQVRRQRLKSGGCSKPSVMTDFYLQSGGPGGTSAFFAADGDPCSAPDGVLWTILAQASYLTQETPEWPRYKASIGPSGGTGETGASPWSKLARATKGPGSQAKGAPWAQGLVWDAPVHPFKNVALDRGPYTLVFQRNSLDGGPGVGPLFPFSPGALASVGFPGRTLHYLGNGLPVTYPGGKDHFHLGGRLEEPTGGLYVDWAQTHSRAQVGGFQVVRAFRNSRGVVALGWRHPYFIRGAYLAIHSLAFLRIC

SEQ ID NO: 962318 - protein, 246 aa, Homo sapiens
LKVLSSLKPAVPHTRAISDHNSERQPPRQLSLGPLSSASRDSITAGAHPADSLWKEEIIRPVRHESLPVSTRRVSPRSPKMHSRGRGAGHLPLYEIRSSSSSVSSQRDKALEDEEDDRAQERPVEDGVLSRKRAFDHFSLVGKPEGRRRREGWNRALLESMLQPERATRVSAVVTSEDWKTHSYTDKTGARGDRWSNEPVAPKQGIGGEPERLAGRGDNSRLAKNGPFPGCTVFPWVALGNTPIPL

SEQ ID NO: 962319 - protein, 158 aa, Homo sapiens
IQMFMPKEKQDFVQHFSQIVGVLTADEMGHPELGDAIAGSRTVLEYNAIGGKYNRWFDGGSSIPGAGVRQGNRMLIVSRRDLDCGLVCGTACTAFFLVADDIMDSFPYPPRTRILLIIRKPGAWRFGEPSMMLNLLESNVSKRVLETLYLPGEHALLA

SEQ ID NO: 962320 - protein, 67 aa, Homo sapiens
HIVESLIKHLNRLNMFRHSQDEELDMSKKKDRQHQKLNSVPSILRSNQISAEHAENALEEDDDMWFN

SEQ ID NO: 962321 - protein, 129 aa, Homo sapiens
MPTTTKLSNEAEETCVKPQLLEREFYSEILDKKFTVTVDHAGPWTYIDEAYGLDFNDPSRLPKEDLVAPSFGMDACQAQGMAACRHKPRPGPPQAATAEGTPEPAGQPVYDQVQRNWPSLEARGRVGGP

SEQ ID NO: 962322 - protein, 95 aa, Homo sapiens
LPLLLPLPPESLPAQLRPPGSPYYSPIFGVRYNMAPTIDNLPSGSSTDECNASQRNRARLRVCTRVEAKFYERTVHDLATGQYGVLYQPLFDKRI

SEQ ID NO: 962323 - protein, 120 aa, Homo sapiens
MDSVEKGAATSVSNPWGWLSRGRRRSCRRKFAAASGRGVDEAPRTWTALILARWQCSVGIPPEEHEAHWRGSRVIGWVLRAARGFRAAFQSVWVSTDPLMNIEECGQNNFGCTRFIERTC

SEQ ID NO: 962324 - protein, 251 aa, Homo sapiens
GAAQGGVTCRSQVRAQAATAVSELRTLKVAEQLSPGPAVDSGVQLSVFRISLGGSMGLLDARKRSGLATQRRRSKAAAVADERGLQLVGIDPGTNEAGEADKSKWIQTEPVTAGNTEGRGLTGGPWTQAERGARRETPEPRGDPRAVGVHRSSHPRVTGQEPHARGWWGTPKRKGDSIRGGKAGDKGHLSPYLGTPVGETTTAAGEHNGERAAPVIGDERRKTGAQKQSQVLGGTRPDADAHPRRTEQKRA

SEQ ID NO: 962325 - protein, 98 aa, Homo sapiens
RRWSAVAGAVAALVDLTEAAMAVGGGYGGSSFYKKIQNAWELALGVALSTSPSGVNSKPHPLTHYRLPCIALGGATSKAAYPCGVSSILPATSRCLSL

SEQ ID NO: 962326 - protein, 189 aa, Homo sapiens
MQFFVAKQVIATYSSTEGLGQMANRRTNEQRSEPNKEANSINKQSPHEVITQATIKSQWRITKANSHRTHYDRGADNTNEDKTHIGHRTVTNPPAGDINTYYHRVRGLIIVLYPTSINGKRKHEEGVFQIIPTCLGLVIINRQPHCRNIYRPQLGGKIQFGMLDSRSLIDDMKRSHQTDTVRPCSGVSA

SEQ ID NO: 962327 - protein, 110 aa, Homo sapiens
  misc_feature (67)..(67): Xaa can be any naturally occurring amino acid
MAQGLYVWLAQSPGSLGSSFQIQPQGPKCNFLHTFVKLWTYTCFTRTTPLCLKFSLVETDSLCAQVXLRLRGSDGPPCLSFQMQQAKLYLGPLPYMPNKRFYTFIMNGLS

SEQ ID NO: 962328 - protein, 114 aa, Homo sapiens
RLEQGRRRSVRLLPSGPRCEPTPGPGALPCEPCHVDTVIMAQRTGPHVDSMDRGTLPLAVALLLAMLQPHAPQVLQKQSIVTFSLWAPRGAEVTYTTEPGLEGLRGSGPPIAIR

SEQ ID NO: 962329 - protein, 266 aa, Homo sapiens
RASPLPIRRRPHRAVSSPLDDDIAALVVETAPACARPGSRATMPPGRLPLHRWGAPGDHGVSVWAWRQKDSVCGRRGPEQERHPHPEVPHRARIVTNWDDMAENLDQPSTMSCVWLRGAPRAVDRGPLNPRATREDDPDHVWTFNTPACTLLIQAVLSLYASWPYHWHRDGTPVTGSPTMCHLRGVCPPPNAIRAVGGPGLGRDLDYDYFIEESSRSAGSQVSAPKAERKSVRAYRGHLGYRLPGFEQEWARGVRPPWEETNRPRR

SEQ ID NO: 962330 - protein, 136 aa, Homo sapiens
MWKYWQNVSMCVPIDDTVEGIHWYISSRYTLMPYFLEAYRPIRKGDILLVRGWDAAVEYKVVETDPSPYCIVAPDTVIHCEGEPIKREDEERVLELKKGMMTFGGCRKQLAQIKDAGGTAPEDMLPSLKGHIGWLK

SEQ ID NO: 962331 - protein, 95 aa, Homo sapiens
KWESACSESYANAVIAGCKCAHRSVDPSRLSDVTRSKAAECRISPQAVELCPGGYRMSGVALLCAAMEVSCRWFRDTTRACHGVVCPHTGAYVVH

SEQ ID NO: 962332 - protein, 263 aa, Homo sapiens
MEVTIAALRRPTEGPVLAEVAPACELRRAGCSEHFSSVYAVVSVLHVQPQSTGFGQPGGEATRDSLMSLFHGSARFSPQEDSYSQSRELLVQEVKAAVSSGAISPRKAPRSGSRGGGVVPIPWHLPEGPCDAGWASKDEVGEWLQSVLTTRAGREFAVLSELRRSTNECRAIISADHWYQRCYRGSARGRGQKPGYPVRGGPGSGVLLPRVFGDIGLSGASLARGRNRFVFRAMGVGGDPPLWWPLYAFSTSLEPSAVLSPTL

SEQ ID NO: 962333 - protein, 114 aa, Homo sapiens
VTAWARWLTSVIPALREAERVDHKVRSSRPVGQDGETLSVLKIQKISRVWWRASVIPATQEAEAENGVNPGGRGCREPRCATALQSWATERDSISKKKNYKSDIDWCAKGQGIQ

SEQ ID NO: 962334 - protein, 196 aa, Homo sapiens
MLHRRLWNNFDWELGYNLTLNDTSVRPPSALASAGASWSLTTALRESSALALWAQARVLSETSLETAPKAPRDPSTQEAVTLPPNLQLADPEHPWLALQFQPDGAISESPEGPSRGSPSADLRRVLLRSTTCNEVGEDPSPVSCHVPVNLEAVACQAAWGPWCRVEERFGHRAPGIWRHAAPLVLGGRGLVGTEGD

SEQ ID NO: 962335 - protein, 81 aa, Homo sapiens
CEAGWPRSVPWAAEQLPHQYSYPLMAVQRALGDSELSRPWLITRGYGAHVSQHRALGMPLGSPLPVFDDTKRVVYSRPARG

SEQ ID NO: 962336 - protein, 270 aa, Homo sapiens
APREQAWRETGEQCQGLCKSMVDPAGEGKEVLCEFCLDDTRRVKASEVLYYTCMVNYCEGALAARSGRRSNCKATADRASEGPQRGDTALAPPQPTCPAFVAALIEQCIYQDLCQEHSGHTIVSLDAARRPRRLELQCSQLDLDAETQRCLDKCHLQAPGVNQQVCSASPVSEVKAVAEIGSYGGNHCGCEEGQAKCDAPAYEGERARLRSSQAKGPKATWENRQCRDAHEPAELETKGGTSKWPPLAGAKLDRRHTSQGTPAPNPAPTS

SEQ ID NO: 962337 - protein, 272 aa, Homo sapiens
ACAVLRAPACAPRAVCMGLFQDAHVRTETPDRGSSCLDSACGSRGAISVGSWGGMTSTCEPCAAGCLDQEAPLGSPWMRRRDALVSPVAASRSVSFSPYRTPDLGDAIKRTDSLQRSVPIQALSPWGENGLAADDWNGGLEVPTRAPTSVGRPKYLRVQGPRREIGGSEAGDLRVKGAGAGPQKRAKETARGFRASVPFLTSAESSPQGGSPRPCPSRGFTGFSSPVRVVPGDSDPQYVWLMGQERLDDKGCLGLGEFQVTALHGRERRFTS

SEQ ID NO: 962338 - protein, 297 aa, Homo sapiens
SREVGIHALPAERSLKQHAVPCGSRQQTPDPSSPSRGFPGCIQPGSPPLRASFTDLVTMTPWSSWTQKLQSKVEFLLLEGATVPALRLITTIHEDEVAKTQKAEGGGRRAGSGSPVWHPKVHDRPYPHVPLSPSPLAPACSPLMVDPRPWWVMAVPHFLWQSKTRVAEVPRLVDLELWNHGATEGSRLGAAQDRREMQRGQAENQGQGGALKRGRVSKGAGIGRTSVARTTRGVDRGMEQPRGPHTGRALEQDHTDNGATPSTKGPDYFARHNRANTTTEHPGLERPTTTNTRGTHK

SEQ ID NO: 962339 - protein, 123 aa, Homo sapiens
MWAYVGLPGVSTPGAQWPGRLRDRSHRRGHQGSRLCPMLPWEECRYRGHCGVSPRHPCALCGRESGIPGGARDAGIQWCLAPLKAVPFAAAADFFGLWGVFEPRLVVLPGATVCSGGSVAHSS

SEQ ID NO: 962340 - protein, 273 aa, Homo sapiens
IRRCPRTAPRFVRAATAAPAAMERAVPCAGSRFRCVFGGLRCGGRSGRGMSSWRPAVRDGTRRMATHQKDCSLPYATESKECRMVQEQCCHSQLEELHCATGYQPGKQQGPACAKRPHGDKASLEATICEEVLPLRVCVGRAAQAKGQSVRVQASWLATSVDRSPGMLCQEPGDRRLAVGGLQGNRIAILGVEADQEDPYLNDRCRGRGALPGQAVPRHGVTRVVCSCFGGYSVVLGVSPVTDALSGSGRPSCRFGDLLTRGSFAPPDMRLVR

SEQ ID NO: 962341 - protein, 269 aa, Homo sapiens
  misc_feature (179)..(179): Xaa can be any naturally occurring amino acid
MGRVKPGLVQHDGQWDTGARVDHVSVLTVLYPWDTPGEGRNRLFGSVVVWSPQAWLGDRGVLGHTRLIRYQAGWAPFKLTYGYQRVPYKRARRLPGPMTGPQGEEALSLRFSGGLRKWSGLLRPVKEGKKHKLSRGCAPRKRENKHKAPNFKTSSSTRGVREPRRKGVLEGNPVGTFLXQQKSEKKPYILWALEGVSPFNNKSTRTTTVWSQKDMPGGQLLGESTGDLKGGKVCAHARGETFRKSGGFEACVTGNKLHIEGEFTTVMNW

SEQ ID NO: 962342 - protein, 279 aa, Homo sapiens
  misc_feature (200)..(200): Xaa can be any naturally occurring amino acid
VHGFRPHLYLIYTVRRSLMPAKYQMSLMVLSILRQSRDRGPCPQDAYSGGSSSATSTLKSNQKTEVDFLKKRTQMHKKPTENPPSATETTQEPDDMEPCPPSGENLASETKTESGQDWKVLAPAYRMETPLDARCGAQSCLPSGLRECRRGCPPGFLRWHGVHELTPCRAGKRCLLPLARRQREVTPSDSGRSLRTLQAXRGFSVKVVASMDYSGVTKSKLGTTSVEKTPPSYQKRWHQVCCQNGPLEGQMKKTPVQMCVIPCTPESCVTIVPLPRVSP

SEQ ID NO: 962343 - protein, 164 aa, Homo sapiens
MSCIQHPGSCTLLPCEAQEGEWDYLDSVSLRVASRVKVQVTDSIWRDSVSVSPVSSICCRSTKEAFTILLFRLDHHPWRSCHAKSTCSAPLRPSRICGLQHQSSISGGSCCLFSACDAVADLHLSHWTLGRRTLTGLIGWIPETPGGHRLRVLHLPGPSKLYAS

SEQ ID NO: 962344 - protein, 272 aa, Homo sapiens
GDSELRQSLAATPRLECKGAISAHVQPPLPGIQAILLPQPPEEVGLQDQRSESSKNHTQQQCQRHVERLEQGVDLSSEHTRTSGAPRTRRTTSENWLDLSELLKAQGPQERTRPGPEEHPVWLKALSLHTATLYTTRQRRQTLATHGHLHCHTTSAPRSDAPPGRPHPTAPIPPTFAPLSHLSPSGRPATGPAQRALPHGPPWHALPSRPDHPGRSRRTGCQMSPKGAASGKPTARNPPLHLPLSAQKPKPRKLPWVGAPHFPLHHPRPYTM

SEQ ID NO: 962345 - protein, 173 aa, Homo sapiens
  misc_feature (4)..(4): Xaa can be any naturally occurring amino acid
YPVXKLKNPKEKPFVKRAGFKTVGDHPTPTLGRQPPANTRQRNTGRNTPFGGTHAHRSALLNEQRATTAGDTHTRAETTVFLHLAAPKPICGGPQKAQAPLVGEGAISDTQKPLQPNNRRVPTATQRFSPRADNSPMGPAHPHRHNPPRAQIPRPPGCRTPNTPRAPGGHHTT

SEQ ID NO: 962346 - protein, 222 aa, Homo sapiens
MVQPQGGTNFLNSPKNQGQLSFPRAPRPQRSWDPKRTFKSIGLKDPPDTTWVTVYTTQRPFPGGKQTKTGHGYHRDMEATTQLGCDTKRIPQPPRGGKETKPPFGVGRVYLSRRAVEMIWASSNTRISPQSPQGGHRKDTQRGQTDSHSPIDPHWDSLENTQGVKTPPQETFGGPKGPPGGETHSWVVGKHHKIHTQSTTQKWARERRSTVPTAGGQTHRNQ

SEQ ID NO: 962347 - protein, 492 aa, Homo sapiens
TLQWGQCGNQIGYGVSGNELCAERWYQPLRASWRSTPPECTDRTAQSKIYQADDGALRKPRGGAARTVETRGGSITIPQVAPNAKGLSNPENILTIDGNHWHVNGRWGRANIGAHVRISSHRGTDNDDSTFERTITRGAYIRTRGKRQDLGQRRTQVDRTAPYLVASLVQTFPKGAQGAGHQGPSLEPGGIPRNHSYNEKPGCLEAVPWRIIPLKTRAVDGQEHLSFKKGLNPPKPHVSREAIARRKLSWLLDPQGAYSAQDSHPSHFQRNYSNMTGGSNRQIKICGRSHVSGQQQALCAYGQTKVNQRDPAVESRGTLGAPKEILLVTLCTHIPLGSPTVPHITIARGKIQKHPDNMEYRILNPQSTGVSKAAGTARQDEKTQWSERDHPREDNHNGETPHYGTRTHKLREGRLHNRRRQTTYQHKHQRQPKGASHTVRRTTTEEHARLYKGPRTCNVTRGIQYTKEEDTHSTEQQSEGHNRRHSRMDQTD

SEQ ID NO: 962348 - protein, 214 aa, Homo sapiens
MHHDQTHTRHRRTIVTALSLASLSAQISLDQLLSTQSVTKWYLSLHAWHISPSYNTTKQGRDRRWIIDLWLTTPPHPYLHIRHPMNRFYIQTAISPLTIENPCHTVHSPCTASGKHECISTRVSPIMASIGSSQQALGRDERNHSELVTPQQTAVGSMLAIRIASIHAMTQKTRCITKYQAIQSPHEGSASNCNLQTWPIERIEPAQHHARHTQ

SEQ ID NO: 962349 - protein, 203 aa, Homo sapiens
MGAVFAGAQMTKVPSCFPVYLVFAPWGAQRGALMETSTSGAQHHQVHLQATGLAALQPREKVSETGVYECGVCVHGSVGQLGVVTPSPAKRGRTLHNPQWRDKSLGPTCQWFVAKTKISKEHEWASAKGPRAMVACGRRPSMVTCGAAGVRGGRVGQAGIRQPVKIGFHFSFLLVTRTLCTHFGAVSIQAPGPSKCAFVAKGA

SEQ ID NO: 962350 - protein, 97 aa, Homo sapiens
MCVDIRSAASDLLVEVCTSLVVSLVTAPRVGFLGGNPLRNFLAIDKKSCLVNPAVISQSITATFLVGYEGGGQTPPVCSTWLTSLLSKLVITCQSVL

SEQ ID NO: 962351 - protein, 210 aa, Homo sapiens
MVTSEVTRLLGELPASVRDPHRRGPVKRYPWSMKATGVQSRVEAPTRAHSLQRATRSSLHVPVLVPQRGTGMLADSGALSRRDQKCCSVKAMLCAVFRCLFACLVLLVRPLPLLYPTFSATFIRFRVSSPCVSSSFVCLFLSPMQSHVDCRCRVFSYRSLSVRGVALLAPQTPGGLEVLCCIYSILPYGPGPGSSLCGVLGTRVTVLWSW

SEQ ID NO: 962352 - protein, 86 aa, Homo sapiens
MTPVQRGGPEAWWPWDGEPRWFRGGFGSGFGAGSRRGRGRARPWTRGGRPRIGVMPVNHSWAACQDMKDHVPWRRSISSPLPIKES

SEQ ID NO: 962353 - protein, 69 aa, Homo sapiens
ALLPEMKLAPFVDIGSYTVRAGYAGEDVPKVEFSYSYWYGGKKEMTEVTLMVIDVDKANKAVPPYSIGY

SEQ ID NO: 962354 - protein, 244 aa, Homo sapiens
IRRTWTPPEWKPKQECVAEGLPEPPRASGQTPERGGRYATWHDDPVPCQEPDSFLAPSLPPRDPYSIRMRTACVETADYEKQPAINPYCAHLRRYIAEFVRTPRDAPSSNLVLENPRGQRMEQETTGNRLQRRQQEVETELKNCGTLTMIPMLRGDAFRDSLRGESEIMTTTESKLRREFEVYGPIKRIHMVYSKRCRKAPVVMPFIEYEHEASTCTPLTNTHDGRKHCWPEGSVGGTWEVGEP

SEQ ID NO: 962355 - protein, 105 aa, Homo sapiens
MQQVTLRASSRNRLYYNQSGRAKTTRVGGNTVWHTFAKGGARHQENIAGEGPPGETVWTNPGGGYPTWGTQTRGGNPLGVHELSLRREEAPICNQGGGAPTAPRN

SEQ ID NO: 962356 - protein, 293 aa, Homo sapiens
SAQSACQLAYQAWVINAQAVLRRWQKEREQAREEQARYMLPTGGGPSQEVEPGEGPEGRQRAGREPCVCRGVLSTAQFLWMLGQGALVDELTRWLQEFTRHQEDMSDRAAGQERYLLTQELLQGWRCAAGGRAWISCTTKPGRGHRLPWPPTRGPQGAPSTRVQWAGREREPLSRHYETDVGLGPLKPRVTTRVACGSDGRALQPDPWGSRCRDVLPLSCYPGGRDCGPGQGELVLDQGGLGNPTWLRQPEAVGGRGARAERLWGCFAHVFHCVCGGPIGAVPCSSHRSSTGC

SEQ ID NO: 962357 - protein, 139 aa, Homo sapiens
AGGAVPAEPFETARAARVPWGSEVGGRHERRMELTWIPLRSQYDIDDSVTWLSSGVPIRTVGWEFLKEMESKGEDKIPRWFLTWRHSQPRVAIRKPLVLCCWDLPRVWASGPSVLGGARFLPVFIMFFASPWELLRIYS

SEQ ID NO: 962358 - protein, 149 aa, Homo sapiens
RGGSRWVGKVEGFCGPRSPASFLLPFTLPVEHSYGSQDEEAAEAVGAWYCNRDFDDEKILIQHQKSNSISKCHILSPRNRIQDLGLRLFIALQVHKMKPIDCRTKMHYPWKNRHTSLEHTSGHGRYSRKRDIGWKDDDFLNKKNTKERF

SEQ ID NO: 962359 - protein, 139 aa, Homo sapiens
  misc_feature (68)..(68): Xaa can be any naturally occurring amino acid
MGLRWGAHEGLRWFPRRGTLESRPIFVGCCSPYCLSVRFAFRLGVPPAFFGPTFSGPPPFFTLGQSEXVPSAWEASAWRSFTRGSVGLYIGHFPWVGSQLVVDLLLAGGRTEGLWISLFSRLVGWTVVLLSQSKRFGID

SEQ ID NO: 962360 - protein, 69 aa, Homo sapiens
AGSVMATRSPGVVMSDDEPGFSDLDVLIAYRNHYAEDSERVLIPHGLIMDRTERLARNVMKEMGGHHNL

SEQ ID NO: 962361 - protein, 68 aa, Homo sapiens
ILWSSSRVAAEIDHRFLQVVPYFNYTVQDLRSTVIEEVLRWATVARKHVSEVIVLDMSWPAGCWAESC

SEQ ID NO: 962362 - protein, 82 aa, Homo sapiens
HAAADAGLRCPHVVLEQGHQHARGTERLRGSFWAQPLRTRTTDGSSRAEAQVPLQRHPEPPPEWSAVRQLKSSSSEARLAKV

SEQ ID NO: 962363 - protein, 70 aa, Homo sapiens
KTCVRLWLSMAYGDYVQDGKVASGTMSDVCTPYSSICFYPFLQALISNPSENPDDATSRTNLLVPLTQPV

SEQ ID NO: 962364 - protein, 189 aa, Homo sapiens
SATFGPGSAGGRGYRITADVRTTWGRCRSGLLGGAPFLSGVGLAVSHLLDVRTQLTRSATINPFCGGRNDHVKHVEIPRMSGSITAPLDRRAKSAHVADLRLGQKFRSRAIASSCHLVTCQVTRSSSYVLLVPQGVVMASIARKVCTAPSSWQKKQDAKRELRANDKTGEAAREVVRQEEDGNIVKKCL

SEQ ID NO: 962365 - protein, 125 aa, Homo sapiens
EKKDGDNEEEEEDYGKMYIDQEELNENKAHLDQEITDDITNEESRQNSIRALTMTGKIILAVKHIIMFEGTVWQFMSPSICPTTCSFEICFENRKKREQHQICMYARVYIMDNCEELIPEYLELH

SEQ ID NO: 962366 - protein, 205 aa, Homo sapiens
STGCSGLGPWRESHVMSRSRGAQSADLYRDTWVRYLGYANEGARGFRSLVPAAVVWGAMGVASSYVLAGCIDNGQDGLEKGRWISSVTPACAISTQQVGGSPAPLDHSSWYLACAIRPPCYMSSSYFLQSDCGTPGSVCCPKDPCAPCVGVSWTEAKRPTCSRTQVAAGSHRGQDLSAVCSLEFQDADVKGDPLCGPGPCLSGKM

SEQ ID NO: 962367 - protein, 302 aa, Homo sapiens
DHSNMGNKMLQAMELCGKALAWDEMCQGITGSRLRLNVSAKWELDYGAKGSAYGFVGRRFLQQMLSGIAMFARFTDAGSEREQRERDDNGAQLNVAISRIRCNRPVSLTGMPCCLSTRSKGEPLHSAGYLPPHLTEVPLMWSSLVNGLPSRQRAREQTGEDSGLRSTPVYTRVHVRVCPCVAYVEVPQPLTYPRGYGDCLYTWYLLTPQATSDQSDAECPILRTPAMGTNRQSYPIRVPVHLREHLSQPQGRPQNTIGTLYAPGTKPCTTHHQHHAAGATPHRKHPTGAGPKRNTANPTHPA

SEQ ID NO: 962368 - protein, 301 aa, Homo sapiens
MEGYGTKKYVKGPVLSGTAPHKKFFFFDDDEGEWDCGVAWARSELNVFGKFRRSMPSGRDGQLCSLSPSFMKASRMAEVHVRCHWCPITHRSVCLRSIATVGADRVCFLITQQAVLQWGAGGLILVPMQRVHGCLSSRAGPGMVSLACSGVSHRCRAAPLPLSLFAYSLSSGLVQTLVWGHCGEMRCLELCKLLVLGSLLFASVDLFPQLIPYRENVLSSRVDRCMPTGLIDGHHGGMHRAPNVSRTKGCPCREGRKNQLNQGQDIGFYLSWAGLERTPWKEKQNLGGGTSAVVAQDRWKA

SEQ ID NO: 962369 - protein, 299 aa, Homo sapiens
TRVARCGAASVWELHSVAANLLTYLLACSAGPLWSCALLNGCVSAWLAQMGKNYISCLVGACSWKAQLHACNDHVPRGLVTLSELHHANGLLRVLAGSCQKCIHLVLMGLHLGKPSWSILDVEQSYPGRSPCRSGSTCGDLVMPTFNPSWVRRGTLPLVARFLGCLLHAVACCGLIPSHGFRAAPGQAGLGLTQNCIHHSLVDPCNIAGFSGVAPLSWVCRTFLHVEPRRVRAHADVVFPPGAVLLYRSSFAVSIPCAGEPVDPSCAHIVCGGGCGPHLPGRTSFLAGALGAFLQSVSG

SEQ ID NO: 962370 - protein, 394 aa, Homo sapiens
SHPSSLEAAEQPDPLSATTQEKDEDHCSSRGGTTCQLTSPTAPDHAWVPEADQFSQAFSVKLYSLETSIISRHLLHGERDSFWLYKHMTMVHRYRPVAHFLDTQLGIECISPHLLECNLSAVWEHALVYREALAFRLRPVTLLKPYRLTHYHFEHRTYIKADTLRSHHLTNALTSMLHLASGGFAHHYSAKHTLSERPNSVLQTCASSPSSYTRFICRPLNYALPHTFRQTRRAITATASWCQRAEPLLLGFRRKLAKRMVPYICDNMERLLPPGPLHNNSTTNTGKAITQIWRTTADNTIWRRRRHRLIAPVDYSPNMRRNSARSPSEAPEHFTAREGYTSYYPVHNTVRYPRATWPSLYSPVSPYYGYHNGWAHNTLRRQATNTPIEASFLN

SEQ ID NO: 962371 - protein, 84 aa, Homo sapiens
EPPAGLVAATVRSAVESAFPTGYQCKLEEEKTHSSSLSHGYQRLYEKYYVGEPVLQESLDELIQSQSRSAPNLPFKFYFSLIRL

SEQ ID NO: 962372 - protein, 215 aa, Homo sapiens
RRVLKKIVVTLEGSGLRHVPCISIMQDNGIITALETSWILLYECTQRMKHRERLPKVDSRGNRFPAISDSTVAFPERHDCNCTAHSCRKRHASLQRSLLPILPHSHNNNFEITTHPQEEYLETAQTDSQHHATCSTHTHVASCVSISERQHSSPNSYANHETSINYYFTRIGKPTKRPTQLIIIYGTHNNTPIFRAMDHTTTFTIHHTRDVASSP

SEQ ID NO: 962373 - protein, 104 aa, Homo sapiens
MPRPLRAATEESGLSPELSRGLRTLLVSQAQTHLEEHEWWIWLLSKSTVYVSNLPFSRDKQVILYPDYFSKVMAKLVHTVTISDTIHGYQGQSKGVALSLILSD

SEQ ID NO: 962374 - protein, 254 aa, Homo sapiens
MYDSTRHALARRKHSTTHICDCPQNYQSYLSPDKAEILTYLNQLRLRTTLHTTTLLYRDSHVMNFPTRPHCRKAPHSTGVNLGNIDRQDTSYTNLELCIMAHQYSPLATYAFLKHTAWNKEAKVRHYSTHYHMVHIHRNAGQVDLIRQRHHHPVAYRNKNRNLKQSSASIWQLPSCQSQRRHITHRRVRITPSRKCRSKPPESPPHFGLMAVYPNTRGSMDETDSQMFRSESKTIRVPAEAGGGPCFIPKIPIS

SEQ ID NO: 962375 - protein, 99 aa, Homo sapiens
CGAMEGGFGSDFGGSGSGKLDPGLIMEQVKVQIAWQRAGAAAEDDWTSVSVKCIGKPGGSLDNSEQKCIAMCMDRYMDAWNNRVSRPNNSRLQRERANM

SEQ ID NO: 962376 - protein, 316 aa, Homo sapiens
AVPSHPPNMVLILAETPAVCARASQLPRCTPVVPARPVPQALCWVHPSPPGFLSPLHGPAGALPADAVKASVHCMKLRQAVEWTLGPDWATTLCGSPRPEPFQAPLSSVDPFPSTKEQVPSTSYPGFVKTMPCLLHRSSLRQGPLQAISRIPIDALESGMPPSLCMQKGIFCGKKTGLLAPISTKMGANYARATQHCWKPTWEDMAGPPEEERHEMGPIPLGDPPQFENGAWCFEGNPCAPVWDEQGQETMDGLLKQKVIEQVPAVHKDYGFPRVVTLIVAWDQVGTIKWHNRGVDHWAQCGLGKQLPYPRIFKIT

SEQ ID NO: 962377 - protein, 221 aa, Homo sapiens
EDLIISELRERYPSDRFIAEEAAVLAAKCVLTHRPDVDHLSPICRGYLHFCAQIPDLWAEFSDCADSAVTDTELDFGVILPLLPEGRRAVVNNGGQAGGSGRAAFPCNLCASVGIRGGLSGAEEPMGHSFHFLVQPHVSWDVCGLCDTIMWGVHPLARHVINNTHKGYSRRPHFLSLWPFRSSSYPWKIKAIGRPFTYVAILVFPEPKESPVGLTYLSEVT

SEQ ID NO: 962378 - protein, 181 aa, Homo sapiens
  misc_feature (154)..(154): Xaa can be any naturally occurring amino acid
MAEDNGVDARHQGVGRLVKDLTDQVAWREIKSLSTLALLRESRDHLISYLGASLKDRGLGTINSQLQESKTLCRASATRFKGNRCTRSGDYKWATYGLGCKQLLQRDGWPPRHILEGPINPWNKAYSDTGPLMQHEGFTCGGTKITGKGPKISXLVQMVTHGPACGTTSSMGSALTVPWAT

SEQ ID NO: 962379 - protein, 80 aa, Homo sapiens
SALRGSWRSPGACARNVKLSNNAQNWGMPESNQVSTYQWPIMSARNKRGQCVVWTRLVGFLWFAQFWVTVLVLEREKTTC

SEQ ID NO: 962380 - protein, 71 aa, Homo sapiens
TKLARKPGCPEATACFNRLDLPPYKSYEAGGEKLLYAIEETEGLDTEYDRGLPSHAPQRYIVVLSPPVPER

SEQ ID NO: 962381 - protein, 262 aa, Homo sapiens
MNSTASTPRLLLASKEQVLHRVVLEEKVAHRGEQRGRGEHTPESAILRAAIQELKTREEALSGLAGSRREVTGVVAALEQLVLDGSLGEGVCLFNPGRVCWRYLSAFDEETTEVGSLDTPVLDLLLSRLENEEEAVSEPEPEGLPEACDDLELADDNLKEGTICTESSQQEPITKSGFTRLSRSPCDYFVTKRKMDSICSWDLVNCALASCGESGSLADVAPDGSQRPVFGHWRGNPCLRVFRTAFPDILSTCALPLVVSTL

SEQ ID NO: 962382 - protein, 131 aa, Homo sapiens
MPLNVADGRECTGMPLIGLFVKAGSDGEQHGNCPFSQRLSHDSLAQRSVFSVTTVEPVTGKQQDLLELWFPVSQPSHFITFNHVKRQHRLLQLRIGRNFSEGKSYALPSTLNAFTQIITQNQITCWKWDDL

SEQ ID NO: 962383 - protein, 204 aa, Homo sapiens
MPPNMVQHVVGQPVVAKPLGPEPGHRIREPLSFPSWSVPSAPVIDLCESLVARYLCDPGVAHARMRTRRCDRYVLEYRRDQASRARPAVMGDQPGMVTRGHPADQRYTLDRSQGLTLKYIELPCEGACSTSGHVLWQPRKKRFPFLGNAPRVVLSVARAPSPTDALSDGFSPALLRIWRGPTIFAQPEENPWRGGWGMASSSRV

SEQ ID NO: 962384 - protein, 192 aa, Homo sapiens
  misc_feature (171)..(171): Xaa can be any naturally occurring amino acid
AGVSSILGAINIHHNTYHYITPWHNPIPNAPSSAESVLNHSECLHSSLYSRQILDCVAIYLTDYTEPRNLNKQHLLREPRREVGKKPHCYITEHRISWILYRGLHPVKSLLIFSSLYTRGSRGIKSCRTILERLRNPGEKKRDPIVEYPLWVTSMLESLFDVLTMSGVSLXARIHPEDGKTRHTTLRQSVNQ

SEQ ID NO: 962385 - protein, 134 aa, Homo sapiens
QLLESSLQPPGFTHQPPESATSPWGSPSQPQGSIRPAIHAGVQPLRAPGWCTQASPKPFTPRGPQGVHLIQPAGGMHPFRCPLGGASAVKPSPGGSQSGSGLPWRSSNPIKAFRGRFQPPSNFLGGASPAKVPH

SEQ ID NO: 962386 - protein, 120 aa, Homo sapiens
  misc_feature (117)..(117): Xaa can be any naturally occurring amino acid
MGWAGVVLAGIAWAGSDEVGSFALLTGGGLVWGLNVKRRVAGSWSRASPAALKGCFMAICPQFRAASNSPQGQRGWGGGGPTAGFHLKSLRASEHGEAGYGWHLSRPALCSQLKNLXLEY

SEQ ID NO: 962387 - protein, 163 aa, Homo sapiens
MVPSRPTHHSSPTNVYNFSQQSWKFRSAYLGAWPTLGFGAPPLTAYTLGLPRAHTHPPDTTLNGEIRPHFEWEGERGLCARARKAIHQTRSRALVKNYIPGAAYSGKTLSHTVKPRTAAFNSSGLNAILSYPSKEHGRLQHRVPPACDATFRHTSPTFVEASR

SEQ ID NO: 962388 - protein, 184 aa, Homo sapiens
  misc_feature (117)..(117): Xaa can be any naturally occurring amino acid
MQRRHGFIIPALLGGQSPGGQLVDELSSGGRLRGRWMFPHSPEIEETSCLGLSLFEERACRASLKGLIQVASREQLLYLYCRGYKRVTRWTLVLLLKPSFFDFEGTCTQLGSFGNAXWVIQCPRPSYCRNNIAVVYKNSIQVGILRIPEKNGNEANRVLGASKVSIYENPCEHAPYFDTADNHL

SEQ ID NO: 962389 - protein, 441 aa, Homo sapiens
LESSMALESGKTGSSSRGRLQAGHHQEGEGEPRGGGPRDICAALEAARGFGLLCVAVSPPEGTLRAQGFLRCRMMWPHKWDLGCPPDIAPSSGSAPLGRLGFWARASIRAFQGGGQGGNWAADGPRNSGADGQSARVARDVGSRRILPGGNGASSTGLPSGKARRLEGQARSRAVTHCGQESRRSKGEHWGPLSQKRPPDGTPKRRPVVHPFRDRRLGRLETGGPPPAAISERLGPYKRAGFSEGGPLGGRQPASVPRGGIHSPKTIGSETGATVLRPPKRSDGLFGPQGLGWPEMNACPKGGLPGNWGPGCELTEHEGELTFGALCGLPGEYVMNQQPTRNPREGERRAGPGRPLFCPLEYHPLFKRELRGCTPHWRANRTCAGSPLAAHINRFPFQGGTVPRATLRGDWAPIIGVSCRGHPVDKSFANGSIAAPKPPKI

SEQ ID NO: 962390 - protein, 320 aa, Homo sapiens
  misc_feature (71)..(71): Xaa can be any naturally occurring amino acid
MHALMHMLLAAEEEIRSFVSRFREWSKGDHFSNGKAKREIRTGILTSWRDFHESNLENNGGAKQADSWGEXQEDKNSTQQKQRHTGDRTESRRNHSSLEAQRDGRKDMGASTNLAEHGESRGTNSQGGYRYNWAHSQGGQTIGTLCGTSGASRRPTLQEHSTGDTPTDGAMSTTQGADKFDQHLKDILWRNYDALTLTKHLATKASTTRATVTHRIRRARQQTENPPDNAAHKSPQQGRKYHSHPRNMIHTQPRGADTRDHVVPDTPRQRRWEFNVRDSHSCCTRGRQKNTEGDEGQTATMQPTGAQGVATRRLEKHEHT

SEQ ID NO: 962391 - protein, 127 aa, Homo sapiens
MTRIMNLLWHTRVPVIPTNLLTTIRQCSDRVMHMQCPNLSGWTVCAQYFVFLISRWLDSDMRPLPCELVPHAMRLTRKKSLKNTKIGGLSGVTSGGSLAMRMHAGELRMITGRDPIRVILSNYGDRV

SEQ ID NO: 962392 - protein, 210 aa, Homo sapiens
MLAAEYWSQEPAMRFENSSAVLELAAASQPKRRLYSQRMSVPRTSSCHQLDSENYLASTLGVETCLPYVSEDMLSRSKRYIGNFFQKRHMGIIHYIFEFFGFDIYFFGNSLAVWPRWEGGGPNHSHGSSITRGLKNPSHLGSWDYRLTAPPGLENFFWVDARILYVAQGVSGSWAQMGPSGLSSKRTGHLYFVSFAIIANKRSIPLMIAS

SEQ ID NO: 962393 - protein, 172 aa, Homo sapiens
MKYHQDSEAAINRQINLELYASYVYCPMSYYLDRDDVALKNLLPNTFFTNLMRRGTMLRKLMTLRNQRGARNLPSGISRNQTVMTWGERADCNGRVHYILEQQCESVTYVELHKRATDKNDPMGVDFIETHNLNERVTAINEWGAHVTNCARWERRIWLGGISLDEHTLGDQ

SEQ ID NO: 962394 - protein, 74 aa, Homo sapiens
MLGLWKLIGCAGKHVMLLVRVGLGSRVVCERLTLFWLGALSQARFRPCPLGLPPPLWSKAPRDLRLFQPFVLPV

SEQ ID NO: 962395 - protein, 129 aa, Homo sapiens
MHTECGKGFTCRYQLTMHSRECIQGRNTMNVPQHGEAPSSGHQLTAPRYILTVLRKLISVTNVGKPLVAHGRLTRPQGIHSGTDTPMECTNMCHSPTALNFIPFKIAVQDYSYRCQHLTMSRARAAQAS

SEQ ID NO: 962396 - protein, 353 aa, Homo sapiens
MLRCPIKEDIALTSDEWEVSARQRFQDLGQCRRPSWCTSSDTKDTPLEHHLYVVSYEADGEIVRHHQRPAYSHSCSMSQNFDMFSSATYSSVSTADTACTVYKLSGLDDRPPCTSRPAYWTSMTEGTQHAPRIMYPPRRIFQYPQRSIGMCEIIPGMIYKAQNAFSKPRERTQPNSPYLVHNHQDPKDADCMDYTSLSKGIHKKLARITTEMRLHWGHTPEEKQKDVPKTTSKYEDTTRTHKEAHEETQEGAQRRAQISDTNVVQDPRHNAEPQQDKDPTDTTLNTRQHNKRDATKEKTTTNTKLARPKDRTPPQYQDGRTTVAPANNHRMQQHNQITYVNTEITTQKIHNET

SEQ ID NO: 962397 - protein, 182 aa, Homo sapiens
SLADSPPSQRIMDAPRQVVNYGPGPAKLPHVQVLVSEITKGDSLDLAKEMAHLDGSWPNCSSQRHSRYERKHLLHHVAEKSLCAELGYADSQTNYTGDRFCKEVGAASSVLPLKPHWLESTARCADYVVTRQLGQLRPQKKPRSMGLINIVHPKLGQLYKKFQIQAPGTSNTDASYVYYMRK

SEQ ID NO: 962398 - protein, 147 aa, Homo sapiens
QKGFYSKNAKYKKKNKISLIPRVNSISPQNKDQRGYRRVKINAPEEGIWKAHQSRTGCGIIILYTHGRECPSRSTHESRGPTWISSVDGAPQNATGAAALCPCLIPCDPRKRSNAVWRPPPKGPQGQRRRGGNEKLRARQRIGTLWQ

SEQ ID NO: 962399 - protein, 212 aa, Homo sapiens
VRIPDTPSMAVPRMSCNLFVLNVTHYKKMQKFLGLPRVHGDSCSKKKPLDDQCEKLSAAGKTQECCVQANKLSFASLKPKWDKNQITYRIIGYTADLDPETVDDAYCSVPSQVWSDVTPLRFSRIHDGEADIMINFGLLVSMAMDTPFCRGKANGTSLVSCLSPTGTDVGGDSQFDDDELWTLGEEQVVRVKYGNADGEYCNVPLLVNGKEY

SEQ ID NO: 962400 - protein, 256 aa, Homo sapiens
MRFWRQVKDEDMSESLEKIKIQLDKGNNELVTKLKQQQDATLTTTTFQNEDEREERSIYDSTQGCKSKPSIKVYSAKDINRGQRKVTETAEDEQEGQTAEAELLESDHEVQKQNQKMKIGDYQDEPKPQHLDKNVQLNLMHNILTEDLSLGKTMEVESFKIMYQLYAFNKEEVTLVTNKQTTHGAGTAQRGTPLVGGPQGIHAVPQSKSGTHTWAPHNDEIVIKKDKPQGTHVIKKDEARATQAASVGPPGGRRTP

SEQ ID NO: 962401 - protein, 209 aa, Homo sapiens
FHTSSRPPPTVGGIARQRQRRSVGPDIAAQGSRVSVGVVGFCGGCGGVIFKLPAAVKLVRSLMLRATRVVAECACVVPGRRERALTVRARGRVVVAEEKGVGARAVESSSSSGLAGPRCFGSRGASRGRTFGREEGGFVACEDLGPWTEAGGLLRATRGHGGVKGARVQAGGVRPPDPPRYPRLHGIRGGNDRDGGRRMEPFLVPAPPP

SEQ ID NO: 962402 - protein, 261 aa, Homo sapiens
RLCRSAAVHTRRQLTMDDDIAALVVDKRVRHVRAGFAGDDAPRGVFPSIVEAAPGDQAVMVGMGQKDSVCVADEAQAKRGILTLKYPIEHGIVTNCDDMEKIWHQTFYNGAACGSRGSNPVLLTEAPLNPKATRDDDPRSVLRPSTPRAMYVAIQAVLSLYASGGHWHRDGLRLTGAPTLVPLYRGGIAPAPECNPCVLDPRLGPGTWTLTTFIEGFLKRAAANSFEQPRADAGTSCVPLGGPCAKLPRTSSQRCHGGTAL

SEQ ID NO: 962403 - protein, 69 aa, Homo sapiens
DPGTWKAFSLSGAMGCYMGKKSKRELKTSSEDEEEYVVVKVLDRRVTEGQVAYLLKWRGLFCGAQYLGT

SEQ ID NO: 962404 - protein, 63 aa, Homo sapiens
PTVKSLNPGRGDIWDFRILLRGLPGLAVPQGASWLYDSRGLPTPPVVPAVACTSGAAVSLLQS

SEQ ID NO: 962405 - protein, 103 aa, Homo sapiens
  misc_feature (30)..(30): Xaa can be any naturally occurring amino acid
MYHYRVVGIALYVIRKFMAMVVAGIIVRVXTQRSVCEGRRWTVDPRVMRRGRVRDPAGLGSSSGGSNPHSVIYVTPQKIGNNVVPARVAGNHWLCTLPRAALG

SEQ ID NO: 962406 - protein, 134 aa, Homo sapiens
  misc_feature (80)..(80): Xaa can be any naturally occurring amino acid
CVVLRLLVQSYAKLHVPGRGQAITNVRYHGTCRMRLRTRQMTSHKGFSICNILSSGESLPQDSCTLLAAGMPHIHVMREXYILTFKQVSSAGNVWEREDCGVPCMSDTHGCSYVGSESLVVKARYLLAHIQTLR

SEQ ID NO: 962407 - protein, 422 aa, Homo sapiens
SSGSEQYQVSVQLERSSSGSSNAARGVKQWHPGSFRQASSRVRKLQHLPQLQRLAALRGSSKSFSAQTAMNEEALPLQIQTTLKEMTQGEEQGGAHLLSPPKCTCGRLTRNCDERITSWRYFPPMGKIKHDGHARGTDASPSCPKGYAYVELENPDEAEKALKHMGWRPNLDGQEITASGELAALGLGQPPRKIPAFPGRMVCTQRLWWAAGLPRGMMRRSRIPRGTQVSPPVQPEKSRGAPGAVWQQEGKRTQESKRSSRIETGAHERDFIAHGNIFIPPPQEQVRGDTSPSTAGENHQERGRTLGRPRAADRNALNGEGEPTTYVTTEEATRRAEKTNDGRAQHKQMMALTTPIKPPEQLGWTDKPTHNACLTTTKNRGVNRKKSNTLMLLPTNNERRMTHYRQNTPQADRRVVGQTATT

SEQ ID NO: 962408 - protein, 180 aa, Homo sapiens
PSWVARNPVHWDAWSASHEQKDAWVRDYTSYRSPGPCVVPWAFVPYAVTHNAVICCLMDQEAEWPVADCWLHDTCGASLIAELVLLQMTYDEHHGGRNKWYDMFQEHDVQKTILKDKSCDGQLYEYAEHCVWQSGVWGGTEPEVGGPIHLYVLWIGASRRSVFRFLVVFPFGPRGIVSPG

SEQ ID NO: 962409 - protein, 113 aa, Homo sapiens
RAEVLVSAGFRAWSHRGGTAEEGRGLDARVPPRGVCHLRAFISSSKHGTINCLGNASLIEDHLTKKALGFWLAQNWERDHFIGFLRKAIVINFANLGATIRSVERIHWWGKKN

SEQ ID NO: 962410 - protein, 291 aa, Homo sapiens
MAPSRNGMVLKPHFHKDGSGACHVVNQPARKIRRRKARQAKGADRPAPRVWVPSGPIVRCPTVRYHTKVRAAGDFSPGGAQVGLAFTSKVGPGPIRPFLVDSSREAETKSTGVPAGPNGCRRLRKYRSKLIPLPRGKPSAPKKGRQSWWKELESGPPQVEPGPVHAPVGKRSIQKGKTRSEVIHWAKEKNFKRLPDNPSGMGPVAKRARGFFAALCGAKRTPGERRQNQDWFEKGKTYMALRGGLWDPNKTRKDREYNQTKEQKQQKGATRTKDLPEAPKYTAPSLKGGPN

SEQ ID NO: 962411 - protein, 175 aa, Homo sapiens
  misc_feature (148)..(148): Xaa can be any naturally occurring amino acid
  misc_feature (161)..(161): Xaa can be any naturally occurring amino acid
PEDVVQAEAGGMRTVESKQKWPGLFLRHASDEVCPVAQGITSSEHAATAVNASSVGKCGDACNDDMVVYTRCRAGEIMSHEAVPFNRVIGRCTYLVGCYRFSWRAIQTGCEFGTLCVQRQFVRNEATGGALWVAKVIATAYVKLVGRXWGFKKRLWALRVXKLNPNRFCVGNFGL

SEQ ID NO: 962412 - protein, 123 aa, Homo sapiens
NHQSSAFSSKRAPMQGSIPHVRIRVCLLLLKTDMQQRARATHVPYLGPEFGDGMLCLLHVALHMAAVTVPLRLNVAFSHSASFSLRSRVRPLWHDRCGWAIVGSLSPASRGSSQSGWLTRTTR

SEQ ID NO: 962413 - protein, 153 aa, Homo sapiens
MFKMYLVSKSFLKPSHLCRMLDVSGWERIMPEGIDIGEPLTDRVKDVTWIPPFNRMLHGRFDLWQAVRLGCSEHSKVLWWMPVPYLKSLVSSRLPRANPSPSENPSGPSLGTIPQAHFLLVMLSDATLQLQGKQLDLLLKFRHAGPRSDGTAA

SEQ ID NO: 962414 - protein, 104 aa, Homo sapiens
MLTRITLGEGISLGPHRVSAGATITGPRATFHSSGGVSLEDLAAQVCNCHKAPGGCWNPQGGAPKGGGSSQQKSSFFPKKKTHTYTTQNGGRPEGAPTGLRGRA

SEQ ID NO: 962415 - protein, 311 aa, Homo sapiens
MLLMKTGNVRPLLGPMVSHCSPLVQITVMQFQYDSKLPERSPEVYLHHQNKLEQHQVYGARSEPPASMGLRYNTYVAPGRNASGQHSKPCSRVEYVSSYELLCQEYLLPRRHSTVPYHPESAVSPCSAVFHDSLCSHFTDRSSPQMMSQPSAQELCEQYKPYQSSQAAQIIRSLSFSLTLRMAGVTTGNSHSPVLLSYYSADGGLSDVECEWKAQVEPQYRHPQSQHWELQHKPISRGTETVMVTEHAEMEATDTAGPRGPGEVLAHRHKSCVRNSPEKKEITTNTHKENRGSETEAQEPDREETRRQQEI

SEQ ID NO: 962416 - protein, 77 aa, Homo sapiens
KSLRQKPGDSTMTYLNKGQFYPISLKEVSSSERNPSSHQQSFDDVSHWLGYYSMKTKAEKISSKAVGSTGTPGEHTA

SEQ ID NO: 962417 - protein, 301 aa, Homo sapiens
  misc_feature (225)..(225): Xaa can be any naturally occurring amino acid
RHSTSEPRGPALMVTPLVRKAMAPARTMARARLAPAASLPSACGFCARSAPGHPGRATGRAPMGCPRVADCLNSFTCRGAWLRAGHQAPSVSETELPSWESPTVRRGWDCVLRLVATTQNGANLALVGALQTDARGRDAIRRLLPHQIASTSRTSCASSRPGRGFINYLNEGKCTVPTRSCGPKGLGGSGIPRLGKAIELEGKTPRNPGWLEDVGDHKIGRLLGXVTLAVSGRAGKAQTGGLCGAHGRPYLVQLDRWLVRPPEGGTSVTVRHQAQGYARSMVGLRAFPLFSPADSSPSGLP

SEQ ID NO: 962418 - protein, 103 aa, Homo sapiens
  misc_feature (54)..(54): Xaa can be any naturally occurring amino acid
EEEAGSGRCVGCGLGTKWGVPVPDELDPDGPSADYGARPMACAARRRHSKFMCXYAAGLLCAGAGSMPWRDRHAVQLRVPCSKPRELAAAHSFSMIIEQRQRN

SEQ ID NO: 962419 - protein, 139 aa, Homo sapiens
MSLRWSGFDLSGPYSPGLSVLVHMGAGGVGIAAGPIVAISWRMCISDIGTRASRGRQSRTEEHLKDNWGHTIPWTITRLTRVYEYQCNNCSLNSDVLMVMGSSASSSDYLAFGDYQISVRNSNGVLTESIRSGNGQILG

SEQ ID NO: 962420 - protein, 188 aa, Homo sapiens
MCESQSEDEWTPFDMSIQCSKGVYISKIISSDRDLWLWCSMVPRKTKNSVNFKEYLRLTGAGYIQVQNRILELDQFLGGSRDQENVFQDMMGHGSDYVTSEVLWVCAKLFSDVQFTDEVTKRIMLVTANERQSPMGIDSAKGQPGQDQKPVISGDTGIFLDLIAPEEMLGGFDNILVPTRRISISIDR

SEQ ID NO: 962421 - protein, 184 aa, Homo sapiens
RWRSAADPWRNAPPSPPSCLGSYRKGFGCGGHADRLRTSIFDDEIRTPFEVLKAADGTQKRERSSDGGDGRFGGAPWVASSTSARVRGQAGTELEFATTAGANRLRQIGRPQDRDPLRNTPAVLPHALGAVGWTTDKGGRSCQTGPGGRAFRVTNAREHKERSLGKERDRGVEASLSGGLKRGQ

SEQ ID NO: 962422 - protein, 104 aa, Homo sapiens
QRSTGPDGMAGPRVPSLRMTQSMRSEDCRQACDDMNLSEFPFSGGIYALWFLGKPCCRSQTGEPILTVVIKAFSDCELLKPNSGTGKDGHIWHIDSAARIDIRS

SEQ ID NO: 962423 - protein, 278 aa, Homo sapiens
MAAGGGGRMPDTNGTGGSSGMEVDAAVSPQRDGLQEMTGRCNRRFSIPLSYLKRSSDHLESEMQLHRKGADLLRGELESSDWASQEVPNISTVNETPFEAWHSPNNQMERTKINHLNNGHINYTPKAGSKYKTRVSNSELRRFWRDMGITNKRGANLVPPRGTIHNFQLKHALMLKESIERGPHKSYILQRSENAINETKGNNRQSIPCYKQIHYGTHSWLQFGIDYIRTRRNKGPRKLAWMTGHDGLETITTFHVAPHKKRDKQASEQAAPNWGTRY

SEQ ID NO: 962424 - protein, 386 aa, Homo sapiens
KSKRAGREHSGVASVVVQHCVGVYPMCLGQTWDMAWVTHVTEWVPSCHLTHLQIHLVAWHMGACSCALAFPHVPYAWTPLMGLEMLGMTVHVASGESYAAVTVTMDGANAGPRETGGPLWTIAAGKGGAGSGLRALLRPAGSQQMRTCWAQGIKDSREQGPDKCATFGDDLLVLPLSAGIRPPWGACALGQEPGNQGIPRGQVQQGALGGRRPRTKSRRPGHERRENVCNLTALFKGNGGHAEMGCHRPMWRHEAARTAHAVRHVPVTTGDRSPLWAHYPGSPPWLSHKRGRGGTIPLQRTRRQTQRGRHPEKQHQEGPHTKRRQVRSEAQWAHAREEEPEGSTPKKHEDRLGRHAVPHHRNMRTAEGAQGTSAHGAPPEESTHSA

SEQ ID NO: 962425 - protein, 185 aa, Homo sapiens
GSMPEFFHTYDKKVYQAREWDNNQRALTDEWTQLDMSYYELGHLTESFIKAIWSRTRICIARGLNFDLSPCTTLEQSLTFNRRDTPHNTGRISHHPQTPFYTQRKTTSSIVPFPTVGNLGGTANGGHHGQSPHTGNHLSPRGAATPFHPSPRGQRSHNGLIDHLNEHCGATTLVLPNTRHTFTLG

SEQ ID NO: 962426 - protein, 275 aa, Homo sapiens
MRCGKGQPLWLRCHQTPKFNFNSPASNHSGIRPEVKMEAPFSNKRELPWRVFNRGDCGQFTATAMSKAPQVRTRYLATLSQSRMAHIRRQPNGAHSKNQGAAHTSLADLFVNATKRLPPRGKQHHGSYDARRISPIPPPRVYRHKPLMRAATSMGSTLSKSRPTHLDYEKQREVDPPGPPQSNTTFAGRNMTQRQLLATSPPNIFGSALTPWTNVWKNSHAIDNSTSRHEVTVCIMTQPYRNHRDYAAHPIQVVFVAQTNSCRLDGKRQCRPDDT

SEQ ID NO: 962427 - protein, 176 aa, Homo sapiens
MVPAQRGAMPRRQRAGGLPQWRASDEALTHLSPRKEKALRRNLKEQSSSSDCQRSKGRPRSELAGHSTVGRFRKKENQKLLLENQLFTAEKPHGLVVENQELRQRLGLDALVFAEEEAEATGIECEASWPGLLVRSTQDYVHLCTQVLAQLSPLHEANFPSGIRGGEYGLFKIQEV

SEQ ID NO: 962428 - protein, 206 aa, Homo sapiens
MSLSALLAGGKPEETGSILVQSGRGSRRPGLAGPVEYRSGACGACGHVSGRGAREMRLGSLYCSLKAAGPKNWVGAQGPSKRPWPFNNPQFQGRGRDPVTTKEGPESLRQTVRTMCALSHCPLPAGGHNHRDDHAVWQSVEAQGETDVPGAGGKLPPPIRPRGDSEGRPRFCPWAWKAWFGQERGLAMRALFAEGPLIFHGCARPW

SEQ ID NO: 962429 - protein, 114 aa, Homo sapiens
MSKGGTPPTPQKGLVEFIPTSELTRTVWYPRHYLVTLVDDKRSGEKRNRNDQSQTAPQPPTEQQEGMHCATDEPVHTAASPPNTGSTRSTESQPAISREIASSQHKRVIAQLKD

SEQ ID NO: 962430 - protein, 211 aa, Homo sapiens
CADGSDQISDYCSWNIQEVTGSVGSFYKLNECSSLPLVGVRYTELDVSHDETEIQHQSDLLSLIGYTLLCDLLDSASLSDQTVSKYVFFVSISMLQLLNAKPQECIDWGTVGTLLLENPLGQKWPHPSKVFLYEAAKVVGRFGAGSYKLLLNETHNAGPLTDASIPGEDSVNYEDCVLFQCDHTNSRLSSTVLLNVVRSGPLPLNIHTIAP

SEQ ID NO: 962431 - protein, 280 aa, Homo sapiens
SSSASLLAAAASAARLLRRRGLRQLHRTESLNSRFLFNPLHRITGCPTMSDAAVDTSSEITTKDLQEKKEVVEEAENGRDAPANGNATEAHMGSTEADNAGRRRRRKPGGRGRARHARTNGDGRGQRMADEDEETLSSATGKRAAEDDEDDDVDTKKQKTDEDDYTAKNKQHNTTTKPPARRHKYLPPGGTTPTSPASPAEISGNTTRRVPTIPEPGDTKSQTAASAKPLDHRHRDAESPRRPAINRRTATSPLRGEPQAATHLPGTLTTRAKTQMTGHR

SEQ ID NO: 962432 - protein, 89 aa, Homo sapiens
EPGAPVVPGLPPVTSLLNICVVVVTQMYQVPTTRLASRDGDPWLYVGFRIHHWVGPGSRVCLVPPWSAFPVFWQSFWVPLLLSTFQGST

SEQ ID NO: 962433 - protein, 252 aa, Homo sapiens
VYGVERCIRLCESGRERTLTHFSRQHVPSVSILLAEDRFQNRAVSTHCFRGHIAVTAQGSFRSAQGSQRRWRPTRERNSLARNIRHARCVRHVSGVDDDRDLTTQFLKNCPEERANGQGRPKTVRILEAVAPDILHVSSNTSSDYAPMECVHAHGYDVTKAQKCTFGYLAWPNANISKTKKLFRPIVALHETFPPYGHTNPYPLAHTTRKLPHWKTLVPLSAKETPLLSDSEPEGSPIRNTKPNFAFPFMAE

SEQ ID NO: 962434 - protein, 201 aa, Homo sapiens
  misc_feature (120)..(120): Xaa can be any naturally occurring amino acid
KKTKTEYLAELKNKEIVKKHSQFIGYPITLFEWQKERDKEVSDDEADEKEDKKKQPDSRRATAVGRLNLKLQDVGSDAGKHSTRNGLVHPSTVTATHTQRIYQVNRRYESAVPQAQNASXNLNRPKHSLSNSWGTSNAKQFAPATGIHFDTCNTGSGTVTGAGTLSSLQRTALHSKWTWEDHVWPVKAILLKFERTQFGHS

SEQ ID NO: 962435 - protein, 362 aa, Homo sapiens
NILLLPQWKVSPTRRPGYQNTISCALGDGNSEDPMESTHVAAEDTCQEVSHVNALEIKRFHDGQIRTGESNQRYESSADDVPRTIPRASQGSKVSPGPTCKEHSLALPRAEGGSGHWDVVKAIPKPMRAWSHMRAPTVRHRQPGPPNIEPPTKSKTVMPGDPPRTIVAIHFRGLHGPSSGYRALSLATESWLSSSLQRPCLDTWALNAGTPLRCVTPLHFASSNSCVVPLPPASGPTAPLPLGGYYRSSNTRPFKLAPRGSINVAVLYSASQSLVAPRASSAQHGNTKDILIRIGIGPQRPLASTGIRGIKPPRRMTVYPPGGGAHSRHTAKQRFVYHIGPQRRLNMVHGEVHRTTRDIPIH

SEQ ID NO: 962436 - protein, 108 aa, Homo sapiens
AGVGWVLHALLCLHRRSPPGSAFGSAPGTGSGWRCCLRRLCRGPSAARLHGSASPRALSVQGTAVTTCAPAAGCVVRACAALHTTCDALAAAGLCRSLEKLPVHIGAW

SEQ ID NO: 962437 - protein, 153 aa, Homo sapiens
VRAVSMCVSVAAVPWGGWGVRTVGLVVKMSLRWCCGAGGRSQCTADRNTHRAHGGITTLLTKPRNSRTSPHLWDLPGRVRQKTNKGQRVLSGCPGDNQISISGSIQTSAKKVSLRTRLAIMTAPVGSGHSFPIWLLFLSLKFKVHSKLWKTKI

SEQ ID NO: 962438 - protein, 199 aa, Homo sapiens
MVLFRAKPKRTKYEERDRDDAYTEKEIHTTEGGARKEDHAPVLREQPPVRRRRVAPQHVGGGRRGDPPDVWGQAESNTVRQPHPEGRREMPHLLKYAHAPDRGRTRPVWVLPCEATPPYCGDPRRFLEAPSLHARLVVATKYIVSVVRLPTLGGLTLERRPLLIYCGVSLRRPPEFFHGGGVSVGCGPPSWVFARDECD

SEQ ID NO: 962439 - protein, 76 aa, Homo sapiens
DKAPVQPSSLQSGPRGTDEKPSGKERREAGDRDKEQELSEEDKAASKMNVEMRRGTTRGRRIHPVYRPALEELRRQ

SEQ ID NO: 962440 - protein, 136 aa, Homo sapiens
MAWFIQTLMIQMANMAKIHDHLQLSAEVVEGSRYQEVIRQYSIEWKTERQRHTLVFHHQFPHLTVTYRDEFEELDSVPLVKSSAGILSLVHQNSQEIQRSSQDEMVSTKQQHINTSQEMTDQNIQLKMQPVLQGIL

SEQ ID NO: 962441 - protein, 199 aa, Homo sapiens
MLCPGNVFPSLDGGLLWPILPDPGHTTDSPPAQSYLHLAIYSTVPILPKGAPRSPHIDTVRALRPNNCSVLGAFVDAGAQNRDPGFPKYPIWGRPTQPDLVSFPLCATKDTDMSARNENQPTQQRTARTLAPSAIKRAGLALELTSAYCDSKNCSLTPIDRTPLANPLSHHQNTRRRPRHPSNVHMTIPQLPSIGVYTQ

SEQ ID NO: 962442 - protein, 107 aa, Homo sapiens
MPPRFPTVRSPPALLLPRPPGLADCASGSAGICHRRCREGIGSQYGPVDPKNLAVRFRTPFLLDCKGEDGVNDPLLFRAGQTVTAILYISRYYTEIFRPRRTRGQGK

SEQ ID NO: 962443 - protein, 185 aa, Homo sapiens
MELENIVAEHGATQWPGKVAVEIAKGKSNEMAADAPVPSHQPVLKSCGSASSVTITACAERQPIGRLLFREFCATRPELSRASPSWMGVAEYEVTPDDKLEGMWAGSYAEFSEPHWVLTSSLRSPVKLVTKLHQRVDGRVPAKTFPGTHPGDQMSTERWPFLANYLDSIYFTVSLRWNVAGNAAK

SEQ ID NO: 962444 - protein, 113 aa, Homo sapiens
SILAHEETQELSNIFSMSVCQRSPVLSSYVWDWVSREAQVTDFPWYLIELDCTLGKTLPGEVMNRLWGSSMEGRSHPVVLARDPRKLTCRIARGTCLLAFPRLMCCRGIVSWQ

SEQ ID NO: 962445 - protein, 307 aa, Homo sapiens
GLERMGPVMDAALPPGLELHVCANNLERMGLDAHGAPTASSAWAWMLHVVPTCLELHGAPVMGPVPGLLALSCMGLAMGGWWLVPAFDLCHRDGAWQLRRKLLQVPIWWSLDCHAPGVASEVLPDISVRNLSFDFTWQDANGQIPTMCGHVLYADITMDNGNSKAVLAAGIRFDVARRWPTQQPARDEGHGMKAELAEETRRSAIDQTPPSAGCRNIQTIDYENLLTLGLATLVKPLSNFRSGCALLYTHFVNTNVHALAHPRRHTRHFHTSTQLCAYRRHTTMSTDTTHYDTSAHVCEQHITTRRF

SEQ ID NO: 962446 - protein, 580 aa, Homo sapiens
MSPEQPPPPPPALVTITPLGWMPQLPAAWSLVTITCNHDACDGRDPCMPDLHVEPWMLMNPHKDMSETLYEQDDSLQHTRYIEQLECTILHRHEQKTTYPLEPNNSRHRARKIPTTHAHPPANANSTPRTDTPTTYTSPNHHHSTTTPAPPATPNLHPQNTRAHHHTQPTAIITKQQQINTIEPPNFNLQKIIYNTPNIHYHSPLTHKHILKHHPSSQHPPTLLSILHTDHILIPTTILHRIQTTHNPPPPLLHFHFSLSLYTNSPLPIPPPHQLDDTLPQDYQTQSTTTTKHHPLTYTTPPNSTSPYHKQSIYINNHTLPPTPITQRTITTLTLLHLIIYPLTQHISPLPFKLTNHSPPHSTLQLSHSITPQQTNSTINHPTSTTPTQATIRTQQYSNTTPTHTIHLTSPTLNTPTIYLKLKPTPDITGKDVQTHRLRAPRQSELPYIIRSMPARSHKPGATHRVGWSRIDIRHTRKQQLHHLINSLLSTPHIHPSLIHIPTYPHNKTNKMNNLNYPHHHSLITPETSTNQYYITIITSISTSHHSHSIPTYKSLKYTTSHTQTHPLNTQPPHTPQTSH

SEQ ID NO: 962447 - protein, 77 aa, Homo sapiens
MRSNGIGFARTKLVLTMQGVTVTHCQQGDLSSLRLTKCFVRNTRCLRYQIPWNWIYKNWETINCQHLMRNAIIGGSM

SEQ ID NO: 962448 - protein, 423 aa, Homo sapiens
SRATSLRHHGEGEGTGVNVIMCRIRAAWSPVADFITLCTCGYKYAINDPYAFELNIHGLNVTNYDSIHVQIDHGNLSMADELGQLVIHMEIPSPSSSERRSLQNQVAAMLAAARTVAGSPLRAHYKPTHGMKARGPQYATARDATKRYIITTAPNSLNAPQSTKFGGETHERNGIRTPQTHNEQHSQLASLPHTPHMTTNNPPYGNTGTSPMHNTTCNSDGPRHSIEPRNCPCIAPTQTDPSPRTNSSSHVAPHPWNTLCAGYSALPVVPYSLPSIKSSNKDRCKLNIYQDPTLNRTEQDDGKGLRGPQQAHTKKRALTRPQTNRRKMKPTQPHKLHRPQVHSAPNTMKNKNRTNNLPSHVPTAQQDHTKETNTTTQHKPREQTYERTTGEKKQKEEKTKRLIKNRRSNQHQNEGPQNNPRHG

SEQ ID NO: 962449 - protein, 206 aa, Homo sapiens
HLGNNDGENLSAPLQFRSKEVSKSNVVDDMVQSNPVLYTPGEEPDHCVVIKYVPYVGDSKRALDEYTSELMLGGTNTLVLHNTCEDSLLAAPIMLDLALLTELCQRVSFWHCMDPGAGRPSTPVGWFPCFSFPSSNGRPLSGRPGQGPGVVKLRLFPAQRQRCIEKNILRGLRWGLPPQNHMLLEHKMERPGPSLRRVGPVLPPPE

SEQ ID NO: 962450 - protein, 152 aa, Homo sapiens
MMPPCPCPIASTLMLPPCSPLMKCSAPHEPNELCAHTCISCAIMLACMPHADAAEETGGAQPGMARCEFGPECVMLRACSMLPWVCAQIHRQNNWTPLPSFLSQFSPAFSRTSPWRSPKNFRRLYPPCTRLWMCSTLALLLNFLACLASYLC

SEQ ID NO: 962451 - protein, 354 aa, Homo sapiens
  misc_feature (187)..(187): Xaa can be any naturally occurring amino acid
RGRTTQRKPVGEECDGGAASGYEVSSSYCPQEHGRDATWVTEVTLVPWGIRYGWRRRESRILVKGDDTTFGVTGRLSNRRILLRRLMRSMRNAWCWWLRPGSNIKNLGGLKGSSCRVVGRCASGLHTVSSAICRPDQSLWSPGLGPKFVVARSEASSRLTLVDRVTLIELLWPKNEGPNMHSLCIRXMLRTPNNKLAAWLIRNGGHVIYCCMWPEPDREPGFVALNALQRSCVNGRTFRGFPFKGNVAIDSTGLRRRPVVGSESAPRCNWSNMKAAGSQVGPFEAHIAKENHGQGSLGQWYKGGQTPPKWAVARNRGQRSHRGMDHTEIRGKSNAWRVGGTLALHRAERSADNL

SEQ ID NO: 962452 - protein, 490 aa, Homo sapiens
  misc_feature (135)..(135): Xaa can be any naturally occurring amino acid
SLAFADPPPVHTRRQLTMDDDICRSSSVDKCSEHVQGQASAGADRCTPCGPYFPHPLVVCCPQCLPEDCDWCEHVVQQVITSCEADSRTLDAMTTALPTLLERTTILMHWTFVQHKLADLHIGTENILRQPHITXTNKWKPAAAWPPLTAQTTPQIDHCIVNLKRHPHMNNHPNGPNRRLTRQIDTNDSMFLQAPLLTSNPHRPHGHTVYKYSSHRDVLDLFSPDSPALLGPENPTLATTDAECTLHELNCADIAHTNLCNVPTHIPNPTGCSYKHTDTPTPCPYTLDRLLEYPAASGTSRTCATCRKYHFNTYSYLTNGTRRTITGLAPPPHQPRISSHTSAGSASHTAENPREPRVSPQSHIPRLTQGPRTLLHTAHKPCNPITPIPHSTSPSAPTLTPPPRHSPHHSPRRTPPTHIIPQPTSTYDPHLQHTLTPTLTLYHLLTLTPHPPPPHPYSHHNPTPHHSTPRHTPNATRPHPTPHEQPTIPT

SEQ ID NO: 962453 - protein, 291 aa, Homo sapiens
ACGYSMRSSLTLTEIISEDRFLAAGEDQDHTDSTYMACHTGLNDSTYDKVGNDPHTRHWPDFAMTADGPDEVHTMTHSLQQLPDEDTGSTIGPVDRPGVIGARQASVRHLGDNTVNQWTSTHWTSTCCDTPTDIHGSTTTTCTKSAWLTNNDTQTGVPASRGATQVTRGQQGTRLDWSLSYHSKCERAYSSISTVRTEKGLMCSPRATNETSKKCTIREGDMPTHQDGIAREGLLAVASYPKMNIHYPHDTEAHANMTLITLAHTPRARQPIAHHSSAPCLGRGHSTYSPK

SEQ ID NO: 962454 - protein, 185 aa, Homo sapiens
PSPLARFPPSPQDDVRGALRPGKPVDRRDLSTSHDQGEVAQAVNEEEKTTGQCPVFKAAVISGSQVVVGGANMYFTQGARSDDERASYTVRDVPMRTPCMRNEAPGPYLIVPEPIKRKHDELTYFCSVTLDKGPFSQNDVTARQSSVYQSVQLVIPPVSFSLRAVPLACRNGARDSAAAFCIFSS

SEQ ID NO: 962455 - protein, 249 aa, Homo sapiens
MSRFFTTGSDSESDVVLVRGGVSSSKPGRMPTMAEQSICLPEQMDEGMIPESMLFRSANGQRGFEELTNLILDHPYMLMKIRDVDPSAWNQLDAAVGNASGKAEEAVVDRMIGVPRVSILRGPVPDLEDYLNELWERKRNGTPKKMNKNQCSRSLRLLASEYPNCTTRDFESLIVTCRTSQSPEQSVVGCWGCLRGVRRSSLRMTLPPESVLCFLGGEPSAAPLRRVAVPQDGCSAGGQESGMWPLWPR

SEQ ID NO: 962456 - protein, 137 aa, Homo sapiens
MLDFFTIYSKGGLVLWCYQGRERSCTGPVNALIRSVLLQERGGNNSFTHEARTLKYKLDTPVGAGVGWLVFTKILTLTYVDKLIDDVHRLLRDKYRTEYPTAKCFKFIKWHFGFPKGASCGSFVKQRRAVRSVLPLP

SEQ ID NO: 962457 - protein, 300 aa, Homo sapiens
RRVQLGWARECPGGPGMGNRWWLPLEVSGSGILVAWGLRACGLCGRGRGRGALLEARPRIRSGLPVTKLGRLVERTLKIKSHGGDLIVFSIAHEGNREINCISSWGPSLKDGGYWTDYAMCKKADPVPASCTMVQCAYCLLSRDYKCATVGSGVYNVLHTDALATRGQFRVRPIILVPKLFHSYPSCCMRAYWRRKQRSGKCPLTCPFATVDMRLSADSWCLGTPFIPLHPWGATVHSVFRNLLPLSNSLGSTCSRWVIPTEPGYYLQAPGRLALGRPLGRQTFGPLGPSYLHCPFSKGP

SEQ ID NO: 962458 - protein, 175 aa, Homo sapiens
MVDHGEGRGPSPGGPRDPLIQQCPPEAGRAYSRNHGLPAQSAHPGGRLVIVLPAFRAWADILGFGVPLGRRGGLSTRVYLLGLWTDAFDCHVGLVRSCGISPCDSTGSTFGPTGGLAAPTEPQCARARGSDTLCVSPGSFSRRNGGSITPLSSRNRALPGEVLLRHAMGQNMPPR

SEQ ID NO: 962459 - protein, 330 aa, Homo sapiens
AKQILELYMLYNAGDREEEAWMEIINKKIWREISKGLNLPSIITSADFTLRTQYMNVSSMPMSVRRKALSSPARCSRHAIDGNRREGPVAQLGAPPSLATHLLRATAACRMPGPLSLLLPHPRSAFPILGCCGFRVSGYQVPTLALVHTPPRHTTSQERWNGSPLVDNHVACAEIVRGLCPLTLGHSPGRVVYSEMRALVMPVFRELVGGQEVTSLLQKQGIDGCLRRSSGWLRQAFLRNLFQNGSAVRMRSPVDWARHEDLSGGPRLALGLDTEEPCGLHIWGPLAPMQCGRCPHPSAPVDETQSLAFLLKPTVHLHLSGGFAHYRFRG

SEQ ID NO: 962460 - protein, 87 aa, Homo sapiens
MYRTNLFLTNVTLRGGDCSLGEQRLFGTLVCAHDVDNHFYKQLINNIGGEDNQHTGGEHVSSHNSRTTLAVDHNKDTSALIATTSFA

SEQ ID NO: 962461 - protein, 283 aa, Homo sapiens
VLLRGALSLVSSHEAFGHRNQLAAYTGTGACGLRRTPRPRRAMLWLLVGVAGPGAAVFALLDVWYLVRLPCACAARAPAAAGVRDLLAEQRFPGRCVPSDLDLLLHMNKARYLRDGQILRASPPDPLRCARAAEGRLRGAHGAGGPRARRHRQSVACGALRGAHPACLGLGRPGVLPGGAALSACGNGFVCALLALSGRGTSRGHLTTERVVQAPCCQVQCWSPRELAPLDLAATGSPTKEAAASFSDWRVGLSGVPQDPLAGTLTVAWAHLGLWACPSGGSP

SEQ ID NO: 962462 - protein, 159 aa, Homo sapiens
GVTDKDITVPTSDADPGEPADDPQTNAVGSDAVIDEASEKSIASEHENTEYQCVTVLPDSPAEAPQDDRSVVMQALHQQQLGLRRPVEQWSLEASDALRSECVGQPILSRSDDGDDRLSVLAPSVAAAAWCSVIERGTGPDLTVAASWSGSGLPRGAHR

SEQ ID NO: 962463 - protein, 225 aa, Homo sapiens
FPAALDEAEPDSAAQAGPGALAGRDGVGPAPIPAGSPSAHRADSDGTMSVSRAQGRAEVLASICRKTPGAFRYSSVERCDESCTAMFLVAGEGAARTSGRTGILQGLQVGKQFERELPYSNSFLTTGNNGSGGDSEKRPQNFVDPYKVSGNSVLGKKYLKEDKPMWDLARQTKKEMVDSHRTAQQAPRDRKKRTMGFCKRICETRPLAHSNKWKNCHGDRQQEDP

SEQ ID NO: 962464 - protein, 78 aa, Homo sapiens
ISSLVAHTKPVGGLFTATRMKFGAITRIRGPPLGDQSPVLLLLLHEKDPPTISAPQTNQPKEHLTNFKSDLLSLAAED

SEQ ID NO: 962465 - protein, 70 aa, Homo sapiens
CVSNLSGLRTVAYERVKLEKLEGVVFWPTEIPGLARTDQDSKNCTGTGHAQLDIQKIVEFDVCNLECHVN

SEQ ID NO: 962466 - protein, 102 aa, Homo sapiens
MYRPCVSQEEQVPRSCPVVPSAEFPVLLCLLTRTWGWAVTLRILSELRGSSRASGPPLAASSGRWTSSIFHSLVIRAESDGAAASRKVIWSADVIKLLPLCR

SEQ ID NO: 962467 - protein, 80 aa, Homo sapiens
RVNGRLQVVKLTAELIEQAAQYTNAVRDGSWTSGGIKFPSLKSLGAALDQLGMASDFVVTNEIRKLDGSPLLRRLENIVR

SEQ ID NO: 962468 - protein, 287 aa, Homo sapiens
MVLMKHLKRVAAPNYWMLNLSTVVSAPRASTGPRWWRTVSPPHQLYLSAQSLGAALTGYAVGEYFAVLRSRYKIEWPGPDIAVHLPCWVHGMSSGIEQDGGQMSVLLYAVTKGRLSCTVVVTALEGGQTYRVVQDVMKTDSYVRDTNTEIPSILVDCNDALRRESGEARIPLIYGEGVAIHELLLEILEELLLSLKYARLVNLCVVTWGLLPQERIGVDHQAEQRPLDLRRAHVRGCPMATALALEVSDICVYWAAVNPGISLPRGKGVRRALVGGNKHLAGPQHGV

SEQ ID NO: 962469 - protein, 335 aa, Homo sapiens
SSLPACRSSSVYVAPRRESRASGFFASAPRVAISRKLECRRGVHWCAAGRHSAPSVSESLGPGRCCVSSASAVGAVSRGTRAVSRAYWDEGREMGSGELYTDSVNRAYRQADLFKEITASAVRVWFGRGRARRMRSQAAVSDIWAQGGNCEETWQFAYRMFEPPPGSVENRGKNVVKKPAWGRKSVSCLAQIRLVVTEEVSLSPKIGTMVLNEPRTPGIAIRAIVMCQCSFGLCVDVSRERYAWCLINSEDRPRKGMMWLNPGYGITCRTAVSRKRSLGPLGEVGHCTLGLRRGERLTLPVTGPRTKPQTFCSRARKAPPRFSGGMLTEEINTAC

SEQ ID NO: 962470 - protein, 116 aa, Homo sapiens
MSSSPLSKKRRVSGPDPKPGSNVLPKPVRVVLKCPRLPTNENGQELAVKQTYDEGLYSRQLYVLGHEAMKRLQTSSVLVSGLRGPGRGDPLTNIILGWGSRACYPYMTMGNLPSGA

SEQ ID NO: 962471 - protein, 273 aa, Homo sapiens
MLPAVADWLPPARSGVLIQVILVADVLRKKHRVDETRPVRLSMNCVMYRMCLVLNQRYRHKEHSAIMHASCICKQLEREDTRLDGDCLALPVLQRPVRRRMASWGRGFVNRAIGLTAASSCRACIIAMDRSVRGPGGPNRAGEMSLVTCVAWHLGDGDLSYVGETPTLGGLQSPEMRGVPGVGSGEAGGVRSLDLAGGCPGEVAFPGEAGRITQKRARASTDERRSEGDSGDRMHDVAQRPRVVGGSRVTFKERAFTGPRPGRGQKLANKRTL

SEQ ID NO: 962472 - protein, 120 aa, Homo sapiens
TIACEHAVAGTITKRISCAYLPTVLGIAFDRCAPRWHVGEIGCESVLPVCNCARSLDRLIVFITRALHLIDMSRPNILSFQRGQVALHVVLYLEHELIRYTSLSVLNCYELEGSFLWYGQ

SEQ ID NO: 962473 - protein, 122 aa, Homo sapiens
MCWRNTRCLRGCNERGQCLTRLKRLGVGSTLSDSCPSCVHDTGRSRSRLPGSVSRPFLELAYFWFFATGMVQNGGAVVGRPHWWGVPALTFWVLHPGLHVLQGCGYPGRLLIVFGAPPGRAL

SEQ ID NO: 962474 - protein, 114 aa, Homo sapiens
MVRLGGTYEMSPEELLASDGQTCIGKTRAGKRINNLEVLTSRIPKAYFHLLNQIATKEDNPGRRTTDRSLTCQVSNETDDSKRAESMLQQADKLRLQTVVTPADVVSGKPKLKR

SEQ ID NO: 962475 - protein, 142 aa, Homo sapiens
DCTARPARPARNGARLPPVAAAPRLGPRAGMAVPGAEPSGCDRDSRREQTEGKTRKAGAGSVAKEFRVLSGILQRMEQGGGDKPGELLLAPIWQGVVGSPTGFLTQFRPQGGGPDRGPSFLLPTRGFDLARKDFALLWERVP

SEQ ID NO: 962476 - protein, 135 aa, Homo sapiens
MEYKRTDAPQPDVKEEEQRDRKRNKDTGSMRRRTEQETLEEQTEEVMLNEDGGTVYSRCEEGHENLKREVEMQILNQISNESRQARNESETILRAGSVISSPSSPAMSGPSAEDLERLRSDIQKNFKTITSAGSS

SEQ ID NO: 962477 - protein, 114 aa, Homo sapiens
FDLSQLHRGLDARAEVTRNDVAPSLMSVPRYLPRPASPDEDGNLSDENLKAVDTDPTAPPYDSLLVLDYEEKRFRSCGSLSSLNSSESDKDQDDDYLNEWGNRFKKLADMYGGG

SEQ ID NO: 962478 - protein, 444 aa, Homo sapiens
DESERGMKVIENRALLTMRNTMELQEHSNSKKLSTLQKRHDRKYEEVARKLADHLRGELGSAAAAYTSLRLASRSRSAEQTGLTQTYDLTGPRNLHSCSELLPARKRYIINHTARLTVCTEEKSKHFFNLTKQPPKRKRQQPPRMPCRLPAEQGRTQAEARKDRRHHDNPPTHLTLHRHGITHLHTLTNWPANTRKRSHTINAKQHTRNWLEHPRSPNAYSTPWRTCHASLPQDRPPPRLPQPPLALPWPPLPPSWHPVGNSRPFGRAPLPLAGAPTLCNPVSVRAWDTRARHCFIDEPWGYGDLACYSLPLSSRSQPARTYAFPAWVLRICNTAPTHSLGTSYGPVLFTPGTQPSHAPRRASYPQAALGSASPFLAPRRGAFSHRRPPCRSAHPCALYTAAPLLVTSVPSLSAPLAIPPRSVARALYPALSFAPDDPRYRGTP

SEQ ID NO: 962479 - protein, 243 aa, Homo sapiens
MTSLKVDKLTYRNLARHAEARLREVRAASATCTSRGPVTKESRGFAFVRFHESATLKGPLWMPLDGGQVLGTEQQSLRGAKWGAANGRPPWSSKPLAAGGTAHARRYGGRLIRDGQRAEAPRQRKPEGPNPRSRSQFTRSRQTVSRCAGPSRKVLGPRDLVLESSGRNLQGPDSDGGSTSRSSSGLQNSSSAVTGPGLGPGSPPPCVQRDPVHVGLRVPRSSEEDEGALQNVFGHVVGAWKGL

SEQ ID NO: 962480 - protein, 68 aa, Homo sapiens
LPDLMCHCLAGMAMQLAVLGDGMLGDLMELYRVMDDQPQTSNENFGELATCDFGASQKACLWKGKAAN

SEQ ID NO: 962481 - protein, 140 aa, Homo sapiens
MYVKGASMNGVIDRCTHIRVGSTKVPMTSGVKQKIMSVIREWGSGSDTLRCLALATHDNATEKRTKCTLRTLPNYYFDSETNLTFVGCVSIAGSSRTRGWLLRDAVPARRHSGHPDSLGNTQGTLVTISEPKSTIIAATQ

SEQ ID NO: 962482 - protein, 71 aa, Homo sapiens
GCYRPHRLSMQGNQSAWFTVVASNILPVHITSLDRGQIASGSQVSMCMWSVPLAVHDFQLRVWNTRCDSGT

SEQ ID NO: 962483 - protein, 75 aa, Homo sapiens
MRNPVGGLVGTNCPDPMAVGEGGQACLGRGTFGPFCRLEGRCLAGPGKQSGDHRGPDHPGVGMEGFREGPLVPRC

SEQ ID NO: 962484 - protein, 219 aa, Homo sapiens
MMLKRRLKADEDSSEREEAKQKELSEKQISQALLVTPSHYQLIMVCGPEEESVDPRSILQRVRSQAIHQLKVNGEDPYPHKFHVDISLTDFIQKYSHLQPGDHLTDITLKVAGRIHAKRASGGKLIFYDLRGEGVKLQVMAKFPEDYKSQIEDIYSVLNRQTAVGETEFGVQGESCVKAQKGELEHQFRDADHTCCLPCLHYVTVIFTSETQRHRKQGI

SEQ ID NO: 962485 - protein, 84 aa, Homo sapiens
KLIENPYVEDVYGYQKNSNIQAKGVRSSGQKITHVVSSTMMAGLLRSLLTDRLMPGAWVRKKEKLQFHSDTIVCYKVPASKVTL

SEQ ID NO: 962486 - protein, 168 aa, Homo sapiens
MVLSLEKFTKRSGRREQETVVGILNANPMKPKDGSEEVCLLYDHPQKVLIMGEALDLGTCKAKKKNGEPCTQTVNYAVTVSTVSTMSRLRYNDSSVQCCAGSAVQAISGSNEFHKTVGPQKAARHQRTGCAKHGFTLRDGRIHYMHYGIAEYKLASRHDVFLNQRYGI

SEQ ID NO: 962487 - protein, 102 aa, Homo sapiens
MKNLQNLRHTVALEPAQRLRAERTGPGKPMSEELLGMLDSPMLGVRDEVTAVFKENLNSDRGPMLVNTLVDYYLEIQLTAGYCTILTHLAMSHMTKQPLGTG

SEQ ID NO: 962488 - protein, 148 aa, Homo sapiens
RCRVLALAAAAVRCLRLLRCPRRAPLHQPLGGASAGRPGRGGTCVAGRRTGYLNYGQIGTPAKITTILITAKPLKDQPLSSRGPQRPFLRMDPQVEMAPSNKEVKRRVQADQVLKGPEGPITINDPIVVQHVRTCNCGDKNSRCRFWN

SEQ ID NO: 962489 - protein, 279 aa, Homo sapiens
GRGGLSCRPEEDQCRRTPAERHAMRVRSGRPSIGGAMNLLTVLTPHGQRASSTAGLQPVTTGCYGDVALDNCDPESITRDSTKTKHRETTNFLRQERVGQCVNTVTFGCQRILRFSYAWVAQKSRKYPSQHKYIDLEIDREDRQTCNLPIDKANRSSAEVNAAAEIRNSARYMGRPLIQGVHISRGQSRISWHSVRNLAITRKGLSVLGPNSNNYPTGLFRDTHTGHVQLVDLAKNGEATGEHSCTTRVYRSWHGTQPGREQDCNWIRHTGPYKNMETQ

SEQ ID NO: 962490 - protein, 109 aa, Homo sapiens
MTRGPIKTKQFAPIHAEAPEFMEMRVAQETSGDCITVGTILIAPLCQGLATLGACGGAGSLAKTGLAHGVHSPLVAKPMAADLCLPGCATDRARPPFSLMAKRGSHLTM

SEQ ID NO: 962491 - protein, 127 aa, Homo sapiens
CDVLPTSRPESEMSDDLGERLYGENQCDWSRSVSRRRHQMVKGEGDTKVMQHGDKFHVPVPSVGTTTERPKTKCLVGYNQEERQENTTRDLKDTMNDNEDILLMFLHNIRTKTRLPEDLQKLDEGLL

SEQ ID NO: 962492 - protein, 147 aa, Homo sapiens
MAPGVVLGTNRFLRGGFPGTAGAHLAACRSDGFDGKNVPPAGAAGPGMEGIRGGSPLVRAERSVVLGRGQRGPKERGFHGGTTPEKRHKKMLGIRGYSFHKRGSGDFKSGIELDLWGQGELTLLESTNRWKGAHVTCAIIRCGTIGS

SEQ ID NO: 962493 - protein, 317 aa, Homo sapiens
SFQVSGSPARGRRGGAGAGHGIGGLECAAGSRPPMEPGSVQNLSIVYRSRDSWWSNGGSWERSHLTSEGVAGRLLDLVREGTLRVPGFPRGWPTLDTVLYRVQGSCQPGVDFSTQVGRLCGGPYNEGARRLGRGVRGGFSGAGAVTQRLYPWRFAAGGPPSQGKKPWSKPIKPLPIVKGTTQLGGGPGPHRPIVASEGLRQGLLVNPKKAKASTKNLGWVPWHPRAWYRKAILSSIGRWLKPVHGGGDTPCCAVHLECPGPPGGVGDLPKGKHSGWEAGRRMSDGSNGVPGAGCWGRPGPLALVCGPHLYCPLTLAQ

SEQ ID NO: 962494 - protein, 130 aa, Homo sapiens
MARWCPMKHLKLGGSSLKHWMLDKLSGVLAPSSIHAVADKLREFSRLIIFLRNRLKYALTGDEVQKIGMQRCIKIDGKVRTRYKRTLLDFMDVISFDEAREQNFRLIYDTKGRYAVHRITPEEAKYKCAK

SEQ ID NO: 962495 - protein, 54 aa, Homo sapiens
MDIAHAQERLLGLRGCHAVRDPFWPQGIHEHALEDGASGSSGTNVFDPCGAFGE

SEQ ID NO: 962496 - protein, 47 aa, Homo sapiens
GPGGTAVRKRNRSVGRGSVAWEVSPLLGSGMDTKKRRGSTPSSEFRA

SEQ ID NO: 962497 - protein, 90 aa, Homo sapiens
IGDVLRHTYEGNEGRELRDLKEVLPLTGCVEKCYSGYTRRRCDGRQSAPIYAPGYMFSGRRIDMCNSLRLSELTPDFEEDGAMLETGIPR

SEQ ID NO: 962498 - protein, 72 aa, Homo sapiens
PTCEARSCTRCQELIFEEFARFILVENTCEEVVLQTVMIGHPCRTVEGEAADAERSTYHLPVTALGHCPDIA

SEQ ID NO: 962499 - protein, 150 aa, Homo sapiens
MRALLCPLAQTSALLYSAPSAGLPTPRTERYSLSGPPHYGTYSGPYNLKNRGPSTHPFEDIYTIQIFPPYTDYNPFLCPKITRRTLFPLQPLTRLGVGDTVLTWCGAYSHDKPALLLYGESIPNTFVWGHTSIYNTRVYYRRIPAIHNSR

SEQ ID NO: 962500 - protein, 184 aa, Homo sapiens
  misc_feature (27)..(27): Xaa can be any naturally occurring amino acid
  misc_feature (36)..(36): Xaa can be any naturally occurring amino acid
  misc_feature (78)..(78): Xaa can be any naturally occurring amino acid
  misc_feature (113)..(113): Xaa can be any naturally occurring amino acid
  misc_feature (118)..(118): Xaa can be any naturally occurring amino acid
  misc_feature (127)..(127): Xaa can be any naturally occurring amino acid
  misc_feature (141)..(141): Xaa can be any naturally occurring amino acid
  misc_feature (177)..(177): Xaa can be any naturally occurring amino acid
WRDKTSYRWQLLHRPQVGYIRGEALMXGPHAWWRIXGVIIDTIHAEGGVCGVFVLSPNENSNLVQVSKYRMQMTTVPXGQFEPIPDGRLLPGKGRDGGGHHDSELQTFVDLFXALGSXSWRRLRSKXYSPLRPNQQTRSSXAPKEEVPSPRGVGRPRALQGHETVFNGVLRQALTPXKDDSTLP

SEQ ID NO: 962501 - protein, 106 aa, Homo sapiens
MQVLYIKDLLTCTIQEMKEQLKHDQDVKGKGYSPEWDKFIVQTSGDNLGFVDSRNTLQIFLERLKNEIDQVNYSKGIDYWIAWVTFEDRFRGLFWETGVPNPCFIS

SEQ ID NO: 962502 - protein, 283 aa, Homo sapiens
MRTSADAGGDTLLAYRAPSGTSPWQVPIARGASSGQKKYQIHLKRVSGPMRFCGEQGGMELSLCGVPVPTEDLLQSPSAVSTPPPLPEACPSPVPGSLTSKYVLSSLPLVSLAVRKSRNGWPAGGDHREWGPGTDSKARVSSVHVPRGPKERLDTRHCSLLPVDKKQQQQREQRGEAPVKAAVRSGTNLTSSFEAIRETPQVFVELPMELSEIFDPPREWLSSEPAGALVSQKCLPSVGFPPGDLGIFNWGNDGFGPIVGLSSREGGGAVWWAKVSGVGLSHY

SEQ ID NO: 962503 - protein, 150 aa, Homo sapiens
MPRRYSDLPRCIQHMKHPIICRLIHFSNSSNINNFMMEKPSLRGEKVLIVEEPSETGVTIWCASYTIRERIHNIQTERTDRPAKVVKQPMAHDFQNTKRGGKDRAARKASLRAKGGNKGDAAERKTGARDGHRAEIGARVKYDAMLALLQ

SEQ ID NO: 962504 - protein, 352 aa, Homo sapiens
SVISEIREEYPDRMMNTFNVDACQLQSCLSTVVEARDKCQPLSVHQLEENTDESLLQLYRRRALVMILWRITHLMRAGPQPNAIGDSEAMLVVSQLSGVTILRSVIPGQLNADLRRVGSQHGPLPTSPFLYAVALPLSPAVEASSIELSLVPELSQEVFDAKNMMAACEPRHVRYLTVAAVFRGRMSMKEVDEQMLNVQNKSSSYFVEWIPKQCQGQRPVTIPARGLIDGSHLSLGIGQGIQEGLQGDVWKQVIGHVPGQEALSFTCVPKGEEAWDEKGVNQRGVTRHVKDPVLQIYREPEEGAPRKTEERHIRGGHTKRLRETPTNRKEAERHNSGTETGRLIPHKEVGRR

SEQ ID NO: 962505 - protein, 102 aa, Homo sapiens
METGEAKAGLQERGREGLGERKSVRLGRRLMPVDPKDPGKPKGQEESFWSPGSVEPAVPGVTIDENFVVYYMRERSTGYKHGLGREWLRGGAIAQTGHPVTE

SEQ ID NO: 962506 - protein, 323 aa, Homo sapiens
DADSTSWDGALAMMTKLKEIVATETYDIERVVERSCKPVDGLISTTRNSDEALSVSAEELPLREYHRRRGSTSMSCYISTSPEGFRGVVLAGEGRGVVWHAHEWSHGRGMHEHKFARRLQALGEVDDNHRVKMNGFTGIRRKHEAPGMHVREMVGQDKMAAGPCVLEERKIELNVEQGLAGEPYSTNVDPFSSTCPEGVTLVVGIEFKVAVGLQMRTQLSVAGPYSRGDAPLIRWLGACGAPEYRLADGARLMTFVELESDHVVVFRELGQREERIAFGRRSPFLEPDKGVPFAGAGATGQEACFSGKPDGRGPGLNGGDRFS

SEQ ID NO: 962507 - protein, 120 aa, Homo sapiens
  misc_feature (49)..(49): Xaa can be any naturally occurring amino acid
MSVQGLYLSYICMRQGLCSCPPGWECSGVIIAHCRPLYSVGSRQSSWPXAFRSQLGTYGARQPCLVTFHLVRRDGVSWVAKGGSQMCGSSNSTVCGFPSAEIADVSPRAWADCLEHPALP

SEQ ID NO: 962508 - protein, 303 aa, Homo sapiens
PGTGLGGLGGRHGVRYTHSQRQDALVLAVLAERASCRSTLRHSVFISKRPGVWVLSMPSLGSVLVVVHLLFALVLAPNSPSQIGAPCSSLGVGDPGKEGFERSRRPGELGSASPWSSSTQWLLGRREDTVSPVDWGVVCPSSSCSVTLRMNTCVANLMQAVARRSLGPGAGWVSEPCAACGCLRLLVNAGVGKGNIGAGYSERVACGGRLVGRSALEAVAEDLDHTGVGAQLVNFDPQALVANLTKVEPSVVWAWVQGLFGPRTRGLVYGLRNIPYPPGVTHILGVVDPGSGLTEKLPPLVNP

SEQ ID NO: 962509 - protein, 103 aa, Homo sapiens
GFLRYGSQAYIPKQSCSKGPCSGYRSRRQLLLCGCFQHGKVEIVAMIRETEATPSYVAFRGALHGLIGDAAKNQVAMKPTNTVFECQTSDWTQHLMMLCPVVI

SEQ ID NO: 962510 - protein, 303 aa, Homo sapiens
MWPVLDHLLDCPADPDYLATTCLDSQNCSGLTNVLFLDLVLPDNSPVLAEDRCTAVPLRATCEKWSFGRLATSMDELFVDCEVMTSLFAGYQKQLSILLRHLPRGPQAERELQKIRIKLMCEVTEISVESKHQSLQGLDLPAEGLRPGDFSSYKQKHGQIPPDDVDQERENTLKVVCNTEAHGLLAQVVLPGLPELGGGNPGLPLESQPQKGTPLRLRKVHITLPGAKWPNRIATTNQRQKSTNTQVGSVPIGESTSILVLTNQSNRGGTTAHICQSTLRLTNPVASRDESAHTDFSPFSSVV

SEQ ID NO: 962511 - protein, 343 aa, Homo sapiens
  misc_feature (284)..(284): Xaa can be any naturally occurring amino acid
MDAACVCEVHPGTLPRAWACDPAAAGWTSVSCMSLLLPVMDAALYPCASYFHVAVHAWMIKPAHAVNDAVAYLECLDGNVECSMLLVSDGTSSPCAMNYLDRYLSAVPTRKAQLQLLGAVCMLLASKLRETTPLTIEKLCIYTTTLSLPASCGTVEVLVLGKLKWDLAAVIAHDFLAFILHRLLSARDDRPWSKRMPDLFGLCATDYTFGMYPAFMIRTCCIGAECLAWVLVLVGMSSRSCWHGSSAWIGSLGGLRKQNESCPQGKPQGIRSKKIKSVVHSPGXSSQLGSMKETLKVIANQCRASPLVTQQGGRRPIIEQHYRWRTHKRHNRPAAIDASLQVG

SEQ ID NO: 962512 - protein, 636 aa, Homo sapiens
RGELFWCPDVVHGRWLSSTILDRQKLLLSVSRDSCEASIEASDILDGGVVNGGWSLNEVQMPEEGMPELNCECRGVACVHSSSLVPWMTCTTGHCVLALDTSQNGSCVEETERAVMARVTPSPSVQGFELGGHLGSSWRRGAGICPFGYCDCGQGVEVRPPADPWGMIIRPIPSGLRRRSNAWPVGHCTSHLRSGHSCCSLPPSCRRTCPIFVGCGAWTPGCGAVSKLTRFRAGSWKESGDLGVDDINVILTGTRHLTPRRLCTHGTTSTRCVVAYPSVRKYALPTVSITFVWRFCRGQENPLSLEGTPLCPEGGATTKRTEASPRMGQKTPVETLVKRLTLQTGREGQHYLTHTSLPRACQTSIHSSEKCARLQHAGVHRPRHDTLRGRLPKNHSEHDKGNKLHSQNRGQTENMSSSRALHNDTSLVDHCSSSPHDHYRSHAPEKHITRSAVPPKGGERQVLAPDHDAPNTCWCPATQERRTTKQKPGPRTIHTEHQQTRWETPYRGHGPTTNPSGRGRRQTHPPRRGAPTTNTTTRRGLDEQPDEERRRHPPPDAVEMRASYPRCDATATRTTDTPTHSRALSRDDQLDPYRSQQNTTKTPITETSDTHPPAHDRRRSRPTQHIQSTRAATEHS

SEQ ID NO: 962513 - protein, 88 aa, Homo sapiens
TASIAGGQALYEDIANRIRAEADEPCTISGMMEPADPGCDARAMTCGRTKDLRISEMNPEYIKPGRPGVIMEGLQKCLTGVLPCEGGL

SEQ ID NO: 962514 - protein, 228 aa, Homo sapiens
MACWEHRRECNGLTVYMCSVYALSSQRLAPGSGSNGTIRRLNCPLVTDESYVVFVHVPLIKVNSLKTRLHVSSRGERSSLEATDAFVTDFSAHVPREQEPVARAKRHQGSRDIVFAYRGGLTSVPASRHGVLQWLQWTCGPPGNRVRAHQSVAQGSSNRSPVLQKRYWAGNKDSGKAHTAGPFANGDKGRLLARVPGTAFNPLQLRWHWGIVLRTLCLKKLLMMAWYR

SEQ ID NO: 962515 - protein, 305 aa, Homo sapiens
MRKDTNKSDCRDGGYKCELISTSLSYLNTSLSPMHQMRRAPTAKPKEKNTHQQQGTKTRDTTRTTTTKTRQLARRGVDEGANKPRRKNERRTKGKTERRRTNEQPQRERGNQERQDREQQLRTIVRRESNKKAHKSDGYNQQREGDERRTQEMQKDRGTRRDQLRYEKHNLTQEDKRRIIDTAKHQEKKRNDKKKRDTPQTDQREDPNTAKKDKERKKRAEVEAQEKKRDSTRPTRKKKEAEQERKPTKQEERKNPQKNHNAETRKKKKEKNTTKGKTAKRHKQHNDQRTPQNNKTDNNDKTTTA

SEQ ID NO: 962516 - protein, 330 aa, Homo sapiens
MASCSGQLHAVTSPWRANAATRTGGGPVDIAAAQGGCRGAQACGAARSHEGTWRPKGSGCWESGPTVWTMGGLLVMPFNLLKAPWGLGLLAQTRYSNPMVDSKVQLECKGPKNIGANGGDRVPGGEVTLFREREGLRGRARDVTPKRKARAARSRAEGHLGAFTRKPQVGTKGAEAISQDAGKRGSPGGIRESPNKARYTGACGEARKRSEESYPKLGEEWRPALAPKPNSSRPQEEGHQREQANGSPREWATSFELKRHEEHIGTLGDPGGMIGHGPESAPRRADRAHEVSSELFPREYTRTRYNEVHCGLCGGPMCGVDRTEREEEYV

SEQ ID NO: 962517 - protein, 137 aa, Homo sapiens
SSVEIQAALSKMQDDNQVMGAEGIYYLPTSEEASISELGLCRESSSVFPTLSPDPSLMPLLPEQCKNINWKARNVGDEADYRTRRILGNGLMNSCRWGEEERRHVGEDNDYCIFHGKGYWASSDRIYPPSPKQRTQW

SEQ ID NO: 962518 - protein, 69 aa, Homo sapiens
  misc_feature (50)..(50): Xaa can be any naturally occurring amino acid
TRIGMPVCDDPPYQETSKARDVQISQGQDSPKIRTPIDGRAYAHMCSFAXRMLAISYEVSQCSTVTIVC

SEQ ID NO: 962519 - protein, 31 aa, Homo sapiens
MHKDAKKGFIRLDMSEFQERHEVAKFIGSPP

SEQ ID NO: 962520 - protein, 286 aa, Homo sapiens
GVPSRATSPTVNSFSTHVHRGSSGTAFSVPIRSLDGLEAAGRHGSARGSAAGHHQEGEAATGGVAPVGHLQQALDGLQVALWPLAVCRRVSPRGALGGAQGVWVAETKGAPTRVGTFCVGRACYLPPCDRGLLGPPLGCGLGALGRNGIGGYEGYLPMGANGPSMGAIGSCPYGPRWNLKGPQRLVVSECCYRALVGQLSTGRTFQSGTEGNGRTLGWATEAMGRSYAKCESRTTHCGAAEAEKPWRQQSHNEWLPLSPKENDPTGWGHQIECAGEAHPPRSEEHP

SEQ ID NO: 962521 - protein, 230 aa, Homo sapiens
MGGLLYVQGGNSIGERDLIFHKGLHNYETTSSDWESSRKRCLNVAEAAESLSIQRRSALNVRLFLRDFCSEFLENCYDRLMGSVTRITCFVEKAQSVMRPIICGALVSLMASTSCSFRAGLFLRTSGVRTFHFIEQKAQHLLWDDCWLTAMELLPWDADALGSEGYSGAAGPGAMSLAIIQMRWREAAVNPEQYFSSVGSGTHPAFGLLDSPPLFLAGGPPLSEWAPLAG

SEQ ID NO: 962522 - protein, 255 aa, Homo sapiens
  misc_feature (227)..(227): Xaa can be any naturally occurring amino acid
MARELRALLLWVPPPAAFAAGAGRWGRAGEENQFCVLGVTTAQLGPQGNQPGACRRTMFSRQTGEDKGVNPCTRLSSSTESVQGPTSKHEFQAETKKLCGHCCPVPCTQKKRCYTGADSPMPAMPWKKLRSQTCCLTGHATAMKLPDSFADQLPTKGPITHPGYVGIGIDPGSSLVSNRGTDCQDPGSKGFRGCSCRNRLNGHARRIIGQFALVATSASLVVATWKXNPRSETPREPASRWLPNVLTVKTRALWS

SEQ ID NO: 962523 - protein, 168 aa, Homo sapiens
MSNCDMADKIEDDYKTYPPRSGNVQRRESETNKKLEHPKRSTTHASQYNQQNFAKTPLVATHYSTTATRQKPTATQSTPTTQPRQLSSTQPPKMQQLPAENYTKREQPKKPDQLPQPKTLPRHQITHTRTLKKASTQLRDKDKTKFTGNTITTEQAHTHKIQPSEAPP

SEQ ID NO: 962524 - protein, 242 aa, Homo sapiens
  misc_feature (241)..(241): Xaa can be any naturally occurring amino acid
LRKGRWRTCETGELHGSRVRRLRMFLRCPVHRSTLPRAGSPLGYAKGGSDAASMRPDGGLMCVVPREAQIWVPRGVLMRMDISPGITCVKQSGPELPLTPYTLVLLGPRAERRPEQRTVMMLSDAQSGLGQSPDPSEWHVDAQNEEDGQMKEDDRRAEDPQLARWPLVAHIDGWLQPEVRGVMAGVQDALWLARVGQRKGPGGRWCALEAGLLQRGWMEPPRAWGGLASGIDAWPQIGAPXC

SEQ ID NO: 962525 - protein, 309 aa, Homo sapiens
MVSGFGKSPVSEVVGSAPGGDGAEFTSRRGSSRRPGADVLGAALRGSERAPGVDGPCAGCQYAVPVLRPRVVRAFRSTPAFGLLIAAGRRRLPPKTGIKENGVHFLQLELISGRWMCLLWLLSLHTGDSGATIDTWQVFVDILCLHGQVTAQHVVSSVRFPGTFKQAVVKPVGMRRCRCSKDAGGSTKGREAGPSRKKKHVGGRKPQYEGARTQAEKTSACGADRPFASDPLPTQLCASSTDNYPACQWGDQIVNVRGLRGPLEKVLAFQPRRRRESTCLARALVRGGLWPCWASTVHVRAQVPFGYRG

SEQ ID NO: 962526 - protein, 242 aa, Homo sapiens
VIYQASQALNCCVDDEHGTGSLEEAEAERVLLTGNWEENTLIDELHKLKNEGPQRKNKASSPEVNLCHPKDQLLVRNPLASKSRLSSAVRFRKPDAADYYVLKSYKKQELKDMVATRISKYFKTLLTADCSDTSLLHLLCKDVSNDFRNSYRSLTAVAASRKIPQALLTTDPISHVTRLITSNVLTPSHSIVPHSAPASLLPAHGSAPARSQLSAATASQPPAPCVGPPCTLFLALPAGTTI

SEQ ID NO: 962527 - protein, 255 aa, Homo sapiens
MAKVKVGVNGCGRMGAWSLRAAFKLLVEWILLPSMTPYIDRSNYEWFTCSNMIPPMANSDGDLSRAENGKLVIGMEIPSPIFHGAEIPPKVNVVADAGAEYVVESTGVFRQQLEKGWGLICRGEPKGSSSLHPSADAPMFVHGCEPLRKYDNSLKIISNASWSTTVRTPGKVIHDNFGIVEGLMTTVHAITCHPEDCGWALRETCGRDWAGGVSQNIISASMGLPGWGTSSFDWTGAHWIGFRSPLPRVFWPGLA

SEQ ID NO: 962528 - protein, 125 aa, Homo sapiens
MGGAGPGPGVRARGRAPGFPAQFDRGSLEDGPALAHIMPNYGRKGPLARPKEVGPPCGRGAPTDIHRVGGKRRTGSRVGERTHKPREGATPQESGQAGGETTTKIGQDPGRLLLRGEGTASKSHH

SEQ ID NO: 962529 - protein, 229 aa, Homo sapiens
MDDDIAALVVDNGSGMCKAGFAGEMPPGRLPPPSWRLPQATRAVMRGHVVRRIPYVGDEAQSKERLSSPWKYPIEHGIVTNWDDMAKIWHHTFYNELRVAPEEHPVLLTEAPLNTKATGENDEPDHVETLQHPSHVRCYPGCAIPCNASGRTTGLVMDSGDRVHPRMCPSTRGNAHPQCQSLESGPGLAGTLDLTTSWKILHRSRGYKLSAATGDGEIVRDIHGNAVYV

SEQ ID NO: 962530 - protein, 99 aa, Homo sapiens
MVGTGALEQEGCCTAHGSMINLQCIAAEWSGGRCRGRFGLPLEGFGLRVGEPWFPELEDSPLVLAQRLPGPLAWVGTASAGPRGTLGPAPVPAFGGNIF

SEQ ID NO: 962531 - protein, 257 aa, Homo sapiens
GFSFHLEQPAESRSMEDFARGAVSHRPLPAWAWFPSASSGLRMRIRRSELETRTQNGAMKSQFREPGAGEAVPRPPHGPPCQSTWPVQFEPRTPAFAVVHADSAGLSVGPKEAKKAFLDFYARASWRETRGSPGAGSLPDVARLKLDRDWADLTRPTDVQRRLRAGGGCNKPAWWPWAGRLEDFRSKRLMGMTPWEPVSWAQLGGLGVGRDRAATRAGSGTWGERCHAPGCDADYHLLPRGQSAGGVSLWSVIAPLG

SEQ ID NO: 962532 - protein, 77 aa, Homo sapiens
SWNSALWQVLRALKGRKSSPEGIHHVRCNGRSCSFLSLGAFPVLLRAENGIFVITDSELGSPRPARECDSLRTVCDS

SEQ ID NO: 962533 - protein, 172 aa, Homo sapiens
MRLGRHPLLTSSAAGLKIRHGPELEVTCACDWLPCRVPRGLWCTGPDSCMLVVPGCLWLYCRVLLNSCCSPVGSAGHMSQSYFNLDLVGDACMDNYPVPEWPSTSVIPCVPVPPLSMTFVARPRKISIPLQCSRRHYQMCGIIIPCRGVCHRRQCSWSFRSNVPAPSVLDYE

SEQ ID NO: 962534 - protein, 55 aa, Homo sapiens
MTRNDSGAPALKALLCWTNQKWPKTGSEKLHHPGLRLLAWRHNGSGSGGPVWVGS

SEQ ID NO: 962535 - protein, 174 aa, Homo sapiens
RCWLAGSPEWLMLPPGRRRPVTAGRLRVASAEHLVHKLLPVAIQCDLLSNPYHVVILFQPVTLPCTYQINIEPPRNPSVILEVQVFLARDRNRQMPSPLDSVRQPAQCPDGSGNPGYNPISRVPGQSAHRQGRGHQSMGNAVTLGYYYQGRRITITGNADLTFEQTSWGDSGCV

SEQ ID NO: 962536 - protein, 287 aa, Homo sapiens
WNPLHATADFRAADCYRATKKMTTCFHLPTCVGNKLQILEDYKDRLLCYEEATNTELQQLELLTLRWHNSLLHNTQLTVDKVLLFDFNCSRNSTRDTDGKTAQRNRHGNNQKRKHVLANENHDETMLHIYNSTAQTPLSFIPWTDYSYNYYTFIKTLAQLAQASNLHLEHLRSNNLLANTSDRFIIHPTSTRTAQLATNCHMKQVPNLFNTSQTKRTILINGPLQPTRKRSKAAFHIPFNFSNYTLATFNHISNSMRIPVKHSLRRWLNALGCFNLRGSSAPKPLEH

SEQ ID NO: 962537 - protein, 258 aa, Homo sapiens
MKHRGDKPDRRTRTDDHRHTGDTRSRPGLHKRKRAKHRNDTTHKKRHNNTRLGHLGTTQEQTTESKNTNKKYTHKTRDKDHKEQHQSIETTVGRTPKTHPGINATENNDKMTRKETNTKKTHDEQQPKEGNHQTKKDQKNNRQHKTKKQNKNHQHTRHPRTTRKHTRRHDERDSTSNTRHQTPTRPRRATPTTRQTTQPQKTKQQRRERQNRTAQHKTGKPKTKRTKPKPRSNRSQQTQEPNANRKHTHKTSDTKDST

SEQ ID NO: 962538 - protein, 75 aa, Homo sapiens
TAMCILTLMRDLREIGTICPNDLVFEPEYQSVNPGIKVHSVRYQCGMSKTKLRIVRSRRDCFGDLMIHWMVSCYV

SEQ ID NO: 962539 - protein, 154 aa, Homo sapiens
GTSPTRRRRMLASSLLPLALCLWMHPAPSSSGIPLHKFTSIRRTMSEVGGSDGVDLMAKGPVSKYSQAVPSRELRGPFPRCSMNYMEAQYYGEIGIGDCPPMCFTGSSFDNWAPSNLWVPSIQLRNLLDIACFDPPRKYKHATKSSTYVKNGTS

SEQ ID NO: 962540 - protein, 255 aa, Homo sapiens
GEGSSLGSMQLWMPRPTPWWGPGASSTKGSLARIHETNLKTDRACCSEPLFGVETVCVEDINQNADACPYTPCGTHALSHSMGPSQGLSSPCDYRPPVHVAFPISKMCPKPPKYWGTPEVHDPSPVSPFEKVPKRKPVFQKPWNGKPPKTSFRDTGSGFSPVDQKAILMEPKVCGPPRFSRPHGQHSHKTAWANNPFFGGPKYTRNSATVRPKPQSAGPPNRGRFGPHHHSIFPPQPSRWRSYSPPHTQVEHPPQ

SEQ ID NO: 962541 - protein, 117 aa, Homo sapiens
  misc_feature (55)..(55): Xaa can be any naturally occurring amino acid
MPKVKSGAMARRGGGAAPGAEERWRTHVQHGDCADILKNPLIITALSDKAALRPXDVGAGSLDRGNVDNIDCVKVGRKGQKGVSLVKLDPRASKLNFTKEFRHACGQQTSSTGGWMC

SEQ ID NO: 962542 - protein, 265 aa, Homo sapiens
  misc_feature (158)..(158): Xaa can be any naturally occurring amino acid
MHSGHDRVRHFSKSMAIYLIYKAVTSRIFTPGLYQKVERPAWQHHHSHPAPRNTPRASATARADKAPVQLDISTPQPHWQAAPMSAVRSDSPLCHTYQRTFGRAHTTLCGTKHHNGVATQLGVGPLPHKTPHTITITPPHNSRRPGPPLGRPSTSAGXQRDLYTTGPPAHKKHIGRSLTAPLFIGGLQERCGGARHGTDRHSMSEGAGPARPREARARTGDAPPKQEPAHAPARRESVRHDRQGGRFAVGGHNTDRGDINNAPRT

SEQ ID NO: 962543 - protein, 94 aa, Homo sapiens
MGHQGKNWVRNTRERMEQPTLVAKQTSPERPTSKNPTKTAGRKPREQEEHQTRQQEEKTEPMEQTDETDRETIRMRVKNIHIVARRVVPLCEKK

SEQ ID NO: 962544 - protein, 347 aa, Homo sapiens
SGTADGLAAVQHAEVWQLCSEVGSWLRCLCSSCETLNRWLNHCAQRMADRRGLCAAGKAGCSKREDMTKVGIRDQAEEVDVTPTVRHHGACWDVTMLLGQSTLYVLFEKSQYMANPMTSVTQVKGKDIKGERCHRQHDLKSRCIHVNKTSATITSTSSKIRFPCCIVGTTYKRFRCKTSNACLTTLGYPKKKKWDVASSKRGGLDMNHTSELTLNVVQVPGLHWDGTNVGGGPFQESWIYGNRHCSARGSSSGRCMWILITTTNNLKEHGSYRKVVGRGDESLIERVDYDVSTEPGFDRCFQGYMSLRSTRVVSHTVTRPVPRENFCDELPNQDSRHRPNTPMRGDT

SEQ ID NO: 962545 - protein, 267 aa, Homo sapiens
QWHSEVGSGTARSAAVQRGRERQSEVGSGREVGSEALLVLFPAGPLEFMADDRPRSVRTSGARGPNSGLPSNVGNDMTKGGILETSEEVDVTPSSTTMWPAVEDPCWWHLPPYGFEHTNQKSRQGAIKQIIRGEDVTRHSLNVGQQEKQTTFSISGPPGVGISRVRETSGLDLGPHKDDVGAGADPKQGCWLAPPCGLTFELSSCACLAFWDVHPIVGRGTIRKACISGTDKFVAGTSRGDDMDIDSVAKRSKGHVLIKMFVLWIKR

SEQ ID NO: 962546 - protein, 326 aa, Homo sapiens
MVSEKVLEGYRENYISTGAIGDGLVASGEWRLKPGVQPILGAHKIWGYPRSIATGYLVGKQKMARAYSSKPMGIDSRGRVHKQLYQGRSGESAWHRCPGTHVNIYYRGMERGIWSITRQPRGEKQEEIYCTHDYSARNIFARSRILTNHIYIIYHPVCAIHAKHGISISTCTVHKPGGPVGKVSPGVAVGDRTRGYDNEIATRDIYTNTRMGENEGTWHHTETRGTHAQRDTISPTNTFGDDHHFMEAQGTPRSSKIHMGHRGGETSARERGKHHNGKECITQRATPTQTGTAEALSSPPNQHRGGVEAPTHRERRTNQRGDENTK

SEQ ID NO: 962547 - protein, 103 aa, Homo sapiens
MNSNSKEQTSNSKAQHTQMQQQSTMKARKQSKAHDKETQQKRKAEQKREERTNFSDSGVVAETYRGSTSFIKSQEKMKHVIGLRGRGCRRKSKRNLAIISNNT

SEQ ID NO: 962548 - protein, 277 aa, Homo sapiens
  misc_feature (30)..(30): Xaa can be any naturally occurring amino acid
  misc_feature (41)..(41): Xaa can be any naturally occurring amino acid
  misc_feature (54)..(54): Xaa can be any naturally occurring amino acid
  misc_feature (85)..(85): Xaa can be any naturally occurring amino acid
STSFMQDCCLHVTLGTVVYSCCLQTSETHXKGHLSEGDIMXVCKYPVGFLHFTXYEVEPRTPARLIWFAQSRSLGISSTYTLVYXLFQQAIQSKKYGVYGHCWALHNRQWGLQHTVEQAYEFDLWFRNRCSYSQIVLPGNCNHLAKKVGPCFQVETFVAPMTDQPVVILCNTVYSLQKPTWVIITGKGAQSQLFSGYFLSGQKYSLGPKKLLHLGISTSGPRGLHVPRSTTSGLPRAKWKCRPRIFSLFCANLPSSLAFGHRFPHIYVPFGPGAEQF

SEQ ID NO: 962549 - protein, 363 aa, Homo sapiens
ATHPHHRPGGQLSERLRRPTMASSSPRSYECHRSRDSQYHVARIQHPGRLTKPPEPLLPHCHSPTTHLSSSFLYPLLDWRPRDADLPSTATLPVAPGLPQRTTVPYTSPPHAAPLPRRPPARLSGPTRPLRNQPATAPTCSLHALDHPAYHAHPTSPAATPTPALHAHPALHAPGCPNAARISCLRPLNSPPASELPLASAAPTRPAHPHAPPPTHNLDGAATPTPPTLTNQPHLAPPTSLHQSADQTHPPAPDPPHALPRPPSTPQQPHRARPPPPPRSPPQTTPPNSLGAPHPITRTTNPQTGPPASQPPPIQQPLTGTPHGRTPPPTLGHPFPPHPHPPPRQPRHLAPPPTPCTLDPPHR

SEQ ID NO: 962550 - protein, 108 aa, Homo sapiens
MVAKVVPRARVRGAGPRLGGGDTRNAGERRKRNDKGAPSATTATSQTRAAEAPRARSDPRGPGDGRGTTPGGPTKGPAAAGDPRDGTQGTRRHRVGPRGGPGGNRATP

SEQ ID NO: 962551 - protein, 264 aa, Homo sapiens
TQVALALIPGAWLSVVGNSAGRRLVSAEACVAAERPLGTSDAAGTRNGQTGEISKLGRRVPAPDPVVCAVRSMANETQKVGAIPIFRFPFTAYSIRGRLHGYERVPGWEAGKDGISESPTWHWEVLNVLLWGPLLDSVTLNRRSVKKRQRILETGTGPLHDEKDESLCLSSSCEGLQAPRGLLENRLGLLSCVQKKEREGPGWTDKGGQGQEEAGRRTPGEIADRVPGQSMQQGPEAGEEDTRGFLRSGGDVQRQAGVEVRDKM

SEQ ID NO: 962552 - protein, 267 aa, Homo sapiens
LPFTATAEEVVAFFGQHSPIDYGEEEGIARCHRTRDGTAIQEDGFGTSFARVTDMMRLELRLEDSIKDVVGLQRIALTRPFSESTSERGTFERVCVNSDLLRLAPSTVASFSDASPDLLPVTYAHAQLVPRYEMFRRAVLRRFCRSILYSSQTIGGTFLDFLGEFAHRLFCTPWRFTVRFGIHLGPPHQGDCHLIADDSAARREPFMRLHRNVSLKTKPLKDQHHVDSHFKCFRLQETDTCVVNWGEQLVTLAKGLIPHHHVKFSMA

SEQ ID NO: 962553 - protein, 74 aa, Homo sapiens
KAAGAVRERGWTQWLMAGPPLPPASEWIMPMGGSGGVLRGCDVTGLCAGACETMPVSSYNTWDHNKHNLPQEGS

SEQ ID NO: 962554 - protein, 243 aa, Homo sapiens
CWKPGDPATSPCRIFDLGSDNEEVVAGPGPAQRQGGLAALSGPRAGGCGRSHSCLERMLDDQGGQSCWPMWPHQATLSAVPQAQEQVPHPSPLAAFTVHPHTRIGIKPDPATPDDHGHGPCAGGGPGLRCLLRTALDHVIDIHGTHHRHGPVALTTGTCTVEHACALAQRCRWWPDPMQAQQIGGRKILTSLGCSDLQDQCGHREGRDTAVAAPGDIRAPNRRSGLLPYFLECQAVTFSGHAG

SEQ ID NO: 962555 - protein, 209 aa, Homo sapiens
MGPSSNIGRLFDRPLTRKGDNQHLHGLPLDYRIPCSNRFYPRRAVGTTGKGGTPKTQHTVGTHTAHAQYVTPNTAANKTAPQRRRTKQLATAFPDHRDIQPGPQVEARTVSENTPTPVTPGPKGARLYHKFQDGHSAKKYSGTTRPMGVGDSPAYQVVQRVIPTRYSDTYKPQWLGLLRNRTIGRVTCEEFHHNSAQKHWENGVARYYT

SEQ ID NO: 962556 - protein, 139 aa, Homo sapiens
VRRPPGRGRGTHVVIYDASDQGLYSAPRVWWMLCAFGHHAVSLLDGGLLPLAAARTSRFSSVQDANLLPPMFRAQLDPAFIKTLRGHQWMNLESRALPGGGLPRPLARSRRHRAPSPENAGVQLAQSRVHQNLRLPGFK

SEQ ID NO: 962557 - protein, 76 aa, Homo sapiens
EISSLLLTQNLLVALHSNANEIGAITRIRGPPLGDQSPVLLLLLHEKDPPTISAPQTNQPKEHLTNFKSDLLRLSG

SEQ ID NO: 962558 - protein, 440 aa, Homo sapiens
MVRFLAAARTMMLDDQCGCLLQQQKTVLEANMDNMFESYINNLVLAAGDSGPVMQCLTAWMAGALRNIACGPGWQALQCNTVIEDDDPINAYQKHVQQRNFVLINDMDCVMTWLTLRQCVDACDVYALDKGALTLERGLNRSVMAGYIEAGRLRGALQVAKILGDNNRVCWLVQWTKQESLIPVWTSGTWDYKLHEGSNGLPSNLDGDYFCTYLASTVRLTRLGDTNCYPRLNVLKGRWQEATGTFGEHDTPEGLEALAGQPASTQPDDILLARIDNTRETNTKTRSLPRRDRKDLRKAAPHKRGPKEEQGIVHHGEYGDPVHHFVTVKWSVKHCDMVTESSDPQNKRVDVVHKPTPDSVLTSQAGERRQTQQPKRRAPQNQARTWCRAANELRKIQRTDPTMTAGHDNTTTRMVSASMEQWKDDPTQTRTRMRLDSADT

SEQ ID NO: 962559 - protein, 77 aa, Homo sapiens
  misc_feature (73)..(73): Xaa can be any naturally occurring amino acid
RKANGYSKPLRKQDSEQMQQEQWYLEVLKSRAMAEELDGSHNHVPNIAQGCSNETTPSLPRRSSKVNAITVQXVTRI

SEQ ID NO: 962560 - protein, 149 aa, Homo sapiens
IVRNGQVYFLPFSEGPAGTSFSELSCLDRLEAFRTLQVKGYVIEHVTRGSYARSALPERYAQMTLVTNLIGLYQAWDHSFHPKPERVRCTLDIFISRLYCTVRRQIGSRAGPFNKSSVSADPALDKSSPNAIGPGASSVIECADLIYYA

SEQ ID NO: 962561 - protein, 118 aa, Homo sapiens
MRYILKKSRISKKPQVPREDPENGRTRSPKRGLSGAQDPFPGPRSTVPVEVVQKILSLLTNLETLPHSKATILEADVDGWLKLRKREHEVSKLLVLSCLLAEEPGFLAGGSDGDRHSH

SEQ ID NO: 962562 - protein, 202 aa, Homo sapiens
MPVDLSKWSGPLSLQEVDEQRETTVMSPTPGSAGGRCVGKVLTPTQVKNRPTSISWDGLDSGKLYTLVLDQTRMLPAGRIPNTAEWPSFSWVVNIERRKDIHACAHKSFSDICGLGASQGHKAFPTRIMSGLGYTEHGQAAKVVPEPILQRTDLGDHRGKFKVGVLPLKRMTLRGPVADHVLPGRVGMTMCPKLYRAAVWRT

SEQ ID NO: 962563 - protein, 220 aa, Homo sapiens
MDLLVLGSGAAVPSFWPVEWSVLPSSDECDRINSIEFRTREVIQSDSLWLVEFYASMVWSVSKIRHQNGEKAANVRLKDVVKVGAVDADNASFPEEVSMVFRGFPTIKIWDPNKKTDQKITKVAELVEAIVGCCAECSGQSLKDRLGGRSGGYSSGHNRARSDWFKYQKAVIELHRRQRLTKNCSGPLTALLGLGEYYASFVWTTAKNLNADWAARSSEV

SEQ ID NO: 962564 - protein, 208 aa, Homo sapiens
MTWPPSASALALCAPLTHAKGLGRVSRGLAQGLQQSSNIFPGWVATDTHAPGGPQPSAHLGCLPLSALAGLDSAPPCPVSLGVPRARMPPHGGRFECSLVENADWGPGMLTRALQVSSPQEACFSVPWLHPCRALAHFPCRVSRPSTGSDLRALPLLRAGGLWCGTPSLGRDPCPLPHSPRLISGFQQELFLTGCGLDVRGPVWRLWF

SEQ ID NO: 962565 - protein, 198 aa, Homo sapiens
MVLGGIQDGSNIGDGTINKEPLADGINSEFEIAKYTRICIVTWKECTQSLHAADVNETSPSSYLFPGSLYKWMNCGHFRRCRYQILLRKLLRIITGGAPELAVERNGAGESKAGINQGGQRANGGFRMTHAGEGAVFPQLMTLTEPADEPDREGFKRPHRNLAEREPGAVKKRSGERERNKIWGAPQCRWRTTRGYPG

SEQ ID NO: 962566 - protein, 263 aa, Homo sapiens
RARMREIVHIQLRASCGNQIGTKFEEVISDEHGIDPAGGYVGSTRRCMAGRESTSTTMSHPVQTVCMGTTGRKGTTRRARSLVDAVLDVVRKECEALRLPARAPAHATRWAGGTGLRLGGQRCSLSKDSVRSPRAPRVMNTLRRHALRPGVVAPAGGGMPYSCHTCRVHHAWLANNMTRPIASTREALYDVWFRDSEADNAHLRGPRTTVGVGHHEWVSQRRMRLPWASFSADLRKLAVELVLFPAPWIFMPGFAPSPTGAPR

SEQ ID NO: 962567 - protein, 268 aa, Homo sapiens
  misc_feature (253)..(253): Xaa can be any naturally occurring amino acid
PSTLMLVGACQEKLDNDSRDGLFGVCPARCGHAGGMAQSMQARLKGTARGNGGENHGGEVIAHPNLMSSELETSQLRLTQMRMTPPAGSAAPQNRAVPHAVMRRHKRRRRKGRRFLGIERSSSFSSITDSSMSLNIITVTLKHGTNITSVGISIVGQSNERGDGGIYMGLYHEGVGAVAADGRIEPRRYVSQVHRDQLLRPLSYDACQSGYCGQIGAQSRAIALTCSQVLGPRSKWVAPHCHGARPSGPCPWXWVPHGLTGLPGRGAS

SEQ ID NO: 962568 - protein, 277 aa, Homo sapiens
VQRGGPEALVALLDGNRGGFRGGFGSGIRGGRGRGRANGCLGAECRVARGWQAEDKEWYALTTVGPLGQGHERSCPWRRSISSPCPIMESRDHMILFLGGASLKDEVLKINAMCRNADPVPGQVAPGSRHLSAIGDYNVPRRSGCKCSTEGVATAIRGAIILASSPSSPCAEATVGEQDRQAPHCSLAKVTRAACWALVLGTPHPLHPVALASSPHLCLRKLAPLMVGIDDVLTPSGRGLLATLAISQGTLCILRTKGTDPTLEGTVLQFLSGSCTR

SEQ ID NO: 962569 - protein, 74 aa, Homo sapiens
RRMRAEACLTTFSRVCGYHVLSRGCRWSVSAWGPCMPQMDFNVRTYGNFEDDITEETNSPSRNIQKITKSMNTW

SEQ ID NO: 962570 - protein, 109 aa, Homo sapiens
DRILADSGGVTNIRMVELYGCISCKNVGYGLCAVVKNCRQYNRARWCPGVHSVPEVRKGFGELMVQNSIQGYQYGIPLQSISAPGSGIWSDGKDKSDGAQAHTWQCRKS

SEQ ID NO: 962571 - protein, 412 aa, Homo sapiens
CAVDCCCSVVSWKLVDALACACPLLHAMVAHRGFGPGACPRGLIGPCVCSGEQLWPSLLRCFGDVQVRLVSWGPCSNDWRRVPLCCTCWPKGLHLVCALDVLQTWCLSALGARGVPFVPKTWAKTDHHVCMVTHMRTRDWRHKVDKNPSLFGRDHLGDSACCDQGFIVRAEFQRLTPLEPVNIGSPGWSWRRITKQRFPRNSSRRIRSQANLNLQDLAIFAPTLVEDQLEDTWAHANTTLHLISLRPGKGFPFDLWVHRQTHEFVALVMAPHTKEGPLHLMAMEPRSITLDVCPKVNTHAVSPKEFPERQSAGFTQFPGGCTTWKDISSIWGDTTCGPTYTSIWYHIHVETKFRQQCGSGDPHTVPSKGLTPRKLWEERFSGGTSDPIYKEARQILFPQKWRSLCISTRFRV

SEQ ID NO: 962572 - protein, 101 aa, Homo sapiens
SGAVALTTEVHGIYGLVSRVIQPRTRSDQEKTVDQEKDFVVLYLLGTHLQDFSKMQVKVRSQVVVIEDKSYERSRVHLQSALRLQVYPSSSEETATIENGP

SEQ ID NO: 962573 - protein, 208 aa, Homo sapiens
  misc_feature (164)..(164): Xaa can be any naturally occurring amino acid
DEEDSGLQSTLEASLELRGLARVADNAQQQYVRSRPAPSPESIKRAKEMDLVGLGLHPLFSSRFEEEELQRVRLVDSIKNYRSRATIFEINASSRDLCSQVMRAKRQKDLQGPSPGSSSDSRGGEEHAWMGPVWPSPEPVQHCMEKQSEKAEEEDGGQTSVEDXSQRSVGRKRQRSGPNRGAKRRREGGPGSGTRKFYIPYGPRTFDS

SEQ ID NO: 962574 - protein, 135 aa, Homo sapiens
MPGPLRWTAIALSRRAWMCTEGCWTVPPRGARLYNEGLNLAHHVPYVKGVVVTRPWDWLGLSTTSLPCSIFVTCASHRLESNRSGDAPSSFRLEVQSIPGFTFSPEILAVGIGKSKPESSSPDFQLRKGLLACPC

SEQ ID NO: 962575 - protein, 123 aa, Homo sapiens
MALQLWATNSEPSISQFKTKNAYTLFKHGKGLLVKIKPKLNRAIDAGFQPFGHNIVSAPTPPWVFPNLNYTVLKNHSLHKVQQHRGGALAERYHSRRPGDKADPTCDAQRVPRDTRHRPGKPS

SEQ ID NO: 962576 - protein, 297 aa, Homo sapiens
MEQPNPTQMATHKPSAGKTHAWAKRDEAEEHGDEQKRTDGHYPNTGTGGYHRSGFIHLHNDLGDRTRHNTGTRRTRPRQRHTEYITTTPERSHPIRRAQPDSTPAKQRQEIRTYHNNDTHAHRRGPTDGNTTPRYPAPINPMGHRKTHKHTGHSMSTQTGSAPPGLPRSLRDKPRHDDNRASRTYGKRSTTGAPPKKPKDTPPIKASHKGTYRRPELGKTRTKEDANDNSPPPKGGDHNERNASTRQSTRSRPTQKRRIESHGDTATGKTPTNLRGPPKAPSQHRKNDQRTERTAHR

SEQ ID NO: 962577 - protein, 355 aa, Homo sapiens
MSPAVSYGNYHHRTRMMDVTVTIKSSIDKMNPTLVLGPLKSVQDADGGTQQLARDSRPAGSETGSTERATERSADAQRMTNASPVHGEWYDLTLAQGPVLCNDCLLTWAAGSRTQHKIHLVHRLSLTELALCNPPIQLEGRMSVGRTAWPRGKADSEIQMETGQAVILSARPASTPGVGTESHDWSSGAQRGQVHQLIHSPYTDDKRCLTGGRDPLPHVTLEATRVTLHTNTKRQMGPWTCRAETGHTTPEYPSTAPSAPVQDDKAPGAYKQLEANEPTQHTGKKTPLKPPQSSECPQCKSPNPVERRAEQGQTSDVTKQKRPEDERSARTNREQKRHHQGSTHSRDVQGATTAN

SEQ ID NO: 962578 - protein, 200 aa, Homo sapiens
LTVSERWPLAQRYPLLLWFCHADVPGKSPITGAARLSVWSLPTCMYRLPNVQRRSYGPVAVAAVANVQDYGALKDIVIKRKTRGLPSSHYSLLGAAQACSVSIFRLLSTVSHASSSVKELLPENLLKLLAGPEYDTAPREDYQVGDPRLRSGGCVPDRYAGIKMHASRRCCPIEGDGEPWRVLGPSLLGQKHKLLSRQAL

SEQ ID NO: 962579 - protein, 110 aa, Homo sapiens
YFPLLLCAPGRSSFPLIAGPIRQNEQLGAKRKRAARSITSLKEQAIGEYEELRAENQNTQETCDTQVRPERDEAVQKLAEFQTQFLTWSSRLSITVQKHLETREDLSRKC

SEQ ID NO: 962580 - protein, 400 aa, Homo sapiens
MSGSCPEDYLLMTLMPVMLLTDKQDGGTVKADSSSVTTVHSSRVIDTATRFHYDYPSFNARQKQSDGSTHGTMGWLLIYSRPQARTGAASNPIPGAGEPVDTRLPLTSDTPSHVILLRFAAECMRKRRLRVTHISPPLHVPLGDVPALRAVAIPKHAWTRTPVGTRHCARMSTHSCLCPFRLYLGPHGFADLGPISPFVPHRAEPLSPRNPPPTRATFDLHADLWHCPEVAREPGQTTHFLRKGTPWRSKSHRAPLSTKPRRKGPPSLRFHFPPRFKLSPSSLGGPLPRAANPWPPGAPGLSLYRRAGSYPQGPPRGRLTRPPQAPLGPLLRSAPALGSLPPREGVNFSPGIPPSGVPMATFFLPPGRPGCARSGRLGRQRLARSSRARDLPLLSHAGFP

SEQ ID NO: 962581 - protein, 253 aa, Homo sapiens
  misc_feature (113)..(113): Xaa can be any naturally occurring amino acid
MPKALYITAPVSKRTGDADNVYPKHGKTTGEQVRDLLVHSDGRHKPLQDKLRRMPKIMIHVAHDKAMTAVLGRLPKVQRVDALSLTNLCVTSLALNLYHGFGRVANSFLFNGXYYNRLHDILGANNLSDILFWLPKPTAIRRCAYKRQHTDEDPTFFTFCGPGTHSGGRDTCAQVYRSHDTSTHTRCFFPQKMTVGDMWTLCARTAKHKPRHFYTPYIITISAGSKQAVPSLGDNPQRGTGKRGNFTPVELFC

SEQ ID NO: 962582 - protein, 298 aa, Homo sapiens
RRHHHRIDTLSSYGPCTGPCCRKLRPRQTRVAGVLRFLYLQQPKNMGPLNSGTFRLKSLKVRDLISNFGQWRSQRRNKSQRPKYWQIKICQFKLVLLGESAVWQTQRLCFVCEPANSMNFQESTIGAAFAKPKLYCLDDTYSHDRLQLVGYSVVKNDYHSLGTNVTTEEHKAAIVVYDITKGGSPCATQHKNWVKELQRQQVLTCNSFIGTPGDLARLTEAVGFSGTHSPLPMTLVIIPRDIGRPPDCSAIFCHCKIARCPNPGQFGPARLTFWAQPPDLGRHPWSRKALSPSDPGGT

SEQ ID NO: 962583 - protein, 149 aa, Homo sapiens
QWRQLGAMAVTMRQIQSWERRVGAGDGCAEVVIDSCGKRAVAPVSGAERWFVVPCSECAERMALEIRRCQADSGAEVHNLRKKLESSRPDTGILKVMLGYDGPVPMYCRERCKPYYIGFSSKNVQLRCFQRRSKFQVLPRTIAFALLQR

SEQ ID NO: 962584 - protein, 340 aa, Homo sapiens
MALLRLSMTLGSTIDKCYLVILLYVLVPPCLSGYHERLITYLCLTLHYPSTQDPTPEPPDYTLPALCSYCCATLTTIAAHTNRTNMLDPIRNAARNCSRPDGALLHLARTPQRTPTTRPRTALHRAPPGLTITTTRAHSWSPPPKHIPGPCAQPANHHNLYQTPWRDALASAPCAQQVALTHRHRMTLATRWARNSSRRHINTLCTTHRTTFDHRLRQTNVGPQTYPQLTNTLSIGQSTPNNAISADAGPMPTPYVLTPITVHCLFPKPVALAVLYTSTDITGDPHTHIADKTHMTSLGPHASHSSHQQMRERLDMTAEATANHLCVPGNGNCIALYGSY

SEQ ID NO: 962585 - protein, 171 aa, Homo sapiens
VPAAAGSPPRSSSSSSSSSSSLGTPVPPSRVSLSPTLRAYSWDARLAPSFASFLPSFFLPPLAPASLSRSPSRGPMSRCPFPARALPRSPLHFLSRLRAVADVAATEPPVLRPEPEQCTWPRYPDSNATYSPRGCSVPEGSPGSHRGNGLQVEHRSHMPSPVHMTWPARRA

SEQ ID NO: 962586 - protein, 233 aa, Homo sapiens
GGRNSGPMPVTMYRNQYDNRCHCIGCPQGRTSSNKNMQLEAVKQGSATVGLNIKNYMQLYMCSALKRAQIRALHAHQKQNFSMIRTTTTRATPSTLAGVPYNLPCTLPTHLGLNCYTILILACSRAAAICDISPSTHCYSQHLRTPHCTCCSIRSYANLSYTCDSQRILSNTDTTNRTYAAAQTTSTEPATELLHSNLDIGLSHCTCNLLGRAHHPTHYRYLPNIPLVYSNVH

SEQ ID NO: 962587 - protein, 125 aa, Homo sapiens
MSAKLIVDPDGDPYEKSTYYDQELEARYVPSIGLPRYKRRWSSDGSNITLCQVSVYWPALGNQLDSYDRARTQQASSFRQRNGPCYARCACVPAIHERSYGMHGDTSIATLAHITTTIADPCTRH

SEQ ID NO: 962588 - protein, 281 aa, Homo sapiens
  misc_feature (257)..(257): Xaa can be any naturally occurring amino acid
VLDFSKPSSAILVAAERHALADAMTDASMHPYRWRPSKGPQRGGVNHLGSVTDPRQSSQVPWILILRSQQCKDPINPCEKLTKGDAWTNLWIFRRACSRGVDSHLYVSDVVVSPVRMAQCLPVLRLLRHGTLVRPSWRIVCYTGYPATARRILVGPTYSIGNVLGAGAPLSSFIAVNSGPRNVSVCGLPPARSENKHSNANCGNNALAIVVAKNYSVVPQGLGWTPTSMQVGGGTCGFSPALLQPPKQDQHKPLYHXVVPSGLGTKAWSTVLGTMSQLGSL

SEQ ID NO: 962589 - protein, 182 aa, Homo sapiens
MDVGMTKFETTSQSYYIQWIGGAPSPQGPNKGTSVPNMITGAAQADVAVQCVRTCRQGQGRVVKAWDFSDAPATDENHEEHLDVLWVPGFLTCAKVNRMAFGKVWPRVLTQQNSGTPRLYTFGGKTKSTQGFLKTRDNVTWAKDTLARPTRSPFNRPNRRRRLPLTPRERTPATCVTAPCLL

SEQ ID NO: 962590 - protein, 193 aa, Homo sapiens
MIRVRYTSVKNMLDRMFVDWGAIRLTIVSNFANESTLLSARMSSLYSLRKGTLLKTIVIMSAAFMNDIRIQRRLPVQERYHLIQDCKKEEKEDGPEAEQYTASHGGSSGLGVHAQTLSESRSRGPPIGEKCVIAKGSYGELLSNHIEVDLEASPGLGHGGIYENRLRARTCLVDCAPVVRVFILPSRHLGALE

SEQ ID NO: 962591 - protein, 173 aa, Homo sapiens
TARAPHARLPSSPSMPPPRAAQRGTQSTGKGRSQDGGRGDDSLYPIAVLDMTNVRIEDVQSSPQTAIKKLSTIALALGVERTREVSFMPFLTDTIYDEDEVLLAWQNSWEPSLPWWEAQSTCTACCHRGSRWPQWRRQGAGQGRESLRAISHEHSPSDLEAHLCRLVKRHGGR

SEQ ID NO: 962592 - protein, 110 aa, Homo sapiens
LREEVRPLRRVWAATTGRTRARSASPALGAPSASPAVTTWPSTPAVSPGFHRGKPAPVPWCPQYSPPATRLPCMLAGSPVPWSPCPAQPRRPVGPSCSQPDRRMLLPSRV

SEQ ID NO: 962593 - protein, 293 aa, Homo sapiens
CCFWFSCGHRRCPACLGVRTDKAWATAPQKPTQVDAGAGRRVGDRVSEGAGGAGGLGAKEGAKRRVGGGSAVGRAGGECRCLTRCRAPGRGGAEWQARRSMDAEMYSFMATVTKAPKKQIQFADDMRGSSPVFPTRIGRKILVSLISQSSSDSYEFSCIYTDSSDDEVLPEEAGTNSEGSSNFVCEEHQAGKNCGLGEDEIGRASTLSCSDFTSVKTCSVGRKPLVVLTISGAGHPFTSQTGCCLETLCGPGGPKAVAQLVTFIHPEGLACHWLSCVQVPWRRRQKTLGDYTG

SEQ ID NO: 962594 - protein, 142 aa, Homo sapiens
MARGAPPTPHLNVLADTPSGRCASAICRMHLRFRAVVKQMLDFPVEKARKKQLIRRTCGLRIDIYSKKTISNRVKVLVLAREWTEQETLLLLEALEMYKDDRHTSVGTCGSRTQDECILHFLRLPIWDPYLENSDASLGPFG

SEQ ID NO: 962595 - protein, 363 aa, Homo sapiens
KGILGKQQVRSTACKRTSERANSMEYSCRNGGKDYMLPGLHDNKEHLHRTNQCRGRVVFCREQLVCCSESDNVKSGTKASPSVEKHTDFQAEQAKPLREDILMQNIETVHPVSKRISSSDISFGSWKHDVHQNFLLKASPLLPEAAAPRTSTNFCTHEATEAQTFSISSLAQLDFHFQGLLIFRHKACWDFHHIGPLHYFPLQAWACSRIPWFPGHLLFHLPGPGTAYDGVLSHKAKVYRPENFYQVRHSEGQGALLALGVGDTTHRGGPKKGERGRSRIFQGFNHIVGQRTPKEGGNNIVGIRRTNARQDDNRHGVQATTKTTTPVCVVQTHIDVGSHTRVSATNTYKMQQHGQTEDVVTTF

SEQ ID NO: 962596 - protein, 108 aa, Homo sapiens
MAQWPRTILTARRPVKRQLIRSCRRRIKSGAEGRETQARLTVLQRCRVQWAATFVSGGHPGRQGMPRVLWPTPWEEGGDGTHGDGANQRRGPNRGLLGEQERPVKHWH

SEQ ID NO: 962597 - protein, 102 aa, Homo sapiens
LSWCLGPSFMGMACHLLYRRTRAQDPRSVDLGNRGEVCSVKQATQCRGQTPREGSRNWARGSNPKEKAAVNYSKWAQYWGADTGGWRQNGGERWPPAKPKEI

SEQ ID NO: 962598 - protein, 100 aa, Homo sapiens
ISWMRAAWEVLAPPSPYSRGVSAWETRMSDTWSSIQAHEKQHGLSAGEAACGGGSRTRGAWIVRNPEAAWSPTFRSDSPVPTAPTVWWRLSPAQRSGTLP

SEQ ID NO: 962599 - protein, 223 aa, Homo sapiens
PSDLYRKSGAANRLAGAPAGACRQTPQQSSWRTSRIHAIYMGWLTASRVARSVPEPLDDLRDSTATSSEAVELPEKQEQLAAIYAVLGAPSRSQPQLPWRDSSFHLVQGGPCIEDVNRMSPVCAGHYLRTLLLRCPGQTRTQLTSMKDVLKDHHVRGDADHTEQMRKYKVKMEEISQLEAAESIASAGFRSCDKNAPWPLELGLQTPYEGGPEQEPQDRDLQE

SEQ ID NO: 962600 - protein, 214 aa, Homo sapiens
VQWGGRGALVALGWVNRGGFRGGFGSEIRGGVACVRAGPGLRLSEPRCAGEGRRDKAVDCPGLTKFGAAWSVGTCKNQPSAGRVDHISFLPALFQGNPRASFGFSFSWGGRLYFLRAHWQVVLLETRFSGAPIGLPRTQQQVTPLVGLRGPKGGPNPQEGFSKLVHFLWCGLQSRRRESVKKCVPHVVPRVLRAGLVSTWCAFAKMWQGVRAAT

SEQ ID NO: 962601 - protein, 105 aa, Homo sapiens
MNVWVRCRIHAERSARRFLPLWIGGVRDSLCVCARHHLLREDAFVPWGGGRSFRPWDRGNEDPRVLRSRPSSRASGVQVTRPCYIFHPRVCRPSRGCKAGPRGSP

SEQ ID NO: 962602 - protein, 254 aa, Homo sapiens
HVGSFELSVQDLNDCSRTERCYSLPSQPCNEVTPRIYVGNACVVQDIPKLQKLGITHVLNWVEGRSFMHVNTNANFYKELLDVTYLGIKAKTTHRSSTLSAYFERAATSFDQACGQKNGRVLVPLPGTVSMPFPKALVNLPYLMMRQNDGRSSLPLSIVEGRTCENGPNRWLPGPALGSLRIDQTSQRRGTSETLGHPQRRLASRGSSVSLAILKLSRNHSYEMRGTHLRKTSKVPFGSEGSSNNPTGFSTQEI

SEQ ID NO: 962603 - protein, 318 aa, Homo sapiens
MQATLIECISQMVRSVMVEAGTSVLQACEKGWQCKIPSMSVHHANGCHGCWKLRRCAYVKLRKPLRLVAACAMPGNDRRCNILTNSEKSKKAREGVMDVLNQQNHPFGPVLMMVTRGGDCESAGIMSMMLWHMTSEPESLRRGTACWCTEPETFGAHSGSKDHINGPSMYNRGAPRLAIQGNGKDRRTRQRTPASHTGDTGHGPERETSDHGHRNGAPVTDFVQTPDIAFTRVPGRSAAFLGQNITPTIVGQNSKGPPGYKTGCSRHNSTAAQKRARATKGRPQLNKGVPTGRPNGGDRDSHIRATNGQSQKQEPRNK

SEQ ID NO: 962604 - protein, 223 aa, Homo sapiens
VSPVSNHVYERRLIEKYIAETWYRPHQATRPTLRGSSCIDYQSCSPNPAQASLSHQHPGHSESLQDEWDAVMLHRFHSAPAAADNPPRAVTRSVPARCRAAVSLPVSRKEVTAAREALATLKPQAGLICAPMALLPKRFSPKAKVCLLGCRVSPMDEGELVGMTPESLRSFKTKPAVLTTERKREGRLVPEELVKPEELSEIPAGWHPTGGLHRGQHSVGILG

SEQ ID NO: 962605 - protein, 136 aa, Homo sapiens
MKQVMYVMLMLPWGTGVVAVSTERRYDLVQVRENWITSKFEISLQGERLTTSGLELDGRQKSRVMEDLGSRERVGRSEKPEQKQLSEESQITPQGEAEDLHAILPDHSRSRSRTEDALVIDFIVEPMSYTVFPLFS

SEQ ID NO: 962606 - protein, 258 aa, Homo sapiens
WYLNPRQVFELRPGRVQGGAGDVPGKMHKLRILACGGDGRWAGSSPPWSSYAVKLTPPVCHPCPMGTGKRLGPNPRTGVGATLDEPVSKILSHVEERERGDSWDRLGPPRLSPNPRGQGLEDLMTDRRQRTGFADLGMSSTEELQDPWAFDGPPFNPLGRFPRESRRGTKHMKKLQTAGYYGNKDRIYAGGTSVYFVDFPLTGGRLPTWNPGQDTHSRSELIADMGHMGHFGFPPKEFRGDPLNNPHRGRSRIHRKQF

SEQ ID NO: 962607 - protein, 256 aa, Homo sapiens
ALSDTWGERKAWWGPPMPGSKRRSEPPEPRARPAGQWHSGTPPSKLVARGFSAADAREPDDLGSVRALGDFTADDLEELDTLAVTGPEPMSAAGRDVCQVIIGSTKIINGMSKKSFRENTEKLSHIKAITSRNLGPVPFRAQSTKEETLKRNPMTCTRDDREFLIARTWRTFSNFGGDLHYIQDRNPFYEGHQDERFTLCFLSNGENPKAPSGDNGTREFSRKAPLPWESGLQVYTMPEIRLGIRTNAPRPVERPN

SEQ ID NO: 962608 - protein, 110 aa, Homo sapiens
MSTENFPKMMSLHAHGRWHLHSFETSMIGPSCQVEIQHACTLSAFVKFHRATIVLFHARATTPGSTGVWREHLGLRPILVPSLVSHSQGAQHLERTRHLRRIFPRLVPKG

SEQ ID NO: 962609 - protein, 103 aa, Homo sapiens
WTAPARRGGNVCINSFGFGGSNVHIILRPNTQRPLTAPHATLPRLLGQGAPLMAVQKLLDAGARAKPGPGFPEHADTTIVVVPATACLPWLRCAGVVSAVAQR

SEQ ID NO: 962610 - protein, 108 aa, Homo sapiens
MWTFPWDEDAPNQCKEIEGGTGNCWQHNKNFLWNNLETVTVIKRTLTPNLLGKPQNTVVITGHDENPLKFVASQIGTHKGFSARLAAYTRFCLLFHQSSELGDFRIPW

SEQ ID NO: 962611 - protein, 65 aa, Homo sapiens
MNLSGLNQEGRVPENVTGVVFQLRLDAAAKENTKVCQDEGGSALKTLGKELVAHLGIGVTGVPRQ

SEQ ID NO: 962612 - protein, 183 aa, Homo sapiens
GQAGKQPPVESRDSAGEGSQKGAQSEVPTTVRRPSRGRTTEGKQKNKGVLAKGTRCKSNNKSSRERENPKGAEPKKIEKEDEEGISQGVLGGGAVTHAVPLVLTGGAVSFWDWTAFAPFQGPGPFPQVTTIKPTEPIGRAYSAILPTVVPINRGTGYTGNTDALLQEAPKSTLDLVRCSVSTL

SEQ ID NO: 962613 - protein, 212 aa, Homo sapiens
  misc_feature (21)..(21): Xaa can be any naturally occurring amino acid
  misc_feature (29)..(29): Xaa can be any naturally occurring amino acid
  misc_feature (51)..(51): Xaa can be any naturally occurring amino acid
GCRARPHVGERDPSPAQGPHXRRFAATLXAVSFKGPWLGTAVPLECSPFDXGYPRFRLFAGCRREINLLCTCVPWTICYIPGRPPGVPPWPPRGHRKTCDGFADLPGRHDMRPGIFTESAQGWSVRTQEGGTCSHRLARFNMEGDGALGPEMGIPPEHGLLSQLHAAFKLALLLALALFLAFPFALALLFFARSLLGSRRPSPPGRPLLGQL

SEQ ID NO: 962614 - protein, 136 aa, Homo sapiens
NGSSWTGISRRCCSTTASVHSWCVEELLRRCWTELLFQSSNIGTTTTSRPYFKRGKARRGRAGMAQDGLRLASFVLRVAASWDPRLAGRLGGEPESWRDPGRPPASGQEWTEDGPKPGFRREIYLPMDMEHFGPCL

SEQ ID NO: 962615 - protein, 176 aa, Homo sapiens
MNDLRRNPGGMEMRKATRALQPSYVMLAHVTELQWSKARRRDRMCFGSVREEPLIHYWTQELESVRKCPFPWLGRHESLADKFGGEPVIPNYCKESRHTLPEELRCPVTAWFQTLEYLRNPMSGELHANCSVKTDNGVLASPGRYRPKSKCAAQAAHEVKGCQTNEPEEEDAGNPI

SEQ ID NO: 962616 - protein, 242 aa, Homo sapiens
EEELTMGMSYVNDDIFRIYITEKNLVPVGARAQRVLREAPRNMVHLNVICMAAMGRVVGTRLTQVLRLCRPSVVVERLRRNTGLLRGQFLARIPQPLFGHLSEGFSPLCRWFRGTVNTTGPFSGCPTDVEVSSCQDRPGAALFSSSPVLRLWPGALGMKLTFFWLHSEGSGGVHFDLRESLVTSVGPVPLVLRGLLSGWYRLWTTGWAWQAPLTPGFSREFRALDGEEPVARPCTVLAWPQQ

SEQ ID NO: 962617 - protein, 136 aa, Homo sapiens
FVLCTGATPMLDASLLESSANQYPGSLPGATAWLVVTDPRGMTNSLSRVHLYVNLPTIALCKTDSPLRYVDIAIPCNKQEELSSGGLMWWMLARKFCACRGPISREHPWEVMPDLYFYRDPEEIDTPKSTAVLRRR

SEQ ID NO: 962618 - protein, 455 aa, Homo sapiens
VPVVWTWLVIGSDPVISGLTQLKNAMIFSCKDTVDRRRPINSLEVGATVTTQSDNIVYAAKESQGLTEMAIPRPIHADGSLCLHGQVSVERMARNSFCDLSIQFLELDALSDVTALGSMAARDVGVAMLQDSYGVTEAHDARGERAPSHARMGHGLGGRTMGDTSQLRTDLGETGPKRISPRGLTTETRQVPKSRRGYQRPQDGAIQHPVKTAKGATANTGNRCTRATRPTPRTHIRYEYNRKPITQHATVPPEGKQPGEPPSSESNPADGHKTPNRREQTQLRPRPLLTDKPTRTLGATHNTLSPTSSTHHRCGTERDPRPPQFSRATQSRHSTIERHPENIGQHSEQLADPNMNDPNASATREPLGGHTAPAPNIECASTPPHAAPHNDGATSVTHHRLRYHDDTQLRCVDSTHTRRETLSYHTNDKQATIIQPQHTRAIQQQQPPNESSHPT

SEQ ID NO: 962619 - protein, 299 aa, Homo sapiens
  misc_feature (29)..(29): Xaa can be any naturally occurring amino acid
PERGLVGQGVTERGRAERGHGQCRTKVPXLWAPRCDQSLSNRFPKGVATGKKPSQNRGVWAQGWLVSTPLLGADATRGAKGARISGGEKLAPSWAIWAQHPPQKGGHCGGQQSGRERSPSLYTRSDTTPAGEGGALIKTVFYAVFIKTVFVVAKQQPGCRGAPPFLRPRFGARTDINDTPAFLTNKRGPKQGETPPEGGQTGDKTPPHAKPLKGAEAPPRGGPRFKKPAPPFEVVGTSYIVVGAHTLYERQLTRRRTTAAHTTAGEDIPRHHQMIPCTAPASHNVTETPRLRRVPGGPP

SEQ ID NO: 962620 - protein, 180 aa, Homo sapiens
SILPKPVLIREEASIPKKLQSDRPSDRQSKRLIRSDTSQSVAPHHEVPFYRPRASRKVASVEDKLPASQLSFAGLSYQPAAPSPEVVLAWAVKGWHSDIWGPPDLLPLSLTELAWYLPQSPHTSTLPQPSTEACQLLCLQLQPVTHLRRPSLSVRRRRSQVTELTRGRSWDDESPFDKAV

SEQ ID NO: 962621 - protein, 155 aa, Homo sapiens
PGRLRGPSGDVRSRLLGHLAACLRQLGPSRRPARCPRLPPRGPRPEVYCLGLPCLLPSLGGPLSLSLCVPPLAAWGLTLGGCPACPHGRGAGGGPGVGAPGKGPVGLRWNGFVAPLEKLWQFRGEGGGCGPPGISIRASPWWAPFLCRPGEEPCW

SEQ ID NO: 962622 - protein, 293 aa, Homo sapiens
  misc_feature (214)..(214): Xaa can be any naturally occurring amino acid
RQRRRAEGESAGGRSGSDEAGGPARSAGRKGASGRRVQAETPCKCRGANEPRVCFTESASRATCSVSMPRVGRRMSTRTSRSAKAGVIFAVGRIAACTSRMATPSTGLGGGHRVYMAAVLEYLTAEIRGAGWQVGGSRQQEWDGVTTRDILLVWAMMKELNRVLRGVTIAVWVVLPNITPMFASEEAGDPRESLAAIITAHPQPRRAKVSIPRXNAVLRRGREGDMGPEITKKTRVKSVRGRMGDRRTGGHLRAGRGSFPQEAFPWDKVTYPGERSKPVEGGVKHTQCVGKVA

SEQ ID NO: 962623 - protein, 299 aa, Homo sapiens
MSGIRQILAFSTAIASGATPRPMRGRPVNRSCRGASFGSSVRAVPKWARDRRVVHRSNTGHELKRLLQPVRASTALRCADGGIWPALMRTVADYVVQAASRSTVQLLEEAGKEVADEVTRPGLRGEEVLQDIQVMLKSDARPSSIRSLKSDMMSHLVKIPGIIIARLVRSVPRGTRGLYPSAAVGRTPSAKCAMRLASGGYALARIVHHQIRLGAARNAMSPYFIMPDNMLMVDFQTWKCTNCLSASPTGEADTWGLLRQVLCHGGRDTGHVGNHNKMGRHKAEGGGKQTGGRGKFVWG

SEQ ID NO: 962624 - protein, 290 aa, Homo sapiens
APGRLPLHRVAPHVHQVVMVGMGQKDSYVGDEAQSMRGILTLRYPIEHGSVTNVGRACAENLCIHTFYNELRVAPEEHPVLADRGPPEPQGNREKMTQIMSGTFNTPASVRCYPGCAIPVQPLAVDHLAIGDGLRVTGVTHHCAHLRGGMPSPYAILRLGPGLAGVTLPGLASMKILHRSAVPVRPPRGDAGIGGVTLGDSCATSAPGLSQQEMGRGAFQAPPWGRPWRVPAARSFTIGTAAVRCPVGSSRPSFLGWGPGVHEKSSLLMEGAGGSRERWPLFLCAHVPGS

SEQ ID NO: 962625 - protein, 219 aa, Homo sapiens
RVQRGGPEALDGPGMGNRGGFRRRFGAVAFGAGVAGVDGGRWPEACGVRVRNGRRIEEWIARCSQCWAALCQGTLQGSSPLEGDLSLLPGPIRESDDHGFLPGGPLYKDEVQRDYAMCKAEPVSGQGTRFKGISRYRGLQWPRRVMGVKCSRDGGQRHPVGPSSWLSSPWSPCVKRLRGGTEIGKALEWSLAKVTGRCGLCGNSSSLDPGATGIVSDLC

SEQ ID NO: 962626 - protein, 313 aa, Homo sapiens
SVMCGTQVHSICRDETGIEELKKDREKMGLKETEWMNMKAVSWPSAFSLVLGQPPLPSREQGTGQIRTSMWSEGPRRHGHSDSKSTPQHYRPIRAHECLISKKQEQLLLELFLCLKYQWLSIAREKKPQVPTIYFLQNHPFRCSLGDRGLPLLFLFRHHFSGLCVVSSGLSCPGNDQMYEGRCLALCHSILGETDAARGWNSLDARWGCWKGRRRELPGGQEAMLNSGGIKTHRVWCFRLRLGLAGQRALEPGLTPKGQGAETEQCLLGHGGGGHVGRPETKPLSQRNRLRGKPDRYRDTEGEASPPKRWAHT

SEQ ID NO: 962627 - protein, 263 aa, Homo sapiens
  misc_feature (163)..(163): Xaa can be any naturally occurring amino acid
  misc_feature (215)..(215): Xaa can be any naturally occurring amino acid
MNKKPEADKKDTEQVTNQTSNTELSKPNETPTDQSKSNARRHTQKNHERNKQQKHDKNTDTIPQSKQHPNHTVLDDIRRATSDKQQNIQIEKAKLVVTVERQETTYTREKEKEEESSQELNDRTETNEMNTNWTQKEHVNTMNTHTEATKRTTYKAQQRHEEXTDRMNSNMSHQTNDTTNIYRDTVSTRIVIDYEDVGTQQIQNPTKRRKRTDNXHENDIMKILERIDKHPHEWIDEERRTRSSDREISRATTDRDTDTHKMK

SEQ ID NO: 962628 - protein, 33 aa, Homo sapiens
GRNGLSGVWAGYWLYDVLVEQPINLCSCIKLEL

SEQ ID NO: 962629 - protein, 277 aa, Homo sapiens
MRQTTFQAADLIALCAKIWALSMPVLKLGSQCDALGGKLYCERRCPDFRITRCKVAGMPMSSMYESSLPMQPVPAGGPQKAPAMVCLIARCEEWISYDRAQFHLACLSIKPSRYGDNVTAVALKATAKTSPGYHEQNSHGTHLIGHPCRKWRTQCRSINHQGQTRTLYDPGMTIDDWHYAFLILLHPGKKVGAGHQVRAFPRTTNEHGANASSHRGTQCTKGDLSHHNQTMRSLNMHAYTSIMKGTPMRNNQRQKEGFDDHGSRNTGCVTTRENRPR

SEQ ID NO: 962630 - protein, 245 aa, Homo sapiens
MAIGRGLLGGVRARQHWGEGAGDAARRVAKRRMHQPVRGGPQRRRGLPGQPSVRTTCPGEPTARSRAPAPLREIHRAKIGGYSGRGPEVTCQEGGPGGTPNGPCGAGPGVCADVGLVSADICEDAPPKGPQYTSPFLNKSEVAPIVMPQDSSFKKIKGPSLRTQGPYGSEHGRCRAGSSFGTGYLTSMPSEEQAGSIYPNGPPPEAKLLERLKKRRKQRKNTLGDITRSHTDSTQNKGLVSWFRT

SEQ ID NO: 962631 - protein, 104 aa, Homo sapiens
MITMGTVVRVDVSSKRAWNQAEAAAAVEVAEFPEVAMAPIQGSEDQSGCLWIASKLDVGRIYRITCVKRGDVCMLIVNQMALVSVNVDGKEDMTYAVRKVVTVS

SEQ ID NO: 962632 - protein, 399 aa, Homo sapiens
  misc_feature (338)..(338): Xaa can be any naturally occurring amino acid
WRYKIKLFSFLYLLTQELEPGALATHSVGRVPREFELRALRYFAIARCYVASIESRYSSRGRSRSCLTLKSPDDHKHRYLDPSILLDFYFNVSIHCCQTLTDDKTDNNTRHKKDKQEGRDQHTLIQEQNQTQQHSQHGNKPERHTTLTQTGTRRQREAGSDANTPGWPKVANTTNDGPTHNNEHTTAVPTQGDTQTKTPYTPKDEQHTRRENKHNDEHNTNTPTTPTQTSRRPCITAPMQATLRHQRRDTERTETTHGRAQTTSYTPQRHHQQRRNAPTTSRESHRGTTHRYGHNTTRCSPPTKKQHPTNTAMSHLRSNRAGEPTHTRQTHNDQTHRXTYTSRAATDYNPPPKANTTRNRSNTSKPTKQQRCDQHRRRKPYEHNNQKKPNNKKQNEDHN

SEQ ID NO: 962633 - protein, 255 aa, Homo sapiens
MQATVRALWTPPQASAVRDEGTDLSAGGYADAGYGRLTLSTPEGHWWTSAISPYLLQQVQALRPRAGVDHVILAVRLHVAGAGEGTEWHTEQTCWRLRISIVPLTRKPFGDSWAPGLLAPGPNSLRLETHILSVLEHGDVILRVSPSKDNGCTTPPGTKWAKVKGLHTLGDPHAGGHPLPSTEHACLLLNAMTTRRGTPPESVGKAPQGVPVPVTNHRRRCDKPEARRRARGPHTSSPTPWRTAGSTHNGHDGTK

SEQ ID NO: 962634 - protein, 272 aa, Homo sapiens
VPYICLWVGTLGSGPFSTKTWQPLERMTMVIEECARVPDKRYVPSTWSSSANRNVVQSEARLLTRMCLTRAQKQAVDKGTGSKQRPADAVDLPAAPGAVPYDKQLPVYVNTIKAMIAGLALLRNPELGPRDPTCAYVGWIRPWAAGQPSHLFVHDQYSKVLAFDAGADRIPPCWHVGHPVVMAFSQSDLKQVQIGKMALNLYRPAWARSAAKKHGTMPTDVHTGRTFASTGSKNWATDLVRPPSHYAGNDSEALTRRGKIAFLDSLQRRVSI

SEQ ID NO: 962635 - protein, 323 aa, Homo sapiens
RAAGPQRTLLSALDGPSEGGCEGKPEGRGGGASLPRRRRRRRPQARRGGRAIAPDAAPEGPSCGLGPRLERIPHLRNRGDGGAHVYDVAYVKAKQTIVHLEELSNAATLYRLIILYAYTGVTWQLNDQHCYEPGFSETSLLSYRKKMCTTVLSTTFSFTTPTQCNHFVSDVEFADLSHLWRNYPPTCLTTNWWTPLFTCCVSIKARVQCQLVTVTLTLIGIFLEEVTNSTVARTGKEHPVRRKLQWLFGLNDEQRNPDPGCWLLVLSPTISFCSFPSSTSSVCPGCAHKTSRCYACVAFAHLQHMLAKRGMFVRHYTVVLVCT

SEQ ID NO: 962636 - protein, 67 aa, Homo sapiens
KARVLSLQYRLNKSSEDFSAIDYLLFSSFQEFLQAQTWLVLHRWPCESAYPAGGPLGASAPGQDVTW

SEQ ID NO: 962637 - protein, 344 aa, Homo sapiens
  misc_feature (160)..(160): Xaa can be any naturally occurring amino acid
MRRDGVESSLKKWWTIARDARRYMVNHMRAHMCKYIHFTVKTCLYHDDPTASAWHDVTFVTLTVFCFCERGLGPWYDELLAPDCSPHQVSRLLMTSCVSHLQILTSMHVGKIVCPTLCNALGLLSLSVSIRSPNRVLRHRDVTGSSRRDAQGGPPGEEVXFERHRCIGPNECRLCAIDASKAFRKLDSEVGSNGDPMSGFRISTRKILSASRIVGADPSQKEGPSHKGGVENDWIDRGSASDFGPPPRIMFRFRPCEVVSGNPERSVIFGRRCVESHWQGGGENPLKRWARPSPHCCDKFFPPYRYLNLIQTVALDLNLPREVIVPQTPSRGVRFAHHTRWTHR

SEQ ID NO: 962638 - protein, 98 aa, Homo sapiens
YPVKRQKMGKTENMTTSNPERLGRSMERSDVSIRGIVHHVPGRICIYTMRGGITEEQPSEENYEKEAAEDWEEVLRLQDMSLGSWYITAEKLRRWNDG

SEQ ID NO: 962639 - protein, 121 aa, Homo sapiens
MTATSQPRSDFSNIIRRQEACCLMANKNTALDHKRKMVKLIHDCEKGDVTSQQTELQNTNSEEQVQSITSGQQRMLVGAGLRLSDISKQEDGPTSVVIIAGLPSKILYQAIFRKGSTQPSF

SEQ ID NO: 962640 - protein, 124 aa, Homo sapiens
MYGYPEDMDQDKHEKTVLMTVTPTNQMENSDGDKLVHRDNGERDNNEEEKITGSECTRLQICLEESRKKKKNMKELTPLQAMMLRMAGQEIPEEGREVAGIFRGRLMKMHSDDSEAEKAITKAA

SEQ ID NO: 962641 - protein, 391 aa, Homo sapiens
MQGRSTCFNTGLSSTALPKWFVFLNCHIRPNERVAISIIERTGAAQEPQEADIYTHAAVAQPQVVGAEGYCGVFTALLGTYSFCGITAYLSCAAARLVARCTRAIAERMAWQKGERTGYQHTLVGYHFQGPPSNGENPLYAQRTVSLSTLGVGHINTKRNPEPFPGPTTRTLGPTVAVDPKSLFDNVVYERRTRLTHNLRTADPYERLALWFPQNNGPEGLTFRDKFAEPFTPTSSTITAIHDDTPWGNTRGYSKRANSSHGPLARLTACCTGSPTFVLIGRERMPGNPQGPLNNGNFALSFHQALVQPVTKGTRTYGLRKMARRKHSYGTACPPSGHNRALNKTLGPRSHYPPPRGAQERTHEHQRNQEPRGHIQPRRRYNHTETRAAIQ

SEQ ID NO: 962642 - protein, 193 aa, Homo sapiens
  misc_feature (175)..(175): Xaa can be any naturally occurring amino acid
MLDYYEVLGVLRHASPEDDFKTAYRKLALKWHPDKNPENNEDAERTFKQRSGGLMTVLSDAKKRDIYDKYGTEDYNGGGGGGSHFDSPFELGFTFRNPDDCLQGTLSAREGTQFSIGRSFGQLQYFLRTLLQLPCDRLSHFSSGRSRNSVCDLPSVTCTGAEFGSAYRSSIFAYXPFEGFFGTPPGPVDLYPC

SEQ ID NO: 962643 - protein, 321 aa, Homo sapiens
ERLAATGREEAYGVLPLGRRPGGNLGVQRFVQSGPLRNLVIAHWKAKPRFFGQVRAPASLYRALDEGSYVGLAFVASAAFLQQGTQRETHKHLLVTEAPVDQHRFKSEPDIAGLRTKAFSSRHTTCSAWQAGFSAAVVEEIVLTTANSMVFQSEHCRRYMDVTELAGCTAAAQYEGYPGNVTGRTHTKTPEGKDTQCASKLTYRTARCKKPIGGGRTLSVRLPRDPRARERVAGPRASRAAVGINREAGGPGRLTTSQDDPHAGLPSDYVQETGLRRMTDADTWNEKRRKTGGDHCNTYASRKTLQACRTYHPDGGKGPKY

SEQ ID NO: 962644 - protein, 300 aa, Homo sapiens
YPGKRGGAFKVLIAAQYSEVQVRVLSEPAHFHFGQTNRTPEFLRYSLPARSQHYAGLDKTRAYLVVFPRANAHCHTYVLTNEELSGKVLQRRAAQVCARRVSFADSDICAPSQYLGCSPRLGIMQQTNRPLRMQRTERECEFLGLLDAYLNDEDLIWWANECHWLTSQFVCTLLWLYKQVLEPTFRQAFPIPTVVPHLALTSPVPGCLGGTRKPVLKKNGPSSMPKKGSERPSYKGTHHGTDKGPGRRTEGSAARTAATQGGVPYRRSDWYCVRRCVPQGGAPFPPRNRWGAKASTPETP

SEQ ID NO: 962645 - protein, 404 aa, Homo sapiens
MLGKIPEITVSTSVVSLEEKLPRRGYRERAWIPRELEALGRWRLLFQRSMWASIYWHVGRKEKRCRNALAEQGGVLEGAKLNIDCNGLWTYGASQEMSNGSCYMQTSAGGWVSRREGLLELARLKSKNPAKGRRFDRTLLSTMYKHVTEDQRRYALRSRNIVVITKDSDQHGRGPSEQRLQKTRLCTQMWGLPWLSRLIIPGIISSRIINCQGQAWSFPTRSCVTAFETRCRRRYNSQRNGGTRNIVHSTPGISPTMGAKGAYHNRAFRSGLFDLNDKQFSPPGGGTPNQLYSSRVRIAEPLADLARFDPPQLRSRKTGKAIVGEHTEDDTTRKRLGRKEIPSAAGSRCVSPRSTRHGAKRGAVEHEQEPAKNTKRATGATIVRRAKKDTNTRHEQHHLEQRNN

SEQ ID NO: 962646 - protein, 71 aa, Homo sapiens
  misc_feature (46)..(46): Xaa can be any naturally occurring amino acid
FGSQSLRSLVQAGCGNTRQIWGSLANLRHSLVFKRNFSWLLPTWMXAEEITGAVCVSPTLGLNLCVVFIYS

SEQ ID NO: 962647 - protein, 313 aa, Homo sapiens
RIRRLGGPKARILPESLTSVFADETGPCGVRVEPGRTEGARVSSECVHACVRLGSPEKAAEGQAQDHPVLQQGAGLESPQGSQSQAQSVPPRVSKTYSLESRSKSSQEYSPEVPTMSAEAKDEEAPKVFSGPGSTCLGSLGPDIREELNPGGPPSDQGTCRSQDHQEFYTPVSQAPGSGTPLSTNWKADTQGQLCSPPGLSIGPSEATSSLAAELWTGGFGGQTTDEKVRTVRGPRLYKNVDLREGGSLVHPREEEMPQFGRLVVARGRPKKKDFSRNARRESPCGKLGEREDQETRERHWTRIALLGGNTRP

SEQ ID NO: 962648 - protein, 89 aa, Homo sapiens
WLLTPGLTTRLSRTASDVNLPTIALCSRDFASALCVTLFIPCNIKGAHSVGLTVGDAGSESSAHAWDHFPVNIPLGAVMPEFVLNFVSR

SEQ ID NO: 962649 - protein, 264 aa, Homo sapiens
RGTGEAGLGPPRAGRVMLHHRAGLEVKRGAERDQARTDLCPGKPRGAGQIIRKALTEEKRVSTKTSAADLVTRNQITLWEDLIISELRERFPSHRFIVQKRPRLSGGQVCAHPEPDVDHRTPIDGTCIFCAQIPDVLAVYACGLCCVRQELEFGGVIYHCTRVRRIVHWAPAGSGAPSGNGQRAPGSPGETDLSKGPWFLTDNLAQMVEPCDPCSLYPELSMGAVAGLARAAWVPSDGKLPIGPLPLGPGGPAVPITVGRAWLE

SEQ ID NO: 962650 - protein, 235 aa, Homo sapiens
  misc_feature (20)..(20): Xaa can be any naturally occurring amino acid
  misc_feature (29)..(29): Xaa can be any naturally occurring amino acid
  misc_feature (32)..(32): Xaa can be any naturally occurring amino acid
YTQRKRFSRKKCITLFFLQXRSVLRLKSXALXFLFLKPARTHLISQVVGLRRTKRPRSEIFPHKGKGFFPQKKQTNLWGGQKGKKKLFPLFVGRKNPPPGGGHAFLNQRKKNRFKGFEQFVDVGQNTNIMVVPNRWWANTRANIYNGGVFPFCKCQLASCNRLSELLGVFTMIRDAPFSARPGFIKERFSFAGEDRAQFLPPYDWFSHPLLWGCEGKTKGMNNTKRAGWGVKYTP

SEQ ID NO: 962651 - protein, 216 aa, Homo sapiens
DVGQDYTYGGVNAAYSSYPTNVCGGVSDEPEAGPSHARLDGRTLRGIGLGSREEVIRRAGTQGPMVLDPKGSGADYGLTVASVSTPSEVVPVTVLAVQEVPVQSDEPRDTVPKAPLYAMMDESQMEVYQEKCLPWTQLELSRNIKDILKVRHSNENFQGSHVFTTEKRIGQGILCIDNVHVWGDLLDSIAFRELPSEIERIQGESREAFTRRDTIP

SEQ ID NO: 962652 - protein, 201 aa, Homo sapiens
MGNPEKLRGRYRLGRVGTDDGLPARVPSLFPRSAPFASLRNGSAELRAGTASFPQAAAGFLRELFGRGVEAPIPKEEQAWLARRVCNPNEGGEPTLELDSSIPYVNLDWEPNVPYRTPLPSTKQANGTHTTVIAPPKCPIKLLRHPSLAENLQHKPLGERHITMLEDHLLLKLWPVVARLSCAPGLMPGPDSKIAHPGMFQ

SEQ ID NO: 962653 - protein, 245 aa, Homo sapiens
  misc_feature (17)..(17): Xaa can be any naturally occurring amino acid
MTGNLKRFTNDHRRDGXFLTAVPGSEGLQHESSKSGHFNLCAEQGCMTVAQSRLFLPIQKIPGRRAGSLAPTGPANVTQACMAEYLPVGRFPACEKQCLAGSWEPSGCLPIFGVSQQKEYQSDGHPGVTTLVCSTASTYTGAITVEAFLGTDIGRTHPGGDIPPFVFAAEEKHPQERLIGLPRGGRKHTVIRTEGTNGHYRGEAWREHAEIEEPGRIGRALGGIPRATHGRGNTPFGSTPGDARQ

SEQ ID NO: 962654 - protein, 70 aa, Homo sapiens
VPYDRCWLADIVHEAMPLTAIHDSGTGSACDLPPYSFTGNSGYSTTEMRVRYCSTYLSCQLGDFSVIGIC

SEQ ID NO: 962655 - protein, 207 aa, Homo sapiens
MRSRPEMCSFDFLLSQIGSSKKSPSCNRQLLCRHYLHNMATFYSYKPLEHNSNKMAEANSTEGGLPSITQHARTHTLSTHHDRSPSLDGRHLGHHSREHPQELGPSACFLGQLPACGHSHAQRWGFGQGSGRFLIGESKVTSSLSQVHHSAPLTNSHYTHQKLQLLAPASTSMGLFGVPSFHPRQVRGFPLAHIRAGHLVGPPKAHY

SEQ ID NO: 962656 - protein, 108 aa, Homo sapiens
MSPRSRESSPPHLSLLPIPLHVITIASPTPRIHTPHFSHSILHITHISSSISITPQIPNTRYTTTYSTHTTTTHNNPNNTPPPYTYTTPTYSHHTILYTQQNTHTLPV

SEQ ID NO: 962657 - protein, 87 aa, Homo sapiens
TTTRRQRGHTGLSGFRRNLREISQCRSLDVCNEGGDVLVLQRNHKVHILIRWTDIYTGQVWALYHKSQEDLGEASVEARAIVAIENL

SEQ ID NO: 962658 - protein, 46 aa, Homo sapiens
  misc_feature (35)..(35): Xaa can be any naturally occurring amino acid
MTVQAGVRSDRVTARKNKLALDDKLKYKTIRSMKXDVCDLVYLIPV

SEQ ID NO: 962659 - protein, 267 aa, Homo sapiens
MAVGSLVQKNPPIREYRCRTGTHDNETMPERLPGTHGRWKASHQATGSVRTHYGQHPPGPRGPNPPPCTDPADRRRLNRTLAHWRATQGDTTSVHRNFNTHMTLGSRTELGRTSTAYPSDKKGQNIASHTFPWPRVKQHGPHRNILSPRRIAHMARHTCIGHTEHGLTKWAITPGSKLSTLVRPRSITSTQFQRCTRCEQPRGAPTPRTKAHQHILATSQWGNPRKTPLPPPCRRYTALATIGTQLSRHHIKPRRRKPYKIGQQDAP

SEQ ID NO: 962660 - protein, 294 aa, Homo sapiens
MMVSQCAAETWNAQASCGMRDAETTVAISMFLLSAHGVAVTTLASLDSSLVFLPPSGSPHPIFILSPTRPCHLAYLSLGTLVPTGEGQDLKVFGLFNNQSSWVFFCQLLVHVIRGMFAPNEQVEDKTVGGEALPDPSLNLTGPSLCGGKWNIYIGRYGGSGSAENLLGDLGELLGAFCNLLESQSTMWIRGPKVTDNIPLKDLLYRAQMLTEWTIRTNNLKTIGTHYTSQTRHPAWQLTEATRNKPVQNNGPHQRPRTGGGQQAATGSRTGPTTPRQTKTESTNEHSNNTHKYA

SEQ ID NO: 962661 - protein, 80 aa, Homo sapiens
CLRAPPGLRAPCTVSLPSFPAPDVPACASLPAMVCLPLPCPTLVNVLLCGLVVWLPLLPCLLSLLCFSDHATAWLLSPLE

SEQ ID NO: 962662 - protein, 553 aa, Homo sapiens
MRPLILEHSAGLTTATTLTLTFPHYLHCFCNPRMLLPRTVHLLTLNRAPTAPGKPSPRLLTLLRADCTHTQSRPNADTHQRLANDQRLLHTAPLTAPPHAWPTHAPTATNNTRGADTPTATPPASATAGPNATYAPTPHDLAPTPNATTPLPAPPSPSTAGTTTSQRNRPTAATTHPPTQPQAGTPRRRRPQARATRPDGISQKHDHTTPSPEHSGAPPINFTAPPPLKPIPYPTQPCLALNSANRTPCLDPPSSDMRPQPAHLYQNRFDTSIPHELTVLAPQFHIPPGPFTARPPMTVHINHTYLQRSVGDPPNLQGQRRIYRPYTHFATHPLGPRRTPPVPAPITHTETSPPWRTPYGRADTPRPEDALGAHTPQGPQDSDKHDQRTLRTPLAQLLRAYSPDSLHTSSDTNLTRVLQTHMMRQPTQQTQDTAQTPRPDAVPAARSTEPTTTTPPATLTCGTPHETNRHHKRDPTADDHPTHTQPRDHQTDITPTPRLKGTHQASHHTQARQATRAHATTTTSSVQPTHARPARRRDNTHTRHAPDTTESGT

SEQ ID NO: 962663 - protein, 228 aa, Homo sapiens
MTYPLGHPPRTPATGQHQGRGQSPEHTPARTPRSPEETTRPHGKPHQPPQPDHTSEDTQRRTRKTPQQQKRHKKDTTKTKDYRAEDKQRQVLRTERETQNLALSKLESPKDNKTGNERQPAPPCKEHAQKKDASSDPRTPALAHNIGVTRLTPKMACIKEREDHHRSTTHHARSRRDPTRVGGTTRDHTPKGASAPQRPRNRRQRHDITRETATTHTHTPTTPPSAPS

SEQ ID NO: 962664 - protein, 546 aa, Homo sapiens
RGPSVGSWGPPYSLREVHPSNPGVHPHNSHAPQVLRPRTFPPKDQGNIPSPPSTQTREKQASTSPRAKDPDAKGGIYDIYVPTGEGQAGIVNGTVPRRNHINTGTSTTKHKEQTQAEERSAENSSETVIPHSRGRTQQGYTTRYTPRTPQSDTKEGRPPYHRRTHDNTIESKAPTGPPTGHHPTTRTVALWAKPPTSHTPLAGNSHQRATPTNPKKTNTRDGAGPHPTSTRPAHTHKPPKHEAELTTKRHKQQRKQTITTTSTNHASTNNPGAGSKPHQQHGAPTKLRPTDGATNRTKSIQADNTPRRDLQADPPATTHIVHPPEELNKHQQIQPPDTQHHTRPRTHTRPTHAITPQAQHNPTLYNRKPDKVTTHNAVHPQHTKQHDQHTHSSCHDIHALPMPAHTSRDPHTHPTSTVDDGTNHNTDRDGNPTSTRTHPHTRTHNALTRRDTPTKRRDSAEHRQRRHNDTRGPAENKGGDDKRGTHKREAYRREDRATTTTEPSERSSETEQGNSAGQSQGRGHDNENDRSNVRSRTNEAGRRRAA

SEQ ID NO: 962665 - protein, 333 aa, Homo sapiens
SRFVIWPLPGRGGVPERWSGWSYTGYIWHLIHAPPECGLSVILEYTYLPPTAPCDEKAMGTSPAPNVLMMCTCGPVPVCEMVGRCEVNACPSPYNKQQTLHHGDAYSWACNCSRMEMTLTLCEIYTSFLTLRTTTKRTTKVARKTCYPTYNEMLVYAGIPQGGPADSWELQLSVLSEQGYLGERPPRDEVNIQTCESWTWLMRRPAGSPWDPRGHGTHVEPHESHNPDIPCWLAELFGDGFTTVEILPCRQGPGTEGMPIKPRIQREPEANCRKAARNDAEPRPKPPTPPCHTPPAAPHDTDPHRRTVRTTHTRPRTDDTATTNDKRQQRPAS

SEQ ID NO: 962666 - protein, 158 aa, Homo sapiens
MCVNPKSVSSVYPNNHTLSLTEGVGSSQYIISIEDVCRESSQDCVFFTEQKSGQRETVNTTHPTRTILSPYRGVGERIYIPITFQFTYMCDTRCCCGGKIFGEKHFTPIAVFTHKKKTIRCGTFQRRDNLTTSSRVEKPFLLLLQRRFVGGQLEKLPQ

SEQ ID NO: 962667 - protein, 89 aa, Homo sapiens
MPIRDLRPQVVFAHHADRTYEGILRPGTGGDGPTRGGHSVWRPGLRRVPGSRCVLPAPLVYCSRLDTGVPHAGVLVRDTSLLPREAFQI

SEQ ID NO: 962668 - protein, 401 aa, Homo sapiens
VLVLQAARGPAAPPLCSVPVHDMQMCSMCLCLCVCVHCLLVTHVVPSGDYVTVCDMLHHCDVCCVPLHVVDNHLPCTLCLDLSTHPCVTTSHIRCAAYLALIVLTALIARPLAAPTLRLLHHSLTNCHGPNATKRCASTNPQQPAPHEAPTISHARAPGRTRDPLPTPLPCSPTRHTHSTATPLLSARAPSRTTTPMAAPHFSPTPTCAPSPHPPLPTYHYGHPTCPTGAPSSTPAYHTLRAHAPFAHLPSRTARPLSQPSTGSTHTWSLLPPPPSTRLSLLDYPLPRRCAPALAPETTGPPSGAAPRYPPTFHHHHTLATHSSHPFATPPPNSPATRSSLAPTPRSTFGPVDLLRPLAPPWARPRQRASPAFGLCPLAKVSRPAPCQRHHHFPSPPLLAL

SEQ ID NO: 962669 - protein, 159 aa, Homo sapiens
HLITVILCLSTEFSSYLERHGLINFGIYKRIRDPVPTKKTGKVIIIGSGVSGVAAASTVTKCLEVECHTFGKPGDRSGVDRRSPQFRQKDNLMYADFLAANGWLNRDLGRDILLGCGSARQVNMELAKIKQKMPTLEANGQAVPKEKDEMVEQEFNRLL

SEQ ID NO: 962670 - protein, 276 aa, Homo sapiens
RSWPVICCEWIRRTIPWLENRVPENTMHAMQQNAGGLPGTTWRLHNAAQWCSENVATLEINVQHCCMTNAACSDNLALPLTALLMCAVNVLSCTLTQLPVCACLVSMCVMNVATDVMLCLLDIDDSCECLDADLERTCARELFLAKKCLTYTMALDLLAKGWHMHAAQTGPTDDLHTTTLGRLNVPLSPQTAIDVHSEEVDPVHATPKEPLLDARLCQTIGTMEALMQLGPTYFDSTPVVKRPVARNDRVTQLVTHLMGPLTSQKPTGEPLLAART

SEQ ID NO: 962671 - protein, 105 aa, Homo sapiens
IRVLGIQVDTDGSGRSFAGAVSPQEEEEFLSPGCASHNVYEVISKSICPSIFVGRPDMKKWHWLCCVLVGLPERGSPDGLTRRGETSNCVMLGDPVDRPQSQTIL

SEQ ID NO: 962672 - protein, 70 aa, Homo sapiens
YTYTENWRAIKALIAAQYSGGSGPACSPHHPTIHNMAKPTCTPRISPPNFLHGNGRQHYMRCDDWILDVY

SEQ ID NO: 962673 - protein, 217 aa, Homo sapiens
RPYFFFWPVSVFNRGRGLTHARTYTHSGFRICVESCDIDTLHVLLKLGDLLLQQVWSPPGRPPPHTESGSFLDTCSPVGTTLVNAPQTSPVQLGYDATQCLQLSHVRLIIPRLDIQQDGGLGATSAGFWALLLRVLPKAAPPAAVPPPCPPPHGHGPNRSRSSSIVHPLRDEAEHSGLGGYHLAQGKIRAGHVVADGPVGQESTSPDTYSQRPPSLE

SEQ ID NO: 962674 - protein, 204 aa, Homo sapiens
SLPAPTPWSERRSEPRPGGLLGAEQCSAWHGIPWAPLPFLFPFWLLCCWAQCDAPYMCRPVITPRWALHYPAIPRCSPVPFGAPLWVPLARITKKYYTGAHSDATEPHFVRRAPGHGPTNTRFFTRTTALNDSRLIPDWFPHLDLVGTRHPRPPGAGHSNRLSYTAGGGTHTTIRPNARCDMTPDNSSHSLNARSNTRRQSGGT

SEQ ID NO: 962675 - protein, 664 aa, Homo sapiens
LDWPCHPTPVEPDELGPVRCPDGALVVCVLDELLCPCVPSEAAPVQVAPFCRSSEMRGASCVMLGTVCCFGGGLTRVAGNAAQLHALLLQRETDLGSTIDYAYKNETIRITQCNTALTYQNDKNPEVWSQGIGEREVSDEALGERPNIALGNPTESRGQIQGEKYPAITIEPYSGRAQKTVEYTPRHYKVEKPTMASHRQPLGELENLQATADPVGGDPKQGNPKNKTQIEQRTEQNQRHHRAAKHTPTDKTPRPAQIEEKDRNQSPIESKTHEAQTDKDTRQPRQRQAKHRRRHNIDHSRTPHTPPRERQTSAATSRPKTTSMDESHNRRLTPKQGQHRHNHERVRHNTRKEPAGGTRNAAEAGRQTKKARHQKRDRIHNNTYAETPPNHQIGEAQRSDLRNIDKNASVTHIDHDLTFRRQDDEEETSTLATTRDGTLYKDRMTSNHTSSRSHRNRTETKWLDIKHEHEATSYYTQLQPMSSDATIINGTEEHKHKRDDDTPYMRRSTAKKKQDPGQEARHRRHTERPNQTQNNRPTTRRRQMRHTHERRDERGALRTTDSTPGEMKQGEEDERREGEREEQRETTDVESDRGDNHADPLRHDLTEGRHEHRDHDDSETRTANNWTRSRRNVSHDTTDAPDDRSDSQHHRAHQNTSRHEQGQR

SEQ ID NO: 962676 - protein, 226 aa, Homo sapiens
GTSAIARPPVAGPCLRTPALRSTVNLLLRRSSSCRRRRLSLLDNGPACGPPIRSSQPTCTAGSVWIGCVGSRVWRLEKEYMGRGYVFGSIWRFKGNKESAWQCPGRRRWRAWGPICKCLQHPGAQQAYYIKALSKESAEVLLALLGDIVHNCGLDGSQIEYVTVDVVLREMLENDRSMRAVVSYYLPASRFHGRISSPGCGAGPVTTVREAVLGAELARVTSAALS

SEQ ID NO: 962677 - protein, 70 aa, Homo sapiens
THSNRNGIPNALPNGKNSRIDTTTQEAPACKPLRATTTPFAERHKALHQGAPKTRHIYASTPCYMTVPVP

SEQ ID NO: 962678 - protein, 285 aa, Homo sapiens
PLLRGDTSTVEEKSRLRGNWEATMLSAIEVEGAKNAELIKLLTWRSKTILQAKHHQHHHQQQHHQQQQQQPPPPPIPANGQQASSQNEGLTIDLKNFRKPGEKTFNQRSRLLWEIFLPTSLRQANAGNYLSNIMAKAGASLHSEGITRHLDFIQLGKPDTLEEIAKVELRHYANSVAKGRLRVRFACHSASLTSNETHSISMCTNELLEEALTGVGQVDKGLEVHKTASIRGERTLKETGPRTKYPGTASWPGKHGTDEVKGTSRVNTNTTDPGPGNHKAKKIRE

SEQ ID NO: 962679 - protein, 198 aa, Homo sapiens
  misc_feature (176)..(176): Xaa can be any naturally occurring amino acid
ATLTAPVPLPASWAASLPIHRAPCRRYAPMGACYLRASHAPGGFRPPGTGVRSPGFPCTVMARSEPRRWPASRGSTELYYPSAKKRVECSYRRERGVQAATLETIAGWHTKQGVNNQHKYGNRWFRDERIHSQVGLCEYAFTKKVGKYHDRRHLRNPGYERRQVATSIDKYRRIRXEGVGEPYWRQWREGRKIDYEHE

SEQ ID NO: 962680 - protein, 222 aa, Homo sapiens
MAGASAVAENHACAYVALNDALCLVPMLVDLAWVALPWELPGLRCVVLWLAVVSAGCCIPHSKCTGLLWLCLDFGDVLLVAQVVLGWVMAAPCFVVGCLCPCCGCWPHWRPWFVPPVALGWMPGTSWPCLVAGPAPCCVALAGHTVVFGAGGGLGFGFPDWIPLGAYGWHPWVLPNNLGLNANPGLFCLGAAFFVSPPGGGLFPCRGALGLVVKWPGLLAPL

SEQ ID NO: 962681 - protein, 113 aa, Homo sapiens
MESQLPPSGAHSSVPLALTALNRPIPRETSIDTRGPSPKREHTITGREWNRGNRHTSNQRVQTPYEHQGRQNPAGPHQHKQRTHSAHETHTKQQSWRRPRDPQGHTALGHHKR

SEQ ID NO: 962682 - protein, 122 aa, Homo sapiens
SSLIVEKTSQKSGPQKSPHFCPNVPIILVGNRKDLRNDEPQGEELARMKQEPVNTCKTAADVATRMGAFGYMECFSKGPKMDVTRGLRNGLRELLCRARRGKEKIWVPCLVKTLLQAQPLCG

SEQ ID NO: 962683 - protein, 308 aa, Homo sapiens
MPTARTLRQVQRLALHPTAKTGGLAACGQAGVTLARLLIFALRDISFLLAIFPKTQLYWVVSFHNDRLRNRVTNLAVDPTQPMPQQLLHSALFLPTKLVRRLVHWLLALDPAAPLISRPRLIPLGWRTLPLSWRPRLPLTYASLGPPAARAGTWPCASTGPWLRPSRHFGPGRLFPHHPCVTHARPPQPGAPTSSTASLVHLRARSPHPAPAGSLWSRPFSHPLPNTLRSHFLQRPFRATPQLAPRAPTRLILLRYPKLERRRKPRLLRPPTHASTLMGTPHDAHKDKDAHVDGFSAIRVRNPSLWET

SEQ ID NO: 962684 - protein, 276 aa, Homo sapiens
MCLMTDPANIWWMCCECWHVIMMCDWCNGQYVLDAVIECSNGQNDTYHEHTGDCMPMTGLVVARWPLPQDNACQKYCLSTTLRNVSDADLVAITLDDNNVMVYIMNVNPDIALAMKLALASCCIATPHVRWTLIYRSHIDQRQCHLGVDKDVSAPLHMWPNLLQTDHPVASPPQQPRNKYPRETTGEQLLDYLVPYPRKGPRQCLCVTGHLWLYFLSPPCMVNIHTFYHLRLTQSFTLQISTQGIGGSKNFPLQLVILPPLDGALRLIPPQVATLS

SEQ ID NO: 962685 - protein, 265 aa, Homo sapiens
LVAYVLLEPEEGGRAYRALHCPTGTEYTCNGVPRTRKPWPVLEPYAAGLPPHKHVGSCPLRSWLVPMLLYAFFSSGPMGTCTCLVLKPATCIPEPECCLCSSCQMATCPGCTVTRHGLVLRDLKLCRFVFADRERNETLVLENLEDSCVLTGPDDSLWDKHACPAYVGPEILSHGPHTRGKARLMSGAWAVGSSTMLAWPYPLPGLGACPALRKTPPVGPTPCLAASRPLARCTGVLLLRRGATLNGSQAQGLPEPLVGGTGAYF

SEQ ID NO: 962686 - protein, 151 aa, Homo sapiens
  misc_feature (11)..(11): Xaa can be any naturally occurring amino acid
  misc_feature (106)..(106): Xaa can be any naturally occurring amino acid
MSLKLSAFFLXPRASGSPDVPHTCHDASRRTPCSEDHHTRNLTGRRTEVVDSGRQMGTRTPLHNGEVLHERTTGEQEADKLKVERKNEDTNGGAGQTERRTEHRRXGEERRMDDEALTELLRSATVQAGQLNDDYGLLTVDTKKQKTDEDD

SEQ ID NO: 962687 - protein, 78 aa, Homo sapiens
KQMQQIRMSLIAGRLCMLMGKNTMMRKAIRRDLENNPDSGETAASYPGGELWAFVFTTGCDLTDDHGHMFAVPIMVAS

SEQ ID NO: 962688 - protein, 72 aa, Homo sapiens
RAWASPSPDMLRKAEEYLRLSLGECVSGLSCTHHWRPAVQSCAWTLQLPVMKCPLDRAYLIKLSWFDNGDIS

SEQ ID NO: 962689 - protein, 119 aa, Homo sapiens
MATAEGPETYKTKPSPPQCRANIQGETAPRKYTIKNTLHRDRETPPTPGPPPYQTATQRAPSRTRWQETKHPRPTQAKNHRTSAAGTQILCTSANPAINRTPVPSLNNTAEKDDDHTVK

SEQ ID NO: 962690 - protein, 113 aa, Homo sapiens
FPPPRPQVHGHHGVLGAAAACGRSALCSVGSEQAGSASGKPPARLGQWRFSRHSAAAWGVNRQGHLRIEGSIPRFQQSTRILTRNELPEQRGVGGGLDVPPFDQVGLGGLKKA

SEQ ID NO: 962691 - protein, 78 aa, Homo sapiens
ARFHGTPQPCPVCHGLHMYRPGLRLNWHGLSPLGWHHARSIQTLRVLMWRSCGQLPTGIRDFSRCTVPACANQRCIHI

SEQ ID NO: 962692 - protein, 68 aa, Homo sapiens
GGGFFSAFWVWANPRVPPPQARPPPFHVIPNHHNSVDSGGGAPKIDFLWPGYVVPSLVGKRSLGKELL

SEQ ID NO: 962693 - protein, 281 aa, Homo sapiens
MSPLHGYQHPFNTDLIEKHDKQDENITSEEESKTPEQWTSAREGREHKGGEGATRIKKQAREHHRIKAIQIQKRSASQERTQQRKPHTGHNSGELGIEGKPHPYGISNSHGKEVYRIRPEQSCNNEHQLKHTEKSSHKKRTKPKQTHRMAGTHENGKGIHTRTSSEEKPKRGERWIGNEQGTTASTPTQAIGHDTTTREPRERQQHRTISHNTTKNYSVQRHADKKQGEEKETKKPKRRLLFTAKDKDDRRRKNNTRRQKHKHNNNQHHNETQTISTRSTP

SEQ ID NO: 962694 - protein, 399 aa, Homo sapiens
IRAWTGGQDVQLDGAGRRVVARTRCAASRQRVSDGERSGLRSGSSLRYGCCRLEEAYRFHEFHVGRALGVIARRSETRMPYGSLLGWAKYQHSGQEPPFSRDSLTGSQEFRAAALTACGRGKPQFNKNFHSIRRCEWYRKQTCRASDSPGGNGLFRSGGNAREERGAVFSKCFQGGVPENGLYRVISEFHCCVKQRPPKSGFPGEEHSAVDRRRPPVHPFTCGEHSSAISAGGLMTFLPGFLASGYGLRSGGPGIIPGSFGRVSKLGPFSGWTSQEAIKGLPGGQGRQIRVGVDKGGHMARRALVTGPSGGPNVGPMRRCLTRPREKRGNKMAPFGGPPPCKQQEKRALLGDAPHGHGNIPEPAKRSGTAHTPYMQASDKRQYTNTKETTLYANKPHYA

SEQ ID NO: 962695 - protein, 251 aa, Homo sapiens
TVKLPLMKINSDMSSLVVSLAHGAVIYATKGITRCLLNETTNNKNEKELVLNTEGINLPELFKYAEVLDLAGSNPKEIHADSHNTYGVMDGRGVSEKEDEEMGMCGTGIWTRGRPLDNLSRGWRDNSVLIEGVNKPLNRLGSGQTLPRIQQMTFETSFQFSEEATMLGSHDELRSPSACLWSGRSSGAVTGTVRAQAASEIASYPGTSAKLQDPWLRAVAQPDFLHERDQETGIQGSSSEQYRAQRELGPE

SEQ ID NO: 962696 - protein, 48 aa, Homo sapiens
MAVVCLALALELGLLVCPLGHAHGARRDVTPWDYTLLAAQDLGVALNN

SEQ ID NO: 962697 - protein, 231 aa, Homo sapiens
LSLNKGETSSGWTRGRFVNCCYIKFRFSITTHVHETLPKDCEYVGLFKWRFEDCISMDIHLLASEQRPEVQHYHSIIQAGHWASYGATIAPTLSQALYPSPFGGSCIISTAHISGASVKAAGNTVTGLPQVVPTETLPGTLTPRAQHSSYHSCHDGGAQAQGQGVFYHGFTSNGETIFHVRNVFTESQRGSVTCVGEKQFYTVLRGFYQFVHLLSSRSQRGYSQVSPGSHF

SEQ ID NO: 962698 - protein, 109 aa, Homo sapiens
MRSQYRENLEREKRISIKGRDRYSSRNKTCLAAKCTQEEMGGTKRTTFQSPQRRPEEAGRRAIEGSKKTTLRTGQDDHQKEDDQKRRGRTQTKRSHAQLANNKRRDKQN

SEQ ID NO: 962699 - protein, 205 aa, Homo sapiens
VLRWCVAPVVWPSLSAAAPGRCLVGLEPTPTGSLTPVPPAALVPWHASLPCNGQTRSVKGVSCCRVRKVPGAVPKLTLGSSDDEAAVRPRAPQVNAPASQHHCRVTAWGGCRGGAVAKQEDLEEKLKEYCATCLTDKSAKTRQGALESLRLALAVPLLPDFLLELPLTLADALEKCLMKREWRGTSPGDAVLGLLCVQLGPGPKR

SEQ ID NO: 962700 - protein, 102 aa, Homo sapiens
VTVVIVRDDLLGLCPPRVPLGPGIQGAGWKQLLVHTRLHDFSIYVGLVWRDKTRRCRAGEASSINLNNMRYDNLKDLRCPGSPKKKQDEYPFRMAMPKEMML

SEQ ID NO: 962701 - protein, 209 aa, Homo sapiens
MAGAAPTTVFVAGGDLARRSSWEDHSTCLWHDVIPALRWCLAAVAGGETWNPGPTQRASLSRSVASEHCGQQTGWGLVRKMIGTLLSNGAQQDGHLTLTCNGSNHGKAKPWNMGLTLPKDSEATHPDVHNITYTISPNLATRGPRDVACSMDNGQSNGQTIWHAKANLIYRTNWAAMMGNTFSGLGHGTGTTLPMGTYFHSNVCNRESP

SEQ ID NO: 962702 - protein, 300 aa, Homo sapiens
GTFYEKRLATEVVADALGERMEGLCGPKSVVWNDEGRFPHEAGCLDSMVVCACLLSKGHSCNRPGTDTWRKRREDQCVVCSCWMRRSERSLILVLGKTWEREEYSWTDCYYGAFAALGAPQELAEIRKAFFQVLSQERRWSDSNVVQDKALNKEKVKNTLETKALHMIQACLFSSTCPARQQIGGVNGLKKQRTTEQSIEEAENYADNCLAKETGMEAQEKRQDQIAKRRGVYSLRASTSKICIRSGNKTRGGNTIIRSEFRTENQKGGRVKTVPTEGARLTDPTVSWAGGPKEGGYKSR

SEQ ID NO: 962703 - protein, 107 aa, Homo sapiens
MTIRVHRRPGAPEGSTRTQRPPSTARSEPGASIAFLPFTLLHVFTTCTADDVGIRRAFAIILSFTYNLDVRRRATMLTKLDDRLPRNLHEVAPQSSFRHIKECSTGA

SEQ ID NO: 962704 - protein, 132 aa, Homo sapiens
QSWRRQSYYAGLMAEEPAPELLSALAAARERSSCFLSWLELVKQWAEARVFRGLLPVAAAAVINAPASPRCYLAPWLLVEALVGRLAGRVQVMALGCSSAVAALVRNILPQFVFFVDYASNCLYMEEQLKAQ

SEQ ID NO: 962705 - protein, 102 aa, Homo sapiens
MCSPRLDLNCWARASLCPCEPLEELGLQSVLPHPANTVCLTPVSLIPRLSMAAEADSCASVMSIPASSIQDLCIDKLSRFLVKHKIDEVGTTIRSKAATNCA

SEQ ID NO: 962706 - protein, 122 aa, Homo sapiens
GLRPGAVVSSPEPYVRAFLGKQEVLLAKLAAQGVVHGLIPTTPRLRGLNPAELRPVFCASGAPGSRSTIEPHRLSFPPSGHRLVNWPRRSLLCLSPRVFQPSNLNLDTCPARDPPSLHPGDE

SEQ ID NO: 962707 - protein, 265 aa, Homo sapiens
MSHARIVSVAKHSHFLILTLGCSSRDPGLSSGSLQGCRIQQRWSNGTGPYGEERPREVQETTVTAGAATIAFPRCQQRSYYNPVQESNQGPDMCCDHRVCSHTDYGAKGIQIKDQEQNGTRHTVDGNFQSHEAAHGRTDTTSEHLASVETQTSPQAEPSEDNSGTDRAALVLVTDWRAPRLRYTSKCPKRSWNQTMVDTTKHSNGKETNQRQEQTKRGHRERQTERPEKYKNEEENKQRDKEPKAKDKRKRKTKQKEKRNNKEKD

SEQ ID NO: 962708 - protein, 177 aa, Homo sapiens
MGHHRTPHTDTTPHHLRTLHHTRSIPQHNADTHTPQTHLQPSTHAHTTTPSPHNTQTQLHFSHLPYTLPTLPTSPRTTPQHQGTTPTTHPTHRHHALNPHPTPAHPAHPTPTPHTLPRHSQLRTPTTATYKPHHPRIAPHHAPPLALPNHDTHSQQQPQRPNTTPLLTPTHCQTPPT

SEQ ID NO: 962709 - protein, 216 aa, Homo sapiens
MYVSMCCELLRFPCPCTCVAVAYYVPHGHPTDLNVGLILPVQWCCPEDCWDVLPLSDLCLLTAMAADDDAECLDEVLDALSRMERSDVLCCASHTSSLGAQDINRGRAYDSSIYSYHWNDHNVVPGPYGIDHTETHIKDLHWKATDTYITTAAPTRQRTNTHNHQQHTQEHNTNTKNNKDQQHAHNTHQPTKAHNTQKRHNKQHKQQAPPNQQQTR

SEQ ID NO: 962710 - protein, 296 aa, Homo sapiens
PHPAALGSPGLTETWACSHSMRYFYTAVSRPGRESPFIAVGYVDDTQFVRFYSDCRESNEGDACRAPVGVSRMGPGSYLGPGAHRGQNKVTPPPQNTWLVLHKVGQTKGGPWETAPSKLAFGMRAAHMGARAKNAPLLWTSGQGGTYPINPHKRLPNRDTLAARWQTCARGDPPTLVAAGRPHISRRFFPRQKRAVDNYHSDPTPPSFRPTPAKTGGIRLMTRGTHQHFLGPTPLGPPFLAGPGGPPPHFGAAHDACIKDDRRPPQLSGDRAVSIGVHTMLPHAGGEQNPPGSERG

SEQ ID NO: 962711 - protein, 231 aa, Homo sapiens
MVNYQHRATLPTKPYFYNAPLTAASALAALLPLRFPLPLPPTPCPSPSHSLLPATPLAPPRSCPPPASPLERPPLPPHSRPPPPPPTHPRPGPRPPPPPTPPPAATPPTQHPPETPNHHSPHPPHRPTTHTAPPHTTPHTPRPLLPPPPHHSPAADTTRPPPPPLPLPPSYFRRTNTHFPPPLPTLPPHPPPPLPPPSSPTPPTPHPPPPPHPTPTPYHTTTHPSPSPPPP

SEQ ID NO: 962712 - protein, 107 aa, Homo sapiens
MGHHVGVLKTKIIFALWGTGSETDLEIQINCAPLCDDTQTVVALCVLTRVEVRGPKEGFVGQHGSHSMCEITHMRMYMWYRGDILCNIVKFDITHWREQSSLLQTVK

SEQ ID NO: 962713 - protein, 120 aa, Homo sapiens
YGKVLNRIIVNDLQGRNDDDASGTWDFYGSSVGEPDDEKWLHCIALYSQPPRTRRPGMMMTMPIAQCVRIGIFRDPPRYRVITSKYPVAQGPPENLGLPCVFRDDPFTEQCEQTGSSPDS

SEQ ID NO: 962714 - protein, 361 aa, Homo sapiens
PPCSAKPAPQPGLLNANRMRVCCTRPLGPPWLPESLLMAKTPASEEAQRKKNNAGARGEPPWRACLSWHWHVLAPCPLPGVASAWLADCARMDCCCSCKVRLLCAVWCAYADVPSTYPFLAADSGERNYVTFGPRIGELCQQGTEGGEQPEGDANQAAWREGSGGAQRRRPPCRQATLMENRTLPEPCRVPETDKRSATKGQTRTWSQNTDEPHGYDTRRNKMRRNEERTGEQRPGSTRGWPRDHGPAVLSPPEKKFPESSQASKITATQADREHPDGQLAQPQGRPMTKNITTTVTKENRRIKKQKRRKRNKSNKGKTINHHHKRERKQTQRQQPNATKKTLKITGNQNNTNTTHKSNTH

SEQ ID NO: 962715 - protein, 441 aa, Homo sapiens
CCEVEASSVAGPAETDHSALDIHEPNVPHTQCSDDVRNVKCDMGRTSEQLSCSVAKSCNGGSCWPHSSITVLGSAPWLSTVVIGDTAVDIAPIVYDRRMARELTIAIYTYPGLRHSCSAFMRTILSDITYSMTVPGNHSIPLNQKGIQHAIKHSEHPHPACYPPPLASRTTWLQLLVTPPLYAKDGCSMEQRSIIDPIDGYPVAGAQPGKAPPLMTSSALLLHGTRNRSQTDCGTTPENPNAATTPRREDAGEKPLPANTGPVNNDQAPQGTKQHTHVGPRKHPANEHMGTLKDNHDTRDQQLTRHQTHRQRTHRLTPPPAHTHTPLGDAPKQDEGTCNTTHKHEEEHLKTNHKHKHPTHRTHAAETATLPPTNTARPPEHPPETAHAMNTAPHTNPRHTHKHHHEATVTAVHNTKRTHHSTRAPPPRPPTHPAPTNNTHQ

SEQ ID NO: 962716 - protein, 168 aa, Homo sapiens
AGGGGQSVLPSRRALLAGWGACDAWCSLRGQGTTYLRMWRPSECTTGPGTTPQIELKLCMLAASGPLVCLGCVASVPFPLSDKTMVLGIRRTPRTKRFLNSLNVRPGLVVGSEPNFMLFEQVLEVNWCWGAHPLFAFLLGGPASSQLTTATALMTDPSSSPGLRCVRN

SEQ ID NO: 962717 - protein, 147 aa, Homo sapiens
AAPCPSLQPLLPLCGPPFPLPVVGGCPRGLGAGLVGPGPGCSGALGMCGRGLVWLAHDRGFRSAALELLINLLRRADSDGKYSTKAVRNEFLPLISLCPGIGYAQGGLSEASCWRDLAEASNINSHQWFGGLPEAPQQVRPMGTPPS

SEQ ID NO: 962718 - protein, 193 aa, Homo sapiens
MVEDGGFTCVGPGWSRSPDLVICPTRAPKVLANYRAVEATRSPGGQKHRNMVHNTLYIRGHKILKKTPCDTRLHDDSEGADVLQLGQEPGTLIRGPKLPNSIYIGDTGDFHYGTTPTKLTPDCCVERPTWDQQIPSQDPLNNMGLDSANDRCLILQHGIPIQPPRRGTKSPQFPTPQVDTRNGPYPGATPSPG

SEQ ID NO: 962719 - protein, 423 aa, Homo sapiens
MGRTHTTYACASSIGKQLPSFELLMQIKPQFTAMSYQAVEPSNIQCVNYPTMCTAYLQHALLCCCATPNFPSARTTSHHIVCPSIALVRTLRTLLLAPQLHSQLHTHSFPLSTAHQVQHNNPNMQHTCHHLLDTAHRIPHLPICTAVYVLARPAWHTQQAYIASFVQHNTSDGSTQSALPRCHRNTSLTLDTSRLLSLLHASQFILWAYTHPPELHRALISIGYAFSIQLSLHNGLLHLHLSPPSALTLCPTTLWRLKPLQVVHLTPSAHTNATRSSTTHNPWPTASAAPTCHGHPNQTRGTAGSKTRHPARPWRATRTHPNTPYGCHKLIANPTPNWLGNIAVWEPRPPPRVKKPHYCRRPISSNLSVTTQTLYPPLTDEVTYDPGAAALSTVQRIVPLSTIYTLTLCTAGVPLAHTRRATS

SEQ ID NO: 962720 - protein, 344 aa, Homo sapiens
MHLGTTGKLAFHATVFKLYTALQQYFQNGEKKTAEDADMELTQSAACRVQSNTMAPKQAHCTVILSQSKQAGHHRPQAPSRTPTQNHSPQFLSLSTPHQCFISASKAHCIEHSKRPSNPSLSLCQQRHSTTKSGTEHLHPLTPPPAGRHSFSTLTQTPNLRGPQQATQAPPPQLLLPSFPTRPDPHRDPDTQPQRPATSANRPASPDALTRPWHLNRPDTGRPGNQSTSTHPPRHAPHPPNAPNSPRNTPTTPTTHATAHTPSPPTHPTTPDHTPQTEQTGAHTENSNPSHRTQTLSHTKDCHPNADDPPHTRNTPPHPPPHTRPQQTQHTTDRSPHPTARTTN

SEQ ID NO: 962721 - protein, 86 aa, Homo sapiens
YADAWATTVHLNSMANESSESEESMNRDSSQTLVVLSDPNGSACCVMFIECRTARDMVSAVYPRSQSTGPVMWEPACVGIISSRDI

SEQ ID NO: 962722 - protein, 393 aa, Homo sapiens
MHLRPAEPLWCEECRVLPSCLCAWCFCPLDPSAPKDHALSVMLPLCLPLPLPLYSACHASAHACVSCDDLSVVLLSHFVVCTMLMLCVHVLCAHDVVTYFCAVLIPMCPLTASCVLLLLCNLQVLSAVVPACFTEPVLRVWWLYLCPLIRTVECCCSGTCVCETPVLCDPVSTVPACLCLGLRVLVLACAGSFATFACFLPATVLLVPVRICLLLLTCLPWCCPGAQTARRAPRLLDGLAMLDAAGPLKHVPGCCFPVPGHVWLGLLRTLGCRVLHLSRAWCPPWHCHALSFTSQSAGLGPPALANANRMPYHGPFQPKVAACALGETAPLTTPLANYYHSKNPFQMRNALQHTVTVGNASLSSHDVFANPLLETRDPQLVLEQLTPKLSTSS

SEQ ID NO: 962723 - protein, 63 aa, Homo sapiens
MDLLIRRHRYDLTSVKYCDLFSSMCDSGRMFERRVQTQVNRDNAIISSYSINAGVTVNVKLSF

SEQ ID NO: 962724 - protein, 218 aa, Homo sapiens
MDNLWLGMTPGDPLDTAAQPLVQTLAPPDGGAHGPETVRSTDNLPHSCWAWALCGLGSLPCSGPFQQHLSRDVVSFGGGRTLHLDWPRLPCVAPLEWPGADGIFADANWQFHNPILPSDPPPGTIKHTVLRHAFTGDVRATLHQPKGSTAFPKYESSTNLNSRTQPSTSRPKDPGGPQRQPCPTHQAQLTARPPIAIDEFGSIPSLHVSPVRTYADPV

SEQ ID NO: 962725 - protein, 176 aa, Homo sapiens
MAMKTCGTTLHALPQHPSQPGEPQGNAKACVVHGSCIYKDMTVRSSMDDILTVPHSDSVCQDLPSARSSSLWKAAKDRVLSVAVTGDVLCHDSPRFDPHCSTIWGFAYARHGLASPICAPKHSLAWTLDFHSWALDQHLTAHQIGDLGKLNTRHTRIGAWNSFSDLTFRTPRPSPN

SEQ ID NO: 962726 - protein, 109 aa, Homo sapiens
MAIEIETWRNYTISYRKGKMNKLTNQRTNIAQALTPTTLSALTEFTPSKLTFCTRRRQQLHDPRNTSTSYLSNSYQAAHPSTVAKYAGNAFIALERDHNPTRAWLHTLD

SEQ ID NO: 962727 - protein, 40 aa, Homo sapiens
MQEKSSTPLHQTNRGDEKTEDTAEDTETEQEATARQQINC

SEQ ID NO: 962728 - protein, 316 aa, Homo sapiens
SSQHRIYWLCKHVDWTLETDENRIYKQCCVAGLPVYYEEELYYRPALMTAIDGKTVTVCIRCSNQSLTREDSSQHVLQTAVNQSDQFLPSEHPPSGHGSWPDPSSTTLLEQISSMNLSVLHRFRCRSRVLTTETHAIHILTTISSPPGILLSLTLARSMAATCPVICKDQRKKFAGIFNGQRQYLNTDFRLSEHKLTLTTLEYPRLRTSLTRHVLLPTTEAIGTSRILIQLYSHHLSNLSKNSLLEGSYTTASVITSTTELTISHYRPGTHIESNQSKATKDKRKLPVAKSKRAKRPSRYNLTNKTPRPYTLPTGE

SEQ ID NO: 962729 - protein, 169 aa, Homo sapiens
LIQNELFQSWKEADIHESMNIFHDGKSAFGIRIGSDPNIRSFSTWCLITYGQQGQSSHDIFLCYNDYCSTRVARSLCPEPYSCELLYFHRRRQDIALVRKWNQRISGNALKLVQHANEIAALQKIVHYSTMMCPIMKLVQSDTRQYTTTSLQQKIEVEKERHQADERPD

SEQ ID NO: 962730 - protein, 186 aa, Homo sapiens
MAARHLVHRSLLARGCTARRQSPDTPRVQIVAAELATAIPASLQTKHSLTTQSSLINHGSFPPSASLLTPPTTRYFPDVHTSLLIRRNFPKWVPPSELFPSSGRQYRTSPLLPGSGVARPLYPCAHNGHPQETGTKHNPGSRAPLRPKRRPTSNNTHPPPHRRRPSTDPPPPRPAHPHLNPPPTRT

SEQ ID NO: 962731 - protein, 289 aa, Homo sapiens
LWFLNGLAQWLESGPRCGKVLRKWFEPSQFGTWWAILSDQSMNLAGGLGPILAEPILVPELAAGACDAGPIWGTVCGCLLPLSPARIHYMNAAECWTPRTGARMPSEGKKGSLKEESTLQELWCPLSLWVLSTGYLWWCSAVEDLRVLTWGQFFLIQEKGQQPLVGSSYMSALGSGGLDRQHRSWLAVRPGMANARDCATQREPVASGLLLFNDWLAIDECSCYLFGVTVTVTSPKLLDPGMGAVIGFLLGLGALAVWSIPKRVPFQLCGTPSHVEPWQGALTGGATLR

SEQ ID NO: 962732 - protein, 327 aa, Homo sapiens
DEEEIEEELQGDDGSQCSKHAWVKHKHKVSKDDASNQIATYRQLLPGYSKQHKNTERHRTMHMANGKFKWVPGRSTEQCRTRWSKTNCEGQGLKLDPCGQQFLACKQEQRTTTALTKANQQGSCSKRPSEEELPFCIVDLNDPYFAEAQLNKKRITLNKIGYICNKMAHLQKHSKSAPRTDTQGCKLAFALLMACRHEDSKQHTSHYKQQIVRAPKKFMMPQRERKNMPASMENTESGTYTRRELTFGASNCYNESTGFHGQHVPLSQQWLQIRGTALGIPDFQEKSKGPGKTSPARQQRAGANAKPERKPRTHNKRSKDKQNTRTT

SEQ ID NO: 962733 - protein, 72 aa, Homo sapiens
MNHWKHKHVVVAKTTPPPFAAIKKILPKKIYKTQLVHNGVVVWRNEELTETQVGGAPILLVCIQTTKQCGGA

SEQ ID NO: 962734 - protein, 82 aa, Homo sapiens
HHQFVLVAALQGLQAWMNILGTLCWMWICCPCAVSLPHVPDVNVSACYCTVCYKRRSSPPAVHLATIASDDTCGQCHLVEDL

SEQ ID NO: 962735 - protein, 225 aa, Homo sapiens
MDQWNTDGALIAIGDRDEIALTADVKAVADIVEPKASTIPVTRCTPWGTTSPYTKYVSHTQSLHPEWTYPHGGMAQAPPWHGLTVSLGQTQRVSWTQWPLGARLDQRKAHNLNPMVRAGNCTLDFGKGTLRIQALGDPSSTPVEQRGMACGSMALQHWARVERHLLAATNVELGTDSTLTKHRQKDSPGTQEFMVTLGVVTNVTTIWVDPQLLSVVFGQLLGHRQ

SEQ ID NO: 962736 - protein, 118 aa, Homo sapiens
MVRSSFLTPTCVNLTFVLAPLSRDETHFTSPANPNMGGLPLKFPGPGAGKHNSGVVWCVWHEPGRCLLSRLGGGPYFFALMVAEVLIFLILVGFQSRVIPWRRGGRVTPCLVALFDII

SEQ ID NO: 962737 - protein, 474 aa, Homo sapiens
NSTHVLNHNFYWCSLYYTYLQASEYFESPFTISDGIYGSTFICKPQDFHGTSQYIKESSFSSTSRALTPANLSSFTFYSSEHSHFCAFASPRALHTWTLIASTAVLLSYSIVVHARRTSYLQMHARSLSPTTNNTHTATHTTVTHNTQRAREGTRPSHDGETALHYSHRAQRTTKTTQLVPTPHTQRDTTPRQHTHPERHPKKQVTSPEDYETRSATCRDNSSDPLETRALTHTTADTHENNVGAKTTIAGRTPPTRAGNTANTADDNNEHHTRQKNHTAPASAPATKKHKTSGRAHRPPHRKQASNSRRRHLFTTDERAPPPPKAAQNAPAHAGQPPQDTSTARRAKDNDDAQYSRTQPPDDHPECTNTTIQQPNAESKPATIVQEKESTTKLRATTLNRQRPDYAPPPHHPCPQQARHHTYKPAPQPPVETTTQHVRTTATDITTQTQQQPGNPHNASTPRASKQGANQKQT

SEQ ID NO: 962738 - protein, 80 aa, Homo sapiens
SVWGAQECRPARHCLWSGASHCVVPPQHHVLTTVSTQRGPVYIGELPQDFLRIIAHTCSMLACVHAVTAHVLLPASCNVL

SEQ ID NO: 962739 - protein, 199 aa, Homo sapiens
RQRRRESERGAAGAVDRAGGAGSIGTGRQQISKTNTQTYRESLRNLARLLQPGAEAVVSHPPEDVRLQTWGRTGASSAGMTSPPTTGKDYIALNEDLRLLGPRSDTAAQITQRKWEAAREAEQLRAYLEGLCVEWLQQIPGEREGDCCMRADPHKTHVNHQPICDHDVTSEVLGPGFLPADITLILAAGMGEDHNSGLA

SEQ ID NO: 962740 - protein, 494 aa, Homo sapiens
GVVKTTPNRHTGKGTRLIINIVVIWTLYDSGAISTTTGHLIYKCCVALDKQNHQHKIQQQVQCLLAALGTSGSLPSNCLVAHLCIQHLHTDLQLLQLYGYSPNMTYFSLCCDTLIDDATAHCTIDADTESTLDLATHVHTIDELYNTPTTHVDLYHVVITHTLCLELWVTLLTWTYRLGLGLDVALCRLTPLMDTAIAANYSVQTIARLECAISTPCMKGQLGHHSYTLCHLHKQPIDALRTATQSRTASQALGYTSLGPSYAPQQRKVGPTSTHQPIVKPRQHHQVEPYDGPTAHDGNGERNLPRRHRTAPGLTNHARTNTASKQHHTPPPTRTHCRALANSNTQLTATAVNTDKPTPPPPRRIHTAKRATTEHQHHYHQERSSAEHTPCPPHRAAIRARPQTLGVVCTPTTPTHSRHHLGQRSTHTQEPLSQQHQPTNKWVPPYVAPYNPQHERGANTCRTKPHQAYPTQPTPRKHTVQPDCRQQLLGRHSA

SEQ ID NO: 962741 - protein, 48 aa, Homo sapiens
MQADRLTWMLAYGPERNEILWIKGCTVRSMMLSRDKLAEEGKTKEGRN

SEQ ID NO: 962742 - protein, 268 aa, Homo sapiens
EPGDVHARSEEPLPSSGPDLGGIRQKQAAHLLQVAACKLNRKFLQTQRCGGSTCSLWHGSWQGLKDDIIHLCKLADVFKAKNLIEVNAGKSTCKPVQTIAPSWQFFSEQVRMSLDWTHVKVDGALPNGLDVTYRSTLNLTDALHGARYYTHTGLANNERQYEYLDLKLPNLLGRAEKVTFQFSYGTKRNFVWPDTSSNHGPETSERNYSVNLYKVTGPEPLELTAGRRTAGMAAGVPVSPYGKTQPHGSSGDRRLRETLAPASPTPDV

SEQ ID NO: 962743 - protein, 387 aa, Homo sapiens
MTQETTEEPARRDRVGARQTKGPRTHGHDATYTDQKDNYTTKTNLIGGKRHTTSIGDTSLNPVDGIRTQGTPQHPTATGSTKHQESNEKTQHPQQQHTRHDHKSPRKLKRPTRQMEMRHKLATRQHTTQETNLHRAQSPEAQTQKTHDQEAKNTDERGSRAHRIRREPARTRKQTGQPHVGAHTQRPTRRQNAQTAPNRAMTTSQTQNNTNTKANLTNHKQTKEDNTGRQRTQQHNTSNPRDTPDGKHTEETNTHTRRQETHNNNHRDITTSEQQPQSRRKQKQETNTHITNIEDAHDNHTTRRNTNKSDDQQPHTTQHQAYTTTTRHQQKTRDNNTHTSNTQRQTTTDHRQTRHKQKRENRPRMTAKTKRSNHTETETRRTRTTHK

SEQ ID NO: 962744 - protein, 111 aa, Homo sapiens
  misc_feature (59)..(59): Xaa can be any naturally occurring amino acid
EDAASYTVGTFGSQAVLVAENRGVFEVLRTQDLVRDVQGVRWQAAVGGAHRENPGARRXPVWVGTLSAGGIYSAYAWTCMDDDSRSDVVAGRVGKHTNEALHAMRYENCLR

SEQ ID NO: 962745 - protein, 44 aa, Homo sapiens
MKAGYEDNGRNGSLVVPLGLGLGTTILVQHVSWRRKGAHKGDEK

SEQ ID NO: 962746 - protein, 434 aa, Homo sapiens
MPTYYCVAYSSALPGKQIGSRALKREGIDVGRNTGAERRGGPQAGLGDPHKKLPTAPAKSPSHRGNDHHTKSTPKGDNNEHQRTNGAYQGEDDQSQLATPSPTQAADALMRSPGPKPQATTRTTRTPTSRTPTPRTQANTPTAHTENDNGPTRNPPNSPTKKTRTRESRDMPTPSSRQRRPPDPANEHTTQTRPTATRTKTHNPPQRDKYTPTQRRTPGKPTAPTTHTQSKRPRTTENTERQAPTPGPRYRRQPQPTTTAATSRPRRPQSTQPTPHPRSASMQANHHPTTRQPTGDNEHSQRGSTRAGDGTRTQRATPQDDPTRGRTTPSAATPADTTEHHDDYEARPATRTGQEAADTRATLTRAHKANRHATDRSGPRRQDRTVRRPLDDEPPSSSARQPHGLHAPRLENAEQHNADTERHTHREPTKATND

SEQ ID NO: 962747 - protein, 389 aa, Homo sapiens
  misc_feature (149)..(149): Xaa can be any naturally occurring amino acid
PETQPRSHRPTPYRRPRLRHLHPWSQSRGLAADRTRATICLRLRSDSGPPRFTEISTFRPYAARNSIRARTRWHRRRPGPQVISAREYLALDITVPNTRRTHNRPHERRGGRSGDPRGTRRPSESHTIRHIQVQPTVSRGRVSIGVRMXKAYQYMDPGKRGHKHVQPKTVCQRDGVCLGPYTLVTEGHIAEPSDNIYLSTIWYADSGQTFLNTERRQDYPGAKTQNARAHLKDRDAHTAWRQTLGPNMLDRSPWHNWKPPAHIHRSAKPLNPVTEATNCGLPGCMTPWWHHHSALKSLTGALLLDVGRHCNTPSGMRQRPIQQGGDPQNGDHNANPADPSEELANPPVTAKGERQDMGRQRKQWPTPSEQTACEPPKTAHPQHRTQTKN

SEQ ID NO: 962748 - protein, 244 aa, Homo sapiens
  misc_feature (62)..(62): Xaa can be any naturally occurring amino acid
  misc_feature (66)..(66): Xaa can be any naturally occurring amino acid
MAPLRGRGLKNRTILQAAEIIIPPCPPTFSTFETHQRPIQDYCGLYGSRHAQHTYARQTRKXVCSXPMNYVRAHSTLAHLRSHTYTWRSEHRGPVPDTATIPKNSRIVEQQTITYKQHFRDVRPPHWGRADTYGPLDERPHSQHNWRTQQTVHLTPTDRPRDPKTLAHLTIVRHNSTDPNHMDNNTHSRWLCRNTRQHHRPHTMDAAHNKQRDYPTHDRRPRSTTYHHEDTKPNFIPINNHMRQ

SEQ ID NO: 962749 - protein, 334 aa, Homo sapiens
PRSASIRARDVVTDIYVVGRGVSILKLSYPFYRVDDGCIYERIIRSAFLYIHAVIKDLYSGNCRVLCSSRVEVNSTRRLSATCWLQRWRYAYAPRCPVVACYRYRGEVFRIGCVLLGLTVRDFGYIDRVSLCVLGLSARSSNSCRVGGKLNDGSVIPTNKGLISSDSGHPMWNSDKNPEGRSQGMVLNMGGAGRSFQSCPRSVWMVHGKVYGERVPLGETNTGGRETITRIVIHVKKCRRIPIDGGGSPRRVLIEKSLGRAQVDSGIIGGPPQGIDLRGVWKNSWGKEKALSLGIQRTDLMDLGRVQTRSLWEHPWSSCGRKSKLPGGSHESRK

SEQ ID NO: 962750 - protein, 465 aa, Homo sapiens
  misc_feature (350)..(350): Xaa can be any naturally occurring amino acid
AECIIVKIEVKDRERRALRVISTRHDDVELQITCSTQSARQDMHALAREGAVCEYHYRTTDAPASRYSIRISMRHIVIRDRSMRYVGAHASRWLSAKRAFIGLSILELVVSRSLAHTLSCPGYDTPSRYTHRTLADRAKFYEWTYPNRSSATYPSRSVDHQNLTTVIGNLGAQGNELYRLQLVFKCFRFTYRLLWFSAIMDVTASNPHYWGKYIDSNSCPPGHALGSIEVIKKAPEVSTPAQWGITHVKPTHVGPPKRDEDTTDYTTKASERRVRTHTQKKAHRQYVNIPLCVCHNNNSAHTNQRRRQQHVKAATDKPLLTTIMKHKDVTVHRTTTMGSRRTSSQRLTAXYVDHRANIDTPYTDTSLLHNTVTHYPSIGHQKNRASILLQGSHTGTHPIMQRRYHITIQRTQRIRDSPLTYHSSNITHTRHPQDPSYRSIVTSLPVQNPQNLLLDYNVDYWTLRL

SEQ ID NO: 962751 - protein, 326 aa, Homo sapiens
SPEQPTGARLVTITPREKPQLAEAGPVTITATMSSEAETQQRYRRPTWARQQNLKREAEASRPRADVDTIETRRAGPVETTGAGHPPHSATARTQAHTHPAHTTTEPNTATRQEPSGQAAPPAPHALATAAHQRHPHPTLADTPSQQPATTAHHPHNSTTTGTMRTTHTHTPRHHIPRHAAHDTPTQRTENSTQIGHRRHRHTQTAPATALPHQRHTMTLATGHSQRGHPTNHTHNEADNKHHGTAMHPNTPEGRATTPHSQHQSTRHPPRYRPPTTHPTLRQPPNPHARPYHRTKLTTPRSAGRQSDTTQQHTSTSKPPLRHAAQ

SEQ ID NO: 962752 - protein, 312 aa, Homo sapiens
GGGGERPLPVCVEPMAVQALRERLGVGGRTVGALPRGPGENSLLGLPVLLDCPDRGRRLLGLTIGCLCLWSAPRCPDSRHHSLALRSFMLPARGGASRMHEAPWRLMARETASSGAPGGRLREGAKAAKKAGELRSRLQVASLKAMRPARARGAKEDETMLIARLREEAGASWPLLFSQSRTLHLWFSPPLPRSCSPLFELGHLPGASTGQGARPLGTGGFPVLKDWAPAGCLSNELRPNRYLQEDLVRAEGFFPQGAAGDVGGTPWFILGEPLCFTAIIFRTGWRVWSPPSESGVGVALYSAKNRSFSPPY

SEQ ID NO: 962753 - protein, 120 aa, Homo sapiens
MSWNMQLKSPARPLALNGSILRIETSKVALHEARYENRTCYGWIRRCRRYIISHNRNKRPMVIYSKSRDRGVLAELDIEAPACHLGLALTEMNGKEDFQSLNGGLLAGGHRRSISFGHRL

SEQ ID NO: 962754 - protein, 224 aa, Homo sapiens
MYCVFNPRRVYACRVWQCHRGVLGLPWPRPFFLVVDGVFPPRISERLLEPASSWSLVTLLFSALWTFLWFVGFCFLSQTMLGQSPSPKGRCWLGADSCEGKPSPSASFPSSPGVCWPPLAYPALQGCRGRFIQELVDPTRGSPNSEEASYPGCILVDKYQQPSLQPERGGPPRATSLPCGLGGGLPWEGGREGLPFCPGISHERSCELRPPLYRSILLRVPTGL

SEQ ID NO: 962755 - protein, 265 aa, Homo sapiens
LPEQQPQHQEQERQRDGDRGSPTRSPQSSPRPWGRAEGAGSDGDGGGGLNWVTCKVFYAMGLYMEGDNCRYSHDLSDSPYSVVCKYFSEGTYYGDRCRFEHSRPLKQEEAGATELTTKSSLACFLKSLIDVGPLVECEYRAKLSQEHSNLCNCRSRFRGLGDMLLSFVPGQPYCGRTCAFRAVKHPVSGPQLTRGKSSGGRSEAPWRPNEAVCPIVQCESAIRGGPVCSPRGFLCLCGRRVLLSVCARDWVTWVWPGGWLLRAQV

SEQ ID NO: 962756 - protein, 100 aa, Homo sapiens
  misc_feature (62)..(62): Xaa can be any naturally occurring amino acid
VSTDEESLPRLCPNFSDLEAEAEADLRPREEVRRGPSPSVPRAGPLREALWQPVLRSGFLSXGLAVSRGMALRSLGPGVTVACPPSCLAGFEGVLPQEPK

SEQ ID NO: 962757 - protein, 243 aa, Homo sapiens
MVWELGTADEQVRAIAENEEDEQLQAGCVESMPMTLEPKMRMKRETKKEERRMAVRQIQPRIRPVNDELFASREDPGNTRRPLSCSQWVRDLAKTMDGVHSKAKHSRIRGDTACLVPKACGECWFRTAPIGPCGCLNLVGQLILPGRPLKTCPRGSLLEMHVWHFGARIVGSAKKKWYNPSVTEERMLEGLTYPTVLPIVHYRAELPMVWALPSTGLSPPKCNVRTEWRQGRKWWAIARPEKS

SEQ ID NO: 962758 - protein, 54 aa, Homo sapiens
MTGGLGPPGNPCEGVWHHTTPRVLVQTTVDVGNPHLTKRRTRRINTAKPTQEGR

SEQ ID NO: 962759 - protein, 174 aa, Homo sapiens
MREVYCVPLPTRGHGSWGPCFAPYLVIPRRAQWFLLFLAVCPRRPRSRAWADPTRWRFMDDFQKVDKIGEGTYGVVYKRQKQVDRETVVALKKIRLDTETEGVPSTGIREISLLKELKPPNIVKLLDVIHTENKLYLVFEFLHQDLKKFMDASGLTGIPLPLIKSYLYQLPPGA

SEQ ID NO: 962760 - protein, 106 aa, Homo sapiens
  misc_feature (34)..(34): Xaa can be any naturally occurring amino acid
LQQCLDGKPWRSFPTPGPGTPICHAPSSHLFTLXSPALDLPQGAPLCLASSMRPAGKGADLPAAASPFLSPFERPPPVKPKTPAGFHLAVFGPGPPKEKANTYQGE

SEQ ID NO: 962761 - protein, 257 aa, Homo sapiens
SSETKRRGSESELQWDVPGPDHEPEREMRRSHALSAPAVPVLQAMSHQRSAASGAQRATNADGVCLRCVAVGGRQVLWLPLQVVAYKQLESSMPPRTVIEEFYNQTWVHRLLGRASVPTYAHQRLVVPSQWPFFAVGGMSWLLLCGPFRLTGVGPAEFNADDEPGGLLVSAVLMGFSKLGQSFEMLILGLGSSSVCTVALITGFVPMYVGEVSPTDLRGGLGTLTSWRRGGSHRPVFEPRVTHGDQGLLAMLVGLIF

SEQ ID NO: 962762 - protein, 371 aa, Homo sapiens
CADPRVVAGKDPQNKQPLHLLSLSFRQACVRSHPGCCWALILMAGRSDLLSHEQEMSSFNVEDRSGPLGARGNVLLGCEACGSVDMQQACGQEVRFDLGDKRLPRLCITRYSSSTYRYIAVVESGSSLPRICDLQGEMPCLELRSQVATLPSDCKDAQGESESHWLHTHCGKIKAIWLVTATMQDAHELANTWCQQSGTHSHTGRAPKVDSGTTDAGGTWAIVSPFNMAGQDHVEVNLVTGCWAEVQQAPVHRGHAQIAGLTALNNYSHGRPTPNTGRGAGKCTPETTTTAGPNALHATSDNPRPQQRTTDRANSRHNRRGETHLEFLASPPRKVTDHTGHCAETREKHPAGHQNNTNSDRSKTTEMKRPQ

SEQ ID NO: 962763 - protein, 294 aa, Homo sapiens
AVCDDEGYLTTDIRDRLEWEWKAMEDQTYLEEIRQCHYRDEFSHQVQEWHRSWTMVIERAYTASSSMCRWQRTQEQAAGCMPEEYVIKACSRKLYNWLRVAPQRQISRWPEDDDFMDENQGKGIRVLGLLSPLPEITLCSQRPGPLVKEKCQTFLRMAHFTKRRTAWREEERETTAQDIETLREISPELRSLIVVTVAGRSTQGTPQMFAADVDAALYMMLDQGQAAVIYWGVQAWVRHRSGALLYFENPEVRGTIPGLTPRGRNRPIPWPGFRPLVYLPVWPINPWPSYPSNF

SEQ ID NO: 962764 - protein, 308 aa, Homo sapiens
MLADWACENRVRDWLRYDRQPMPIVVTRCWTEGAGSGQDCGPSKRILGSLLSDSLFLEVKELFLAAVRLDPTSIDPDVQCGVWESVFNLSGEYDKAVDCFTAALSVRPNDYVAVDIELAPPVANGNQSEEAVAAYRGCLELQPGYIRSRYNLGISCINRSGLTGRVWSTFVEALKHAEEKPGPRGEGRCHVRENHLEDLGWGLSMVRPSEAMGERKRREHDHTVYECCGWATESAQGRPGKGTRETNPARAASTAPPRGHPRGGEEPKGRSQDKAKEDGKEQYTHPRRRRIHTSSRHTQTTHHRRGPT

SEQ ID NO: 962765 - protein, 167 aa, Homo sapiens
MGTTGVAGSVAVGHLSTFSQVWETAGISLIKTMKCQEKDDLVQGWMASMLYPVPYSSLHENLVYLAAWDYLCSDCLRCQSHVLSVVGLSLENVLELLFPPLRLGPGACEFPIYGFSVPPPLCGAGGPLAGCATEGVSAASKAPNPGGGPVAGPGPSGGGFTEEFRTY

SEQ ID NO: 962766 - protein, 234 aa, Homo sapiens
MAETAAEWRRFKTNYAVERKSGALSRRAEKHSCDQTGQQLFCVCGTRVNILEVASGAVLRESVAGGPGGTSVPLTSCPDNEVLVTASRALLLAQWCLEVGQRYPTVEGDTHWSPGGHHGLRPISTLVAKGGCDGAVRVWDNRCGSTGAHHFRGSPRCRAPEVPSSREPYMPVVFFYLRPRYAAIRVWDTARTGHAWLCWTCPLQRLSLIGPSGVCRANLVQVRPCPEFFPWPLE

SEQ ID NO: 962767 - protein, 329 aa, Homo sapiens
MTDDEALTHTTIQRHESPVKFHACDGPTVRSSYTESGIRRVRTTTITLVLTRTASPATHDEYPLSTSCDGRTSAHMMRKTTRHDKLRKQSRSTNMGVTPGHEQHTTPYKRPLPADNPTERPLPHRNAYPLKPNQNTQRQTDIAKHTPRLGRTMTRHETDHHYQAAHTDRGETRNRHILPSAATFGVAQTRATSTDNSELTDKLQAHSYAIPNPPSSPPMRIDSHHTTAHTIPLHKEGIHNTQDNTRHPPHDSGNHPGHHTMDGRSTPSKTPPIGRAPTDTQTHVPPPTSTHPLQNEASSGALANANQTRAPFHPEHKTPNTFEEPNTPG

SEQ ID NO: 962768 - protein, 290 aa, Homo sapiens
ARSTCSFSSRPLRASPVFPRRAAADGGGCVNAEGAEGMPAAAEEVTGKWLEARCLTPLGVVVHSGRKKLDMTPMVTPPENFLEIGCEQPENGWVCRPGAVSPLYEIGGPGTNSSYFQGLKGNLTCREEGLRVDFWNLLLADRLTFYAKRTAVSNGSYVSPASPPVGKRAVQRRTGFPFVGSDDIELGNTISEVTHFLFGRQDGKPRALASQVYNNKPGVAWIHPSVGTEPHAVCLSTWFLPGIALFHLIKTAINLHFLKIKTVALKIFGQGTSCQQQRLLYYVDLQQDRM

SEQ ID NO: 962769 - protein, 260 aa, Homo sapiens
MIGPLIIVAYEPQAHSPDTAAAGMAASVEQREGTIQVQGPGPIFFREAHDRQDGTGIAILMILHASNGIYSIHHIRRPGRYTGDTQQHRTGPVLDYQGLMAHRPAKRFMEAHTKATQTAPLATLLGRERHARTMEDIRSDRPGDEMPIGRMRYHHGIAEPTPPHEVGNSYLPLDTFHFNGPPVMHKISPKTTDAQTEPPQSSHRTNTTHGPSHTETPPEGRKTTSQTPSHTPQLAKNHTQTPEETPKHRHSTPNTKTTRP

SEQ ID NO: 962770 - protein, 350 aa, Homo sapiens
ASLSDCGQLVSGVSPRSRVYSNPGYCTLRDMLLDSTVNVRLRVRMRQQRLDSVTVTLVFCPGASCRFSSFVDHSGSAWRGVIFDPGCASGLSLSGGALQGPGASWLPLRGHPDGDSVCRLPIASLHDCLPSPGMSRVRSLWPVILTLLHCVRDRCRRTPVGDLRRCRGILGGVSYEFSWVLLDTCSPRIVESNAEPQNLTGSRLTANQEGQTFRGCTTGKHVALMEKVLSDFSMTVWVAEEDACAVMTCYQGRLTIGPGELLALCHGYYAARPLCCEDASCLRRIVGARDAGIHTRFSTFMILLARCDPGSGGGGETGHEGGCREGRLTGLVGGPLPQPFGRARPVAAHS

SEQ ID NO: 962771 - protein, 76 aa, Homo sapiens
ADIPYHSDSMVLVKVQVDGALEQYGSCLVSNGACVANLRSAYKVGTTLLAQYQLTPLLIRAVKVDKWLVSSVVQEY

SEQ ID NO: 962772 - protein, 142 aa, Homo sapiens
AQLVPGGGCAHAVDEYSLKPVAVEVKSLLGEDVMGYDMDCEEVQKVEEALLHEPLAARVHVNPAWDERLALFMWRGKKGKDKDGFLVNNRIQTPEPAEESSKAYPQLSAFQRLWDVLLVECMRSRASCFPSSWRQQLANWLR

SEQ ID NO: 962773 - protein, 309 aa, Homo sapiens
NIARALVVASVFRCCTYRVAISDVGPLSLIIMSLASVRSPKCENYIKRSVVTSDRMQSMSNTSGRRIRSCINSVITLESQVAQSHKKGPPCEIEGSTKRGDSEASSQPYPYVKVKFSTSDSCDLIKENFSYCKLSTTGLKLECDNVGQVSNVRGCSVIYVMYYEMSYWLNIEMHKQAEIVGRLNGICAQVLAYLSQEHQQQVLCSIEGPKQGSPFPRLNSIDPTGSSKPTSCPSCKALALPLTHYRGAEWRFASGGQRRHRPALIAYPGHGFPRPNLSKEDKGKVLHVCNPTRGILVKNWNITVARTLQ

SEQ ID NO: 962774 - protein, 124 aa, Homo sapiens
VKLDLIHESILHKGIKTLLEKKKRVQLKDMGEDLEWLGQIMEGQGDLDETMERAKSLMGSVLWPNVLLDVEVRNWQQGFGFLLAGIPVEVARNTIGVPRQGLFLDNGTKGRINQNSVKDASKQI

SEQ ID NO: 962775 - protein, 166 aa, Homo sapiens
MEPRVNDSGQIRPRKKTAHEIGARQGAPRTAEQKRRGGTEDIATQSKTKRTADPRGVEAHNNREGALELEQRYPINWVACARNNDTRHKKPTTKQRTGGRRHPVSERQAENMLMGNQETQRSLRATRQADQESHNDQDGMLTRAQHNNTQQKGKAVKHELERGQSN

SEQ ID NO: 962776 - protein, 136 aa, Homo sapiens
VITEGVKPTLSELEKFEDQPEAIDLEVVTESTGKEREHNFQPVGQQCDGLVRGDAHQHCEGERSLSVVMANEDLPSCAKHEDLKDMFEFPAHGTYEKYVHKIVCGHTVERVEFALAPNSRVAEQQWLRTYVAGVVM

SEQ ID NO: 962777 - protein, 69 aa, Homo sapiens
MEENFGVEAAVTTKTVMGSRARYEDSGEVCKGRNMVSVTVFAEYLEDPCRLHCLMTGASAAIEGLPTIQ

SEQ ID NO: 962778 - protein, 237 aa, Homo sapiens
PPAPHADLDEPQISVVPSHVHGMCVCAAVPIYLTMCPPPACVHACGDHVAWECALGVSDDTCCLAPPARTPMSGLVGSGESVGGRKNWHLPREGDERFALILREASEKCFKCVCMRQACGQLGACPALSLPSLPQVTSTALSPADLPVMPNLLRKHGDPNTHGALDQTGRGQAQEQRTGTAKDTHTCLLTCVCLCVVSVAVISETVTHQSVQDKVSWPRGHSYCNFQRCVINDVNGY

SEQ ID NO: 962779 - protein, 145 aa, Homo sapiens
MPVAEADPVPGQLHQVQWHLLLSGDYNVPRRSGVVSAPSECWPPTSVWAIILCQALHTSPCAEATGGNKIGRPPNVPCKVTGCCGLVLVRLIPAPSGHWDRTPQLVPKKLLMMVGIRLTCTTSARGCTATLGKFAKGTFECISKT

SEQ ID NO: 962780 - protein, 64 aa, Homo sapiens
MTVRRPGINCPGGDPNVRSGDKEQGGCTLGSKYRKGPYLTKLVPFEGYIHIGQALENTYYSTPD

SEQ ID NO: 962781 - protein, 280 aa, Homo sapiens
MCMNCSIIDPFIDLNYEWSIHSCQYCSSQPMGTNSIGTVPMAARTGTGIDRFKWLNPNRAIFSNGRYTPVQKLTRATAWALSVRSLESNLGVFTAPVVTNEPRGSIAAKGGRCRKRGQSSRGPHLCLTPPSCTSTRVVSNHGVSRYRWDEAFKRIIIKISLLCNLANLHETTPLGGQKAHCDRTDILEYPDGKGTRWTESPMTNELTDPRNDLFHEAPARDENCCALMGGGGSPKERIIALNFYLVAAKCGLGKGSFALRLNGEARMGMAFGVPNGERTA

SEQ ID NO: 962782 - protein, 73 aa, Homo sapiens
EFGLVVAFRHDGTSNAPMSLDGVHFAIELVECDERVMARYRECDERIWLLSGPSSEHRISMALDMCYYKATKN

SEQ ID NO: 962783 - protein, 152 aa, Homo sapiens
MAIERGWLAFPKGKRSSEKLDTNFTLNHERSTPGSRGQNEQQWVDTLGSPSVALGHTNRNVALLLARENGALREGHKTEYRSPQVVTKEHDTLRGGQDQGVPRYIRRRHVSNTQVCNMIIPQLRHVFEDANGYFVGQTAHTFVGPNRPNRIA

SEQ ID NO: 962784 - protein, 215 aa, Homo sapiens
GTRDPVSAPVVFLAPESLVHYERVRCISIHVGQAGVQIGQVPRAQGALVPGTRYPCRWGQDGRDVDRKDHGGSDDDSLSETSLSSGEDEGRLDKDDVGRGASCSLGLWKLAQDTYDVRLLSAGLSIPHRHLSSAVSSLIIGRGKMLPKELCPDGATTPLRQEIIDLDVWRTEFSELAEQCYRRSGLLGYTTAKVGGTGSGYTSAASWNVSQGVWR

SEQ ID NO: 962785 - protein, 188 aa, Homo sapiens
MGTVHARSWEPLPSKCDLICGGLEMKKLTFVEVEAVKRNSRNISVIYKRVLVCSSSVQLSSGPLVEDLNDCISFYSLRVDDCLQMAQDNLTLDGNAVKSHDSPLQEIARVLRKFFMHTSEAVLSLSLELQLFDNGLEVGARLLFAQHIGVLVERYHPVLGDVNLNICREGLNWRQLYSNTWLGGTNAM

SEQ ID NO: 962786 - protein, 231 aa, Homo sapiens
PRPATLVGPCALIPDLVRCSHSMRYFYTSMSRPGRGEPRFIAVGYVDDTAVLCWFCHATACEPCMDGCLLGAVDSSSDGAWCIWDLEHTVNVKAQHKTDLRCDLGDPAAGYYNHELRPGSHTIQMDVWLATVGPGLGASSAGYHQYAYDGKDYICPEKEDLRSCALLADMAAQTTKHKWDGGHVAEQWRAYLEGTCVDVVPQIPWRTGKETACSALEPPKTHMTHHAVSDH

SEQ ID NO: 962787 - protein, 99 aa, Homo sapiens
LRCASVWEMAGASAPRASWAADTPAGAWMPNSDIDLSNLELLEKYLEASDLHEPGCLVHDACDVLHVAPDTCVVLEPYLTEVIFRGGRKNNDSPNDERF

SEQ ID NO: 962788 - protein, 215 aa, Homo sapiens
MWVREYSTSQEPQPTTAESKELRGEATKTEGNQMTAPQYRNTGIFKGQSTRGDQNAGKTKSGERPQTQNAEKRQMANARRRTKKGHATKKDQRISKKYNNKRKHHRPVKICAKDTECKITESKEEPKSHWKTLGNAPRDENHGKTKTPARKNELRTNTGNNTTTKKNQGKQAPHTTSTTEQEGDDINTTQPRQRKTTPENTQRTNTHKTTQRQRK

SEQ ID NO: 962789 - protein, 377 aa, Homo sapiens
MKRSIMTWLNYEKKYVALLGVFEGSIAHISVTDEPEQEDLIECINCIGTTGAARGSKFVMELMQMAYLIVAYGARLCSYDRVFRLVDIDEVYLNQGIVVLTTCGMSRLLGNRSVVEKSVRHDDVVRLWADRHTLASCTGPGKRGEGGKYHICPVPPEMSTDIFEVTHDELPCQNRLTTDFDNSPCLLAWLREASYGSPLNLGIWSDIAWLYGPSQEVVIGPSFGQPQYMKQRLRRVVSEHMWLSRGLRAGRPVSNWMLGAPRVRKAQENRRAVLVACDGTAMIVVHHPLFIKLTGNTVAPPRGEAEGTSRTPHESGEQAKSRGDPENAAGPGPQTHQERAPNPTEQPDTTLRRKTSTTPSATPQTTEKSARPTRPHQ

SEQ ID NO: 962790 - protein, 229 aa, Homo sapiens
  misc_feature (62)..(62): Xaa can be any naturally occurring amino acid
MHLSKLLSSAIYCHSSKRRTNVLPLSEGYCANDEQSSLVWSCGINASTVDNVHALSSAGVYXHACSLAVLLVSWWANTSLICFYDDTAAMGYSLTKKLVPEASGSAVGLLSVQKEAWEFTVGPGEDLVVVRESHRGRRVLFAGPVSQGRFTWFSVARAIQIHSDAGSAYFAWCTTLVSGRLLPRTPGNARKYGVEAGRSRANVAAGAGVVVLTLREVGGGLMVAPGGKG

SEQ ID NO: 962791 - protein, 82 aa, Homo sapiens
MSQVRFPLAACPNITESSTPVKSRAHELGRPVQHRCERRFDEPNWASPPLGPFSAGEIGTSVCDAHYGPSSDRLLAGMFLVP

SEQ ID NO: 962792 - protein, 83 aa, Homo sapiens
MRSSRYLLICQMVIVAQCVHSLERAGSKQYSAAIAFTLALFSHLVNHVNIRLQAELEEGENPVPAFQSDGTDEPESKEPVEQR

SEQ ID NO: 962793 - protein, 159 aa, Homo sapiens
  misc_feature (70)..(70): Xaa can be any naturally occurring amino acid
  misc_feature (154)..(154): Xaa can be any naturally occurring amino acid
MRLSNWMVSISIWRAQYIGPRLERATTPNENNRPEGPSREQNVALYGDDADSVPRLTSEQQRKSCGDPPXPVAKKAGPPSNGTATVGWGAYSKNLVTGEVETPGCVYYTVSQCALYTVFPCAWRYGHWARLKRGQEYVGTPLGYNVRTHMVQMXYALAR

SEQ ID NO: 962794 - protein, 67 aa, Homo sapiens
VPGGHCGKLPHGYCVHVAVAVVDSLKAELAWAALRESVDVLSLPWANPCLGLDGLLTAGLAPSVLGV

SEQ ID NO: 962795 - protein, 446 aa, Homo sapiens
QYRVQWMTAGWWGQRASPGYHQTTKARDARAILHLRASIPCAQLGRGAWHRITIGSAWVETLDDYAGILTVPDAPCQRSMALCDTWHGVFAGSPLMCIGPPCPKPHVVTTCETWANGRSVSGVCTDGTCTQYGGTLTQDLNTCTGPCGICSDAVTQSAKAKPCTWLWVPEDPIILMLHDHQYHSTRDPYPVLTTVLDTLLAWDSHRTTTPMTDTGTWTGPYRCPKHPGTSMQITGALVVHNAHMVQQDPVTARDAHHRSQNRPPAGPRDNIGKRPDATGAINGTNTMLQTMDLRTQSTPLAKQRVKYPAAINQHTLHWIIATEAQPDESHRLTTINHSHEQRGTEASTHVSTTQPSHNATSEHPQPTRTTNGGTRGIQQTGTQTNPRQTKTRTNPSKTNVRQPHTHPGCRHKASVATHKEHNPESVPTQHALVHTTKKYTHNAHTS

SEQ ID NO: 962796 - protein, 203 aa, Homo sapiens
MDAQSKHPWKQERNNDINETAKPHKQQTAHKLSTTNHLQRTKAGGRRTRTSRKQKHTKTVGRPNKRIKIASDARHIELCKKSGGTPHAALDPPSHSDEPAPTQPTKRTSPRTRHRQQHTPTPHAPPPLTRAGSDRRPPHQTEKHAQADTTPLPPSTHPPRPHRPRSRSTPPHTTPHTHQPATKTQHRIHTTTTHIHTHDSHPR

SEQ ID NO: 962797 - protein, 330 aa, Homo sapiens
PQLLALGVGYLQRGDFVPPSSAPAPGLCPVGSPEADNRYHHTPMAVCVDGPASSQATEIHVVLALVGIARLPGDNMHVRTPDPQASNRRQLEHMTNQDTRRHWTRHAPGGHRTTVEDRATRGAAANSNGTNTRQENSPIMTGQRAPPPENVGQQRNNGAGGSRGQHSEPRQNIRATDSDKEDNSSTGPRKGITDTRKQVSRTPRSCTNPPPSKDTADCTGTEHRQETDPQQTKIEPKRRELKDPHEADQNTPQDGPWNTWGPYTEDTKSSNRKENTAGQKTSGDVSAGSTARRTRQQAPRTKKTRRREREHAEHTHEPRQQKKRHSRRTG

SEQ ID NO: 962798 - protein, 412 aa, Homo sapiens
MPMLMLDHLKNCAPSKLRDAQLNEPAGWSHDVHLCCAACEMHGNAIGCVDDLNDLHLADSDDYAANMPSDMLLRWRHALMPALHAVTDTNLMTPRTLCLCTDMITCTTLEAETLIERMHNGLPRVLMCFPGDLGSRLKLTLQCSCLRSNATPHDDSNGRLASDAQPTPMPLPKDAHACRRFPLCMQSSHCVGPHAPLGLSHVPRGMAYTAYLGARLSTNQPPLGKLFCTPWTPTRLNTSGLVAVQALWALRPRPSTWATIHLLKTRPVTLTGVPRESYQATLAPPLANPARSKRGTQNTNCRAYQARATDSRLTPPNVKGRPAHAPPPHGQRHPTLNARTPARKTHPHPARTGRPSTAPGRTPQPRRPARLDPTTPATTRPNTEHHSKAPPPTPHTKEATTPHPTTPPTHTT

SEQ ID NO: 962799 - protein, 265 aa, Homo sapiens
MGFRPQHAINSLGPPKVYTVGLVHLGGTQVQHTSWMIADTAIEAPTEKALDHNTTTDKGKDDNPNRPLSTKGCTTKRPGGHKDAPGRLPPGRTARRCHGNSTHMRHAARTTQRNDQNRGDEGWRPPWAPHQRANDRHRRINNGAQPKEKHWYMDGGAPHEAHRGTPESGLKLATQPHNTHREEGTDHIQKEKNHHKNRRQQQPSVATMRPNTWEETHSKDRAESTTGRTDKTRQTTRQTQEHHESNAQRTTTKGGKKRGTQSQCT

SEQ ID NO: 962800 - protein, 228 aa, Homo sapiens
MTTKHQKAQEQLTQGARHTEQEPPKKVVEHTRRKATPTNPTRQTLTAANHHNAQNTTPQNNKGAGQWQSTKTKTKRKEAKADTTNKQSAPESHPQPRTPRGPTTVKSPESNQHTTPNQTTNTTRPHTHTQTKKDDSTTQQEPHESTSDANQSDAPRRRHQKKEQKHTGDKTTRQQQQDPPPAHRHTQTQTTHAHNSTTRNSGALTAPHHADATTEHRTPNTHKRRTVT

SEQ ID NO: 962801 - protein, 120 aa, Homo sapiens
MDVDEHETGKLPLEQAFLAVEMDISPPRLVLYRENPHQEQGFVYNRVGEMTREEFGVGKLREINRVERFEGSVVHVTSISNGQYYLDPHLYAILQLASGIRKCKRKEECRLNSSRKGAMW

SEQ ID NO: 962802 - protein, 109 aa, Homo sapiens
QPHSSYDPAAAGRRCCASPPWALTCYGDSGQPVDWFVVYNAAMLLEGPGEGGAEMGCMYKFCDEMLRRLAGRHGGTHQQPVMLGPVGRSLHAACTWSKHQAMTRHILAS

SEQ ID NO: 962803 - protein, 205 aa, Homo sapiens
IGENVSGLQLRQNQGLDNDPGEGGRTEFRYWSFVIMLIWQGCWQCKISSRAELKKAGVDANYRLSQNWSNHHEPTNSTQPPLAQQVTLALASTREAQQDPDWAYKTYNVRPNTMTPPKGEDKELPNDEGQRAPGQPMTGPQSTRPTLSHGVPAVYRNSLGPGPDRHKLINLGSDVKLEKTTIVLHANGDQNHIQNRFLIIRHTYI

SEQ ID NO: 962804 - protein, 448 aa, Homo sapiens
  misc_feature (299)..(299): Xaa can be any naturally occurring amino acid
MWSSCEPVPWWEGDQYQRRTTPYSGAHRPLGVSRPNDHTGYLVQPGNQQEDTHVGNRNRVIAIQQAVEALAEQLSSKIVTQLLKRALRGLRGKPDTILPCVGRLLPRTDPALPLRRPGLGARPQYRWIDTREMSFPHGGRVNPVAPNRRFSVNGPLVVAICGSNTYLLEIRYKITLLVLVMVFTHGDARIIQKLGISQLPHIVGGTPATTIPTWGGLGPHNSTTLDQCGPPNTRPTTMKRLLTKWGDHHDYTPKRNNGGSDHRATRTPILPCRGNDRTHNVHPPNVRWRQRATGHRGHXQPHNNTQNPDANTDNDVAPHFTTQSERDNTLSCGGNNGQIDPTPNNLDKHKRNMNNVNGRPTTGLPPTRTNPVGTQTHNTQTQSQGDTTQPPRQHTPGPDNGATEHMHTNTQHTTSELTTNRHNVGTGINQPTSTYEQTHHYSRNLDAT

SEQ ID NO: 962805 - protein, 274 aa, Homo sapiens
APPVVTGIVRTSRTQSLASGEVYLMPRFAFCDLVAEKGREEWMTSPLGGHMVSKMRYDQLSSEALEAARIVCQEVAMVENLWREAWLPYPGAAPPPSTSSASTRCCTCAGAERLQTGMRELPWKSPRHCGRVHIGPSYHVHPSQAAEQGACDLMDLRRAKFKYPGRRRSRSQKKWGFTKFNADEVEDMVVEKAAHPQDGCAGPRTVPNRGLLEPSDVPCNHDGFSNVADTLLVCTNKFYFLSKQTTQRGTAKKIPTGTNTAYQFLYTGTKREQQ

SEQ ID NO: 962806 - protein, 31 aa, Homo sapiens
AVDMAETLKTLRQVEVINFWGLPGALQGVHV

SEQ ID NO: 962807 - protein, 113 aa, Homo sapiens
MPFSLMHIETKLILYVFLEQASSLIVGYYSSINFYSGDYFWALATTEHNELNTASDFLSLQLNGKDHAHSKCQHLKCGSLTHFITYNGKLRFTGRDYQENKKRLIQVEQHTQK

SEQ ID NO: 962808 - protein, 168 aa, Homo sapiens
MTIIAADFQHNIMDQGMSIKLKTSQPLIGRPRQSRLAHTAVPPMNASPSSHHLIPMQTHSLMRLASINTSVLALPHPSPHTTSSGYTPVAHSVTPGTIHSCIILHPNRKARRSKTKTHIEIDERRQSATQHTHSSDQPETHTKVIFRPLLNSRQHHHIPKTPHHTQQP

SEQ ID NO: 962809 - protein, 343 aa, Homo sapiens
RCLQYQHPSILLKKLAPYLQVGAAPGSSELIFEDFARFILVENYCYEERGSWRPVTEGHPARLLTGGLLAAHSASPILYLGQHWSCTNSEPSSALCIGLTGATPSELGAREVHANTQSAAAVHAHMTPRSTPATLTASLRLGHTATRAPARAPSAGLILLRSPAHCSAWLSCACPFLERLGPVFSSTLCRPPSAVPPGALRCSTPGRSPLSAAYAFAPRHWVTRSRHWCDAPAPLHHPRVLALLVSSQTQRRYLSITDLSHRITLTDYTHQTPLFFCPLPVPLLTTPCHPSYYHHSSTLYKYRPAFPHLQYTFTYSILSVQLYHYSIRCANHTNLYIDSLTPT

SEQ ID NO: 962810 - protein, 167 aa, Homo sapiens
MFEVYERSRWVPCVGTVGCGVDAGCDRGRDERNGCTANGLCMTTISWFYPESVTLALPIDEASSVPEVCDLRWRLASLAIGPAKHGALCRLRRDVNVLLLFESVSEVRLSGISRGEVVCDFVCRGSMRRYHPTAVVRGSLDGYGGHAGLYALNGEARFRGPSARRHT

SEQ ID NO: 962811 - protein, 74 aa, Homo sapiens
ASVVVVDRVNVLQASGTVEVRCSQLRLSEVRCLMLTGRDITVFDFHVIFVVLLVSPMLSLGFECLSQGYHRLIR

SEQ ID NO: 962812 - protein, 116 aa, Homo sapiens
LSDVLLYTNLLTIGTQLVSIHTSWKACMTIMSNTGMDGQKTDELYCWHLHLCCVWSVERMHNFLEAVVDRVVSTHVLTYSCENTQRAYSTWVPSDCYIPSLYERNCDRTARDNQRG

SEQ ID NO: 962813 - protein, 363 aa, Homo sapiens
  misc_feature (213)..(213): Xaa can be any naturally occurring amino acid
MPQHHGCAKGDKLTNSPIGNWWSMNTRACKRPSPTGFRFIGRPFTPANTANDFLLRTNGNDQPPPPTYTTYNPFRTIPMNKDKLRVSRNRVTVYHPECIVSELYKSNLSVAKKTAPYKLGAHHGTFLAMRTPSGKDTHSRRAHGKTQLTRRKRPTTGEGQALTKRKYRNPTIISTRWRPPLAQHGRRLIPTRITLPVQPAANTGRPSKSRTPXHAKSTRTGERREATQTPDCHSPSLNNCAPKRIVLPNTPINHRHTTTAITGTHCETTALSHNPPSTDAHGAPPHAAKLPLGPPGATARPPAHQTHSTHNDPTYPTVPRASPHARPRHTATSHVAHRPHDGTPAPHNQPPHAEPQHTPYSTH

SEQ ID NO: 962814 - protein, 144 aa, Homo sapiens
MYTRGCTGYSDLSAPIYAPDKVESNQDERHSFGNLRVHPNALAFVQLRRSSSHILAKSLALSRGRKDVRSEGVGVITMGCAHLRYVIRVARLLGQGAVERYAIRPYLALWNGSVRWVDGCALIRTMVPVVAARFGAKGLNAEGG

SEQ ID NO: 962815 - protein, 138 aa, Homo sapiens
AHGVRAWQLLRPRFLDHSQVFYVALYTREAQPLAAHVVPGTFARDQDPIYGTSHGARIDGESFGDDVDKAAVLHHLETDRMSLKLVTWNREERQPLVEVVVCSLEGDACALVVQLRWVVTHTITTIRTERKDLVSNEM

SEQ ID NO: 962816 - protein, 284 aa, Homo sapiens
PRKPVTKAQKKDGKKRKRSRKESYSIYVYKVLEPTLHPDHRASHRKAHGHSLQLLRPMTSLAAHSLREAFPPWRHYNTALAPLTSRARSRRPCACLLPGATLAKHADVRGAHTGLSTKLHQLQAAASRQLPATPKASFSRSPLTAFPAAHRTPCCHSLRPRSAPPLPLRTSRPAPFHSPARDPTPPAPTALPTLRRPPLDPPPLISLLTPSYPPLPPLLRTARLTLHTPTIASSLRFNPLLPQLPHRLPSRTPTTNSTPLINLHCPYPHLRTATNAPASSPCPD

SEQ ID NO: 962817 - protein, 397 aa, Homo sapiens
PHPGRPAHSQPSVILVHLHPRDCAQGPRLPLQLPAQAEPPACLPALSFARLPMHDLLSTIASVLPGTYAPRTHECLPINAAEIIPGRSYAISTVYPCSHMLITEHILQPADCTDALSDTEPFMPRHYILLSTQIIHGRETRDTLASTNTSSRTGSRSNHNRTCLCTESRIHFTADYSHSHNPTHLACTWTLAQRTPVLPRHLAHPATVAVTTSTTHWRLTHHTASTLTPHPTTAQNSGYPPNPSPPQPWNHNTALDPPPPPNLLAGPFSTIATCTDHYNHNGNIDRHPRVTHSCPNHQDTTHPIFARSGIPTGFGPPKNPLIGPPNKRNISGDKPLPTGQPPIEPLMRHPSDNLTSLPLFFIPQSHTQPSFEWNTNTRYATNPIEQRLQTTITETTK

SEQ ID NO: 962818 - protein, 273 aa, Homo sapiens
MSDGTVICGMPSLVCQLPCLRLLKTNTPCLLPCLVTCVALAAADELLHFAMPVPLSVPLCFTFLFMLADHMALHAFSGVVELDCSHVVLPLEATLVIMWLTVLPMISHPSMCALASSHSGYAFLCPMVLSLTVDLASFNPPHVAFALMRHVFHMPSLTAFALMLDSCWTMSPVCLSLAPCLPMLMALSTACGSLVPWAPSQCPHLAFGPYVPIADGPGPGCCPPVPRILVRCPRAGLDGARVCPCPLELVTNLLIGGPDRFAILRECLPITSV

SEQ ID NO: 962819 - protein, 361 aa, Homo sapiens
MSVTAAALLLNLVQQQQHTYLPCWAPSAHSQLHRDSYSSALGAEQYLKSAEHYTTSPINISLHSSIPEHFNTPPHFHTLAGATLSLSPYTLFYTYARKFQQETCKRNTLYPGARYPIKRHSSTYTEAPIDSPFHGSAQLMPTMRTQAYHNRSPRAYCTKYQTEPTPTQLTRASRCQTATLRRRTGDNSSPLRPLPCPTPLTPQQQHIRPGGTNKVNTVVPLTHSTRKYHRNSDPPNQEDGYHKPCAHTVGTQRTRESDWHHEPNILNNSTCRRQLQRDTLKPRRRHQHAGQALHASRHTRDHPLNDEMSKTCRPTSHTRTINTLNPGRRDRRNKQEIAQRNTTRQQKDRPKPAHATTPTQS

SEQ ID NO: 962820 - protein, 425 aa, Homo sapiens
ARPDLPASGRGVKSRMIPSPLDMAPPHQIYCQRLTAGPACPRLFKAHCLTSREDPDPRNGQPCGAGQQYRTDDMPLPWSSRQLAATNSCEQNDLPTLTKYALNSRSYPRQLLGAPAPRASRHPAQPSPRSSAPSAPALHTPHATLTRHPHPRATAPLLATPSRARANHALAPLHTLATPRIPSRHAHALPHRHTNTPTTPNHTPDPTARSHPTNPWRTHPQLPRAIPRLPWAPPTRTTTSAPLTPPYLPPSRPATTPPPDPRAPPHHRTLPPAHMTPAPPTGLPCNHTLPPPQAPTSHAPWRPNTTRQPCGIRTPEPPRQAHAAARPATRPTPGPIEPTTPRDSQGTTPPQAQQDQFTPPKHSSSPSHPTLGNHPGQHASTSPTTTHTPTPTPRPPPEPPPTQRTPPGKPNTCATRTSPPHTTRA

SEQ ID NO: 962821 - protein, 381 aa, Homo sapiens
MKNEKMKTTSWYVPESRFDRRFTGMSERSRVKKWVRERRRCSALTEGDICATTSTMTCRPIETQAGAAQDTCRHLPGTAGAIERASSCPEQALDARHNPTVAAGSYKSPHTDQRTTQHCTTPSALLNAGLDSHCAARDDSSIALYPAFQPHRLNGAALYTRPLPSTVTPHNSTNLSLNTAPRQQDSRSVAARQTIGNQQHLNIRRHRHLLIGEHPNHTHEAPAFGPTHCNHRTPSTARTNYTTIVEHITPPLHLDITQRIAHRLMPSNRKHTHCTANTLRNTHGNQKKTHKRNKYKNNAWMETQRTRTNPQKTAKRERNTQHEQNSANYRNKPPPHNDQTTREQTRPTAGEPRNHNSPARGKGPRTTKHRNNRQYCNGEHQ

SEQ ID NO: 962822 - protein, 380 aa, Homo sapiens
DDYFFIAHQWMNGGALVVSFFDDSGLSAPRQEAAFAYRTEPVPGLYASFLHFPLCKQALLHCTSFTPQADSCWQQPQHSRHGYATTLLTPADMTRGPQQLLALFHIQGSSTLCQRYSSDCSFYPHNRALHWRDTLALQPIRSNFHTASPAHTSWPSFPTAHSKRGTWALRSEMPRAAHGLLTAALYGRATSTACAHPLPTLRPRTYLPNLVLRTVYSCCLYAPSSTSCTPYPSLRAPPDLTHCFSATALLQPALHTCAARLAATHSAPATLHLCTSHTDQCLYLLLDGSTNSNYYEPLSTFTPTHIWAPLWKAYTHNRAYFATQLHRAPPMFHIKALRPPPCSSNTAQTTSSLTVPRKTYLRSSTTHEPNSITTKAYLII

SEQ ID NO: 962823 - protein, 147 aa, Homo sapiens
GSLKTQDPDDSSQNAMQAAPRDGPCTSTLLQPAAPCHRRPPPCAPCSLFVYPSREEAYHGSATCFRLLGFVCTSGDEPNLLLTLPRSLPPAPSNPACPPPTLAKHLPLLHAVGLDFQHPPPRAPPRSRPHAHSTQQSQAHDRRLVRR

SEQ ID NO: 962824 - protein, 270 aa, Homo sapiens
MAPTGTHALLRSSTYFPPPNLYNTCALPRGNPQPVLAPSLHPPTASRVFTLRPPPPFYPSLHPLRPHPHHLISLPSPAPHATHTPSPPPTGPPPLHPPLAPAPRPADLAFWLPFDLPLTWHPTAYIPQTIRLPVLQTQHWATRPLFTRATHYIQGLYHQTQHTLQSQHNKVSINTRRSTVGKTQITTGKYNASMIHSTHIQITALHYGVAINHTRNTTYRKYNAHDNDITATLPQLGPYPRYPPRLPPQPLHTHPLDTHTSPPPAPPFSH

SEQ ID NO: 962825 - protein, 115 aa, Homo sapiens
AGPPAVLCGRWPAPVASLLSARLLCLSLAPATDEALRQLEAELGCRAGLGLLRGAVVPCSDLCAAGGPGLTYMLLVLPCCVAPPGPRGFAADLLAYQQRGPLLLRNVSKGFVDLE

SEQ ID NO: 962826 - protein, 133 aa, Homo sapiens
  misc_feature (125)..(125): Xaa can be any naturally occurring amino acid
MFRSQLRSHHIGCRHDSVDMVTHCGRMDDVAVRCSSAELRAVESVVHPKRVCCGEDAIDSLRGSEMFCPIPLHSGVVLPTGVPRVEVVIQMRLLDCDAHTLMFPYSTRIGEIARMGYLVNAGNDXGLYQKTLI

SEQ ID NO: 962827 - protein, 299 aa, Homo sapiens
TRTPCDPLCTSHIVRDGGSCVLAVSDRHPWGLAVWQEILYCWSATSTQRESHPKAYFILFGCLRMTCMLLKDPDSTNELENALVQDELDCETMCPCMATEATLNRAHNADTGERRSASTAIEGTRTCRLAPADGPRRTKGPDPRTYWQLSPMSTAFKKPGSKKVPEHIPDTSATHEPTSNITEPQNIPRAGTSNGHQTNQANDKAVKTQEITRSIQERDPQKMSTETTIGHTEEEKPGPTDTQKKLNQTTDPDDRSNTTNNTETTNITKHKQPTGQKEHHTHETQWRPTTNHPEDNSPP

SEQ ID NO: 962828 - protein, 266 aa, Homo sapiens
TVTGTPVACTTSSWNTEDEVRYGLIPEEWLPVTLSKNWCNRTLCTRNWAYRCTLYPKKIYVISARDLFTALVRYYGVMVYGIKEKYGPFVALTLLSKLKWAKILPNYEEAKQASIHDIQNAIDTEKSQQALWFTQCADYLVDVHTEIHIARWLWKYTYRERLYTTYYNWTRKRIAWTIIVSVQNMMRRKGTKNSDDKLVVGSTWCKASPQEQEKETIAKVHWGTKAAWQRRLEPQQYVNVSIPVETVRTVADKWEESICKSSVSGL

SEQ ID NO: 962829 - protein, 218 aa, Homo sapiens
RQCAAERALRRRRVLYRGLSLLALLLMRRLPVALEVIHCMYWLRQYLDCVQHLMWTHEGPCELLWMNIPILPVNTCVFHDWWTQCVFCMDHAGQHVVDDPVGLNCLKPDEYILQCTTEMLCLLQWLEAQEPLGTDEAVSWNGLARRTGKPQETSHLSALEQTCGLYYDGMTASELPVLDRTHREHTLVGTVGQSTKLPQGRVLPFRPNALDRQWPADR

SEQ ID NO: 962830 - protein, 492 aa, Homo sapiens
  misc_feature (293)..(293): Xaa can be any naturally occurring amino acid
  misc_feature (440)..(440): Xaa can be any naturally occurring amino acid
AVISLLAASESPPSLPGSPCLPTTVFGSRPSLTTPGCCLLPWFHAVLDGCAQWKCHEKTPMAWKCEGVNWDWSLRVQGFPQNPSGDILNYPSSSACKGLPKSYQKGWNEIKTCEECGTTAYKTQGGPCARSHVAGHSLWSATHPDPHSPENHVGLEEMAEVLWVYPQKKQLECGQCGRGYIIPTKSPLWWGSISPRSLYPHNKDYPSIGTHKCLTKRKSICPQGNFTGAMERNTTQRGPKADIRMLVRILAHRAQKRGYPRRHTRGHSRFTKEHTQKSPVHRGYIEAPITSAXHKRWYQKQPTTRIEALCDRAKQYIMRRLAQRELVNRTIIRQQRHHLKSRCDNERQRCGEAEPHIHHQQKNSPTMWRQPTENPKKQTGDPTEGAPRTKSSHPREIEKAPGTREKQEDTRAKEVLHIHSQVVWRDTTRTTPDHPDKQNXTQTEKIEEYENEGNTPHGSTTAVETHAHQIGGKKEQTVPHNKVANTHKWPNG

SEQ ID NO: 962831 - protein, 298 aa, Homo sapiens
RADGREDGGRGRGYNDKGGEQRLISLSSIPHPGHHEWSSPEVSSINQEAWVLTAKDTELFVQCLATYSYRHGSGKEKNVLTYSDLANHCISISETFHVSCRIYTKEDFSLVNTCNCVKEEPREEDEENDNDNESEHALNAELLQLPSALNNQPGEDSPGAIPMSLGKDSTARLERLHFFTEFQCVVSSEVFFPGRDGAPHVTTPQTGRGNATRSSAPREASLQVRHKKPRYWQHRRPNCTGRPINPFKYRSDIEELLTYRTGPTHTAPGTHANNPREYDNHTHRAETCQLAHSPQKVQ

SEQ ID NO: 962832 - protein, 157 aa, Homo sapiens
KLCSGLKSHWLPIGIHCCKKNCPEESHFQEIKNVVSGKTSVLFEPSLDYMVTKYSPAWDLERFHGTSSQNGSSMKSVGEVMAIGRTFEEEFPESFTDVPPIYRRFALPVLPMNKRMAIYYEILEKSGLNQASTRIYAIAKAIDDNMSLDEIAKLTYG

SEQ ID NO: 962833 - protein, 310 aa, Homo sapiens
RLRSRDWEPAFPHIWGCWTAGDSGERAGKPRSGSRRRTGGVLQQQRDQDASIGDPSQSDDPDDPEGARLPRQPGEAAAEVSRRRGAQGPASLTVTQRRWKLRARPSLTGDPKTPWGWGARPPAEVQYTPVARSDFPPFPSRDSGASGPDLMSCAGQPRTGDEAWGISASLFSSLASALPPGSPSAKGPVSLRIGHSRLVWFRASVRPAGGLPTLPQKGLPLGREAFCPPCSPVMGRRTGGPPVSPLVWSTKSPSARPHRDKFSMACIEPGDPWGVLAVRGPRGDNYNSPRGHVLLVGSPAFLLPPRGVWP

SEQ ID NO: 962834 - protein, 176 aa, Homo sapiens
LTSLRGQCWILVWAWLLGSSTVPALTPEQKNGCCTDICSPASWPPVQWASWSADESTVEHLPKRPCRSILRTLWTHDNLLTVAIAHPWGLPCLSPLVSMASVIAFGTHASGPAPLARLANPPPCMLFSRAVLCVYVPFITAQSPSNHASLYPPSRNNVARCPLALGVSGPLLFPRT

SEQ ID NO: 962835 - protein, 385 aa, Homo sapiens
  misc_feature (72)..(72): Xaa can be any naturally occurring amino acid
ANCLRTRRRKERRFYTNAYTDWFRAAVTDRDSDPEPGRSEIDLRHISERIRKSGEERGTHWEVHEASGSLQXYEIINLAYTVMRYIVRCEGSNSYYFDTCRELGAIGLTPRHYLSDHHDSADDMHAAHAARIAGAFQEFMLRAGSFEPRLFPTSKGKLMGRCSLTSGELASVMSHLRGPSSHFCFWYPNAVQRVGALRTHGSTRGTLRLNTLRIRTLTDQIPGHLKQVGKTCSTYSRVGQRLLALSSTFQLSPAVTSEPYWKGSGEISRAHLPFKAEEGRLSNSASLGLSTHTHYMFVPWGTSPICGFEEEHQEDPLSKPPKGECTLVFPTLIPEEINECQGRAKELCLYTFVPFTPNRKAEHIAVQGGINSPGAKVAPAEKQGV

SEQ ID NO: 962836 - protein, 129 aa, Homo sapiens
HPLAGVPPGAEGGSAALHSVSDLGASEASRLSEEARVFFSESKFLGDAGRMTAAPERRDSSDRRCVPRTAHGQEAPGTDSPTLRRRDLRLRSVAEAPEFATQLWSSAAQQQEKPVPCGGPGASRETAKG

SEQ ID NO: 962837 - protein, 264 aa, Homo sapiens
DCLVQRGGPWCALVDLEMGNLRWCFPLECFWHAGILGPGGRWLWTGAWGLMCPLDARCDVQRPSDKRGVIALSPMLVPACVKDMKINVPGMEIYLFSLPINGIMRSLDFFLGASLKDEVLKIMPVQNARPCAWPAQQSSMAFVCYRGLQLATVWSRVLMLLQRSVGTDNPVGPSSWQCSPSSPCAEATVGNKIGSPTVHCKCDSDWCMICAGTLIPAPQGTGIVIRHLVPKTLLMMAVYNDATPQPGLKCNPGQFASKFDAFLD

SEQ ID NO: 962838 - protein, 118 aa, Homo sapiens
RGLRHHDSFSDAMTQPIMWSSVMCTMGTISLDFLSDEKYVDISSLSCPSEKNILPCLMQHCSKRGWRVLHHSHHIVRTGAEATHKGDLMDASRIDVDCPDGHEQSEWHSLDPKEQRHL

SEQ ID NO: 962839 - protein, 288 aa, Homo sapiens
GGEVSECCAERALARSECVQQYDRQIRLWGLEAQKRLRASRVLLVGLKGLVAEIAKNLILAGVKGLTMLDHEHGELQKIPGAQFLILYWVCWPEICAEASLRSELTNLNPIGGTVTGWTLDDIREANHELIISLNIDAVSSDLLLQGMSELNVDQICHKNSIKFFTGDVPGYHGYTFANLGAAMSPWRRPLKLPKLATAVARCGPDTKRSKLDSSETTMATPTVVFCLSKNPEGAPGRTEQSTRYILKRPRARTNYPSFRLPQEEFRTEFSERRSQLLSSPLVYDSAK

SEQ ID NO: 962840 - protein, 368 aa, Homo sapiens
PHKYHYIDDLVVILAQNVWEHLYNRFGGVPLAVNHLYCVLHLPGVRSEALCQMLQEDRDLTLFIQVEQRPIQAEESHVASYYCISNASGSGELGGCSVTGKDNRAPRAHGQQQDRTGQPAADMSRLKQGADYRADNRRRPGTYLKQHCTGGGPENAIRQQCRQQTDGPKRTCNGEAERSHTVTLEPSVIWLGHSSSRLPAKNTSWQDVDCTCDMPLEPTCCTARLTNKNRWCPPPTGAYQRIFDATHSYSSMIQLDIYTPPTLWKVTCIDYHCLLTTCSTIPILPHVPAANEPKTNLEQIPPTKSPMHAPRVMQHSTRMTTHTSQPTIQLTKPGRRQSNPPPATVQTAASLGPPEQPAEPLALHHREL

SEQ ID NO: 962841 - protein, 219 aa, Homo sapiens
FQGEWLCDRHLRDVMCGLGLLLCAVCVGDAVMPMMLLCGACMRFGCVVPMPGMQPLSECACCDLFNGAVETGNGKCAPVFGVFHVDCLCNFNLCCLALVLYPVCSLSPLEMMFSVLWLHLVLRVLNPVQHLPTSCTLGALIVSLCGPPVCMLPMWPTRPCLLTALLQPLGHALPAPVGTIVHVCLTLSCFPLTCIYLHLLLAYRVASPSTFVGSLTHTR

SEQ ID NO: 962842 - protein, 428 aa, Homo sapiens
ILNEFDTAGFLPSSEVVLHSVALAAHFMPNMHNAITALLVGQLSQSNTGLVFKQQSVSRQFQLIILFSIIHVICFHSCIQVHCASGHFIPYSFPITHMSIQSSFTQHSMICSISTSSHTGAFILLYSSISTSTISFWHIVLHVHISYHYLQRILSQLHNIHTAPQLHNTVTSHSGRISFSQRVTQHIAASPISTFVLHLTNMGLSLRHQATPTILPHTGWDTGTSPSISGPTTGISRPIITLSPAHALSHSLTHHTARLLELNHFTNSTPLWTNTPFYIPYFSNNVSSQSGPSPHMSTKGNEDQTTIRGENQEIWTNWDNILFNLPLFPWLAHTDTHIPKQEGIMVTGPNPGQGNSVTQSAGTPPEDTDHSADLATLTGPTTRSRPTGSAPHHTKTGHNAQDNLRHKPETRARNNTTGRQHPPRHGIT

SEQ ID NO: 962843 - protein, 185 aa, Homo sapiens
MTDTYPMCQWSKMAFENEHFQQDPSGLTVTICPLVTVPGPVVSSQKASHKHHLISYVALCAMLLMQQLQLALVIVLVSLELVILLHVHVQAQHACTHNNGQHNSRSHLLGSNHGRGMFLVLVASKHNGQHCASGSRSLSTQLHPPSHVWVTHCVLAISQGGRKHCSPHSRGATDPVFIHRLACED

SEQ ID NO: 962844 - protein, 306 aa, Homo sapiens
DNACSADITQYYLGMPPQWDMFCVCMAVALSEIERVPLAVLCDTSGLQLVMNIAEHYMASYVEWDPTGRYVVTSVSWWSHKVDNAYWLWTFQGRLLQKNNKDLLLPAAVLRPRPPTLLSQEQIKQIKNGSEGNTLRSFEHARICSESSPNSLQSAHLGVSRSAPPCMASISCASHRKMAQELYMEQKNERLELRGGVDTDELDSNVDDWEEETIEFFVTEEIIPLGQSGVTWSTVGTDSACCPVLSYRDSRVVSRRSSEWQSTPMSDLDPVGRTCRESHGDYRLLPWAHLGLGLVLVMEIWQCEEL

SEQ ID NO: 962845 - protein, 357 aa, Homo sapiens
ACQFLIKFHERRNDTDHRLCLTMLFALKAICHFDCTQHPTTLRHLRSQPAAHSACPPFSQQLSTPTHTSHKFTPSISPYPKAHAAPPLAPATLPAQPHTAPSTSTTPPLPHLRCAFPRAAPATPPPHPAPTRPALALSRRPPPPRRPRSAPPPRYPRRPLSPPTLHPAPNSPRQQPPTAHTAPPPPSNPTPRPATHIPPPSPTPPASPTAVPPALALSPTHPPPSPPRPLAAHPHPRRPSPLPSLLPPHPPPLPPPPLHLSPLPPCALSPPLQLPVTLPPPRRARAGPAPLARATPQPHTTDPPPPHARTSHRAGPALRPPPLHPYPTSAHSASPPLCATPARPPLAPLSSPFSPAP

SEQ ID NO: 962846 - protein, 240 aa, Homo sapiens
MDVPQLVCPPSSFVDLDLLSPSQSFRVIEPRSDSRLPSVIIATSDGVSQHLNPCTSLAHATEQRPQKEPMIRFRQSNLFEDTDQTTASSSRSCCVSARQVFQAGTSKPLHSTGINVNAAPFQSMQTVFNMNAPEFLRVESEPEDFKSEQNQYQASYNRELGLVSRHQVEQTELQQEQLQTVVGTYHGSPRPVPSSDWYPPAAPQQNTGFPRSNQPYYIVVECLVEAPVELEADEWIRGLQ

SEQ ID NO: 962847 - protein, 100 aa, Homo sapiens
  misc_feature (45)..(45): Xaa can be any naturally occurring amino acid
MAGPSGLKQRFYVALYEEREQYAMWSPWTKLTNQSSKSFTHTTTXSATPTHHHQIATTHTHTAPPSTHNTQIAASATHIKHSIDPTTAQRQPTHHHPAAS

SEQ ID NO: 962848 - protein, 106 aa, Homo sapiens
MTYGDPNTLVPCTRQAVVRARPSVPGSCTHEYPTCLPDYDCVLMCFWCPVACVVETVTITQVQTSDVAHRRSRVYATLQCVSITGTSTMLFEYHLITLYFSNNASV

SEQ ID NO: 962849 - protein, 368 aa, Homo sapiens
MGKEKDSYQRVVVMGHARFGQVHHYVASLIYKCGWLRRRETIEKFEKEAAEMGNGLLQGIAWDLGITSGEAEAVNRGIHHVDILAVWNNLMNQTSDYGDVYICSAPGITRSTLIENSMYYRVPSAVAWLLPVLNGYARSGVSVQFCIAWVMLPQQLATVPRVAMPLAGVYTTKGWCREQLHLIRCLTHILRFQLEPTHRAQTEHHARHTSSKGSQLLTINDHMGLNNLTTPASIRCQVAGAWKGDNHAWKPQVLAMPWLQRDWPHATPTRMRSAQLGTQAGHEGLGHQVTYTANSAPNLEETSGRPGLFPTNYSPPSGGGIGATGMLAPMGIRRVPQNHGIEDEQIRTHRNNVKQQRETLPKDRQQHQ

SEQ ID NO: 962850 - protein, 354 aa, Homo sapiens
WNPALVPHTRPAAHSQSSVHLFTRTLVTCPKDPRRRSSRLRQTTDQHAAALLLSTPHMTDLRPPSQAAARTYHSGPQSAAYQPATIKPASSYALLTIYRVPMLLNTASLTGRTALLRISATHPYRPNNHLSPINPTTQLTRTTRAHHMALHAQRIALDTPCPATPNHARAGPRNTSINPIYKAQILHTHQPPHRTLAATRTTRRQHPPTGGPPGTTAHNLPPHARPRPPTTHLPLAPHHHEHTGPHTYNAHHPTTTRDQPNGHATPTPGHPHTIRHTNNKRSSVASPPKRFERPRPRHHFSQHIGTDKLRTQRHNTPLGNHCTTPRRICKHTDPQTSKTHTLLRTYRIPPAGKA

SEQ ID NO: 962851 - protein, 300 aa, Homo sapiens
KRHKGLVLINFLAKKVPRGQGLPGGGACAANPAAKAVPFGSRLFVPACAAGQLWPPSKPEGPGLQASGPGCGPAPGERTQAPSSRGRTTAPPRDSGSLTLGRGSPLPCHQENSVPGSLGPSERAPTQGGGKQEGQEAGGARPGDSIGPIPVPTKDDIGKRGQGRVGSPGCGACGTDMAAGLQSEGGRTNMSWEPHHMGGRQRLAALGTPSGGSPGVVPPVECANGAGTPKPREPRDVPRASPPATYGNGRRGHMRARCPGRDPKDGASDPTATEGDGRGGERGGDDTANISEQHGSTEPE

SEQ ID NO: 962852 - protein, 212 aa, Homo sapiens
MSRSPRNCSDVSAVKCERVRSWVNFDSSRLPGSLRASSSSLCLLCLLPGSGAACVLRPALRSANGLLPDLLTRCALPLAPMPCDLGPRWLGVAAARTWPALAWGLVCLCCLRMCHVWQPGGCMQGVGTVCEALCSTRLKSCKGVCLVMRWLECTAMGLQQRKPAGQVWLVIKEDGHMESLTRQEPRLVLISIIYENNCLIFRAPDNGPAGIA

SEQ ID NO: 962853 - protein, 147 aa, Homo sapiens
MGGEEKPMVLVKRQQKEGGKKYEHQKDLEMEVELSGILGLKYIYTRLEMYNILKARTWFHSGQKRRKTDSKPIKVTVPDGKQVAAESWKTNAISNLPVELVKAWSENNVIAKVNNVVWDLDRPLEEDCTLELLQVEDEEAQGVYWHC

SEQ ID NO: 962854 - protein, 141 aa, Homo sapiens
  misc_feature (90)..(90): Xaa can be any naturally occurring amino acid
MMRKAIRGHLENNPALEKLLPHIRGAMWAISVTKEDLTGDQRTCLLGNKVASLLARGWWPLPHVKVTVPSPEHLVSVARRKNRPFFTRGXIRARSTQAVENSFSKGGSIQVWKTSPLKVDLWQCLSQLTLDDNSWDARRAM

SEQ ID NO: 962855 - protein, 220 aa, Homo sapiens
MPDALLSLLLLLLPLLLLLLLLLLAPVSLGPEPCAGADVRTTGFACPAKCERDIAVLTLNVTADHFAMTAPVIIALHNGSSDLQQSDFANGACQRPLQTLHNLVHKVGQGGAWTSPMSCGTETSAEVADLKNAAVMCWWNEYDGGDRRLVQEPPASDDLTDSLCANHVLTGNDTSWPGTAVVRQEGADTAGLRRDDVQEEQQHAPTAACPKQYHQQFTVT

SEQ ID NO: 962856 - protein, 152 aa, Homo sapiens
MPNRDANASITTGYPYILGLDLAFLHSALHHRRSLSGSLENTTEGRTKSMDDLDGVARQSNAPVESWRSATRSMRGRPAKHRSHAHTHTDTTHTGKPKTPTITTKDTLPPHPLALRPPTPSAHQPPAQPTNEPHNATRPPQIGPPAVNRHPP

SEQ ID NO: 962857 - protein, 66 aa, Homo sapiens
  misc_feature (34)..(34): Xaa can be any naturally occurring amino acid
MIPRSHEIRRIRITFFKKCRPNPMIWAGGLLCPXGACLDDVLPFLLWMAHCFPTVEEDILRSHSSV

SEQ ID NO: 962858 - protein, 208 aa, Homo sapiens
GPLLWAGWESCVTSGSGLVLPMSAAPGRDALVLVSRWWWLPDCCSATLTSSFLSAFPMQIGWMTAVCMLCGVCPGGPGGPGMGNLRWLPAGWFRQLASWWPGGRWPVDWGLGPECLLELLLECNGRWITDVDSPVTNVGPAVVKDIEDQCPWEGRIYFFFHPLATNLRRGTSSKKSIWEFSLFTFVWVAISSSNGIEGFWTRTLIAQV

SEQ ID NO: 962859 - protein, 185 aa, Homo sapiens
FLPPAAAMLPAALLRRPGTCACLCPATALCLMPEACLPAPGCRLCAPTMMSFTFCLSHCRCSSTVPTVLAVWTVPTADLEPSASLCWPTVPTAAWSCGLGLVVVHAEDVHHLQILCEQLVPSSERLTLRCSCWPEEAVTLDMSGPGWQPRQTWMKAQAELVGVTADRGQLRAEIQIRIEANEALR

SEQ ID NO: 962860 - protein, 432 aa, Homo sapiens
EPVRRALRARPRAAADHRPATCYLQLHDLSDDPHGATLGPMVLPVPCSLPAACWLGCCCVNVLAVQCCVARLAAGSFHMPPVPVLEWPEHVLAGVQCSHLCACWACSVADASCCCMCWHVAPGACPCAAQLSVQPTPDRLACLHGSWPRKRLGRAEHVPCGDAMATKRHTTRGSQDACTGSNTRDCTADGALDENRYPTQRKNVTYFHCRNQTLASLAELTLGALKPSFGQGDTTVGYTGNTGRDCTRCERTDLNCACQWSGASTMEAYFPSQEPPQWAGTPKRKGHSTYPNRSRKQGIHWRQAIQTAQRHASRKPEREGVYRADNPNRNRAARRRNLGRVKRTNAAASGPSGNVPSAKTKRSPHTNSERQQPVRPGDHTRGTHEKENNTRPTNKQNKNKTATSGQQTTVAHKNPTKKHKDNRESGIKTGRP

SEQ ID NO: 962861 - protein, 289 aa, Homo sapiens
RWAGTYTSVKAGECGHECGALMTRKGRGMQEVEELSETVECVVKQHRVGEALRVVVLVLGVWSFGRRRWPGSWVCAWATTVGWLPCLCEMPALLRFLPMAHWGICTLCLPLHALLGLHPCALCSDAAAWTWFLPSWTIFTGWREQSPAHWSGVLADQVWTLTQTEEQLHCTVYRGDKSQASRPTQTSWSACASTFQLDVTLAQLYQHLGYRGHPNSMRWLRNSKVCDCCDKNPLNGYSHVSGPPKKTLPQSLALAAVMCQWLGPRLTRLMMSHTWIPSMKPGCKIEAPQ

SEQ ID NO: 962862 - protein, 194 aa, Homo sapiens
RCWAERRELLGSAEESQDLQMPCWRGGMTEGSMAPPGSANAWDDVKTATRSWMKAVIVLVEQLLQDIVSKFQAGQEQDQQERCFLRDAPSKELEPQCCRTQGTGRLRIHAHPESWMSIMTVASSDFDEYLDLEYERGSLGPIAKLMHDAGYWREQQLEDPCGANILPGQLGSEWPQATGMHCHQGAYPVTQCDP

SEQ ID NO: 962863 - protein, 289 aa, Homo sapiens
PRLECSGPVSPHGDLRLPGSGASPASDVLSIWDVQVHAYHTQSDLVFLVETWFRYFVQAALELLTSGYLFPHGIPKCWDYRRELPCLASVYFFLVCYSFFEMEFHSCHTGWSAVAPSQLTATSVLLGSSDSHASDLPSSWDYRCAPPRPANFTHPSKRQGYTTWSGRLGLRNSFTPQVISPTISLHIALRITELWDNRHLAPSSLFTQINSPALSTYNSSNNDHSFTQIISRLITKPQLGPHSIDALIHRTTYPARRVNPQHSTPALTPTPTTNKPETPALIPPPTRNA

SEQ ID NO: 962864 - protein, 137 aa, Homo sapiens
MVILGTKQENRAKLKSTLKMVHHSWMVHSRKDDVTKMATDLVPMAHSTFPTYWLGSPEYTKTSFYRVVVVFKEGAYYTSATHITHDTSTPRRLTPYYDDTTTTQTSQRRGGYYFKGDLVVVIRRSHPHQRWATRNIQ

SEQ ID NO: 962865 - protein, 175 aa, Homo sapiens
FPAGTESDPISRALHKIGACSKACTLATALARLDGRGLLVLVPTIQDDEELKTQVAMQPWVPAGAARHTPTLHAPVAVATTCAAEMAADCVRRSRIPKAPLLGQESGTPNRTLIASVFPAGPLAQRQLRHGRGPSKVNEGPWPLATGDRPERPCAFRTYTEVAVVFSQWNPGFLL

SEQ ID NO: 962866 - protein, 179 aa, Homo sapiens
LSVPTSRACRPSFAKQEEGPAGRNWRGEAPGGTYKKIGLGFKTPRGGYGGLTYIDKKCALHLVDVSTLEGRTPSLDVVTKMKMQRSMSSARDYLHLHPEVTTALGESATRSMSVQAVHPCLSGTARRSDDNRSQWADGAGPHEQDSAHSTCFKVHRRRAGTKKQYQKVLRRGASDRSPQ

SEQ ID NO: 962867 - protein, 267 aa, Homo sapiens
SVGWLCQVAVATRSLFAGQWPSRCLRSWLASPGSLGSPYFAAGGAGWLAAVSMGGGDNSLLVLGCWTCFHLGACGGSLWALLACCLRLADAATEIVERCGPASAWCHHLHGSPGGLPGLPDRLSCHGCCAAPRCCARERDVGPVLWPDGLLCQLRPCSHPEPHEVASLGKHVAPLSAAKRGVLLQQAPTSWWMSSGSHGCPVEGLIVGLRTHSIVPEAQSFLQTALGEKGGCQPMHACSCALPPSALGVRDGNHLLHPQLSLMNKFW

SEQ ID NO: 962868 - protein, 313 aa, Homo sapiens
RRRMMGVPSPKLSKSNGRLLCGTHRYDNGLCVPPEQVTTWRLLHTQGLDVACLMRMCPSTKKDGSCTSPNVAVVVHARLGGTAPPIMPVDRSVVQSANCYHVPRLLLSYSGPCSNCALMCTTTMSSRDDSVAMTAATTVLCKLHATYCVPADTVHELDDRTHGILQLDSSTTRSLRHTAPIAVQCPEPTEYIPHGPLHMTTTATFDIYCSAASAHALILINTTLLHCYHVPTSAMLHLRASTSIHDTASAQQLDGQAPTLPLQHFQMANETKGGRPLALTGPCGHHGTHTIPNTDRRARQRTYWPLARRLGAE

SEQ ID NO: 962869 - protein, 224 aa, Homo sapiens
MPDGPVQAVPPPPTRAHGAQTAHRRRSIFTRRIPAPSKPVVGIIYPPPEVQKYVDKTDSFVARNGPEFEARIRQNEINKPKFNFLNPKMTLTMPTTAQGQASSRKGTAQEPSAPYPKVMQAAARQTHQKELPQKGQAQVIQETIVPKEPPPGIEFIADPRIYLSPSHGNVVKLTGSVLWTRIGRQFMTQLLQYRAAQYQVDFLRPSTALFNKFRKLVGQAHQGS

SEQ ID NO: 962870 - protein, 267 aa, Homo sapiens
EKENADGQTETCTTYSKWDNIQELLGHPVEKPVVLLEGLPPQTTPTHWFHILALVFRRMILRSCRTTTSASVTLYGPPRPGRAPEKQRKLPLGTPAPMPLVSVELCINIRAQLGSLYHPVRLFYGLAWPVLKGCRDGSEVGLRLGCSAMELRGPDILLSIFGCWCQLGDTDCQEKHKVRALIPGPRSSSTNKGGRTRSTHVPMRHREDSGGTNRGPGGRTGNPRDYRTKRPALGAPHGRHDPYTGTRAQVYTVTGGKHRTNNHFRHR

SEQ ID NO: 962871 - protein, 103 aa, Homo sapiens
MGKGDDCCINDCRHGDASDSGIVDHDGPSGSINGGIDRRTIGKFEKEAAESGQRASILKYAMVSRINLELSDEPVVSPIRYLLWWKIGEPAKVLNVTYLLMPQ

SEQ ID NO: 962872 - protein, 32 aa, Homo sapiens
MLAIDLFLRRTSVAGTKKKNSFSRGLISIKID

SEQ ID NO: 962873 - protein, 346 aa, Homo sapiens
SSSQTCRLPRFLIIIAIKSPDTLCCTHTYSYCTAHTAPTVHADTCCMRHSCNTCFSCPLVTLHLDACKQSRWSATCQVHDKGHQSIFHQLDNYHELRLYHANLHNTTLSRTQKHTQRCPTAGLRYILGCARTASDTQLLQSNLSNALLYYCTSAPRTPTIAMHASSALHFPVVCLLCLPVPLDSPSEHCKDCDTTGQTHYVSSQDTFYTSTCSRRYSSDVLSQTTFRLGALHTSQPQHILAAQHSTTHDSSKSSIFSPNGLGSHFIAQLGYAPTSPLHPRLQLSPATSTCRTHLAHHTPLASSDSLASLALGQRNPLSRLNQTAKFRNLVQHIHQELKSRKERKSN

SEQ ID NO: 962874 - protein, 277 aa, Homo sapiens
LILLLSGALACSRPGLLPLHAGISTPPLSRPGRGEPRFIAVGYVDDTQFVRFDSRRLRVQMRWTPVWAACGVDAVMVAWRYLWTCGDTEVQAPGNRLTRSEPAEPAAATTNQMRWPVGLTPSSVMYGCDLVALTGASSAVYDQSAYDWQGLRSALIARTCAPGLPADTGWLMITQLQRGRLAREAVAVESLPGGHVRGVRIQQNTRDERERMTAAARGTPQKDKTVTNIPSLTVKATWRCWAWGYTLRNIKTDLAGEWEEQTQGQRSCGDQAEEMNR

SEQ ID NO: 962875 - protein, 102 aa, Homo sapiens
  misc_feature (37)..(37): Xaa can be any naturally occurring amino acid
MVAALISAQPGGTTPHWGLDQTPFAARPLASARPQPXASPLGRFGLGNNWVIEHRVQGGISNISFGTQGVLRRDIKYPVTPKSTRYPINARPFPKRHLTATT

SEQ ID NO: 962876 - protein, 367 aa, Homo sapiens
  misc_feature (215)..(215): Xaa can be any naturally occurring amino acid
  misc_feature (235)..(235): Xaa can be any naturally occurring amino acid
  misc_feature (242)..(242): Xaa can be any naturally occurring amino acid
MACHGCPAWNGMVLKPLLPQWTWQLAAVATVCSTMPGPGMILHDCNVPCAMPMAAACNSASCCPCCLCVPIRGPFCAACPYCVLCTTTECVLLPVPAGFHALDVSSRRGLCISQRQVGPVTHLRIYLCASCRECCELMFHCEYPLHVPNLLAVLCLDTCMLPSSQNLQFHTLPPSESAHPCTSHMHTAHDMLPCLQRNRDTPCAQPHVLTLYDLXQLPGSLETGRTTLTPDRQCXRRSIQLXATRTHTTFLRHGPIRITLLPASSATDDPKWPRGIYRCHTVRNTHDAQKGNAGYDTRHWSGPTRTPHFNRPLTLVDAPFAHITSYSGRLKLHNTIRNTHHKLTHPYDPHIQQPHTTHHRQTTPHKT

SEQ ID NO: 962877 - protein, 103 aa, Homo sapiens
GVVKTTPKSQNGNRTQTHINIVVIGHVRFGQVHHVLVHPDPITCAWPSTQQKPLDKHFDAQRGLHDERQQGLHINGTALAILRTHNPEQACTQLNSWVNTTPI

SEQ ID NO: 962878 - protein, 155 aa, Homo sapiens
ATLAPSKETKAYAELNARALAKQHCILNIPLIQTQLASFAYAGTCDDWQLLTSCSPQGHGKMQACAEDISAASTLAKLLIPAFTHRVSKAQIPSMILKRLPMNDKPGDYTTRMAPIATPSIARVPTNISYEYSINLRPKAQQVRRGIISNAKCGV

SEQ ID NO: 962879 - protein, 166 aa, Homo sapiens
CVPGLWHWNDPDMLLIGNFGLSLEQSRGPAWPMCDWCLACPPSCCPHDLRTISAQNMDILQNPLMIKINQDPLGIHVDCSDSQRNKSLIEVYMRTLSNNGYGLSLLQLQDRYALSLPTPPLAQAELHPGLVILSRPMDVYYGDITQCASDDETNFTVIINPSGVVD

SEQ ID NO: 962880 - protein, 211 aa, Homo sapiens
TSGGTQGCLSGQVIHARQEVRSRVTNMVSHQLSFQRERRYQLFGRGEQVTQVQRIVKRLCRDGSIRTVSVHMKESCLNRGVGCAFNFDGEVSSEERHQEQFGAHSMSGWDEILDSGVPHRIPRQARCNSFITQQGIERSASDKRRAVYRSPAEVTGQIGCAVEGIKYRRNELFLDVRGRAVNLVMSPQGQVLSAHVSGRVVMKSYLSGCLN

SEQ ID NO: 962881 - protein, 145 aa, Homo sapiens
MSTRAGYYCECANAVAPLLIVAMDGVGKTVNVAPPHQHRHRSDAPNRHKPPGYSYRYVPLPRDRNRYQNESNQDQAANCTAFFTGETAIEYRASGPSMFAQTSSRISVTLLRVLIAELHIAVIVTNAFYATKTLRTGVQFCIKYQ

SEQ ID NO: 962882 - protein, 326 aa, Homo sapiens
MISDGPGAPTSRPRLQHGAYSDVRPHTHHTALGKRACAPSTSRQPSYAIGPRGGSVCTQQLHHAVAAMQETACPGDAGIHARTRMDFISMARQPINTRDSQTHPDDQRRQVELHGAELTGFAQLTSDKRARSLEQAQNDRILAEPKLAAAQWAKATSRAWGTSYEDGDAGRLRTDSVDQITNDKSPTSTDGTQRQTRDEDTPGAYGQNMAGDRMLQTQRKAENTPADHTNQAVPKAITGTVMDAGRTGATEAKQNRHMRAKPPNREPPRRTAQKGNAGPSCGRYQDRPKVNTQEQKTEERETTTGRKRETPEEQPEKKTASKKNHK

SEQ ID NO: 962883 - protein, 75 aa, Homo sapiens
ADCLPGSGSRRRAEESLEELGPQRPFTAVGQSSGQVGGWVPGNPVSFYHRPSALSLELVELQEVLWSVGWDQLSR

SEQ ID NO: 962884 - protein, 456 aa, Homo sapiens
YQTTLAKPFTQIKYRRISKCTTVAQSASSVTATGQQHATDIHQPKPSIISQGTQRPHHLSASHAHSTQHTSHYEQGQQPKSLKHPAQHPARSSPSSNQHQHSSHTAVVIVSKHNNVGHSILHQSQQAAPTHSPAAYGCISMGWSHSISTSYQVPHVITHLSTQTSKPVLTNRPCVTNINQRSIQVSQKAAHTQHPIRNHIRAHNTPCGLSSQQVTHTHFQSERHQESQRALTTRKAPPEHSHDTGQLPQGIQTSRNVTLTNKVPQRRYYTRGHIHVRTNASKIWGRQNSISPATLTQAQPTYKWMKIIKGIQQCGKTTTLSSPPGTIKRTLGRHTHLQDTPQDNRGTTMINQGTPKVNTNHTSKHKTDRVIYNKTTHPPWIKSTQTQQGHVGVPHKRATRVTTAKRIKHGKPPRQQTHKHPEAEVENQKKNVKPQKKSNTENKKEDTRPDPKGQTK

SEQ ID NO: 962885 - protein, 193 aa, Homo sapiens
MEHIPLGRRKTTALQHMRRTWKSTHRARAILYTQETPQVRAVRTPSSLVATGRQIKGHICEEHIQPQVDIGRHSGAQQKQNKGAGATRTIGPNTSGGLHTPSTGPRPHHRCDTSITPRWMNRKNNPETTRRKETKKHSCRHQRTQDSHRQRTPDTQDIDGATTSEYTQQDETKTDHDTKRNDTYERTHQTNEH

SEQ ID NO: 962886 - protein, 365 aa, Homo sapiens
MTGFHTCLPGWSRSPDLLILPASCLPNVLGLQAVSHLCPAWYILKPSDLVTWCAVGTDENTGTWAMKHVPATNETSARRNWLVSGACDVTAMLCVGFKENIRYGATNGTVTKKPSSLRKKETFGRRETPVQCAVTEKPPAPRSGKRANGNAGCCDHEPGTGRTWDGEWDTRSEHRAHRSCRPTSAATRKTDLASAANEVRVPNQMTGAQEQTLGAGPAQCENLAAPRTTSDAAHDGANQDEEAKHTARTMGANSGAAGTKPQGPDNTQEGKTKDTGPETDGEPSTGTLSGTCVHNWLLVHNNSNLPTTTTLPAVCSLLLNTTKVWPTSPHTSRSEAAKNIANNSHPVTRHTNRTHDNTDEPYTPP

SEQ ID NO: 962887 - protein, 229 aa, Homo sapiens
RESDGEDGCLAVAASWPVWCPVWCHAHLCVLDVDGMHKTCDGLREEGVTRMEEEWLMDGQLACACPVDGATPLSYPSPGPQPPGPSWTATFDPVPTDAPDSPRCLRVDVKMLAHLGLQPHMGAPHVLPQGLPTQSLASPPCPVTALQCSVSHVTPRTPPTCTSCEMPHEWQPNVTGGPQPLAMALVKHRGPSGHLPRDPVLPQLLGQCTRDPLALSQLRGPQTHTEHRM

SEQ ID NO: 962888 - protein, 185 aa, Homo sapiens
QTADGSHCAVSDGEMQEHYDEFVEEVFTEMEEKYGEVEEMNVCDNSWESTLVGNVYVKFLSVRKYAGEIGCDFDLNKPVGLMDSRVHGRAVTRDGLSEKPAAVSMRWENAHEAASANFMHLDMPSFPEELRRATLMAAVAGGVDQDPDPGSVVARSRDRGRGWWLVAGGGGGGGRERDEEAVERS

SEQ ID NO: 962889 - protein, 82 aa, Homo sapiens
GAMDARPCVARGRWAGVVLPTALTWRPVVARLPGARLVTAEWVLVPWPPNWGCCTGACSWVGLLSPLPWDSEQPRPLCLPVA

SEQ ID NO: 962890 - protein, 342 aa, Homo sapiens
MTACVLRVVCALVVPVCVPCVMGNLLCVHSCCDVFLCMCASCVAWGLLACVTVCACVCLMCLLCCICCDVQWPEDNVSWMPYTNVWCLLVSMDMKINVPGCEIYLFSLPLMESEIIDFFLGASLKDEVSKIMPVQKQSRAWQRTRFKAFVCYLGTTMATSVWVLSAPMAVLATPSCGGHHPGQALHRPRAAEATGGTRIGKPHTVPCKGDRPLPALCWYGSSLAPRGTGIGLRTCAYRKLLMMAGIDCLATPQARGCLATLATSAKCPFDAISKTYMYLAPDSGTGSVEFSNCFRIREVTGELGKNPSKSLRTGTSGPNVAKHRVYSVTSVTIVNKQVAPES

SEQ ID NO: 962891 - protein, 179 aa, Homo sapiens
MSGLKRVSGLEPSVEVDVGDLRAVPSSGRGQTDSRSSTGRGKGPWDKRFMEHVFQRDVKDRGPEGDYVHGIRTFGGETDYGSSIQSVFVRRGFRLGATQQSKRHPRGYDMKREEGTGRTACLQIGRSMCVEISLKTFVREIPGAGTYGVWNMNEKCDKEIKVSYTVYKRLSWLLKSRIT

SEQ ID NO: 962892 - protein, 165 aa, Homo sapiens
PAPETQPRSHIHAHRALVRLFSGSHVRAYRRAPMPIAIPPAAMSTRSVSSSSYRRMFGGPGTAMPVRVSSRSYVTTVHPAPYMPLGQRACSPAATHAGQASYASVPASGVVCHALHLPVRLRSIVARGAVLQDFGGTSRLADAINTEFNESPGPHEPVELPGSWL

SEQ ID NO: 962893 - protein, 528 aa, Homo sapiens
KNTWVYCGDKEHGLKKLQVGKNSGRDTQQRYFTGYVIQGGPGPFRHTPHRQKGTHVGSGPLRGYDLYKNTRVWPQAPAGVATSSRGRRCVCPRGRGRKSARYRGDTKLLSRGGELSNERVRGSWACGQKWRGCSAHKASGVAPHRVDTRWALPKDREKAWVLVGHDSPSQATRSTCRGTISRGAYLSRVGRGGHLLCGPKAFGAQFRAVGPPFPEASRLPSVGGPLGGTQGAPDKQDWEYTHWGANNRRRDTAWENRATWASQLPFSSKYPYARGDKGGGGFGPPVRRGHEVGGALTLSGAVENKRREKLTVEPADYEGRADEQRRYNHGLEMDTLMCGEGAQVGVSPNRRTCGGCAPGKQVGGPPTEKTTRLLREQWPLGTPSHIKERGGAPLPLTWAHGGGVYQQTPYHREGLGDHRRKCVRRGATKAIQRKRVLKARVVGPHEVHQRIMLTPRAPVRPEEKKQPPPGGRDRTDRTSDRDTNRQRRPHHKQRGSTAEESWQREQPELNNQPRTTNGRQHTTNESEL

SEQ ID NO: 962894 - protein, 297 aa, Homo sapiens
WRNCCSGWAGVLSDGGLDSCLSWLAELGMEHQAVCGRREEPSGCWARSSRLNFGPPSTGELTCCECAEGGLPWDGHAMMALCVSEAFPHDVAWPRAELMRLPSGKCGLQQWPCPTSGFGWTRVLADGPRVFLSGGQHGGMSVQRLAPAGPVLGDMELRSLGETGEERAEEEETLLAEVNSEDLLVGAKASAFSTSICKQETELSPEMISSGSWRDLALSMALHTFLAHGVSLIGPLQPCSRSAPQFRQIFLALGVPPRCRCYFIGSLSDLTPLPARAPRRDRTTLFLDSAEAGSRVC

SEQ ID NO: 962895 - protein, 110 aa, Homo sapiens
  misc_feature (99)..(99): Xaa can be any naturally occurring amino acid
MIADWGRVASSMGYCLDRHYNAGGNGAVQTESTCQELHTPIDVRDVNDTMEGRALMSEDAHSRIFRPVRTRWYSKPLMRYCSMMVETCSYTRSDTDVVXRDVILNRKRTK

SEQ ID NO: 962896 - protein, 207 aa, Homo sapiens
YCLVHAGGPWCALVALGMGKPGGVLPACVFLAVAILGPGGLLGCVTVLPGGPKCLLELAEAMAVDNVMWMPVTKFGACLGQGHEDQCALEEIYLFSLPINGIRDHLISSCVVPLSRMRFSRHLVAIGDYNWPRGLGVKCSKEVAPHPVWAIILAKLSIVPCAQRLLWGTRSGKPQLSLAKVDQGLCVSVLVRLIPAPSGTGIVSDLC

SEQ ID NO: 962897 - protein, 265 aa, Homo sapiens
MAWSSNMNDLVSEYQQYQDATAEEEGEFEDEAGDGEWTYKPFSHLSGKMQGTRRVKLCYSLTMPCRCVPCPTGVHHCLVFPVHISWLYATPPVKDIFIVKPQKEEKPGGARSLGMSSLGWGARASHRYPPRLLPLWSLPCWSRLSLARVLAALNLRTPQVLGARQVVTTPRPPRWRQRPCDVRRVRACSRGSNASPVSCSWRRWTFRWERHYAYSKLLLACTRCRFTLVTSVQWCSKYPGVSRRIAKVLGYRRTVFGLFVGALSV

SEQ ID NO: 962898 - protein, 54 aa, Homo sapiens
MYIHTPEEIGRPRSDEDVPQRSEVAQQPPRAEENHTRDERRPHTNIQFHICPPT

SEQ ID NO: 962899 - protein, 68 aa, Homo sapiens
EFHIVITDYGQEEQKLYVMASVIMSDYSFLAEAVFYPLSLATIDVKYIGVNIRPMSVYDVQQRRYNYI

SEQ ID NO: 962900 - protein, 429 aa, Homo sapiens
PPEQQRLIFAGKNSVEDGRTHVMTTTSRKSPPCDLVLRLRGVECKLSRVHDPVYMAKTHQPSDASEPQVSSASTNCQKANRSKGTRQGPRAQFAFPWSDEAPSAVLRPSVLEATEAAQTQAYGGTGTRGDSTTRNRYTWPRFNENSVPPDRQPPASVPCDAPVARDPEAARPCAEPPSPKGRRASQHHVGEPDHSYLAGAEDPQRTAAVSKHMGGKHSAKPNKRADTQSHQPDLETKGAHDKGCEAKRANIQPHAPKGNPKRGPPKTRKHHANEGDPSKSQDNKQRDQKISTPVADHRTHRPQSDEHQTHRHTRAHTPQSHTVHTGPQRRTHTQGTTRWPHHEPNNMCGRQHGTNTHREKGDNAVGKRNQHPDNHEDTTTNRHKEQGQHATAKARHRHTGQQQTRHWNTHNKQRRTREDRNTTPRARGN

SEQ ID NO: 962901 - protein, 106 aa, Homo sapiens
GDAHAKRNPTCGGTNAKTKTPNMPRKTYRSHITTRTSSDTYNGPTAHGYPRTGPITNSGPYGTKIEKRDATRNVNDRELITAQPPWKTHNILRALTNTYQPATTVC

SEQ ID NO: 962902 - protein, 348 aa, Homo sapiens
QAELKALRCPQPHQEARPAEAGKGGGEPAGAEAAVVRMADNEVMDAFRKIMAALAASKLDPTNANATRHPVPRKTPDRSVSSILQAAGMGTPSRPASVLDYLGPSGEWEWDGHTSFYLEHRDNTWALVVASSHTNLCVHVILRRGRLSPYHHLMCTIILGTKPYLVYHNTMWTKHWAQGHPLVIEVTFNDTLDEPQYRSSLAYWQFPPWIELGRGEAAWEMNHNPGSINLRRSIIHIHICTPINLITHNYTGPKTDSPVAMRPTNKLPTNETDTDPYDHKKENNINQTPPTRPAPHSRGPHTTGQQTHTKANTYDNRRTRGAKDAELPTKRQNNTDDKQNTDPHRTRR

SEQ ID NO: 962903 - protein, 577 aa, Homo sapiens
QVPCPQDKGLPLCVLPAKTSWCSSTSPEPKCASAVSEHHALNVWHGAPTVRTCHCGRSCASCPSACATFAVNLLHAVPCPCAPPLCHHCMRCTPLLRCCVLTACVPHPYLPPISHGGALATDTTHSSANAPPQAAHRGLPFGPRVGHLSQHLTRPQATWTQTPYHHGAPTHHRKPKNRAPTYQPAEYQKRHPHTGTRPHPDQAAAPPGGARHNCNPKHQHAYPFGATATPLAPHIGPPDNTGHKRPTHHSQRFRISRQTRQLAAGSTTPCAIARRRTRTHSPRDRRHHNQLSDAPDVPPTPPAATHPSGQDIAPRRRCALPLHLGNNRPRRHGRPQAGDSVWPTTTMRGDSSTPPTRPPPAAAPHGPPVGLTRPPTDTTTTARRDAPTRHPAQTAGPPPHSKPMAAPHTVATSPWCRPHAPALGPAGGHQRAQGVTLRKHTRPGSTAPPCTPQRPQLCRAPPTRTRKPGPPPAPPRHLRPPTYRESRPTRHPPAPPQGPTARTHAAMPLGGKPPTGPPSHTRATTAHRPHHAHITTHTQHWDPRDAHTAPPRRPTLSRTRTNQRRPPPPDDSPTPPP

SEQ ID NO: 962904 - protein, 176 aa, Homo sapiens
WRFSNGNSQTMIPLQVQGNIANQIVVPKRTADEDNNTSITEANSSVPASSRSDRTVIVIFTSVVTEECGPVSSDISSCLINHTNKKILLVQIHSLRTEASPVKRHDYLRIRKVRGNHVDLNRRVDVGASSAKPNWSCVHAGIGIVSLRFVYCMLHRLPEHETAHSTHGPVAGRKPS

SEQ ID NO: 962905 - protein, 153 aa, Homo sapiens
SFGPHRKKSLSSQKPQINFSISGFWHSMSPVSHMFIIWALFILNLHSTLPLVTTSCIICTLHAQHIQSHIVQSYFSTSQPNIYATSSSSSHQQHSTQQHIPAHHFIFLYHYTSLTLTHISSHIYRQFSAFVPASHPITTIAPQLIMGIINTRA

SEQ ID NO: 962906 - protein, 245 aa, Homo sapiens
MPYQYPCTDPWSRRMACCLDIAHLPLWHLCTGAILCCMMSPLGAFANAALQLHMAPEQHPSENRRFYLPCCSLTRCLTCDEPLPSARLYILLPLTTTHTSKRGMTGRSHSPKLYHITPTRAALAAHSRLTHNGRGSHTEQRDHTARTTYHPHRRSATAAAPDADQLRPSPHQRDLAALHRLAPPAGRTVARPAPHSARPPTTHPLPAPPPPNITCAHHMPNPAPARRLMPHSALPCPQDRQLRPL

SEQ ID NO: 962907 - protein, 235 aa, Homo sapiens
HPIPPHTHRRHGGTTATPTYLPFYTNNRCIKKRKKKKKNKTKKKKNKKQTTKQNKKEGPRARAPTNRSLPPTRGRAPQKTLPRRAPRHHTTPKRLIIDGRGHATTHDGGPPGRQPPPYQAEEATEGRRRKASTHYPLNRHHRPTHRKRGARPGPARPGPAPAPRPRQPPTHAPRMHPSAAHNTTPQPRTTPKPGHAHHTPRPRPTGRPRRDRGRAPRHDNHTRRTAGRARRPRPP

SEQ ID NO: 962908 - protein, 317 aa, Homo sapiens
MGVTIYRRTSVCPRCRRWAPVRCAVSMDEYPSDGDYPCKDHSLIRYPDMRRFTARIGCVVSCQHVSPREWGVMSCRVMRIVGCRLIAAAVVGTGRHGHPLNRSALLSEWGLPVISLFGHVRLSRPVRCWSSRVGAGFRASLQAAPFMLTWEGGVLSYGENVHFSLCLAGMRECSVLCGVRRYGYLLRGDLRCSALTAAPLSRWVLDVPFGSVTPEGCACGLRVRAVCGLVAEPMGVLSLLNDRSPPADSLRSDGRSVLHSAVGSGRRHESVLPVDHERNDVVEGKCQVGRGLAQQACPRRNTAGGNRLFENAGNSYR

SEQ ID NO: 962909 - protein, 46 aa, Homo sapiens
MIDRHVVKRARYWIQSTLDERDNPTKHNPHKHIRQHRGTTNTIVQR

SEQ ID NO: 962910 - protein, 490 aa, Homo sapiens
VGQMSKSESVYCLFHPDPGTTDTWALYSHTTSDPRRSQGSSLLQGYPEHPDYQGPRADTEIRWSHSCENIPNRLDTRSDRARYEQLDDTKPRHTVDGTTAGWRLNETSALDTADLSAMMPSLICTSEKIIIMTLTDALTQYLTTLLHRHGLATAPHTHNTTDTTIKHHLNHGITTAQIYRAHPTRNHPTATLSSWGTAPVTGTNTTNDMETNINTQTNDTHTNPKSRTTGHNLRCVTPRTLNSHQRRHTHQHKNNKGTKTTYTTGETHTITNTQQRHTLLTTNTHQYKKENVPGPMISRQNKNMRKQGSDPHISSRHIYEARNDEQAQHQAPKDNKIKGPHHTPPDHSETTRTTPPPQERSHGDSPPPPDGTTNRQTTHHDNTHITTTQASARRPKTQYTVHTKPTWRHPNTKANRHSGATATTSKQQQEAKDRRTHDTPRDTTKNTHTGTPHMTGETHANHSPHHTRKHKQENKTKEETPPTANTTEQT

SEQ ID NO: 962911 - protein, 285 aa, Homo sapiens
AGACSGRMHVTETLGVASVPSQWSGLSSGIRGETTKLPDVQHCHCQCILPVPGIIVDCPMCARLDVPPCACPAVAVHPQFQSGHNPVLLRAISIGEMWSAMVDPESFERRIWQSRRVLIGFECELGPSQQRMVSCRCIPCGYPARPMAALGLAVLMRASPWNLRLGSCGCGLVPVRGRGWAPTGDLDARLKVLPVCAWNLGRGRRPLRSTGMTYETVVECPEELALCLSVSNQCKPPMWMMEWMQRLGQQGYVVLVVTGRNVSRKGKDKQMREEDSLKDECIRQP

SEQ ID NO: 962912 - protein, 512 aa, Homo sapiens
  misc_feature (229)..(229): Xaa can be any naturally occurring amino acid
GPAALLALLCVACSAVRLWRAQYELLQLPAASHWDRADAALMSGLPGIAAGQVHASEHWCRELWATWQITPAAAPLAAATCEAFCHLQLHAPLPEAPSPACRASPGISTMLAPSFGGPACCPARNLPSMLLAMLVAFAMAVSGPGPPDPKPDEWFALSRGHIHKADPLKPPEQRFPLARYTGIKRVQCGRTLDSPPKMEAPYSGLSVWAYQASPEFHVSFGKQPFRLDXTSDTVGLSNTEREEPSWAQLHIIKERRGLFVHFRDEARDGATNALFNNGQPHVVTTRQHGFHYVLQKQGPCAITYPGCATCSVRRCPNLQKCGVVLCKPVGQGNHTFRYSKQGNTIVHRPHARNQYHDPGRIFSSKTRSHNFINTRQGLEHYSTRAHIGARKGRVTPHAPKDDTTGVTHSHTEQHIVSHTTYPHNCKQAVQSILLHETVLLATVRQQYHELEQKRNHTHQGYYHEAEKPEVETYYFARPDVRSKKAQKTTQYDKSSRQQSKDKKPLDLRRQTH

SEQ ID NO: 962913 - protein, 135 aa, Homo sapiens
EADGERRERSALSFPRSAGRPPWGESFGRGGKAELEDMPAPTSQGCAFLRARSGAGMEGRKGVPLGPPPEVAFLVTLCLGVWFCYSVSSPLCYPVTITSLPRGRPGTHACSDDPPEEDLITVYSGGLLVHPHASF

SEQ ID NO: 962914 - protein, 151 aa, Homo sapiens
MSAYRKRTRKERTAHSHQNTDKANALTVTSDTVDKIQWDRSSKATNEQLEKRKHMRKGTTTQTYEDAQITNKRQHNKKKYTKQYNRKNNQDKHDNHTTKLTTPEQHTTTPTPEKSKHTPLGLHPSHNRNERDRHDTREHTHTTKNTTNTSH

SEQ ID NO: 962915 - protein, 261 aa, Homo sapiens
MSPVDTFFNLGKLLPMCFPCAPLSPPWGLLRGRVGVGGRRFFFYPGLLGRDTKLVSGWLPFPPVFFLRPFTGPLPWPGSWSKPGSYRPSAHPLFLRGCPVAAFQNWPWVNSYCGFPFCGVCIVPWFGRCSITLGRELHMVAPEKNFSQISQIPQAGHPTVVKLSPLSPPGGDTLHDNHWEIRGGGDTQAGLLTAVLFSPTLRFCGLSRWVHIVSPSHIVWPFFCPPVYYFVAHARHVVSVSIRGAYTGCAGVVSVLHFRAQ

SEQ ID NO: 962916 - protein, 69 aa, Homo sapiens
YEDISSSRTNPYSLCNEYLNKPEFLTYQYVAINFLSASELARAGFYYIGPCEIRIALLCRVGWDSLRVS

SEQ ID NO: 962917 - protein, 396 aa, Homo sapiens
LLPACFWDPDWCLRLLSACLTTQACAVPPTMHALMVFLQPDFHKQMNGTDACQQENIPHRQSCPLDEVILSVYARMCGQWNDCVTMAVEVPALWPAFQAGAHLWTPHGLHHTSGPGLLEPAIVPDLDLSSGTCDHTKAVPCEHTWTIGQALMSYSTNLGWILRHRYLQTALLSIIARLVLDNVATATQPSPFDRMTSISIHTAMNLVRTSVQGKIIPVADISRILDAMHWNAGPKTFRQPGKPAACRLDTASLDPRTTTSTSTLLWPNLTHNGRLDYTPLVVPHTLAATGTQRHPQTLRTPQQMHSPRTHYRTTRHTPRHTHTATLAPATNPTTSRAPNYTPQPTTPINTRPHQGQRQPSTTTPMQTRTQQTPNSTTPPTHPHNNPKHPKQTPHKP

SEQ ID NO: 962918 - protein, 295 aa, Homo sapiens
MKEPSLRMLWCYRQEREWLPAQSWSCSWEQAGPVHGFRGEDIVWNVSVQPQTTPIMVAAGILCGLAYAMAHTGVSSSSLALLACAFALLSVLLHPPPCLTLCWYCMCIRAYEQLVDRGHSGPAGEGMWWPHVICLHNVGCHVQFTCSSSNLSPPGYRHFPVHLTTDGGLVLEWETPQIIIRQCVNHHCPSPLIENTWATPGGYHLVDLVLVSIAMHVVTWTNGQILKQKVQTLGWTHTGKGERPSTDDVKAPEDISQARRKKEGEEDQLYQGRHTDATQGARNGRREGGHQIGCQ

SEQ ID NO: 962919 - protein, 31 aa, Homo sapiens
AQFPASHPHQRRNKTALEENRRERTFVNCSC

SEQ ID NO: 962920 - protein, 90 aa, Homo sapiens
WAGSTLPSLEAHSSQRVARTDVISAEAYTINLLAIIPVLPKRNKPSIHRSSHEVFPSCKATCNPDNPFVIGYPLHAMIHLREHLNGINAN

SEQ ID NO: 962921 - protein, 246 aa, Homo sapiens
VRSPSPVRPVLTACWRPPPTAAMDAIKKKMQMLKLDKENAIDRAEQAEADKKQCWGPLQAAVMEEHAGPPEEAEGDRGGVWKSILESVKEAQEKLEQAEKKATDAEADVASLNLRIQLVDGRTLVTWCPVKRLCYMPCRSLDVSATESAADESDERTGMVIENRGHEWMICDTMRTARKMHAERGQAHRLRIQTATYEPGGYGNPVILEGELEPHGGQDLAWPTTKCADQRGRHDNSDQPNMTSPG

SEQ ID NO: 962922 - protein, 250 aa, Homo sapiens
AGKQETPVPEQLGMNDLSPDDVGHFSAMRVLSLGVLHSSGLLNGLDLCHWCTHAMQLLKHHVAWRELPCSVCTGDPMLSSSSLTFHFCLFHSTAAAQGSQIAVCLNPSFCPCPNCEPHAKPLVVGRADGHCVCRVWLVPRPNHRWVPSCRLHIQASTLPKHTHDPWLFKETITRGNWVTVVTSQSKHCRPKPGMYPQRQDNTTEHRLSNHCELPLATVLPQGQAQDRDPSGAKSDNVNPGKSRRTGRNTT

SEQ ID NO: 962923 - protein, 149 aa, Homo sapiens
GDVVLGGSRVVEHGLRTPIARRAVTALVLDSSRCPALAACFYAPSTLSIISKRPGLSVLTMPSLWDRFSSSVHLLFALVLAPNSHPRSGLPALSLWGLADPGRRGYDLLHEPGEIWELQSTLDSSNSGIRAVTRQDNWSYHGMVVSVLA

SEQ ID NO: 962924 - protein, 133 aa, Homo sapiens
MPRRKTIDEWLTSLRFSCRGSRPCRWPEAEQLLGPQLGGVWNEDLDGMEGYVLEGKKFARLPEEGVGHFYTQDCYVFPLQDWVPVEYRGRSANRRHDPGVRQAMGKEGEDSTLRQKEQAARGGLQCLGTLAGP

SEQ ID NO: 962925 - protein, 368 aa, Homo sapiens
MAPSRNGMVLKPHFHKDLACCAAVATVVQPGLALEGLLHDCKVPWQCQWLLPDICVLCRLCRGPNTRATSVADLTPTDYCVTHTECVAAALACRDYHVLVTDAQGVRPVTFHKEMVGPGTITDISCVIPEECGNKSREYPCMAKRSSRAGMDVPGPKHYIPHSPSEAPRDPRRTVQTRYLACKKHEHMDHHQLDLDAVTCPSGNVLIKKEKARVTHLTDRDEFSTPSTSHPYVPRCKRPGSYRNTGATHDAKERPDTTRHGPNKEQNYNATPVGTLEISKRNNSEGATAPKDSHREGTKINEYPRLLDQGCAHNLSGRSKSTKDKRQVPERIKTVSYAVVNPSSACDIICGKNTLIRLRGHLGTTPKQ

SEQ ID NO: 962926 - protein, 188 aa, Homo sapiens
FDPLSSTGQPEVPGALTCALRLTQQMFDAKNMMAACDPANMAATCLVCLTCSGCLHVHEGRWMSKCLMSKTKTAAIYVEWIPNNVNMAVCDIPPRGAKNVRHLHLCNMQQDIHGDCTSSISEQFTAMFLVQAFRALVHRAEGMERDESSPEAESNLTGPGVLSTRQYQDATDDGGGRRSQAGGLRHGR

SEQ ID NO: 962927 - protein, 274 aa, Homo sapiens
RLSPESMSFITRSTFSTSYRSLGSVQAPSYSARAGQKRGSVLCRRMGALVARDLLLSRSPPASVVRVYGVSGGVPGPSLWYSPGGSVQGMGGIQNEKETMQIVRESTPPVHYLTWNKSERAVDDREPGGCRAKSGSTWHEEREPQVIDMEPLASGSSTDLRAQTLRQYCGPTAPHRTAGLTMPRHWLLMDLYESSFDDRAGQCSRDRVDETDDPVGLRLEVHLLTTKCSLQTCCWETTRIEGSSGAGLLFMKIETPIEGSRMGCNARIAQLWGD

SEQ ID NO: 962928 - protein, 359 aa, Homo sapiens
RCPVPADDFLDAAAWTPCNAIGIANFAEQIGVVWMFTSVPGEYIYMHIWRTVCQSKTDVLTTLYPLAASLADPYIQHVERPRTVALAQYLMDLFHMPLPLTLMASNVRTLLNPAHQRLRTDPRPACLAVAGAACTSSDMALTSTAISCQHCQACTGQEPQNTLASYRTYTLARQRALTLVLHKALLYRTPQAYKHTEETPQRPPDEPRARTEPPLDPREPGPPTRLAAPQGPMELPNTNPGPPQPEAHKRLNRGRRRAPRRTKSDKPPGLTLALDSTNRTPRLDTSRHIPYVVLHHERTTADRCTLHAPPVRFARPGSRRQKSRGSTHNVRAPPGVDNKGPSISANRREDKRDDPNRAN

SEQ ID NO: 962929 - protein, 234 aa, Homo sapiens
MQSRFTQIPRAKTGRRSWSRVDLTVLHWTAYAFSVHPTQNSLVTLHFGKGGLVSLSPPPGKLRNKPMRQTTNAANNVPLYTGVVRNGRNRPPGLLIRWHAVDKAKPTLPPAAPRRPKRDDLNLGHAGPPDEEGTFCTGTILSPQRREPCSPTTLAKSPPNHSGFPVLAATIPLLGYTILSFLNTSYPHCWGHQQPPGRLVLHSHNVLCLLGLPYAQQTRDAYQYLWQSPIDGLV

SEQ ID NO: 962930 - protein, 157 aa, Homo sapiens
MENEVVCTVGNGILVGDASKDELVNQVQQVNQHICRIKDGDCGFCTGVFQTQMQAIRRGHDWTNSCNSMAMIVAVANQRLSDIEYEGAVKEERSGSSEDDKRDWFTSGQIAAFGKTVQTMFLATLLGLDGQLCVTAEFPGLVSPGNGSPQNWEAGKN

SEQ ID NO: 962931 - protein, 128 aa, Homo sapiens
RELRTLNHPESGLNPVVSHLMFVPTLNLQRTVKIYSRSKYEYRIALYKTTQVPILTILRSWTIMTTFGLHDYITELYALNSKTYMHTHFVPFSIPWVVHVIKQNPTIHYGLKTLTDVGKESVDGCIVS

SEQ ID NO: 962932 - protein, 172 aa, Homo sapiens
RRFSREPWAGRAGSRHVSRARGSAPGLGLEAPAPWIRRPWSAESVSSLTIADAFPNFLAGLAEELQLQSPAAPRASQEVHHCFHIALDLQRQLQPKPGKLDAHLCKHTGERPFVCDYEGCGKAFIRDYHLSLHILTHTGEKPLYVQPMAVINNSDTKKNSKPWKKHLGTAKT

SEQ ID NO: 962933 - protein, 217 aa, Homo sapiens
CLCLFNARGSDAEGWKMAELQMLLEEEIPSGKRALIESYQNLTRVADYCENNYIQATDKRKALAGDTEKHYTTQSLASVAYQINALANKYSSCWISKPLSFGDWTLFHYETPIIPSNKGNLGWRNLIVPIYNAEAPHVGHAREIGISTNNIRIHQELTQIIAPANMERPVRYIRKPIDYTVLDDVGHGVKHGHNSLQRTGTLSENKSSYSETGKGSS

SEQ ID NO: 962934 - protein, 189 aa, Homo sapiens
EETCGHPPWCPGDAALVMEQEESPPEEDTERTQINVLAVQAITSLVLSAMTVPVAGNPAVAVGAAAPEQASESSRHQVGRKLSIIRGIGGRKRFNATGSQTDDQYSPPITYYTHLRIPAPFSVSGYYTLPSSATEAAATRLNPDRRAAAPELPHSATVSIPSACLPPPPPPSAAPAPAPAAPPPRLRPP

SEQ ID NO: 962935 - protein, 68 aa, Homo sapiens
  misc_feature (50)..(50): Xaa can be any naturally occurring amino acid
  misc_feature (57)..(57): Xaa can be any naturally occurring amino acid
MVLRTGRFNSTRRLCAITWLPTEMIDDCDSELIHLTDLYAALIETNVPTXSLPRRTXYRYRNTRPLNT

SEQ ID NO: 962936 - protein, 246 aa, Homo sapiens
GISEARRDAQEERTNWRSNYFLKIIQLLDDYPNRLHGVEQYEVGSKVMPQIRMSLRVKVCGCCWGEDSIMMRNVIRGAPGKEQPELWKKAAGLICGGMWGLVFTKEDLTVRIRDVLLAMLGASCWCDAGASCRSAEGHWWPVQEALVSGPEEELRINQALGEFTNRIHPGGTHLRSPEVMCCVVVTCETKLGASEATLLNMLQILPFFLGLVIEQVFEMGASTGPEGVAITEEIPGCIVLLEGVRS

SEQ ID NO: 962937 - protein, 77 aa, Homo sapiens
RDQYLYQIRRRPQIHNGKEVNDCRTFSWWSVSATGATLAVMLGSDSRRELVSREDEQQLLGWYLRALRRLLRKEEVD

SEQ ID NO: 962938 - protein, 448 aa, Homo sapiens
MAIWSAFTLPCTIHEEFQLLTPLKLVCSLFTSRQEEIVYMAGFPVCRCKGLHLVNSGTSIGHSLSCIMHGHDSHNRVPQCMHQCTNPVTFSHTFSYKQQSKCYINHQSSSRCALSFRQHKRKQPFGDNFATSLRLIASHHLGAISGLQLHANIASLQIMPLCFHNPTFPTITKPSPVSSSRTNASQTARISRFHMEVREMSTDLSLYRPGSVDKAFILHYLVNWGHPYRQSFTSASYPTSFPVSNSFPKVSLDGSITYIFLDGTTPEALGTSHRSTVSTPIVIPTIHHPYHNYPQKFPHGYYFKTAHIFHKPFSVMHPALYNLGPNWGVPTPTFFTPWDYTPYVANPLLHNPTRNFFFVSTRTLGLSYRNMHRCSPHRRNTAALPHAPEQPLQPYSPPSGTTEHAYDKDPYTTHNRQPSHPPGHLRQQHAHSAPKRSATNTHYRHTRA

SEQ ID NO: 962939 - protein, 372 aa, Homo sapiens
MYPMPVFCYMFDVTCANCFEQPESQPTIWHQLVLLLLGPSSTHIHVLCTMLFVTMSVAISSSTFHVIGSIIAHADNHPSACAHLRPRFLCTHTFVPFFRLHLPPHSLTSAQALQQFLAFTMSWANTCPLGRGVILVAPWPKHTFPNAGTPHPLAHLLCCPWLESSKTGASCAPHFWFADFGPFSTYGPRPLGCGFWARPTPVGVTTSIATAPGLNAIAPAQCNLAAGRPPEDYLRLPFCARGNPLAQPSLALPSPWRLSKAKSTRFHSHLLNGIWQFPTSEHSPGGLTNPLEGRGPPQLSDFLVRPHPTTPRAQSLLTPPKSNRTASKAELHGHSNSNFPTPLELKWVCHMAHFPITPFGAMEQLTFIAAYP

SEQ ID NO: 962940 - protein, 139 aa, Homo sapiens
MVHVYVKDDLLGHLNEYLYREQDFTLIFHTMGWKLPEAAPGLWAPYHLPVGRNLIEPEQCTFCFSGFSASDIVPFGTRRRDVQSPGGGALDGPRVHERAVGWCTGCRADGSNPSGFHPPGGAPDPLIGHGGGPGCWPNG

SEQ ID NO: 962941 - protein, 189 aa, Homo sapiens
RREEQDLWVQRPGTVENPDRQPCGGTWSNSTPRLGVFVRLLCDVRIGGAQCSASMECAWIFGPTYREELSVTCDLVGICCCSVCLTLGPGGQTACVSCLGDYAVPKEPVTHVVACCGMVGLALSFYGLHSLTCPNLAIAAHNNTLNPAPSVRVHLYLPCCNKLHHVPGWTNTRQGHYVAPKVFPFSREE

SEQ ID NO: 962942 - protein, 349 aa, Homo sapiens
MVHKAAKTTQNIRYTFGPGTANKTYRCSGGIKKFGKEESLEDEERDYGPWEVDKDQWRAIIELHEKLQKNSALTILRSLGSVQHSKQIGKVKKLDKWVPHELSGNQNYRLKCSLLLCYATTNHYSIGCDMYMKSEFNTKTVQWLDQRQSKAVTKANLHRKKVMVTGSGDLQAQSDTITVTDILVNTITSETVMAPAMVKMHPKLGITGGLHCATHSATLSTNRNKQVRDVATTTGPTTRNRQRGTKRLETTTNKDKTTENRVAKRKNRGTRRREQTRREYHHNERNKTVTDTDTMQTANRPDNETSIIKLHNHTEQQTDRQHKTNKSPNENKENTQRRIRLKSHSSTDS

SEQ ID NO: 962943 - protein, 264 aa, Homo sapiens
GLWRAREEHCRSQDDGAQPWVCHAAHRGCALRTWFGVGLLGRDLFMTRTLCSPGPSHALERKDLSECGPVCAAPPAPSTWEEPWWAQCIHATDANSTCQDLVCDRYERVCLDSPGGSRGPCGNGDRVLRKCSLVCSEVLVPRGSGATCEVHQAKLKDGDVDLLDRVSREDSQYLELATSRAQDAADGGRGFATSLICVQTTLSERKFSLLLCKPVRESHEKGAHKGLDEGRKQLVPRLGQHWGALIWVWMDQHYGEPVVRVTGG

SEQ ID NO: 962944 - protein, 113 aa, Homo sapiens
MSLLGGTSISRHSLISSPTMPRRNNTIAVHYSYSHNPQHPLPLSQYVPMAILVLADCEAAVGRSRVLISESSRRTYGLDVRYKPKPTPMLRVSRPQASYIDVPRDDDLSRKNT

SEQ ID NO: 962945 - protein, 256 aa, Homo sapiens
VLGVAEGKSWKLPSESWNVCRKGAAGEGGWRDIIARLREDLGSKNCDTVKAEESSRDFKMCDQGHVPLPDCCTVTDEGTVLGLTAVARGKPMELIIGKECSMLPVWETICVHHAEKWEIAQFLCDIKHVVLVPRWWTRVSATSRCGNGPPVMGHAGTAAGVAQMREQQLPGHADLDALKQNPAAIIFHMEMLKCGEPWTYQQGPLGMTWTKRSARPVRIIHQEGNLVCTREGHVKEAVASTTMQCCSELREGQPGP

SEQ ID NO: 962946 - protein, 363 aa, Homo sapiens
MHEVTHACVYLVPRTCHAAAGVLENLVKSTIVKQMSDPACYCVFNGEWRRRGPCRLQWSNSDGENGNQMCSDIKNNLKEAFETIVACMSNLVPTTVELAKPQRTSSEWTTSMSVMKCALTIDFPPEFYEHAKAADGRMNGVRACYERSNEYQLIDCDQVPSWTRSTMIKQADKCSEAIQGPAIRLTCVLEYLEILRGPSTTVDTQSTSTCMTVGGQARLNAATEDSGAITKCTANIIKGGNRKYTKEPQVEQTRTMRQQETRNLKHEMATTEAGTEMGNEPKEQTEAKKQQRVHREAKSRERATIKRTYRTGRKRERKRRREDENERGQGRRERRAKANTQPSAEKRIEKKIREYKKRHEKVA

SEQ ID NO: 962947 - protein, 274 aa, Homo sapiens
MGTYFPTMGGAFLGMKARWIRGIYDMWKKLDYMLSDRGLNQIPNRRFTLWWSPTINRANVSVGFQVQLDLTGYAFMHGKIPTLKISLIQIFRAHLLAKIHESIVPGLMSGCSDQATLMHWHIADSYKRRQSIPDKSYKMNSSCADILLLCLLKAGMSPRPLINWMTPKDVMDSTNTQNYCIALHEAAEGDYRSPRTYERYHPRPSLLELTPPTNMSTLTISPQSILHSPIEPCPYHPAPRRPIAHLDKTRHKRDLKTKSPLAQHTLHPNTTAPY

SEQ ID NO: 962948 - protein, 258 aa, Homo sapiens
MCAKTQEHTRTERSVLELVRQAPFLVTLHYAFQTDAKLHLILDYVSGGEMFTHLYQRQYFKEAEVRVYGGEIVLALEHLHKLGIIYRDLKLENVLLDSEGHIVLTDFGLSKEFLTEGERAGLLLLWHNRVLGPEIIRRQTGHGRLVELVGLGIWHSSCDGASPFTLKEETEPHGEGDRESGSVAPSLFPPLGLGPGRRMNLVHREADVKGPKQPVRLQCAHGARAVTSTPLSQGTTMRVRPYVRRDITTQRRSQYKQS

SEQ ID NO: 962949 - protein, 191 aa, Homo sapiens
MAIKSFHKMENNTPLLHSILPRLLTQLAHKHPRADGDGESPELSPKEGTHLAIEELHLIPHITVAGARIRGSGTLRKTRNPQMKVSSWTIIFLHEINILGLTSEWEGWHAAHNNGGRGLYKNLSSTGRDIWVSTCGDKTTPKIPSDSSDHGSTGGTEVEEPPRWILEAPVSYGIEATPHRQGEPQGAGAHT

SEQ ID NO: 962950 - protein, 521 aa, Homo sapiens
ATGDGGRACVRFQFSMGSVKVPRVTPLQANARSWRRLWVLEVLDRRDGLESGSISEQCESCRGRRVGAKRLMRMALRMQALEKPTVSRVSVTHRLLVTGVSELAVIAIYAACRGTDAQCKEIMVTCRSIGNHRKPDCREGLLVREAIGIAPRSHSHRVPRKLGSRPRIGDTAIGAWHGAVASSAMLHKKSSPHGICVRMGYSRRPCATREEASDRGTLLEDTSIGEYPGRGGGIHKAHSRGKQGVKTIEVRSKDMSEGSGALQHRHIGGNTRRRFQTRHCFVWSSHHKGKRHRPTIHVDVEPGEHVITKGKGERALWLTAKEYTVERNCTSPLLEAKGQLAGLGTAKGLTHCPKASRLAAFGPGLWGMGTRTRGHGAGSSRLHRKEPCGEERDYRTVCRLGRQPGGHFAQRTRRLAEEGIGGAEIETRSIRVGTHSGAPKRIALGVGEIATCEIDSMGSERTRTDSLRREQIDTLWDPCGDLRTTPTDYKRRNGPRETQTRKDEVNTRKRQGTPPMVPYNV

SEQ ID NO: 962951 - protein, 55 aa, Homo sapiens
AVVAAGILGASGADQVDWATLRSVAACVRREAAGADTRPTVRPRNDVGGGAGGGG

SEQ ID NO: 962952 - protein, 177 aa, Homo sapiens
TLKNSALSAQLREACYSRRHARPLWFHQYDKSYLGSMLYCACVSTDSGNTLAVSSVPLISYDSHVMKIHDSEPHANAGLVGAMGLSLFQDGHDLIPWQLSMTIQGARDRGPRSFGRSRCTQTLDGRRVHIISTCPLEVVCGEGHPLLDPHSTRDGPIEAGHVADGVSLGDAQDADWT

SEQ ID NO: 962953 - protein, 146 aa, Homo sapiens
KDENPEMHYSLRYKSVYYGLEHLVTWINIKSAIYPTNTIAYSPLLPVDCLSANDNGQCSITGNAYNLEDVTMGSTRNTLTHLTRSVYPNRDNPASHDQSTQVIARKGHQTLVAMIDDKCLLNRRTRECTLYICLHYRRYSVSSSRS

SEQ ID NO: 962954 - protein, 40 aa, Homo sapiens
MASSTWSSVQQNEERDGVRLSWNVWTSSTAGGYKNGCTPG

SEQ ID NO: 962955 - protein, 67 aa, Homo sapiens
WYASVYPVISSIHAVRSPNWTFEWTNHKQLERLNFRHKGMMRLKQKRSEELFEYCSYRILILTLLHP

SEQ ID NO: 962956 - protein, 142 aa, Homo sapiens
MPSHLRLARSTPRRNVTTHWPTLHTDRADTATLKTNRTLPPPGNTVHRQHHTTSDNPDATGTCSHRQAHTVNNPNQCSPNNAITRTTPLTHAKGTQTHENPPTQTVTTNTHSTNTPNHQAKTRPRARHTYKQNTHLNRKDLQ

SEQ ID NO: 962957 - protein, 163 aa, Homo sapiens
MRPTPTRVKTPRDSSAAATSCSLPRSHSWVSLRAWEAQVSLLADGAGCTASAGSLRNLGGCPAAAPVLPCRRLVFASCSLNLDGQLMGLTTHDHWCVSALRLVDPMWAVLTSLCVLPAPAAGWPCAELQEADGQCPVTEDLAEVEQLVQVVSRTRGSRVLSSR

SEQ ID NO: 962958 - protein, 92 aa, Homo sapiens
HELVSLLIRAELGQPGKLLGNDHIYTVIVTAHAFVIIFFIVIPIIIGGYGNVTRFPVIIGAPRYGVTPRINRHKHSDILPPLSSYIHASHSA

SEQ ID NO: 962959 - protein, 139 aa, Homo sapiens
MEKKCAGAPAPEGGRWMNVSRLLAAEPNVPMDPFAHLPKSTFVFDEFKRKYSNDVTHSLWHCHISGSTLIRTAWFPVVLRVSALPVRNSSQTLHDACNLHPLGHVSSRLGQAERRTGFRPVYSFLGTNNRQSTSGVLVF

SEQ ID NO: 962960 - protein, 168 aa, Homo sapiens
MLDWMMLGHSAVCLGLMTLTKALAHVDGLYLISAGWIDNLALSGVSCEQADIECTGHCSGVPGVHIYEMPVLAGQMMAPLSVLHVVGHLYPLNVGKSSYETCVSRNACVHRVPEPGTTVMVLGDPRSTGWISLCCARHGWFAGGPWAVEHEGVRAPGVGLSLAALSGH

SEQ ID NO: 962961 - protein, 167 aa, Homo sapiens
SPSRSRRVRSPRAVVRPATDAPGFRRPYSTEEKESYQYVRYPEAPLFRPLADASKGDDPAVLLAREDYIHIRIQQRNGGRPLLLSNGIADASDQQETSEGGPRHNLSLHCGTVIEHRGLMGEVIQTHQRLDPTARHTCHASSVTHSHLATDDQAEGPMGFPCAMWIT

SEQ ID NO: 962962 - protein, 381 aa, Homo sapiens
MPYVNVLSIATYTSMNPIVAVYRERCDTLTCCEYCQLNAHKDHQYQFLEDAVQDTSVKLLASLDEAPWGTNYATLQKSTKEVRSSIRQVSRRTESVEQVDVKMAILQIMTELNKTGPVCLAHLTAHDRLLLDVGYARQRPVQRLAPGTMTIDSHECTMEHTSCRLAPLCAPSSRRRCPTHTPPAPSLRLLPYATLRTLPSLPLAPARSPFTATATRVRHSPLAAPPLHPHPAPHPPAGAPLPLAPAPPPHVPRPAPLAFPRHPRPPTAASPCPHYTSTQRPLSPPLAPLSPPLPPTGPPAPSDTSLPSATTPIANNQDRIRHNHQAKAATNKNTSANSSKNKKHPIPSPQYKHEPHPAEPQDTDTPTRKHRHTANNRAQPR

SEQ ID NO: 962963 - protein, 37 aa, Homo sapiens
EDGMNDQDLPNWSNENVDDRLNNMDWGAQQKKANRSS

SEQ ID NO: 962964 - protein, 83 aa, Homo sapiens
RPPTTTKFAAASTGEIKAWTAHVVILCTGGYGSVYHWSTLAKGSNATATWRAHRQGAYFASPCFVQFHPTALPVSSHWQSKTS

SEQ ID NO: 962965 - protein, 132 aa, Homo sapiens
YGQAWWWQSHAVVMLSSSRDWEPEILDKNLFQSAQDLRLGPRFTFQQDNNPKHTAKDKSLNVIEWPSQSPDLNLNKHLWRDLKIAVQQRSPSNLIALRGSAEKKKNELSKYRYAKLVASYPRRLDAKITAKG

SEQ ID NO: 962966 - protein, 64 aa, Homo sapiens
SSLLIFTGHLDNNMSEYVMANAFPLLNYCHKFTYKIKHFIGIKFHLGLYFIKDAKILRRRGREF

SEQ ID NO: 962967 - protein, 130 aa, Homo sapiens
MIRQHFMTWINEDGPQVVGCKASVGALAGRLIFPEDTLFGKNSHSVRSPKFRVDSLFPIDCCSKAIVLISSGTSEWSRSDASHDSHAYYSRIVNDDKIAFAIEVGAAHHVICKGEFQVDAAANLVVVGGR

SEQ ID NO: 962968 - protein, 75 aa, Homo sapiens
VVHTKQRDVVYTSKQAEASTDNPVGAGNYSAGIINQIQPRADLFIEQMVGGPKIFVDCKQICLVDAAANLVVVGG

SEQ ID NO: 962969 - protein, 371 aa, Homo sapiens
SVVARPLPVQPARVLRNLGVVQICLDSSVQWSLSDGLSLACAEVGVSQKSQESKCFMEQPTLAFKFRLELIVAADSRDYSELLYIASQTVKKVIEIKPILLGTMAGGAAGLQLTGNGLLDRENVELYELRNKRSGIVCSSRLPNCLPNMVVLQVPIGHGGLSHGAPVDLVGVGIHAGRPLAFLLTVGTGDRGHRDFQGANHSRARFVAHVYAICGSMGLGGTIAYDLRSCEQGLMICGPVRAILPRAQRIRRLPNSREEGRDKPPNQKLREQNKIEAPEITTCWHIGAEKTKEWSKRTGAGHTPSTQIGGKSTMRESTTGDQQQQQEDDCRTEAEHHRRTAQNKMRDETAHNTSNDQVTQQYSYEEETQIS

SEQ ID NO: 962970 - protein, 232 aa, Homo sapiens
MSGTFSRLEEPGDRAVKGLVARMASNCIQASVNSGVLTPSREPGGGHASNDHLTESSLSGALHRSGNGGDLTLPGVGGAYESSQGPDDRVLAYLPVATVVPAAVPTRDTLSVPCGTVAGRGSWDCVRVGRMGKLCGRARAGCSWQASTHHGVIVVSPARPVRRAPGVRGESNARPDWRVRVHAPSGVSPVVGAARGDRPGGVLRPWGRLQGFWAGGDLAPGAGVTPAGDPAL

SEQ ID NO: 962971 - protein, 114 aa, Homo sapiens
MGGGGAALSPPSKYLWEKRFCGGARGLSVWSSWPVVLNAPVCCVPERGRVPPRVWGASVLPRDVRESLPPKSARGTRGVSPEMCVLGGALLSRRAGWNCGERCVMGKKIFLGGG

SEQ ID NO: 962972 - protein, 70 aa, Homo sapiens
GVKMEEYAREPCPMANLWMTVVGPLRWVPWVAGIVLKQSKGFRNVSSGTYSHRATREFDSYENQGSTVRR

SEQ ID NO: 962973 - protein, 467 aa, Homo sapiens
KPSSGLGSGSGSLASAPAPLGYPRPRPAAPPGPRAAPIAVPGLRLQPRARVGATCPGPAPYGPRLEAPPPTARGAPDCWPGRKAGLLPGGSPIKALTIGRGATIPITQRKGASEAKDRGGTWQTERLGGELGTFDRSRQKESVVGKPYCSPQKMRKGRAKLQKTDDLRQRDLQKLGPRAQTGGGGSPKCSRPQDPSGPSIHGPRERLNPTFGASNAGAPFVRHPEESIPGEGLQGAPWPREIGQTFRPGNQIRWAAYLRAAPFHNQGARAGPNPGHLALGNPTLGTARAAPPRDTRVVVDKAAPRRGIPGEHEPGARQRKAAAGTTGGRMGADPPGRERDKDNAPRNVDAPQRTSGNPTQADDPRWGATPAGNGRSPKNSWARHYWGHAPTYGRRRSGAPNSEGRNRKRSLRRQRRQTPTKRIVLRQRENNTQDERKRSVVCLHKQGLGVFSPLARPSFVSSGFYRG

SEQ ID NO: 962974 - protein, 330 aa, Homo sapiens
GAARARNLPSRSPCGQRTASTRIGPAPRGRCMGARAQAAPGPGGLCCCCAAVVCSGCWAPGRAGGAGPGGAGEEQVNAQGQTPFSQSVRGHVGEENVRADREVLAEADLGDLCGEWNVVENACGKFGRGSLDVLEVEVSESCPSILRPEPRLSKSARGAGRSVGAGRRPSWPYVVLVPADRLGLHFLGVLDGWVFGRFVLDRGGRPVPMFRGVPSAESEGEPGNAGLAEATGGPRNHEPGQGSKGGTVQGARIPRHPTVWENGVPLGRAAERQPSKGVSGGASGHISARGAPKTAFKEEKTPRLKGGGGDNRGGQRRRHTGQHNRATPNT

SEQ ID NO: 962975 - protein, 209 aa, Homo sapiens
GPWMTLRASTAAPLSEEGEVTSVPPGSGRGGYRRPLLPRPVKAEDEGEGGREETEREGSGGEKAQEKSPALGEKSLAEEDSEDCVAVPCMGRRRWSLPCGLGSPGLPPALPKFQRLYELLAAHGTLELASRDPAPPGLPGREGPKSEEERSDEGAGGQRRGRGKNHILPNGISDLDDEPVDTKGLPLFDRENAPQEGSDREPETGEARL

SEQ ID NO: 962976 - protein, 272 aa, Homo sapiens
EARLRREYLYRKAREEAQAQPRRGRSGAARAGKNRLIPTELRREALALQGSLEFDDAGGEGVTSHVDDESQIGQESRIPRFMITYLPRPQFPASRLFAKGADSWCSRAPSGIEAEVDIEVGGALLRACKGQGGTESAGRHEPRGHTLWGLIVSHLPFGPTAYFTLGALWSVRLDFPDLGTLSEASPTFIDTRVSPPAWGKGGSDILRYLFPCPKMTATGFITFATQDGVPFHFRPMCLEDRPPHVGAHWGRARFELKCTLSGLGPLDGGPAT

SEQ ID NO: 962977 - protein, 146 aa, Homo sapiens
PFYALGKTQLWNMSWGKLCTGPCPREWVDVVFGGGGLFPGSIPHCCPVGSYGSAGLWLSLSWVLFLSLQIKGSCRDSSRAYTKGVGGQETWVRVGVAVRNTGAQMCLHQVWQPVFCAPPSGLFSDIVCSQDVDKNSLSVFTKISVI

SEQ ID NO: 962978 - protein, 216 aa, Homo sapiens
MNLLRLLGELFVLRKGAYVGCVSFSMGTAGMYWLAGVLSIHTLVPLMSEDVSFSFPKCFEEISGFSAGARRRVGALLYLLGAVGVLSGAFQGFIVPTWGVCSPLFHEVGTFSFCWRVRPTAVVQFYNPLGIRTFALQRGVYTFFPRDPAGVPVVVTAQGLGGPLLDHWVLNQEGGRVEPSPFAGDKGSAPPGLAPQGGGPADKVYPSCAQALASQG

SEQ ID NO: 962979 - protein, 85 aa, Homo sapiens
NSKLQSHLSFLPIPLVSLQEQGTSTYDGCTNSFGANVNITNLLLSVIPYNRHLLLACLLDGRSHTKRTLIASAICACAWTLMVTF

SEQ ID NO: 962980 - protein, 158 aa, Homo sapiens
  misc_feature (19)..(19): Xaa can be any naturally occurring amino acid
  misc_feature (62)..(62): Xaa can be any naturally occurring amino acid
MRKVHWVSSGVPPGNVVGXNPIFDSPYFSPCGGTLGSLGLNTQEHTVWELQRGPSKEAKRKXGPKYKLQEGGGHNVGILNLERGPVAYSGKHSKRGGPKRAPRVVPRGLLCGLKGFRSSCRVPPQNSGANGCVERALGGRLLFSPHVCGGRPPRPPLW

SEQ ID NO: 962981 - protein, 453 aa, Homo sapiens
MRNIFAYDLYDSTHTRLCSTLAPKGPFIQTIAQGIQSQGLRDWNAPPLAVPCLATIPMNYYLASILNINGVVGLSCVLGTPLHWGNTLYFGNPFQTNSQGRGFPQGSFPSGDHPPSGRFFSRTLLVSKRLTKKLERKPLAYSNLGQQCETTAWAPVGGLCTKVKTSNTFMWTAIGRLVGAAVKRARIDKRRASCTNLPNQGSCAHHVTPTWVHGPFPGSGTLVAQLRTPQPQTWAWCPPLAHKLFLPSGCRSHVGKLGPSPSDFVGTAPGCPTELVTAPRRCAPGSNTTFLNPLRGKNRAVSSSERGYTQRGGLSPTAYTPNGNPTGVCPQSKDLRPTGADHTHTATYLWRQRTNRVGASHPTEHRRLSRPKIRGRTKRLTHGELIRWRTRCGCSTPQKQIEPYRETWDHQQPGDLGAAGVTRTGLANTIGRNRNTTRAVLSIASAGDHTTHT

SEQ ID NO: 962982 - protein, 172 aa, Homo sapiens
  misc_feature (58)..(58): Xaa can be any naturally occurring amino acid
MSRQAKDDFLRHYTVSDPRTHPKGYTEYKVTAQFISNEMDPRGCQRRVVVWKAGTAEXSGKACNWKTLAYNPRKASFRPASEGGSLAFPRGPQGVLAGLKGPQVESEGSRAKGGAEGDLLSLSLCHIPAAQQPAPSSRSSSGVGRVTLTLGGVQGPTIFANRVIRSRTGKIK

SEQ ID NO: 962983 - protein, 327 aa, Homo sapiens
LKKQPQHPKAAARSDWTAESACRARVRASMAEETSNSSRSSRAEHTEQKTPPPPAKSKLSCHQSTSTTHGRPAATVSHSKRNAVRRANHKKSDERADIISDTEGSQASTTPESITRALRAHCTSQRDRDRSPTKLARPREQPETNSKKRRPHALVQQHYTHIARHSTRVTRSKRTRRTPHKQGKALRDSAYAAQQASKQKRQGYNKTELQYKSYKEFIKELAYEQASSATQTRQTLRNSVATQYIRGIYTSNKSYHALSGPDQHETTTSYPTTQSIRQYYNDINRTQPHTLTVTQYMQHSHDMHHTAVRTTHETHNRAHQHTHSNNS

SEQ ID NO: 962984 - protein, 244 aa, Homo sapiens
MTDGPLSLPNAAMARGPNEASECGWQLQMHCDAVAKLDLVCFAPRSIPPGPHNVEQDVSPPSSFVLQEHDLTYCPGQDDDSNRRLCHARVFITTRVATVLNCIYTYPDWIHGMSSAIDNEGENFRLIYDTKGRFAVHRITPERGQVQVVQSETDLQLGTNRQSLIWLTHDARPIRLPRIPHQGDMITTPRLGSRALATHYLHFPLNVPPPGYTLVYCVALGEAAQNLQATNFGMVIPSHSARTK

SEQ ID NO: 962985 - protein, 271 aa, Homo sapiens
IYDSVMLEAPKCSCGDKIAGTREHCWRIRASGPGCRSGGSGASVSVSEAVRPPRGRSCRVWSKLLDARTVRPSTGSKARSVGAQYWTIGESLARAPGDQRDVLSTACPGGVGCGLRPFGAPVVGILSFHLPPKCRARLWGTVWARVSSLERIRSLFIDRLGYPRLEGLNTEDLGCPAFGRLGLGNPPPDGGSEIRQFGAWIFKFFQKSNWRLGLESALRLEISVIRKLFECLVGQNPATVGACAKALAKQIGNRGPNGGRMPKNSLRVGLR

SEQ ID NO: 962986 - protein, 225 aa, Homo sapiens
  misc_feature (207)..(207): Xaa can be any naturally occurring amino acid
MPKWNVIVNELDDIILTHYFTLFDTVLCWWCHVTCVPSLACHGCTAGTYTNVPLPAQRLSVQILTPWTQCPVIMCLTHPWTSVGHSLCQSLELVQRTSTASFPPGALLWTLLLSKAPIISKILDRSEVKPYSALLAKQWRSVERQLGRTGELGRLQLKQKVSWNLVWVIPQQAEWTELKLDGGNGGFGIPYNLFGTTSHIVGLEQQXLVGAISSQFLLKRLPRAW

SEQ ID NO: 962987 - protein, 294 aa, Homo sapiens
  misc_feature (231)..(231): Xaa can be any naturally occurring amino acid
MRPHLEGCGNDIVSARPDEWLVAAILDATGVVCTGDHEGVHYNHLELSPGESVQEGDPHFRSALTAQPVRDPVHMYQLAQSFRPELNWKRTVLKEIRGVTVGDPVIPAIWPLMGTGRAAVVLCGIPCTYPARDSLLMRCCAGTIFAGAACFLLRRWSPRCPTACGLTWADVGDVLGDSSRGAEPPVLTRTCRFQKQQLVNGYRRFDPCRGYENYTLDLQLEALSPQGGRRXLTRRSAVLRRLRRVADLACAYVTGGPRSVCGALAWLSDCARVLGALALGCLGVWGLPFFFSGG

SEQ ID NO: 962988 - protein, 298 aa, Homo sapiens
AARESDSGGGPAAFAARAARLAEWRRVDRGLGDLAWRPMDKFEQLLTPPCLERASKGWQRRSWSSRVIAKDALNLAQMQQQTLQLEQQSRLIRVCSACRGSELIELIEIRAQVEERRMTLSEETRACTRPGAQVFKSNAGPGSAEEDQLNLEQVLNEEIHRKQEESVQNPGSLCWEPPVSGEIGLGSKTCDAALCSAVGRARVQAELGRIADIIREQIRLKAVEPRQTVLDVPSGNGWHLGLGPGFLAFVGDLASVTSTVAGLNACWLGGGYLRARNARLCYRHGPSRGPPVWKNRSP

SEQ ID NO: 962989 - protein, 316 aa, Homo sapiens
RVKVCVSFCVTRALWRCLLKSRARGSVIMSAYGAVRRRNQGVCSVNLGHLAAAHKEQSRNGLLSLFMVLLRHCTGLQSKSSRTLPIVRIRKTPADADRCSYEALRWTLVTNVGSRREELNYLTGMPQDINVLIDQLPDVPEIQMIDATECWRKRATHAFHDYVIVTAGEQDTQVPDYNHNLDPNGKANLLRSRTQGARATDGPRTASSSDDPRPNHQRQLSISHTHKHPGLASSTKARRPYPLTNAANESRPRTNHRTTTAATQGPDSQHQKTPTPQGEPNNGAPTDGRETRIPFADSGATQTGQGAEQRTQAIKR

SEQ ID NO: 962990 - protein, 134 aa, Homo sapiens
MPAGGGGAGTGLGLTRGDGAIARVPDAGSRIYSSSHASDGTCKKLENAKGATERGREADEYESTFQANAGPVIMSIGGEDCEACCPFHRMLAIVDYWCRQQNELECSLSLAVCSVNRCYPYCVTNFSGHPKGYA

SEQ ID NO: 962991 - protein, 77 aa, Homo sapiens
GLEEPAPMTVRVVTVGTTSFDDLIVCVGARSLQQNSESLGYNRRYPAKIWSEGTVVAEPVQVLSLLYSGCATGTRIP

SEQ ID NO: 962992 - protein, 193 aa, Homo sapiens
VCAPNLRWSTRDALERPTLVPSRWPLIRSWQDDKTLIMNQEKRRPDVQAQVRIGGKGTARREEDRLVQQQTATADDEELQFSLETSGVNNSSLAMEEVRYVMQNQGTVIQFNEPLKVRGDHLGELNDFVNHLQCRAGDERSMSRRWLPQASYKTRGDGWRSTITELRSGREHGVPRQGSIGTPKKNTLPWWDI

SEQ ID NO: 962993 - protein, 194 aa, Homo sapiens
  misc_feature (81)..(81): Xaa can be any naturally occurring amino acid
MRCTSLAECLFPPARGYRRVPRVGSSPSRFPSKSRSPDRCYGMLLKVVHNSEDSDFLTMHISMPWQCHPQKPRAAVGGARXSSANPVPDPSFPCHDSVLHAGGYAGGATNSVVTWPSLKGSLALGATGWVHQACRGPSLCQGPGQGTRDLNLGLPRPGGRNLSYVPGKMDVLSRHTPFNTARMRGVEARCIRKC

SEQ ID NO: 962994 - protein, 71 aa, Homo sapiens
GELTLLWAEWLGNDARRMGADCYGGVGDGSLDWNGEELVCTSGLNHRSVSLCAVSHRKSAVSWRMGEMEDA

SEQ ID NO: 962995 - protein, 281 aa, Homo sapiens
QPSSGLGSGMLARSPHAPAPLGYPRAPGPQRLPCPRPAPDACALVCLLALEPRGYALRLPDRGPGSLAPLMGPRAKECACLADTDPCGEPPDKHRTRKGTCRVSLAGARYSAIRNRLTQYRPARGTNIPRHKPRAGRGPRHTTAGRVHEQPHSVIGTPRMAEEQATVARDGKRLGVHPFSTLNDHMSQRNEEQAVAIVATRTKKRIKGPIGKKAPKRGTPRREKPNQEAANREKQDVYQAKTRGHSHRKRRANREQLKGGDPHTEQTETDKGRHNRQRRDG

SEQ ID NO: 962996 - protein, 70 aa, Homo sapiens
GGQFLRLVLATADRKECRSGECYTYGGTLCSPELSKPLAVNAKMCQVYKIISPVLNVQTGRQIMWVSFFF

SEQ ID NO: 962997 - protein, 68 aa, Homo sapiens
MLPPPTLCARLNSFMSGRPPADASSYRGGGGGHITPRPSSLRVVLAHRRREVISPPADFGVVISRSFI

SEQ ID NO: 962998 - protein, 163 aa, Homo sapiens
MWVRVGEAPGVLSLWGGGDTSSSSLSRGGVVPRRFLWCAPGILCVSKRGPKTCGEAPLWGGFCGFTRGFNTQREEALPFVNPCVGSPGGAICGVHSLSRVVSQRESAHSPEGVEISPRDSRGGDISHSLYRVGDENFCFTERAPVVESGGSPRGEEFHKSLIR

SEQ ID NO: 962999 - protein, 69 aa, Homo sapiens
AETASGLQVPRLGQLPPEFCLFSCSEGSGLQNLQTLQVDLDRFGYAALVTIWKHFGYKGEVVSVFDAAI

SEQ ID NO: 963000 - protein, 69 aa, Homo sapiens
DWRGGGVTCERCAGASPPTASWNRAVLLRGLGQDNNLLEGPRGGDTGARKVRAAPWRVPENQGKESGTF

SEQ ID NO: 963001 - protein, 545 aa, Homo sapiens
SAVSSRAGAQAYLSNRLSTGFDRDSLWQRLTSVQRGESSLFNIAATFARNGRCLVNTALLTYHLCENACEPSTRALLQALLNTTTFPYAIAPMKRRVGTSTRHSPPIWSEICLYLVWPTCRPWARICPQASHHAALTLCPFSVPLTSSVASPRSSALPRGPCPSGPPPQAPSCPRAPGRPIVLPRGRTPCVGRPGPFHFPGPAPLNFCSAPPQCAWSLPPPYLRLCPLFTCATPLSPVGPSSPVDTRGRAPFARPTLGLPRTRRYSLRALPGSVPAAPHRAVGSSPLQRASDSPRLSAPGPRRLPVFTPLSDVRQLGLGPTRRSHCRAPRWRPLCTPILVATHLHTSARLHRAPLSSRLCHPHTYVPTAPWHPFDLVAPRCVSPPCAALTVTTADPLYRDDPVSPSPGCPIPCAPRLLTHGLGPLVVPAPVASDPSRAENSAAVKSSPRRPVHLLGALPHCHSIRSLLGVPCRLPAPMLGGRLSTPITRVRPAPTCGCVAWCAPPGRSSPNTASLFCCFPGVSTTQSIRAAPPCVPVVVHPSRVP

SEQ ID NO: 963002 - protein, 190 aa, Homo sapiens
PARVSARGSAPVPVGFGGAWRLNPAYRGRPEVRVSSLTIADAFIAAGESSVSDPYVPGVPRRVHRCSLPLTLQRTNLTGKQLKMLDGAPLVVGHTGGRTTIWCGDLMKGCGGQGPFHQAELTPILSPAKFLDLNNREETRRLGGGASPNWGCVHSTIFQARKFQHVWTQTLLWERPTLLETLPPRTTINY

SEQ ID NO: 963003 - protein, 234 aa, Homo sapiens
MKETIMNQEKLAKLQAQVRIGGNRNCSQTRRRWFTRTSHSRLTKHFRYSYTRTLPGTPTISGIDELNTVTNQDTVIHFNNPKVQASLAANTFTITGHAETKQLDRHATQNLPTSLVPDSLTSIQETGLKLCQSNLWTATRTTASWQRMMLTRKLQEYMSNPNMNDTIPSTDTHTAPCVHSCTHNLKTLTGSRHLHIITGLLKHACVSRTPPKPSTFYITHPKTMGNRQNYNEPA

SEQ ID NO: 963004 - protein, 166 aa, Homo sapiens
MVDHLGNGGNLSLNASANRTGGGITVGYGQRHGIKSTVIPSPTEDKQQHGADLNSTPVAQKAPAGCEHYGTHTGQRTLTITLAVRQHKRLGTRVRLTTHGAVGHNDTSYFYTGFKYKPRQHNILLTLIKGDFHINTHWFVAQRKLSLETSKRERSQTHTQGRAPHQ

SEQ ID NO: 963005 - protein, 58 aa, Homo sapiens
MLPSILNQLGADSLTSSRRLAEALPKQSVDGKAPLATGEDDDDEVPDLVETYDEASTN

SEQ ID NO: 963006 - protein, 152 aa, Homo sapiens
KQGNPVTKQAINHYGFENTISYVSAKLTRQYEGKLVALIDAFCKSKLLKQKDFLQFSFPFYISYFYSFTWLISHQETFISSAVFIFRMCYHHLTTTTPITKRLAHTVAFTIQQQSFSAFIVLCKLTGHHSIRDLLLRDLLIINISWNILEIH

SEQ ID NO: 963007 - protein, 258 aa, Homo sapiens
MAPSRNGMVLKPHFHKDWQLARGHVVQHSRTRKIRRRKARQAKARRIAPRPRRVPSGPSCAAPRYRVPPRRCAPSAASAWREPQGGRHSPMNGVPGPTGISVDPEEGGTRPRSPCRAQTCQRLKGVPVQHSSYFPQEALRTPRLGRQSAEGTETWAHTSLTRDRSHAPSGTRSIHANGEPARVHHLTDDARPSKGRYGTISRSGPVQTPGQLTDYGTHQQPRKPANSMRHDNKAPGDWNRSRQDGQHSEVAHTGARAT

SEQ ID NO: 963008 - protein, 116 aa, Homo sapiens
PPPPPFFGGSGGPRTKKTKKKIFSPLGGVFLFQKKTTPFIKAGAAKCGWGVSPQAKPGENHLCRKADGGGVRRFLSPPPIFYLYKEDRGREKHKQTSNIKRAKKRHPPPPGGRRWG

SEQ ID NO: 963009 - protein, 140 aa, Homo sapiens
SKGGTGNSVLELGPPFKSNFIIFIYKQQMNTKRASLKMVWPVTQKCYEGFRKASWILVGPAWPGYRTEETATLGARKPKQAWWKPGTGIENGGGESYEQRGGVLEAGQGRKGVSNTKGAVSLQGNIQLVTLNTSRVLRGS

SEQ ID NO: 963010 - protein, 204 aa, Homo sapiens
RRQPWRPVRNGMVLKPHFHKDCAVGCVATWFNQPARKIRRRKALCNAKAAPDRPCAPASGPILAHRALPHWFGYHTKVRAVPRVSALEELRGWPGHFTRRWPGPSAYLWIRGRRNKSTESLAGQRAAGLKELPDPKLNPSFPPRRKVPLSGGPPLQKQSGGRNHGFHLADGDTLEQPLCPDPQALNPGNPGSLPLSRKPVLFTT

SEQ ID NO: 963011 - protein, 114 aa, Homo sapiens
MVTTIGELTGFVHARSDNCPVWLRDDFLNQVMRRNRLCRMSVDGRHQTCHDASGDKDELDPWPWNLTWRLQIEMCLELKELGTNLKEENSDGWKIRYTLKGAKVRKDRINVWEG

SEQ ID NO: 963012 - protein, 207 aa, Homo sapiens
RFPAALVTWRHPQRCLVLNAGACNHGIDEGPGGTSCYVGIDSILEQMRRKCMNAVASEFNIMVVGQSGLGKIHLNQDASSRSKISAEGGAGPPQSELHSPMTILRSRSITADIDGGKASGMNADKDCDTSQGLGDHIEQARTAWLAHRGSSSIDQYEKYLQEEVNINLQEAHPGHPASTAAIYFIPAELATPSGPWTSSYETPEQWW

SEQ ID NO: 963013 - protein, 118 aa, Homo sapiens
LRPPPAPPIRVEEAEAMAEREERSLDNFFAKRDKKKKNGAGATWAAECRWAQRAAPAESSGAAGAAGLGGGRGDPGGGAGRDLPARGGLAGPGGPPPKACDERDGRLNGKGFGAKKEG

SEQ ID NO: 963014 - protein, 494 aa, Homo sapiens
TAENEDYSQQSDCLTFHENVDITLTVDAQFIVKWPQTGTPCGCVTYHSHISTVRHYTAYLWEPTNNNDVLLWSDQIGLGVHHCTGTPLAYPGIRDLLSCKVHWYQDHHWTQLALITDCGLPGFTNATDGFWVYFDFNLYHTLFQHRSDFTSQGEDNLWLPPLCVVTHIPGKIFILTTLDTAMYPFLRHGASGEIDWTPQLRIESGTIWIYHRFIPYQNGPPLANIVLDDIHIPQFAHIWHTVESRSRTALLYLTHNNFIHAVSPSLARITNATTQAHNHNPGSKLPTANRGTLIQAEPNQQRGPLRHTRTTAPAQSEPQHGGKTLSTHGHAPPGTDQSTVTLTKRCNVIIPPVGPATNGHADTGTGPHENCHTTMKSTRINVRLATPLPQPGTAPDQTKKTPINRTLAANNPAQTTTQTHHDTQRTNTHKRDYWTDHHDQAHTPRRAKHDHTNDSTHIDRPDRRHDRHHTERADENTQHAPRQTTNPTRHTTRD

SEQ ID NO: 963015 - protein, 151 aa, Homo sapiens
MVPVCEEPAETSVMAVTDPEGGTSPALYPGGGDCSQGHLKVFHSIEGHPPRIGGENHQGPLTKNAEERPERIPFTQQKLKSCLRDDILIRSLEKQITCLTRHRCHEVEGAKKWLQYLTELRREGGLCWPPRYTSSQQMKKFQDKPDRWLLQ

SEQ ID NO: 963016 - protein, 178 aa, Homo sapiens
MSSLGSADNMLSSSWDCETGQAAVPILNDQIRLSGPAVLTEGGNIIMYSTDKQMGYQCYVSFSDLRGSSQIDNNEPYMKIPCNDSKITSAECGPLADSGIIAGHESGELNQYSGQSGEVQAHGTGATPGRINDHQENRHLTNDANRVHSQNTAQATDPTTLTHLATSTETKARPQQEP

SEQ ID NO: 963017 - protein, 277 aa, Homo sapiens
MRENRAGTQNLGRPWAQRGAPKEAKGTQGPPVGHERHTRGRGRQTVRDTGTHAAGLATRARHRKKPMKPLMMSAHGTKTMLVHKTRTTNREPLTQLWRTLGGPKRPRRRETHTPRRKKKHGAHPQRTQGRHPYPRGREPHHQADNSGPPKEECSARDKLSKTSEEPRGGTPPATKRKSAYRENRPPKRRDTQRRGPQRPLPSGEKPPPQEGRGGHTPNGGGQPQVTTASHKDNTPRKSRQNRSTTRSRHEQATSKPARNTHEGDATTTKDEQSINER

SEQ ID NO: 963018 - protein, 171 aa, Homo sapiens
PQTIYNGLNDNISPKLHEYKDREHLNDYFLQDISSEVNPASAMKQIHPLLLPRERGGRQRTNTTTTIFQASNAEITVMITLIVAKSAARGMLSRCTVYYTSNFPKGMLLSHVVCARSIDMGKLLKKKLSWLGKKYNPMSFREKARLMFQVNQWLTWLETAEEEESEERTLS

SEQ ID NO: 963019 - protein, 106 aa, Homo sapiens
DLAAVSRGLRSVVDSAVLRQMQAWGSLLFWTGQAEDMVKPLVPISALCCWCGFGYHDVTGGFWWDSLAMYNGQRAVPGLQGCVFGRLAGLGAYQAVSGSRERLGLT

SEQ ID NO: 963020 - protein, 203 aa, Homo sapiens
MGKVKVGVNWICVEYCGVLCHQGCLLTLVKWILVAINDPFHGASTTWLTCSRYEFHPMANFHWHQSRLSNGKLVIEWKIRITYLPRSRDSTRENHSGGRCLVAVSTVDGGPTGRVFSHAWRNGWALILQGREAIKGSVTRLAPLVLMSPHVRSWVENHETVLTTSLEIISDALLHTLNWLAALAKVIHDWALVIGDGLSDHMS

SEQ ID NO: 963021 - protein, 150 aa, Homo sapiens
MSLPWLKDDFLLALHSVWTPGLTPRATPEYKVNLRSSSQMNGPMSDVKAGGGLEAVQRLPAKLHGDLCLQPTGNLFQPASRSSLAFPLWPQVFAPGLRAFSDPRQLGDNGGQHGPCFGFTCAHYHCSSKQQATTASTGRNLPGGWRDGRP

SEQ ID NO: 963022 - protein, 199 aa, Homo sapiens
MWGGRETPASWRGRTEGKGQKKDEGPKRDPRARDAWERRRPERRKTQPGANPSTWGVGTPPKMAGRKNKRPAPGGHPAGANLLYGDAGSQRSPVPGEGKLLSKGAPRVGAKRRRCATKALEKGAGLGNNQRPTIKAFKSYEQMVMPREMEGGQVGVPRRGGGGTTGCLESQRGLTKERRQEDRWKHGSVRDPKELGEER

SEQ ID NO: 963023 - protein, 85 aa, Homo sapiens
GLQWPKKKRGGPDNFEKHQIQGTGGRGSGRHGTKEGAGKGAWGFAKRGTKRLAGIAPPPAVEPAREPRGGHREAEHGEGGGHPRG

SEQ ID NO: 963024 - protein, 228 aa, Homo sapiens
MALEFNKGCQSQSLFDLLDHQVRMSLMWLLQPPRYMLSEQCGRMKSMGPLDLKIRGSSFPGNIGWCVTSSGTASQNEKPGAIKPLPDVLAEPLSSEAHVFCDEPTIVNCLPGNDAPVGMGTFTQCGEPYFGRCQSTRCAWPGCSGIAATRFGSLVPEVAHVHLWSGGSQPTMVVAVVPHSLANALYIPAGEDSLASTGGGGADTPSGGREHPLGGAVVRGGSACVVAA

SEQ ID NO: 963025 - protein, 94 aa, Homo sapiens
MDSKMNLNTVENSLCIRCVSKPGVVPCEVIPCSNRTSLYLSSTSITLLGTKLRCDCTLKLGRVKLFVSVPRSGYANPQELVYGGKNFVFPEKNA

SEQ ID NO: 963026 - protein, 262 aa, Homo sapiens
AGGLRAQVARGVLSARRAPAAPTHHRGGLGGDSGLRGCPGPHLFPAAPANRRDDRGCPSLMSGGCPPLQRATPAGGFGAVNAVGGAGGLGLVGPRGAPAFPSLGSPFENSAGQFLHLSLRKRGNRRLSRFQLSLPGRGRLDAAHSGGARRNPFLGDPGAPLSPSGRPGFRGGGTKTNSRGVFPFPIFPLLEKPWDAEFLLQTRLLGILKPFSGLGAPFSRVTPRGKGFHGGENERGRGAPLSPRGAPLGVFVSGTPTPEGRS

SEQ ID NO: 963027 - protein, 88 aa, Homo sapiens
MSPANFTGMHLYASCRAESVLETKKPKRSRELREGALEALCIITLHLTESLGLVRNLAHPEGPILGGGTAFIGPIFGRERGEKWSVTV

SEQ ID NO: 963028 - protein, 30 aa, Homo sapiens
MALTTPYLPQPSNPPIGHCFPRITSEQNVP

SEQ ID NO: 963029 - protein, 419 aa, Homo sapiens
KFIHKKQSGNQKGSGRSRVSNPLKPPQKQLKQSEKRKGKGNKVQHWALGLIHEVFPRSSSGNVKAKLFCGQTRGLLKYTGKGSPQVPSVANRRAASWCQLRTWWGVSTRRAPLSERGGSVGPLVSHSTFTPSPGKFQPAISRTAWGLRAVGVPLIPPEDRRGPLGHYMLPRRHRGRVPRESEKYRVGGESPFAFIYKRFWGGCEREVRSKEAAIPKSFPPVFPKVPHKGVPNFASPNPIPRWNKSLNFPQGVHTTRQHQEKAFKAHGGGGNPNSIQGFRIPARGVNPFFCRFSNKEISHAVWGSPVYYITNIIHHPISNPQKFSHERNKSFSPRRPPCMGLENEGPTKQRQAEELTELAPYKGKTPKTSFGVSALSAPPGDNAYTQYIAYKVARTAWCTHSWRDNLDEYGGCRTYTRKG

SEQ ID NO: 963030 - protein, 360 aa, Homo sapiens
MSVVVLAGLGWDAGSAQSTTEQIFGAFTYLQLSARTLPLNRCWLLADTSFSEELEFNLMNIITHRLHWKPQHWKQGELLLKHVGRTIYGVTTEFFYRPPRANTRWAPRNCHTIHATCNTLPQENLHHLINGVPDLLTTQSQKFYFPDTSLTRHANKRAAKFSDYLVIWETPLTKVHMARCILRWRFRTGHNNSPAGRPIFLTSRSMPGEPSEPSGFYPATGFQDLITQQGTFPKRNTYFHTTGCYLKGDGRSQNGRLDLRRGKNPGWTLYKCAKGSHYHFVGPRAKRRNTPVWERQRTKNPLAQGRYFSPHYGEQTITQSSPTCIAEPDPPPRYNYQKPAHPDMKYGPPADTLSTENTDH

SEQ ID NO: 963031 - protein, 99 aa, Homo sapiens
CAERAAQSLLLSSVCRGNPGPGPWSRFPGMDLVWKCVVLKMCVKGKGSLPFSAHGIVVAWLSRAELVTSDGIYLFCDDHKLAAGTRLSRITVLEEQVRQ

SEQ ID NO: 963032 - protein, 107 aa, Homo sapiens
MPPARAQPPRSWGAAFGGAPSAPGPAPYVATDDGTPLLPVPSHPILGVLFPSQLDLAHGGHCCDLALFGGIPHRRATVGARFDDIGTACAAPALHAQLPLRAFHLRL

SEQ ID NO: 963033 - protein, 167 aa, Homo sapiens
MSTDTGVSLPSYERKTQGINNSFEKLKRHHSYPWAIAGFGSNGGYGTHITLNEQGNILPMSIHLIHMRVRSPRLRPLGAIDLSGMAAIPVYSATFWGKHLMPLDSTSMLSWGLCSGRSLGYQALTMLLTHFTALPYFTGQGATSPPTLRHCRASTDLRLTHWAHSRT

SEQ ID NO: 963034 - protein, 309 aa, Homo sapiens
HALSYWKPFLVNMCVATVLTAWRLPLLHGSCSTATHMPDPPPLHLHPLSASARMSPCPTSSACRGRYRACRTAYDEPGPLDGTLVLALKPIFPWMCVSPLILLTFLPLSTLQYQIHKPFPLRHECTESYHAGGAEGTGPTPVLGLAPPMGSLPWSIPVRAGHAHSPPPFDILARRRNSSTPIFHSTTTHSPKWHPIAALAILLATNYMSSPLPRLVSPFLSRPFIPKRSLTSIPRLATGELQRFAHGACLRQHQLPGDRRRLVSPLALPAHYRRRSPSAPSPPILFSLLGPLGSSHPHLLVAPLSPPHP

SEQ ID NO: 963035 - protein, 334 aa, Homo sapiens
VWLDLVSRAAIAQWMEEERAPRKRRWRGLPVPCGSDSEDARVCRSMCWTDDCPGPGSWDLEDPCPPSPPRNAPRDVEPGHPGRWLRAQNKKTEERLAGFQSMGPELPGVQRHHDTKGYKVPTPIQRKTIPVILDGKDVVAMARTGSGKTCCFLLPMSERLKTHSCPDPGPCALILFADPRAGPVQTLKFTTELGQSLGLKTALILGGARMPTRLAALAPQIPTYFWQARTVGACGLWQLSLQLPVLRSVVVRAPCRALRPAFSLIPFRGAFRRPPRGGPTTGGRSLRRPPHPVVLGDCPRLCLRGAVVTPAAGDYTPRASVPLFPRAGGPTPRR

SEQ ID NO: 963036 - protein, 155 aa, Homo sapiens
MGVVARTQVFVPPALLARLAVRSLMGAGGSLRLGVGLWFGVSGALGKPLFSASLPHLGVVPRKRLILRTAESFIHEAHAMGEAPCAEAPWGIICSDRGGQRKCYMRPMVERSNGQDQTTQRPSGDSIKPLLCRPRVWDSANSIYPGRLRRINPKH

SEQ ID NO: 963037 - protein, 264 aa, Homo sapiens
MNKGIANDKHTSAGMGMEGIWIRNKVNMGGMEGPFGGGMENMGRFGSEMNMGRINEILSNALMRGEIIAKLGVAVAVELKRPWDREDVVLAIDSPRWCRRWCCLVAGPGPWLDRVSSEIYRVVLVLDRMVSVERMGSGDCAHGPCWGSTTWLQSLKRLGQQHGARLALSVERMGVAFGVQLERHGRVTIDRGGSNIERDGRLALNAHVARVHRARLRPEHVGAMCARGVFVACPGALWAPRLVLAGPRTWKRIWPPNPLAGSVL

SEQ ID NO: 963038 - protein, 113 aa, Homo sapiens
MHYKYQSQRVDELVACYGNYTDPSMDVRETETESSRLNTWAAEEMESHSVTQAECNGMISAHATSTSMVQAIPLLSSQVAGDTGEHYLISVVNLISEPQIPKSVSVCGYPVGG

SEQ ID NO: 963039 - protein, 226 aa, Homo sapiens
RALAEAAPWARAPPRLSPGRAGVSVMALAGAPAGGHARRRWRPCSGPARCGVDSSQIVIISAAQDASAPARFPRGPGGALPPALQTLSCCSSPHRRGARAHTQCAGARLGRPGPVTSGGLDLGKVDHQYPGREACGAKALGQEACQSKGTQGVKTPPGGEVQRLIREPQLNLDATKGAFPGELVEANSGERVSVRNLNVGCRKGCLKGADKGGAFLIDISTQKRFL

SEQ ID NO: 963040 - protein, 297 aa, Homo sapiens
ARESDSGGGPAAFAARAARGRAAAVDRGLGDLAWLPKDKCEQLSTPTCALDAAACQCADALSLEHSRYARDALNLAQMQEQTLQLEQQSKLKEYEAAVEQLKSEQIRAAGLRRGGMTLSEETRSTRPGPSIKDKLARQRLRKDPVEPTREILLKAGRISGKQEESVQKARKPCGEPTVEREMELGYQGMRCCEWRPEARGRAPRPSGRMQTSSASRSAEGWRAPSERLGVHQDGLDLVGRRIRAFVTDWDKVTGPVAGLRLLAGGSTQQNGTLVPAVIEDGWGNRYGGDSAHALRPR

SEQ ID NO: 963041 - protein, 110 aa, Homo sapiens
QPVGDPGLCLYSTPGGGPACGFEGLLGGRRLVRSLASGCAPKLNEGPQGLWQKPWAPDIDSPWEFPHTGENSKGYEEENAKILEHGNWIEVGWGHEMASLKLADEVDPLG

SEQ ID NO: 963042 - protein, 240 aa, Homo sapiens
KAPTRVCMQDRPGPGPQAHTAESKVPRLPAAPCLPACPGAGPGLPTLPCLPTLPSVRVASPARRAMRALLDKPRSFVRHSSGRPLLLYSGQRTAARTFSPVPADNSNQSAWENPSPFSEHQKDVEVGIPQTRISAISSRASGPGGTMYIQVEPVLDYLDLSACKGEGADSEEQSPPPGTMQAVELLLSTFGDRESGHLGVGLGNSWEALRENRAGLLAAGYLNPWSSPDLPFSNGLENGS

SEQ ID NO: 963043 - protein, 285 aa, Homo sapiens
SSAAAVVVVGLRLVQTWSAACSHGCTQLHCKQPDLLAIQQHSLLLHVIFDHTALVAWHTSYTTHNRHIVAHLSNCSILLCAKQSPTSTASSFLSAPMAFHMEQFSIGLHWVTLWHTKFGTFAIAHFSWNHICIGPSQPTHASEPPPATSLPQHSKTFQPPQPISQLIARSHQRGIGPHGRFIIPDLPCPANTLSPNGCIAPDTLLGRQPSFKHCNAIGQSLALETCNRQRPQFQAIILHRASQCAPPDSHTLILKSSLAGSSQIGYLHLVPQWLTTNPFVLPLAT

SEQ ID NO: 963044 - protein, 290 aa, Homo sapiens
PGAWCGVVPAPGLAECSAPEGQCLRSCPRPGAQGGLGMCLRAVAALLHLPAACRFAVALLPVPPAGLPFFVLRWNAPLVGVGTQAGMSLLGFAVPPAMPSVPAAGGRVVLLLSNHEPVSMDVRTTFPQQTGDSAVRSFGTGDLTVKLPRSQLPDKPNVYDFKTSIMTRCTMIFLGKDKELYTQNGILHMLDRNKKSSPGHERFQNCKDLFDLILTCEERVYDQVVEDLNSREQETCQPFARWSMLDIQGQARSEAHPCVAVSHSVSSASCIQDPGPPCERDSRAVSRVEG

SEQ ID NO: 963045 - protein, 182 aa, Homo sapiens
ETCVDDADQSCWNQNSGEPCAMSLLIVKNLPNGMKEERFSAAVCRFGTLTDCSLMFTKDGKFRKYMVLLASSPRKSAQKAQKHFSKSFIRHIPVITVEFYQVIRGPGQTQSLEQMCPETNAMANAGSKRLYYSMKLGEDETKKKVGSVNWEKLEGGYRVPGVSCQFIKIAVCCMACHFCVRS

SEQ ID NO: 963046 - protein, 280 aa, Homo sapiens
MAPSRNGMVLKPHFHNGLAAARGHVVQPCLALYDPADCNGPGNANGCCLHLPLRPCVGSHPGPSVLLPHWFGTTLKVRCLACGFSSGWMLSGVPGIHKNGGPGPSAFLVDPRRRNNVHWMSLHGQRAAAERSTCSKLILFPRKPSAPKKGDSSAEELKLATQLTGPVMPVRNVYQTGEKLESSLRKRRLSNAFASLRMARANARLFGIRAKRAKEAAEPGCCTLNPLKPSWGLGNSVGSHAGSPRGVFVGTIGPGMGLHCCDFPLQGIWGAFLVTDGPGP

SEQ ID NO: 963047 - protein, 149 aa, Homo sapiens
AEMRLRHADYEKLARVNENRVHGKIASRNGVRPDSSAVDRRAAYLNESWRARHGRWLMRSRSRESCGTLTKGYKPPSSQEHSRRRAWVQLSLDRGAVACLLGVPLSFEPQTSVCYGASLLLHGQQLLFPSRVSGADEGASVPSLPLSIR

SEQ ID NO: 963048 - protein, 519 aa, Homo sapiens
VWGGGNPKNFFIITPRGARERERRKYPRAGGGGGESASSGGGPREQTTRGGEETQRAARGGREREGAARARGGWVSPSPMWVAPFTRARRRERHTRWTHRAVHSRAGVVRECEERESERESALRASGDSIISLSLSLSLVRARRARALLSRSSRRRARERERESEHHTLSLRAERAEGASHTRQTMRAHPSLVVDARVRRFVPSREHTTRARGAPHDTHATRRATTRRETTPTLYYTRRRREESTSRDRSSRRTTQRRDTATHRRDTRRAYDAAEHRAESKAPPSRSERETNRRSASEHTPTLSEEAKMKTTNKEAERRRCAEQPERKVDKQQYESTRRRGDPSTQKEDDHNADTPRKNNNTKQMNIYNQQPRKKKKDAQTVKTNNHTWDEETKHKQRHSFLLCWRRETTNQVAIQQEAKPPPTPPKRPGQEHNLHPNDGARDLTITPTHNAHRIEQRGRRTTHKHATYTPRENEEKKTHTNTSEVRSHTHSMRSNEQQTKQTTASPQQHKAKKTQKPK

SEQ ID NO: 963049 - protein, 313 aa, Homo sapiens
KLEGFKALIAAQYSGAQVRCSPHIPLPFWPKQSGSPCNFSDKFPAGKVPALEGDDGFCVFESNAIAYYVSNEELRGSTPEAAAQVGACVVSLAVFRYSAPSTVAGCCPTLGIMPPANKQVTENAKEEVRRILGLLDAYLKTRTFWVGERVNTWLSITVSDPCVVSISQVLELFFPQGFPNTKRWFLTLHKPVAQFRAVLGEVKLCEKMASLMLKKFAETNKKEKRGRREWFHGTEKQKPRLKRRAEKRGALLLGVMVNVHRAGCESKARTFRHLAEYVVLVNERQPKRHTLWAPFGNLRGGSGHKNPEITRGT

SEQ ID NO: 963050 - protein, 272 aa, Homo sapiens
HGQQGVAREPPAAPSPCQESSSRSHGGDEDRLRGLHRARHGSCGCCGRGGPRGRVGHACGSLGSRTSAGCSVKIVEQINRQARTGQTMLFGGEHEEEWLLQYATWEQLGAQFTGICGGSHALFFGPQPSARHPSVAANRPRTEPPCQLPPRPLFQAVAAILRAVLSRSGKPPMELSLLRAPEKKEKNEERRRSQEEERRMTVSRVVLAGGRGWLHCSGGCPSSLLVTAPRTEGCERMLSRAQRHRSPLLQRLRGQSLRLTGHSGGGSSGGSG

SEQ ID NO: 963051 - protein, 254 aa, Homo sapiens
GRAGVVLLEWLVPRSRWAGVRLAGGGCGRGLPAAARCRARRPCGHAMDFNMKKAGCRTLGIFFTRAVQFTEEKVLARLRTTELDAHFDNLLCPGQTGTKNWTEKILRQTEVLLQPNHQCPEWMEFLYEKLDRNGPLKGTNGELLAQYSGSAVSELWADHRPMGKTLIEGGRSVNKQLVSQRRRDVIQLASISFLRTFRQLPGGGTGRPSRRTTAAPPTTGRLDLDACKARVKKAKAEKQKPEGCLDFQETRTRK

SEQ ID NO: 963052 - protein, 272 aa, Homo sapiens
  misc_feature (28)..(28): Xaa can be any naturally occurring amino acid
MSNIVRRSGIESVGILHLHPRNHLLHLXSDDDELRSLTEEAWLDGFVHDRLDEGYVLSPEAYEKTMAINECHGRIPRESIHVGEKALVRVQCGERLDGLLYSNSTIGWVWKNLRARNYVCAEPCWRKANTHEGPWQRDKLVRLYGVSPRGGARLRHYRVRWQAVAGFLKTMQWPMGPFQKAYGFRSQDAGEMCLFGAGKSQFPGAGHRQRMGARPWREAERAAKKEQESTQERGTPNRGEHNICVSKEEERPRRVNHKATNTHRRVHKERSG

SEQ ID NO: 963053 - protein, 66 aa, Homo sapiens
PPPFSLRMGQKEKLLPLALRPSRRLHAGPEAPLSRRRVLTEKSSVSPPSCSFASVMVDLLPNVRAR

SEQ ID NO: 963054 - protein, 87 aa, Homo sapiens
ELPLLEKGFVRRNEVSPSVNEVDLPAGFLLTGPEAVLRDPGDFPSRKSEDVCLKVTPSGGRNALEYRMRRRCCSFSGRDVAIDVVSA

SEQ ID NO: 963055 - protein, 387 aa, Homo sapiens
RARRGRAGATVNGWRREAGAAARSAQIPRNFSVRSPTTFLVNAAACSCDVRVTVNGGMPEAGNVWVESVQWMPGDDSNPAVLCVCVMSCQLPLLPPAVPPAIFLMHPSPAACEPGAWSLEPESAACSLQPALPGPRRHAGCVLSCKPGAPILADLPVALVCSVAATLAAVVSACVARAVFRGTHETVSAWCHCCMPLAWPRVPWVPVAPRCNVACWVLWCWPLSLAVRKIGHGLTAERCGAENTIHDLFSYCDIEEHPRKVVVNGRVLELFRARRCRTTWVLPDHGQPWWVQQDLVNTGDRQSTWLETCTVAKLVPLKMDKLTTECTYHDKMVAPEVRDLPMTSFINRTPGDVDNHNGGRHTPTKNTDMQSTPHDTPVHENPPKRSR

SEQ ID NO: 963056 - protein, 274 aa, Homo sapiens
YNWKHKRLYYKGASQLRGGDKKKEQTGDRPFPSAKGSEPDFQDPGSSQAQRNLGASRSDSKGVSTSPSRRGPLTWRMMDRLVSSMNSSAHLGALVPENRVLPRPVVTLASLIGCTRLVSMMGGGGGRAERSVVSPLSARGVCSPIDIGVLRKGGVIWAKMSLGLAVFKVLFDQMWDLWVTPILRKNNRPALCWSSELGSVIRHSGRSLGGNWQKLGVEIPRVRRGGGPTVLGQGGVLATMWSWGADCCAPTQNLVPVAFVSGKPTQTRIALCFG

SEQ ID NO: 963057 - protein, 210 aa, Homo sapiens
MKRPNGEPELGICTDEAESLFRIMRGQAIHLETRDTWLHVGDLDGMTDCILDVFHIEAGTGMCVYVRLRGTRAIVLLQKHHVSCIEPTINILGCENTASSEFRPMVPGPRSGNEIDIYFPCHFSPSSNAFVGPVRYTGVLLVREHVAFLLVYCNWIARRRVRGFAGTSRGGTRLGGRILPSVKNPRPSRAGRPSGVLLCPAVVLSPVCST

SEQ ID NO: 963058 - protein, 207 aa, Homo sapiens
MPLTPQISRPCLWLHLSDVLMNDLLHGADETISFHRCGSIRTTHRQRLALRLDEETHEDVLSPESIVSLPTADAELIHDYSSSILDRRDCTWGYPSKKTLYEIIDNSIVYGGQYHLLKISSWSQRWIRHLLPWSSRKGARRRLVSDYGQWRAMGLFDIVLRIICNITFHSCPNIVHSGLFEYARMYPINGSPCNGVLVSPVVNRTGL

SEQ ID NO: 963059 - protein, 434 aa, Homo sapiens
PVTSVVRARLLVLCGTGDIREAWLAAGQSVLTSLGMSARDYRYYSRREKTGLPTMPRRTPRWTYCIRRAQMSMYIVDKIAWAYARMGQLLPSHLCLTYSTIDEWAATQQRTRPHVCELTYCLTAVSVRQSATGSNAIADCGWNEECIRTAKTRMSEAWRHLTYALNPQSYTLGTFPPGSSTPWTYIGPFRGLHTTGVPLEHERDDTTTCREPPHPSSHVVGIRKNVGACETNTSCREPDVTFPHGKYIASAQITSHLPSSGQDGHTRAFDPYYDWQNYIHGQPLMSTCSLCRIHWISPLIRLRPLKRYRPWLLKLSAKQTRMPSSLTHCSATSTWTRSNSTDINSRMTSYTFTRALDANPGQPTKLTHIQTQHERPSPKQGGKTTPQKPTRTPATPKTPHTKPLETGTAPLTPPTAPQAAPSNIRPPPNRTIHN

SEQ ID NO: 963060 - protein, 258 aa, Homo sapiens
EAEDDTAHKSKEESTNTDSTQHITNEQGMKIRKKYKPQHNHEQRIVSIAATNKRNTKRQNELCSTEELDERHQSQEYKEITQKNTRQSNLNQNTTVTDSDIEKGGRRAHWSEERKAESSVQHEQRAGQENRLGRKKKAFKQSRNSRGRGGSSTRRTGLKDKDDEQNRGNVQVKGKVRRRVTRYNENNSNDLLTERQRDRGDKTGRRQRARRKTESTRRQRRKIGRDRGGKTKRGKPVAEKSRGAERAQRGKADAGAAR

SEQ ID NO: 963061 - protein, 294 aa, Homo sapiens
PARYVSLERRSFISVRLLSYLSACRHPMARFDWTWTMSPLQAPELSSTVCATNRPTKHYHFKVDELTDQLSTSYIFTEPRQLIRALCAHTACAMHHRSHTPEATLTLRKQPGPTSTANPPGPTSLHHLLLIRAPNGPNTPLGERHIETIKRPPNPKPGAPSYTGLLTRRNARASPSGGSPRWQANFYDWGPPSNPYTPITALGSTTPEPHLRKKRVPTNTELDRATRTLPGHRFTTPLSFHTVALSSCGNNSRGYLRPPIGLSGVRPHHTARLYPPPGIHSTRSSLHPLRVIGA

SEQ ID NO: 963062 - protein, 163 aa, Homo sapiens
MVVETLAQPGRSNTRTYPRPVTDTITRTRATNHKVPVPLRAHNKHSHCSPTTCKNTCSCTHATMTSNSRRRADKPGTNGSQTTELSCGLARRYDDLSSLTQRNAGSSIRSITRLRYRRNSRERKHEPNHSEDVSSQSSTHLKDDQSKEITSYEHVRYHIHMIT

SEQ ID NO: 963063 - protein, 249 aa, Homo sapiens
MRYVVSKIRDETRKYLCKVNVTLANHIAEQRESQLLRLLDESRAFEPAAQCAMLDRGAQMYLTGTFQPHEAQLTKPKPIVSSTHTLDLATKCAINLSEHRSQGGTLVPTTGMTHTSLPAEFPTVNPLEPERPQHKNSSTRWPHILQHTTTNHVLTRPKRPMDATHLAHRRTFGTPQLYPRTPAGHTWNRTNPRTPHGHYSHIAARTRLTRQHIQPLRLHTHAAGLTSSRWHLSTIHYTLSSHGTNHFAS

SEQ ID NO: 963064 - protein, 156 aa, Homo sapiens
MASVVPVTGQETSGGQTGDELPSWDLDAGLQVLSGISRSVSQRGHYRVLQQCTFNGARKGSISGNYHGCLGIATDGPLSITPYTHTEHSTMPRSRDSRQYLPSLERSDHNFLQALLQILTVNPIGALNGPIPRRSENHLISFKIPVYASEALPCST

SEQ ID NO: 963065 - protein, 57 aa, Homo sapiens
MLCGGEILRGGPSQRTYSAQKWCHPRKPPYNRRSSPANVTQRPRIAFTTRKRNTGVV

SEQ ID NO: 963066 - protein, 148 aa, Homo sapiens
GERQQPDGRVLMIRRQRPPSSGRQGVQHGVRYLKRIVEGILKLAFLTEQRLYNGLTTFLGLMGRDTWGEVWCFTQSNSTGHDGPMPTCGGVGPFPGAMYATFLRPLVAIGPGFFQAVPKSLPLICDLKGPQGLSGKARWPIETRRVPG

SEQ ID NO: 963067 - protein, 60 aa, Homo sapiens
MQDRRNTPPIRNRRLTETGAAPRPPENRQHTTLQHNGTVTSRATPDTTINKRRETAVTTH

SEQ ID NO: 963068 - protein, 399 aa, Homo sapiens
ISCLVLMFPRVSTVPTSSAPFPDQPIIVLMECHGDNHAADDYMLHQMIRASEHVTVTCMYQAAFDMALAPQNITIPKGKLYGAHNQCASCQPSNAYSQSVLKLEWQHFTRQTISSRPKHQLEPGNHYRTTQALEQGNQSNGAMHKSHIPRPQPPLTRNQPDEEAPHNSKDPCDDTQAFGDKHNHPMGPAASATAAYHGKIVASQTNRTNLDEPPLEVPWQNRGRAKDMANPRHGRAPRNVHSTPSNRTTAKHKSNTVTKTGRDSPRDAQAAPSRERPPHGANQPVHCQNEHPQPSSCHIKRHQVARASRTPHARSALRKRSTKGLGTTHHDTAAAHGRGKRNTTTPPGTSATRPNTTTHGQPTYTTATEKHTTDVQYHTTTPPTTDTNPHDRQRHSQHA

SEQ ID NO: 963069 - protein, 252 aa, Homo sapiens
MVTKLQLIIHSTSRSLQHSMTSPATQLAIPQMNRSSDHCAVLCTGTACKTHWHHPTTADLAHVYDLSHDTPLYTLTLRWAYALLALCTLHLTFTYNVPGSPYQQATPRPMDVNHTYVDHMAPYTQTHNTRTYNTYSPTPISNGYNSNSSQPSHTTPDHPHGSQQHYNQPINLPRDHTQPWPQHTSYLPQAHTATPQPTTTARFKTPATTEHHHARAAPNTTRRHRRPTTPAQGARPETAAHARRARARARPT

SEQ ID NO: 963070 - protein, 113 aa, Homo sapiens
MLRTLAGRSCSRLLLYSAWLSYLPSGIFPRSTGPIRIHTGLTCYNTGYMGVPLGTWHYLLGPSLNSTRWSAGTRALNGTPPTSIRLPKTKSHLTNSALPHPTQSHPGRAPPAH

SEQ ID NO: 963071 - protein, 274 aa, Homo sapiens
MIALIAGTGNESTAQRGSIVVPWMGHPKGSPISPFSQPPLSAIRAFCAFQASRPQVHGRWTYLSLHTNNTSPGAFCRTWQPYSSPAALHHIMLSIFNVRNYMRRVHMRIIVTIYPPVSPFPPCDTPFTQMRSPWTRSKESHKALGVERTNITCGDKGLTRWKPSPFTRGSFLYVAFYMVYSPEELYGPTPIGPQSEIPFLGDRERAPCGTETLGLAKVKHGCTFSRTTQESKATPNNLWVGLSQMEHGDQLFPHHRAGLWPLNTRANLGALNFG

SEQ ID NO: 963072 - protein, 225 aa, Homo sapiens
MTLKLPTLTYYSHLHTVTFILLFIISHFTITYITLAEHVDQLEHAYSQITCCARLYAGTYQDVYRRSPDLTLHHGCTWSDPTDHWLTTPTITSPLPLDHTNVGNYTETPTLTYGGQVHGYHTPSPTQAHGFKQHYTLVYGHIPFNFQSLHSLSLWALFTTPLLLNLHYPPNWDTVDTPPHGNYDNPYRGHSRVTPEENKLEETATKAYRTKKKQQINPKTHTGYH

SEQ ID NO: 963073 - protein, 104 aa, Homo sapiens
MAVVLCEACTIPYMTTMPCGTDDVHEYTYYNDMLGLKHVPTNVLTFYWNLNPLAHKRYHDSAKHTRPRLSLEDFTTMKPYRTHFLHKLTFARTLNNSNGIVPDP

SEQ ID NO: 963074 - protein, 107 aa, Homo sapiens
MCPRKSMIRSKYRAKVMATNTCAEHHLIRLSYLRAGWTGSESTLVSLHRDYKIDPELKGKWWDKYARRGVEEKFAGIGCNCRSPAVYETYDSTLEKIIYNWQFSMLL

SEQ ID NO: 963075 - protein, 217 aa, Homo sapiens
PPSQVRGYILVVRRFLSPSGKAQYLGRSDPIFQVPSVTPFFDSERELPDPLRFPSEAMPRPASARAWCSLPLTCAHCLALPSEMNPVPQLEMQKSPVFCVLTLGAVDRSCRQELFLYGHLGSSLTKLEGEHLEGLLIMSKGTGFAWRFITGQYPSLHDSPLWGTAPRDFNKPWQHQRMEPPSADFDHLAWLMRPDSQTHTAAFAAAHTALRYNAFNH

SEQ ID NO: 963076 - protein, 150 aa, Homo sapiens
MLFQTGQQLLTCGGLGSLRLYLTKTNTTTTPSSNANVTTHTLYDPPSLLLLTHALLSFSTLLSSNTRPTLPCVHSTRHTTPLSTHSCCFTSTAHTLTLRATPNPNLLYLWPQPILTNNPSLAYATHALLSSNSLSLSHLWHQRQRTTFSL

SEQ ID NO: 963077 - protein, 147 aa, Homo sapiens
MLYLAPSILCRLLGPFPVPDENLVILASQQRLVPAVSHRLPVAGDASLPDPGMTIAHLSSCVGLLGGLATASSSSSPILTPSCFGGLSLLYLAGLSEHACPLLAVRPGLPFLLCIALLSPPACSRHRLLRPSLSSCPSATVSSLPSR

SEQ ID NO: 963078 - protein, 191 aa, Homo sapiens
MASLRCDDAGASMTMCIKTYMRSGSCFKADAEHPTIVDCSPRPWDIRSPLTATTLLLMPRKYLYLTFVRKWARPFGDSSDIGKDNLNYKLCEREQAPLTIINYLMFENRAKYRSYQVVLANDRCSQPGPSLTRGGSGPLACDRWIHKHTQTHAPTVDHGPQTQAMRPVPLGGINLRLWDPRRDQESTRDTE

SEQ ID NO: 963079 - protein, 348 aa, Homo sapiens
ARLLAHNAGDLGLRLTRFSLLLKCSSRPTLVPDAVPMASSNTAARLRVWLALLHILLASTHGRNLTSSRPLLYLPDTDAPLALLAAHASTCCQPRPCTHQPPDPTWPQTAAICSLHSGPPANTLPPKPPTNSLRGAHHRILPLSAAERWTHPSPDLRPDQPQLAHAKLPGPATPQCPPIRAAYPAALLQLRTANSNLLLRSVGCASHTANWPTPKANNYPENRILSFASPWLNHALPHLRRTFALYCTRDNNAHQPKRRSILNPDPIIYHTLLERPRTPPTGPGRTRSRGNKSWREHTNGHSAAAIRQHTTLGNKSTHGSDTTPLHSPTDHPKPAIAPHAPAYLDQAH

SEQ ID NO: 963080 - protein, 327 aa, Homo sapiens
TARLPRLVHALCPERKRLARHAPQLETYTAPLNELRNRRNADQLRCRRAVPPTYNNAHLTLTLPQVLLSALPNPATAPSTLGFALALRAPPHLSLPANTPTFFLCFNTHLLKPHLLLRPYTTLHNTSARTLTTGHAWYPETHFSPHLIGSPTTQQLLLHHPPKTPTAPSSSRNANAHYNSWTPSPSPGAPHIYKLSHRTFFIPTLGLRFHAERLLKPSGKPPKPPSMAPSSTAPIPLQLAHAPQTPHRHAASPISSPWGHTYAPLTPNSPFKRTEHYCTHLRPLTHHRKPATSPNLATALAPSNRTHARTPGHTANFAQSTQLPLHI

SEQ ID NO: 963081 - protein, 320 aa, Homo sapiens
PQELKFLVIFARLEELEEGQKGARRRYSYAGALKMTERYDTYKAGQATDFIAATKAQTYANTELYSPESRMLDLNTHEAPPLSLDFCNNKLNMNRNEITSSWALAAMPRQPYQLLSTNGNNFILALKACTFKQPNDDHNWCSQRTTMTASTSHQTGTKHYNQLNLTLDLKTLLSQHPTTLPHLHCLHLLLCTLHPTSHQLPPNSTPLPSLPQHISQPCASHHCTLRTIRLPHSSFPPLPAPHPHFTASPSRFTPGRRTQRGLAAPSPPAPSLWSRVPPRPFLAALYIPWPVYCGHTEHLSAAPPPSLAPPPVAEPRSPWP

SEQ ID NO: 963082 - protein, 137 aa, Homo sapiens
LFIIDPNGVINAILSAQRLSQPGPKPWQRNPPLWLKAFQICRTHMAATSAQRNWHTAHFSLRLNATAPRLPSTTSYLFTQGSTLTLALTPLLLYCTLRQACRETNPTTLRTHSCPLLIQLFSQTHCALTLSYATVHR

SEQ ID NO: 963083 - protein, 257 aa, Homo sapiens
PFECSICGKSFRCRSTLDTHQSNSHWLKGLMSASELWRHTSLAHKLNIILTTIGANSLSDDKVFAAASELCAELFSSNIPYLIRSPNKFTSEGKELTNCTQMWRTFFTATVSDTPLAHAAAVHYWQTNALLQLHADMLGTALIALHTLSPHLTHRENFTSGAADPYSRAPALLAPPLLYPPPFSLSLQLSALAPPPAFKHLSLLPQTARPPSPPPFSSAFRTVDLRYPLPSSCSSFSFPILYPPTPAHAPSPAPPPP

SEQ ID NO: 963084 - protein, 393 aa, Homo sapiens
DQRSFLNPCYCSLLTGIHRTLLIRKRLRQLTASSPAPHVAFCSGALTAPQLSRAAARTPHSRHHCSISDALLRHTPAAASLTTPPLDSPPLHWPRNCLLAHLALSSSAWIPPISTSLSSHAALYFLIYTLDPLGLPTTPDTHQRHFQRNTQFYPAHSTPTASTPARPPLTLPLAHTFHFFQPAHPTVSFLVLPTAPPHSTLSSTTCLRTLLNLLHNTRTQLPLHPTYNTLSTPYSTTPPPHPHTFNTPYLQTHHNPTHTSYTTAHTPHRGAQPTYITPPHPTTPHTPGPTPAHPNAHDTPTPCPHTLATPTPVTTSRHNHPTQPLTPHNSHTTTRAEPHRRHPPEHAHPTTPHPQRTSTPAPPPTRHPRRHTHDTPTTHHPRRPPHTHHHLTH

SEQ ID NO: 963085 - protein, 344 aa, Homo sapiens
MEAQTHSGRLPASNGCNTLLQQLLASNATTATPKHTQTHNSTDCPALLTAYLNLSSYTYKRTGSLLPLLLLPHSTSLATLSDPTSSSQDPHNSSLRTTSLYCLPGTPTTSPSSEPSHPSCTGTPSNPLPHATRLSGTTPLRKQLPLATLLLTYTSPSPNLHLQHPTARHTTHSPPHLAHTTNPLSLHHTCSNTPHFLARQPHRLFPLTHNSASLSQALTPHTRPPSHHSLPPSTSFPFPFLLPLSPDPTHPSTPSCPRRTPRPHSTSPSPLAPPRAAALPLLSPTFALPFSSRPLTRSSSPPISHPRPVALTTPSSRDPSPLASRPPRSGALSPRASRPLVARP

SEQ ID NO: 963086 - protein, 442 aa, Homo sapiens
MKKDNKRSRRRYSLAGALQRLTEDTDTLHRLDTALTSTSGHHRHKLTETQNYYSPATAEQLLDPTNTPRKPPSASALSTLANTHKHLHYCNRAHNTNFSQLRTGWTAPGMALNLRLLYAKHTAPNNIPLLRHSTTLCYPFTRTPSTHRLLHWNCSQTRTHTYLQTPFSPPSPHPHANGHHTPLTHRHFTPFSYALAHVIRIPLAPSTLLPQPTPFSVPSKWRSHSLRSLSPLSHTTSIRTHNLGRSRSLTLPLFSHGLSPLTPHSLPSALAYCSRSLDSPAGAHPLSGSHATLTSLAQRLTHWALPTAPILPSPSPPQRPHTPRRLLACHPLCPACPLTPAIATSPLPLAHHRRPRFAPHSPTPPRMNTHRRNSATPRNDLHRTLPQRSHTHRTGQHPPPHGTHTRARTPARPHRHTAQPTALPTHTRPTTSRAEHQRHTSH

SEQ ID NO: 963087 - protein, 84 aa, Homo sapiens
MGRHGYLLHMSSKLACDGVGNVHLSYIFDDELSSRGEYEGDPGRYSLVDAEVDIGCGERGPFAPGELHFVAGGAGVCKPAQRRR

SEQ ID NO: 963088 - protein, 109 aa, Homo sapiens
MHSSLGNKKKKKKKPKKLVARAGLWAYRKKLSRKPTPVGPAGRQVVGYTSGHGGPNGSLPKETLRGARDPRGGGESFTPNIKHRRGGHPERVRGSTLPKGAVREGTQAG

SEQ ID NO: 963089 - protein, 374 aa, Homo sapiens
ALGHSASVHGCLLLSLLMDARLLIIARNSACSWHGLVFQNTEDVRNSSKPSLGPERSFSTLRQSRRPYHSTSGSRPGRWTGTADIHTRSALTQPPIYDTANRTMLDQIYTDYTHEARHASATQVRTNHNALKTQTTTISSWDIPSPRSIVLPMTLFHDSPRIRDVTHLAKPHSRHPHIGISRQGPEEQLDLAPTAAKTPVSNPLSQSHPALQAIPRHQLWWPWHTTPTYSYTQPSHPQNAHQDDPLKANGPHTYHHHGRTRPTHTTPHSTGHRWAGNSLTPGTIPPQDRNHPEQGSHRTDCTGADTTEGDPAKAMIHNALTRQRCNWGAPNGYQHRTQEGGTTPHRPANPASDTRNAIVSTPLPGQHNHNTVAA

SEQ ID NO: 963090 - protein, 145 aa, Homo sapiens
TSGPISGWASSILVTLMSGLADCTTDAGHGSGVRGETAACPSSHRGRERRDFDGALAFCGTKDFDQDSQYALLQGLLTSWTLDEWLIIRGTKQQRAAGQDAISSGNCGSGHTSLLTFPPALCAAKHRMHWNDDPVGFQTNLFTSR

SEQ ID NO: 963091 - protein, 133 aa, Homo sapiens
MPRLALSKPPATTHTTADAFAATLIYARAGLSHATTDSTTPSPGTDSRYLAHTHALDHPHNLLHALQLDPDPLTTAHPTTHNQPDRPNPGPDPISHSALTHSPRTHRHGPLQTRPSPDSPPPSSLGHPTKNHR

SEQ ID NO: 963092 - protein, 400 aa, Homo sapiens
LRKPDFARTRAPRFAFPPQPCPDNTRLLADALDDTLRTKLEHLNDSTEHAQQTTSTCLSTRQPTRNQDERTATANSLNARRAPAQLLPPAHTSHHSPLCALSFISYTLSLPLAPALYTLPWLHATATHRDAARATSTRPLQPHAEPQWADPLGPTTFPNPTPTTQQALTPVPHTRNTGPGPPPLGRTSRPTTLPLVSPNASPNPTPRRAPRSPNAGAHNRRHTHAKHATYSGPPRHTRRTPEPPAGTPRTNAPWNGDQPCDEHTPRSHRRSAPPPVGRPTPDTPTPPPAPASRYNRHGTNDHHPPHYTRALCAAPPPNTARRTDSDHTADEGDQNVRTTSAPFTHPGRSKHGLTLITTPPTDTKHELGTAPQPDVPTPAYRPHRTRTPTPPENDSGPQDD

SEQ ID NO: 963093 - protein, 459 aa, Homo sapiens
LCIALVRHPGYLLSADTRPAEESSAPHRHVARRTQRPQAQELTDLSTHSALHYSNSLQPRCAGASALRSHAALPASTRTLPHAHYYPPLAYNPYTCTHAHTVLTPHKAAIGSNLHGHALTHSPALSAPRANTHTPHPDTPRHHPPLPPSLWPKTGKRTGHAASARSAPRCSPTRTPTYRAERAAPYPGPHTRAHPWPYPLIHPIPKAQLFRGIYLLYNHAASHATLPTCPFNISYAQTSLWSPPSLGAFSPSTEGKHTLGHPLTLKPRRFTSRSLLSHPLSFSVVSKFSFPAHHFITQHQSIPRIIKRPAYPTLSYPRYQPYGAYNYTWRGPPTHTAPTLPSGPTSLTNHTTINPTLRHPHRPAMTPPHIAGAANQWLPRAKTRRHRHTHRPPPPATAAAPRQPQTTTTHPPGRTLMDSRHHTSSPPPEYCSHPQPLTHTRPTCRYKNADPPPSPTTAR

SEQ ID NO: 963094 - protein, 404 aa, Homo sapiens
MACGFSPRYCLPAFQSVESSTQKHLHHINYLAASNFPNNRSKLAWLFSISVDFLLLRHNKTHDPFKQPSTISTASNAHTQTSPSTNAYTMLHHTLAAAATSSSPSAPTATWYNSLNTITTQQQSSSPHPQATSLPNPNQRSPLPTHWASDTPSMRHFNPPGLAERILQNPSVGHPFSPHRGQQRTQQTLAGALRNRLLRGQVPNPDNSCVRTPTNPPALPPTRLRGAPPAMLGRPLSSTPARSQLPRATTLSPPIHGPKQLRFLTHATSTCFQAAHQFANAFRTQEENLPPGVNAFGGRNLGQGPPGQAPRGGLHTHPWGGKHAAPFTPGPRVNPRGPYTDARTQLTPGATMPPQHDPPHKTSPHFPIPSQANPTAHTLHQPQAHFPAPPHSQHSTQPSRTSDS

SEQ ID NO: 963095 - protein, 382 aa, Homo sapiens
  misc_feature (204)..(204): Xaa can be any naturally occurring amino acid
MAIFGPTIALPMDLINTHLKHDCILHTGCSLLHRSQRSKGNFTSSKHYAYTRRSLHMHQKPQLEPCVYCCYRHHTLTTLTPHTLSSTSLSSPVSHIDCIDNDIKALLSTKWQKLSYTPRLHGTRLHAPLCDQATHMRLGLTTPRLVSTLAHFSHNGLPHLSDLHSPQLPPQPGPLTLDTRFNLSRTHHLGMAPWAVCNPHTKGXPITRPPRDHNLHTWQPTGIPSTTSTTPGNSQNNTAQTHTGSLPPPNTAAPTNPSTQHRNIDPMGHNNAPKTNTPTPLGTILCSTSTDNPWESTPLPRTSHTSQHLQHRQDPRHRHEQQNPTFAQSADTQRGLTEANIYHPWADTSAAATPYTRTLPTTHHRRNVATHNKPTLAAPRSA

SEQ ID NO: 963096 - protein, 310 aa, Homo sapiens
TSFFTGSTSHVNTCVWLTHSTQTMGPRPAAARRCSYSCCPHRLHSYKYAAGVRNPQQHLTAQPQAYNCTSLLLHVHGSGTFGLLPRSAICPSSRAHSQLSAVNAPVSPTLFKPTATLSLCMAHTLHMRHGRSCRLAYLAETLCLSASPLSRPLPSVLSCAPPARSLCLSLPSSHDSLSEALLSTHPHAIHHLSYLASFPNLVPLRLASTVTHASRTPLHAFTLAPSPLSSTQFCHQPSNSLHSRTHYKTRDASTTHPHPACTTGRTATAADHPTNKRVPLSPEPLTPTIERTPQQRHPRHPYTPSDRPKR

SEQ ID NO: 963097 - protein, 159 aa, Homo sapiens
KAPRVKAKIMLKVPMVPTTPEADNDLPGRRNNYWFTSSISSLNCSDGCDQYFLPFELADSNLRLMSRYWLVLSHSRLLTRRLPKAQPSMASIGLVSYCNDALSCNHDTIRGKSTGEKLSSTLCNTHWATSVQEDHGYYFVVCTLDGTRNKFRLGPITFC

SEQ ID NO: 963098 - protein, 122 aa, Homo sapiens
KKKEKSPPRPPRKKGGERFFCFVWGENPLGVFHLSLISEKLGVGQKVRWRKKRMLREQSAGHSRTGKQTRGNNGRLAPLRTKELYDERENIWVQPKKKPLKRSPPPAVLLLFRPQFFVGGAL

SEQ ID NO: 963099 - protein, 391 aa, Homo sapiens
RRPHRPHLRDTGLSAQRLGITPGLGAAQVLEQLGATGIRSAPAPTRHPQESPRPARGRTHLTACILSQTHASPAQKQHQAPMRQTPMPLDPTRPQHAPGPTRTTDAPTHPGINSPASRTTPATPPPLPTTTPPPHTLHTPPTPQRHKRTGTPHHSHHTNTGRPQLTPAPQHMPHTTRTPPTTHPPQPTTNSPGTPPPAGHTTARHIAPLARHPATHSTHRLHSTQHTPQTTRPNTDNTRRMLHTPTTLAPTPTYAPSRAPPRQHLQAATTSTRHNLRSRPDPDTRRHAETDESSPPTTRATPTPPPPTHTTTGQPKHPNQYTPQSSQTPGTPPDTPAAPRHRRPGHCAPHPANHPHADRPDSPHATTSTNTRPNNTETPSTPRPHTTPTTG

SEQ ID NO: 963100 - protein, 410 aa, Homo sapiens
CYMASAALNMCVNRFMHHTCPRIAMTLGTPAWGHVYQLTWQSTSSINSLQTHSLSSRLSGKSVNSSLHSTPHANPATPRTQVSTRAHARLSPLGTQKTGATALRLLLDALRTTPSSCSTKRTPRLDLGTATHVIAHGPQLATLLAYRTYTLPRTCTPGPATATRSHADHTLGTPHGNWHRATASGHSNAHHAAGTATWPPDDRGQHRPPANPWATHVAPHPTPRPTQTTAGTNPSPHPDNSFTAPPARSNGPVRTTTHHQSPVKQPPTPPPTLWAATQRNTPMPAGQAPRSRSLRQVAVHDRLGPSPPYGAHTSPTTRSRAHSPSLRQPTHSRPTHTRHPHTDPVGHPTSPAPLCAPPPPLPLNAASPARRTSPLPYPAPSPAAPPQLRSYCPRTASRCHTSPPPPGGPT

SEQ ID NO: 963101 - protein, 113 aa, Homo sapiens
NGGTSGAYYRKCRRESWRPDGIELGESSIWQQTVHIISVCKIGYHVMTWVHDVCTCTCVCEHISTTVTLGVRLDVKGVDANSLKDAFAHCVREYYRGFAMSAYSYGTCLLLPR

SEQ ID NO: 963102 - protein, 334 aa, Homo sapiens
MKDNKTNGTTQDAIEQGCLVEAKALYNHIKLIPRYPSGTEFSTDGHTSLHHHSTRKLPLLLLNLALYRQMPTQRAHCTASSSHYHAHCTSALSFLLTPAALPAKPHAPKLHVTTTSTPWTRSRKHRMHSQQLPTSILELLASQAPTKPTPTATTWPSPPHPGTLTPTPHLNNAKPQAPQPQHRPTPLHSTLHTDPASHHPRTRTRNSYTHYSTPPTRPHHRGHDHARHLSTPPATYPNTGPPLRTTPTDNAPPALHPNTTATRWAHKQINRGPLNVAIPQRKPYAPRFTKAPNHHMQPPPRPVPHRGAHPPPPGTQTKTTTALPHHPKKPTSSS

SEQ ID NO: 963103 - protein, 132 aa, Homo sapiens
GPVRQLLLSGCTTEGILCETHPLLHIAEHINTYTDHTSPGIYTHQHMEHEPHMASRRGPMLPTSPYLPRILLPQDARPTPSAFLRHIPSYTINKTNSNTHAEQGIQEPHKGRDRDHKTTHPHIPRDKSNREP

SEQ ID NO: 963104 - protein, 101 aa, Homo sapiens
GEAGAVILLKCDEDVAITRGPVTVSLNEHNRAIARSGNRSNSKCRTIHGIWPGLFTNTPGINSCKTVSDQNTITAANDIGKHTQTSIDVYKTTGAQQKQAN

SEQ ID NO: 963105 - protein, 343 aa, Homo sapiens
RRPDFARYSVRHRFAFSSATMSDKPDMAEIENIRITVAHTARTAQQHASSKKSTAFPTHNDGTQAEASQAHSSLQAMRPDTPMQLITVSQQRHSAHIIYLLALRIIDLVLNHIANRHAPTQGCGTHTFIPVQLVAGPPWFHQSNETITCTNAHRDRRHLDHMIHNRGSYSYSGLGQGTRKRNHLSTGYGVHPDRTRGELGPRPKGGTGDRTRMTTVLQDLQHPNRWEPHRGGPLARAGTSGTDKHYTDVATVISKQHGTHTFDILTRRLAAPCAQQKQLKKQAHNTQHTCNTDTHKNTKAQQQQNKTRTTHTTHTRSNQPKSHTSNPTRKSKSREPAKKHRDS

SEQ ID NO: 963106 - protein, 158 aa, Homo sapiens
MVKKLMKTIQKKFTMYFVSCLRIPLVAVDEIAEDNDVMFLEMSCMHEVGSNLTQCKSGFWFLAYTLQFTVCGLYFGNPKELIPKVNIQEEPWHFGTESTTYTIEQEVKDTYTRPTNRSAGQSSPQHVAQLQGLSVKQHWPLLADTNNLKQMHIKICCQ

SEQ ID NO: 963107 - protein, 95 aa, Homo sapiens
LSGCGGRVSETGSAGSMADRLTEEQMVRIQMKRFFTYLTKMVSGSYNQQEEVGSCEIEISWAVIPQKQELQDMINEVDADGNGTMTCPEFLIMNG

SEQ ID NO: 963108 - protein, 260 aa, Homo sapiens
EWLRRVSVTEVADSVWPALGTRQDWGLHSLVAFRRLLLLYDTVETMGKDYSHQTFRFYDTGVTQKYIEILHCMTGIPVAIFITLVNVFIGQAESRQNFQQAMYQNTWELLKASHITLDCTVIFYDSPERYMTEHMDVLQIEAAKAELYGYRSDRAKIDACAEEIGPRSTYHEDQLDKLTPIETKHPKQQIPGPIRHLNPRLHVTHQQLDNQIPNYNLEKANEHTHEHGMRHKERTDREQRESPHQTGNDTKEQQAPTHTS

SEQ ID NO: 963109 - protein, 82 aa, Homo sapiens
GAVGRLLRASVARHSYVAIPCGHFLPLAGPQCHCLHVGKNTKHLTTHINYVVHSVSNVKANNYFMQPSSLNAIATLLVQPDN

SEQ ID NO: 963110 - protein, 169 aa, Homo sapiens
GVLSPGNRAMTEADVNPKATPLRCPPHQEANGPRQQSCTYKQLRKGANEATKTLKRGISESIVIGCRRRAHWRSFCTCRLLCDDQECALRVSALQAGPWGEPEWGLQALSSPVLVTIKEGSQLETADPIQFSSPFERALSLNLFASCNGCSLPVSPPCEGGVASYPLVC

SEQ ID NO: 963111 - protein, 69 aa, Homo sapiens
LLTPAGPQAACGGTPRGDSSKGEDKQDRTMETKEALQQGCTSKITSHFDQEQLQEHLQPYGMSIDNGVS

SEQ ID NO: 963112 - protein, 210 aa, Homo sapiens
  misc_feature (148)..(148): Xaa can be any naturally occurring amino acid
MAVGLLPFRFPPPGKALLLCGSAGEERVCGIVEPGRKNQRLQERGAPVLGPLPIPGFAGERPLGSFRDIGAEQAGVLLGARLGAPWWESFASPKVGKTNTIPLHYTRSNHCVVAAPYRTDEKCLVRTTIPWCGARGAQKVEIGQRGHXLFPPKEHLRVSTRAGLCFHTHRKTAGGQREVLVENNSIVGFEGTYGIYTGSQGPDEIRTACR

SEQ ID NO: 963113 - protein, 104 aa, Homo sapiens
MAHKKTHAYSRIVNLHSGRITVAYLERCFQEHRTNPLDEWPCDMQATIAAYTLPRSHHNLVVQSDRLHRTMCTLDEKSRNNEDLASVIVMCAGWLIVRSVAFMV

SEQ ID NO: 963114 - protein, 310 aa, Homo sapiens
TGGGTGLLFLLLGSPDGVSLCQTRMDLISRPRDPPASAPKVLGLQAEPPHQAYCFDFKNEEISLSETESLKPRLNSYTSCAPGHSQSYSLQLSNTYLTMTKLVTSAALPKPGYIQNLRPFPKLQMLLASIPDPNLAHNMGSTLTPANWPDDRYPCASPPYCHKSFSSPNCIAHDTTSTPDITTSTLTTKGFSANYPTTPARTIFPQQSTTAQGKYLRNQMTDYNVYARQQENLTPGQQHSKTSCPSLAVPSTRGLLNHSYRPCPPPSQIKTYILPLIYHRLTSPHTPFTPYYHTLPLPSTLNHHFAPNRL

SEQ ID NO: 963115 - protein, 143 aa, Homo sapiens
PSEPGVGYSLVVRRFLSRSEKRNIRVGVTDFPGASVTPFFDSERELPDPLRFPGEAMPRPASARARCAHPLACAHCLALPSEMNPVPQMEIAEITPSSASLTLGAVEPEAVPIRPSWLLQNKPIFWRKYNLLKTMMDNFFGRI

SEQ ID NO: 963116 - protein, 177 aa, Homo sapiens
MVFNHSTKERAASRVGKQRGEKSKNLFKEYPRFLRGILTPCRQPLQTLFVECPLWDLLALSCASPAHGTVFRRYDTFGGRTVGFLPEICHHLIAPLELQCFTLKWTHSCALSVKPPPVWSPACCMLSRLHGEFQTAISPMILNFCRTAFTWQRNASFVTSPLVRASGRTRAWDPPAL

SEQ ID NO: 963117 - protein, 119 aa, Homo sapiens
MASKGLQDLEATRWRGPSKEAVSADRSGKLQETWLTKANRRRGTRQGLLCTQAWAQRTNPGNNPIGTKALLPQGLQEEPYHQANWARPKNIFGASLYRKISQQHKGEKHHWAISGHQST

SEQ ID NO: 963118 - protein, 234 aa, Homo sapiens
MTEARRWSKGSILRDRCWRHLKGTLIQGKACWGIFRLPGGCNPCRGEWHSPTRFSLECKPHPVRALEGDFDNTYPVCRTRKALPLVGVELPPQLFGSKTLLKFAARANERLSFTHNGPEDHGGNTLGRIVTFERPPKPGSKCSKTIMNNGRSAGLNDWWNHVGKFQEPGTYKLVLVQDCLPEVKLAGYCPEIPGIMGDAAEFPVQTTDVEFPAGAHLEWHLIAPTLVHRGSSPR

SEQ ID NO: 963119 - protein, 127 aa, Homo sapiens
VVVSVVAGCWLSNSQDAADICWLFVRMWAEDDKHLLPAGHFKNNVPEKQQTVPARLMHIPLYLKAWVADAPPLYKSHHDSYSCVNSIMPYMTLLSLHFPKKPGCDLSSPSPAIACVQFPSALYGPVI

SEQ ID NO: 963120 - protein, 252 aa, Homo sapiens
MPSEDRANLEVQTTSLRSSNYVMIIRNVSLWEQTIVGSKQNAADPAMSLRGKACGADGQRNTMMRRGHPEAHPWEKQTQPLGRNSWLASLSGGHLWALVVFHPRGTGPSLEDSGHIVVAAPLSVPACLPCAWCAICPLLLKRSLVPAPRKHVVSWPGERTLPFFPEGLLSVIPPTKKILPGAPPIWKHPLQSGLLPACIQGLCGRQHVVAAQRNAQGCWTTIASNILPPFLLVGLAPPSTGWSDNWGGILQL

SEQ ID NO: 963121 - protein, 326 aa, Homo sapiens
MVNFGRRYRALANVLASLWALGYSWPMDMAEQPLYKSIYTTGRNLPGPLHNLTYVGWTEWFTTGLAWDLTNFPHGPPGRRLPYLAGPFQAAGLRKLGNVKKPFLSIKRTLGFLMQFKPGLITAPISGDPFEHTNTFHTGYKGQPNRWGRPPETEPRKGSNPKTQCPINLGEGRTGNIWFPNGALGKLPRIYVARRHQSGDNLGAICRHNIEASHVGSHTSVYSLPFSHWNQGPSFSIIVALPQRPRGTGAYGPPNGFVWLIATVVVAGQGLNRPSFPNWDGGMKRPNPTPITYGGLGQIAGQITTQYYQPLWYPPVWDRFRPSGTT

SEQ ID NO: 963122 - protein, 110 aa, Homo sapiens
MRISSHYKVHAPAGILLPTKHYPGVAVIRPVTSVGTRNGPGAEEIVRGVPWAVSRFGFRAAGFARYVVPVACAALGRVLLHVIVPAVCVRVRLSFSRSRRSASQSCHRRP

SEQ ID NO: 963123 - protein, 131 aa, Homo sapiens
MGAWLSWVSMPMRFVVCNPRSDEKLSASSTVVEGTVSWAFSDTESGRWPLRCPRRDGGVSVLYRRSRGLACTRAHRDSRVEGLLWSVRVACVAACGHLVARVGLNMELPSFMRVLMTLVPGVEGPDYDWPL

SEQ ID NO: 963124 - protein, 142 aa, Homo sapiens
GPSVGSLVGPRVVVLQFTRLRLRVVQTRGTGVFPWPAEGGLGLRRISVCPLTPSGFANSVGKENLGWIGGGRLGSPCGTRTFALCLTITFFRDKRGTKVFPPRRRGYCGPQPRLGFGRQPHLLAPRELTRKGLWHIGTTRQR

SEQ ID NO: 963125 - protein, 289 aa, Homo sapiens
MDDDIAALVVDDGSGMCKAGFAGDDAPRAVFPSIVGRPRAPGRDLVGMASVRIPMCGDEAQRQERHPHPEVPHLSTGNRQPNVGRLVEKIWHHRLLQVMLRVAPEEQPRAVLTEAPLNPKANPGEDDPLIMFEDLQHPECMYVAIQAVLIPVTPLAVPLASCMDSGDGSPHVPYLRGCMPSPSAILGLGLLGRDLLTELMKISPSAVQVSQHGEREIVRDLQGSCCYVGLEFGQEMARVVQLLPGKSPVLEGSVPLAYAGPARGGFNLLLGEAVGPTNSSPDVWVPRLF

SEQ ID NO: 963126 - protein, 382 aa, Homo sapiens
PRVLSPSPRPPPPPAPFPPRGGGAPPHVCGAAGGCGRVSHTARASAPGVHYNGVLHDGARAGGEGCFPLPRPGVGPVCAFLRGGHTHLAAGVSPRGGALSRPRGGLLPPVFSHTCVLLFSHRARGAHTGGASTLCLNIYHAGVVSPTLHTSTTYISSHSPRALVTLTPPRVCGDRGGDSSRAHMCDIPRIYTARRGGPCGTHRAGGRAPIIPPPRVCHSYLTRVVLCGATPFFIIILVPHCVWFVPPTTYFLWAPTSPLCALPLSLRDDVRPPTVGPAGASYRRRGGAQPPFCGVLWCASGGAPLYILARVIPPTPLVVWGGAPYPMRVVAPPLLVFLLSSGTFVAHLHGGATTSQATTFPAGDVPLILREDTPCETTTETE

SEQ ID NO: 963127 - protein, 132 aa, Homo sapiens
KPRWRIGVSRLQCWLPYQYLSGVVLEGRKRGCWKTPSPPVMARGIGMFEGYNSTMKDFCDAIRLDSLLKGWANGPWVRNGEFGFNLVNYPGRVPNMALPQRSKHSSFQQWVVDQKPFTVYGSLGWATELVTY

SEQ ID NO: 963128 - protein, 277 aa, Homo sapiens
  misc_feature (5)..(5): Xaa can be any naturally occurring amino acid
  misc_feature (78)..(78): Xaa can be any naturally occurring amino acid
  misc_feature (82)..(82): Xaa can be any naturally occurring amino acid
  misc_feature (86)..(86): Xaa can be any naturally occurring amino acid
  misc_feature (101)..(101): Xaa can be any naturally occurring amino acid
  misc_feature (114)..(114): Xaa can be any naturally occurring amino acid
  misc_feature (200)..(200): Xaa can be any naturally occurring amino acid
  misc_feature (212)..(213): Xaa can be any naturally occurring amino acid
  misc_feature (234)..(234): Xaa can be any naturally occurring amino acid
NGGQXTTLRLGKRGRVFKTQKLITTCLSRWLQKEMKKVSCCVIDMSGLREKDDIQRAECMLQQAERLGCRQFVTATDXVSEXNPKXELGLLIGKPLFNRIXAALLTNQKEPGHXDWGCSLKRENETKKRTFRKLDRDSPGCKRLELNHFVPVDLYRCPLVSRSSSYEKIKRSLLTWNRGKLNRRYPRTGERNYEESFENXVTTPVAIGGRHXXRSSPLVWHPAGARSSDEARTXLLSTGLEFGELMQTGIHWRYPPKKLVVGQKVHDDLIVNWVMNI

SEQ ID NO: 963129 - protein, 144 aa, Homo sapiens
SLEGLGAEFRKIPTSMKAKRSHQAIIMSTSLRVSPSIQWLPLSTQPLVRKPWATSCENTDQRYHLEGLFRNSWSTKKRQEAESQSHFGHRSGLWQEKSAVPVMGLERTRTKDKLFQFREHWRKYPIKFTDREEEWIRTLSKKWT

SEQ ID NO: 963130 - protein, 278 aa, Homo sapiens
MARYVLAELHGCPEEVSCGRVPPSGWQDLNLAGWEQACQCDDKRGNRGSRSVDWAWSRRESAMSGPGRRTSPSPWGVMSRHSTIVEAAWARRLVVPRAGASQVVPLVRPWDLGSRSDCLCVGALAASRFGRPLRALPESHHVRCEHAALPSLRDPSETMRPMWRRNLLRKGPQACGTLRFAASQGDKTESLGRAVCSSHVVDPEGHVAGSISRSPGGAHYGEADLGCGLIETLDERSFKPRLLHQDIHTKCPPCMELVINSPSMGELKRFQREPPGDT

SEQ ID NO: 963131 - protein, 231 aa, Homo sapiens
MAPRTSSAALVEPWPYRDLVPAPTPYRVFLHAPCPGPAAESPCFIAVGYVDDTQFVRFWQRRREYMDGDACAAPCCVLLGRVGRELFGYLVETLIVHSPRHMTVPVVQPVERFALYYRIGWMRKAVVFTRLQVGCIGLRTLGARRAAIAPARYDLMFVLIERRIDYVSALTMDLRLLWIAADTAAQITAAQFGCGRAGVAAEESTLEGRLCVGVRSCDPLENGNEDAVSGA

SEQ ID NO: 963132 - protein, 102 aa, Homo sapiens
VPYAKDSRSSTKREDASCCERMKDKRARLPRILKENNRSCVIKNIRKVGLMSGRIAIEQKKIALFHEDNCSSRFGAGGNPFTWEVVCTNMSLQENCMNEIPI

SEQ ID NO: 963133 - protein, 248 aa, Homo sapiens
  misc_feature (4)..(6): Xaa can be any naturally occurring amino acid
  misc_feature (144)..(144): Xaa can be any naturally occurring amino acid
DEEXXXLRLGTEAGGGTRGLADDRPEKLHVELTETVLDMMARYVFSNFTAVPKRSPVGEFLLAGGRTKTWLVGNKLVSVTSSVGTGTPVVDYGLEPRGSLSVRRRSASLQPRGAMCRQTMGGCRARLVVPALGQPGVPWWPGIXVRSDVVGGAMGSSRFGALELCLGSSQFAVACASFSRTTGLHQCAKSEKASAGTRVPVQEKTNLVGYVPLLTRGWAGILVREGPGNAMVCDEPWMKPLSPLSSDI

SEQ ID NO: 963134 - protein, 215 aa, Homo sapiens
IVPFVNTRSERYIILLVQYLTVLRTKLKKEIPPVVKKLHLKRGSGVGVLKGISTLAPRSSQQSLMGSKEIEKIMGKMYTGAQGKMLNFTDEEKVPRKWASKGELVGRGVGLMGWRRKAPEWIANRGGGPLDAPMVLFQVGGHTGERRLQRIYQCAEAIRTGDDPVGKTPNVEAPRGGTLPNGRRTAPEMSAYQGGRHGAGWHWPPKALGATQRRE

SEQ ID NO: 963135 - protein, 115 aa, Homo sapiens
MRWMYPTECECLKLTKICLMMSLPIRLRRHYNNFMEYWVALYSTSVHDDFAFYDPLRSRTPFIVRFTFGMTSVVLGMSACRPVLTPPNSFALFPSNSYKSCSSKIFFQASVPLNG

SEQ ID NO: 963136 - protein, 274 aa, Homo sapiens
MEDLPRKRDAVSSGAWVPGLQCPTSFTTPLGSLAIWMLRFPVGLRLRWLVVKERKGLSEGCATSLPGGFQLLRGHHAVPISTCLQAAVAWVPMSSCLLGSRGSGFRAPPRNVQSSRLVLILFPGTPPCLSWGILLLPVWGAHSCWSNRYGNDTCNYGMAPEIHKMVRQLFLCPVNPQFQVTYLLMSGGALYMQQCPRWQTCRVLALVVPAGSGHRSVFPPGVGRAALGGLQHVTMRGPLSTRPLFGANPNGGHFLPCVSRGKALLRETSSVFLL

SEQ ID NO: 963137 - protein, 202 aa, Homo sapiens
SRLGRGWVLGEGPESLAATRAASYITPREEPSCAAAQSPSPQHEQRGETQQPPRHPGRPRPQRRDTKPGHYWADGAVDAVARGGASHSCGALPAWHTDRSVSSAKRYRATRLKHGFNVLTETRLLRFSPTRDFDHRRGKHCIRVPANGRLADLLVAHDCYSAPQSKCYPFRTRLVQGEDLARKHLVESVSGLVRFGIVRTKR

SEQ ID NO: 963138 - protein, 49 aa, Homo sapiens
MPNLSNSLLIQHWNKACPVATGLNRSFVPVCSPLPSRLSASFYGTRREQ

SEQ ID NO: 963139 - protein, 313 aa, Homo sapiens
WLDQAGVAESGPESLAGHRARLVTITPREERSSAAGPVTITATIAARRDPAAARRPPRPPRPRTKPGLGSGQERCPGGLTSAAPAGGHTKVIATEGLGNSHTGSLNGNRDMVHSQGLNPKEDVFCPPKTCPYKKITPSESYLSPRCYGSIGRSHLVAGFGMLRSHGAATCGLAGRAAKLVYRRSWGGLFPTVSTAHAYILQPVTGNPFISTRLSHVRRGFLPRNYPAKLPRHRSSRWGHRGQRADSDRGAPRKGQGAQTNGRALPAGRKGSPAFRTICGRTPYGAVRPNRFSTLPVPGGTVDCPGADNPVLRR

SEQ ID NO: 963140 - protein, 279 aa, Homo sapiens
GARVAAERTSRALKTMLQEAQVFEDCFYGSCLRNQGRVKRVSHKNSKKAKSTKKAKPQVPCGAVCDNNYLKGTCSIIDYSTYTLSLDLKLGILKNSGMPSSPSSGGGGHPRQLRPLRLWKEMNLSTVFTASCRCKNLKFHLQGGHEKKKKISTHKNIVGGRASAAQEKFFKPPLVWGGRRPNIVMNPGAKRGAQREIRGQQIGGGFPPNKKKARGHRGFWDPLPRGSGAPGFTTGQELEYAPPHQGKPRTPHTKNKRSDQHTSAHQTKNKHDRTTQEDS

SEQ ID NO: 963141 - protein, 271 aa, Homo sapiens
MALKDYALEKEKVQKFLQEFYQDDELGKKQFSFGTQFGSGWVHPGTRVGSLYVGPEDDVSRRMTPEGWGGLNFVRNARRYAEALLADALQGACCLKYKGEGEWVNKGLSLDVYNLSIGYMMEQRSRDPGDGPSPQNQYPAELMRRFELIFKGPSSNKPRVDPGKCGLTLVGKLVTVRESSLVSLKSNPRWWWPLTLCDQCGAETYQPIQSPTFMRSDHVPQPGSANTNLVREGRLYLQTRGSRIPPRSGDFRFADLVVGPWGNSAVVYRAG

SEQ ID NO: 963142 - protein, 229 aa, Homo sapiens
RLGVISLVLKAVVRGCAHSHVKRYASIRSAGGSQLAAGDSPGSSGGPEVARGGSEASPGARRVAPRSAVRAMSLICSISNEVPEHPMCIPCLYIMFMSGGSSRKYIAEKWVPTPSKPALSEGAASSTIKVCSPKIRAQSLPQPPASRAILKAFAGIEVGCSHCCTVSLCGQQAARQPGQELVTLLLYQARMAGLPVSICPVSPRECHLLPEKALANPETTGWASFVPQA

SEQ ID NO: 963143 - protein, 251 aa, Homo sapiens
MARYVFSKFTAVPKRSPVGEFLLAGWQDQNLAGWEQACQCDDKRGNREPVVDYGLELGGAAFRPGVRVSSPGVHVRQHHVGLPAGWWSQAGQPGVPWCPGIGVRSDVVGGALVFEVAARGACLSLPVRCEHVLASPGPLDCDQCAKSEKASAGTRVPVQETTNLVAYVPLLTRVWAEILVREVHREAPGVVMSLDEPLQPFCSSDINNMPLQELSNALMAAEAAFKEPRDTALFPSSLSVPADQEGKTPLC

SEQ ID NO: 963144 - protein, 237 aa, Homo sapiens
MRLPPWPWPFRPAAPPFSPSAFLRRWLWPGGGTWREAPWLARAPIVAPRGRPSLRRRFWHRAALWLASAGAGVPSVEGPLHGESGAHRRGPPLVDAPLRPGWNLPSRPTLRYTARTYQRRLQSGLPHFRTWHIGEILHARDPKEVPSLGTLRGQASPSFGPHDLTPTRSSGNLSRNSFRCPPKSSKRSFHARVLFSETRKPVAGDFCPSPKLVCARGEQHHDTGSHQRCSLLLLETR

SEQ ID NO: 963145 - protein, 136 aa, Homo sapiens
  misc_feature (27)..(27): Xaa can be any naturally occurring amino acid
MPWWGLCRAWACRWAPPTRLVLPLLPXKKLGLPCKATATQPGGGSWGTPRGVGGGHHPRRRGRGGPWPCFLQDHAAGARAAGGLGKPQSPALLIKGHCAFSPFTPVPPRGLPLSCPPRGGLPCFAPGVAGRLGSEH

SEQ ID NO: 963146 - protein, 217 aa, Homo sapiens
NRLGTRPWWFNSAEAPLPAPPVPSSEVGKLKGRCLSFWFPRAPGVWSAAGCAVPPVSPEPGPACAPGAGVSRFTPVRRRKLVGWLGPRGLGPESGMLEAVWEVTTHSRGFLNPAPPVCRWARVRSEGGGRCADSHALGQGLPLLRPGDELRDPVPRGLLWHACRPVLGEPGCPKLLMPRPALPPWAGGRSNATDVGGLAHCGGLSAHIVRAALFGPI

SEQ ID NO: 963147 - protein, 230 aa, Homo sapiens
MAEPLGLASCRSIQTLRVLSGDLCQLPTGIEIFVEHSARLCHSEGITICDGTEAENTATLTLLEQQGLIRKLPKYNNCWLARQTPRDVARVESKTGGFVTPFSAGTRGTTPDLGRGPVGTRLGQTGIVPSLISSRAVDREVSRLHAGRTCMCFHSAWVLWDSPMSRIGVQLTDSAYVVAKHAYYDPTGDTCCFRPWEMVTLSSVCDSVGQPLTGQGEPVKQRRAHQKKLI

SEQ ID NO: 963148 - protein, 234 aa, Homo sapiens
MSRYEAGFSRRLTVASSSSCGPPQPPLPEAREARAPRLAVRGRARCERGRGAAEPLKRSWAPAARPLLGPRIASARSSPAPAPGEMPCGEDWLSHPLGIVQGFFAQNGVNPDLGEEVIEYFKEKLKENNAPKWVPSLNEVPLHYLKPNSLVKFRCMIQDMFDPEFYMGVYETVNQNTKAHVLHLGNTIEMLAELWALNKELDLNSPRNTTFGKGQTFYCVRLPGESTLGKKKPM

SEQ ID NO: 963149 - protein, 301 aa, Homo sapiens
PPRPPRLCTTAYVFNCWNRLFGCPALVHSGDYEHQLKLSGLVWPFCAHAEVHRVVADHPGSEEYEVGGSPFILVIRYLAVVNKCGRCMKQVECAIAMTVNRQAGCTTTAWPRRMAGCARSAFKLLQLDKEFQLFQGVTRAVDLCAAPGSWSQVLSQKIGGQRVRPRGGMWTCRHMAPQPGVVQIQGDITTDVHMPREIIQHFKGCPADHSGSVTGLLMNPVSMIVDEYNAGPDTSLACSEHLLAQFSLKAKGACLVGPKNIPKAGIVTAPSKGQLQGHLSQRGYVAKPRSSRKSCIEASVA

SEQ ID NO: 963150 - protein, 143 aa, Homo sapiens
  misc_feature (24)..(24): Xaa can be any naturally occurring amino acid
GTQQWQVAAGGEHSQVLSSLHNDXQEITQRIISEGVFFFISFSFFFFPFPFFGHMTVLVWGTFQGRGMLCSGAGVPGLQCPHLFHHPIGLLGHLDAEVPGWGRLRWLGVTRRERASEGLATSLPGGSVLRGHHQFPSARSPCS

SEQ ID NO: 963151 - protein, 326 aa, Homo sapiens
  misc_feature (196)..(196): Xaa can be any naturally occurring amino acid
NYGLGRGWLGAESGPESLAATPRGLVPITPREEPQLRSRPSHHHRNHEQRGRDPAAAAPPRAPPQAATQARIGGAGAVPGRLTSAAPAGGDKKVIARRFGNSKMVHCTEPDMVSSTGMTPRKMFCTPDCHKEDNPRKYLRSVGDGETVEFDCGRRRHRGAEAQLLPVLVVSSSGQVIQQDRNHYDAIHVVAGPPRXLPANSRIVRVGNDRRARRVLRRARPNRARPYRRRRSHLTTLRRPLLAFDPQFSHPSVQRAVMAAADTQVLETGYTTWAALFSGLPRTRGASCKKPKRTPERRHSGLTQVRPSGPAFWGGELQWGRPRIPA

SEQ ID NO: 963152 - protein, 361 aa, Homo sapiens
DALTLRLGTRLGGAEPGLFLALAAAPMNGICICYQRRAACGACAGPQRPAPPLPATRSAHRRPAAGARAFPAITLPPCSFSRRAQTDVSRARSPASPLAFQAGNRTALTKRGRARPRKQPPVSPGTALVGSQKEPSEVANTLKRPRGRTKGNATNHRACCQDPENHQQHPGKAKPRAADPKQTWRRERRHGGHSRQEAPRHRTDPGDPIALPACSFTGTRPAPFLGDCDSFCSVSHSGSMTLSPTSLQPTHNPSNLARPPHALSLHCSHHITHIQLHVTHSFRGFAVAVDFGGLCFPAGSSFHEVSAWAPTSLHYPTNVPPYPTPPRPYTTSPYSRPRGALLRLHYPSLAPPPRPHSAPYT

SEQ ID NO: 963153 - protein, 146 aa, Homo sapiens
MLVDSRAFSLGPYISALRVNKVIEINPLPALVPMSGCASDVSVLGSSLAWSEEMQAVHICEMENVFQCRKSPSCCPNMIVPVPGLMDLSMGSMICGWDNEGSWDSTTWMTIGTLGLSASFVLRLGRGNIVSAYGGLGLWVIGLILA

SEQ ID NO: 963154 - protein, 279 aa, Homo sapiens
  misc_feature (11)..(11): Xaa can be any naturally occurring amino acid
  misc_feature (74)..(74): Xaa can be any naturally occurring amino acid
  misc_feature (120)..(120): Xaa can be any naturally occurring amino acid
WRPMAGQACVXGRGVSPAQERRRRQHGASRNGMVLKPHFHKDWQRRVATWFNQPARKIRRRKARQANGAPSPRXLVGPIRPIVRCPTVRYHTKVRAAAVQPGGAQVGRLIHKKVARTIGXSVDPREGENKSTESLQAIVQRLKEYPSKIILFPRKPSPPRGETVLLKTGNGHPVTGPVMPVGSVYKRRKGSSQSVRKRRISKPSASTPYGRANAGSSAYGQKSKGSRKTGFEKKNKGLLGLGIRRSHAGPTWVFRGPLAWMGFTAGNSSARDWGLKDSS

SEQ ID NO: 963155 - protein, 129 aa, Homo sapiens
MLRESEAARLLLAAGGLALALLVSAGPAGPARHGEDELIQKAKLPSRPRLENGTCMKAVTEQALSVHEERNCLRAYKNVVGGRSPLEGSSLASSRRRTSDKKLQLIRDYREKVESELRSICTTVLGIVG

SEQ ID NO: 963156 - protein, 262 aa, Homo sapiens
MVRGWVVTASTWSDGRLEKKKYERGSATNYITRNKARKKLQLSLADFRRLCILKGIYPHEPKDKKKVNKGSTAARTCYLIKMTSGFSSQRNPMFKQSSREIQGVRPVEAPEGLWEERSGTRVERLQGRISSNYNSSTTVIKERYIPTFMRIAHAGTRGELNALSNVAVRCFPTPSLRDLAEVAIVQTQFKLVPAGSSVEFMHYSYRCRVPVRKVLPVHQRHLLPGRGTGAAIVWITPYAFSHDHPKTWTTGSWHFSEFYSTL

SEQ ID NO: 963157 - protein, 354 aa, Homo sapiens
RLGSEAWVVQVCSSENAFRPEVRWSPSGWTWRIDGQKLRDAFTWNMNEKLMTPGDVVKKSSVHDLDCEARCTFVPAIASGIIQQIECYPTDQASWEGPTQTMRVIHLELNIHVGTQHFRWLGAEFEVGTMSEQGVHSTERKFALEAVAPELGVGAGAVVSTERIALLRIRWHELKLCIEEKTIIALQAEKRHLATTVEDASILGRAAARMRIPDGCPLACEYSEHDAENVERDGIRELGQEASRRCEASCQGPARGVVTSALAHRRPSGASQIDGARSSSSLLAGAEAMGQARPSLRIGGGGGRGGSGWPLAGHFLWLGPGLPPGVPARLFVEGVPCVAAWPALAGAYWASGPG

SEQ ID NO: 963158 - protein, 69 aa, Homo sapiens
VPPEQYLGVPHPVGIMHQNKQATENAKEEVRRILGLLDAYLKYEDFSGGRTSDIELTVTGCRAAHVVAL

SEQ ID NO: 963159 - protein, 361 aa, Homo sapiens
YSNENLDLARAHGSAGMEDHYGRWRTYKKRILDGSLPISPAPWCPPRGKILCVLWAPWLWRNTSIARSIAAALNREYFLLQRRGHELTCAEIKGHMAERYVGAMPGKIIQCLKKTKTENRPDPHRRRWTRIWPEATRGDPVDRRLLELRVTQSRMPTSWTTYRGRARGLVQGCCTVCTVQASRTRIPVADCGDRMDDDLTCRATWPRRSWPFAELLPVCPRLAPCVALDESKAELSSHVADAAHHAVLPRERVFRNWGSTWARCSAPPPALTGQRSRRIPCAGAPREPVGTFRGDTLLLPCPSSFSCHRPSGSLGVRTYRPGGAPPCAGHPRRAPRIVARTVVLRARSPSVCSACRALILS

SEQ ID NO: 963160 - protein, 133 aa, Homo sapiens
VHAREPCRPRCPLQSVQVFGRKKTATCCGALQTRQWSTQGERAGPGDDLSRARYSTRLSGVQFCFSCQGSDFAGCIHSVSAVKGGGHVAQSLCYPVRSISKALVAYYQKYVDEASKKEIKDILIQYDADPAGS

SEQ ID NO: 963161 - protein, 140 aa, Homo sapiens
DASSPNDRRAYSPFMITPSSSLSLICFLVLCALCLTLTTKLTNTKHLQTLRKKKPSEAILPAIILVLIALPSLRILYITEQRSTIRPLPSNQWSALVTEPTSYTDWRRTNLQRPTYFPRLLLEPGDCDSLNVDNRVVLAI

SEQ ID NO: 963162 - protein, 118 aa, Homo sapiens
MSRYEFVSSPPHGSLSTHGNSTLSSRPFHLGRFCMRGEKQTVLEEGCEEDMREQLIINTVRFTGCAVPTSSPWEMNFSDRLEGLFSDSMAKHYGAPGPPPMSSYWSLGNSTFQIFTCA

SEQ ID NO: 963163 - protein, 101 aa, Homo sapiens
MNINGSWISWILQLTKLELDAEAKRRLRKNSSRDSGRGDSVSDSGSDALRSGLSCCQTLSPKKGQRVCLDMADPRSGIGTRGLPIDQVVQEAQVSGVHLDR

SEQ ID NO: 963164 - protein, 253 aa, Homo sapiens
MFCVLPALCPCPTRCPAMLAAAAACSRVALCRALLFPAAPVPDAASPAVPAALHAMVLLCDPVLFLLLLWNPALCTCDCGLPTGNACSCLLWLLDARMADVVPNDTLELQSPVHLVTNGLRLQRLHLPQGDPVPSCAMAGLTYTKPASGTWRECPSTGMPAYLTRTLHLNAQWGQCVLSMANAGPNTNGSQFFICTIKTRLVAMAQPVVSGHVKRGHGPLVTDPYNSHGFSAAADVTYQEALVINRLVAQLEA

SEQ ID NO: 963165 - protein, 72 aa, Homo sapiens
MSGTQWKDRFTRWTQWLGGGDSMDPVVQHGGVWTRSSWACSREGELMSGGMDTFIHRNRLQTEVIYQPCRKR

SEQ ID NO: 963166 - protein, 76 aa, Homo sapiens
MANADPTTTHHHPEPPPTLVLPTPIRIRPTERPITHTTHPPLPPTRYHNPASLAPSLPPAAAAIARDIKPDRCLTH

SEQ ID NO: 963167 - protein, 67 aa, Homo sapiens
PKKPNWEQAQTHIKHSRHGHVDSGKSTTTGHLIYKCGGIDKRTIETLEKEAAEMGKGAFKYAMASVD

SEQ ID NO: 963168 - protein, 77 aa, Homo sapiens
YTYLKLEGFKALIGAQYSGAQCPRALQSPSHFHCWSKATRSPEISHAKFPAGKVPSDLEGDDRITVVFESNGSIAYL

SEQ ID NO: 963169 - protein, 37 aa, Homo sapiens
MPDWLTKSGDLPHHAIQHGPPAVGGKAQTPRGHAHVT

SEQ ID NO: 963170 - protein, 270 aa, Homo sapiens
CGGWAEVGRLSGLSVAGRVPGVTEGVDAGGLLTQPHEAPRSLCRRHGGRSISVLCGKRLCGGYLCALADGGSGTSGAHRALPTRVYDQVGTQEFDGRCPTRARSRRWLDVEVTYTVQMEYPDFPQHVSPSKDIRTVKHMRADKKLSEFLTVEMTHDGEDVYHDGSVWLQEKVQKDSLRPELLRYLERLIKLGRRNGLHLPRETQENIKRIKKKLSLLCIDFNKNLNEDTTFLPFTLRGARRAPRGISELLEKMGTEFEVPKYPIISPLKN

SEQ ID NO: 963171 - protein, 241 aa, Homo sapiens
MLPRVGCPRCRCRAAAAAAAAAAAAATGREWRGGGRARRCCSAARPAHPSAWRLRAPAGLLPPACGGRKLAWSAALLPCAELFREPVAACAARVCALVEGEACGVYTPRCGQGLRCYPHPGSELPLQALVMGEGTCEKRRDAEYGASPEQVADNGMTTQKGGLVENHVGQHHEHVGRGMAVVVRKPLKVGYEGAGGVREEGHVSSTRADWATGAKHHLGLEEPKKLRAPPSGLLPTGTGQV

SEQ ID NO: 963172 - protein, 244 aa, Homo sapiens
SPGGCPAEFCCQLPEAASLCPIPVPPGTLEWQLRRDVPMCCPCYCALLLCADADARVLACMPLPGWCCTVQLLESADAACPVQRVAVAAMTPWLGAHRAPGQLEPGGLGRRGVHMLAQPPPGRLSATPTSVILVPMVVREEAGKRRWPFGTLVYTIKQMTMYRGFTKMPHVQYIHTEASESLCGLKLEVNKYQYLLTGRVYDGKMYTGLCNFVERWDQLTLSQRRWLNYRNHLGCNCRITYCYT

SEQ ID NO: 963173 - protein, 216 aa, Homo sapiens
FCQMWYAIFLAVVASWFAEGWEPPSVSGTCPPSTSSSVPCVLCQACPSHQHVPRGSGCPRPAQLVLSVPSPVGSPFPCRRMGFLSRAECRPWPLWVALEGLDLCPQLLPSPVDWLCEPACSLERWILTCRPDSSPSASWPKRGFQVSDTGSQVNELCSLGGAVPGTRRLAYRLSFLTSSVLGVLAHSSACRASVYPPVANSRYQWGNFVSIVRRRI

SEQ ID NO: 963174 - protein, 101 aa, Homo sapiens
IPAPVRSCTVAQGEPVQFKDCGSVDGVIKGSECELHDPTHSCQLSKGSLTGSHVTLHQGIFSLKAGMAVVCMGILDGSFPVPLPHSWRPDGLYGVAPLNWR

SEQ ID NO: 963175 - protein, 302 aa, Homo sapiens
GEKIRSPPYGGVYKVSTLGKSHSPRTSAKQASICICSQSCICTDESSGCRAPLPAMEVVSGVALAQLRGGRGCRLPCSQIRGFVVVRRGLRRVSAIGRRCDRVGSIALEGVPAYLAFGMVGYRGGLWRSALELRHSQVVFGWWVQLVALVRLGGALLNEEGTPSAWQTDDMDQHDWHRYTVKRSDLRFAYRWEERCSRPIGMEVTGALTLEEVKDPDDLGTLQQIPSLGDLSGEHKRSLNLLVSEEEASGYYDSVTVKQLNRERGHASGDSDECQGVVGGRRSWARCLIMEPGSGAQSVGWP

SEQ ID NO: 963176 - protein, 141 aa, Homo sapiens
MSSSEHVDSGKSTTRASLIYKCGGYRQKNHVKNSRKEAAEMGKGSFKYAWVWINWKLSVKRGITMDISLWEIGDQQVLCDYRLMPRGRHEDFIKNYDYRDDLRLYVLLSVMWLLGVGEFEAGIIQEWADPRACPSGLRHWV

SEQ ID NO: 963177 - protein, 228 aa, Homo sapiens
MCGVSPLLIISPQKISPLILGAQIPPMGWPPKINSDDNTTRRGGGVPTRKRPPTREHQLRERFSPPPREHGKGVYQNSPQQGKNPTPPRGRAHPTQKVFPKRTPTFAPILPLGGSGVVKSAYEATFFCVCGTGDFSSKALPQVVVRHLTRSGRFFREMATTFLPGGDPVCVPRVFDKGQSLYYVHQGLRRTTLYHQPARRFSPLRLQQISLGSRSITTRVLSAPHSIF

SEQ ID NO: 963178 - protein, 431 aa, Homo sapiens
  misc_feature (166)..(166): Xaa can be any naturally occurring amino acid
  misc_feature (192)..(192): Xaa can be any naturally occurring amino acid
MWNQQRVPIQPVCQAGCGGPNVLGRGGSQHLGAWWLENNFFEDIMWVKEMWCAFMKWGEEGTYIYRRRKLHEGECGSQRGVLYSGPRCERLWVVKLCVGEVRESPTDRGGKTLCGTHERRVTTLKDARELLRGETLSLCASRVWFVVLSPHKSALSRKRERLTINXPPTSSVNVGVAPSGFEEPKSLGGVVXRVWEALMGGGLAPLCPKRWSLRGDLGGARGVWRNRVENAWGSITFDGGGRAIKRSYSSERPQKIGTLWCGGVATGAAGKDFKKERGGFIKTPRRGGGEKETPSSLHMVEEQRSGFLKTRGGAVEKKFFLKKWAFWTRGGWATNSGCGCAEELCAHHIGYPLERSLEHSRDENRMAQQGGFPRKTTWAGVGEKNPGFIIWWAHRGGRDQENIWEWRRHPGERYVPLMKAEGAAGKKTPPI

SEQ ID NO: 963179 - protein, 194 aa, Homo sapiens
  misc_feature (93)..(93): Xaa can be any naturally occurring amino acid
SSMLGERTMSFGAQPTGCFSFQSHGSKGGLALASGIQLSGLPPDAWVCFPPRARGGAHAWETVKCDGPAPWGHCHLSSCCILWLPAAGRGDPXSGAQNWGATTPRWPNVPPVCATTWLFEKINSPHAKGLIGPLLWPHFTIWNCDVGQPIISPINILRLMRPLVVVPLANLSRLGFTLDVEYGAYWWRGGLALG

SEQ ID NO: 963180 - protein, 317 aa, Homo sapiens
MSPHYSRRAYLLSLGPTKYLRREKQSVGHSKRPTISTEMRPHILQLRASAPQTILEKGAPQDRHRSVYEGCQRNKSTHHVRARHHQQIVVANPKETGRFKQPREELTPHPPQEQTGGEETQTKLTPEGRETPPVGGRRPHPTGEREENMSGHTQTHRRKDVYITTHKKTTKREGAPVRRSEIVPTTRNKQHGKQNCGAQTTNTVCWAPPQQTRWIVCKHPSGRELSKTVREEVKRTKKSELVSKKDIPPGENTDYPARTTAAVVSEQLKTPTTPSWIQNDLLGASHTNNSERARRHRPLNVDNHHQSYYYAHRYSYA

SEQ ID NO: 963181 - protein, 95 aa, Homo sapiens
EYARSLAMGIVMTVVGPLRWVTIVVVSFKQSKVFGNSPVGCKPQTTEGVDSLLKPRAPQEGGSLQLGRAVFHALTVVWFKSEERKIPELHSQVVP

SEQ ID NO: 963182 - protein, 147 aa, Homo sapiens
MVLIPYKPQPVPDAGGLLTNQCQAQENDSRFPMDGVHSVLRYTELTSELTFLSRTDEVTCKLLDVDEPVFTLMPGIRGENSVMRTKADVGRYSLVASMGSEVCLGHRGLSCITRNVSDMKSKQWFRLSQLVTLCLRCILSNKYRGLH

SEQ ID NO: 963183 - protein, 168 aa, Homo sapiens
MRGRREKTSAEERHPRGKRREGGGGEKTHARRRPTTSARREWCHTSLTRQRAERVKRERETERERGAHRAARGPPTTRRKTREENTTHVERKRVSVGKTAREKHPHARNTERERREPHPTEKKKTPHKKRKTKTESEREHPQTRGGGKEETTKKQVTHTKTKRRSVRN

SEQ ID NO: 963184 - protein, 251 aa, Homo sapiens
MPLPALSVGVLGQLTMNLTLPLAEEEQAVRSLRRERSRCHPHENPVPDSRDDSRHYATMYRDPLMLLCSGLAARACPFQRLRGLRSTHMPLCPGPRTTVGRKLRYYKNLSRLTYGATTLLYDRIRKCARAEPTFHPCWAERLDTGQPIYADACMGDDDHCITAARSASVPSSTRHGLFVTSPLPVLRRLRERGLGCTTWYLVPRGSPGPPEASESPTKTWPSWHERALHTRGPFDIYEPGKCARKNMCECR

SEQ ID NO: 963185 - protein, 128 aa, Homo sapiens
  misc_feature (85)..(85): Xaa can be any naturally occurring amino acid
RLKMEKEKEGFPDHVAERRSTPSYKAQSSNIVTDYERLSVGMQHRTTSSIVMKLCGCTNLKSLDGDHANSHFLTRVTVKTLHDPXCCVGMKHLARTTEILAPMNLNERPDLAGCDHDRSSLKCAVTIE

SEQ ID NO: 963186 - protein, 71 aa, Homo sapiens
GLSPTPQPGPWALCPPLSLRFALPSGTGKCPMPDAWCALSVPVCVPACLPLCVPIVSLPESLILCEARTVY

SEQ ID NO: 963187 - protein, 190 aa, Homo sapiens
LPLLVLLVCSFWCGTWSPLSVKRQLRRLRTAVNGRPKSPRKESQTENNDHITLKVAAQEWSLWLQLINDYGRAYYQTIVQLMTPAYLRTDRGFVNMSADHDSDLTGQPRSIDKPRQHPAPVRAQLRRDDSIPSLTVLQRVRRPRLSTDKAETLFLNSANLCSFDRPIGLRSHFETLHVWGSASIPGLLTV

SEQ ID NO: 963188 - protein, 118 aa, Homo sapiens
PAPPRFFSPGRGPGDQSEKRDHVRRKCDGSRVPQPRRFQLQRMKQNLESFIVWLEDQKIRHLQDVTDQRGTFKETIHMQPTWAPKRFPFGKQGYSPENVKPVLSRFKIDKKLLTGFCG

SEQ ID NO: 963189 - protein, 52 aa, Homo sapiens
MAQAVVKEKVVFSNLLVGVLRSGITWTMTQRSCVNFSTGLCRKDKFTTGIVI

SEQ ID NO: 963190 - protein, 287 aa, Homo sapiens
MPSAIQGDLDSPIYFLNDHSNYCDDYPEMFHLLGCRQVWAPEHDAAGSACPFRGKAVVLMGKNTMMRKVHSEGTWTNKPMLCEKLLPQYPGGSVAAYGDSPRYVTSRETQGHVAVPVRCHACCSGAVCHSAPCESHWCQPMNTGLVARIRPPFSRLKVSPLKSPGAPLKSRGDVQLIKTGDKRGSQRSHAAEHAQDLPHSPLGWSIQQVFDNGRSTTLKCLIFTDETLHSRFWSGVRMLPGLSEIGNQLLLIPHSIITGPRVRLVLVHGYPFQLLRGRASRQFTALW

SEQ ID NO: 963191 - protein, 340 aa, Homo sapiens
  misc_feature (18)..(18): Xaa can be any naturally occurring amino acid
MWCNAINDDQAANNVAAXHNDHQSVSTRQPSPFLLTTISCVITTFFSPPPHVWGSQRRSYHGGDCCNTAGGVNPNTLGGHYLYNHSTTFPINVGGGGDNTSGSRGDGIIVGSITATTILWGRPNKTALGGGVSGGGSYYNKSPQPLLTRRSWCRGGHKVGPGAHLTPGTVWDSTSNVFEPAATHTRGGALTTRGSYHTAEGRGGNATPTFVGGDNTLTYSTLWEPPTPGGGAHKTDHLWVPIVCVTRHKPNIRPRGPPVAYCVPTKGGGVCPPVEGAPPLLCGGHPPQQRFATTGGGHTTPLQVVTDWGDNKRPNYIRTLQFHTRDTQPLYEREGNQPLG

SEQ ID NO: 963192 - protein, 115 aa, Homo sapiens
GARGYPLQATPPGPTDTTAAPGPFAPRARNGHPRRPSTTTSLKLSLWEILGVGKSKSPVSIYSNMSLIWESKSTNGSRVGNKKHPGGWKNNKGTDMGHSRARAISSYNISILSWS

SEQ ID NO: 963193 - protein, 163 aa, Homo sapiens
MREKPSIFHPGDLQDYQIESLSKKCWIPVVSNVNIGAGSDALLLIHMVGRRVLTDELNTDMIRHLYVPEFRDIQIHHYPNGIVTVRLCPAPESRAPCNQRGGAPHRLRSSPPSPTNIQQIIEIEDTVGDPSGCCGCIRVQGRCLKVKRQYRFGPTNEAFEKMP

SEQ ID NO: 963194 - protein, 284 aa, Homo sapiens
VIGTRVGREEGGKMVLEMHYVCVWTTVSICWNGDFLPTRLQCPAGCCQHSYVIQRPCSNPENNCGPYHTGYMTCEVLTTLTPDTGLYPVQATYLSNPMCKITYLQLGIRCGPSGSEAPDKAMNHNDAASFAFSGGKPMWQAHMQQGILVAPLVLNNASKQVQHTVNLVCTIHTNYYWVCTPRSVDKNKQNMPVPAILLQSTVIDMGPRNCRTLDYSILGRTSLHFPLWPHASVAFVLPPSSSWFTPRTLLGLGFDNRLGCPLAFAGTSLRSANVVAFGHFLGRS

SEQ ID NO: 963195 - protein, 221 aa, Homo sapiens
MKLTMQNLNDRLASYLDNGAAALEAANGELEVKIRTVYQNAGAWALPRLHATTTRPSKDLRDNDSCVPPLRTPGFVLQIHNARLAADDFLNQCLRRNSALRMSVEADINLACAVVLDELTLCQRLTGDADSEGPEVKSLVYLKNDHERWTIRYADGPCWEATVSVEGGSASGHRSRQILSDCAHITPWRADRRFGLFPPANDRVLARAPMRQVCSRPWSIG

SEQ ID NO: 963196 - protein, 124 aa, Homo sapiens
MISAERRLESVIYTSREVYGKVTHRWRGRCCEQLRLRRLVQWNPLVESSRRLTDDTCWFMVSPYSGLGVPLKSRSPVFEANGDNAVGLAMSTAVPNRFVEDGWVGPDRISGPFGSFALGDAFGS

SEQ ID NO: 963197 - protein, 228 aa, Homo sapiens
MFYIPECLLCLYVVLLVILFTNAADFLYGHWLEQVDSCENGPLGTPANYSQLVTRSLLVGNGTICLATLMRQRQPALPGFLALAGLLWDLPGSHTTFTLLLRTNRNYGLQAIDPMVITSRFPLSWAWGQFRVNRRNPIIHTGRAKRYENGLCDLWAPCLFPSGNFLECTPSLPGLDNQLTTPRLIQNPLAFNSGTPKRLLDWAGVTCEQALPHNLAYAQQLPNNKLGI

SEQ ID NO: 963198 - protein, 466 aa, Homo sapiens
TGSKKSNKNKSGKNQFNTTVVATTRTLARTSTMRWREHFQQRRSPWRTRWRDITEDGATMPQTTVRCADAQRSCVAHSRYPIPSLPPCSFSLPPAWPRFTSTHQQRATPHTPTQRCATLASHHSRRNLTHPQHNLSQHAHTAREQTTIQLENIIHTTTLHNLLKRDNKTHAAPTTRGPPHLILARRSQHNAPTGTRFHTHLYFTPHKAPYYTLAQLTPHKTFNPPRTTLQLTINYFLLQKKPLSNNEKAPEQFVITPISSPTGPYTPSLFHPHLSPTTPHAAPAGPLPRPHLPLFFRDTTRPFLARRAYAPSLSRLPLCPLFRAGSPLSLLHPLAPHLFHPRPLATFRSAVRHTPSPPHFGCAPAPTPRHGCLPRTPPHSAPPYPTDRSDHTTALPPHHPPTTRNTTTTQTNTDTKHRTAHITHQNRNAHHPTTRQPYSPPPIYPTHNTKQRRDHKPTPPHTHSHP

SEQ ID NO: 963199 - protein, 306 aa, Homo sapiens
GVKWGNRWWRWRRARWQPGAHQRKSPRRWNPASRRDGHPERPDPVSSFYPVICHHDPDKRFLHLLQWGGISWRVEGGPQACAPGQLMLCTHWWHLPGSYLRMGSLHGLRGYGPSQHGFKAMRGELCPGQASTGVGDLHPTMTTMTFERGIHTNGTSRWSGLLLFPDGSHGNPPTIDRSLQTEQTSCCDVSKCPGHWSSRGPEGASEGKAKKFHMAWTDAIGATSLDKEQEKRPVAQQAKQHKRGTTRRLKNTNELAHRKLGNRKTMDIATRTPRQTNTRGPPNKRKTERHQNHRKNTERSHASRRT

SEQ ID NO: 963200 - protein, 126 aa, Homo sapiens
MTPARASRLASSGTILTFRLCTNHFLVVWDFFSGASPFALWPLAPCGPMTRPSYTRTGRVHRYFVRVPGVRCGAFSPCTPAFWSPQSSLAFPAYFPPLVETAPRARLSPPASPRAHSVRALSPLRL

SEQ ID NO: 963201 - protein, 67 aa, Homo sapiens
  misc_feature (41)..(41): Xaa can be any naturally occurring amino acid
DNQQYAILMVPEYLVCWVMISNKCCYTCRLTCRYLIHRLDXQKYAISSVDTIVTLNHSAIDAKYSSS

SEQ ID NO: 963202 - protein, 187 aa, Homo sapiens
NSAQLIGCRRRGADSGGEERKAENMDVYLLATPRHGTDFFPGFQIRFARPDFSGHFQMETKPAVVMQPALLPETSLAGGGVPMMIVHMWGFVSPFNMILAGLVVVLVFHGFCVGMPTNNDVLRRMKNVRTPPTVRSMVVMLASYFLISMFWRQSWSLCLGNTFALAVNEIRCIVEDFRNLQGTRLRD

SEQ ID NO: 963203 - protein, 89 aa, Homo sapiens
RCGALQYAHPEAVGVRHGGADVRAHDRVLQTPLSRDPVLRSEVHILGRGGDLACLRCASRPEDMVNFINHVSIQPKGGRVATYLDPSLG

SEQ ID NO: 963204 - protein, 202 aa, Homo sapiens
MAAGDPVHVILIRTGWAFKALIACSVHAVGSGSRVPSPDSTPTFQLCAPKPNRQTGLNLRPAKFPCSGREGPEQLEGDDWNACVFWRATAIRTNSCELDEGAVGGEQYLLEGLVEDHDVWVRPWGETPGLNSGYYGAPATDKYPGMFHSNLGRLSMAFTYKRRPICMTVTLDANVRLKFLVRYWMCRLRGKTNVTSIMGDAK

SEQ ID NO: 963205 - protein, 338 aa, Homo sapiens
CAVREMWYADFFMHDDCMNGCLCDPVMWTCEINMNLMLNMRACACTHVVLCCSTCDEPDDVTNEMMLLVFGPFEPCVMCKHLVPEQAREMSLDLLNRCLIFDYIFPKLHSMVLELQVYNALRRMLISPCWYCTKNQIYNYYLPSHACDMSKFCEKHYDTSAHIELRPTPFSVRHPGSSSRAIRQVSSDRHSFVSLSLVAVDCTPSSPGPGVLDGYVNLLDHGLTMPPPWAILPWTAVHLASNFAPTVALCQILLSQCSLGSSRIHASPATTLSHLLCLRPGLDPYPQPTLQILSGRTLPYSPHFLPVPGLHATAFIKRPQAVVFSVPETLGERSVRHT

SEQ ID NO: 963206 - protein, 183 aa, Homo sapiens
MATITVSQMKSYPAYMNIHARPFSNISQTEGPGRDALRFSLPPKCINSLHSTDFGTQQVLYTRLEFWRKKVTFYTPGNLKSLLRMAPKALTVATRLTDGGTIFSDLLGIIEDVVAKQFSSKYGIVDDITRKGLVCVTLSLGTHLYVGSRMRIRVKGIEADFVENQGQLCGARNESGQTLHPIY

SEQ ID NO: 963207 - protein, 137 aa, Homo sapiens
  misc_feature (97)..(97): Xaa can be any naturally occurring amino acid
GAKAGVDVSLGNCCSFTSQAVTESSAPQAGNSCTIGQRLGSWMHLCDHVFPKSPGEAISWPFPETLPQKSLVLWRTRNTHFCGTFRGNTISQKKHAXDFNDLRTCKAIDLGETAFKDAHTETSKGQLKGKKASKPGQ

SEQ ID NO: 963208 - protein, 173 aa, Homo sapiens
  misc_feature (48)..(48): Xaa can be any naturally occurring amino acid
MNYNGQHTYCDNKRAMWAHQKRERTPRGPRDTNRGGRVIFSTPKEIQXTAAAGGGKNPEERASGRHTTPQTRKGGTIPGRREHNKPRGGELQYKQHNGGRSPNQARKGRPSGVNNKRLQTDPTSGVLVRRTTDERQNNTNDQIAAHQAHKPIKDSTAEQSSTKNEHTRNNDKE

SEQ ID NO: 963209 - protein, 111 aa, Homo sapiens
MHVKIIQTHSYWMSEENQNTESSRLNTHWGKLTNSQKAFIPGSIPNTWLTQPLFHIDDTFCVFSRPGDTSSDSGESQHTGCDYLSRGLMCPSSYKERVLPQSFTLGRPSIL

SEQ ID NO: 963210 - protein, 115 aa, Homo sapiens
SKVTGGPEHFTICCVHLVHHSPCWLLRLVCLRDHLAFWVCHPGFINGLPCCDEFHHEESMAVNTSREYATKARMGIRRGKQLGQEYSKEANMGNHSDGTKYLKIDQNAASMASVA

SEQ ID NO: 963211 - protein, 90 aa, Homo sapiens
MGDRHTSRPNYYERGGSLHVRVARCLCKANLVQTNPAVASCRYYTQKQQPEYDLVICTQAALTIGYTYHTRQCGMTRTRPREYNTQTAVF

SEQ ID NO: 963212 - protein, 69 aa, Homo sapiens
DCGASNQRDSVGVGPSGASLQEISSERIFKLSGCFTQPSVQSYVMSESKGCFIPCCSISDIQALPLNVS

SEQ ID NO: 963213 - protein, 237 aa, Homo sapiens
AAVGRLLRASVALTCDVPFLEGISAICSPQAWLHVEERCLTKFIGVLGSSQCKIIHAPSSSLPMHPACHPCMHPNFTGYMPVCQWDDVQMTLSLGLTFNRGAQYLRWAYSFVILCGHFQPLRVVVHNRKTWVGLFNGGQKGLHGHCSPDWWKPGWQGLVPARFLPGWGFSPKLYYGPTPWDPGNLHNLPTTKGQTDTWGWRIPGEAQPLWKTNFRPNFRMVPRNPYKPLNVQGILSP

SEQ ID NO: 963214 - protein, 166 aa, Homo sapiens
  misc_feature (128)..(128): Xaa can be any naturally occurring amino acid
  misc_feature (135)..(135): Xaa can be any naturally occurring amino acid
  misc_feature (138)..(138): Xaa can be any naturally occurring amino acid
MERPCKGIFGNLSITQFLGLLLGHGCVKQWKITSAARKLAQRVDDTNSLHTSGNPRKVLPQCQGQGNTLVARELRPLYNTLGNRVKSPHKRVTLMELLVDPCSLLSGLWEQQRNKLPRAMWTIDNFSXKIPRSTXEAXQRSWRQGTVAHGTCAHSQQTNTMCGQAR

SEQ ID NO: 963215 - protein, 70 aa, Homo sapiens
SRRWPNQKPCRSFGKTSGCMNKSCLYFGRQRRNRQSALKRKSWSRACLSKCHAHGPARMLTFDEESLIKM

SEQ ID NO: 963216 - protein, 528 aa, Homo sapiens
MSYSENATALGTRCPAILQQPSGCWHARIGFEFDNDTQRSVVVDYNMEHSIGSWFISLLTPIMWTLHPYRVVALHRKDSIWHLSSMNKARNERTFLPGNRRNMAPKGELEGSLTWVGEYQFEDIPAVHYSLMPHEGRSKNDGPLTGKHRYADAHLGGETAKWAHQFCTFLRADSIRTEKPHPVIQCLCNEAPTIRGAVPKRAIVTALGGGQTTHSKYTRAPYCTALGTHGGPRFALTAIHNRVGGPPIHLHNHVRQTSGKLHNDLHTAEAITIPNYPGRDRRKFIILDGGLSQILWIARLPPSLDLRGDTPVILRMAMCRHLCPAQHIMMAKANLLTGISQAWAPYYTAQAFIPLLCSAHTASWARNNTCDSLGTTDQWRPDGQKDPHAPRGLDNSAHLREPRGRGPPRESKARNEKPTFPATKAGQDKRRQTGHARPSAFQRGGHTGIDSTLRPPPRTVHKSSKKTLPYPREEHTQRDCHPRERRTGTNQSFNDRLQTTPDSVAGAFIQQRGEKHRFNTRSGERVKT

SEQ ID NO: 963217 - protein, 184 aa, Homo sapiens
  misc_feature (184)..(184): Xaa can be any naturally occurring amino acid
RGGRTVPGVTVKDVNQQEFVQSSWQAFLKNVRGSLKGSPKWVGYPVKAWPMHKRMLCSPTIEELFLHARLVSTGAGTLVPSGGWPLGGLAPMTPRSMGATSERKRCVIAHRPLFRPEGSQDVWPLPGFHPKPLEGALKNCVEKRAPTGLCGAEKLEHPSGDTNGDLGQNSPDQVGLLPKQSKAX

SEQ ID NO: 963218 - protein, 131 aa, Homo sapiens
LSRAGDCFSGFSADWDLGCPSESTALHSALALFGLIIERAMGPPVQGGKHACVVYIVDRSVTHRREPFPSKTGDAFMPIYNVFGQTWKTCTGHHRHFTIACIYYQCAKFQTCNTHGAIANHCLSTCLANPN

SEQ ID NO: 963219 - protein, 144 aa, Homo sapiens
VRDSGSRPPVAAPPAPGRRPICCPRGSWGMEHAAQPWPMATGDGGGGGAPVAGSPTCSAPWLRGFARNRQTNLSCTAANALAQPKAPELPGGGPALVGAGSLPSVALAGLPVTPVSPARVPPRRANVFLRGKVPSSTYGPSGAN

SEQ ID NO: 963220 - protein, 124 aa, Homo sapiens
MWIGGGSRSVGGFSLYASSDCGINTTGHSRALLRAVLHAWCCLRRVSQVEDTVTKRVLQCTDGSSASLGIAFTCLVTKMISVATNIAFFTLSQRRDGLLPPRQDISMMTFKKVCRVVKVQLCCV

SEQ ID NO: 963221 - protein, 112 aa, Homo sapiens
GKMAATKRKRRGGLQSGEEAKKKRNRCGAAAKRHATAEEVKEEERDGSQAPFARECGKFKERILIFSSRGINFRTRHLMQDFENVMPHSKADTKMDRRISYGDNEVGEMKNV

SEQ ID NO: 963222 - protein, 80 aa, Homo sapiens
VAGSFKMRLLLLSPSGGVCDGPERGLGNLGGCPARDYRCGYATGPRVSDVPDLCCPEVIGGCREEYMRVIGASVYPDIRY

SEQ ID NO: 963223 - protein, 109 aa, Homo sapiens
  misc_feature (82)..(82): Xaa can be any naturally occurring amino acid
LGLVEDLRWRRCTECITASLRGCARRPKYESTNKCPETRQLIVWCLFKISENNFFLADRLIHTDEAGKCAEDGVRSVWPRLXCKGLDLWLMEPRASPVQCGSPCLSLPE

SEQ ID NO: 963224 - protein, 67 aa, Homo sapiens
DGNAEITLSSASLTLGAVDRSCSYSAIWGLDSALHVLTEKSTQEWIKDLNLRLETIKILEDNMEKPF

SEQ ID NO: 963225 - protein, 37 aa, Homo sapiens
EHKMYTRLCQFISLNGEGLIYERGSGEQTSYSIHIRS

SEQ ID NO: 963226 - protein, 103 aa, Homo sapiens
MAVVGSMVAELPLEKCCSLACIAPGVSILYAQAVYRARGTCCVPVPSPCWLIVLACNLFPRWVLAARSSGFFDLACSPFSLLISKAVNLSRNSGVKVCRLFWD

SEQ ID NO: 963227 - protein, 69 aa, Homo sapiens
CAVVLWTRRTLISVRLLSYLMCVPAPDGTHQMDIGHRSPLEAPKNYSYIELVTLQGRQTHYSPLQVDIH

SEQ ID NO: 963228 - protein, 104 aa, Homo sapiens
MALYHTEERWPKPLLRPEITGPSSFKTWLIGVTTFSPLFSDIPLEGEPLKEGNKWHFLMKEKHEHDGHYEKSCLSNDVSENYPRVGTNIAYTHATHWPTKRKPN

SEQ ID NO: 963229 - protein, 111 aa, Homo sapiens
MDSKHQCVTLNDGHVHAMYGAFGTYAPPEGTDPSIALEVTKSDNEAGFRHMAFVLYVIQYSEEQVGLAPSAFEDVVRVAVVTREHDIFLTSVKRFGYHFVIRPELVRSQRL

SEQ ID NO: 963230 - protein, 218 aa, Homo sapiens
SHCCTLSSIDDSAGGHVTSRGRHCRDSVASLHGYIIRLIAMGRRSIPKHKAETAQMSIHSCLVVVHPSSWRALQYFELPDASVNVLSRFIIDEVLSKTDAKDHALAKTRTGALVKIWSKRTMSVYEGETELPYYFPSQRAHTRDQTVQRIPIGIREASFGLLSSSDSEYLPIEVTWRTIPGLSYCVDFCEENWEQNVVINTCLPDDQGSPYEQEAGDS

SEQ ID NO: 963231 - protein, 264 aa, Homo sapiens
  misc_feature (40)..(40): Xaa can be any naturally occurring amino acid
MLACSASLRSVPDYLLLCKRVAVGEYITFASAQWPECKYXHKWKEDVESTGMQHIVVHYLHYKEMGCAGESRAVVYLARDCHDLYRISQYASVNCLSELMTLNGPVLSVVKAVVGVVCQPDATWIMYFTVLADRGTIATIPDSENNRSTNKRMANHCFREEMEQGIRSALIEDWNKLFAKDKGTHLSERVLPLSGGGPGGEPLEAFLVFNLHKYTMLANFLEMGIANRNLIPVGFDTFRKREPRQSISGFRTQYFPWNLNVTRW

SEQ ID NO: 963232 - protein, 69 aa, Homo sapiens
ISWGQSKIIRSRKEAEDLESGEKLDVYSHEGIEGKADGRKYHLLCNVMSCCSIELHASAYNKKQGKCEL

SEQ ID NO: 963233 - protein, 80 aa, Homo sapiens
SQLLGRLRQEKCLNPGVRGCREAIDSTTDSSHGRDIAILCLVKSNAAMLTVYEHRSGFNQFFPGVLVNLTKGEDVQKLIS

SEQ ID NO: 963234 - protein, 182 aa, Homo sapiens
  misc_feature (24)..(24): Xaa can be any naturally occurring amino acid
RDSGEVRFQCMVFPAKRFWLWCHXMEGVRVGLFLAALWLAEPEPNGWLASGDRFSPRSKERHWAEFVLCPGSAKAAYGVVVVMDTEHEFAEKWNIPVESYSLCKELQKENPVLCKRDSSNPYPNFNFNISHQGDLCSAVLLNLSWQVWHWIYWKTSFPGRGSIPEFFHIMTTNVYQQRMGNN

SEQ ID NO: 963235 - protein, 106 aa, Homo sapiens
PAARGIPLVLPGRLRLPPRRLSSSALRVPPFGPRPGSGAVAVAGPARKGQDFLLGGAFPNPGRYVLQVKGQGGEVRARRPARRVTPPGTGHTKGPGRGLWGAPGGR

SEQ ID NO: 963236 - protein, 96 aa, Homo sapiens
GSKQCGLPQAVKQFLVNFLLSRNSNLQARHKHRQSGARYKFSCGPLQACMHSIFATFTHGWHQAMHIIWAHQSAPYIICIHTKHIIIRPSKRSATL

SEQ ID NO: 963237 - protein, 84 aa, Homo sapiens
RRTSSEQKMAVPPRYADLGKIWPGMSSPRAMDCALNKAVIENKIWTTWDGAISQAQGSANTETTKVDGQSGKTKYQDGTGGYGP

SEQ ID NO: 963238 - protein, 107 aa, Homo sapiens
  misc_feature (11)..(11): Xaa can be any naturally occurring amino acid
MLHCPIRSSCXCKWCTLRRRVTTNLLIKVLYLIVEHSWLYGTEYIYLYYEFTTKLSINLWNSNEHTYGMYDVLQQRMHSMCLIVTISHQMAQAYSGHNAMWQHDADT

SEQ ID NO: 963239 - protein, 89 aa, Homo sapiens
  misc_feature (4)..(4): Xaa can be any naturally occurring amino acid
LRGXSLCIQQCFGLEQIQWALSSSLLTSHPDYPSSGYATRHGSHSFIWPLSKHICGPLTRQPVIIDGYMHPYLMTKTQNHLSIHMTICT

SEQ ID NO: 963240 - protein, 407 aa, Homo sapiens
NKHQQDLKANTNNQRSHTNHTTRSHPNRRTPPHPHTPKNTAPHPIFPPPHPTTHTPSNTLNYDKHPQTPSPAPQHPPTHNTTTHTPQHPTTPPGTAPERPHPPPPRPGQTTHSDPRTAPDATPPYSDLHRAEGAGHPPPISHHSVRSVPPPTVATGSTYPHALQRRASHRADPPPPHHAPPTPQATPPLATQRGPRKPAPAVRPRRRGGARAVTRTVRPPARATPPTTPPPTAQRRAPGTLLQQTAMLDRQHARDLPSPLLPPLANRRDSTGQRCRRTQGSAARRRQRAPSRSPRRAKPRDARDPLATPAAARSGDTPRAQGLDWRSTAAHQTRASLRRSHSTGGQDPDPSPETTAHLRTAPPPAHQRREHQCNPPRTHTTPPRSARPDEQPRRTDEPTSTHNARHP

SEQ ID NO: 963241 - protein, 121 aa, Homo sapiens
KPSLHCSSSASLPAAVASAAPKNKGKGGKKQTSGVRSENESEKRELVFKEDGQEYAQVNQKCGKWTARSNVYRWCKEVMSRSEEELRKRGWINTSDVIMGGLRDYQDNKADVMLKYNARRS

SEQ ID NO: 963242 - protein, 377 aa, Homo sapiens
  misc_feature (312)..(312): Xaa can be any naturally occurring amino acid
MQQKHNSKKTISHNRQERVAHTPEKHNNSKRTEDTNQQNTQTQKHNGKRNRPEQIADRTKSDTPTDIRTPNTKRRHTTESEMNTKRRRKIKGNKDQKRQREASRGHDTAEGARRQKENITQTAANAQAAKRGQRALPPSKGRQRTTANRHATEKHGKQDYYITTYHRKVRKKSRTNRIDTHQRRIPRRQHTQQDIQTEATRKRETTPRLSITAKKTKHEHHAQNNESHTSEDTQDKSTTSKEQRRIDTNGNHTTSTRKEKQRRTSMQERRKQMRYHKLRTIHKQTASEQLQSDTQRATGREETDDERVRGCXDEAKQKRAETTRLASIGHNSASLRTTTIPDRREKHGSTSVDNATSTQETEARDVKQVAQGDEAAN

SEQ ID NO: 963243 - protein, 98 aa, Homo sapiens
REILQVNHDVKRNRCIPFFHMRKIEGIKISHSEKAFPECDQSRTRVEKRGLWLRTSSSYGDFIMNWKKRVREASLRICLISSGSHNALWGSPLLGLGG

SEQ ID NO: 963244 - protein, 67 aa, Homo sapiens
APPTMVRMNVLADALESINQLPENERARLRRMSQFESLLSPLMFDRSVFASACDRLTDSEFALGWKL

SEQ ID NO: 963245 - protein, 95 aa, Homo sapiens
  misc_feature (5)..(5): Xaa can be any naturally occurring amino acid
  misc_feature (34)..(34): Xaa can be any naturally occurring amino acid
  misc_feature (57)..(57): Xaa can be any naturally occurring amino acid
AFQSXTGAEERLPGRNAAMAAQGEPQVQFKLCMXMSGRNGLVPWKKRPLVKSVHCDXGVKFWRKGQVHVLAQPCGGVVAEGFIPLSCSTPNRGPY

SEQ ID NO: 963246 - protein, 103 aa, Homo sapiens
VPITGRGPLPSTYTLGSSMTVLGGCRGVTSSFMCTYCYSKSLSLQNLQEDTWLIKIRQLGDTKHLGEADDEPRLNYLLRTPRLPCGERGGPPKGVFRPAVATI

SEQ ID NO: 963247 - protein, 270 aa, Homo sapiens
MSSRPGREDVGAAGAAGVPVCAGREQELQRRREQKAGGHDAQASCSRFKAPGVLLREKTPRGLIRDDDDYSRGRLAYPDVPWHLKQGQREYFRGFSATPTKEGTCGLPSGGTTNVQMLLPGGWAVAQTGYGSTRRGVDQKGLPLFFYQEGNPKRLRAVKRWHIERSLWFCLSLRRTIKADFETGAVGDYQAVNNPFTWGRSYPQIEEREPASNVPSEGYTPTHRQTIITTTTFWGALGPQEEVLKTICWGPARPMWDGILRIRVPRDSGQ

SEQ ID NO: 963248 - protein, 111 aa, Homo sapiens
LIEQPPLKISRWTSQRCQSVEVSSVDQGLERSLLGAHGGKDPRRVVLITPTAVNVERILAWIHHNRENLQRLEILGGKTKSGQPLQSDPEEDDKPCSSHTQKLTGPRTAEA

SEQ ID NO: 963249 - protein, 164 aa, Homo sapiens
MYRGGLCSAQGEENAKRRKSGLNSVIPPKHIAGRLHVTITARWIQGTLGFKILTYIGTDTMLIFKPRKQILLTNDWFWEDAHPLLTKLPWCGRMCPERARWTPGKVHESSKASPMLLWAPFALYNGLARGRYTKKNLFTTIRVECISDKMEAHKPICWACGPCY

SEQ ID NO: 963250 - protein, 109 aa, Homo sapiens
MKVCSYTPELRHHELSRRNEQLWTWRNEQLQTIRLKTVTTHRESLQLHSKASETTNPPEGRNSDTSEHQTEQTPDTIFKNCNTHREGLRFILEVSKSKNPPFRTQWGCI

SEQ ID NO: 963251 - protein, 307 aa, Homo sapiens
DVKEWVVWAAGKWERLIGACGCEPSHCRTLDLENAYVIPDSMELYGLVVGANTLENNWQIHTTGLERLLGLSMDHSEVCGIARESSRRRLKKNLGRIPEMQADVRSREPGWREHYVGLPVVRKWPSVANGRFRIDMYGLAVDRISSFGVCRPSEIDYREERESIHTRPYVSSKEGMNAFLSHPGVTVPVSRDMETAIARWPREMEIRRRRDPFLKVSKCDRGQLTGSDDSCGTSGVGEHTSSDSVSETSAVELFSMALEQYPRTPAGQGQRTCWRDEAYTSVTPHIGDMYETSPGHKRKHASYPTRH

SEQ ID NO: 963252 - protein, 120 aa, Homo sapiens
  misc_feature (107)..(107): Xaa can be any naturally occurring amino acid
AQPCVVPRRSRAHACAAAGPHALLSRTYHAAHTPSALRRHLLTHASHPPLQHTQRPYLRSATAALAMPHPPPAAQSQPPSGSNWPLFPNTPGPTFAHRRTTEPLAHXTTNQLPSVPETGV

SEQ ID NO: 963253 - protein, 207 aa, Homo sapiens
GGGGGGQSQSWNQGYGNYWNQATATSRATGLCYGCYDYSPYVLLLATGPGYDYSQGSTNYGQEPADVVAIRITTSHTEAAAVWLWGPWKTATEGTEAAECGGRQVEWVTSQMFGLTGYGNYLNQATGYQQGYRAWLWRYDYSPYGYYGYGPGRLTVRVDTNYRHEPATVVANQNTYKPLLRQAAGATKMIDTCLGLRSGVHSIMFQI

SEQ ID NO: 963254 - protein, 183 aa, Homo sapiens
GRTVAGSFTDEASAASPSGGVCDWSGREASANLGGMPSKRLTDEYATGPLLKFQILLLPRALLRRVFEEYTAGLSRQRKPTTSAIDRRRITSLNQLYRHIAILPVRSLKTSINRPELIARQGSYHAITSAMQRLLAIMAAEGPKTTLTVHCTVLNWLPPSSHPPTDSHNPPVLPHTASAHTDE

SEQ ID NO: 963255 - protein, 52 aa, Homo sapiens
MTLEQQDMVCYHSSDSRPNSFVQHLRWCPLTDRSFGQEGDASYLASEISTGM

SEQ ID NO: 963256 - protein, 67 aa, Homo sapiens
QVRRTKGITDTTDPCCFDRNLSDDRSGIWENMSVLLVTSRDWIWRDDEQLIPCLILGFLPTLAGASP

SEQ ID NO: 963257 - protein, 149 aa, Homo sapiens
MFGHSENPHSQKTNIQAAWRLISQEMNLGQKLSHIPFACRKNRLKLPAVDSHPQHDVQRAVQVKLNLQLIRDIRRRGKNNSWLLRIAENKKDLVTQYSYELEPHDSYDLTFRHRTVTHMEPKFGFANMEQTNGRKDDQKALSAPYLGID

SEQ ID NO: 963258 - protein, 43 aa, Homo sapiens
MRELWGAPSELETHCGALSANNAGATRHAKDTRRMGARLSQPQ

SEQ ID NO: 963259 - protein, 373 aa, Homo sapiens
YYTTQTYNTEHTLAYCLNTRKPSTALQHNLRTTQPLNGPRSTLRTARLSFVQRLKPTATLHTPAPTRHNTNCTRANCAHHRYVAPERARTLQVVRYSNASARLCAPEISKALAHKKTLAAPPHEHLNLTTLLRPHHVLANPCCGGLGGGFSHTFGVATYPPLRPPWPSPPFPPPRSLAPSSPFGPRSPSTSSTPPTAPAWLLPLPPPLLRPPPATPPTPFPLLPGAPSPPPSLPPPPPPPPPPPPGPPLPLPPPPTLTPYPLGLPPPRHAQPPWPSPRPPPSRRPSPPFPTLAASTPFNPWRRPPPHPSRPFGPTPPLSPPTARSLYPSPVPSSSGGPPPSSSAAYHRSSPPPNNTRAATLCNPPPFPSYPPP

SEQ ID NO: 963260 - protein, 390 aa, Homo sapiens
VAGQPGLAMRGCVCDAWSWHVQTGGVVHPPGCLLTCVWTHFTPELAHTALDNQQCVLCLRVAISARLTGHKAQTTLHCTRNSFSASSILCTDTHCTQSTDSPATALSSRHSLHLTSSRNTALATCAHLLSHTHTRLNLSYGVNTLSTLLDLVFTPPPCDPLNTLTIQPTPRHTSRPTLTPTPLHFAPHRLPWLPLTLSPLTSRAPFNFLTRLTLAPPVHSLLRAALGPLYTHRNTPAFTNVLYLTPWLATRPTSVSPLGNLALGALPLSPHSLPSSPLSDSQISSGQTTTAVCQPRSARRRTFFGASAHELPATPPFGRVGQSRFLGRTRSLGEPSLLLCLFTLVHASLYLSQSLSMPILVERCLLWSLTTTVLPLGSAPPQRTRGQLST

SEQ ID NO: 963261 - protein, 81 aa, Homo sapiens
TPSFEEGKHGHQVLRRKRMSPKSETLLKSKKQRDSGKLLIFSNAGLERGNATRWLRELKVAMRAGWACMSSQEREEEFNEK

SEQ ID NO: 963262 - protein, 74 aa, Homo sapiens
  misc_feature (45)..(45): Xaa can be any naturally occurring amino acid
TVGRLRASFGGGSLGVRTSESFVLQGPVFFAPEREASYLCTRWGXVDMAGFLKMSVSVNLLQTFQQVFGAIYPS

SEQ ID NO: 963263 - protein, 118 aa, Homo sapiens
MSKSESSYRARTAEEALHGGWSFEDRTDESLRSHWSNGERSGLCGNERSRDTKRSRAWVVTYATVEEVGAAMNAKATQGGWESVWNQRELSPEKILKRPGAHLTVKKIFGGGIKMKDS

SEQ ID NO: 963264 - protein, 35 aa, Homo sapiens
EKKTQNSTTEEERQTRDKEETENEERKKKRKNRTG

SEQ ID NO: 963265 - protein, 184 aa, Homo sapiens
MTDAVVSFAMDTYWEVEGWPSIVPRQGVAAIERVEACNGAGAQPLASETRSLLYKRKNKGIYTMCSGSGSPDGIREYMSLLRAVIHGPHVIEIEFLHANGRVSFCRIDRLTSMHESFARGWCGQSSNHELQARIFAQESLASSGAVAGIIPGFVYPLDCAVTVYRRMWGKAGAEREFRGSLNAW

SEQ ID NO: 963266 - protein, 71 aa, Homo sapiens
ALRAWNPYASLGVQHDELNRALGMTCQALDSLLTEEFVKVNMLEGGGKVVVQYGIRCKDGVSVGVEKLVVG

SEQ ID NO: 963267 - protein, 119 aa, Homo sapiens
MTMRMAEPLWLDRGNSRQHSAMNYIGGSAHCKTDPEHPKSNGQGTTHPTESPISSNDEQKYSNINVWDMDGRKTYKQQGHTQHNQESTTAEDTTNQAPQTGSRQQQLQNLGEPTPATTT

SEQ ID NO: 963268 - protein, 119 aa, Homo sapiens
ARDVYPVIENEVGAVAIQAERLSGSEVRRKRGWSSFNRHAYADGASVASDEWAMVKRSRVQTGHFMRTLILPATSPWSLLALSSICGLSCVFLMSLVHRATFFPHWALRLVATCWLSSS

SEQ ID NO: 963269 - protein, 265 aa, Homo sapiens
MADCTCYTFLLTTYTASLRTVLHPNNCDWNLYCVLLTLYTFTLHSPLHTQLTSLCYSVRTPLTTHALTNPAAHVLLHRHLHHATAPWRSTRKRTRGTHIHTVALRTPNCPLCYAILSCGRPEMYVIQLCYFLSIDPPWPLLGYTTRHCINNQGHRRPPIPCITYPSQGAFPKQLHLNKELSETWNAINAISTRTHIHLWDTHTQGPTHTRFLQHNLTQTNTQAANTQHCVYNPRITNTQTLKTLTPQHAPLIHNRHAGLTSTRPT

SEQ ID NO: 963270 - protein, 102 aa, Homo sapiens
MLRRRRMLASCYSDPTVSINKVPYEASSLESVDCRCLKRRSSCTCREQLHLRERYLLESASDLEMLKIGDVSRCPEVHLRSSYSILGERERNRFDQTRLSLI

SEQ ID NO: 963271 - protein, 179 aa, Homo sapiens
MNSPLTRSESCVVSIALAMQQCAVTHECHGDLVAKMRLVHNIYTYDICEQRHVVPDHAFVGPTWVALRRALHVMLLYPWKRKRLENVRTCRTYPADADASLGVGRPGGGWALDSVPTWISTGTFCVRGTANCCLPGAPIYFVDISWAPGAFRPFWFPPISLPKLSHIPIEGGSDRAQGI

SEQ ID NO: 963272 - protein, 90 aa, Homo sapiens
FWRREDQQVIDAYTYPESRAKLGTVRRHPYQAVVTYNSEHARVSRHTLQRSMSWCKSGVLLELAEVSRNINGTHFACKSFLTTREAVRGR

SEQ ID NO: 963273 - protein, 163 aa, Homo sapiens
MALLPIRSSIQRTCPQSRGNELAMNAQLTLQQYESFKITLHFLLCAERLTAHRHTKLYTLTAHQHCLKTNCHAYQDPGTFDLSLTPYRTDTNTPNNIAQTHMAVTDDSALWVTRPVIPWASSLRPSSPTLPTSLGYKAIISTLISSPTTNPNSTAVLLKPLNP

SEQ ID NO: 963274 - protein, 114 aa, Homo sapiens
RSSVSAMLVSPWDGFLLLFLRGGVWVQCDPQLQQFQSTVETQKQRLPLQLVHQMTELMWGEVHGQAWAKVGRVGLRPCDVNCVERFDVMTSQFILNRLEQTQKSKPVVSESLSD

SEQ ID NO: 963275 - protein, 180 aa, Homo sapiens
ERAYQKQPTYLSKQKMRALLGETGKVEAPGDYKNIGLGFKTPQGRLLEWHLHCTRNAPFAGNVSIRGRILSGVVTRDEDAEDHCHPPRLSALHPQRSNRLQRGAINDTCLVHLSPSGFTGRTVSDEIRDSSGDVPGSDARQLAAVNRCSRSPDGCAGRKASQFQKLLRLDIGLRSTQNDT

SEQ ID NO: 963276 - protein, 292 aa, Homo sapiens
TQWEDPRSQGQLNEKPFTCKAWEMRFTAGLEFHTFVDHNRRTTTYYEIPAQENSALDNGPQIAYARAFKANALQYFRLLVSANWPCHSHIQALQLHKKTHRSAGTSLSTDNEPSAPQASAQAPYGWRCTFLPAHHRNASHHLTATRCYPPTQLRPPPLSRHTTEPCFHTPNLVLCTWLMTLTCIARTRALTPNTCHFSPTIKHPPRITPLTNPNPQRIPTLDNKEITIPANIHSRRNELFNFSHPTMSTHPSRIPTYGAKRTLSTHSNPPARHHIHLHSLSPTFPPTLTDPT

SEQ ID NO: 963277 - protein, 174 aa, Homo sapiens
MHRVVARMHTRLCTLSASRGPGACILGISLVLWGVQSSASEIFLDPDVSRLAWLVRNETASPIVRFGHGDHTIIGGVISPLTGLFGGLPKRAFCHNWGRAVSGGPVCAPARIANGVLRPIWPQGCESVAGSRDCMTEDAALNGFEAARFLCWIHVCVNSQLRTGFGSREQHVYL

SEQ ID NO: 963278 - protein, 137 aa, Homo sapiens
EWTNSSMQKAVSVSEQIPSLMYATCNTSTALELLRALWTACFCIPCALPWWARTSWPVIKRVLCHCVARMCAVHGLAWTRSRFLWPAAIPLIFKALVSFAKLFEPPLHLHCSLAVPGPNASMLQRCLHCFMTHSELE

SEQ ID NO: 963279 - protein, 407 aa, Homo sapiens
MITDVQLAIFANMLARVALLACSFSLPPCPPPPPPHRTDTARCAASLLPQRFHGHISSCSARLRTRLCTRARLPHISTYPTTPLLLRSNHTIPTAKPNHPLGTHTISKTKPFFTYIPSTHALPPSNTPYSRHQPGNALPTLDTKESPILTESSSAFLSYYHTLTFHHFSSLANNYLNTPHLLNETHLARNHPTTTTPPHHQTTPHHYLHTHSTTAVSQLTTPTRNNKRPPAPHERTKTTRSSRWRIGRRNVMKQKEGAQTSSEVVSQEERTNQKRGVRLRLREQHRWGGGESASPNSGRHTNTVGAQYHTTMTRQTRRKPSSNTHTKHKHISRSSSLLQPSTPLRPSLMHHNTSPLLPPYVHIYLSHTRLHILLLTVLIINTTTLITLSHTTSLLSSITSYLTHSTF

SEQ ID NO: 963280 - protein, 174 aa, Homo sapiens
MYSALTKLRPLPSSHPTAALNTSQSSAQLVNTCCYALPKTHKLATNETILLASHLPIVLFHTMTTAQHTTTTPHTHSKSPSVPPTNVTMLRSTLSAAHRSTLLPGHPGTPPSEVPFPPHKHVHLAFLWLRRPTRLVPQHRTWASNVAESAHNLSVLHLFTHNNTCTRNSLSYAQ

SEQ ID NO: 963281 - protein, 231 aa, Homo sapiens
ANDAGLPHLLSWIRDTKLIGTLVALLALSRQSILNTDACPRARDAQLSLAMQDYTWNFARSLCTRPVTAHCSLGTVHACCRTNRLDTLHRTKERTTRYSWILTHPALNNHSLLKIYSQTPCATPGAPMSHNHLRTRKNKTYTLNFAQNQNFVVHMNDSCSFRAQANHATSPGPFPGFPAPKETALTRYQTNDTAGTTRHSYWAQNASKYGYLPVTYLAPHRLDDSSVETPS

SEQ ID NO: 963282 - protein, 71 aa, Homo sapiens
MESPGLNSSYTPRRTFGTGRYSLRPPLHKMGLPPGHSSYQKRPELHGRTENRRGRTRMALNVGQTTDHDPT

SEQ ID NO: 963283 - protein, 474 aa, Homo sapiens
NRKDTPKRHNKPKPRTPHDINDTTDAHTATPPPRDSTHHIATTDDKRQYDNKHRTNRHTTHDTHAPARTHGHTHPTIQHTTHHRHTHNHNQHTNAPQPYRQQKPAAGTHHIAHTQTHKALQTQTPLTQALDTTPKEQRIIANIISDDATSDIIPENPPHDSNAEYKEDNEKHTHHTIKCRVQGKGPISIEIPRGTQHIIESETIEEIAHTSARKANRDKAELERKTGSQTPKSPTTNRPSHHTTERDSDDEHSASQIAQTERQIDREQDARPEEALNDIMTEAVENLIKYRYNSSNRTKQSMTSIRVQSQQHRRRDKEKQRHQQTDTARRRTLSTHYHHLHNNRKCKIDRNKQGDHGRRIPQSRHHTHRMEIPRERNHHNTNEKIDTYIHHYPHAAREPNRERTDHTIRTMNASQSACNNLRTNRYDTDTQTRHTAPPTPHPTDDKPKSRNGSPEDINTRPPVSTTSLLMQDIH

SEQ ID NO: 963284 - protein, 348 aa, Homo sapiens
GSDIVFKPCVAIPARTAVMPREDRATLASSNYFLKIIQLWDDYPHNCFIAGSQTTVGSKQQHARLRMSLRWEGCCVLPGATNHHCMRTGHSAGPPCEQQPSFLAVNCCLTTPGAKCWRSCCSHQQAHAPLHLPHSRGPLLCHGPKLTALASPVLPRSPGCPLCPLTCLHPLTLLSRSAGTATFAFLRRPLPPQDTPPRFLTPIAVVAHVAYFPADLPSQPPSRVGCPLPLSAPTSPLSRVDLGFASPSSPPPSRLPFGAPDLPLTAFGAQSSLYRSRSTVSPLSLSLVSSEQRHSCCPSHTPDTSPFSTPPRFAPSPHSPLPALLSSRSTLFHTSHLCLASPPRPQLS

SEQ ID NO: 963285 - protein, 93 aa, Homo sapiens
VCDAADRLEAGRFNDLGAIIFWLLLMTLFQLFLIRLKIHKAYINELRRTLDPALVLQTVRPTVTKLLPRQTLITTTCDRTPVRHDTGKTLSRN

SEQ ID NO: 963286 - protein, 141 aa, Homo sapiens
RSLASISVGRNEIRWTLFQPPPPPISSRVVTSGTIFSVISCFWEPDSDRLWWLVPFAISTMSSQIRQNYSTDVEESDSRDLVKFCDLQSSYTYGLLVGFVISDRDDVASWKGRCWHFFRRIGRGEKRRWCTKRSPEDAKAA

SEQ ID NO: 963287 - protein, 252 aa, Homo sapiens
MAISWPHLPLPHEGGQYLQINSASGEHMENEMAHYACDCGDAEDPKRSYGWIEMWDVLIVRYDLSFMHGSHKVPLVAEKPLKEPKTVNVVQLDPVKGAIGKAYNEGCEHWVMEICHCDECYITELVMLCVENGNSQLRAEGNTFQFRNAMIKRRDAEKTDKGQTGPDVMERSLRAGGSVSDGHYIQVRAGDYDRSEFALNVMKGAAQQQRVAGQERATRGSNTRRTRTQRQERSSKTQIRRRHGPTRQGKKE

SEQ ID NO: 963288 - protein, 111 aa, Homo sapiens
MGFLASSENGHEEETIWAFLAGNYSSGDNSQNNFGSGFGQGWAIMNKAAGETFMSRLLVVGHKWSTHWDKDQEVGLRDYMYYANQSGQIPGFYTEKPKTIKLRMDWLTLPP

SEQ ID NO: 963289 - protein, 258 aa, Homo sapiens
MSIFVDTSYLVACYPIRLHLTFANNPWAPLTEVTTLPAGTRKLVWGGHLDQTFLSKGPILQTPVCPGHGNGDQRGPNTLEPDHKQTSTKVSFATYHRNGTTGGKPTGNLPIRAPRTALNRGWELPKKSKPPPPATLHTKTPTTKAEATYGINTRPRANINEPMRETKAWSPLPWAPWGPTGTSHNNSPSYFAKIDTGARSEDNHQSRDLLVTYHTWDYTHRYAPLKCRHMRTLEHRTTAATAPPHHPTANSAGLTPHT

SEQ ID NO: 963290 - protein, 88 aa, Homo sapiens
ALAVQTMEMMLDKKQIRAIFLFKFTMGHKAAETTHNISNTFGPGTANERTVQWWFKKFPKGEESLEDEDACGQPSEVDSDQLRAIIEG

SEQ ID NO: 963291 - protein, 209 aa, Homo sapiens
MTSTLALPWLPEHSNASLVLPTRTAQPSKTLNKRAKPTNTEHTPQSRTPALHTMTILQTNLAHQSLFRKPQGHSQRLTRAQLSPVNPNTKTHARRTFTLPKHLPPSTAQEQERGQHTQTLSLTGLLDSPTPPWPGITRPPRHSNTRPGKTRYRLEQLYLLAKSADLIGFILEPDLYRNTKPYTGQGSTAFHLTKRGMRARTTDRGISRH

SEQ ID NO: 963292 - protein, 395 aa, Homo sapiens
SFSQRRRCVPAGPLATELKLAGILADSHCIQRTNKQANATTKRTEERYDSIQACKLLLNNNLRKEQPRTHCTSEPKRMSEHAKARAGTKPTDSTAASKSSRTDGPQGQQGTPLLARNGCTLHISSQAAFSQRKDYSTNDGHFYTHTAHDYALYQDTLRLDNYATADYNGSSFQKTQTFITLMPARERLHSKHQSIYPLILTARFYPCTRHLEYFTNTIITCLTRFRHSPAIFPFAPITSLAPTTPVGLLTWLPPIVILLVPSAIPLAHWHSCTPIHKLLRLLTTELFALVPPRLWPRSSPAQPPYYSPLHISTSNPLPLPFSLTLRSQITPPARHTPPDATVSSAPLFHPPFSRHTGPHAPPPPTPTQRNRVNTPPQDTTQHQRTVLPPPYPPPD

SEQ ID NO: 963293 - protein, 105 aa, Homo sapiens
MDSSDIRGERTWRSCAVMAYAHCLDAVISHPFVSKERYLVSIAIPPLSHPPIGDERIFPWQGSSDELLEAGEDTVARPMKLEVYGSSPGVDDTRARKKEVRSDRH

SEQ ID NO: 963294 - protein, 229 aa, Homo sapiens
  misc_feature (154)..(154): Xaa can be any naturally occurring amino acid
FIRCPRSILLPVSMLLFDLARFCLDTTMDNLSFNWLQVVLGVAVYELPGGLRTIAASAAEKETLERRIGEVDSIFGGTSIQHLYLFPVLRGVSGEPAHRVLVVLPGNIVSEIIVLATPFLAHPSYLDRIADFARHSLQRHLASFFVAGSTIASXWNPSQPTPCGYIRDNPSCTALWPVLRVELYRFDRGSHQERPSPSVVTWATRHRGSLALPLAPGRPSAPGWPVLVS

SEQ ID NO: 963295 - protein, 116 aa, Homo sapiens
MSKQATSRVLPYPVIMRTRITRYSGIHLRTMRRKTGHQFVTRLAITQGFASTLGVHIAQGYINSTEQWLPLLRDAPLCILIHDACWQPNGVQYARTQSDLTGSARYSDAIGAILML

SEQ ID NO: 963296 - protein, 402 aa, Homo sapiens
LSLPTSFYDLSAISLAMGQKVAFQYVPGQGRADRDCGFALRHNHPGTSPSLNQLQCRLSQAPWCVLALSPCLPTFGTLSSQCRRPRTLANTPPLRRMSLAAPSRLPPVAQRPTPPSALTSKLCLRRRRSPPRTHGTPTACPLCVLEREPRNAPRHGLIRLVLIDFYSFSLTSPSRAPARTRPDTLLTHPDAADFPLTSRVRPRASLASPVPHARPLCGTKRKCRLAFSVPFWFPDDLLVEAWERGGSEYSSVSLARSSAPNAPVTRAQLAFACRRPPSHSQSACPPHLSPPSGWIPGFPQMVLPPGFGAPPLRVCPAAPPVRACAPSGPALFRRTCFPLRLVGGPRHRAVCYAARVSVVAGTTVVPRTLLLLSRARHFSPPLLLAHRELLLSRGGPPFYRHL

SEQ ID NO: 963297 - protein, 125 aa, Homo sapiens
CCMTVAPSVGCPTCDVPCLVRAFSATAALRPAAMWKDTRLDKFIVSLSCRSQCIQFILCDQFPHAMQPAVTQSCIPILTGTACCQWRVQVTNALYDFDRGNYLLLDFYPLDFTFCVVLQKLLLFT

SEQ ID NO: 963298 - protein, 332 aa, Homo sapiens
MSELDTQSSNLTNAIHHSKVPATDSSLLRDNGPQRIACRSLSLSRYRRTLPAWPWRSTGLLLRCTGAPACAAPSARVGRPPGVFSPLGFRGRRTLSPRRVTLDFHHNCASSFSLSGATSLRMTRPFAPRRGPASMLLAFLRGAKGFPLAPHSRAPSAAPSSQPLPPASLHHPWRPLTPGRSPRPSRHVFTGSPHDPTPPPLTPGHPWGGVGTSAGALALLAQLQLFSWGSRRPSPLAVDFLRCPLRMRLLTWRLPPPLLPPRGLQRGARPPVHRGPPCLAPACTPPHGYPHGTLQHASPFAPHPRHPNRTSASTRNPTPFTRSMGVLCTHPL

SEQ ID NO: 963299 - protein, 157 aa, Homo sapiens
RPSRSAAACSACAHAHLTTDELNPTGLHCLSKRPSKHFFYFIDTLFPAAYTRSDTSGRAHAHTQLAPNLSHWPLLSAAAHRPGSAPPCALPPYHSHGHHYSTTKSAHSTPGASSALQPALRSYSSRSKLAQGTDYDSPCANTQQCTPSAPATLTRTR

SEQ ID NO: 963300 - protein, 66 aa, Homo sapiens
AFTRPPVSRCPGRVLGGVVMRHKGAPHLRPEPDLTWYQYHSFDVIGFLLAVVLTVAFITFKCCAYG

SEQ ID NO: 963301 - protein, 49 aa, Homo sapiens
SPPPPPSPPLPPPCPPLPSPPPPPPPPPPPPPPPPPLNRLHYRALASVC

SEQ ID NO: 963302 - protein, 341 aa, Homo sapiens
MSLEHPWAQGKGSGGEVGCVDPPLKGVCRHYESEPPGVRRAYKIRAANRSPSVITQGGSHPLWPSAYHTSPRHQHRGNQDIAKIRVTSLLSQVPQENWHSRWGGPMGGAASQEDCGDLERVAPTGVLSQNIVWCSLRNRAPHRYRTITQETHIRVIVGPQYREAKIDDETEIRRPFGAALPGQAPGYQLEGALCHKRTWHTTQKILQNERTSQYTMEGSNSRSRNPNGTHPKEFMDHSTNTWHHERLINQDVEAHTMQTTTTNKDAPKNETMTTNKEGGTQVGDIIWATYEAQEDGVCEGYKLRRQAPPNLREKNRAINRGGKNKQQSDQKRTNRGANETR

SEQ ID NO: 963303 - protein, 39 aa, Homo sapiens
MVLTISRHLAVPLIDNYTPLGKHSASWQGAVGPIYDPVG

SEQ ID NO: 963304 - protein, 251 aa, Homo sapiens
MFKTGRIKTWRCVDLGDNLGPRSILGWDGGGPLGTPAERWRNGRTARGENIPARRTRLQSAPTQNTSRPRAGSRYLGDISHTVAVATVGTPVQLTPGDTTQKEESAHKTGGDKHIYTIYGGHSVTAKTLRGGHTTKSPTQLNKQRGALFTKPNHCAAAQRKKQFPDKPPPRRGKTISNKKGVQHKIHPLYNAWCPPAEQRGRANKMSRDRAHQQSPGPPRWVPAHTQENHAGHPPRAGETQTVTQPHKITN

SEQ ID NO: 963305 - protein, 157 aa, Homo sapiens
MKRSDTTWHYTLRPLAPYTGTLLGYPPKDCGASWRYSPACTNSIWPLSKPSVPISLLPNLNRTHVELILATFGTRLWNLPQWKRNTINKRPTTTLGSHAQQRLHSSRLRLKQHYFSIRKTLLLWTPKKWANMKRKTTSDHDGTPLLTRHDVIAESEL

SEQ ID NO: 963306 - protein, 524 aa, Homo sapiens
MWVLLRCKLFLSAKSKWGAPICVGPTHSRGVTRRRGRRAALLKEGQQRERGVAQCGTLTRGVCLHSPPGVSQPPAASSQSGVAHTNNTSHQTRGGDPPRGPPPVQSTSHHTDEVGRRLPRRPGETSRPRGHHAPPHSSDGAYYTTPLHHHTTAHPTNTSQRAPHSARLHPLTPPTERACSLTPAAGPTDTHTRRCLTPILRTAPPTPQQSVVRQPTHTTCPDTATESYYCEPPTHQTHYILAGAALTTLITGSTVSSRLTLTLHVTPPIALPNTRSRTPAPPNIETRSHTTHHPAATPTQNVPRRHAQQRPLHTEHNPRHGRRANTHPHQGERRTKRKHHESNTTLAESRHQQPTRGATHSERDIQTRAPTPSGPPRQSSILTRRDTGSVTPLREEHLPPTHPVSTTANLNTGSTHKAGGAHNDSLDREAYTATEVNRRQPALTSCDDSEDTHETTTDNNMRAKQHPPQPSAKHHVRQPRRLTPVHTKQLPTRLRSDQAPSRTRTVTRVHATALTYRLPQQGAP

SEQ ID NO: 963307 - protein, 82 aa, Homo sapiens
EEHFIALRIFPGGFKANFRDRFVEGGKTVVVRKTLARPIWEVVHIGEKSLYQGSGLGPRVFNNKSVYMRFSLLIRRVVVEIA

SEQ ID NO: 963308 - protein, 295 aa, Homo sapiens
MSIYRQEQYFISMFCYNEEYYRRSLPRNTELWHVTRLLSATKERRYINTRGNKTKKAVPRVEEQYHKGGHCGHKHKMWQHKAVSVKELRTRNRAGAPPSPHSIELNEESRHHTDADRAHNPPNNECGRNLSYQQRGEKPATTEHRHSVEQHHVGGRQNTVRYTHERGDDGVEGGGKHHTDNRAANNPPITTGEAPPPPEEVNEINHDGAWTKHRVIIRETCRVVENNPPKGGGHDPRYSGEQPAPGQRTNSSVRNERMTADDVVNQLTGEKHVERDEAELFDNERKRRTRRKHTD

SEQ ID NO: 963309 - protein, 322 aa, Homo sapiens
RGRSSDFIMGKEGLRVPAPPPQSPLSGRLVISPQCVKVRFSCQGGPGITQVTRALVDPGANAHWGAVVVARRKRWTAEKERSPWPCEKKAVERKEKSAQQDSKKHKKRGSGLAGARAENTTASAEYPTMRGGSRGAPYDKRGTPHKESALQGVGIQRVTNKTHEATREDDEEVISQSDNTFGESPHKEGNPQGTWKPTSVASNKDGDAGGTTVSHHKKTYVAQKRAPPRWKGTPRGGRDTWRSSNRTLYNESYQEKTWHARDTDQGLPHHTELRKSRREAIHQKEVAAVNTACKGEHQRTIATKENGGNRGQQHTARGYEGP

SEQ ID NO: 963310 - protein, 282 aa, Homo sapiens
GTKGFFPQNQTPCVGLKKRGFGPQGSLCVCVCVAQKRFPRLFSSHKEGGGGAAVILWGKKMRDYTKKLRRYDPSKKEGGDIRARKYRQRGCLEREHLSRPSGGDHKGSRTQGDTPAGGESRCTHERAWRGDKEREGVVRHPGGKSKGEGVPQVVNPQLSMREGAHISVSWETLLWQCVLASETPGGGRNNPTAGSPRSSMRRGGNTTRKDTTTWVRTRGEQTIGAEQHFGLGIQPHTTKSTSGWCSSREDTACGTIEEKKGRARREEVINGPKCRRRSNNTS

SEQ ID NO: 963311 - protein, 383 aa, Homo sapiens
  misc_feature (151)..(151): Xaa can be any naturally occurring amino acid
  misc_feature (268)..(268): Xaa can be any naturally occurring amino acid
  misc_feature (368)..(368): Xaa can be any naturally occurring amino acid
MSRHALREITPARVWRAGIIAAGERDESRYTTTTEDKRRAGGAGAVEQRPTPHQERRDREARGADPPRVGRREKGSAAHPPQKERETPSGVGGTTHTPTEGGSEIKQPRGDPAPREEKTHLVRDTARQTHRRGGDDKHRSAAAPASHNTKXRQPHTRQRRQRKPGRPTQQPAKDGWRRAPKQTMFVVQQHKKLHTAEEDVSDQPQPTHQKLWENDARNDTSQLSDEHATGRRRIEHTHPKWVGRQHRAIDVGPRPGHTATTPFVIATXARASETTGQVHTTTHTKTVMKECEGNADAHATSELPEHEKRRASAQKIIPHQAVADPTDARQPARHCMYRRGAAPKQKREDKTIQASRPGRQPTRMKNSXTPVALVDDHTTVSEM

SEQ ID NO: 963312 - protein, 256 aa, Homo sapiens
CAVPRGREAKRLGVPARSAGVRKGASGQEGSGRDTLQCRRLSSRPARVLTDPASRPPPCRAAVREEDSPPRRPGLPKQESSFPVGRMLRYIKKGHPKYRIGSWGHPLYMAAVLEYLTAEILELAGNAARDNREGTGSHPGHPAWLVANDEELNQLAKRSQHSQWGCCYPKYTRVASEEAGIQGKLEAIIKRPQQKRQSPSQKKACIYKKAGGKKGGRKSKEAGVKVSKGGKRDRKRGQTCEGYSPFHEELSWQKLT

SEQ ID NO: 963313 - protein, 189 aa, Homo sapiens
MWLLWRLLVALFARCSFLSRFRSPSFLVLCFLLWFYLVSHALCCCVHGCCGCSTLPFFFGVVCRLLVWYSCFLLGVPLVFFFVFYGSCFGFSLHLVVYFCPPFPFSGSCPLRWFTSVVLSPLLVIVSGPPSFHRVLIFPGDGPPCVFSMCVTLLLLGSLTLNCVPLPLVPHVCIFRGRYPVSVGIVILY

SEQ ID NO: 963314 - protein, 209 aa, Homo sapiens
RGVTARQDLSRTPLQGSLVGMQEHLPPIPRRSPRSLHLAKPGEGGKHRERDNQSASWRTGSDAQELRVENFGGSSPIFMGLQRTFPVSQSQSAIIIPSWQQLRASFILHDQMPSEIRRRTETLRLWERLLCPFYPAPLTRDGQVGFPSFLCVTIMCRALTLACNDYFVVHMRAVKAKGRVRQNMSTFCSSVIRVVPKGRLRNLPHSFPP

SEQ ID NO: 963315 - protein, 119 aa, Homo sapiens
MVAQGRGVGVRHQSFVVLMVAQRYLLWKAFGRAPGVLLGEASTSGNLASGGLQPGAWVEIPGPGPWGLGAFVAPVKTNAFRAPPLWGDKYNRGAHPKKTTRAFSPQKAYWEGVWAANLG

SEQ ID NO: 963316 - protein, 536 aa, Homo sapiens
  misc_feature (191)..(191): Xaa can be any naturally occurring amino acid
WGKGGHRYNWAGKRNHSTAGPEGGTGGSLTPLLSLVWSSRARSPTSVCPFVWVFCSFYSRGARGGAPARRGERRGATEREENRQSVTSAVGETLAGAETKEKRDSARECVPTHTRWRARRHPREKSGARVRGDSSTRARQRVRAESCENCGAKSAPSACEKDTTRADRARRGRPASKRKNSPKLIKKSPHXGMWRNLTRLANLCGAPAYSTQGHPPKSAGDTQPAVSANNTGTRNTAYDAKGHTTRPRREGSTPFFLDNIQEARWSKQRRILPEERGDAPCAREDIPRRRHHGGAKKIRGEPPAHRKKATSQIAEWGRHPGEKRHPNINTSRQEKIPTHFCTAPTMEGNNSKPDDKHIYPLEAKGGAALHPRGGGGGAPTTFIQSRIYEGAGRHKHNPPTKRASAGGGTLGGGVPTMSACEHTCAGPPSPQMVIKQTLRRDNNSGAIQHLNRKEAEYTPPSMRRGGGTTNETITSAADMPPQTYSPAGYPKGVGPPTNSRATNGIYIQSKDDVLPQSDDIKTPARSNAAQPKRPAA

SEQ ID NO: 963317 - protein, 151 aa, Homo sapiens
MPYLPRDRAIKSVIGQSNALLMDLAITTLVDKCIIGTSDGGTPRQYRVYNPQHVNRSLVELHKGPMEDWDEGEEAGNTFRTCGLTPWIPRILIDKRANVGSRCGYIEVASFLLASLAFEFSSDIVPIFLWNGLGFHKISFLLAFEASCANR

SEQ ID NO: 963318 - protein, 151 aa, Homo sapiens
GGGPGAPCAGVRRMGGWVRVPGALSVRLFSIAVRGSTLGPVNRRARAPEIGSLWLRGRAEGRSCRGGQMARAKVKKAPRKECVVVANVDAGDTQQGPTPSEAAGLRGACRGTVVNQSEARERAARARTPMVVGSVRTTRVNSVAAARLGVS

SEQ ID NO: 963319 - protein, 133 aa, Homo sapiens
MFTSTPFTLLILGSTVSTHFTIYLMMARCDTCSHITKATTHHLSRNRPCDIGDESLLITLTSVILFAGISSEPFTDSSLAPTPSYEECIGPQQASSSAKCPLEVATPYTHPYYSQQEYQSSVTLTSSLIENKP

SEQ ID NO: 963320 - protein, 38 aa, Homo sapiens
ISINKSHLKSHPIFTIQKPEIYLYRTLGFNSVSAFHIL

SEQ ID NO: 963321 - protein, 130 aa, Homo sapiens
MASISAPVPVTLWYPHSLNSAIPGFIHPDPLSCFSLSTPVCSIVTVLHNIYGTCETAQRATVERLLNCSTIGELTEESSRKQLVWLHVNSFQPERKTKTRSKGDFSSLMSQLHITLVYTARSNSELAIDT

SEQ ID NO: 963322 - protein, 243 aa, Homo sapiens
MLRELEAEVAVEVRADCDQAGHRSPSSSLAAAHPCLENNFFRSKERKTKVVVRPSRPLLPLSLPPVRKPGVAAPPSGPRRRAHGYAPGQTPATTRTPMHPFIHPVPPLTERARNKTLQSDDPLDSSQRYSSGTKGDFTHQNDTHLQHTYTGQDALTRHTAMHNNTRHYNTNTRGSQQRDQRKGARGKPRYTPLNPSTLDPVKTGPRQGTHRTATGARKKQEKRHPPKWNTPNGQAPKKRHTTS

SEQ ID NO: 963323 - protein, 186 aa, Homo sapiens
NVVIPLALHHMSVLDVGLLASSMSNVYGQDLTPLKIFYMPVDVKHFLKYFRKTVAKIRSIRGGGSPAVLNQRHPSLCEDPPGLLMSACRLGLRCADATFLLRWDWALDTTPQPLCPHCLASLGLEWACDGMTVGCLCPQLVPCSLSGSLLAFRVLFPQSPVWDSLLLLRADSMAPGQIVLVTRLQY

SEQ ID NO: 963324 - protein, 358 aa, Homo sapiens
MASSFCLRVSRSSSFVFCVANIFCSSALCGDQCPTGVPLSEVPVLFFLSVAQYRSVHTALHLRHLPGWLPLVLSWRLSLSGVSFVACLLRDFSHRVPRDPVPLVYHLTVSATFAFLLLFLRLAPFRAVRLGILSLRMCGELPVRLLLFAPLFFPSLCDLSSGDGVVIYGVGFGRFFLLLLVVSVCVCCLAWVCGPPSTDFLFAAIRLVCPTSGVLCPYVSLDVCSPVGLMLSSPLFVECALVCTRVRSGPSVDSLSLLGMEGSIKGGSLVSVYRVVWLDVLWYADLGCALEPLAVLSRAVPFRWRMSTACALGHVPLDPLDVYSYTAFDFSPSSDTSVGALERFLCELFSNVLTRLSV

SEQ ID NO: 963325 - protein, 193 aa, Homo sapiens
RVPAPFAGLGVSGPFLDAVSLGFFFRWNLRWSRQDLRALPVWDAARAVVLHLPSLGDSVISVRPIPSRLRALSGRPQHLLEDFGLPLSRRAELGSPGRRGLAGPEGLRWEPGRSTWYTGTSSSRVTCLLGGHLGERTEACSLASRLCYVDSNESELSSVKPTGEPGRSGPPIAAPFPFQQSSTRQSKHLDTST

SEQ ID NO: 963326 - protein, 80 aa, Homo sapiens
PVARRCLFCFAARRCVIYVAVLLSPVGALPPFRSNSCGEGRAALSGFMNALLIGSSLSLFERQLDGSFLFPPPRDAGLSL

SEQ ID NO: 963327 - protein, 249 aa, Homo sapiens
MVRVCSSTEALSDHHESIHGRHLGWKPNMVTLQAMLVTLEVVLTDGDSAIGDAYHYRCDLHQCTPVCASGDATFAVLEGQMCRRYGCLMQPANAQLDIVSPLSESPCGSCRVLPYEPERLAGLMALKGHEGREEWRTVNGHAHGTEYSHSRVHMANRALALYKESTAAEDGSGHEVLSAQRVPAYRPRKPSAILKSEVITQGHAPRITSRPCPTLHSGKKEAASSGLQAGLLRALSSLVTVVYGVVCEC

SEQ ID NO: 963328 - protein, 104 aa, Homo sapiens
MMWIKHGSVYFIVFAMLRMRSSPRLCICGRRRWGQCSLRYRSGAETCFSLKRVGMQLFSIKGIICYSLLLSVQKFSFKATKSLGAAAEATAKAVFPGESVISLS

SEQ ID NO: 963329 - protein, 177 aa, Homo sapiens
  misc_feature (104)..(104): Xaa can be any naturally occurring amino acid
MRPTFLRFLPASAYLGAPSVCELRSPRRVRELCRSQAEKGVVGATWSRYIKGAYIWCSLFRRCASPQRFFLSRGHHRCSMEAPPSRHNAQRLFSPGERLLFCIXKKSYNPTLPTPEKVCSFICNSAGEALYTRLWVIAPRFTTPPTSSCTYHVGLGFSIPRTLILKRKKSKGASALY

SEQ ID NO: 963330 - protein, 105 aa, Homo sapiens
MAVAEVSCFCLPLQLVMLLRRCAASYWARVVCGARRPLGVAPQLPSPPTCFVAGWAAAPSLTPCSLAGMATTSAEIELADVEPAAFLALAEIFYIQMKFKLVQKQ

SEQ ID NO: 963331 - protein, 114 aa, Homo sapiens
MLIVSDTSAGVVLPSGLPGVSHFGCAPSPHGGRLWFRPPSMVVDHRSFGGTQALYGVFCGTTLLLQPAIKLVWTTWGKDTMFRRLVGGPPQVFPSILCVKWGREPRGDCPVLSY

SEQ ID NO: 963332 - protein, 125 aa, Homo sapiens
KKVTLFSLLVWDKKKGKGGGFGGISQKNQSPFPAARYLPLRTLAGATNLKAGAVEEQPAEETSRVGAASHKGGGRTAHKGDREVGTQPQKRGAWNLLTDPRWDRGCITCAILTERKPRGTERLPV

SEQ ID NO: 963333 - protein, 102 aa, Homo sapiens
GKPVGLAKERTWNGREAQDGGAAKESPPGASAKPGQQTGTRKMPACLQKKADQKMNPLGGKQFTGITLAQGTVRFRVRVPASPTRVQGAYEMGHDRCGLTIV

SEQ ID NO: 963334 - protein, 115 aa, Homo sapiens
CLRCLRVPFAYLFYCLIRILDCLWSDFSYRVTVLLVSHSTWCVLRGPSYLAVQSSFSSWVSVAAHADLVTFPVCLPVPHLCFLYITFLFLCHEYYSCHVAAPECASEPILVLRVA

SEQ ID NO: 963335 - protein, 140 aa, Homo sapiens
  misc_feature (113)..(113): Xaa can be any naturally occurring amino acid
MKPLGGPSHQRRGTSNAPERGENFGGGRKNTARTTLLPQKKRMIVDLPPPIIYPQDVRCMIFKGNHTTLWKRPTTHRNLLGPPQREKIGGNVEKAHKPCPWKGRYIPANESYXLENWGRKKTKFGFSKKIYGAPKREELL

SEQ ID NO: 963336 - protein, 78 aa, Homo sapiens
CDKADESVSIREFPPMGPTSSGFQKAIEWRGPHPRVSGPQRGVSGQPLSRVLAISDYGDHVGSPRKCSEPYSGSSGVR

SEQ ID NO: 963337 - protein, 334 aa, Homo sapiens
MSSRPWLRRVQATTGPDSPMGPPENACASDHHPAVLPIDVMGTSPGISPAAAAPCHPDTSTRIPITPDALVADQSQDHCIDTGTPWPSGSVPSAQREAQPPDRLVTSETPTPQVTRHLLTCHRRHLRFSRHRCPGRLSQEAFPTLTDPLTRVHTFPLSQPHSLPSDPLGWTPSMAAPAGCWSHHALLSGLKNDLCQSHLAIDSKPRTMKPFLQHEHSTTHSARHRRPTGIHTPRRDQHRCTPNDTNRPHPTWPAPTPLPNDPQITGGTQTTPIPPTIDPETPYPTQLMCTNTNKLIDNCQLEADNGYDRYTNDIHASTLPTNVRAAVHNHTSNF

SEQ ID NO: 963338 - protein, 72 aa, Homo sapiens
LYHVTVHALPDHYCSPVAGSSTSVFRDTENRDSERSPLGTHLRIPIKITVSSPLLSTIKDALGLLLVRCLVL

SEQ ID NO: 963339 - protein, 63 aa, Homo sapiens
RAGRLPASRSAIRRMWTDEHRSDGMRNGREGQMNGMDIRYVLGDETIEMKSREERDEREHEAE

SEQ ID NO: 963340 - protein, 129 aa, Homo sapiens
CVVCGGGAGLSVVVCRSLLGVSVSVSWRVSRLDGVFTSWRLSVVGVSRAVVVGPAPWVVGGPCSLLFWVRAVFLARWCPPVGKLVRVVPLEDSACPEGFQMARLIPGPHFVGPCLTPWPVLATCTLLFP

SEQ ID NO: 963341 - protein, 78 aa, Homo sapiens
  misc_feature (16)..(16): Xaa can be any naturally occurring amino acid
EAPKPPEEPTLKHSVXADELANAGIRTHALRQRPRIRRTLDRNDRSSACSQSHPGELIWSHARLKYYEDNIIAGVICP

SEQ ID NO: 963342 - protein, 172 aa, Homo sapiens
TLQSGWNVEPLPWWTLVVSVIPLASWLAVRGQGACGLCRAQYLLWDRGPCLSGGMASESWIARCRRLMDEELKRCARNVASLVVGFALSCRFARGVVESSLCWLLARDGACLGSHALAARYHERNTQKRVCPGASGCGASVFWVIVAQRSVESAMLARSSRSPSGVPLGTTC

SEQ ID NO: 963343 - protein, 311 aa, Homo sapiens
MLCVVCVCGRFVCCCLCLVLASLCLLVFCFSAGGAWVSRPIPMGGCGGFVRGWARVRCSTFLALVLSFVSADWALPSDCARVSGVVVCGVKRCVCLALPWDAAPWRTRCRSALKYHVPMISVVFLTDSAHRTARRPVPVRRDIDVRVQIGSSSTCGHLVSPLRCGSDKREQFSRCGSRTRVAYYVAACDDSGVYVDAHDAIGNGRPAFTQATACERQACLRPRVMPRVRARNHIVIIPPWRRILAWLRSVTLRLQVPPYEECHATRHARGKLWLPRQLPLGSLKLRPAGMRHPASPLHSLLACRRLSICDP

SEQ ID NO: 963344 - protein, 265 aa, Homo sapiens
  misc_feature (236)..(236): Xaa can be any naturally occurring amino acid
VVCGLAGVCVGGAGFVFCLLCVVVASCCVCVDLVAVWILSLVCARVASVWLVSSSSSFVGAVLWIRWVRCCLAASDDVVSCVVWRAGVVNRAGLFLWAAASLFSCRGKPLLRRAGLLPLPMRSPPAALVFLPLLRSDCLSPICSPGHRSDPSCLFARRGYPLVCCATLCAPLFLGGPAPICEPTRWVRHENVRRRGVGSTPGLSGVISPPPGLYFSFWCGPSTAVVSPAWQGGWFXLFAPPWRAPRVWRRPRQHPPIGGAVYFLE

SEQ ID NO: 963345 - protein, 118 aa, Homo sapiens
MHTVEVSKFYRAFALLKGFSLALPYRLHTLTGSDSLLLQHGQGTSYGHGAAQDISADKSTRVLDTTLQALDHEGLSVLKDSTVTPRRVATAKNVAKEAEPLLIAGPGAQDFILLTQIR

SEQ ID NO: 963346 - protein, 264 aa, Homo sapiens
RLETLGALNRGRNSDICGHQWRTLNEYQAITVRLGKCTATIAGPVLGDNCPHCEGHMSQPRHTVLGPEKTSRFTRHYRYDPLKNLPGAPDEILSDSAGMIKNRRQSGSPANASRMLNIAQHLPRLPLVLVIQQSDRQWQHHTTSRSALISQRKLCILASLEGVRDVDSVCLQIGYQLVHYYPILSLNGYKRVLALSGGDGLHLSHILTEKVEAFCGCSICLCGCCPCGCCHYSCSMLLLQPQLKVGTKEESEESDEDMGFGLVI

SEQ ID NO: 963347 - protein, 174 aa, Homo sapiens
MRRPGQRQGGACPQARARRARKEGSAAQAKCRRSAGVLGGFLRKRPPRWRSVAAASAAGPPQRRAQRVESARRLREGAASQPAAEAARTLSQLASAKEVEDAQEEAALEQRTAAAKEPGLRSSGPGGCQPRASGRHEKVAESAEGDGRSAKDSCFIARMAQAKQRGACGQPDRP

SEQ ID NO: 963348 - protein, 71 aa, Homo sapiens
QVGVATLTEIVPRSVARSLAASGGGTHVSQSALRWAHSHRARTDPQYATVMKAQTRRTGSATRESGATSLY

SEQ ID NO: 963349 - protein, 316 aa, Homo sapiens
  misc_feature (94)..(94): Xaa can be any naturally occurring amino acid
EKGGPAIQIREVVIRLGEKIIQGSAIVGSRADPRGHFSKETFAYLGTGPCLVKSAEPRSVKNIAPEDFSVVVSGQVLRPLGGSQGHWDTFPHMXPWFFIPRWARFVPCLTWNGVSKTTGRWRVPQPTPSNPRVSTPGFILSGVSTHRYWRTFLGPKPHGHSVNPPPQLGHTSPLGWAPAGQSSSQHNAGVQMLLRVNPPPSSTTSHGTHSTCGLYMAPATLAPLPYFLFTFFIKCCKENFLRERTPPRLYSVKVGSRERGHPHALVPLPFGTDHGGCSMCVKRWDHFPCGTVASACPVCWCRFSLTADPEKGVCAL

SEQ ID NO: 963350 - protein, 100 aa, Homo sapiens
ALRSMHKLWSKSCDYGRKLKCQKESQFSTPSVIALTYLATCELFRHKGDYSLSSVTDITREACDMKALDIVCGVHDPDGSSDGQASACYLSGKLLQIAND

SEQ ID NO: 963351 - protein, 125 aa, Homo sapiens
MHVCAVSSAWVPVSAGPQVISRAAEAYVTQDRPLNWTPDFLLGLLNRRMCDSHWAQTGKQLLSLCYPVISWKPWGQHCVSLRLNVTLFRFSSLPDLVLGAGRPVTVRYCVAVSVEIHPSSFTAMT

SEQ ID NO: 963352 - protein, 135 aa, Homo sapiens
MGTGRESSLGDTANVNARVLDPADREETSRGTRNDPGRPGDCLSAEARRGTADIHIKVCDQQGQTRLLEDTLAESLMSKGETPRIRKDTEVLRNNQETHVGSVNRVPGRISPRDNIRPEPQTRSGKLCFKTATSG

SEQ ID NO: 963353 - protein, 33 aa, Homo sapiens
MNSHSIPPIPLRPTHTPHYEVTSYNLTLALLIY

SEQ ID NO: 963354 - protein, 119 aa, Homo sapiens
MKAWNWLLYQSTPLHSQGSGDSPGGYWIACQLRYCYRPGEQLPAFAKDLSLILRSRANALRRDASIAQQLMKRHLSPEIITVSFCGLVLCPMAVSETGNHRSRRHSLRRVCLTSKKALS

SEQ ID NO: 963355 - protein, 171 aa, Homo sapiens
MARYQPANHRITGTQPQYGCFLKANEGPVLAKWSREHGVFKMATDVSAISGRRQNGAPTKRVHKSNSEDTEIHGHFGHQPTLRVLSAINVVRPRESTTWVDTKSTHYGSNPIPGIYLPDSGAREWPPPITPGPPEADRFKTTWGTRTKSVDVFPSDNYNKHKWVSFFVSEN

SEQ ID NO: 963356 - protein, 534 aa, Homo sapiens
ASQIACCFSRLGSIPVSSGSATSGVNDWPVDVLSAHVSRRRRRSAGYSCRSKILEGLLALTLLRTLLSRITQAGHARSCALTAYYVCNALPCHTSQLRDALSRRNRNTPSPWADLTRGTLLYTKDNVTCCDIAQVYPRQHNGYRRYAYLELYRSFTLHSAYFAHATKPNGHIKTSQTARVRRNAQQTPLYQSTTDSSQLSRSKTSFPAIVPLGPRHILTAHMRSAPRANTTTLVALLSHLSSQPTRTQDPHLGRQQTADSDFDPNVWPWTRNTRNQRHTTPTSAANANAPPPTTAKRKPTDNIWQSTSPSPLAAICTPTYEPLSTTLRQRLTQPNHNRRYLANHILLALIGGTLPTANNANPAADLPTFHNQTAPTITKLWCNPYTKRHKPHPGPSNLAHNTKPFGSSHQPRTASAPTFGSPQRHITRSHYVRKSTHKRTNTQPLPAFPILPHIPQTHTSLLRHSPAHGATTAVTTVIDIPLVAADNTHHAPYHTRKNETTHLIEAPHRIGADYVKYSSDHLSTNNMGQTHCTR

SEQ ID NO: 963357 - protein, 163 aa, Homo sapiens
GQRIKNRRLSSAWRGLNSGGTPKFGKKRAVVRPQNEGEGEVEGPARPPSPTTKPCDCAPQRWSPLGFSPPLEYAYIGLFFGTIINNQDTHPQKHENTNGEIKKKHYFTHRVRHYKSSPLPYLANIPSGTPVARERAQQALRSTGAPTMRARYGTTGCVNTIEG

SEQ ID NO: 963358 - protein, 191 aa, Homo sapiens
CPTSCGLRASCEPGRIPASLLSGCTCAAWHLALCHFPMRYLCCCCVLLFLCDYCVPCVSAAVPFLFLRLCLPLHVKHAGYLEDDAACEMFGLQLRDASVLPGAHALCCPRMAWRHGLLGVWPELPACMDDHLPRVPAVLRRAHDALTAGHNILLRVPRPLLGALAETNVSLPAVPGDLPAEAHACQPGTLA

SEQ ID NO: 963359 - protein, 111 aa, Homo sapiens
PQARIVEESADEMFLATHFAVGSIETPGGSHPSRELYQNIVLGGVHTPIRFGRGKQRVIGEKILVGNFVEDRPSSAQRVTRSPTKYFLLGTTKDPMGRVPSWGFPSAPPTM

SEQ ID NO: 963360 - protein, 165 aa, Homo sapiens
ECVAQAAVLFDLLTSQALRSERTLVPAWLPPFTRSIMYKTESFRACGRDEFGRREFDLLLMRGGEVPMRLRVAKPGWRATLRGDEKEVLHERQVRRPSNQTEASAKSGRDSRKLSPQRWKVGRPRYREAQTGLPTSVEACRRRERDRRIEEVRQERRIQTDPCVT

SEQ ID NO: 963361 - protein, 241 aa, Homo sapiens
CGWDIVSVAGRCVPERGLGACVVKRGPTGDPFWDVCIRGDAALSPQAPSGVAPGLPAGWGSPMGLVGQRASSRVHLRHNGSSRRPIETPPDARGRPYKPPRSSWQMSSSGVSGWFRHTAVFPAPPRSPGVLQPACAPDEALIWVYAPRTGVVDESPAERGGAGKDRALGDNPTPVLHAGNERRCPPGVDPFHSFLLPVTLRALCSVEAPMPAAAAQCDEITIPVAFESGSLLGGPEAALIR

SEQ ID NO: 963362 - protein, 55 aa, Homo sapiens
PGAADGRSAPAPCRLPAAAAMPFSNSHNAVKLRYPAEDEFPDLSAHNQTIMAKVL

SEQ ID NO: 963363 - protein, 221 aa, Homo sapiens
  misc_feature (69)..(69): Xaa can be any naturally occurring amino acid
VLYSLSLLFSLSYRVSVLFLPPPSLLLFFSFFSSFFLAISFDYLCLFLLSTLFFHVLFFLHLISFLSFXLSLYLCLFSSSFIVLLVSSPLLSLSLPFSSFFSFYLFFFFIFSLSSFVFQFLSFLLASSLFFFFSFSFFFLLYASFVFLFFYLLEFFLPFSSPFFSPFLFSVLSYAFFAFFLLISFVFLCSSPFSFSFLFRLFVLFFAFLSSSFTSYSVVRF

SEQ ID NO: 963364 - protein, 193 aa, Homo sapiens
  misc_feature (134)..(134): Xaa can be any naturally occurring amino acid
LEEQLEDSCNNYKIWRNAERNLIQHAIMQANPKRQHSGSQLSAISIAFTQQQNSCLAQSCTLCSMQLTVAHAAWPIPGQAHSALVSVFTTAPQAGVHPSNLAFGHNMYKPTRVLTDVYRQQRLQPAGIVDQQEXLNWLVKKAWEIERTLLQLQSKYRCWAAINLRQDVPYKGQKKTVMGGKARQKGGFGKSRG

SEQ ID NO: 963365 - protein, 189 aa, Homo sapiens
SVPAPPRGDHRFQTKTVNGVWRSESRQDAGSRSSSGGREPPQLCEPPDSAQETGEVDQPIPIARLAQHHHVARSSPHTPQTSRLMQEDFPQAFTPGPDLQKPFPMNGKPWFGNSNGLGVDSHNTCIKTDANTKEKHNHLTAMTYQRPYHQRPAQTDTYPELDTYTIGTTQRFVDPYEENNRDTAGTWQH

SEQ ID NO: 963366 - protein, 305 aa, Homo sapiens
VRCWYVRWCLVEYLRGSDVVVGSYCRFVRLRQQGGSGVLRLCVVGSLLGTLGCRGCLVCRRIVPLSSIGCSLRGASGSWAVRGAAVVFSCPGIGDLLLCLGAAVYVSSWGCLRYGALVSRSSRGGGLFLRVVRVGCVAVASCALATPVPDDVVRLVRIGVCAMCDWWAEWSVPLLLCVSVPVIMCVCVVLNVRSRFRVTTLWSLRLVRIPLVGAGLVSCSGSDAGSAALVLCGCALRCLRWGPHVVAWVRCQLGCHGWSGALLHNAVAFGARCVPCGRGVRVLRASSLGFDGLVLSSRDSEGVCD

SEQ ID NO: 963367 - protein, 240 aa, Homo sapiens
WVGYHQVASAYILHATRVRQPCVPAYIFLGSDSRRSSHAVCAKGLTGALRRRTEYRVSGNQRRHTVWTTVSQNTEGARRQAMHGHRLLVLPESRARVLAGPCVYRVRPRLWSLGLVRGGLWVCAVLLPLTWLGVFRRFCGRPGVVARGGWGRGAALCRLCLPSVSSGSRRACGSRDCGFWLPLLVLLVVLSSLLFPWSPLVYWRRSAGVGGACSSLTSAAVVQGRLGLLRASLVACLVPR

SEQ ID NO: 963368 - protein, 127 aa, Homo sapiens
RPLCRGALVGFPLRPLAMLWLWVGLLCAVFPVFVGPCPLVLVFGFRLLGEVGVLLPLVALLPHGAWVLCCPGCFFTPYGLCAGSRCSSLFALSLIHLCFLLVVNCPACHHRQWMTDWLRLVASGSGT

SEQ ID NO: 963369 - protein, 354 aa, Homo sapiens
RRIEGKDLMPWSSRQGALLFTMSLSPECKSLGVPLPKSSCVRGLSRRWGGSPAPCEPRVGAAIFIENTNSSSSERVIIRNPNPLFVGPGSSLSCGVVRSGRRCSHIGGSSLMGPVWKGDRNLCSKAHWYRQPGGSHMSSLLWAWMLNVHVLGERLSHRLLMMMDAWLHGRRWLIPVGVHFPLPPTYFHRSVWSPEPFLVDRPGIPILEGVCLLGSKGPVVSVFAFLFFFSLFFFDEQSFIYLLAQAGVTMTRSRARSNLCLLGLQAMLSPQISQVAAITGAHHHAQLIVFFVFLVQMGFHHIHQAGLELLTSRDPPASASQSVAIIRCEPSAPAQLSYLTTPCVVHINFTLLHI

SEQ ID NO: 963370 - protein, 102 aa, Homo sapiens
  misc_feature (30)..(30): Xaa can be any naturally occurring amino acid
MPPQSAVFCGAPFSRGCLGGVSRGAAPFFXGTRRVFVGGKFLYLRWVENTTFCLGKRAARKLAVAARRRKIGVAAFAAFCSGGNRECVRWEWGAPRGGACSV

SEQ ID NO: 963371 - protein, 108 aa, Homo sapiens
DSLCFVLSDDMLCRAQSQGSVLGARAVFRLFVGVPAARLSPEVLFGMGAPVPPSLWSAGAIYSGLPVVRARVATCGIPLFVRARISRPFVVHRVSSPVRELARNHWDP

SEQ ID NO: 963372 - protein, 105 aa, Homo sapiens
  misc_feature (6)..(6): Xaa can be any naturally occurring amino acid
MQTTWXRDTTRLARREGDQQSRSGHPYWRVVKHDTSANQSPAVQRQTTAGVDSADRHPPRETVRPTTTTSVVGPLARPRPTLSRAPQAAVKHPPQQHNSHQNHHT

SEQ ID NO: 963373 - protein, 89 aa, Homo sapiens
SFFSLFSRLLLSSLFLFVFVAGCCRLLCVVVFLSSVPLLLFSLLLPASSLALFLFVSLLCFLFSSSLVLPLASLLFSSCVFFLCSFRYP

SEQ ID NO: 963374 - protein, 108 aa, Homo sapiens
MFAPRKSPHFAYWGDQERHVLDHTLRPPEDWDLELTPGIPHPLETVDVEDLGSPGGKGFETLKFDIRVENRAWWLTPVVPALWEAEAGGSRDPEFEARVAHMVKPCLY

SEQ ID NO: 963375 - protein, 66 aa, Homo sapiens
RQSVEADINGCAGCWMSSLCLRLTWDCDREADEECYFEEDLTRVQDFAPVSAHQVVWCPPDACPFA

SEQ ID NO: 963376 - protein, 191 aa, Homo sapiens
TWEAEAGESPGPGRLRQENRLGWEAEVAVSPDGPLHSSLGNNTKLRPKKKKKKNPRGVEVGKTELPFLFITAITSVFNRGGILRRDRYSRRESSQGCTDTWWRGWTLQELLALTKSSSLDGVNYSPSIENVYRGAALGVREHVGGGVALLGGGEGEYDQGEVIAVYKRRRPKKRREEIIQGVWRQGRDLGP

SEQ ID NO: 963377 - protein, 209 aa, Homo sapiens
  misc_feature (203)..(203): Xaa can be any naturally occurring amino acid
LIRLLDRRSCSAARLLRRRGLRQLYTPESLKLCAFLFNAPASDHRVPHHVRRSRRHQLRNHHKDVTEQKKEVWKRQKMEETPLLTGMLMRTNGEQEADNEETHEEDEGGAGRGRRKKKVMVQEEEADEDEEAESATGQAGLAEDDEDDDVDAKKQKTDEECPRRAPKGTSYTLDKEGGRRVTYSTRPIFPVFQKIVKTGGSTXSGDRRR

SEQ ID NO: 963378 - protein, 503 aa, Homo sapiens
KKGQFYFMGSEREDSPRWILFPTLLPFPQILRPLFPTYVAYSAFSNLTLLSPSYFHNTILNPCQKYPKGQGPSSVVGGGGAVRQPRQRDLSPGASHSLTVLTQDNRDPGGEHSEKASRGSVPSRGQSWAPEHPTTFTESGQEELKRGGPHTEGTPRGTLHSQHDNRAHDQPCRTKSGGKSAHTTDGPHRWRSNPVYQTSVGTMSTAETGPSRGARQRDTRHNCGMRQGGPNTDHARDKRGTHPPRLAPAKDRTHAQPPCVCAGREDPPEDRSCVRTTCGHDTRGPQSPHHGRHSEELHSTQRKATRRSPTTRGVHIVAPQILPGRRPPITEQRHPTGGLGGNNTETRSHVCPLHSESGHQQNTTDGVHTKNMMRTTTHSRERAPQGDLFRNRAATMLGAGTLTTYGAAVWYANNKARGGHPMRDRREEETIKGARWVTSSEVGTQRSEGGVIHTKGRTRVPPSCGEERKRTSQRGGAALLKQEDCVCPTSLLDVVAGKHSREY

SEQ ID NO: 963379 - protein, 147 aa, Homo sapiens
  misc_feature (69)..(69): Xaa can be any naturally occurring amino acid
WQTFSPRLCQLTYVGPLPPMAHPLATKGSSQVSAATHWGARTAPPPWFIMGLRPPHAMGRDNPYLGNPXLGGRAATGRGYVSCGSRPFFQCGACNIRPFACLMYRSLATWVISAFAGYRVCDVRLSRPVWGSQRLFWQPGVFSWYTP

SEQ ID NO: 963380 - protein, 228 aa, Homo sapiens
QGVGSMAPSRNGMVLKPHFHKDWQRRVATWFNQPARKIRRRKARQAKARRSPRAPRRVPSWPIVLLPHGSGTTLKVRAWPAASALEEAPGLAGAFQPRTRVARDQSAFLWIRGGGHKSTGVPAGQQCSALKEYRSKLILFPRKPSGPPKNGEHQFVLTEPETLATQVDPGPGVQLPRSGHGLYRTEKSSSSSPEGRDRISKASRLRSSGLMGPLPTAPGFFGAYRGNN

SEQ ID NO: 963381 - protein, 279 aa, Homo sapiens
TSRPQSPEPVVPARRGTRGTVPASCFPGEDLLQLRVPLVFIACCPPSAPWDGPRGEQLQHMAWPCSSVLEWSDNGRAERRHTWTIPWASARACPRMSGDVLKPPLAASALPVTVLAADLGLGFLLDKLAGTGSADDLCRDSWPAAVLVALVSLILNNSWRAFTSNWVCQTLGGWAQAAAVGLMEGPAGWWTVTRGGPSPGARAGQVDAHDCEALGWGSEAAGFQDVRGTVKLQYDMMRACNLVGNWRAHRQGNSPSSCAWWPCPAGTGAPAGGGMAAHQ

SEQ ID NO: 963382 - protein, 160 aa, Homo sapiens
MAASGHLVWPPVLRAGVALSLCDSSRGVVYFRPSGSLCACGRYVDAFVRGGVGYHGRNLVIPSPWMCGVYRARGLSECFISEYCYHSQRKGGPGYQWVQLVAKFTTAPDMYLAPHFITTRFESNMVGVYIEFHFSCLWGDLISRVRPTSTRPHCERYDSL

SEQ ID NO: 963383 - protein, 517 aa, Homo sapiens
SPVHCPAQPPWAATTMVAWLVCVLCWRAPLMQCGHCTLYWAAHTVLKMSPHGRAWMPVMHDHSSSIPPAMSVMHWPIPCLTSSQPCTVDSPVAQPVMLLPTMRHHTTCMHTHTMCAHTCAPYVTRFHTWTVFHLHCRHCYLSVSWSPRSTSHWRYISVRTRGTALTQHQLHNIRKHILMAATLVCPRALYHAHATIPSHANPCAYQERAHIVHSKPWKPHRVEKPSHWTCERSWRASEHTLDKIIQNPSDCLSWNTYHSTLLTQPPPVEAVLHGTQPTRVVPQLATLLSNRLGSKLGFPHGGLPFHIAAVELESEHTKLTVVRFPSRDEGEETRAKRPTSAVFSSTGESPFGAYLGRLAREARSTHTAVDPTQHRATRSYPQQHLGGTHSQPTHTWRNGGIATHRKPQGDPREPASDQDPSTCRRIPTWEGPGYGRVLEKRRRQRQEDTEATTDPKKELLTPFPADPRAAQTEAHNRTQQAAITEATSGDDATRNEAITLTATKQSDRKTKPRHVVK

SEQ ID NO: 963384 - protein, 103 aa, Homo sapiens
MAADAVSPGVKVCYYYDVWMYGNYYICDNGQPMNASPESCMTHNLLLNYGLYLKNGNLIALTNANAEEMTKYHSDDYIKLLAAPSVQITLSGVQQADAEIQRR

SEQ ID NO: 963385 - protein, 55 aa, Homo sapiens
MRGALWWLDMDKHGSIWISVRTWAGVEAAAVGGGDRRSKMEEESGAPGVPTGNGS

SEQ ID NO: 963386 - protein, 63 aa, Homo sapiens
SRASKRKEVPRAPQPMGLAAKTPPLETEPTGSQTCVKYPIDHYMRTGDATNLSPSQHMNQHPR

SEQ ID NO: 963387 - protein, 124 aa, Homo sapiens
VAATRVELRDARGYAYWVRSSVVQGERAETEPIAMAFADMWPHIQQLGFVSSYEGGRVYYILVVYIFETSLVLSSRLECNSTISAHCNLCLLRQENCLNLGARGSSELRSRHYTPAWMTKQDSV

SEQ ID NO: 963388 - protein, 260 aa, Homo sapiens
CILGLLAFVCVACSKLFSWDVFGTLSGVVLYFGRLSESVLRASRWAMDAILKAGACGWSTADAFVPTVIPEGVCLRSLVLSRVFRSFAFTMHGGIERLHTGCSSAIGLPGSSLPSCGHMFVAESPMGVQPRQRLRRRACMLRYQKRLEVPITRPPPPASPAPLAESVARRVGWTCPQGCSVAVGLAKPKRLRGPYPMKKPPRSLHRAVCMGPQGTKGCGSGRGLEAGFTRPQATQICPSPVSYGSLPRSWGGRDLIPSRK

SEQ ID NO: 963389 - protein, 129 aa, Homo sapiens
  misc_feature (114)..(115): Xaa can be any naturally occurring amino acid
ARLFDKAAVSGGYSPEPSQCRLRGRQEKKEARVEKSRPRKDKDTRGEQSPGAEAKKKKGGSKRQSSRAQTLSIYTYSLCVCVCTKAITYMCIYNSLCVGGEFSQSYIYTYIYHXXAAVCGLSLWKRAQL

SEQ ID NO: 963390 - protein, 532 aa, Homo sapiens
PAPEFRDPGGGGCALVEGTGNRDGAGRTAECWECVLMISLLWALGLSYPCASVLVLLPPLPNDPSVVTHALHDPACETILLLCDALDVLVNNHYVSSGLRLSWLSPALTNIQSSHFYAGLPVTPMVASKCHSFGVDNALCLSPVHAGCTIGCLTDPSGLGPSNCRCVGVTVAAPPFSRDTCAVRFSSCGTQHVTASPTLVEDRRLRQAGFALKWPNGLPHGSPAFHFAKRTCNQAPCSSTSGTSGPPGLERPTHGPVTTLRYPQLALLSSSGDPSPTTQPTRHCLRKPRWRFSPNAPPERTRTCPRQRHWAARTHNGLRDPKRDLPPAAPYSALPAARTHPCQRAPTSTSISTPALGAHPSAAITMRDAWTAMSTTHRGATHRAPHAPPPRPPHVLCDASGRTHGAHGAHPRAPGPHHRTPRPRTAPGAWSHPRTAATPAGPVRTPPSQRATRARPPQPPQRGVRPRPSTAHTRRFTRPPRSTPRGAANATARTQPTHQSQQAAACTAPHQRSPTQRPQAHAPWRPPTRPPP

SEQ ID NO: 963391 - protein, 156 aa, Homo sapiens
  misc_feature (1)..(1): Xaa can be any naturally occurring amino acid
XQRAILSGRVVFLPWFAVSCLCACFSVVSSFFLCFALVLVWASLFVAVCPGPMPPVVCSLVYIEVGVRYFLSMLTGLALLVLIPLFKSVALWFSRFDALFVPGLGPSLGVVMLGVALRMPPPLCVLLGSYGLAPYMAIPELHAEFAILYVSLAQKA

SEQ ID NO: 963392 - protein, 33 aa, Homo sapiens
TIENHEGGSRGSMKSWQASDGIMVARGDLGTRD

SEQ ID NO: 963393 - protein, 290 aa, Homo sapiens
MWCDRRVWLYVRGLLSFHRGRLWLMSWVGDCAESWWVELVCCVDSSYCVVCCGCSLYLNCDECDSDCRPISLSVLSSGGSLCVCLVCGRVSSVLTDVVPVVSSALCGVCEPFWNMQSVVLVFFCRWVVGGAALGPVVVCRVPVVMGDLFVFMCMVKLTAASLWDEVIWLTSLAVGVDPPGKVELLQWYISSICNVATEFDVLRVIIVVTCCVCKLLLVCGLMQMTVEWKHLLRVLTNLHSSVQRRSGVTQLHSYADVMHITWRIFKLDSNGHFSPILVNWICFLLYKYDH

SEQ ID NO: 963394 - protein, 111 aa, Homo sapiens
MVIWSEPETQAPVRILPLASARPRAPKRWENHVLNNFSDIVKQWLREDEEQEARDLPGVCLAGVPEILQQGGPQRLEKYSSMRTSVCLRGLPQMVTEISNCQVCYACSPRR

SEQ ID NO: 963395 - protein, 210 aa, Homo sapiens
MHCAQRNGIVLNAPLPQWTGSGAVATWFNQPAVRSADVRPGSQGAPDRPVPASGPILAHRALPHGSGTTRSVRAGRWLQPGGAQGGRHSQEGGPDHRHFLWILMDVRNKSTGMVPAWPTVHAGLNGGTGSETHSSSPSELPSVAPMKGSTCSCLNETCELVPILSLDPGPGSFAPVRETVVVEDTEDKGSSSVTVMRHARTEIFRRAPFA

SEQ ID NO: 963396 - protein, 112 aa, Homo sapiens
MTGGKNTSRTFGLLLPDVICLRPGAVAAADRCRRVVLAVVVPTPWLSSRVVDNGCCAVCVTCSVGFVCGSRGQFEPFVSQCSRNPCGGSVVLSCVYLSCCSYDPVVCLVNNL

SEQ ID NO: 963397 - protein, 214 aa, Homo sapiens
ALGWGADVALSGVSEDVGSRSPCLFWAEAMGGRDDKSVVRHRPLAGSCLGCCSACVARVVLLLWRSAWLRAWPCALGWVGVGVSARACRAVVVVVVPMCELGGLAGWACSPLWVGRVCRVAAGGPSCAGQGVGLVALGGLRGRTPGLARGRSGRSPIVPECEGVPHAVDCLMVASADLWSHWEDSALPASQARGLCSPPGRARAEAGLDWAGAS

SEQ ID NO: 963398 - protein, 366 aa, Homo sapiens
QARRQPWLPSRNGMVLKPHFHKDWHAALWPLWFNHAWPCNDPADCNGPGNANGCCLHSAPAAPASGSHSWPICAACPTGSGTTLKGAAPCRVLHAWSELMGCAVHFTMKGGPWTIWHFCWILRMCGTMSTGGPLQANVAAADSEYLLQTHPHSPWKPFGPQERETVLLKNYNWPPMLDLDLVIALSRNVYKKEKARVITEDEKNFKAFASLRMARANALVFGIRGKTEPRKPQNSDCVTHRSELHALPGDLGEFIVTHTQIQSGIYGTDAGTTRYSDLAPLAHSPGFLAPRAILCTTGGKHSCRIPPEIARDDALTPSQYTPRLPLLMMMNAPQHSIDDRHEYSEKSQREIHISKLAREYKHEADY

SEQ ID NO: 963399 - protein, 275 aa, Homo sapiens
MRTRLNCDLCIFSFRSWTSFLGVVLVSILYVAHRCFDPFSCFMLVVPPLSPWASPTVFLFCCVRPPVLVVPPFVGSLAPSRVHSTGPPVPDPSGTVTMFRGLLSRPCWGSAPEARSHPRYPCGLAFHASFRKLSLSIPGAPLLASLASVPLEDSVRAPDLALGLCRPPGRAPQSQAWTGLGPASPPGSDVGGPGGADAARRALPASLLDGPAPDPPSAPWLSQSSVSSLRLQRTLEAPLGFPIGATARGGTWHAHHGRFVKGSRCHLVGWRTSGP

SEQ ID NO: 963400 - protein, 144 aa, Homo sapiens
MNCLASKGVLAACNRLDSMIDELVQMVHSLASIIMLLLWDAALLFGEKLEEYPNVENHDMRSWDLLFSPGLQKPDTCYQSRKELYHKPSLSWHENWLYSSQCTPVHESWGVVVRYVVVLVVLCLCLFVVWWWDVLVWWCCVVGE

SEQ ID NO: 963401 - protein, 114 aa, Homo sapiens
MYDHNGWATLHALRCPTSAGLAACAWTFLLQGLLLAAEMPLALPLLCLLAGLWMAKNDLLCADNAIIVNVGTIWPCGPREDHADCSHHEDSSLSATVGLMFNDSTDGRFDQLPL

SEQ ID NO: 963402 - protein, 123 aa, Homo sapiens
MRSCCVLLLVLWGVWAVAVSACVWFCFWVCRGVVWGCGVRGRLLTSVGFGWWGWGGGGRVSCLGPVWLVNRVWGCARVRCRRVAHCGVASVGSVFTGRGARFVRSVLVVGVGRCWGFSVSWWC

SEQ ID NO: 963403 - protein, 112 aa, Homo sapiens
MPIAEEASVLFEGQPTPSYFDPRFMENVRPSPPLPSKLLSPPYLLALRSLGESLWSWILSPKTSPPFTHLKGPKALDQLHGAATLRRRRGTQIVRYRGGSRSVPPVSAYPHL

SEQ ID NO: 963404 - protein, 45 aa, Homo sapiens
GGGEGGCRTPSGVSREPEGQLACPPSSMGICVLNPLSPLPHCPPG

SEQ ID NO: 963405 - protein, 169 aa, Homo sapiens
MEAVLNELVSVEDLLKFEKEISAEKAAEGSVSNAVTQFEYAWCLVRSKYNDYIRKGICAARGAAAQREAREEQRDYVFYLGLWVNYRLKEYLRKALNVLSCGLLHDQSPRTSRPRNCERVIDKAMKKDGLVGMAIVGVHGPWDVAVDWSGRHSTIAVVPNVQILKVDCG

SEQ ID NO: 963406 - protein, 236 aa, Homo sapiens
MRFCLCRARCIFAVLSCVEGCLCPVLRPFPFVALYAPFGASCTLFSFIPWRIASVSVLVVLVPLDAVDGKSSVRPVPPLLLSPPLLHLLRAESVWPLPVPAIGLWDGLPGPHPFAKSRNGSFRLFLPRDSPGFPPACLMCPPPQLQRPAQLSTIRPGLACRAIKSITTSLDTSLQYQVCGAASRLRGGPSVAGNACAFAALEANAPSVLRLALSAIQELPSSVGRSGLPSFAPFLY

SEQ ID NO: 963407 - protein, 225 aa, Homo sapiens
HRSIIRASPRWPGRVSLGQEGQTLVLQCQPFVFVRASHSGSIALGQKLVLATHCPLPRPMGSGSGLPLGAPALGPARKGNLSAMCLCLGTQHPGVFFPRASPEWGRPLCLPTVERAPPPLSALHRHWPCRVPRRNYTINPYAVTPVCQSPAVLVNPPPGVGEGPRAWERPVPLSAREAHAPFVLPWPCCASPEAAPACGRSGSFSSLLLLFYISDFIKGIFQGLV

SEQ ID NO: 963408 - protein, 280 aa, Homo sapiens
AALLPYLTAQLDEELGVYPCPEPCGPMARSPAHLMSLFVLCELPMIIYNGAGTSLRWAGADMPLPCYPASSSVLRQQLLEPPGLYEVLPKAGALNSNDAFVLKTPSACLPDGWVHGAMRWQTRLGCPGAAPPCCWAPTCCRWQKAASQMASGRPWAGKAAYRTSPRLQDKKMDAILLAILACSTKIGRHVIEEVPGELMQEDLATDDVMLPGHPETRDFMTGLDRDPPRINTQNSKPGPSCINSVTVRSNGTTRRKRGICEQTYSTVDALQGLRAYPPSE

SEQ ID NO: 963409 - protein, 172 aa, Homo sapiens
FSAFGGPYSVRRLRVASACVHRIVVECTFAVGPGEFSLGARVPALVCPSRLLACPVLSVFPCGLAFFPASTARVVTGGPTGPELCVIGLPVMRGPTFVNKKGLGNRRKGWGPCGGKLCGGRAALFFFFYIDKHRLFMCNFLQIQTLTYNSIMSIYEMTAKCSIGDFFLFKRP

SEQ ID NO: 963410 - protein, 174 aa, Homo sapiens
MPGALALRSSLLAIGCPDALPQPLAPEEWLDITGELGLSEGTKTLVPGPARFEPPGKGQVVTVHLADVAGEWHTGAGGAGAGVTLGDCDVIQALDLSVPLMDVGETAMVTADSKYCYGPKAAGAHTLPPNAAMCLGGALKTAVDGPDLAQLPHGGTETRWTLAKRETESAAKAH

SEQ ID NO: 963411 - protein, 109 aa, Homo sapiens
PVLLPRAAVALGAGVNTALFLALVFVARASRAGSGWPALGLEPISARACGMRAGWFGLSGERGAGRWGMRWGTVVDAVFGMFARKGGGCRSRRRGGNPSILEHAQEGEH

SEQ ID NO: 963412 - protein, 265 aa, Homo sapiens
MHVCNPGAQLLLMRPGAMWFDVPQTAVTPECALLVMCGLLPGGLVCPPELMWTSKTWLSEEIEKKWHGAGEAAPAGRIMRVPLTALLNPKPAGRAAEGPQVTGHEALGEGVFRLFVGPRWMCVALQGECSSECTEIPGGLAHPPGYISQEACQLQPGRDESSHQQVMEELRDQERELRACEEKEWLADENGARLSIEAMRGYRESLSESWQTGVQQAGMARRPVDFGAEESGERGIGVLDVGLGVEGDLAVMAGFATSIARYGFG

SEQ ID NO: 963413 - protein, 198 aa, Homo sapiens
RANQRDAGAQSMCALIAFAPANRIITTHHAPTRRLLHITLMVLCSVLLKHLGSCNSAKSTRALGNLTRPISFVHAEYNGQQPERFPTLATAPPAGGVNQTLGGFLPFGAINAQFPGREVANQSALRAVWNLLRLVYLPLVNAQAYLYLSLLFAVLGTYPLLLYMGMAYGMVPARIREVTVGLRTVQGYDLSMVPDMTE

SEQ ID NO: 963414 - protein, 134 aa, Homo sapiens
MVAGLIGEGGSQYLSRWSSLAAVVALRRGVNTAFVPQRLVFRRPVPSRRRALAGRPRSLNPISARAVRMQLPGLGLGIEREEEEERLAAWAGMQMGNCCWTQLLRTVRKEAGLVQRVGGGEDPSILEHAQEVST

SEQ ID NO: 963415 - protein, 109 aa, Homo sapiens
MSLLNFYSNALPEPAFCLQLYQPRNSYADIYNFSFVVNNLTHFTTWLLRHFLCSAPNWVTKLLPPSINQLRNNPVHHGSHWFHASTLSIHGIISTQHLGQLAGLRKYPL

SEQ ID NO: 963416 - protein, 332 aa, Homo sapiens
MATTEPGSIIIVVVLIKVMLDKELVRLRGSLSTFIPRKQWCERKLDCPLGEDEEHCVKSFPEGSAVGSPTLQGSDPHCGVLDVATGKLVLCSCCDKLHQRLSLMTGPVGRWATAAKPLAERWRSAQSRDLDVVEITEDSQELRMRNSSGPCLSGLPGLPALSLPCGKKPERPAVWWVGRRPRVDSVALAGQLSTYDHSCPSVGGSMPGAPVGPQLAAHVFMKHTDVFNWEVRAGSDKLCKFHPWLWAKIIIIEFKPPCYPKRNDHRLKEAEFPFISQGSRAICCLLGESHISTHLVNGWREADGGNLAWWGPRFTHGCRSPGTKLGAGGARA

SEQ ID NO: 963417 - protein, 380 aa, Homo sapiens
  misc_feature (219)..(219): Xaa can be any naturally occurring amino acid
MPGPYIRDPPGALSWVSCALFCGFVSREREHVWCSRTGGVLRGGSKATFVGPGGLRVLRAPSLVPPSGGGQFLERRPPRGNVGCPRVGPRANKQKHEAGEQQQPGAKTLQGKRGGRRIPQEERTSPGSHTYLGGGPPAMEDAKSESPTGEMWSTPTLFEPPEERQNLYGNGGHKHPEWGPWCGCVGWGENYTGDEQRTTGKVDCVAQEQPPSRRKRTPXRRGLTREEKLTTGCGPPRWLCVTPPTHKEDVLDSSEVPREKVAHRTWEVERTHVRPRVIAQGGPKRRIYQSTEHLRLRGPHWVAHQKRDNPRIRAAPIMTLQEQATTVTTSQVLPPRVELSKHKRWSSKTTSTSNKTNTHRCVSSIAGRLAAKYRYIETHR

SEQ ID NO: 963418 - protein, 340 aa, Homo sapiens
  misc_feature (142)..(142): Xaa can be any naturally occurring amino acid
MVPSRNGMVLKPHFHKDWQMCCVCTCVQPITGPVMIHADCNVPCANANGCCLTSDHLTPLTSGVTILARSVAACTELCSCVPTQKVLLLPVHCCAFQPIVMCCIMWLCLAIPQGKGRTQRHILDNYLVGSQMSMAVKANVPXGDDHPCKGTKPVQRRGSNGTVTQGYTTSGRFPLLPHMGTAPSGAPHKGERGAGTHGSLALATHHWHPRGDPTPKTIEPGAPGSTWPPVPGGTPDHLIRRQRASTKAPTDTIQPEKRKMHDTGNFIPRSAPSSGRKETFPGTIGAPLDAPKLAPGDVHPTGTLHRAATQQGQPYVGPAPRQATHRGTGFGHPRQQTTHK

SEQ ID NO: 963419 - protein, 338 aa, Homo sapiens
ETLETEREQKNSLRKAAVTYMSINDSFYTSHLDVSLDVPLSSVTMLPSPTTDAEALVNGFEHWRPGQAATCDILMTSIAARMEGLAPPSPSHRLLTYSVSSDISADPESCKQAAACEMEREHRRAMLATAAGLHENAARRHTAVASLVQNHASGRQVDPASQTNLECPVGALQGQATDAGMTWPLDQTQEGTGDHANLTRWGTNYEGWDISTGLSIFEPLQVTMVAGGLKRWPQPPTGTQPSKGHYAACTKRKGRGIGVTGPQANGRKGTKGSPPTWTQVRQGPIGHTPTANQNGIIPSGIYNTTDHDPASRNPAEDLEMEPKDLAQHATLSSPQRTP

SEQ ID NO: 963420 - protein, 423 aa, Homo sapiens
MLGETTARKAICAMRGLTGALGKPDRAFAHSLPGWLCYPVLLPAPEYLLLTMCTPVPVSPACWRCSPARVLGGWCPGAGPCSGPSPRTACGLPGMCTRNGTALLTNDDSYTATGYGRAPGGLSFTQITNSLKPEPWRCQPVPSPLAVMSQRRLGARGYPGPMSGGVWLARLLFVVQGSGHPAASLRARLFGRWNGLDCPRTATAVTHDVRLTPPRGTVLFTPAARAKRWTVQRGAGGGVPEEQEGFARGAFCPQALGRIFAMVLTLVCIPQGVSGRLPRGPRVGPGRLSRPVALPVYPAQQALFPRPLSLSGSGPGIRQRGPGGPSTREPPSWVSSPRGRRLSGAGPRHPLFCGGGAHPHMWERAPLLAWQSSLSSAWVRSIVPYPPHLLHVSVSPELRSCAPSALARCVHRLLYSYEHASRR

SEQ ID NO: 963421 - protein, 117 aa, Homo sapiens
SFPAAAQPPSGLLVARAQTRVQPALAPGSLAAPSRVSLGASWHRCPVGLACLPARPPEPLRCFGPLGWPVAIGGPDSLRGQGAPGAGPTLHLQTGNLLNCGPLAEECAPSTHSEELH

SEQ ID NO: 963422 - protein, 243 aa, Homo sapiens
GLEAVAAKLAGLKDELLCSICLSIYQDPCEPVAASTTSAAAASRSTGCGREAQGALLTAPSAWRTVRRARRWLPSLKLANIVELATAPSRWTAILNCWPPCLRDPAKAHEKGQCSSASLGALLLLLSLSLLADRALHLRRTQASCVTWHRRLPSTTLAGREAEWNQTSRALQRPAGGGGNNILKTRLPRLDSTGRSENLGLQKERTRFVSPPQGRPLAADPPYSGRRGPIRQPGLGHPALLAV

SEQ ID NO: 963423 - protein, 107 aa, Homo sapiens
RRVAIAGGTSGAAADESTKRSYWHLCIHDGLGCWKEDCHRSLGRSDGVTDVPLLPHVLPYVLYLVIGHQSLLIAWAWEMVLFPNVSEETVSPTMMHGTVNGLRKSSH

SEQ ID NO: 963424 - protein, 363 aa, Homo sapiens
MVTHPPEDQVVDHVGLWRASEGSCYHNACSVSTAEINVTVDNLARWANAHYLSTSLAHPFTAKGAQEIPYGLAGWLPRNRDTHALWTEALAGAPPNVGPWGTQEPQSSVLGNPISKGYRMFGNMREHAISANSKRYGREGYHNGAWASVGERPVTIHEAPQRFPCNAEVLGRRRESLYGFSNTAKLFAHTRPPVRKQRPGGTTRHGWVLWFLASAGSLTRAAPAYGWGSQQPASATLDTGCPPPISEHCREFAEMRWWRTSWVQLYGGSHYIVDRPPLCHHQAVGEQIPQKENIVDTKQLVDPDGPLPHTPLCNPSPKLCSVCNGYYSAQVRDVNNMRDEVGECRSITALVVGVAIVTLESSL

SEQ ID NO: 963425 - protein, 245 aa, Homo sapiens
MDDDIAALVVDNGSGMCKAGFAGDDAPRGRLPRPSWWRPRPPGREWWAWCQKDSYVGDEAQSKKRRSSTLNVPQSRHGIVHRTGTTWQKYLGDHTPFYEESCVWRPEEHPVAGDRGPPEHRKGKREKMTQIMFDRLLHTRTSTCTLASPWLCVSLYARLARATGASVMRLRVHGCRPPVCPIYDGVCPSPDAVRGSGPLAGQGSWTGLSQWMILDRGAGYRFGTRGPTREIVCGMEGEAGATSAW

SEQ ID NO: 963426 - protein, 197 aa, Homo sapiens
MDCAPHVQHLPVSSRYCARGPGYFSCAAVSGWMYLATDLPRAGTLPPERACYVQPQKSNLTASEDLVGPKSFLAREKKEESELNDIFQSSRGHSHSVRAFCYNLDDQQPELQMSAAESSDHASEELSPPGKFTSDPLCEVLVQHRVNIWSSSVPPNASILLLELEHWNLLNCVCLLCRLSLASPGTVRRVPSFGTPC

SEQ ID NO: 963427 - protein, 416 aa, Homo sapiens
MDKVKIHNRIINALRKLHTAGHQAHGGGAQTRKNTTHESRDTTTKRICNTQLQHDMSEEIKPDKYYKVTSHQRKTGPVGPHRGGHIQGINVNHLGTATSSGLRRSDNTVHETSRREVGGRTTMDSRTAAIPRGHGKPPSDSDRKRTESRTGTYHQYGEGTPETKNKTTDPQNAGAETTTQCERSSYTWIGARQQLRQHYPQDKKDRKDPPSKNQPSVADKPVSDRGGTSPEKTHEREQQKGHTEDTESHDAHDETSGLTTQRNYRSELTGPPEQARDDRNNKEDDNDPQEQNKTGQRDDRDNEETEETTESTDANGEDERSDDAPEKQETVERTNERKTGGHQNTQGSTEKGKQGETTRSRKELNETKGENKKGERQDKEDQRDDNADSREANTQKQTKTRISKRRGHVREHKQHR

SEQ ID NO: 963428 - protein, 390 aa, Homo sapiens
RPRIASLEPEPEPGPAGLLRPERQDAQRGSAEPGCPVCDEACLPASALPWLPAAPGLAMGAGHWLSLHVRLCMPMDGQPAEAAAAHCPLHGLHASGWLWAAPMPRAPWELPCSAGPHTPLDRLQRAGHEALERAAGRGLRAGLPDTHKHQLHTRRATAFHNTCAPGTQARNPTDEASSEENITELWQEGFRSLGQPATLSTTNQTGRCRSGPYNPQQGGPQKANQVGVAEDRATRRCHLQDVRRTTRKRRPDKITQGTRTMTWHTLCRGQKRINQDDIFKRRGPTTTVMPEKGLKKVANGFPKRQGQRREFNPSPGQPLWKRHFRTRATAGPRHAGPRRGVWVNPKIDQFHNPEIATSRAPGLAGGSTIGGYPKVETPPGGLRLASQQAS

SEQ ID NO: 963429 - protein, 260 aa, Homo sapiens
MLTFEAYSPQNEHDTALYNARLSSITIYTHNKNEDFIANHMTDAPPTSHSLTRTSDHTLSCTATPLALIIYTHCTAHPIWHHSPNAPYTPTFTYTRLHSAPTAPPTNGFSYNTCTLTRTLYQALTSINAAATRPPPPLRVHDYYPALPTGTALTTYFAYRLNRYQPDTANMLCRSLPAPLRQRYWHCTATHTLRQNQSTRSKRIRPSYPPLAARWLCYHTPAPTLAHSSNLDCTSPGSHVIAARTHFASLSDTHHLHCAR

SEQ ID NO: 963430 - protein, 282 aa, Homo sapiens
MGTVLRTFDRPDSSVSQMHVPAPLWLLPLSDQHLPGGLAIRMWFQWSEQRDYIDTTWNCGYLLASSFVFLNLLWTADWLQSWFPSRNFVAVTACFWASYGNHSSAGLICLHAFPWDLTVSDDGTWPWEEACLLLLAESRSAGKSMFAGVPTMREQLPPNMYMQTRRQGLAGSDVHDPPSLLTASFFAIVQNIVAHSSAGFSGHVAFTTQAGWFDSWCCGSLAITVYLNAFLDHPALKAMLDFLTLDFFSTCREWGHVTGDGLWHGVHQGVTQTSVVYGLRVS

SEQ ID NO: 963431 - protein, 258 aa, Homo sapiens
MYNNSTTEKQWRYHSPPGGGASGRRGDLGPYLLLREESGGGALYEMGQGDLSLGETNGLSPIYLGKCEFINNDNHTTIWVGQIQKCPFGAHLFGCEHLCGEEMQIEGPKTRKVAWVHLSPGAPKFFQKTPLGVLQSAPIQKKHMKNTTPPDNDIQTQTKEKEHTTIYKRAMLWPKHSSNNIMLCGTPRRAAPKFHGRTLCGATQNTVVGLTPRTQEEGHLKYRARALTKTSLHSSSGGGAATTYVRAGAHEETSVTNN

SEQ ID NO: 963432 - protein, 112 aa, Homo sapiens
HEDSAGGCAYLEVKVPPHGDPAAAPRWELIPLLPAPGCGTLVASFVGCLLTCLGLFYQLACTMVDNGKLPGMAGDELLACLCLMWPMCVLVHLSLLVSVCVHIFPLLLGVPL

SEQ ID NO: 963433 - protein, 492 aa, Homo sapiens
FVTPVLRPQGAQQWCWCLGHQSGFGFCSCPGLMLHVDLHWCPGSPACRVSLLALWPVGDACALTTCAAVPCMCSLACLPVPDHLDARLSGYLPGADGLPVLPAVPAQCALMLLRDSACLYCWCPVCLVTCWCLMCLLVVCSACVACLPAPGNPVWPLAVLVALRCLPCPPFHAPFSGLLPFSACACCGAIAAPLPALCCADRMYTLGPLLGLVAHPTAPAGKGPPPVGPPAMTIDGTKELPSNAPSPARTRLDTRPLRAAALGTGLETSSPEPNGEGEALTTVHDIENAPLGNSTPCARLSSPQRDSASPEHNMHTRERYLSPLSDPTAQAQKVPEPIALTNPAKPIGERVRRSHGPSTRAHHQSQRLCLNIGLTEEPGQPPDTELAKSQSTARARHTGEPRTSRSSRHETTPLQPQADPGPRRAGSTLQSEVEENTQPASENAKGASENTRTVSNPRCGNLRRIEATEYEQQQRVAKTTACPAAPARASGD

SEQ ID NO: 963434 - protein, 102 aa, Homo sapiens
MPMIESGVRMDLDASQLLSTNEALDPPMRLARRTLRAFESDVCHNRTTNRNGTLQARFQFRNNLSKNKERQERTRGPTDPPKEGGEESAKFGLSWLALMSVK

SEQ ID NO: 963435 - protein, 317 aa, Homo sapiens
PSHSRADVRGADGGGNGGGSSSKNGGGGDSGAGALERGVAPINAVNTSPPREQFHQFLEAKGQEKTCRETEVGDPAGNELAEPEAKRIRLEDGQTADGQEEEAAEPGEQLQTQKRARGQDKGRPHVKPTNQDKEQAVSLPNPGARQLSKVFLRVIGCRFLHDVGALPGDQAGERGRPACVLFETFVPVPLRVTWRFAGAQPVGPVGTSNLVQEELAGPRDQPPSNFRKWLDLKPCSDAAAETGEVRSSELRRACAGFSQGPTPGCLLSPGGTAGEAVQADTCVPRGPQGGGYASSARGGLWPVGYAFRFALKKRGPC

SEQ ID NO: 963436 - protein, 479 aa, Homo sapiens
MSGPAGLLACLLELQWTFTSLMDMAAFPYGTLCSPACLLPAHVPAACLPNASMHGCHLMDSMDAPHVPCSSCAHMLPHPVTPHADPPCPALLCVLLDLSWMTLAPVCCASAMTYCNGPCCRWLCVTVCDVCCAVSLDGLCCDDEMCVCMLCKSAAMATRVHIPSCILPGERCAYTKTTGTAARTGNDTEPQDSRETNGHFRVPPCAKASVTQSNWFTRIQAYKFTFTHMEPIGSVRLDRFRSNIIYGWHTCKDFELVKAPPGTGALTARHAQGTWTEGQGEEHKHCEPESPGNARVNIEQYYREPKDVEERPHQRKTADTARHYKTAETPSKRTGGSVSNSASNENEPTKTWTPVSEDLRHRIRDRDPLWPQVQRRLHNSPPTFAQHGSVTTQAVTPPVHMHGPSRRQTTKGSWTLLPTTSVTMCAQQPSSKLKPRRGQSEFCALTGRDPRERTLPQDGVDEHTEKRGNTSTAEEEHTH

SEQ ID NO: 963437 - protein, 449 aa, Homo sapiens
IFRARFPDRQQELSASRSPMPSLWAALRGDSCSTGSSSDGGYSQAPQLRVCPSALVWSSPGIPAGRMKVSKCRPCQVLVSSRMQRGHSGEPSKKVYDYSATTLHRPQGMRFLLKQQICPVLYHAGDGPAQLPLLDTVPSAQCTVDELVGIEYSLMKDPVASTSNLDMDFPGGLRSPVTERNWSLPKRAVEPQLQEEERMVYVAFSEFFFDLPWRATSGAGALKLLLVGGQGAQELDMLAEGQLLWEAWVLLTQEVIDSHIEGWSCRVMGPPASTVMPSGPPTLAHGSVTMAGYNQKAEVSCSADNKEARGKGKEGSRERSQRNTKGHDGPTLHKKYESETNHNRGEHDSKSGETKTRTEGGAPTRQDPSRRDKKTRRERNGRENRGPTNLGCRVATQLSTRANKPNKREDQHTENRTSKATRHDEDANHTRTSTSNNDEAARRQHEQER

SEQ ID NO: 963438 - protein, 72 aa, Homo sapiens
LLAERDEGDQMSEVGEWEGVCAECNADFICATRMVHLSALRCPMCMLLACGAHGCSLSSGVVSGEVGVDECT

SEQ ID NO: 963439 - protein, 142 aa, Homo sapiens
MARYEARVNRPRVLRQWLTTSKAWLGLRSSLSGSGDGRPTSAGSGSPSVLDTPASLSHRGSPDHDGRLSLGHPTDLGVATQWKVELGAGRGMGGTDGEPDSREPKGGTPKAQAPPRTTDSRNTASDLKATERQHMRPPAPQS

SEQ ID NO: 963440 - protein, 178 aa, Homo sapiens
MRRVLSARLSGRGGLTLRSGLGSERGEADDCELLSHPAASWGHRALRCPGMDGARTPSSSPPLPLPAPGHTLQLPMVWPWVAMGQVGSLMAGPCCSGPGGSPSDGRVARLQHSSTRERVANREENEILPQTLNGVKLEMDGHLIAVHRGLQARLGGFDEDAEPRRSRRKLMVIFSKVD

SEQ ID NO: 963441 - protein, 268 aa, Homo sapiens
SGIRLLLLEGICSRLPGYYLRSLEEERTPYSRCSIGLMGCPVHCINASSNLVQRGMRVADVPIPIYFPPESQRVVVGRRGLDPGTLIANNDKLSKRLKNVWSHSVFEQSEIHTVKIYGQSKFTSDCDHVQDPVNLIDEANGLDLYILKTPKEDRVLQVQGMDLKRGNADCRDCPVRNPRVHPEYPVAAGIHSTYKVQGICHPSRRRQTGWCLTLERGALRRQRLLRETRTPVSRVQDLCGGADPDRLQAAVQLSRSRLVGAKTEQVAR

SEQ ID NO: 963442 - protein, 363 aa, Homo sapiens
CYFRHEGLGYLGNASERWVLAANEREEAHLDVPRVRQCQPPTTSSSSDVAPLEDPELSVSDAYEIEYLVELARGALIRCLKRSCSCMPCRAAILVLGPWTANGLLPAPSVNVERCPGQHGCVGPWWAAWRTGKPGADVVDLTLDSSSSSEDGGGGGRGRRKTRTEECAPGPKRLSDPFQTGPGCLALVSPAWHSTYPGGYTNARRGHGAQAIEGARGREVSLSYITLESGSDRNGTFHPFKAWIPGEAGDLLDSPNRGDYTKTKVHTCHKTRDTKGTHIEPQSSDVFNTQGRRTQQKAGIPRGRKDPEAGGRGKRGRLIVTQARTPRGSQPPQQNDTRCDELTLGDSNALKRSDSERHPRPRQ

SEQ ID NO: 963443 - protein, 212 aa, Homo sapiens
MPGQELIWALGPPPVCTSKCLVEHDHALDGMMELPASKARAGTMLAACKCRNRSEGTDLTFLQCCETDKLEDEKSGLQREIEELQKQKERLELVLEAHRPICKIPEKEPMEGDTWQYQWHQQTNSHPAGLYLVSPFPQGLCLNLRHCTPHTLMTTPSLTPINPSLVYTTPALLSLVPQLIAKSSSSSGDPSNLTPMGSATNTSTYEEAAMSH

SEQ ID NO: 963444 - protein, 168 aa, Homo sapiens
MGSWRRGRGGLILARLPLGAVEGAPAQARVKPLRSTPLASPPSPGPGQGMSCSRLSLPGAEGRGAWGVLASSPPPHLLPPGASRMPPLALLSHGSRRPGLSQRRVWDRVRGWRALWTSGVSRGCHLAALSAVCESPAGAWSELSSALIRTQVVSGWPHDKVRRGTGNL

SEQ ID NO: 963445 - protein, 320 aa, Homo sapiens
YSVARDVSCKYVRLVGLRPVDLQREIGICKSPPGKDDTVRPRPAVSDMVAKLLAQSYEHAAGAREAGAERCALLLLAPSEDQLCGCAELLDAGSGAMLQGRAARCQKMELRKKHGLMWRNVERLQQALGQLQAACEKREQLDAALRTRLEQELKALRAHAETCAGAPGGSSGSGGSPELSALRLSEQLREKEEQILALEADIEPKRLGASPVTHGIWEERAMRQFAMDAAATAAAQRETTLIRDSPRPHPAAASMRGLLTGGHRHQEMESTVNLGGSPFVAPPRDNSPFGADREKRGAHLADRAWNIPKRGHPLSQGVPG

SEQ ID NO: 963446 - protein, 199 aa, Homo sapiens
NTAGTGGVTRTGEHWTYACTWCGITQPLPLPALRVENSRSPATDCPATPSPLAARPSCEQKVPLSQPSADLLGHDAGTGSELREAVFISLPSPSHATPAPLGWVLLMRWDLIEDHKLNREMTPTPITTQSFETGLSKPDFSVLDGADVDGEPWTRATKDTVERAAARCGAVASGLGHDVGVELALWRLDLAHRDPGNVC

SEQ ID NO: 963447 - protein, 310 aa, Homo sapiens
MRRGCPRVCQMWKTEAVESAELSPGDPLFPRAPCRCHRMEKTLLCNLVYHWLLSRQKSSQAWWRAACNPSYSGVLRQQNRLNPGRQRLQWAEIVPLHSKPEQQWSETPSQMNNNKKRRLKLFFSKMATSWFAPLVVPGGNPVISCRWRGSALHFDGVPVVALLSPAMCLTTGLFQLGGLSNSPAYLALVHSYIDMAGAHCPRHKGLVVSRPVDLAGALLKRSFKPMDNPCWDAPSSEYEAFSRALDTWEATTPRPPEFGTYFGAANEKTGWDVPQPRPNFACPERTVTRAEALSLDLVRQPGPGEFTQPR

SEQ ID NO: 963448 - protein, 323 aa, Homo sapiens
LAWASNREPAGAGSWCVKRLPVKCYRAREGGRGARVNALTCWLFAAHACLAGLLTLPRAKPPMNAADHVHPCPGVTCMLEMLCLLAAAMGLDAVPCMWTLPKTCLGCLPWMCTKMEHALLPLTDSYTATVDTVPVCPCVASLYTDYKLLKPKPGCVNLADPYLESQMLPGGSAGPCAQSGWRCVVLCMLPFLGQGSVTPGCCLSSSASSGGLELPDCPQQQLASSRLTPTPPGDSTFTPRGGWHAVDVCLLWRTGAGVTEEAGGLRRRFVKALDDLHQDDHVNPPSVPGATGGAPVGRGRLRGRAPPVYQLRGSPAFVSGGPG

SEQ ID NO: 963449 - protein, 292 aa, Homo sapiens
QTKARWRPVFNRRGREAGSLGRCPPPALGVGSRRRPQERGGRSIPETEWQAALWRGSFPVSPQLPLSSGSRQSGVVAVWAGAVGPRVPSPLPGPGPRAAAVVMRLRVRFCSGPGRGGARDGGRLLGHLRSHLRQSLLCTLGGTVLIPIYKLHVNYKDPLTGDERDLWFIMGWFPGDLICGFFKMTFQRPNIPSSTRFRAFFTPEIMSKPLVGHQLQSRTSITRMEQHKVIPFQGQGSPRSVCVGTDDQYVKGLVNNFEAESTARYMRHIGSSAHGLLYLRTMFCTGIAAKGP

SEQ ID NO: 963450 - protein, 156 aa, Homo sapiens
MHGLCMHHEESCTCHLLSAYLGQQKIPLFAPDWLKENLQNADAMKYTIVVSATAPDAGPLQYLVLTLVSHGERIFETWQHACHLLGFSHGCATAGALCRDPGRGLLGVSTPPVGGAMTCWGALRCANRRVWPPCPCGACDFVPRLPRPRALLGPPL

SEQ ID NO: 963451 - protein, 203 aa, Homo sapiens
ASSVYIGRVAYVPSYISPGEVPCASREPLLKGGPREEKRGHLRGRIYSHFPKFSQEVPPPGTYNIWEKPLFLEARRFLSLKGRHTHLCIGAGVVKKKKFRERVYVVNFYKKSVALWVIYSWGVLKKRNRVLVTAPFSREMGGEDFVSRPPWVFAFRVLLLGGALIFLLGLKIRCRPSPKLRAPSTWKKEFHKKSRAEMGPPIV

SEQ ID NO: 963452 - protein, 113 aa, Homo sapiens
MWPAARPELTSPKSTLRLIWLLSEGKGMVPHPLKCKELRACSSGPHGGQGSAWKSSVVVPVQAGGRYGADPREGGTRCHCARCLAPLQEGGSRVRQGWQEQTASAHVPMPAGR

SEQ ID NO: 963453 - protein, 165 aa, Homo sapiens
MSHQKKTLSDEDAGTYREGCMKKTPAKSPGKAASVKQRVPNLLLIVSAAQRGKARPLPKKAPPKAKTPCQRRPDPHPQSSSKPSGGSSKQACNLVPQHQATYTHCRATRANPAMQEVFSSTSQQHVQHLSLGKHNRRINDCTHLHQILHSLSTVHVVPSRLNVSE

SEQ ID NO: 963454 - protein, 146 aa, Homo sapiens
SWNRGDAEGNPTRPSAPRRSVEWSLTPRMRPPCLATAVVGCALPVRCSRVSSGSSTLSVWRCWAGSSLGFFKGPLCPPPIEGFCSAAVRDGRLGVADLTWAGERGMLVASIQVLFDMWELDENETLMSAKFCKYEHDDTRCLQSGS

SEQ ID NO: 963455 - protein, 126 aa, Homo sapiens
  misc_feature (108)..(109): Xaa can be any naturally occurring amino acid
  misc_feature (122)..(122): Xaa can be any naturally occurring amino acid
DKFIRRWVHKEGFSGFKRYVTAAEDKELEAKIAVVEKYNIRIPELVQRIEKCHIEDLDFAEVDILGTVHKAKGLEFDTVHVLDDFVKVPCARHNLPQLPHVQSWKGPXXFLAAHCNGAHSTXVCCQ

SEQ ID NO: 963456 - protein, 429 aa, Homo sapiens
  misc_feature (333)..(333): Xaa can be any naturally occurring amino acid
MGTSVHPDETACHMVHLFEISIHYGHLDILTSNRRPHKVLRHVTRTSVNQLRDMACNDESRATREPGCSALGMLAIVRSSTNDAGRHNARHSSRLIPSVANTHSLAAGKWSPYTAQNRVPVEDPCAIYLTIPTLVLGIDQPDHCMATRSAYRISTRPWTYASGSVTTQHVLALGICPWIPFAPTLLTGIPKGVFYRIRGDNSDARKTEYKARRCRGSLHSTTPLICGQSYATFLSPACGQAESQRNSGPETMLAHRRLMVPRNGVGVDHQEPRARAYIYCRHSFSPLRVPTMVQRTFYFSERHSGVRTRHKQSLVGKPQREPTAKLVRVHRRXRSQKQKGEPTDTKRRGGKRCAHNTARELRDTESHRYTGFQQRPPVDTPKDERGKRQCRHGPKGPTIKIVTPATSECDKHHIYPGWDRNRWENIGRG

SEQ ID NO: 963457 - protein, 215 aa, Homo sapiens
FRSCFSYWVVCLCVLQHALGTVGVLRYYVYAFYRGLFVYFFMAPPPLGFSVSAHYLKALAPWRSSPLLVLLRFFSASLKPPLGRTPPLVVCSPQPRVWEAVVFLYKRPPPTTVCMRPFLRLLDVWGVGGGLPPSPRLCPGRRMICRCSSDTGRVVFRPRKSVTQLRPKCCSPLLGEKQTTRCLPQRAQPHPPSGVNYLYRPRCCIPQTLVNLLVK

SEQ ID NO: 963458 - protein, 132 aa, Homo sapiens
MTSKERHHKTIRHDNRPLHVRHEQQESDKAATRTQEQRKQGTTNREHGRNDHTRGQPAVTTPPHRERERHEADHKHRERRPTDAHRTKHTTTHEDTTQHRNTDKHEAHTRRRRERRKEQQETAGDKRKIKRA

SEQ ID NO: 963459 - protein, 151 aa, Homo sapiens
  misc_feature (121)..(121): Xaa can be any naturally occurring amino acid
ALDAAARAAIIVCVGHVLSGDERDPGRVLSVMQRNACGHVLAYILVYGSRRMAIGGSTQVDAPSNVRQSSGQNITDVRNYNASNAVSSTWRGIQNAYMVVGEDVRVYQDNEKTNEAGATWXITSERKMTEHEGEHRRWEPTCKGMNKLGKG

SEQ ID NO: 963460 - protein, 109 aa, Homo sapiens
  misc_feature (79)..(79): Xaa can be any naturally occurring amino acid
MRKVATDDETLSARYASRAGSQAKGCTRNVAEGSHPFQSAYTVVRERGSIGGIVGTAYRRKNSGQNKAIHLYVGSMSRXCHGDRDEPAQALILTDIPGEQHKEREIELL

SEQ ID NO: 963461 - protein, 95 aa, Homo sapiens
RAPSERSGPGPASTATAATIPWPAAFAATTHTRATVLPEAPSLRPMEMRPPAAMGPPKEPYRGRELASVPPELTASRQSFRMAWETPSESVVDVM

SEQ ID NO: 963462 - protein, 389 aa, Homo sapiens
  misc_feature (17)..(17): Xaa can be any naturally occurring amino acid
PPPPLSSSRCAVGCGCXFLIILQLDESVSFSWYVRVLHLSFVYCILLSRSVAMRRATVIVDHDRRRSSCVVVGVRSSASLYLRGEEDYILPSVRAGRLMCFYHRSSALPCAQVLFGLPASWWCYRPARVCLRVVVALARVSSLSTSTIRRVVVSDPPGLLFASSPLSLVASSLCFLLCVCVRASPRLLWSVAPTALLLFVSSLLTKRCLSASAARVGVSRFVAPARYFFLLAAGGVSVVLVWLPLPHALLSVLRPSRFLLLSLILSIILLHTTSVYALVCAVPFLVVVQQMAPRCIISLSVASLFCVVERSPVPAREREFCPFVLLSRARRARVETCVSRRSMRVLIERVAPALSLCALFSRSLAARAYRRALTSLSVVSLYHTITQIT

SEQ ID NO: 963463 - protein, 145 aa, Homo sapiens
MQRSDAACSLFSAVSLTMCGDHAILASPVRYCKCACGVVPNTHVEETKLSLGIARVIVIECVEVSVFHFRENRQSSFGGMMWQAGFSPGPTTEERIQTGGPNSKGPFLAWRRPFTHTQHIHTHTHTHISQFSHSACCISVILRSI

SEQ ID NO: 963464 - protein, 148 aa, Homo sapiens
MSTVTWGQHQFVPDPNSANITVLATVPSSENIGSYQAGAQWHSGKMGDNIREWAAVWKTPHSLTRSWAGPTWARNEAALQGFSSSVAPVTSPRSQKKPLPAHHHGEGKLNAQGDGLHGGPTWTLFCNTLEKAALPCRLYTLQRAGTQS

SEQ ID NO: 963465 - protein, 127 aa, Homo sapiens
MRRSQGCSQSQTLRLPTQYVLKYERASARHRKSNFQSDVRHVATIVAGSSIVALRSKPCRVASSAPLQPFADRHLRLKHLFVATGFHRTSRHLMAQRFLTICFIRQRNISALQPNITLASKPPTLVL

SEQ ID NO: 963466 - protein, 169 aa, Homo sapiens
MVNLFSEQRGNTVAAFLPLVKWPFVTVKCLREAFGAGTRVGVGFPPSNCVSRHHAMVPIGFPFRSVGFRMAKYKEDYTVGCECADFMSVRLRLWKQLSRGDSSRCTHEDRVVHMRRDKLCSPGTSYSWGQYGRGLESEGVGKMVQNVTSTEDGELVKGVSLLLGLSVCP

SEQ ID NO: 963467 - protein, 112 aa, Homo sapiens
PTAVNWIWRHVVHASCNSPMSVTQHGNVGNHDAFHGCADMGLRATHYRYVPEMKGWFPSWAWTTLWVALWHICCNHGTRLLLFWLPHGYKWKVRWTHQGLFLITSSGRRNTC

SEQ ID NO: 963468 - protein, 186 aa, Homo sapiens
GRTLRSPRSVAVNIVSADRPNVQEPGRAREALQQPYVGGRVTVATRASRGQQDQLRILRACINEAGEPAHSWALVHSEQVFALRLQDKKRAASCLSEIWDVHRFEGAGQPSPHSLAMTTSLSRYDLLGTPVLFSRDGMGALGTMHCRPIGSDRIGTKHPVPGTRRLPSPAHSESSRRGERLAGPDH

SEQ ID NO: 963469 - protein, 345 aa, Homo sapiens
ADLMQHYSSYHNACTAEAAVPVKDTVNLPTYQLHPGHHCCAVALATPRHAAAAAEIMAVLFFHTMRYKSHGPPGILHNDLLMCSHKVPCMIPYRLRGLGAECWFPGLRLDAALNLSEDQLRLVTGHPCPETKLFTYVCHLCYPGAMGLRVACLEGSAYTLANTSDQGHATRVYMLAGETGSCPDGLCPAEAMAFASIYTLDNLVAILDINACGQSEPAPLQHQMDIYQKRCEAFGSACHHRGWTQRDRSCCKAYRPGQAPPNSHPSPRTQGPRDPQGYPHRAQAGNAHHQQPARARTTTQTTSPPPTTHRKPWTPPQQNTPRARPTTEPTRQKRGTQSTKDKPND

SEQ ID NO: 963470 - protein, 384 aa, Homo sapiens
ARLVSIILTSLIHPPRPPKVLAHYRRESQPPDIIQHFTKIIAMLGRAWWLMPCNLSTFGRPRRVDSLVPRRFNDQRWDNDGRTTPLLYIRKLINNTFTLERRREIRPEIPRADTRRRQYKQGEAQTSDVQRNGIYNTTNFEASLPYVTLCNGNGEHIHPSHAHAPHRALATDTERNSLDIFTINMNPSPPFHIHSPKIGSTPETWLKPYNPVHKLNQLRYKNNRNHNFRDTNAQTYLINAHSGGSQTSKRLDWSKPRAYWYTHSKQANVTLALLNQRPRTNNPMPSRLPLPHTSSPRLSGKHTKPQADHIQRKPTLHINEPTANRDYRHKTTHRPVDALLTETPKTRIRHEPYHRGLNILGTSASTISYGRLTTCLLLRTTHNS

SEQ ID NO: 963471 - protein, 279 aa, Homo sapiens
MAQAECGLVATASGPDVAANRLWVTPGEREPAVAPDFVPFVQLRPLSALAEAGEAVLLLREGLLRRVRCLQLGSPGPGPVARRPGPASVSGLAAGSGRDCVLLQEDFLAHRGRPHVYLQRISSKPTERVALLQTVGPTAGQPQGLHQVPLEKGRRPYSSSSYSGRSPLRPLGFGAPWVVVAAKKLGEPPPKFSKKAVDETVLWVVGPFSCPHLNPKVLKRQSSQGRLKGAWRELPGRDMLEPLGHSSGGAVKNHQISGVSLQPRSGFSKITEPQPGGFT

SEQ ID NO: 963472 - protein, 176 aa, Homo sapiens
LGQQSETLVFAQFYFLKRGKSPGERVWCPRNSLASLPKAEVKKATPSHLPFFKKAVEKRSSQLCAAICAKLSRRLLSGSWRRAGCAETFSGIVSPVCENIFSCGECGGASVISWLPVVPHKGPPNSHISEAEQYFAQSTPCVCCVILDTRVLLMESKREDVTRALGCDILKTEHRI

SEQ ID NO: 963473 - protein, 364 aa, Homo sapiens
GAESILDRRWVVARAGPAAWRSTPAEPTLAGAGVPGALGTRLSSRSLVFVFLFLPLSLACLPPGLPLMPLLPRMHACRGLAAAWLLRCLHACGVLGPICYTGPEEGTKRKLNAAPPWPMPQPLGPDPPRLPAPPAHRQEAPQRPAWTGMGLRSSTIPDASRCRPPRLSSAADPGICPPAAGDMLLLLMFRHRADPTQVTANSQPNVRIQKCTTDFESHDFINLNSAVDVLRLMRLCMALQCYDVGTSELQKTAVGNLVYQYSREGISDLMTKGMDHGWTKVIYQPRVNMTLQHTASRPQDTAERGPDVPGNEQGQGRRPQTGIRGTPPLTTGRAPMTANTEDTHRPAQDQIAERAINTGGANPA

SEQ ID NO: 963474 - protein, 146 aa, Homo sapiens
MWFDNQIHEADTDQRIRVVSLLRTRLQLPGLLLSSNCRSLEPGSSSQANARNKVLTLIDFNAGHVGQRDALMQFKQLLNRWHRSWCQGATGDRAIEKTTILANIDAEYPKVRANTRAGERIHKPRKYEAPTPVGNQGAPHRVTTVP

SEQ ID NO: 963475 - protein, 248 aa, Homo sapiens
QFARTLNFAGLFWDTVKKKKRNNDTHTHTAHSQSLLWLALRPLGGKDSSKRHGPGDMGGPGPSSGRQLSQGPAPRGSTRPGIISPSARNQPTKEGGSKPCYHHGDGRSADPDGRGPVSSVPVSRSQGLRGAVSSSGESFPSPDKDLVPGWSRSVTVIPWPGSACMSSPRNLFDHKRSNLCGTQANEARRMGIHLRVLQPGGCAVGSFRRQAPRSHVVGASAPAQVGPQTLRSSWAASSVPRVLYHPSR

SEQ ID NO: 963476 - protein, 352 aa, Homo sapiens
PTGAPLVRTVEDAGLAVFTCPVAASGCPPGYCPTSVALLPRGRVSDKEMKTYRPGMLEDRCIPSDGLCDLERGAAEAVIQGQAVRKEQHLVAHAPVALLTTETPGPPAQPRSTPLEENVVDREQIDFLAARQQIPELWSRRTRRAHHSSPARGTLQAQSPGAMQDPKAFNKPQLANGHVVPIKPQVKGVVREENKVLLCHLGQCQVVDDPGSLGSVEVPGSPRETPIERRSSGQERQETCESKRGKAENRQPGTGGNPTVRCDQGELTGPGEKGAVLNVMRIVTGNQIYEPRADACTMAELTTKVSKDHNVHRNPSLTLDRRVLSATAKIVTTTESDTGRRIDQRSHRPRST

SEQ ID NO: 963477 - protein, 402 aa, Homo sapiens
ATRLRYSSHGKKARESERIITGATEGRAQASGISQNQRDQKQLTVILSDVRSDTYRLGRTWAFWLLDTNSLAFRARVYAVSSEGDRVGLISQVFLIRTQQLSGDATLSPELEGSDPCRRFDLVASSIAVYRRISTDDIRSQARASERANSTGTLPLSRNRRGRTHTEFEWLGANLEALDLHRQVTDDAGSWRDVARFLAVKTWRVFPFIFATNRARRQRSRRREGVWILTPLWSRRMRQGEGLHQNGAHRQVPVPTNGHLHFLKQGRFSHQGPIGTAPVFFPPRIGVTPFRPSVFTAPTLKWRKPFLVRAQWALSDTRTRKTHHHTLASCTLRASYSRASTTTESNLGCPDKAPNGAREYVFPPKGGVPMRSRCGFEPTRGPGCSFFSQRSSEFAPVCSKTR

SEQ ID NO: 963478 - protein, 214 aa, Homo sapiens
LIQNPLSCSGKLVAAVQAVAGWEAVGAWEHQLVSHVKVIEPPGAFTREGTTQRKLFCAPAIMHSATAVTVLTATDPQDRRWTNPDGTTLQDLGIVAKKPGSPWENVCHLLLSELDPDQTCWRHGHLHHQSSTWARENEGRSTSSEPTSEHCPALPAPHSPHIPVAGTQETQEKAPSLSEGGVGIRPWDTAYSWYRRTPSHAQLSGQAHKIDLAC

SEQ ID NO: 963479 - protein, 236 aa, Homo sapiens
MVSAGVRFLVVIDTSWDTVRTNSRRLLIANLGSFRQAYAVSTVIGSWFAHGAQRVFRPSGNTGGWLDGRKADLRMSISCIRSSRYEEFPRHILRLRTYGVTHLAFLIKHSVDLVPWCVPSGCAMGGQGHVEAPASSSSTPSGRNAFDHVAQPLQVSPYRGIGTGLHPSLLRVASVGPDAASPVVPPNQLVTRVRTAYGTDCHGAITSEGDAVQAGARRVHAMTPTCPYGSTPTSCV

SEQ ID NO: 963480 - protein, 52 aa, Homo sapiens
MQEVSGQLSLEDPLTPPQLLPCTLKHLRTVQSRVVIKTSKSQGLVKCICDNL

SEQ ID NO: 963481 - protein, 121 aa, Homo sapiens
MTQQDEKTLWSFESILMQTVPNEPTGLLYYPNACIENVRFGATSEQNPTSEQYMLRRSPVKANYYTQLDPITLITTGQVTVGITAQSYSRVHIYYRSVRPPMLDQDIPRVQPLLKVRLFND

SEQ ID NO: 963482 - protein, 61 aa, Homo sapiens
QGERVVRGHGAVRQPNGGGGKQGKPMRGMTRGGTHVHTREHKRRLWEGRRKAFLKTRWGRQ

SEQ ID NO: 963483 - protein, 236 aa, Homo sapiens
  misc_feature (182)..(182): Xaa can be any naturally occurring amino acid
SASYPSRQMGAQRMLIIMPSGLVWLSLRSPLMCFTTTLVFCLTPVVLHHTSVGGIYTSPSSVITPWVIHPAPPTPPNVCEKPFCTASFFSTATVGADAEFTQSPCPPICCSSLSLFLLCFIKGVSTPRLLVPNDPQEDEANSRVPGGFPEGDLPVLTLRPPRAWLMGPPTIAQYESGSLLDXGVLAWCWPQSDIDTRFRGFVAPPPPIAPSEAPKTGGPCAWPTFTGPQATVAPLV

SEQ ID NO: 963484 - protein, 51 aa, Homo sapiens
MLVISKHWKHIFLRNKACVKRLKTPGLTIYSPIFTINPQVIITLTVNPTQA

SEQ ID NO: 963485 - protein, 299 aa, Homo sapiens
NGARSYPGLRHTPMPLQPTRSLYNDALCPSTVCAQYAYHQRRTFFPRLCGPPMKKHCVEGVHDFRVQKCTPAWTRRLWTPPTSRTWSTLTAFRTMVMPIAHEFSPDVVLCSAGFDAVLNGHLSPLGGYSRHRQMFWPLDQAADDPGKGPGGDWPWRERHDYEPPSVMPSEACVLGFLLSVELQPLDEGKFLHCLKPTINAVAIAEMITSFEIPEQNTGTVCRSCRWLGRSLREAQAGETDEARDCERHGLAGRVGTDQAMVRQPGYTAYRPAEEPMSRSLPVRAASHPSGLHVSKSCYK

SEQ ID NO: 963486 - protein, 193 aa, Homo sapiens
  misc_feature (63)..(63): Xaa can be any naturally occurring amino acid
VLTPECGPSLPPGLNAVWKDTLSPFWVGYTLFNRHEWFWATLETTAQLSDPGTGALVVHGPGXEAHDLTRHHVMPLEALCLRLLLQCRDCQPLGYERQIFASQIAPHIYASGHSRESLSRSQSQTLELVCQKIRPWFGPVPARGPRPGETEEAETVSAHGLAVGGGRAGPRLRQPGNTAPGRQRSPLEQEPAL

SEQ ID NO: 963487 - protein, 79 aa, Homo sapiens
GKCQGAPAQEGTFARGCRNCEARYIGTWKLSAKVTCATVGHCLLGVHKKGYWQPSVVSDSYQGGMLGEIVHALSHIGTR

SEQ ID NO: 963488 - protein, 263 aa, Homo sapiens
VFPCPLRLVSPRLGSDCAPWLSFSCIDLSAFLASLRMRSALLLLLRPLHGAGARVGIGARLPWAHLTLCGFTLLAVCPIPVVVGAPPLDWPLEDSRSTVCRLCPPHPLSLYPSHCRCYYEKAVGTSRPIPIGSSASCRTSRPSNMPSSIYNNEDFQVGHSQGGPEEQGMTKVTVIGAGVTLHEALAAAELLIESNEINIRVLDPFTIKPWTDKLIHRSALVPPNGTGSSPVEDHLLRTVAVGEAVSHVTVVGEHWAITVTHLA

SEQ ID NO: 963489 - protein, 125 aa, Homo sapiens
YFDSPPGVCPPLFSAGLFGGWTPPVHLEWPPFVSPALSPQSLWLGQRRYCDYMTFRTTLFSARLSLGDPPLHPLSRPPLGTTLIILHFLSNNGALRCATHTRATVFLLTRAWKEPTYFIVKCGTW

SEQ ID NO: 963490 - protein, 140 aa, Homo sapiens
MGLGRRVVALPVRFMRIRTLLDWSYLTVCPIFLMGYLLGPRRTFTPYLLKTPVHCHFPYCHRYPKPRATLRPRLSLPTGAGDGCGVGLDPRDATLSLSHLRIPGERWGRGYNWRYEFWGNEESDDLLLAASAPALQGGLA

SEQ ID NO: 963491 - protein, 260 aa, Homo sapiens
LGGFLLDNTHSVVFCHIYWGFAPFFGVRGVFLRRFFVDGRFCRRNKSCVSCSVWSIHPPHLGCAPGEASLNVVFPNTVGVCLWEAPPRHTIVVGAQQGGALVVTTRECGLLGGFSSSPLLGRFYNAGGVFAHHPSLSGLCGFLKPLSARLGPHTSVCSLSGGITLRRGHREETLYSLITPPLEKESLLCHTSVQMFVHHTWATYRVIPPIIGPTGGRPSLRGAPKRFQSALRTHSGVASERLRRFWEIMGALSDIAEREI

SEQ ID NO: 963492 - protein, 187 aa, Homo sapiens
MPVGRIVVTYVHRMWPLPGVSGNTWHRAIYPLILINSRVGDGVTCLTGLSKRCCSEAKQKVPPVAAGAALAGMSPCWTLEESAPLCLLRGPGRHRITRLPRDSTAIASTNAWSATVGSPRDVALRTHRLQWTSDADTSSLLCQEASVPKTATSLHIQQPPGQNQHFSSAGLEMGQAGPGCLFNASSD

SEQ ID NO: 963493 - protein, 179 aa, Homo sapiens
ISHLPLFHLAALQSSFLVNNRYHGFLWWLTSILCLCLGTMQALWLTVVVGLGCSPLPSSPCALSSLSVVGLTCLPIASSREGQGTWLSVTSLWLFVRSKSSTLHVWYLALRGRLFFSWPHSAHQEDLRTVHSPPEHYSLLLSGVKCLVCGRDADSIFPRQQVSVEEAILPSCHWGHHLT

SEQ ID NO: 963494 - protein, 175 aa, Homo sapiens
HALLEHRSSSATLGLPTVIGGDGEAGPIMPTVDPACPGRPSMDQVRLVGYFPQLRGYPLLLYELRGLRDAALLSVPHGPDAPRVPRVPSGYKRRTRFRGTSPIMIGAGYLESRSVVGKKGRRTEKVGVPQQGGRRKRPTTRRAPPPYFGDRSRRRPESAGSRRTWPESGKFSRLI

SEQ ID NO: 963495 - protein, 209 aa, Homo sapiens
GTRSPPRGQGKAGACGAKAGPGPASGGTPWDEPQPRPVHRRVKGGRSPTRVMVGRRNTGPKKPPREPQAGNERSMSHRRTRRETLSHTAFPGDPHLTSELQVLREAPSCRTPRCPPTTRRPGKTLGRQPGSRSGEPPLMMGGYLEGGCEERKGSEEKEETPHKEEEEEAYYPARAAPVTRRTELGRRPEMRHGSTEELGPESGKFNRLI

SEQ ID NO: 963496 - protein, 188 aa, Homo sapiens
MGCTGPKVLVCVQKGVSSCVTCLSSLPVCWGRLVRAVWWGDFAVYGRWAALGVWGGASFYFLCPCSSRSRRDFRARAPCDSARGAHTGGHSRCGGSRAGVRTSFPHQGCLSALPRLFRSQALFCLCECFVAVPFSSHATHYGAHAKRSFKDMLVSWATDWLRRTCAGRHGYSLWMGQCPQVAKAVPCV

SEQ ID NO: 963497 - protein, 105 aa, Homo sapiens
MLAGSLERISLLTHDGDTQGAPVSLAPHMGGNKFHLPQCLSPVSHPFRPLKVRHSVHSWVRLVYPHATHICAQYKFRCHDFMSLGGHRNGWRRSSNSPPAYHWEG

SEQ ID NO: 963498 - protein, 66 aa, Homo sapiens
CVDTAHTLGTVLHVRLFNVVELPRLWVDNSHVVPTLVFGVFWEEKSDHDNNLCPRIQCPLGPDLFT

SEQ ID NO: 963499 - protein, 175 aa, Homo sapiens
SHIYCMVLFGCSEGARSFVVDLVTWMTRECALESLFVAEAYFPAVSVMYRYDVYVFISFRGCQEIRVTTTAPKSWHTLIRTRIGRLTLYTEARDKHGAHTDDMRAKYGLPKFWHRHDCETAACAGYTSPRAYWGLMKQLYDFMGPNLNTLTWSYALLEALKKHEDSAYSPEARCV

SEQ ID NO: 963500 - protein, 112 aa, Homo sapiens
AASKRSGAPPDRENRLGPPPGRSAGQGGPSRAPEPPPIRAEPYTGWITSAPQRSSGARRAHEEGYTLESMRDPPAATEAWVTGHEQGGADLIESPGQMTDELLVLYSGEDDE

SEQ ID NO: 963501 - protein, 162 aa, Homo sapiens
MPISRDCRALNVMFWGTHWTTGPGINRLEAARQRHVCGATTVEPAAHRRDTTALPMKQPGIHGRDRPKPCMRCGRASLEYSSGGLGGDRIVLVVMGARAQVLDVAVCARGLRLVASARGTAESVLLTRKSEGLGETGVLGLCISGCTAALPSTNMYTACFQQ

SEQ ID NO: 963502 - protein, 237 aa, Homo sapiens
MKLGIDSFWEKLVCKDFWGNRLKSGLNGNLRCSLVLVIWFLVKGTPHLKCVKFLKRELPKIVQHERPRLQHKGLVVAPRVTLCNSCARPTREFAHPAFGAHTWLGALALAQGLLLWLRRAHFFGQQGAHTSGPNPFHGHLGFNGLTFKPFLGLRAFLFETTRTGALRDALSVVNGAQGQQVLELLCVSKRAQRLVAKCTGAHTESLSCDAQVLRVLGGGRLGLCIFWLHRGASQHPT

SEQ ID NO: 963503 - protein, 107 aa, Homo sapiens
MSNKHLGVGGLLTAWPAVHRGCLLPFATTMVLYVEILRNNWTDAYGTSAGGHVLCSNSEGMTIGTTRQHLSAKHEIHGDALELPGDTMWFNNGITHALIKPPGSYTS

SEQ ID NO: 963504 - protein, 207 aa, Homo sapiens
MQNSFQGEYVATHGNIIRRFGCARRAISTRPPVCQRWDMMIVPCPKWARTLGVRGILYQCFIAVVCCAGKMSGPYKDKGSPEQGGYYQIVPGCIKAFQGRISCAALVPPNVSPGCVRLSSGKRVRVETPYINDGGPTKRGAPRYMMNCGELTPSGGNLGKPGGNSNPALGDACGAIWERCVCRCSVWSSTAQTGAAPVEAVVSCNPH

SEQ ID NO: 963505 - protein, 268 aa, Homo sapiens
  misc_feature (150)..(150): Xaa can be any naturally occurring amino acid
HTGDYAAFGDTAASIRGQGWAMCVTKGGHSTEIRDMLQANKVPAAARAGASAPSEVTVPAQDTWSRAQRRPPFSRPLGITRSNLQGAPLTILRLIVQLDQDLETKWDASAKPLLLNMRQYISPLLLWDWCIQQVFDNGMHLQPLKCLDIXRWKLCNSRFLEGVRNVSQCLSAELATQLLHQYPILIINGDKRVLALSVETDYTCRTAVTEKVKAFLADPSAFVAAAPVAAATTAAPLLLLQPQLRLITKEESEESDEIWDLCSLFTHH

SEQ ID NO: 963506 - protein, 319 aa, Homo sapiens
MCLLFPRDLSLFSLFRRSAFSRLGDSSGFLEFWGQHGLQQVVHAACPFGEPFVLMGQTSLLASAIRGTWYHPLSGDCSSFPGNLAFGSPRGPPEIQDKFVPIKGQVLPSGPLPHVKSLCQPRTLVSAREDLLFPGFRYHPYISRGTLEILSDVQLIKTGDQVGPREATLLNMRQHFPLVLWAGHPARCSTMAAFTHPEVLDITTRKLCTFSLPGGVSAHVARVCSARFGYPHLLHSRIPTSITPPGTQRVLALSVETDYTFPLAEKVKAFLADPSAFVAAAPVAAATTAAPAAAAAPAKVEAQEDSEESDEDMGFGLFD

SEQ ID NO: 963507 - protein, 106 aa, Homo sapiens
MMTLSVFFSPPDISSFFFPHAQVFFWYATPSFHAPLPPFLPLSLPPCVGAHVAPPHPLGLALPRAYYLLRSSALLLYNTPPGFIRVRSWVRLHLPLRAPPTLFFDE

SEQ ID NO: 963508 - protein, 109 aa, Homo sapiens
MPRALYSELSPIAYTHHWNTPIICRLNSFLLYTPVYINNFHEFEKPSLRSDKVLYSRRDPPYTWSDYMDAPHPTTHSKNPYTLNLDQKGRNRTPPSWFQANPMASMTFS

SEQ ID NO: 963509 - protein, 202 aa, Homo sapiens
AQFPSIAAQGSLSSFGGSSGAKIFDYVAQSGKGELNVLTSLSATLTPMVSSQHNGSLSCGDLLDEEELRPERLRSHCVDCGGHLRSWSRIAVALKRIAGADDRAYRRRCHYYWVRRAPAVPSLYGSLHWGARVTTGDVSARCLRLSLCRRAPRLSSGCHPFCIDAVSALLNSEEFTVFILLTRCEHSHGISVTLVSTSREPF

SEQ ID NO: 963510 - protein, 73 aa, Homo sapiens
WSHTMLEEVTICIATLAPKGPGCGLTHRRCPHRSLCGEIDSNDNCLTDREWGSLLIERGPGSWNSGECIILRS

SEQ ID NO: 963511 - protein, 204 aa, Homo sapiens
LATPRAPLSVPCVVPRSFWGPMHWGPSAHLQGACALVTTRSESASESKGLVTPQLEEVHLHGHLAPQGPAVLTTLEGGHIGLWGEKTSTENCLTEGNGALVKKGARHLESGECIILQELAHARLHPGHPAFPITLGAQPFLLKTPLLALTSVSPFHGMRLGLLYGDWPSYGLRPHGTLFTPRMHVEHGPVLPSHAIYHPPWRPR

SEQ ID NO: 963512 - protein, 114 aa, Homo sapiens
LTRPGAVRFLDCRLCLFLLLVFVLCLSLYCWSLSVSFVFFCSYCIARLRVCVLLYRLPSICRVSVRFLLRRESARISICRALVSLSCYQTQLCFCYPSLRALPVFSSKSKPRVL

SEQ ID NO: 963513 - protein, 149 aa, Homo sapiens
MTLFGGGPLVFDEPQMCVRTRPRKVFVCIGAVRLFSPNTPGAATHVLLGVVLDGARPTPPPHREKRCFVAPWIVFGGGERCLSPPQWPPPLLRVLTWLLLCGNTTGADTLPLGERFIILNSAIFDPALVATRIAAPRGHCSSTKERFLW

SEQ ID NO: 963514 - protein, 114 aa, Homo sapiens
MYQAVPSFLILVFLLPARTSNEGIRSQRLQCSPPEPSSGHACGSVAHLSVTAGPFVGASCNCSGAQNGCWSTFTRHPTALQRVGKGACPHGPPSLSDSPHNPQPCPANPPSGKH

SEQ ID NO: 963515 - protein, 208 aa, Homo sapiens
IVFADVVVFRVCLSLLVGPLLDVLAAHWGLLHTLPCDLVSPPSQQFFVPVVLRRVRVVFLRGRHHTVSPHSTLSFAGENSPWGAPAPPQGPPFAGVSFVGCVAATRASSVPLPCRRSLYVCPMPGFYLIGPKGGSWKWNLFCLRTNQRGSSRALRKLDPHGPSSQTCCPPSVRIVLLRFFEVEVGVNRDHAYCDSPAWATRVRLSTEK

SEQ ID NO: 963516 - protein, 69 aa, Homo sapiens
MKVGVISVHDFFRSLELPRIFRFLPTEFSVSTLTAPSRSMQEILTVPGLNPLTSQYIVYPEQNDSLLNF

SEQ ID NO: 963517 - protein, 110 aa, Homo sapiens
  misc_feature (96)..(96): Xaa can be any naturally occurring amino acid
TSETVPTQLGTHPSNDCAHSAYDPRHLGNPSATVGVRSLLIVISLWQHRDIAPELSYGYVDVLARLWTPTSLYCVVLTCRRKALSIVALTLRAHSXAAIGRSGSPYVLTH

SEQ ID NO: 963518 - protein, 112 aa, Homo sapiens
SDLRQPPHLLRMFFDGPVRRGLVKEDAFYSWESSTGPPEHRARVWPPKSVTAFFKWLPEPEEESDTTQLEGCVGPGDLGAPHGHHQMAPASPPWTSRGAGQPTGRLANGSPC

SEQ ID NO: 963519 - protein, 110 aa, Homo sapiens
MQMKVNSDAGAFKNSLQGLCLDEQELITQVRSEKCSLQAAAIPLMQIDLIKQRPPPPKFKDNKPLVERFETFCLDPSLVTMQANLVHFPRRTVQRHSLQAFVLLTVASQP

SEQ ID NO: 963520 - protein, 111 aa, Homo sapiens
MVACLGLVVAELLTRHSYYTIRTTCVVTSAYCPDPLGLYLPSLEASFPDFPYFSGFSLGPTCRPDPCSTDQYVIGVDADFRPRHTFSAYPDAPTLLGAIPDAYPPWTSYHL

SEQ ID NO: 963521 - protein, 86 aa, Homo sapiens
SCRKHKPQDGFSRAGKDHTTADNNEGGCLFFPIEEGGAPQTSVGEALFWRGGNKTSPPREIKRGCVLVCCAASLWAKKRISRGGNV

SEQ ID NO: 963522 - protein, 285 aa, Homo sapiens
MCAGYDIYGRSSERMTTMRFYGHYNNSHKQEAITDWNNEKTSAVVEETRAGRGHHVYNLSQQKQKSKNNTALILSAVAIAIVLAAGMVCMAGVDNRPSHQTATSDALANQLTRHCKKPRSSQKAELEGISLRNKLHNLSRRIVSKKRWPNSWLKSNKRSPPFPAVMLTPGCGSGRFSGETRRTEAVGGDQDVNDRSAALLKTCRRPACRILNDPSLITVVGAITDDIAGLSEESKVALMTASSFTLNQRQSGTYLRLGANGPERRHALQRHNSHVPQRSGSTRNT

SEQ ID NO: 963523 - protein, 48 aa, Homo sapiens
MPLHSSLGNKSETPSQNEDKTNKKTQTRSLIGEWEPQTIRKVLFPKRV

SEQ ID NO: 963524 - protein, 211 aa, Homo sapiens
HSLLSVFRYGGLLDETQDAQWQRALHYLSAISEQLTTVTHDCHHASYDGQRHKDPFISRNGSTVEQYIFSPPELKWLSDGNDRHVTPGLLLLAFQSKPTSDAMTETDKPNQQAAMDDTCAPSDKALSMPPVPAHCSTSAPASLRALALSEGDHRLIRNRKQLVPWTVLSETSSSRPGGYRLFSSSRPPTEMKQSGLGSQCTGLFSTTVLGG

SEQ ID NO: 963525 - protein, 135 aa, Homo sapiens
MPAHACVAKIAFKDRGWKVSRLHSLVSSLGTMFCSNLHTPLINTGFHDNTMRSSIPSLEDITYVLKPTLHKRSTIGHTVDNAKPIIVPGIIDGTSYLPGIGGLNNIKASDYADAVFRLYLNVARLRNYFREDEQL

SEQ ID NO: 963526 - protein, 72 aa, Homo sapiens
MIQWSAGAPPPHRRRALAIVVRPPSRHNTLLVCVSHFANVGGSASVFRVNSIWIARMYGPPWAAGAHSSGPC

SEQ ID NO: 963527 - protein, 179 aa, Homo sapiens
MAVDRLSPLTGQSHITPLLVKSVVHRLPLTLQVHSKKESSPLTSLPVEIREFVPGIGRGSLGTEVSERSIRAHMRCVERTRGLRWHFSNITVHVFIGLVCRSFNASSKASGKSTGFTLKKDGLPHSAISGADDGGLMAALAWHESLVPLEAVDGAVRFLKFCTKFSFVISSHLYVFPHL

SEQ ID NO: 963528 - protein, 62 aa, Homo sapiens
MLDQDIARWSQPLSKGSYWFNELKSLRDLSSDRSNPGRFYLLKFLLYEDKEISYSSNPPKVV

SEQ ID NO: 963529 - protein, 89 aa, Homo sapiens
GDPVIPLSFKQSLMPPASGHVFSPVPGTRGVPYQGTAKLNGLRNAPPAGASSMAAVGLPRSALLVAECVTPCRGAASAARSKRTAERGP

SEQ ID NO: 963530 - protein, 115 aa, Homo sapiens
MRVRVLPRVYEPSRRAESFIKEKGCKNGFIRGYLGINLFVAAPWCCPSREMAAFVRVSPPVCYGGARRGFPVGNAPCLSRARRCSLVLPALLRGGAIKSPTGGSLSIFGGALCSI

SEQ ID NO: 963531 - protein, 108 aa, Homo sapiens
MHAASVLLVDEQGPSDPGARYPSCRGLRNIGSVQRNSVYSDVYTYCMHVASEEKLYHDLAYNSYSHITDRSIESIMTCEELVTCVIPHLKVRAVIRSVACIGLTPPRY

SEQ ID NO: 963532 - protein, 71 aa, Homo sapiens
GDEAGPRGPPVQRNGNKPAQALRSASRRPLTPVRRQLQVNCLLYQVVGNRKYTLNTLLKALRCLYLQKYVL

SEQ ID NO: 963533 - protein, 405 aa, Homo sapiens
FLIPGSFSLSPPSDHAGLQSAPAVTNTLALAEAFLYTCITSYLTLYYELFTSSANAAYYCCCCAGWHWPCGLSALSTQLTTLLGAAQQLYPSLAPLEAQLRTSGEPRALTHTTPKNLTPALLSPPFATLYSLLSTLYIYSTRKAPSAYVRTAPQGAWHALRTRGPPAPPCAPFQACPQAHPNPVPQGLLPLDRAFLPLLAPFPRRAFLCDAYALAGILTAARPQPHTHRPVARLTLLSRSYYSVIYYISGAYYFYKPAAYRRRNRAAGISTTRRVVDIRPPDVPMLAPSSSGHTLIRCGKPLCGVNTSTTTPRGAPFRPAPPSRPKKHVRDCVGATDISQPAGGRLVLKWSHTPDGPHPTKAPPSYRTLRERFLSTNDPRRRGDPFIPHIPIYNIARAQRRATPI

SEQ ID NO: 963534 - protein, 132 aa, Homo sapiens
MKRGAQGHVLNNGRAVVTNVPVGAWGAPYVLVLYDELKKVIQGPRPPPAHTQHSQGNAERTSVRITATVRTSQPCEKFQLSVFPAASCRVDRLGEGLLEKGQHCDPTIGSQIPCLDQRGGREAVASLRGAHG

SEQ ID NO: 963535 - protein, 232 aa, Homo sapiens
  misc_feature (57)..(57): Xaa can be any naturally occurring amino acid
  misc_feature (196)..(196): Xaa can be any naturally occurring amino acid
MSGTQTQKGVVSRDTPAFSKNRLSQCLAFTEVQALMQLRCRGEIVTTSSSRQSSRSXSVNHREYGSGGCCRPGIAEHNHQAVASVTHARLVLTHDRICEHQAGASLLVHPSLISPYTTVAGSLAQAQAGRVSRARFTDQCIQLGSSVSQQFEATVINANPSLLDDPGPSINSSSSLVHLTRGTGRKGIFVAFAPLXPVLAEVPPVKERQGRRGAANSGGAPRRATFAWPSIL

SEQ ID NO: 963536 - protein, 83 aa, Homo sapiens
MYNIYLGLYFTLLTSLRVACESPFTISDGIYGSTFVCSHRLRTDFTSPNGSTFLTICFIRQLIFHFTSKHHFGFEATGPDTDI

SEQ ID NO: 963537 - protein, 41 aa, Homo sapiens
MSGISHNLLLDLPLPSYIENNALKGDRDFCKTSFSSNFSPM

SEQ ID NO: 963538 - protein, 115 aa, Homo sapiens
LEQRRQGSPLDEKETYGVVQRLSTATGELRQKIHLSPEDRGFQGAKSAPMALQPGLTEETLCSKKYETKTTWETNFESAQLIGKMQIKRINVLRMLHRLVSYPPNACMSEGHGHP

SEQ ID NO: 963539 - protein, 284 aa, Homo sapiens
LEVTGGCMEVKPHGDLVSAIRAGGNDHQVCLVVAVQTDEFFKKCRVIRISGSDLNGPLPVPFTNGVVYSKGDTVVKPLAEAGLGEPQASPGEIRPPVTQRGAEFPETSPQNRTPLAALVVPPPSDPILDFNISLCHGQREGRSMKRSSKRAPQMDCSNERRTLRGTSERRGAPSDWEGDASYSHPRYFLLPQLLPWIGVKFEHPIVPFLDKWIFLENMFFPDFSGTVNVFPVVAARRAGDSCLRVLPPWVLILAGVPLAAALDFAGLARPGLGPGRGGSLRPVD

SEQ ID NO: 963540 - protein, 129 aa, Homo sapiens
MSPATKVSNFPVPISQGRCGPSGPYGGRLGRELGSITYRANRSNGRNHGPHNAGCEDAPAMASPMSGPNRVMHLLRSLNVIYAPCSIGAPLKFPVAHMIDCLYDLVSRLIHSLSVSTLDVLYEDACGWN

SEQ ID NO: 963541 - protein, 178 aa, Homo sapiens
MCSLFVGFYLFYFVYVIYAFPCICCVSRLYCFHREIFFFWGHALFGFSTVLQFVFFVVPPLFPSLCSLFGCSPRTLLSRQMHRCLPRVARCPHHIRTVHPGFPRDSGQGSEVNQRHTEDSPWQPASPEERDIQTEEKSPAPSFLAQSEENLPPPPSTDAREVGGRSGKFPFPSDPPDV

SEQ ID NO: 963542 - protein, 86 aa, Homo sapiens
SLNSRLRPMTAVFSSQKLVREMSPEQLMNLFCAGFTLDTPDDEPSLSYVSMNGPQRSPAAVFVSDEIQDKRQAASQSAVVVLLRLC

SEQ ID NO: 963543 - protein, 104 aa, Homo sapiens
MALSQPLCNRSPLNGQARERQGTIRGSRPLRSGHRHRILILDKVGTAPSQPTKPRRHASRPHHGNHTHRTRPARMVHSDMRHPTDLNLGARTNREPAWRDWRAQ

SEQ ID NO: 963544 - protein, 348 aa, Homo sapiens
DGRMYVECVEPEGSHWLDLGMGEPASELPSEKDYRGKCASQENPWAQQCLVGLGARGTEVLQESRRDGYSADGLMAVESSHSQPKIREPGYSVSMGPFDMMSKVLAWAGRILSFCTALGRYSYTLTSSSHAVRTLSFTHVCGPHYPFTRATRRFSLDTATLNGRQGCQGKGQVNHPVWHRFNKDGQRLVDFHKCANFLDERYIREDTYITSGLKLVEDPWSVVHTVPFPKVKAGWRRKPGINSTVERGTFTITLWLQMTSYPIRFPRGLTATKEYNARENTNYIAEAQARHITMGYSLDIKDRSTGAWPSQANNFVAKGLSCRILIHPFGICPTREDHLGGTIRLITA

SEQ ID NO: 963545 - protein, 282 aa, Homo sapiens
  misc_feature (60)..(60): Xaa can be any naturally occurring amino acid
  misc_feature (194)..(194): Xaa can be any naturally occurring amino acid
MLVELVLTSDEPPFRNGGVSISPQKGKYTCVVSRRTEFFGGVHIDYRAPPNCAGAKASHXPLGGPDYYKAGLLGKFLAPSTGGPIPAQELGGHRGSLRQGGSNLAKGPMRGPHGWDPPGMKARVSHHMPGRYPRSRRGSRNTPRLAPRGPQLKGAKGSEREGKGGIKGGKQGAPLEDSRAHYGHPHYSDISEHXNSGDLAPRYLHAPESPQGPNVHSTGAPHHMGEISRFTRTPQPRTENGEHFLEHICHSRTPPERSSGAQHPQPRGLVLAGTRRGTTLKE

SEQ ID NO: 963546 - protein, 111 aa, Homo sapiens
DGQAPATGIGPPPDQCRGKPGAPFPHLARSGTANAQADGGRTRQGAGNSRGLTAPGSFLPAGSWRETTLWALQGPPDTQGSPGGGLPGTLLLSSFSLINASDRIPCLRGPQ

SEQ ID NO: 963547 - protein, 364 aa, Homo sapiens
SDEMKSGDGDEGADEPCAMCTCRALVAEVSELMVQWQRRSDGLEMKMNRCLLCSGMTVLAGSLCDLQVSMCYVATCNLLAPVVELVQCIAVRHAARMRRGTQSRARWRARQTWGQTLSVCDDDESPLHGARTQHADVDMALWKRDAHPHTHAASTRTRADLRKPRTHTCTATRHSSWYRNRATHEHTRGDTHGNTRRTNAKSQGALREQETCPHCNSGHGLRTPTRRTDVTQLPALRARTRTVVTPVRGLKRVTPRPRQCKRKARAEAKRVGTHPCLGRTTRGGTNAKDSHKVTEWCEQSPPTGGRGYARHYHILGATKEADIQEKHMGVTIHAPMARDDACTSKASSEHTLGRSCNPQGEGST

SEQ ID NO: 963548 - protein, 229 aa, Homo sapiens
CGWFVSSVCRGFAGSSRPRWGVCSGFVSPQPCRRSALFAVPPSPGPRVVARAWWPPSVAAVLGALVWLRVPSRLFILVFRRCVLSFLRLIGALVVFCVGLVLFLFFMCAPLGLRPMCFCPWVWGALCVWLCGCPGPFWAPPSLLCVIGGVSALLAQWAPLIFLVCCLSPLCELPCERVDGAVLPLVDHCLIVWRVSAPCLSSRVMRLVSVMPPGPLLRRVLSRGVRPGF

SEQ ID NO: 963549 - protein, 369 aa, Homo sapiens
PLKGGGWGDHQKRGGGALVTNPLPPPPPPPPAVVQMYIFVCVSPPPTQTRVDISGRTTHTPDPARPHVVVFLKKKEEGGPPRGARAGGALKPATPPGEISPRAPHTPSTQERRGESQHEGVNPPPHTHHTHNINNNTPHNTTHAQEETYNTHQRHVSLKKNINTQERHSEQALVTLDHHIDDQHHHKTLPTVANTTKRHTQNTYTHTTLVVEQQHPNYQQKITKIITSTTLLHLKENHTPGRQKGNNTGRRTQGEKTTRPDTMSHPTHKNSTAGDTATQKKLTEHHTSHQVSQADKVEQTKTHPPQRDGTKTIINQRHTTTTHPPTHQKKKHTSAHVGRSEDNNKNQNTHAREGAPEHPREARTAHRKH

SEQ ID NO: 963550 - protein, 172 aa, Homo sapiens
  misc_feature (72)..(72): Xaa can be any naturally occurring amino acid
PAPWSLQSPGKLCLSGSGTDHILSAISEVHSSQPSSRMALPPSPLAMEYVNDFALACKFAGKAANPLQGRPXPPLSRLTGALTPLHAHVASFTHASVQPRHCVAGNPRAPRPGLDGAVLAGYPARTHPARRLRGTRHFGALHVLQRRPMARCLHGLSAPMSLLDWAPMASLP

SEQ ID NO: 963551 - protein, 86 aa, Homo sapiens
MAPQGMQMPGKQGVMMLPGGDVCKERDARCTGPCSRVASIVVVLPGILCVPRCACGYSVSETVHFATTQVTSMGFETAKEMNASPY

SEQ ID NO: 963552 - protein, 70 aa, Homo sapiens
PDRIFNFRPNGSPVEFPYAAFAPRFPPGNRANFPVCTTRHRTVGLQTSPVPSNTLKVKLARPIRYLKPIE

SEQ ID NO: 963553 - protein, 115 aa, Homo sapiens
MPYYSHQEYQSPELTISLIENNRESKDEFKHCSLAIFELGLYFTLRTSLQSSFESPFTISDGIYGSTFVVATGFASDFTSLNGSTFLTICFIRQLIFHLIQTSLCSKPPPDTTLC

SEQ ID NO: 963554 - protein, 97 aa, Homo sapiens
RNGYVGEIGVGPGWSLMGHKSVRMRAGVLAGKGRRRVPAKKAREGQRQKGHDDELARGRWATKGKRITAAGASTINLVDKLDPVFGIGRSCREGENL

SEQ ID NO: 963555 - protein, 149 aa, Homo sapiens
MSRLLYQFVPEQGTPRWAIRLCPLTGNPYYYGNNSRLYSVMYLPKYSMGYDRFRMEAGDLEETNLLVTSWTPHLVWRWPISDRASVGHSSTALLISGYLCKAYLPHRRCPHEEQLRGLPPVHCKRDDSQVNAHCGTLYEDELMQSLSPC

SEQ ID NO: 963556 - protein, 292 aa, Homo sapiens
GPRLTVVHDKPNEDSARPRERADNVRYTGYYVWLQARPGARVAAVLGHSGLRREEPPGSTMRLGQPTCSSTSRRVAQTPFGVPSSFPASVACEEASSHGARAPQSRRPPTEGKQAVPQAENEAPQTHGHTHQSGARPEGNQRLRGQWTTRIHSSHPATPRPEFTSGPYRAGVLKQDPVRPMGPGPPHRGPPTPTLLHAGFLPHGWCGACAHPAPSVYGPDGAGPWCTQHQQRHGSGPRAIPEAFNTAHWALPIPRGPQRHQAAAEGGLRTGRAAGARACDNRVPQNCPPALD

SEQ ID NO: 963557 - protein, 218 aa, Homo sapiens
MCSFFRCPAHISGLDENSSLFLTHLHLRCLQYYLRRVGISWEGAWELGSTSALPGRQFRLCRKEQSPWEALGEGGAAGPARMVLPATGGLRVVSAPVHFTFFDDFPSLCFPHLFARGVGLADENSPEDCFYPRPSPRCDSGVSGDYREPGHLAAVQPRVNLLNWNCWLTGGFSTICELNLMAIAGFLSAYTQKHPGSICQVLATGPGSNWRMIYVTFH

SEQ ID NO: 963558 - protein, 122 aa, Homo sapiens
MAEVAYHVKNNNNNNNNKSLSVNQLFVPPYQGYQPVFLPFFFLGIIVGFIPKFLTASFLFSCIELPCYARMRVQDWLCALDSASTWKHDVPISYCWRNSNLQALGVAILSSHQLYLRTGITA

SEQ ID NO: 963559 - protein, 381 aa, Homo sapiens
RFFDGWLFFGAVVSVFGRAYQGVCHAGVSLFYMPGVVGLVLSAAWGPFSRICSFPSRFSVYAWHVVALGRPEYPVADCDAGVYVCIPVFYSMVWSSLVFEGLHKVSTMDVLLFFLDIGYYLLISVICSKGFLRGYSENSQCESSHVLWRRDMREHIVLLRPAVLEEGEWNASGEQAAGLLEGRKATMEPPGLRHTAPIEYPLCWLVLNFYGASRYLAIEDTLLLLALPYFLGSTCDYTVWLGATDGTLTSYLSCPEELHVQTRSVTLQVIIAAGDGCQTSWTHRLRKNAFRQCQSFIWNQATSRLAVSSDVSWSFHEAMELCLLPLSATSWQRGPTTSYTCAENWILAGEETQTLGSRVLFLGGGLSSSVGKAFNQGKIFK

SEQ ID NO: 963560 - protein, 121 aa, Homo sapiens
MIYKRMHVSPYAASQGLLGSRNIPALINVLVIPVVCSQNLSPDKMLINDNMCPITSLAILILPRSCGPVILLCLHLPCDILLPCGARDLCDSHPIHTLPPFLKITNKNLLVLRLVGHHGTC

SEQ ID NO: 963561 - protein, 80 aa, Homo sapiens
GVAHPWWPAPAECVNPPFSAVELDVRPVVPARDKGGECLGRFGAPGRTRGVSRARCLPVSLVERIICGKRGGIYVPFGTL

SEQ ID NO: 963562 - protein, 90 aa, Homo sapiens
MSSMASWPLSDPCEKEDHVMLWGILDRQQTGKISHRVRSTQCGSLPSASSYKVTRHGPSAFHDAQETKEVINPVDYTVLRSHPKLTPGPY

SEQ ID NO: 963563 - protein, 178 aa, Homo sapiens
FHPYLGKHRVTKPGLLITRNVGLTYGELERTPVSKRRPMGVVHTQLNRATWEQIAFNASYTLNSLFPTKAVIWNSLLPMKVDKALVFRITPSSIFLVGNPSTGIRPPPDCGNRPNGWSIYALSYAYREFANRSSLNNACSANRGLYGLLLDSGTVPDSVQSAYLRGSFVQAMYSAYVI

SEQ ID NO: 963564 - protein, 105 aa, Homo sapiens
AVYSFLLLSVFCACAPPCRVSLQGVPSVLRRFRVPVPALDILRLSVWVLVSSPGRLLPFPLLSPVYVVYGFSWAGVLSSILLCAYCPFLLRRHISFSSFYLRLCA

SEQ ID NO: 963565 - protein, 164 aa, Homo sapiens
MGGFLCTGLLIVSWLGAPVCVTPAHSGGGSYTRSGGEMWLAFVGSACPLCGERVSLLVGVAGLVGGRPPALVPGSSPREGPVWETSLFPWSYTGVILHERWGLLPSAAKGAAPARSPCDRVRVSWSRRAPGINIWGIMPFLLGGIFFPQIRSSAPGAALGSPRV

SEQ ID NO: 963566 - protein, 84 aa, Homo sapiens
FYHNVLRVVRPKQHYVEHDLVAQGSVRCKAMMAKAITRGHLTQIGDVMEGTDILSGILQNVKPKKAKKDGLKGFPGQTEVTSRS

SEQ ID NO: 963567 - protein, 86 aa, Homo sapiens
GHTNFANPTTCCVANVNLHDAAPVGVSGIAPKYRHRLSVRCATFLACSGVDLSLVNIVLNPPFSVAKRTLSLGFFTASVSVCLLLS

SEQ ID NO: 963568 - protein, 105 aa, Homo sapiens
MDACYINYAMQVCECVLRGPRQGLTETRCRDLKPVEGQSQEPVTVKMVYSIASHLWSNNRKKLAPPPLCEIREFSEWQGKPCTEVAEKHPCHILCQKPVGLTWHL

SEQ ID NO: 963569 - protein, 261 aa, Homo sapiens
PVETDFGGTMGKPQWPGETRGWNEAKERGPGIGLEGPTLPGRRPYTRVRNSSNARAVGDTSKTHLRRIKDRLKQLATPSAVEYSRSTNRGRPSSRSFLERGRRDERRNGKGRELTHTYTALDHETEAVRGNSTGASECALPCTAPWTEGGQATTTEELQARGLACIHALLPRGCHADTPTFTKPTRALGRSHARSEEHGRSESKAQPTSFFGAAENLGEKQRRSPPADAPAPGPQPFQSCASSLGPPLWPEEGPQADSLGL

SEQ ID NO: 963570 - protein, 78 aa, Homo sapiens
QRGSQLEGVQASVAAFLRSVPYWRSTAPGRCVEQLAQASHVVLTPFARPEYYSTAAVLIRVDPEELIRDFRNQLSINT

SEQ ID NO: 963571 - protein, 173 aa, Homo sapiens
MEPIAAKTVGVIVRTAVWLGATDGSFVGADGASISVTAGCPHRLLFGAHHWVTVCAQWVSAVCHVRWATLGHAIFGPPGMSFRFSKDLCFGVNLLHVAKVLLAASPLRSKPNAVTPWDQDCRVCLYGRKVLLFFLVVGASREIDLELWHVPDFAGIVSPRSAFEPTGFSPCNA

SEQ ID NO: 963572 - protein, 349 aa, Homo sapiens
GWWSPAGISSLLAAHCAPVGFLFFRRVSPPQRWRHLRNVVGVWSPLVWECPPPLPGLIARGAPRLLLPPFSAAPLVGPSGGGVSLLSAAWVCFRGRDGVSALGMKGEGRFPEVWSGPQSMCALYKSLVQLVSPTGVEPTAHGLVTSLVWGDIVGDFPARPPPHCVSQRRHTPRCLRGGPLCSPHPSRVGALLPRVWRTAGHPPVSHFGGPPHNGPPTAPHLLSPPRGLLFFTKGAPQSLWESHGFSHPVPHVFSRPAGESAPFLPLTLVVTPTRRTGATCETQRDVRMSHPRGLERGHNTSERDLSCLSESEFTPAIPTREGPTATEKKERRGDFRVERKGPQKKERRL

SEQ ID NO: 963573 - protein, 118 aa, Homo sapiens
MTLEKACSRTTRGLAHLCSTDRLQKSAQPLATQYGKLALVLVSLEICALPCERPLHYARDREWYTGFRMNLQGPIHDMCVLLSEMGYALEGPCPVVIMLDRSRDAREEFALLMLRGAV

SEQ ID NO: 963574 - protein, 71 aa, Homo sapiens
MNGKPLKNKVQCEYMMRSPPMKTAMTGVRPLTCDLSKAARLVRPPSPSWGWTSVSHTEPTTVISSACLNTE

SEQ ID NO: 963575 - protein, 235 aa, Homo sapiens
TVSVCPVCCISLGRCVWSLCNSLLCHLVKGLRLLAIVFVRRNVVAFNVSLSCFLGFIAADSTRLALSHALGPLAGVGVSIVVHASWIPVQWSILGAVPQVMKKCLVRSTLAVSAFLSDDVNVLSMELCRSTFCIMIADLCTAASSAAGYVCDNIAALISVRVRGHGCREPPVSSHLVYHDLDVRLLVILCLDNYEHGTIGHGAMPRNSALLSLVCLSYDDVLSLGLLPSICMHRS

SEQ ID NO: 963576 - protein, 207 aa, Homo sapiens
MGALCCRAVLPRRGVNKSLVVLLVALGGKKYLPLYPPQRRGKGKKWGKEGASKMERHWEPHTVMRNFGWETLWRSPHIPRGKRPGAAHTYTHMGGKATYFGEEIEMEKHIILLHREGGWFYTGVLQKPSVIMGGPQVRYIHTRAPWRVRTSYNRGQRYRCRMERCREEHALDISHIIYGVHTILCALSVCLCVVYNINLIYGIGVFV

SEQ ID NO: 963577 - protein, 127 aa, Homo sapiens
MSYLHVYLAYIGDTCTDSVCSAVPAQVPWTDGVLDGLRSPRGPQAQGLGPCATFPVKQGLSLSCRGRHCDATGLIYKQQACGLFKAEPRPFDCPGGDGGSRMLELNQTLTVLQAFLFHKRMTHANKY

SEQ ID NO: 963578 - protein, 239 aa, Homo sapiens
  misc_feature (118)..(118): Xaa can be any naturally occurring amino acid
KAFGGQWEWYLRMLSSFHEYKFITTSYMETSVLHPEEVYAVAKLAGLHDAILRSAIIGYDTQVGGRGLKLSGGEKAKEVANLLRCTCSEATHATSYSMMKLFIVRFDLLKDDVDYLVXTTKDMVVMVKEQNFYFHYAHRLSTVVDADETHLSLDQGKVDRTWYATNGLLAEPLIVSIREMWHTQSSRVQNHDNPRMGSKDKYNISKEEERKILQEEIVNSVKGCGNCSCYSHIDISFLC

SEQ ID NO: 963579 - protein, 148 aa, Homo sapiens
MSKTPLFLFVSVGSLRLFARVGDLMSFLFFRMFRCFMHLLRFLHLWVLVYYSWCEALSAFSLRFGMFILLFFELLTSIALLYGSIDLDVSGVVRVLMRLMLCIFFFPFPGFVGNYFSAPSSVLLSVTLGHFMLRQHSIFLLLTISEVF

SEQ ID NO: 963580 - protein, 103 aa, Homo sapiens
GGVFSAAFVRSFGGWCRGCFRVSRIRLLLSGVCLCFESFYVWGARGCSPHGVVLRRGVLKLLWPSQVELWFARWPLLQKCLGVIRGGGAHHAGHSGYKLHTPV

SEQ ID NO: 963581 - protein, 117 aa, Homo sapiens
MRAIMFLGNSFSEETGFVGKFWILDEAKIWEIQKDTRRGPLVVLYRVFSCIKKFLVWKYSLHSRSKVFRFLVIRSTHQALAVTCLKHYKAVSNEYFLLHAHIFDGWGLGGEEVKSRF

SEQ ID NO: 963582 - protein, 109 aa, Homo sapiens
GGLPSIQMHLHRPSVCSHIETAHSMHLLVGKYRLPPSCFKQLESWSLNPQTVQRLLGTPPSQEAWHPPSVYPLRGQGVRLYSFCILLLSVATDSINDATMVCDHVGAIK

SEQ ID NO: 963583 - protein, 288 aa, Homo sapiens
GWSVVFELRMRVPAVCGRAGRVPTQRSLRGWAASRYWGRLWGGIMVWVAIWKGDRSRIVSGGTRGRFPFGASVADAPSAPLGRRGRLGDLREALCNWRDYLCALGPPRIRPRVQVVSGWVIPRWTCDRFAGARRPLERTGMFAWRHVMRTTAQLGYDSLTGGLRASLVSAALGQGRYLPTWLEAPFGAAPFVWSHLGVFRRVVPRPIVVAPWDGVSRSCTQPWRFCPLALYQAPLLKLGLMWRMCLSPALLEPRKGNGLQEELCEAGRDQMEEAKQLAIAHWGDGCGR

SEQ ID NO: 963584 - protein, 290 aa, Homo sapiens
PVGEQGPRKAKRVTSGKARRLPLQGGRLGGRTRVQAAARVHRGLASCRQMDPQKGETKDVRWATPGHAWKWKHLPSPGPILGCPSYPLSRRRLSSSGFATFARIGMRGIVFQFDMLNAFQILKATNGFLYTLGKRSHTHYQLSLKLFAREYRAFTSDHSGSTGSGPCPVVACRQPAFGPFKAVCQWQPVQLGHIRSPGQCSGGLLCKVGSSSGCQVHLAMYARAERPYRRTRGSSSGVGGSGTESGVSNRGTREPSMNEPRVLSIQQDAKECTPAEEEEDISAEEAGEEA

SEQ ID NO: 963585 - protein, 150 aa, Homo sapiens
MRPPCDTPPRRDNTHRAAVFRWSEDAKKEVDEQKLNGQNKDSSYFVEGSPTMVKTTVCDIPPRGLKMAVTISGNSTAIQELFKQHHRRQITAKFRRKAFLPMVHRRGHGRDGASPRLRATWTTSSAEYQQYQDAPAEEEEDFGEEAEEEA

SEQ ID NO: 963586 - protein, 172 aa, Homo sapiens
MTLGASHLFVLLANRSGHGASRIGLRPLPLISPPPPGLCPFCCNMCGSSPLVVGEMLLNCGSKGCPIRRTAGSVLPEAVWAATPFTRLFLFSPSAHVYSLHRAAQLQRDKVPFGLISLVMYALGGHTTFLWNWRHSPRGLMGLIPEHNGKRCNSNIRKFPRHLPFAHIALYR

SEQ ID NO: 963587 - protein, 142 aa, Homo sapiens
MALGRPLQCTGRRPCNPLMGPQCDAKIAACKAQSYAVRASPRYPCNVCASCHVVSLQAPWHMRMDRRVGLHDWATHHGKASALGSCELVARSAATHSRASQRTYLRCVFHAVMETYTDSRSLRGSDYRSVREEPAVVTQPSH

SEQ ID NO: 963588 - protein, 100 aa, Homo sapiens
LRVQAMNWEYLGQWWKVVPSWYLPHCLNGLKIAMVFQRNASPAWGTLFGLSTESPSRIHAAPANMAAQSSHPGLAVLLYLAYYHFTWSMSSRKRLARISQ

SEQ ID NO: 963589 - protein, 97 aa, Homo sapiens
MATMQLAGASQVIAGPNHRTRALTEGYQEPGATTAENTVPMERRKEATATPATAVITTNTKGVRTTRQAKAQTTRWSGHQTGHTRQNQTGSVDHHQL

SEQ ID NO: 963590 - protein, 120 aa, Homo sapiens
  misc_feature (27)..(27): Xaa can be any naturally occurring amino acid
METLCSTNTDVCLFAGYNMGESPTGFXNIGENRVASPEELLSHRGVLYLLGGSQRDLFSGLHRGTTRTAHTCVFKTPVGSLPTVRPSHMVSHTQAHIYTCATGPSGKRRCIHHTAHAFCH

SEQ ID NO: 963591 - protein, 222 aa, Homo sapiens
LTPEVPPTLLNQFENTGPPPADKEKIQALPELSAATEEHVRLRARVPLCAGTNTRWVSVCGSCTEYHLFARRLASCPGWSSTDMLPPSAEQSHHGTEQRPGTPHGPHMGVSILLLDRHRSSVQLAQTTRTPQATREPTSAVGNSTGPFPHASTQTAPNRQPTDWVPRRRQTHRMVRACRYRLIQGQGHPRPQTTRTPRADEGARNTQWDPTEHRPQDYNRHS

SEQ ID NO: 963592 - protein, 266 aa, Homo sapiens
MLQAGLTANMVPPAPTPRPQLPPHGQHFRGGHPTQAFPTLWRELSLAFSLEKTPALRWPPLSPLTGKLGVSGTPHSWSPPLSGGFFVAPSGLFLSRRSLGISRTHSLICDTLFSRTRGETPHRALCATPLVHTETPSIRAQRARGVPAHSCAATFPPEWSPLRGRGAQPHPQALPGVRGAPCVCATGTLASQPPLRVGRVLGHIPRRKLGPCTRHTHRARPKTHRGAPAPEPHPLGCPALYCPAPGTPTPSLVFVCVCFSRKDSNC

SEQ ID NO: 963593 - protein, 395 aa, Homo sapiens
  misc_feature (36)..(36): Xaa can be any naturally occurring amino acid
HYSSPQSRSVVHDGFLAYIREYPVMQGRCSRMAVQXRQCCVNQQSAHGRTREFRMMCMAPNEDEVSRFAFTVTVLPRVGVAAAALQAVSTGVDARDYVSMRCCPGVTGSVPGRYELASGRQGITGVFEDEVDQRFPGSVGVSTKVEPGMLVKFVQVWRLGDMVRHGCDGNVACKAFLPWWPDDYQWHSIPLPGRGDRSCWYQEDRAWVWHAIDDANLLVSMLSTGLLKLYGREQTYYLNLDELFLQSSYQTEIGQTWSSHSPRARGSGQITEQRYNIYGQYKTVSTPLTSIGWSITGTNDGKRARHAGRHRRAKAGDTENTGGQLNPWEPSVRKFGRCSEKSVVWASGEVPKGRYEKWGKGESEKHRGSKIKRKQSLNSHMGHKKGGKYKDIVFC

SEQ ID NO: 963594 - protein, 237 aa, Homo sapiens
WTLCVYLLTAAVMRRNTGPPGKSDYSLYYHATIGMIISKKVHSGSRPGGSTQMTDQQDVTALEDVSVLMRLQNRHAIRSAMQEAEPVKEHNRFFWQEEVMNSICGVESEASVYCKERNSLKIIESDCWPEKVADRFHAEFQPMHPCSRCSVAIHKDGCWDLHSRSFDISYSVIEQVNNLRGARKKSLEMHVQVIEDGKKLGEALEGNAVEDAHGSPPFYCAPVIQEVSRVCDLHREC

SEQ ID NO: 963595 - protein, 72 aa, Homo sapiens
YQGFKSRRKGFRCLVIGCLYTFLISTTLAVLHLTDTEIKVNPPQDFEIVGSRILRLSAYLQWQPAPLSLDQF

SEQ ID NO: 963596 - protein, 506 aa, Homo sapiens
MWPNLPRPTSTSIEAVARTTPKSRSSALDTEDRRTGDERRQRILHNNRMPASLAGAGEPAPTEPPYSPLTAGQEPELMLEHGGTGLPAACCSYPCIAASLRDCTQTIVRLTSQAPTKLRNRYRVRVHSIVPKHNETAPRYSPHLHLGLGRLPRRPLPRIAWLLGPARPNRNRTQRRPARTALAREYQRQATKQCGLGLARPNPQQLTPSTPRDENYDATQETGALAGTRRAPTETQTHITAPVPPGPAQRHPPNHEMLAHRVPDPNTEQSPENDQTEPYRQDTCAHTEATVDLGRRATKHGGPNGPHGAAGERKGPPQDPAPPTRGTRHAQRPDNPTETARRPPKAAHHDIAPQRATLPGTGTIGRRWGPHRRSPTRATQAAQQPESRPEMHRTNPAGATKQSMGHKLRSRPAQDTKPRKTHQQRDRNNIAEHAVVNRQSNAAAPRDNPPWRHSTTPTSSVSSTQYSAYAPTRARRRVTTAEHNGADKQQAGHHTANDKDERAEQT

SEQ ID NO: 963597 - protein, 341 aa, Homo sapiens
MLGTGGRGHLLPSPFSLVAPLKRCVPLFSACALTGGCSARFHCGSPLSVVVGGPLFGQYCPGLRHNTEWGHYLGPWVLFVLWSSSTPYVPHVARGVPHLLWGYISPPPSQVTGFHGLEPFVRRTSRPLAGTDTWCTPRVILGAFLSTFTVPSPCSLLSVGAGPFCFRGLMPALAPDAPGRATSLGLPVPVSHRFWFSVPLCTRFSRGPLAPPLPPARPAAPTFTPSTQGEERRHSRCCTSPFVPLGEVGERDEPSAGGDMEGLLNLFLFLVEASPSLSPFSLSSWWHLAPPCLSPPRPVPPTRGGMAGRPKGEGGSPLLRGWFLLIIWITPQKTVKLRERE

SEQ ID NO: 963598 - protein, 551 aa, Homo sapiens
MSPHRDNATMESVKLIFNGDEALRMQTAVCTLNGQGYCGALSNMVDSLAIRMRRAFNRALIAGGIETDCEHEMLAYGVLRICERSQDQSIRRHGSSRSSTLRLIASSMRDTDVALGPQRDPALALQRGPGRAGTSRTVCDANYAIDTQRDRADRFAVSTRVIANSLIVAHIVAPTEGNIANRAHLPRKRNELRAAQECDPGEYPEIGRLSNGSRLPKRGRNRGLGSSFGSQRITYVTEDYPVVRRTSAIKAVAAPLEGTSSSISKRTGPTFCRDRQLTYLESHNLGDPTVVNGGNRHVIPRFRIASEPLTIGHMVYGLGDNNGPCANLVAVVGVLSPPGAQTFPFSTRQQNFRPVPSVGGQLHSDKVWGVQHTRPHQQRVARNAPNIYRAPSEPAIQRLGTNAPPHAVTPSVNNAGDAHNGAEQSLSQGRPPLKTKPPRHRNAEAHFGARNLSQLEHHNSSLHKRRAKSTGERANDETTRKESLCAARTTTNMSVHTATEDGQVTLIELAQPTEGGAHSHHSSPQRRYANTNTRSPLHKHGPRHTITDRVV

SEQ ID NO: 963599 - protein, 177 aa, Homo sapiens
QGGPQMRVPFDHRADGHPYTFPAPGQGAPGKANKGHHPPRQGRLSKEEIEALVQGGGEVPTEDEVPRREGVNPERLESYAFHHEEALEDEGLQGQIRRGRPEEGAGPDVQRSSRGWTPTTLAEKDEFEHQRKELEPVCNPHHPLDCTRVPVVPGLGASGLTGPQGGSGSGPPLEEVD

SEQ ID NO: 963600 - protein, 288 aa, Homo sapiens
MNTLSAPRHARFLMTAVVTEADGHMGRTDAHRCSDQFTVVQMPHHRYPTAMSDLLDESSGYPGQCSTSQNSGTVALIRTRTCDARPERPTCATAEPLPCPRPYVRPFRASFLSTESRIPLIEVECAFLPLDRPAALQQRQCSVHIRPHHDRQRDEALFRAASPNQLPQEKSVPKSRMKQAKASDNAHHSDDAEDPSGKPAAFQTWGSEDMSATGTLEQGTQYVYIALPAVAVIVISDLDYGDNAFGAEKGTVSGMHLKSACTQNSEINVKKHKTIPGEKTIEIALESP

SEQ ID NO: 963601 - protein, 144 aa, Homo sapiens
RVRHPFQIRIPDPFLNPFQMDTGQWIGTFPLPDSGNRSPGRYLCPQTPPEDLEPLLPLQLSPFSPCSSTESPNPWTLKCLPPPTARVLQTAPLFIPHPTPSCRPRDEASSEPPPPTRFLRKSPFPKAEMIAESQASDMLIIRIC

SEQ ID NO: 963602 - protein, 219 aa, Homo sapiens
GWGGGLACVGGGRGCGVRGGHVCVGGVQCAVLSAGWESAARRVRGGRAQAVQTVRFLVDGLLRCLAAPCLRSSAKPYIYSQRRDQGQLCPGSQRSEELASPLRLPHHVSSQSQPRGCVQTGLCGTTAGACSLWNDRSRSSVSMLWPSVSEPWRPPETRVLYEDSVSASALRNVQSLGTAGPCHVLVSACRGPWRCGSLHSRRTVGASEGSSRKEQRESG

SEQ ID NO: 963603 - protein, 102 aa, Homo sapiens
MATGTVSQSRRVPALSRSHRPGGGEGPQSKGGNTCIRCKEILFQSIPVCTNRHMFLTRGVTYFHHRFNNFVFLRVYDFEFFLFGGKNFESISLSEFKYRERM

SEQ ID NO: 963604 - protein, 84 aa, Homo sapiens
QDIIHCTLAGAAKAVGKVILELNGKLTVLAFRVPHCRIVSVVDRDLPCQWNLPNMNDIKKVVKQASEGPLKGILGYTEHQVVSS

SEQ ID NO: 963605 - protein, 158 aa, Homo sapiens
  misc_feature (4)..(4): Xaa can be any naturally occurring amino acid
  misc_feature (120)..(120): Xaa can be any naturally occurring amino acid
MIHXFCGCSVGSHPPFPPGGVIILLLVVSSLVSLGPPHPGGDHLLLPTVEPYVLVVPPCGAVLLYVWVRRRLPQQKRLSFCGGNHKVVSNCPPLGARCCHPWGIRPLPTLAAHFGPPYSXGCVLRPPTDVALQNRIVVSRLVVCGTTTWNHSRPAFFF

SEQ ID NO: 963606 - protein, 468 aa, Homo sapiens
LLVLDPVVLPCFVWMRFFLSSLFSLLCVPLCRFSRLSVTRALCARALLLLRTRFDTVFGGNTITGLRFLSVASFLRCAFSCLLGPSWFVRVWTTGVSITLWLVFAGPCHGWECLEGRTWGAISGAFPMAFCLCALSFYHPVQVCPVLPFYIASVSVLPPVLTFFRIGFLLYVYYLPHVFSLFSLLSFDCVTPLHDTPLSLAELIRLVPIIWDKLKSPLPSVVKYDLCQLYAVPRGQFPLQCPTLRMPWFSLHFRGKASYRLSWCLVRLCNDFCGFDTFLPIAHPRDEFSPADSSLCLWVIPLHFAPELMVPCPLLAFPTSFSKAAQCLWSLHMLIPHLVSRQCLPLSPTFQVSPMAYRQWLLICPLVSPVSVPGAASHVRTPIHLRVSLKTTLVQECCWGPHQPGARANAVASRSSLRTHQPLQEHPQALCVTDSFLVPQACQQGPRFAIEQYDNRRTFVLLVVLINI

SEQ ID NO: 963607 - protein, 101 aa, Homo sapiens
EALDTLVGNYGRWQPWKQQPPWECAIWGWNQEGFFGWHRAFVIEGPLMMLLIFISCYLNVESERIVPISDEVGLAKRQIHKVMSEIVSVRSRVYVLRNRAH

SEQ ID NO: 963608 - protein, 170 aa, Homo sapiens
  misc_feature (104)..(104): Xaa can be any naturally occurring amino acid
  misc_feature (155)..(155): Xaa can be any naturally occurring amino acid
FPLEKGVWGLFAENGWKNPKPPREMGAPLVSEMGPGLPCRHAAPWTRCSVCWLEPSPVRAALAAIYSGLLRRLQAEGCLPPSLTSVVVIVCGGNNINSLEKCMXTGPYLEKSPPLGPVFLKGVTHAWPQRPLRGPWTVLCLDEEDSVLADGSGSXPVQLCCCLNTPALLT

SEQ ID NO: 963609 - protein, 223 aa, Homo sapiens
GGGLLPVWCWPLEVGLAAVTHHCAWRPMGHQCFNAAITAGQTGHHFPDNHTSVAQRPGGPDGGPSGLECIAGVPDSLCSGGGPRGCERCAASSWMMSVFWWSLPVGQPLASPSTQASFGGSTAEGCLPPSLSFSCGNQCVEAHNINSRELQALKTHPGPRSEGSQSWPPRPLRGPWTVLCLDEEDISAGRWQMETALCNCAGCLLKEALLELLFLAFRPLRPN

SEQ ID NO: 963610 - protein, 149 aa, Homo sapiens
LLSDIESRLLITQPRRCLKQVASKLCRYRACDHGTPYEAATRFPLTKVYVNNMARITDDSMTWFYAYTYRLTYPPPVGLLAVLSDESHNFVLRFMERGHAAFLGKQTLAPSLEGCASTLYSRVLPLRYELGSDVGCIGFPETSSLSRNS

SEQ ID NO: 963611 - protein, 190 aa, Homo sapiens
MATTHPPVQKRPSIRDKSYLSTSDRFVFFAGFVPEPIYHSSLAPTPQLGGHWPPTRQSSPLNPLEVPLLNTSVLLASGVSISLRLTIVYIEKTSRQNPKYIQARALLQYLAGYQSIVTLTTSLQSSFESPFTISDGIYGSTFFVATGFARTSRHLMAQLSSLSASSANVIFQPFTSKHHFGFETIASTAL

SEQ ID NO: 963612 - protein, 197 aa, Homo sapiens
MPSAKVKAAYTFSGNFSAHCSFFAPARHPCYAQNALAAVRSDSSSGPGMILNVYGIMSHPVLYKHLLPSLVAHGSMPLNPSILRAAEAGLWSTLSPGALRSSLDNMADKPWFQRTYIKIRWAWMVRTYGSSYLRRMRWEDQLSVGKDRGLQWDGDALPLLTEVQAWAFRVRSLLSKNNTYQIKSNISLSIHHYVCAP

SEQ ID NO: 963613 - protein, 59 aa, Homo sapiens
NGPVEGFAPELSPHYGTSTTGVGHMTGHHLPALPGQLNADLRKLLVNMVPFPRLHFFMP

SEQ ID NO: 963614 - protein, 189 aa, Homo sapiens
MRARLTGCALTTGQPTIRALTGPSSPHRWSDSKNMMAALRPAARPLPDGGCTFSGPQVPEGGGRPEAQTARTRTAATSWSGVPHHVKTAVCDIPPRGLKIVGPLQSATARPLHGGCSSASPRPFTATVPAPGLPAHWYHRARELERDWRFTEAESHMDDLVSEGPSQFPDAPADEPGEIRGGGGRGRGV

SEQ ID NO: 963615 - protein, 192 aa, Homo sapiens
MGGARALDTRTTTSIVRYVCSSLPRMSYRIGAVFAIIGGFIHLISPILRLTPLDQTYAANPFHLCIFSRRKCELSFPQHFARPIRNAPTLLGVPRCIHHMKHPIICRLIHFSNSSNINNFHDLRSLRFEAISPNSRRTLHKPGVTNMDAPHPTTHSKNPYYMYVDINGRIDPPINLSHPCSAALGGEWGESG

SEQ ID NO: 963616 - protein, 104 aa, Homo sapiens
IEEMEERREKRELRQVRAALLSRELAGGLEDGEPQQKQGPAAGGTRTRRKGDGTGGTKVIESLEKTLRNVSKRCRVFCPTARTRILPSLLVEAEEHGPPGGSSG

SEQ ID NO: 963617 - protein, 88 aa, Homo sapiens
MGSTLLWKAKSLFALPLCSIGVRVPKCGYVAHLVIKSRVCTELVSTIVFTNLLCPKAQLMQGPIVGAAMDGPETVFVMDVCHPEKAQA

SEQ ID NO: 963618 - protein, 229 aa, Homo sapiens
ARVFSSRCVLGFDPFVGLHFALSSLGVFLLSRAPWAPFAPGPVSFKESVLYPYLRARGSFRAIGHGVALNPPEVRYIPRFLPEAFAEVCCCPWTPPFAAAFTPGPSLPDPAPFREPAFLWLLTPGLTPSLSRSHLMLTYLTLALCNPDSPLPYVDLAIPCNHPGSSPPVGLIWWILAPGISCPLRGPLSREHPLGGHSLICTSTRDPEEIEKEDPAAAEKPVTPGGISG

SEQ ID NO: 963619 - protein, 105 aa, Homo sapiens
SHYDAFNLYLHFKAYQDINGDSKVEIDMYSMCCPKYSLVYCVFHRQLNILKLVPYFLFQRQILVNGRLFLKSPFVPNPIFRVASSFFIEKFVSTPVSKNAHSKFC

SEQ ID NO: 963620 - protein, 85 aa, Homo sapiens
EFMIKTAPWKGLSEDVSISKFVQMILCYWNLPNRMLCSNDPHVSAWTPVSSCSLQWAATPVFEAETSYDVAFVLSESVWKMLVPS

SEQ ID NO: 963621 - protein, 207 aa, Homo sapiens
MRRPLRLNCLYSPPLALFASFIQGGAPFSSSLSLWCDSSPSSSKPPHGWWFCIHFSPSLHSTLAVALSLRTVRGGPLLFVLPKQPTLLVCPPILMPPTSVVGGAARVVFFPPLAVVVVRTQHCLLRWAPLSTDTARTDRCVVSPIRRAFCSYPRREYSLPLCVLSPPPTESVCFFFSPPRVFFFGGPLLCLTLTPRARAPLVPPPLI

SEQ ID NO: 963622 - protein, 268 aa, Homo sapiens
MFVIALMGADTHGMGMTGVPGVGYNAVKTPGLPIAYAINMGGVIVLLERCCRSFPAGEAHYRRIWSALRDERTLCAYCNAVSLTVERYSDSVSVFRVGSLGSKMCANRVLELLLVIVRLEESCNLNEVVSPLLLRGCPEGVEPLGHLRAPFWPQAWALRAGLVYVYRLYKSAKQFAVGGLVIARVQRMQSHSWTRQKLSCSDQRHRCRPRWCKDASTSGRTHYLTVTAGISVSADVSRDSSVASAGISCHPSWSVNSGTQEVGSQMSC

SEQ ID NO: 963623 - protein, 111 aa, Homo sapiens
MEGAPLGESLCSPIPIVWRHPGHPLGPHPPGPAFYPGVTPREMWETPPVDLPVRECLGSDQGSPCTSFVGPLSPRPMAGYEASGPGSYTFLRFWERCSKMYMRGGVNICFE

SEQ ID NO: 963624 - protein, 124 aa, Homo sapiens
MLARTSGGLTCKGIPSLQRRGTSAWRLEADRNRATYHQPAPTTPRPSSCLDRRCPPVPQVPSRSSPVPPRPCLLWSSVPVGRQDQLGAAFTAGPCAAGHERRVVPLVQMGETDANVAKFIHQTQ

SEQ ID NO: 963625 - protein, 212 aa, Homo sapiens
  misc_feature (49)..(49): Xaa can be any naturally occurring amino acid
RKLPQDCEFKVSSLFGVFFWEISSPEKGPLTFCRKSFLEKSTGPLATDXGIWTLGGPHIALSGPAVGFSPLELYPPVHRPGAHIPGAVDQMDRPSSTQPSVSHHIYGLSILALDTTLCLPRVRPVPSTVLSRSLPALPTLEHACPLWEAQIHASALHIFCAGRCAARAAETCGASCPDGRDRSNVAQIFITRLRDYLFTLSPDMPALKEGNP

SEQ ID NO: 963626 - protein, 107 aa, Homo sapiens
MLKVYRIEDGSFAGDIWGEIDTRFSFCTVATLALVGEAVMLLMWKRQSKFVFILYETLTRGFGCRPGSESHAGQIYCCTGCSGYYRVSGHQVNSDLKLAGGLVNDND

SEQ ID NO: 963627 - protein, 202 aa, Homo sapiens
RGCIRRAIVTMRKAISWGNDVYRGGYKSTYTPGLPKLRSLQVYDQVPLETVTNGIGDQSWSLWYIMKGCHHGTGFATAYKCVTKATEDDSKWSKVTVLARVTRLRSICRVDNAHSAKCRRGCTWCIQGAKGRRGMCSLGTGVGDRGRPYVVPGKPCAYQRCCALMVTKCAAYARYRSDSGIANSESRFPSVDTSDEARGFAG

SEQ ID NO: 963628 - protein, 145 aa, Homo sapiens
WFPDADEVPRTVGCVTATLPPVGSFFSGVVPATHTSSLVRGRDTSRSLAAFSALSHGGVSPSLSPFREREVCFTRPRRHRCSLAAGDILVRRQEMMPCGRVKRRTQRDPTPGVVHLYRESEGHVFCGGGKREPPPAGGVSHHPPD

SEQ ID NO: 963629 - protein, 291 aa, Homo sapiens
ETRRHEQSNLKTVPPQTRTGKKGLDGEEASPAGYKTGTVGPKAPGSLRSGRHIREAMPTCPRTAKRGLSNGAHRTRESKPVQEAGQAPGKVELGPQLCTFTVQLKVPRAHLDLLRLLWGPDLVVSVTADNHSELEPKILDSPEIALRTRMCIDWGWMTEVPGTGKSTMVHVDCLREALNNHLEEDDQHKGPCRTEGKVQVQELGAMGARWLPPTIGIDRGEREALAACHSQTPALCAHPGSTGLKSHLPTNVHKAKVLMAALLLGVAPTPLSRTFSRKSFPDYLCTRVPLH

SEQ ID NO: 963630 - protein, 142 aa, Homo sapiens
MASPPIGSERGEDGKPLLPAIPRAPTPFVLNPGSNWSRKVTCLTNVPKAKVLMAALLLGPPAPCEDFSRKSFLSYLCPECPYTETVCPAIRCPIYVSVCVSTPADPPRANLPAWTESGFSSCTPLNPMHPGVGIHKMNSSTD

SEQ ID NO: 963631 - protein, 120 aa, Homo sapiens
MSLDEDEPRFLGRTCITVQEVMMTLDIELAANSEEIMNLLLKKKDFLTLDYQEHTLTCEPAAMLLVHCKELMKYTGYLFPMEDLREMSLVQSVTTQEDHKRELWAQFWCFKNNKCAYLIN

SEQ ID NO: 963632 - protein, 172 aa, Homo sapiens
RSGGTGLACGTQSASDTGGVTECGRCSRDMAGCASAECQVAGMVCGGRRNPVRIALTDALLPALSDWTMALVDANIVTIERTTKQAHTDTTHHFSQWFLIVQHHDGEHLAIAGELTRGTNARNKTNLAAGSLRNLAGAGASSLRRTGLESVNTFTAAICYDLLAHDLNAIIS

SEQ ID NO: 963633 - protein, 215 aa, Homo sapiens
MFPRFLGPPIKPRGLVVVDPRCVRGVPTALSCPFPPQGSHGSPSGALPPLLMTALFPPRGRTVSLGDISVGPPPSGRSLGGTHRRPSRSCLPQRPLALYPGGSGETPSEGSLRSTGAPLLPLLLGHMLLRPRVVFPRHVLRSTLVKIGEEREIGGPSRATGEGEGHFVGKGHGRERSCPHAHHTPTGHRLASFFTASPRSPLRAPLCKGGCFPEA

SEQ ID NO: 963634 - protein, 345 aa, Homo sapiens
HTYNYHTPDANYLKSQTKSLIELAYISRHYYRLKLDTSYFSDSLIMDYCLKAPRSKGPISEVCQQYSSGKLVLGYEINTSRFITTVLNTSTELTETPLKHITTITLRIPLFPYCRTINYMYATVNLIHDTYSHIQHDTVTQCRHHYRHYALSFKVHSPHFIKVPRPHTVRARSNMLQYAHSLLHVHDIHPGTGTFSFASVSRSQQVTFGTTRAVYTSSLTLRVINVHTYVHGNVGPDFHRESGSLHTVLVHFSHGVTLSHITHCVTFPTTFNIHASPHVNMNVFVDAISTFRLDHLPVLFKTPAGTLYQALNLDGRHFILGERKRSYSGGCTCSCNTIIILRFSR

SEQ ID NO: 963635 - protein, 137 aa, Homo sapiens
LISGRFMPPRFVGPLAEIMGPPLGVVLPLGRAIFTRLLCVLGTQGPYVLPCGDICLYCPPPSPSVGGPPLFVPPPPLVVFPRRPICFFMMSPPGCISSHYIIFCARSPSRRNLRAAPSRLRSVLILTLSLRGDARNA

SEQ ID NO: 963636 - protein, 126 aa, Homo sapiens
MWPRGSQARGSRGSSGSVPRAQASCSLVLAYAQKRYYTFTEWTSINWALCGGASSLKGGNGKIPPEMFLQAVPGPITTERKGLGSSLKQKRKKRKAQQRATNTDTTPRKKGGKQRSSPFWARKSAD

SEQ ID NO: 963637 - protein, 265 aa, Homo sapiens
MISKCHPSVYRAISTLCNEVIRHAKVTGHVLCIDFHASSRMIVCAQSMCCLKTYHRDHVSTFALLNMGARESPVPDVQKERTEYPRAPWTFCLMHECLTRIKKPWAFHDCVHYQDWSSQRDGAYGSIVGIRYGKLGLSGMPGHGVGNPPRKVETGVGLLDGAVSTKQEPPLLMLFRQEATDRTIVPDHHAGPITFRSKNHLHCEPTKPSQASKLGPLTVDSLPGPCNQHLGIHRLPNVTANIGGVLPFDTPHHVLYTKDDTISAQ

SEQ ID NO: 963638 - protein, 438 aa, Homo sapiens
QRRSRAPTHRIDSHTSPRSASSIREPVLLPPARTPKDTSATHPHAIVPTTVQCPRSSYRMRLFRKDPWTPEYDLSPQSPRHVRLTFDLTVATPKPYPALGTSRRVRTAQIAHDLQATRTTYDSHQWTGGVVIGKQAAIPYLARMHAVQGRQGEKPPEGCMGIPLPGDPYGDVRLTVSVESSSSSIQITPETFPHGKLRPLTQRQPHGLDSLEMRRPEQFSRPVGPNLRIPHPRGGGPLPLGRQAHTLRDTLHRTPDATGRQASKADPARPKTRRPKRANRHSHRRPNRGAVRRPGLGRPTFTPTRPKVPHIHGLGSADSILARGPFNGALPRSDNYARSAILVYRYICGSARRAPRGDTYANESQTQRAPPARLQTPARQPGDRRAARPVPCTTQRPRDAHTGDMQHPAKRTRGAQPRTESTPTHGEPDKARPHTTVP

SEQ ID NO: 963639 - protein, 140 aa, Homo sapiens
MWEYNRSCTSLEKNELWGLKGGEIIEDLDRKTIICYIPQRSTTAGEDKKQTTAEHTTTTNQRKTRPKSNHNRSQNENEQKQTKQKDPNQQNEHPNKREATNTKNRREREEAQQKTHAKNRTKQKQKRHKHQNRQQAKTTH

SEQ ID NO: 963640 - protein, 68 aa, Homo sapiens
RYGKRIVPPTPPALVWLGLQKDNFLLLKKNNVCVVSFRSHSIGGCCLSLPPPAACCMVRRRRWNRVLE

SEQ ID NO: 963641 - protein, 142 aa, Homo sapiens
  misc_feature (44)..(44): Xaa can be any naturally occurring amino acid
MLRGETVYIEKIYFFRVRVPLCSSISFIYSAWCVTKTIAWLYTXTHDITSLTHEWPLFSAWERVYYNSSTKKMFAATPLWHTGSSVFLFTHTMCVVSYSYMTAPYYTPRGDKSSASNQNIKLLSIKHRIFKTQEGADKTSPL

SEQ ID NO: 963642 - protein, 134 aa, Homo sapiens
GLSKKTHNFESTQPAHQPTLLRIIRSTHFCNRNVNKQALFSVVPRTLFRPYAAYDNAPLHRYLNYAGLRNPFDKSSGKAQLGLVAMPFIAFPLGIQCTQHTHIETANTISTLAKEPLGPGHRRTRTHKRNLPKH

SEQ ID NO: 963643 - protein, 178 aa, Homo sapiens
  misc_feature (79)..(79): Xaa can be any naturally occurring amino acid
MRETAESLKAGKNLYNLEGGLCPHMHLGAHLHFTQKLTALQQISINHISNVATKDDKFPTHKRPQTNAQHHTNNKTGGXGPKKKPPGGHTLGRTPPSLTTRAPTGTTNKHNRGGAHPHTVELETRTPEYLGIEPNLGGRPQRQTHPTTNYRVRALTTSGTGNPRNPRRHHWVPLDSNN

SEQ ID NO: 963644 - protein, 214 aa, Homo sapiens
MRAHTRGLDCNFGAKLHSLLTGDLHELMSRGQTRVQYDAPEIYQNGGKFPDQTVTHQCTMYSMGQGGCIPLMSQELSHPQLGHVRTLRTGQRYPRQCCEEWRRDRGSSQGTNGGTATALARTQSTQTTKAEYIDHRDRVPMRTSTHMNENTGLGEGHRDGTTLQGTNGWSQQERPGTSRGRAINEARTKSARRHARGAAETNEKLRVGSETPEQ

SEQ ID NO: 963645 - protein, 199 aa, Homo sapiens
AAPSVPSPRPPSETTIWQGEECTGEEERKGSRTRLPSTEPVHMGLCVTSVYGAFDKKAGHYTISIAERHHREAYNIAERDATQQQTQKEHNTATTDTTTKQNTPQQTTQRRHTDAETHERRGQDTEQEKAEPTPRKPQTHHTKPTLDGEGDTEEREKTERNPSTRPTRDRREKQMQGESRQKQKHDHAPNAPNRAPTTH

SEQ ID NO: 963646 - protein, 109 aa, Homo sapiens
VFAMCSCDVLVFVSAVLFVCFLSCVSCFVVCSLFWFCPFRSLLFFPLLLRLLLQFSFPGAIPSRVVFPLGLFVTPLYVLCQMRRPSGSRNLLPSVDFICSLVFTYLCQL

SEQ ID NO: 963647 - protein, 118 aa, Homo sapiens
MNLLSALSLCGGAVRARARERCCCVNTTRGRERVSPLGAHTDVGAPSLPLSTPAGGGTQQGERYLLCSHNIIKHTHTHTPQNFIFFCVVVCGALVSAVFFLWRRYIVWRILFCSPLVW

SEQ ID NO: 963648 - protein, 129 aa, Homo sapiens
KKNEKRKIIYIVFPIYLCASLCIQLWRRLSIVLTGLYMSAFDVAWSPLPYGAPAVILPPDSFTAPMVVLQFTSCPLFLSSVLAFPSAVALRACTIRSECPFLSHDVLFSQTSPTTIAVPCQALREDLRA

SEQ ID NO: 963649 - protein, 98 aa, Homo sapiens
MNFSVHSADPERKHSRTGYDNYPCLDRKKHLITLKLDTIQNLVIKILTVHRLSYLCMEQRKTETVEEPMEEEEAAKFEQEDSDDEDNARREIYAVPSL

SEQ ID NO: 963650 - protein, 107 aa, Homo sapiens
  misc_feature (34)..(34): Xaa can be any naturally occurring amino acid
CSGLPSHTGPGRFAVLFVRRASQCLGAPKGVWVXYGSSQPVLEFCTELVQAFSFGGCTAFPFSALGEISEKSVRRANRKFPEGGTCVGEAGVENKEISVRDWMFKGF

SEQ ID NO: 963651 - protein, 122 aa, Homo sapiens
YSSLDQGFTQRSHGQGPGSTRDTCNSKVQRWNSMGTNNEARIQSSSNVKRPQCNEGRQCINPILGSQKREAPEGCAELGCIAWVLDVGIRPLGRWEWSVTNLLLFFYPPHVIRLLLSYSDGS

SEQ ID NO: 963652 - protein, 103 aa, Homo sapiens
MDSPRWPRGVCEFLCQSFLPPALSQGGVAIALRLCVEREENISLSGGRTCVSHTLVLSLLVFSLFFVNLSSSCIKTHRSLYKTLSSSLLEEEKYKRVSLFIVV

SEQ ID NO: 963653 - protein, 138 aa, Homo sapiens
MDDEQFYRINPDDDHSDILLDYRYPKGAYHAFATTQLVTPSTHQTLRTMLATCKTKRNNDYATALDSSANTSHAHTTEALPPSNLAFSTNGPLSKIHKNNSLIIPTIIATITLLNLHTSTLRLIYSTSITLLHPYLTT

SEQ ID NO: 963654 - protein, 330 aa, Homo sapiens
SLCWFLCCCLLFSFVVFCFLAVFLSLSVSSRSRSLSSLVFSSFVLSSLCLLCLVARFFFSSSSSCGVCSSPACFWSLPSLFPDLARTCALSRDVSALVSRLVGCVFVCVVPASLVSSLLVSVLRVCLSRFLSSLCLFLFSSFCCVCRVLCSGCGFLSLLSLSCFLLSLFSLRVLLSSVFSEQHDVVVVACVVFSLLVLLAGLFCFCSLFLVRLLSSLLFHLLILSVLLFTLLVYSPTFLVLASLLIKLHEMSSLFLCLISSVPRVRPPVIDLPQFPICSLLYWNPSPTYVLVSSLVIPDVPSPSSVIIIRPPMCSRRGESGINPSFLSST

SEQ ID NO: 963655 - protein, 116 aa, Homo sapiens
  misc_feature (10)..(10): Xaa can be any naturally occurring amino acid
SHSLCGAVDXVPRLLLMRTLRLTTDPPSLIYPLLCSLCPSSRPLGDYLSLHLRSASRTRVSSSARGSGRAPPPGECRRALIITFFPLFSPHPPSPPLTPPPLPPLGFKKFNGGFNF

SEQ ID NO: 963656 - protein, 178 aa, Homo sapiens
MDILSRSEQQQGFAAAYCRSGKGPILMELQTYRYHETQYEMTLESSYRYTCKKFRKYSNVRVTLIMLLKDRMAEQQSCQCGRTREDNVMWKLTEGAFEDRCRQFASADPEPPLEERGLTDYLTPATHLLKFVVPDQWIKFKSVTLRGAEQWRGYTFRGLPDSVLTLVKEEENPVNDIQ

SEQ ID NO: 963657 - protein, 132 aa, Homo sapiens
LVHPGLQRTSPGRTCCRASTGSLDDIFQPHFHSMTEHTPDCPHAPTHVQVPQPLSQTLSMGGWESARDITNTPPPSTPACCVLLLPSCCSVATQAHHGGRAVPWLSLWLLTWPLATIHKKRGLAGRNSPAAT

SEQ ID NO: 963658 - protein, 139 aa, Homo sapiens
IVRANKLLRNWTIRASHTIGTDRSSTVIMRRLTPVRPVPTLTQILYHLHVSSGRLQVMSSPELSAPAVLVLARKRDSKQPPRKSPPSSDKESPCAPLLTAYSIDRPSALLLFLRLLNDINTILTRPPRRPRQLYPSQPR

SEQ ID NO: 963659 - protein, 107 aa, Homo sapiens
MDVYPARNFALMQIFRQISGRILPWDYQVNMFYTHMVDLNVTTYSYILKSTNMHMACTPARGPLLVTVALWQPTFMLVPYLVKMHLQKSALEKPNSPGTRCSLLPAI

SEQ ID NO: 963660 - protein, 113 aa, Homo sapiens
MCLFRGAPADDWSRFTMKYTAVRRVLCLHERAVPLLLVGWSTLFRLDLHRGHNDSVGGGRRKRHKQLLGGESAPLIVVLCARIWLSVSLWERRPALVIYRERWCSPLPPPPLG

SEQ ID NO: 963661 - protein, 168 aa, Homo sapiens
WPLGSCLCPPLCDPFCVSWGFPSGVPCTVTISWLLVSSYRHMGPPTVLSVLLYRGYIWLSPCLLTAPVLPRPRFRCARFVTPGPSVARPSLRRSNIGRPGPLALRHRSSYVGTPLPCTQAPESTRLAQAFAYCIPSARSSLSTFTQSSGYRVSHLTLNYALNRRTARQ

SEQ ID NO: 963662 - protein, 111 aa, Homo sapiens
MTLAHEYDLSPPLAETHRTPFDLAEGESELVSGFNIEYPPGPFALFFIAVYPTIIIITPSPTTNLPRNQHMTHSPLNSTPTYFVHPDPTSNLPVFMNSTAYPRFRYDPLQP

SEQ ID NO: 963663 - protein, 247 aa, Homo sapiens
NSRCDSCYQGSCLGDDTADLWQPFTLPPNCFCHCDVSNESRSPKIAPAPHGVRAPAHSGLGNFVQSCCCPLPAPVVLAAVSGNCQIQYRPFFPLTANFWALAGFTLLPQSLWPFCHVPPVVPPRAAWQRSRPLRTLLPAPRQGAAACPGHASPGTASSRMPLEPSPLAHSRGLPGLGRRPRPCDRTGHRGHLHGAADPQPALGVGSSGSGICCRCLGPGQSRAATGGPSSVFCRRTQPPPIPDSSLG

SEQ ID NO: 963664 - protein, 251 aa, Homo sapiens
SAALLFSSVAAPPCGVGAVLVSSLRRPFVFVGALCPQVGHPSGCSSPRRGLSWTVLLRRPPSGDDLFVPPPPPCGGVVFSSAHRETPLFLLRLLLFFSSPPPRYWSSPPSSLSLRTRGTFAAGLSRRDPPPPAVITPGAVGVGAPHTRALVLLASPPPPVGEDVRPLSCVVAVSLSLLLTAPARRRRAPPPRPLFFLLCWRRPPPPSLLHTSLLRCVGCAPPCGGAVFVRGGGGGAQGSPPPPPGKSWGFP

SEQ ID NO: 963665 - protein, 244 aa, Homo sapiens
MYKNLQLFGFSRHYVGRGLLEVQLNPEYWVSGPHLPLMWRFPTVSQCAMDLGTSSEIQKFHTGIDWGNLSNQLTELSYIEGLPGTHLVHVGCPMQRSGEACTSVTPTLFSSRFRQVFSTHLGGLGTWNTSKGRPSARGCHCDFEACHRHVLMRGAPAPRARTAGNARGYLCRHLLHRETYEEYGYDDTYAEQSYEGYEGYEQPESRGLSIFIDYGHGEVARFCDEAYGQDDWNGTRPSLKAPLC

SEQ ID NO: 963666 - protein, 113 aa, Homo sapiens
MSRRCLRGDFFPSARRYIFVFAEPATRGVLAPRTRVSRGGLYLTLLWLPAAGRIILGEREKRQGVVFLVAPRAVSIGFGWGAHTHSVCNSPHPHSLWRESTLMRVCVCGVVVS

SEQ ID NO: 963667 - protein, 346 aa, Homo sapiens
CLIVRPSWCVIPSLFFFLHCPLLHGLHVPLTAFPSPLVRLGVLYPRVSSPRSWCSPPGSPAPFGFALFVVILVDRPGPRQTVAVLRFIVCALGLCLVPFSMLCFSSLSSLRFLFMFWLLALCAGYVPVYPSVPYTWMRGYLWSLACLGASILPGAVLRRFMGFLGSLRFASSSSTQMSLFPFVAITLYVPFAVGTVPLVDVTFVGPSCLVCPSSPLRVSLSHLWITGVNANGVWLHGTLGSPPNLSDGSPLMAAASPAALQGRSGQAMDFLFWAPRSVGDHLVSSPCNLSSDTETRASPSRMGPIDLIRTVSVAAHGIFRDTTTLTARPWSHGASLPILSRRYAPY

SEQ ID NO: 963668 - protein, 182 aa, Homo sapiens
LLLLLLSLTCCPSLTVRPLLAGPVGFALALCGNLFLFCLLVRIPVICLSYGHVTYCVRYSPRPGLFADPLLFCVVPSHALIFFLCLPVVCWWSASILRYPSWLPLEQPTFFGAPGPEYVVRTPYPVYPHYLFIDLVGSHLKFSLFAYPYPRTLGESSTSHIVTHFASRFYSRDHFENTYGMV

SEQ ID NO: 963669 - protein, 346 aa, Homo sapiens
SGPSHLDSPHAADSPTRPGNNLSVGPPINRALPPSLRDHGVLTPWRSLAYFPEGPTGSSSSAPLCLMPPMSHSSRLNRDRYDHRAPRVISKRPPAPPAALAPWHKVHPRQLLVLTGKTSTEPHVHATHCHPEACGLAPSGNIAPGADGPRGSPEHSIPCLYLGACQGCCARSSLSCYGKLTWHWPFPCPQLPMARHVVDHDLPVIEKPAKNWNDTQRRLRESRTSEGPLKGSPGLQLKHQVVSLSTFNTANHPHPPHLNGSGPRAIALHTTSFVQAHFLRYVQRILAYSNRVVDLMARTWPPRSKTPGPPAPARAQEEETRTLNCWGVLPHSVPHHTESPLLTVAM

SEQ ID NO: 963670 - protein, 72 aa, Homo sapiens
LPWGNANIATPSTGNQGLSSGLCGPFEGNYRSLKADFSPQCLSIDALCPFAMPKVAKAFNPQNGNFVGVCPL

SEQ ID NO: 963671 - protein, 103 aa, Homo sapiens
MVRLSQFFLFDSLVVLPRRVVSLSLVFSLFATTTLVVRPSWWVIPHWWGASHRSFVSRRTDDLFFLFFHRPPWGVVSLLFPFFPPPPAAPFFFSFSPSPIFPP

SEQ ID NO: 963672 - protein, 104 aa, Homo sapiens
MSLWWFAAPIDLLSSCRPLVVCFSSLRLVYVFVSRLTERPPGCAIYHVVMVAERIIDTRGVPLSSGGIILLVGGPDHHHYLCCCPHLRVIYKSRCGRDRPGGDR

SEQ ID NO: 963673 - protein, 68 aa, Homo sapiens
VQYNVLSVLPEVLISQCSFPEAFQPVEKSSEGRIGDHCHIQGYSAVISMALVGQTAGPQILDLFSSVI

SEQ ID NO: 963674 - protein, 120 aa, Homo sapiens
SHVGHEYWRKVPPYAFVPTTGRGSHPSGAGNGIRRRTNESPRPSKVSPVPGPNRYAPGKEFTPGLRGLKRDQTQKATHPGQLDSRNKFWQRVQRRILGGLHPVSTTIRVFYGIKEDVRVL

SEQ ID NO: 963675 - protein, 238 aa, Homo sapiens
TRTPDRFSPSSDPPPEGPTQTRRPRMSVPRQHQERDQPRHDTPKERTELDSALGTDTLNPITGEPPRRTPSSGMWQKRSYKLPEEEAPSTVCAQNRFHSKTRKFSTCFREPEKRPPTVVSNTFTALILSPSLLLFALWIRIGANVLQLHFVLLSTIIFHLGHAAMLGLIVCLLGLSFNMFQTLKVPGHLGQCDVSWAGNRMLAQQACAQNEQHISSRRQMEILNKLNVKQRSPEPFTV

SEQ ID NO: 963676 - protein, 235 aa, Homo sapiens
GKVLGALGLGLREPHLAGFQGGGGISRGPAPGAHLSPFALTPPSLLQALSPELCPRMSDARACIAGEPDPKGTTERLAWVRGPLGGGPGAPHPPLGPVVPVLVFPPDLVFRADQRSGPRQLLTLLVNPTKATALRFQSMLIRHGGTPTFPKPHMIAPGNRLFREFARHALRKELSGRVVGRKDITSILRAPAYPLELQRTRRSSALAQASCWDKHPNPKTPQHREPKGTPPSPQS

SEQ ID NO: 963677 - protein, 441 aa, Homo sapiens
MSDAAVDTSSEITTKDLNGEEGSSGQQADNMAQRRPCYRAMLHAGNTWGSQAGCTMQASTQRKQAQQVCRRRPSQGRAQAHQPKGAKGRQSHSTTCAAIATASQRPAPQLHPHRRPQTAPSHGTGHALHATEPHLIPNSPHRQRPANEPRTDRAHCTSRTNGHTQATPQPTPPTASVHPQPQPKCHDNTTSTDMAVRAPQHTAVNTSRRKTPTARAQYNTLRRQTRQHRSGGTPPPTRKMTETEHQRNMYAQTRSSNRAQQLADAEPTVRSHNNRDDQVSKSSDINTTTTLSTPTHTPSSNTTYPLTITSTTEPPLIYTYSPTSLLTLHQHTHISMRVNTNLEPAINHHHTRHTHASHHDKTARSHTDLSIPESTRRYHTRYILTPNQPPATPLADPVNASEIEEPDERHHYGTLMHRLPNKHTPTPSAPQTQAPNHPSPD

SEQ ID NO: 963678 - protein, 158 aa, Homo sapiens
APSCPGCELARGHLPWTCALACELRPAAKVEHLPAPALECWLPVCCLPGPCALLLDLQLRLVNVMYMPDPACPGNAPVAPAHALGLLVHVPSRCLLAHLVLHNPCALRCRRLCRAGMPGPERFCPGWPGRGCGHGLSGRPIDPDFEREPLFATPLQNP

SEQ ID NO: 963679 - protein, 225 aa, Homo sapiens
MPARPTRPGPPDPVLLRPSSRGFLLRALLRRGRPAAHPGQPPFHGPLFCVYNLGSVDSPSMRVLQTACLPLRACAAPLSKALAVDLPSERAICPPVPSCSQTLPYLPRLRCAVPSGPMPPGKPGPLRSCLLAPPRAPTLSSGLHGQPLGLDGLREQRDLCPAPGLPLDGEERIVFLRGRYVEEGLPPARTCKGVSGDANFEDVTLEEVVMAEEENEGTDRPGSPA

SEQ ID NO: 963680 - protein, 194 aa, Homo sapiens
  misc_feature (101)..(101): Xaa can be any naturally occurring amino acid
FSHFNWTKKVALACTDFKKPKVPLKNIEKWGGGVQNLQWGTDRDQLNSNFRAPFLSQKNTFINNLHSSTTQPLQKYTRVGTLYVEITRCGGTVTIRVCRCXTLNEGVGRISRVKKRWDNTHRAPRLHPHEDTHPQQQARKKETRTRGQTEAEQSRKQRTTTKQQEAENHRTRNKKTRKTTRREGTTTQRQPKKQ

SEQ ID NO: 963681 - protein, 169 aa, Homo sapiens
VVASRVFCGCRVSLSCALLSSRCCRYATCCCSPCVCIVVLPFPGALFLCQLAFCPCGTTVLAGVCLLGSCVLIPLCRCESALGGGSLSCALGSFLVFGCPFLGGACCSVGARCVALDREFSLDIPPLAHVYRSCSMPLIAQAGILEVPIVPGISYGPRSRESQLTVLRP

SEQ ID NO: 963682 - protein, 78 aa, Homo sapiens
GVTRVLMDSPITSKAGGPPSLLPAPPQHPSPFEVTGPTLREWVWQVWARKRQQASLAHGRKPPLETRWGNQRQGAGPF

SEQ ID NO: 963683 - protein, 197 aa, Homo sapiens
MHYTAPRQVASPVDCSVSYLVRSVTHCGVVVLGTSMAMSPVDMCHIHSHAHLMPSPTRNLTVDSVSLRCQHHRPCDDCMRVCSSLVGVQPCVLTAKTPASMFQVWGDHQGIHGWLTCHSYTPLRCGVSHTGSQAPFLFMVHGARFGEAHRSVACAHHDSMELPAVPTRLPVHAPHSTPARWRVHMMGLGAGDRIWYG

SEQ ID NO: 963684 - protein, 75 aa, Homo sapiens
GPFLPFGEKGTSAYVSADDRRGGCLLFKDPKVSSTELFSLERVTELLSIFASSHSCKKAILVRPLESLEIPISLL

SEQ ID NO: 963685 - protein, 115 aa, Homo sapiens
CSMCWTGACVCAQCALCACRVLPVFFVCWLCCAVLCCAVQLCCEARMCPCMKCYVVCDDLETCVSSMRCRPLHECAQHSHETELSQPTTNLTLNAIHLRHIAEKRPSGFPKRAHC

SEQ ID NO: 963686 - protein, 553 aa, Homo sapiens
MSVRTMSEVDYSCDRPRRPMDVSGQMKYCSVPEFMVPASPLGGPNSLQASDPTMTTRKRRLYQTLSSTDPRENTTNTAALNTEDIPGTEQDKTPIDAHILDTRRTELATFAVSLQQPRQKQTPQARDNLEPKTLNAPPDHRPPQTTPRAAHQIGPRYSHSIAPTVEVRPGEHPTPKTVDKLPKLDPKHRTRSQISDTRQRKTRPREKEHTNIAQRHAPSTHILPQQHHQSPQRPPTNNPPTKKRPHTTTNTHTRDTNNNHHLTLHHRNRTQKKTSTETRDNTNRHPLRNVELKHPHSPHAREHSDHGTTNNPSTTPTTNKRTPRTNTRWTHDQQSPQRLPNPTADDVTQYTNTHKINTADTPNTQTSTNQTKHSLNSTINSKALFITSNQTPLNAKIIHAYTSYRIMHHHAAPSALNTRTPYHAETINQHTEGEPTIQLAEPHSTITSIPARAEFRDTPSNRHTWTTPTQATSSTTALAQIHSHRSDERHDSQMTERKRHCRHTSHTISIAENTTATKHTHIRPPKLHTCNAHDQEIEQERTRHQDATRQSHD

SEQ ID NO: 963687 - protein, 388 aa, Homo sapiens
MGRSGGPDVKHPLLRQDNPRTVQKQLTSGPLSSNMRELLIDLQGKPDFPSKCRANYCHPWVLGDLQLVRYYTHCWLPKESRGRTGKLPNDWVRFMRMPGFVPCAKGYQFTMKPKHACKPSKGTPKGGPHREAKLPTELARASSLTKAKKLVVLGGHRAVKQFPPERKKCLRPLSFPVGGISLITDRLSFHGQLRTSARESQFRGKRRVRANMACFLLGGAPPGISPFVQNTTQKYRLSMNYLLNEKECELAFHGAPDKKGNKGFGTVRKNESRKRYDTHSLAGGIVATDGSLQFCPGAWTKWTSGPPAAHEMEEHGTQYNNKQHRKSCAQQGDRTRTTDKKKRTGLKQHPAHIKRPVVQSTQGLQRSTDYTPNNCSNQQAKHDRAYRY

SEQ ID NO: 963688 - protein, 139 aa, Homo sapiens
MVLTAGSTPRWPAQTWPNIVQPSRIGTQGQSLPPNTTHHSPKIIPQQTHPPQPHQHTPPHHNKPTHKQQGAYTYHTTPQPPPTPNTRHKQGSTARRTRTQPSQATCAPTQTWSSTAAHQRRHIHRTAHRDLIQSRRPRR

SEQ ID NO: 963689 - protein, 265 aa, Homo sapiens
KARESINLLMVTLTRIYKETFRFVWTPKTNELKSHFPKPVSCVSPTCATPHSVLINWQMAICWGFTHIPGSSPFSGCDFPPLPHTSLHWSPVCALWWKCPRACFSPDKVFILPVHALDSSGCGHPSSGNHLLPGGIWGDKGLDRKAQVTGVPVGTLENQWPPHDKEGQTRGLPIIDMGYDHLDYAPSLTGWGLLAGYPQKLKRTPLGQDTGLFQSKVNSRKCREEQINDLGTFPEHNTTNTNTRKPHKHRNNTRAQQQNATQKTR

SEQ ID NO: 963690 - protein, 302 aa, Homo sapiens
MRERHETRKKIEELSPTTRTVEKQQHTTAALNYEKRREQRQQHTPHRPAESGEGQTTTTTPTRGQRETTNKESSGAPHHYYKNAAEKSDTYRVDEKQPQNTTGHIMMRMQHNNTSGRTTRKSNKKHIKTLHTPQIAATPKQQYERTTTRTDLTGPHHNQHNNDQEETQINGRQATRPTENEQERERDTTQTKQRRTGRHKNNEAAEHRNHRQQERRRERRTKKHKNQHNEHGSERAQDIKTNTIDVRGESRNTKHDADGNQRIVQETKATAQQDQTRKAKIQTTNTAGAAHHKQKAGERNKQ

SEQ ID NO: 963691 - protein, 82 aa, Homo sapiens
MSTLVQTERALAQTALHTTNPKNSDRPTVFGRTERRGANALDWWSRSWGYPHPWVQIGRCMMSSTCCSAETTTTHTDWYDTT

SEQ ID NO: 963692 - protein, 342 aa, Homo sapiens
GAQDSFPLQQKILSMLFDALDQAVDTSQRSLWGPLYEAYSKVCRITAGGGMMDQSECLSLSRALGKPGAFSGFKEKQGNPFDQQVLSLSIAQSNRNSTHALQQINSFYIGTHILQQKQHPQGASPNQERGITPPRERGTPTAYNRRITRNTSLMRTTQNAGTPTSLAGQPQQHTTHRTYGPPGRTRQRSTTPKGTTAEQADDTTNRGQSALRATTQARTSKREHPRTHQYERGGCNAPQYNWGNTNPKRPHTDTTHDKTRTPRKRRPHPAHQNHLHQHHADTTHTRQRQTPPTDTPPDNNTPHHDTPRPRQPHRTTRPTHTPEPTTRTQQHRAKHTTTTTHN

SEQ ID NO: 963693 - protein, 74 aa, Homo sapiens
DDLEPRRSPRFLPSSAEDLGLLFDALDQAVEIQEVTLGKLYEASRKVCRQQPVAAVDPSECLSLSGLLEANGAF

SEQ ID NO: 963694 - protein, 383 aa, Homo sapiens
MWVAICNASHTKRGLREDTQWAERKKDKCYTLSLFLTTRGVRQRLRGEPPIMTKHLPREQLHRGADTGKQAVTIRHPAGYKAYQTHGGRSLTTATLLSRRGRTPSTVHKGGATKLPLQKAGHSKKHVGPVRNRGAEPNTRLLTTNRGGKFAKHRYDTPQSWDSTTRQTHKYRGGQGPYVYDNNHRYYHNPTADYRRHTRRGIRRTTHRTIGGHTPTAPKLRQMMLVRSVLHNTDRTPHPWVGGILHNDLYKTLSWEKPDTLMARNKVRKQQRRGTTPHRRTRPTGRSVDQLKVTRNTWLQTMCCASITKHSVWETCPDVCEHTEPARATTRAQQAQLLTEHKSKAPATHINVGQEYRIVEETPINNVEDQQRNENTQEKQGTA

SEQ ID NO: 963695 - protein, 202 aa, Homo sapiens
MGPATTSVKRDSLTNNKRGGGDPTHKTHSDTKRKDESRPAINCSSTQEHKEGATWCHACSHPPPGWSGCTITRGGGPHNRPRSTNRRPYEHPPTQRTQRRITPPTEHTTRRAKILSVRQTEPAAPPRGDPKAGNNHNRSTRASKYPSNPANKQHHHTNNIDARRGGPHKNNTPKGHRGLTYNKRHPHQITTHKKTGRSTTNY

SEQ ID NO: 963696 - protein, 102 aa, Homo sapiens
LVVVGSPLVVVAVLFVVAQLFVCFCCFSSLCFVVFCWLCVSGVRSFVFVSSFSSSVVVVVSSLCVLLSVRLVVVFSFLVVVFGCVCLCFVFLSFVVCPLLVV

SEQ ID NO: 963697 - protein, 157 aa, Homo sapiens
LGVLGAVLAVVLQSDSLAVVFPPPVCADFLVLGRGLCLWPRVGGVAPPPRSGGRWLGFTPARQYSPVCAGCLGGLGLCRSPRWGVFAAAPCGAPPRWCSPAGCGPPRAFTLRGVSVGVGVLSPIVGRRPAPPFLWCAQGAGASLLWCFSRLRCCPAS

SEQ ID NO: 963698 - protein, 476 aa, Homo sapiens
SSGPCSTPSSMNPCCLGFISHSPHSVQVSGHRHSMVGARAPVAPEPHASHRQVPATSGPCIHGPSSMHHILLHRSSPDASIIPRPHGISIQAGINCRARQHLPNATCIHTYLQPSQCPRPMTPTRDRDPDIRPLIYLTTTLILPKWPLSSKRVTTNVNMADKHTNTNKQQHKTKKQKEEMRERTNNKPQREEANRQQRNKPNKTKQRQHTENKIREKSNRHRTEQAHSKQRTRTKHTKANDTTEINHKGETTRENTNRKTREQPTHSDTETTTQESPQHTQTRDKKQTNKRRTTQHTTQKPNRTTRTKRTHKPTHNDHENSREHSKQRTRDTKGKRRNTNTKKVTKNRTRKNRRKKDQRKKRHTDNEQNRAQKKREEKQRREDYDQKNRKQKTREEQEKRERKEKRTRQDERENKSGKEQEEERRQGTEHTEHKRKDNENEKTQEQESEGHERQGDEKKARRVEEADMRETRSTSR

SEQ ID NO: 963699 - protein, 153 aa, Homo sapiens
DTFSARQHNSSWSPGCDNPPFSGTPRPAVGFYTQLPHPWSIRAEKIVGDTCTRAPGLFLPPPMALCNILAAILGISPRHLVVYLSIPRRDFPRTWIDPEAIFLATGFPRPFSPTHFLFSPPPRAGSFFAPFPPPLFFQAIQKRHRVLGPQKKK

SEQ ID NO: 963700 - protein, 61 aa, Homo sapiens
MEKPPGFIGPGGRGPQSLSGGGGPRSFTHPTPGFGAPKMGLAAGGVCLAPRRSSGGPTIGS

SEQ ID NO: 963701 - protein, 148 aa, Homo sapiens
MREEKQPIGGEPPNEVGEPSRKVTTYVDGRNRSGWINRRIPPMVVEEHGGRLSPNAPGCTRHNTPKDIDVGAPTGVGAHKKPPHRGGKSPRGPYPVNKRQYTPGERKNPQLNQFVISPRQKFIPVGGGAPPEKKNGAGPTIKPTASRA

SEQ ID NO: 963702 - protein, 139 aa, Homo sapiens
MLVYYHYIIIIMLLSYSSHLLILTAGVLHSVVDEDDAAPTTYPSSTAEAAYYYTFILSSSLLLVENEHRLMINHQPRTINNHSPLVLLAGHHHTCFFFSNKDGCSSSPNAALLFFPAAENKRCVGIISSHNYFLPPTGC

SEQ ID NO: 963703 - protein, 371 aa, Homo sapiens
MLTEPERFLITPAWDRGLNGNTKGDKHDDLQRARFICPACWAWRLNGRPQALCLPFGCLLACCCFSLSRAFAKQTNKRQALATTLLRACPLPGSDCLSLCASTLRQPNGHGTVRPLPCNATAHWHGTQHTRLHARRTALRNKQNTTNAQPANGHATQAPGLPHTHPSQLRSSLKHGTSPPPAGPPIQTKSLSHATHAPKGPLQAAQWPQSPPLANLSHNSNRRATRNNHYPLHPLLDATSPPTTQTATHGPKIWNTCDRMPRSFHRCAQQPKALMAPKTAPIPRHWHGAKTPKPLHGNEGSTNIPGPLGNLKAWQHSETTFRRTPRPPLNPQSFSHTFTLLLNSELFYEPEAPYPPVPPNRRWRVFPKQWP

SEQ ID NO: 963704 - protein, 469 aa, Homo sapiens
  misc_feature (94)..(94): Xaa can be any naturally occurring amino acid
MWLSKGGLGAKCVPRGCGECAPRGPVGGVSRVSLRSPRATLQRSAGLFLRRNRVARGDNEVPQCGPRRVCRAEVERRYHSTQREPPQERLCITXVCAKGGHRECVGRYCARKLCVCIPRQRVNPLCGGTQRWDKNSGRERLVGPLRDSGQSGPPAEDNVGARWGPHPLPVGGETHLYTHTRKKTPEAAVAPHVWYKVPPGNMTPTPKKGGSFIETPPWEMSPTGRSRVARGTLMSAATPDARSGGNNSTTALINTTTPSSPSPPLSATQEEGGTPPRGDKQQHSPTEATPPARSTPRSNRGGSPAAATTQASKGHNSLLPTQEGHPENTTLYDRSSRVMTTHRERGSPQLFVYAISGVKSHTSSIITSLRAGMYAALRGKDIRGEADGGPSRHPRHNSGTGQPPGAPESHEQRATKPLWRVNTPTEQLPQPPRRPKGSPGEPTREEQEDSTQTNGYESIDRARLHNTPL

SEQ ID NO: 963705 - protein, 269 aa, Homo sapiens
MCVKRQYYTHPEAKKSPRVPLAWLPHKVRGAPECSSLSLRESAPPKGEVCHRGLSRDTLPQRTRADSSLWGVLFLKKTSRVREREKPCLSHRGGKMMRGGTPPRGGATCGSGAQEVSSYLKVSDTRVRFVSPCDKPRRFLRPASGGAQPPCFSAPTRGRRVDNIRGGAMGRAQHLWLTGRGISPSPSFPPSSEHAGGTSGGPPLTRWSLILGPPFLPKATTTLVDTPQTAATGPTTQATKTRGGALEPDTIEKTLSTRRRGGGPSKGVF

SEQ ID NO: 963706 - protein, 336 aa, Homo sapiens
GQFYFMGSEEGGFTQGIPFSLYTSPLPPNIVRLLFPTIRAIFQHFFYILNPLLLPFHTSPYIHTPYPRGPRRVHPERGRGPFEPVCAAAGVCAVEPPRGREGEAWSPRAPEPLSPGVLEAQGHTQRCNTEGCDAISERERSLCGGVPSLCGPVCVAQRFSHTLLSRAACAQASDKRAGGPRHREGANPRGEPTHDTQGDHHVSSQGVRASTRGRERSSRGQRAHICGRVNPRGFSVHSVAPICGPARTRRPCAGAQCVSRRARARVRPHHTRGGRSGFPPPHMWCAASVSTRGRTRGCGEGETSPYTRVWTTQAWAQKPRRKVPRGEHPFCSRPTR

SEQ ID NO: 963707 - protein, 322 aa, Homo sapiens
TGKQNPFRGEKGTIFKSVLEKREYKANLKNVKTSSPTSHSIPPNAVTGSRPATLLSPYFFFSPVCDRGRKFSRFSRQDILLLSCAPQRVSSQPQRYKRGLCRDTQNFCVARGDIRVRTRGALSEKELSYLSRALCERLFTNRAVVWRHPECESVRGTIITLPTQRHKRHTQASHTPYRDVVGGATRRCVGTREERRVMRGSIQISRERPQRRLMREKRASWHESLRVEENTTNRAPPKIIQPSVVRPGAQLWRPPSQNKPIDGGAGPHPSSRSGRRRACTKRGEEECRPYKGGILKGRDQPLLTNEFITFLLATTEHGNNGG

SEQ ID NO: 963708 - protein, 53 aa, Homo sapiens
MTATGCAELLWVVPGVLLCDDLTDVLAQADHPTWGPLTLGRLEHELDEGLAIR

SEQ ID NO: 963709 - protein, 40 aa, Homo sapiens
RIIIQELDDLEEVVDFQVALVSLGHHGGASGMAALGYKDD

SEQ ID NO: 963710 - protein, 194 aa, Homo sapiens
  misc_feature (68)..(68): Xaa can be any naturally occurring amino acid
  misc_feature (70)..(70): Xaa can be any naturally occurring amino acid
  misc_feature (77)..(77): Xaa can be any naturally occurring amino acid
  misc_feature (79)..(79): Xaa can be any naturally occurring amino acid
  misc_feature (82)..(82): Xaa can be any naturally occurring amino acid
  misc_feature (98)..(98): Xaa can be any naturally occurring amino acid
  misc_feature (101)..(101): Xaa can be any naturally occurring amino acid
FFLAVPGFINKGGKKPEGSGGRDRAARSSGFFNLSQKEGARACGTPCVCVRGLSYKAAQPCVWSPLTXVXQGHSVTXTXLTXVPRWETGGSLDTTTYXPLXGGYISRGSAASLSLLPLSPTEYSLSLHSRVVGSGNRATQRHLCGRETLSHPRGREFLSQRCAQDTERRAVRGLRRVVEREACDNLSRERAPAR

SEQ ID NO: 963711 - protein, 377 aa, Homo sapiens
IHCLQRLFFENHPLTYHTAAKGQSKFSLKTALHCAPKSKPVLEPLTPPLGCSIDLEMLEVLPLGEGTQLHLLEPSVIRRGRRQSEPVKDPYVMFPQERYAWHSSTLAAHGGHSTLQNLSHQYQALHPLQDLEHAGPHNTAPPLATSITWRNSWTLLHSAEASRDPGTAPPMTYPTLPGTLPERLDDRRHPSHTTAHAQPANISAHTTHRTHQRRAMTTSNSKPEGPTPHSHTTGPRDPTHKPRPPQTAPTNPTHLTTQTRTRHTNTSTTHPTTTTETSTHHYPHTPVTYQPANTKTRTQKTQSVHHNQNTYPTTTSPTHSHRAQPNQKHHPPHSEQKTRHRKQQTGNKTKDHNKHTQETRTPNDGQTHKRHNTNKTD

SEQ ID NO: 963712 - protein, 179 aa, Homo sapiens
KGNRLLIKGGYKIHQNQVPGCGEYPRETKKSCQGSLQTSLRGRAGAIRKAVTGTRRQLLFPQEGQEEQVRAVPGVTTSVLCKAGKGWGRAAEESAQQAWRLPAWTPGRSRGLGVKPSGPPGGGGGGLKLTMLTANNRSPVTERGAEEHRRQGSRITLQGKHTRKTTIRAQKTAARLTPL

SEQ ID NO: 963713 - protein, 187 aa, Homo sapiens
  misc_feature (91)..(91): Xaa can be any naturally occurring amino acid
  misc_feature (112)..(112): Xaa can be any naturally occurring amino acid
  misc_feature (115)..(115): Xaa can be any naturally occurring amino acid
  misc_feature (133)..(133): Xaa can be any naturally occurring amino acid
  misc_feature (143)..(143): Xaa can be any naturally occurring amino acid
  misc_feature (183)..(183): Xaa can be any naturally occurring amino acid
QAILARVTSRPPMGEEVKNLYRNNSVHRKCLSSAHVPITSWKRPQLKKSAADTSQNLVDMKLSAGQGPENIYYEQSHALLSFTCCGPLEEXASNSKKPTRDSWFLKTGGHKXWDXTQVRKTLAFTHRIGHRPXASGPGTWATXGKHEARARCSDMVDIGHMKKKENGRGTFIQQDIGRSMVLXTNRE

SEQ ID NO: 963714 - protein, 306 aa, Homo sapiens
MSEAHNTYRAWCITRLAPSIESQYNIPTYAHRTHPNPLDNIHTCQIQERQQTHQDPYGKPHPRYDQQYRHSDTPNSRHIERTAHHSHENAYKRTQRAHQPRTTEQSQRHTTTEHTIKTPTGTQSLLNPTRHEQYEGQHTTLTQDNPTPRPRHPHHVTPKRNNNKGTQDKPNDAPNYHTHTLTQSNTQYIRHPSRAQNNRTHKAHRAPKQTQRGNRQHHNHTDNENTTNIATTHKQAAQDDPTHEAHEHQGESTSKTQYRRDDKPTQRKNNQNDPNRQRKRDNRTQQGRKHTDTGQHERQQRDDNKS

SEQ ID NO: 963715 - protein, 236 aa, Homo sapiens
MSCRAFSARLVFASACAVCAESARFARRSVILFGRVLSVCCETASWAPSVRSYVVSRPSIGGDCERLFLQGGDCFPQCGGCRYLTAELRALSFAPLCMARVGGRVEVGVLYVLSGDMLGWLRQWGVVGPPNGGFGGARPAGVDCRAGAGRALIPPYRDILRPLNMGGVLPRLINGWARREFWWGACDCLYMGYRRGRRQKLLMAEGTLGVRIETWGFGAHTEDRRYVCRVSSTGVK

SEQ ID NO: 963716 - protein, 141 aa, Homo sapiens
MAQTIKETAQTRRGPTNKGGDKIARTRKHNPRANTGRPQKVHSPSGARQTWIWCDTGEATRTPPLCNYKRDPIRTAAGGQRDQQELSAGAKITSTGDNYHEAAPKVQIKTTTGVILMYKKRGHRGSQALKRHNSIGGGHTA

SEQ ID NO: 963717 - protein, 104 aa, Homo sapiens
MDGRLDGMGGWTVDGRGCAVPCIPKPGGSVLVEHDSLQQEYMCAYLCGQKYLHLGLWSYSRGNVTEAAKPRTEHPLDSESQDGGRAGLEGLLIMCPALFNKAEP

SEQ ID NO: 963718 - protein, 98 aa, Homo sapiens
MAGGKRSALHTPTTVGALLLSTDKPAAGILCVPICVDQNSYTLGFGAIPEEMLTTEQLNPRTEHPLDFEFQRWGHGLAVKALLSHLLGPWFHKALSQL

SEQ ID NO: 963719 - protein, 176 aa, Homo sapiens
TWCQMYMSSCPLKSLESARICANKYMVQTIVAKDGFHIRYSVSTPSTSSASTKYCCPVLGLTRSPNRHARCLWTSPRALWPGFTFGQVIMSIRTKLQHKEHVNGGPAAVAKFIVSWPPSKIHILNRMWGFTKFNADEFADMVAEKRLIPDDLWAQVHPQSWPSVQVAGPTLMRLPS

SEQ ID NO: 963720 - protein, 185 aa, Homo sapiens
  misc_feature (93)..(93): Xaa can be any naturally occurring amino acid
MVCCPLVRFGVPRSTVFPIPTSIFRERGPSLGNAPPGAHLVVPTRLFTTCGPHSYITVPAPAHPQLARHPWRHSSSLKAPGATGAKFHKFASXRHERVPPLLPMRVGAFTPCSTAERNLKNTGALKNAAHSHDGSWGLSSTPPFLALWNQVSGPCTFTEGLPMCCPPFNTPPIHFYFLSQRKQKK

SEQ ID NO: 963721 - protein, 113 aa, Homo sapiens
MPKNHGRSNAIAAGIFHRSWAPDSKQLTSASSRKYQCIDFLRPYTVPNKKGIHGLAGTVCEKGTLLRVLNLRYITPSGRFDGDWKETVLNNDTSMNGISGWLPRFWKTVSIEA

SEQ ID NO: 963722 - protein, 79 aa, Homo sapiens
IAQNTVSFTNSHEEREHAEKSDEAAEPTGGRIFLQDIQKPDCDDWDELALNAMECALQFGKIIAESRHYWNCTNLAYVT

SEQ ID NO: 963723 - protein, 171 aa, Homo sapiens
MQIYFTSHTEHIHILRDEETYFPRRYDTYMSWALTLYCPFRENPTLGAPIRACIMEQERRDRKRLFTENIDCHTTVSLLANPLLLETFFFFLPHFILRGLPTINHAPPCFHGSQRMPLKTKLMLRPPLVRKECARLYFLSPSTPQLSPLHLVSTNSRDCEFVKNTGRKSTH

SEQ ID NO: 963724 - protein, 148 aa, Homo sapiens
CPIPETVLGNVKGASRQIAGSVIQGQDHGLCRRPRHAAKLVDCASSGPPRDFPDRTSCQLSVPLSPHYDPVVLGGGPEPWMYPHLPPDGQFEARFFPFGPEEEFGRLQGHFGPINQCCPSHPDGQSYSSGGEDGYVRIPLLRPPVLRI

SEQ ID NO: 963725 - protein, 242 aa, Homo sapiens
LGFLSVLCLLAFSCLLSRVFCAVLRFLSSRGVCFCSFSCLVVFRSCLSCGAFVAVCCLFLISPSFSLLLCWWLVLSPVSRLVSGLCIGLLCVWGSYAYFDVGGLFCSVCSVDSETWLGWGALLFFHVSWERGLCGLVGCRVVVGLCVLRMRFTVDVGLCPCRAAAPVAVPSSPALFLCAVPILRVCCLPGVWLVLSSLGSPLARLGLDVCHDVLGLSLMGAVPHLPSTQACLWVLVSSVSCL

SEQ ID NO: 963726 - protein, 329 aa, Homo sapiens
RSCRVCVTRGSVCPLCLGVAVWLRVVCHVPVHYRFACCVCCRGPSCRFCRGACIAVGVGWAYGLSGVALLGDVFNVRVLSLILACRACSVWLLIGCRPTCHRGLSAVDVHLSRSCYASRVKVCGLSHGLVDRRSVRESLLCSPYPNSVSYKGIIKRGLWDCVSVRVVSEVELKRPLCASKGNECIVYVCLYLCVVYVSTSIPVISTIAVHSCVLYMRRSPGYLSAAKAVSNQSVDYVRSKAPCLPYVLQEPDMTTYYCTDEWYTTRRQLDNALHVRIQYIWTHCCTLGTCYNNMMCVGARKTLLLTSLFYEFDTAYPPIPATTNSYTFL

SEQ ID NO: 963727 - protein, 296 aa, Homo sapiens
CRPCCVSCAVLLVWSLVPVLLRPACWFIVPFRRCGPFFVVLGGLPCADLLCLYPLHHAVRILRSPLLFYVLLLFARTLVLVFAGSRFVLFATFLFASPASWSFCELMSLLSSVVSLSCFASPLSVRPSSSPTVSAAICMWLRYPMELLLPPIGAHVVCVPASLMCLASASSLPLGREGCGCASGLQCQLHFVLPCAIPHPLTLQLLLALSRCPLLLGLYASRTCRWWVAGYSRRNRGLLGRSLGGPALMIVPHLLLPHNPLFMSALFIYPHLEPLSQMTLERFTVTNGFLYKDDFV

SEQ ID NO: 963728 - protein, 153 aa, Homo sapiens
  misc_feature (1)..(1): Xaa can be any naturally occurring amino acid
XVDRLLRLRVGAPLRLCVASLDCVVRGAALCPLSLCRCAARAGVLSVSLSSRGGVLLCASVRWLCGGAASCGLDVVLCVGACRRRGVVVVSLSSCVPRGGCGCGACRAAGRAVWCVVSCRACVAWGSTRSSGLVACSGGELCVFVYLSCAFVG

SEQ ID NO: 963729 - protein, 197 aa, Homo sapiens
VTGALLVILSFALVSPRVGNELVVPIGLLQCVMYTVSGECPVKRRSGGRGCAITMAPHYAWHNVGCVECSGAPQVGKEGAMKVTLVAHSCAGLKQPLQLMGYVGVSLAWVLTKGFASNGRRMWSLVLGKGVLRDMSLCFRVDNVLPFAGYESRVTHGVCQYYVKRAATCECKMREHELGFGASKSVGMLRRLGKGRR

SEQ ID NO: 963730 - protein, 114 aa, Homo sapiens
MRKNFSQSKRNVARRQVDPITGPTEQVTLGMNSAIAIARVHINNRVYEPRVLDQDIPMVQPLLKVRLFNDYKSYVSLSSDRSNPGRFLSTFKFLPVRKDKRNKAYFSKAPSPRK

SEQ ID NO: 963731 - protein, 95 aa, Homo sapiens
ELRRGYSKATPSCTFRPASCAPRLSNNGSPRCSLSITDPEICCRSARTVIAYLAHVFSNAVSMQVAGSCRWIKNLNPAYAVIVSDYSAAEYPTIG

SEQ ID NO: 963732 - protein, 195 aa, Homo sapiens
MPGYLFFTAMQSIPPRMLSVLWHSDSYCVRRAGPARRPLFFFFFALPLRHTPITQWGLATPAFLLCFSNPPPLFSRGGTSRPLDGGLFSPTRGALVARRECHSSHQQLRVFGLAPPLLGRAPIPPPCRLFVSLSRALVCFFLPPPSPSCRPPFFVNAQKKNPFVTHNPTPPFSPPLFPPPPLFPFFSPFFLYFFL

SEQ ID NO: 963733 - protein, 84 aa, Homo sapiens
IEDFVRRWVCLECESINGGFAHGEWVESERRCVCMDPVARLVAAEIGLSYSLRGSSRGGFARVSSRDELYGDVCGSQSYFLIDA

SEQ ID NO: 963734 - protein, 262 aa, Homo sapiens
  misc_feature (61)..(61): Xaa can be any naturally occurring amino acid
MCDPGLSLSGRSWRFRMALGPLIGFHSSVASGSSCMALAGRDSPWPDSALGAPHVTRGRNXFRRPPGSPTVSQKSPFSFRGLSMMLFALQEVFSFAQNFLEAPVAPSSGRALSPHFGGHWPPTGDLPPVNLPMRGLHCSLDTLRCYLCTPGYSITLGSRIMFIIWHPPVDPINSSPSYIQIYWVSILPSYQYLTSTSSLPSHISDGIYGSTHFCKPQRLPPNFTSLLAQLSSPILLHPPTKISPLPTQKHFGLKPPPDTGLF

SEQ ID NO: 963735 - protein, 137 aa, Homo sapiens
FKGWQSYRGLDAVRMRGQRDHSVGQLSDHVAFGRLNGAMKKAGYGIMGCDGSLPGVPYPTCSRRIQVATQEGSPRSSFLSPTRLVDGFREDHESWTEMGNRKESGIYIKLSISCVSDLGVIGGDGVWRGLVWYFSWP

SEQ ID NO: 963736 - protein, 212 aa, Homo sapiens
MRRGSLFQTLAGFLFAYCILSASPSCDLGTSQVVIAQLNPLALRAPFGEVSGMICLWALACSFHLSYKMLRGKSTRSGYTYRGWSTEGGHPRIKEEHSAYSPDPVCTLPSHRPIHARLCRESAQFSPSSHPLTTHPKLVSEVDRAVTSPITALQEKRSQADQSLCNLEDIHMSLEQEHHCHDQTVLFIDRQKCIGPNAYMLPHHPAIGRLPV

SEQ ID NO: 963737 - protein, 170 aa, Homo sapiens
LPLKEDPPCPGGSFISKHLCQEPPDWGPHPIQERLEHVQSRVKSLWVEEFRKETKWEMPTAFEKNGNVGRNHLAETKNLKERPADREVRKVIALEIGEGESCRQMVADSDEDDYSFLHDHGPPGPQSLKWLEVLLDHTFAEEFPTQIRNPRMLELWEGELVKELSVEEPR

SEQ ID NO: 963738 - protein, 152 aa, Homo sapiens
SLVSTRQRYLTAVSRTLPPIVPTQLRMHVFCPVTSEVLHFNVTFPYFSMDYITLDLRPTPNIHCHYQYCHSRQLIFLTCVFPHIHFLGTIRNAPYDVLGRILRCIHHMKQSLSSVGSFISLTAVILIIFHDLRSLRFEAKSPNSRRTLHNLE

SEQ ID NO: 963739 - protein, 107 aa, Homo sapiens
AGRLSERVLKPSFFDPPAGQCHPLVRGLPGYPRSLVRPRGPDGHREVSGSFGDAQVPRDSPAFRGATQGFDQRDLASPYESFEEAPAPCYSVGYPGVVFLRLWAGPY

SEQ ID NO: 963740 - protein, 141 aa, Homo sapiens
LLTNNYLLNVLVCLFSYIFLSPDAPIVNLVVAFCSLWSTHALVFLSPRFVIGTPSGRYKILYVRCPQVALIERNLKKIRVLSHLHKWGAHTPVSIPMKCSLGLIRLFICLFAGTPFSMCVLILLYGVSVLPLSLCYVFFFV

SEQ ID NO: 963741 - protein, 130 aa, Homo sapiens
SNALSLSKDPRAVGQRTYIYTCDRASQPSETATPTKAEVLALASGWPTIAPAHTTSVTRCSWTTLSFSQRRCTARVTSNPPRPSRPQSCAPCTALHIQPSPVSMPGFGFSSQPHPVRWANVMIKPRKTVK

SEQ ID NO: 963742 - protein, 69 aa, Homo sapiens
CVIDDRHLSVPHSLEDAGPSGAPQAIRFLGPGTYKRSVTRGVLHMSHGAMSVMSHAWLLPQSWISPLDG

SEQ ID NO: 963743 - protein, 149 aa, Homo sapiens
MVNRTCPKEKPILCRPNHGLISCQSIIHVPPCQECAYMGPAAGQAAFLSVHTRHCRPRRSQEATAACGVPATDRTSCIPSRDLASWHEGIKEGAEARRVRSPSADHARLAPHRPSRAPQSVSPRLPWVNWSRREPTSGNMFSPWIQQQC

SEQ ID NO: 963744 - protein, 247 aa, Homo sapiens
MRAPQLRALRAKPKGQGTWVQPQWPRHFAMWGLNQGTPAKSDSSNVGVPRRHQQSGELPFKPGRLAPVNKGPNHSRSSRQGRPPYAYTPTLATRIKQEEDNIPFYRASRKLPNRWAVNKLGDARIPARDTGGPPGTSVSSAHFEGNPLCGDESMTGRPHGGPRYPQRTDCDPSGHPTRTPPMTPADHQGWRGPPPPGPTWGARSGRNDTRPGGHPGCDKSTRHASETAPPLAAVTPQPKRKGRQPAK

SEQ ID NO: 963745 - protein, 390 aa, Homo sapiens
LQVPDHVSVEVWSPRCPQKKCSWLYVDITPTPRGDLLGHWLESQTWAVPGRLQTPSAATWLSALLISTLSSTYQSLVGRAGGRGAPSCNTSDTLESISSEGPPEAGGHITDKYFKAEKTAEFMEQFRHLPNALTLEAGTNSSQRQACERLQHRDRGDPTYSEHALQTVRALNARPKDGLLNSLAYEHSQLIGHCDPNIERPGPLAHSPLKNHLGRKTKQRQPPHANTSWLDQQTIPKHYQAHTEQSKQELAQGKMRRHRERSATAMGPPQHTRGTKRRCQKNHEREHQTKRHHNNPRQNSHNGAQNKTTEAPPGKTTQEHNQNKRQSTEETLTGTDRAREQTPQRTLQKDTHTEGETIDRSTAKGQQTKKKQNQQYPHNAHNTEQAQGTS

SEQ ID NO: 963746 - protein, 129 aa, Homo sapiens
  misc_feature (14)..(14): Xaa can be any naturally occurring amino acid
EKAPCSSVSLVTAXGQGARKAGKHIQGHRHCCATTTAPPSVLLLPHLMGTTYSSTGKERGPPRETPQRETYSAQHTRQARSACVNARRQSHRIGARMVEIKDGQQCLDMNSYSQHVYSMPHRGVDTYKL

SEQ ID NO: 963747 - protein, 124 aa, Homo sapiens
  misc_feature (89)..(89): Xaa can be any naturally occurring amino acid
RRWLPLRCAREVADPVSVSAPVLSVRSFDLVRPWAQMGGAHPSLWGLSFALVKAAPPSPVSEGESPPPLCPVPPCKWSDTLIPVPLSAXWEGEPCTPAKFPGVEPCPQDPLGTPASCVSGVNPG

SEQ ID NO: 963748 - protein, 106 aa, Homo sapiens
MVSVVAPCVITPCGTTYLSRPQRGAPLCALGPTLAHRWTRYIPRPPLDTLSPESHPESRCPVVRVLIGTTRTCTPPVNSVVMFLLCLVFSLCVCECVCGLCCGASL

SEQ ID NO: 963749 - protein, 170 aa, Homo sapiens
GSRSLAPQRHGVRGKLLKLAHGSSEAAAAEPLAPLKLAVRCCPLCPGPDSWAYRPPGRPEPAACAFHDHDPTDRVLHAALPRPARELAAVPSSGSKTLSQEALQHQAHHSSLIHERWARTTSTQGSGSVEFQELHSLAASRDNVNRFSFPSGQLQLGDRKGFFAGLTRQW

SEQ ID NO: 963750 - protein, 71 aa, Homo sapiens
GLEHEIRSTLLQRLGCAGMLSVSHTRLLTTWLCITTRRVMSSTLAAADNNVLVHHVGCLRSQLFINGSVEL

SEQ ID NO: 963751 - protein, 159 aa, Homo sapiens
CLRADMSPCCAQCWSCACVLLFFLMSWGWPVQPVPDGLRCLAVGACPLWFVCPAHAGEPGAVEWRPAVVRSCELLALLCFACLPGWILWDPGARCCSAWRWPGCCAVGAWGLPWMSCHFVAGSNCLGLRDWLHLLGTCCHCGFALFAANGTPVLRKVAL

SEQ ID NO: 963752 - protein, 152 aa, Homo sapiens
MNAPLVVKDLDIFDRVGHSTSSRWHYTYEPSRKGKLSVPGEVSPPHRENSTLSLSRGTMTIPRSVHSTSWLGPWMMYPSFSLIPGLEKKEEEEEEEAYEKGLISKNQTHKNPGASQAPAHPTPMPPDHSSLMFPILVAFGVFIPTLFCLCRL

SEQ ID NO: 963753 - protein, 189 aa, Homo sapiens
MHNTGVQNKNKTKQQTTQQKTTKQNKKKRGGGAEEEETTPNEGGGTTQKSTHQSSTHNKKLSGKKTTRGAPTKVRRGRNKNKISKTRERRERGGARGSTKKQRERESGKGRKKQREQSKSRRKQSSEEQRRTHPPTIQSGGGGGAHKQTARRHTTLTHRQNSKVRKTPRLRRRTTHKIDNNNLPSRTDT

SEQ ID NO: 963754 - protein, 342 aa, Homo sapiens
QPGQQSKTLSQTIKRKQTKKKDTIKSGRMAIHIYGKHVAGHIWVDLRCVVYTNEIFIEMEVIPVYRSMETGGPLGRVDLARDSGWKVVHQGWLPRVDWSSIGGGMAGNWNPKKGLWWKAGHRAWAGLGDRKGPGTLAGRTEMAGAWMAYGGERVLRASKAIWTGAARIAAWVGLGTLDRWEDGPVLIGEPFVNPGVAEGSSGVPSWQQSFYHPRTIAEGCHCQRLGNTGLYEPGKRRTRDTREYPVGRHWSRPRGTSKERVPFNMTSGREGGDLKPNLIHNPSIPEGRAKDTRGQSPKGDPRTGGVNKTYTQECWAQEITHGGAVTPSGRKTGSKTQLCSPK

SEQ ID NO: 963755 - protein, 183 aa, Homo sapiens
TVVTFVCRYRARGVFSPIVCARLMRSRDAVMVFVPLLSAAPFLGNVPLVGHLPRWCYVSAVVMLHAVVGFIPSMSVPGPGSPLRARLRLWPACLDLVFPMSPFRLFWGLFPCVFVAVRLAPGHYLCPICPGTGDPSSSPGHDGGPQAQGTLELRWSWSSSLSPSFLSLEVRIWSHPSPCVFAI

SEQ ID NO: 963756 - protein, 344 aa, Homo sapiens
NAGRETKGEEGQCWCWVKLLHNAKESGPPDLSPPSSPEADCTLPPSARAPGPTDSGQYPQTQQMARNGGTPVTASRTLDSPLAPEPASSTHAARFRHRAVREGGAVDACQQPWSPRAAAHARPAAHDKAPPPQRHPREPLASCATNGPPTLASPGAAPDHPAHTPQTHTPRRPPTGHTDRKTPSTPASSCPHHARSSHSGRHAPPRHPRHRLPTPQRIARPTPALALTARVHCPRHRPQLPTGNTGQHTRTHAPPTPPNGTNPRPIITRRPGPHPRHTPLGPAPPARTARDPHWQPPPRGPQLTEPPPWHTHHANPLHTPGHSPPTQRIADHPHSHNHTRQHNR

SEQ ID NO: 963757 - protein, 116 aa, Homo sapiens
AGVEGSLPFPPSMRCLEQGGAPRISSLGARSACFEPSCLLRSFPSRKHVVRPGGAFSAGRLYFLCVLVACRLYLPASLCGRHPSLAVTLSGGLFPPPCGPPTLRSPCFLGMLPGYN

SEQ ID NO: 963758 - protein, 644 aa, Homo sapiens
EATLHTLHKQLEHSGAITDRTHNDKRHDHAPHAENKTATKKPSNNKHTPHTPPPQNHTQENARGTRATATEPKSTSPYQLPQRTPTQTTTNKNINPQAHQHQQRNSTHATQHDHIQQIPLTHSPSTHPSATTSHYHNITFQNHHTIYYFQYSPFTPRHHHPHIIILTSILHNNPILKPNTTPSNPAPIDTHTHAANPTTATAARQPSQPAANEDTPPHHAKTPNAAKAHITHPPPHNLTNIDHRRHVHDASTSTPYHATGQHSKPDLSPSRHSPRSDYQPTCSATAAQRQPQARSLDPTMEDNPTDQPIPQQQTDNEPHQSAVRNSNHTPLASRQRDIYSQQMTTHAHAEPSRAQRSQRIVRARDKPQHNRRDHRERITKRTARRVGELAAARARTTRQRTIATKNYDEHRPNDSRRDRDRHHSPTEYARRPQQTNRRTTNAGALPRRSKPRPSWQQHHTQLTPAPTTTASNRRENAQAPDHTDATLNSTEGESETKRQTHLMDGEEITDTETTGASRQETHHHSHTEDIKTYDEPVTSPTRRQNTRKTGCETATRRTAPTRHDRPQHPDRTHHTQKSRNRTRKTDRRRTDSSRETGEHEHEGQNEHTGRNTPQTTAGHERTDQTTGHTRINVNRHRRRRTGQN

SEQ ID NO: 963759 - protein, 73 aa, Homo sapiens
KTMDLNPVSFNLYDVTWVLLILDLRAFSGGAGDKGSYIKMSSSYSPTIHPFFRVASNTSVGQEGAKGLRGSAR

SEQ ID NO: 963760 - protein, 371 aa, Homo sapiens
  misc_feature (364)..(364): Xaa can be any naturally occurring amino acid
PGRSSSCFAGVLALWAGVSVLRRGVAPGDILELLLRALWVEALVYVVCPQKFVGGDVCWAPSSGFVAPCSRRGRWTDLPGVLATRGSVPVLWTPLWKVGPRVDFTLGVSSVPEGLVIVAAQALCGVFISLCSTEGSVLGTALRGRAMCEPVVCGPSGSLGFVVWGLGPHCARALPWRTLMLRSPYVWGALGALAVSVAHSLLSHGAFTWCFVPGCAEWSQRVYARCSTLSVRFWHGLSVLLRLVGGPLCVSHMASPPLARGLQPLATEMPAHVVDTVACRRQLCSRSRVHAAADGPRDTWLLMCPRMFWSGVSARRWGCARVVSGRHPVLRSPRELTAALAHCLALTYSATYHDEKGLSAPRRXGPLGKKY

SEQ ID NO: 963761 - protein, 219 aa, Homo sapiens
MTNLVFPRVDFVYSRGVPCSVAPPRLCGVVAARPPPLRRSLGWLVESLSVAPPVGLVLWFGAFGRFVGAPLCAVVLISVWSDLFLPHGGVFLVICLGKVSLFARVGVVSPYSPVSWGGGVSTFFCFSLLLLVCVSARPIMVRGSVGHPTLWVALLSLCGSVLSCSRPWVCPLPPARWPRSSRGFVCPHALFVCYPPHSPTSRSSPTSGGCCARPTSFLE

SEQ ID NO: 963762 - protein, 133 aa, Homo sapiens
MVVVDWYALMVLSPVGNTCGSVAGVLRTLAGSACQRGRVNLFGVSGDTGTPNVLPLIVELRRTWLRNTNVGGRRVQRHATLCIALVRSVPSVSGFTCVISWERNGTLPVMPFMGSLWGQVVCDTAFDAIWSLH

SEQ ID NO: 963763 - protein, 145 aa, Homo sapiens
NADKNRSKRHVRIASSQQFYSYVFVFYRPVLHECYRRSVYVPTLCFADCVWYYLCTIHIVCYQQYPYLLSILSFYIKLHVAPSSIHVQAYALSRGMITAIKLAIGKRMTGCSITDAHHEFEKYASHVGESVANVENRAVIVRRAF

SEQ ID NO: 963764 - protein, 138 aa, Homo sapiens
  misc_feature (1)..(1): Xaa can be any naturally occurring amino acid
XEESIAVIYGGCGCLPGFVWVFEVFRSFITVDWPCGFQSVDYCQLLCLNHRLLTSGPVRHGRIYCLMSVTSSVAQQNSWLTCTSLAGSFSGHQGPRLLLSRSWTSGACRQSEGGKEVTKLREGRRKVARQRSFRITFD

SEQ ID NO: 963765 - protein, 241 aa, Homo sapiens
SAFFARPKYSCDDSVTASFSGVSLVLGAIAAAVHPFVVRLCAPHNTAGGLFCVTSLRRCLQKDSVLRWFHPSFYRVCRVSSLCPPCPRFPNDSVVVPSFFGACILFCGLPPNGGALFAGFPLGGLPLSVRPSRGLWPRPNEISPKGGLPALFRPLGGKGGVFGQWGVRARACPQSRLGGRSLRVLIVPCAALKQIQVHPVAITWVYTATLARTRMHCSNPLMLSCLCGHGLLPFICSLLLS

SEQ ID NO: 963766 - protein, 96 aa, Homo sapiens
RSRPASNVRELSVLRALLSVDEQAGGSGEFMRRNGLEGRGVVEEVVTVREGDDLSSSAVWCRVYIVYVMRIMALRAVQASVVGAMEEERGGGQRRL

SEQ ID NO: 963767 - protein, 137 aa, Homo sapiens
TCVLGRSATWDCPPSIDPSGHDISACCYVKLTSVCELAEHHLCTRRSIGVHDSIYIGIPSRYECSVPGVYLCNVAVGDEGWRELHVEHCDVMSIFSLVGVREWHVAKRRDEDRFSQVHLLVWNCVSADGKTNLWDAL

SEQ ID NO: 963768 - protein, 293 aa, Homo sapiens
PVCLFRFPASVPGRPCALCCFLCCPCCALLQPFWPLSLRTCCDLCERLALLLLPGALRVLPDSFRACSMLRGPYCGLPLLGAAVGPSRACHKGARLITMRDQPRRVPAITAVAMMDSRLAMNGQGHPCAWTLFSRIIIPQQEQASYDIVDTILDMVFPRPSEKDRYLPDTLLLEECRLCYRKGDSRFWLTNVICPGAPDFLAHRATGAAMLYECTHYQSFLEYSGGGGRHMEEAILQGPPDSRNRDLSAPLGPHVGLYSPSLVQKVPDVLLLTFCGRRDCVLYAKHTSPEACA

SEQ ID NO: 963769 - protein, 34 aa, Homo sapiens
MHPHAGPGLAAPAPGLTGGTGGANVGLMTCFGAR

SEQ ID NO: 963770 - protein, 53 aa, Homo sapiens
DGGMVSAIGKTSSPAVVLLNWKRWCVSEAQTVYSSALRTVKSVDGSMTSAQCW

SEQ ID NO: 963771 - protein, 39 aa, Homo sapiens
DEEENEKQNKQNSTSDSSEGKTKSVRHAYVHEPYLYYEI

SEQ ID NO: 963772 - protein, 35 aa, Homo sapiens
DALRQVTSFPFDFPDFRSEYSEPPRRLRAARRTVA

SEQ ID NO: 963773 - protein, 90 aa, Homo sapiens
LPQKWAAVVVPSGEEQRYTCLCAARGACKMPLTLRWGHSSQPTIPIGGLIVAGRGVSVACPKLVLSELVVGLVVDSSREEGALGRTKGVE

SEQ ID NO: 963774 - protein, 61 aa, Homo sapiens
APPVYCKNGCFYLRIHPCTACVDGLREKQLTLTSSYNYKHKRAELCLSKECVATRSPGYKR

SEQ ID NO: 963775 - protein, 69 aa, Homo sapiens
KSRSQECAHYGRGNRNLIVTGLVTVALRGNIDVIRSPLNLLIRTLPFQLSGARILLHDFRNIIKRIQTR

SEQ ID NO: 963776 - protein, 71 aa, Homo sapiens
LTAGLYLKPGLFKIISTCRWLMLQAPIAFTSPSFTSSSMAAHVSRKLAPHGNHIARLIQWEKFLPRLKATS

SEQ ID NO: 963777 - protein, 32 aa, Homo sapiens
GFHWNKHGAVRAPPLARDTQRVGVSVFVPVKS

SEQ ID NO: 963778 - protein, 50 aa, Homo sapiens
AQAEVTVPPAGCLPPVAYCVIRGKNYDASETRERPKSLQRLTLEQLEPYS

SEQ ID NO: 963779 - protein, 85 aa, Homo sapiens
SDRKFQTHNLAAFGPLSMMNLQHTIAVPSAQQCPPMELCNCMSYCLWHMAHMTYYVATYFMHKCSTLALLERPTPLLELTCSHVP

SEQ ID NO: 963780 - protein, 115 aa, Homo sapiens
ALCGWWRACCVLVVASSKMDAPHGFMATPLYSWHAVPLCLIFVVLPCPSLGMAGRSWTHFAACRVHLCWMVCVLAECTWWFANSKRMLHRIHGHTPVLVGHAVPLCLIILWYCPA

SEQ ID NO: 963781 - protein, 43 aa, Homo sapiens
PTISTSPALPPLPCAEHSRSGVREVFEMATRAGLQVRKNKRRM

SEQ ID NO: 963782 - protein, 128 aa, Homo sapiens
DGGSLEHVLKEDKRIPEEILGKCQHLRYLRGLAYLRVEAPDHAPEDVKPSNILVNSRGEIKLCDFVCELCQLIDSMANSFVGLLLLHGSGAVFACGTHYSVQSDIWSMVPCPWWSLCRREVYPIPPPF

SEQ ID NO: 963783 - protein, 102 aa, Homo sapiens
CTRRETILILLTLYEPSHESWPWQPWGKTILKTAWERLLLSFMLETATVRALFPQSMRSAITAREDTANLDRSCTYVPRMVCSRTRRELRLLRFKRSRTRSQ

SEQ ID NO: 963784 - protein, 70 aa, Homo sapiens
DRARYRVDLTTGTAYRPYGLRCRSLLYGSASVTTRNPIEPSALDAGVLPRLCIPRPVLKHFTIAPVDWRG

SEQ ID NO: 963785 - protein, 104 aa, Homo sapiens
MGCLLSCLSSNYGHQRSRPMNICTVPSHCMGPMGVATRNTEANIVTNFRVVMMMERVVTTLHDRHDDDPLTLGLDQPKEPDVIDDGRVPLSKVHEVPELPGERD

SEQ ID NO: 963786 - protein, 122 aa, Homo sapiens
QLKPDYKIWSRVTNQEAEEMERTVVMDKSTGEPVISVQNHKRVQRERGVLPLPSQGQRVSHDGSTARVIRIMKTALFCTLKISKLVGGAIMVEMADTDTDMNPGAFCRAVPIRVGFPYWLLI

SEQ ID NO: 963787 - protein, 59 aa, Homo sapiens
MVGSHVIHADKLGEKVEDSTMPIRRTVNSTRETPPKSKLAEGEEEKPEPDISSEESVST

SEQ ID NO: 963788 - protein, 40 aa, Homo sapiens
LEDPMINYNPLLKDGHQAPHPDKVLYTQDSTSLCLNPWAF

SEQ ID NO: 963789 - protein, 106 aa, Homo sapiens
VYLDNRYLLLVSEWMLKEPWSYADAGETGSNTEALKNEFTCNLAYAKRVKHAEEWERLCESNRVDAKTKLEAQAYTAYLSGMLRFEHQEWKAAIEAFNKCKTIYEK

SEQ ID NO: 963790 - protein, 37 aa, Homo sapiens
IAVHGSEGARGHGAIREQEYYYIPQYKNWRGHTIREH

SEQ ID NO: 963791 - protein, 115 aa, Homo sapiens
SIGGILLLLRPSGLEGCFMDRSTSSSCLARIYGTYNLSYRALQLSFQDHQLPGHLFIFAVLNPTAKCYGLLQLHLLTSSIFSSSLHGPGFTDDLHSSIALHQAAFSASSPASCRA

SEQ ID NO: 963792 - protein, 101 aa, Homo sapiens
GNNTHYRKNSNQVPRRFGIPPHCRLSDLKVGPTGGVPKLPHFLSVRIYFNNLLDPRLRPPEHNCLSFLFSPPGSWMENTSYWASLYSLHQMRDITCYLVGS

SEQ ID NO: 963793 - protein, 68 aa, Homo sapiens
ADLEDPSSNKIAAAPERALTYKYRPAQAQLASSPALICTLTLDSAAHGKNRIAPCMQLNSIKLSCWEL

SEQ ID NO: 963794 - protein, 78 aa, Homo sapiens
  misc_feature (21)..(21): Xaa can be any naturally occurring amino acid
  misc_feature (24)..(24): Xaa can be any naturally occurring amino acid
  misc_feature (33)..(33): Xaa can be any naturally occurring amino acid
GPAPQMYYDQLSLSEMCISIXFVXILEKSDVSXAVRIPVRHHVQCEGNNPIWNMSVIPRKRFFLPDSSLSKVKILLGS

SEQ ID NO: 963795 - protein, 61 aa, Homo sapiens
  misc_feature (41)..(41): Xaa can be any naturally occurring amino acid
THHRMIAVQVCLTGEISICPLVILWAVGPGLYSRQGRNSLXVFFRVASRVSMLCSDSMQTF

SEQ ID NO: 963796 - protein, 47 aa, Homo sapiens
  misc_feature (12)..(12): Xaa can be any naturally occurring amino acid
QQSECRVRIRAXEAAELVPELALLLGDVHSSLWGAAAHLVGSLGTEL

SEQ ID NO: 963797 - protein, 38 aa, Homo sapiens
VAETGVDVQAIELVMSHRTCVESKAVRALKNNSNDLVN

SEQ ID NO: 963798 - protein, 34 aa, Homo sapiens
LQLSKMSIKRKVKIRAKKDNVAGVTLPVFEHYHE

SEQ ID NO: 963799 - protein, 84 aa, Homo sapiens
AHAVGDGSLLRCQHSGKSVPAFRRSGWLPPSGDDSHGGAQCGFEEAITYDEFCGCECSHSGSFVGQHSHREVQFFSVIVVHCTT

SEQ ID NO: 963800 - protein, 146 aa, Homo sapiens
GGAVELEDTGSRVIQEELTKSEQELKYWYMLTIHTRVSNDLEDSETQVVKPVLKLCDAKDSQLGCTESEIQEADQLLSTRTEALEALQSEKSRIMQDQSEGNSLQNQALQTLQERLHKADATLKREQESYKQIQSEFAARLNKVEL

SEQ ID NO: 963801 - protein, 43 aa, Homo sapiens
LPGDYGITVPPPVWKEGGGEGEGEQSGAAGIRLWLICGQPGAQ

SEQ ID NO: 963802 - protein, 116 aa, Homo sapiens
  misc_feature (97)..(97): Xaa can be any naturally occurring amino acid
PTQPKAGLDTSILPICKGSLGCMYNKLDMNYDLLLDPSEINAIYLVKYEPWIKPMFNSSDFSKDGTLSNNEWCYCFQKPGGLPCQNEMNRIQKLSKXKSLLGAFIPRCNEEGYYKA

SEQ ID NO: 963803 - protein, 76 aa, Homo sapiens
MWLSCIADIPSNVEALQDKPRKCCREESQIYADEYDSRNGLRRKYELRCTLRIGDISDEDSSDGKYSSLLIGHSGH

SEQ ID NO: 963804 - protein, 55 aa, Homo sapiens
MQKVRIDEYDYSKPIPGAKKKPFEDHWRKHTLSYVDVGTGKVTLELQTLDRHSLL

SEQ ID NO: 963805 - protein, 44 aa, Homo sapiens
LSIIAHGLTYLHYYYCLANSNYERDSQSHHNTSTQGLQTYYYPH

SEQ ID NO: 963806 - protein, 39 aa, Homo sapiens
GGMREAGRQLPWQGFWSWPFLLLRPLPHGCQRNFFLEVA

SEQ ID NO: 963807 - protein, 106 aa, Homo sapiens
IRGYYFDEAKEISALSQFMVQPTPEAMLRRAKPMASDEQTPLVNCHTPHSNVILHSIDGPAAVLKPDEVHAPSVSSSVVEEDAENTVDTASKPGLQERLQKHGEDW

SEQ ID NO: 963808 - protein, 42 aa, Homo sapiens
GYIPLLITQIQSRRRKGRGRQAVAVRRFWSCALPAPEAPSYR

SEQ ID NO: 963809 - protein, 69 aa, Homo sapiens
LGLSCLCQQLPGRRSVCVGPSDVSELPDQLTGTCLQRSVQRDTWTVSTEPDVRPGGPIDTTNLTEERVS

SEQ ID NO: 963810 - protein, 89 aa, Homo sapiens
KRIYKNIRAVIMYTAVYPGNKDTVVAWELLTVSSYPASELSSSTSSAPCKRNVAVSTGLVCALRPIRTPPDGGGFLASVELLMVISYPR

SEQ ID NO: 963811 - protein, 132 aa, Homo sapiens
MDAARPILQTSHKPYQQRDAEGQSPLSQKIQTQIHREMPDLDSGDLMTGIQTHYFIYFNKRVSQQSHVLEAKPPKDDQTIIEEQATKIADLKRHVEFLVAENERLRKENKQLEAEQARLLKGPIEKELDVDA

SEQ ID NO: 963812 - protein, 68 aa, Homo sapiens
TEAYSYTITDEREIVRVHQGEAVLTSPWYFEHRDGHRRDPPLTLEKSYDAARVARLITTWQVRRFRLS

SEQ ID NO: 963813 - protein, 42 aa, Homo sapiens
MLVSAPPCLRRSCLGTPFAVRLPASDWQCLQSLRCNGERGGE

SEQ ID NO: 963814 - protein, 53 aa, Homo sapiens
YRGYINLLRTQIKSRGGTGESRKSSCRVAQVLVLALPAPEAPSYGAGYQRLEI

SEQ ID NO: 963815 - protein, 76 aa, Homo sapiens
DSPDSILRSRDEGGSCYHPRALNIPVSDLDECSAVLSQLPSRLYILLRQPTLDDEHLVFFCHMGNAGPSRPRSLAR

SEQ ID NO: 963816 - protein, 98 aa, Homo sapiens
SRGGGSLVTIPGSLNFPGVRVGTTCSADAASCLPGFIFCLQKPDLEDEHLVFFCQMGYAGASGPRSSPGVLDTLGLATTLEPYRVMVGVQRVRQEAAY

SEQ ID NO: 963817 - protein, 46 aa, Homo sapiens
LVELQEGPEPAGIHDHVKRACMYSTKYRISVHGEGRHGHEKKDFAG

SEQ ID NO: 963818 - protein, 81 aa, Homo sapiens
GSLTTFFIDCMAASVLAYDRKKVSKAAILDRIKRTGDGNYKSELSLGSLQVPFFKEPRQAAGFNSLVYSTTVITATSDAKR

SEQ ID NO: 963819 - protein, 130 aa, Homo sapiens
  misc_feature (104)..(104): Xaa can be any naturally occurring amino acid
MVVRRRKSLCGKVLTQLHINLSGQKDSGISLENGVYAAAVLPGSPAAKEGSLAVGDRIVAINGIALDNKSLNECESLLRSCQDSLTLSLLKVSLRAPRGGGQNXFENIKDSDKMLSFRAHGPEVQAHNKR

SEQ ID NO: 963820 - protein, 45 aa, Homo sapiens
MIRIELVPLPLDKVYSVDSSGDQQLCFVPREEHCMPWVSKSQRVM

SEQ ID NO: 963821 - protein, 61 aa, Homo sapiens
YNRARYLHIFELNLYTCGLALRWLRKNVLVEDKSVAVVSLCGLQNRHVNTLHRSEAAGHTD

SEQ ID NO: 963822 - protein, 45 aa, Homo sapiens
  misc_feature (10)..(10): Xaa can be any naturally occurring amino acid
QPINDMSYFXCLDSVMENSKVLGEAMNGISKLWQVSVLGILGDAS

SEQ ID NO: 963823 - protein, 88 aa, Homo sapiens
TSLDGTTQHLTIRDESLLQLYNPIGFTSNKNNSVSGMRTAYLEKLDGAYEVSSRISLILAAFDPRYFLLLDSDDSTASSSGMSKSLPL

SEQ ID NO: 963824 - protein, 40 aa, Homo sapiens
NYGTERLANYTGGIIRIPGHHILTIVVSVAGWGITDGRRC

SEQ ID NO: 963825 - protein, 154 aa, Homo sapiens
MLGAPAVCGAPLLCGYFPSTRGATQMPWHLGPPCCAGPWEKVLWVSRPKGPQCAHPRSWAFGKCEPCRNRFPLRRVPGSEGLSAKSRTVDQSGYEDGCLIQMTLSNPSELGGLMSEEAYENDRNLLRSENGTPELTSMELPQPARVVFKIEVVD

SEQ ID NO: 963826 - protein, 37 aa, Homo sapiens
MTPALGQHGAYVAWSQRAHLPLGELIISPKGNRLTDL

SEQ ID NO: 963827 - protein, 58 aa, Homo sapiens
LVVAKYAPVDSTLPPADVSGKLTDLGYHAEGAPVEVLVAWPFAVKIKYIAWTDGIRDA

SEQ ID NO: 963828 - protein, 128 aa, Homo sapiens
MLAVVAQHAGAQSTRPPVGVLHSCVDLPNQRGDFVVEDHAHPGAPTLALIALQELPDKHILHLIQNRQDGPTRSLAALSRLLVAHQQLHVERITVLPEGNPRGVCTSLGTAAMEAYYSGRRGPTDNPT

SEQ ID NO: 963829 - protein, 45 aa, Homo sapiens
RTCAGYKVHGRVLKTHNSHRISYLFEAYSLFSRHRITVEIVLLLS

SEQ ID NO: 963830 - protein, 343 aa, Homo sapiens
MSCSRALVLPPCSSPSCCSGVVLLWHAVFARRLPRGYLLFVGVCGCCAHRGVVVSMCVRAREGSCAWLWLVSSSSVHSCGLFCGCFVGRFRACAACLRSFALVYLSGHSCGVVLLCRAPGGLTPAGSPVCRFCSVGYWVYGHRVALNVVVLPLGSVVKCISELVPPVVPLVIKVSQGEHYAMSRRVYLAAYVCLVRVYGYDNILLKQNLGSVACLGYLALDCPRLLRHYAALGAGAFAQFRTPGTPVYTCTSTATLSVTCAYTGLGLRSERTTYIRDHVRSEGALLWMIDLAHTTWALLRAQGIRPVVSRWSYDGSPYEERATLSAPRWGIPAPCTAYLFGGS

SEQ ID NO: 963831 - protein, 67 aa, Homo sapiens
LQPGAIVPIAGCAAPHAAWRPERLPSEPLLAADLITSGFVSCRAVLSFASFLLFPPSLLSFPLTSKR

SEQ ID NO: 963832 - protein, 81 aa, Homo sapiens
LIFLVEQTSPALSFLNMGINTMIVLREAETPGDNPRLKTMESYTYATHQWELILLDEVIHQAMRYQAMEAQLPVARKNSWV

SEQ ID NO: 963833 - protein, 74 aa, Homo sapiens
DELKVRQNDRVLIDRLRYPTLKLENTEFDVYGYSFLVKMIVDSYNLQHQKIRMSLVEPQIPGISIPTDTSNHGP

SEQ ID NO: 963834 - protein, 154 aa, Homo sapiens
LQQHIDGAPHSAVQCSCMLQEVCNLPSPVCFFASLFSVLVRDPETVPQLYPEDSDLGLITTPAPKAGFSRGLVVDYTYRAQAKKFYLCLFSGPSTLIPEGLSENPDEVEPRESVFTHERFPLRMSRRGNGEEESGLGAGERRSGTGARARESQT

SEQ ID NO: 963835 - protein, 58 aa, Homo sapiens
  misc_feature (49)..(49): Xaa can be any naturally occurring amino acid
  misc_feature (58)..(58): Xaa can be any naturally occurring amino acid
MKCRNVCGKKKYALTKRSAALIEVNKSKERSGSRSDFPCRGQQVKCLSXGPQRETILX

SEQ ID NO: 963836 - protein, 60 aa, Homo sapiens
IPHHPLNHLLELPLSSDFRVWASPMALNPEAALPDPPWVAMAMTLGQDQSSATQAEVLRG

SEQ ID NO: 963837 - protein, 126 aa, Homo sapiens
AFAGRAGRLVRAPGLCLDPPPCVSARADRIFERFLWGEGGFSPLPRGARFSRTLGRSEETPLGLQRPGAVFPSHLPDSRCVSPPPSPGFNSHASLAPGCNGYVATRAPPLESLLPKRPSSCGSAAF

SEQ ID NO: 963838 - protein, 51 aa, Homo sapiens
MVLHCIVSVLLDCLLYHSSRFLLSASVQHHLFSCVSLLSSFFISYNVPVTS

SEQ ID NO: 963839 - protein, 158 aa, Homo sapiens
MYISPSSIHQPSASLPPTDSLSQLLAQWFMPCTTLGIMEKTHDPHIQAITATPRRLWTGPWPANCSVDAHAGLSRTSSLPIPATAKAARQGHNPGAEREAHRHRPCRVPTANVSVVDSDLPSRNNLPNMMTSRKVVKQASEGPIKGILGYTEHQVVSL

SEQ ID NO: 963840 - protein, 168 aa, Homo sapiens
  misc_feature (142)..(142): Xaa can be any naturally occurring amino acid
MVGAFVACGVFQALAPFTVPVARVCIAPVICGSPWGPLFPQGLPTVVVLPFWGPHHRAHRRVGSFASQCPRPPPSGPAPRVCRMARNPGTLARPGALAPPADLPSEPANEGPCEGAARSLCCALPPTGRCPCNAAQPTPGGXPEALRVTPPLAFWELFPCVAAPPMPA

SEQ ID NO: 963841 - protein, 68 aa, Homo sapiens
RRGRSSVIAVDERSVETHETMKSACNSRQQIRKLIKDGLVIRKPVTVHSPGSNARKKHLGPPEGRHMG

SEQ ID NO: 963842 - protein, 71 aa, Homo sapiens
AQHTTIIEVLLADTFCVEAYLQNLFSLCQLDKYAPENLDEQIKNSVHMQILEKSSLYASVLTPACDQGNID

SEQ ID NO: 963843 - protein, 100 aa, Homo sapiens
DTIRLLIHTNYALDRYAINQLTLLAGHLLMHLIAITTNNDINTTNLKTNNNHKQNDKKLYLSILISLQITLIITFTDTELIIYNIYIETTLIPTLAIITR

SEQ ID NO: 963844 - protein, 66 aa, Homo sapiens
LTDLSAAQRRSAARYSKNFCLWCAELHDSMNPRVIAMATKGGTVKAASVIQVPCADAHDPVVKATE

SEQ ID NO: 963845 - protein, 68 aa, Homo sapiens
  misc_feature (37)..(37): Xaa can be any naturally occurring amino acid
WLAGHGGLDDSVVRGRLPGGHGVRTRCWCPYCAWIQXISGERGDPRQGKESQCDKPIALSQSIWAPEQ

SEQ ID NO: 963846 - protein, 72 aa, Homo sapiens
PLHRLALACSDALVLKERKKAANFRHETFTFPRATALAGIGVVYHVAYRSACTAGLPSVPVATWSFMKKHDT

SEQ ID NO: 963847 - protein, 45 aa, Homo sapiens
MSSNKEQRSAVYVILFALITILILYSSNGATEVFHYGSLRGRSRR

SEQ ID NO: 963848 - protein, 35 aa, Homo sapiens
HIISTAHTSTHITSTHTTSEPLSRKKLYLSILISL

SEQ ID NO: 963849 - protein, 76 aa, Homo sapiens
CKLACCCYDPSRDPPLHYRVVTPVWKPPFRIMNYITRRHCTHELVPYNWLENRFISRMSTPNHFHRYTVYGYRRSK

SEQ ID NO: 963850 - protein, 41 aa, Homo sapiens
CVMQWYSGTVQSSDSSLSELFMYSLQSYGAPRGTTEELTPQ

SEQ ID NO: 963851 - protein, 44 aa, Homo sapiens
MFVAIHDPHSLCRPDSCVAIDFLLMLLFEEELGLYSVLQFDSPP

SEQ ID NO: 963852 - protein, 67 aa, Homo sapiens
MAHEDAKQSLQERYYPHIIEELITNGTETYEYTDYGETNLQTPTYFPHYSYNQANCDSLNVDNRAST

SEQ ID NO: 963853 - protein, 46 aa, Homo sapiens
RTYQGGVSFSEVSSATRLKSYLSNTTQFQIRVFGARSSGELGGEIR

SEQ ID NO: 963854 - protein, 56 aa, Homo sapiens
KGLTYTLSSVTCFHKLASAYGCRQLQATGKLFAILLPQERLVPSCPLDRVVPYAGG

SEQ ID NO: 963855 - protein, 34 aa, Homo sapiens
GSEQRGLIPVYRYQPVDPRGCRHCPTVRLWLTRQ

SEQ ID NO: 963856 - protein, 65 aa, Homo sapiens
APLIVCQTFCLQTEQVFLWSGSHFRFGDELVSGVCSNTITSCEKKMDHSSNSKPRGSLRTTQVSR

SEQ ID NO: 963857 - protein, 44 aa, Homo sapiens
KGVPRGLRELQLRSLTEILKGGVLIQRNPQLCYQCQGILVESDP

SEQ ID NO: 963858 - protein, 192 aa, Homo sapiens
SPKLLQSGFYFCLPAKFLLLAQPLRMWAPARTHLWFSLVELFLVSAQGCFQWLFHLPPSQLLTRHALRSRDQVPRAVLLACSPTEWRLDWSPGRSVRLDWSPRNGVEAGLGSRNGVEAGLGSPSGGWSGLPPDVEAGLGRELHLPPAPVSREGASIGPRGKSPLALSCPAPLSGPLGSWVPVFFNRQPPLGN

SEQ ID NO: 963859 - protein, 42 aa, Homo sapiens
FTVPPRRLRELQLQSLTEILKGGVLIQTEPPDSATRTRFSVG

SEQ ID NO: 963860 - protein, 351 aa, Homo sapiens
MDAYMSPLLDLLLLRVSCSSSSPRPICSVTRLIPGASSRCYPLSARVVAMPLVSVSVVPTWVTVTKLFLPVTHLHRDLFCLRKFSPLSVPRFFLPSVWDFPIGEAFKLVMDPVRRVFPHTCVVPYFNGIAVSSAVPTSLDTWRIAKLSRHSYVGPLFPVPNVSHITGGKAKPQGLERHSGNVPHFLCDPPSMISSRLSDEYQSCKPPGRSSCLPCGGPRVTPTVDGKHKNLPFVLGLSSGRNYQGLLLPDDKALPYQPSWFPVFNGGPSMPWASPVALRSGDLAPFLLRILICPPILPSAVPGDEASLERVCLVLDHVYVFAFNTQPSSAVRFAHPGESGVSCSATGVWLR

SEQ ID NO: 963861 - protein, 34 aa, Homo sapiens
LRRVLNVGRDSDGTGAAGITTLALHDGWWVDVVR

SEQ ID NO: 963862 - protein, 198 aa, Homo sapiens
MDRDRCVEILPLRGASSGQGPDWVTGPFLCVLNYTKRVKCTWGKFLDYPSFLLVRGLVLASFLFVAPCGPVADTPGVKVPIGIHRPWDLTNVVGTDTHSLAKVMGPVRSLARSSLRPRLVCTIQSWPSTSQLNLEGARFTVEMELYNLSDVSGGRALTFTLLMDGSPGRSPCQAAVRHAVRCTSIEESYIRFAGAVSQ

SEQ ID NO: 963863 - protein, 96 aa, Homo sapiens
GVRGACVLWRRRGPLDHILELVVQAQHEGAPHAPQDVGPRTLEEGLAPLISENLPPTVTVPVYMMSAPLRPECIIMRRRTVSKWVGHHADHGQPPG

SEQ ID NO: 963864 - protein, 114 aa, Homo sapiens
RALRSSFSWCGRPRFPRLILCLRCLPSLGCPPFWSSKQSRVFSTLFSPLLSSQAQWGPEPPGLYFRAPSSSLSFSPARVCHGGPLMSLGRPDCFPPPLPKCQNFLEDPDALGIC

SEQ ID NO: 963865 - protein, 134 aa, Homo sapiens
EPIAGDVCVAVHLPGVLEEQRAQNAAIALGGWVSLSWLCHVYRRTHGSVEVSDYISNQSVTVHSLTGTECFLGTIRNLFLSKGNLAPLQLKRLVTSSCNLDVRIRCTKSRANRRQGTQVSIEGWKFRLTYFVED

SEQ ID NO: 963866 - protein, 38 aa, Homo sapiens
LKIRGKILDQGEDSPASEMTRIARLMAKNKMSDGKKEE

SEQ ID NO: 963867 - protein, 202 aa, Homo sapiens
GALTGLSGLQRQDLPEVEGETWRLFFCPVSPQRLETCSERTTVVSQDCRLLSANCSGRKGEVGVLLLPGRRWAISELGPVREGGECGGGLGTLTTGFLGPYSISLTELASPLLSGARARRPLGRPKNHAGLGVWLDGTNGSRCPAASHFKEGSSQLGGVRRRMASRHGAVLCLMAGRGSQRVGDYCCSLTCLARWSLEFSSL

SEQ ID NO: 963868 - protein, 103 aa, Homo sapiens
DPPPSSPVTVSSSSSSSSVLDLLVFHYLSIFIILLLILLLLLIIHGLHVALSIRITGLLVCPGHISLPDVSRERSLNTLPRKSFRLVTSQLKRSKLLRLTHFF

SEQ ID NO: 963869 - protein, 97 aa, Homo sapiens
FIILLLLTSHDLLIHLPPPHPSSSSSSTTYSIFIILLLILLLLLIIHGLHVALSIRVTGPPFLSRVLCSLPDVSCGRMLEHILCGVVHVGKLAIEKV

SEQ ID NO: 963870 - protein, 49 aa, Homo sapiens
MPNISYQNKEQCVLAVLYFNNFFPKWKAITLKHIFKNIGIGSCGVNRRR

SEQ ID NO: 963871 - protein, 54 aa, Homo sapiens
CCCVRCTGRLWKVVDTSLTPELVVLAGESVVAGDLGGYCGTVVDFSLTAWQMWY

SEQ ID NO: 963872 - protein, 83 aa, Homo sapiens
  misc_feature (65)..(65): Xaa can be any naturally occurring amino acid
  misc_feature (74)..(74): Xaa can be any naturally occurring amino acid
WYNRLIEHTDRRWSELICRLDITIYIHVAESIGYNDDFYEKYTIVQGNTEKGHYLAGSSLNIAVXQRVSWAVLXPDVTSLARH

SEQ ID NO: 963873 - protein, 72 aa, Homo sapiens
SSPQLQTFLGCISRTSLKSLIFSSSCPGVDHKRNIFFPRSSVKICVTFLTKDSILASGHPLQFTKADILNKS

SEQ ID NO: 963874 - protein, 101 aa, Homo sapiens
MIYVRVIQKDRGMPTIDLVSDLCPPRLKSGPLEVCTSRLPIEKSCYKWNLTVYLGSIPSRLIIIYLCPQRSCLHYPSPLIASEKEVYKLLYPIRRWVIVFG

SEQ ID NO: 963875 - protein, 102 aa, Homo sapiens
MVKEDQGCWDSIHVVEVQEKSSGRTGHYKLSSTVMLWLQTNKSGSGTMNLGGRLTRQMEKDETVSDCSPHIGNIGRLVEDMENKIRSTLNEIYFGKTQDIVH

SEQ ID NO: 963876 - protein, 259 aa, Homo sapiens
  misc_feature (231)..(231): Xaa can be any naturally occurring amino acid
RCGYVVRALLMCGLSLLRRFCHGRALLWPLICSKAWWPGGFRGLFTPPSVFLVSPALIFPPSKFRRSPGVFCFAPPEGGYRIARVHFAALCVGRRLSALLPPPHRGCFSRNPSDPTRGWLTGSSPLFDSGYLFLFCGPLWGVSLVARPFVVPRTIMFCLSPLFARRWGGFLSPSGGGFLIPVVFVGSLLLSPAGGSPLLALWCLSLCLSPRGECFGSHKSTPRSFSRGPSXMPVSPHWCPPLPLVCNTLPHTRGSFSSW

SEQ ID NO: 963877 - protein, 35 aa, Homo sapiens
MDIPPFGRTQILTSSVPIPFTAPHSFAPLSSPERY

SEQ ID NO: 963878 - protein, 55 aa, Homo sapiens
MNGQLTERRILNPLSKEDRTLNLMVSSRLRYPLRQDDGNSHFYTLLFRPSGMLGI

SEQ ID NO: 963879 - protein, 157 aa, Homo sapiens
  misc_feature (153)..(153): Xaa can be any naturally occurring amino acid
IIHVFPKVLYKHGEFRGLAPSSASRVLARLESAHKYSAVMEEHGIHLLNGLVGSLSGLEVDKGITLRAVLITHHPAGQYVSKSRKSIIKCLVIYRFVQVLDEDVSHTRFSQRGIPLRPHDADWLSLNHIKVHGVQSPLSVGRLLEVDVGIAQXAAGD

SEQ ID NO: 963880 - protein, 142 aa, Homo sapiens
LRCVRSSLVFPLSFSLRLCSPALSSSPLVVSGCSLLLYPLFYALVAMSLPCFGIYAPVSFSILCRWLFHSSFPRAVDRLSASGCRQPQFLLACFVLLRISTSCLCCAFFPGEQQLGKVSKASDTCASVIRSALQTRYARLPR

SEQ ID NO: 963881 - protein, 229 aa, Homo sapiens
MGYLFPFVVCVWFSSCFGFGFAGLCSLRDSCVRSCVVCLVFVYLVSPVRLFLLLRYWARCLCCVFVCCVVHFFSLSSLGSFGLLWLVRFLCGSLSFVWFFPLCVSILCPICRFLCFTLLILVLLWFSLLLGVIKYLSPVVILYYLPSGSPSVCMSVAVFICGSISFFGCVCGVVWLVLVVFVFNRSVVLYRPCFVLLALRVVSVYPALECALSLSIWCMFALVSLVVVS

SEQ ID NO: 963882 - protein, 88 aa, Homo sapiens
QAGWSVATGRKQHLRIASSSISQWAVATLLPLPQRHHTAKNKTRQQHTLHKAKPRPPLASWFKRVPGQKASRPLPVSSFTEEKLIQFP

SEQ ID NO: 963883 - protein, 39 aa, Homo sapiens
MRIRFPFNHIKVHGVQSPLSVGRLLEVDVRISPVERRVI

SEQ ID NO: 963884 - protein, 387 aa, Homo sapiens
MWLSLIAPWPLHFCFLVTGVSRLVLRFFGHFFPLCISPSFFVYPRPGALPLPSAWRFYFLFRASWFPRVCFLCSLLFMSVFCPCPPVVGLPASAAFSLCGLSLSDCVSPFSVPLQIRVVLSFSSFRGRCLHTNLHYGLASVPMENVVLNCITVNVSVVLVLPLSPGARLISDPSLCCKVQSKVSGHRPMGHVDRATTTYAILAPTWSPVQSPCIHLLVPVSVYLAFSGLMVAVHKCYMREYRLSTMDLPRGSWCSVHIPSGASSRVPSPSLPAFRSSSGAPLVCFLWALQSGNPSSGSMTVVTEASSLTVPPPNCAQAQGMAPPSRVCHSRVSPCLITGTPSELPQGSLEAPSPLSRDPSYPPFLRRWDLFLPNGGGWAGWRHRTCT

SEQ ID NO: 963885 - protein, 73 aa, Homo sapiens
ESAPSDQYYYPFFRHLFPGRSQYLCHSTGDQALLHLSFPPIPQAALQAAAHASVDFKNVLDFYKQCKEKVEID

SEQ ID NO: 963886 - protein, 119 aa, Homo sapiens
MIPSIPGPRTLRLADDEAEPTVIDSDARVDAVIFRGHAHNLQRGLSQVTVGDAVVTIVVQGVVFRALPGNGGFGAATDSTSRNNGLPCLTRDLTQWNDEFWGNVINVVGIEKLVAESFP

SEQ ID NO: 963887 - protein, 184 aa, Homo sapiens
MLAQVKEETMLTVKQEWPSWQEKAHVNIRIQQGQKLRAVRICNIYICLACKLSRRILWARESPLNKQNGSQKSSVSYSSSPESSSVIHGRVFEGNMKSSSCLCLWVNFFGNHCDHDIFITPADHHVQGAFPFNDVADIIGGDHGLSIDADYDVVFLETTSFCWGIRNYFNYIAPEITSGKSRCR

SEQ ID NO: 963888 - protein, 97 aa, Homo sapiens
MSCYLRAVLCHRRLDCARLLSLAGQCVWTAADHLASSDDSPAGDHDYALPVGKQKQDLLEEDDIVRAESVSMWTRSQVSVEFCSACARKASSSLKMK

SEQ ID NO: 963889 - protein, 307 aa, Homo sapiens
MLSFRTAALLVSLETGASSCLIILLAGSIIFRSGTCFTLCAFVGPPRATVGATRTPGCCPCARFFRGGFRDPTPLRRLLVLIPPPCPPPGNVCFPWGGMGAHTPGGGVVHQGFSFGEERWGPFPPGEWPSSGSFLTVRCSPKRSSGGLGSPRLLGGSNYWGLPAASRGDLLLRERHPTEDLWRWPKMGHTTFRRGVPIVRQPAPPSPSGGFPTGGLCPLGLLGPFSRGFSLGEIYPPAGVPPAPPPAPPAVLYLWGNFVYGYREPAGGLPPPSGGAPPESSPRRIFTRGYPTRAPLGLSPTNVSAGV

SEQ ID NO: 963890 - protein, 76 aa, Homo sapiens
TGLQEESRYLRAVLANETGLDSLAEPGERRGICVLSHLASSETRAAGWPRTSALSGWAKQEGSDLAGYDGRSRPVE

SEQ ID NO: 963891 - protein, 44 aa, Homo sapiens
GLRAESRYLRASYAIETGLARLLSRSERRGDCVLHHSRSSRMTS

SEQ ID NO: 963892 - protein, 70 aa, Homo sapiens
LAQVPRILLRIHAGLGEGAAPCPSASPYREELLCDSWPDGPAEGGCDEVSRSMFRASTFRDCHRGSGSRW

SEQ ID NO: 963893 - protein, 186 aa, Homo sapiens
MSLRIDSTCVCACRRRSSRLGRSSLAYYPADIVIFSDLLLVGCDSVVSKIFLGGPFGALSSGVSTDRRCLFCVGARLWVTCYARAFSVVTPPGWARCFTPRASPFWGTRPQSCVAQPQGVFPVGPRDRPVSALFRPSVLPRAHVLLGGAHTQAWGVGVSHPAGGSTMRAFLGYTPLPRGPTTMWGY

SEQ ID NO: 963894 - protein, 84 aa, Homo sapiens
VTRLYSIPLCIPEHLCHGGLLDSHYSRILRLVVVSVRHTQVASDLSHPPHAPEAIAFVYCCPSLSTRYTPLLRFVHEDLPFTLD

SEQ ID NO: 963895 - protein, 30 aa, Homo sapiens
MRPAERRWALRLTTSLFSTTRPDRLPTTYA

SEQ ID NO: 963896 - protein, 44 aa, Homo sapiens
RLLKDDDWREESVSMWTRIRCQVEFCIERCARKGSRYFYLKCRV

SEQ ID NO: 963897 - protein, 84 aa, Homo sapiens
TSIKGKLTGININKAVQRTLGTSFLLEQLVQFVAKLVNPCLMLQMFISFTRNTWLRWPVAVSLPAGHWEPTPIAGRFTSWNRSL

SEQ ID NO: 963898 - protein, 67 aa, Homo sapiens
HSNLQDPPDVANDDNIKNDSDRMKLQEVRSKNGCNYKGYVELIEEYAMSDLRSVCRRQMELCHNYAS

SEQ ID NO: 963899 - protein, 238 aa, Homo sapiens
PLEPCLMVQGNPSRYSAQRPLLRVGWLPPGPPPIAGPFTPGPFPYPIQAAFREPRLLVVTDPRADPQPFPGGILINLPTLALCNPDSPLRYVDLALPLPPPGELPSVGLNLVDAGSGNSAHMRGPSFPWTPPGRSLPESVTFYHEDFLERGVVKKKEATVCCPEEGHVTPGGISRVNGLLPLLSSLLLSLRFHELVLKGVHTVPSVPIQPFPTEDLERSRLPRKNWSARSPCSRPLNG

SEQ ID NO: 963900 - protein, 102 aa, Homo sapiens
MTSQHHKGILGVPRETFLSKMAPRSKRRYLTDQRVAGWHFLFSAMQSALFTNQLSAWNHRTNTLGIPETKWKTEALTTLGECRVHFHGKAVAREVITSSNNK

SEQ ID NO: 963901 - protein, 72 aa, Homo sapiens
RLGRRSVTKQSSISRSSDTCRLLSSPQYDTNTFKTSIGHDCRRESYIQVELGSAMTASAATASLDRRDCIPP

SEQ ID NO: 963902 - protein, 41 aa, Homo sapiens
NWMLQQLPLWVEVLFLHGNPCRVSAVYNFIGASFDQFRVVF

SEQ ID NO: 963903 - protein, 39 aa, Homo sapiens
MSNSAVPLRTNSLNLQGGFYEGSSGQTLTVELQILSMDN

SEQ ID NO: 963904 - protein, 114 aa, Homo sapiens
FVLYPPPPPLGAGRYYRKGVCPIYVWVFSSFLVRARSTPPSGRDTHVGCTLVPTQERGGLVPQERYYSRSPRCYVWCCYMFLTQGGIDLSDNIFVFYIGAELLPPASSPLRGVL

SEQ ID NO: 963905 - protein, 338 aa, Homo sapiens
MVHWQDFRVGHNKSAGREPGGPFEPLSFWIMDCPSRNPRTSRFSMHILPGIARIPHAVIIHKKEEQGLSLMCSGGSNETSPALSWANVNAIFAPRSAHLVGNTAILVTTRVHYTGQRDSLSSGATTCWHLADKPKIQEVKEQRLRGSAGLTLLDWDQSSIVYRGIMPPGKIPLAVLSWEFFLLHWESPSPSRDPVSYERLHLLLMPPKHHPDVTYVKKVRTLRMHLFTALQLLCLGLCIMGQSESTCMPPGLPLHHVILSSAGSDMVVLTRIFTDREMRCLDANEAEPVFDELEGVDEYNEMPMPVYLPLEGQPRDRWMRGQAGGMGFPLPCPSLLII

SEQ ID NO: 963906 - protein, 145 aa, Homo sapiens
MTRIRRITARYTTNSHSHTKSLEHSKLLLATVKHSPSPVDDHRELMSSNQVACTMNEVPRMLNESSSGKATYQGKTAISHLQILSLSITPGLPLHYASRQVPRISYVAYRSSTLLSHRRTRNFCPFPKIRPRIKSAPETLTASRA

SEQ ID NO: 963907 - protein, 59 aa, Homo sapiens
IPASLMRGAPPVIAAGHIEHSRYLSLLDAVDNSKMALNSGSPPAIWTLLLKTIGYKPGK

SEQ ID NO: 963908 - protein, 50 aa, Homo sapiens
MLDHDIPMVQPLLQVLFDQGLKYLRDQSTDRSNPGRFLSTANSSLIPMTR

SEQ ID NO: 963909 - protein, 111 aa, Homo sapiens
RSGLASRCMVALMERVSQLAQWCSGVVRHLAAPVHSAVDTRVDWDKKDDVVFREAQRFGEADEVLLYFRSQLLGSPVEGDLEVLPVLRNFLEEHHSMLVVVGAHHSDEVTR

SEQ ID NO: 963910 - protein, 38 aa, Homo sapiens
PLRSVLTASTLMEPSTCGDQCPEQVSVASTGFEQEAGP

SEQ ID NO: 963911 - protein, 38 aa, Homo sapiens
YEYKRTELIIFDIFFESRLYPHLGYHQPMRQQPERLNA

SEQ ID NO: 963912 - protein, 65 aa, Homo sapiens
SRGSLVKDLCSLCTAPQQLQLSAEALARIILCPRWIWFRKYVVQFHLRLRLKCITCNRLERLLHV

SEQ ID NO: 963913 - protein, 71 aa, Homo sapiens
  misc_feature (28)..(28): Xaa can be any naturally occurring amino acid
MEAASWVALVSPLHCMTNGGGNSQQHIXHALQQCGGPTKELPLFGSSSDQLRHHQAGVILQQLEEVLTVHS

SEQ ID NO: 963914 - protein, 47 aa, Homo sapiens
GECWRMLVLWALHHIVRIVTGCITDVWEPSAMLHSGSPSPNLEVTTP

SEQ ID NO: 963915 - protein, 50 aa, Homo sapiens
MKLQQVSIPTMTVDKSHSEKSRNTHPQVMIRDLQQLTECSNSSKITLSFI

SEQ ID NO: 963916 - protein, 40 aa, Homo sapiens
SREQGLPLTVKWDQQEQKPACSGLHYSSWTAGGGTKLMTS

SEQ ID NO: 963917 - protein, 39 aa, Homo sapiens
MDGQACGIIVGNIIGSGILVSPKGSAGECWFCGPCSRSS

SEQ ID NO: 963918 - protein, 117 aa, Homo sapiens
EYPKSDKELLYVREAGINGSCCQFMVVACESGDLGFSPISTVSELCNVGKSLSSELQFPHLSHRYRQDLPGTLLTVLDAVVAKPTESLICVESQRKNDPVDTWGLSVIQDPSFNPKV

SEQ ID NO: 963919 - protein, 49 aa, Homo sapiens
FTANIISRTVLLTGMDGIQMDEELVEKTIINIHFQRAKNGGGEVDMVKC

SEQ ID NO: 963920 - protein, 43 aa, Homo sapiens
HNTPCHHPITKRPSSSAPSSLQQSYYLIVHSSNDHSTLLHVLD

SEQ ID NO: 963921 - protein, 36 aa, Homo sapiens
MSLYDRGDLESDLSWNGDALHVYILLRANSKRLVTK

SEQ ID NO: 963922 - protein, 86 aa, Homo sapiens
CISGRLFNTNARILATLDRCLLPTHCPEAMICVMTGPDLFLPSPSQHKFAGIMECTSPTIIFGVTILNLVRANTFVAELKGLDPAR

SEQ ID NO: 963923 - protein, 40 aa, Homo sapiens
EVTYRERLYRVYQEVKNRLDYHISVQNMMRRKEQEQMIKL

SEQ ID NO: 963924 - protein, 46 aa, Homo sapiens
HFGVLRLDLWQVKSGTVFDNFLIANDEAYAEEFGNETCGVTQAAEK

SEQ ID NO: 963925 - protein, 46 aa, Homo sapiens
YRAGSSTLWYQTKGSPESRCTSSMTLRPLCMVLRKPGDKVCLPENE

SEQ ID NO: 963926 - protein, 78 aa, Homo sapiens
AIPRLIWLIVTLTVRFPLLDKHRDEAVSVIGNPPGVACAGVNMKVLNKVKHEMDFDAEWLFENHDEKDSRVNASKTAD

SEQ ID NO: 963927 - protein, 40 aa, Homo sapiens
DSEDPNVSTTWAESSPPGRHLVHCLSCVAACLSPTKKESR

SEQ ID NO: 963928 - protein, 104 aa, Homo sapiens
TSALLGGEQESQLVVIAHDVDPIELVVFLPAQSVKGGSYTWQYTPSLGKLNVQITEGFDLYLELREIERAEQNTGAKEAVGRALWEILVPMAAISDFVSQGGAD

SEQ ID NO: 963929 - protein, 63 aa, Homo sapiens
IARGAPAGDGSAGAQRCPWMKREEAQEGECDIERHDLIMLFHFQCVMLFVHRCVPVDVVMIRV

SEQ ID NO: 963930 - protein, 47 aa, Homo sapiens
KNTMMRKHPRALEDNPALEKLLLISGTVAQLIVLSDQLTVGWNLRGG

SEQ ID NO: 963931 - protein, 35 aa, Homo sapiens
MASPYERAQRLYAYASKIKNALAHFLPQGTPTPLI

SEQ ID NO: 963932 - protein, 71 aa, Homo sapiens
ALTLLQATYSCTLLWKRHPSTISHSPSLYTYHLHNSNSTDYPRNRCRLNPRLRLTTLHSKTQPEQLNSSES

SEQ ID NO: 963933 - protein, 35 aa, Homo sapiens
IKWVHDLSRVTAGLCLVASKALPGRSPSIPFYLLF

SEQ ID NO: 963934 - protein, 76 aa, Homo sapiens
VPPQFPTPAPPMISTHCSSTIPITSCCMIVSSTTNVISLATSGMITAASPYYGLITWFLLKHKSNNEMSPTTPLVM

SEQ ID NO: 963935 - protein, 30 aa, Homo sapiens
MGIPAVSNPIFMALDLCLCAKILQLLNWKT

SEQ ID NO: 963936 - protein, 47 aa, Homo sapiens
QEHAGLETEDGDGATADPKGPGTGRLVRLWERVQLSGSERTEDASNG

SEQ ID NO: 963937 - protein, 43 aa, Homo sapiens
VGPRTNPAAVIGRIDEEGRLVLGYGRGFREQQEFSREQQEFSR

SEQ ID NO: 963938 - protein, 38 aa, Homo sapiens
DRESCCCGNQFLQVIEQDREGPFYGLPGGHCCCRNSRG

SEQ ID NO: 963939 - protein, 111 aa, Homo sapiens
MSSTEVHVEDSLIIVGKSNASNIKTEEDRTVMRDFLQEFKFGRCVSSSSNAQIHLPCVLRHTSLRFPRSRAHKLKSEHQSPLCCGKPTTICEGGKGMRDGECPQTSAKIRL

SEQ ID NO: 963940 - protein, 112 aa, Homo sapiens
MLPSQEWAASGGSIQHKIHSHNFCNGVFVWPTRIHSHSYSSVMPYGLEPSESPQSLSYQQVPSLLLKGSLHCDQSQNPQYHCHLTPSNMKIILIVHGGLCWRGTAVTDVQPH

SEQ ID NO: 963941 - protein, 34 aa, Homo sapiens
MHIHRHHIEHTLDETQMARMNVTHEQGLYSLYLA

SEQ ID NO: 963942 - protein, 105 aa, Homo sapiens
KKYAYLIKIVTRSSGMLSKKSFLHKIKANRYSIIESSYNFNNKVKANVLTKYIQRPTDNAALAMLNPMLTKVNISALRLLAPIHAYIMGTYLFYRMQITANNPHD

SEQ ID NO: 963943 - protein, 45 aa, Homo sapiens
ILLLLLHVSDHEPRMKQFFTDYMGGYFSGSVTLMSVSLNSRGSSR

SEQ ID NO: 963944 - protein, 66 aa, Homo sapiens
PREYLLLPREFLLHPREFLLAPARIPAAPARIPDCPRENTCCARENTSCQGCNNEGHDEVKGNRLV

SEQ ID NO: 963945 - protein, 72 aa, Homo sapiens
NSAIVFILETVILVIQHISGELYSYALTYMQATTHAPDWKRQPNNINHEPSLYTYHLHNSNSTDYPRNVLLW

SEQ ID NO: 963946 - protein, 74 aa, Homo sapiens
MGQAPLVVSRVLTTGASATCCIAALGQTMSRDLGHEVEQRVQQQQDQSGSESNPLDVVDFGAKTIAVTPSWCHT

SEQ ID NO: 963947 - protein, 37 aa, Homo sapiens
LEDPIFLIASKELELITLTVGFGILIFSLIVTYCISL

SEQ ID NO: 963948 - protein, 37 aa, Homo sapiens
QQTKAPSSGQLCSVSSSRSHLAHPFFPFLTLNRRCGV

SEQ ID NO: 963949 - protein, 184 aa, Homo sapiens
RERDAAAARAERNVRQHQFHRAVLGQPVQRGVAVGHCIGPRAERRELADHRVAHLGIVVDHQHARARAHRRRQAAHGVRPAGRRRAGRQPKLDARAAADLAVNPQIAAALPYEPVHAAEPEPAAFAGRLGGEERFDHLVEQHGRDAAPGIRHAQHDRRRAARCVRRRLASRGQRERPAFRHRGR

SEQ ID NO: 963950 - protein, 71 aa, Homo sapiens
MTIDDIQPTSLEQESMIGEGTQVSVGTGVTVDKEGRLVSPPPHIMLTGTQTHIRCPNARKMMPEDLEDHKG

SEQ ID NO: 963951 - protein, 58 aa, Homo sapiens
AYAVDGRAELLQFLQSEDKQTKHEPILKAEFLPYNGLIHRMTVCVKLEAEGKGVVVVI

SEQ ID NO: 963952 - protein, 46 aa, Homo sapiens
LIEDPIANTSLLSACLLPDPTFSDCLPAHAGEVARYPTYSASAIPR

SEQ ID NO: 963953 - protein, 32 aa, Homo sapiens
LFPSERTISGLAENAPLHTLVMEVKTTDGRRL

SEQ ID NO: 963954 - protein, 100 aa, Homo sapiens
MPPKAALTQQHPPVTNGDTVKGHGSGLVRTQSEESRPQSLQQPATSTTETPASPAHTTPQTQSTSGRRRRAANEDPDEKRRKFLERNRAAASRCRQKRKV

SEQ ID NO: 963955 - protein, 45 aa, Homo sapiens
MGLTDVLYSRFLLSAFLEPAQNRGKPDTPYRGPDSRQGWLLGARS

SEQ ID NO: 963956 - protein, 69 aa, Homo sapiens
MPWIQQRDSSGVRLEDRGRVGMGEASLYVGCHLELDRCIETEATGMGPIAPGEVDVLGPAVGAGVGRPC

SEQ ID NO: 963957 - protein, 48 aa, Homo sapiens
PLQRLVVPRKDSRSQVKDCNWRRVVVGFDAGLAEQLRVAGSSVCQVCK

SEQ ID NO: 963958 - protein, 51 aa, Homo sapiens
PNVNCSLQLQRQRSWLPGVIGEAWLAPVAAGRWWTCYGRGREAYWPMLDKV

SEQ ID NO: 963959 - protein, 32 aa, Homo sapiens
MLAFIPVLTNNINPRSHRMLPRKYFLYARQPH

SEQ ID NO: 963960 - protein, 59 aa, Homo sapiens
RKEQICFVSSKRLSSPWCRVPGDGHVEPVSHCLRVGPGKKRSVTEKFPKAGYRTSEIGI

SEQ ID NO: 963961 - protein, 59 aa, Homo sapiens
GTNALRNMALDSQKEVSYIGNYAMRDLVPRLPVMEQQQQHLQARPMSDDTVTAVCLHTA

SEQ ID NO: 963962 - protein, 51 aa, Homo sapiens
SDSFTSATPRNMREWLNVAITRTLHQCEESLFELTQTDLLFTSRQHQSSSP

SEQ ID NO: 963963 - protein, 98 aa, Homo sapiens
RVIPEDPRLSGMLRGEWYRELASTNPESSGQLCGNPATSGFPVQILRYLYLGCAKDSTNLDVLGKYGNKYILKVTPKLPNAFEHGGEFTYKQIPISDH

SEQ ID NO: 963964 - protein, 94 aa, Homo sapiens
IALEDPNCIRTDRKSRHEGSQKRRLEYTHDSTTEYIPSGTFSDTSCLNPKGQKDRDAPAFTVCIRTEKSRSSELLPFCSTGGIAVFIRELALET

SEQ ID NO: 963965 - protein, 55 aa, Homo sapiens
CVTSIGSPVSGIPPRKFTSMLTLDSEIAELFGAGTALVLSAAKEQIPSGGIFHYR

SEQ ID NO: 963966 - protein, 35 aa, Homo sapiens
RVYDNKLCSPKIILSRTMISFGAREEGGRSLTETP

SEQ ID NO: 963967 - protein, 37 aa, Homo sapiens
MAKPTGVVFLARHASQLFPWVFKCHTEVYLSRRISVH

SEQ ID NO: 963968 - protein, 34 aa, Homo sapiens
VNCSGAVCRTRADSVLVSSKRLSSPWCSVRGDVH

SEQ ID NO: 963969 - protein, 64 aa, Homo sapiens
MTSDRVVCAVALRCEHGLGVRHKELIGEIRHARPSPQASRREQQRQDCKLANCRGDTRRQLVCV

SEQ ID NO: 963970 - protein, 41 aa, Homo sapiens
MICSFLQTAPEQFPSEEFPISESKVYMDVNFPGSSSTIGRT

SEQ ID NO: 963971 - protein, 48 aa, Homo sapiens
YVNCSVGYRAVQHMHIYPIVIFIHYKSAKHIKEQRDPIYLRDKVTQRH

SEQ ID NO: 963972 - protein, 44 aa, Homo sapiens
GALVSVFLSLRLIISRVKLGHLLERLLGDTRTWGDEEGVRERGV

SEQ ID NO: 963973 - protein, 135 aa, Homo sapiens
LVTAPVMYCLLAGVLLLSAWGDGCFLGWCGMCNLFVLGKRPPSLLRLQQPSCPYLLRYDDLFSTAIIFCILLTFPHLHYLLLPPLEEEPFAWGHLDFDLPSGATTMMAAECEADKWLQMSPEEAKRRRWRPRVLK

SEQ ID NO: 963974 - protein, 50 aa, Homo sapiens
APELIPFVISSSKGANVEGVAGVSSPLGGISGGGYFLQHDHLPFQGAEHS

SEQ ID NO: 963975 - protein, 52 aa, Homo sapiens
LGDSRGSLTELHVCHAASITWGSQGLYPSPSVANFQAERVRGVNASCQKFAT

SEQ ID NO: 963976 - protein, 35 aa, Homo sapiens
LLRRLEIEAETITAEHAYMTLEQERGHAVCAGGGF

SEQ ID NO: 963977 - protein, 80 aa, Homo sapiens
FYSLPSQITGTSVHCPDRGGEADLIVRVPIPTKIPLTKPRRRLEEKSEENQEQDLSPRRARRKKKEYVECLEKKVETFTL

SEQ ID NO: 963978 - protein, 105 aa, Homo sapiens
RVLHLTYTHSPGRGGSEGAVGHVAPTSRYPTCWNLVNGTVVPLAEITGYAPLQTRTRTPLGSDRRVRGAILTIRKPDYYAKIPGFRRIRGESELYTSLYCHAQPT

SEQ ID NO: 963979 - protein, 95 aa, Homo sapiens
IPPCVLFEGDEVYSTIRSSEYNGKIPLFRRIRGESELYTSSYCTLQNPHVHLSATIDAPSTRPYPDDTGTRGVEFRQSIASIACFLLVVNNPVPT

SEQ ID NO: 963980 - protein, 122 aa, Homo sapiens
SVGPDYVITWSWCTMVVDELWVLHDSITGDTVVTLAAVDVGENLMGSSHCIPVFRMVEYTSSPSNRNREYSSGLKGAEPLISPSGTTVPFDQVPAAGVPGVGATGQWPLTPPLQESDVVLAV

SEQ ID NO: 963981 - protein, 86 aa, Homo sapiens
YGSNVSCLQNGSRQLFPKGIGEELCFGKKWMLDVISGPIFDYQYNGSHDTEELNNTVRGRQFHSCSRLTYYIYNHPADLDFTSVLP

SEQ ID NO: 963982 - protein, 32 aa, Homo sapiens
CSCEAFLIIIISATVMFLQFSERRLSLPQVGV

SEQ ID NO: 963983 - protein, 53 aa, Homo sapiens
GRSEDPELLLQFAYQPDLDMLERISVEERETKIMIAFQTTTNFNFLSCRNIAS

SEQ ID NO: 963984 - protein, 87 aa, Homo sapiens
DSLLRSMYTRNWVYMLIIVKAVDSHACLCCTTCRNSYSLLNLAEVRSQYCESQGDANPQSSSLGSSISENFLIMELSAGIFCTRIYE

SEQ ID NO: 963985 - protein, 55 aa, Homo sapiens
  misc_feature (48)..(48): Xaa can be any naturally occurring amino acid
PSLVSSTYCSLPPCIPHTSTPHSPRVASRVFWILCATSKLSPSNLQSXDPHPGYT

SEQ ID NO: 963986 - protein, 42 aa, Homo sapiens
TLFPGRGERGRHRFLTKLVLLRVFLHDLVRNTLVVSPTTPTE

SEQ ID NO: 963987 - protein, 64 aa, Homo sapiens
PYHQTTQRPADQGFILESCRSIGDLIDRDGNWKLGLVEFNILWNRIRNYLSIFRKFDLDQSGSM

SEQ ID NO: 963988 - protein, 71 aa, Homo sapiens
RELRSGEMCHAEAEHTLLLLLGPLYETRHEATQVWSCLTSHPCCSCLDSLMTSPSRISTVFPTMFLLWCAF

SEQ ID NO: 963989 - protein, 43 aa, Homo sapiens
NHLAPVSGEANYDKAPSAYDKQTLYRSLHISFNTATIALRIKQ

SEQ ID NO: 963990 - protein, 46 aa, Homo sapiens
IRECGERVRAQRERSENGHASCPGASLAVITCTTLHIDLAISIDVS

SEQ ID NO: 963991 - protein, 41 aa, Homo sapiens
MSWAWCSTSISMLFTFVHQNSRASLHSLDLLPIPHSGLHPG

SEQ ID NO: 963992 - protein, 64 aa, Homo sapiens
  misc_feature (41)..(41): Xaa can be any naturally occurring amino acid
FDGSMVFEGVKGVMKNDDKVLQPFQVPRRLKTTAVLFTYAXLNQGRGLVPGNKQSPEEQKVMEG

SEQ ID NO: 963993 - protein, 157 aa, Homo sapiens
FDGSRLLLGDTKIQCLFELWMISYKLFVGAREGGCWVPKRWRHFLAVANVYLCFCPLTASSVRPSRVSFLTGRRPDTTRLYDFNSYWRVHAGNFSTIPQYFKENGYVTMSVGKVFHPGTAPCPESGFSWFVVSESSIPILGMGLSLQSPLLAGRVPR

SEQ ID NO: 963994 - protein, 49 aa, Homo sapiens
GSPRALRFDGSSDDVLVSPLEKAQPHIQPREDSPGLPLLTAQSVIRETV

SEQ ID NO: 963995 - protein, 80 aa, Homo sapiens
LDSNLSGAWAAGFDPNQKHPALEVRQGSPGSGRRKNDPIYAMKVVKTELVHDDEDIDWVQTEKHVFEQASSNPFLVGLHS

SEQ ID NO: 963996 - protein, 93 aa, Homo sapiens
KRLSYTKICMTHNNPYERSVFYYVALLWIPIVIVTDNFWFCVMYHRSDEQQVMSLNSPFQGPIGDNDKNPKLIESSTLLTALLIISATSSLPY

SEQ ID NO: 963997 - protein, 41 aa, Homo sapiens
EDPSVRYADSQNFVIQMTLMKSSFNVYKAMSAAVCFMIDAL

SEQ ID NO: 963998 - protein, 51 aa, Homo sapiens
MSSRWWWEVPGEYQEKHSHRLQVYKHNSIGEGAHLSCMAARGRSPVWQQRG

SEQ ID NO: 963999 - protein, 42 aa, Homo sapiens
SKYLPGQASSRGIELRWGQISLGSELIWNPDSDIGTYSRQIQ

SEQ ID NO: 964000 - protein, 35 aa, Homo sapiens
RILYNTLGLLWQAPPFLVMVPVTALMAAQGTRKPG

SEQ ID NO: 964001 - protein, 43 aa, Homo sapiens
  misc_feature (1)..(1): Xaa can be any naturally occurring amino acid
  misc_feature (21)..(21): Xaa can be any naturally occurring amino acid
XTDFSTSGSSTSFPFTYVSAXFTRLQSDHHFSIWLGDAPEQTV

SEQ ID NO: 964002 - protein, 39 aa, Homo sapiens
SVCTDSEEYGGIELRELMSAIADVHVDSQLPLPEFPQVA

SEQ ID NO: 964003 - protein, 78 aa, Homo sapiens
PPLSTLLFTLAHSLSVLPSSLSIVLSGNRSMFILIPRCIEILVIGIRLLPAVRQMALPHTAMQYSSVSKLFRLPPHPP

SEQ ID NO: 964004 - protein, 45 aa, Homo sapiens
LEDPSFQLVQLSSPAPLVFLITSFNPVSSVEASAVGAQIFTSWSR

SEQ ID NO: 964005 - protein, 35 aa, Homo sapiens
IHYRFFNVISRYGNSSKGTEGDGQITAILDQKNYV

SEQ ID NO: 964006 - protein, 50 aa, Homo sapiens
MKGDHYRSLAEVASGEKNNSVVKLTEAAYREAFEISKEQMQTTHPIRLPL

SEQ ID NO: 964007 - protein, 39 aa, Homo sapiens
TYTVCGIKEAPRTCHPMCGKTAAHAIPKLYSLDSDQKDQ

SEQ ID NO: 964008 - protein, 55 aa, Homo sapiens
MVFGCCARPDAYNYGGTLSDLGSSLIYEPTVSRTSLSYVFRAPDAPGYGGIAECM

SEQ ID NO: 964009 - protein, 100 aa, Homo sapiens
VGSSNPERLRDAATHVIRRARYRTIEHSDVPVNAWPPQASYPCGNFSDTSCLKPKRSEGSCGPAFTVCIRTENQDQASFCPSAPREVSVLPELALGHLRY

SEQ ID NO: 964010 - protein, 33 aa, Homo sapiens
ESKYLVLRIRGGMQIFVKTLQLDKTITLEVEPH

SEQ ID NO: 964011 - protein, 56 aa, Homo sapiens
PSSANTLSKATKYSASTHVKDVRSSVSPMSSGKKCGLHFLPLADYDALIKLKGRKW

SEQ ID NO: 964012 - protein, 34 aa, Homo sapiens
VKGPGDAARRACSFSTTWSADSAAIAVTGAEAIV

SEQ ID NO: 964013 - protein, 106 aa, Homo sapiens
RILGQMDFWFTQVKLERSPKCQWTEHRYLNPVPPFLIYPLPLILLPLQVEPTINKCKVRRTGLTLLSQASFSDYKLVRQKQVPCKEQSHELVIGKWRQKELMERGY

SEQ ID NO: 964014 - protein, 120 aa, Homo sapiens
DPRHKSGPNEFFICPTLCPSQLGPGTSYVGCTEVDFVRFIGKGTESIPIQGPENGLERKRWISVGFLAVLDGLGERLGAQPELQQDDSMAHVQGSRAAGRGWVCVPGELNEPQHQQPAFV

SEQ ID NO: 964015 - protein, 95 aa, Homo sapiens
MATTLAMYVSHSSCLSLTASCAKDSTFSWKCWITAFLSALGKYFDKRFSLFPFSHELEQFSLGALDSSLSLDYKEMGMSITHPQVSRDTCQRNQG

SEQ ID NO: 964016 - protein, 148 aa, Homo sapiens
RTYCSYKCLSVSHALLTVLTNAFLLRHTLIQPFMFRLHNRYQPMEPNPRVPLSRVFFASWRVVLECGIAPILRCLMATPAKLNLSNHIAVDEIRSDCLMQVMRLGLDLLALNMPRPRDHGLPGYNAWRRFCGLLKPETVGQLGTVLRN

SEQ ID NO: 964017 - protein, 125 aa, Homo sapiens
MPTYLCLQVDSVDPRIANVFTNAFLLTGTPSSKPSLSRLGNRYQPMEPNPRVPLSRVYFASWSFVLEGGIDPILRGSMATPAKLNRQNQIAVDEIRERLSERVMRIGLDLPALNMQRRGDHGLPG

SEQ ID NO: 964018 - protein, 60 aa, Homo sapiens
RYPRGRIRKLCPRYSSYRVTQLDPRIANVFTNAFRDGHDPHPTLHVPAKTIVHQSHGTQP

SEQ ID NO: 964019 - protein, 71 aa, Homo sapiens
MLGHAPIQIRYVGRAYGPSVSSLNLQVPQHRAQLAHSFRLRELTEAPPGIVSWEAVVPAALLVQMQAGPAH

SEQ ID NO: 964020 - protein, 77 aa, Homo sapiens
PAAGSCTLRITVEDSNEQVLHKARNLPSPQAEKGLPQLCLVIIDKYSKIRSTGHPGHHVHPAEVCATADLGEPACAA

SEQ ID NO: 964021 - protein, 70 aa, Homo sapiens
VTLDLSRVCNLHHSSRPRRILNPLSKARKGTHILTDTALGSYPIEPQQELPYGQLVSNLNFTCVYFSFAV

SEQ ID NO: 964022 - protein, 66 aa, Homo sapiens
SGTFPINPTSLVRLARVHRYHPQRLAPSVLPCAQATDQDAEEPNNLVDYSITHAEPANVFDIDAHT

SEQ ID NO: 964023 - protein, 67 aa, Homo sapiens
CPFRLWILTRDCGGVEQQQELILNIFFFRRSMARLWPLLGFSLLDITLEGRDLHLHVLQLMVSDMGA

SEQ ID NO: 964024 - protein, 66 aa, Homo sapiens
DIAKIGRLYKAIPFTTTALIIGSLALTGMPYLTGFYSKDLIIEAVNIYFTTILILIPTISLIENKI

SEQ ID NO: 964025 - protein, 49 aa, Homo sapiens
MWTLNREGGVEQQQKLILKHLLSSGARWPGSGLCWLSPSGFTLYEGSRS

SEQ ID NO: 964026 - protein, 52 aa, Homo sapiens
STIRESFIIHHLDSSPDMMLRSSTPDAVVLTKGDEYYFSRDGSEEEVYSYNR

SEQ ID NO: 964027 - protein, 51 aa, Homo sapiens
SGGVEQQQKLILNIFFIQALDGPALALLAFSFWISLYEGRDLHLHVLQLMV

SEQ ID NO: 964028 - protein, 41 aa, Homo sapiens
ARVVNTTLTDCCDDSPDQSTWAQRQISAAVHSYQESTNAAH

SEQ ID NO: 964029 - protein, 107 aa, Homo sapiens
CNSTCYTGISDSSLGLIRGHHNRVSPGCQSGYELSRSGTPEQSRKARMDSSECPLQLMSRRTFDATLVGRPPQPIVHGRPKPVRVGELHIAQVVHDSYVDETPGIVH

SEQ ID NO: 964030 - protein, 72 aa, Homo sapiens
PDVFTWSGSSTSPSSFWNSDMLWTHTATMEASTTLREETRNELGRQAIGCVCHPNPDLLAEFPESQHHVEVH

SEQ ID NO: 964031 - protein, 85 aa, Homo sapiens
MTPDLFNVVNGESHVSGTTTLTDCLRDSPDQSTWQQRQVSSCSGLPYATSESTTAAHYEENCPLVAWFSSRYEFEHLCHSLRAEG

SEQ ID NO: 964032 - protein, 62 aa, Homo sapiens
LYFNVVHGESHVSVNHHAYWTACDDSPDQSTWRWQRQESMCSVLPVATMESTKSAHYDRNCP

SEQ ID NO: 964033 - protein, 36 aa, Homo sapiens
YTGIWECEPVASSAGTTKSFTVDVRVGMVVSCSGQP

SEQ ID NO: 964034 - protein, 136 aa, Homo sapiens
MSLILRGTNIPLVKHRLSLRYHRRGAYTWQGQSIHGLDVGFSVDVYPRIPMATERNMKRWERPRARGLGVPIPAMCRVTFLGLNPPAPCLCICEALLGRSHLTPLYCTQQICSPPLWLLTSTIPAFYGILSYGLYH

SEQ ID NO: 964035 - protein, 33 aa, Homo sapiens
MPSPLLPPAACGGFLTKLNGSITSPGWPKEYPQ

SEQ ID NO: 964036 - protein, 36 aa, Homo sapiens
TWSWTLAPGITENSPGGEEVGGEERTQRAPVSYTAD

SEQ ID NO: 964037 - protein, 102 aa, Homo sapiens
CTWLANNCLANPKQDKRPVLYLENENKALMASWEEDGEGEWDGGSSRDLPRQHTQHEVQHKKGANDDEGEKYNQFQVFPEASLLYGGEEGKQVSTEWYSGMI

SEQ ID NO: 964038 - protein, 45 aa, Homo sapiens
SVTLGDWEGNICALIAKADCLVPSEIRKLKERIREEIDKFGIHLL

SEQ ID NO: 964039 - protein, 72 aa, Homo sapiens
  misc_feature (72)..(72): Xaa can be any naturally occurring amino acid
RPGDSTISIGQHADGGQLRLKPLVSDKGVLGSSRPDDFTVMPTPCEDPLITPVPLLENPFREKKFFCALTLX

SEQ ID NO: 964040 - protein, 31 aa, Homo sapiens
MPFLWKDPSPPDNPLSVQTRYRGAKDRGVGG

SEQ ID NO: 964041 - protein, 42 aa, Homo sapiens
MDTKGIKTAESESLDSKENNNTRIESMMSSVQKDNFYQHNVR

SEQ ID NO: 964042 - protein, 108 aa, Homo sapiens
YEDGSYPQKLSAEQACCVSMFYDGTVKIRTGVSKAKESGSHYHDSLKRIQASLINVQPQKQKASCQREAHSGSFQLRSCPRGNGLGHLLIGRWYHLSWEVQLDVALTE

SEQ ID NO: 964043 - protein, 47 aa, Homo sapiens
SVYEQLCVTIFYYGILKILTCFSYANESGSHYHNSLNRITGLLSIVF

SEQ ID NO: 964044 - protein, 65 aa, Homo sapiens
VIAVAISQISSRHRAALIRRPKSDGIAHFHQALEHVCLELCVPDDVLQLAGGRTPGIPGGRYRRS

SEQ ID NO: 964045 - protein, 38 aa, Homo sapiens
MSFKGEINLPKDYCSTDLDLDTEFEILLPRRRGLGTED

SEQ ID NO: 964046 - protein, 69 aa, Homo sapiens
MSKICVQRLNSTNHYLIVLVLRINKYKNNIKIYNQLIMTVLQMLGKLNLALICMQVCLELSEISGVAVG

SEQ ID NO: 964047 - protein, 137 aa, Homo sapiens
YEAMRLLKVKSGSGSQNEARDNVSYHQCSILSYVTTLTMPLTANPSVYNMGVSLTLPQTYCLDELTKYLTACKYLLDKMTSCRISNTIFTGHRSHVPPVECAKVHYYNTDSTPYMYHLEIRPLSCWTTFPTQSYKTV

SEQ ID NO: 964048 - protein, 38 aa, Homo sapiens
MAYLSSVSERAFPGLYSYLLQVEDHALGGSRRKLYYQP

SEQ ID NO: 964049 - protein, 59 aa, Homo sapiens
GASCCSHMDKNGQDMVDADGILELQSLKGPIPCLYYLLLQVEDHALEDPVEALPDPALP

SEQ ID NO: 964050 - protein, 107 aa, Homo sapiens
MCAAQAAVPVAGMLGVVLAPAISAHVVASCMNSRCGICLGVKLVLPACACWPGSVGSPPVQRLTRGRSPPQAVLAMGCFLAERFPSDSSRLQVDQLGTTLVEGAGSR

SEQ ID NO: 964051 - protein, 36 aa, Homo sapiens
HWSVMRQRRYWEISQEGYGHEELFVSIHGARTCYSP

SEQ ID NO: 964052 - protein, 121 aa, Homo sapiens
ATNTPPPPFLVISLARRPTTDSERGGGRRRRKNSRGLWRLGRRRQEESGEAERTAVESPSINFHARIIIGKLESWLPDSRFVSPNESERVGAQRRAAEGGGGGGSFRLYAASSNSSMLRRA

SEQ ID NO: 964053 - protein, 152 aa, Homo sapiens
  misc_feature (70)..(70): Xaa can be any naturally occurring amino acid
NLQKITEKFEISWLDSQPGPADSRPRASPPYFWAPRAGRGNFQKPGLWGTAARGRDLRSHPSRSTAWAEXGVPAGNDDGAARVHRARPFPSAGAGYTDRMSGRRYLVGGAQEVRDEVRSGKGAGESTAGALLDPCHTQKQELQRHPSRLERP

SEQ ID NO: 964054 - protein, 58 aa, Homo sapiens
  misc_feature (41)..(41): Xaa can be any naturally occurring amino acid
ARYPVDCHHRRGEDASQKTCATEIDRRETSLFSFASSSRHXAQGASLRGGEKDLREIV

SEQ ID NO: 964055 - protein, 85 aa, Homo sapiens
EGRQGRTMSGGSRFNRIGVPNPWATDRYQNRATQQEVSSRRAREASSVFTATPPLIPQQPELRLLSDQWRLEIVKELEPYGELRM

SEQ ID NO: 964056 - protein, 51 aa, Homo sapiens
MRLLVRALSRCHLRSVLLSVFPRVTPFLLFPECHRRLCSAQTRPHPQFTYR

SEQ ID NO: 964057 - protein, 112 aa, Homo sapiens
DWDLFLKSSGTSNLGCQQARNQSLVLSLYLRWLGRSISQHDGRHPVVIRQQLGSQASGPCGSMSCRFLCVKTLQNLMYTVAGICFTVVLSGHNVFKQLPAGNKVKHEVVKPF

SEQ ID NO: 964058 - protein, 145 aa, Homo sapiens
LPETCRELDFISSLLKSHPVRELKKSKGSRRSLSSRLQRLGHQPAHSAKKPYKCDDCGKSFTWNSELKRHKRVHTGERPYTCVECGNCFGRQSTLKLHQRIHTGEKPYQCGQCGKSFRQSSNLTSITGSTTVTESRASRSAHKED

SEQ ID NO: 964059 - protein, 51 aa, Homo sapiens
SSTAELDCLEEAYTTEHWLVRIYKVSQQEAAEAALVLKNGPHVSNISGRRV

SEQ ID NO: 964060 - protein, 125 aa, Homo sapiens
RGYRPKEAARRQDTEPMNTEALNDPADLMTFSKQDHDWGLLPQRRSPGLMPPYRLFNTWLVHPSKIPVMLAEVIKIIMRGGDLLNIAAHADHGLLTGLLDLQALSPQYISSVRGRGTFCSFDTPD

SEQ ID NO: 964061 - protein, 33 aa, Homo sapiens
METPGVGSGCLTTDSGPINLPTADCTQTSDKSV

SEQ ID NO: 964062 - protein, 75 aa, Homo sapiens
GGHCGQCRDSNPLPSSGKILSSRTESRCNSLDQVVIQLGSAHPGIQASNSFSIFSRYAQTISIYFSLPSADILLL

SEQ ID NO: 964063 - protein, 35 aa, Homo sapiens
SMLIGATPPSVPPRSRILGAEAWTGPRRLIGRLTF

SEQ ID NO: 964064 - protein, 52 aa, Homo sapiens
ADDDLNFSLPDIRLEEGAMEEKSMTNLNWLHESKNLLKSFGDSVLTGLPDSG

SEQ ID NO: 964065 - protein, 35 aa, Homo sapiens
RRAVATVLALGERHCCSNHASHGWRLWVLGTSQNP

SEQ ID NO: 964066 - protein, 38 aa, Homo sapiens
SLRQLYSAESTCSALSFSIRIFQEQGEKLKAYTCQTVE

SEQ ID NO: 964067 - protein, 119 aa, Homo sapiens
LIKLNARMKNSQLATGAQSHSRPFPTGPVNDNRESSGLAIQSVDQLDLIDTCPQLPTWQIYTATTPAEGTHCPAELHVTIHHQLANAELPTQGKHSQNEILSFLGGRLQLEVKCSQAQE

SEQ ID NO: 964068 - protein, 104 aa, Homo sapiens
MDRHLLVSSFSNNSQCCPITKAGLTGPTWEHLDDVGSVALMERVTAPKDERCSIPLLPVHDPYHRIMSIADDPSSERCEVFKHHTGHDAARGYLVATHDPPPRS

SEQ ID NO: 964069 - protein, 34 aa, Homo sapiens
MTKLVLPSRVPYRLGNVDTFQLRDGWQDICAHFG

SEQ ID NO: 964070 - protein, 53 aa, Homo sapiens
LKLHDALRYVHVTLHHQLSPTQNFPTSGRRCVPKRDFFLSFVVSVITGLRGTE

SEQ ID NO: 964071 - protein, 75 aa, Homo sapiens
RIPDSSRNVAKCTGGIGLETKVIVVIERGSGSYTFTGKEDTLEHVEVLHKAITLWLGTQAPHSVGNASLDSTFQG

SEQ ID NO: 964072 - protein, 167 aa, Homo sapiens
QVDSVDPRIAKVLTNAFLLRSRPHPTPYMFRLDNRYQPMEPHPRVPLSRVFFASWRVVLQCGIDSILRGLIGLLCQAESVQNHIAVDDIRYRLCERVMRLGLDLSALNMLHRGTTGSQDTMPGGASCGLPEPWNCGPAVHGLGNLNLARKLMEQYGTPNNIDLWIGG

SEQ ID NO: 964073 - protein, 63 aa, Homo sapiens
CYRILDKPPYTQLLQRRIEPRCNLHHSSRQRQILNPLSKARIEPATSWFPVGFVHHCPSGVRS

SEQ ID NO: 964074 - protein, 58 aa, Homo sapiens
  misc_feature (4)..(4): Xaa can be any naturally occurring amino acid
ILRXNPTPGHKVWWGHVQPAQDFSPHYAPNTHRRTTVALDILSMTSYILENPIAQSFD

SEQ ID NO: 964075 - protein, 103 aa, Homo sapiens
KSLKAFRISSYSIFLRHFLGSSQLKSQQSSLFPVPIPISISLHHLLKLSSFYGFNSPEALHLPPFSYFQHTHGSQLPSRIRKRSHSLPGIYLLYRTIRYSSRA

SEQ ID NO: 964076 - protein, 150 aa, Homo sapiens
SLQFGLLGSILTCEIEICLLGKPSSEAVPKPKRAPKQKKVVEAVNSDSDSEFGIPKKTTTPQGKGRGAKKRKASGSESEGDYNPGRKTSKTTSKKPKKTSFDQDSDVDIFPSDFPTEPPSLPRTGRARKEVKYFAESDEEEDDVDFAMFN

SEQ ID NO: 964077 - protein, 67 aa, Homo sapiens
MTILITEIVFKDICIGWHEPGHVPRKHGVKGRSRRDICRVKWNGCVSRFRFLCLFQVQQGRCKQSSI

SEQ ID NO: 964078 - protein, 134 aa, Homo sapiens
KKRRVVGLLASYIPEDEALMLRDGRWAGAICSHRPVLDTLAMLLPTVQFLQRFYGKKQPVKERKQSAKHQNELRRDETKAEAPLLAQTLLITQSATHRAPHYNSCCRRKYRPEALGPSVSLSPMPPSEVKLQSG

SEQ ID NO: 964079 - protein, 46 aa, Homo sapiens
EFRGGSTARGLPEIYVGAYRWSAWFFMIEAPHQEVLTSQMCSEYQV

SEQ ID NO: 964080 - protein, 61 aa, Homo sapiens
MTITHAALSHTYLSKSPATVAAQRSLGGDVRGVPRVVIHDTLALMKSEWLWLFSAFSRTRE

SEQ ID NO: 964081 - protein, 52 aa, Homo sapiens
SLLFVSKLKLRTHSQSHHNPLSRTSGVLMLLEPHGVRYSAPLVYDAHVWGLG

SEQ ID NO: 964082 - protein, 38 aa, Homo sapiens
NDCVMNEDELSHGKQILMVMVKLDYEEFVQMMTCKVRG

SEQ ID NO: 964083 - protein, 46 aa, Homo sapiens
KVLGPDDSTKDGQKGIFLGDDEWRETAWGASHHSMSQPIMVRIKIL

SEQ ID NO: 964084 - protein, 46 aa, Homo sapiens
AGPEHDTDTHRGAKPNPEQREATPTATEWLGLPRHHDGQGLLKRLL

SEQ ID NO: 964085 - protein, 117 aa, Homo sapiens
MEQPIQNEEKDRPLLGVEVHQPAGNRRRQARRLAPNFRWAIPNRQINDVMGGDGDDIEIFMEEMREIRRKLRELQLRNCLRILMGKLSNHHDHHDEFLPYALTPAIYHEINTVIPAG

SEQ ID NO: 964086 - protein, 53 aa, Homo sapiens
DELAPFHPVVHAVPVTSSGFCEHCAELQIPVKLEPRVAMLLAPCGLPARASSR

SEQ ID NO: 964087 - protein, 87 aa, Homo sapiens
DASTAAMNPEYDYLFDAAFDLATQAWAMSCLLLRFADDMYSRESYLSTIVDGSPMIRITRAGFVITVLPVEDSRDHRSAAKCNRVPQ

SEQ ID NO: 964088 - protein, 45 aa, Homo sapiens
LPRDYQMLHAYQLHTYFRSNPDAGPLKSVADKVSERLEKNPSPEI

SEQ ID NO: 964089 - protein, 44 aa, Homo sapiens
TSSATLLCSPPAFLLPCCDVQAFAVLPNSSLASLFLIGMKGLDR

SEQ ID NO: 964090 - protein, 81 aa, Homo sapiens
ELEHFISELHAHRGLIAGLVLFGAVITGAVVAAVMWRRKSSEKEGATLRLQAVTVPRALMCLSQLVKCETAALCGMKGLDM

SEQ ID NO: 964091 - protein, 51 aa, Homo sapiens
FISSAFMPIRKREASEELEEDGKGLDIHGRLECKAGGLHMTGGGGMKALDM

SEQ ID NO: 964092 - protein, 88 aa, Homo sapiens
NINASWDGWLQKQLAVRDSEPPCARGATITFTPSQHGSRNNSSTGFYCCEGKLTQWNRARLLRAVPLIKFGCILKIADLNKGMTGLDM

SEQ ID NO: 964093 - protein, 121 aa, Homo sapiens
SISSGSQSGQPAPWNSYPTSMQPVADTRTEVRADDYLHVALDLLERKLRSLWRRPFNVTDVQTPAHLNVESKSSGCALPGRGGDLPGSQDRNTRTITGMCNNIRRPTLRASNRAFVHWLPA

SEQ ID NO: 964094 - protein, 84 aa, Homo sapiens
STWYTFSWAGVSTSMTLNGLRHRDRSFLSSRSMNHVQVCQRPSPPSWLAATGLLECRIGMFHGGWREPAANAVCLSAFSCRSPG

SEQ ID NO: 964095 - protein, 70 aa, Homo sapiens
ECPDGREVILCVQRVSSPSARDTGTVDLSVHGLSYAAHGTTSDKVLVWARILTHHEGMINKATFPFPPSS

SEQ ID NO: 964096 - protein, 48 aa, Homo sapiens
QGPRETGLHSQCSLLWNLILSPAAASLGGPAGWLCLGSVACCMDCALL

SEQ ID NO: 964097 - protein, 111 aa, Homo sapiens
PYKGRCDVIRILKSNNPCDNHCLNAWMALEQVYGSVCELYMDAQIKFLNTYQNPGRKIVCLCHSVWSLCYKNGGREGCAIDKDNVNQCPPRACVIDGAKHMCAILNGMLLS

SEQ ID NO: 964098 - protein, 99 aa, Homo sapiens
RLATHRGSPEYKADSDKKSSCDLVSALKLTFLALRSALPVPNCRRVASASSSSSLCYLLTDLHQQLKEDVGLDLPQTPVSHSCQRNGPAVVGPGNDLII

SEQ ID NO: 964099 - protein, 51 aa, Homo sapiens
TAVQRCGKFSGRLPPTWRDFRSLEASMTLPAVAPTLAQPQTHQHFQTPGSH

SEQ ID NO: 964100 - protein, 38 aa, Homo sapiens
DPPYNTRKHAHGQRGAWRCSSDPPALSLCVTARTCVVA

SEQ ID NO: 964101 - protein, 73 aa, Homo sapiens
  misc_feature (29)..(29): Xaa can be any naturally occurring amino acid
YRPDCREGSKSQVPDLDKRKYLVPSDLYXLAMFYFYNPDRESTCRPVGRHYSSFVNNTIPSHHVLTTGALYVG

SEQ ID NO: 964102 - protein, 37 aa, Homo sapiens
GGTTYVVVLCTGCETRTGVEFASSSADIPCQGIILGL

SEQ ID NO: 964103 - protein, 119 aa, Homo sapiens
MPCLLLSGFITPKSTPSKSSARAFSPLLPCLQELRGPSWCQDFLVHASWPLLRSQDGVQVPDGPQCVPWGSVEQSGRASAWRKQCLQSSWEQARWQLIRDLPTLPVLELPSPRSAGPCT

SEQ ID NO: 964104 - protein, 59 aa, Homo sapiens
RGTQREARWLHTDRHMLHTSSVPHRMCPHPVKMLVCLSSQPTLCQCILPVYPSVYNYTY

SEQ ID NO: 964105 - protein, 59 aa, Homo sapiens
ETGLHSQCSCHIDLVQCLPHETGIPITLCQCSVALSARLVAVRCPAVCFPMVFSWLSLW

SEQ ID NO: 964106 - protein, 30 aa, Homo sapiens
MRALDLVYENMWMSNNMYLKTVDKCTEWLV

SEQ ID NO: 964107 - protein, 64 aa, Homo sapiens
MGLRLVAAGAMHPLRRATVLLAVPPALVPAMPSWPSPGDCCSSVTGGWFHEVATSPGSSVGRCG

SEQ ID NO: 964108 - protein, 52 aa, Homo sapiens
RTRPAVEVAPAGVSYNPSFEDHQTLLSAGPRGGVAAGRSEAENAGAAVWPLP

SEQ ID NO: 964109 - protein, 74 aa, Homo sapiens
RYKAPQESQEDLASSENGTECRSGFVRHNGSCRVSVLTIFPMLLVTSGWPGATVCGRTYGCLLQCATLQDYYLA

SEQ ID NO: 964110 - protein, 99 aa, Homo sapiens
MARPAPKEDCVCLMSDGGVSIAACSVYHMELAHWMADFTWGQLLSNCTGHLHLKNCAHTYLDCRCLNKYFTQMHVTPLNGCITLIALTCALACTVFHPL

SEQ ID NO: 964111 - protein, 73 aa, Homo sapiens
MGVHAILILGLMSGEWHTLWLVANSCNNDWSDNGYLQNTQRTGSLWNRIRSGGWNSTHRSVLGKDLVCRVALY

SEQ ID NO: 964112 - protein, 115 aa, Homo sapiens
LRGSLLQGTLSWCPWAEWTGACGTPAQWPADGCGHRRRQTSSPVSARSPQSRTRPRPFLSLAAPKAYRSPWPGIESEPQVIPRHKLQQLPGPIIHLHHKQQPPTLASIKRLRLAE

SEQ ID NO: 964113 - protein, 114 aa, Homo sapiens
MRLCVVVPAFLIQDVELVGLLLSIHCCPPGLPGMNSHWGLVIAGLSLPAMRTIAEAPSQGQVHSELWIVLGRRITYAGAGDYSSLQLPQGPRRSGSERVTSLGALLRGYLSVAF

SEQ ID NO: 964114 - protein, 120 aa, Homo sapiens
YKAPHGKSCVDTPPAWKTKLLVTGPNARMVSKSKDGTGSDDKKAKGADGKTKITITAGGALYAYKAPRGGAASWLKMLRWQGRPGPALGLAWGHPGDREDPRGYPFGEWSFKQFRKLPNF

SEQ ID NO: 964115 - protein, 141 aa, Homo sapiens
MRNGVDLLRRNRAQGRNGVHVDDYGDVQEMKSFMYCPGSMGCPPTAGWGMGIDRVAMSLTDSNNIKEDFLSPAMQPDHEKVECSQATDITGKQQRGRHCCLEIVIGKVYNSGVSGELREIKVCKGSLVCCVSIVTPDVRLG

SEQ ID NO: 964116 - protein, 39 aa, Homo sapiens
RVNVTVRPGLAMAAERVHRALLRSCPSPPSGVVGTCRGQ

SEQ ID NO: 964117 - protein, 67 aa, Homo sapiens
PANIGSGSFIEEQARTRLQVMMRPCSETENLMYCPVNMGMPPNSMAGCMGIMNRVASVSHGTPNNIK

SEQ ID NO: 964118 - protein, 45 aa, Homo sapiens
SPAEPSWSTDQQGLIISWPPAYGEQWGLGGNLADPTVALGEKGAQ

SEQ ID NO: 964119 - protein, 66 aa, Homo sapiens
ILMPSSLQTPQTQEQNGILDWLRKLRLHKYYPVFKQLSMEKFLSLTEEDLNKFESLTMGAKKKLKT

SEQ ID NO: 964120 - protein, 34 aa, Homo sapiens
MCLTVPCCVTCCGLTLTRTVQGWRARTDLCAYSF

SEQ ID NO: 964121 - protein, 35 aa, Homo sapiens
MQDPSHICNLHHSSWQRQILNPLREASDQTRNLMV

SEQ ID NO: 964122 - protein, 84 aa, Homo sapiens
KRNAAPNFPFIPPVDVLVILQTSSVKSVLRAELTLTLGKHFRDSENQLLYPQDICDDPRLIVGNISNHQLIQGRLGHKPMVSAF

SEQ ID NO: 964123 - protein, 82 aa, Homo sapiens
KTNCGRSMNQLFLREEKKETRQIDLWSRTCGLCSGFLDRLGLSSTKEHEEGGSCWMLVGTQDGFLRKDGHIPITNGGSAERS

SEQ ID NO: 964124 - protein, 50 aa, Homo sapiens
MIPKRYIGPNRGPSSKTAKNPLLGAAFCKGKPCSGIKPQPRCSLAQDRSA

SEQ ID NO: 964125 - protein, 68 aa, Homo sapiens
IAEKNERLLGSSRLFKELGMLVNTGQLPACSPREHAGALRADSPKQSHMKNSSNHNTISTPNKWINIL

SEQ ID NO: 964126 - protein, 74 aa, Homo sapiens
SEHAAREDVSAPRGTEELLTSAEWWAGSLGPTHQATVTIVAEEVVCTPTGRNDFVHLVDPWDWENGWQQSLLKA

SEQ ID NO: 964127 - protein, 63 aa, Homo sapiens
SDMRQANMRGLCLPPCLTALLPMPFATATSLWEEEEALSDFYLCSLLASGTAALACVFLGVTV

SEQ ID NO: 964128 - protein, 117 aa, Homo sapiens
ALPCVDKHSKLFEDAWGPQLSAHSSAEIISSVSDVKYMPHAVANMLTRGLPYSQGLGPEHGGKTHIDLAGPCTYLRSELCSLYENDCTLDKSDCAWNGSDSVIMTGAYYNYFRMSAC

SEQ ID NO: 964129 - protein, 37 aa, Homo sapiens
MRAAALCDNAFQCSLKSLSDPSNLLILLGNHLLRVLT

SEQ ID NO: 964130 - protein, 99 aa, Homo sapiens
KRYAGGLTDHAAAEWWLCEVAVGLAAMHKLHFLHSDLALLEIVFSPPDLNCEMWEIYWNSDSAVYNGGLYMKHDDNKSLPLCEWTCSMNYVSHAFNDST

SEQ ID NO: 964131 - protein, 55 aa, Homo sapiens
MSGAVAVNVDDTCFPWSVLLQSVVTSLVFSVYICRPRDAYYTGIKYIALYNIIYV

SEQ ID NO: 964132 - protein, 116 aa, Homo sapiens
QRRTGSALCDKHSKLFEEPEDPSKRSFFSVRIISSRVRREVQPQWLYYMLTRDYSYEIKVWYLNMEARAIETYQVHDYLRIKLCSLYDSDCIFQQVLMCLDAGADSVIMTGAYNSF

SEQ ID NO: 964133 - protein, 57 aa, Homo sapiens
MSVKQMDSLTWQIGLDHKHRWCCASWTPRTLCARFLFKYPVRCHLTTVLVDTLISHT

SEQ ID NO: 964134 - protein, 113 aa, Homo sapiens
MRRCGNRSRFSFPVGTYILVNQICSHMVIYYLKKKSGVPIVAQRLMNLTGIHEDAVQSLALLSGLRIRRCCKLWCRLQTQLGSRIAVVEDGDYSSDWTPSLGTSTCHKSSPAC

SEQ ID NO: 964135 - protein, 180 aa, Homo sapiens
MKEPQVSRLILRRKSVSSVLRRDSSATAVATLLTRDYLTVKVWDLNMEARPIQTYQVHDYLRSKRLFPVRERAAFSTKFELCLERERLASSCPGPYNNFFRMYDRNSKRDVTLEASWVQQLAPELLLMPRCVCVGGKRRRDDISVGSLDFSKTILHPVGHPAESLIVIVATWSLYIFQDE

SEQ ID NO: 964136 - protein, 67 aa, Homo sapiens
SEHSAYLELPGIHDILEPPQLDTDGDLDGGRCKILLLLTGLQLHQHLVELMGRASAPTVSAPRSVRL

SEQ ID NO: 964137 - protein, 68 aa, Homo sapiens
GDSRGPPDLTPRASLCSLHHSSRQRRILNPLSKARYRTHNLIVPSRICFHCGYDRNFSVISFLKIVLE

SEQ ID NO: 964138 - protein, 33 aa, Homo sapiens
MSHSLSMGYTPWTSNGWEKGLSAQITCGGVVMC

SEQ ID NO: 964139 - protein, 63 aa, Homo sapiens
  misc_feature (32)..(32): Xaa can be any naturally occurring amino acid
VDAVSAPVLGTSPGSFEQVCFAAPLNFPGASXHNEIMHVGRKVSQARWKQAARTCDKGVLCWS

SEQ ID NO: 964140 - protein, 91 aa, Homo sapiens
MTAVPANSGEEREEHELVESMVVLEEAGSISDRGPCVIHHKMPLSLGWQWLGWSRWLEKVRVVDRVPLAASRGVRDADLCNVMKLGHLKIP

SEQ ID NO: 964141 - protein, 61 aa, Homo sapiens
VGPYPEDTVHRDYHIHMNAAAATLTIHLQDGMVTNTMPHSLNKDHPEHPVTRKYQVVACHN

SEQ ID NO: 964142 - protein, 109 aa, Homo sapiens
MTTSTETINSHEAAAATLTIHLQEGLGTKHKPNYAQAKSSRNTTDPKVSLVGIAKYFLVNVPQQSTTLNLWREETTTMCKDSITFGGKCAGKKSASFLLWLNVVAMRAV

SEQ ID NO: 964143 - protein, 64 aa, Homo sapiens
AILEPGISSEHIWGESSRWGDSERAVSGNAVDGVGLMLQTLVLACMCLSTEPLDFVVREACMVC

SEQ ID NO: 964144 - protein, 50 aa, Homo sapiens
LIRAESAIYITAHGNAKIVNPLSKGGDRTHNLMVPSRFLDHCTTTGTPVG

SEQ ID NO: 964145 - protein, 41 aa, Homo sapiens
MGVPQAGGQIRAVATGLHNSHSIRDSEPYPRPTPQLRAIRD

SEQ ID NO: 964146 - protein, 71 aa, Homo sapiens
PNYSYTTATAMPDLSHVCDLHHSSRQRQILNPLREATDGTRNLMVPSQIVFLLRHNGNSPPSLFFNTAFNP

SEQ ID NO: 964147 - protein, 192 aa, Homo sapiens
GLPEAPALLQWRMLTVEADDSEHKYSSTPLDWVTLETNIAYWLHPRTSVSRALVRAELSRAPDSRDLRSSRRMVTEAQPCDVFPNKSLGLASSECFGGVGPQLPHSQGVRSQRLCRSRGTELHCRRGSTWFRFSGKCGLVLLFGAGCIVLFCFVSLGPHLQHMELPRLGDCIGAAAAGLHQSHSYTRSELQF

SEQ ID NO: 964148 - protein, 74 aa, Homo sapiens
NGLSLQDLYCRAVVSCTVPVHLVDKLPLPIALRSHLKSFSMCQRAMNASDDARVVPTPLTTMLHHTKWSSLLQM

SEQ ID NO: 964149 - protein, 104 aa, Homo sapiens
PEMLLSLNRSTLTHTVIPATSGHEGAATALVLHFQETLRTLALLLGQFAKNMTHALQSHIVAVEIEALREQRRREQWLAGAKAGLVDSAFQLHSWDNRKARRVR

SEQ ID NO: 964150 - protein, 42 aa, Homo sapiens
MVKQHNVEAELPVCHKEKEFYVSENALKEVMLINYYTLSRED

SEQ ID NO: 964151 - protein, 65 aa, Homo sapiens
LSLFPTVTAFIGFLSGMNSLVDYKVSVVNEGFTTFKAFVIFLPWGRCLMGDDHLPEALPPGGEAQ

SEQ ID NO: 964152 - protein, 56 aa, Homo sapiens
RVLTLVTWCTAPAPIALRSHLKSISMAKDLNARMMHGGSYSLTTSTTHKRSSLRKV

SEQ ID NO: 964153 - protein, 58 aa, Homo sapiens
GRLSSTALDYGSGDEDSKSEKRKNKDPLYAKMEERFYRYGIKPEWMMVHRILNHRCVP

SEQ ID NO: 964154 - protein, 44 aa, Homo sapiens
RSELRCGTVVDESDYGTMRLRVRSLPLLSVAMSCGVGRRRGSDL

SEQ ID NO: 964155 - protein, 84 aa, Homo sapiens
VPVPEFLDFASLGVSPEADVLVVAHPADAGTSLVPSVPVLRAEGRELVKGFSSGRLAHTRQCRDGLTICRQQDGDEGVHSLFGC

SEQ ID NO: 964156 - protein, 70 aa, Homo sapiens
EILISGRQGREPELPGLLPLPGASLEYTEMRSNCRSLGPVVSAGGVDAMFITDHLPELGTDLVATLTSLD

SEQ ID NO: 964157 - protein, 150 aa, Homo sapiens
  misc_feature (139)..(139): Xaa can be any naturally occurring amino acid
SGPQWRGPKPAFGQEHEQLPKSQAEPLSGDKEPLADTSSNQRKKFKMQSAAFSIAADVKDVKAAHSNENLSDSQQEPPKSEVSEGPVEPSNWDQNVQSMETQIDEAQAVTQPVPLANKPVPAQSTFASKTGGMEGGTAXATSSLTADNDF

SEQ ID NO: 964158 - protein, 80 aa, Homo sapiens
EDTVNIATPMTSHCQPAGSIIILPEGQTSKTSPVSNHSVSSTNSAGRTINNEDNFHSAKPMTLNITVVITSFFTYTCNTG

SEQ ID NO: 964159 - protein, 64 aa, Homo sapiens
VIRKYSHWKSVDYWKISHILDRTGEEVLSGVSSYQDSLLKAIVVTQGAQTRHSQIAKTFILDGH

SEQ ID NO: 964160 - protein, 86 aa, Homo sapiens
YRTVGHLSGSHGYVGWHGSGDQTSGGCSCTYFTPIGKSPCMSLEQPGDPHCWLRILGTLPAVWMSLGGRVLASMPHLVVGYRCSNI

SEQ ID NO: 964161 - protein, 68 aa, Homo sapiens
QWGMQLVHREAELVEVDVDVDQQVTSGASGCYSQPQSKRMCSMLAWTMKQSCCRLAGLQNKTQVPMVV

SEQ ID NO: 964162 - protein, 41 aa, Homo sapiens
MTFLYVNVSIVLGFLSYALWPITVVQYCQRVLSWLTATALC

SEQ ID NO: 964163 - protein, 50 aa, Homo sapiens
PLPWIPVAQQPALPSIQLGRESRVCQQGLGPAWLPASVMGTSCLSRHLLC

SEQ ID NO: 964164 - protein, 41 aa, Homo sapiens
QWCMIESRPSTEGVTQEGGGEGDNAPVAGARWPWDHFKLET

SEQ ID NO: 964165 - protein, 74 aa, Homo sapiens
ADHGVAGQGSAERRAVREEEVHAGLGELLRSLSNSTARQCDLEAGQPDCKDPSSVSFADDFVRRGKQHYNCEHS

SEQ ID NO: 964166 - protein, 69 aa, Homo sapiens
MGGGWLRIRPPGSAVCACVAMEHRHIEKLVMPSTQRPMVDGSGEQSSTFAITQVCPQSPRHRGTRSHRA

SEQ ID NO: 964167 - protein, 74 aa, Homo sapiens
KAHDGRPPEPRHQWTGAQHDCGACTWRTCTARTKDEDLFDIEDDIIYTTGLHGARTGPRRGGHVTSGRAIVRLR

SEQ ID NO: 964168 - protein, 33 aa, Homo sapiens
ASWRAWFVEEGAWCSLTIAEPGHYLPMCRKRTM

SEQ ID NO: 964169 - protein, 89 aa, Homo sapiens
MARTYRREALQVPPLPYMPVEILASLKRTWSHPLLVTNPLRCSLLQLPASNHEHDTSNCHMLLAHMARSPIRCATLRHIPLVHVGQHYN

SEQ ID NO: 964170 - protein, 63 aa, Homo sapiens
MARTGEKGEFSRPQCWLQCGWRHCFTLETLQLPVLRVTVDNWCSHITMASWKPWPNAMPMGNT

SEQ ID NO: 964171 - protein, 35 aa, Homo sapiens
YSRGPQKAHDGRPRGPVSAVTVWGWQHEGDGVVWM

SEQ ID NO: 964172 - protein, 89 aa, Homo sapiens
MARHAGAQSLAFCCSAARHTRRQLTMDDDIAALVVENGSGMCKAGFAGEDAPRAVFPSIVGRPQAPGRDGGGMGQKDTYVGDEGPEQER

SEQ ID NO: 964173 - protein, 46 aa, Homo sapiens
GSRSARWRAHEPFSVTEDYPLHPSKIETQLVVGACLARVATMHIDP

SEQ ID NO: 964174 - protein, 53 aa, Homo sapiens
MSASTLMRRACSVSTLVFGSHLQPEERCQICEDNPGRSQVVAPENLVPQVLRW

SEQ ID NO: 964175 - protein, 60 aa, Homo sapiens
MPACHWFERDEPRHNVWGLSLFKPSRSRMVGPLTNLHNFPPTSGLQFLLCKASGHSHSLV

SEQ ID NO: 964176 - protein, 67 aa, Homo sapiens
CHSCSEDPGVPLSGDANKTDLTYQYYRMPTRGKSGLAMTMHISYQLQGMVYTARAFWGGHGVDIGHG

SEQ ID NO: 964177 - protein, 127 aa, Homo sapiens
MKPKNPEFTSGLAIASYRLDDLPPSYNAIDPLRQAIRLNPDNQYLKVLLALKLHKMREEGEEEGEGEKLVEEALEKAPGVTDVLRSAAQFYRRKDEPDKAIELLKKALEYIPNNAYLHCHIGCCYRA

SEQ ID NO: 964178 - protein, 68 aa, Homo sapiens
MKAMIQCFTLLNMRLFVFLLTSGTMIDSGLYYAGLLCTKHEPYSVAVPGAVVKEDGALFPCEALRVPS

SEQ ID NO: 964179 - protein, 58 aa, Homo sapiens
VLAGLADDALARSRSCRDAFLYEGTKVGIAMPWDAKYNEKEILRLQNGLEIYQYLRTY

SEQ ID NO: 964180 - protein, 128 aa, Homo sapiens
RTGDLLKAASINVNISANKKRLGRFCGPLGSPLSNPPEKRRNYMSQGNKMLLSFHTDFSNAENGTIMFYKGFLAIYQAVDLDECASRSKSGEEDPRAQCHHRVSLTTSEAYFCLLPPGYELHEDTLPC

SEQ ID NO: 964181 - protein, 34 aa, Homo sapiens
AGAQTDPFDGGHLCTLTILTSYECEEMKSSNLTK

SEQ ID NO: 964182 - protein, 79 aa, Homo sapiens
SRGSGDVIATLTLSQRTEAREVNELPKSQRARNRDGLGALDLWLLLSCSSWSWQMDTSVTCDDGETAGPFRGSHLKVGI

SEQ ID NO: 964183 - protein, 61 aa, Homo sapiens
MNLISRREEGEVTDLEEGMITLGEEAGFRNTFCDCVPIAQPCDVDHRRKDVVHKTDEGVGD

SEQ ID NO: 964184 - protein, 95 aa, Homo sapiens
  misc_feature (14)..(14): Xaa can be any naturally occurring amino acid
EVLMYSPHMNDTTXNSTTADHDNFHHGISAGFMEKQIRDPEKYQEYRLILLETTGYVMAQIDGLYVGAKKRAILEGTKPMTLFQIQFLNSVGDNI

SEQ ID NO: 964185 - protein, 45 aa, Homo sapiens
  misc_feature (7)..(7): Xaa can be any naturally occurring amino acid
MKETIIXLCWEPNGSKFAVLHGEAPRISVSFYHVKNNGKIEPDSL

SEQ ID NO: 964186 - protein, 42 aa, Homo sapiens
MKRHHSFAGTNEVVCCAARRGPRISVSFYHVKNNGKIEPDSL

SEQ ID NO: 964187 - protein, 38 aa, Homo sapiens
  misc_feature (2)..(2): Xaa can be any naturally occurring amino acid
MXETLIAFGWEPNGSKFAVLDGEAPRLSFFFYHGPKQR

SEQ ID NO: 964188 - protein, 136 aa, Homo sapiens
WVTWAVPNISGPPCLLLERYNSFYLEDPYFPPKVDLQVSQWIVGEQHVRPGQAATRSLGLARSPRSPLSLEVGTPLTALEGLGDEVVVVGQVSAAVGTAIISGGQSIPGRPENVLVDDIKPGIGFARGNRGSKFRN

SEQ ID NO: 964189 - protein, 84 aa, Homo sapiens
DLSYRSSWQPSDVRYDIERSVTREASERVNDNDEMVESTEESSRDCMWSLTVEEKNLLSVAYKNVIGARRRSWRIISSIEPDSL

SEQ ID NO: 964190 - protein, 59 aa, Homo sapiens
  misc_feature (32)..(32): Xaa can be any naturally occurring amino acid
  misc_feature (38)..(38): Xaa can be any naturally occurring amino acid
WYPCMSPTNTSTSDNRQLKNIWCDHHLDRIRXWFWTKXVRMRKDCNARSTVAATLNRIA

SEQ ID NO: 964191 - protein, 43 aa, Homo sapiens
VGTVRVIDNNCVSSGQIDFEAPSSSGKQEAELVSNRCIEPDSL

SEQ ID NO: 964192 - protein, 30 aa, Homo sapiens
MMYRPTPDRVFGHHPTENLRFFLVFCILFI

SEQ ID NO: 964193 - protein, 49 aa, Homo sapiens
MQWRTNSHSGLCQKAVYTSSANFKPRPCFDFAHLPVHGEGLDVYMSVVK

SEQ ID NO: 964194 - protein, 176 aa, Homo sapiens
CFGGIVILTVLPGASGAGHRVRWGRCVLRFGLLGSVATGEVCHKIWALCTVGLCYVVSASVVMSSTLLSTLCVAGLVIHVACLGLGVQAAGVVTVTMLLYVCRVLRTVRQLVKVCTPLVRVPEFHDSVTGSGKFSLIRQTRAAVPPYVLLEEGALGKTDGPLVEAEETMTRVPWPQ

SEQ ID NO: 964195 - protein, 183 aa, Homo sapiens
MCCCTPRCPVYVLLFCSALGFPRPLGALLVLRSRIPTHLVAPSTYVEEGTTKSEVFYPGETVVHWCLVRQQLVCVGAKHMDACEYGRGVIPSILAFALADMCLQHPVTSSPSFYTLRSYARGLRLELSTYLFGQEPDQPGLKEDLRLERSGQARTFHLLEPMFTDRDIHHADPEFLLYEQGYP

SEQ ID NO: 964196 - protein, 36 aa, Homo sapiens
RSHHSLKSRPKPPSLICASWGHALEGVCCGELDAIA

SEQ ID NO: 964197 - protein, 35 aa, Homo sapiens
MPERKGYCCVRQAPVMPTTGARCIQLDRHMGSSWV

SEQ ID NO: 964198 - protein, 71 aa, Homo sapiens
LHAKVICDCCNGPVVVTRYKCSVCPDYDLRSVCEGKGLHLWGTPSSHTPAPSGTCLSGILAQPAWIRQGET

SEQ ID NO: 964199 - protein, 60 aa, Homo sapiens
MRYTSIRCTFLTLQCTQWRRADSLSRKSIPASELFSRRVPSQVWRADAILAMLPSIVNKD

SEQ ID NO: 964200 - protein, 175 aa, Homo sapiens
NAIGSGNDLDIILRFAIQDISVEETWQGMGSFSECQSKDGPVIQNCHMCMNYPQYSLEGIGTCTSHATDPRGTDTELDVSMTMLRKDEPVTNLNNAFEVAEKYLDIPKMLDAEDIVNTALPDEKAIMTYVSSFYMPFSRSAERLKLPPSGSCKVLACNQENEHLMEDYETAGRDL

SEQ ID NO: 964201 - protein, 35 aa, Homo sapiens
LIPSCTAEVCDLNVPVLYSMRFSSLRSRCTTFYYV

SEQ ID NO: 964202 - protein, 44 aa, Homo sapiens
IDNNRLRKKYSTLLTKCARRLAEVPVGRSVMEVCGHCTGSLLSL

SEQ ID NO: 964203 - protein, 39 aa, Homo sapiens
SGTRLLALAVHVTQPKDGGFCEVCKNAGGILGSPGYRSS

SEQ ID NO: 964204 - protein, 48 aa, Homo sapiens
  misc_feature (6)..(6): Xaa can be any naturally occurring amino acid
MRIPYXPRRFFILVSTMDEISSGQNALVLPACMLTVHLVPCLRLLITV

SEQ ID NO: 964205 - protein, 63 aa, Homo sapiens
TLEDPDENIKITLVDSRTSEVKELRSSRCLQFRSIAGNPCSVNFVSSSTKISIGSCMNLRQTG

SEQ ID NO: 964206 - protein, 36 aa, Homo sapiens
LDLLHIWACSVTMLPQFSHLLQQFGAMQLEGPTHMT

SEQ ID NO: 964207 - protein, 34 aa, Homo sapiens
LEDPNKLNGNVRFIHCPTILGLPAAVLIIRMSPS

SEQ ID NO: 964208 - protein, 60 aa, Homo sapiens
ESTVSPEEFSKFISDAPGCCRLDGCIPHPPHGAMPWSLTQALKAVDINEVSWFLVYIQRP

SEQ ID NO: 964209 - protein, 94 aa, Homo sapiens
RIDGFSAELQTRSRPPRTPAQYPMTGARGRGLEVERSPSPPLALSCSNSTRSLLSPLVHQSFQFDEDDGDGEDEEDVADEEDVNEDAHDTEAKV

SEQ ID NO: 964210 - protein, 34 aa, Homo sapiens
GYTLAAVHQRVCHLVEARLLVKVPHPTLEGLCKG

SEQ ID NO: 964211 - protein, 55 aa, Homo sapiens
IADPLLSRLALSPLSTPLPAQGSHWASGSGQLAKSGVPHHPPTEPSCHCFYLDLD

SEQ ID NO: 964212 - protein, 136 aa, Homo sapiens
  misc_feature (65)..(65): Xaa can be any naturally occurring amino acid
  misc_feature (75)..(75): Xaa can be any naturally occurring amino acid
MPLICDRTQDSRQAVCRVVCIRETGTHAHAELGRVRIVLALAAVVALVGQYDTMDEEAVDVPILXHGQARVVGQXLPSSHPAHGPRCTHSACLHFETHVLAFLCPHICNRRRNSSSVSRTWSRALVAVLPARKVTV

SEQ ID NO: 964213 - protein, 45 aa, Homo sapiens
MVMTWRQAVVALLQGRSWKQPWPSLARSPGRRSTVSSLMSRTISR

SEQ ID NO: 964214 - protein, 32 aa, Homo sapiens
MKGDVGTPVLVWHSVIPILISEAGEAAEGPVV

SEQ ID NO: 964215 - protein, 39 aa, Homo sapiens
GSDVNDVRQESEEVSCGRRGASLQLGLKLGKLLKVIFCT

SEQ ID NO: 964216 - protein, 37 aa, Homo sapiens
TVRRSSRGSRIQECEDPPWPCLPGWGGSQLFTDLEVI

SEQ ID NO: 964217 - protein, 42 aa, Homo sapiens
MASHTEPSESSPFSQQAIDSVAGLVEVFGGVGHPTSGPQALA

SEQ ID NO: 964218 - protein, 80 aa, Homo sapiens
MPTAKYLINKRRITTQRLTNQTNRRTNDNHTQRLKDEPELLYIVSLIIYIASDYTSSELLRLLIYTNQPTIYEPSHGPSG

SEQ ID NO: 964219 - protein, 113 aa, Homo sapiens
RGGTAGPILSLPRTLPPSPPPPCVCNDLFLSSVRYLGFHLSCPCSSQIQIDPCMPYRHQRGPPFLPLYLFANSYAFHSHSRGIYVSHSDALIQVIGINGLPSWAYRHANITMV

SEQ ID NO: 964220 - protein, 36 aa, Homo sapiens
MSWSDGHVYLTLETPPSSIFLLLCCSRVQNQQQGLQ

SEQ ID NO: 964221 - protein, 53 aa, Homo sapiens
AGPPFRWPCFPGSPGGLQHQEVWVTCLFQCQPVSPNVSLTPLPPSEVLEGQGG

SEQ ID NO: 964222 - protein, 100 aa, Homo sapiens
RTDGHALLSAHSIRRKGMKVTCSTVKLIWCHTLPSSEGESSCSTLLCCALCLLRDAILLAPDFMPCGHLGLCMVPSGTGWVIPLDVDPAVHCNALATWPV

SEQ ID NO: 964223 - protein, 39 aa, Homo sapiens
MYEVQLPHISWWHLCARQCVLGLLIAEWAWSSMVPSGRG

SEQ ID NO: 964224 - protein, 49 aa, Homo sapiens
RPRLLMAMCLFDHIFTCICDHAGVILKIKMPAACWKPDSSMTCGIGYIP

SEQ ID NO: 964225 - protein, 61 aa, Homo sapiens
MLVPRPIAMGCCLCCADCSFSFCGCWPQLCAWDSDSAVSTNQYILVSLPFISADHGAIWDG

SEQ ID NO: 964226 - protein, 48 aa, Homo sapiens
RVSSRLCSGTSVSDTGKVVSRILEALHEQDLGPALEWAVSHRQRLLEL

SEQ ID NO: 964227 - protein, 75 aa, Homo sapiens
LPAVDLEDPVGSYESLLEYLAPQSLGLARRFFCSAYILRIYSIPSSQYLIYQSNNHQPYMTNQGNVRKYCYPARN

SEQ ID NO: 964228 - protein, 52 aa, Homo sapiens
RIRTGKRRLWRLAAAEEEVVAVATGACEPLGGVPEITYTVASLISVGLVIGK

SEQ ID NO: 964229 - protein, 36 aa, Homo sapiens
IFYEEKRNKQNKPLQKKGPEKSTVESPPAERRRITK

SEQ ID NO: 964230 - protein, 55 aa, Homo sapiens
  misc_feature (2)..(2): Xaa can be any naturally occurring amino acid
NXAAIKPRPITTRKAEPINCIRPSVLGHWKENVEWNWILGQEIFPGINNMVSSDV

SEQ ID NO: 964231 - protein, 194 aa, Homo sapiens
DSILPEHATVFLMPHLGSCSSHWSLLKFVLFPGLSGGSNLVSGQGSQNLLHFLYWKSPYLRLDSIRGQQHSGLRRAVNIIIENALFHLQKEQALSDVLNQFLGHILRVELGTELKEQGAFFRTSWAVTFLLSFSQVEKPLVSWYCRPKNQTSLKPIVFTTWSNSCFPVVLGWMANSSSASMVVTPHTDRFGHGG

SEQ ID NO: 964232 - protein, 210 aa, Homo sapiens
  misc_feature (1)..(2): Xaa can be any naturally occurring amino acid
XXTAAIQAGTGHGSSASPVHIIQVREIAHIERDGYAQILRDLGGIGLANACGPCIGQWDRKDIKKGEKNTIVTSYNRNFTGRNDANPEIHAFVTSPEIVTALAIAGTLKFNPESDYLTGTDGKKFRLEAPDADELPKGEFDPGQDTYQHPPKDSSGQHVDVSPNRQRLQLLEPFDKWDGKDLEELQILIKVKGKCTTDHISAAGPGSVPG

SEQ ID NO: 964233 - protein, 44 aa, Homo sapiens
CVLSKNSRMLSPVLGSLDSSPKPCVSFFFSLKFSTAPAFISNVW

SEQ ID NO: 964234 - protein, 42 aa, Homo sapiens
SPTCVLQRNYLFSAQYVQPSCIASRLTSLFSEDDTNLVLQHT

SEQ ID NO: 964235 - protein, 122 aa, Homo sapiens
  misc_feature (52)..(52): Xaa can be any naturally occurring amino acid
  misc_feature (66)..(66): Xaa can be any naturally occurring amino acid
  misc_feature (85)..(85): Xaa can be any naturally occurring amino acid
  misc_feature (111)..(111): Xaa can be any naturally occurring amino acid
  misc_feature (120)..(120): Xaa can be any naturally occurring amino acid
VLVKRFAMPDSGAPILRKLVTWSPNSLMAFTCLIQVTVSQMKSHKVGVIFVXWPCLCEFHVVTRFXIFFQSVMHTHIAFSPALPXHHSLCFLDIREGQIRATSLGSAAFIXFLTHVPFSXMR

SEQ ID NO: 964236 - protein, 89 aa, Homo sapiens
EARTVKRKVSLFHEKCCIVLKEIVYLPELRCGIISVDPVSVNWLSFVRNRFRNGLCSVKDGEPHFRGGPTAQATSRSGPQTGVSLSSVQ

SEQ ID NO: 964237 - protein, 69 aa, Homo sapiens
MGCLSLPWHVLTCVTGGDDVVPYAAYSFSYTTMTEQDYDTLSSSSFVTFVNYFYEPSADVDVLLLYERF

SEQ ID NO: 964238 - protein, 97 aa, Homo sapiens
EAWGMDALVAEERGGHAKGNEVRPVAGSADVRTTQTLAPLQHVHAHLSPLQNILPIEFWRVIDSSEFSSLILLFGSCWHNLGTQVLQYVLVYRGSNF

SEQ ID NO: 964239 - protein, 64 aa, Homo sapiens
AGAMLEEWKAGTHVAGEGISSVHYDDHCNLLAQWFPDDTEYRGPKTINPAVRMPDELGLIKASR

SEQ ID NO: 964240 - protein, 48 aa, Homo sapiens
  misc_feature (26)..(26): Xaa can be any naturally occurring amino acid
LATGTGGSLRGPWVECSAGLDRDLLXTYQGQVKMTFLDPGTLTEISKE

SEQ ID NO: 964241 - protein, 48 aa, Homo sapiens
LSWYRLWCTDKLQVILALCAFYLSLNYLTTSHTKSHTKSHPKGHAKSH

SEQ ID NO: 964242 - protein, 45 aa, Homo sapiens
RARYRLFVQLEVDQLLRKQKGCVVVTLQEPHHAPHEEPPHAPPDA

SEQ ID NO: 964243 - protein, 38 aa, Homo sapiens
ESSSVPVRGDAGTSCGTACYCLELVSMDLELHRPPPKC

SEQ ID NO: 964244 - protein, 69 aa, Homo sapiens
PDRLFVWLLRVGSVAWLFGWLLGWLIVWRLGWLMVWRFGWLFVGRLGWLFATAQLQAQCQVIWDTIDCD

SEQ ID NO: 964245 - protein, 89 aa, Homo sapiens
KLAYRSLGGSWMRLLAWLVVWLLVWLFVRPVGWLMVGLFARLFGGASGGSSRGAWCRHLEGLFVWLLVWLFVLLFSPFPVSTFLSSPQR

SEQ ID NO: 964246 - protein, 48 aa, Homo sapiens
GRSSSVPARSVAVEGHLAWLVVGGLLLLGLASNLSNLSIGPVQFLLHV

SEQ ID NO: 964247 - protein, 49 aa, Homo sapiens
MSLVLAFARLFGLPLVGLLGWLFVWLFVVARRGISVFVRRRSSPCFPTK

SEQ ID NO: 964248 - protein, 41 aa, Homo sapiens
MPVPTSYSSLYPMTQDATQRATLKSRPMSHAISPAKGPTNS

SEQ ID NO: 964249 - protein, 75 aa, Homo sapiens
LVAARSVQYGIALCRGLTMMLLAFCPGVSGPGLGVSPARGSDPMGSRGPSPFQSAVRLPYSRAGSAGAAWDRALS

SEQ ID NO: 964250 - protein, 34 aa, Homo sapiens
ASRSRMSREQSEGSGTDDSDQYGPSFLGITEFLP

SEQ ID NO: 964251 - protein, 59 aa, Homo sapiens
MLVQGCGTACYCLQLVSSGSSNFICPLDRRSPLEHPPCSFTKKPHEPPRSHTQEPSPRS

SEQ ID NO: 964252 - protein, 110 aa, Homo sapiens
RGSRHVCGSCGWLMGGARVCLLVWLLGWLVGRRVEWRFGWRVVRLIVGLIAWLVVECGESAKYFDAGRDSDDYGSGGGSSGHAKSTQRATPRATPGRHATSHTTGPAKCR

SEQ ID NO: 964253 - protein, 88 aa, Homo sapiens
PAGLAAGASEGHGSDNSVEHADYRAKLSQIRLIYHTELEKYEQPANEFTTHVMNLSARAKPDLRPISPKDIERKSVSSTKRHTKSPTN

SEQ ID NO: 964254 - protein, 54 aa, Homo sapiens
TWSEAVASPSEDLHEVVGQVPASHVQTHDGVVGAAYPSYIGTVWLTPSPGASQR

SEQ ID NO: 964255 - protein, 56 aa, Homo sapiens
HASIFTYGIDYYTRAYFTSATIIIAIPDEPPKEPHYEPPKAPHYEPPNAPEEPRNE

SEQ ID NO: 964256 - protein, 75 aa, Homo sapiens
AGPGALGMLSVEVQDCKPTWLQCRQLHLQLTLITKSHTNDAAQRASQWATQGPPQEPRNEPHDEPTMSPPMSHPT

SEQ ID NO: 964257 - protein, 70 aa, Homo sapiens
CRYRSLGGSSGGSLGGVEYDKFIESGRKWFCHVDDDNYVNALVVPLSPCSKGLFALKALLLHHGTRSAPK

SEQ ID NO: 964258 - protein, 71 aa, Homo sapiens
EPVRLFVARWGGSCVWLVGNTKLDDIIYFKFLPVRKDKRNKAYFTKRRCPRRVSLPDPPNLLHLNHTTPHI

SEQ ID NO: 964259 - protein, 34 aa, Homo sapiens
VSWYRPFVWHFGWLVVLARLANCILHLLHAPHEE

SEQ ID NO: 964260 - protein, 38 aa, Homo sapiens
SHAQRRREEATEGSTKVNRKAADRGSPMPKKARLPSED

SEQ ID NO: 964261 - protein, 55 aa, Homo sapiens
MIRDSTEEGEIKTNQILSGCQISQQVLLPKLALAKILLEAESRSREIPSVLSTSS

SEQ ID NO: 964262 - protein, 81 aa, Homo sapiens
GSPAQRRGTTAASGGGSGGLFSSFSLLQHPPPLSVHLLYAVHLSVLSSSVLSILCAVHPLLLSTSSVLSTSSVLSTSSVLS

SEQ ID NO: 964263 - protein, 33 aa, Homo sapiens
EEVQEAEVEDKGTKKPVGAGGAGQGQRLMQQAL

SEQ ID NO: 964264 - protein, 35 aa, Homo sapiens
LDSTEEVERQPTLVSTVTPVPMLTCVSSSVASSVL

SEQ ID NO: 964265 - protein, 45 aa, Homo sapiens
NTEEESKTLSLVSRDAKPLEVYSVDFMVDNAQLGFLVSDRDRNLL

SEQ ID NO: 964266 - protein, 39 aa, Homo sapiens
EKELLLQKKGPGITNDEAPNTVPIPAPEPANPSVLSSCP

SEQ ID NO: 964267 - protein, 33 aa, Homo sapiens
RALRTRGLCKPPGWAALSVDVEGDCLELGRTSS

SEQ ID NO: 964268 - protein, 55 aa, Homo sapiens
DEEELELALLERLFRLAGVGSGGRPSSVLSTSSVLSTSSVLSTPLCSSSVPLCAV

SEQ ID NO: 964269 - protein, 39 aa, Homo sapiens
LEVPGAPDGLHSCMDLLCAVTSSVLSTSSVLSSCPPPLS

SEQ ID NO: 964270 - protein, 43 aa, Homo sapiens
QRIPEAEEDEEEEDKEEELELELLERLLCAVHLLCAVHLLCAV

SEQ ID NO: 964271 - protein, 45 aa, Homo sapiens
MSASLCCHLLCAVHLLCAVHVLSTSSVLSISSVLSTSSVLSTSSV

SEQ ID NO: 964272 - protein, 103 aa, Homo sapiens
SSCACPPPLCCRTAQMRSFTLALRKELVACDLGTGVGERTPGSRALEEGGPEMVWDQRRPEVEVGESTPPLCCPPPLCCPPPLCCPPLCCPPPLCCPPPLCCP

SEQ ID NO: 964273 - protein, 43 aa, Homo sapiens
ILEDPDSTEEAQRRNWFVCFAYPQCWHGHSCPTMIHSHALAPV

SEQ ID NO: 964274 - protein, 89 aa, Homo sapiens
MTCTEEVYSYRGGDEGADGMLCTRYLHNSSMSASANSCAKSWLQSGQMDESQHSQTSEKPIRWFQNSSQMGCECCPLSVPSCVLSTSSV

SEQ ID NO: 964275 - protein, 89 aa, Homo sapiens
HELEEETEEASPAIVLGTTSSVLSTSSVLSMLSTSSVLSTSSVLSSCPPPLCCPPPLCCPPPLCCPCAVHLLCAVQPPVLSTSSVPSSV

SEQ ID NO: 964276 - protein, 42 aa, Homo sapiens
  misc_feature (30)..(30): Xaa can be any naturally occurring amino acid
VEDPSTEEEQKQPRFIMGSITPTDYTLSKXLPPCAVHLLWCG

SEQ ID NO: 964277 - protein, 79 aa, Homo sapiens
  misc_feature (75)..(75): Xaa can be any naturally occurring amino acid
  misc_feature (77)..(77): Xaa can be any naturally occurring amino acid
IAGLVLLGAVTTGAVVAAVMWRRKSSDRKGGSYTLGCKPVTVPSGSECVYSRACKSVRQRALVWRLRGNELFLPXPXVT

SEQ ID NO: 964278 - protein, 34 aa, Homo sapiens
KYQDVEENENGEFQAKYCGDLAVMLLRRIPGMNS

SEQ ID NO: 964279 - protein, 36 aa, Homo sapiens
CRLTLEYPRSFVYTYQVNGYNTDFMLVFSLKVYCFL

SEQ ID NO: 964280 - protein, 39 aa, Homo sapiens
NLLQKLSEPKPIFFTLNIAAAKPTPPKSQVTLTKEFPVS

SEQ ID NO: 964281 - protein, 48 aa, Homo sapiens
MAHGGFLNSHPKYEMRGNRKSLAILKATPFLSKENGPVLYNCTCVEIE

SEQ ID NO: 964282 - protein, 34 aa, Homo sapiens
NDIDAFFRKVRGILNKLTPEKLTSYALSSSNVGF

SEQ ID NO: 964283 - protein, 63 aa, Homo sapiens
MIRAHKYLNGIRPTGYLGNGANAHLCVLAVQRVMSLMYVNVCVEARLVLNMQITYIKVDDNNE

SEQ ID NO: 964284 - protein, 32 aa, Homo sapiens
MVVFGYTTAMAIEEYLRHGGQGRGLESVKWGS

SEQ ID NO: 964285 - protein, 59 aa, Homo sapiens
  misc_feature (5)..(5): Xaa can be any naturally occurring amino acid
MFYTXQRQQQLLWPYASHRKYEGWRTIVHFNEFLAASGWDERCTASSCVEIDHTDLEVP

SEQ ID NO: 964286 - protein, 35 aa, Homo sapiens
ASVGFLRLKRIRLYCFIFSDVDLVPMDDRNLYRSG

SEQ ID NO: 964287 - protein, 61 aa, Homo sapiens
NAQYAGHRRSVVVPWLAPAGMPKSGTIIDGADSMMTPCSQTNQHILEGCSHVPGHVSVTSI

SEQ ID NO: 964288 - protein, 39 aa, Homo sapiens
ESYQQVGFTNSDVGSGHPDGGAAIKGSFVEKSMVLRVRP

SEQ ID NO: 964289 - protein, 39 aa, Homo sapiens
DVAEISDMKPSYDGNSTGPIDSDIVEVSYNVNTCRYVYG

SEQ ID NO: 964290 - protein, 120 aa, Homo sapiens
GRTRSEDDEDITIDLFGCDNDEDDNGVWLSCGRSGYVLYAEKKAKKPALVAKSSILLDVKPWDDETDIAQLEACVRSIQLDGLVWGASKLVPVGYGIRKLQIQCVVEDDKVGTDLLEEEI

SEQ ID NO: 964291 - protein, 110 aa, Homo sapiens
MAPVHLWRYEQRGAPVELAKREEPVRVVDYIVSCDDIVPDNLNSLPNSSDHDMALVWMDEGVRAMARNAPCEYQLIDCAQYYLDKIDVIKQADYVPSDQVLLRCRVLTSG

SEQ ID NO: 964292 - protein, 106 aa, Homo sapiens
YKFVSMLDFTSKANYYTQVDPKLEPGVNELPLGANRRIRILESISTIGLRPRCRSQDTPDWCMTRYSKVRSFNDDSTYADQYSERSKSRSVSIYFTFLPVRKDTNV

SEQ ID NO: 964293 - protein, 38 aa, Homo sapiens
TCYIRVHEELRKLGLYVETRDGADYEGWCVARLSWLPV

SEQ ID NO: 964294 - protein, 63 aa, Homo sapiens
ELGTCNIRVIIHDNMNADADLINAGEETVTILPGASFFSSDEQFATELERGHVRNLTIASERM

SEQ ID NO: 964295 - protein, 48 aa, Homo sapiens
DSSSAPVTFVSMAHAAQEVYKTLLPAIIEELIDLVMISALIMHLPYLS

SEQ ID NO: 964296 - protein, 70 aa, Homo sapiens
MKPSARTWGGAVDSNLVTCLCPHSIVWAVSSANYQCARQCSALHSPVLPRACVCRQFPEAVLAAGLTPET

SEQ ID NO: 964297 - protein, 109 aa, Homo sapiens
MHLEYVLNCQHIIWLMILPFLSPRSLRCQRLWWSAGFDVSGYPTIEILEKGQAVDYQGSIAQEEIVASVREFSHPAWMPPAEVTLVLDKEDFDAVVNEADIILVGCDAP

SEQ ID NO: 964298 - protein, 58 aa, Homo sapiens
MSCTWALDQQFDFSIINIDHILQAPGIYIGRTTYGRSRRRDYYDRGYDPGYDDRDTNV

SEQ ID NO: 964299 - protein, 125 aa, Homo sapiens
QGHCGESPHFMYNACQLIDDGPGLSCARRHCLRIPAQVLGAVRTGRLLRLLTAVPATFRVPDHDGLRFLCVSARCRCTSRRMACWVHSCPKAFWNTCLSWSEPSGYLYLSVTSMRALLPTALVLM

SEQ ID NO: 964300 - protein, 82 aa, Homo sapiens
DLEDPEAGDRGRGRQEDLRPTDHQKCGDQRPLEVVVTAGTRSTWYPEVLRGADAFPAEARENQSSCASSALTGVPEARNSVN

SEQ ID NO: 964301 - protein, 60 aa, Homo sapiens
DRSGQAWKKSLHMRCDECQENSISWKSTVLATVLIQVAHQLLQPLLIHFLPHKAGQLLGR

SEQ ID NO: 964302 - protein, 38 aa, Homo sapiens
TAFEAWAHSIDTSDSDDKRHIGVLQVHRSSQLFWYLAE

SEQ ID NO: 964303 - protein, 49 aa, Homo sapiens
ESSLPLVLVMAAPHWHEKITMQNLNDRLAFYLEKVRALEDIIPSTLNLP

SEQ ID NO: 964304 - protein, 109 aa, Homo sapiens
MEDPPQKDYSRGFGGKFGVQSDRQDKSALGWDYQDKTQMHHSQRDYSTGFGGKYGIHTDKQDKNAVVFEYQGKTDKLESHKDYVNGLGVKFDVQTDRHDKCALAWNHQE

SEQ ID NO: 964305 - protein, 56 aa, Homo sapiens
RLFYYERTLASSANGARAQEHRSTRGSSGAGLTTVTLAGEQGNMGQPRGDTARDEA

SEQ ID NO: 964306 - protein, 41 aa, Homo sapiens
SALSHEAEHYTKMTSAPFHCRKLPVAYFSNNFHLLSTGARR

SEQ ID NO: 964307 - protein, 37 aa, Homo sapiens
MAQPTYKVRIVRDKFLGRCYRSQITCSCHSYDVVIVS

SEQ ID NO: 964308 - protein, 116 aa, Homo sapiens
IEATSFTTSGTEREIVRDIKGESCAYVALDFDAGDGHRPASSSVSAMKKLASMPGWSESSPMGKELVPDVLEALFQTFLPGIWNLARIHEYQLATPSWMCDVDIRKDLYTNTVLSG

SEQ ID NO: 964309 - protein, 63 aa, Homo sapiens
MIRMRARRPISQYYQSILIINDIIMADSNKKLRNSPLSASESQRLTQGTPADIRPASAHMTST

SEQ ID NO: 964310 - protein, 73 aa, Homo sapiens
ERIELGTVLPALPIEECPATRLLAQMGHYRRIHKKSNSLIIPTIIATHHPPITSYFYLNAVIYSTVNQHYSAI

SEQ ID NO: 964311 - protein, 114 aa, Homo sapiens
SVNHLTPSLLILDTLTNLDTLTPHPDTLTPQPGYPHSAEDSRHSSCLDTSICTHVDPHSPWTRSLTLTPSLTLDDPHSPWIPSLLILDTLTHPGYPHSSPWTLSLTLIPSILTL

SEQ ID NO: 964312 - protein, 54 aa, Homo sapiens
GCDVRSYKKDGAEFAKVALCAEDVGNTAPSDPRTSMVKLPIVHGPRYDSVSCQA

SEQ ID NO: 964313 - protein, 83 aa, Homo sapiens
VNTLQAAALRASLKKNTGYKGTLPNVLQRSVEDPGLLDCTIHVGTGTINGDDARKRKAKAKPGMCVSAVMKVEWYITCLGTCC

SEQ ID NO: 964314 - protein, 33 aa, Homo sapiens
VSYDMVTPEAAALRELEEETGYKWDIAECSPAV

SEQ ID NO: 964315 - protein, 109 aa, Homo sapiens
SGSVPDCIVRMYKEGGADFAQWRLCAVKIEERQPLSPRHHGKCQMFWPVMPVSDHPTNGIVPTRGGLISSLMGTMTCSAASYVTEIVLVAVYQRSELTAITLPGRLAFL

SEQ ID NO: 964316 - protein, 66 aa, Homo sapiens
LVGSPCWSHMPSSFMSPKSRLTIYTPGLTVLLGVLARQGVRRRLVLAPQYWIRVRDMTSRAWSNTG

SEQ ID NO: 964317 - protein, 39 aa, Homo sapiens
YQLGPDSPVAICASNKRIRALFDESLIHGLEQRDDVSCF

SEQ ID NO: 964318 - protein, 181 aa, Homo sapiens
AVQEGRELTSQVAYVELKIGEHTPSDLAIHGKCQCELARYASICQQNGIVPIVEPEILPDGDHDLKRCQYVTEKVLGELYYKALSDHHIYLEVHLAEAQTWSPQAMLCTQKLTHEEICHGDRNSAAPHSDPTLSLGYTYTCTGGQSEEEAYIKLNDINKCTPAESLGPELLLRTSLHASDL

SEQ ID NO: 964319 - protein, 53 aa, Homo sapiens
YIAMLVMCDQKERDVIYEGVSVLALAEFVITTDLLARALAVQQVSLVINYETR

SEQ ID NO: 964320 - protein, 45 aa, Homo sapiens
MAIFLMRKLLNASIVWGDHVGLQQGAFQVNWVITQSLVDRQPAPS

SEQ ID NO: 964321 - protein, 58 aa, Homo sapiens
MYLALLMPVSSQQNGIVPSMEPEILPDGDHDYEAAASNVTLRSVLWLAVYKCYLSEHH

SEQ ID NO: 964322 - protein, 47 aa, Homo sapiens
TAKLRCVLKIGEHTPYSLAIMENANVSGPVYSHYLAMQNGHCCPSVE

SEQ ID NO: 964323 - protein, 38 aa, Homo sapiens
LRSHTQNRIGDQHLVAGSSRAWMWTTLLLLGLLLVLVL

SEQ ID NO: 964324 - protein, 108 aa, Homo sapiens
IGERHPSALAIIGQMRKVLALVCQYLPEQNGSSAIVEPEILPDGDHDLKLLTVCDARRCWKLSTRALSDHHIYLEGTLLKPNMVTPGHACTQKFSHEEIAMATVTALR

SEQ ID NO: 964325 - protein, 34 aa, Homo sapiens
LRVSYTEWDRGYSIWMAWLLIGHGCGPHYFCYGL

SEQ ID NO: 964326 - protein, 107 aa, Homo sapiens
RLLPSGALVASCRNTLLVCLGWKLCASLAHAAHVPVGSPPVQRLTAVVGLPHSLAGTGLYFCQSCCPWRQQQVTVLSRWNMWLSGRVRGGPTDVEACSIGGHWPSRN

SEQ ID NO: 964327 - protein, 93 aa, Homo sapiens
METSNGTWPVMPCILPDSNGICAHRWSHEILPDGEHDLTRCQYVNAKVLGLLVYTALSDHHIYLGSAPCLTTNMVTPGQCSASRSSLITDIAM

SEQ ID NO: 964328 - protein, 73 aa, Homo sapiens
MTGDTPEAAALRELEEETGYKGDIRRMYSSGLYGPRLVKTVLYTSVAQSPVNRKMMPENAEAIAQSLVCCVSE

SEQ ID NO: 964329 - protein, 86 aa, Homo sapiens
AYCTWMVTLSYIIQLGRIKCGLLFLLLVVSVSECDHSAEATRIRDGNGRLVCGFAPFSCFACSVFTDCKGDVLFVKMERSQICASN

SEQ ID NO: 964330 - protein, 139 aa, Homo sapiens
MCALILPKWKHPQGAGSDREPPWLKAIFHDLQSQCSLTPLWKADGQHGVPYCHCREGQWSPYGAVSTSVGPPLTLSSATWSSCSACDLLLSLRTALWQNLASASQAVGETYHASCAELAGFQRDLGSLRRLCHSFRPSY

SEQ ID NO: 964331 - protein, 40 aa, Homo sapiens
AHAVSSSWWVRVVLAPAIRRTVASCSEHLACMLVLEAVCC

SEQ ID NO: 964332 - protein, 32 aa, Homo sapiens
QNGIGDHASGGRLLKGMVVDHIYFCLVFCWCW

SEQ ID NO: 964333 - protein, 67 aa, Homo sapiens
SGQCVAGGPDANMTEENEYAHLPALWILQQNIKPGKADWTPSSRALSNSDTGMLSAPGMVPAAASSR

SEQ ID NO: 964334 - protein, 166 aa, Homo sapiens
VQGRMELSSSKWRCVLKIGEHTRSALAIMENANVLARYASICQQNGIVPIVEPEILPDGDHDLKRCQYVTEKVLAAVYKALSDHHIYLEGTLLKPNMVTPGHACTQKFSHEEIAMATVTALRRTVPPAVTGITFLSGGQSEEEASINLNAINKCPLLKPWALTFSC

SEQ ID NO: 964335 - protein, 135 aa, Homo sapiens
  misc_feature (3)..(3): Xaa can be any naturally occurring amino acid
YPXAMCAGQHRGSGSCWKDRRIAGDPFVWSSRAAGYPAPIITSRSIQMGVSKCPSGSAELETRVLPAQCRIARSQELLRGSDELNVCPSSTTELSLSCSLRATCVRESDGVILHTVLTSAGLGCIEARLSLHAGT

SEQ ID NO: 964336 - protein, 76 aa, Homo sapiens
DIDVSRAWYMPEGIEEEFATGGTDRKDVLISTRQTMSTTYPRSRASWTMEPRSDPLPYLNYPAIAKALTTSDEHHT

SEQ ID NO: 964337 - protein, 74 aa, Homo sapiens
DTWQLCAEDWGTHPHQTLAIMENANVLGPVMPVSMPAECALLPICGRLRSSLDGDHDYEALPCMLTETGAWLAC

SEQ ID NO: 964338 - protein, 111 aa, Homo sapiens
CNSAERRNRPWRPVCDVLHPTRASSLCSRPCLGKEMPTTNSPSPGFGFGRCFAGIISVTGDCHDVYSTVGHAWVHTDRWRTFGNVPFVASFFFKLPESSCFWEYTIIYETR

SEQ ID NO: 964339 - protein, 77 aa, Homo sapiens
SLELDEADYYYKSEEEGKSLECKRAAWEHLRLIGCGERRTRDSLGNRPRPDRYGVYLTYDMQGKKAKDYRYRQYYLP

SEQ ID NO: 964340 - protein, 63 aa, Homo sapiens
MARLFGQGSLDILLLRSLQVLLLPAPGLQGRGLQGSAVGEGQGPGLQQGALVNGIEVDGRLLL

SEQ ID NO: 964341 - protein, 33 aa, Homo sapiens
IHNGIPDTGDTNSSVYMNYNQLLTFVIKVAPLT

SEQ ID NO: 964342 - protein, 44 aa, Homo sapiens
VESNMELQTMIAAVDTDSPREVCIRVAADMSSDGNFTWGRVVAL

SEQ ID NO: 964343 - protein, 81 aa, Homo sapiens
  misc_feature (57)..(57): Xaa can be any naturally occurring amino acid
  misc_feature (60)..(60): Xaa can be any naturally occurring amino acid
  misc_feature (69)..(69): Xaa can be any naturally occurring amino acid
DYMQNMEQKRRQLEESQDSLSEELAKLRAQGKQLTTIAGVQLLWPKPDTLYVGWTHXCLXFCSVKRISXVYCKDGGRVTGN

SEQ ID NO: 964344 - protein, 48 aa, Homo sapiens
DRYGQRSGRNRSVPARLWGESYHASGAELAWLPMVTWRMAVQGYRARN

SEQ ID NO: 964345 - protein, 38 aa, Homo sapiens
MVSAPRASWSEFATEGTDRKGRLFVYQRRRLSTYIPRV

SEQ ID NO: 964346 - protein, 125 aa, Homo sapiens
EGILIRVSDKGVPVRQRSRGMDSLALMNMQRRAARFNLAEPSKNTASPEEFAQCELENRCVVACSEILVSLQEAQERPSSKRKADITKAKLMLGWEPVVPLEESLDRAIDYFRKELEYQANDSVS

SEQ ID NO: 964347 - protein, 125 aa, Homo sapiens
LQNQRMLLEVVTRQVAHKKSSLQTSAKQIEDRIFEVKHQHRKVENQIKMAKMVLMNELNKQANGLIEELEGITTERKRKLEQQLQSIMVLNRQFEHVQNFINWAVCSKTSVPFLFSKELVRGISQ

SEQ ID NO: 964348 - protein, 70 aa, Homo sapiens
KIFSQKLGYLLFRDFGLIHLEEARPLVEFYEEIKKYEKLETEEERVSRSREIFDSYIMKELLACLHPVYR

SEQ ID NO: 964349 - protein, 99 aa, Homo sapiens
TTYTLVPQGSCPVSVGGWLPAQHDDMNNPQIMQSPQHPCEVGRKLATIFTPTSQTARDTVKRERMVELSPPVQVLGRSPRSHQSLPEPGRLQHSHLDTG

SEQ ID NO: 964350 - protein, 33 aa, Homo sapiens
MAFMIQIPEYDDPVILHYNVPVLKCGLVAPSDL

SEQ ID NO: 964351 - protein, 47 aa, Homo sapiens
MCNIHQDRKGDFNISRCILLAVNARVTFTLVDLPHHPGTYCWAPDYP

SEQ ID NO: 964352 - protein, 62 aa, Homo sapiens
PLRSHTQNGIGDQHLVAGSIKGMAVDHITSAWSTSRCWLLGVDYMKWQGSVHLWDRHGSRNL

SEQ ID NO: 964353 - protein, 43 aa, Homo sapiens
KWYQHGESLKNLRRRNIKSYDYRLSKDVHAYQYASLLSSYLYP

SEQ ID NO: 964354 - protein, 57 aa, Homo sapiens
SPYRIWTETHAVDAPTIQIMCIYDAMIPEYEIRRYYLQDLVKVDVGSYGPPLITRTK

SEQ ID NO: 964355 - protein, 137 aa, Homo sapiens
RAPPCGPNIEGLKSQEGYFNTGYALCLSQCKSVGIDPGVHCEMYFSYQSIKSLQQVILGKRNDFHKLSIPWLWLRPSVIGIISVNGDCHDVYSTVMTSLGPYRPLENIRQCPLLEASFFFKLPESSCYWGYTIIYET

SEQ ID NO: 964356 - protein, 67 aa, Homo sapiens
MDTQQEAWHHECQVSTVSCCLYLGKPTIQAAVVAPYPASVHTTHTPQRVEVLMLNVRRNHPQHMQGV

SEQ ID NO: 964357 - protein, 58 aa, Homo sapiens
LRGLIYCHACMIWTKEERRRDYSGSFVAGSSRVLITTDLLFQRIAVQQVSIVINYETR

SEQ ID NO: 964358 - protein, 78 aa, Homo sapiens
CVSLHRMGIGDTASGGRLLKGLACGPHLLLLGLLLWLVLDDDYWKGRAQAPMGALVLEPWARQGSVYFGGGRAQAPLG

SEQ ID NO: 964359 - protein, 47 aa, Homo sapiens
CESHITNSNATKGGQSEKLSTHMGYASEPYTTSGCITMTSMNLRAIL

SEQ ID NO: 964360 - protein, 48 aa, Homo sapiens
LAGWPRGSPAGFHNGFRICRHMHHEGLELKLFLGTTVGFNVKNVSVRD

SEQ ID NO: 964361 - protein, 74 aa, Homo sapiens
CGHITELNLSKCTMKLGVKLFLGDNVGFNVKNVSVRDVRRDREDSDSKDDPPMDAAGYTAQVIILNHPGQISAG

SEQ ID NO: 964362 - protein, 61 aa, Homo sapiens
MHHELRVMLFLGTNVGFNVNECVYVRDVRRGKCCIVTAKMTHQWKQTGFTAQVIILNHPGQ

SEQ ID NO: 964363 - protein, 34 aa, Homo sapiens
MMVKPQKHAALRELEEETGYEGGHGRNVLQRLYE

SEQ ID NO: 964364 - protein, 31 aa, Homo sapiens
MVKPQKQLLSGSLKKKLGYEGDIAGFVLQRS

SEQ ID NO: 964365 - protein, 46 aa, Homo sapiens
MNGITSVEMHPEALSEALPGDDVGFNVQDMCLYRDVLSCHVKPWCT

SEQ ID NO: 964366 - protein, 79 aa, Homo sapiens
VISLNSNAPQRWMSAEALNTHGLARNHINKGGITRLQECRAIFQLFYHERRSILFLRAQHNLHAIVSLCGNTNTVGIRR

SEQ ID NO: 964367 - protein, 32 aa, Homo sapiens
TFNPFLLIQRIEIAFVHFPYYSPHFIARTQVV

SEQ ID NO: 964368 - protein, 61 aa, Homo sapiens
HHLSQRRHHRRWRKPGDGATDADSNESPRSYNTCDDDEGPDRMQCMPSGGLIPKWGRLALT

SEQ ID NO: 964369 - protein, 62 aa, Homo sapiens
MAHLGKKPVSGGRPPTERRVNGINGVSHVSLFDIQDPNTVAVLDSNLCNNNAVVVSDNINSL

SEQ ID NO: 964370 - protein, 77 aa, Homo sapiens
TLRGVMHEEDGGVGVAGAHFGLGALQGWEQGGVHQGWYSTSLAGGDHLCHSKVRILVNGTWDYELDILLSRKICGNE

SEQ ID NO: 964371 - protein, 134 aa, Homo sapiens
VSSFVEATSLGQLNIGLQSHNCHYVVSIWGPFDFQLDHALATADSNGLHNIIGHHLNPLSSDFFHGPFAEVFRRIFSIFPFSGKSRNTSVPKARAFLPRAQASSLPMKPPPIILSDLTSREIFFKLLKSPIFLK

SEQ ID NO: 964372 - protein, 108 aa, Homo sapiens
TPPESVYKHLRWTMEGPDSSYSCLLIHMSITDCSKAWREPPIHTKYLDSRVAMILIFMVLGVQSQHHVEATVGNAPIVGGHRPHRPIRGKVFAAVHATLNDGFEGGLV

SEQ ID NO: 964373 - protein, 77 aa, Homo sapiens
GPACLCDDCSKPPWVFQCPSSPTLTPNPDSFTKKTGVSSQEYPWHLSLFEAPCFPLPSFQGRGNLFSLKADPYANCL

SEQ ID NO: 964374 - protein, 90 aa, Homo sapiens
MVDPPAACTLDLKKPQAFNSDVGDFGSHPLKLYRGSHSYNRPRTYILITILASKLKLRTPFQAHYNPFLRTSNSTSTNSFLMNSNKAWLT

SEQ ID NO: 964375 - protein, 128 aa, Homo sapiens
FGAKNIKDGHFKWLCICLLQCESVGLDPGVHCEMFFSYQSIKSLQQVFLGKEMTSTNSPSPGYGYLALRIGIISVNRLTVTMCIVQLDKPGVHTDLWRTYGNVPLVARFFFKLPESKLAAGVNTIIYE

SEQ ID NO: 964376 - protein, 45 aa, Homo sapiens
MAWNWHTGLCLYAQRLLALRVVAKPSRLLPSYTKLHSLLTYWVSR

SEQ ID NO: 964377 - protein, 89 aa, Homo sapiens
TETQKTNLLILIHFLLLKDIGEVICALLVTGTKEVGKFSFIIVSRLGLSSLVITSGVFVKHVDHAYYGPLFLSVAHLCFQKARAGKRHE

SEQ ID NO: 964378 - protein, 95 aa, Homo sapiens
THGSSMLSTMHLITELVRTKSLVKNCIVLIDSTPDRQWYESHYAAAPVAAQKGANADSCRKHAHFKPKNDLTKLQKQICMKGQTNATQSACLLAG

SEQ ID NO: 964379 - protein, 79 aa, Homo sapiens
VITCRVCIVCNAGFHVVNVVGELSPYCVVRNICSREYRAVTQYVGPVQSGECIFEPENVVTSTEQFSQLQHSTQWGVRA

SEQ ID NO: 964380 - protein, 94 aa, Homo sapiens
  misc_feature (82)..(82): Xaa can be any naturally occurring amino acid
ECYVDYTVLIVSNSTSSDYETFWQCFVWSSLAGQECTSSGAYECPGVLLIMAQFRKPTNRPRSIHYSSWVSGARAALNTLIXQSKRFGARGTLS

SEQ ID NO: 964381 - protein, 50 aa, Homo sapiens
RYSDTSFRFSAADIAFTSDLINRRGLIIPPKYPITEGTSLTPSWQSIQLH

SEQ ID NO: 964382 - protein, 78 aa, Homo sapiens
VTLEDTDTIECQNQGACHPMCLSPATQSAEPASQGSGAMPPKVPEALPFNSHSSTRPAEEQAEVMWSTAMPFRRRPPD

SEQ ID NO: 964383 - protein, 108 aa, Homo sapiens
DNIECGYIQTFKRTVFRKGKLGHRKHCELPTTPSASGSREITISCVLLGGHTNFSPYLTGCNNGLHSLSPKSFLFQNQRNFPHLIFGSQLAVPISNGFVRGYRGSEFR

SEQ ID NO: 964384 - protein, 61 aa, Homo sapiens
MAGVLYELKNYMDYEKAKNRYKRTKNWEELRHLIRECLRRFSIVLSAKIIYLLQEFRVAVW

SEQ ID NO: 964385 - protein, 75 aa, Homo sapiens
LEDPLTLDAHWEVAGAQAVKSPAGRAGFDKVSYSVPISPAHSAGDRRDELWGHNQQSEVGKRPWGREPCIPMRAF

SEQ ID NO: 964386 - protein, 65 aa, Homo sapiens
VGEGVTGGYFLLALLRLGRAVDTLVMARLSALLGVAMALGTLACGTQAVAVRAASIVAVDKTSCW

SEQ ID NO: 964387 - protein, 78 aa, Homo sapiens
SSLPETPVYPRASAQSHVHPRSALSAAASPTVYTALRTISSARQKYPTSDTFPTLPAKVSIQEQVTASGFIRSMRGYG

SEQ ID NO: 964388 - protein, 54 aa, Homo sapiens
PTGSSTAAGSQSWQRTGIKDTEWSDSRKTRRQQQQPGWNDGQTHGRTWPWYVNR

SEQ ID NO: 964389 - protein, 73 aa, Homo sapiens
  misc_feature (58)..(58): Xaa can be any naturally occurring amino acid
TLEDPGTLVMANAVPTQMVPQFFILHWQTELVWNAKHVVFGKVKEGMNIVGGHGSALXSQEWPDPARRSTIAD

SEQ ID NO: 964390 - protein, 54 aa, Homo sapiens
YFRAVLRDHTEYSSLHTRTSHCWGMSSQQQKQPCIPPPQLQQRQVKQPCQPPPQ

SEQ ID NO: 964391 - protein, 68 aa, Homo sapiens
MSSPGVKASPATQDRPADRAESSLAETKIFVPAPLGNLRGDEEKKPGVKGAELQINNSQMRRKENADE

SEQ ID NO: 964392 - protein, 118 aa, Homo sapiens
DYRLSKTTADFLKSKLTELQRTHITLLQEHNNALKPIEELTRKESENVARAVLKELSEKLLLAEKALASKQLQVDDMKQTIAKQEEHLITMTILRPQMEDYILILPGFGILTHIVTYY

SEQ ID NO: 964393 - protein, 106 aa, Homo sapiens
RLQMAAVLRSSCDPGSCCRLNRPPSAAAAKPSPADQTARRLHHSADRPALPQASPSIASQRQTAAPSDLDSPGRNLGWPQALDRDPDSWPPPKGSVTLSETYFLPT

SEQ ID NO: 964394 - protein, 73 aa, Homo sapiens
  misc_feature (50)..(50): Xaa can be any naturally occurring amino acid
MLIEFYRLQSRLLYEGYEAPPVPLSYTLCLEVNCQSSFCDLTVERYGKHXGVSNPSLGLSYCVIRYVNATFVV

SEQ ID NO: 964395 - protein, 96 aa, Homo sapiens
AACIRKQAKSCLQRLALKRYEGTALQLLCQAAAYLDLLVAVCLQFMLDPCQLLLDGALGAVINHFALKGRRLGVPKDKHQILLLALLDLIGCIIEG

SEQ ID NO: 964396 - protein, 61 aa, Homo sapiens
EAGCEEKRHEGSSSESVPPGTTVSRVKLLDTMGDTFPQKLVAAVSYQRFTDCYKCFYQVQP

SEQ ID NO: 964397 - protein, 42 aa, Homo sapiens
AKMLGEALSKNPGYIKLRKSRAAQNISKTIATSQNRIYLTAC

SEQ ID NO: 964398 - protein, 75 aa, Homo sapiens
DLEAPPVSSQCCRQVAEAWVERSSYSYGSGLGSRRWLQSHAVAEAMGGGLSSVGGGSTTIKYTTTSSSSRKSYKH

SEQ ID NO: 964399 - protein, 52 aa, Homo sapiens
RCVDSSGSRPLLQVLSGAQPLGPVTQLLFVAFFMAFCVGCHAYLYHLDVRLL

SEQ ID NO: 964400 - protein, 59 aa, Homo sapiens
MTLMDLNQMDTHMGVKKVEQTRSLVVLEWTPHNSMNGMIIIGIPSCAYGGTDARDFVSR

SEQ ID NO: 964401 - protein, 162 aa, Homo sapiens
QLKESEEEDFSVRYQMKAWNFQRMKKRKRSTEENTTQFENLCKLMKDILEKQVDTVVVSNRLVTSPCCIVTSTYGWTENMERIMKAQAQRDKHNNGLQWQTKKHLEINPDHTIIETLRQKAEAAKNDKYCEGSGHLALLNCASCLTGFSLEDHQTHANRIYR

SEQ ID NO: 964402 - protein, 89 aa, Homo sapiens
RQETWTETLMRKYSDPQNDQPSTWWTCYVKRQYMNKSTYQDLDSEGSPGSHRLQRPWAELSSKKCPQSFAFISVTSFITASSSKQHVFT

SEQ ID NO: 964403 - protein, 102 aa, Homo sapiens
CRVCIKGTETLHFGGHLLSMVKWFLGRQWNHLVQVPESNVLHWEDTKVFRQLCFERLHFWPAGDPAWAQYIADRRDGGFINGRFGKRQKGLLAHNDEGIRFR

SEQ ID NO: 964404 - protein, 42 aa, Homo sapiens
KGTFPEILINYDFFKVQNLDQEIGIVYEANPGVPPATISGSL

SEQ ID NO: 964405 - protein, 113 aa, Homo sapiens
RPQERNSTIDIHTQIENMIITKAKNGHLDYDRPTAEFSVHKAPTGPSQRPMLCIFSSSPSQLPKTRNSQNRDPGTPRSPPEISQILNIPLLREQKRAKSYPKEEAGRATEIGK

SEQ ID NO: 964406 - protein, 67 aa, Homo sapiens
QSVHVIETLTKYQTSVPTEVNSININQGQNHVCRKPRKECTIDFTTGSELLITKDQERAPGCGRHHG

SEQ ID NO: 964407 - protein, 57 aa, Homo sapiens
EHITLALVDGRGTAIPTADKLLYAAVSKAGCFMTVEDQITAVRKFIEMGFIDEKRIA

SEQ ID NO: 964408 - protein, 56 aa, Homo sapiens
PDGTESSQTHIKIDIYSILSMTGGGGGGVLDGRELPPPTELRPPPNGSATDMETED

SEQ ID NO: 964409 - protein, 70 aa, Homo sapiens
EGAEDCGTERLADALKMHYSSFLAGEREVVVYLMVELPPPTELRATPKWLCTLLELEATIQAPTTTCHRT

SEQ ID NO: 964410 - protein, 54 aa, Homo sapiens
SKNGISVESYLSGCFLTYHSSTVGSMCQSVLSSLAECSVRENGVVNGWQIGAPT

SEQ ID NO: 964411 - protein, 70 aa, Homo sapiens
MVELPPPTETEATPNGSATAGTEANSNAKNTATRSSCFLHPGLSHCRHHWNRHSHWKTVDCTTEMLPIGE

SEQ ID NO: 964412 - protein, 72 aa, Homo sapiens
  misc_feature (1)..(1): Xaa can be any naturally occurring amino acid
XRQAHLNAQPQVTMQQTCCTCTRSGTFDCFHVGTLPLLKSKRQCWVNGCFLLYKPCTLLLLIKSLACCLSEK

SEQ ID NO: 964413 - protein, 72 aa, Homo sapiens
CAICWCQWCRRGLCAWVEEAATPIAVVYGVGWWLQYQQWQEPLRGGLSSIGGGSTTIKYTTTSSSSRKSYKH

SEQ ID NO: 964414 - protein, 127 aa, Homo sapiens
TIQDPLFSESNISDGALHRHQWLWRVPVVSAVALLPGVDGQLAYSSSSVLGCLRWLQSQHWQEPLGVALRALLEAACSTIQYTTTSLLQLGRAISTRRASATSRSPPGPQAPSLAAEPSPHFAFRRK

SEQ ID NO: 964415 - protein, 126 aa, Homo sapiens
TDPAGSPLLRKAHIYWGKQESKPRAGGIMDEEMMADDCAPASVTPTLSGWIPRRMPRHFPHFGNWIGLSLLRLSARLQENEVSLTPSLPCIGVGYITSRGGLCGEGYDGADILYMLPYILGGRRCE

SEQ ID NO: 964416 - protein, 89 aa, Homo sapiens
YWLTRSQFHLHLLIKAIQDTQEASFLLDLDRPVMISDSKRFILFESCHTATVEVETEQKEVLELCQLPEASDRKSSYSHLANPLREFSL

SEQ ID NO: 964417 - protein, 44 aa, Homo sapiens
LVDLYQDPPSPKGNILWCSSTVSSGYSGAECVSAVASRLVWSER

SEQ ID NO: 964418 - protein, 35 aa, Homo sapiens
YSLSYLATVTGSVGSRAQAVTSEDTEHYDLIAILA

SEQ ID NO: 964419 - protein, 68 aa, Homo sapiens
NCRKTRYRAPNYTNLYRLINQIVSSITASLRFDGALNVDLYSEFQNNLVPYPRIHFPLATYAPNMPFL

SEQ ID NO: 964420 - protein, 127 aa, Homo sapiens
SLQDPLFSERHMAALKTPCEARDRSTENPECFIRHQSDQICQTLRRNWRKPRGIDHWVRIRFKGQILMPHIGYGMQSHHNVHMLPRGFRMFLVHNVEELEVLLMCNISYCAEIAHDVALRRRGYRAR

SEQ ID NO: 964421 - protein, 54 aa, Homo sapiens
EQDTKVPVPGYTKVPEPCPINDHYQAQLSRRPSRSNLGAQTSPCRSQPPDARTP

SEQ ID NO: 964422 - protein, 85 aa, Homo sapiens
MIYELFLLEEEVVVYYLVELPPPTETEDTPNGSATAGTEATSNAKTTAIGIAASSTQAYATADTTGTAIATGDGGPHHRDVAFRR

SEQ ID NO: 964423 - protein, 34 aa, Homo sapiens
IRSVLSTSRNTTSECNGYGPFGVFHLGYMVPWKP

SEQ ID NO: 964424 - protein, 66 aa, Homo sapiens
SKNAYQEDIYVLTPKFPRIGPEHQPNGRNTLKPLEFMLQYDAMDRNSLQSAVSHIAQVASVYSPLF

SEQ ID NO: 964425 - protein, 83 aa, Homo sapiens
MALPAGGGGGGVLDGGTAASNRAEATPNGSATAGTEATSNAKTTAIGVAASSTQAYATADTTGTAIATGDGGLHHRDVAFRRR

SEQ ID NO: 964426 - protein, 76 aa, Homo sapiens
LACSRILLADAMVIRDATLTGPSLLHTHRLPLESLSVNPLAPGMVGPAVIINNKMQKKTKKAHKKMDKHQKHHKYH

SEQ ID NO: 964427 - protein, 97 aa, Homo sapiens
WDRRATQTHLGAHTLFLLAAEVVVSLMVDLPPPTELRTPPMALPLLALKPPPKPDHCHKSSIIPPPMPETTDDTTGTAIATGDSGLHHRDIAFRRKG

SEQ ID NO: 964428 - protein, 111 aa, Homo sapiens
MQEFVIALAGFLKTVRESVNVPEWVDTVKLAKHKELAPYDKNWFYTRAVSTARHLYLRGDADVGSMIQDLWWTLRQTALMPSHFSRGSNSVARRVLQCPGGAENGVTRMSR

SEQ ID NO: 964429 - protein, 68 aa, Homo sapiens
IARAPSVLSISGPRVHDALVQQSWISTLMVQLTFQEFLILDDKDGRGSPQKKPWKKATKSSSDYMPLQ

SEQ ID NO: 964430 - protein, 84 aa, Homo sapiens
MYKCRAVKAARRVEPVSHRMEQALCALASLIRIHPVRGPFSFPDLLRKAVRALTNSCWFTFSYSISLHCAPSALVCQGKGMRSG

SEQ ID NO: 964431 - protein, 56 aa, Homo sapiens
MEAELEDERKQRSMAELAARKKLEMDLKDLEAHIELAPNKEPETKLIRHACGTLSG

SEQ ID NO: 964432 - protein, 86 aa, Homo sapiens
SKNSPRWTAQSARPTSIPKYARYFSTAKRKFIIADTTCAMSRYTRNMATECVHLMTCAIILARRPLRACETHDPVVTDYIASIARA

SEQ ID NO: 964433 - protein, 35 aa, Homo sapiens
MFSLSTSGFRGFILGFLSSCLIARHSSNFKHTIVP

SEQ ID NO: 964434 - protein, 67 aa, Homo sapiens
  misc_feature (38)..(39): Xaa can be any naturally occurring amino acid
ESISTYDISTHLASQGIHLPTYVGYYTYTGKAKTTYLXXLLQSSIYQVQHLGPGYSIRTRHPDDRTI

SEQ ID NO: 964435 - protein, 76 aa, Homo sapiens
SQALTYSDKPASGIISYIGSERMTLLAPLNSVFTDGTHSNDAHTRNMLRNQIIKDQLASTYLYHGQTLETLGGKKL

SEQ ID NO: 964436 - protein, 113 aa, Homo sapiens
MADQVHGQVQVTSPHRHLPPTMDYYRAYILLLDRYFYTGKTDPPIRTLNLNLQVNSRTGYSYSTRHPEQSHEMSASTLHDDRYNSSTTYLSAEIIRGQTGIVQSAEGHKALST

SEQ ID NO: 964437 - protein, 82 aa, Homo sapiens
MAQMGDFHKGTDGTLQAWICCKVRLMAASTHVDVGQSAHGGFIRQGNAVVFSGLHSEGVLPRTDRATHLVQVGGQAVVEIRH

SEQ ID NO: 964438 - protein, 110 aa, Homo sapiens
MLIVTIAIHVGMDRVHVRMTAPSQQHPHHRWIVVRLEELRWNVLFPFPAVDSVIFAMVDMALDAEYTVLHIRDPPARVVHPIHQALRHNDSSLLSLHTNYYTTRKIHPPH

SEQ ID NO: 964439 - protein, 147 aa, Homo sapiens
HIHIDISSHTGHQQDIPTPPHGIFSPRKLALHSGSRSAYPGISLRQSELIQHPEQARRCQASTLWRKASSFSYLSLKSSTDSLKLSISRMTRLYTMVAVRILSRKTTTEGLVIGAVVPLRDSWALLQVPVTDLQLQVRVGLLQGAHL

SEQ ID NO: 964440 - protein, 43 aa, Homo sapiens
ASLLRRGLLQVGQLLLQALNLHLLDRADLEMQIESLKEEILSV

SEQ ID NO: 964441 - protein, 75 aa, Homo sapiens
DRTCLYLNDIDSLGCSQYWIMINIITISSSTMVCRFFGWSIFPNMSSTRESYSSRTWSYLIELVAVANASVEIRH

SEQ ID NO: 964442 - protein, 49 aa, Homo sapiens
AAAVTLAGSRISNITMNIDVEEKLQYMDIFKLYLVQLILTITTVFLAIV

SEQ ID NO: 964443 - protein, 79 aa, Homo sapiens
RLYEDPQGTHLQVRLCAELSGTRVTATSDPSSSGVLEIVAGDKGLGWLCIDCDRRELGSNGGQCLSYGLDTYRIHYYPQ

SEQ ID NO: 964444 - protein, 86 aa, Homo sapiens
TQEDPLFSESNISVVQSTVSRGYGGASGVRTWLYGLVDGMQPSLLVAVWSCAVGEWRSGLPATWTDASCGRWPAVSRMDGEHVPTT

SEQ ID NO: 964445 - protein, 51 aa, Homo sapiens
KKYIKDYMNSIIGKLEEQRPERVKAFMTGDEEQIKHILAKYNKNYQYLYLV

SEQ ID NO: 964446 - protein, 85 aa, Homo sapiens
VIIALPARNRRCLVYLMLELSPPSEMSATLNGSATAGTVATSNAKTTAIRVAASSTPAKATADTTGTAIATETVDCTTEMLPFGE

SEQ ID NO: 964447 - protein, 88 aa, Homo sapiens
CEYLLDLGQMHADSDLCSPPGMYIQEYLHAELGLQLNLQVLHGAPELRNLALAATEHSSLQVATYAIIYLDLGQMHAVATYWSTYKAV

SEQ ID NO: 964448 - protein, 50 aa, Homo sapiens
CCGDLEDPRQLLCLGEEPFLDILRFFSAIFSYWVTHLVQNAAQVHARCSV

SEQ ID NO: 964449 - protein, 87 aa, Homo sapiens
ASQGSTHSQTEITSPEEPCMMHELSQMQTHITNTSVVLSLDNNRNLVLDSIIDEVNPNMIEIAQRHRAEAESWYQTMYDEQQVGVSK

SEQ ID NO: 964450 - protein, 45 aa, Homo sapiens
WWNAARAPLHPIGSQYPRILVLSLQFPLGFHVFLVPSQASWMAAC

SEQ ID NO: 964451 - protein, 80 aa, Homo sapiens
GAGGQVDALMAGDYLHEAVLDAELSQMQPLVSATSVVLSMDTTRYLDLDSIIAEVKAQYEEIANLQPVTEAESWYQTKYG

SEQ ID NO: 964452 - protein, 56 aa, Homo sapiens
MCLGCGGSMSMWTLACCSLCCGPEPHLNELRDQAVLQGCFHAALGLQLNLLVLTWC

SEQ ID NO: 964453 - protein, 112 aa, Homo sapiens
AAIISWIWVPAACEASFGLLHGWTPCDALMLSLVTAAHSPVFCMVRQSSEISALAALPLLAVGAPPRWPAPLSWRRTIPRHPMRFFSANLLILGHASRTECGSVPRQVHAPQ

SEQ ID NO: 964454 - protein, 51 aa, Homo sapiens
MACFHADAGDCSSISRCCMQNRPLVSSRLYSSDAFMLSVGLQLNLQVYRAR

SEQ ID NO: 964455 - protein, 51 aa, Homo sapiens
MRDMYEKMAEKNRKDAEEWFFTNDREQLNLRGGHQAAELVQSWQRAEISGA

SEQ ID NO: 964456 - protein, 57 aa, Homo sapiens
MTLVGSRLWLLTPLCLVCPALAYVDNAYWLWTFQWTPPAEEQQGPLRATLRVARPVP

SEQ ID NO: 964457 - protein, 38 aa, Homo sapiens
VVERCRLDSELRNMQDLVEDLKNKYEDEVNQLDGSVPQ

SEQ ID NO: 964458 - protein, 61 aa, Homo sapiens
ILDDQCTAVGLMDLTSQPITKMCKNNAPVCEPFPCPLRPSRHRQENARALLLMRVLEGLMD

SEQ ID NO: 964459 - protein, 81 aa, Homo sapiens
PDTAITAGSIPLRIALSSPTTSYTVTDEVNEPTPTIRSTWPPVVLNLRVHRLRRTNLQLLHTSPIIRENQASCDSLTLTIK

SEQ ID NO: 964460 - protein, 78 aa, Homo sapiens
MTDKIHPISESPTFSICIYEEFFYACLICYRKQYRAYGNGLTEFWGFSISFLLDSVIEGIKTSPPSLSPQNVLDKRVL

SEQ ID NO: 964461 - protein, 86 aa, Homo sapiens
QRIPIGRGYTVPKGNQMHQAAQFKGQLDTLMIWKHVMMYPNVMYHTPFLQGGLIILEGKVQRDYKMKTDNTTYTLWRYPTHTMHVL

SEQ ID NO: 964462 - protein, 77 aa, Homo sapiens
LYTGTELSWSLVLHCRIVLPSGHILHIADDFTDHSLTISSLGLPVVLIYEYTDYRGLIFNSYILPPLFLEGRRAETP

SEQ ID NO: 964463 - protein, 81 aa, Homo sapiens
RVYLTERRRDEHKASPFQSLSSRNKLRLDVDESTQTLFSAVIRRIVPLLVLPLNVEADSPCLSVPPTPRGRSKSHLVSSLG

SEQ ID NO: 964464 - protein, 44 aa, Homo sapiens
VVSGDSKNILFVIHKTSMSTIAHASDTYIVYGEAMIEDLSQIST

SEQ ID NO: 964465 - protein, 78 aa, Homo sapiens
IRTISSSGTVSSWKKMALVDSKGFDEYITELGVGIALRKMGAMAKPGLYQSLVIGKTPHHIKLQSTIENKQSFSLYPE

SEQ ID NO: 964466 - protein, 40 aa, Homo sapiens
GILPDDASCGAVQRACCAVKEAGIREQCVLSEEQIRKKKM

SEQ ID NO: 964467 - protein, 77 aa, Homo sapiens
QQASENTQGKRTQDSEGDRERPQPIRTMRTSIRPTWARQPDQDMPHKRIRVDTTMADLMPSHRHLVSSLVHLVSSSW

SEQ ID NO: 964468 - protein, 91 aa, Homo sapiens
VSNIPPSRAYVRMDRSTEEATFISLPEKPGDSEDTASAASLLEEQQYSPASPGSSSKLLTQLNKNLSLPSLQSATLALQHLVLLRCKRGSS

SEQ ID NO: 964469 - protein, 130 aa, Homo sapiens
WLYSAEISVVGEHAMPEACALKWFRDNQYLGAPSSQNPAIPTPPPSTRSLNERAETPPLPIPPTPPDIQPLERYWAAHQQLRETDIPQLSQASRLSTQQVLDWFDSRLPQPAEVVVCLDEEEEEEEEEQP

SEQ ID NO: 964470 - protein, 75 aa, Homo sapiens
RGKDKIHTGKRHGLRGDWEGPQAIQDHADEHRPMGPSPRQDMPHKRIIVDTTMAVLMPCHQHLVSSLVHLGLFSW

SEQ ID NO: 964471 - protein, 39 aa, Homo sapiens
MAVWLLLLCQGLLKAIHFRKELVNAQCAKFIDEQPYSHL

SEQ ID NO: 964472 - protein, 77 aa, Homo sapiens
MTRMMLYLVAQHSSLLKRNKGTVKDAIVSTALHVEPENYFMLLSLMVGNRYGAQTRIDSSHIDCKATPLTLYGYYCG

SEQ ID NO: 964473 - protein, 38 aa, Homo sapiens
VINSISEVLSAELPVFSKGFKYLKPFPYKKGSTTFIRA

SEQ ID NO: 964474 - protein, 159 aa, Homo sapiens
IYTTLCHRVGITKRSRRCMNPTTIHKSVLGGKFGVHTERQDSAAVGFDYKEKLAKHESQQDYSKGIGGQYGVQKARMAKNASTFEDVTQVSSAYQKTVPVEAVTSKPSHIRAQLRNPRYRTKQQEDRRKAEAAHAQRMATERQAAKKRQEELEDKPQHN

SEQ ID NO: 964475 - protein, 87 aa, Homo sapiens
MRQGLDVLGQQVVMFHAPVPEYAGGELVVSDRRAGSVPSSPSPRWAFLYGDEAVEQDRASGCSYVFEVLQDGDNGLQGNMVGQNHKY

SEQ ID NO: 964476 - protein, 101 aa, Homo sapiens
FVVLAHWRSHSPYISSSHAPRVFLVIEAHGYARACPFLRLASLYRSIESWPAHPSLPGFEASGSFIFLAGRTSQSSSKEPHIHLAVVNLHLIGVVWPTQSV

SEQ ID NO: 964477 - protein, 44 aa, Homo sapiens
MFLRVLDYPSARELFVETGSSCVHEKKIGLFHCGQSSNESRPSS

SEQ ID NO: 964478 - protein, 97 aa, Homo sapiens
SEYQLMDWIPNAQCPVLAVLACFQSALPTRGRLAISVFFKGDKHWVLTEAVLEPGYPKHIKELGRGLPTDKIDAALFWMPRISNIIWYLSIARTTNI

SEQ ID NO: 964479 - protein, 45 aa, Homo sapiens
VKNCTLNLMQRTAVGQLSLKSGTLTYTVCCRSFTRVFIYGQNHKY

SEQ ID NO: 964480 - protein, 50 aa, Homo sapiens
PSLRKATSLWCSPASPVAMAVPVVSADGSRPGLDGMQLLAMAVCLGCWKV

SEQ ID NO: 964481 - protein, 92 aa, Homo sapiens
LSEDPLNCCTVDSMGLDQGDWSCCSWFRVPQQQLAGTWFMPCLRCLVLRSTPCEVRLGAAAEQTKEALLWLHAQKTVICACLSLYMSITRDF

SEQ ID NO: 964482 - protein, 84 aa, Homo sapiens
SERIKSLWLQSTVSSGYCGASGCRQRLRPGWRKQLLLVLVVLALDGGCQFPAVAEPLGSGLQLLLESGSFHPSTYTTYLSRSQQ

SEQ ID NO: 964483 - protein, 45 aa, Homo sapiens
PPASARRHHRSSSSSSSSSKSNSDLGIETARVTLAAAAAATVVAG

SEQ ID NO: 964484 - protein, 53 aa, Homo sapiens
PDAQPPPAPCLEKSVEAAAELSAKDLKEKKEKVEEKASRKERKKEVAAARGWG

SEQ ID NO: 964485 - protein, 38 aa, Homo sapiens
KRSGTLSSICWIPHTQYSITIYVGRWGQTAQGGAPGSG

SEQ ID NO: 964486 - protein, 117 aa, Homo sapiens
LLSERHMRRGPARLTLGLRTVRPMMLAGRTLMLIALPARSERGGGVLDGGTAASNRAEATPNGSATAGTERHLQRQDHCHWSSCFLHPGLSHCRHHWHRHSHWRRWTAPQRCCLSEK

SEQ ID NO: 964487 - protein, 99 aa, Homo sapiens
SVGTWLNAMGGGSSYSYDSGLGVGSGFSSSSGRAIGGGLSSVGGGCSTIKYTNTSSSSRKSYKPKVLLLAHGHTVLKAQSLTAEPSPHVAFRKRGDPLK

SEQ ID NO: 964488 - protein, 75 aa, Homo sapiens
PSTAPRKWKEEDSVGTRGPWKHLRGPPAMGRPHVDTFKTSRWAHHSPPYIFSMVAVIWTWFNFQSRVSRRGSGDL

SEQ ID NO: 964489 - protein, 82 aa, Homo sapiens
CAMVMYADVTTATLFSLAMAGCQFSGMMLATLLHWGGPWLGGTSRLAEPCPPPLARCSDCRRTQLRASRGRLLAGGRAVARG

SEQ ID NO: 964490 - protein, 91 aa, Homo sapiens
MVLWMVRKQLLLWTVLLGGWKWRSDSCQWTQPWGVASALSEAAVHHHATSPPPPPAGRAISTKVRLLALGPTVLRPLSGCRALSSCCLSEK

SEQ ID NO: 964491 - protein, 79 aa, Homo sapiens
PDAELPQFTKLPPSPTFKLEVLTSSIPGAVDEMTSWNGIRTVKKSHYYHEASDAGHDGNAMEHDLPHAPRHMHPLVGVP

SEQ ID NO: 964492 - protein, 53 aa, Homo sapiens
AVVQSPEFLLHGCDNAQDAIKSPRSLTMHKRVVFCDSLLHLSSCQLYQEAQSK

SEQ ID NO: 964493 - protein, 39 aa, Homo sapiens
MLREEEYVAPPRGPLPTNTQDGPRTLSCAVDENLSIPRN

SEQ ID NO: 964494 - protein, 68 aa, Homo sapiens
MPTQPGSLGSSLWLLQQSPCPLQRQWWPGWLHVERAGFGSRSLYGLGGSERISIGGGSWPRGGVPETR

SEQ ID NO: 964495 - protein, 33 aa, Homo sapiens
ATAAPETTSIAGRVSSAVLVGPVLVLVCLLAGA

SEQ ID NO: 964496 - protein, 59 aa, Homo sapiens
MHSLLPKPQLTAASIAPSCSPGHKPELNMVETPLASYPAGKEPPPETTYHSVADGATAV

SEQ ID NO: 964497 - protein, 53 aa, Homo sapiens
ACNVLPLQWRSLGAPQAIQTAGCKASPPHAPPRPPLPLELVTLEMLLKPEWMT

SEQ ID NO: 964498 - protein, 53 aa, Homo sapiens
EYSAPSLYDAISPGHHLTLPVTYTVNLSQTLGHFILPFCGHSCLLGGARWLGG

SEQ ID NO: 964499 - protein, 75 aa, Homo sapiens
TTIHYNYMCNSSCMGGMNPEAILTIITLENSSGIYLGRNSFEVRVGACPGRDRRKTKETLRTKGETHHELPPGSP

SEQ ID NO: 964500 - protein, 60 aa, Homo sapiens
MQTWTGGVHELYGQSSPETRRFVCTSTDLQRGEHPLSWFPHTQPFSDDKVFGSLSPIRGQ

SEQ ID NO: 964501 - protein, 71 aa, Homo sapiens
MQLTLYISSNLRAADTQLQHDGRESKAGRRWSPWGRPPSQINYELFNCGNFNIRYWSWNYRGCWHQCCMDT

SEQ ID NO: 964502 - protein, 79 aa, Homo sapiens
RGVTRLRVAANCLISPDSPVYCLTAACNEILGTIYISGNCPGHVNDLKQYSSNSMYMNYNPKSNKIQFLAQVYCILALI

SEQ ID NO: 964503 - protein, 32 aa, Homo sapiens
MKGEIGTLAGVRSSSLADVHLDEVSLSPQTTW

SEQ ID NO: 964504 - protein, 38 aa, Homo sapiens
VKHERIRILGSVIVPQLHLHLLTEAFHGCTGSFFLLIL

SEQ ID NO: 964505 - protein, 92 aa, Homo sapiens
SFHRLMSGQYDYCVITVVIFTVILAYERIGIHLSPYSKDVVQDNYNSFLSTAVGPPGSLLYIRASIMSISETGRSSSGKTHKGNLCRAVGRI

SEQ ID NO: 964506 - protein, 125 aa, Homo sapiens
NQLRHIRRWVQHLPWNRHARTRMLYEDEVLIFKFHPIDGLANSAIMACEVTPLHTYNPGNILCKQDTLKPNPFSPVLSTRKFSAVIWDHCLQTASKETRPKGSPSHGTVEAHGGVRSDRTNPIAL

SEQ ID NO: 964507 - protein, 32 aa, Homo sapiens
MAWGENVLITRSTDNEDTETDGKRVSNILLAG

SEQ ID NO: 964508 - protein, 188 aa, Homo sapiens
MAEWALVVTAGRESAPGYGVPAIPKDPNLRCEEITIPMCRGIGYNMTSFPNEMNHETQDEAGLEVHQFWPLVEIKCSPDLKFFLCSMYTPICLEDYHKPLPFAGVSEREPARDAHPSCSSTASNGRREWRASTCPLHGDPDNLCMEQPSYTEAGSGGRSGGSGGSGSGSGSGGKRKQGGSGSGGSGAG

SEQ ID NO: 964509 - protein, 69 aa, Homo sapiens
KSGRHQCSIDLKKNVLVIGTTGTQTYFLPEGELPPCAKLVSGTGQDESSDKEVADTIKHSVMNSGRKKH

SEQ ID NO: 964510 - protein, 39 aa, Homo sapiens
MADCGHIFHDTKVVMDTLARVLSSWMVQEALLMILLAGD

SEQ ID NO: 964511 - protein, 115 aa, Homo sapiens
AEWHSGTEKCLPAQYGLFLGTSLGSVLSTGETQLLSVRVWTICVFHLVMVHEAQSLQGIALGSHSSTPEELRSLLPENTFTEDGRFTPSSSQISKKFSSVTSSGALKKCSTLLGC

SEQ ID NO: 964512 - protein, 39 aa, Homo sapiens
IRKSPVAGCYLAASVSCYYWETISIWLCPGTFNILLAGD

SEQ ID NO: 964513 - protein, 80 aa, Homo sapiens
AGDLYRIPQQEWHSVAILTESEHFGYMLLSARQLVFLVVLSTLAFQIKYQCPLFLSVEELLNTFNVLIFIITCSYPIVLI

SEQ ID NO: 964514 - protein, 35 aa, Homo sapiens
LFRGAVQLQNSSGPERIRIFGSPRSHSSTFIFSSK

SEQ ID NO: 964515 - protein, 149 aa, Homo sapiens
RGSKSIQDLQNRHLYTTTGGETEFTNDDLPPTAYYITSVLSEDNSIQTMITFEQGGRWTAPEEDLKTVNVMLQQKTRMSAAFIFMLPESISQKLNVPMAPLSEPNAVSIVIAHGSVRDAISVMVPDVSISDDGGYSWTQMLAGPHYYTI

SEQ ID NO: 964516 - protein, 68 aa, Homo sapiens
ARMAYQETCILFIRIFRITLSCRRPAKAMMTFCLIQVLTGFFRVCVNNKLYEYVFLCDTNPYRDYGLG

SEQ ID NO: 964517 - protein, 49 aa, Homo sapiens
  misc_feature (43)..(43): Xaa can be any naturally occurring amino acid
  misc_feature (46)..(46): Xaa can be any naturally occurring amino acid
AFLAQRRATEKATRAGCHAPIQATYAQASAGSWRGSYLGSANXLVXPYC

SEQ ID NO: 964518 - protein, 159 aa, Homo sapiens
RISRGEESGSCHKPQDRTLDPFGLPPRNSMEIRIIFANVSVRDVKPHSLDGLRPDEFLGLTHTYSVRWSETSVERRSDRRRGDDGGFFPRTLEIHWLSIINSMVLVFLLVGFVAVILMRVLRNDLARYNLDEETTSAGSGDDFDQGDNGWKIIHTDVFR

SEQ ID NO: 964519 - protein, 75 aa, Homo sapiens
ALARHKSSFLQVVSLSRIMTEPSMSAGASSWRSAYNRLDALKKPLPLYIQRVHAGDIVTWDVAHIPGGQGSSLPP

SEQ ID NO: 964520 - protein, 74 aa, Homo sapiens
DCGIIWRTGAAAVVRLYLRDIPGPEKKLSEFRMVASLRGVHGLSAMISPSRPRQPTPNVMGKVLGACSASAIGP

SEQ ID NO: 964521 - protein, 80 aa, Homo sapiens
WGVPSDIDLGVRLCCEADVGTVEADRRQRLGPGGATKMHELGLDEVELEKVQDLDREGWEAGAGSNEAIVTIELCLWRLL

SEQ ID NO: 964522 - protein, 124 aa, Homo sapiens
YTIFPGGRRGPPTVFYIFVMSLSSVLRLESSSIGCSFPDCLRPAPFPLVVIAMALARDSGNLVHPFMRVTELDDEAFGYLKRVIVTPAVYPRFIEFLHFDIQSTGQKSHRVNTRRGPSRCFVLI

SEQ ID NO: 964523 - protein, 67 aa, Homo sapiens
EHHILGRSKPCRASIISTTQVQQTLYLVSRPLDVIAGYNTYRELDQYFLLNSDLNFQHCPLSLAERP

SEQ ID NO: 964524 - protein, 97 aa, Homo sapiens
EPGEHHFSDAKDRVGASVISTTQVQQRLLVFALSVLLDIIVQGLAVLSLEFRPNFQHVHYHYRETMILIRTLSRVPLPFMDVISTDQQNTGACFECT

SEQ ID NO: 964525 - protein, 93 aa, Homo sapiens
MMRGDYNQASYSKDLYPLLPSAFMNVTRINFARIAQAYTPVIQTSYLRSAYSAHPVYVPQYWEDSIGRGDEPTVAWFISFFVCLVMSKFNFKF

SEQ ID NO: 964526 - protein, 37 aa, Homo sapiens
MLAWMLGAQVSIMNYEEYKHCWDTFVDHQWMSQQSAW

SEQ ID NO: 964527 - protein, 33 aa, Homo sapiens
MGQQSQTETTQKYHLAFMMVTNVAKMTRVNKRL

SEQ ID NO: 964528 - protein, 40 aa, Homo sapiens
SRVIPQALVGEGQSSAHISVSGNLRTFVCLHEEDSCRLVA

SEQ ID NO: 964529 - protein, 58 aa, Homo sapiens
MAYQQSSVEFVVLYLMNLPTILRLIQVCAFSCSEDARLVSGVLTMALLAKLYLVHSLC

SEQ ID NO: 964530 - protein, 42 aa, Homo sapiens
RRVLGHGVSAKTKDGVREVQKLAYVKSCAAKVYVRENTIWFP

SEQ ID NO: 964531 - protein, 117 aa, Homo sapiens
MPTLEDTLHLRNKVEAIEIDNLAREICSRMANDENIISRHIKQGTNPYTFCIMNQLEITLQGEPKLRPPKPDYYLRTAKRAHPVYVVTIDVKIHRSRRRTYRAGRWLVVHDRILVQL

SEQ ID NO: 964532 - protein, 82 aa, Homo sapiens
QLQQLKEFEGKTLGVSHQQKAWYFQRMNEEKKKQEEKKTKFENLCKIMKDIIGEKKLKMVVVSNRIGDISIAVVVTMHIMAG

SEQ ID NO: 964533 - protein, 36 aa, Homo sapiens
SHTALVSSAVGVIFINTQTKFIIASRSCKHVSGDLS

SEQ ID NO: 964534 - protein, 73 aa, Homo sapiens
MYPQGKDEREIITKHHIARTNPYTFCYECTRINFARRAKANTPVNQTSYLRYCLESRPVYVGQQCEDSIGRGD

SEQ ID NO: 964535 - protein, 70 aa, Homo sapiens
MTRTTEMQGVTEKSYDVNSSLSHDVSTDHQSALCFNGFFWTLALEYEIDPSSIGGDCQRSNRKEYRSMPE

SEQ ID NO: 964536 - protein, 33 aa, Homo sapiens
TVNDASTIRYRPLIKVNDTIQIDLETGKITDFI

SEQ ID NO: 964537 - protein, 63 aa, Homo sapiens
EDYAVINPTLDYSVSDTTDSRTTIICMNKRNFNSSAAQSGCPDPTSMCRKPYCMIWTLEKDNA

SEQ ID NO: 964538 - protein, 47 aa, Homo sapiens
MRSDPTLLWLWHGPVAIAPIRPLAWEPPYTMGVAQEIARFYVPRVLC

SEQ ID NO: 964539 - protein, 92 aa, Homo sapiens
MCSRGSRNTKAVVSAAGNHSKRFSFAEKADFGLKKPCVHWPCATDPRASSGGPHLGPSSETAQNALLGAAFCKGKLGSGNKPQPRCGLAAFV

SEQ ID NO: 964540 - protein, 110 aa, Homo sapiens
CNRPPSRMCYFSALRNEATLRAKGQEVSLLSCVPAITRTIKCAHERSVHLFIDSVLHPGMQSTAYLCKDMDSFSQGLCPSCKKGRCTTLGYYTHQEQQSKKSKSLFLMTR

SEQ ID NO: 964541 - protein, 72 aa, Homo sapiens
PIPIRKPVSTPLEPSSASYGADITRREATTLVSARGDHTKDCPQGAPVMAQWLMNLTRNHEVAGSVPCLWMS

SEQ ID NO: 964542 - protein, 76 aa, Homo sapiens
ENYGYPPQLRSFYFPARMIPTSKYLINNLTSQHPTMTRVKAEAQEQDDNHTQDKRTNLISYTSILNHLLLPFLFSS

SEQ ID NO: 964543 - protein, 44 aa, Homo sapiens
RLLEDPPPPPDSPILKDCLTYSLQVLETLRSIIAASSRPPHSLC

SEQ ID NO: 964544 - protein, 70 aa, Homo sapiens
RLHGTPFSVQQPRTGNSQHHASHQPPSVYPQGLQQYTTVGYLHAPLVSDCCGRELLMSLLVMSYLKVEAH

SEQ ID NO: 964545 - protein, 43 aa, Homo sapiens
GSTAPRAGGHLRSVISLCTTHSPAAARCALHADLSDAGCRAGL

SEQ ID NO: 964546 - protein, 62 aa, Homo sapiens
LCPYYAHDRKFGIAVRLAIQAYARREITAILIQYPLKLHRRSRSHNRPRGLQSSSHVGVVPE

SEQ ID NO: 964547 - protein, 70 aa, Homo sapiens
ELGTDLGQRCCLGRPGLAYPRSFYTLYPHEDPVVAIGACRALQSLFGEISTCYGACSHEGEAVEHCQREY

SEQ ID NO: 964548 - protein, 112 aa, Homo sapiens
KLGTGLGRRAAWDGQAWHTPILYTLVPHCKTRGWLEGACRGLRLVWGIEMKLWSQLPGRRSRGTLPERILRIRGIYQLHSQGLKSKGLVVLEATVWGESHGARKGKKESRVQ

SEQ ID NO: 964549 - protein, 108 aa, Homo sapiens
IGSVPVSKASCEHGRVRLRSPGRASPIVFTRTFAASSVGTSRAWLRSLLLPSEHDDDRGFSMVIELLQSIAPPQHRSGAWLGQTPGGPPLHHDSTWVGMRRMDRDAIR

SEQ ID NO: 964550 - protein, 59 aa, Homo sapiens
PAPWISFFAFLAPWDSPQDWGFMDHLPLTLQALTVASVDASDPQYALLAMFHGFSFRGA

SEQ ID NO: 964551 - protein, 82 aa, Homo sapiens
RRAVSFTVHAVITSSSHSPIIYHMIALQSIFICGFTPSSSFMEYSCFELSSEPTSFWVRYLLDCFFDYCRMRNARPVYRLMC

SEQ ID NO: 964552 - protein, 68 aa, Homo sapiens
RCTLDSVISQSPEYPPSWEPGIYTQISQCSQLRSSPLYEYIQATEISIPPLIDVAYILTPAKASCTGQ

SEQ ID NO: 964553 - protein, 114 aa, Homo sapiens
GQCAQRAPRPLYKYIRRAEIVEYLPLSDVAMYLDTVPKLPSRENEKHWVPSDNSEVSRLWDTSLYIRMSLASEILNYAHFTHFVASAFMLPLSSSLHDVFLLLFVAAVDRGDPL

SEQ ID NO: 964554 - protein, 119 aa, Homo sapiens
VNHVPYRQIRRIRHPYPTALTVNAIHGSGALPICVPPHHRLHIVVGIPRSGHSLHQQSNRNRPRVMSAHSIVHSIRTPRRKNEEKNAPHKETSYAFMLCMKELRAKVVALCSFEDSAAI

SEQ ID NO: 964555 - protein, 107 aa, Homo sapiens
CAPALYEYIQEQRSQYRPETIHIRGASLKGRLLFIGWIKVDGDTVYQAKPKDSAEPALLPTDRAAVDDSDDNGQGQPDPEQQSISMIEISGAPWAPFNIHIEGNASL

SEQ ID NO: 964556 - protein, 70 aa, Homo sapiens
NHDRRQHEGVNRGTAKSGRYNPRKEKGHVAGFCEPVHSSALPAVPDALQRLSMRYIQEAEHLNSPPLKLM

SEQ ID NO: 964557 - protein, 41 aa, Homo sapiens
WVRLVPSDIALLGSSPGSSRRTAVWISRDLIGATLLVVVRH

SEQ ID NO: 964558 - protein, 108 aa, Homo sapiens
MTCKRNYISTQHQNVYYGVALRAVGGYQQKGSYHQIASYHDYYACYLKCNEKANFSVLTDLPVAPVTAGCAFSSHQETESRCSLSQNSRLSSDILIRMTLYRNRNPVD

SEQ ID NO: 964559 - protein, 60 aa, Homo sapiens
QQTASLTAQRHLSLRIKPIANLHPAPRPASATPRLSESLHIIHRDRVVIVHPGPPSSSLS

SEQ ID NO: 964560 - protein, 54 aa, Homo sapiens
MGRGNNRGGDYRCCELVIGNYAYLVRFGLGGVGAGLARKKARYGDSAVCDARVE

SEQ ID NO: 964561 - protein, 77 aa, Homo sapiens
ILVLIALTLPIILDVPHEVNGHAVSFASVGVNGAETEEYTDDGGLIFNSYILPPLFLEPGDLRLLDVDNRVVLPIEA

SEQ ID NO: 964562 - protein, 98 aa, Homo sapiens
GTLGVWKHNMNAEPRMMKTVPYHNDHEAQQTTPGLQTTVSVSSDIGAGLSGSQCFMKRLVQSPVLHLPGITLLSRRAEGEVTALDNGVITLGAAAGLR

SEQ ID NO: 964563 - protein, 159 aa, Homo sapiens
GPNPSHSPSLKNRKPSRIPARFTTVNESSSVHLPGSDHIRKFTKQDRSHSFSYTRHCTIETNRVSKEFIEFLKTFHKTGQEIYKQTKLFLEGMHYKRDLSIEEQSECAQDFYHNVAERMQTRGKVPPERVEKIMDQIEKYIMTRLYKYVFCPETTDDEK

SEQ ID NO: 964564 - protein, 82 aa, Homo sapiens
MADQLTEEQIAEFKGALLIVGQKMTMAPSQQRNLERDMRALGQNPTEAELQDMINEVDADGNGTIDFPEFLTMMARKMKDTD

SEQ ID NO: 964565 - protein, 127 aa, Homo sapiens
MGKNDLQLRHIKRPEGRKPSDVAHKSIGASWWFGYQKQNGLSLGHSTCREEVFVEASSGTEDIDSQKMLCVPRALYEELLSNYQQNRNEMRHLQQELERTRRQLVQQAKMLKKYGALVSEMQELRDL

SEQ ID NO: 964566 - protein, 80 aa, Homo sapiens
  misc_feature (57)..(57): Xaa can be any naturally occurring amino acid
  misc_feature (70)..(70): Xaa can be any naturally occurring amino acid
  misc_feature (73)..(73): Xaa can be any naturally occurring amino acid
RRWIVKIYKKHREIKLSGKEHQYKLSVTAYDCGKKRATEDVLVKISIKPTCTPWVAXDGTTVIEYEPGHXARXGRLFQNI

SEQ ID NO: 964567 - protein, 82 aa, Homo sapiens
IIVSKKPGCVYRGKMPRFALQDVGVDLVCDRWNGEYTCRCFWVALVCISLCSHARVCVGGRMCTTECTRGDFQSQDFIIVIV

SEQ ID NO: 964568 - protein, 129 aa, Homo sapiens
MDLAFVVLGIHDDWQVGRHVHAPDRESEKSPAAEYAPELKSCSTRRRSMGLSPSCREPTPFSSVSLSVLSLSFSRYGIRSFSVQCKNLCRWMSAAQVVRMSMAVRRVCLRDGTKTMTGFLGECLVIAWY

SEQ ID NO: 964569 - protein, 66 aa, Homo sapiens
TSLGRVAAPTHPGWDQDHQHFSITRLSQDGVGGRSMCKGAKDTLMKATGSHTPLGCCLGRKALVIP

SEQ ID NO: 964570 - protein, 105 aa, Homo sapiens
MEHRGKEGRTAPKMSCATADESAQADCSVYKYILYLYETKLNLCLPGSSNKPTSDSRVAVRCTTLHPDNLVFNSRDGVSPCWSGWSQSDLVIRLPLPPKGLGLQA

SEQ ID NO: 964571 - protein, 34 aa, Homo sapiens
RYHISRGVGPLHQYASTGAVQLSSPVADYSDLGY

SEQ ID NO: 964572 - protein, 37 aa, Homo sapiens
SFDQDPPRVVFGFEASGSFIFLGCESSRTQSSLVTVT

SEQ ID NO: 964573 - protein, 94 aa, Homo sapiens
SAYLAKGDIVVEAWADLLQMPLSLKESLPLYVVADVDTLLTVLVGIFFPSVTGIMAGSNRSGDLRDAQKSIPVGTILAIITTSLVYFSSVVLLG

SEQ ID NO: 964574 - protein, 51 aa, Homo sapiens
YGPVPYRYQPMTGIFSCTEGPKLHLSPLAQVIKSFLGYELLTGSNLALDSI

SEQ ID NO: 964575 - protein, 90 aa, Homo sapiens
LLSRYIGPTFKCLQKSEDVNVHLVATITPKHVTKNNNQNNKQKQRNETKKLPVPTTSRCRDEVLTSLPQRGFLSGMSVKKMAAPWPGSKL

SEQ ID NO: 964576 - protein, 59 aa, Homo sapiens
RALLVSRAQELCSSSLQPYGVSASFYAKQLIPSHLWSFLVLLFTTFPTSPTPSNLPRAQ

SEQ ID NO: 964577 - protein, 91 aa, Homo sapiens
GERVLHQQDGQVGSVNVQPADKVAALSMLSNSTSSLTLKRQYLGGKSVSYIAERLSFLQQAWEGTSSSGAFTACKQEGDQASSHWQIEYET

SEQ ID NO: 964578 - protein, 63 aa, Homo sapiens
MDQLRLLIILRKAAEEAWHADLQGITIYVAQDRTADNSDDIDKQSATMTSDNADDKAAIILDP

SEQ ID NO: 964579 - protein, 61 aa, Homo sapiens
EEGRSAYDLMVMLAKRIPGWSECNLVMKVAVGLALTYHTVDCEQGFVRRGSQTSMPVCHGH

SEQ ID NO: 964580 - protein, 34 aa, Homo sapiens
LDFRCNVDWSKERPPYRVCENTSLSLGQQEQYQY

SEQ ID NO: 964581 - protein, 86 aa, Homo sapiens
YFRVNTDAEIISSKKGHVRKMLRHADASAIVEYAYNDKAMYEKQRNMLTEELNGNIIAAFTSQQITQLWTKCKRYSQKNKNIFWMK

SEQ ID NO: 964582 - protein, 40 aa, Homo sapiens
MRCNYYTNGGLKREYYSIVIVKESQVRLVLGLMGERLSAL

SEQ ID NO: 964583 - protein, 61 aa, Homo sapiens
MSNPTQADQFRYRKMTSFLLDYYFGRLELDLRHTIIPAKSPEKCRKNIIPDLLAMNPLHAQ

SEQ ID NO: 964584 - protein, 66 aa, Homo sapiens
  misc_feature (1)..(1): Xaa can be any naturally occurring amino acid
XSHIVQHCYCRQCFDSALSSDTVRNWKTPAGHHSDLPLMVGTLWNAFFLGGLKSPRCLVSGEQINN

SEQ ID NO: 964585 - protein, 59 aa, Homo sapiens
HDIWPGSTGGSVIPSTNARIQRLVTFYQSGDSWEKYVHSVRYQSTLWPCIGSGIPTFTD

SEQ ID NO: 964586 - protein, 185 aa, Homo sapiens
YRWHSVIPSTNARIQRLGVVSNWRFMGEVCALCQNTSATANGRGIREWHSHPLQTYPSSSGPVEVFITETPSQPNSHPIAVKCTTAISHFQVHTQVETWKFCRPLEGSYHTRPLKLLHHQRPEAWLWEPSASSISVQQYGHQEVTRFDFSNTSIMLTYNQQHLPMETRLPFLLYVATSESMTEYR

SEQ ID NO: 964587 - protein, 153 aa, Homo sapiens
WCCRGVKQWPMSYCREATRRAGSTGGCSCGSEQGAREAGQMLCPLGAATPGGCGEDTPLPGPWPALGGFCFTVNAGLLPSPEMFPWKEGVCLKVQMLVCMEWFGQLNQQVSEVFNTVAQELLQRSDEEGQAPRGDAAVALNKGPARQAKCCAH

SEQ ID NO: 964588 - protein, 113 aa, Homo sapiens
TDYSRTHRVTSSLTARDTTTVSSWLMPRLPFCTSSSSVLTIDGSMAAIFGSHGPGAYVSLWQQLYMLSADTGCKDDNHQILLPRDRENREPDEPEGIGRLTGADTTDYTRTHR

SEQ ID NO: 964589 - protein, 182 aa, Homo sapiens
SEVALESREENPVCFLGEHWTAEEMQYLNIKEDCNAMAFCAKMRSSKKTEVNLEAPEPGVEVIFYLSDREPLRLGSGEYTAEELCIRAAQACRISPLCHNLFALYDENTKLWYAPNRTITVDDKMSLRLHYRMRFYFTNWHGTNDNEQSVWRHSPKKMKGKRGDEKEIRLQLQSAETRRRNA

SEQ ID NO: 964590 - protein, 74 aa, Homo sapiens
MVKGGAKLGRIGVITKQRGGTLDSIDVVHVRAANGNSFATRLSNLFVLGKGNKPLDFSSPGKGIRLTLAEEKKR

SEQ ID NO: 964591 - protein, 190 aa, Homo sapiens
LHERRGANEGQDDQLASPGSRRPRSCRQSVVIGQELGGGILCEQGHHLWQTVGQARGHLGALLVQEQVVQRGDGIEQDRLHRGAEHADQSRDATRLEDGEQPLPVVGEVVQELVVQRAVSRSLVFCMVRTTADTSWGEPIRARRDASFFDSWFTIMAALVTTTGSSSSEQFGELGQRASGQLGIVLVVEK

SEQ ID NO: 964592 - protein, 51 aa, Homo sapiens
MPQLTTVAARLELGIEVAKRPLAGLAVAVQGRSRCCGCESCRTFLINRELL

SEQ ID NO: 964593 - protein, 58 aa, Homo sapiens
MLNEDMRKHDDQGCHVDYDFDIRGIFTILSESIEKQINLSFSKTYPGCNLNKGLFKSQ

SEQ ID NO: 964594 - protein, 134 aa, Homo sapiens
PCLLVGLLMKSSGRCQYGPRSRLLPKKPWLWLLLVRSPGGSQSLGHRGGDPDTVLPAPPVCSPQLLVLTRVLLEGWQEAVTSRVQHSQGFLGGPGNRMSCCVAAHGQLGLKASLGTHRQRGPGSLSLPQGDRAN

SEQ ID NO: 964595 - protein, 228 aa, Homo sapiens
VSGSNIVVHSGQQDRFYERLSSPIKKRVHLQGFFHDTLSERDRAPALARIRSFMQARFAEPLRELSRRDAHRHGPTFEESEILAWPPERNSLADLRWRVVRGGLRFGGTLSEGIALGLQTGFDSGSTLDYIYRDEARGKGPLGRMVDRNYLDAIGWRGIRVRGQHLQELLRDAAQRLRGQGTPVHVLDVAAGHGRYVLEALGQGEQRADRIVLRDFSDLNVTQGQALI

SEQ ID NO: 964596 - protein, 144 aa, Homo sapiens
ASNGATGLAYPAQPQQQQQPPHHLPQQMPVQHLRLQTMMEEPQTVPEMPVETPPLSTIDMESQERIKAERKRMRNRIAASKCRKRKLERIARLEEKVKTLKAQNSELASTANMLREQVAQLKQKVMNHVNSGCQLMLTQQLQTF

SEQ ID NO: 964597 - protein, 105 aa, Homo sapiens
MREKDMKKEDDVEEEEEDVEEEEEDVEKEEEDVEKEEEDVEKEEEDVEEEDVEEEDVEKEDVEEEDVEKEDVEKEDVEKEDVEKEDVEKEGVEKEDVEVDAAANL

SEQ ID NO: 964598 - protein, 66 aa, Homo sapiens
MEIHEIMTPERWHTSLHIMKIIGDQVSEVEQGTDLSMSASLCQYSLYLDSFFRDFSKTLASYSALG

SEQ ID NO: 964599 - protein, 50 aa, Homo sapiens
MLCIMGNISRSPIAEADSGNLYTDQTSQRIGRVDSAVRGEGALGYAVQGE

SEQ ID NO: 964600 - protein, 108 aa, Homo sapiens
IVDTALFSSVVTERSGSPDDSSICLSPTTLSNHRIQIVIDLLHVPEQASLVQGTDILELASLLCRSCFNSAALILIVRGVMSSLYFHESIIISTASNCVRVKNLSHKF

SEQ ID NO: 964601 - protein, 40 aa, Homo sapiens
MVLLRLLLRVLLPPLLLVRLRLWRRLFSWLLALLTLPRFS

SEQ ID NO: 964602 - protein, 129 aa, Homo sapiens
PRLIKMCKKIAVRHLQKQGAGPSLRKTLTPDYTIGCKRVLISNDYYPALSRSNVQVVTDNVQRIEADGVVTADGIKHPADCIIFGTGFQATDPLPRNCIIGRHGIDLMDTWQDGAHAYLGTTVPGYPNL

SEQ ID NO: 964603 - protein, 61 aa, Homo sapiens
SGERVLALGFLFLQEEPSDRELLSEALRLSCPGGEQQPGGGSRNVRRLIEQAALELLQLHL

SEQ ID NO: 964604 - protein, 131 aa, Homo sapiens
RPTLTLQTSKSPDAYVECVVPKFEKNGMTSTVTQNSRHARIVVTSKIAADNILEVYKSQDGGKVFLYERKPLASAFKPSRFEHAAQDCLSSTGAGLSAGGDLMWGLSSPSEAAMASLRSDSDTEVIPSQRR

SEQ ID NO: 964605 - protein, 34 aa, Homo sapiens
KPLWYGNQNDGPQQDHPEQWSGSSNNGPPPPQGK

SEQ ID NO: 964606 - protein, 169 aa, Homo sapiens
MDLIEEIRGDKTQALCEREVIQEKECALIRDSFRDGDPVHRHRKLYELALRPHVGLPVHFGQMECLKVIVSSRFTGKRVGYLGVMLLLDERHDAHLLITNSIKNDLSQGIQAVQGLGLGSLSTRGSAEMCRDLAPEVEKLLLQPSPYVRKKAILTAVHMIRKVPELSSV

SEQ ID NO: 964607 - protein, 40 aa, Homo sapiens
GRYCGTAGGEEVGLSDSSWTSNQHGADFVSLGEKVHTFPF

SEQ ID NO: 964608 - protein, 48 aa, Homo sapiens
MTRISGRSLSTVSVASRMRARIIGSFSGIATSPMIANGSIGNSEASPS

SEQ ID NO: 964609 - protein, 46 aa, Homo sapiens
DAPPKDDEMETDSRRRKKSLSVDFSLGMRKSCPCWPWLSRVQDFLI

SEQ ID NO: 964610 - protein, 33 aa, Homo sapiens
TDIIHPSIIQMYIEHLCLGPIGELVTTKTFLSH

SEQ ID NO: 964611 - protein, 55 aa, Homo sapiens
SWPHTQCVQVCKLIILATDVLVDRARSCPCTLKMTTCQVESGSYEDDGTSLPPNN

SEQ ID NO: 964612 - protein, 70 aa, Homo sapiens
TPAWTVVSRSPHRCCLAAQSCVYRCGNSSSLPRMSLLVSTILALVVKDDKSQVESGTLEDDWNFLCHLRR

SEQ ID NO: 964613 - protein, 61 aa, Homo sapiens
EIVGSCGEGVDSFPVQRIHPIGRELRRTAPCTHRHPDKARASGLNGHISNAKRKTHTNNSS

SEQ ID NO: 964614 - protein, 33 aa, Homo sapiens
APPSQGGEIEQHGMVRSEISSTRTSVSQIPFYS

SEQ ID NO: 964615 - protein, 55 aa, Homo sapiens
HIGFMKKQWNIEHLFHRSGTVGGQDTIRPLWRHYFQNTQGLIFVVDSNDRELVEQ

SEQ ID NO: 964616 - protein, 70 aa, Homo sapiens
SSRGFPGEKGEVGCNWTGWSGLVKMETKDCLVLLERKGILEEGGNGRTRNLRFMEAEAKRTYRSLDVEEP

SEQ ID NO: 964617 - protein, 42 aa, Homo sapiens
CAMKSYEYIVRKSTITQYTRTASAIVLVQSLSVQVVLPDQHH

SEQ ID NO: 964618 - protein, 90 aa, Homo sapiens
MDSDTPPEGLLARPPDDSGHQDDGPQQRAAKTWMAITDILAHLLFKISNDHPNEDTVNSLYPDFLLQPAGSINILSVGTHQPADPQEEEE

SEQ ID NO: 964619 - protein, 79 aa, Homo sapiens
PSLLRLFSAVLGGSGLGHWALLLLLRPAVLLEAGDGLAGPSCRLWLHHRGCTLSRAWMAFDRQQIRLPRELVEGTPLDV

SEQ ID NO: 964620 - protein, 36 aa, Homo sapiens
MLTAPRSRLGSPGAVLTALGLLDVSDIIRIPIYFFW

SEQ ID NO: 964621 - protein, 60 aa, Homo sapiens
PFLLFFFSDIGRSSSSVIIEKFIKLSSLLRTPSTTTTSFLLFGGFSLTSKHKNMLGLLHI

SEQ ID NO: 964622 - protein, 74 aa, Homo sapiens
MVEPDIQEPSEQPSSAQPPGFSALTPIRVSTSPSRHGAFLHLRIDGLGSLSSIEFPTPHLALYWSLEYTESCAQ

SEQ ID NO: 964623 - protein, 49 aa, Homo sapiens
TTPKIYQRDLDRNGADGASSVYKSPALHDKTEVRALKRFRRLLLAHHIT

SEQ ID NO: 964624 - protein, 42 aa, Homo sapiens
YQDSILNQSNSHIRLQSSYTLQLLLVLPADIGWPSVHDDAMR

SEQ ID NO: 964625 - protein, 38 aa, Homo sapiens
LMLTATTKAAAAAAEATAIASPKATTKAAAAGGIAAGG

SEQ ID NO: 964626 - protein, 108 aa, Homo sapiens
GNSSWLLAPLSGGMQHRQVFIIQRSGKSYLAGREDSSYTYESGSTYTSRSTDELQTGPPFTKAQPAQTQAPLVLQVDGTGDTSSEEDEDEEEDYDDDEEEDKEKDGAE

SEQ ID NO: 964627 - protein, 132 aa, Homo sapiens
MLTAPHLRDYFEQYGKIEVIETHELTDRSAKKRGFAFVTFDDHDSVDKIVIQKYHTVNGHNCEVRKALSKQEMASASSSQRGRSGSGSFGGGRGGGFGGNDNFGRGGNFSGRGGFGGSRGGGGYGGSGDGYN

SEQ ID NO: 964628 - protein, 52 aa, Homo sapiens
MSCHRCSPGAQKTVDASVHQINGQVVPASPSLLVNMLLCETAEEDTAAPGIR

SEQ ID NO: 964629 - protein, 97 aa, Homo sapiens
RIVVLLMRNRMLGEDGGRWPPGFRGSLAVRPSSWIPTIITRGLGRELLSLTEVSGVPDRVADYESIYIWYGESKVCIVHIIYLCSELSSEPGAPRTR

SEQ ID NO: 964630 - protein, 134 aa, Homo sapiens
MVQVRTSNIHAESCNGTYLHTLLVAAFSVYLLWRIAEKAEALGQRLPVLPQQAVVGSQVPAAAPASLDFPPARSENLKGDFNLSCLVGERALSSLRCQLLLVLAIFFFLIFELTDEVGRGLMFIPSLVPPEKVN

SEQ ID NO: 964631 - protein, 70 aa, Homo sapiens
VVVGEGMLLGSPCVPGVGLSLSSESESEESLEEEELETAAVGLIIFILIVILRRRRAIHSSITSPISPSP

SEQ ID NO: 964632 - protein, 39 aa, Homo sapiens
MVISDTRRYRSVLDSETPLLSCLAKRAAVGGRVHCGALD

SEQ ID NO: 964633 - protein, 53 aa, Homo sapiens
SDGYQRPTIYTWYVSDLRWPCMQQFQNPDFPPEVEEQDASTSTNSLSTSTEFP

SEQ ID NO: 964634 - protein, 43 aa, Homo sapiens
WSLHATCYSEEDRSRILIQGILQAGILLLKLLELITGCSTSTI

SEQ ID NO: 964635 - protein, 46 aa, Homo sapiens
SQDINSCVRHLLRILNCSKATRYGILPAAGQFLEGSGSVHARSPSH

SEQ ID NO: 964636 - protein, 72 aa, Homo sapiens
IPVVLFAREGKGFGECTFGLKIRRKFPYKRSEVLMYIIKEWLMCTPEIIEQMQDYALEKVVGIQLKEVDARG

SEQ ID NO: 964637 - protein, 41 aa, Homo sapiens
IHVASDEEYSTCDNPRDVSGLGGGKGSISADEIFLLHDYGV

SEQ ID NO: 964638 - protein, 49 aa, Homo sapiens
DPYQDINFLQLNPKYLLQGIACSFNDSRGTPTVYSIDDVPSDSVLSCID

SEQ ID NO: 964639 - protein, 42 aa, Homo sapiens
FSCFILGFSVEYATQYPSAVGSPWLQVLGSQGGSEDCSPGGP

SEQ ID NO: 964640 - protein, 73 aa, Homo sapiens
MQTVSAFVTLEFARQNSNEDVSPWAIMRMTAPVKQQGVWMRMAVTTRAMWLIEEYAMSDFRSVCRRQMELVII

SEQ ID NO: 964641 - protein, 70 aa, Homo sapiens
FPGIKTVSAEPGAVVLKQYINNLSEAAGQHLWGELGPAMDSELEKHAGPGMEDFKNKSEDDINKRTTAEQ

SEQ ID NO: 964642 - protein, 46 aa, Homo sapiens
SITVSVHRPKSQLSRLTVGQKLWFLFNVVMLHTNVSQSSLNGPSKW

SEQ ID NO: 964643 - protein, 98 aa, Homo sapiens
TTQCIKTVRQNLERCTEQYINNLSEAAGQHRGENGACLDSELRNMQDPVEDLTNKYEDEINKPNHQLRIELCRYLKKDVDSYAYMNKVELEATVDSPG

SEQ ID NO: 964644 - protein, 123 aa, Homo sapiens
MWLQVGAHAGVIERDLQLVHGLQEQPLTLVRLVFKKEASFVIRSEGLMMARMREAMVRHFHTFLHLGSTQVKVHLVVGTGHGGQIEVTHPVEFQLEGQDRFQVTVNATTANSSLALNVENLGN

SEQ ID NO: 964645 - protein, 37 aa, Homo sapiens
MYGSTVVVATGFQGLHVIIGSTFLTICFIRQLIFHFT

SEQ ID NO: 964646 - protein, 76 aa, Homo sapiens
CDDLIAMHVDSASLCCRQLRLLIGMDIYLKGSLIHLFTNYRVSETNNLLIHDYYAKTWGSIHSFAWGDTGEIKSSM

SEQ ID NO: 964647 - protein, 67 aa, Homo sapiens
MRNKARKKLLADQAEARRSKTKGMHSKRREERLQAVKEEIIKTLSKEEETRNRTSHFVCAYWPSVIT

SEQ ID NO: 964648 - protein, 59 aa, Homo sapiens
MYRQRGEVHFLVSSSLDKVLMINTPSGLEALFTALACFLGLRPAGLSLVSQELLAGLIC

SEQ ID NO: 964649 - protein, 65 aa, Homo sapiens
MQIRSDTPEEPQSSHSTHVTEVHDTKGVYLQLDLRRFRCLCKCYDVILYCGEDALFHHGQKLLAT

SEQ ID NO: 964650 - protein, 44 aa, Homo sapiens
TIEDPSADKAKYLTRKPGSQLWRLLRCWMMILLQTELPHVPCVT

SEQ ID NO: 964651 - protein, 355 aa, Homo sapiens
  misc_feature (173)..(173): Xaa can be any naturally occurring amino acid
YSVQSPFTRSAQSSPECAAARRPLESDQGDPFTLFNVFNAWVQVKSERSRNSRKWCRRRGIEEHRLYEMANLRRQFKELLEDHGLLAGAQAAQVGDSYSRLQQRRERRALHQLKRQHEEGAGAQGARVCGGCAERDAETGGLQMTRTGAGTRPHQGTSDGVDIQGCDVQRFGXDTGAAGRPAAQLSPRTWSREAARLWLKLCAGAGACTHSWPVPDAFNSSRKGLRADFPHAGQSRAPCCTPLRLRWAARGAARTGGWRPGNWDGSRGMVRAETSHSELGDLRDGARHKGRPETGQRVGAKTAHTARACWTTQRDLGKGRHTDPRPRVSRLGTRDVPRGHEGRAEREGQQGTEST

SEQ ID NO: 964652 - protein, 137 aa, Homo sapiens
MIAATCGLPEGAWHNEALSQPTARVIQCIFYIHQQTVNTRDTHVKREPPESPTLTPAEPLWLTHIFLQLSLSRRISRLSLCECGDSTHSSCAPLWVFKAFLTLAEPSPWLEQFTWGQHIFRPRCPPEKKDSGGSGHS

SEQ ID NO: 964653 - protein, 288 aa, Homo sapiens
LLRCVPRVLGSSVAGSRCGPLAFPAAPAAGTPCVHPAFGLLSVRAGSERGGLLRLGTLRCGVVRSCTPRRQSLVDFLSDEIREEQKNSEAENLPKMSGGWELELNGTEAKLVRKVPGKKSGSVSTLTKIPQHCDGEEEPSQGQKVEEQEPEDDINPNSWVEVIKNDDGKKALVWTCHYPEDEVGQEDEVRVTSSLSGKLALQSTGRKSEWKDTNYTLNTRFLGTGPLYDHLVIFLADPGVATTFADELVELSKPWSTRRNLLFVKTSEVWYEPVEQTDVDPSYGGLGP

SEQ ID NO: 964654 - protein, 127 aa, Homo sapiens
MRRMWATQGLAVALALIVRAGADWAARARATAKFVFSYLGRFYQDLKDGDVTFSPATIEKESYKVLPGSNEANGELGCATISGAIDVLQPPKSINEVSSASWPNLYPCGERSVRSYKKKGRPRYCEP

SEQ ID NO: 964655 - protein, 290 aa, Homo sapiens
FFVFFGGVKRAYWQGQQEFNQKGQTPGHHLTLSELLLLLIFLLLGLQQGQNQQQGLQRRLGGTQEDGLQAPPGRVHVGKAGQITRGQWTVFKGVFPISGSLGLTLVVENAGAPSCPAPAKYPRLGVPKRSFLDVPLGAAGGEKMLGPHKRGNGPRKGVKRRGKIGKDRGKFRGGERAMNTMAAGAGEENKKVLPKNGAGGWGGETPTRVVWPHYFPEEGANKTPGVGGVPFLGRNTGGPEKKGGPPWVETRMTPRGVNIHPDDRNFRVRGPEEPGGRHHLYGTEAEKPPR

SEQ ID NO: 964656 - protein, 100 aa, Homo sapiens
  misc_feature (67)..(67): Xaa can be any naturally occurring amino acid
MRSHTDLSRLFDGELVHRLRGNARRHLGHGSNKPWSKYAAPLQGGGMVRGDVALSKRARIAAHSWVXCFVKRVTGTLKTAKELPWSSLAWHDVACDRLGQ

SEQ ID NO: 964657 - protein, 164 aa, Homo sapiens
MCTLCPPLTRLGQAKRLAIKGADIMLTGTNWPYFAPRVPAGPVTFPPSGSGAQSERRMPRKSPGWTRVGRKQCGQDREARNPSARPPRLVLELPPTGVRPRAVARRRLLPGDKDHKIGAPLKLELDIGLTRQVGVQGRTQNRARIEGPEAPVHGCEAGAAEGRT

SEQ ID NO: 964658 - protein, 71 aa, Homo sapiens
SSVFSAAVVGPAHSWGGLCRVAPMGKRAQFACGRLSPSSYALPPGWHVSMLNVYPEVAHMGERSRRPEFIV

SEQ ID NO: 964659 - protein, 136 aa, Homo sapiens
WKKPADLNWLLGGRGLRSSVRGRVRFSLFHHLTGFCGCAQDVALWPWGIGLPVRRIGAELVLGDSVVSECCVSGGAKTFWVRGGLRHHIGGWKASPGAEILRGISEPPQRNLCAVGKRPVSTSAQEAWGGGKYRPR

SEQ ID NO: 964660 - protein, 152 aa, Homo sapiens
SRGVAPNQVVPRGGRKEALRAPFRELPSGAGIQARSGNPRIRGAVGPGLPTSDHPSGAGDPGFPGVHACTMLWCAPRWGLSSLRSWAQGAEHPGEPEKEAAWGDTGVVATYVTHGGVDTVGVRTRGDVERGGVYQTFKQRVCAGHWVGLGER

SEQ ID NO: 964661 - protein, 315 aa, Homo sapiens
DQPGASASSGTVDTRSEAGKPGGALSSAKLGKHSVTALRIRKARGRLQQANTDRHSSPTGIFEVTVSMRERLVPRGSLPSPGKSVSSPTSSKTPTPYETPEDPFHKAQARAVKVEKRLRVEYPRFGNVRAEAKAKDSEDYAGFGSELQEIRRDTRTLNAEGTDAIGPKCRWNTQSPQVTRNLLIRALEGGRNKNFSEKSLPDLAGTDNRGTVKGRNVILIFEPRPQIPERRAAKVHALVEQSRLHQPYQYTPGSPSHRDRPKLANQVGTDDRCMSIQTNRLHVKLPITGTHKGLHNRMPMYSTQAYICGKARELA

SEQ ID NO: 964662 - protein, 122 aa, Homo sapiens
GKGGGAELLLRRLLLPPPCLCPKGAGWSRRRDGSSSGGGGGGREAACVFSSSPRAPAVILASGAAPMRLLAGWLCLSLASVWLARRMWTLREPARPRIPVNVNMISWPPVVGSVLAGRGGGM

SEQ ID NO: 964663 - protein, 537 aa, Homo sapiens
  misc_feature (160)..(160): Xaa can be any naturally occurring amino acid
YGRSRAGASGDRSRATGQKYTGGRRRVKESADPLSVKRHSSLHRQPSPSARAASARAWSAPEAASLTWHIVTGGGVAGRKVDDGQWTAVLFACRGARVDSDPQIWLCLRSCEAFAFIEHLSLAPFAWRALRAALRVSLCFYTHRTAPHVRDSYGVSTWLXPYLGGNALVPRDVFACAYAWGPCHACWLHTHGHRYLDTHGAYPHGTLAPETCASQRAASMPDANGANRVHPTLGEPGPACRAGPKRVARSIACGKRINCTSDIPLVDWPSHAQLVCAKTFHVTGYTKVQDRSAVLGEEHPNTGWLCRARGAINGGIPELTGAPGGDIEYHGARPRKEEREAVPSGPQALAALHGGPSVTSRGGDHITGSYTRNGKAASDTRRIGQDRRRLTAEGQLSKAAVGKAHEHGQVPRGGPMTPHESKRPHGNPATPGKPSWQRGPPKTGRAVPTKRGCPTPGDYPTATSGGRITNPKGPTRAEGQHPPHRRHTTPPAPQHAPHGTPSCSVHPSSGPSTTPNNHDTCKTLARAEHLTHPTNAQ

SEQ ID NO: 964664 - protein, 320 aa, Homo sapiens
  misc_feature (39)..(39): Xaa can be any naturally occurring amino acid
  misc_feature (183)..(183): Xaa can be any naturally occurring amino acid
MRAFPKRNRGTEVWPARGPCGQRQVGPRSAVETRNTPSXLGITRGGAGGEGATITARMCGTRKKRAYRGPWEGPLEGKWTPDVGANHRGKANPRAGWVKEKPPRNTTKGPPVGGTGVEATRHAMRRHGNPKAHPFLPLARDSPFGALLKGGTNVIGPKLTLAPQQRARGGEMPGKDAFPAKRXQRGPHVWGRGATTYNPECVDVQGRHTKRKKTTLCNGGATDKHDPAEKKNRVSGGETLGRAWVKPHTNTGPRAGETTTRMWGRPRCDKRVRGTPPEEEHRIVSTQRRRQTRGAAERRPTKKAEHVIDKMPTYYADGNN

SEQ ID NO: 964665 - protein, 174 aa, Homo sapiens
MGQTQKKVVEASERGAALSQESSWRRSRLTHAVPPGSSLGGSRALLSGTERVCVRSPKGCGWSPRGNQVSSRCLRRQPPEYIILVPSNLAQRYQGYSGRLMRRLWREWHWVCRWCPLWHRRASDLTCCPLGRATFSFRTWTLSSHPLRGAVLWRSVGRRTCTDRPCSQGREVLR

SEQ ID NO: 964666 - protein, 271 aa, Homo sapiens
MYSEAICEKAVEHEPPGCTYRLGAVTLMQESAGSDARSWTDDQMSCGMGLRSIEWDLEDLEETIGIVEANPGKFKPQPGPAGEKGVVERMREAVQEMKDHMVSPTAVAFLERNNREILAGSQLPRSPPSDLLDASAVSATSRYIEEQAGHTAADHGLNRINQLEEVSGKHPGSEAYVRARWRRAGRAGIMLDAFARRLDTPSPAWTGVLREVGQSIPHDGVVESLRGGVSPWWGQVVGGTSSRDPDLLFQTRRVSTRVVSGRSSSSQSIFL

SEQ ID NO: 964667 - protein, 146 aa, Homo sapiens
MEDMNEYSNIEESQRDPRSARARISRMTVQVLCEARAGIQAKKDLTEYLVSMGGSGRRDKLTTDPVSGKIKRMGIGGLSKMLQAVDKRWANVKRTQVWMGKFDRSQKEAKVLKGKETSKKVWVGELGPDTSEEQLKILGAWQDDNM

SEQ ID NO: 964668 - protein, 103 aa, Homo sapiens
MKRFYTNVGITGGRKWHRAYKAARYSEQAKLDHSRQKSCWERKYTERGAVENNEFFGTKLAFDTVVYTVVTELCACRNMFKKRVAHNSSEEKLYKPNGKKESR

SEQ ID NO: 964669 - protein, 136 aa, Homo sapiens
MTISPQRRSSSAVAAETDERGSWPRDVRRVVAGHLGGRCDTAAPLRTGSLGPGSSRGPCGRRHCSRRRAWLGPAPWALGRGEPPGGGGGPCWRFLANQCRFVTGLRVRRAQQIAQSTAALLRELTPRLLGALRRCT

SEQ ID NO: 964670 - protein, 230 aa, Homo sapiens
MLTARTGHNFAPRVPCSPVPSSGRSGPSSSIARKQPRWRCLAPRRCPPASGKPEPVAFLPHTLLGCLPPGGRRAAWSRRLVPRRSHRTPKFGPPATERPSAWRATFEFRPSLRDPGTREKQGAGHGVPCWQAGCRLPWGRGGGIPADKVGIRGTEVPPFRHFTALTGTPEHTALASRAPCVSTRPHYGGRIRGVRPLVWAVHAVPTRGLGPPVCGGALPLVRGAVPHREI

SEQ ID NO: 964671 - protein, 192 aa, Homo sapiens
MFVHSRPGWWRLLLLGRSRITDETCLPAAGLSQRMLEAGGSEAEQARARDLDCLMQRPRLPLRLLPEPKKPGTCGVSPERRRRQPSRAFACTLPGCWRLEAVTQQQREAIWSGSYSDLAFRCASSQSPRSPEPVASISERRRRNPAEALLGWGLHDRAGLIKWRQQGAQTRVEGLLERRRTWNYTVGHQSTL

SEQ ID NO: 964672 - protein, 203 aa, Homo sapiens
KYRSGTRPGLNRHRGRISRFRVTARFALRPPRPCALAMSGHRHRGRLGAVAPWMMWAPHGRARSAAAVRAFLERGTPNWNGFMYSDGSPIPSWAAWGSRLGGVRWCRPCENCHQGQPLGWNTSLKPDSVRSQLETSLRRLQCPQVDLFYLHSKLTTDPGGKDAECVPAVTTDGHGSCDAWPLPTMQAANLAEIVYPPAKETSG

SEQ ID NO: 964673 - protein, 229 aa, Homo sapiens
DVWTRLGQAGLDVSCHVVIERFYTPCWASFGNSGLLVSLVESLASGCLGLARVAGNSAEKGRLWRCDRRKSKGGGKMNEEISSDSEYREPEPPRKPEEEEEEELEETALEKKLRLVEFIPRGTLRHQEEEKAEALLHLSEGPGGGGRLKEDVALRQEWARHAGHLGGQRGRSKPQSFSVTFAVLTGGRPRLFYSRLLEYAHAGRVTLRRIFRLRCPKRTAGHQSKGGTR

SEQ ID NO: 964674 - protein, 554 aa, Homo sapiens
KRPEAVGDFWMPSRRRTRSTEVENQPPCSAAIHGQSLVAVVCPHVLRKQMQHLVTHTGTAHKFTNAEQPSEPWGNQKSCTSSSPASSVQAISNHQQAANNTFTHLLQFTCSGYIHCSIYLTSNASTAQQWHLPSIIQLHSWLPWHQVPNQQAPLAEPHSDTHVRLQMAIRVCWHHGLSAPYTLANTCARDKHHYATQMGTHHKEEMSAQRSWRDDMHTSCETSDSEHLRGHPEADIIQAKGKPHRKQRTPTDNGNTLMPTTEGLSRATPETASTSNEHAWPSDERPRKQHSPWSTSARDTATRQRTRTQPCTKEQYRRERTPTKSHALGQATKPPRATITMPRAKAASAEQSKNNVQTVHTLNNPPKDSAYQRQGRRDDDNDKSWTETTATTDDTKNDKTHCTDKRRDTNENTNRQPMATTRNPNIPSQRNTSKHRAEPHVTTPRMSEDPTRRRHATEPQDQATEHTGSRPTPQRAEQNRGKTAEGTTESSNDSEKSSDKEHSRAPDEKHTTDRCETTTERQQKETEDTQDARDGRHRRNDAQDKTTQTRLHQP

SEQ ID NO: 964675 - protein, 170 aa, Homo sapiens
MVVMGVSHEKYDNSLKIISNAILQHNCLAPLAKVIHDDNFGIVVRTHDRQIHAITGTQKTVDGPPGNCGVMAAGASSTNIIPCTLRGCLPIGRSEAKAHRLQSVEAGEGVDYGYGTSVVPHWPSVVSWCDRDHAVIVKNACQHTELSTQRKGGESKASERGPLKGILGYT

SEQ ID NO: 964676 - protein, 243 aa, Homo sapiens
MEIAPLEAPPVRARTGTLKRPQLMPGLPGPGRPPPMGASRLQPSAVTFPSDEDIVSGAVYAQKTPGDLAQNVTVDEGHRAAYNAGLPRRLNCRQIPKLLRQLQGITDLGHRSDCLDLKGEKLDYKTVEALEEVFKRLQSKVVDLEQTTLDEDGASALFDIDRGTTSSRHPLFNIFFNKAQSGTRGLGRAGRPTLLPQEEAALQVILGRPGKRPPFWDHFVGPFCGPWPWAIRNNRWSAALGER

SEQ ID NO: 964677 - protein, 80 aa, Homo sapiens
TAGRGPVLIRHRGLAAKGDQMISVNCVYKGGSMSPSVMVPIDAVDGHRRTSWEPVGLMLLLPPKMKSEDMAEEDVYWPSA

SEQ ID NO: 964678 - protein, 184 aa, Homo sapiens
MPEYKLVVVGAWAVLGKSALTIQLYPEPFCGRIRPTIDGFLTGSKVVIDGETCLLYILEYRRQEEYSAMRDQYMRTGKVRSCGVFAINKHHCLFEDIHQYREQIRRVKDSVDVPMVAGGDPCVTCPERSVESRRLRTSPEGYGSPTIEDLGPGPRREVKDALSTRWCVTNPAGTSLGKLKALHD

SEQ ID NO: 964679 - protein, 252 aa, Homo sapiens
MAVELVLIGTEASSVTLLLLLFACAGSGLVARCVAMPELACKGGGPPPVAAQVLLDHFTDRPVAKQKRVVGGAYGVMCQRKYLMYRTVPQFLLMKMTKSEFCSGFQTSDYLEEHVWRLFKKVEVAVERIVGWYHTGPKLSHKNDIAINELMNKILSYSVSVIIECEAEGPRVVPTASVHFSGRTSSDDGTASNLENRLNHVTSEIATQRKLRKLAVEHLLAEISIDTTVGTLSQRITNQVHGLKGLNSKLLG

SEQ ID NO: 964680 - protein, 159 aa, Homo sapiens
GAEVKDRTDREEEGCWIGVGAAPRTCAYLPMVEEPWRSAAAPLPPPTSHWPTGLPLLLGFCAPTSTTATQSHTRPPGYLAREETRYDEAEPTETETSDGTNMETELIMEGSPAEWHDDDQPPGPSPPYQMISQHRTVKQHVHLEERDTQIERTNCKATK

SEQ ID NO: 964681 - protein, 238 aa, Homo sapiens
MLPKNNTKTNLAGHYMAGGGRTHTRMLSYNSCRTWRQKPWVPKTPHVFLYRTERVGEETFAPRAPPNIKKGGAPEFKISEIKRQCVYNPARYKLDHCTDTTSRSSDDTLSTYYLTYQPSNLHNTERKHTQHHFNYTRPTITTSNTLPHTKTPMHPQAPIAYNIFLYAYTYTRTQTPKIRKSIPLISHHTTTSLTNITHLHSNNAISANTDITHYPSLTPHTTNNRNNQHLNIQQNTIT

SEQ ID NO: 964682 - protein, 103 aa, Homo sapiens
MSEITTKDLKEKKEVVEEAENGRDAPVNGNANEENGEQEADNEVDEEEEEGGEEEEEEEEGDGEEEDGDEDEEAESVTGKRAVKDDEDDRCLIPRSKKTDEDD

SEQ ID NO: 964683 - protein, 317 aa, Homo sapiens
  misc_feature (259)..(259): Xaa can be any naturally occurring amino acid
QNHGGRGWCNSALRLALAARGRALAMSGHRHRVSPRCWAPWRWVRRLARARHVSAAVRSFLERGTPNWTRCFMSATASPRPSWGGLGLGAWSDGDLQMLNTLSPRPTLWRIDNITNSLTIVRLPAGDFIEEAAVVPSSGPSSYRTRHLDHVYPGAMRQLALLAILGATREGTNVRVSLVLLQNMLSLEKLAEICTLCNEAMGWTPAHVCTRAFVQGYHPEGGKCSFSCASGTLPLRYYCLTKPSWVGGLFDVGCSPTFXGTRTGNTACGAGSVRNSWGLRPYTESLLGRSDQFEDICVGCESPEAAYWARAPIVTSV

SEQ ID NO: 964684 - protein, 76 aa, Homo sapiens
TTSARYEAWFECGGEDLTQGDVAELHAALAVNISAARGLQDVLRTSLAPSVHHEDARFWRWITSNLLKTVMCCFTE

SEQ ID NO: 964685 - protein, 202 aa, Homo sapiens
MCELGSAFMKASHLGTPQFTGVSCGSARRAFWLAAWVWPRPCLPSRRPTPSPLTCGPLCIQGWLRVSENITTLGRADGVTLGFLVGIDSEALRIQLSPPYSSCGIAVLRSYLMPVLKSCSQEAAAALALPLALGLGYAVSGHLPFVRPEFTVGSRTSLGPHWLVIPRPPCLYYPVGSLAQGLPLRPPCDPASTFKRPGRGPS

SEQ ID NO: 964686 - protein, 302 aa, Homo sapiens
MVKSVAISTVPRLWANFHYGAGHPMKPHRLDIDPYLVLHYGLYKKMIVFKPYQASQHDSCAASTPRTTIDFLQRVESHQYARFTKSRYLPSIGRQYDCPVFPGLLRFCSRERRRISLQGATQLNNEICDTAINWAWWSGAYAKNGLRPLDFCYVNDIVIGILELLKYHPRVLYIDIGHSTMVTGFKEAFYLTDRVMTVSFHKYGNYFFPCPVTLYEVGAESGRTTCLDVPCGMAFDDRGSKPFSGVFTGSGFFNPVRCAPVGATPGRTHGGFTTPPAGGVRFEAIPPAGGDSPGRGVNTREA

SEQ ID NO: 964687 - protein, 308 aa, Homo sapiens
PGATCKGAHTGVVRDPRRNFKGKLFTMAPDPFKSPCKCEGGGVFIKFSFAAGHPLIGVATNLLWHSPREWNTRLTISLITEEKSVRVALSIFSLITHLSRRERHAWEEESSLWRGTACAWGPQCVCAPKYENPPALRAGCVSDALCIYISLSPRENIAVGPRETGACVCRVRECFVRRAWSPQVCGTAHNSPTQVVRCWAPAFFTLSPSADTPPFFTHFQPPAKKFSHIAASSSPHSSRSRRTPPSGVLLPPDVSRDFITCWAPPPGRRAILVMQPTTTSSSSSFSQRVDEDDKTPIHDGGRYQPPHQ

SEQ ID NO: 964688 - protein, 214 aa, Homo sapiens
ADGLLPTGPPTARMTSDGQPASSPGPANPTGGYEPACRNTTHNTRPHGQAAPGHPGPSPTVHLSHGRPTPHCDMESPTQSEITLQTKIPMSTQDTRRSAPARNGTAPPKRPQRESRVARTWRLGRHPQLLARTRGHRSTTVRTQERWHPTHRATPVPKGHPGTRRGQAQPPVAHRRDCDSSKNTRATLTTRQTTAEAQGPLTPPSAHTPYDGPQ

SEQ ID NO: 964689 - protein, 265 aa, Homo sapiens
SLEFFIFSFLENEMFPIIGDSKPRPPRMRGAKRGVLCRAYMCHTIGQWLATTGSGVLSKRPHQTRPYTVPSVHKPPRRAWRPRKDRKNSWSYKSSVEAHILLATPETRARTSDDTDYAPNTQQRVSRRDVQTLSRHIKPLSIKSLTTRASRPLHHTTSHDDARASQHAKKESVVSSLPLAHISPPRRLRARERSTNSSYREQTREVDTYYEEISTPKDVLIPLPLMRSKMVSYYHPQPSCCSRKHAVACDVVTKHTLSNALLVVD

SEQ ID NO: 964690 - protein, 431 aa, Homo sapiens
MWCVPCCSVSMHCGVLCTHMCLVCHDMWTMACGDTCDMMWVPMLHTSTHTASSVYVRMCTCGAMLLCTVLSHVPIACEPLMWLGRCVEGHVHVARGDVCMHVNIHTSDGAKCCATGKWCVPPGDICDSQWMAAWGARHCWCAVSHQTGTCSAQGLGAEEDGAQHVGLWVTPCIALNLDQDPEGLDWADKYMHPRGRHMAHGRRMTRPSAEGLWRSDGELKLTALPGDGEGLVQGQGGDRERHAGWQELEGHLCHPGDPVGQGGDISDAGPTGTTRQNQGGPPASHGGQCRTGPRSYTTAVQRDQHKWPKAHRTPGHSVDRDNAIDYMNRVARVQTANGTDSSREPEAIVRTQIAEREPLPNEGQPPSNPHTSLRQYASPQHYKNKPEQQATPRPELINNLSRQNRSRRIKRTEDERQNRGRDTTEMRSLKR

SEQ ID NO: 964691 - protein, 425 aa, Homo sapiens
GCNRVNWMMSPGLRLKPWGGGAQSEMGRKGMLEWLLRDCRSEFPNLGRGQGEASGTQPGPSHPWPRSGWAWPVALETGHCARGGSTIHAQTSVLEISMAVFPKTFNPRCKGTYRAQIQISNRAGGGKREFGWEGFWRIFFEKKRGNSTGNKALKENPKTDTRQRVLPPQQKKQKGDISGSGKISRKSSQRNVGNPQEVPFNTVTKGISEDKKGVGTLIYHTYSAGHKSCVDPNILWGPIPYRTTTKHENNICRGSTKMCGEVRGQTTKGDTTRQRGTPSGAKTASVHLGTPTTIPGHTQQGGTNSGAGDPPKKEEKRTNQTTGQNSARGINPRDLKRAPRQEKGDSTASKERPSPTDRRTRTNRGKRQADTHTAETHTRDIARETQAMNRSNTQRNNHPATKTVRDPHRKQPPSERTTNKQRQKK

SEQ ID NO: 964692 - protein, 425 aa, Homo sapiens
RYGKNKRLTTGGKKGAKKNAVLIHNSTNRLVCCDSTCYVQYEILERRSSPGPKEPKLHTDGLQGLVLFCTVQLYAAFAITCMHSCHFSNTSTACIHCKHVLGVQNCLTKPFHVHCDSLPRSTQTVSPLAQTTVATTTLSLRRSPLDCHPDLTAWLYFAFRSCIMLIWLFTLTHTLPTNLTTTGHDPLYCYSRHTSTGYRRNTSCDTTRLDIVTQLIIDPLTERLTSLSYLERYGNENTDVYNILTLDFPECNQWRIWRTQWTNVTNNRLCTSAPKMPILKFHHPIPTLDSVPYTGLKQHDRVKTQLVVGKRNAHQMAFGTLRTTQQATSGDSTLQQGLNRTDKARPGPNQATTMVATPTHHGATHNTSAQRTPASGTTMNHPPRHQHNTRLSQHEQQTPPHHTGPHTTPLDHTAKPPPHTPQTSA

SEQ ID NO: 964693 - protein, 490 aa, Homo sapiens
  misc_feature (94)..(94): Xaa can be any naturally occurring amino acid
GLDARGYLIGGYMTRGGSLGPSPLTRGLLWQRGEEGRFRWWVGDVSVVAGISPARWRVSLFPLGASGVGRGVAPGVLYSLGEASVWVHVRVTPXACVACVAQISVWSIPRKCELVTRVWLCEGQVAEAPKGVKEGGREGGCVSPVCGTVSERRETHAWGGPSVCRPQGEWALVRGGPLSRERRVCFYNQTSFLGECVHIKYLWGTEVYFLYRKAGRESPRVSHTSVEPALWGPRGVGSTTVGEGGPYVRQGVERFPAGVQAPSNGGLLEAFVRPNEGTVVGKGGPKDKRGARGELGIVPVGKEAPRGGAQINGAPTNVITPGEGGGPTPQNKGATTWGSRGAKVSNGRQCGTTGVGGPIEEASSSTKQGINPHNNGVGPHRGNVRPFGAPQGGVGQQDQYGGGGQHRRRARLASEKHHRRGDLGQAPNKLPTGWFHNPPSGPDTSVGGPTTAKRAVARSMLAQPFCGESPPRREKVETPSKSNPSGGAEK

SEQ ID NO: 964694 - protein, 77 aa, Homo sapiens
MGPRCSQDKIYGDLDGGSQICVMAQALGEFRELIAQLANSKRGHPQAGGGGGRDGREPPGAPSGPAHTGGTLGDRPK

SEQ ID NO: 964695 - protein, 305 aa, Homo sapiens
MESRSVAQVGVQGLRSRSVNSASRVQAILRPRPPLSWGSTDAHHQPGNFIFSREGVHYVGQAGSRTPEAQMIRPPRPPKVLGITGVMPPCPGRLALKVALNNKIRKDWEGRLRPSSLSGQVCWLPGQQTGAWRTAGPGSHKGPGAPSNIPGAAQNPIYPNKRGADPPSGSGPAILGTMIGKVRVNLQAKSLKSRSGDKPCCNKKRRGSTGPPEDPKVAKPGGGALMEKKWGLGAVFNAKTRSIAEKEHGPLDGSTEDEAQPRLQLSVCPNGNTLSNRKETTRYTRPENPQTSDANNRRANKYNQE

SEQ ID NO: 964696 - protein, 109 aa, Homo sapiens
MPDSWCSPQISPLWARGDTWRRRFGPRIDCAPRRLAGGHTYPCVKHLINTTRPDGGAHLCNVHQQISTKNGRFENLGWPLGRGQRGSWVSWAIWGINSFKRHYYPFGGR

SEQ ID NO: 964697 - protein, 472 aa, Homo sapiens
MAHLPVALHSAADILGELQWTPAGVTSGRFLARSQTYIRALAQHIERQSVGASSTYTRDGNQAPREYMWRTTCVWSLTKRAAPTRGFCVAHECVVSSHTEVTAYLHMWALQRVCESCVKGYTKASITRRPRRRDKRGVCALRRREGCYQRKAPQLAGNPRCGNTKIRWGDARCPLAALVCAPDEKTTRLGGEVYTQKTSLIRRTPAGDCWGAGHTRRRGSFISSRSNSNRYYRRGVQPDGATGDRTCGNSPFHNINLGGAFCATTGGLPTLPRGKTPSWCESGKTLSGDGPRGGTSGRKNHRQRRTDKLMRLTALCRRPLPTNYWGTRAITQARKRRRNTPTPPAKGGDYPYIPETKRTKRATKSISNRHIYDEGAESRDDVGDIYPKRDPGPPVGPQEGATRKQDSERNRRLVAKVSARVKVTGAPHKTASTSRPQQPLGTRTIHKRGVRPEERHITSEAKKTGRSWSKDP

SEQ ID NO: 964698 - protein, 423 aa, Homo sapiens
NEASRREVSAVPGDDVRAVSVHLWCVHLSSLPGAPGEHKKHKAPVSCAVHVCCVAVCAELTVNAVSLVQLLGVLMLLVTLCAVLLCVPGRLECPVMHCICTVAVDACMSMCMMPFPESGAAVECCVRMLLIDRGYCWCLFASFAKAMLSAELRSFDFSNRMDDLDKGSCVPEGLGSLKTLCGVLDCAIQLNMERAGCYPNVEVTPLLEQCLDCQYKRHSEGLCRNMAERWMACRGERNTGLAAQSLRISSDWTEAAPLAFDKRRNEGISVWTVTLTMTPLTWRHCGIDAPFWGSCGPEIEPLVKGPFGGIFCIGNGHAPWKPRSFGSRHNVARAQRVDALGVQRHGTNALVGPPKEGYHTFGGSVGHAHFVRRAKVRRVSLGDCLSNGRHRFHLRETLGDKAGTGCGKGSLRGGARRESGRGA

SEQ ID NO: 964699 - protein, 64 aa, Homo sapiens
QSETCQNRHSVKRGGSTGAPRTGGKQGTPGGRKSADANQWTAQNQKGRRRRNQDEPPPTHGPSD

SEQ ID NO: 964700 - protein, 165 aa, Homo sapiens
MSRLFKKPLYYTTTKKLCRRQKNTKQKEAEPICGGNEHPSPGGANNHSAPYEHNCVPTNRRGGHPTGKKKQTSPLMKKKNPTCRGKKAGDNKTTAPHGERQSVGARNPSEPPLHQHPLTTTKHRPKTHGGGATATNNNPPLKTTATPRQGARPPNATPTSVHNSA

SEQ ID NO: 964701 - protein, 342 aa, Homo sapiens
MLQDVWCEISHIAGQGCVPQHHVLLRTHLSFFSLSPQGKSLTTRGHVGDRAYSRLSSRERGHAWTHVALCVNRGDTSGHTHRPVGDRGRDSRCVETQDCGHTLSTRPRQQGVAHTEVGGSLHPTAGENSSADTGRLWGRVSPEEGKLGKDIPHPGVLPNAQQTHTPVGRQTTQLIQQESPQTLKEREVGQKDTPPGQKTGVDVINHVEPTSVGVAPIMVSRIHTIPLPHNITHQRGRGGNAKPKEGGRWPTPHGRTIVDPPIYRRGGNPNGPPQQRQKKDTVATKIDHTKPGWENNHTEGGTYIVGANNNIARKPHYDADVGKPDDMGVTPVATLVWDEKQQ

SEQ ID NO: 964702 - protein, 303 aa, Homo sapiens
FFFFGGVGSLLNGYGWYYGVRVQGKQGQRPGFQPKNVVDFSSLPYCDLTGGWVSSEKAPEGRDQVSFQGLKVWNVEGLSVHMWRGSPALSRRWADKERNSVPCDRVAEGLSHILCNTQCESSVGERTSRARANARGHLVAEREAPHSSGDSARQMCAGGSERARGDSRKNGKTRGAEECPSVCGERGRTSLWGAVTQTQSVSKCETPPCGRSHHQSGWYRCAVVGNPKDANKRRCCDYKSGEARTVRTRGAPHGGARGERGDNITRERKALVWVSPTCGGVATDRERPFGVGRESWGGSTHLL

SEQ ID NO: 964703 - protein, 91 aa, Homo sapiens
MGGDHTGFQKSSAKRRENSSKEAPQHWGGTNTPGEKNPQERIGPTGRDLTAAGESKRAGTRAQSAHQISTTPNSSRANKAAGNNQRQLNHQ

SEQ ID NO: 964704 - protein, 258 aa, Homo sapiens
MANGGHHKVGSCYKSKSNGGGGAVSPRENNVRCEPHKLPSLEGERAWLSLGGPIEGGAPGAGQQNTKTHALTTRDLVENTVPQRVNNTGTPVDVPKKPPGVCAWESTPGQTGGPGTTKTAGENNNPDASTQVGPRGTTRGAHTRASGPKKTCYPPKNPGSTKLFPGGPFCTENPTTTNGRGDRPHHLNAQHRDNNRRRQQKPPTRATNTTIENNGNRYLTPQTEPATHHTSANPALDNTRHGQTQTMNNNHTYNPVDH

SEQ ID NO: 964705 - protein, 357 aa, Homo sapiens
QKNNIYFFSHTNPAEKKNKEGGAAGGDTEGAPPPPKKSGGGGGAPPTPGGGRGAPLCVCPRVGGSLSLWGGALPSLSLWGGGGAGAPPPGRARPPSLFFHTKRIYMCGGRGATPAGANQRWRQRERETKGARARGEHNQKEEQRGRQTKERRKRDDKNKTTKREGAQQRGAGGNNRERQKRAPTNTVWGGGERRERERGGGVLAGEGAAVEARPGEAKKAARAEEEGSLPNPHTEAGGERTATRRVNHTHPAGGAPPHTQTRRRPPGHPRAAPPPNSHSSLGGGDIQAVEGTQPSSLPQREGRAHPRVSTSSEPSPPDNARGWRAKPTHTTQGKTTPPFKPHTLSRMTKRRSVGVRP

SEQ ID NO: 964706 - protein, 266 aa, Homo sapiens
GGGGGGGGGGSTTKKKARRVVGGEDDAGGGGGGGGGAAPEEPGGDECKNTPPHHPPHTPQTTTQHGARRWGRETRVAAPPNKNHKRQTAPLMHAERRRLLRGPHQSGGSPHNKHRHPTAGGGLAHKKRPQGAAARHTNKRGGGLLRPPKQTEKSRGGASHVTPPGERRGSTACRQRNSPHGPAPLRFVVFPPGGGPHPSRQQLGGCAHLWAGPPPRSAFCCFTVASHDHLPLFSHTPTRAVSFFSPPILVRTNPGSATFDPPRCFL

SEQ ID NO: 964707 - protein, 146 aa, Homo sapiens
MWVEKCAPRRGVKLRLHSLGETPRGATAKGPIGRGGKRASATVDTVWRLWRKAPNATEQRVAVHSARAQERNTGGEFAEVGPRGPVGRVVPRGTHVREHRGRREPEETPCGGENTGENEWETDIHKKIPTGHTCEEETSVWTPKFP

SEQ ID NO: 964708 - protein, 155 aa, Homo sapiens
  misc_feature (20)..(20): Xaa can be any naturally occurring amino acid
  misc_feature (38)..(38): Xaa can be any naturally occurring amino acid
  misc_feature (45)..(45): Xaa can be any naturally occurring amino acid
  misc_feature (48)..(48): Xaa can be any naturally occurring amino acid
  misc_feature (52)..(52): Xaa can be any naturally occurring amino acid
APLVTQTGPFISDVISSFPXQFREFGMLTGSYVLGVAXFLGVGAXPPXFSPXSRQHGPVALAIKEKRAGRSMIEPEALQTSILLPRMASAIGSLPPAALKRQKQAIRFQKIRRQMEAPGAPPRTLTWEAMEQIRYLHEEFPESWSVPRLAEGFDV

SEQ ID NO: 964709 - protein, 146 aa, Homo sapiens
MKPEGKAQGLPTFHACMLAGLSRFHFPTVAPSWPWWAGGPAGREIGPRFTVQRLAWRRFRCNGLVRQVVSLERDVSPCVYGFPGGAPLATHLWTDQDFSRWLCFAVTPFYLSLADRFLENSSLFGEPLIWTPLVVVFLHIPELACE

SEQ ID NO: 964710 - protein, 215 aa, Homo sapiens
MCLCPIHKHNFKLLRQGVQDVKKPVGEPHCVVLGAPGQFCAHVGPQNVPREIPANVALWRCEEFPSFFLKIFSSHNEMWTFCPTRVCPILVGAVCAEFNPTRVDNIKNPGETLNPVLQNSRRTPVIITQKFHFLLPGGPTESHGQNYRGRGSLWGKPLVSRAKRASQEGKTPRPKRGPPPIEKCPSVSKQPGVGFRPGGYKQTTRRNTTPQRQHL

SEQ ID NO: 964711 - protein, 246 aa, Homo sapiens
MGLWSYSGGGVRGKQSKSITVECGCAALPCVKPGGVPETLVGTDPPGGSWRPAHFLLEHLTVCYLRMSQGYIILKRRSPRVCSLEKGRDIRGISCVAKDLHTDTKSPRVRKHTSCEIVDSDSEITTEIYNPQRGGAYRCLSHIARAGGPEGNLRDLSGGPRKEGPYITPRRDTTLYNTLSTGASVGREHPRGERDGAIHTWREGDEEAISTPYSSRDDRRVLHQEVLTPRAAERRKTPAGVVHQNI

SEQ ID NO: 964712 - protein, 429 aa, Homo sapiens
MERLPSGANNKLVKLGRVIQEEMGWVDGINSEYGPSPKGGVGVYKKGVQGATTAWARQTTWMRHKKHLRFRGSRGNPGVLPKVPQGAPGVSPPNEMQVSQRVRVVNSKRGGSLEERGEKRENATLWRTLCDHPNTRCQYMRSWGTWLTKSDSKCDLCVTQGHTTRVNKTLSLSGSLPRCATPIFLSLIQSGKATCGARKSKDGATEGITLGIWNHQDAETLERKGPPERALGVGPPSNPGDSAHHYGKGHRHTLRSIKTQIHKHNTTRYQEENKGGLPPWDIPQRNPRVKGEKASPQKGEPPRGHHTHSDPGRRPTVISYPPYKKKNTQLNTNRRGREDVQERQLLQEGKKLSEAPQVQTHEGQKRTTTNTRARQETNTHGEDPRSTESDGTQKATSDNHRSYTSNTAAGARPHQQESQRKREEEAHKS

SEQ ID NO: 964713 - protein, 135 aa, Homo sapiens
MRFRSATTNHKQRTKATNQKTTHTNKTAEEKHNKAKKKDRRQHAQGQNEQSLYTKDQQATTCDKDARRSKKNKHKKTKKRPRKQAKEKKKKEKKKKKEKKTREKDTENNSEKRKKKRTTKNQEERGKKEKNREKK

SEQ ID NO: 964714 - protein, 100 aa, Homo sapiens
YQAGRVTKVLGRTGSQWTCARRCAVEFMDDTSRSIIRNVKGPVREELKCSPFCESEREVPEVALSLGARWVLDVGIRSHLVDGNGLSSRSAPFLYVPSTP

SEQ ID NO: 964715 - protein, 39 aa, Homo sapiens
SVRRIAQQLYSVRPVARNQYQLQINQNERERNRRGATGA

SEQ ID NO: 964716 - protein, 299 aa, Homo sapiens
LLLAMAGPGPGLRRSRVCWPRTDLGCIICQWAAGLARHAALRATASAATAWMALWGCPLTPCRCGLPHLPAMWLPAACMPAAAVKNTATACDLCRQCTCLLPALLMIHGVAPDPCPSSPVPGAPVPSPAAGLRMAPGCLALNLAAGVGTAWCPAVVPLCSRTVGLPCRTVEPLSASVVARYPPIPTGPFSLFTVPINVTSKHVRSTRLLREGNYCEQSTKQYMNDSYHKKPKFPSLPDNACSTIRPGTTSYRPILHHTYLSAKAGVYRDLISYVKPSEQPWSVAPEQQQEIHRTMAHGP

SEQ ID NO: 964717 - protein, 230 aa, Homo sapiens
MRRSRNKTKQSLVAGPTDQTNNNLDRHTTPLYRVEAEQRRPHTHTKVSGAPPHRMHRWERPATAENQHPSRKYDKAHSSPQQNNTVDETENDAYSYSDEDETATPPPTPGRTKHTPETRYHHTAPKLTDENEYMFSGPPTLASLFRESRRTKSLPAHNTLPKHRIDRASTTPRERRGPTSPPAAQYKQRSYPNDGGYFPSPTTIENDPSTHPPQYFHKHRSHLTRECDSR

SEQ ID NO: 964718 - protein, 106 aa, Homo sapiens
MKAGTRNPRHVPIGRDSAAADGEPSSVAVFLEHKPSLSSMPAGGGHAGSLDWPMTPCAFIPADKLNMILLPGCLMENPALHDAKLRFESQEMYRDWGHAPITTPIL

SEQ ID NO: 964719 - protein, 184 aa, Homo sapiens
MSCAEYVGDRQTSRGTTKRNNPPFSGKVGAPSNPLRGPTVCFFFGETTPPEGVYFPNKRTHGERGYKIYSPERNSPKGKDQHFFGARVFLLPKDRARKGRHRIFLTDTTFPCWGCNVGPPTHNIFGASVRGGEFGPPSWWKEITTQEKGGPGRFHTPPERKPLVKRRTIWWRPLGGERYYHRFL

SEQ ID NO: 964720 - protein, 245 aa, Homo sapiens
LHHGGVRVCQADSSENASIAEDMISKDYYFDSYAHFGQSKRGKMLKDEVRTLTYRNSMFHNRHLFKDKVVLDVGSGTGILCMFAAKARGPKGSSEIECSSISDYAVKIVKANKLDHVVTIITGEGAATVELPVATVDIIISECMGYVPLHTSPCSTPVLYAGTSGGARWPHFSQNGPRWYVTATRGPGQLQQTNKIHWWERTVYWLDHVLASTRCGHKGALVMWDPKEVSTKRLLIKEWTLYRQG

SEQ ID NO: 964721 - protein, 111 aa, Homo sapiens
  misc_feature (62)..(62): Xaa can be any naturally occurring amino acid
AGYRLPLPASFPADLPMGSSPPKGSGNIKQRYRVPEKLRVQLHDHVPRVLHSAGNTMQNQNXCVGGKILRRSVHNLAVELENENEERGLGPVGGGCGCPSSTVGRPRNTGL

SEQ ID NO: 964722 - protein, 493 aa, Homo sapiens
MRVGAERKVQLGFPRHPSPSGAAPPSAGRADPRRNISLMRQRAQGRASKRTPQAEPTSMWRSQDDSQGAPPEELPDRTSTREQAQEKDDTYHTGLKTGPPKAEHQARHVGHHRMQQHSHNSAEDTIKYRTPKRSTRQRGEKYTNTHKCDSKHERPRHTENGAHNHEEETHIYSDQKIANTESKGTKKTDPTKIKAHQQRISRDKQAPTRETKKTGTHNNNKKRRTKTHRDTTTQQPTHKANQPEQNEKTTNEKSRPHEASPSTNAGNTAGEPVRSHDIRQRSKTNTTLQEENRRHMADERQQAIATPHDAQDETPIPNARTHTPSEEATPGRANRTTKNRARERKTKITEVCHPDRHKSSKTTKDNTLNVVAYTQANKHGDQQADSTREQATTQTPAYRTKQQPNDRTTPPPRGTLRSARDTKKEDAMKRNNRHASTEKEEKRNMTKEDTHTEGNNNRNRDRKHKRTHQVEGHPQKNKLVHTNKETKDQKIDD

SEQ ID NO: 964723 - protein, 40 aa, Homo sapiens
VHVGEPRGLGCLHRRGISHRPRACRKVMGSWLQSKREGIS

SEQ ID NO: 964724 - protein, 228 aa, Homo sapiens
QAERPVRCFSESGLAWQPGEDEGRRGLPRGGGRMLGAWAVEGTAVALLRLLLVLLPAGSGTRARVAGCRLRGGRSAESVIWAVNAGWRGACGRAGDPLPKGPFGSAGGGPSLKTYGMKLPFLRSNPEGTKILYQNCAVQMREHPWATEVPITAGTGDYRCVGSSDNFAGGSTFCTRPHATQGYFEVYRFEVGHVVVDRRPGHTLGLVWDMQSSPIEFILIEPPQRGHA

SEQ ID NO: 964725 - protein, 189 aa, Homo sapiens
  misc_feature (188)..(188): Xaa can be any naturally occurring amino acid
MVPGRHGGSQERRTIKGAMETNKRLGTQEEEKTWGEDLRDPRETQEGKRRRNGSTCRDPVWSKKPVRRHPAGGGQGTNKHEEEKRGRDYYKGPLGDRAPTPGRNITENARKGEHHGAKGGGPYKSQEIKKQDEPRHKHASNKGGRTQADRVKRATESRKERRRGWNKTNTKMRTTQTHDTEHTTTYHXR

SEQ ID NO: 964726 - protein, 306 aa, Homo sapiens
KYQYEFSLKSRCFPGQSAGAGFGQKRVKRGNVVEKKWNVDVAQAQGSLCLGANRDLGLPLGDVGEVNKQALPSGVSKFYVRRERGSGGLLLSPPPEAVKTYFFRGIYTSRAPFTAPKTEWPEAPVAPSSLGLLERSGAPCGAKKEGAVRTQRGRWWGWALGEHPAGARAPRACLSLAEGASVGGPGREVVSERVCRGAPPVGFARGGDICFLPRDSEVVLCGGAPQSNLREKSRGGTTRVELPVGPTIQVDTPEGITGPVDTPQVASPKGGAKPQRGPVQGTTNPKRPSHGRQKTQSGVKHTRVGP

SEQ ID NO: 964727 - protein, 284 aa, Homo sapiens
MGKKGLIWQGSRNLIKKAKSQVISFLSSLYRLSLLSFFILFFLSLCAAAWAQEPAAGAEKAVGQQKTVYSPTSRLPWARLVPIYPVGKLRVFSRVFPHFSFTVNNLVLEPGSSRPAFRIPKSVFPKNSSWECSCGAVGRGVLPPIGTAQTRSREGRRIGDIRGRTYLRGGGKKMFSSVLLTRTSSSGGGCRTPLFWQNCCPKGPKYSPRHRGMVYSPKLVEHKTRLFLGINCGAGGKNQISWEERWTREKIPFLKEIFTKLIPKKEGVFTNPVDNLRRVDSVPL

SEQ ID NO: 964728 - protein, 175 aa, Homo sapiens
CGNWNQNFFPFGWEKKTHGVVGVSGTPYPSHPSPRTPKKDKQRPPNVASLLCPSVKPRERLSGCGVGRQVERRPGKGQGRCLRLHRAGAVPVGALAPGFIEGTHGRGVGLGIGGAQPCGALAARLDGVPPKNFEGAPISAGIGGLPRGDVLLLCPPHILCTTPGVCYSPRALSPL

SEQ ID NO: 964729 - protein, 121 aa, Homo sapiens
MPLCFIKPNGNPLGHGGKFFGITRGPRVGPGWPGKRVRVAGPQGGAGPGEGSQKQRGHGGIPGGLGPGGPQGDPSVVDSPGYIAPTTVAEAETNKHTQQQRPCRSSRERRQKISPPVGARV

SEQ ID NO: 964730 - protein, 85 aa, Homo sapiens
GYLVEKQLSDFTRTRRVFRLVEHIGLSEETLFWLFRDALQQPSRPVQLRCIPYLLPMSGDLHPACRLAELNRYSLKLGMDWCVLT

SEQ ID NO: 964731 - protein, 570 aa, Homo sapiens
  misc_feature (434)..(434): Xaa can be any naturally occurring amino acid
NFQLPYLNWGQRSEVMQTITKGPPTKGVQAFSTISYSIDVRYIYSNTGATLGMWIEKWEKISNTGEVEDIRVSFHMSCVGARGACDIGARGTSSTYMWIRTRQGGVIKNYLPLFGDRYRDIGEDETQNISPHIIYTDRWKHKWRQCEEYNLERGQKSPLYLKIYILVEKKGIAEIFITPYTQGRGGYIEEQGETNSVKRGKTFRQNILYTDKRTHLRGLLVRVEKEHTAAQSKCANRIVEDKKLSHHHWGENCVLWFNPLCGGTIYSPIIPLSGCLDTRTDKREMNPQINTVQGSKRVGFPRKGVYNIKEKQHECGEEVLNYRAQQRGGETRRKPLYTDDGHKNHRGPPQRRWVGKHTRINHTNITNGGCAVEVYSEHADQETPYQPQDDHGMKLPINSSEAKKSYYETSNDVGVTSNRKKKEPERNVVPLVVXCCEPHYRGWCGRYERHKKSPMREREESNTRGERLTPPRSTRKREDEKTPHLEHGIAAAAHKKRRPGSNQRRDPNQKIVCEGSPQGHATKDGFSQTQEDPGQVGSLNKGGAERTHQRDTTYIDEQKNPVAKRKETAH

SEQ ID NO: 964732 - protein, 135 aa, Homo sapiens
MVDPLTACTEHLEKPQTLNAEPMKAARRAAVPCKATGWSCPRPWEPTFCISMTWIWSMELKKYYFGTLRFNDCPIGFRTCMGPAAPSFWPISPIWKRSIYPMPVPPLYLEVTNLLLILQANRQKGLALSQMRLWT

SEQ ID NO: 964733 - protein, 96 aa, Homo sapiens
MPHMHEGLMCKRPLRPVLTPSQRQSGVVSPAEDVTWAGDCVCFRDSVFQHILWSAFPRVICALGCPNPLVVQGLVCLDDMAQSPSIHLKPPSPSTR

SEQ ID NO: 964734 - protein, 146 aa, Homo sapiens
MKVLEVGLALLLGALLGILLLLGSEPGSPLWSMHGLVDEMNYNWEIAQVDPYDERPFMMGSFRIHVQYGRASQCGVEVTVTVSPISKVVSLWALDEIRAAGKEDLGCTRTLKKDMTQKITDLALSILDRMLQAYSPCTFASWLRKP

SEQ ID NO: 964735 - protein, 93 aa, Homo sapiens
RTGAETLLQGTPCWLRTDIPRSSFRLVLVGDGGTEKKLTFVKRHLTGEFENPSMSATLGVEVHPLVFHSQQMDLLKFNCMGHSPAPRRNSRGL

SEQ ID NO: 964736 - protein, 152 aa, Homo sapiens
MVREGPPGTRERTLCGGEARWRATGLVGDVIQRFERRCFTLVGMKMLQAPDELSCESNYQDLRRGSPSYPALIRLHGASRACGCAMFWWNGSIVSSAPLGPMIDTPDSVRLPQCTIRGDFSCPRSAGMSSTQGDSVEGGPAGKIQLWGFQRQ

SEQ ID NO: 964737 - protein, 70 aa, Homo sapiens
MCSAAERACLHVWREPCLRRSEEVDHLRQKGEGPPEGRQIDQDKVAQMYRDWVKNLWERDFPLSGGHRGR

SEQ ID NO: 964738 - protein, 129 aa, Homo sapiens
ETELRAADPAQVITIGDERFRCPVGTLPGLPSWCMESCGIQITTFNSIMKCDRWTVRKDLYCQRSAVVADTHAMYPYGYCQNRNDEGEALTLETDVPSEVSPNQLLLRDAAEFLPVLDRLVPLLVLVVS

SEQ ID NO: 964739 - protein, 40 aa, Homo sapiens
MAPWVPDFGPRPPVFCARGDKFRGPPIGGAQFQYAGSRIT

SEQ ID NO: 964740 - protein, 167 aa, Homo sapiens
MGAAPRRQCQGGPLGAPGVLTPYLVSPSAGSYGNCGNVVSYPRGGGIYESLFSSHNKYSEPEHIFLGGGGTKVVCQRFPRGTLFKEYIGLPDNIFAQGYSRGVQVPQRVCVPPRRLYSLPQRSGCVPGEQPPLGDTCLGPPRGNNCSSTAGFSHGTGVLQPRVYEGV

SEQ ID NO: 964741 - protein, 234 aa, Homo sapiens
LQLPDPGAERARAQVAEGAVRNIQAVGHMADPRSELDHPSPLGPPLQLASAEVWIGPSPDLSLVLLQALTLDLRWLPHLSGASGVRDAGVERDILVTRWVQKGMQASVDHQQEGHYQARTRKNPRSPLRQLTFKRRRGSCTREVYALVYSDKYWMQPQLLAQCHCARDSVQLKAKLGSKNGAVLETWMPFSKRGRKDGRTCSSSGDVQLEEGKDYPFARFNKTVQVPVYSEQEY

SEQ ID NO: 964742 - protein, 125 aa, Homo sapiens
  misc_feature (41)..(42): Xaa can be any naturally occurring amino acid
MYPPLSIKVVRRGDTKARAPYDDRGTRLWVYHNEGCSPKQXXTSSLCARRADNNKTTLLRWQGHSHNQTNKEKNYTSAAGIILSKEGGAIIWLWRTRRSVCGRRPVLVYVGPPTAWGTTYGVWNL

SEQ ID NO: 964743 - protein, 227 aa, Homo sapiens
DANGVSRDSRREAGGAGQEGLLAVPGPAKVVSNGLMGRTVVAPELTADVLLLGLWMYCDWMPLMLSMPDTACPRAILPDALGFRNPKFWLHLCPYLAAKSFSPVLTYMGLLGDVRGPPETLASLTVLWAPVYPAISNAYLHAGRKSTTPFPGRPVQPMLYFLKESSAQVRSFDIFAAAESQPCSDRLDSLSHFNNTGPSYPTKSSSPAPKSRTRLSNLAYISTRRPP

SEQ ID NO: 964744 - protein, 192 aa, Homo sapiens
CDAECAESTAAGDVSLWRGGGHRRSARAVWPRPSPPPSLVTFSGPGGWGSAPGGGDVVQEEKIFAGKVLRLHICCVRLAPSGLEEATEDTSVEKLKERCLNALLLIGSLEDPKSITHHKLSTLLREGAEVMPGHILEENIQDPRCPIIREKSVLHHHFPKMAVSQQKNVTKQDQKGSEDKEAILVGQRQTAL

SEQ ID NO: 964745 - protein, 234 aa, Homo sapiens
MAAIPSSGSLVATHDYYRRRLGSTSSSMTACGLARDAPRKQPGGQSSTASAGPPPDLSGYHQPQACGGASPPEPSAPDVPIGSSPSNSQPPTAVNLGRAAVQADLRINTADTKNPVRAPLLLSGRGPQHFGMAFPDHLELVPLGPPKAGNTLKTFQMARPAYTARYMKSQNTAASRDSYMSEGGPQHKTALTEHSGHVGHIAVFMEPQSFVVHHPGEDIYAGPPIVGGAAIHFR

SEQ ID NO: 964746 - protein, 120 aa, Homo sapiens
MVPSHCLDNFYEKNQVKESGNWAWDGRFRGQLGGGAGNSPWRSLPPPRGPKAMEKQESTKQGAPSTSGEPKCKVVHKSVQAQEKRREMLRRKEEREGAPGRHQVRAIGGDAPLSRVCVGV

SEQ ID NO: 964747 - protein, 384 aa, Homo sapiens
MLKTRKKKENNGGNLVLSSRGGPIRDRGKPGAPLGGRHGLEWTGPRHEGVAKTLGEKPRAQAQGATQGEPPRDTTQHKCRVHRDRNIKSNRAKTVATYPQGGEKKKKAPQSPLPNDNKGAPDNILSRGRAAATKGRLDTRTFTREAHTPEQPTEEALQSDRLWRKNTPTRGNDAHTRNVTPTEGHKNAPQKNTGEHPGEKDPLVNTEWVGPQGGTHSAFTQRTYKPEGKKGVPNGVEHEERHERPPGETGSYQATEKRPHTYYPSEYTHRVLYYEAGETTLVAKTNELRPRVPEQRKTPPLTSPSSRLTKGEKSTAEHIEIGNTRVLVAGKITTAVGESWEAPKNTHIAKKAPQERTEQGESPPHLDDSPQQGEQDHKGARQKR

SEQ ID NO: 964748 - protein, 99 aa, Homo sapiens
ARKLRVSNQIYEYDKKQSVIEILAAKPGTKDHHYFKYWQNLSIGLCCKMVMHARIGRQLGSDGSALLGKWCDECKPMYRYIVTSICFAIVRQGNLIIRS

SEQ ID NO: 964749 - protein, 212 aa, Homo sapiens
DKASSHPGMSSGPVPCWLCTSITLLGERPVQHRVVQANESDLFHELLPTGASSTRKVVWSQHFTRSPQEPHVAIQGKLVSMVEGKKNTPVPPERALELRTASTLADCFILELGQNIFRLVWLDKSNSPGTATRLRDLALVIRDSERTGLMAHGGDCHWHGEESLCEDDPEVLGPKPALKEGNPEEDLTGDKGKCPRPKHLYKVSDATGQDKP

SEQ ID NO: 964750 - protein, 269 aa, Homo sapiens
RSPSGNHDATVIVGGLHETVSEGAAVGTVCSSLYQYVNHPRATRIESLASTKDYGFVEFLSEEDADYAINDHEHDQTLWEANTGEQSIRLDNQKPVDVGANIFIGNLDPEIDEKLLYDTFSRRLGSSLQDPQNYAGAYTAGNSKGYAVELILLSFDAFGCSNSKPMNGQYLCKPSYHRHLIAFKKDSEGRCAIGISKANDFWRAPEPCSSQGLIRPHQVVLQMHLLQPFAPNLCWYHHLGSVVPSTRVPPLGPFPHPGGPSLGLPPVFP

SEQ ID NO: 964751 - protein, 110 aa, Homo sapiens
MRSTKEHNNSKSSPGGAQHNNTSAAQRSTEVEPIKQTNNTINTQAQQQQRDVREKKTNVEETKTQLSRTYEEETRTHTGGNQADQNTKETKQIHRHRGQHQKLTKAQQAP

SEQ ID NO: 964752 - protein, 69 aa, Homo sapiens
FVQVGRVAYVSFGPHAGKLVAIVDVIDQNRALVDRTLHLPSDETLSLAFTSCMQLTDFILKFPHRCPTQ

SEQ ID NO: 964753 - protein, 411 aa, Homo sapiens
GQEVKFIGSVLKGGQHFGTPFYGLQGPAILSPEGPRTGGMYLEPQSHSGYEPVFYSHHVLQYSISLLRHLVCEESPIFSLREMCGDSSLAGPGEILRDLVASVGRVALQSTYVLPVCVLCDACGVAGCGTMCIYTVCAQMCVLHPVCPQVCPCGGFLQRATSLTCALCVCESACVSSRHRANRGTHTISVCVRKSPENMTPCETSRACYERPGKPPGYIVVESAISCVPHTKLFIYPMCVPYIVWAAPKISAADKTSHEGGFVEESGTRVMSLQNYILRALLSSTRYVVVALPHNKGAGKKCSMFPTLFVVGPLLYTPRRPPEGFPKKNVWRKIFLWAATLQAGDTNPFLAHRENRWKEPFGGGVKQGHLSNSLYQKIPPVVYTHQAAGPGEGERVCPPNCGDERPAGGIL

SEQ ID NO: 964754 - protein, 131 aa, Homo sapiens
MVRRCLCGPGPSEYEFLTSRGGVAPKGMLGRGSYSVKSRFTDDRKERPPVLGVDIFSIKKDLEVTDAQVRRPGQGQTDGRDDVIARFFFPPINVKPPKKKSERTRDAGPQPGGGLFVGTARKSTIELVRNH

SEQ ID NO: 964755 - protein, 428 aa, Homo sapiens
TWVRAAAVRERDAVVPGCVCGGPRRLPPGTQEVPVPVVPSCVSPGVLCVWLLCVPGCREWCPGDPAAVPVSCAACRPLCRIVHWLCAVLQLAARVDQRSVKRALLRGPGVDSAERCLRLALQLRLRRRTGVPLAAGAADCMRVASVACRGMLQHAISGTSDGATCARAAWLLPCYVPCSKAMATVSRTPVMLSVLVRSRFIIQDPCLALWGGHARVRLPLLVLAARFIGDRSRFGWVLHTDLRTVRPHPGARHQGPMKTGGAHGTQGIAITGGGQDHQLYEGRPGLLMRLARARRGLSRTKDISISDQLGGAGLFPGVTGTRAMHGRVEKTGTTRSSSSITTRREPGEQRTGSIAERDQGGGDTPERHRQRGDPADPRRTGTPGGTHPERPRTNRQATTTEQRTAGERDDDTEQNDTGQRNEGGPRRS

SEQ ID NO: 964756 - protein, 308 aa, Homo sapiens
MTPVQRGGPGVPVWPCGWGTCGGFLRRVSAVASWWPGVAGLCGRGPGGLMAAGASRRQGRSDTEWMPVTKLGRLGQGLEDQVPLEEIVSSSSLAQFRESENHLDFFRWGASSSRMKVLRRFMPVAERREPCCRGPSGNQVFRGGILGYEIFGGDHTELAAMSAIMESSNRWLQEGRVVPTGQSGGGPIHSLGQRASSQSVPPVCRPRRAIRGGEKTYDFGEQAPPNKRVSPFATCVDHGHGYAGHYLCRVEYTSHSIPLWNPEGGDHLGPFRILRGQPLLAFKKRLASIRCAMDIRIDLDTPLRHRGA

SEQ ID NO: 964757 - protein, 48 aa, Homo sapiens
QLKIPFGPGVQPGVGPFGGVWRSKVKNVGHTKCSVAGRENITPRGENV

SEQ ID NO: 964758 - protein, 112 aa, Homo sapiens
MPIWYDQVVVRYRRHPCSIHRRCGATTEDLAISGPRRGHPMAQGKTVEPVLKTSAKTGNTHCWGAQLWSHNRPKVRPDMGELCAGEISGHIMRGPTADGTHQDGEGPLLGNR

SEQ ID NO: 964759 - protein, 175 aa, Homo sapiens
MRHQNKTPVRQWLRNPAGATTEGAGKNFYHPPGGRRDKPQSGVATTVPMRSAKISFDPTYRGKTNPVTVTKRSPPKFAAASKESPIKADPRGGDDTTPFTVSHPPLGKKLNPPSVDVRRTRAHTPDCRADTHTPKTTLLLGQNNQEEGNPAPRKIGESRPPRKNNSLERALASTR

SEQ ID NO: 964760 - protein, 332 aa, Homo sapiens
MSKQQNYTHQQNVGIYNNIRGQDNTPNEVVVLMWSPQQKGITQRGRGNNTPHKKEGRRPNVVVPPRGAYPTKSAYRHPHTVDHHLMRSPPTPGAGKTIRTNERETPPPKDRGRGSGGVIKSGRTTPNEKVGITPEEGCEYERTPTTMGERAGAGETTPERPIGRGAQPTEEQEKQTHSDCRVDTKREERPPTMVSPETYRRGHPQGGLRQQEDPLLRLWRTSRAEKQQPPRGGQNNTKRTRGDKGNPPLVCSTPARRTKTGAGPPHDQKERKGGPPSSIEEEHTPSKHQTRREYNRRLGHHKTMETEGSKRRAPIPPQRRQRQRNHADREVA

SEQ ID NO: 964761 - protein, 144 aa, Homo sapiens
  misc_feature (29)..(29): Xaa can be any naturally occurring amino acid
MWDTKEAHTCAPLKRGPPSGVDTPAHTFXHRPDVLKLGPAIFVENSLACALFSDVPLPGKSTHMALVSFFHRRPSEGRLLLEGTGGSCLGRVVGRPPLLGPGALSRGRPLASLSVETLGFVVRAPARLPGHISLHAPRTHTAQQ

SEQ ID NO: 964762 - protein, 159 aa, Homo sapiens
KLRLRWGEALTSSGRLAPRRSAPALHSPGMCSVSELCLHNSSLILHDDEVNVTEYKINALIIRSQVYSSLTPLLWPALFSTEGARAQDVKPLCGCLHLQMYGAPLGPVSRKVWLAGLKPAEGPRLSSNRWLLEPRLREQKERVNPMETFEDIPERSVRV

SEQ ID NO: 964763 - protein, 204 aa, Homo sapiens
GFRLRPNEACGLKAQGPPPSLPALQRTSQPLSCTNTLDRFSIPNDEPQMEERSEEVGSGYSLRGLPAVCNPVGRRAEAAGCSSGLGGQIMDRRKQDAIAGGAVRPAGGATHREAPRLSSSAPRQGGSGHPSRTKRCPEKGGDDPVINSVTMRKAISHGAPKRTEARVQRAEGHAASKRTGGWRRTKLEKCSPGVCTSSGREVYA

SEQ ID NO: 964764 - protein, 161 aa, Homo sapiens
LHVSERLLRFCLDRPLPDMSRDRSDRWRWRWGFHRREEAAAGAPDSVLRRPDGPQSESRPMVPGRAKRPKPPIPPPPPDQQQQQPPPQQHRAEPPRSAAAHPQAHQQQQPPHRRGLFQARRCSGPGPAPGVGSAPNQGLPGFGAPRPPGPNFPKPKKPFGG

SEQ ID NO: 964765 - protein, 437 aa, Homo sapiens
PLFLGRTVDRAYAAETMICLTGAELLMACTQCDMWKNRYSSPVWWTCVAMHASDQLHLLTWLSCMTYCLHTQRQMLTLRHTNGLVLLTASHDETCDARRDTYTGWLASTAVGYSPIPTTNARMPQALAIQGTSRKKASATRVSPWATQQAIEHGADRVPPRYLGQQSRQPASTRGTLVPVTTPQGRLCCSLTFKPGDGTRSRRARQKRPHFRVRYLNDYGHHNWRATNLRSRCHTNRPAQSMGTPAHNRLAEGRPLVAQPLRPSRTAPPEDRGGIRPIPRDAPNPGKGDTGTPRNYERTTNNDESNKATGISPHQGLTTAPSGRTPPPLAGHAGCALSPYNTRKQRESSTTTAWYPRQNFIGYGTEPFYHHPTLRLRSYFERNRKNAAHQIDRPTLIATQVHELTPLYLRAYSSAGCIVARQTERLRYSTLRKRKPK

SEQ ID NO: 964766 - protein, 137 aa, Homo sapiens
MNDKAWNSRKSTLKRKLKAHCQQEAARYGYAPQVARNARVNSLDRTTLALHTPEQTMTLRQRILFADETALRTTHTELAQHTLHGCGKRLLDDTRTSPRPTDKECRKYLHDFPLTPLSGGRTTRSTPRLPRNRDIHT

SEQ ID NO: 964767 - protein, 344 aa, Homo sapiens
TLYLGTSRIDQRVLLAETMYCLTGQRLDGSTQVTVEEPGTAAQCGGPVWPACLLIQLHLRHGVPQPMPPPRTSYPHINDCLLTQQEKGVRTLTCGCCQMGLSLILSNAVSPRLHQQSEYAHRGLDNVGMENLPILQTAHGDRSCADTKDACVVLKVSRVPKRWSLAPKAHGWPPNTTRRRRDRNPAGACSTSRAVPPSTTVTERDPAPPPQTQHPGAPRSEAQQWRMTWEPDNTPPGPNARHPPEQRPNNLCRLTHDSPPQAQGNEHHITWAMDFRESEWIPDAKYCHNRALRKTRFYQSMHTLTWETHPCDRYMIDLRDNNVNHYKDHVTLLPIPSTPPGPYA

SEQ ID NO: 964768 - protein, 136 aa, Homo sapiens
MEYEGHAGPMEISQLYLKVYSVDELSDHIPSFTMYNDFKDVGQMLMGKLAVIRGVTTKELYPEFGLDMNELSRLIALCAQLPGQKGVAHDKHESPTAYLLSFQRRRCQKHFAREAKPNQEEAREQAGMQDRGVPSS

SEQ ID NO: 964769 - protein, 183 aa, Homo sapiens
MRRAERGAGGIIRTPRRGERRPFCARERPLVRNPPVQRRGVSPEGGPLIIASCCARGGCGLSITGSFVLRLILNPPGGGGPRGGNSPRDLSPPYSPRTSWAPLKRERGTILFFGSPREGGETPQKRTREREIRGCVPPHLWAPGPQEPPGESPIKRTFHFKNGHPLLLNAGDARRAPLSSKKT

SEQ ID NO: 964770 - protein, 58 aa, Homo sapiens
MTMTANCAQNHTRELEAGTKTVSRYHASKTTTHRKTTRVDDYKNKVEERKYNKGGATM

SEQ ID NO: 964771 - protein, 278 aa, Homo sapiens
MLQRDCLLSTCDILGNDERAPMLFSPRTQHRTPLLLYHYLATALSFFVVCNHTMTKPPLSFPTYLSATNLRHTHLLPYHHTLKLLYVDLPTRYAQPSINIHKQPFLAILQQERGVMFVFAWVRAKRLRGDDESVIPTRCVTRETCRLRLLRLLRAKHREEALDLRDRTAPYLFQCVVREGGAHTRARDEIYIKRDKINLTCRIISKHESVVCDTNNNHVRHVGRLAIIGRLSLNSNDNPTDSTAGATGRDASFVVNPPQVVPFFYFYPRAILVGRAHI

SEQ ID NO: 964772 - protein, 184 aa, Homo sapiens
GSGNWPQRANRFYWASSPGKYQRLGLVATRLQLSLLLFLISGIRTFQRRALWAAFDVSLILCRGTAQTMWLYNVFSEKAQRLSTEARLCVQQDTHKSVRLWFSPTARAEGRRHHSHTQRLCVGSLTQVSPGGAPQCACVWRSPLRRETPPCVCDVMCGFSPHETRCGKRGISLATVCDRQGVSL

SEQ ID NO: 964773 - protein, 187 aa, Homo sapiens
CPWAGSPAGRERMRPHPVGPGRFPSGESSLAAAAPCIGRMRRILVPWPGLKPEARGGSSPPNLFFCGVSGAGRGTRDNEFGRCHFRGAQERLEEKRHRKRDGAPKGALERFPDEMNRHIPCSRFKPVGNLTKSSRLVETRECCPLGRSLVNQRHYSEGPPGQISPGGPNFHLFRKPDGRPFQEENLR

SEQ ID NO: 964774 - protein, 121 aa, Homo sapiens
  misc_feature (97)..(97): Xaa can be any naturally occurring amino acid
  misc_feature (121)..(121): Xaa can be any naturally occurring amino acid
MWEENKEKHVDTQEGNVQARSTKNSKEYVRAKVGVDGGASSVAYRKESDSWVVIKYITHNVSNLYSRVCAPPVSANVGDSSLWRVDSVWPFSVDTTXGRLHVCLSKHIYSHCGLLLSHFVX

SEQ ID NO: 964775 - protein, 133 aa, Homo sapiens
AEGSQGPRQGSSSRHHCSLRHTPEGVSMPKAARLNFPRPKSALERLYSGDHQRGKMICIGAAGAHEAIPEGPGPRAQEDTWRGKVTSDGAPVHHLVYLSRAAPCEILAQYVRRGQAAWHGYRECRYAPSQVPL

SEQ ID NO: 964776 - protein, 279 aa, Homo sapiens
MRLECFGYIYHKLLVHEVKDVIIKCQLAKRFTSAVASPTPNTPKFMCEDCAAKPLSLIQARQAREDGDVVATIVYHLALCKATGPVLVCAPSNIAVDQLTEKIHQTGLKVVRLCAKEPVEANRLPGVFFWPLEKQIRNYGQHCHELEKLQAGCKTRLGELVVCRTRKRYRALKRTGEEELLDERGMSSAAHVWAPVTPRAGQEGQFRSILIDERQPRQRAGVQWFRVLHRGPKSCSLVGDHLHRVPRGVFQKGAKAGMTQDVFKSPGRSATRGTGQAKR

SEQ ID NO: 964777 - protein, 216 aa, Homo sapiens
MCHDVALNAWTWTSQLTASHPSSIVFPGSNTEDYNLIVIERGAAAVATGQPGLRLLGTPGAAHPGWHGSIVKEEDDGGWQLEPLPIVTEGPDIKPVLMALRMCPGAEGPRLASPIVSTSSGLEVVAPEGTSASQVCGPGTLAGQCHHLPCSARSQADLVDVQPSVTSCLPSWTVSCPTCRMYQGAGTVELYQVCHVAPLYLNGGRDGMASDPGVVA

SEQ ID NO: 964778 - protein, 433 aa, Homo sapiens
SLRGPRWLARGSAAEVVLVAAAGGDMAGWSSDLSGGGALSPCVSLDVSPCLPCPLVERAHRLGALTGWRLCVIGPAEASPGAMASLGKGQQKEHAVTGRVRTDDKVPQLCIRRGPCQPMCLPQRATNFGRVVCPLPCCAFNVAPSQKCKPHRSRRAPFETPFQWGRCGPPGAAAAGEMLRRGPMFTRCNPLRQTGLRSLQRKEPAWGQRLLGKGLIGTETCLTKAAPAFYPEGRALRPGIPVIAEAPKERGPKPGEPLPKCYHIGPPKWSVCWGEAHPAVNNGCPGPPTVGSKCARCNVLPPPGCCRRDTGAVIDNMWFCVLRGAPVAKYARWAAPNILNQIVKVPAATPTFFVVAPRPGGCRPPQRAIVEVGGSPPRQFFFRNFGCQNPPREVTSASLHRCVQEIIRWWWSAQTRHDTFKKIDAALEKKQCV

SEQ ID NO: 964779 - protein, 120 aa, Homo sapiens
MIQVLLRIDTDYKPRLCVLNIASPGFLRARGGEEVTDEQADGSSKATGSLKRECEPEESGVESRGRLAGQGAPKETICVGGGEKSSLTIVGPGGYKRVNPEGVRAPQAGRIVRTLRESRG

SEQ ID NO: 964780 - protein, 57 aa, Homo sapiens
MIWPSYPPTELGQWKNRLKCGGAPHKLFFTPNGPAGGSGHFPKKKYILGNSPLCGGG

SEQ ID NO: 964781 - protein, 68 aa, Homo sapiens
RPSGCLQGGEPGSTRGGKSVLLQAVNPGPESEGSGVPPRPEEADETWDSKEDKIHNAENIQPGEQKYE

SEQ ID NO: 964782 - protein, 207 aa, Homo sapiens
MSDAAVNTSSEITTKDLKEKTEVVEEASEEVVETPRANGNATEENGEQEADNEVDEEEERKVWEEEEEEEEGDGEEEAGDEDEEAEISYGLSGASCTDDEDDDVIAKKQKTDEDDRQRETDKVSKVKCWGGISSLRVVRAKNPRVYARWALWREGAFVQYSMYSVSEGGEMRGEPPVGGRSIWGPSLRNPGEKRTKGANPGSGGQGA

SEQ ID NO: 964783 - protein, 51 aa, Homo sapiens
PCSAKNPIIGPITHIFNNHGTRGKEHSSQKGSSQKFPTDTRVDTNRAHEHT

SEQ ID NO: 964784 - protein, 357 aa, Homo sapiens
MRVSYQQGPVIRDEDVLDLLLGSLIHIFLGNRPPGLGRMDWTDSINLGPRDHHPLHGTRFVYTRQIGSLGRKTQELGSSSLGTGERWRRAQSFSRGPARFTLDGGTIGRRYWRVARHSVCRLVLLGGPEDLAPDWRAGPLGRLGFRAVGLENLTGYQGGRRGHKPSDRDSSGGVPRMTRCGRPEHQGCGPENPQEYSRSLGDTVWAPIDFARIQWPSSPGGDYLWREQGKFLPSYLAHRAQGGRCRAKGVPERLKGPPGGRGAKNPRIYDGGGKKRGGNTCKGGPAYKGRGEKNRAPGGTPLRAVEAGPPQEAGGGTTRCGARGQQESRRDDSLPGIQPHVMVLQCEGRLTTQGEDS

SEQ ID NO: 964785 - protein, 287 aa, Homo sapiens
MPPERRRRMKLDRRTGAKPKRKPWNEAGLDSRMRGQAGLPKKPAPFIPAVNRRPRPSACVRCVLQYAAGGVKRDWLRQRWYRLRPGGWTNRAVESVLGWELVFWRLSTNLTMDRVDCGAFCDGPEGFRATMKDSGDFRTWSNEGKRVICACSKRSQFGLEWRKMKHEEMVDMMSNRLRTDMMTQVLVTVNFRRDNLKTRLTDEFQHAMGGVPAWAETYLSGKHLPMMNVKRMTMTCAKGLGIFHYSTFNFFPRGPLAPLRTGSMQCERSYWWLGDFPLGPFIPVPDC

SEQ ID NO: 964786 - protein, 149 aa, Homo sapiens
LPAAHPGPAPGLVMQLFQDHGFFPSAQATAAFQARYADIFPSKVCLQLKIREVRQKIMQAATPTEQPPGAEAPLPVTAPHWHRLLPLPPLPAPQGALTPTSPSSDSGTAQVPRQVLHPQSRGLGQPAWEGAPQSFPNPRFPHTVCHKAG

SEQ ID NO: 964787 - protein, 275 aa, Homo sapiens
  misc_feature (237)..(237): Xaa can be any naturally occurring amino acid
ERSRRANPSQPAGVRRRWRREGPDARTWPRRPPWRTAAPAGGAGVGGPGPPGPGQLAGPVTTLSYFQKPPRGAGRRGARGGGGRMTGPCDGAKGKGHRSSYDRKGAYGKAPSILRGGGIRGSKLSGALYEVASDRGDSRESGDLDAWIEASVGPVREVTDCPGSAKGQGTLLGGPVYKTHRGPSISWPAGTKIRGHCRKLSTPQEEVEGPDPGERVAPTGQSLPPKSRRQQQIPGDXADKAWCHEQGSFVRLAQEVLFPLPPQFFHFGGVHWYYR

SEQ ID NO: 964788 - protein, 280 aa, Homo sapiens
QGELEVNYFLKIIQLWMIIRNVSLWEQDNVGSKQNAADPAMSLRGKAVVLMGKNTMMRKASRGHRGKQTQSLEKLLSSYPGECGLCVHQWEEPRLRSGTCCWPIRCQLLPVLVPLSHCEVTVAAQKTGLGAREDLLFPGFSVSPLRNLQGTHIEIRECCARLIKDCDDNLGMPAKTTRLNSATRSPGFSFGRVMPAGVRAWQAIYNPEGGLISQRRTLHSRFLEGVPQCCQESVLQIGYPTVASVAPFYHQGSNRVGRVVGRVNLPLVKRQAFGGPPLGV

SEQ ID NO: 964789 - protein, 113 aa, Homo sapiens
MTRCRARAPGSRHFVANRGTTRWPSSVWVLSAPREVAPGIRWGIILGKLSIVPRDAEGYVGDQDRRVAQWSVPRCPGVRLCVGSPIPVPGRWLVPACAKDAIKAFPYGDPPGG

SEQ ID NO: 964790 - protein, 304 aa, Homo sapiens
LADEEAAEGNPAPVAPRPTEGDDLREGPGAVMVSYVDPISMLLSLLSAQSSPARVSGLLLIPPVQPCCIACAQQNGGTGLFGVRPQCQVLCKDCSGYLELGEEALVELLATSAGAKNSAATVAVASPFNSEGLHSDSSWRITFIGSLRVIGAHSLLVGRAQQLGKALRRSRLLIKSGRIGPVTLCTISTNPIPWMVLVVRPFVQLPYLGGFYPVCNWVSPLRLLLARLGHTQGGAMCVTSHPRTLETSQPFLAFWPGPPVILPEGVWGRKGVLGKSTWLVKRPRAPPRIDLDRGKSPLGGSANP

SEQ ID NO: 964791 - protein, 182 aa, Homo sapiens
MLLRASSLAKGQLHPSQAREVRRDHRLVVRPSGTRAAGLGGRSKAGMSQGAASLSAACPVPAGRSLETGRIEEASTQGRPGCKHLPASYYIGGPRSNTAGTQDHKIAKTILRTLLHRFETVLQKARRKGFVGGTFKFPRGHKGTKRRKGELKFCFGRKEKFAWPQVIDGDALSLNRLRRLWE

SEQ ID NO: 964792 - protein, 340 aa, Homo sapiens
SEESDSDREALAAMNAAQVKPLWENAPSVKPDLYHGSMEATCGNRRLDLVPPWEGGAMQPPSAQAAGSWDGGLSRAGSAGQSSEQQLIGRGAHMLLAPELSEQRPCGKHRSMAKTHAPSHCQAGHPQNGTGHEPVQRHTADNSPMRQARDDAAERAHSRHVPRQLQDGHQSEPLSCTPHGKNQARDNTSSGAKAMPQSKNQLPLASAQGLARCCDAGRPRSRPEKRHGHLRKLPHSQGLQSPRPVGLGGQPRRPRRTDFVRTARERTSGLVKRTQTPHGPRAHNRGEQAAKPHAGQKGPPRLRPQAPHVARLQQARQGGQPAPAPQNPPAGATARPKAAH

SEQ ID NO: 964793 - protein, 218 aa, Homo sapiens
VGPGATVRSVKARTRVHSSGTWIEAGAMVRRAGGGAVRRAMLLAMAQRDTRAACRSLVKHLLTRFLRRRTDFFIGGEERDGREDWPGERMSASRRNARRLIKASDLVENSRRIMRTAWGKPSWCFELPPAGTAFDMSGHYKFKRYHTDLSATKIQLAEKTRREKRARQEGRAVGEGGGAAARLGKEAKSETSGPQIRELTDEEAEKAAGRRLSRKKDA

SEQ ID NO: 964794 - protein, 239 aa, Homo sapiens
LQPRSQRLNGPPMLGEWGGRSGPAALLPSGSPSRLLPCSFGSCMARIHPACQQAPYCGGLFASEGHPPVPVRGNAAVGGDGGQRAKVIMPYGGEHKTLCPAVYANSKESAPQTLHIEHAPSKSQAIGRRSTQPRKRETQKSVVCIHTQRSTKTYIKDTKATIARHQLADAPNHRCNMSEDRNCDRGGNQRGEKSALLMLPPRAEGANEEIRVDRRRDENTQGPRRADDTGNLSRHTLEP

SEQ ID NO: 964795 - protein, 262 aa, Homo sapiens
  misc_feature (201)..(201): Xaa can be any naturally occurring amino acid
MWGSYKGNTTLISSYKFCVTCHAPSVEHHRVYTRVEHVKPRNNALGSLEPHVAGNKHIHVAEITHHGGVDNKRFEDHSSTTSCIYVSYTPFSVVGPPMWGHFIQTPPFLKNLVGARLTHRRNRGQTYTTNTQGGLAHITLGVAPWSTNWDTKKRHGGQKTLSRPPVDQGDTAEQPPVSVQRQHTQGQSPGAMQQRGTTQQXTQPHTSHKPSSNSQHYSPLNSEQQNPDQLVNSNVARTLKREHTKQRQIAAGRAHTPTNPDG

SEQ ID NO: 964796 - protein, 239 aa, Homo sapiens
MCAEVSHTTQVLPRCVLWVCPLCGAGTIRARVFSHRYIFVEGQKCFARATQMWVEVWTWEGKPSAVGTHEWAPPRTIYKCPYREPYSQLSSGRVAPEGGPVVYTAPGALEKKLYTPFLGGDNTPWGLHSGEGAYSPENGKKEGVSPRGIHWVATIRFGGGIAYIRKAPLFRCGAQRGVSRGGAITGGPPGPSGLGETCPWGRKRSPVAKAPRPGGPGGSIGKNRVPFDKVAGTNPENAR

SEQ ID NO: 964797 - protein, 76 aa, Homo sapiens
MVFSPPGGETHKVFSNNFQKKQKTIRETTHTNNTTTRTYYNQNTYTTHKNQQTTHSTTPQLFEHEKNNNQTTRQLR

SEQ ID NO: 964798 - protein, 89 aa, Homo sapiens
LFAMDPVCAGPGVSAGRWLAGGVLCLGCDMAGVMHVTYIWMCCDALMPLLCALCCDAPACRCSPVWMLLPVCFECALTVLCVLAVTRVP

SEQ ID NO: 964799 - protein, 253 aa, Homo sapiens
SENNVVYLDLKLENLMLDKDGHIKDHRRSGLCTDGDQWSVPPMKTFCGSIWVPGPEVLEDNDYGRAGVLVGRLGCGHVRDDVRSRRALLQCRTMTKLYELILMDGDPGFPRTLGPEAKLLAFRAAQEVTPSQEAVSGVHPSDAKEIMQHRFFAGIVWQHVYSRRSSVPPFKPQVTSETDTRYFDRGDSRARMITDHSHLSKDDSMRGVDSERQVPMVPPGSSYSRQAARPDAGGGTALDRCLVTGLATAASCA

SEQ ID NO: 964800 - protein, 30 aa, Homo sapiens
MLRLYRPRWSCNKRHGSVEPFPGTVRHVLA

SEQ ID NO: 964801 - protein, 290 aa, Homo sapiens
  misc_feature (259)..(259): Xaa can be any naturally occurring amino acid
TSRYSEPYGEDDESGWWTPESDLRGRVKRTGPIVLVRLLKALGKNRSVDFNPDFVFSAKEGTYDGSWALADVMSQLMKKRAKPRTIENEEDGESSERKRKNRGYKNAKSVEVCEHGEQKQRKALNQRSMEDLHRSNDEVKVSSQHDTPLRTDYSSADENILTKSEIQLYRKEDRKNQRRRTAMEAGTDFLKDASQYDERPLYQENEPFPPLLKAITSHGLQASPPESRRRCIPVGLWGNGICAFAALGKVKLLAFACCXERWFLTRKVSHQDFGVVPPKLGRCRWPRGVR

SEQ ID NO: 964802 - protein, 47 aa, Homo sapiens
MAQRRRHLSSHVEATIVKPGLSSLQTQQSAQQTNGLTTVPGSHDVVR

SEQ ID NO: 964803 - protein, 214 aa, Homo sapiens
  misc_feature (68)..(68): Xaa can be any naturally occurring amino acid
  misc_feature (194)..(194): Xaa can be any naturally occurring amino acid
MFSASCVQPRVWECGSGGQSLQAPSGNSPILPDVPKADSPLAYKPSVSYPWDLAGSPPHPCAVLIPQXIILCGYFYHKRPRVFRRGCEQKAENHLFSKRSRVGLIQTLTIGAERSPWGNISLFLSKRSTLVCGDLSYGALIYKRENKTLGGYFSPQDVRGPMCVQARVNYTLWGKPPISGPLKSLWARRKRIPXLWVSLPREKDFLTASKNLYG

SEQ ID NO: 964804 - protein, 109 aa, Homo sapiens
MEEHSMFMDRKNPYREHGHTAQGVIYRFSAIPIKLPMTFFTKLEKTTLKFIWNQNRAHIAKSILSQKNKAGDIMLPDFKLYYKATVTKTAWYWYQNRDIDQWNRTEPRK

SEQ ID NO: 964805 - protein, 232 aa, Homo sapiens
LHPACGIPDSTAVMPRKTARTGKSNYFLKIIQLWMIIRYVIIGGADNVGSKQMQEIRMSLRGKAVVLMGKNTMMRKADPRASWKTIQLCRNVAASISWGNVGFVFHQGGPSTEIYGTCCLANKVAQLLPVLVPIAPCEVTCASPEHWSRAQRRPPFFQALGITELRISRGTIEILSDVQLIKTGDKVGAREATLLNMLKISPFSLGWSSSGCSTNVLHLTTLNVLDITGGRL

SEQ ID NO: 964806 - protein, 329 aa, Homo sapiens
KEERAKLNLCARWGPLACPRAARSRRGVAGLQRSASRGVPTRLDWPPHALAAELPCGHLPWTCALACLSCCPAAEMGAPVCTCLDGVCLVFACHGTLPLLLDPACCCCVNVMYMPDPACRAMPRCPLPSQFAVRATPLLAWPPVLLPWPGEVGCESCLTSALLPECGQLLFEQTACELVRLDLCAAGSGRRRGRLVVLEAALATLLAVVARLWARRGAGTLGPGAAAWPSVQEGFGSAAGADTRGARCEAPTNRFPGASFMLYNLGSVGSLEYEVLQMAVGLCACLTSKGLGECAPRGHVRLDRLVRTWATGELAVTALWDSQRETWGG

SEQ ID NO: 964807 - protein, 70 aa, Homo sapiens
KPEWYEWDEELIWLVEVTFYQKELAMGSDKQIVREETVFHEFLGDWRRRNSVIVIATGKKRSRNEEGYIN

SEQ ID NO: 964808 - protein, 192 aa, Homo sapiens
FLEYVAESLEPPSPFELLEPPTPGASSVLGRPCCYIFPGGLGDAAFFAVNGFTCCWSTVCAQTPMSSFWKLVLCTWTCVDAVLVTHPVRRQPPRAQQPAAAANWLELLQMCVLLVRGSCGLTWLLHGSSPPTWGSLFFNCLRGRVACLALLAERGGAEAVLLSLLCAAGHHASATHPRPRASQTHRALLRKM

SEQ ID NO: 964809 - protein, 123 aa, Homo sapiens
TQEPKTCYIISDDKGIKVTAEQTSRLLAVGDMVMATVNERRKQSSEKRYDPAGGHSDKRTVITVEKMACFVVFKCMESYVTHITGEHAKVLSQLQDQEHKAGVQTCGPRSGIQCWQHGMMSSR

SEQ ID NO: 964810 - protein, 148 aa, Homo sapiens
MPSPAAVLALQWAVSGHHFPLLLHVLVDVNVHDTVDVASCRSRLTHGPLMAIHDVLCQCDRCTGPGPQDMGSARVVSPQHDCTSCIPTTPVSPVLPPYLCSQLIDDRRVTAHLRHCTSFPLSACLRRLPHHTSSPCLRYPPTALQRLP

SEQ ID NO: 964811 - protein, 294 aa, Homo sapiens
QLRGAAMRRLAELTVDEFLRFWAFDYLSPELLMPENSPQCWQTSVNALLRSARDVLWIMPGLWSPSASLAVNGRASEHKDQLSRLKDRDPEFYKFLQENDQSLLNFSDSDSSEEEEEAVPLPAMMCWRKPVRRRMEREDRRTWGQTSPERPARAQRSTSAPVHRSPWPAHDGTRQPTATPHSKAAPMQLRTGRTRAACGQPPDGGPRTVPDANKYQVPEQRCHTMLCVTFCIRTPHWPVYTNPPLGPRAHGKPPRSSTPCQSCLALRRPPSSPSLAHLGSANQPRCLCPNLSPP

SEQ ID NO: 964812 - protein, 415 aa, Homo sapiens
GALETGPVIASRSRSRSRGRRAAEALSGRSAAAERLSQGCPCLLMNAACLPSALPWRLQPRGWSSGAGHWRLLHVRLAALGWGSRLSALRSLSPQCRSQGGRGRRPVPGPLERPPRVPTSIGRLSGGGIEALEAGLPGGGSVPACLAATRIDNWGPAFPPWPRPCRPPAEAGSRKLPTSEVVVTRSPAREGSAAGEPQRGPEAPGGAGVHGACGGRRTTQAKERRKAGVRDRYGTITRPGKLQGSLGGHVPRRTRLPPNIEHEGEENRRVDQPSAELCVRVWVKRPGEAKVADKREAITSKFDPLQGVAYSAGDQPAHISTPYKGRFPTGITLYKQCGARAVGTWAGGRLQPRSYLLTPKGRRCPAQVLEQATTLERRGERGAAEGSPEGESKNGWSTGRRRRCDATKRESTKVG

SEQ ID NO: 964813 - protein, 217 aa, Homo sapiens
CHHDLPMAQLRLVQIQFCASSTACNKYLTGRGCSVCSMAELLYCHACLEGMNADLVTAVMHAPLHDGCVHAAGLSCHCCMPPMCACYPVLCCDQCDCATLLTLLMLLMCCPWSLDLPGIPSICRAGILTDRVLPCVCLACSLHVPRRPVAAFTYSCGVCRPLDVYPCPFAPSCFFGLAMELVLVPPTGTDMRLVGDGCCHPFGPIAMPSQRAPDVIP

SEQ ID NO: 964814 - protein, 212 aa, Homo sapiens
  misc_feature (186)..(186): Xaa can be any naturally occurring amino acid
MDKNAFPQRKTVREGGFHKPREGGVRASKEEPKHIHIKQCVGHAQEFFVLLETPKYVPRERRPISITYYTPRVLTIQVSRGAPQVFCRCVAYFYALSHTKGGGWAIVCRHTAKLRTVHTILLSVLGEIGIGLAGDFPGNLAGSNKWITAFLRPSGGVFIPKEQFWRRKFGEHKAISRISRLVRTQXFEGRRCDKRRGGPEDKRVVVRGANLC

SEQ ID NO: 964815 - protein, 260 aa, Homo sapiens
MSGALYVLQMKEEDVLKFLAARNPLEVAPILIFQMEQYIYKEEKGSGIYIINRRMRTVGRSFVRGESRAIVAIENALLMSVFISSRNTGQRAVLKFAAATGSQSNVLAAFDSWNRFTNQYPRQTYSGSHEILCGLLTPGADSIEALSRRPSDVEPSYNIALRNTDSPLRYVDIAIPCNNEGAHSAGFDVVDAGSGSSVHAWQHFPLNTHGRSCLLRPSSGTPDWDCPRLSRLLLQKAVSTEGIPAARLLPLLSSLLLSLR

SEQ ID NO: 964816 - protein, 297 aa, Homo sapiens
TGRSYRLAAHRRCKLSVLRVEHALSKVHFTVERGSYYKSLTVCARRPKARRNEKVWAHYEEQPVEEVMPVLEEKERSASYKPVFVTEITDDLDFILCRMSEIGRLARLEKLMENMRNDDCHVYPSRVEGSVCPPRGGEFIAKLSKFCTMENGHLCPSRESRVSCQPYMSSTLTTAHREVLTSIRRGYPITLPFSTRVLPDQATEYAYDFIQVPQDDVMAVADAVDSVVRDIQIQSGACSTLEDLSDGVAPCQPVGFAIRRAMWGLALGERKAGQVERGPGTRPKSGSPILTVKLEKQ

SEQ ID NO: 964817 - protein, 177 aa, Homo sapiens
MVKSREPAFEHCWWQDGLSGILFLTIMHAMIRDCRYGPSMNATYDDHRESTEGRTLVVISFCGPARSAAPLTSKHDFSASLQGTSIKTERCTGTQSMQLQSKTAYEGRSMDTRATPGRSKPGRARARRSSPVRVQRPFVAAPVSCAAHALAGILGMPPQPGPLGRLPGLARFLAMTG

SEQ ID NO: 964818 - protein, 130 aa, Homo sapiens
MLPKNKRQENNVTVTDRDGRRYTQQTSMETSRRKSPASYPGITDTRNNTGEEKQVAESQQKADDNSNIVIVRVTRTTRHKLVPNDTLCEHLSHDNPQQTKQLKNASKTRRKPRSQLTRRSDTDLRYDNKT

SEQ ID NO: 964819 - protein, 324 aa, Homo sapiens
DTLVLILSWARHRVLMLTMASEVARNRTDWVIVDDQQTFFCGNVAHQQLIQITSASAAGWSLKNPKLWSVKECEPQAKNITCVPPAIAAQVCGVLRHGALYYLQIHTSGAPCSISHTDDGTCKMDSALDNHTHDSETSKCDMVPIILMPLAHSWTGQSSESKILDQYALFLAHLACHQGSMHEAGHDALIIPSTSNSLNCTPPQYLEARLRTYSEPIPILLATYGVQELVPAGLYNSLNLPGVNYKQNSQHHRTYLATEKPKNNRPQTPTTACNKLGANKPTQRTTHHPGYRYGRENRPNTGKQRHKRHINTKTHTTGTAIYEH

SEQ ID NO: 964820 - protein, 221 aa, Homo sapiens
MLYRDPAEDGVTALSVYLTPKTSDSGNWIEIDLWHQTQGCVLGHRAATRRLWARGLSFFQTFTVHLSASVTKIMLSEKHLISVCGDNNHVRTWSVSRFRGDDFHPARVATPLASFRDPGLWSRQMVHGGCQPLITEHVAPTVMRDDQQVFIQKVGAQCQPALRASLIYWAAGVLRALRGRSPRELLECVDVRGRPGGSALGPGESCSLSKAKRQALSMCAL

SEQ ID NO: 964821 - protein, 52 aa, Homo sapiens
MKFLSHEEGSEAGQNHTAGPVGPPKPPQTKEAAHTDAPGPPSNNPRPRRAKP

SEQ ID NO: 964822 - protein, 130 aa, Homo sapiens
MKAWGTWCARDEVGLWIARQGMHVGTKCKGAAIEDMSGRSLGVTRGKRDNGRHQNVWGATKRKLAPKGPTEGCGQGGRYLGHWASGSVEAYSGGQAPGAERVHSPEERPPGTSADSAGAPQHGSTRPQTA

SEQ ID NO: 964823 - protein, 157 aa, Homo sapiens
  misc_feature (2)..(2): Xaa can be any naturally occurring amino acid
AXSRLVEAGVIGEAQSETRLSVCSAASDFYSYRQSSATSSFGGLGGLCSVLFGPGVAFRAPSIHGGSGCAAYPVSSARFVSSSSSGAYGGELRAASVTASDGLLAGKEKLSHADGSKRPPGLLPGQGALPCSAVNGVARGEDPSDCVSRDAGVWCPP

SEQ ID NO: 964824 - protein, 86 aa, Homo sapiens
ARHPEPSETPLILKRRDPQQVGKVTGTPGTVTRHKAANNLQSSPEQTPHRTKTPATLCAGRDNGQNCTSDLRAGPLVAQGHPAPKT

SEQ ID NO: 964825 - protein, 123 aa, Homo sapiens
MVGEGHSTTESTQQPDPAASRKKKTPPTNYRHRRDNSRAREIPPCGDTVGVPPPRVMTREPLEVRHNPRERVNNYTDGPSRERSHHDGLSEANTTAGPLVVRHKQWGQTVVFVPSVVTAPPGK

SEQ ID NO: 964826 - protein, 128 aa, Homo sapiens
MGVPKKHNNKTTTAAIPKNHPALYLNPYSPHSISRSQKPQRRKSSLGDTKTKICDEIGQHQTNKCETQPAPQPRGCDANDKKKSPGREEPQTGWRRATYYAHKHHPHEGVSNNSRCNSDHISGVRTTP

SEQ ID NO: 964827 - protein, 359 aa, Homo sapiens
PGALAYGPAGWIWFQPRRAGLGMRSVDGCWVLLGCAAGPGLVLHLLWLHPLPLCCLSCALLWTLTCLGQSGEAVLSALWLDCRCQSCPQMEQRVLEREAEKGTEGNEERQRLREAGLVAQHPPARRSGAELALDYLCRWAQKHKNWRFQNDEADVALLHMYDSDKVPDEHFSTLLAYLEGLQGRARELTVQKAEALCGELDEEGSDPPLPGRGPAHLTGAAVALLVGSAALRAVASAGLLRPTWCSSRRVWACSQAGQLVSKGFQVLGGGAGSQHQSFEVALPPRTFLACRLYRMAGHGLSGQGDFLTYRTVLRGPTHDFFLGVIFRANRMGECPRESSFHPVYYTIEAVVYQHTWRTI

SEQ ID NO: 964828 - protein, 204 aa, Homo sapiens
MASGAVAPLGIVKHFFLLLPCEQGRVCIPFHHDCEFPEAFPAMWNCQLPFPFSHEWQQPAGPHQMPNLEDSSQPELGTLQTRTSHNTKPYLHKRTRQHLKRQPITPAKDMPRTEAPLLTSHQQPHIPPNMYQPNTRNHTRNNHTAHDTTAQQQTQHDPNNTLQPCAHNAAHQRAKNTRQHQSPHTTPATHTPHPAPTHHLVPTH

SEQ ID NO: 964829 - protein, 314 aa, Homo sapiens
SFFTHGDVVPLVSGALGACCLGIAACQHRRVSVQSPRIAVLEYLEDIDAENTLEEGTEGLFKSTRSVWDKKHGAVDEWPCGRPGCDPRVAEESCGVCPPVIIAMWTSWGVARSSAGGKRSTVKDVEGERTFQALIVTWRKIFPWSEQRDEVLMGPQQAGRLTVNWGFYPGLGSVVQLLPEPGTGGSLGKPGGGRLHTWGEVRGGTRKAGFFLSPGNKFGDPGDSSSVGRRRHNKRLKHQPMGAPKETPMGGKAPTKAKTGETTAVKRRCITQTRREGDTINSQRGERDRTSDVTTDKPTHTVISDEQAISNIRE

SEQ ID NO: 964830 - protein, 319 aa, Homo sapiens
PPTDICSQLHLLFTHSAPSVFHLATHLFPPQTLMLALSLCCLAALPVMPLLTAFSMALKHIKVSCMTAVFNQPTVPHILPPRWCPQTEANFPFHAHMNAQCPGVVCTHTPPIPHDSTQRDITHETTTHENMTQTPPWRAPLDPEGSETQETSTSLQTRHQLINSPDLLHQRPQTASLRNANQHTSPKPHQHCWRHIQTPSQAHKPSNAKKNTHSQVTHSQPKRCTTLDLAPNILAVSTAHSQLWPHDPPYDTQSPATNTKLPPSEYLPNTFAQGNKLPPSTPHYHYPCPARKSYINANPNNALLTIHRNTIHNTHFPIQ

SEQ ID NO: 964831 - protein, 203 aa, Homo sapiens
MCETHRLCGHSHKCVHTYRKFHVGGGALVGTVWSSRCRNTNFFRETSLTNTDFYNTALNQRVRNTFTHVWHTENISKTPSVVGNTLFCGNHRRLIKNGVSVKKNGPVGTPLYKNRVGREGRHPQHPWETADHIPRRQTGWLTLQKPTQVLPPEGINTITVGDNGATKDDTPDAGHPKEDNDTRRATLHKNWPRTGRTTCGSVG

SEQ ID NO: 964832 - protein, 387 aa, Homo sapiens
MANRFPTQSNVTGPRGSWAKRNSGIKKGKLGVHTGLETSHNPLDRDPAKTKPTWVLGAAPHKKKSTRNTYSPWNTVLITTRWRNRYNLTSTTGVTNQRKSVSITNHRGRGIFTDIQGFQGNKFLFSEGALYSHKFSVGGLSIERVGGAFWHRGGKIFSYCPQMLHPLCTTPCAYPPFLCVKLRVIKRHFWGGGAQTWAGGPQKLGTKTHPGEGEKKSQHSWAGEQVGDHCCKAPRDWRHPHGRPTHQKSTTWEPPEGELSHQRHMRETPQGGGDESAHRGSGEKTLPLSEQPVEENNRRRGETRGGEATPRRRPGVCGDTRGPERRISPRENPTETEREEERTSRRHQQREHHRARSDVNNHLELRNTEALEKRTQEQSIVFRQRDT

SEQ ID NO: 964833 - protein, 113 aa, Homo sapiens
MACKCDQRQTQYVCPQWTHFTCSKYNATAAGHVYTACTETALHALADGHSAQMWRGTGLILLKAIKEKAISQCRAAAEPYRGPVSVGMRFLWQQAPIAKSLVDNFSVPSQEAR

SEQ ID NO: 964834 - protein, 103 aa, Homo sapiens
MCQPHRVSKGGRRWGARVWKFRRKNHRGAPGLAPGSAPGKGGPSEAPVVITQPFFEVLHSILGDRGSYHRSGPVSGFPPKGTRLWPWGEPAEKGPGQWRRIPR

SEQ ID NO: 964835 - protein, 141 aa, Homo sapiens
SRVLFLFFLVQNFIKGSLKSNIQTPKYSCQGNPVYYAWWGRGVGHWTGGIVAFPTLLVFVKVGGGWARYLISLGVSTSAHVGSEAGELSIYRAQFLYTGGAPHGQAYDLFHLVISAQDTPCVRRSNNFWPPNSMCSQPVYA

SEQ ID NO: 964836 - protein, 43 aa, Homo sapiens
MRRDARGGARPRVETRARRYTKHEDTETKLEQRQQSRGATSTT

SEQ ID NO: 964837 - protein, 123 aa, Homo sapiens
AQVMLKPPVFCNTTSGGTSAERMEKCGEENPWGVGSVCAPGTQGCALYWDCEKKTLRGPVVVTWNTRERRTPWAWRREKHGVCAPATVCGRGGKSGCGSPEKCVDSARSPHKKERETSRGPVS

SEQ ID NO: 964838 - protein, 115 aa, Homo sapiens
SIFTMGMCVHWCRSPGGCCLGVAACQTQTCICPKPQKADLEYLEDIDAENTLEERNQGPVQEPQGAYGTRKHGGCALWPMREASAVNLFERKLTDLSSREKAMLDQLGVPALVQG

SEQ ID NO: 964839 - protein, 150 aa, Homo sapiens
MRSHRGYPTKIVGDGRHKETKRDPPPQEESRRTLYMGPENQGGAHKLGETRHSKAINHIMGFVAHEKAPRRSTGASRPPEQRGEKPQALVSSVEKNPGGKPTGEPHHGGPTESQEEPRVEQRDTARGEKRNKHARLATAEHQEGTDKQAK

SEQ ID NO: 964840 - protein, 104 aa, Homo sapiens
FCERVGAPCPGPPEEAAAQTALLIILADGRSDEIPVQQDSQIQYVLVFTQVKKQSSYNAAYSYSVGIRHSAVWTDEEPDGNFCCVMETRNVAPSGEVFAKLFIL

SEQ ID NO: 964841 - protein, 160 aa, Homo sapiens
MEGEKEDLMERLKQIEEQIKRVQQKREETDPSKGSGTMEREREAVPRAESLKTLGQGSVKKLKKAKGGPGWRASRGPEKDSENSWAWEMGRADSRISQREMGPQEKGELRLVDVGEQKAQYGTEDLGERPVLELKYGLEYPLMLEGARCENNELDERDDK

SEQ ID NO: 964842 - protein, 89 aa, Homo sapiens
SSRLLGVRGTQCVCWCWEWRDPRKTSFVQRLTGHLHAQGTPPICDQLWIQQYMNVPFPANIDIRDTVKYKEVMKNMDIGSNGGYSDLNV

SEQ ID NO: 964843 - protein, 236 aa, Homo sapiens
MPHIAIPRAPVPGQPCTPPDSEPPRAYPGAAPVTYPVSSSSANSLDRAGSQCRCYARYTRGLGLSPRCDPQSSLEAEAPSLMLPALTPCENSEVLLEGMKGFGTDEQAIIDCWGVAPANAAAADPTFPFKTAYGKDLSHKDLKAERVSETLRRQVVGSDEDPSHLLTLCDDDIGTPYNGVGHLSDGLAVIEILRVPDRQLSTFRELNRAYKARIQNDPGRGPSKRNSGHSSGPMSP

SEQ ID NO: 964844 - protein, 104 aa, Homo sapiens
  misc_feature (97)..(97): Xaa can be any naturally occurring amino acid
MHHNKQATGECPRRKKRRILGLLDAYLKTRTFLVGERVTSAEIDSCLRACCGSIEQVLVAFFAGEALSAIANLRGSSTVRLTEPRVRGLVLEGKVKXVLKNDWP

SEQ ID NO: 964845 - protein, 509 aa, Homo sapiens
HHQEGEAGHGEGGPGTLRSKEAAGARPAVRRSHDGTCWPSGSWCCEMCAHMWTCVTAVCPSPAHAPVGLACADQYMHPVVQSMVHWCAAEPSTSAECCGMVAGVELSYSVRAGLVACAWGLSGAAAVSGLKLWRCNLCTYQRAPVCPRAGASAWPAARAAGASGCLQTVSGAWETRRCQWCLPRHGRMGPVGHNPSRCADTRPTNRPRWSLGEQVDPQQVTIEHGYQGWVDRESMRTQDREEAGWFPRAHIPFESNPYIVTLGLECDLAEAHAQGRGDRWYSHIYTVYTFTRGACVPGATTDPLIRAALGALTFGGDSPPKDTTPRSSHLRPGTQLGLLTTPQGLPKGPWGRTFVTIHSADNKITAHLHYKALLGQTLDSYLRLAPIYNNDRTHWQPITRSDLPGGTYRGAAPDTRLSTARQKGNNRGNRYTSRAANHLQLRNPRVRNTSKRVPRDKNTQRRRKRVAATTTHTTVPHHPGQRRHRDDTQHEQRRSINEAKTRVDTNKAK

SEQ ID NO: 964846 - protein, 410 aa, Homo sapiens
WGGGECQVKWSQSSGAVQRLQGPRAGVGSLSGVAGRDPAFIQGPSPGEGRSRSVLRGTSFHGPASMLPHGKRAQGATAQESEAGAGQANGAPGAQGAGGPHKGQAWKGSSEAAGQRPKGCKERAAGAPNTRQQGRGHMQEKDSHNARGIPENPCDTLSVHLRGERRAPRYSSRKCPEREGPKLVGGNTPSEREKKEGRRYMRVGGTYKSREEGKPPRGRFRAKRKTQKILRETNCGGGAGEEEMPPLEDRQGENPAVVHLLGDATKEDPLGGVAGPPPVTSTGEAPGHKKSGGAIDNGENLFPGEKSGRKTHVEDKKLDKRGAPPGKGPHNTTTMKKRGPQQAVGSYNKKNIIPPVGDKDGVGPPQNGFVTHTKKCAVVGGKHSEWRIMNDTRQEGASTKAEKKNDCVPQ

SEQ ID NO: 964847 - protein, 73 aa, Homo sapiens
MYHQEHHYHGNDHHVGIKNDVEGATVGGGPTDAGVSNTGVYTKSQCRKNKTTRDGERETTKRSAKSTEEIHNP

SEQ ID NO: 964848 - protein, 203 aa, Homo sapiens
LSPPPRPTGGAPGGKVNTGPPHSGGGGGGGGPHTHPGAPDICVKQNRSPAPHTHPTPHTQRSRTRDPGEQREGAGHTGSHIPHPVVGTSEPTTMPGEHKLNRTTPQGNSTPSNNSGISHPPTRGGTRGKHPRTPQGDAAHQWDTHTQREKRGTKNKQNKKRGKQRSRKVKTRPTGSTTTLHTRTERNQGEHHTRQQHTTQKTQ

SEQ ID NO: 964849 - protein, 427 aa, Homo sapiens
  misc_feature (149)..(149): Xaa can be any naturally occurring amino acid
  misc_feature (259)..(259): Xaa can be any naturally occurring amino acid
  misc_feature (329)..(329): Xaa can be any naturally occurring amino acid
MCLRCLLFLSEEFTWPKRGRGCVKVVAVRAQLWGRPTSQMWRGPGSHISCGKPFQLKPENPEGKPFRGRPTRCSCGGVYLGPPRGCWTQHRTLLTSGGGISLSVLNPLNSYHMWGGLVGNPHRVFFSLFLWAPYVACDPFVPIPPLWRXQTKGWKGLHTPGEGGHNKGGGGEIAVASGRKIPWGGHLGGGAPHFFPGGKHPPVWGGVRGALEITWVTSPTPGKKFSWKATYLATTRRNEAQAARLRSDKNGGCCAPPRXGGELSPAGARIGNCGPPGRPERCPPRVTPKRPVGCVVQQRCVLRQGGGHTRWSPPVCAHIYKEKVPLTEXRKGGERQHTVHGEKLGSLGTPPCFRRRCGVVVCAHPHSGWLFDTMLVSDKCPQPRSGRAVCAGEAHTLFLDNKQRASSLSWAGENGSCCCSHHLRKRP

SEQ ID NO: 964850 - protein, 178 aa, Homo sapiens
MAENCDLNLHVVDVALAGLFTKEPGRFATFALVAHCRIAILVPRADVYLTRMTRVVNCCMSGNIWHMTFTGALLHLAPGLMDALADWHGVVIPRGVLLIGSCGWFAPRYPRSFLSWQVLAHPAGPCGYFVAHAVLGPGYRGGNPCVTGLNLGRDFPAIRALGARPAGVGGGTRGHREY

SEQ ID NO: 964851 - protein, 186 aa, Homo sapiens
MIMIMQQQQQQQQQQQHAHARCAAQRSRRELREEKKKTRQEDSCQADMMTDARHLTEAYMQDDCRLHALTARLTDYNQIRNNHKRQSTNNAPYMQHSNSSPLISRSFVVRFVRRPVIRRSSVRSSLVSSSQSVKSGKAQHARYGTQYGKEARRDGGRYVRSFLRRLYGGMSSAKSSLKTCVRYTQL

SEQ ID NO: 964852 - protein, 300 aa, Homo sapiens
RRAAVLIQQHYRSYRRRPGLPTGLLATLPARNKGSFLTKKQDQAARKIMRFLRRCRHRMRELKQNQELEKGFPNGIGQLTLATAFFTTWGAPRAVLTRERAFLGQGSPCRQLSCSPLLEPSVGLLPPPQPCPNPLLVPPGRAPSLLVLAPENRAPILHLPAVTSGALLALSPVLLLTRSAPPDCLIYLFDALSECIRLGSTMSSWHALVFQGDRVPPDSACFGLFPPSLALFNPSTDSGNDSGGGEGGVHRNAWESAVPEGGFVHTVTEEIVRTIKAGEGEGVGSKRGPRPGLNGSADAA

SEQ ID NO: 964853 - protein, 644 aa, Homo sapiens
RAGAASGFHEIALMHAPPACLPGLVTITPLGWKPQLPAAVPHVTITCNHEHADGLMTQHAAPQNPHKHDTKPQYRSQTNKPNTRDTKKRKKQTHGGRRDNRSGIKKTERGNMHQADDPTQTQTNSHQQNETQREQTSDKHRAKQATPAKPQKTTPTQQHNQSDNKHPLTHNNKKHKNQTKPINTKTTKNDTPTHTPNHTHSTHTKDKTKHNTYTTKKNNNNNKHSQTPHTNANTTATKTKKHPDQTTKETSKAKETALTRKKAKRNETQNTPTTENRRHKTKQSISKATKTKTTNKRSKTQKQTPHTEHEAQTLKRQAKTDRNQDKHKNIREEQHSRNPARTKPRQPTNDKQGEERHSTDNAQRRKTEDRHKGKHRGRKNAEHKRTTQRRGRRADHRRHKHSQSKPTDKAAEDKSTADRERHTKTRRKETNSADSEADRGEQSQTGEDTREATRKEERKTTDNTNTTQTKTKSTPERNDTRAESEQSRKTSRRETRDKTKSTAKVERAEQRERPGIDAQEERNPEDRRQRRTREQQTRHYENAPNTRSNRQPDKTNNNRALTRTTRTTTRTRSGNERSDRRAAREQKEVENNKATKTAYTRPETERESNKAREPTEKKRKRDNRHAQKTQEERERTNRDNKEQY

SEQ ID NO: 964854 - protein, 45 aa, Homo sapiens
MARRVLRERAYRDMEASIGTLHYEGVDHATVTKLLYDERKLRFVD

SEQ ID NO: 964855 - protein, 43 aa, Homo sapiens
MTPLLLCVTHPRRRAGRHSHTVAEQHAHPSFSTQNTRTMKIRH

SEQ ID NO: 964856 - protein, 231 aa, Homo sapiens
MAWWDSEPTNGGLEMWSAIREWAVAAGRHSRSPAGRHYWEVTAEALPAVPDTEWQMWTCPGIAALVSMIVPGCTPMPSAKLGTTNAPANEKATSSRVIGQTRQGGASKLGVLTAQELLTPEWTVTPGPLEDSTTLHEQTIQGVPWWIALTLMHTPEELGNASTRPHYQRPPHVAPERNHTSEMVAKKIEKINQTPHAHQRTTHPTQNKNTPGTPYNILTQTHKNLHNNKPH

SEQ ID NO: 964857 - protein, 109 aa, Homo sapiens
MAMDQAGCNRTRQTGKLDTSALTRAERIQTRSAYRGTEWRCSAGCPLVDLENDEQAASAISELVQHSLRFPCCTCGMNVPFKRLSVVFGGTTHCFVTVSGQRGVCGELG

SEQ ID NO: 964858 - protein, 276 aa, Homo sapiens
MQPDGRKQNRRRKKKREHNERKDTHKENKRNIRQHKKASTADEREQEDSSRYYKRQASSTNQATEEAPKQEAHNSTREDTKHRKRRKRNKRQNQQNDSTNRYTTQHSTQEQPHQDETTNEVGEERRPSQTIDKNKHNGETRERRPAAETTCTIRANKYSTQEEDNKKRPTKKTEETQKRANNRTTTTDAHKSERKQGGPTERTTLNGERTRQLEKRTGQQTPAQHKHDQQKDRKTRTNEEAEQNKNQTTKQTNTAKSKQKKHKHEIVEKHIENTNP

SEQ ID NO: 964859 - protein, 252 aa, Homo sapiens
GIITAVMGVITVPLPHRTPRRCGLRPILSTTVSQLRTRTTLRTLGNSPCLYQRRAALRLVAKLLQGDHAALQPACHQPLFGGAPRSQAVGRASHLRSAALPRWSVTPFLYWLPPLTSPTVASHFSCQRRPGDPGLHFFRLLGCASIRRPPCPGLALCPTRPWPGATNFACAHCSLLGAGPPINSHPVPSYHFGPLPPALPKDPHRGLPGANLEDGPCTKAPSYHAHHQQLACQPDASPLENPQQETTKKRKP

SEQ ID NO: 964860 - protein, 136 aa, Homo sapiens
DKTKEFYIYSSSKFPGVKRGHKLMWLKKKINHRAYPRGGIKGTHHKNRKKRTVRTTTGQNTSHRGSLRFTGYRSTLPYTTRNPRGNIPVGRSTSLHRVGENARQKLGEGGVHKKFLRTNPQWARRPRAHLHREAHL

SEQ ID NO: 964861 - protein, 252 aa, Homo sapiens
MAVVIAEGNFRTGRLPEATSSSSGNCFFQNLALRFNWRDYFSCKCHNCREFLCTVYNRETVFAVRILTGNIASFFKEPEMTKQPEDWLDDVPGDDIEDEDDEIIWVSKSEIKRDAEELKRLGAEMVDLGKKRLDKIPLDADLRAAMELAQPYYRWKVAVRQWQLIGKMLRQRDVEPIRQALDKLKNRHKQQVVLFHKLEKLRDRRIDRGDDATRWGIKSVAQMPIVSKWGTLIRKRKEETRRGLKPAKIPEA

SEQ ID NO: 964862 - protein, 273 aa, Homo sapiens
  misc_feature (26)..(26): Xaa can be any naturally occurring amino acid
MCGTTCGYSEHACVSTFCCGSLHEPXCVGNTRTWRAKAHHSKLPSPHLRQKSGVGAKTWVSPLLPQELRTIMWWGDKIPWGDYSPRTRETNVTTHTRGDTYKNLPHLLGGTSQEGTPSAGAHQYTKRPTGGYYVGLLGDHNIYEGEHCPRRPHKRQSARLNHHTLHDNQLWGTHYNNCIQRTQINRGRHYNHPPDGSSAVAPRNKPSVVDAAEMVETTSIVATTRIQQATQSCGHTTEAETYSQTQRSANYRKTANRTNHGRPKRDYTQSHGE

SEQ ID NO: 964863 - protein, 413 aa, Homo sapiens
GCALALTLLRRRYQSVEENVEVRGNWEALYAVCNRQFEQAQYLGDSEFITLKRVLHIFPTLISVVIRRGDRKKYLLHGCKHAEESTLLTWSKHKPYYQESIINITTSSSTTSSNSSSRHHRQYLQNWATGQPATMNGLTYRPEQNFSENQGETDLHPTARRSTSWEIYPPDTHCTDDTLTGNAISKEHSGQQGRAGKTTNPYTGITRDSGPEVPAKETPPKPLTGPLATKSAPWPQVISPPHEGNSQPGDAGTYGHSTSPAYTITAHKNLPSQKNKIQATVRDRQPTTSERPRETTGSSANMRDNRHAVKATSENRTNRYTPTRKARGHRPPREHAPTTTHTTSPLSPRIQSTTPTTTKRTQSKEQTRHSREKGSMNTADTTNEDRGKSTLRCTQTRVNDVSKLIESRVALLA

SEQ ID NO: 964864 - protein, 283 aa, Homo sapiens
NTPNRKHWLWIGVVKWPRTGRRSAPTPGSPPGGRAPRAQAMALGSRLLPVVRSPRVATAPGPAMVLDFKSPRRFRPTWMIVTGGIAVPTAALTWQSHVRASSLRSPSRAVRARALPSFRAQWLNVGCGPAEERRAADRPPMLSPTSIAENCRDHFGLDIYDSWAFESEARSTKRGTVHSLKVKHYASKTKRHGTDSPFPLTHCGLQPGACAAGGGANWLSAPSEGAARGSLEKSPCRGRSLARCVILCYSIATVTLGGENRRRDDAPDLLRSGLAWDLRLKAR

SEQ ID NO: 964865 - protein, 232 aa, Homo sapiens
MLERSRRCVTRLGPHTYTWTMTWTYIRFLAPCVRRTSNYTIPVVLGVAAEKKYLVGAHLPIRAQKHEARVTLGCVTHHCDSIVVCPSCVPQQAPRTERAISGHCTAGPHHSRCSPLLTKPYHGPPGETSKEGHQLHATMQRHPGGQLQATRFKPSTPSATPTTEIYRREGPHATCGEKRRIIRGQRGFNPHGDRIKAQSLAHRPPHANDTRQRANKLRKHHLLTCNTWHTAP

SEQ ID NO: 964866 - protein, 273 aa, Homo sapiens
MGSRRGGHFPAALLPLWLTMILFLGPLMQLSMDALVTWQMGMKVVLAPRSWAQMPTQIMRMAAEPSDRPADMSELVYRALYACTMLATGAWDWALLVYHLHRVQFTGRLPNYSTTNYLTTGMDVRQETSDGERIYLCLLQYQVSRYNKHVIRVRYNLLILFIRTGHTDWGRVTLPFTFCNTGFPNCVVLAWSTQEAGPCRTGLCTWSVEKSDTAYCPAPQGTTKLQRQTYPSSRVSERRRGLRRLHLRSRTYVHAYARPLPDHGLTQQGIEDK

SEQ ID NO: 964867 - protein, 459 aa, Homo sapiens
GGETAPGGEKRGPHTHTHTHNEEGGGGGGRGARGGVREHTPPTTRGGGAPPREQKTQTSTHTPTQTEREAPSPNTQRGGDLGRPTHNTPHSRGAHPRGATLSGEPHTHTQAASPQQHRVHTTQSAAPTPSTFTTHTPSERERHRERANTERRAAERTHGHHTECGGRERKERETTKITREARGGGREQSTHTTQERDERERSDTHNKHRGEKEGEREGPTTNKWERAHLNKRNQREKCEKKKRKKNKDIKQRRSTSQQNAADGESTLYYTTDADTEDEGGSVETNHHLNNNTPSLKNTFPTSRGETRRNYHQFAAHPDRRKQNNPTSRRSSIDAKATPPPHKANQQHNTTTHTVVEETRNEEQRTTNREVRTQTTHPYPRRAPLRCGRHRKARQTHDPKPHTHTRRREKARKRRHQQTEHHTTHTPTQAAAQNTYVDATHTPHSETTNEQATTDSTKKT

SEQ ID NO: 964868 - protein, 469 aa, Homo sapiens
  misc_feature (191)..(191): Xaa can be any naturally occurring amino acid
MAIDLRKNYTATPPGARDQCGRGSDLSFSVRSVVSAQEKKVRAISSPGVLCLCNKYRSLSWVSSGGDVPLLYISVRNSCETISTYFSEVLVFPQWGPSPTLPEGVKVALVPRGSAEGLSLTQKQTFCDTLLPHTSPLRANTRKKTTQRRRATGGSSENYSSFFCSGQVVVGVVNELLERQQYGTRRLSPQXHHNFSASPKAPFVVLVAPPVGSHAATAIVEETPPLLVRPPLKRPPRWGAVADQYTVGRRLLTLDRAFSARWKGTILLVGGRCVLSEPPIITFTSEARFELSCASPVLGAELSPPKRSSPMMTCSYGAASLVGAAVFSTKGACILFVQRGKQRHIFCVGGSEFSYDACTFTKQHRAPVTDTPPQLGVHHRSGVCTTHPADIISIKDRNKLTCLNYSCSPRGHPSAQESILRGAAKSIYSAALTTIAVRIFARPLSRPSTSSFRSGPLTVAFDDLRARQA

SEQ ID NO: 964869 - protein, 142 aa, Homo sapiens
MTLFDEGAWNGNTRVSYKSRPPKPTRERREQLGAPKRPAAGDPHDAPEDPRTQNTNQCTRYTDPTARALTKETTGADTAWRHRTEYDDNPINGPKIRTRETTTGTRHHTALQAAYRPHKTSVTTTYPRKPSPQGEPRRRSEH

SEQ ID NO: 964870 - protein, 365 aa, Homo sapiens
LYCRLVVNLAEAALRHGRPTLSRALVHVPGLCFFVPVSEVLTAGGPVPRSPDYAVTPGAMKQDGLLARLAVVADKGENRAGEENKNPHRAGPQDVEMKGGSDGWRVNGGVHDGKTACGSVEHSQRELDTVTYVSDIKEHVKQLEKAVSGKGAEIRAAGPAGSAFHITPLNHYVLYKGAVQGFFLQNNASSRTFCSPSLEEPIGHRRADLQFPSPRGRRAASTPLLALKVEAYLQILVVIFMINQASATKRGSKKDLLWSCQKIVLRAAGPKTFEPARVYYIRPGSISLDEVILFAVFVPGGGKSIRQREALLTRPILLRLQPGVFHFFDGTQGAAPHRRGRDIGETGRQLQEPRWHGEHVGTLSR

SEQ ID NO: 964871 - protein, 53 aa, Homo sapiens
NWGRTQTLTTSFLPDRDREEAAESGFGKQLPHRSAASHSQEPASRLTTIEISL

SEQ ID NO: 964872 - protein, 316 aa, Homo sapiens
SPHPKHHTIRLGTRLGFNAGSVLWGAAVTPFCVQLHLCVHCPTRHLSQSEGALAGSVETPFLEPMLHANLPTATPQSHIPCCTWSAVGVPVTWPNVMPSMQLATPTPEDGQLGLSRGDITDVRPGTLLWQRPVVHRSMRRPGAHTQCPSNQAWTSTMQSALRANVAQDTRRDNATTRTSIVASRLLEPPERAFPHLYSALSDGAASTTAHLLTPNYHGRYNTLVHHRRHSAEDPASSCSCTHVRLDYPSSPEAATNHRKLPPPGQISALRPRNTVLTETSCHIDKTHHGSKTKPWPPTPTTLLRIVHHDTNATCKT

SEQ ID NO: 964873 - protein, 151 aa, Homo sapiens
MKERAGCTSESEGAIRCAADEDPGEERMITWSTKTSSLCALMNTLLNGTQGVGTAMVSRPSDVAQIFDLNEFLAPKYTIERRGGSEAIGPPWRQGVKCGPCAGKSAQGGYWTGGAPRRSNEQRCATWSGATERALFRTAAVALSAGDPGPR

SEQ ID NO: 964874 - protein, 352 aa, Homo sapiens
  misc_feature (341)..(341): Xaa can be any naturally occurring amino acid
MCESCVSHPQEQRDFSQKSVLCDRDAQTYLRTRPEMCWAAVGHTSRVGDCCPITLCVTRKKTLVRGRFSLWEKRDKRFLQAGGTTAGEHLWRSATTQSTSSAAGTVEEHPLLGALPIDRVATRRGDTRREQLPLGGAPPKRQPKTATEQVTNSNSLAEHPLLQEVGRHTSGGTTEVRDCPTDGGRRCRTNQQAAGPARPRFVASPKEAGLSGVGDSANVAGAENGRHHTSRRAPHRTGDITPSEPASMRRTTLLSQRTNHAMGENTTPPHQKMVVQNKTEGGRPHPKNSFDLWGEGGGTPPPHQNKNGCACDASGRTDDGWGGQLNSTNKKRSGGPPVWMXTPPICLCGGPA

SEQ ID NO: 964875 - protein, 190 aa, Homo sapiens
WPSPTCFGPELPEGRRCHSQPMWAPAGLATACPPCSPFLLGFTPRPVVCAFLMPALLLCPLSACLILPALGPHCSPLPVLCCVGASPRRGLWLELWACCVVPLWACAVCRGLNRGSTAWTARVMPCAAAPLSSGPSQTQTRRPPENASSEIINPLSCREWAMSPSQPGYNLQGYPTSRYQTIGIIPSALI

SEQ ID NO: 964876 - protein, 195 aa, Homo sapiens
MMTDERRLLCRGTVRRVRGRPFRGTACDTCCAPPDWFLVAPGSSLVGPVEMACMLPAVRLAWPAWLGCGVTAVCAVGALLGASWPIMLPASVTVPAAVAVAAQHGSAQLYVPLYSESSLPRSPRPASVRRLHGCPVPCLCLDGGCKPASSFGTRRGSRRTELQRSINEMKRLEEMSNMFQSSGVQTTSRTKPNRR

SEQ ID NO: 964877 - protein, 281 aa, Homo sapiens
VIHQPSRRGFGPKGRSCAVSSASLRAARHFSCGFPELSRDLCAPSGRFPAWARDNFWGGVQQKVCGSCRRSLRSWPRRLAAVPVVSALPGTASVPRDRYHEQAFDIGNLNESVTPADLEKVFAEHKISYSGQFLLSKSGYAFVEHALDDHWAMKAIETFLRDKEESHRKHAYDDDTLRSPKHTQEPEHIQIRKDYSTSSDGKLRGTKQPATGKATEPEPVSQVKPRELKTAVSEMSPYNNPRPEQAKRIQQLTGTIGEPCQKDTYIPNDKSHRTATARGAE

SEQ ID NO: 964878 - protein, 153 aa, Homo sapiens
MPRNQRGGVGPKAPPDEEGAAGECVTPRDKARGSADARRERQQSRGEAAHPWCGDIGAAGGPHYKQRINEEREKHPYTTESDHHVTCGAVEETPPQRVLWPQKSHAPRYVAPKRIPLGGGGQNHQGGGAADDSSKRETPHMGGPNNLHTGETK

SEQ ID NO: 964879 - protein, 503 aa, Homo sapiens
GAVGPCIQVSENWRAFKALIAAQYSGAQVRVLLRTTPLPFSAKPTAPLNFSAKFPAGKVPAFAGCMHGILCVCSSQRHYAYSCEHMQELRGKYIQKARSPGWMQRVSLLLIPDLVPPAQIPGDVTTNLEAIMHPPSNSTATLRTANGRKVTRDTLSAACWALPLPLTRPTDAYSSDGAEQRTLTTKSLDTINSIVLDNHTSRRDYIHKATATQADPYLKPAQGTKKPQTNTKTRNWANPYHHLATCHNPTEHHKINSSGPYGHSASTKTVEHNSADEHQNWGTRKHGMHKQKRIMARQEPHKQTVKHTTHTTAPTVGPNRTKQGGIAPREHNNRINTRTRPPHRAHATHRTKRQRKAQQPSGRESRHHRTSPCAKQEQHQWTDTLDATQGTTIEIKVEKANQLGPKRENPTHTQQHHHSEQTPKDTHIWRVQRNCNHKAGAKRSRQTEHDNRTDTQGRETNGNKTNTHGKPTTETKEATIETPRETHRRKNGTPEKNHQTKKH

SEQ ID NO: 964880 - protein, 230 aa, Homo sapiens
WSARRRYQAAGASVPEPRPIVDWDLRASWAATVPRSCLRAASAAAPAPGRAALAGPELTLSQLAGTNAKLVLPTRQVAAGPCKFSLELRRSIHVATATTACLALLMLTRHHPRAHTTHRTSRQHAHHSTSRTMRSPSPGGLHSHSGPFHHPSYLAFSELTQPASIPHPLPSSTDSTCFLHLHATPFPQLRAAAIASLSTHNTSRIRPPLGRGTRQRGLHAQALRLPPPTH

SEQ ID NO: 964881 - protein, 429 aa, Homo sapiens
ALQTCVAEPDPVSKKKALWLGEVCSLTPGNPSDFGEVRWCGWIYEVSEIKTHPGLTMVKPRSLLKILIEKITLDVRDTHLESQLLRRLRQENHLNPGRRMVAVDAKIRVIGTPAWLTRENKKQKKPFNGAVTGTVDVMLQGMPGYGEVVTKWAQMLFFTKEVKLGFRSYSSGDKMWAPFLSHKSREKHTNVGGIIQPEINTAMGTREKALVEHLAEHGVAQVGATDATSEVWRFRVLNFALEAIVFSHRSSPQAKHTLWSDETWWRLGCPKEFPHHILAETAWICGKLSPFVTTKRGRPPPCDYTNKIYIRRDSGHHGASQPVIRWHTRGAGPKRTTGEITMTGNAITPHTWAHWVHTHTFAKDTTNYRDSVEIVKYTPHGRLHTRHLLNLSRNTADRKYPCTTLHRVRPPKNQTIPQPRYFSGKHSSD

SEQ ID NO: 964882 - protein, 522 aa, Homo sapiens
  misc_feature (422)..(422): Xaa can be any naturally occurring amino acid
EETGMLTDGPALRWPGSDFTGSTVSKQHLVPLSPAAEACDTMRIIIYLPAWWSQKMAVKLYLCQRATSSKHKLLYNMESVLLCHVQLRGYGCLDRGTGYTVHSTENMHGPISRCTLDIDPRLTQHGRHIGMQTNKQQTTWLTRLTHSHYEQQLSTVLILQAHSALSKHAYIGHLQRLLCRLAQHHNQEMTRRHNQGTNSLQSTPYAQRTTAHHHEPPNSTPHGTRPETYRQTSSEGHHDMRTIRHHNDAPPYKYTPTQTQHMNPAPHHNKEPEPHGHAPTPCQTAPNPLTSRTRRQTCAQCSNIQKKNQIDTHREGQPSRLTTMTTSGKPKTNDRTHTNNQRKDQQNKTHKTQGDKKIQAPRQTREIHQHKCELARTTATSQQRTEDTHKKKQTNEHNGKNNDGGKQPSKTRGRATGRKHTXHNRHSTQAAHNHRDTTRRRHQQRHPEKEHNTPEVKIRTSHKQTTTNATPRTPNKPTRANANGKHETTTPDHNHTPRHTENSQSISDIKNQRGNEPDRHNS

SEQ ID NO: 964883 - protein, 110 aa, Homo sapiens
  misc_feature (76)..(76): Xaa can be any naturally occurring amino acid
MRGPTLVRRQKVRAITYYLMGGGRHASPPLVVSSSHQTDTSTDPKSEGPCTHTSQVCRATILRGRTQGWSAHATDXLPPNYTLGRGGEQTTLFMEGQNLVAARPFIYTKK

SEQ ID NO: 964884 - protein, 71 aa, Homo sapiens
LCARRYDKMVDYMQPGGTPATEGLGRLGTLLTDFQRGGTESGWREDTEATLKWEEAAAQSYHALGLAPGPQ

SEQ ID NO: 964885 - protein, 406 aa, Homo sapiens
GCSPGVLLKCQCWCKELRGTKTAVHNGAGGELSSQCCSAWTCDVGPQAMQYQVLNEVVILTEAPPPTCTNVDVYLDGHLITMVQGDGVIRVHPDWAARMYDGRETGDSMQSNPTCLDHHRYTPILDTQLRMIHNTRTNTMEPPKRKISSSRRINAMTTMTAHGQQQKLGHEPIMTRRTGTRQTNDAYKHNRAEQAIPDNPPKPTMRLHTTYRPPTPRCSRETPQKERHAPGDRTERPNARKTALANSAQQITGDRHRQKSPTQRRDETGANTAKAGDGTSAHKGNKSTTKYQEYQNNEPTPANNSSTQREPLQKETQQPQTQGKPGTREKPHSSHQDGRTGHKSTIETRESHRNKEDTGATRRQKGPTKTAQTTKKRTEHKDRRSTTHKTNNEQQNTKQRTRPGRT

SEQ ID NO: 964886 - protein, 365 aa, Homo sapiens
ALLVVLRGGGSGCLGPQPTRSALRFPSAPQELEGKQSMAGILVGRVMPHTCAHCLPVPGAPGGNASSRTEAQVPNGKAARRLCHCSSQAFTPGPRAASASTGSPGAPNPRTEAGRHVACHGPVTFLLVLLTLVHALHYGFTETSDGGESIYWGPIAGQARNTGGPAVADSGGLPGSSIEVRGFKVARCRENRFLPGHDALDRGARGSAEQAREVEAPGVPCNMSARGGIRHQETAEGPEETSCASVYVHESARDAIPLVVNGAPDTWADATWRESNLRLWGLMGSGRARGIITVPRQYVFLATLRCIITLLLNVVKTEINNNYGRINPSSSTSYYMGRCYMLPLHNSCQVVTGAPYAVESSTGPD

SEQ ID NO: 964887 - protein, 447 aa, Homo sapiens
GTPRVWQCGEAALENTVTCPAPCSQCVVFGMPLGAKVMTSMLVFHAAMVPLAVLAPVEHDGAMLTPTYRYNDEQAGALCLGPLPYLRAGSCPWRNPDHGASGSRGQANLTNKLASHSNGELVGCALNLRTLARHTMPPCACATPYTDTAPQRLNQNFGALPLIPGNPNSQLNLVAKAHGSYRLRLSTGLSTGCSHSVGYHPPDTTEDGYKAIRPFSGAPISRHLADTFRRTAWASHEHHTGKPRSGGAFIHFTRKTHLGTPQDIQLMEPIRARKENQSELLQAVPTYGMNRFPNLNSSAATLRARPRPVGPSTPATISELYLPRPAYNDMSQNTFTVRSTISPRLRARNFGLHTDFLPLYKEHITATLISLDPSSQSLFGPLVLYTPITPLNSGPTTPPRTIARPQRRATHDTFPPLCTSYPQRSHITPPYSTLSSTAYIFRYATFS

SEQ ID NO: 964888 - protein, 311 aa, Homo sapiens
NKRRSEASGYSDEGYRERISGPREPEQPTVARGLVTHHTPGGACSCRSRPQSPSTATMSMRGLRTSSHMNCKTQRERRERQRSSGENTQPQGPQETRQEDKSSSNKQKTTRHTKKNRQERTKETENKDTQRSRRITTTPNATQKTADQRTDHRPTRRDPTSATQQRTPPPHSTEPHTKHPPTSSDPPPAHRNRATHGTAAANTTGHHDDRTAANGTDSETDRPRHEERTKKTAETNADTKRQHNAAAHGNRDEHRAGRQSQGERRRQRTESARTHTQPTRPPNSSTTSTKTREHPPAPNTEHTQEHRNERH

SEQ ID NO: 964889 - protein, 216 aa, Homo sapiens
MYRAAEEKGALEEPYNVERHIRAQKSLPRRGGVRARANHPTLSGKTPHIEGGSRKGGSKTPEQKGVSTTPSESGPRPGAFSSREKVKVHSGVGTEPRHKKSHKDKERPGPTKAGGKTKGEQLPGWPPPLKGAPTGWSQRQRAPRWREQDHPPRLKPGENTPQVCRPNWGQCHGNTPEHHKVVHPPEEHTDLEGLHTGWTTVRGGATQYVSDTQTTE

SEQ ID NO: 964890 - protein, 459 aa, Homo sapiens
LKIRENSVVTLVWNQTPQLKKGADTAKANRGATEKKSRSLKSDQDRRDSSKRTETVFPKAKQVKKKAVAFCKLHMQFVLKSEKGNRRERGAIIETCTFLLKTQKFEKETRSPYETGKYVSIVTTPKTQCTNKCRQPFCSAQTISMRPQAPKASIDSKSKQANEVAATISSSKSPETSTAMAFILILYRALVNHQGGQRAEWPRNSKTSEQHSAASAHINLGAHTKTNSTGRRITVRKMFEPALIPWHSHRTNIKHFSHPNNGPLRARKTPYSHELIPLVNQRAKWTHSPNTNGYINKAAGKGTLFTEAKKGSSDTGENWGTGTLPYTIMANNTPIWEIGRHKRNTSRATNAWPNDTSGTTSTEHPSEPPIKRETIGGHISTPHRTRKHTHRRQDQKDKGKRKRITEEKTTTQETRKWTNRETYGHKQRTETTRHKKQGTKIQTQRTTKQNQERKHPDAR

SEQ ID NO: 964891 - protein, 144 aa, Homo sapiens
MRLGVESGEELARVYSLRHISTSLGQRCVDEASVKLEGSDWRGRSEAAEPWCTKRASTPLEELNGILCQGTGWLCAAHQGCDLRTEQLVLCVPLQEPVGRWDQDYDRAVLATAVTPSSPCYLLYLPRLTECSGLRIGSSSPVSA

SEQ ID NO: 964892 - protein, 181 aa, Homo sapiens
MMSRQPVPSLSWSAQLRFPAAPRMNVPFKRLSVVFGEHTAAGDSVRTEWCHSGEDGRNRGLGAHMMSEPARDGARVGSNADWVHGPSCELSAGNKHDRDIWHMHDRNIVGLPVICPNAITPPPYPWHRVPQGALERNFMEAWMDKREDKKGRNRKEPCPYRWLPTKYRTSIKAMKILELDT

SEQ ID NO: 964893 - protein, 80 aa, Homo sapiens
GVGALCGFEGRSFLAFPTLRAYHTLRLALEIPGLLEPQGLLLYNGNALVAMDFHVHLALLDVPAVHAQCLTTGSGGLAGD

SEQ ID NO: 964894 - protein, 232 aa, Homo sapiens
MIAVVENRRARDASYTKYSVLLLKRLQLCYGICSRLAGTAALPEEERTPTPVHYRPHGAKFKINPEENGQREAVCRTCPFPVVLSPRIPASVEGRRGLDPGQIYANNDKLSKRLKKCGSHSVFEARDSTVSILDKKFTVDCDHADPVTSSMRLSGLDFYILNDPEGGPVLQVWDGPEADGMLLRLSPDRSPSACTPEGSLSGVQPSTTEYKEFCHPQREEAEWVGLTLGGGH

SEQ ID NO: 964895 - protein, 142 aa, Homo sapiens
MCGPCAPGERRVFGAPNCVAPQRGCICCGHPHSRSCGGAPPQGGEARGTSAPHPRRGWRLIPEGGGEVCKKDAAVVGGTQPSHILIPPGGDTPRGAEGGGGEPTTPPEGGRRKHVGRECMATRSILINEKEGCLFDGRLTVE

SEQ ID NO: 964896 - protein, 450 aa, Homo sapiens
SLQGLLIPRSKKNQEQAPSALSLANTTQKPGMGRGRHRKRLPQQVCVCTCGSLLVVVPDGSGVYSGTVRVTRGCGVARESRGETGARPVWPRERNEQEANKIRSGQAGPPWRGPRVGVGRGVHHSKGLRGGVVGLVGTVPGDETEKRQKARNKHTTALPWKWNTWRCTHAELVEQHWRIYPTSRAENTSITPSPVAHRGKRGRQGCEPRATGVWMHGEKPHKDKQQPHRGDPCEAHRGITTHRGKSDTSERPHWCSMAKNNEAGVRKRYSGKRPPERNTLQHQRTAATFLGCQQNGDTQNRDQEEGFDTREHATRRGLEKRKRPRSHHKEGTVEIHPHNPTGSQPQERQAKRRKQYPRGATPKVHLEQNRKEPRDTSPGKTRATGSTHGRNNNHGCGAPKKWGRKSRGGGGYSPTNNDDENNTNTENQEYKDQKSKKKKERGERATRRAE

SEQ ID NO: 964897 - protein, 222 aa, Homo sapiens
MCCCSWLRGSCCCYGGMSTILHHGSQPGPVWRGNDPSHHPAPGRSSRSYMMPSPPGLAVTFHHLRMSPRVLLDTEGPLEEEEDGEELIARWHGKGHIGTSHELDAYEAEGHGIVDDERRRGADGHVYEWSAGTAGAMSEAVTREAGRGRWVRDAPEGLHVMSSQMRKDRRSALLPDKEHVSCENGHNGGTGRGVTEADDRRDIGENVEGFLEKGTLWWREVG

SEQ ID NO: 964898 - protein, 172 aa, Homo sapiens
  misc_feature (38)..(38): Xaa can be any naturally occurring amino acid
  misc_feature (49)..(49): Xaa can be any naturally occurring amino acid
  misc_feature (153)..(153): Xaa can be any naturally occurring amino acid
MESESSGQEVARVRDKCQLPGVSEGGGEMVEGARCVRXLKRETTCGCLXCDTPEDVPLEGVALPRTPVLSPQPFPCDVFHLQFLGDRSYSTRKRRQVTRVHTQCETHSCVGAVWGTTTVRKGGPIAPQCENVLFRPGVQRLTRGELKTPGGAXTRPLWGQMPRPMLKRGKGD

SEQ ID NO: 964899 - protein, 184 aa, Homo sapiens
MTHDKTKQKPHTKHQQKNKRRQGYQPNRQRSRIKTKTKNKEQTRHEPRPRQHSQGRPQTTKNKKSSATTHTQENRRTPATTKRKKERKTQQRKAGNKEKQTHTKREKHDTPKEDTHPTQTQDTTKPRDGRHTSAQHKNKDTPEPKQSTQTQNNTTTKQEKKKRKTKKPTKNKQKRKQQTPNAHE

SEQ ID NO: 964900 - protein, 122 aa, Homo sapiens
MAIPNCSINRRLPLITAKSEDRQMLTAEVWEQYYGWNIGDIESGGGTEHDKAKVFNESWTTIRNSHLTLKQGIAMLPCKVTPTELRLRETGHESIPQSTDQFPLPWELATGGEQDEGGDTRE

SEQ ID NO: 964901 - protein, 126 aa, Homo sapiens
MVPRLHQRKPPPSRETRGVIASQPLITDPTNNRAGSPCCGFTSVRCRVVTPPLVDAGRVEDGPQLKKPSNRRRITVESVDETKQLLEDNKHIHTPPMIVVKYFSYISLPPYTDKSCVTTIRSYLMD

SEQ ID NO: 964902 - protein, 84 aa, Homo sapiens
LHPGEISSLLLTQNLFGGLLTATRMKFGAITRIRGPPLGDQSPVLLLFAAMRKIHLRSLLLRPTSPREHLTNFKSDLLSLAAED

SEQ ID NO: 964903 - protein, 130 aa, Homo sapiens
MVFEAEDHVQAIGEDEEHEQGGEQPHPDAGGEEAGTVAGVGELLPITLKAWIWKSCSIICQGEGCVRAKKRLPFLLRLLTYSQWKEYDAGPCDLGSIEVGDGAFLWTSSAPWYTSAGQNWVEAVGQNELE

SEQ ID NO: 964904 - protein, 121 aa, Homo sapiens
AQEQSPAATATAATAAGASAPLVPASVPAGAFGSTVPSLPVSSLCALCISLFRWLADALSSPAAPVAHTPTPDNPTPSRTNQPGPTPAHRITPPHSSDHTNNLPLHSLHLTSDATQHATYT

SEQ ID NO: 964905 - protein, 92 aa, Homo sapiens
MEVVAITGLAVALTRRGKQRDKLPWIEEVAVSVHFQDQNDVELNRLNSNLHACDSGGLHPMAGGGQAHSTLCEPQDLLQKAAGEFGLTTDCA

SEQ ID NO: 964906 - protein, 388 aa, Homo sapiens
QRREAIKRSRGCVLIRPRAVQRRSAAGAVSWGLVPAMRLTPRALCSCLPSACLCVDELPPVAGLRLWLLLCSLWPHGQWCAEGRMHDACLNAWWTCSHLMGPAECPVIPAFMCLQPFLFQVKAPCALKCLDLAVSLRQGLGLCAVILHDAGRQKLVADTLRNVTKCAKKNIVNLLTKLVVNTGSETIVDRRAFIPWIGSTWTLDLGEQSPTLALSQRWRHRRQPFAHRNVVSSVGSILAVSTQSWLGAKGPVAYSSKLPRPVMGMHPYRGHRAQRAPRKGAWGWAGGPWGIQPRRPWCIVPKNFRGSSLKRAPPAVAAVIRWTNFPWAVAWLPFGALDRLWRRPWCLERPWAPCGGNRVPGPTVGRRHRRPIGLTNLAVEPLQPEHPA

SEQ ID NO: 964907 - protein, 267 aa, Homo sapiens
MSLLELLPSQVTTATHVKKIPPRYPRRTDDDLGTSCTSHMPLTLRHRPESQAPHVHPTAHWHTPRATLQESSHSHSDWIPDADATRTTRIAPKGDTPTNAATLTAKTQRKQTKDEPHRHNLANQVDNPTYHAEYTRRNIATALLNNNFTSVTQPPWTTLTPTLKKNPTVTQHHHTTAAQPHHAQCHTCRNVRLCDPTYMRDNTHNPLDTLRDRHYQPNPHPPLHHSQGASTRSAGHIYRWPTAIIGNDPMRHRPHVKHGDPTSLGDT

SEQ ID NO: 964908 - protein, 264 aa, Homo sapiens
YRTASPTTCDITNPPRTNVAVLELAQYASVALGSRSCMRKMASSSGEGKELYLSWVVEVPGGTSVAILQDCLVPAVPSSTTCCELLLRALQARAYYFHRLILQGFLAPYLMLHSLLLVVVEDEYLMAGPAIILMGRGHRTGLRVSQWYACRGESGVPCSLVPMFVRMSHVPACSFKGRSIACRHACGPGTGVAPFVGFIQERAWLRQQGKEVGETLLELRLPPSDEDYLYREELAQFHRHGALTQLNVAFSREQSHKVYVQNLL

SEQ ID NO: 964909 - protein, 254 aa, Homo sapiens
TRQSSNLHLLSIPALTMSLRLQSSSASYGGGIRGVASCQLRVMCRGVSTCSPRFVSWGTQLAGYWRAAVTLWSPGWTRAAYVALDAWLLTVASGTVANGSAGPLPRLAYCAGAALRPALASRSHLRDALLHLRERSHPLAPTCGPDSPTARNPQIEPAPGTSAYPLRSNRGLPASPLPTAQRANQPRHPQATVVATNIPWLTLGATRMIQPRTPPKRNGPIDSQREPTREVSTITLTHRRPSLRHRRRTQRPHR

SEQ ID NO: 964910 - protein, 115 aa, Homo sapiens
MESWMLANYNQFFAMIGSKVNWKSWEPWMEWVVDHRKEQEQDHRDIRGALLQKVLRISHQKILMKNNSTGDWLRELLISKESSQNLRYFQINQDEEEEEDEGLNFIYLEKFCMSS

SEQ ID NO: 964911 - protein, 94 aa, Homo sapiens
MSLGVNRRGLGNVLLVWSLVTVRLLRSLLVSSPGVPWWLEGGVWRDAAVDADECAGAPVRSRAAAEPLVPRAGLENLASLELASAPGAWRARRK

SEQ ID NO: 964912 - protein, 306 aa, Homo sapiens
MPVVLLTASSCSVRLAEGNSSAVENCVLPEICACASNCERLTLHGKCHNVESFSEVYQRTVFSVRDLRLVTLASLLKEPEMTYAGRKTGSTTFPVMTSKTKTMKYIWVSKKEIKGDAEELKRLGADMVIWGRTRWIKIPLDADLRAAMELAQGIKMEGRRRSCSSSVKMLRQREYEPIRQALDKLKNVRTAGGAVHRLGKLRDRLIDQGDDALRVRVLNLVGRCHSQARGVIMIRKRSKGENGHKRGNRKAEFPGSGRVCGTEGKSAAREKAGGRGPLGGKTTHRGKAHVHAGGGNHSAPPYLVAK

SEQ ID NO: 964913 - protein, 294 aa, Homo sapiens
VLPPLRRRVSLPVAIGRRDRRAGSLTMAPACAELVLLLTTLPEPCFLPSSGAPDTRRHGGRGPEVTPTLGRAHGPGARSCWFIPLTLVTYPHYEAVGIDIAKLGRNGEKESGDADILLSNEAVSMALRKEHTSAALTEDSPVTPEVTCDSTGCYVRCLVGVRLNQPPCSIVNVGSLPLGRAMFVFYCLVLSVATRLGRIVRLGIVLKRPGGSIPIMWVAPNRIAGVSALSLRCRSRALWTRGLAGDWCPDCTLSERSRLVNRRLQAFNEPSAEAGKIRAQRSRDEPLCLRTALY

SEQ ID NO: 964914 - protein, 105 aa, Homo sapiens
GWAGSGGARGLCALGAKPAAPERGLGWAFPMGKAHVLFLPITGTMEQWLPYGAMIPGLGLGLPVAQSYPGSVSASSTAYLWWQEKRGPAEQQARPSCPGLQWSTR

SEQ ID NO: 964915 - protein, 346 aa, Homo sapiens
MINAHVRMVSRSRATTSARRLRGDRPAPESEPRRRDTSRANRRQPPPRRLSESRGGGGMSEAGEATTTHHTSRGSEEAAPGPQDPAPRARWAVVRPRAGPVPRAHVAGNPWWGRRAPASQRALGRRFLGPPAPGREDGGRKRVLASKSRWHLSMGHAFRKWILELISSERVTPKEGCFCVHSGVASRKKYPGGNFSARVVGRMGGTWRRVGCCLKGERVAEVHNCDCPGGVLVKGSRTVQNRRRNGRDDMEGAWPSPECAELIDEDGVQRAHFRRVSEMNYAREKGTCRCQSESEKKLARGQTVVERAQKRARELSEEGERRGSAVCECVRERIREREEIYLYFRG

SEQ ID NO: 964916 - protein, 288 aa, Homo sapiens
MAWDYGVDPGPSADPPQQPHSAIVTVELSVCLLSGPCVVPPVGGKSPLPHTLVHLKCVVGSSLCGPLHLWLCPIQAPPGSPRLRGGNVWCVGGKLFAPVGVPFFLNLCGGATSLCVVGVWLFSLKHIFIRGPWGGGLTISSLSPLSVAISYPRGRAENSSRGGLPSGDTWGTAWGVLWGGPVVPYAGALHHEGGGLFPPSEEKPRGLCPCGRGNNPRGPRVCAVWPRHNLPCGVGPPQFFPWGGPRRGTPVGQCGQRNRTPERRTPSPREKSPPSNIETTRRAPREET

SEQ ID NO: 964917 - protein, 247 aa, Homo sapiens
MFCMSSSTGPEQEECHEQGLLERDGRGASTRFRETLTVGLVVISGAWKSVHCEVVDRDGQWVSDIRAAQRRMMWPGVSWYLRDIITRLQESFETVIERCPTPVICCRPWVAALGRSVWTLVSACDSGTCAPDAFFQVQGGGRGFELRCRNTVCACRWSLGDQSLVHERGRFNARNDDVRDRGPGAVAGSDGVFPERKRVLLVLPYAAAGIAADPCRCCSTVTCGSRTIVGEPHHVVPPYVFSPPFVS

SEQ ID NO: 964918 - protein, 414 aa, Homo sapiens
CGAGSCMEHIRKKRHFSESEASQILRSLVLACELHALMECGLWLHLRPQAWRTSMYCLTDTALVAPGENHRLRGFSAGLRACRCPWGCPCMTAPAFTACMYCCTHEACLCCRHGGYRTSPAEPSLEPWCRHFLYMNGLSGVHGPPSSGGLWTMGRADATGWPWDHMLQQSGDGGGFFHLDCGKALCRGGNPAREGQWTLVSLRCAHLDQVGTPGHMLGLKSIEMGDIAGVQELRLGLQRTGQDGCSIPSGHSTDIALDWAPGKACHTEFRSLETPGHDSQTYEGIHYKHDQTNFQLGAHYQHPVVAHRQGRQEGCSFTTLTNEMDGFVGQEKQGKSHTMIVGDHKIDCDRVNTARTKRLGQTNSHSQTHLRTITPVGPGGALSHSLTDTKETKHRGVSRGVSNTGDGPETQKMG

SEQ ID NO: 964919 - protein, 143 aa, Homo sapiens
RKRGVSWAQYTTFGNQPHGQKKEVFGFLSPPRGWTGVCGPGGRVVRTPLGGPYLSLSLSLSLSQNIFSLSQRVCVSATETTHREVCGVSLCGETKRGMSPAGALQTSLSKTPQEKTRERVSSGETTEKRGLSVSPLERVSLCV

SEQ ID NO: 964920 - protein, 249 aa, Homo sapiens
VDEILRKVADTRLVIIMLVNNETGIVMPVPEISQLHYSPVTRNGWHAGLPPILVHTDAVTGLGEAERVDVEDLVRGLPYRSVGHKFIWSQGLAALYIRGTLVKFNPSLPYDYLEVDKERNFRPGTENNPNDMLALEKAAELVTQNCEAYEAHMTGVREYLEREVCGAGFGQKRIHLNEPSFQAAMRFPIPVKLCIRGPGFKATGGCLRQWRVLMARVVAACHSGPLGATAGAARFSPPPGLSPVLAEYG

SEQ ID NO: 964921 - protein, 463 aa, Homo sapiens
  misc_feature (163)..(163): Xaa can be any naturally occurring amino acid
  misc_feature (350)..(350): Xaa can be any naturally occurring amino acid
MRVALCPSGRCGPISLSARGVSPRALRPMREEWPHCGACGPQTSGVVSHTCYSRCVRESACAYYATTVWGVVTTHREPPDVCAQPPQNLSREPQECGHERVSSALHHFISPALCVDTRPRECVCQACVSLTHSVTHSLRESGKRPHTVCAESVVCQLTSDHPXRAVLCGLSALVGSPSGITNICSERHTILCYTHRGTTHKGAERHFTTILETGRCRPPVEKKISSHISQQKKISPGVENNVLSSFHPEGRLLWGVSGAPRFSVYNKVVVDNDAPSVVDLLSTHNRRREKDAACGTNMRCCRNQVLSTTISTHTQRWAHKNIIYPPINAGGSIKKKRPYNEKAPESYGDXHTNNFRRSYSSQEKAGVPPDASCGSTWEGEQNNKRRSKCVDLPPITTLIVNAYCEGPPPPPPPEKIGRTDGVHQLTHTTHADREASHHCTPHKKRVTATSPGWVPQEAPNVPQ

SEQ ID NO: 964922 - protein, 271 aa, Homo sapiens
MEYQDAVRMLNTLQTNAWYLEQVKRQLGDPQTQLEAMELYLARSGLQCGGLGPVNIIHVTGTKGKGSTCAFTECILLKLWLKRGFFSSPHLVQVREAEIRINVAAISPELFTKYFWRLSTWCRRPRIGMLCLHAPLRSVPEQLMGLSTSSSKRLVDLAVVEGWALAGLMSAPNIIRKPCGVRRLLSLGVDHTSLRGGYGWRKIALAEGGVLGKVSLASIVLHLEVPASAEGRARDLMSHTVSVMGLQKGAGGTLPEVRTRAERFVSAMLFG

SEQ ID NO: 964923 - protein, 30 aa, Homo sapiens
PPHHPSPPSPPPPPPPIPLPNLTARYEAWV

SEQ ID NO: 964924 - protein, 343 aa, Homo sapiens
RRNIGLGQLVLIGTREAQRTFVMFFAPGVVNTASGCSRLGMTWETNTTAWKMPKSMWLKWTDGPLRRVLRPGGARIPHLKLSSQAKKAVKYQVLGTSRHSENWMLQTLKRKEPVTPEPGKVGNLASAPELNARGCIEASSSKQLLRLARLHKGGTTFIQSSSPPRGLWVHLERPWVPNLGSKLALGLEHSENCQGFAQGGIVHQHYELCSGKTRFVGNPTLSLVPEMRTKVDQVQGESGILEVTGGEYVGSRRLACCTEDLSDRRPVHGLQEGPVWFGKLGALSVVQGAPVFWHSLEDSSMTPSGRKDNLLIQVYWHRVGTCKNRGQLGGSSQGSLDLGGKNR

SEQ ID NO: 964925 - protein, 291 aa, Homo sapiens
MNLASQSWGGLAAGQLLFANFNQDNTEREQGHQEQLVLAARAVAAGPIAVWYAKSGYNISLPFFLWITLRTDSYAMHRYRKHCVHSLADALVSPRSHSWPSLSPLQHHRQRYQAHATFTARRTDDSCKPTTLHPNNRTSGPSERFNPGTQALDYAIAMGSDVPMLPLQATTSAGPCNACLADYRTQGQNGHTKDPCQGPAAAGLVKFNQPDRNWPYLGAGTPRGQAAEPNSGATQSDTSGPHRSYPNFNIPGTKPWPTPTWTIPGALPRNQVPFTPAATWAVLQAQVWAHL

SEQ ID NO: 964926 - protein, 276 aa, Homo sapiens
  misc_feature (125)..(125): Xaa can be any naturally occurring amino acid
MEAAKYDFEIVLPAVPLGPPSSSFSHPSWASCSSKRAFDQGAEAIYEHSHRGEAVENTSSTSMRTSSSLEVPIQARRTAGPGQHAVSRMKLEPQLVEDDVSEGTSLHWTGNQCAACFGYTRQRGXLRLAKTKTSCVTLSLLGSFLEMVTRSMLKAVLHGTIHTGEIGPLGETDEYTNTREEKKKRGGPGGPLRKFGARVREEEYIGARIGCDRWRGRAEPFESWFSSGHPKVVLRRVRQSGEEKCRAGGHPTPQNEREHRGEYWPNKPGGKPGHKG

SEQ ID NO: 964927 - protein, 238 aa, Homo sapiens
GLGSCLPHCVAAESRYTSSGVSALGRQSANLLPRRDCPGILPAAPQDAAPVPRAGPVELGTGTVRAPWVAAEGVLLPLLFWPRGSRESSWAGAKPQDGGPRWASPEPWLGSPSPPDTKWGKERPLYKGANFPGGDKSVGGRDGIWSSPACPLNGPEGQQVAPAGGRESLEYFPVEETFIRLVLEATQLGSSQRAVLSHWHTNSIITVGVLKFRNKTGVVRVIRSLVTPKWLGKYQWGA

SEQ ID NO: 964928 - protein, 131 aa, Homo sapiens
MSQNPYKCRHPSRTQQWYCVFMESSYARSHWQRYSVHRGEVRAVAVDTTGTYMATSGLDHQLTIFDLRGHVQPLSTRNLPLEHVTALLPKAHCMFRRNGIPFDTSGPVRHGQPPPLQPPTTDPGRACLNCP

SEQ ID NO: 964929 - protein, 188 aa, Homo sapiens
MNSWHLWLVGRSSCRLTSNAPRRSFAGGTWDREYVGLDDQTEYAEFRVSEEAQTNVRRRRCSRVYSRNPPDPDEPGEQQLRYSTKAAVAAQAWYILGQVLASTEERCTALPGVTRPLAVGLKEQDSLQARSSLDEDDPNILLAIQVSLQESGLALDEETRDFLSKEASLGAIGTSLPSRLDLWPRKYG

SEQ ID NO: 964930 - protein, 207 aa, Homo sapiens
MRVGRGAEVHARLTPAPLPPRAQNNQTSRASPTHDSNYSHKQRQQKNEQTALTDRTPQHKTPTQCHKHTTQQKSSTRIMYRYDTALTRTQHRHVPGILPTPAATDAQNEPTSPPSHNRLDKTHTIYTTLHFSSPHARTHAEHEAYHHTQHPKTQHTQETATATTHTHPTKPYGPPTSAPTTPATPNEQTHHITPPPIAHPKNPTHQT

SEQ ID NO: 964931 - protein, 122 aa, Homo sapiens
MTSKQPALLKIPDWMCCIKCCMPDAHAAPELFHEQTSMSMSHAIIDLMLSAVPLLLLTCCGAPYACVDPLSCLTCVPWHMPGLLSAPVPFSVLGPCALPWMCMLRLAMSSDIMWLCKRLLTL

SEQ ID NO: 964932 - protein, 413 aa, Homo sapiens
MGKKCSLEDLARDGRLVPTCAWKAPFPGKDTLKPALVGLLRVPGFQFSASGVIDSRIDSTCANSVDFRRKRQALLWPRKDPELPEKWSVHIGWVLQTQGLTTVANRAFLLLQAVCSKFGCENHFPRLIEDLCTASSEAAPDSVDVLYLEGTQPNILPRKYTPRGLTKTRLLLFQQVASPGNIYWSSGPHQDRKRVLTPLHFWARFNVLGAHYNNFSILPNTDTTEGRYPPWERTRRVKARKRRGVSPIVGPLFAAPLRRHKVSECGPCVIHPSFFISADIFRGSLSRGMPMGGAMSRPHYMFLPFRFFRGFEPRGGGSTHGISIIFPRCGKTAFILPYHPRLNDSWPPIYIKGDCGRLPPCTKTFHLQRPFLHNAGGAQHIIIFNHNKVLQQLFSPPKRKKCPGDTLWRRVVL

SEQ ID NO: 964933 - protein, 229 aa, Homo sapiens
WRSSSCSNALRICCNAKLNLTSRALEPAGNEMCIPAQRRGVLQLCGPEPGGVPGTSPPVVSCYNASDHVYEGLLSTATVNLDGSYCDCVLACPGLVSRMNSCTRDGSNRPRVSRSVAPVARGPAVTLTSGTRPTSPLESPTPLFRAAALQSPAICGLKHICHHFYLRPSEDPDPAANPCQRQSVRLLRQGVEHEASRDVGAQVTDGAVGPPRTVAIQAVSCEQGGPMSP

SEQ ID NO: 964934 - protein, 154 aa, Homo sapiens
MSSDFIPVAGRSLSAASAFLIAWTGLASTSMLSPTADGWQEPLNCYYGRDAVWQRGCPRPAAALDCGSPYIWVQPFPGRVPSWRSHLFHSLHVCAKGWECRGMRSRGRGLAFTQWGPGAPLNGHRLKFPYESERLQRNWSHLLHLTHDTHPPHD

SEQ ID NO: 964935 - protein, 154 aa, Homo sapiens
GRMARARAVAGGGRRRRCHPPLSPRRRRVIRASWPEPSDETAVRAGCVLSLAVRVAGAEDVELRSPLTRSLYVNMISRPGVWLGWGSRGGAGKEKHQVVVCAKLEQKLCRITPGLSLVQSYLDQGTRDLLKPTSIENIGLGIYPIISFFVSVVF

SEQ ID NO: 964936 - protein, 303 aa, Homo sapiens
  misc_feature (303)..(303): Xaa can be any naturally occurring amino acid
MSCNTHRKVCSFTPEPGEHKPTGRNEQLQTRRLRAVTLTAKVCSFILSQETTNPPEGTNSEHIQTSEGTNSRRATLRAVTLTVRVRGFILEVSETKNPPIPDTSWQPRRDFRLSPSSKTIAYRRAVRQSLIAKQIEAIKLQMVLQMEPQMSSTNNFYQGPLDRPTALPLAREFPSEGHYKLQGPFFTPIQQEVARVVIGQFQQQLGCLFRGGMGGDSVLAVSQPRLSRELLCWAPLWRTEELQHVHWEPSGAASSPQSEVGRPGPVRVALVVGVGRQGPRRSAGGPGHIRRAPLRLPAGSFCX

SEQ ID NO: 964937 - protein, 385 aa, Homo sapiens
TLCKDHVSEGWSTALDMLTRNRVQPSVTYSPGHVGARRYTLSCVVTELSEHHGTDLQHQALTRLLLSSDGLALVYLYPAGTYPAGLDLTHALWFPCRSQSLQGGMSGHADSSLKHRLSWPGVQTCADTPLPHRTAEQLLAGPGRGWRLTRALDMDPAHTCCASLAPFITPWGYAHPAPPWAALRHQRQRLADGALPMPTPAYAAAPRSPWAHRNTTCGPKPKTPTTWGILEQASMGPYYTRRTKHATSTPRDAMSPRNRKRHKARALQPGNRRTNRATPPIPNTWGRTLEPYPQHTPNGHPWQTPPTADKQPPKVDQGQQRGEHNSRRGTTSGGPHPQGTHSAQGRPPKSGRNSNHGTYGTLTPPQRRPPWGAATPARTEHKRKE

SEQ ID NO: 964938 - protein, 77 aa, Homo sapiens
WAQVLRSRWPFLTLASGSSAGRSWDMANSGCMDVTGPDEESLLYFAYGSNLLTERIHLRNPSAVYFMCGPACRILRR

SEQ ID NO: 964939 - protein, 279 aa, Homo sapiens
MIWKRELLLASGMAAPVGGEPGPHSQWRGVKAWVDIYSQLQQEVGAAGGELEPKTRGSLTGRLIEVLENPRFNSLVVSLCRSNVMTVQSTEALTTTVPALDVRIPRWDLSVPVGLPDQCLLLCQVPTCVTRDSSARELECASAVLGCWKQTSTWRNSSHNDCALGDTAFPGNVLLSLFKNLLLKKIKRCERKGTESVTEEKCAVLFSASFTLGPGNPHPAPGLFSAPGGHQSMENKRNKCQSQYPGVDNAFSEMDLVLFVVPERCPGESMVNPLNRSSW

SEQ ID NO: 964940 - protein, 112 aa, Homo sapiens
SFFCIFFLGTKFYKRVFRRATIQTPKYSLPGKPGLVRGGTVAWGMWQGALVAFPPFRESVKVGVWVAQYILHSCGSFQHMCSPRVVSEAEGASLIEGANLFTRVWWLPEGRA

SEQ ID NO: 964941 - protein, 539 aa, Homo sapiens
HGENLGTTAFYNELRVAPEEHPVLLTEGPPGTPKGQPRRKTDPVLMVLSTSQAPAAMIRIAYSSACCLVPLLPARLAPGYPSAGPFAWHLRTLSGPAAGRASTPHHLCLPRDFATRTRRFVATISPQYVSRSPMPASMAPYGPMVPASTHWTLAAITFNMETKLPLRTQYTGGLVNPRAFYKLRILRNRDRRNRPWVHTSTGRADMKLTFHNARTAIRSRIRPIKPAEQDRTMGQNPYYPQTAPSQPNGKLLISKSGAQLGALCITPKLSPLTPIYRSSYVATANKGPTPTYNDEKAAIGPQVSIPVADPPGAALPTLFPIARTILSRLVRTTASVTRAAGGYLTRPRPIAALPPLVIGVPSAALSAFVRYYGPGTFLFPAILAATLGRRVPYPWLAPLGLYPPLVFLCPVGRSFPRRTRVVPPCCILIPALPFSTHRLVFPAQSVSASLVDYNTRALVRFATSRDSPGRSQSPVIVSLLCASSLSPGLALHAIALLAPRACPDYSTDLRSGFPGRALFAPPCMAGRRAWLPHSPLMSS

SEQ ID NO: 964942 - protein, 298 aa, Homo sapiens
MVEAGVNRRGCGSCRLRSAGGWAAPSGEHADSSWYSFGSGGGYGSGFGGVDGLLLLEVRRARCMETQLTELASYLDLVRALEEANTELEVKIRDWYQEAGSGARPLDYSISIYRTIEDVCRTKIRSQSPCDNDNILLQIDKARLAADDFRTKFETEQALGLSVDGRSSMACRCVLDELIPGSEPNWRCMIDEAQRMMLANLKNEPRGGDERPGRQVRWCSIPCGRWTRAQRVAPCSSHPQRRCVSCMSKMAENNLGDGRRWVLQRDRGTGPARWAATSELVRIGRVSLGARRPAGLGI

SEQ ID NO: 964943 - protein, 273 aa, Homo sapiens
MCALCAPVCALWCHAVWCKCVSAECWPREVLVPVVVRGAGWLQPVPWNLHCFECAQRGVTYVDITVGSFVCTTCSGLLRGLNPPHRVKSISMTTFTEPEVVFLQSRGNEVCRKIWLGLSDARTSLVPDSRDPQKVKEFLQEKAMRRRDGMSPQTKSRVPTYTKGSASTPCAGLHPRREAPSGHFWVILAPVSLQVAAFHSSQPVSQSHARTFQGRSTQALPILCQRSQVMTSCVENRVGTPFCWPPNGPGFIAEFRALQVAKSSNEGLPQLVD

SEQ ID NO: 964944 - protein, 514 aa, Homo sapiens
ERARHVNKFWFYSAGGVDSTARTACYIALEPRTSHCCAHLIMALLRKEKASSARKQAAQQQPGHSGSTVTKLLLTSFYNGTQQPYQLSECKTSNPPTATQQLQTQHRLSNYLNPIHSVPCTRSTHHAHTHTRLRARTNLSMTTNSTLAQHLHTLNTLRSNTLAHHLQQPKPSATRLLNPNTGPPNTGNNPYSIAATPTGTIIARYLPHTRACPLTPIATGHHGQRPPTAHSDTPLQPRYTNIPRASSRHTVGNPTHGHAPSSFRRTTTAYRHPHRNADTPELPLTRLTLNSTFPPFQLATTTRNLPHTNPHTLGYTSSTALGPAKTFTLSTRPRLAKPPLFGRTRLPPQLHNAHWSVQRLFYPSVHGPPIPNSLNLPPNSTPPHPYETASPKRARYQTPPHTADTRVENPFDDILALRRHMWRHHTNETTNPAHSNLNPILAPADHNPQRKPTLNTPTSWTIIDPPTNITQHEIKIDTLWDANTKLLTPEQRAHKQLKHSYHHSAQPHPSAATP

SEQ ID NO: 964945 - protein, 253 aa, Homo sapiens
LGRAAWVNGRGCSARFPGFSANGLVCYAPVPATVIVRRLPEWVAAMIPPASKLEHGASPPAARSWHPRYYGPLCSTSSNSSCSSTECPGKPFPTPQCLPKADPGHWWASFLFGKSTLPFMATVLESAEHSEAPQASSSVTGCGLVRDARVSSPAVSTSIAALGPVLTCAGYHQPQGLRRRLVDQRLVDEVRASRRTKLLHNATDSPTFFLLRWSSTQVFELEIFHPEGLVIAEELCISLPPGVDCAGCCDGTN

SEQ ID NO: 964946 - protein, 141 aa, Homo sapiens
MCLCKRCEPLCAVARGGRCAFSLILVETRVVASQQLSRSGCSMCGLPTSPRSVKWAPVRGSRGLFSTEQTSVPINPTPSLSDTVQEKHRGEWAERPQTISPSPWEKCVWDRVLRTDEELPAAPFFLRPDCDLMAPVAPNVF

SEQ ID NO: 964947 - protein, 443 aa, Homo sapiens
MCWVCGLVPSCVCCCEHVMWLQCVCMLLHCACHALPACLGAFLAEPLCGCPVICAVLADVLTCASMDGAVAWMNAACCGCVLCFACFVGQLECWLLSLNLRLRVLACFVLMCQCVHCVLACAPMDAHAFLRLPLNWALLACCWLRSDATLCVCAGILTLQLTLCGTRTVRVLCLQRYGTYHGLAATTWEQELPCVFGKTCPTEFTREGPFGYKWLQNDNHCNVSQFPRNHVACVAPGGMNALRENQGEPRYGCSLKKHSLGWRQHKFVIHFTFALNARNKPFDVSLKGPRGRGRYGLDNPLPWALIEEEPPGAFGEPTPTSLATKGALVYKCCAHLWEHQDLFVGIGNKRTCHVGHRPVGNTCTHTLRNRGKGPPLWAYNGAQVAAAPRQTQVLFTEHKRWGTPLNADNCTHAHSQQRSPTMCGNICRSPHGTITSKRDNQLC

SEQ ID NO: 964948 - protein, 79 aa, Homo sapiens
YLLCVFHLLKLATRGWGASVLVKGPGSGPQHPMLSWRNPRSLGPKPGSGVVAGCANLPQMAIPLPGMPAIMGGEALGVG

SEQ ID NO: 964949 - protein, 206 aa, Homo sapiens
MNYGYLSRRSLVSRYGSVDPYVSKWVPVVTLLMSEMELTTIIGDHHLPTEDIIKTHKWVKEEGAVVRHSKNPSVNVRTRVVVEGVDVLLHLLHSLLDSWCIWCNKRGPLVMAHMYIPEDMIEFRSSEPQPRSYGSLVLLASYEIASIQSTGEGDWLLVMVYEGSSSWHSPVSGGCMVCAEVPKAVDEIFTHIIVGTLWAAACRIIA

SEQ ID NO: 964950 - protein, 298 aa, Homo sapiens
GPSGRSCSAGAAEPGAQSREAAAASALPCAACSPGRSMGAWHGVAAVRLCSPWRAAGLGAALLSPQVAARGGRWRCPGPGAPCELPGRLVPNLPLDAFQRGGHGALERVAWEGGSGPGLPGPANPYVNYCGALPSHPCAPGPCLNPRQMPGFGETSGQAEVGLGTRGALPRSKGGGGAGETPKGGARKDQLVAGEGHGVLCGAVPARTETQAKERKKAKRAGQTRYGTFTKAKQFGKKPRRANGFPRRETGITPGLFDAIEARKGTDRAGCLEPKPFNPEARLAFAGAPWVPKENAGA

SEQ ID NO: 964951 - protein, 148 aa, Homo sapiens
MHAVLTLPCGVHSGCLWVHGCVLPVLCCCGAFPLCLPAVLGAALPALCACSPCLPCCLPCVWVNRCDACDCLCLLAVWPWCLKLACCDNLVVLPDGCSDVCLACPSWCIGLMLLLTGCELLMLERQVACSNCSSCGYWGTLVLSCCAM

SEQ ID NO: 964952 - protein, 195 aa, Homo sapiens
METGPELCTNNLWMEKQHLLLERMMMMKFQILWETFDEASKNEANCMESTSDRYNLKKLLGAAILYYDWFLRNLVHGSDKIYISNILKAKPLDTAALSDWVIHNSSLTVISREAAESQSEPRLTKGPWPKRTTTERKTNHVGRHWAQRNVKNHAGRGPNGHQNTAQRLPRNRAHRRGPTKAGAQADTNGDAKEQG

SEQ ID NO: 964953 - protein, 344 aa, Homo sapiens
MDLFPLVRPAWKAVGLENADACSVTSSNSLGFGGHLGHVCQCLPLAYVVMVSCVCSGCLSRAACRPDLSPRAWVTAPCPWLVSNLQVLEVALGMTGGSPVSLLTPASYYCNCFLVTCLAQRPYSGLLMRHINLIPTNLHWQRWPGTGSLPEGFSSFQGRMVQTLGDLGRLWVTAGDYTVRLPWDGSGDSLAGVTVRLLSLRFQIFLDSKDLSERAVSWNPSSFLDFILSVKEWNNLSLVPLRQLLGDNPKVLAYCNSPYGIMDPSKLSSRWPTNVRLMTSETDAVGKGHWGPHSSFGDLTAWADSYVLTREPLSPGACDLNSQSGRRLRGDHSVTMSVLCTPAP

SEQ ID NO: 964954 - protein, 274 aa, Homo sapiens
MEIPPCEVPEDTNQGSGWSTGGVVGEHSHKGDKLIARGRRQLPRGMREETQGGPPPKKWRGGKRGDISARRQGGHNTGPHRKHTPPGEKKKTTTPSHETDNNLNHHGESNSPGNITTRGPIIRAAPTCVVRDSTRGSPIGRPLWCNIPTEWVKQLGAPQTPCGHTQGAHRTVATAQKNSAPKTSRSDNECHTRTTWNTEDTTPTVDQTAPGPRTHNHETSAPEKKDPPVTKKSHKRRDGESKPNNHNDGTNSPHGHARENKESVRGTTTPQKKT

SEQ ID NO: 964955 - protein, 167 aa, Homo sapiens
MRISSDLRHTTSQVLLRAPKRTCTHTNEYTASRQRTQLAGVTEDQTVKRTQLLRLPRHLTLRKLDTTPHESLKPKVRGDHPETKAAPLTHWRHPHGTIVHAHPPKRPRPPTMQRRCRRGAPSARTQRKPPQRAQRATGHTAPTDANPPATAQHKNARRDDGEKHDRP

SEQ ID NO: 964956 - protein, 297 aa, Homo sapiens
MCCILHDVVPEERWSQEKPWEGGVGNDTALLTGMATDVFYAPVHRSALAMAFGNGTHTDKYEERSAGLGWLKPVTPCTYGEAERGADHLRSAVRDQPGKHPISTKRKPISTKITNTLAGHGLRMPVIPATFGGRGAENCLNLRRGGCREPKVATLQLQTGVTAVRLQSQTRTRHTPGHLRSTVGNGLPTHEDPTNCMTNPTYRRAPMGQNEQLSTNPTAPTVCQRDDTHTIEERGMPNPSPPTVPVTSPPEATTTNTPQTVAPQRGHTARHKADKATTHTPKPDGAPRTTHAHQTYP

SEQ ID NO: 964957 - protein, 279 aa, Homo sapiens
EKMEDGKVEGHPSCEPTLLPPPVRNAIGAVSTRRKSGGGRSDCPCCQGEEESCGYSVKGAGDAAGRQKSAPGWGFHTALRDYGPGMMEHGQGADESGATLPRMSVALEACKPLGEQERAVILELKRAECERRGRALRRACSPVPGTCATTVNQVEETRYCVDQNLVKEYFPVQVVTHGLLGIYQELLGLAFHHEEGASAWHEDVRLYTERDAASGEVVGKFYLDLYPRDRKVRAQRTGFGCSPADCGRMGARQIGIADMVANFTSPSEAPRWWQMRGGD

SEQ ID NO: 964958 - protein, 283 aa, Homo sapiens
AVRDLVPKPVDTPSEEPVVALRKGRIPHSCMWAVSSPRIPSLWFSAPIVETGPTPSHVVWDEVSPFLPTRMSNNLRRGLPETLQRKNSGNASRDPIIENLRIHHLASRVAQGKEHGPTKDSPGDTTVNLQGITILEDSDCIDNFTTRFFGAFTYRGFRKSVPLLRDSLEPVWDLPGRKGLDFPFTPGFATRRWSLKHRKHQSLIGRTGRREQEHPGEHFDVAKEREKPNIDNCAPPQRAHTERTVLRAAIMGHHSPVPTLSVYYPLRFFPNTLQIHEPTVRAR

SEQ ID NO: 964959 - protein, 123 aa, Homo sapiens
VCLLLHTVFGTEHGSGSTLFQVLRPPSEFALRWKAPGPSSTCHTPDCWDLNRHRSYWFSSFLAKQTDELPDCVQEMYYSTDGGGASAINKPGRILYRMQWPSLMTIPSSRGFYVSNRRSECEL

SEQ ID NO: 964960 - protein, 86 aa, Homo sapiens
FLCGPIFFPPELGVCGRRMNWELLLWLVVLCCAAPASWCSLLRFLRADGALTGYFVAVCVQARLPEMWELTDMVVWVTGAVQGGNR

SEQ ID NO: 964961 - protein, 31 aa, Homo sapiens
MTGDTPIKGNAYIIHPAQPVTTNYCLRHTPE

SEQ ID NO: 964962 - protein, 342 aa, Homo sapiens
RHSFFSGTTLLPPLHDAHTLARDTDSELPHGLQAAQHERQRLTAARLHTLTPPSLACTRWQRPTRSHDTHGTLPTHAWRDCLATNASAARTCHAYLLLRSLCSSHLRLLRTLQSAPSCTLPDSPSARPSPFASLTPTTCPMFWLPLAPWTLLHHSLVHLLFLMLTLSAAPHVANHTHYYTEHSLFLSARLLYALTRTLQHLLHHPLLTTPHTSTDHTPSVCSAAALAPPRQHTLFTPPNSRSSAHPPPPPPPPAPRAQAVVPPQRQTPGSTQLDAHAHIPPLIITHTRPGRYTTQPLSRTTLNRRPSRAHPQRAPITTQRPQQSLPLKIAHDPCGPPLYAHT

SEQ ID NO: 964963 - protein, 160 aa, Homo sapiens
  misc_feature (112)..(112): Xaa can be any naturally occurring amino acid
  misc_feature (137)..(137): Xaa can be any naturally occurring amino acid
MCRRVRKSPAGEERSDVPERTTVERTSRRGETSPQTRLVWPRRGRQHHVGRSQRRGPTGGCLKEGGGGNKYSPLREKKGLLLQGKTSEEGTLQNDEAASWLPTQENKKLAAXTKRRQIHSHGGGREDAWWAQNTNTXGATKHVWDEAIRDKSTDAMCANR

SEQ ID NO: 964964 - protein, 212 aa, Homo sapiens
MGTEGVSDTKLVPWYPSGDMATLRRELGGATSHPVQWHRGALGLAHNGHHIEPPRGQPRLCTPFAARGPCTLPVALTVGTTRRTLCVGTVVGNQCLDTVGPWTVASTWPYGVPEPHHASQLRNRTDGGPSSHPMALIGAQHAGGSRNRNSRHTQVLVERTPAYRDTHTRKRPARHRLGGADRQPAPHTGTGATTLGEHVTGDPLPGRRTRDE

SEQ ID NO: 964965 - protein, 108 aa, Homo sapiens
WKQKSHSVNPGWECRGAISAHCNLPLPGSGNSNASASLVPGTTGARHQTRLIIWGILNRDGVFHHCWARLGLELLTSRLIHPPRPPKVAGDIQGVEPFGAQTKLLCIL

SEQ ID NO: 964966 - protein, 170 aa, Homo sapiens
IPALREAKRREDSLSPGVRDLPGQYSETPFSQKKKKKKKKNIVSAPRPRAPRKKSFRRHQCGGGARAGAQEGKGKWGHKRCGITNRERDSGRHRDKGAGSFSPTKKKKRRAGGEQPRERGSGENKISQRWGESIEEGDQLQGKLIKTAGEIHNGEGPQISQKLTPPARGS

SEQ ID NO: 964967 - protein, 84 aa, Homo sapiens
MTDQETTQERGRARKKGEKNQASTNTSNQRGRNERHQNGEKNKATQEAVNRETKKRRQDKSRERKQAKEEKQTYKEEKEKREKG

SEQ ID NO: 964968 - protein, 461 aa, Homo sapiens
YSLDPENPTKSCKSMRFQSIVFTIKNTRETAPGPSKGHALYSNTATHSHLAHSMSTISPANQMCHPFTQRYTWWQYGQGVAPAPTANGRHGTTTASAWHPTHTADACTSFSLPPLHSKHHASMQSHCLHTFTWRSQHRQTFIIGSIRTPSYPHVAHHTATLTRIADRPGTITKQPPMRLRIYNPITIARFLALCPTILHAIAYPLTVLHTAPHPSNLVHYNTLSHSQRSVWPPRHSTHNSSPFPEATATTLHTHTRNTTYHCATAAPTSNISSPIHTHSTTGSHSTHSAHTTQNKNTPPQQEKNNKHHPPNTSNRHHTKHTRSTHDTNTRSHTTTRHPHAPRHSRLPPSHPRTDLPRTTKEATTTNMHRQHHTKKYAGTPRTNNENKQTNSIHHGTLTNNHLEAHPPHAHRCTKGTRHTEAPTNAPPHRPTHRTTTPPYTHTHPTHDRTLHYTTPTPHTTN

SEQ ID NO: 964969 - protein, 171 aa, Homo sapiens
MALYPPTRSSSTGHLLYCNHPLYQPRLPFSTRHLLSPDLSVDTTLVPQKLAVATGVILIKCPYLSQAHHSSIFSSAHTLSHTSVTLAYTCHFTLGALGTSPTQTHTSPAHARKHPTVRWDPCHWCKIAHPRHTCKPQGTQAPWAHRVHLGHLHFPFHPTLMVHPISLPGPI

SEQ ID NO: 964970 - protein, 118 aa, Homo sapiens
ILIQSEKSDRRLNFVSCYDVLESLLKYMLDIMRIEWLYKRVRIKDSEMSLQRINNIHNIPSKRLDYGSSTCDRSMVPGSKVYFQSGRGPLLGVKEVSFVPLDAWCETSKLFIPYDTLV

SEQ ID NO: 964971 - protein, 282 aa, Homo sapiens
EEDDITDSSSKWQRRDYLLLVMEGTDDGRRAGGMICDQEVKVLLDQLRFPNGVQLVSCRRLVLVAEDKHGQDTEESTFLAMMKGWGCSVSGEHAWISRQTSGPAASGGYWVGMSTIRPNPGLFHAGLSYLERTWIKRMIVQCSLVDSETVMKVVPLVRKPRPRSQGQGCLPEKPAMSPRWCWWPTYISEVQEHDGHLYLGSFRSAFLCRLQAAGCRALQIAGPGKAGMESSHSGSNAWSSEELGDTGVVPVCTMHPVVPEEVGGNGRRHNPEEGPGPRGGAS

SEQ ID NO: 964972 - protein, 170 aa, Homo sapiens
MEYRDTAVTQASGTHKKKPLGRRKKKAAGDTPTQIIKTRRGGTNRVRLGETTPQEGGRRRAHTRRDTKTRSGTHRRRARLTQKIKSPPLGREQQHKHAAHEKRHPQNASEDKKTKGANEHQAGQHEGTGAAELDRQHHLPTDQEARESDAHRTGQQRTAQNNRTPQNTSN

SEQ ID NO: 964973 - protein, 66 aa, Homo sapiens
PRMQTSYLRTAKRAYPSSLALEDGEDLLRVEGDNTYPEAWEIAWLSKDRILVQLEEFAHRSLYIPL

SEQ ID NO: 964974 - protein, 144 aa, Homo sapiens
GGPSCRLHGHFLACAWARFSTELPLNIRCSKEKKWTMKEIKRSAGWVPVKNVKETQLLAKRQHKKADCTGHNWLHSGASVGLMTWEEMHLPQEERSSVKGKPVVFELATNGSSLVRVPGSSAHRECKAEALKEFPSAGVFDTSR

SEQ ID NO: 964975 - protein, 463 aa, Homo sapiens
DCARLGGYGPVPVHEMSNEGSGCGAQGVASVGSSTCGCVPHVPVCQTWDMACGDTCDMSGSPCCHLNPPATSFMYSAHVGMLLCTGVSHVPIACDASDGAWMMLWNDMLQLLLVDVCSMGLYTSDGCDMLCPLWMCCVPLCEHLLHRNVDVLGRCALCLGWCLPVSPLIGHLAVATRGSWVAVTNGCPSDVGELLGYDSIVIDPYNGGFHEPTWGGHEAYGAVEHGNQGNSPCGGMLQRGAHLGGTGWNAMEHKGGKARWLWRRRSLDICTLLPREGRTVDCACQRAKVGQRLKRGTARQSRVAASGKKGPGGKRAPPWWTPFPKKGPHRERPQKGGRGGPSGTGAPVHQHGEQPRRGKLQWEWRHPRAGLLPGCPWCKYTRGCSQGGSSSPKRQLECRCGNELCPQTPQSVFGVEEWVHQSRSAARVVAPWVVMTHRLCNQLRLVGYTFSTMCRPTVDCTQL

SEQ ID NO: 964976 - protein, 212 aa, Homo sapiens
IPALREAKRREDSLSPGVRDLPGQYSETPFSRNKETKKTKRTKTNKKKTQKTTNVGRAAPRRPREEPFKDTTRGGGARGAPKRRERRKVGANAGAPRERTRGAQRHSGGRSLSTTKIKKPPAGERPPRTAVLARRQLPKRGGESKERRKIRGGLYIKPQRGAPQAGTPKEYTKMKKPTDRRGENTVKHAKPNRRRRHQHETNSNRNSHHQQR

SEQ ID NO: 964977 - protein, 518 aa, Homo sapiens
  misc_feature (234)..(234): Xaa can be any naturally occurring amino acid
REGARHRPGSVSAGGEPRVPRAWGRAQSRCADPPLRSRAHPLRQGYRLFLIACADQALASVLIARHEPRSLMRWWEPQHQYRQSVDPSSQRRAPKYSTRLNHCRQSNCGPHRKADIERIQGLAGSGPGTKSARSYDQCWPMYLGSKRRPNVLDLTVWIALDYIRSSATFHAVGRHRIRTNSDDFGEQVGANSIEGPDPRNHIRRLLLPHNECPNLPRVADRHGAKEAIWSSTVXPTVSRGVIPSLTGWPLWAYCKGFLDGGGQGRAIEGPAGGPDFGCLRKGGFFPHLRKQFCFERDREAPGSVLDLANEGSGPILKAPRLSRPLEGPVTGYHNGPGLGEGHRGTEPWWAHEGSRQGAPGEKRPNPRDGMSPGEDAGGGPGGGHRGRDRAPEKVAGGTETQRLRNHVEKTTGKMMPPRGESHGRERGAKTGPPKDQHVSSRVWGHPTDCCSAGQHAKKNRTPGDVHTMMVDKRRHVSYQHELNTQYGGVVRDQQAESMAVITRTNEGDKHPLLPRLLT

SEQ ID NO: 964978 - protein, 146 aa, Homo sapiens
MGCSVQSSVNEPCSTSVLSFTGNRFKVPVCVDHTPSDVPSVSIISKWSDQAFWTSVCVLSKLGWSYIPKGKYIPCCSSINEIELEAEKSDVMDNWKTHMLQTAWKMDDRKIGRGFICYVARMVYDERVLVNVAALSGIVEYGPASP

SEQ ID NO: 964979 - protein, 120 aa, Homo sapiens
MISAAGGTRVALPRCRTARPFSILHPHSKLATAPDPTPSPSSHHSTLPQQPILLAPLCRSTTLCLSYNPLVPSVWAAFGRASPILWLPFFLYALLVVLASLVCSLTVGRALCAVARSSAA

SEQ ID NO: 964980 - protein, 166 aa, Homo sapiens
CWELEAEELGRSERCDQAPSLVLPLSCRSCLENNFFSLKKERKVVVRPHALSSFSLPPGEEARGGCSAVGAARRAGRRAVPARAPCIPSTPGPHHDRRDRLPPLSFISKFLRTKGLTSERQLQTFSQSLQELVGSNIINITVFPEKPWQGDRVPGVFASTIKSGSS

SEQ ID NO: 964981 - protein, 587 aa, Homo sapiens
  misc_feature (397)..(397): Xaa can be any naturally occurring amino acid
  misc_feature (493)..(493): Xaa can be any naturally occurring amino acid
RGKIIFYWKPHQRQNLVPGYKALFFSWQLGSFLPVGPMEWLFFLLPWVLGSGPGPNLGGWVVNENLKGTILSHRARRLPVSGRPQDKEIFGGRVWTHPASFLGVPHNTTHKALIQDSENKSVHVVSHLYTPICGDTNRATPTERGACESGSVCVRDNEGVTLSLRGWESDNSGVLCERLTDCVARTSCGDIQRGDSPLGGPKTSLLLTNSLSVRGERTPLQKERREGGKWCVEGPFFLLWRPRESGGVAPQQREEKKGVSPKRKVRKGVVAPEVAPPKNYTEGANPVWKKIMCPDNRGANETRGAPRGGGHNHARRGVGPPAGGTSQKELRPPGLENKQQAGGEEGPLNTKKEGGGWKKIPLLGGARWKETTGGRPQRNTSGRDLLVGTTEATTPQXPQKRREKPLTHPGFLGVANSGGPPRDKYQTTGVVTQGATHKRKDPTSHPYKKRSEGEKERGGTTLVETEKPTGRPPPQEDPCGKAGAQIARGTTHXRSLTKSDGVTHKELHTDPRSSTDHDEPTHNRHTLACRSPRCDEQNKTGSVGQHEWGGTHREKRAIPGESTEKRKTITRATHSWCEPTRHARRDN

SEQ ID NO: 964982 - protein, 34 aa, Homo sapiens
MRIFRRDHTRMSPINQEWSQGDASDIHYLPPQAP

SEQ ID NO: 964983 - protein, 92 aa, Homo sapiens
VVTEPLRLFLARVLLSAPARMNEEYDVIVLGTGYGMYPVRYNVSEWKKVLHMDRNLYYGGESASITHWKIYTKDLKYQDHTRVNGERKRLEC

SEQ ID NO: 964984 - protein, 135 aa, Homo sapiens
  misc_feature (71)..(72): Xaa can be any naturally occurring amino acid
VEHQLRVAQRSVPSTEPPAAGRDAANRDVPAPCVALPWTWFAGGLSPAPACLLLHARLVCAGAALPGVCSXXLPSRDLQALKQTSLQVWWDIGGHSKTATLGTGAPFAFSGLWGIAPQRAFRGNKNLQKKELHLT

SEQ ID NO: 964985 - protein, 144 aa, Homo sapiens
MLERPLQLTVLATSESQNAWSTPNLVERGPPLKGTDPLMRNPLIPKAVQAVSTNNSPRFNHDFLCRGTRYIPLPFVDPYFPQYEGLFQGNGKIPVDDAPVCDFTPKGPMCPNQNALMGDELPLESLEDFLPTGAGIEKARWAIW

SEQ ID NO: 964986 - protein, 169 aa, Homo sapiens
NWIPSPQEGLIFSFTKSGLGVSWALFGPVCRRRPGRWAAGHSGELAEGLVKFFSSSGDDSSFLLLIERSGRGMCTGSGSDVWCGQFSVLFQQETGSSLSCGGPKGLSVGERRIRVGEAVNILLESGVNTFGAVGEGNLAGDTCGTPHLLAESHREKVPKWTRGANLYRG

SEQ ID NO: 964987 - protein, 256 aa, Homo sapiens
  misc_feature (166)..(166): Xaa can be any naturally occurring amino acid
TPVQLGGPGGPGGPGMGNLRWLPAGGFGSGILGPGSAAVDGAWGLRPLELAGGKAQRIKEWMPVTKLGRLVKDMKIKSWRRSILISLPIRESEIIDFFLGASLKDEVGRYMPVHNADPVPGQRTECSRHLVANRGTTMGHEDVGVHVLQMEVGHRTIRWGPIHRRXSISHTYPVSRRGITGGEQRIGKPTECSLLAKGDNGPVDGILVRRNAYIPLAPQGGTRASDSGTLCPKKAGSLMGVVIGIDWGNNFKARGA

SEQ ID NO: 964988 - protein, 219 aa, Homo sapiens
CGPRHTLFVHLSAAPRSFRRPPMAAAAVPEIASLVPPAVDSPLMPRICNARPPYYPFRYYAIPCIMRMGFTPCPALCSRDLYFPPVYFRRTVPVSPGCVFVVIVLHCPPLIFTLSHPSRVLHPCLSPLVVSYFAPRANLIFLCPRVISPHVFRFPRLNFPNTFLYNSCTTLLRSESEKISVRCGEFYGPQTKRERQNTKKNFPPPPQFTQSSSYFFRLY

SEQ ID NO: 964989 - protein, 196 aa, Homo sapiens
  misc_feature (121)..(121): Xaa can be any naturally occurring amino acid
RRCSGGARGPWWPWDGEPRWLPRRFLAVGILGPGVCWPWTGAWGLMACGGSLECNGRWISEWMPWHQCLGLLVSMDIEDQVPWRRSIYFSLATLRNTEDRLISSLGASIKEMTFWKIMPVXKADPVPGQRTRFGAFCWLSGDYNGPRTVVGVKCSKEVATAIRGANHPGQALHRPRAQKATGGNKIGKAPHCPLQW

SEQ ID NO: 964990 - protein, 111 aa, Homo sapiens
MQTAVVRLRRDPAAMRPTGGDSPHHIKTAPGGTPRRVSREQNSPERGAAWEEPHTRGSLLTKPGGSPKRQSPPEIFKIYTPPEPRRRPSYPTPCHTTTHYVALMRSHVHVR

SEQ ID NO: 964991 - protein, 399 aa, Homo sapiens
MWVWVACCSGLRGLAGDYTPYSVRCPQLSSYLLLCLLLTAGPSCQGLCCAQTIVHSPKSRRRHLWRIVGGHLAHVVDVQFDAGTTTNSKCPGKCTWPGSTSTGFGQVGPAEWVSSTVKDLLANAMVHARAEGLAWAMHTVTGTPVVAPNQQFPVGIPETLWVHATHLHWSLADDTILWMTHARSHQKTPRHTLGLPSSLLTASKQFIGTIEWSEPGHILGGLGYSRSGTDPAKPTPIDHSELAKHTLARISNWALGMPGSLGPKDLGTLHSSAHASPFQLHTGSDPTWPHVGWANLPCWFLAGDWTWPLTDRAPLFERGPTALQIAPPCTHSVLTPLAVGVAPTIYPTRIATPHKRGNSARDIIAHKLRILAPPLCVVLIAPRGYDIITMGGQSHMGLT

SEQ ID NO: 964992 - protein, 243 aa, Homo sapiens
GGKGGERKKEKKEGEWRARASAATHTPLKLCSSPCCGASLAAALLAICACSPGGPSAFVTSCWPGPGCGPKAALQGDRWPKVRQGCPTLAFVGRTDVLSFKQNQGDCGAVNNFSLRMIICPFCRFPICCYTGNFGAKRVPKGAIETFGPYLAIFRANGWLSEDKTYWNPSLVLLGPRDPGEKPHGIERTVHCPQALLSRGFKFWAPECRGTRGRDVYHIPRRGTHTRSYFLGAQRENTINLLA

SEQ ID NO: 964993 - protein, 186 aa, Homo sapiens
  misc_feature (186)..(186): Xaa can be any naturally occurring amino acid
MATKNKNKKQKQKPVCAARAPPAPLERENVFFNTHTLAVCGARARAPPAIGLQTPAHHLGRASYTRAVPPLTRGDTPGPHKREKSARERGESLHPPTTFKQTHAPEGRASHHPERGVLCGEKTQISSREDGEQFLYESALTSYRWGENLYILSPRGESSSTEPQESPRELIFQDIFDPPPRSPRGX

SEQ ID NO: 964994 - protein, 118 aa, Homo sapiens
PDCLELRGRGTNPTMTPHRLVHRAAAVALLLCASPGWRLGRCPGCGQGVQAGVSRVACGGVSEDAGVSQPDGLQLRSLSEARLKDEQGAESAEYIHPSNFASPNLKLPCCHPDPKETD

SEQ ID NO: 964995 - protein, 153 aa, Homo sapiens
SDALGMLFYFIAFLKNRELKSTLFKKPHHWENYKGFWCLELVCGWATPNAIRANWILGIEWLFQEHEWRNVGPNYSVVVHGSGGGGGGVRSQKDAASKNKRGKVKGPRHTTRAHGRGTSYELSWVPAAGSRGGVTSAQGRLWKQWRRCSKGHP

SEQ ID NO: 964996 - protein, 111 aa, Homo sapiens
RCLSPPPPDRKPPLAAALGEAEPPGPVDATDLPKVQIPPPATRPCAQPRVQPAAPLQLMTGCQQSYMSGEGYQSLQSMMKTEGPSLRCPAPRLRPPAHLPTTPMSTRPNPP

SEQ ID NO: 964997 - protein, 78 aa, Homo sapiens
QPIKASILWAIQYIPPELDQVSKMDFLTGISPPQQAHPFKTYFYEALVDCKKSDAASESHGGIAREAYTEDNASQAAS

SEQ ID NO: 964998 - protein, 164 aa, Homo sapiens
LPLRGLAVSFLASLLSRLLAVPLRFVPPPRAFYPRARPCPLLSHRLLLARSSLPLASCHPPAAAIFLLVSFFWPTCLFPLAPSTLTLSPLVTCGVSRSVVLSSSVVLFSFVLFRLQFASVVVVCCGMFSACFFVLLPSCMIVFASDLISLLLVCILLLVCAKPS

SEQ ID NO: 964999 - protein, 72 aa, Homo sapiens
ERVHVRYPLPPQGPIEAREYLVPLTKGSRNHKNPPESEQNTSVVSSVDVVSEWKLRQYIWYDYTWYMGVYDR

SEQ ID NO: 965000 - protein, 128 aa, Homo sapiens
LVFFFVLSVTLLLSVLLSLFCFLVRVLVFFSLFSSCWPPLFFGLLVARLVFFPSSFFSSVVAWSASVLFSLSVSSCLRSSCSPPLWFLFALVSLLLAVSAVLFVSLFRCSWLVRLFSSFLVYRFVVSV

SEQ ID NO: 965001 - protein, 64 aa, Homo sapiens
DPVKPLGLPHIVNGPAPTSQEQEGPHRTCEPRLTVRRESIQQTAEQRLYQRTYTGPEDRLTDAH

SEQ ID NO: 965002 - protein, 30 aa, Homo sapiens
SVSAFNTLWTEQIRGLCCHPSDRPPISLSR

SEQ ID NO: 965003 - protein, 32 aa, Homo sapiens
  misc_feature (26)..(26): Xaa can be any naturally occurring amino acid
KPEGARRVQFVMGLFGKTQEKPPKEXTQWEWS

SEQ ID NO: 965004 - protein, 205 aa, Homo sapiens
VANEFISVTRNAPDYKFFRYYSTTRFYSLSYILLASRFSSRNYISLLWNFCGLIISGRAVIIVFHSGGHNILTLYSKLYVITPLYCVEYTIIGEFCPDIMSPKVHPSISHMLLQPGLLSPMFLLWSILVGITLLWGSRVLEKFVRIFSDYLSSIVRSWVSSKLALIFCVIAWFLLTGINGGTSGFPNKVPLELLLVPAKCAPKSR

SEQ ID NO: 965005 - protein, 117 aa, Homo sapiens
MCAGRMFAWPFVSGLCGFMVIGVYAAGGRPGVVVIGFGVCGQKHNSVVVDGDASVEDCQHRCVCLVCMVFECVNELHGGLSALLVVTGQHAGCEITMMQHMWPLVHAVQGVGSDLYS

SEQ ID NO: 965006 - protein, 166 aa, Homo sapiens
AVGSPPFPLFLCFGSLWSVCLPVLCVCLWCVAAVALVVSLPSCPLLQQFCSRVFSPYVRRFCARAWLFPCCSLSLLFGLSSYFRPLRLRLSVRSLLFCCVVVRIAFCLSSRSVIHLTPLCCHCSLSSVLLSLGMCGPCTVPVWFLSFFHLVLVLPTSACYVLVYSC

SEQ ID NO: 965007 - protein, 99 aa, Homo sapiens
IADCGSAKFTCRYAKRCVRLERKDCVLGSERDELMLRQTTVIGVERGRDTPWRRYRGILLRLSSERKICLYGNVTSACVGRPLLCHESNSKMSDASLLQ

SEQ ID NO: 965008 - protein, 373 aa, Homo sapiens
  misc_feature (333)..(333): Xaa can be any naturally occurring amino acid
PPCGHAVIPVSGRLRGGRILEPGVETAGNIARPVQTKKTTTKHNQNCARAARATQKDFQTNPGSAERAPRRDVDTARNTDVPKGNAAEHATEGRRATPKSKPRRGATPRRRETHHQREGPPPDKTQGEYNKKPGSNKSSTPIKHKTPPASKARKKDRQTTQQETNKDKQRKNKQKPTKPEARQRRHSKHSNKLEEQARPSTSTARTEQKRKTETETEANKLERSRGKREDRTRNAAESDAEESKNTRRTSKEERGTDEQQKDEQRSHDRANERHGRKDSDERRARTRQSEKDERRKKGTKDEAEELGSEGGRHRQQDRGKEETGKGEGEHRKXHGDDDEERDKRAHIQRMTARRRTGRASRTLDEDDNENHDE

SEQ ID NO: 965009 - protein, 74 aa, Homo sapiens
MFLRSYDSHALFTTGTMTECDVLDCAVDPPWDDATRQWCLHYGLACVASGGASRSLLLDANPATAVAHMCQLRG

SEQ ID NO: 965010 - protein, 115 aa, Homo sapiens
FYFFFSQVKIILLLRVTRKKRHWWFKSNVQNHNRPKGLDSRAQAHEGGDQNRPKVRQQPHIKRVNVGASHTHTHYTLRQGSESVVDERGKFSGWLSLGGIHFINYEGCGRGGNCG

SEQ ID NO: 965011 - protein, 139 aa, Homo sapiens
KRETKKSGAIYYYFLFIGDRVSLGHPGVECAGGVWVFSFTATSPPLPGFKCESRCLSLAEQCGTTGSRHQCRGYTLFFFCVGARGISFLCGHTRGCGRVRRGHQINSSKCGSLRKRGYIASPKSDSVGDSVERARLHPL

SEQ ID NO: 965012 - protein, 343 aa, Homo sapiens
QRRLEDPGRPHESTHQDARGCYQMVTTFSLYHILPVLHKLAHVRRSAQGGEPDCPWLLPPVTPRVCSISGGWLDVRRWMASFVLEELRRQTLPVPPNAILPMDLASMIGHTTRWASEGAKTPPPGTLIDVTENVRSDVLAGSAMSGTGHSGRAKMWREGQAARMKEAGHPEWLGRHGPNWPTHKLAWRDVALHATGQRPGANAKWTADAMEQSPLGDGLARDRKPRMIARTTNLGLKLTLSKEPLSMGHKEEDHWGHFGKPLEQLEKGGTQKVNHRVQGSCSYDALSEENHMDKYGRRVWDKRENIKNPRENQELAERTQRNNPSEDRRPTYTKGGNAKNGTA

SEQ ID NO: 965013 - protein, 133 aa, Homo sapiens
AVGCERPGEIHQESTHQDARDCLQSDDHASPSNTFFRSSQMDHVRRRLKGEPSVPWRCPQCLRRVCIYRGWRLCRGRGWPWFLRLVGARALEFPGSHNGQAYPKALAARDWPINRAGSWHSSTGRSLVTRHQE

SEQ ID NO: 965014 - protein, 56 aa, Homo sapiens
MPSVPAYIARVKARRSIFEKIQAKRERLSAVKTCELHMMSKSPKPGQGKQIPPKRI

SEQ ID NO: 965015 - protein, 94 aa, Homo sapiens
MIRKIVGPRVGAFGEHVRDINLVRRRACQSGLQDHWFPTRASKRETGVATHGVGVPNPRKKPPRGTTDGLRTTQRDAGAYRVLAREASEAGKMS

SEQ ID NO: 965016 - protein, 206 aa, Homo sapiens
LEVGTFIITSPKSVKLLAHGPTASKLACVPGVLTLRFGSDVQEPPPFTFPGGVCEGAQEQKGGHMCKRSPRHVCRVSCGRKLRGAGGCQEASTGCCSLWPVGAVVKRSRNVLEVAGVQVRKTWAQPVEERGLQVLKGRSVKRRVSHTKGTVIIRRAYVEVSYSVAKPRKTRVAPRENSVGPPGRHRRSQCVVLPKVTSGSTTLLLV

SEQ ID NO: 965017 - protein, 437 aa, Homo sapiens
AAAGGGEGGAGPQRWGYRQPEGPSSVSPPAAWHRVLNPLQPSSPTCPAGRPDRLAGTSRTANPGHWPRFGTPAPAPRNRADRSATTAREATHGTDSTALEPIARLNRRRPSPGPSAPRGTHLRANPQPHATGGLRQRGTPPSATATTPPLGPGDPPHGAPPRQPQRIIPHLRGPLGPPHVAATGPPPEPAYPPRTHTHTKDHTPQRGSTTPTRTTLNATGPNARPPRPSHAMAASPSTHPAHAPPMAPPPTPATTRARAQARAPPPPPPPPTRAPLVPPPVGPHPARRAHPPPPLPPLPPPRRSVPPHTPAPGRPPPSPSRRPPPPPPLPSDSPLPTPAVLPGAPLAPAPPTPPPAAPRPPHPAHAPPCPPPRVCTRLRPRAPPASSPPPPAAPAPAPFSPHPPPSPLSAAPTCLQPPLSGHPPHTTCAFSHASLPT

SEQ ID NO: 965018 - protein, 156 aa, Homo sapiens
MPVQRGGPVSALVALGWGTCGGFPGGFGSGILVAVGRWPVDGGLGPDGLLDASLDVQWPEDKEWMPVTNVGACLCQMDIERSSPWMEIYLFSLPINGITRSFDFFLVEASLKDDGFERLCHVHECMTLCLCQLHQVFTGNLLAIRGLQMAHCQDLR

SEQ ID NO: 965019 - protein, 222 aa, Homo sapiens
MSVGIDWAPSGVPRGREISRLRRCVRDRGRRHTPVIREERAAISRADVESTPEGRGETKWPISPDGEQTKKVVSKGEVQSPTQVVAPLVGVRGGAPQSFLGEMLWGWGPTSLWIGAQCWLEHPTGGAYNGGKKVFAKGGLWGPLWVQTSTLLRPHGPTRGLAGGGCCISSPEGPRLAAAPLSPGGPLWDIPSRKCAPVAKPPASSVCKAGLTSPSVGALPTY

SEQ ID NO: 965020 - protein, 336 aa, Homo sapiens
  misc_feature (328)..(328): Xaa can be any naturally occurring amino acid
PRGPQILWGGGKKNGGGGVLLSPPPPPKKTTPTERGTKPPAQTSGGGPTRDKVCGDKKIGVGNSTSGPPSTQTRRRGGGTLRLVTRRIRLCTENAAVSHQQKEPQDNTKSPRNNTPAAEGGSSTKSARVASRARVGSMTHPEESWDNKYELATALEVERRGGVSPERESEYLLRASTGESAMEVRHHYTHTARPPTRREMSGRAARRKRQRKPPRGSRRPRRERGDSPTRAVERATRPHDREKNKNTSLATRAGEVRNDPRRMQKAHPARTGRACAPPESRTSHTVGRRDASQCTHPQETLCRYNTTVAPPPRVVTIHTTSEQQVDDXRPPHVGVP

SEQ ID NO: 965021 - protein, 530 aa, Homo sapiens
QVTAHYTKAACEKPHRKIPRARVYPHGRPNTASSTVQAGTKATTKYTNGLNPPQGNTTRVHTTHYTSQQRHPPSGLTPIEHRKANSPRRKMPQAPRDTNNRGIMRPQERTKRVIPTTNNPHHKGHTHTNIPHGPPLSIPPAPATTPPAHHINNTHHTDAGPHSAPPQPSAPQGRPTVKQSTDESTSRPPLDTTSQQGAHPREEHPLRKETTTHSNQEQPTTTHIIRADASCTTSTHNTEKHQHTRENEVESEHTNYVDHHMRRYTQRGARRKRRKTHGQSAATKCEKQHPPNKQPTELQPPNGRTNHTLRWSSTITTEAKHTHRKPHTKSRDAFRHQHRSHTSLVKLSHHTDTNRSKHNHQHQERRPPECTHAPATASQPHNTKHTTRGGLRLSTTLNKQTTNNNTTTRRSTSSHASGARPEPPTLDTTTTAHTYATQHHTRLPPHPPPAQYTRQTTHRATPNNRRHHQPTHPQPILPTDNHPRDTTPGTADTDYRQCATAQREQRRHDPRNDTEPKLQHKQTREIKTKT

SEQ ID NO: 965022 - protein, 414 aa, Homo sapiens
FIPVTFVLHGRGTLVATRWSWWAGFDPSDLVQLDVCSLAAAVACVSDPILPGQCESPYPPQDSLPQPSERTGRFTVDSEGAVQWDECTITTIPCMMGARDCGVHVKTVMQMFDSSFFECVRCLEGTLLTTVSLGVWSTCVALISNVHGDIDCNDVRKVDWMMSLVGAVPTAGHLCPMSNQIGECLGNAPIVSPSVVQLKHCWDPIVARGWNSHVNQTVGGPAQGLDQTRTKRHVRKSLQVSYVTPWATKRAPLAFLSQLRFTLPWALSARDALRTVRLGKHRWRNEQGQVASGGQLGQLTRQINQDDGAEQRANSGKCVGPHGGSNFACKIPELLWLGDISAMLIRPCPKEGNLDVATGSWVPGRIGAQYVDGLPTLVMAINLFTPHVGHGIVTDDTAIPIAIPRAIGLRPEIG

SEQ ID NO: 965023 - protein, 45 aa, Homo sapiens
KTNHNLKPKTTNAQTKHKYSTTPNDVIQACLERTTSASEVVSEEA

SEQ ID NO: 965024 - protein, 307 aa, Homo sapiens
QHVTYAVYERQIPPISASSSNTTVVAIIAFRRYCGSTAQIISTIRLIRPNAAKSIVRPSISEKLKEIRFFLFQLHHRQPQTCLYHFNHDRNNSLPDAQNAFTGPLCVMSVRHNSTTRQQNAEHYTDCSANAHARPRIFAHILIGTRRRDTGLFGNGITGFTQAITALFQCLLRFATNLTQLFFDFSPDELSTSSSVSERDFNSARRCSVVCSFDIVFSRVSKVRDYLLRFSTVRRLPACFQASFLRLLAKVSRFRVLGTLYPAFALFCFRLGLNLGWGSRHLIFRLCDFFWMIRPQWLLTGGRIPQG

SEQ ID NO: 965025 - protein, 179 aa, Homo sapiens
MESEVDSRLVSHQDGKWQVSHGRSKATIISVKPTGHYWYSSEPLDEPTARLIATVPVNYRTWRLDDLIDFLFCDPAGGVRPDIFDQYRRVYHSRIPRTFVTGEWAKKLAYETGVPNIRSLVQGRPVEAIYREEGEPGDILNFRQNPIKGSGCYSIHSGGTGQYGNDMDAHLSMKGHYSR

SEQ ID NO: 965026 - protein, 150 aa, Homo sapiens
IGCPSTPAVLYGHRYDGGLCWAKEDRIIATDGNNNAGGDLRVVTLTAMAAQHRPFGFARIHFMPAVTTVFMRSVKLRQLYASSGQLKQPNIEINDLTYRPHIVTPLLLYYTKQVPPAIRRFVVRADPQDRNLPLRHMAILPSATIIFVHG

SEQ ID NO: 965027 - protein, 208 aa, Homo sapiens
MVLATLLGLPGWAPIGSCLPCQYSYGNFRLCEAAGINPGGSGLGPLLFPAGRCCWPGWAGLNLFQVLPSCPAQFTSAGSTVQLDGDLVFYNSVGKLALSPWAAIIPRTHVGLKVSVGVEGPQGFPSQWLHLAAGLLKGGGKGQARRAGSILGRLGGLVPRLSSHQCSQLAVAQSLLLVQPRGAGAMPCCCCDQGVLWVLPNAVVGRCA

SEQ ID NO: 965028 - protein, 155 aa, Homo sapiens
MYTCAMLVRKAIYRFNAIPIKLPMTFFTELEKTTLKFIWNQKRVRIAKAILSQKNKSLEASHLPDFKLYYKATVTKRAWYWYQNRDIDQWNRTEPSEITLHIYNYLIFDKAEKNKQWGKDSLFNKWCWENWLAICRKLKLDPFLTHYTRNQFKMD

SEQ ID NO: 965029 - protein, 262 aa, Homo sapiens
MKINYPLLALAIGAFGIGTTEFSPMGLLPVIARGVDVSIPAAGMLISAYAVGVMVGAPLMTLLLSHRARRSALIFLMAIFTLGNVLSAIAPDYMTLMLSRILTSLNHGAFFGLGSVVAASVVPKHKQASAVATMFMGLTLANIGGVPAATWLGETIGWRMSFLATAGLGVISWLSLFFLITYRLVARGHDPGSETKEPGGINSVRRVAWFCIADDGSWEPGAIGYSSTPIISPGSASIYPRITGFRPGMLVLIGVGILSELF

SEQ ID NO: 965030 - protein, 185 aa, Homo sapiens
MSHKAETSIPSQDNGQDREYCMGYGGEPQWDSPDGEGPIENDAPRSEGTPDTPNDRQLGTTQYKTNRHNGIIDRDNIGPLTPPRALRNALSKSPYGMANTVIPPAQKRVTPPQVRDSDRRKHMAQYEQYLRAPALESPVAIGPRTYQYDAIQANTTHLADTDHRAIPLAISHRCHKHGGPPGVRH

SEQ ID NO: 965031 - protein, 273 aa, Homo sapiens
MNWQSLPVHRLLPRPNKFEALATCDSPGFSAHGVVERVGCVTDENLPMMSACAGPPGPALRELVKSQSRKMSRAAQSCRGKVNPTQCEALTMLCCQVMGNDVAINTGGRFLDNFELNVFRPMVIHNFLQSVRLLGAWHGTVLNKALPPVGIEPNRERINQLLNEIADAGDCVLTPTLVNDKAAEDLPNKSAIKTGLTFKAAGLPLGYLSEAEFDSWVRPRPDGRQYDSRAVNLARYGCRPRTGPTEAAALRVIAGWLTLAGSDFAVHKVRAPG

SEQ ID NO: 965032 - protein, 176 aa, Homo sapiens
LVFTQGGELQLAQISAHLQASVSVGFTPFSVPQPLKLAGTTGTRHYAPANFFILFIFLEKCESLWSLCVSPRGVESVQGGGELCVCSHTWKPLPPSWVFHTAIFLRVLPHAPSQNIHSGAHIYVRAPRHTHTPARGIYICVCSFFIVHTKHEGVFSPHTVCITTQDIVSLCRYISL

SEQ ID NO: 965033 - protein, 123 aa, Homo sapiens
CQCRGVAILAHLQPSTFPGFKRFSCAPASRVAGTTSTRHHTRLTPVFFLVKNGAFATPARLWSLSNLPTSQADLVPVPLGLSQECAEIHRHLATVALLGLLIFCDFHTNKPVCHVQRFVALSI

SEQ ID NO: 965034 - protein, 130 aa, Homo sapiens
KLTSQCLQAEQEALAGEGPQETDNHGKRQRGTRHFWPVFGAGKTERFEGGRACTLLNNQNSHKRLTQLFYEKQQGGSSAPIKPNSPSHQVPSQQTLWEFTICDHCKFVGVCGYTKVCKPVFKGYKFQPGL

SEQ ID NO: 965035 - protein, 317 aa, Homo sapiens
NWAALKNEGLDFSHTQQLPGTDYTIAGMVASQCGIPLFAPFEGNASASVSSFFPQNICLGDILKNSGYQNYFVQGANLRFAGKDVFLKSHGFDHLYGSEELKSVVADPHYRNDWGFYDDTVLDEAWKKFEELSRSGQRFSLFTLTVDTHHPDGFISRTCNRKKYDFDGKPNQSFSAVSCSQENIATFINKIKASPWFKDTVIVSLLTISDEQHGVENTSISRIRKYTWFFGHFRGDKAAAKRRLAGESCNHDGNNRRRRCSGHSPGGNNYLSDLVVTTVSPGKSMSGIFLHIQEQNLWVGAIFFRLWEIPSKIRVSL

SEQ ID NO: 965036 - protein, 135 aa, Homo sapiens
MDANTYDPLFSYPFPSLFPSTPALCPEVPSLPAVSACVHMSSTLRPRCRGPFLGVLDLGPGSKSAWSHPTGVHLRILRTWGGPRAHALQNLGFALGALVWWAPWGQFVGHRYPGLDPLFSLCGFEGLCPPFLNEL

SEQ ID NO: 965037 - protein, 259 aa, Homo sapiens
MLRGELVCEGANLPSTHYRGVSSPLCVTLFKEADSPTKVCPNFLWGYIEYRVFEPCVVPGQKGGVSRKKKPKKKRARAPKVFEGKTQFPLFRGAQRLSGARKFPQDPQGGRNEYSRYLAGDPPPIFKAEGSDISKFARIKAAGFNPVRIYEGSRRETNTERKTRRQRKKDDEKTQKEDEQQKKQKAKGEKHKQKKNQKKKERHREKKSEQKQRQKEKTQRNTKGERKEAAGRKKKDANNKCSQKEKQREANKDQHNKQQ

SEQ ID NO: 965038 - protein, 91 aa, Homo sapiens
TVGCSTLQARHVALEQSVYHNLKNVITGEIWERCHQCGVMKAGIAPTHPGRINEGLELAEDVLYEEMLATLDNGGHTAWIVAGLRGILLAV

SEQ ID NO: 965039 - protein, 65 aa, Homo sapiens
IEPSLSTSMLDQDIPTCSRYVQVRLVPPDLRSYVTEYRPEYSRSVSIYFKFLPVREDQRNMAYFT

SEQ ID NO: 965040 - protein, 64 aa, Homo sapiens
NSNKLHLLRHTDLRIAHCILFNQPHSPRSTSHSHPNPHKLHRRSRPHSHPRRYVHVMILASRLR

SEQ ID NO: 965041 - protein, 50 aa, Homo sapiens
YDLECRPLQLRQKYEDKMYSAWGTVTHMSIKNFSVYSCPEFLSPVVPHYD

SEQ ID NO: 965042 - protein, 46 aa, Homo sapiens
RAHTLSMTTLAVGYLPNYLICRAVCWQISLAMRLLETFWGSFLVVR

SEQ ID NO: 965043 - protein, 32 aa, Homo sapiens
AFKLNTHYLKNPKRITELLTPNWYNLFHFGSV

SEQ ID NO: 965044 - protein, 72 aa, Homo sapiens
KTEHQVRGGLFLDVVILQGASMLQLFPIKDQPMLVRRNAFLILDLCLDILNVVSLGSTSKVMVLPVTVFTKI

SEQ ID NO: 965045 - protein, 87 aa, Homo sapiens
VGNGVAAPCLLVWLAVVAESSAGGLVDLLRGSEMTLTYLDLYHNGTHLTGGHAVLTCTDCQVGNPLPPVGGGRWQHLTAPACVYHIQ

SEQ ID NO: 965046 - protein, 123 aa, Homo sapiens
GEWSVAEQLASFAAEMEQQNQDYTILLDVKARLEQEIATYRRLLEGEDAHLTQYKKEPGDHPSGAYHCGLSVQDGKVISSLLMQCPPDHPLRTQLPLCLATQGGSGVHACPICPKVSVLSSRY

SEQ ID NO: 965047 - protein, 60 aa, Homo sapiens
GDLEVPVATAGEHCLQLWETQHCQLEISEQPCYVVHTSFAFHVSELLTCLQHDVDSVPEL

SEQ ID NO: 965048 - protein, 107 aa, Homo sapiens
GYLLDAENCYCVQLSQIQCADWQLWRSSWPSFAARWSSKTQEYKILLDVKMLGGAVRLPPTCLPAGGRGCPPDSVQERTGAHPVRCVPLWTRVQDGTVISSLRAVST

SEQ ID NO: 965049 - protein, 78 aa, Homo sapiens
AHGIRTLVAARLWLHSNPSVSAALVKIALSIRIPPPSLDLDSVSYTATEGMKVELQLGCPDVDGTRWVSSFFSRGRRR

SEQ ID NO: 965050 - protein, 79 aa, Homo sapiens
TCVQIRADWSVEEQLASFAAEMEQQNQEYKILLDVKTRLEQEIASYCYLLEGEDAHLTQYTKEPVTTLSGAYHLWTEVQ

SEQ ID NO: 965051 - protein, 46 aa, Homo sapiens
SPSSSLTRLLSGGVPGCPKTPGLPLPNLEEEAAPSGLQAGLPRTCM

SEQ ID NO: 965052 - protein, 36 aa, Homo sapiens
LRTYLSAWGSGVEVLVSVLVALAMDSTDWCLPAEIW

SEQ ID NO: 965053 - protein, 117 aa, Homo sapiens
MIWTPCSVNDLRGPPAISPHPAERVDPWLSLEKQPWFHGPLNRLDAESLLSLCKEGSYLVRLSETSPQDCSLSLRSSQGFLHLKFARTRENQCGAGPTQRALPQRARARPPLQFTPT

SEQ ID NO: 965054 - protein, 123 aa, Homo sapiens
DPRSIVHSGKGSMCVLNSEPVSGVLLSQSGKEEGRGSCERVMRLREVGYLAALTLGRVLHRSIKVDWHIWAPFTGHNDVSLLRAGPVCTVGVPGAVCQAAVCDVHAGVALVAVALPVLAGDLF

SEQ ID NO: 965055 - protein, 62 aa, Homo sapiens
YFTGRMTQYHFPGSTWHALEYCQRFQLPLLLKHSYEIFSPPNAGAYTLSPTGTISYEGIKII

SEQ ID NO: 965056 - protein, 65 aa, Homo sapiens
MRSKCSRVTTFLFPVQVITTSTCRDDFIELYHPEPIHAGLQSTDGVDFGTVDYCSKSFESSTAAL

SEQ ID NO: 965057 - protein, 64 aa, Homo sapiens
IQGLVRAAQRLQVARQGLQLAPVVVGFVLGLAEQLRACGPQRLSGLHPLERHPSSASCMLLDAI

SEQ ID NO: 965058 - protein, 78 aa, Homo sapiens
  misc_feature (56)..(56): Xaa can be any naturally occurring amino acid
  misc_feature (74)..(74): Xaa can be any naturally occurring amino acid
PRVSNKLFSVCPNRFPRRPKNPPPNTNYLYSYPSTIMASQRHLSSEPLSLKKTLAXLVLIVPTTSPVIVTIHEXYSKR

SEQ ID NO: 965059 - protein, 41 aa, Homo sapiens
MIELVPEAGGPIPAGKTLSNLISCKYMSPVSSGLIWVPHTS

SEQ ID NO: 965060 - protein, 39 aa, Homo sapiens
SHGKKVRVYARLTTDYVKLDFGVTFGLWCSLRIGEISEE

SEQ ID NO: 965061 - protein, 49 aa, Homo sapiens
MGYNLLWARPTQAPGWATSCLTDHLTDDERTDEANALQARSLDLLLANG

SEQ ID NO: 965062 - protein, 122 aa, Homo sapiens
SVSPVQVVSDFEQRLRGNSGVEIYMRRCNICEVSWDLERRRVSGDVRERDLLRFTVDVPDRDLLRVTGDVLDIDLMRVIGEVLLRDRLLVTGGVLDLDLLRVTGGVLERERRRVVGVLDLER

SEQ ID NO: 965063 - protein, 38 aa, Homo sapiens
MPMIFPIRLHNSSDPVPYKRRRRACLITSPSLILAKSR

SEQ ID NO: 965064 - protein, 37 aa, Homo sapiens
YSQANLDQTYAAISFTIIFIGVNLTFFPQHFLGPIRA

SEQ ID NO: 965065 - protein, 43 aa, Homo sapiens
FALSLHLTLHYCMAQQDFTCYIMHRNGIKQPPRESPAQFAIRI

SEQ ID NO: 965066 - protein, 75 aa, Homo sapiens
QRDLRTKRTIVESSTVRTINLREIRVAFFPAASCLEMAGEGSRKGAHCDPTIGSRFRVLITGWEGTVASLRGAHG

SEQ ID NO: 965067 - protein, 92 aa, Homo sapiens
RQRIRNFGPCCPLYVKPKEIYNDSGEFSEQCCKTPSSDLANMGISGFSSTLKAIHDDQVFLPFLGRARTAQAQKDARFGEAEPKRDSGSKLR

SEQ ID NO: 965068 - protein, 123 aa, Homo sapiens
  misc_feature (9)..(9): Xaa can be any naturally occurring amino acid
MNIGGAITXEKAYQCKECGKAFSASNGLTRHRRIQTGENPSECKVCGKAFLLSSCLVQASEGYTRGEKRYQCRECGKAFIQNAGFFPASPSPHWLKNPISAVSAVNSLVSGHFLRHIRKTSVK

SEQ ID NO: 965069 - protein, 76 aa, Homo sapiens
SPHRRARKAQGHAWVGSGGSERSQICSKATEQLQKKLSAPESLLLLMSPSMAFRVHSRNGKSYTFLISSDYERPVW

SEQ ID NO: 965070 - protein, 46 aa, Homo sapiens
QISIVPDVPGFLLSRSKLDTMFLTTVKQELRTSVRTPPPLTTAMGI

SEQ ID NO: 965071 - protein, 37 aa, Homo sapiens
GADTLIEVIPDYDEDLVQEASSEDVLGVHMVDKDTER

SEQ ID NO: 965072 - protein, 51 aa, Homo sapiens
RNHSKGVTSAIRDLQLRRGSSGHQVRIRLRILSLKYVALMSESRTLTANAV

SEQ ID NO: 965073 - protein, 43 aa, Homo sapiens
GNRECKLKCMDISDYHVVPGLEQGRLSTRLKAFNHSAPRADTD

SEQ ID NO: 965074 - protein, 38 aa, Homo sapiens
MSESNEDDGEDTLGEEVGYAIRFEDCTSENTLIKYMTT

SEQ ID NO: 965075 - protein, 45 aa, Homo sapiens
KTQTRIHSGEKPYKCETCGARFVHVWPPPMPSVLYPPLGRDSRYP

SEQ ID NO: 965076 - protein, 34 aa, Homo sapiens
TLVGSPNGSRKIEVELQCPPLGMASSFSEGRIIR

SEQ ID NO: 965077 - protein, 77 aa, Homo sapiens
ERVAPVIGSRPRVNPDVHQPPSGPHASPPVARLYGSMVWRELAALVIDHADTPSRQNGVRQVLPLHGRHEGSNLYHI

SEQ ID NO: 965078 - protein, 44 aa, Homo sapiens
  misc_feature (3)..(3): Xaa can be any naturally occurring amino acid
MSXAHMMLIGTCCTAVHTSSSGTHVNTATDRLGGFVDRREELQP

SEQ ID NO: 965079 - protein, 37 aa, Homo sapiens
YPADVLLFKEILAFYSQEVRDRFQMKLSWLRMTTCFW

SEQ ID NO: 965080 - protein, 48 aa, Homo sapiens
TYTVCGGSSTNPSRSLKVDQDILLAAKVLPVEDAQDFPPLLEQLNEQF

SEQ ID NO: 965081 - protein, 67 aa, Homo sapiens
MLRLYCMRLYCMRLYCSRLYYSGPFASSVIMYHLCIKTPSPSCMFILETPLLMALALAEAASSYKIA

SEQ ID NO: 965082 - protein, 115 aa, Homo sapiens
MRLLLKNTKLRCLISVPRVAASTAKENKHSPVRQQVAPTDDETGKELVLALYDYQEKSPREVTMKKGDILTLLNSTNKDWWKVEVNDRQGFVPAAYVKKLDPAQSASRENLLEEQ

SEQ ID NO: 965083 - protein, 40 aa, Homo sapiens
MVGTCGPSPTHRLIYTHRDLRLINILLLSLTAQDLMWSLM

SEQ ID NO: 965084 - protein, 103 aa, Homo sapiens
MRSYDMRHPYRCSSPGSFCGEDLRFHSSAMPSRMHSLQRSPRCCTQHGGQGCPVALWLQLAGSLIDHALVSPRLSLSLPPLGPMQRSTTHRFELSPGGQRGRD

SEQ ID NO: 965085 - protein, 66 aa, Homo sapiens
  misc_feature (54)..(54): Xaa can be any naturally occurring amino acid
TTPDKAEGSEYQVLYIADDNEIRSLFPGHPHSAYEQAFQLVTRSVRIVCYRMSXVQGWPVSIWTTL

SEQ ID NO: 965086 - protein, 104 aa, Homo sapiens
VELLPSVAKREMSKQLMNTCPNIWYRRSFEHQLNLIPSLFIANGARSSYERNLVTRCTLPRNCQTILQKYQPLMPYSLWCQRSFSCIIKQLVYQEVSGTKSMTK

SEQ ID NO: 965087 - protein, 43 aa, Homo sapiens
NYKSYKYYDTVGVKVCLTYDVFRDPSPFLNSKVEELKGGAREE

SEQ ID NO: 965088 - protein, 62 aa, Homo sapiens
ESLKAMIAWEWTIEKGGVCEEDKTDKKKTRKISHSAQTYDPREGYNLQPPDLRAVTLFRELQ

SEQ ID NO: 965089 - protein, 79 aa, Homo sapiens
VIVESPVNDGFCSLLRWQREGREGRVHTERRQEHVGRGSRAGSHPVHVQLLNVGEGRLSGGVPAHLASDVLEYAGGPSF

SEQ ID NO: 965090 - protein, 50 aa, Homo sapiens
ASITHRYQIWTTVVDWIHPDLTIVIDILWTTTLYFSMRNYNAGTYQNDIA

SEQ ID NO: 965091 - protein, 34 aa, Homo sapiens
RASVCCILRSEASRSFCPWHRVQRGSSGSCNAGD

SEQ ID NO: 965092 - protein, 42 aa, Homo sapiens
TYCPVFTGRGTYSNRGNYNQRWNAQQGGTTTRTSEDEETILA

SEQ ID NO: 965093 - protein, 44 aa, Homo sapiens
MGAGHDISPGRFPEALDELRCPPFLQPLDLTGKGWPGGTYALDF

SEQ ID NO: 965094 - protein, 76 aa, Homo sapiens
MIFVGAVDHRLPALLVYHSSQLHLLAVHLNVRNIVLKDSRDVDLRNTDPCSKTTEECRSYPHGTIPQTITSLLFVI

SEQ ID NO: 965095 - protein, 70 aa, Homo sapiens
VTPDFICRRHLPCLFTEETLIQIRKQILFSFEEGGNSDHAGTLLNRPHRKGEKVGFMSRLEAFGTTNLRS

SEQ ID NO: 965096 - protein, 60 aa, Homo sapiens
EAPPRFTVIKQSGVDATFQGPATGSCLVRSWNLVRHNCWDSTWLRNAQDAKGGRIIGGLM

SEQ ID NO: 965097 - protein, 41 aa, Homo sapiens
  misc_feature (34)..(34): Xaa can be any naturally occurring amino acid
NICTAALCRVGHEDVMDLAGHLTNYELVCVWVYXDALNSVI

SEQ ID NO: 965098 - protein, 137 aa, Homo sapiens
DISIPEAYPICSVTFGEDPGTDERCCDLVVSLRIGHNFGTTPRSSWFLLPLLRSLELFRRLQKIFNSAQTGSFKQLTVKEAVLNGLVGTEVYNVVLCRRDYRQAGPSLAMMFEDQSLTSDYIDLLFECCRTMCDQTA

SEQ ID NO: 965099 - protein, 99 aa, Homo sapiens
GLTGGFALYEPSPMMMGLTEKHRAFTHFLTGVRTIIGSMYTETALIDTLIYQLSTSHTEKNRSRQDIVATLGATSDYCISLACSCTAAYATLHLLGQPQ

SEQ ID NO: 965100 - protein, 52 aa, Homo sapiens
MSISGQCLPLSVFHGTNNSIPRIPFTHTFKGRGLSSKYYSLSVPSYGHTMQV

SEQ ID NO: 965101 - protein, 84 aa, Homo sapiens
  misc_feature (78)..(78): Xaa can be any naturally occurring amino acid
MPLSCFLWCNWTYRTSALRRSSVHATAVLTPTRELCTDPAEREFSAAARREQSHLYMEGLGGTLDKYCDREYAVKTHXHLCWRG

SEQ ID NO: 965102 - protein, 33 aa, Homo sapiens
MQPITRYYQSILIINNHNGYSNNNLANYAPTCL

SEQ ID NO: 965103 - protein, 76 aa, Homo sapiens
MKKNRENTREQQNNTNTTKTKETELVQAAAAGGAAPGGARPPPARRDEGRRAPSPSPTQTHPTLPAVMRRARPGGH

SEQ ID NO: 965104 - protein, 245 aa, Homo sapiens
DVVCYNDVLDLVVSYLLCVRDEQCEPCVVANETVADVVVVLLQELNVDDVYLVAILWLCRVPSVVLLVNPFLSWLEPFGDATGDIQWPSPESLPACLPPDTTLPLPVILMSGRDAAGTDVVIIADGTASMPCDAGCDAHASSTIVRDYPLAVLTSQGVSEPLETECTVQMGELNLEVHPGATVSFHNSNVADRADSNSARIVQPALGPPRDNERSPQRCNSTLTSFWRNFHTAHYTLPRTINLGP

SEQ ID NO: 965105 - protein, 112 aa, Homo sapiens
  misc_feature (15)..(15): Xaa can be any naturally occurring amino acid
QRQLQPLAAHSASPXSLGDGNNSSKDDLPLHEAAGNSLFSYFHARWLVMFDVDSTVISEEGNRDAFFTRGNFRGKRHHWLNSSANHKFNATNCLNGYYHWNLGKRLLGEQPG

SEQ ID NO: 965106 - protein, 79 aa, Homo sapiens
MSDVPLREDVLEQIGEILLFGGSSQAVMLTQAKRLSYKAGEVPKFTPRYVFGKKGSAPPRENGGFPLGVSKKIFPRANK

SEQ ID NO: 965107 - protein, 183 aa, Homo sapiens
SLESKILRATCITPHPIKKKQKKRTKQHTRVWGGACRAPGREEAFREKPHMRVRGRARGRTQRERDIRAMKHEGTHSAVMSPKERETRGGAQRAKRRGAEEIFSPRPNRQQKKSAHAGGRQKHHEKRALWQKHKISPAKRETRYHGESHTNQRGTSSIHKERGETTKDAGRTPAKHITHTSRP

SEQ ID NO: 965108 - protein, 242 aa, Homo sapiens
DFKYTDTLLLVKFKHVLPAEILSQITCNNLQMPYPFEHFLFSMSYTFNTCSAGIFATTCPILLNNMCPLIILSVTCQLSATHGFRRKPRSIYQSRIPVTLGFQRHAQTSNQCQLHETLATHTQHNTHTHHTHTHTPTPFFVAAAPRAAPAKNPSPKHTQPRAYASAPRGPPPTTHYPLHNPPAQPSTLPTTQKTPCGTPSTKRAPATQLPPHPTYNPPRAVHHSPPPLTKHPTHGLTPPTTM

SEQ ID NO: 965109 - protein, 129 aa, Homo sapiens
MGIILTVTSRALITITSRDSIGPITSSLYDLCLLKPMDRLTCVPNHNKQADRSLEKFKGMRDPSAQSMALKGVTFNGPSISRMLNDDSSVAKGPTEVLNEQRKPLESITVWDNRRLIPRLLSHVTQEGP

SEQ ID NO: 965110 - protein, 49 aa, Homo sapiens
MRRRKRHQSRKESSEREKRRRERRGTRGEEREEWGGSATETKTDDAQTT

SEQ ID NO: 965111 - protein, 96 aa, Homo sapiens
CDHLEEYYPAVGFLATVQSVGVAVLPETVVNESIGMSEKAADKMESNMRAEEEAFASLSNFFSSRICLQCSPCVLRVYLAYCTIVTMRQFQHRWAM

SEQ ID NO: 965112 - protein, 161 aa, Homo sapiens
  misc_feature (116)..(116): Xaa can be any naturally occurring amino acid
MGAHPLDTRLSHRVGLYSLLSLVPRVVFNHGLPPIINYCSAEMISPVACCAAGHKEKDELFLAQLVAHPLHWGGPCSLLFSATMSAPVRGLHYTVNSPGVPASPSSGEWMVVPYTXSISSCYPHCPLVVWYPSSQEMHRHRVSGAMFLCTTPGHLLLGGPQ

SEQ ID NO: 965113 - protein, 82 aa, Homo sapiens
EHGHKNHQQSAGGLNSTVHQEDNVLWSSVIYPKMRGWFSTCKSINVMTSVEEGRDFMIVSIDAEDVDRFWYPFMMKKKLSAD

SEQ ID NO: 965114 - protein, 106 aa, Homo sapiens
MSHHTHKIKMIGDINIGPEIMKLLEETTGEMFQDMGQGKDFVAKISKTKMDRWDYIELKGFCKTGETVSGVRRQSVERENMCRLFIRQGTSVESIQGIQQQKENPF

SEQ ID NO: 965115 - protein, 70 aa, Homo sapiens
FLERHNLPGSVAGIRNPSYLGALSTDESAGNPGAPRFTEPILCPGNSTWAHEWNSIVHNNYIYKSNGKLI

SEQ ID NO: 965116 - protein, 116 aa, Homo sapiens
MCGFRGCLFLVVFRCARPFSYVSPRGSWVPTCTLRFPGTACRIAYPELSEMSGSASQCLTDPRSFPPAAPIAALRHFFTAPRLPQAPPPLQRRAATRRRRLSLVAAMTTASTSQCA

SEQ ID NO: 965117 - protein, 35 aa, Homo sapiens
GRARHSLVVSFSPPLRPSFLSFRPVDVPRYPLFYP

SEQ ID NO: 965118 - protein, 118 aa, Homo sapiens
MRPCNSLFIEMVRQYLWLSIVLSFVEINMSHTPRPPPRAAYIERKMVSPHNIGVFFARPLRHQFMVAHHAPSLLYCGILYQQYKRFLYGAHRVQFPRVHARGASSKKSAHNNRYTANY

SEQ ID NO: 965119 - protein, 36 aa, Homo sapiens
MRSNHQAADSVSGSHGVEGTVASCVGQWVRHISPGH

SEQ ID NO: 965120 - protein, 99 aa, Homo sapiens
EDEWPGLSVTNEEIFGSDADSEEMPDSIMRTEDRPKCWLVTNDSDSGQHMGVASRYPGACECAAASPFPSVDRSLGPGRIGQVIACKPSDFHVKADSDT

SEQ ID NO: 965121 - protein, 111 aa, Homo sapiens
  misc_feature (63)..(63): Xaa can be any naturally occurring amino acid
MWKLLSWAEMRTRIYVERNVETPYKWHCENAPVGTPVCGLPQIYVLRAPGKYAPVPRILCVSXGREISRNVISLRGSFVRRGVYTITEDPHDKYVCRYTNHHVCLCRYIYM

SEQ ID NO: 965122 - protein, 273 aa, Homo sapiens
  misc_feature (84)..(84): Xaa can be any naturally occurring amino acid
MLCTKKCVGRPGVLCAHTSSVGRIPPSAPPGKSSNEKTKGGVCCTTGAEKHSDVGGHMGAGITFSSFITTPLLFLRQGTLLVLXRGCGEATISVVAGCCTPTGGQDNRVLGATLSPILFPRGGFPRSSSFSPPEGEGRRVMEGEEEKSQAPYSPQVGAAGKTQRVSSNDGGHSYSSNFKTVFPQRGERQALFCAAPQGCCNHSGVGSFPKPECWAPTTRVSGWGVGVWSAQLCLFVLGGLTHRRRGANSGGLWQQGPFGVFLGAPLLRRRGCL

SEQ ID NO: 965123 - protein, 337 aa, Homo sapiens
PAHMAENPLHGPGELAIINSVYPVEDSTLHLGCCRDCDDDRLWMCPPCCLCEPWPSGYAVHSALCEAAYPGTLRPLLSAWQMSSSHAAQGLLRTPYAIKEEGTSWSVVAQLQPLIFPACCINQTMSSPIGGSTQPTTNNKKEQHQNTPFCTPAGTEQLTYIITHQHHNHHHIPNKYKIFIPKSHKIRNPKYKLTYSTLKLINQITPTRKQQHTPPRGSHTAPASHVTTHKHNEIRNALSGDPPEEENQPTQRMHKGHTTQNHNTRPPTTQRAANHEDERGAGNGARKDASDGKATKKTQTAEDANEHAGKETRSPDNKAQTTSTNESPSRTRTRRRE

SEQ ID NO: 965124 - protein, 525 aa, Homo sapiens
MRQSGMGVTHGPKYSKYKYPAILNTWLWVRWLRRLETMYLSPRCGRGEGVHVGVNSRVAFEKRDRYTLLCAVGRNMALCGISCGSERQHPTLSSRHCDSRRPPCEIFSQEGLSQDETQGSTPRRICEICDTLVNIYLLSETAHKRRYFVIFSPTTHRGEISLSECVSVYKMLCVLWGRHLSPQEGVLLVCALYVRVSLCAEDVERGGFCVPPLCVVYLSQCLRGVLPHSHRCVARKKCVDRRNKGARDTVHNTESVPHCGAQNINQKEKTSSNIWVWLPPERFRGGSPHTRVGPPHVVPPQKEEAPRENHSPAETSPRDKTPPIRQRVYPPRGRETNTRTRMSLIEEKPPRDEETLPLRDGRRSAEHNTRVAKDRCWWSPQQHTRRGEAPIPRNLEPPDFCKEDRIQRAALSHRGEPPTGSRKNPPKEFKKRGHTPAACVNTTSEKKLLQSPPKRGWWGGDLAEPHERGDPRKRGHQISEDIATTTEKSMTYTDTAEKHQHNQAETSCRTHDGPPANYDKDVYDK

SEQ ID NO: 965125 - protein, 293 aa, Homo sapiens
MNVIQNCPIDVRRPLYKNVVLSSEAPPCSGDCRDVRTCKRDYEGEWLRWLEVLRHQQRELTRLGGSLPEACGVSMVVDASHACAHAVWFGGSDAGLDSQSSFRSATPKKDYEEYGPEASAGTTPSLESCPSVCLERVVNDGVSVGEQVSFSNPEKAPSVNSDVVLLPSSVLALAVHEARAGPSVQAIYAVCRALCCQLCPFSRPPAISLSLLLPSRSLLLTISILEVATVDFELVVVTIFEMGSPRVSGRLGGRAFPQRWYKVPGLNGFFRVSRGPAIRKSWGSRGGLLPTCV

SEQ ID NO: 965126 - protein, 168 aa, Homo sapiens
LVNGPCDKRFATSEELLSHLRTHTAFPGTDKLLSGSPARRLWPALPAAAMACHMHIPTSGAPGSPGTLALCRPHHALGLQQPAYHALTPMSPAFPRLDAPCAGALTVDLDRYVRPPLSPRRNGRRELTRRASGAWGISEGGREGERGTTDGRGGGEESRERRDHGPGW

SEQ ID NO: 965127 - protein, 131 aa, Homo sapiens
MALPITTPASRGRTKRDAPLTGKKKRKSPSPRPWGQEKRVVEPGDKDVRGVTWDEYYRCGTTRTFIDELTCRFKVPHEWCPVTLGSELRRSRVLTIRGLNRGGSLKETGCSGPHGKNLGDKRGVSKRGRRM

SEQ ID NO: 965128 - protein, 65 aa, Homo sapiens
LYEDPREYSPMMVKGELTGCPPIQVRHCGRSSELTDVTYHVTLRLRCGDNTYRYCLFRTNIGRNW

SEQ ID NO: 965129 - protein, 37 aa, Homo sapiens
MLRFELRRLQSYINAYRNEDIFIVKSSMQAIKHHWES

SEQ ID NO: 965130 - protein, 41 aa, Homo sapiens
NGVLNGSRKSVKSYRTTLDRLYSDSVNVLMNYRASFQTLRE

SEQ ID NO: 965131 - protein, 85 aa, Homo sapiens
VSTEGMELMNYLLTPCRPPDQCPKYQQGEARRTWTLSIAERSRAQGISANQFVDSRFYLLLDLITINMTSISSIILIELLISLSA

SEQ ID NO: 965132 - protein, 69 aa, Homo sapiens
ESRVLDDSLGLDNEMDLSLRLLDCVTTMFMVARSTSERLCLISSLKFLKAATLSSTLLPDSGAPATSAQ

SEQ ID NO: 965133 - protein, 289 aa, Homo sapiens
MRVWCGVSVGTRVCGRGRLYVRDPVYTQSRFSHTLVALWKEPIEISLQRLSRGEISRGDESPETRRGACPNKEGGWVGIISRVLYPPYRDTRVAPPLFYRHVCNPCVVCGDPPHTGAVCGAHPMCVISSTPQQKDFFHTTHIIQDHNNVVAFLTRRGDIIPVEEHTRRGDYYRRESLLYSPPICRGEWSHLFIHTSLWLLFLKKPLLIDEHNTGLPCVAWWTTPGGGDTPWLFRHQNVVRPPVVVLTTLSGGWGTPRREGSTRWWRRPGGAPGWGGYSPRGGGRGPTVC

SEQ ID NO: 965134 - protein, 39 aa, Homo sapiens
EGNILPWTGQLYQLVRIAKVSGYRRTVWVLKKYHIDLDP

SEQ ID NO: 965135 - protein, 225 aa, Homo sapiens
  misc_feature (166)..(166): Xaa can be any naturally occurring amino acid
SHSLSLTLSRLASIANLKGPAWTTMAYDDSVMKEDCLDGDHTFEDKDLQLAESNERKNVLTKDFLREEEEIAAQVRNSSREEVEEDSELYFIGDRNRAEKKRKHSSDDYYYGDISSLVEIVDEERKREKKSPAQQVYVIQLQDLLESVSDPHVTAELQCPPKKTGXEILCALQAITESKKEHHRNEKSVASSGELPLEDGVSHKSTKMKPLYVNTETLYLREPDG

SEQ ID NO: 965136 - protein, 432 aa, Homo sapiens
MAYDQTPSTPVNAQYKTETSILLQNPTYGTHLRSRIQCRHTPNSDSTANQLSRTPTPPTQTWLRNSNTAHKRTTDIPTPVHHELCGDHNNRKIRVAQTSQELQAHSSKFSTGNSTQYQIGQDSTLGDNRQTNSTNKYHQGRKKKRTNKDAKGEIQIRTQKNAHTDTATLPKPLRHQHTQNRHKQITDQPPTPPPTTARATHTHRPRARTPGHDGKSPNHFNANPYIPQADRHTLRHPATHHERTPNTHTPQHTANTTTHKKGTQTVTKHMTPTHHDDPPHPHTTTTPIHTQYTTNYHKQHHPSNYLHHPTTPQTPPQHNNNNTLYTKPHTQQEHEEKDKQPHAHDKQYYTTTLTHMHPQRNHPTTRTQDTRQRKRHRTKTETITSRTSLLALSTTTNARHPHDKPGPTTLEGHDTDTDQLSDHPLPHKHHNT

SEQ ID NO: 965137 - protein, 139 aa, Homo sapiens
EEDRKAYGATWATATAHRQVDRKLPRRPRYMLVGLHHHRINVRQIPPRLLWESWYEGHYHLNEEPRASAQSCPNLDMIVELCGHVKQQRVNACVEKSKTWGCLPSVDVSAIGLLQSSGERESSRNAACHREGQILQQKS

SEQ ID NO: 965138 - protein, 292 aa, Homo sapiens
PECRVDENPFHKKKIESERALISQCGKTVVNVSYRPAYDQMNLNTRGNQKDTRGLHVSVNQVAQLKSFPSSILGSAYHASQGARFLAQTVHSHQRRAEMSPDGLVRRAKSVTHASNYQYGSLWKTEANTDEISSHVSNEAIDFIDCVREKGGTGPRSNGEAGDLPITPPPSSMAYLMKIKQFRLKEAFDDIRQRRNMVSPKFGFMGQLLQYESQKFGGVQRDYMLRGPPIVPKGEADTVFTDRAIPRQSSTGGSGWLLDIPCLDAGTLVLTNQEPRDQKGLVNSHRVTGWRT

SEQ ID NO: 965139 - protein, 219 aa, Homo sapiens
MDLTFQGAPPPTKATTAVEAPASTRGVPKAPQVQRDPAFGVKPTHRPGKPRPHTTGGPLGLPTRKPPSGQRATRSSPPKKGLGWGPTRAETLTTTHGRSTPLHKRNPPSQKNTRTQNFVGGPRKIPTPLKEQAIFSDPPHISRPPLCQARGWRDCVSGLPHRNPPTKGPSQQTPMCGPTQKVETHRGAGTPHTALSPPRRINYLSPSLLSLINPPLHRG

SEQ ID NO: 965140 - protein, 41 aa, Homo sapiens
DVCYLRRGKWTRKSWNSKARGENGIQTRTVYRREDDLIPCY

SEQ ID NO: 965141 - protein, 118 aa, Homo sapiens
VSSPWGCGPLAAGSPGGCCLGLLVANTDVFLSKPQKAALEYLEDIEPENTGEENARTIKAKELWKKNGAVIMASVGGRGWFPSCLRGSCGSVLPCKSMLVPAWCSPPIYADGRGAHQD

SEQ ID NO: 965142 - protein, 91 aa, Homo sapiens
PAGPVVRAGARDGDVSQANELKDREALMEAIDFRRLRNLRSPGGGFLGLAGLDKAWGPGLAGEGGTLLVAPEHWVWRNPPKTIYGDLEERC

SEQ ID NO: 965143 - protein, 92 aa, Homo sapiens
  misc_feature (6)..(6): Xaa can be any naturally occurring amino acid
  misc_feature (24)..(24): Xaa can be any naturally occurring amino acid
  misc_feature (74)..(74): Xaa can be any naturally occurring amino acid
YRPETXQEKKQRLVARAEKKAAGXADVPTKRPPVLRAGVNTVTTLVERWSSAGGDCTRRGSHRAGVFLPALCRXMGVPYCIIKGKARLGRLV

SEQ ID NO: 965144 - protein, 67 aa, Homo sapiens
KDSRARFGCWRLQSEFISKQLEGTMAKCERTFIAIKPDGVQRGLERDNIKLLTEADQRGGPPLYHPM

SEQ ID NO: 965145 - protein, 108 aa, Homo sapiens
MAPAGVQGTVFLLALISHYASTWALTAHFTYLTNDGRGETRMPRWYRPFAEFGIMRFYSDRGDSAALVLRCPDAHMKAMYLTSDLTLDPSNVDSLFYAAHGQPGPLRM

SEQ ID NO: 965146 - protein, 80 aa, Homo sapiens
SASGDRSASYQVSHEVDLLCTECLAYGLQFNLDFMLGASTSFYRVTNSFSAAVRFLISSILFILNSPPPCPACFSAFLAT

SEQ ID NO: 965147 - protein, 143 aa, Homo sapiens
MTLGSSAQESPISREYNELLWAISDSDYYSDDINRAVCLFPSIDVLKQNTTAASMETCTKRWGQVSSRDRVRIACLFSLLPGVPQNNKKPGVPKTGLWLCGFQMNYGQVQFDSGQCHEARGSKKKAGKTRIKGALKGQPAREF

SEQ ID NO: 965148 - protein, 139 aa, Homo sapiens
RTDILYQRNTMFSHYVNLVALIPQSLIGGLPSPGLTPSPWCWVCSPAECQGLGSWRGLLSAMDIPSFQPMYTSGPRSKVVFISMKKGLQEAVDELVVPQHLVLQGCVQLLVGGTWEVKGLHHINLFCFTLFLCMYNISS

SEQ ID NO: 965149 - protein, 71 aa, Homo sapiens
VVLTSVIYRWVNTPDEDMEELGPMNILWYQTRSAPLHQDYGVLKADEGIIVQGPSLSLDDRRDIRSCEYLL

SEQ ID NO: 965150 - protein, 44 aa, Homo sapiens
MNALENHNSQIQLRCSSPQSILVQGAHRVIAEHQTTQQQMKTSQ

SEQ ID NO: 965151 - protein, 281 aa, Homo sapiens
VDDVSSDDNGQDLTHIQASPLTASTVRPQEPTCAWALVVHGGVDWHEEAGLPLPGVKEMYKYLHKNNRWWVDRQHPKREIWTYSIRDCRWEALTDLWLTHSLKALISHQLPGRTVSNVLVTTSSDKFPALVPKVLASMAWGLCCRIVEHLQCNQRNGKESCIRGGIMREIRLEKHVYGGDGDGVEEELRYEKGVTCLSGGYPARRSGGTEARPGVLEVIDRQDQRHLASDILTFETRIGFIPASSSRRTPVDAECGDEEGGPKAERVSVSHLKAGFEQLGF

SEQ ID NO: 965152 - protein, 34 aa, Homo sapiens
PTQYKLVSDTIGQRVDPLDARLFRDHNRYETSCR

SEQ ID NO: 965153 - protein, 529 aa, Homo sapiens
KFKDHGNPSKTWSLSKPLLTSTLVTKMSTKLRTEACWLARDSGWTAKQEEHRNFLPEPQNSLLWPHCAATRLALTSLDITWLQLKRPPRTYALLQESSATLDNTPPWKNRTDTTCAYLYSTTHSMRALHTATPHTDCATIAPASYHTWRDIGTLPAPARNAHSAPPTLCHILETGDTGTRHNEHHAKLCLAHAHTFAHHIYSCSRNTSSPTGACLTAMSEFHPERLLAITLLHNRIHVDMHTYKYTFETVTNTLEHLLEEALGYQLQYYPLRHSGDVSTQFRVTAPRNLDRPLTNNGEYLEAFADPHTMRSNPDVPLGVPLEPNRHNNNWAHRNTAKLGQNGDTQHNHRTLTTWRRTTPFTAHVLDDERTLLHRGIPTRTPNTPNFSFAHSLGVEHKRTLGDIISYRCQRFAMKEPRRNLLTTGYDSHQPYFGMARYLSETEQLSRNKSYATIAHQAHGNQYHRPHAKQDTITHKGRRTRYHTTTTWDTKGKHIEETNTPVADPLGKTIDTPAKVETDGPTQGDNRTRD

SEQ ID NO: 965154 - protein, 103 aa, Homo sapiens
MLGYIQLHKGPIRCMAPYGTTDNPSADRHKKLFTKEPLETVHIILITLYISILDLRLVTIRVFYVVKPPLIPDYPKATLGSDATRHKCHLDEANSYASSSYVR

SEQ ID NO: 965155 - protein, 122 aa, Homo sapiens
STSDGSPVCVRGISSPTMEHLTEKMKTTIQRGLVLRNESCSENYTTDFIIPAVFKKRAKAVFDCRKNVLSHMQQGEAPSPFARNFGTRNLCQSYGVDHLQNSRRPGAEEKNLTTMTPYVCWG

SEQ ID NO: 965156 - protein, 303 aa, Homo sapiens
  misc_feature (112)..(112): Xaa can be any naturally occurring amino acid
KWSLALSPRLECVVRLSSLTSASGVKRSPASPPVSGYRRCTPPPPRANFGIFEYERGSHGLWVRLVLKLPDPRDPPSIGLPKLVRYTGVSHRHLCRNTILKLPEDLIRAPHXFNKDHVARYITIPRTRGNYHCVNTPAHTQLLTGAPHTPQESHSFRYNDLAPRTRPRPLAPRPTTPTATRHPTPSVNAATRHGTRNTHVSPPPRSLQTPTDPPKHTIRCRHPRAIHNQHTLTPNAPRMTSAHTAQSGPQPNHRHVTHTRQKSPTTTANGQGTSRAREKPHPPATRAPRTSHLAPNTQNPPQP

SEQ ID NO: 965157 - protein, 265 aa, Homo sapiens
MAFLMAYRTKNSRLYYDYARGPKVVGPYAGYYNPSLIAIETLHQRAPKIRRLAIYHHPHTISLSPTVRRLTNRIFYVMNSPLTHSTQNRRVVNHSDRRHSVYMRKRSSRPTCYVHQVCLDHGLERSQASTELKSLIRVDYVRRLRYSAHTIQSYNIDTVLARLRARLRLCMTMNTDIKEEPHTYSGPHSYTLLLGLIDTDKKISDWLLAIMTRGHKDDIYPSIIYSQEPIRMTPLRALAKRGGRKCRSHGMRNIDFTCGGAPFCP

SEQ ID NO: 965158 - protein, 81 aa, Homo sapiens
LNEVVWSFQLLLMMGYLVHWLGWLETMACCTAVVTLTSMELERVGDAAREDGLDLRPRERTGVIPWDAPSGRMTFSLSSLL

SEQ ID NO: 965159 - protein, 119 aa, Homo sapiens
MVVNPRLSVRMVAKRLPGCKGMESKSEWSRGREGRQVKSSSYTEQRRCGDSLGVKPGIRSTSILGYHYDSTMGLLGAGEACIRISEGWYVVNTYRPNPMQEKRRDSCQRRGGRARSVKT

SEQ ID NO: 965160 - protein, 136 aa, Homo sapiens
MAVCAMVPDDLPVLSSLAKVVSRLVKVDDKLPMRHVRWHACDISTKAQSGGIAGDLRLGGTPKILLTYHGQLQSVKGHYPKHARPAVVLNPGYSSIPPVFPGSDLNWKGEKTNSKDDNIRAMQGEVIVCYKGAVWP

SEQ ID NO: 965161 - protein, 97 aa, Homo sapiens
MYRIISDRNSRRSKGSYVESVKISCATGMGDWQRLGEAQHWTGPRRKTVEQATEGRGRAQGARPIRRGRDLAWKRKREQQAQVGNERRRKGGHRKGK

SEQ ID NO: 965162 - protein, 78 aa, Homo sapiens
STYAGYSMPDHMKRTLDGKDALISSYTKYELICMYNREQTDVGWKAGQRGAPNAERRCFKEMGKPELVMFLPAIRRPS

SEQ ID NO: 965163 - protein, 43 aa, Homo sapiens
SSVPATVLRHGGVIPGLVLVNGGATVLRHGGVIPGLVLVPSTS

SEQ ID NO: 965164 - protein, 214 aa, Homo sapiens
METSNLSSLGGVYHLVGDGAGKTPRGLGPSNVLAGDPGGAWGEPPSWGDTLLAQEGPLARRSPGGPPQERSPSKVGNLGSKSPRLSSWGKGGVPLLNWSFVENPIFSPPSAERHPEPEGTPALLFPFFWAWVREPVSLGRIEPLSLENSHPQQLHPRGDPTSPCSALFKKGSFKGGHPLKNIRRRVSWRGLVPLNLCVITNYLGRIFAVSWPPG

SEQ ID NO: 965165 - protein, 548 aa, Homo sapiens
SDQSPGGRRGPLPGAQQSARLPLSPGPHKYNNHTPTHITITILHQYTKTTISQRPSIQHKTHNTHTSHTTINTTTTHNQTHPQANNTPQTPPHKSHTKPTHPHTTHKTTNNPHHTTHKQTHQPTTNTENTTHQQTYTTSHLHTPPTQKKTNNINIAKPYNNTTKHPNKHPPTTTNPPNQINNTQNHHRKQQTTHNPTSTVKPPTTTHPHPPTNTSTNKKTKPNKQPQQKPTDHPTPHPHNTTNTNTHTYHNHKQHTNHEPTTTGNQKTHTPRTNTNHETHNTTHNRSTPQPPHNPPPIPPRTTQANPQHHPHKHNTPPPRHTQLTTRPAKPRTPPHQPTEPPRGTTTPTLTTTTPAHDTDHNITSTQPPPPTQATHPTTTHTRQPPDHTPPTRNTSTNSNTTPPQPNRTKPPTDPAAPPPPPPPPTPPHTHTPPQPRPTRPTADTPSNSTNALNTTHYDRAHNERQNTAKDNDKTHTTQTPQRPDHNQQKHNHRPHQQPAAPARAGTAETTEPSTGTPPRPRETRTRTADHRAETKNRPTAQAHTHHH

SEQ ID NO: 965166 - protein, 290 aa, Homo sapiens
SQLPALGENKKVIVDFSSPNIAKEMHVGHLRSTIIGESISRLFEFAGYDVLRLNHVGDWRDPVWHAHRSPARQISRLSNSFTSYPADLQGLSIRNLMTEDLITEDGTLQDSEHISCAEFCSRAKNTRYLQKACEALSVIVSRPRVKHKIYDALARPPFNQRRPRDIPLYQRMDDTDSPVTTRHSRTRLRNRIQPPAPRLDRTKTTHMGDLTGHKRVVTKSVHSKPTKDQTTSSWSAHVRVSETTITSNPDLDTSKQQQQPKPRPHQQPPTTNNVTRCTTKQHNHCNTHNH

SEQ ID NO: 965167 - protein, 274 aa, Homo sapiens
MGKVKVGVNGLGRIGRLVTEDCFEARGKAVILLPSMTTFIEPQASMVYMFQIVIRTHGQIPCDTVQRLMNGKLVINWQIPVTHAFQEEIPPKVKWGDAGGSDTVSGTSYLACTSSNQWQKAWGIQLCMGGSQKGFISLMSPLVRDAPMFVMGVNHEKYYEQRSRSVKQCPPCKHQLALATLAKGIHENFGIVEGLMTTCACPSLAPRRLWMSPPRKLWRDGQRGLSRTFILASTGRCQRVCGQDIHELNGKLTVMAFRCPNGNGCQSVDLSLTT

SEQ ID NO: 965168 - protein, 119 aa, Homo sapiens
YYKPGLLLMCFILPTLVPWYFWGETFQNRVCAATFLRYAVGLNATWLVNNAATSSDICPYDKNINPRENILGSLGAVGEGFHNYHHSFSYDYSATLERALFRVALFTVDFSECHIFEIV

SEQ ID NO: 965169 - protein, 115 aa, Homo sapiens
MGARCSEIRDCHRLPEKDENLDLASLTCILRRYLAHSVMTGDSRAVLEAHTWVQVNERSPGALKILSDERGHGKALMDSTSSFIRMTHSDYPATRDLLDGMGVQYNMSGILRKCD

SEQ ID NO: 965170 - protein, 40 aa, Homo sapiens
  misc_feature (16)..(16): Xaa can be any naturally occurring amino acid
CTKSSLVVREMAWSSXQEMTLKSYIYSGLPPLVPNFSIQL

SEQ ID NO: 965171 - protein, 67 aa, Homo sapiens
GPFQRRRLICPKAAEAETTDETLCVLFFYNPTNAQKKKNPNPTRERNTPPTPTLCGKKRGCAWGETQ

SEQ ID NO: 965172 - protein, 123 aa, Homo sapiens
PSSFTKWIPGKDAHSTLLSRKETSNLYKIQFHRCKAWIRWMPTTCLTEAVLPKLHPGMRTYPVLTRGQLEHVVWGAGPGSAPCGDSQVATPALMDCSEQALKTIMEYLGVPKGAEPECCLIQE

SEQ ID NO: 965173 - protein, 146 aa, Homo sapiens
  misc_feature (103)..(103): Xaa can be any naturally occurring amino acid
MCEKACAWRECTLDSSCGDTKIAKDFPNTSICSKNIRIPPDGYELETVWAYAMPRSIQLACAWHTLIRQTTNGRLACLADTLDATSEIRWYARRQTHKCKAMXHRKAFVGATSYGCLSSLSGPLVAPRNLRRSMFKAHAIALDRGA

SEQ ID NO: 965174 - protein, 216 aa, Homo sapiens
  misc_feature (118)..(118): Xaa can be any naturally occurring amino acid
  misc_feature (148)..(148): Xaa can be any naturally occurring amino acid
SGKETAKELAQRGARDIFSFRDVEQTGECAWPTEIQTHDRGTMSGVVCGNWTCLILSSIRAFAYGLRELEDKASAPRILIKQMQEVMSVSCTRRSADGFESAHRMSDQLGSLRSLIPXVLLCRELNTDIRSLESEGYGKMVVFPIDIXRPGGTESSLPVNRARAVDRFLDRCEGHWLYVSACHRLARYYSLLVSARGTWRHQENLYNGRPRDGLRE

SEQ ID NO: 965175 - protein, 112 aa, Homo sapiens
HFQSSASSSTEENSFPLSLPNHYQLQLKSLGASVISDPISAYPQIGSGTFLQSNAFSLFLVGTLKQDLQGELQHVPTIFVSAEGPLGKSHSTPLVGRLLCARCIHQLEATFI

SEQ ID NO: 965176 - protein, 152 aa, Homo sapiens
  misc_feature (102)..(102): Xaa can be any naturally occurring amino acid
MSAACDRSRSRSYDRSVASAVIAVGSASRRDLTDGPLLFRRRDRLLTREGMVNPKAVRCAREYIAGRRPIVTVLSRVLTGGAVSVEVIDFGKSEERHREQLXARVCHEMIHVHGIDVGQFEIGHRTLYSRIASGNVEPVVEAFPRARKSRTH

SEQ ID NO: 965177 - protein, 74 aa, Homo sapiens
EAADRQSLLEKHMRKPCPDPAPVQLIVQVVEQAAKPSVNEQNQVQPAPDNKRNLILKLLALKVAAHLKWDLHIL

SEQ ID NO: 965178 - protein, 137 aa, Homo sapiens
  misc_feature (115)..(115): Xaa can be any naturally occurring amino acid
LGGKFSLCHQGGVQVGAMSSCFSVEASCVFGPQCGASRAFPLFQGRFVLLSSGLRELAWEHTRCVAPPWPAGIIVVSICYRINKARCISSVCVCGTRDVVSSYLSQTPLVCISLXTPLCGLSLTKGVCVRDYNRGCV

SEQ ID NO: 965179 - protein, 70 aa, Homo sapiens
MVSTGAACKFERSRPGLNHEQEKHLKGEENAHKRGKYCKDAHVCCFTGVVKNMRRGVPPKDTRTRRNWSG

SEQ ID NO: 965180 - protein, 139 aa, Homo sapiens
MVTRPGVALYTEWTLRVPEIAKVLRRKRNHGLCADPISGQALWGGDIRMRQPRGRISLTLGLASGILFGGGLTIVFGTWGGSPFWGAISFSPMGGTIVFWQGTKKRPVGIQKIETISKLATTDMETQRFPPRDQISLTI

SEQ ID NO: 965181 - protein, 220 aa, Homo sapiens
GKPTGSWQVQEHETGDPRMKPKNVSRDLGLAADLPGGAWKEQLHRSLGCVTASRNCVVISDVLSRVDKHGPPAGPWLVTWMIEKGPVGWDHVACVPSDACREGWWSDCLLSRSPGMRPEPGAVGSNRAVPVGAIRPDNANAQSGDLNTAWLAPILPDGDWRDLVPSMHEGSAGPEGLGSIIGLNPLACCPGERNSCGALDALAPARLLGGALQVVHSQAA

SEQ ID NO: 965182 - protein, 127 aa, Homo sapiens
MLTHDQENSTKQHWGRPNPMNPRPPVRRHSKTTHGGSHFTQSLGGRTNLIQTWHGIGEGRNGSPEGALKKARSPRQITEGRPLVLTLETRHGKDGEIRGEGKADTAAANKKTSVRGGGRVAQSSGEQ

SEQ ID NO: 965183 - protein, 233 aa, Homo sapiens
MQGLRVLLEARRFQGMCCCLGWVGSSMGMMPGPSNCSISHDCQGGESEELLRRDDPCIQQIYWNVMDSSEYTNESRSMGSTSYVTTEYHSNAEVAQLTVMYRGDIRDADGDPVISLWTRWVRFGIHVPLSEYRRIAGHVYDWSGDASSARAMLLKGSDVCVTLGGQRLGGIHPALEKLATSAPKWENGKKSLSVYCVQAVHPGYHMNGAGEKHNGRQRGRTTGKRTVRKGSCQ

SEQ ID NO: 965184 - protein, 75 aa, Homo sapiens
QLGPTFRVELVLIIGTHFVPGLWVISVPTNIWMNNATTHEIQCCSTSSTSNKYKKGDQAPMLLGLTDDLAEHVFG

SEQ ID NO: 965185 - protein, 106 aa, Homo sapiens
MRLEVFSDLPLPGACCVDGRRASAVRCSLQYLDWRGPSFLLVRGLVLERLYMCLGTVWACASEVSPGLIEGPSPLSGGLSACTYAATRKGSFIFERLGKPGNKSKF

SEQ ID NO: 965186 - protein, 277 aa, Homo sapiens
VLMRAFTSSCREKYGDEMFGQCRKVTHEVYERTFSVTPAPSSCTPLCVPNYDNVHPNYHKEPFLQHAEGVVPDECTSNVGEPEHFKPIRKTFHASFLSTIAMPVVLKLWLASMRPPPDQEFRIPALLVFQTHSMERSSVLDQVVIFSPLVVASTFHVTHYEAGFDYHTFDKDMIHIADNRRSPGVMGDFFIRLDPQIGGELKSNPEEDGTETLMIFTHIQEPVSMYYTAGKCLGYREELYLRSVHQACRDSVKQGEGPKCFRVDLSKGSVEPENKGA

SEQ ID NO: 965187 - protein, 133 aa, Homo sapiens
  misc_feature (114)..(114): Xaa can be any naturally occurring amino acid
MLGYIANYGMGIECCGPPYVPTTTLRVTTIIILHQQRPLNVRDYVYRSPVLHHRAVTVSSSPSSAFLPIEAPAPAIPDMPPGATLKLTVLLIDPEHNLSCRYTIFTLSSVALSXGWKRVHDYEMLARRVSSMA

SEQ ID NO: 965188 - protein, 87 aa, Homo sapiens
HELEDMKMKNSVLKSEIHKGKAHQGQSRAIERLKKKKFENEFLLVVNFPTIPFRIHNRNGKSYLVLLASDYQRAKWRKTIQKLLWKV

SEQ ID NO: 965189 - protein, 58 aa, Homo sapiens
THYWLRMSLAIQGVLDTGKELSDDNTIGKEEIQHMLSQFVEHCKQLTELANARGPYDR

SEQ ID NO: 965190 - protein, 34 aa, Homo sapiens
PTTGYYWPLVGRVVGSRTPSGRLVITDVEQAEGL

SEQ ID NO: 965191 - protein, 55 aa, Homo sapiens
GGAGFSFGASPALGSLPSCEGALGGRGDTRNCRDARIHGEQTAGLDHWGVADFLY

SEQ ID NO: 965192 - protein, 34 aa, Homo sapiens
SVTDTDLSLLRSSSCCCSNSGTAAWRRGTPEVCS

SEQ ID NO: 965193 - protein, 61 aa, Homo sapiens
MVSDNELQEMSNQGSKYVNKEIQDVSNMRVCFTLSEPKESSKNKKYLRKEPIIDKRLRSNL

SEQ ID NO: 965194 - protein, 51 aa, Homo sapiens
EQRYQSPSICERIVHYSSLSGHLEVEVAVIGVTSNKGIIKVIFILSRTESR

SEQ ID NO: 965195 - protein, 33 aa, Homo sapiens
IDFLLLVEIKDIIKRHQEQSLRIRTMPPMLCIL

SEQ ID NO: 965196 - protein, 70 aa, Homo sapiens
EYMYYKPGNASHCVMCHDASSTKLGISVQQDSSVRVQMTNQAGNRNDSAGGDSVKQRRPCRLPLTRAGRS

SEQ ID NO: 965197 - protein, 35 aa, Homo sapiens
MVCWSNWSVFWSTLAVASSIHRILASVRRALARPR

SEQ ID NO: 965198 - protein, 43 aa, Homo sapiens
GSSQMKRVPSTGPKKDQFLMKLKQEALTCARNGGADYILFADP

SEQ ID NO: 965199 - protein, 104 aa, Homo sapiens
GSSRFIPLFVPSHVPFCPIRVPFFSILPVMSTFRILLMGAFYRVLIGAFYRVLMGAFYKPIASYRALIGVFYRALMGAFYNPLVRQKSSPRPHSTQEVQLARPR

SEQ ID NO: 965200 - protein, 38 aa, Homo sapiens
MTHHAVSDHEATLKVLALSFYPAEITLTWQRDGEDKTQ

SEQ ID NO: 965201 - protein, 34 aa, Homo sapiens
MLWCSRGFPTCRILNSPLAIFHKNFYTIFYIVQT

SEQ ID NO: 965202 - protein, 31 aa, Homo sapiens
MVSSGLLASHHKSYSVGVDFDVLRDEDYAWQ

SEQ ID NO: 965203 - protein, 62 aa, Homo sapiens
MITRWDTVCTLSVSKLSRIAQALQQAEVYRDTVHMLLEWLTEAEQTLRLRGALPDDTEALQS

SEQ ID NO: 965204 - protein, 82 aa, Homo sapiens
RLLLRMLEKRMDRAEHKGRFSTDTDERAAAKDVHRLQGQSCKEPPEVQSFREKMAFFTRASELISQALSACIPQPGTDGSNF

SEQ ID NO: 965205 - protein, 119 aa, Homo sapiens
SLTASSEIKAELNDDEEEREQNSPIYISRIIPGGVAERHGGLERGDQLLSVNGVSVEGEHHEKAVNLLKAAKVQLTLVVRYTPKVLTHMEARFEKLRKSQAFGSSSICSFSSMQPLQTA

SEQ ID NO: 965206 - protein, 79 aa, Homo sapiens
SHYASENYIGEHVSAPPNCRSNRLLKDEGLSKVQCSVYSAQQCSVVQKVCSATLNLNKNGGGAFEKYGFTKACHYRAKF

SEQ ID NO: 965207 - protein, 45 aa, Homo sapiens
MGMNNEKKLRKKALPVKQELMNSCESRGAHAPKAHGSVPQTACHK

SEQ ID NO: 965208 - protein, 39 aa, Homo sapiens
RGSRNAANYSIARIPNLWFVRYVPRCPGETPTTAAFHSV

SEQ ID NO: 965209 - protein, 40 aa, Homo sapiens
MHGQCGIVAGMKTILAVVGHVLQAELGSERALNPMVQRST

SEQ ID NO: 965210 - protein, 48 aa, Homo sapiens
PDYEPDISSTILVATSTSAVSCLLMWSFLNREVKAHLVSKTNISCVAF

SEQ ID NO: 965211 - protein, 58 aa, Homo sapiens
AEHIQAETELCAEADELRARLTAKKQEEEEICHYLEARVAEEEERCQHLQAEKKKMQR

SEQ ID NO: 965212 - protein, 72 aa, Homo sapiens
AFRVHKHTYAITPMKAQVEEDGEEKSPSKKKKKIQKKEEKAEPPQSYELPKMRVEQQLNARDCTYRAVCPMT

SEQ ID NO: 965213 - protein, 73 aa, Homo sapiens
PTRYFVTTVFRATIRADYVLRDYVLLSTLLPTTYFRLHTSDYILLTTYFRTPTKKDYLKSMEKWLTDKETPEE

SEQ ID NO: 965214 - protein, 130 aa, Homo sapiens
PPPRSRSSSKPSCLSFPSSWDYRHAPPRPVFLVETKTYTIYRFTWKGISQWRSHSQYFTSNRVGINRDRDSQSCCPSWSAGGYTSGTFIAHYNLKFLGSSDPPASGLLNKLGTTWHSDPLYLICNSSLKL

SEQ ID NO: 965215 - protein, 36 aa, Homo sapiens
FTQAQPLQSSAFRTTPYTGLSCLILDALDPSRSRCG

SEQ ID NO: 965216 - protein, 36 aa, Homo sapiens
TTKCILESEKPKGWGQNTDGPSTGISGPGDFLAHTR

SEQ ID NO: 965217 - protein, 41 aa, Homo sapiens
TGKLVVLVSVGLLGLRMLEDCPDTAGLPGMKGHRGFSGLDS

SEQ ID NO: 965218 - protein, 49 aa, Homo sapiens
AVMIRSYSSMKLRCICFSFLKAMSVHAHARQHEEEAVPQHLLVLFVCAA

SEQ ID NO: 965219 - protein, 38 aa, Homo sapiens
MFYSSVSKLVPGCRHIRRRRMGHTSLQITSKYQREIIG

SEQ ID NO: 965220 - protein, 78 aa, Homo sapiens
  misc_feature (66)..(66): Xaa can be any naturally occurring amino acid
  misc_feature (71)..(71): Xaa can be any naturally occurring amino acid
KILVVMNGQSLPMTHRFQLSETNRTLFLFGVTNVYCEDPYEVLKYVNSGECQHAVTHVTLEFSSMXPGPPXEFTASYT

SEQ ID NO: 965221 - protein, 94 aa, Homo sapiens
HPAYTSCLCTERLITTRSHCARAVYTRQTGQHLSGRRRSDCGGDTSPTVTNKPSYSTRRITSGYKDLGCSLAISCTVSNCHSSSFAQRQQQHGR

SEQ ID NO: 965222 - protein, 94 aa, Homo sapiens
TQEDRKTGENSHQIKKHMIVYFLIFFYRSLSPRLECNLSSLQAPSPGFTPSSGLSLPSSWDYSGVQAYLANFGIFSKGGVFAMWAKRSPTPGLK

SEQ ID NO: 965223 - protein, 81 aa, Homo sapiens
MKARLDLQSLRRTRWPASAQLIHHPVTPRPPCPPISHGADTVLKLCAQIEEKREAVEGRTERPRDEFVILPKSPSPIDSYS

SEQ ID NO: 965224 - protein, 160 aa, Homo sapiens
MYVLRLSRLLIHAMLQVLIARTSVAIGTYQEFDRYLYPIEDADVFIPGMTPQKTPSACQYSIPTPSKHGGKRYRNPIYSCLRISLLLIESWLEPVRVPLGVCSADNLVYDTSDSDDYHLLKDLEEGIQTLMGRLEDGSRRTGQILKQTYSKFDTNSHILP

SEQ ID NO: 965225 - protein, 52 aa, Homo sapiens
TSLVFWRELRDNVSYASRHNNDLHMLGGLSDMFNALSSRSQTKSVLEIGLSP

SEQ ID NO: 965226 - protein, 82 aa, Homo sapiens
FLTCPLLGTTGEKMIRFWGRPMYGAYWMNIRCSLLLANATARVHYREHASKMFAHICKAKRVNMLQADVMLQYTMASSGKPY

SEQ ID NO: 965227 - protein, 83 aa, Homo sapiens
GVSPMEGVKTDNDHHQPEGGRRSDWLRGADSMIKRHTPLEQADEVPTAEAAACQMSADQIQCSTVAAINETDTPAQLEMEDED

SEQ ID NO: 965228 - protein, 68 aa, Homo sapiens
RSHIITAIIPVGMYYDLLIKSLRISSGYFGQESQRLLRVVGIKKIYDGTLNELGLYSHGEENTEGQPM

SEQ ID NO: 965229 - protein, 76 aa, Homo sapiens
WRVESYKDPPRNNSIDIVNAIYGINKCDHMEAKLFWCLERSYACRLVFEHLLLFSTHNIKVMRFWVVTYDAGAAEA

SEQ ID NO: 965230 - protein, 46 aa, Homo sapiens
CTKESCMGVELEGRIIRAALTNKTSYNETCSIMYVAQIQYATKPPC

SEQ ID NO: 965231 - protein, 49 aa, Homo sapiens
NRRDEMKKRDAGGRAYSNGCINYEELVRDYADIGEERFLCLPISSVSLA

SEQ ID NO: 965232 - protein, 294 aa, Homo sapiens
MHSPLLTGIQDGLSSTSFRHTSAGNSYPASNPLADSQHYLLLNTFRQNYILSSRTLSYIGTDYTDDKIPTSLRLPNTVTQSSTREHFTILSRTGTRLDKVFPLKTQENNPPFQAPLRPDLRLPSKGYATQASVTSHSHRTRNRKHTNMTTKTSSQSPKSNLVTPALPFPTPHTHAPQSQSTGSHFTTQCRASLPSYTSSHHPHHTPGLRAHYRLQHTTATTPQQQLTTAPTHHPIPGTNSAITPFNSHTYHNPLRSTPPKTTVNFSTLNLHDHYRHLDRKQHCSHDSATPSGPH

SEQ ID NO: 965233 - protein, 138 aa, Homo sapiens
SGAVISYSSEMISFDSMSHIQVMLMREVGSSYGLGQLCPCGFAGYSPHQGAFTGLCRESAAFPGARCKLSMDLPFCSLEDGGPLLTAPLGSVPMGTVWGLWPHICLLHCPSRGLSMRAPLLQQTSAWTPRHFHASSEI

SEQ ID NO: 965234 - protein, 118 aa, Homo sapiens
MASLEASGGCAGNDCRDESGVKLSRARWLGETDGGIPVMCRTPDVMKYSQKRVHSSDTGNWSFRCGLETMGTEAPSVNGPGTSGENDPQKGGGEQKPGGIRGGRKEGPDVETHDGTAN

SEQ ID NO: 965235 - protein, 477 aa, Homo sapiens
  misc_feature (347)..(347): Xaa can be any naturally occurring amino acid
  misc_feature (435)..(435): Xaa can be any naturally occurring amino acid
WKRSLTLSPRWECRGAISAHGKLRLLRGFHAILRGLSLRGGGVGTCRHRATSAQLIFGYFIVKKGVFTSVGHRKWSQISWMFGEIWRRSWASPKVAGRLQGGEMSPGLGPFFIFFYKGDFFINSLREFGGRLKRSTKSGRAPGVVCNHTGEVCEILFLCAQARRERCTHTFVCGAGVWANKSDTRGGGYTERETSAPRGVYITGGWARSKTTHTAGGGEIVLGECAAPVVVCAHKKPPLCVSAAPKIEETRENSRGVLRPCGGVHPIPPNVVARTAGREILNHHTKRAPNKHHCSFKQHVGAKKGRPPQFWCVPNGDGPPPTKIGVVRRGGSTYRGEAGNHNNKRSXIMRRRRGARELQTNHTQLNAGGRPTRWVVAGRQYTCLESSAHTTLSVWRDASNTGARGRNNNFGGARCVAANPIFVGTPMREKTPSFXTKTNLQYYRSGGGREQNHTTNTKTRHTTKTQLEQVEVTVRKQ

SEQ ID NO: 965236 - protein, 120 aa, Homo sapiens
MSREACVVGDKESMRRTPGGWARSGCYERYTRGCGGLSYTSDIYKEEPPQNEGGHIRAESRGPWGGYKCTREHLLSHSGGPSGVHNFFHRCVLYTRVLQGRKPSLVNPPLRGGEAPISPY

SEQ ID NO: 965237 - protein, 157 aa, Homo sapiens
  misc_feature (43)..(43): Xaa can be any naturally occurring amino acid
MVVWQYLGARVEEATARPSYDIVSSNVQRALTLQGAALEILLXQVVDLHRSVKKTPSGNSFMRKISFEDALDDAEGRQQSMMFSKILTGHMCMCTCRYQNLQKWGMRIEGLYLALAHTRAPHSSRRMSSKTGRYRAGGRKLEEMAMNSRDGPWEAAS

SEQ ID NO: 965238 - protein, 42 aa, Homo sapiens
MGGKHGDAHAHGPPSRTTRTIPLRTPPWPPARAAQKRQAPCE

SEQ ID NO: 965239 - protein, 359 aa, Homo sapiens
KKENSVETQCLGLGKTGMCLESGNVTEIQTPRWAAQHASKVASKHTAHRHTPSHLGGAATQNTNYSPCKFTSGVGQIKGHEHSSMHSMLHRHTTQTYFTQGTAQPPVAASQQQHRHLWCVASQCTPLCWCAQTWIDTTSQPQVAQYIHQQHIYAASLNVLRQHIQDTPGHLGRAAHHQEASTHSMAITDKHSRQASQKHKASALLQAMATTIIPRANPAEAAASPGTPNSTTGVANLAEVGQEPSQHATLHAPTLSQPQQCNRSTMEPFSRFRLSAPGQPARVSHRVGKGLKLTQETDPPGDNPTARQRTTNLPRGLPGYKRNTLGNSTAGDTTTPTITPPRPGTRTSTGHPLNTAGAE

SEQ ID NO: 965240 - protein, 228 aa, Homo sapiens
VPGELVKHGHQEQSHPANGDDSPVIIYTSLTGMPMCEDYWMQASVCLVTPDSGPLTESWQTSYCLPRSSDWWLASTTISIEGCQSLRERHYAHLGSHYSRSTHFSPFCKKPPFLSELLVSCISEFAVLVTVFIILLDLHIGLSMELMDTTELESLWNCQQTERYVSLCHASREETVFQKRCCAAGQEPTLWHIRNERTGTGRGVGSVRCTPKRSTNLGDWHTWRESRV

SEQ ID NO: 965241 - protein, 426 aa, Homo sapiens
KKVLGPSSERVPFAVTSGRVVSPVSRDGPPELLLESQCDHYSGDGFELLRKMPPSPDDKENQAPKGAGPDLRFEISSEDGLQRRGRELGAGRGRTLIAKVHEARGHARLRHLSLSGMRGARHPGQSTMMLISLPGRAAPRRPSVARTYKIPITSRHGTRATDASRTHEIPHRGLHRAERTTLRDSAPLTWYTHSLALHSHQGGTPEREPTCELQERRMTRSTTSETTKTVTPGACDAARLDTMPGTGHPLPSDRSQTEPGGDGKRDQGQPTRTTAPSPAPAPTPQHHRPRTHWRPLEGDTTHVHGTIATPPASLSAERPPPGRRANPEQIQNASRGAPTQDPRPDRRTHAKDSTDTHQTARGPRPLTSHSRRNAHAKKHPQQHSANERDDHDTTLDHTRGEYTHQTGRHPNTAEDHTTDAPLENDA

SEQ ID NO: 965242 - protein, 229 aa, Homo sapiens
MIRGVSSRRGVAGGTNLGFTVQPSVPSVGLKVILPWSSSLPKVSVGTSRGRNNQAYTPHRGYNCCCVVLCCVVERQRGFSPSVVGKDCGSSNFRENFGGSFPAFSLPKVAGDNRVVSQPEPKPGFSLSSSGKEGWDDLLYRAEWDILQIYPPQRHSASSSKAHPGSGTWRSTLVPVVAVGTSGWQSELPCLGPSDGPDGRDHGRLPGVYRSSELPVLDSGRVRGRTWWR

SEQ ID NO: 965243 - protein, 104 aa, Homo sapiens
LLAARGAGPGTGLGAGSAFTPDWRKPTKFSTGDHLLHGPLPRFDQGCDGSWEAGSLMNISSCVLTTISSNSQMIWTNALTPVFERPTIMYMPRADCSGLKSCLD

SEQ ID NO: 965244 - protein, 59 aa, Homo sapiens
MLYPNRGGFPSETNTHRGDKLERLRAKQYSTHGAQPPYYKGGNGTSTKSVHLVRRTSDD

SEQ ID NO: 965245 - protein, 103 aa, Homo sapiens
  misc_feature (77)..(77): Xaa can be any naturally occurring amino acid
MGVSIKLCGRRRQRPHPPIPKAISHMLRKPHKRGGLWRARPKGSGHTSGGQLGEEEQTKNHNRVLAAPQYTIGGGGXPPDDSNTRGTPVRRAGPHHEGRKGEQ

SEQ ID NO: 965246 - protein, 235 aa, Homo sapiens
MITGGALYGLCKVQRLWRLRALAPVNGPTLLPGVPAGLPLPSPTWSANSHLCNSELKPNQCKVSGKTLQGAPATCGGAAASYAGLRAFACAAVPPGVLPARWASWCTHARVRSGERPYQCPICRLRFTEATALRRHAKRKHPEAMGVPLCAPDPSVSASSWDEEGIPAKQGAKERRDTEGKGEPAEPRPRTKLPGRLKPGVWCVGLIQGRDTLFPGLRVGQCGGDSHWGLLVTPS

SEQ ID NO: 965247 - protein, 339 aa, Homo sapiens
LRLGFMPPGGHLSPRSGDLLRPWVCRSRFQQAEGLPFVLSWDIWLLPRDKWRYICSLTQYQYTGLCVFCSEDRQTVCPKTRTGRTSKYQRVVSCSVLSCCFLGKSLNVDNAPRLWVLRAHTFVRKHRGRESGLWECLEWHSVGCGSGTSATWVNGSMGSRAEQHDSVISSYFLSVGLRLVVSTKPVDALDLLADRTSHYRYCQKKFVLSGQSLHAEMLLQPLIGGRTSLDLGGTRLLLNVSWRVVGLTAYMNFLQSITVMLHILWAAGIARVLKYGYVVFSWCTPVWIWPLACVVAGASAATGVLAGRKSPILESSGPAFRSGTGRGPLPPKGGAPGRS

SEQ ID NO: 965248 - protein, 180 aa, Homo sapiens
  misc_feature (173)..(173): Xaa can be any naturally occurring amino acid
KYPRLIMLRKKKEEGVIDSSDNRNRCVKQKYWDVKADGPSVFITRHGLFCNGRRLREQIKKYEAPISVLMLCTRDETRQQAPTGLPLLYYRFYGARLLSSKATLGSAHDFKPCKLLDRIAQHYSMKGRIVRIVTTLLYEGTRSCMQYWVRHKMALLKNTMCSEKEPWPKGDFXVKAVTML

SEQ ID NO: 965249 - protein, 67 aa, Homo sapiens
MWGGTATTQENKRRSENRWVGRAAKKLAKTTWRGHNRSVVWRRHRKIIQRERHSTDPGKKKTIRKRG

SEQ ID NO: 965250 - protein, 405 aa, Homo sapiens
  misc_feature (140)..(140): Xaa can be any naturally occurring amino acid
  misc_feature (184)..(184): Xaa can be any naturally occurring amino acid
MARQGGCGHQRRSCGPPEECLVVSFSVGGPPVRHTLSVSPVVPLSTPRLSPEKLVPLLSPLWPLMCDQVCLSNISPLFSLYLCATLSSHLSPCVDALFLSLFPSVCLSPCLLFSPAACISQTGPIMCGVKFNKTSTTVEXERPIYHIRGKHLPTGGNIICSFPHISLLKEHLPFITRFIKQLRXISGGQKRLPVMIKYVAGHKQLVLYHISCTNGCCLPPPCFNSPPLFWRRGVANSISGPWLSRLVSRQCGRIDLFSKCGWPPPRQSGGHSKISHRLILRGGGEPTPFRARHNRAQHRRIIGWMRETDPIMYEGGGPTRRTLRHIWDASALPPEGKILRTSWCCYHADALPPVTRALPHMQWSLTWSVFSHRGGVPSILSHVLFIVHITLPISGNMPVECAKDS

SEQ ID NO: 965251 - protein, 171 aa, Homo sapiens
MSGFPPHPVPNASSTVRCLPPDSKVSQCNAPRPLSFTEGQPCSCHKQGCRRSSWKGQQSSSGFSKHSWGPGILHALKGTCPESDSQSVTGASGLPAICVYSRTGLGGFLRPESAELALPLQGFRAIGGSPSGYVVRSLRCEKGPPHGRSVPRVAGRGFSTTVGTHPGPFGP

SEQ ID NO: 965252 - protein, 790 aa, Homo sapiens
  misc_feature (14)..(14): Xaa can be any naturally occurring amino acid
  misc_feature (17)..(17): Xaa can be any naturally occurring amino acid
GGKHIRLWDRRSVXFVXSGPPTGDDDDDDDDDDDDDDDDDDDDDDDDDDDDYRRRRRTYVRTHDARLLLAASCSCCSGRGGVGRYLSGRSYRRRRSSDDRSASTERNERSMRSIVPRDRAKVRLDVEFERSRSSLVVSSLVDDSDYYFLPCLMRAMLFLAAVVIVAGRLLIVVDLLLLIECCWLVGCLIDDEIGGSMVVEGWVSDRIVGGWRGEIQDSNSKDATVLDEVSSLRFYLTLNSTLQIASFRFSSLSLVMVLVYLRYSHPFLSIAIFACHWLGDDLHTVYYTFTYHMLWLFTMPCYLNCTGSTSHACEWQGNPCWRRHGSVADGEDGAPAGVGQGAGGEARGRGYGRVSQYAPRQHSTYSPAHGRGQDSGRCQQRPETGAEDGTVQDLHEARAASRTRTDTDSSRNSPPDRAATRRLVRYEYDTVPDTLDSDSNRTVRMGQSREGDRTSIHHDSHEEVETRATGRRKKEIRARSESDRYARVRIALKIRQATGREDQTAQRPVRTVSTVCITPARPARSIPKHAVGSTASLTLSLLCRFVRFNCSCDSSVASLSCACRSFAAPSLIDHNGEMCETSCTLLSVLLCVWCVRRWSDIIEQTTCGRADLSESREIDSGRLERELQQHDGCSTMTRDSPTELDAPGPWMPDCRLHPNGRLSVPGSSGRTSRLADDANRKDTRHSRQKTEGPGTLRRRRPSDAAAPHVMRPDDVTSPTAETENSDTREGTANGQSATRERQKFEGGDIELHSQTREDPPTANGSPAHDREVSPRPLNLERLTPAPGPCI

SEQ ID NO: 965253 - protein, 732 aa, Homo sapiens
WAQDTEGPVRLQQQQQQQQQQQQQQQQQQQQQQQQQQQQQQQQQQQQQQQQQQQQQQQQQQQQQQQQQQQPLYTGGAVSTQQEEADGTEGGGGGRARQYVRSVGAGGGDRRKSDEEEKSEVQERRSDVVGRQQEDGRTHLATRDKPLRSPRPPPGSYILLTSLPEQEREKRVHPSLPRLPPSVRPAACMRAGAPSMSYPRLRPPRTSISNRLQLAALPDLPTYLTKRQLTYYARNGRLPQLRIPRYARRRHAPTHLANRCKHVALPRSLDWIDGGEEGRKERRQAQGEPVPPGDRATEKRDVAGPRAERRGKERWAGEAAPSEAGKERSSARPQQPATKKRHERREEDEREEERQAERGDQADDAGRPAEQAEAPPARSQARRAQARQEVSQIPGKRPDRRPPAVPARTARRRQPGTRTDSLPSASSRPTTPPSGGHGAGTLRPPPTETSEQSDRTAQRLSATARGESRERQAGSPAQLASDEAAAQSQHNTVSQYSSNGRARTPNDRTTRERVQEKEGHHDTNDDTHKSPKARRGEDGQTDPPTNRTTGMRQKKNADQTDETRREEKRDSDERERRAATGGTSARERTRTTTEKRGRRITRRAAQWQHVESRQGGGATANVASSEGAARDVQAAEGPTSERRVRQERQTSHSGKEQRERRKEQQGARQDGGRREREAGERAEEKSCRGGREKSEQAVEQAAETERSSEKQREERDSCSPSQRSALSPHAEE

SEQ ID NO: 965254 - protein, 269 aa, Homo sapiens
MAMDQAGVSGRGQNVQIAGGLAEGFVRALAELHSQNTLPSRHVAAQPVNGAGMVAPVVGLGGRRQRQRWLQRQSCTELSRRVYANPLATSTPGALSSWLAVRPPYWQRPCHGLFPLATLVMQLAAVAGSWAQQMPVQHPRVMLALKGGASVQCPEYAAGRRLARTHVPRDQTNVESPQSGSKAERKRHDGTSIALLHGVSVCRKLEENRPGLVGEKSGETPFESLEENRSEAVAGSHQDAEIKLASTGGENPGVWGPQGRLNNGGKGPS

SEQ ID NO: 965255 - protein, 274 aa, Homo sapiens
MGKVKVGVNGFGSYGRLVTRLLITLVQWILLPSMTPSLTSKLHGLHVTKYDSTHGKFHGSVKADNGKLVINGNPITIFQERDPSKINVEAMLALSTSLVVPLAVLHHHGEGWGSFSKGGAKRVYSSSAPSADAPMFVMGVNSEKYDNSFKIISNGSWQQELLSYPGARSVHDNLGIVEGLMTTSPCHHWQPEDCGIAPLRVKLWRDGRGALPELIIPLSSDLGGWPRQCDQGLPLSLGTGISLALALPCTHCQRVTRWTELAFRKPGNMRLHKV

SEQ ID NO: 965256 - protein, 429 aa, Homo sapiens
SPAAYLVGSAARKAMPDSGFLGAAVPTSCVTQLLSAVLCCADVPNEIMKRGTGCAVHCIIVTPAVCACDGMTMFLGQTVLATCDAARTLCGSVCLYVPSTLKPLLLSVVNTMCSQSAHTQCALHAQCNGSTAEKCPQEEPSASNVAVYLPDARAPPRIQGGYLDARYHVTSVPEPGTMQSIFPPQRLRYATSGIPAARDDGTAAFQLFRVRPPAAKVYTASPTRALRPPHTRTHSRPFPVTLGPRPVIHPRLGAAPNVGRSNILTVRIKREHTAAPFLGDAPQPSPVRYTICCGLRDYAIMLLMGPHPHRPWMRRPTTGLRILGLDAHTSIVGSSPHPQMRAVAHPYLYGSDTISPSSIQRQIDALPPILHTYHTHTLSRGRQKMAATHTWSAMVPSTIITDYSYGSHFWLCGASPPRHWIGNSTCAPL

SEQ ID NO: 965257 - protein, 637 aa, Homo sapiens
  misc_feature (415)..(415): Xaa can be any naturally occurring amino acid
MNHTCPNHSSLLSTAGQPPNDEMLKEEHEVAVLGAPHNPAHPERSNVIHIQQTRPPLHDTVSVWSLIQPPITITEPPCLHWRIYTTPFRPSSDENAPAPTHNALSPHKQMQETAHTSIKAMPHIHHHHMTLEQSLYNYDPRKDTKNTDYQTRTNYTRNDQHMQQTPHQHPTNHTPPAHTATPHHRTHTHHATTPDARAYAHTRLDRTEPQTTTHEQHIPATPTAKQTPQMSTNPRLHPTHHDTRTPTSKRTSMQRHQLQLAADPPTHPTTLRRHPLAPTTEHQHDSRTNPTLTLLYTPKTRDNKHHTHHDRNQKTQQHSIKNHDLKSTHIQLHHQGRHAHAAKRYKRTNTNNKKHDDRQQPTPTQNNTANTKLTPSEPPTTQLHEHTHTYRDDTREREQTTRQHKDERLRASDTXKRTPRQANTNNSSMKRANDEDSSARDARTDRRAPTFTHKPRIARERIQTHINNREIHAERITAQRTTTREAHPKRAARATISHGMISDDTSTMKQDNTRSTDTTTHHALRTPDTHLHARSSVATEHATTRTSNDDERTYTTTARRTKDRYEHSEARLRRDQSTRCPSTERCYRTSKRNRYVQTEQAPTKRDSYSHQTRTSRRHSTGRMITRELDTQTHPSTR

SEQ ID NO: 965258 - protein, 142 aa, Homo sapiens
  misc_feature (104)..(104): Xaa can be any naturally occurring amino acid
TPGTRGLWVCTVMFVVEGHSCCYSECVSMDVWAIGSRSLGRSMSVLWGEGVLTYWEDAPVCIRDAACHASLSHCMRSTLLEVVWCSSEVVYRGGVALPRISDRXCLLHNQFVGSGVRRGVGGMCSALGERVILFHRRRKRMV

SEQ ID NO: 965259 - protein, 173 aa, Homo sapiens
PTLIAWVLSYGLTMDEMCVLLGERLGSSCRLSVRSHPLGSEFAPLSLWVLDQDQTKRPGFTVPGAKGPSLVRAFLLNSAGQGLVTVKCVQCCECKCNLTEEVLLQARQTATANERLLTECFGTKCAWAALRVISPSDLVRRARSKVFHLNCFTCMMCNKQLSTWRGTLDHRRE

SEQ ID NO: 965260 - protein, 200 aa, Homo sapiens
EIELPVKRRAKHRQDEKTLWSFDILMQIQYLMLPDAALKISVGATSDARTQPPSSDMLESSSVKANYYTQLIQELDQRNRVILGKQRIVLILESDINNRVNELDVWIQDIPMCARALIKRFVVFKRVKVLRDLSSDRSNPGRFLSTSNSLPVRRGQEKMKAYLQQSAFPREMIHLNLVLYPHPAKNRVVKMAEPGNRIRT

SEQ ID NO: 965261 - protein, 239 aa, Homo sapiens
GALRSVRARVHWPICAPPPAVCADAWCASRAGLLPVSVRTERGPAVRGSTPSAVAPGFAASRRPTRRDRAGAAGWRGLCVNASAVSRLRAYLLPGPPGPGNAKESEEERAPASVESPSVSSTHRVCDPKFPAPPFKEIIIKKGHAKRRARCYKVDYESQMHMIPRNSPPESSGKTEVWSLPERHGRTRDYLKFLNVLSPGLVPFQVGALQGSQKNRVPQGERLAVWNMALRNPMKESRP

SEQ ID NO: 965262 - protein, 200 aa, Homo sapiens
MGGVVDNYTHNAAAHTLDAPPCRTYSAETKHATLSADNVEAAQNIIQHAGLPAGYRGSLRYTAHTPPSRRHAHRPPQTTTSSKYAGPPNLAAGDLNGVSPQAGANSGGETQRTTQSECGYRGATQQRRGDFNAPTHRHPTLYTKTGNNTTTNTHPKISRPGSPIRPYRQHTTTYYPAVREHTRTHTQYEDPPANATTTEP

SEQ ID NO: 965263 - protein, 106 aa, Homo sapiens
KPSRSLLEGGDIACVLVSIRGLDGARMGDKGGFVNSSKSLQLIYYFFFFFFFLETESHSGWPGAGSAAGVISGSLANLRLPSSGDWSWPQVPKWAGDYRAPTIMPS

SEQ ID NO: 965264 - protein, 169 aa, Homo sapiens
MSGDTPAAGDRRVSTRPVSLTRILASVAFSGAALHKCPHGAGLNILAPVRKGDRVLVRESVTQVPEGKEAALRRAANDFHPRVTVRLEEHRIGTRGIYRSPRSLWWGDLSVGKTCLINRFCKDTFDKNYKATIGVDFEMERFEVLGIPFSLQLWDTLGRKRFNALLTTI

SEQ ID NO: 965265 - protein, 72 aa, Homo sapiens
VFCFQAKENKSKTQKAVLNPGPGMQGFAWERQPVLIAPLGFRISPGVHFPAMVDSVTARICPTACERWDVEA

SEQ ID NO: 965266 - protein, 403 aa, Homo sapiens
MLCDDQGAAEYDKDGNLRPWWKNSSVEAFKLSDPDVHWYEVTYQVKLQAVKREAELNRDGITLGGEHSARPTVGLKDALYSACLPYTSGGSKNGGCSPLDSTTLGLNTNHSRFFITVGFALGLVLRTGRPEQLTDAYGLQIDRIAHNKAHSSLYPASSAFTLFQNSLRERYSRIHFTCLGQHLGTARTNEIPSHQQTLAESLLGVKVIRNVRQQVKPYKESAPRERARKREVCSATVEIPPNSRTLPRGAQFLSSNMAPVFGDRFPWGGPPGAFSLSNGRGWRDCITAREKPEMPQLGCYGASSIDGLEPGNLLGVPPWFKRRPGNMFPEGRAIGFVWWPHTFSSHSGNCSEVWHWARCGVQITEGRGAPPRPCEQETRRRNTVATQCSHLCRSPVGCFHRSM

SEQ ID NO: 965267 - protein, 248 aa, Homo sapiens
WRLWNQNTGIVGSITGSKYYVRILSTIGSGAVKAQRLSGPPKHSNALVDVLPPEADRSIMMLTSEQKPDVMYADYRRHGGIQKQEVREARGAPAQRIVELYKQIGIEVPPEAVLMYGSHGGVWEDQCGKGGGDITQKLHAIRVVGFGAVYRSIWVRAPDDGSGMCSAVARMNASCHHRSEMEIDAVATKRFDAQTGADEGGSEDPAWSCWITMDGFDPNVNVAVIMAQKEQRPWIRPWFGQDGVDGRD

SEQ ID NO: 965268 - protein, 210 aa, Homo sapiens
MWVTTHTSLCGRREVDLHVSPAQTVCVSFTHIFLASFSLPVVWRGAPSLFSVCACVRTVRRRFSTQRERECERIFSRADKCRPRSVFHRALLCARRLLGSAHPAVVIHTALWTISHALMCPAAIRRHTNDVLHHNTTPLLRLSTTISYTTSSAAAMINDVFVPPCCLRRTKTTSVLTQAPLILILLCYLLVVACSTNNTTSSLLGRQYII

SEQ ID NO: 965269 - protein, 320 aa, Homo sapiens
GFLVNEGPHCPQLERRDGSSIRQNTLVYYKLEGGRRVTPPKGRSPPGVELTPSAWPLPGRMKTDRSLIKLKTQTFHGMYFLEACALRGSGKPGPFEITGVYSLQGQPVEGPACCAAWRKLLQAAPPNISLHRIVDKMHDSNTGIRSRPQHGAGKHAMRIDASVGSSAGGLASSPTSFSGPAVCEAVDPLPPGLMECERSSGLMGSPKAVGSQFASGGSGSSSVLDDSHQPCYTFAESYRKHDKAQRKNLSPEALVDVHVATVADTKAYRGQSQGAQRRDNSGTVDEHMAPTARIPADRPYMITLPRHRETAQSAGNNTHR

SEQ ID NO: 965270 - protein, 360 aa, Homo sapiens
MFGNDISPGDMAEKVRTLVLALVNSTSDQIDGSSTCKAPMKPQTFPLRPFVIPFLKAKLPLLQRELLHQRYGLAQADPIPDTWLRHEHLLLNSKHCIALLTSYRARSMAGAHGNLAHSRPKVPAAGTQHAAISLRISSTTNCLPAGHPCHNEKLMYQITPCLPPVAPRPCLFNPDAPSLISTEGPTFHSLTPSNLFTATLHPLPPDYSATLSSTLLFRATPTNDCLRKHFAPQSRSLHTSIHPFGILTIALRYVPALQARLTSTPPAPTTGQRRAAPPLATPQPPHPMTPCKSHNPTCPPLRQEGKHTHRAAPRTGARIPRRPHPYPTPQTPEPSSDATPHQSTQENDKHADHNSDTHTH

SEQ ID NO: 965271 - protein, 221 aa, Homo sapiens
LGVKQVMSVLTKWIPLRPPYSQRRYEEIVNGSQTLHIKKIGYYPSTVAFCAKFTGWNGDNMTGAKCYAYALVQGDGTVTRKDGNAMWNQRCIESSGTASYHQLVPTDKDPCACLSRMSTKLVVLVLFLLARLETGVLKGRVWWITFAPDHIVDNREMLQICRRIVTMNALSEALPGDQVWCFNVKNVSVKDVRRGNVAEWLAKMTHTNGTHAGFTRSGDYP

SEQ ID NO: 965272 - protein, 267 aa, Homo sapiens
TRSAQTRLAMKPGFSPRGGGFGGRGGFGDRGGRGVPRGLWLGCRGRGGGFSKCLWDDGGGGRLAGWLVDAEDGKRVGGGFHSGGNLGVVVAGQGKNTGWGKNPRSGGAHTDSSLTGLDASNLRPIGRGGFGFPFSKPSLGTDRDNRNRMHIGSNRKGRTPIWGGLSPPPFSEDGGKTTFPEAGATYSTFGGATAKWNKPHTEWVSITAGNFLLGDSDGIGRTNTSHRSPQQRPHFGGKTPPPFFPPGPFSRIPGHAFNGSPQVAPHG

SEQ ID NO: 965273 - protein, 241 aa, Homo sapiens
CCSSAVLSELRTKIDPTIVPGCQNGGGKYLVQSELYLRYSPNRKFPTILLRRLQRVRTEGDKTQQQRFTSCLRMIVLMAEAIGSLINTAGELAAVKADFGYKLVLDQLQLCTRRVRETQIALKPTELSTHHWRFYLRLGVTIQRGSDNHSLTVPDACTDKQLTQSQDLIHHFCALAHSSRQPLREFPSVYTHTQMAASVSLHHCTVILRCNYALSIKLFRYTHLRFRVPHGLTRFTLPLLL

SEQ ID NO: 965274 - protein, 277 aa, Homo sapiens
KEEQPPVPSSPTEEEEEEEEEEEEAEEEEEEEDSRGAVGMLPKDGPTCHCHPLQPGQPLLSEDNNACPTTEQTAVPSSEMLPEEALQQSSEECRAGLLEVTMERVPSCEPWMQGRFSLLHFWPPNWESTDLRCSRPDAYDAITHTTELLIYTRSCHHINAMSSAGQPETRGSIIRTQHLAQPWGLTGLGALTTDRVTDAIATYAGHRHRDCLARGPYNAYDQALARPCDGERRPSVIMQPTEAETTEKVPSCTLDDDPAGLAREANRHEAHQRKTNQ

SEQ ID NO: 965275 - protein, 229 aa, Homo sapiens
YAVNCQRDHMAEDYAATLIFLHLDISGGWAMKALLIRSYGLCWTISITWELTRALLHASPPQFLPSAGADQVILDSPVVHMARGIMAWALARLAGFNSRCRTYHWASFKDIHTTTGQASRELLCSFTPCQLAPTAPDWLRPTKSFSLPDDARLECTLSPCTHPWQARLTSDIDPFLSSGKSHYSICASPKPQLIPLTRLRTRYAHFLLSTWTAHFTSLSHHQLQHLRYA

SEQ ID NO: 965276 - protein, 59 aa, Homo sapiens
MASTRNPHLEMPRVDRRLCAPGHVQLVEHLPRNRLGDIPPQSSAQSYLATAHTDRLWDP

SEQ ID NO: 965277 - protein, 153 aa, Homo sapiens
MCALLAHVHENMEARRAMDTSRDKRPTSRHGHRQDSDQDRTTMTEEPQHAHRQTSGPAGKPTHPRTAQAPRHATTVTPPEERGTQKTYLTGHPTKKRKKQQQQENIGSHDVAQGRKRSAARTTESAGDERECPGDERHKRDGAERDDPRAPQR

SEQ ID NO: 965278 - protein, 437 aa, Homo sapiens
MARGPMKILKRVAAPKHWMLDKLDRLMVCSSSIQRSPQAGESCLPLIIFLRNRLKYALTGDEVTEDSPCTRFIKIDGKVLNRYNLPCWIHRIVISIDHDEEMNFRLIYDTKGTLCLYIVITPELRPRYKFAATRARQDLSQAQDRNPVTLGDFMMTRTIRIPDPFHSWLAPDTISHCTLASTRHRYTENISYNVPDTTLTLSVIGRTCEVALTLVHSTFDCESTNQTIRHTLESHDHRNTTDDTTLDQIAYTMPLAPHKEPNPTTCPATLAHSRPTKPTVLSLTFPGVTCGNQRANQSSVMNTSHISLCRPHDRPLCIKVWILVLPCTTYRTILTHTYEPEIKTDRKVTARRPGRHSMPEHRRRRLNTRPCVMPPGAAASSDRGPTITEPDDAADSRVFHILSYARSESEYASMRGPHSCPSDAIRRPLSHQPSHHT

SEQ ID NO: 965279 - protein, 142 aa, Homo sapiens
MGHALWCSTRHAGVPTNELAGGPFCPGCEKRRGPFLLKNPMWVVGAHKKTIYEVCANLTGSLPPGTSGKRPLYLTLWWEAGRQGENKNCAKKTKGPPRWWSPQEVSEGARTHICNEGACDTVWGTQTKRGGGSLWSGGAGTT

SEQ ID NO: 965280 - protein, 159 aa, Homo sapiens
MDILGYSGTITGCTWEYISTQTHSLHLKIQKGLYHILLKSTEECLIPTLDWAVTVGMWAPGPRAGAQQPCGETGEGGGNQLHTQRQTRSTGEEAQEASQDLQMHKQYPAVAHGGINGTPGLTKRWNDAHDIGETIPHTKDEIGRPHTRSTGHRGWRNIH

SEQ ID NO: 965281 - protein, 509 aa, Homo sapiens
TPKSQNGKVKRLISDIVCSSDTLDSRQVHHYMAIWTSTTSARAIDTTEPVDETFENESAAADWRTRAAFTATALGSLGLTPETRLMQVNRLAESRNIRLLIAMHATHVPEHPEHTLYPTWMTLRQSHLPPKAPSTARTNSQSRHHTHSQPPRAATTSSSALAPCRPAPPARPPPPPARASPGAESTRTTPAPTPPPNATTRATSVTPRHTRPLTPHSPLAARLTHPTLARLPDHTPTHPQHSRPPTLCLPPRTHTRRHSPPTSEHRDPPRIPAPTGTHTAPTLAPAPHLPPQHRAPPAKSHTAQPPYHPDPPTPRAATPTPPPPPPPHTTAPSHPAPHTAPPTPAPNIAHAPTPPGPGAPPHTPRPPHTRPRQRLPTHTHTQPRPPPPRPHPTTPPPPPARAHPHAPATDPQPPPPTAPHPPTPHPTTLAPAQHEPPTHHTPPPPPPPHAHGRPPTTHTPEPPQLPPHPSHHPAPPPHPRPPTPPPHPPTAPPPPTPPHNTPRRHPSPH

SEQ ID NO: 965282 - protein, 243 aa, Homo sapiens
EKIMLYTVLAVLEDTSRDIREALHELLCCTNCFNQKKGFILASVELREQIYSQVALLDRDIHMEVLEVSGKVGHATLVLPLVPELLSSHPFLDTGEPDMEIQLILQYLVLIFNAAKTCPSNASIVSHDHTRSGSYAYLRDSLSTIWLPGLEVYQVEELVSSAVYSQDHTSMRILPSSSCRRALKECIVFSTLDPQGAQELLEFTIRGICKRLGELQSEWAGVADFSGSYLRCQLLLIKGLAGK

SEQ ID NO: 965283 - protein, 188 aa, Homo sapiens
WVEHGVLYGGYMTRCGSLGPSPLQGVYLATVRRGNPGWGGTDCGRDSPAVRVSLFLWVLCAGAGGPGVSTPGRPLWAMRLHHPCGCTPNRWLIPGNELDNSGQIEGKCQPQRQPVEDVGVAVRSQQEHHRAAQVVRHRMPLRGAHPDAGFTTYVDSHHYSGRLPKNRQVRSTSEPVWHAGDPRKRHGQ

SEQ ID NO: 965284 - protein, 309 aa, Homo sapiens
IIKIHDMNENEPIFTMEVYTGTVPEMSDVGTNLVVQVTAEDADDPTYGNGAKVVYSDSTGYSRYFFTVNQKQVLIKDSLLNMDRDNREQYHLVIQADTDMGGQMGGLLLGPATVNIDTELDVNEILPDLPQSTYQFTTPESSPTGTCNWQKSQASDADVGRTMLKLSTASQTVRGWILWMSSATRTPQGRAITCQKALGSANTHRNAYTPYKRQASRAHRRRHDLDWALPKTPPHVRTAATGCPLTPRCPHTPASLSHYRDTAHYPTTPPHTPHPTRATTPATTLRPPRSPPSPCPHRPPPPGPTRRPP

SEQ ID NO: 965285 - protein, 135 aa, Homo sapiens
  misc_feature (19)..(19): Xaa can be any naturally occurring amino acid
LCTAMAWNDEVWIRCELPXPSRSIRPEKGFLHQRSKGEQALLFPHKPPFAGNFLTTRRNWRQAQSSPPTYAESYFDQARHRRPPPQIVNLLVRGPYAGIAAAIINHLAPQTGGIPLRHVRPPNNKLGFSSFPPPY

SEQ ID NO: 965286 - protein, 122 aa, Homo sapiens
MAKLGPRSSCSLCPFKAETDEVESSAVIDSVQVATDVMSDEEIERIKEIAENYKLARATVRDPKSRSPHCRQSQRVSKSSWLEEDDDAVVAGVNRRMQDMTGLTVKTVEWLQVANYGVGGKY

SEQ ID NO: 965287 - protein, 282 aa, Homo sapiens
CAAMLQFVLGRWRGPGFGLPCSQWPDVLLCCERCACCCADLRTLDAVCAMLMGLPVSPVLLQMSDAPWYPLICRPVQACGQSPCWGFEQELLWAWPDLHPDVFATCAQAGHTCTSVAIVCTQELQDELAIANDQELMMPEVRGLCGLEALAAEMCTWAVARHGSILLSALARTEVLPMAPGGPTKLLLHAAHEGAGAGSQSGTDLSSLAQDELHIMDSLELPRRPQYLTELVHLPPLGGLRTPRGLNTRGRCQRSIVEATLALKTFKLIRVVAYMVHGIVRR

SEQ ID NO: 965288 - protein, 198 aa, Homo sapiens
MTSYADLSELELKAYEKLDERDSRRLRERVGRRLEGAGSFAGTLQQPPDGDPGSGLQLERRIENQKQSAEQGSRNRWQGGQRRHRKEPSLWLSKPCSSPEVPFRLTRTDGDDICHGKWYSFDLLISQSDTKSVEENLNLWEWKDPSRERGVGHTSGCRGMANGARCGSWHEIGANPRAGGTGGEGSPVGGTTRPPAQG

SEQ ID NO: 965289 - protein, 361 aa, Homo sapiens
MSHSGGERVTYSHNMCVCPQEELCVLLSQRAVGDSPQGHCWKTNPSEMVLHLYVDTKEDVCPSKEVINTRRLFYKRCARILKSSPDNKSYREKTCADKLCSPQGKPPRSPFFHEEPPQKRLFGGGTNKRVSIPEGGYTPAGVKKPPTHGGRTQRGGGARRRGRSCGRPTRKGATLWWASPTKGEQSNILLVGGCPQTRSGEGERSIPPNSEAPPPRSAPRQPGGRRPKGGSTFVGGAHRRLVIQQQTGPKSKKQQHGHKRTRSERRKGPQNLPHFQRRWGQTIQLIRHRVVAIVVNAHTHGGAQKEGPPIIEASKGQRTTQAMYTPPAAGRGGVPTANNDHNYSLVGSPTVVTAGWYTRHK

SEQ ID NO: 965290 - protein, 234 aa, Homo sapiens
CSSSASLFAAAASAARSSAGADSGSFIAMSPETLRFLLNPLHRITGVPTPSVETAARETTSSEITTKDLKEKTGKLLDSTADIHGKETPLHNGQCSPCMGTQWGQAQAPASLATTLCQRKAPPQAQRRATAQAVARARAQPRQGSAQHTTASHACRRDQWQTPDHLGGGKRTNFREHTGKPLFGNLVAKHTRRPIREYGAFPNRHPYSTPLGQATQQRSRWRHNGPLGHNGQVG

SEQ ID NO: 965291 - protein, 188 aa, Homo sapiens
  misc_feature (18)..(18): Xaa can be any naturally occurring amino acid
  misc_feature (165)..(165): Xaa can be any naturally occurring amino acid
RHNIERMKEEKDFTSTFXTRNSRYNRRRSAHVQAGGGGNGWAAVQQSWLEGYIGAETENNDCTTSHLTAKDFILQKLSTFEETNRTLRELLREQHCKEDSERLMEQQGALLKRLAEADSRKPPAVTAADKDKEVEELLQEIQCEKAQAKTASELSKSMESMRGHXQAQLRSKEAENSRLCMRLESGRT

SEQ ID NO: 965292 - protein, 576 aa, Homo sapiens
WVLSRSGGGWDGGDLEQHLEDTMKNPSIVGSPCAQHSPRHFTSGLPAGTRVKHAAMLAVIICSQPQQADISSTIGTPTGIFLCVCLRHPASMGNNSCIPANHDRHPQDAPSATTHEPLCMRPSSVSYTTRPRSLRTTENSLPLLITYNLTTTTTYNVATIRYDEPHYTLLIGDNYTSNLYTPCLYVLYHRPVPTLTRHYSYTLTYIVRRPGRHTYTRTNSQINRQHAYCTGYKQTQALTPRSHVIHPINGTTYLRHTLAGTSSTFSHQSQQSVGSWRKETQKPQQTSEHTQQKRTDHNESNTTHDDTRSEAPHKQTTDTAVAATNHERGHKHTGEPTSKHRHQNPENTPTATHDSKKKKKKTAGTQNHTNAPSEHKHHKERQKRADKQSQQDTNHNQNNQKHKKTPEERDRIGKRHNNTKREKKAPKNTKKERNRTQRQTTKTKHRRDNKKPNTHETQTTNRETRREKRRKTTRETQGKTPRERQGHSESTRKAEQAAQHKSRAQTNCEPRQESDEKRETRSQTKAQKKNDRGRRKKAEDNDDAQRGEQKRDGDEGDHKTEETAEIEPERQGQKAE

SEQ ID NO: 965293 - protein, 133 aa, Homo sapiens
MLLFPPKSLRKGRQQLGRDDDVRNFTLVTKKYKASSRESGKSKRKQIMQYSQRASFISSRCSSSKGDRRRPKQFGGHGGKGKEQDHNVVAPDGVIYRHQLNGPHGQVPSKPRRSGLLVGPSGKSRIGLDWATI

SEQ ID NO: 965294 - protein, 137 aa, Homo sapiens
QFGVPQALFGVRRMLPLIWSKEPGVGKPCLMPTVNSTSTPKGTLPEPMAQVFDSESLSAASGCLGWDHSGVYEEMSLCSYVARRSELNTSSDPAAVVSRATENGRLLSSGALFLCHASWHDGTRKARSVGSNLDTIW

SEQ ID NO: 965295 - protein, 311 aa, Homo sapiens
HSVPLLLRLSKEETVLATVQCSADSIPPVPCSADLSEHLLEGDLHVTIVALPVMNSVGAVYLQVYEEVHIVNTNKQLYLVVLAHLTTCIHCASIVVVHLMPIPINVQGIHVSIPSIALHTAASYPRRQAQHTIRDVPSSLQQPLSQTCWAPHSQALQWLHLFCPFTFPAIPRKAALAPQDYRLEIIDTAPSATLVAFRMALLHLANTTIPQFANTHVAVQCHISGHRQVSRVQTRFYTHTSPEQLVEFIRPYLCHLITQADPLPFGHTPYRNEWTRNCCMVLKREQPLQGGKHPHFTVPYNDTYTLGFYVG

SEQ ID NO: 965296 - protein, 160 aa, Homo sapiens
  misc_feature (66)..(66): Xaa can be any naturally occurring amino acid
EERRDVGRDAPGRPRVSGVVTAEREALENEPGLKDAVWGREPQGGAGCRARTFPVLPAQENPVSPXLKGYALPPVRDSRRGGPGGGMDVEQQEEEDNDEEAARAAEPALVLPACLQDSQQLDGLERACVWRLGPQCECRSPGAWRAGKPGPKPISFPKGS

SEQ ID NO: 965297 - protein, 122 aa, Homo sapiens
  misc_feature (71)..(71): Xaa can be any naturally occurring amino acid
  misc_feature (116)..(116): Xaa can be any naturally occurring amino acid
  misc_feature (119)..(119): Xaa can be any naturally occurring amino acid
CSCLLLLTSEIDLALMKKAGITQEDEKSLWSFRVYASAKAVILKQNADRLPNTYARASHINKCSGYVGRTXRTQEDQPIRRQIACLKSFSHGPIRNPSIVSSPIESQCETRITNRXSDXRIH

SEQ ID NO: 965298 - protein, 214 aa, Homo sapiens
GRPVGDISCVLDRWTGWGQWWLAGLRVAVSVKSPVGSSVPECPWLLLVPCPAPLHPLLGTEAALRILACYLLRLECIMDLIKENCISGPVKCYMSSLECPKRVLVTQQIPCQNPLPVTYVAMAQRVIVSFKFFPAAFLMQAQKLVSSHKPVQNQKQKQSAGNQCTSSCLQALNNTQKSKQPLRSGPETNPEEEPGITKETCTNQTKMPVGFGRL

SEQ ID NO: 965299 - protein, 90 aa, Homo sapiens
CGGEKDPRAVRHKSITPRGDLSTQFTWWEHGRVLMQTTGPRNLKKKLEGQHMLENHRRILTLELGHGGGTRRGQIRSKGKPGDSSAAERS

SEQ ID NO: 965300 - protein, 80 aa, Homo sapiens
MRTTTPSVARQKQLSWQHIDSNTQRTESQAPNAGGRLRDGTLNNRHRPQTTTKSETNEETATTHNISTTHTPTSPIQIPQ

SEQ ID NO: 965301 - protein, 121 aa, Homo sapiens
REAVPLRYWFLAPTRELATSRKQRLQLTSHKSCQWLGFYGGTPYGGQFERLRNGIDILFWNTRSYLKTTYRMVKLRSQPKLEAIVCPRMTVDPDVGYRVICIVSKLENEIYTVCAYQRNTF

SEQ ID NO: 965302 - protein, 255 aa, Homo sapiens
MSDAVFTYEDSPPTGILATDGSWHSKATEADGALLEANFVQIGNTDVRPSRLTTGNTSHTDRWHIEAYRHMALILRVPAQRTVPGNVAWRSPYNRTRGSLAALLCLSSLRTTNCSQYLAPLYRAPWPILRTTFTGRHKRLGHERGPWELITTDGTLERSYQISLTRNGHTSFIGPTESKNTAALRLLKLAKTIGGHKHHERARPGLAISKESNSTFHTYHLQARRNKLRQIDQKTPYVNIHTGRTALNDPIHTVP

SEQ ID NO: 965303 - protein, 139 aa, Homo sapiens
  misc_feature (56)..(56): Xaa can be any naturally occurring amino acid
MSLDLLSVEAFIHNYFWGQYRPTKGLWGRMGLDGVYSYNISGAPRVVPTNAFITNXDHCVCVLNHPRHKIAAPFAAVEDKRRRKRLGGGPPRRSNDCCVITPLGISAVVCRAGGSYKTIQLFPPRGGVRDDSSVIHTLL

SEQ ID NO: 965304 - protein, 75 aa, Homo sapiens
MQSLNDRLASYLDRCELSVETENRRLESKILGALGEEVDPSVRDWSHYFKIIDGPEWLMIFCKIRVDKCPASYLA

SEQ ID NO: 965305 - protein, 507 aa, Homo sapiens
GHEGYLTAVCLHSVKNAPSEPQLWPKLDSSESEEETLHKIDQQTADVSPSFPCTDAMSLECRVHTGSNASQQFLPTISSNTPMTAETGAHPKKTAQLPIGNTGKPPLPKTLEAQDSHGPHHIQGTRSFPCFVDMQRTTLTYTPRDGHIMPLAILLTICMGQRNVLHLPIIICPKVLPLELRTHASNESLRAIQQKLNAHIARHNFTNPERLFPYTQPLGYPFLPTTTPTHARTTPPLPFGTSKPLATSGHQKRHTRSPKQRIISIDPLSPSTPPYTREHQHQEAAPSDTTNNHTTAHKRKQETTAHSRYTNKPKERAHRTNNTPPACHSPVPTDKTPIPRGYTNLEHPHHIHTQTQKPQPQTPKTTPPHTPATRPGKLPDKSHNPRPTNHTPQRDETPQDQHSDRRPPTAPQYQKHETTNNKFTRADKPLPTPTRQNQNRPPPPPPQTTNREKHITHQTHHPDTHNASTPPHHSITPPATHTHQPHTPAPPTKPTNPTPNAHPHRRP

SEQ ID NO: 965306 - protein, 258 aa, Homo sapiens
VKRDIKYFCLQNSGVHFSWPGTVPKAVCSSLRPSCTSDEGGAGQGKAKPWGPEASLDHRGQGNVNVAWPRKSPHLHPILALGQINGSKWSGLPGLGLEEMRWGHLPTGSKRGTRSSRQRGRLGHQGSWDIALTWEPLGGLGPRDKRGCVPRGRACRWRGEVVGCAKVACDCYVALEWTPGLPGVGTGGALKTQPCNRGLLGEVHLKGAAAIWSKPTAPLAREKPDVSSVALRTRIPSEWPFDPRELQTLTGEAPEKAV

SEQ ID NO: 965307 - protein, 245 aa, Homo sapiens
MAGGPGLISVFSSSQELGPGRYAQWWPSAQHADWQLVPAPVSRSVVGLGASSRCQPGATLRVALRASSLALLDAVGFCDERLVPFRSRREHGTGLYLERIFSPDCRSQKCQVITINPELPVEEAAGGYAKKAESRHSKGIHPGLRPADPGGVAPMVTPVSHLPRQPLLQGAGEDVVTFSDFTEGKRTAWLTLMLPVPECRTNCNLMWQLDECKEAVWGALLEGQEEQPMPDELFSAERGKGSMFI

SEQ ID NO: 965308 - protein, 233 aa, Homo sapiens
MVIASVEGLVTLLGWRGLPNIVICGPLRAFGVAPVLSLGCGLQLGAGVSVLLELDCLFSRIYTYKRMHACYNSCSLLSGASASLTTSGTKLLAGRQPGPHRLQPASVTMLDFVLCLDTCGPGGSSLHLHVSKACLGSGTLKPLPSCWELETGCARHQLPLSVLVLHGWHKLDQLAADVLDWEHERFDIRRFPAFTLSTLESTLLTASATRIMDVLVPVDSKDLTVKEESLQMA

SEQ ID NO: 965309 - protein, 187 aa, Homo sapiens
  misc_feature (18)..(19): Xaa can be any naturally occurring amino acid
  misc_feature (21)..(21): Xaa can be any naturally occurring amino acid
  misc_feature (48)..(48): Xaa can be any naturally occurring amino acid
MHDRIPPHLWTARVSLPXXQXCPPEASVEAAHQEGGGYSYRKAPPKWXKARVALQFSTPSPFPSLAAMTILRDQTGPKTDAPELFMAQLPHFLQEQPVASLPWAAPHGGFRGLSPEVKRGSLNSNAEPRLKCGAPGLPYLRQEGQEGEPAAWGGVGLTRRASPAWPAQICAPCLSAWAAGCQGQSGL

SEQ ID NO: 965310 - protein, 410 aa, Homo sapiens
PPRNTDEKISGLESTGWVEPSDPAEQQQQQTHVQRFFFFFFFFFFFFFFFFYRGRHTPRGKEGGGGGRTEERAQRGETRGEHHTRGGGRAGETRGAKGETRGGGVGEGPRAGGVGHTHCCETGEEHGGVDTHTGGARAENDAEQREYTMCETHTHTPGAHTHTPQRTSPHQRAEPAGGRTPGEGHQTRETGGRTHSRSTTHTLTTVGGGQAHSERDAPPSRTEQRSESTEETQRRGAAEGPERHSHGCEKRARTEGTTQPPKERRRARIHPAVGGGTKNNDKNNRSSGEPPARDDNQHNTQRGGVLAGAHTTNGSGRATHPNEGREANHAASPPQKQTKRETKRDSKERQTKQARGARSGSARTNKNNSRGGHPRPPKPQHSPRTKPAGGTNSHTRERARAPQTEPEGTT

SEQ ID NO: 965311 - protein, 514 aa, Homo sapiens
MDPACGEAAEKDIHCAWCNSHLRERLGTQIDEHRRRTSEDVTEAHACCCECSSQCELLMSQAQKRRPSMSSAPQISQQSNTGTWPFHQPRQQDVKTRMSHREPAQQIRGIGHMLAQHCTTRRDCILRTNPSLATYATSNGTIIRWHSSTSQNTNRQTAPRLHCLGRSTTANEHAPHIPTTLLHTHPRHLPTINCMRNGMRPSPPYSWVATPEYPTQHTTPGTRRHCNLDTHRETQPSDGHTGNCTPPAYHPETHIRKTAATTHGTARATAQQHDNPKTEQNNHPPKKDIDLSDTFGPRNTEHNTRNQQQPYGAPTNTETLTHHNPPPTVHLDTATPRVGTHRAQYLTTKRAHNTPRGTDPPTDNLGSGPTHKGKNEKNHEHTTFAQKESKRETHRPHKPRRNDTHSTEQQPSKLRTEPTPNKKKHGPTDRHTPGNAPPDKPERTHNDSPSGSGTNKPTRAEHTVKPKPNMTIDKRHTSKQPVTAKITRDNTLTNKHTTRPTGCDETPPPETPTQ

SEQ ID NO: 965312 - protein, 113 aa, Homo sapiens
KKFTSCNGTYNRSNGVVDQEPYQCKQNGRIHIASTVLGAFFPPPASLAAGPPITPAPARRTRAHYSRDGMRLTPWQAELLYQTLRTKHQSSSFGNNTHSFPPPLFPTGLPGSP

SEQ ID NO: 965313 - protein, 238 aa, Homo sapiens
ARGLTRHASTMCCGDPCPGFPVVYRAAAAPRRRPGPGGLDPEDLLSPCVAAGTAGYAAKQFARYGAAPGWSPVRYGRRRSSCRELEAEEREWYPSLADHAGVCLRVKQAGEEQKLSGRGSMHIAECIGQDATDDCELAAAVAWRTGRMAQADTVRGGAPTAVLEAQELLGYQCGPKELPASSELLQDLKKKERKLPQGGKTETEGRRRELCIGLQLLAQDPDRLWGHPCYMRLFSLSQ

SEQ ID NO: 965314 - protein, 354 aa, Homo sapiens
RATREAMDIMVVMEVLDDYAGYNNYGYADMMALTDRLTAWKRYWRRTLATGCEHGDCTVQRFFMAASLLATLCTQRLRPLFAATLQHMTLASHILSHRLTSRYRAFTTSPTSRSLTEHRATTRTTRHDCYARFCLTTSVSALPTLRLAQCSYTALDNTTPSCHNHSANNYFDSLLYLAHSLASHGKGPGYLRPLGARGLPERHLRARDITAYHTDLAHLSTKSTQARDLPAKSKHTSEQENRRANLSAPHHPTLLNPKASANRRIYIGSHNFLCLHTSALSKGALAILICRAPACGLGLAERRHHLSHATFTLNCRRPQPTPGSTRSRLPPRLAPIVPRFAPTCFTLATPTPNT

SEQ ID NO: 965315 - protein, 102 aa, Homo sapiens
MATGIRSQSKELGNLSGGHMGQNPAEAESQDMINEVDADGNGNSIDFTHRNFMSYEWLERMKDADSEEEIRVGYSESWTRDGNGYISAAELRHVMTNLRRKT

SEQ ID NO: 965316 - protein, 85 aa, Homo sapiens
GSSSRELHQSTHKIFLLRLWRCCLSCSSAIREQLAHDFLAFLAMKLFLDETCGLTHRFPISFLPKTMFICLSLTSRTYSREYCRS

SEQ ID NO: 965317 - protein, 400 aa, Homo sapiens
LSTVLPPLINSGVAGIRDNIHLVLLSFLGSTTVTSPAPRSLTRYHCLRLTPTANCSAPHTHEPAKRPNRLRELLTQPLNHTMAPCHGTNTQPNWPRHHPEPLNAHFYARHSFQTSLSTQTPAHSTLLSYQSSSPTPLLLTHCCTSAVCAILPHYQRRPLTPVPPLLSGPLATAVSHGTYTPTPDAQPAKAHTPIALSRPLRLRASTYLPQPQGSNPTPQNRRMPQPPPEHATPATTHNPPRPRPPPRLPQHNMQPLPRHQRAATAPARDLHHPDSQTTTTPTQHTAENPHNDRTQNQRHPNDQNPLPNPTHPHSTWLSTANTPPPKPAPHSTPKRGHNTHSTTPPPTHRHRRHTPPRTQPRDTYKPSVRMARTHLNPQRHNKQASRRGPTNPGHPHPQTP

SEQ ID NO: 965318 - protein, 125 aa, Homo sapiens
MMGGRSHPPSTITNSRVGGREEEGRQSNTTSQGGTKPSRAAGKEGLYHPAGERQLYSPKQDGAPHKKMQGGAREQPHKHKHEKTNILPSIEKKTPHNKKRRRANKQHTSTERGGARQSRTHHTLR

SEQ ID NO: 965319 - protein, 197 aa, Homo sapiens
MSTSAVLRTSSGHQGSGLTKTWRPNDEHHTGVRCGLYIPISRHPCTGLTGQQGSSSGGTQYNAAWRLRRISWNPLVELCTSELNAFTHGMYSLWVGSANATADLTHSNCLSHTDNHQHLLAELPLKHTPLSCCPLGSLGHSSLSIHGPGQPLNLCYPYGALPEPYPGPLAVTSSTAHDQRLVNAAILLNLATSPRRP

SEQ ID NO: 965320 - protein, 32 aa, Homo sapiens
VCWVERCQATAGTIPLCHEGQPAQTTTHTPQQ

SEQ ID NO: 965321 - protein, 393 aa, Homo sapiens
MSLEFYLVEFLLRGLQIGMPGPWQPRSHLVPQTETLQDRWERLTVDMSLFIIINIIMETPSITPVHGAHPYLPHISTELESLNRGLCCDQAHHACTTHGHCTVSVHDRHVNKNRHTQGSGMHRRMHTACVTSCHSCIADSSGQERCTSAHLYLKVTGPSISAFRALETTVVHNRTTPGHKGVLAATDGASRENATPHGQLRANDPITNTWSHITPSTTQAPRPTIVDVLHMVEIPGGKHTAASSPRGWGHGYNMSTTEDRTNTTTPPQEQHDTQGGTTGDRQKSPTIRGGDTERGAHKTHPRTRGPRAGSDDGAHTSETDRTTPWGARTPWHRPCHTTSSTQTAELSRPPPTREKRKRPPLQESRQLHTPHQSGEELQKNNTATTQNTDEQTT

SEQ ID NO: 965322 - protein, 382 aa, Homo sapiens
MADGDGVRQSWRDPEPVPEATVLRPTELRDACLQVGMQHGGPFLHYMVLVRWTCLFPASGLRGFPNVLKKVLVDQLVASPLLGVWYFYGPWLPGAVTTRWAATLPGAAGRSLWDLLQAQTGAVVAMPLAASSSTLSLSRSPTQIHRVHHHIANENCTPARLRHHGTHLIHNYGSHRAAPRTLCTTTKGTADTAHGNHPDAALAPCHASLANPTNIAPTMDIPLRRDTTNPLREPTQGGHWDIHDSATASAPHWTPKVPYDHHFHAFPQTPTFGRPTNTSTHYPTSTYQLSCETIKPLTTSKDTREHNRPACEPHSDLAINPHPESPMSPHKGETQYYCNTGYNPPTVCPIYFTAQASRPLRRDNGTTTDTTHHTEGETRTRG

SEQ ID NO: 965323 - protein, 209 aa, Homo sapiens
SKGGDCAGNMCHGSADSIRQPDPRQAELRIIVEEIEDLVGSALDELGGRVSPVLTEWTGNKSVICGCHLRSYMDHVVTEPSISDGVIMCHPSLMIVLIFSERRTLSPSPDSLQRGLMQACCALAINLRTHSASCGMCLEGSASDTHEQAILRLQVTQCCWSRACVNSGLNCVRNWNDGVGDRCCFRLEPLVPPRTDIRCNPRVGDVPVN

SEQ ID NO: 965324 - protein, 130 aa, Homo sapiens
MTVKCLYGPLSCHSSHRTICQKYLASTRGRLTTANYTTSPYRGQTKKRIRIATIKDAGKIDTALALDKKPLIEVVNPTGQPIGTTPNVCVAVLTLTTKQIARRTASSRHHNERATYATHVAIMNNRTVSI

SEQ ID NO: 965325 - protein, 325 aa, Homo sapiens
PSPPGVFGQKTPKEREPPPPLTRGAPQGWGGGGRPQPLSVCAPCVVEKNIYSLSSQTLDGGAPGETGWESSPATRETHKNGGAGARRARLGESRPLRDQGARVWPERAVAAVGARGHTPARALSVWKHARRAHTHTLSPHRDGGGGAQEEERHHTHTTHRSAERDTPTLSARAYVRARIHTSLSCERVSTQRARRSCRTRTLSRAARDHNLNLDAEHALIGEEEDMLERSDVHSLPLLFSSSSYHRSSSYTRSSRRLSVLLLLLVPEPLPLLPFLFISSPHQTEDTYLAVEDGWHIIYPTHPLLLINNTTTTMHKTKYTSVDSRR

SEQ ID NO: 965326 - protein, 252 aa, Homo sapiens
MIGSRILASHEGHVEVSAATIRDSVLERRLQLCGHAKPEFLQKVMIRFLPNVCVSLRTFVQNWTGSTMTSLSDKSSYIQWLFPLREPGLNWHAKPLTLREVEVFKMLPGDPGCWHCPGPIELMLGFYWDPVGVTDVHRVTVGPSTRTTRMRFLEPCTGAVLGQRSGVITRFFKSVGELVSRSTSRLPAGPVLPWGTTLCGGSCAWFWTFALGLLHVSPFAAARAPVGGFAWSFRPVRFFGGQKVGVTPFLPV

SEQ ID NO: 965327 - protein, 255 aa, Homo sapiens
MPKFKAALWGGGSWKNMRPCDDQILAWECVCCVRGCPGRMLAGGRGDMENAGEKSIVGAPGLMPDWINACNARGSNMDVNSDGLMHGDLGTMPCGCLLGTAPLLARGPKDMPSSDAIQALTAGTEEVVPNALERNVLDTNGQAKRRHTIHEGALCGPHEGTERLWPNTTSGPIETHKTRPHLAKRRQHHCALPNFAPLRTNQLAALAENGRTDGRDLAEHWFQWVTAGAWYGGLIPVYSAHTDLGHPAWAEPYEG

SEQ ID NO: 965328 - protein, 182 aa, Homo sapiens
SPGERRCRVEILREGDRIRWRGSPLLCIGLKNDKPTSAMKDPSQQSTSPSIINEDVIINGHSHEDDNPFAEYMWMEDSARKRFKREIEEAVMGKKRIYCTLFPRNAGRGTKSDEVVYSERRDLREEYGPNPKTSLMTLSSVMALLWKILWSTSNLNPNANGVCSWGEVRKVFEYDGALFWWM

SEQ ID NO: 965329 - protein, 120 aa, Homo sapiens
YRSRSATPANRALRAYRRCRDRYISTPWIATSYPDADAGTTPTARMSRSYEASKTASNGTTHFRVAPYPSDADQNALSPSTPDTLSLPPEYLEEQQKEGLTRHVWQTPGALRPGPTARTR

SEQ ID NO: 965330 - protein, 361 aa, Homo sapiens
YIPRFWTFETGCTVCDEGLRSLKGIGDEALPTVLVAVFIEQPTAVSSPCSSSWLLLVHYPQKHMRLFIHNHDAATTRLRWTTFLCTAMFRTYQLCERCWALQVRMRECRLPGTMVRTTCAGTDRSCTYYLQLCDCCRGPDRAQQTCGLLHPTATRMSLPRCMTRPGRLWSNFCPRSQLHMCYYAQSRGHTVEPLSQGAHDVGLSWHMCPNLSTQSTLESLAHVPLLWLTLARPSATALTHTTTQPSAHPEPWRIPGANKIQASRHVRHRHLKQPGSTRWRIMDTRRTGNAHNQPAQTDPRQKGDKQPPRDGPPRTTHHRNPRHGPATQHRRHSRPGGTRATIITADAHHRSDHAHSPATCA

SEQ ID NO: 965331 - protein, 73 aa, Homo sapiens
SQREQALREAEPVPLLASLAFPKRAVSGVVLFPDSPACMSSPVGDRAFWCSFPMMFRRRTYSSRWDLPIHTFA

SEQ ID NO: 965332 - protein, 110 aa, Homo sapiens
MGLVGTVSKGAHLRCHRSNKRRVTRGHPWWSITVLEEVKWLILLVHCNMTIEIRTPEEIPLIYLIGMILSDTPSANHKTEIINPVWTSLDFTWNPDKHNAGTDRNCIWNK

SEQ ID NO: 965333 - protein, 290 aa, Homo sapiens
KPDQKQRDNILARRAREGVYIFTYLHSYLTYINAINGQSSCNDEHGQRSADGLCCSSSQRMTAMRSPRTQDLIRLYDIILQNLGGICSSFLVIEEDKAFQNEIVPQALCVFKAYSVEHQHLLSPHVLVTHSWHAHTPLSCMTELLNYAPDVHSDCWPYQATRLKELPAAVAELITTTCGQHYTHSLPLHMDPPAHPIALAHCTSTHNTNNSNHQAPSIPYHSQCNTKHSCAKQLGLRTTNCLGTETHTPHGHTHDPTKKRCYDHHSPTQTHHQAPHPPCGPRVMTPESRV

SEQ ID NO: 965334 - protein, 133 aa, Homo sapiens
SSCCISIVGHSNERCDGGIYIGSIMKGGVVAADGRIEPGDMLLQVNEINFENMSNDDAVRVLREIVHKPGPITLTVAKCWDPSPRGCFTLPRSEPIRPIDPAAWVSHTAAMTGTFPAYGMSPSLSTILSLCLG

SEQ ID NO: 965335 - protein, 98 aa, Homo sapiens
MEFEISLDGRERNAWQVRGQELTCTARDSRLLVKLPFTVCFSWVEQRGSWRTPLVRVWVRAPGFPNLEGKGVIKTFALLGLQGVNPTYCTGWDALDLG

SEQ ID NO: 965336 - protein, 251 aa, Homo sapiens
QACLLPEPLQEPYYQAPYTLVWSSPASSCILSGRWPLAGGYKKRPGIEILFHQLAPLYEIVIFYDRVTGYDCCFQLIDEMWTPYGFISYRLFLGRHKIHGMDTMFKDISCLNRDPASSSSCGTAEKESLFRLQALVDGVALRPWDGNSDDRVLSDLSAFLKTIALNGVEDVEAVLEHYALEDDPDCRLYKQRVKPAESQEVAAESPWSELSKSQQAVTSFLGSLTSPLLARLHTALNSWGSSNSVLGPGPQ

SEQ ID NO: 965337 - protein, 94 aa, Homo sapiens
MCSVDPGVAETPGHKDDKGGTTISHLCYLGQRVSTNFVEAYFNGRHKNECMGSPGKLQVSLIYIRDIIIGVLLYNYALNSTFVFMNTSVCLPKK

SEQ ID NO: 965338 - protein, 497 aa, Homo sapiens
GQEQGAHTRRLVEKGAKKKVVDPFSKKDGYDVKAPAMFNTKKYLARRSSPWTQGTINGILMGLNGVGVFEGELLRDSADTWMDTLASLGTYFRALQLTSHMHVPVLYQRLAMNLSFPSGNRQSVSPSTNEDVDNPSGLHKQEWGQQRNVVWRASERSRSVLQVALPASGVLAYWPFAGTWVFLDEYGDISKLREHTTVRPRVLGIAENREPSVNVAFKATPQSGLTTRNSRKGNDCNREESLSPGGNVFGRKRKLASFGTHGKGLWITNLTDLVDVYPTNHKGKLGGKHNAYVTKEHQRGDYVAKDPLNLVMAPSICSNLVKLGRPSFRVDRGTTEGLHNIVGLRENGENDPTKRSMRRIVGLDNTELPWRHASIVDRGIAKREASTYMRTWRPKTQGAQLRRGWYEESNRHSTTSNNRALQHTPRRWHWVQLTKRSAANPQGRAKQESALRRSNNQMMRAHQSSRNDNKWGDGKIQTQTNRENHAGNGKEATAKRQ

SEQ ID NO: 965339 - protein, 217 aa, Homo sapiens
MAPWGHTHPRALPVRRAWLPPHIRRRHEGGAGAKTHHTAPHGGVLPTRGSEPRSEEYSYALCFAAVGGVVSPQRSTTTAHECAAPTRLYYTRAVTKRNVCGAAVSTQHQTPGQVVDGTRWAGPPNYQVGATGGWAALVWRGGARHKTSRAGGRYLRRQQHPTGPAATTPTGAHTPPKPGGETTTTHRVEGREPHPPKIQPARGTRTPRRATPNTTNA

SEQ ID NO: 965340 - protein, 109 aa, Homo sapiens
GEEIVVVLVCTGFVWAAHNKDVLRRMKKRYPTMCVYDVVMLVLQRILLISMFRRSHGSSVLWAFTLSFCCRCLSMHRVRLRNLKNNSWRIKLEGIRLQRTPMGIVLDAL

SEQ ID NO: 965341 - protein, 54 aa, Homo sapiens
MHCDVESSRVPALDRQDERSKVGKADPNAQQQLQNRAPTEQHTDTRALTEQQKE

SEQ ID NO: 965342 - protein, 83 aa, Homo sapiens
DTGSRWRHMLKTGGTLAGSSSMGFCLRRMTAVHLAHIQATPQPASPLLSPGRRQYEVMICRGRPYPVMPAWEAPLLLPILTLC

SEQ ID NO: 965343 - protein, 77 aa, Homo sapiens
RCRAKLPLKANNGEREKTHINIVVIGHVSIRRKSTTTGHLDLYNACWPLTKRTIEKFCRSEAAEMGTGSFNVCLGLG

SEQ ID NO: 965344 - protein, 90 aa, Homo sapiens
RRLFLGPSATFFVPLSRDRSLLSRYFVPRCPASRSVFSLSVVSVVCASHFVIVALFFESLGVLFRSGLGASSGLIPVLIQVTRPYRAGAW

SEQ ID NO: 965345 - protein, 269 aa, Homo sapiens
MWETHNQQNINKTRGAWVTTFSQDNSGGDHGKALLTRGDKGAPVRTQFSHNIYEKEANGGAHLREGYHPLGVWGGPPWGAGDKTRIGTLIKEKPKHTKYLWGASTEHNSANVFHPTGCFGGAPPKPPTVRHGEKNTLGGLLTISICGGLGETHFHPDWRYFGGAQGNDPGGATTLFGCKQPNKIQNEDELVRKVKIEQDIDNKGAHKGQTSQETYSWACGRDPYIFGKDSEAQKKVRTNNCVVEQLLVVGNEGDGATRLGLRTPTISEL

SEQ ID NO: 965346 - protein, 63 aa, Homo sapiens
FPHSRLNGLNSICLTLLVLVWIQAEARYDSGVISNNNCHICITFFHFYTILKESSYILVTPIL

SEQ ID NO: 965347 - protein, 310 aa, Homo sapiens
LACINDEYYVCPIWWIRGQLEGASLTAVCQIKVFDDAYRKVLVSSLDRVGCPLQAQGKFGEDHQRDLTLTIKATKGLVGRGPVQEYLLQVGSRWSEVISCVLYDQSLGSLGAVILKGSEEVQNVGPEDNPRARDELVEAACALTCDWRRADPESGPSGFHRIESQPASLLQQHLISARSATCPCAEGHGALLHEDEHAPRERSSKPKNGKRSQRVAAHKKPERLASPPGDLEARNCGPCPLATVDEREASSVSGELLAPIVANKLAGLLALVGSGWHSGSLTTGARWSISSANSQSIKRIRGPKDSSRVA

SEQ ID NO: 965348 - protein, 83 aa, Homo sapiens
MLVAGHEDSNGCTTYNAFVMAYPARGDGPMWAELVRMVLNGWATFPISPESVPFPCVNLRTLAQSFPSASLSPPLSPLVSSLV

SEQ ID NO: 965349 - protein, 202 aa, Homo sapiens
MRELGVATVGPKSALKRSGAQGGGTTSAWGSRGHVWRQSPPKNPGATARWKGENLFKGIFPPRETGVRMNPSLMWRGPPKNTFGGAPVWAQYLLSERAFGEKKRTFGCTTGEGQISGGARPFENASGKAAMFRQGKYSTGTTQGALGGEPTIGGMGTPVWKDKSPKITRRDSLGNVGCEKHFRRKGPPQKTPVGDQGEVLSG

SEQ ID NO: 965350 - protein, 125 aa, Homo sapiens
MVVPPRWQPRGDNNTFGGGPRKKSALPHRGVTHQEERRWAHEKPSGGERPTRKKKSARSVGGWRYTPPHPTKKRMWRQEENAREVVQPHRFVSRTNRDDENEISETTKPNTSKCQVRPDVMRRGR

SEQ ID NO: 965351 - protein, 101 aa, Homo sapiens
  misc_feature (1)..(1): Xaa can be any naturally occurring amino acid
XLCVRFLLLLLFNDVFLLFSLRRVVFYFPPVRDVSLLVGCILARVLCFPRVLYYCGCGSFTLFYQLAVFLSVLCMLLRSWCSLLRSCLLFCLFIWCGVCFC

SEQ ID NO: 965352 - protein, 426 aa, Homo sapiens
RERERERERERWRRRTWISPGVDGNCKNPKPPKLNEGPLITPLSSPYKKMGVSLKDEKGTNSLLGNPLFLWGEVERARVSSNLQCWLLAEGRNQRAGEQLFFCWHHAGEVVRVDQDTKAEHAAGEYTQGGKKRCVAVEEDHLKNTREGTLRGVFLLGCCSSQSYIGPLGGGCVDDATTTISHTISSQSVVVLVLLTRRIFIQQSRDVAPVAPLMVCWETLTMLLAVQAGIRGMGVVGQCQPGGGDNNNTNAHVVTRVLYSWVSWHRCTLSDPGVPDRPLLFYKRPQQGVGRVCKGHSAPGPGLVPEEAWSLGVRGQVREYAGLHIMAKDTSAQTPDQVSSTSVVLFPQGLCVQEQQGQLYPEGGDRRPLTIRPHTYRVIEGEYSSGYQQFYKNRETLIYRMCGEQGKKAGMDDTQAEPRSHREESA

SEQ ID NO: 965353 - protein, 104 aa, Homo sapiens
GPPGRTVVHDLFGFVSSVRPRFRVVPSAKPTGPEHKLPEYGLRDSTRNFEYKFAISGKKDHGDTQCRNKCHLPFPQGISIESRMNAQSRRYSLMKAVRRHIWHL

SEQ ID NO: 965354 - protein, 193 aa, Homo sapiens
YEEIGIFVEKAQDDPSTVRVPGPDWAVLPGALSLRTWRDLYSRYKKLQQELEFLEVQEEYIQRGGKHEPLKNGSFSSAQGRSVDRKSKGISAWFTREQVSLARAGGITTYPGSIGWGFLPNEGRPRSVISVWLPASFPLEGQSPIPDSRGKGLGLPRRPAKSGPFHVLVPPSPRKRADNGEEFGSLGVGDPVS

SEQ ID NO: 965355 - protein, 103 aa, Homo sapiens
MEISFVMYPCVFSLSLVSTGLWPVVSLAGQGLVRPVICSSISLTNHGHGWLSSKPSRHRAKLIWAPTTLRTALLADVVLHHCFLRIDEHECDLTDFGQLVPFP

SEQ ID NO: 965356 - protein, 562 aa, Homo sapiens
  misc_feature (548)..(548): Xaa can be any naturally occurring amino acid
RQRHSEVGIWHSEVGSVQRGRQAAQRGRQLAAEVWQLAAMVCAAVLRCLLLFRWTSEVHVRPLANDWQTSGLRLRKRACFRSSASTETKQSAIRMHRAAGQVAICRPRNCFRRPNCGPLAGEGHPLLCLLGLISFTGFITGVFSGNRDPTFRTRDSQMPPLQGAHSQHAEGEFRFRTQGRQREHVVRFRADAGSCPKVPRRRQNVRTTRRLNAPTPYFTCYKYLQKGYPFTRMGSVHPAGESNYPHGGVPRVREETFTPSAFITDASYIGASNHPERTHGTGTGLSGAFCFRPRQLPPRAPGCGAAYRLFMASPYGRVSNPLTPLYGSISRYPQKFCPHNLDRPYVPTYICGCHGAAHTPDERLGYCVGRGKVGPPPILQRVGNNARFCGAHIINAEGGDPNDDHIERYIGSSARACVVAHNYYPTAAVVRAVHNGYLPLRTRLSIATIIAAYRPTVTDSAPPLRREGHHHVVFAFNIYARQPLIGSRWRYMLWARTIRHRGRLWHYCNNPLCLSHTLINHERAFLLQPRLCNVPTGQIHYTRATPCXSSYSTGCALRRPMY

SEQ ID NO: 965357 - protein, 52 aa, Homo sapiens
PTRDNEMYKMKRRDDGALRETQGRRMKRAIMQLGTTLLSLYHILSRSIGVCY

SEQ ID NO: 965358 - protein, 421 aa, Homo sapiens
  misc_feature (334)..(334): Xaa can be any naturally occurring amino acid
MCVPLCSRVVPREGAKGTIGSSGPKKRGCGSPVGREKLCGRQVVSDKQKGCDNSGEKEGGCVGPPTDPKFSRQGGGAPKSEAAHKSVAPKTTTQMVAAAAANNHLFRLATLISLPTTLLWLFPRVKCTPAVVGGNNNDERGATALCCRQGADKMCAPQRGSHKGGHRAPPFGNDLTAGDITRGEESATNKKVGAAGVEIFPPRLLFFFPSVHKGQRDITHQPQFFGKRGTKGRVCTLVCPPDVKNSETFPSDGPHSEGCSTHDEGGAPPPTCQNKLRTGEGMVGKDSHNKTELLQNDPNTRVRTVAVWRNTVWGDRRPHLSVGRSATLIHCYHXRRNLLSVSRQLPREKRRHLERRSGSPPVVSGYSWTGRETAGGKKKESHQSSIKTLFVLCPPQPKIRAGGRHQHTHTEEVKVRGQRER

SEQ ID NO: 965359 - protein, 69 aa, Homo sapiens
TQINDDDIIYWGKALCEVVPYVSVSFRYREEFEVDMTPSLDYSGLNSDHVGLYSWNKRTFNSGCTIGMS

SEQ ID NO: 965360 - protein, 421 aa, Homo sapiens
WEPVAFIHAPLTKCREKQGPVSENNSRGLWTSVGSPYVQTLSPVCKPKVCIKGAWVVCDHPLWGRSKGAKSPEGPVEERARAIRRWPPKKRRGKGRARCQPTSRGLRKTKSAARVAKEGAPVYTYGKPSSKPGESPLRGEGRGEYVYKRGALTFSCYPLFLHRRRCGHVLRNTGALCGKLLPDRKSAGKSPPFSEAPCGSPVAGNPVVRRPTAPPEVVVRKILSKRQPLPAEESPLSLVGHNVECCKNTLNEGHQPQKGATCGNRRGSVPKYVFPRGALSPFKKPRNRGAPPWRSSTSLCGQKTLFITWRLITVPHYGATQRDPLIIKFPHKPKVTIELAANGLEGSPTKRSINHPSVEDPRLSHEQTACPQRAGARRRGQRWHKSAPMTDYKQREASRENEHKGRRDLAPKEPSRSTTKY

SEQ ID NO: 965361 - protein, 136 aa, Homo sapiens
MFLSVHLRVHCYRPTARGLVLLKKIASVDYNNALFPFSSVHHTRLSTTICSVPSRITCAVGSVPAAAVSERLQGNNQGGSDSLTSISTSFLGGNHFSRTVNDGSTANRDGVSETLGTYGSGSYMTWLCVVVLFNTP

SEQ ID NO: 965362 - protein, 103 aa, Homo sapiens
MSCKILGGTLCAQCVYRALLEHFFKPKDYRLNVSLFSSGPGILTPELGAFPCYPVPYSIGVPPRDSVLAGFAAVSAPRCPWFRGRCTCHCLPVACRWATRFRS

SEQ ID NO: 965363 - protein, 424 aa, Homo sapiens
RKEPGRRTAGMSYDRAITDLLDPTDTSSNVDVRARTAVKNGLDRGLDVRRNDDHLIVSMDVDERQSRVPTPGQSMQQHTSSGASTHCAYMRMHPHRSCQWHIYAQSTSTSTAMPHGIRSIKTTGHPENEHAAQERHKHQDLAHDSAENAQRITLSETAHQFKHPSINQYRATQGDHWDKKSTTNRLTPKPHNHPHQTHANNIGGGPAPKQGSNQPHINEEERPLNHTNTVSYTQITTRQLHTVDRRRSTKQTKQIKDTKRKEDKTTQPKQEQRTTHNTNPQQTTSRQHTPTQIHEKRDTTLKHNNNQEKGHTGCGTTERRPPTPTTHTRHKRITQDQPSPKQGLARHTEHPHRRQHIPPNGTREHPPRKANSTSHPLCGTQTQTTATHNNTKNHTRRRNPRDTPRTTPTQASEHTKPTHAHSLD

SEQ ID NO: 965364 - protein, 60 aa, Homo sapiens
LEDPINNRFTTVDVLIMDIPHSAAAIKGSFVQLIKVLRDLSSDRSNPSRFLSTSNSSLFD

SEQ ID NO: 965365 - protein, 456 aa, Homo sapiens
MWANEQALAYGLILITVGHRGHQMGASPSGTIGAYSIVAGLCFVVPAVSTPVGKRQDRAPTMDAVVDQKHMTAEVEASSWPFYQDITIVSRPHHASNLNTQDDHRPWTYLGLEQHTLLRNTGAMTHEDTWPDSGTIVTPITMAAQGAHRRTKHTQRHEPKHTRTATKDTQAQTDHATKQERANNPTPEDRTTGHEPDEGTEGDQQRQQTRQAHQHRTEHAATQTTTAGTGETEKQHPQATQARTRGTRGRQKQHTTRGRSGTQERHSESRQTNNTPQQTRRRRRKRRTEHARHPEPTTKAGNNTQTQRTNRREDSRDKQERHTRAESGEEEKTEGTKVKARRTRPERGEGGAHKARMRRTEEETEERPEEDGRKTNGQEKRDEKTEKEADRKGHRDESGHKKKEKGRKKNDDEESRKEKKKGPQAANMDKKREKENEENSEQKENEGQAATETENE

SEQ ID NO: 965366 - protein, 259 aa, Homo sapiens
PDLLPLQKRPCSSCLHLAGSTATEFAAVPAQKREFPAQGHRRASQLECGQRQTLGLQGSGPQGVNEEGILQAPDIAMRVAVINPKPSSIIHSLLHLFILLSQELGYNRKETGHRQTGKAIPGSERRRELCELEMMRKRGEGRGRFRKAAGDVLFEEVTLSLEPSQELGKSMSGPENCRCKGPEAGPQQDPSRCRCRCKGPKAGPEQVQVQRPWGRTEQIAGAKALRRDLSRYGCKGPEAGPEQACLRGQRTPVCLEQRV

SEQ ID NO: 965367 - protein, 74 aa, Homo sapiens
PDETRWESLLETMKAYGKLYRYYYNPHRERHGTLGETGKVLSHSAPLRTSSVPMGPSPRQDMPHQRFIVYTTIC

SEQ ID NO: 965368 - protein, 249 aa, Homo sapiens
MVPRLECSGVISVTTNYTSQPLPWLPKCRDCSLCPAAPRLGSEECLCLAPIVWDVRSPSAGCPVWKVRSVSTRPPSHLGSEERLFPAPSHLGSEERLCLAAISEMWGAPLPGAHLGCEERLCPAAARLRSEEPLRPAAAPSDHVRSLSARQPTHLGTVTAVPISDDRNTFALLEIRVSLCHPGCALPVAVILRLPARIHISCIHVILLHQLPYYAGTYHSCPSYFLYSLHRSVHHTSPMCLQLPCLTHS

SEQ ID NO: 965369 - protein, 188 aa, Homo sapiens
MAFLMLTERKILGYIQLRKGPNVVGPIRVYYNPFADAIKLFTKEPLKPAHLPSPSRSTALELSSHHRLHTYETPPRPHTPKAALVRSLRTLVRLHMYVILDQRSRPETRFISNPSVSVDDDIRDVKTYVGRDSETLRASTPQQSRYDRFTPSPSLLSYTNIDVISGSFNSSRALINEHKNSSDYSCHS

SEQ ID NO: 965370 - protein, 200 aa, Homo sapiens
MCHVRARDPEELLCESLVVSPTLLRQAESLCPHNPTDDPQCVPTSVERGQSCDTPFLLSRCWGCVPKNTYNTELWPHRGLITRGPPEKSGGEGVSITKQTARARRRGSRPPITKWRHVRAAPSAGSRRNQRRPAGAAGGSTHKPGGAGLLAAPRRTGGGGPPTHGEEGGALPPNDYHKRGGARHHQWGGTHPNNTTHAAE

SEQ ID NO: 965371 - protein, 181 aa, Homo sapiens
  misc_feature (77)..(77): Xaa can be any naturally occurring amino acid
HRGSCLQSQHFRRPRRVDHEVRRSRPSWPTRRNPVSTKDTKNKLARRGGGRLQSQPLGRPRQENGVNPGGGAAVSRXCATALQPGQQSETPSQKKKKGKKIGSMPSWFLQEEELRGRGKTQTQGPELHMREVKDKICLLLFQTRNHGDAGGGLRQAFIRGKTATLGRRQGSGGTRLLGPES

SEQ ID NO: 965372 - protein, 113 aa, Homo sapiens
FVDTNNGRPPQPGCGVDLDKRQGLQRRHPWPWINFLGQIVQRPFLAVPAVPGGLASTHCHHAPRNSQNDTCDTVPHTADAPLERFLWARLLCLSRQPVTLVVPFFFDVRVPQL

SEQ ID NO: 965373 - protein, 173 aa, Homo sapiens
  misc_feature (159)..(159): Xaa can be any naturally occurring amino acid
MFKLLNCKEKVLQFFSQRVVTNPCATSQQCDFSRQGTAARNSTPLTINTWYVECDGHRVKQGQFPVQTSEPARGEKPPCERTPGEKAVGESPDCVWWTPGCLHLCLGCHSQPGTRWPRALEKPAARGALVTRWALQLAPTWAQKRSGEIVRRLRTLAPXEHTWVRREKGSPGV

SEQ ID NO: 965374 - protein, 69 aa, Homo sapiens
RRRTTAQNKTLEGPLILSLLSFPFSILSPRSPHLTSELLCPLDPHISLADFLVLLIPNSASHVFVISCF

SEQ ID NO: 965375 - protein, 284 aa, Homo sapiens
  misc_feature (255)..(255): Xaa can be any naturally occurring amino acid
LCCFPMVYPMKITGTVLCWHLYYIWLHSLIGCLPPLFGWSSVEFDEFNMDVCGCLGPGDLATRPSGRSGVPFFPFHGHAGVLWLHLPLLGKGSKAQQGALWLLVRHRGGGCSEDREEELQSSSTSLFEAEQEEVPFRLWSISANQCKALITILVVLGAFMVTWGPYMVVIASEALWGKSSSHPRVLEILGMMVCPLLSDVWQPLIYGVWNKISSHENYVGMCLGDRYYREAFVQVTVDFQGFSISNMIHRPVSVXELNGGMGRWKALGPGQDGCLVQVSRIRAD

SEQ ID NO: 965376 - protein, 76 aa, Homo sapiens
  misc_feature (50)..(50): Xaa can be any naturally occurring amino acid
FVEEQRHLSSEPLSRKKLYALYTKSPLQISVNYNYSQPRERNPWFYYRSXDNHYFIPYLGYHHADEATSPERLNAG

SEQ ID NO: 965377 - protein, 91 aa, Homo sapiens
MIDAGDDKRRHTGGLNPHKTHGRVTHTSADSPQEEQKRRSHKQREYLTSTRSQPTRRTSTNIALTDNSSDRASTNRQVATCVGIHTPSTES

SEQ ID NO: 965378 - protein, 157 aa, Homo sapiens
  misc_feature (75)..(75): Xaa can be any naturally occurring amino acid
  misc_feature (79)..(80): Xaa can be any naturally occurring amino acid
  misc_feature (82)..(82): Xaa can be any naturally occurring amino acid
  misc_feature (120)..(120): Xaa can be any naturally occurring amino acid
  misc_feature (127)..(127): Xaa can be any naturally occurring amino acid
  misc_feature (156)..(156): Xaa can be any naturally occurring amino acid
QAMQNSGIVLERAAGEEGALEPAPAAGSSPQPLAVACPCMLACVLVKLHACCETHGGQRWPQLVPMDPPMSSCCXLEEXXSXLTCMPNPVKCPQDGATPGPEACSALRCQLLANGPFPPXRAPLNPXWPFSKAKSPIPKRQGLPTVAVEAWPAFPXF

SEQ ID NO: 965379 - protein, 80 aa, Homo sapiens
AITRVSPGEEQRHDSQTAHPEILQIIDSHICTVSCEGAEGIFFTVAANLNILYNTDSCVYVILILLCFYSFGAWETPQKG

SEQ ID NO: 965380 - protein, 90 aa, Homo sapiens
NVIVRMAAARSSKPLRGRFSNVVTGKPLGGEVEDVLLWVLRVPGAAGAAGRSAYNLSRKVVQGRGAFFQALALAGLRHHLAGAAAVVLRR

SEQ ID NO: 965381 - protein, 140 aa, Homo sapiens
RITVLRSRIRFIHEVTGCVLGSSGKVLPKMGLGAVGSYLHPIPEQKTLNSIWNVEAHINPKLPNISLDVLQTQIYLRSCMESHMVMIRGNSGHQTQGQCVQVQTLALAISNYQGTMTYQGSNDKDLHEIYMNWKTGGYGG

SEQ ID NO: 965382 - protein, 154 aa, Homo sapiens
MDVWEEGRKNKYFYMCARGRQFQGCGVQECGLRFQKTNSGDTGKLDQGTLGSRVCSMVWVSQALFRGRIWVQQFFSEHTFGARRPKEWLSVTVRSKLRCRVSECTVPGWKHGQRGINTDECGTRGCQEARGPWAYGASEDTGRVTACARYGLNI

SEQ ID NO: 965383 - protein, 98 aa, Homo sapiens
VRYTSIAENESKEQSRFNLMEKMLQPCGPPADKPEENETLPYHRSAGHHLTSVSSGFANSILSIPCLHKDRFLHALLAPRCFSADRSGGYLYQSHLQR

SEQ ID NO: 965384 - protein, 248 aa, Homo sapiens
MATQRRDRVAWLLCTHTGVNMRLPSQELDWPGLHFWSLCHPETHDAAPSQRYRSAYYEDLWPALLQPSDSISANVNFTLTHLMANKDPTTGLTAIQRLTLSCMSWFLSSLFYRPLSSHQLTSLLLHATHFLQYVSQLMEAIIKCHGSSLPRELPGTLPSPLQRALGAAHRSPGATRPLDPVRTNQHEATSPPDNEINTHSTATRTNDTRLRRHPRHNETGMTDQQAPPGPYPNHPTTPTIPAQSARQQ

SEQ ID NO: 965385 - protein, 37 aa, Homo sapiens
MLVYKIRTGKGTDSGETGKCPAVIQYDHVVDELYHSM

SEQ ID NO: 965386 - protein, 74 aa, Homo sapiens
WVATHEHEGKPYCQPPLTTQTMFVGLNGFGRGGAESHTFQCKPWLVETPSLGCLQWPHVQANARPLSPDAQGIP

SEQ ID NO: 965387 - protein, 43 aa, Homo sapiens
MSSTIVYVIEFDKYNASQATYGKKKDESYGLSSTSSSIISYIA

SEQ ID NO: 965388 - protein, 349 aa, Homo sapiens
MNGKASSQANRRLQRYSWTQQHTTLPGCFSSTPVLHNTRNPPDRSAQASPSAATRAAGDRPAPCPAHGSLCLKLLHPAFPPYAQPNAALCSERNHGLPAQAHTHTNWHTFLTQDSYYATRPKATTYVTGSPHTLDTAHAPSIRDIPMGELTFRRNPQALRWAPPYPYGQAFLLPPPPLHAWAYSLSSVYPLNAAPWSTYLPRRPWGLVFVPPSGAFPLVPPDFSFQCTPFSPLFSLYTLPRFGLSFKVGFWPPPGTGGSYTLSGHPCAPPTGRLSPSTPMVASPGFLRLLLQLKLPSAALTLRPALRPLPTSLTLPLDLSRSAPAAYLPHFTSRIRPAHLWPAVPLPAP

SEQ ID NO: 965389 - protein, 46 aa, Homo sapiens
NLISGSRIYFPVASIHYFPRSLGQSVLAGDDEFSWLSCLLREINAL

SEQ ID NO: 965390 - protein, 34 aa, Homo sapiens
NESHTFRHFYSRDDIGIILINQYIAQMCGMPWTP

SEQ ID NO: 965391 - protein, 84 aa, Homo sapiens
DLTNQPPFRLLVRSIMHILLVSRRCQAVENRSRELALEVDQAWRLAVKEVEGAFRVQEPYPPQADGLHPLHGAHIKDVHAKPCV

SEQ ID NO: 965392 - protein, 122 aa, Homo sapiens
LLAGLAGSVAHLAVWGCSHSVRYCSSVVQVVVQLSTLSLVFPLRRTNAGLTQPCVSPRASWMTPGHGHQWSTHLLLRWCRTVQIADWRRPLWRGGKVDLQVAHGFDNGHDGLDGVAVDNRPV

SEQ ID NO: 965393 - protein, 82 aa, Homo sapiens
VRERMMHDSAEEWSQLLTWSALEAVLATKNVEPYDAVGNGERDDSQATLEARSEGKHRRPRYKLYISSCLNLFGFRLVFYLV

SEQ ID NO: 965394 - protein, 55 aa, Homo sapiens
GREVICYSRASSVGSPPTGNFAVLHQARKRDLFRSFSKVWTDVEVIETCRLVLTE

SEQ ID NO: 965395 - protein, 63 aa, Homo sapiens
YSQLVYQAFAGAGEILREGRDMAIQDWCFWVHGVFSKDQRWSEDEVFEMVYYELLCKSRTWRR

SEQ ID NO: 965396 - protein, 72 aa, Homo sapiens
MDTRDADFNGTKASESATFYSFAPRQENQKPKQTNKKNPTTTQNKAKPSRLYLALSKSILKFQISQTPLILP

SEQ ID NO: 965397 - protein, 66 aa, Homo sapiens
MIPCTADLSILRGGGQIIPTARRCLYRQCADRPATPHVSPSTLEEIQCPEQAEISGIYGDIEQESG

SEQ ID NO: 965398 - protein, 85 aa, Homo sapiens
QFAGSRRACLFISIPVHVIGLSHRFHYWCHGMVMDLGSPENKGREDSLVVNKMLTTAFSWEIRDRPCSSFFVFLYESERGDRNMN

SEQ ID NO: 965399 - protein, 54 aa, Homo sapiens
MVLHFYHVKSSLAQPQMMVVSDVADMFVPLLDGFLVNVNESRAFSPAYWIRFQK

SEQ ID NO: 965400 - protein, 127 aa, Homo sapiens
  misc_feature (63)..(63): Xaa can be any naturally occurring amino acid
  misc_feature (78)..(78): Xaa can be any naturally occurring amino acid
  misc_feature (83)..(83): Xaa can be any naturally occurring amino acid
  misc_feature (88)..(88): Xaa can be any naturally occurring amino acid
  misc_feature (96)..(96): Xaa can be any naturally occurring amino acid
  misc_feature (103)..(103): Xaa can be any naturally occurring amino acid
  misc_feature (108)..(108): Xaa can be any naturally occurring amino acid
MCVLEQDQRIDSAAPSTVGFRTPVTKPVHGQAASMRVHLIFKNNSIFQCELTPLKPGLKHFPXFSKGNKLLPKRCRLXGPRAXAPIWXGGAVWTPXWGRPGGXAQWPXFPGRPFRNAALATDRVSAA

SEQ ID NO: 965401 - protein, 76 aa, Homo sapiens
FSRRDPSYAMALSHMRPPMECRYHLLNRFSSTPGSSILHLKVIRLSHKASHCMDFTDGSDFPIYKPFIDRLYISFH

SEQ ID NO: 965402 - protein, 69 aa, Homo sapiens
DMIRLDLGTTTVALWTNYLQNEFSHILQGVNSELKTWHIDDICKISVQYAFSDAIMRCEVKALPLSSHM

SEQ ID NO: 965403 - protein, 54 aa, Homo sapiens
MIESSSVPKWCLGNLSKVNQCPSATYAIFGHTFFFLQFGKLPGKAVFTKYPLVS

SEQ ID NO: 965404 - protein, 41 aa, Homo sapiens
LLAYWRGSHENSKRPLSIMKEMPQDFSTSKKLVGIMAHSEV

SEQ ID NO: 965405 - protein, 71 aa, Homo sapiens
LSGLQEDVGNILGLRVLYSYKKDHRCSATTASNNELVRTTDLVKTCIVLIDSTTYRQWYESHYALTLGRTK

SEQ ID NO: 965406 - protein, 55 aa, Homo sapiens
IIPDIKRPQWVNTCFSQFWRGSHENSKRPVGIRLEMPQYSPLSRTLVEIWTHGGG

SEQ ID NO: 965407 - protein, 46 aa, Homo sapiens
PEELDDSDYEKEDRCQKQDERQTEDDQLIAGQSAGRSWLSFPRDRE

SEQ ID NO: 965408 - protein, 119 aa, Homo sapiens
LGSYTDEYIVGSYLIAHGFFSVYACVWTRCYILKYEEDLERNDGSAERPYFMSSTLKKLLKQEQHEGSGVLKAPMTTPPLKESHAAGCSVTRSVPPAPWAHLKSYHCRSAPPHEPDPNS

SEQ ID NO: 965409 - protein, 76 aa, Homo sapiens
LSRAEEGAGKGTSNEETPVFEQEFNTVTTLGENKKAQTDGDCTRRWIPSELVVLYACHCVVKLGVPLLHYQGKGKT

SEQ ID NO: 965410 - protein, 106 aa, Homo sapiens
LEIVLGSSPGASAWGSAIYGSYILLLTIHMDMEMDVVQDQGPDEAQDQLQVPVHDGLAVDETTSLMLSRSRNSSATDTFSSCIRRKVGRWYCLRSIFFWLSTSNKR

SEQ ID NO: 965411 - protein, 54 aa, Homo sapiens
CEDDSDIIHALKMDVVDIYHLTGYKERQRRTNIIRDHGLINLRQLQLMERRNPK

SEQ ID NO: 965412 - protein, 50 aa, Homo sapiens
RLLDPLWGHRDVAYIVVCPENEALSEGSQTVSSGDYDVPVYDDCVGYGHA

SEQ ID NO: 965413 - protein, 58 aa, Homo sapiens
GACGSVGYDLLKDGGVRPRIKSLSSLKPLVIFCHSAKNEDACFRFSMSRTWNLSNKRL

SEQ ID NO: 965414 - protein, 73 aa, Homo sapiens
MNPEDIRKHLLVHAPEDKKEILASFISVPLQFLQRTCTSPYLDDQSHLVTWVCLCGMGARVPVPNKRLGVPEA

SEQ ID NO: 965415 - protein, 65 aa, Homo sapiens
MDTSFLFTVVGMTGHCISKLITRHRTTRHVLRCRPTSTNVLYNRTLYIAINTAASYHWISPNSSG

SEQ ID NO: 965416 - protein, 132 aa, Homo sapiens
ILLALVTTTGSKIALARVRPDIAETEAAYLKILESSQTLLSVLKREAGNLTKATAPDQKSSGGRDSCPDHGQALPSVCPSAQPQQVCAQSIFVLHGSRYLPSLSQVPRGAGCQASTGISDECPAGYRAPNRT

SEQ ID NO: 965417 - protein, 118 aa, Homo sapiens
TALSSTDFYLSRLEINMLAFIPSSNRKNKPLVPQKLAIKYFLHASHRIHYSSNSYSLPPYSLRTMDPNQYYPSILLLNSPYGYSNKTKNRPLSLLNPRGYPREPSDLRAASSHLTSGP

SEQ ID NO: 965418 - protein, 49 aa, Homo sapiens
MVKELRDHADSNIVIMLVGTKSDLRHLRAVLQMKQELLQKRMVCHSSNL

SEQ ID NO: 965419 - protein, 75 aa, Homo sapiens
GDSTGSYGHSSQRYARYDFYLSRPRNKHASFYSSSNQKNNPRSTEAAIEYFPHASNRIHNSSNKLYLFNNITSPE

SEQ ID NO: 965420 - protein, 141 aa, Homo sapiens
SSCCNLSKEGGRFPTKKVAVAHQPKKAAVTPGKRQQQHLARRQLHQPKQFTTPCQEGSHTKGKALVGNSWEERVLPIPAKGAKNGKNATEDRGDEEEDDDSEEDEEDDEDEDEDDDEIEPAAMKAAAACPDSEDEDDEDDE

SEQ ID NO: 965421 - protein, 33 aa, Homo sapiens
REDIRMPSRAEGLHQDGGRFREDPEVSRCDECP

SEQ ID NO: 965422 - protein, 129 aa, Homo sapiens
VDTQIKAEGAATQQEGGRFPNKKRLQLPHQPRKQLLLQGKRQQQHLPRRQLHQPKAVTTPIKKGATPGKALLATPGKKGAAIPAKAAKNGKNAKKEDSDEEEDDDSEEDEEDDEDEDEDEDEIEPAVMK

SEQ ID NO: 965423 - protein, 56 aa, Homo sapiens
  misc_feature (34)..(34): Xaa can be any naturally occurring amino acid
MVLIVTSDSINMCASHVHPYETQLGSSPMSPFEXYLILFPVFIRIHWGMGRFGFCF

SEQ ID NO: 965424 - protein, 90 aa, Homo sapiens
MRYIDTILLELTTVRTRKTPALDITFCLPNEHTLCWFTSSSIKVRAVSLKVLVFQDMQQQATRKAFQQANFKHTKSSHLTGTDFVFNMYL

SEQ ID NO: 965425 - protein, 85 aa, Homo sapiens
MEKIWHTPSTTSCAWPEKEHPDAADRGPLNPKANREKMTHDLMFETFNTPAMYVAIHGCAIPVRLWPYHWHRDRNSGDGVTQQLC

SEQ ID NO: 965426 - protein, 39 aa, Homo sapiens
VDLRIPLALVITAIIVVHQISATEFIYFEIIAIKLTSAQ

SEQ ID NO: 965427 - protein, 34 aa, Homo sapiens
EEENSSIGHNRSASLMRHLFAVYFLLYNSAGCVL

SEQ ID NO: 965428 - protein, 50 aa, Homo sapiens
  misc_feature (31)..(31): Xaa can be any naturally occurring amino acid
DRHLKSGSLAANTFTLQCMLRQAADRMLPAXLTAWWDSLTSLRRLAEALP

SEQ ID NO: 965429 - protein, 40 aa, Homo sapiens
  misc_feature (19)..(19): Xaa can be any naturally occurring amino acid
LGLSVWEGLADADHVKPDXSASFCTSRPRSPRADLQVRCS

SEQ ID NO: 965430 - protein, 79 aa, Homo sapiens
SCPSCASPSDRRCGSKLSKIRVVRTTFAVFSQYYQTQKKPQEIYEGKMYTRLDLRAKKTRAMRRRVNKHEENLKTNKRL

SEQ ID NO: 965431 - protein, 40 aa, Homo sapiens
RCALELIYRAGGIQQFESASFLSFSSAEMSRFTVHTELYQ

SEQ ID NO: 965432 - protein, 94 aa, Homo sapiens
  misc_feature (44)..(44): Xaa can be any naturally occurring amino acid
GELLMVMNLSSEGGVHRAFSLDARSHSHLDTVSGGPRQRTVQYXHAATQVEGDAKHRQHRSGAGAADGGVPAHGRSGKLGPSATLKFCSSNKRL

SEQ ID NO: 965433 - protein, 75 aa, Homo sapiens
GLPGAVGGRRVPYVSFGPHAGKLVAIVDFMIRTGLWSMDLDTEVRREAMPFKCMQLTDFILKYPDSAHQKYVRHA

SEQ ID NO: 965434 - protein, 88 aa, Homo sapiens
TIYALWEMQTSQAGHWLCQGVDAWHKMRQLFHFCGACCQLLNFFMVGLLQAFIIHDDLVSDEGEAKDSKSTVPCNDNFWYCTHANKRL

SEQ ID NO: 965435 - protein, 152 aa, Homo sapiens
REMLRDVIMCSRLRQLRDKKKPCSTLIRYVIKEPIIKRKTSLKELGFCVHVKHPHKIIVMYLQVLECERNQHLVQTSWVASEGEVTKTSPLLSKRFGAGTAASSANPVQALHRRLALDWWYAHSIAMADSCCGSLTIVLLVNPLSFFGNRID

SEQ ID NO: 965436 - protein, 52 aa, Homo sapiens
MITLGWILLKMKQLSLRTVSSVAGAKDELHIVEAEAMNDEGSPIKVTLGNFE

SEQ ID NO: 965437 - protein, 52 aa, Homo sapiens
  misc_feature (26)..(26): Xaa can be any naturally occurring amino acid
RANLLRQDLMRRQEELRRMEELHNQXMQKRKEMQLRQEEERRRREEEMMIRH

SEQ ID NO: 965438 - protein, 79 aa, Homo sapiens
MEPLYPTYYCKNETFMNAFLVGIRPRIIGIEHHDESESEKDEDVEEEQMRTAEGKDDRKWRRTEIQQVTKTLNGNSAFA

SEQ ID NO: 965439 - protein, 92 aa, Homo sapiens
QAVPLLSKIKAVLSPLTEAAEEESDDEIADKDSEVGDLFPVYTSAFIILILCKNETFMNAFLVGISTEDTWDEDEEASASEKDEDVEKGKWR

SEQ ID NO: 965440 - protein, 124 aa, Homo sapiens
MPKQSCRCDFQAQHAGPKIDEKLVSLKYIIKSPDGHIVGKGRPAPTVSPLPAKTCNGCRYEFAIIEPSRTRTQTGMSQKVEGPIEQGLRMVSPRWGRGGDDVCTRTQLQLIEPSQCRGLYNNPN

SEQ ID NO: 965441 - protein, 75 aa, Homo sapiens
  misc_feature (68)..(68): Xaa can be any naturally occurring amino acid
YKILFSERHIIWSNLQVSRNDTIPEDFQEFQTQKFRPLRLLNQGSNLVTSFIGTLKTIYIFNYQLFFXHLPTHNI

SEQ ID NO: 965442 - protein, 41 aa, Homo sapiens
MRQDRQPKQLILINRPMISPALTGLKLLSFLVLLPDTSKEH

SEQ ID NO: 965443 - protein, 44 aa, Homo sapiens
IPNLLIPNSKYLINNRLNHHSKQRLTQTKPTKQMIHHYTTAKRT

SEQ ID NO: 965444 - protein, 37 aa, Homo sapiens
YQVSRKKGELQIHEGTGRIADQVIYKPDCRGDWVMFC

SEQ ID NO: 965445 - protein, 109 aa, Homo sapiens
VSQTYESLKGGGPQRFLMNMRFAQKHNKKGLKKMHANNAQVHECTCRGYQGPRIAQGGYSPRSRRVSAVKLDRLAYLAHPKLGKRARARIAKGLRLCRPEAYAQAKAKA

SEQ ID NO: 965446 - protein, 36 aa, Homo sapiens
EPAPDEENDYEGVIMKGDELFYDSASRSTRRYFPYH

SEQ ID NO: 965447 - protein, 54 aa, Homo sapiens
TGRRGWRKNKGLQVTLQIRGPPESPVAGVLLVWPSGGAEHAGVVQRVIELTGDL

SEQ ID NO: 965448 - protein, 77 aa, Homo sapiens
DHTLLSLLSSGDTCVILLFLRTLVQGEGVYYYIMFVSSATPHRAKGPAEYTMLKPETSSDSPSARSKGVRLVSAIPF

SEQ ID NO: 965449 - protein, 40 aa, Homo sapiens
ITRNTSSVCADTVLGYTVHHRGLLQCALERRGPEAGKVGW

SEQ ID NO: 965450 - protein, 101 aa, Homo sapiens
IDTSVMWRSSGDILGCSNLDKYDVPGYLLSASPSILAALGLTLGLHNFLPLFLLCFFYQELGPLGLLLGHLFGFYSSCVLSAKAQLCDGHIIQDEAEIPGL

SEQ ID NO: 965451 - protein, 39 aa, Homo sapiens
VVHGCQPSANPEVQVPRCGSSSRVEPVLIVWSKLFVLGQ

SEQ ID NO: 965452 - protein, 127 aa, Homo sapiens
MRSSQWSFSTIRRCTQTLITSICMQLRPNTRIDLKKKRRVVLDSFLLVLLELGELALRVGVKRGPVGGSALLLYRLCLPLDTEPRSILRRQLAAIITAPILSGEVHRGLVSLGTQSRKSHIAKIPGL

SEQ ID NO: 965453 - protein, 175 aa, Homo sapiens
PEFGSRDDSPHKVSLPAVQSAAHNLNSVTFLRVSTSNTCDRTGHGGSHTCEDTWGAKSPSEFDSGSGLRRSDVVHSAGSSDGQAQDFHNICDLLAGSDRRSIMMSLLVFLEIWSKALMLQKAHIVERVWEAVADRDPLACVFRLKQVVPTQPDLAIPGEEGGGCMRREKMGKGMD

SEQ ID NO: 965454 - protein, 110 aa, Homo sapiens
TATHRALYNMSRSEVIKAFRPDKDSSHDLMLLRLLQSTAKITDVVKVLGLPNQEPALGTTCYAIRLGQHQTRGVSLQCVSLHLLSNDMLCKSYYSEKVTEFMLCAALLDK

SEQ ID NO: 965455 - protein, 64 aa, Homo sapiens
HRQGVITCQQCSSAIGASVVSICHKSKNLHTQIWFVTVFSNYSLHDVFDMVSYDQMNQKQNEPC

SEQ ID NO: 965456 - protein, 37 aa, Homo sapiens
VVRTHALSMSHAPLRWCFCNVYTAKNPRITTKYLVCY

SEQ ID NO: 965457 - protein, 40 aa, Homo sapiens
LPDTPVSAHKAASCVAYGTAPRSEEFGGSCRVLWVGFVCR

SEQ ID NO: 965458 - protein, 99 aa, Homo sapiens
GLTDLTVKHAVTPPWMSQPQCLSVILSGEHTLPEGLRSPRSAESKESPSNWWAFSKTWLLHWESFYSVRLLAPVLPAGLPRRRVLNRVHSSCAPGLTIT

SEQ ID NO: 965459 - protein, 73 aa, Homo sapiens
RIYNQIQALYGTKGAIRSVFLLGRDLTTPAECMWLPQHPAPEAPGGQQLPLAPSSPQKLRRRHSASTEAPLWE

SEQ ID NO: 965460 - protein, 72 aa, Homo sapiens
LYQNRHYTEERRLRSVVLVGRDSDYMPGGSACGFPSTQLLKHQAVQQLPLAPSSPQKLRRRHSASTEAPLRE

SEQ ID NO: 965461 - protein, 112 aa, Homo sapiens
MATILLHASVGDVMRALGQNPSNAEVLKVLGKNNRDEMNVKVLDFEHFLPMLQTVAKNKDQGTYEDYVEGLRVFDKEGNGTVMGAEIRHVLVTLGEKMTEEEVEMLVAGHED

SEQ ID NO: 965462 - protein, 117 aa, Homo sapiens
TQDQILVWCCLCTSIHHEFLDIQVNKVTVFCTVGKVVTWKTPGDSCWDFIMLLTVWFVWFCLLLIFSLLLPAWLCQTNPPVPGARKCLGRVWNTHLGSTPAPGLRARWGSWWSPRRC

SEQ ID NO: 965463 - protein, 90 aa, Homo sapiens
RRPSSVLLSLGCVTAALRRHNSVQPCPRKTGKIGYTRDSSIFNFVMNGSLITFRQDKIQHRPELFWLVIGLRSWGTACGNTCCALGTVAR

SEQ ID NO: 965464 - protein, 124 aa, Homo sapiens
TVGPIPTISYNMVDDYVSTRRAETCLTRVYHKGISGTGTEVASRSKSSRIKNDSREKIQSKYAEAYEVLSDAKKRDIYHKYGKKDSHGGGGGGSHVDSPFEFGFTFRNPDNVFGEIPRWMGPPH

SEQ ID NO: 965465 - protein, 57 aa, Homo sapiens
YVGPSVIRVLTQVSPSMVSATPLPDARRARDEGCLECCEENKIRQVRQARGVAWDRR

SEQ ID NO: 965466 - protein, 43 aa, Homo sapiens
GRSRGSQRRAILDNSSLLSEVKPILEKLTQEQDVDVKYLPQEA

SEQ ID NO: 965467 - protein, 43 aa, Homo sapiens
VLLLLLPSSLHPYAMFPPWYAMLGRLAHEVGWKYQAVTAAGGG

SEQ ID NO: 965468 - protein, 81 aa, Homo sapiens
MCAHPSRKAVNNYSCMAANVVGPSSKKPTSLPSTRRLTRDEGVMGNESINWDKLGFDYIKTDKRFLQTWKNGEWQAGMGPT

SEQ ID NO: 965469 - protein, 53 aa, Homo sapiens
MTSRDGRPAVCCAPESIGYTNFIIVEKNFVINVVYRLGAIAKDPKSETGPRSR

SEQ ID NO: 965470 - protein, 44 aa, Homo sapiens
MVWVGLVNSGITGLGWVVLLVQKVVLAGEQDDTDVPGEWDQLLG

SEQ ID NO: 965471 - protein, 85 aa, Homo sapiens
APYPGPDAEGPHEDNSEHLKNPVNSTEDPEADGCGSACHFGDDLFIPPFPSPSCEQEDAGTAATPHGAHRGRPGAQKASSLYICP

SEQ ID NO: 965472 - protein, 137 aa, Homo sapiens
NKFTYKTIWAYIQTYRSDIIWMTQLSRTDKIETAVTINPICFWAVQQAFLIFSIRELALILRIITPTPSSNFTAAQGATTSTKESNHDLDAFSSGGGSKPSYEAIYVKAQLPQASPPHQRPAQENLPHLATELWHLL

SEQ ID NO: 965473 - protein, 46 aa, Homo sapiens
MYKSTPDVIMVLGFRTHFGGGKTTGLGMKALDMKSPFRKGGEHSTM

SEQ ID NO: 965474 - protein, 94 aa, Homo sapiens
VIACSRKSDYIRVHFLLEEAAGQLAVPMVERDPARVKLADHYKALHILVHELQDFAAAEDYCLLMLLGPISITIASNSFIICCLPSTCVLALLP

SEQ ID NO: 965475 - protein, 30 aa, Homo sapiens
MASLLFFGLEEEHPMVCHSGKVCLGLQALA

SEQ ID NO: 965476 - protein, 73 aa, Homo sapiens
MSSPFMPYWWNIDLAADILNSYAGLACVEEPKYMITREYTWMWLKEEIIDDDDDDITLTVEASCHDGHESAGQ

SEQ ID NO: 965477 - protein, 132 aa, Homo sapiens
MKLTASSSSLDTGSSSQLSCSLNSDSCLLQENGSQSPDHCEEPMSCDSDLGTANAEDSDRSLQEVLLEFSTAHVNSVPSNGLSPETEIPIAQGSLSLHGLNTSTYLHCEAPAEPLTCQGDSGTQDGVHRAGA

SEQ ID NO: 965478 - protein, 35 aa, Homo sapiens
TYGTPRNCSTCFHEVPTCMAWDLPRSLAMGGTWAQ

SEQ ID NO: 965479 - protein, 47 aa, Homo sapiens
RGPFMSGFMPSEESQETGSGCAPQLQVSVAVPCSGTAGSGAYALHCC

SEQ ID NO: 965480 - protein, 90 aa, Homo sapiens
HVQRFHAGWEEGRLKDDVLHGSGCHEIMIECFIPNANHYYSKPTNKLHSLSIPHAFHMRHNHNQLYLLYVKPTWHEGTRYEMSSAFMPYN

SEQ ID NO: 965481 - protein, 35 aa, Homo sapiens
MLCTVAQSCLVLSKELLEGLKMVSTGPGESWRMIG

SEQ ID NO: 965482 - protein, 71 aa, Homo sapiens
PGPSLTATVKAMRDPSFVCDLHHSSRQRQNLNPLSEARDRTHILMDPSWVREPLSRDGNSQDKHLSEVQGR

SEQ ID NO: 965483 - protein, 65 aa, Homo sapiens
RSLLDPLLPSLAGYGWDTRAMCKLGFFMPNQPTPRWRKTFGVGFKLRRPPAKQQCPRSQRHSRPP

SEQ ID NO: 965484 - protein, 74 aa, Homo sapiens
MSLLGDVKKLITDEFVKQKYLDYARVPNSNPPGNEFFWGLRSYYETSKMKVLKLACRVPQKDPKEWAAQYREGP

SEQ ID NO: 965485 - protein, 56 aa, Homo sapiens
VRGDLRIPLYLSMQEILCLKKFRRPRQHYTASPGDAQGTGLQKINLQIPHNTGPIL

SEQ ID NO: 965486 - protein, 74 aa, Homo sapiens
FISSAFMRQQVAKPESKSNRIKDDHQEKEFETVYATPNSDPRFTRDLEECIVASYFSQSQCLSRPRGFSNPKAT

SEQ ID NO: 965487 - protein, 57 aa, Homo sapiens
YRRHDQGCSCRPMSQPQIHQIQAESSTYTTAHGNTEILNPLSEGRDRACNLMVHGNT

SEQ ID NO: 965488 - protein, 87 aa, Homo sapiens
FISGFIPHFQSDYTSAKWHESARHDFMSSPFMPAHTPKNLELMQLNTSHGAVPTEPSIGPHPLRKPFPNNSYTSSLGMKGLDMTGTE

SEQ ID NO: 965489 - protein, 72 aa, Homo sapiens
  misc_feature (2)..(2): Xaa can be any naturally occurring amino acid
GXYRRQRGILNPLSKGRDRSRNLMVPSRIREPLRHDGNSTLVIFKSGGLKKSSQFIIKCVALTLFPYPILYQ

SEQ ID NO: 965490 - protein, 77 aa, Homo sapiens
CCWGALEDPSCQGFHPPNHPPDPPGCAQPFEAFEECLRQNEAAVGNCAELLRRFLQCAEQVQPPRSTATVEAQATSW

SEQ ID NO: 965491 - protein, 58 aa, Homo sapiens
HVSASCVYHLKLLFPAGFIELAWPLYTFWGEESFEREEGDFRRGMKMSPGRHEGPRHE

SEQ ID NO: 965492 - protein, 36 aa, Homo sapiens
MSSAFIPPSYLSSQSTACSGVRLADVGATGGTWGLR

SEQ ID NO: 965493 - protein, 106 aa, Homo sapiens
TASILSYDQDEHLTQNTHSSGPYEQQPGQFEDEETLAITVVSGLLDTCYINSIHPNHNTRAHLNNLYILTPSHNMIYLNPSRNQTEPRSTLQKESQNLYQALTYGN

SEQ ID NO: 965494 - protein, 108 aa, Homo sapiens
HIEGFMPWFRLYYKATVTKTIWYWHKDRHIDQWNRIESPEFNPCTYSKLTMAEEAEYLSGTKPKAVCNGFREEVIRSQYVSGSKLSNRCSLPSLSKQLMLSGMKALDM

SEQ ID NO: 965495 - protein, 41 aa, Homo sapiens
  misc_feature (8)..(8): Xaa can be any naturally occurring amino acid
QAFMPPVXFIVLTTSAGIMDHEEARRKHTGSKTFYFWHDKL

SEQ ID NO: 965496 - protein, 63 aa, Homo sapiens
MGRIEAVATSLHHSHSNAGSEPRLQRYTTAHGNARILNPLGKSRDQTCVLMDASQVSYPLSHD

SEQ ID NO: 965497 - protein, 81 aa, Homo sapiens
MKQKKASFEEASNQLINHIEQFLDTNETPYFMKSIDCIRAFREEAIKFSEEQRFNNFLKALQEKVEIKQLNHFWEIVVQDG

SEQ ID NO: 965498 - protein, 71 aa, Homo sapiens
MPTLSRRHISFSTIASMLKKGLTSVSCVGSASADPPTSLNTTNSILKRRPLSAVTPEKPPVRTFSTSLAFS

SEQ ID NO: 965499 - protein, 42 aa, Homo sapiens
RYLHARLTQFNVTLLPLQNCWRQKCDIELSATSVWLVLESRQ

SEQ ID NO: 965500 - protein, 106 aa, Homo sapiens
VDSQECSCKDSKFNCHLRCASISTKQTALVRRLLAMENLPVLGTDTDIPMDIDNNDINRDSSSGFGLTQKSHHPQKIQMFFLDPSDLDVDGDEEAVCTLSPSISDN

SEQ ID NO: 965501 - protein, 34 aa, Homo sapiens
MLKCVQAITHYHHPDQSGDADICQLLPRVALAVT

SEQ ID NO: 965502 - protein, 68 aa, Homo sapiens
EVLPGECRALRKQQARATVEASCMRSVTEGGPYSLLLVPWAPYYVHACSLCAARSTQDGRTPLAEFVP

SEQ ID NO: 965503 - protein, 39 aa, Homo sapiens
GSALTSFSLFQLSSSMDHTGGAASWQYKNGYVTVSEINS

SEQ ID NO: 965504 - protein, 51 aa, Homo sapiens
WKVCRHDRLYSYCHFFRGPESQTPLFVHLVTEGSPVRIAFQQHAAPQVLRS

SEQ ID NO: 965505 - protein, 85 aa, Homo sapiens
VLTHEDIQNGVHAAVGNGNGSGQGHTQAEDGARHGSVMELQEVERMVGAPAEEEGDNDGHDDLEGLLGLGQAVAPQLIDDSEVAG

SEQ ID NO: 965506 - protein, 59 aa, Homo sapiens
LRHMDVPRLGVQSELELRAYTRTTATQNPSHICNLHHSSRQCWILNPLSKASDQTHNLM

SEQ ID NO: 965507 - protein, 69 aa, Homo sapiens
KATIQMQSRNKKWAQVLTALQKDSREMEKGSPSLRTLMAAAENSHSCTNSEPHCRVPSLIVSELTPGAA

SEQ ID NO: 965508 - protein, 43 aa, Homo sapiens
MPDPSRICNLHHSSWQCQILNPLSEARDRTCNLMAPSWICFHC

SEQ ID NO: 965509 - protein, 74 aa, Homo sapiens
ITNHIPELVRFLNDTLSTLDTQRKPSRSSLSSGHRKPTPFRRLSGAYSKRLGNDKYLKSFIYSSRMQNIQAILT

SEQ ID NO: 965510 - protein, 76 aa, Homo sapiens
  misc_feature (25)..(25): Xaa can be any naturally occurring amino acid
PALLLEADEGSSLVDQIDQLAQDLXLSLPISSCLQASLPDHVACELLDQLPLRLLQIQFLHRDHELGLLSHQAVFL

SEQ ID NO: 965511 - protein, 87 aa, Homo sapiens
GQLFDPAPACCEPILDHNPYPKLVSKYAPSWAQTPETGWAAYGGSRNWNVPLAHLSLLSLWVPTHPLCCEECSVPETVGALTLADWG

SEQ ID NO: 965512 - protein, 57 aa, Homo sapiens
PYCCTSGHRIAYQDLLCDLLWSDPSRDVQDWGANDRDVSFTFGAEVVATYLHKHDLD

SEQ ID NO: 965513 - protein, 88 aa, Homo sapiens
ISRASPIEVFPLHICYSLDGIHSKSQPSVVNNIEPHFGAQRGCRCLNQGFGVLYVNKDAIADLVQVFISNASSLLIAIGYSDRVNASV

SEQ ID NO: 965514 - protein, 111 aa, Homo sapiens
MSQCMLGLYFGFLLVIFAIDMLRHSGDIPTRHEVIKEVQEVFKDTYHRLKTKDEPQRETLKCHPLCVELLWLGWGRDHCLSQIICPKKDRYSKPFTAESPVLSANQKRVFD

SEQ ID NO: 965515 - protein, 35 aa, Homo sapiens
PSSVIPLHICYSEDGIHSKSQPSVGNELVDLVWSP

SEQ ID NO: 965516 - protein, 114 aa, Homo sapiens
MTCSEASTRQKWKKEIHVSDASPSSYVNRPEPSQSCHLLLLLHVMASRHKWALLEHCIKLFTYRWSEELQTDEEGAQEDDDEAHNARGIPPLGLIALEGLTQLSRCPAELANGG

SEQ ID NO: 965517 - protein, 71 aa, Homo sapiens
LNLAKQNSNRGCKPVDDYENDCAGKASGGYEDENGCNYEGYVADVKQYAHERILEICLYVRQIELVIINAS

SEQ ID NO: 965518 - protein, 32 aa, Homo sapiens
MVHRLSVISMCHLYPVACWPVNAMIRCSRAFK

SEQ ID NO: 965519 - protein, 35 aa, Homo sapiens
RLAGLQSGHSCTDRWLRYAVNAVLTVADMERKDRR

SEQ ID NO: 965520 - protein, 42 aa, Homo sapiens
MRNLLMLMTSLRPYSLESTGFTSITVALIRDSSLEVSTLTLT

SEQ ID NO: 965521 - protein, 46 aa, Homo sapiens
AAPCVVAIAVPVVVSSGLEPRVGGSSYSYGSGLGVEEVGYTVPDSE

SEQ ID NO: 965522 - protein, 62 aa, Homo sapiens
YDFILNFNCNLSFHGILIHKNGTLDLDSVLNIITGTPVTAASRTSVPTMRNTTTIKKLLAHH

SEQ ID NO: 965523 - protein, 105 aa, Homo sapiens
RTFVIRCESDSWLYHWLIHVDCTYTELIFVGQAAGPWTLKEVLLDVVVPFHVLLAESQISMLEDCTALPPSYEEPYQDRVSEELRMSEAQGVPAGGSGLSTTVRL

SEQ ID NO: 965524 - protein, 72 aa, Homo sapiens
STIVAPTPAGQVTGQCCEEWLCDEDGAKDPMDDRDGLPGKALAFDASEVELTRNNELIAFGKGGSLKRLPGK

SEQ ID NO: 965525 - protein, 81 aa, Homo sapiens
RSAGLPSLSITVLVQDGSRAIDAAQENLGNITWTLSLKSHTLTWDAISQSFTGTHYIPNAQSGDPVSSKIWQFVYETVQNI

SEQ ID NO: 965526 - protein, 84 aa, Homo sapiens
RYRIHTTYVSTIIRFSHPTRRNKSEIPAVRNEQNEFPSWLSGYRAQLVSTRMRVRFLDSLSGLRMDVAVSYGIGQQLQLLFNPQ

SEQ ID NO: 965527 - protein, 38 aa, Homo sapiens
TEVYFDTQVLMLFPGLKCEHKTEQHQFRGILTIGSSSS

SEQ ID NO: 965528 - protein, 94 aa, Homo sapiens
TDEVSWRNNSQDALDIDDALFVCSQNSHVTHERGVEAIQSQVEQTAVDGILSRNSVRVPKFYFFFHRILYQYMVFRKTSLIGGTKKSTHIFIII

SEQ ID NO: 965529 - protein, 117 aa, Homo sapiens
PAVYERNRDRHRDRERDRERDLDKDRERDRDRARDRDGDRKRDMDRERDRDRDREGAFRRSESFPERGADRKGNTLYVYGEDMTPTLLRGAFFPFGNIIDLSMDPPRNCAFDTYEKM

SEQ ID NO: 965530 - protein, 121 aa, Homo sapiens
PAVYEHSRSQGCIPWPALGSTQTYQTGPAHHLPRDHICLGSRSLKSFIRLIQPCRFFKELTYDSLAIYWESLLLESMNPDPQREFQKHHKRRKAVLFPVGFAVGTPWHSHGGRWNWRVLLQ

SEQ ID NO: 965531 - protein, 81 aa, Homo sapiens
PNERIECGKSFRRNSNLVIHERSDTGEEPYERTQCGEPFSQSQQLDAHKRTHTGERPYESNESRKAFNRSSKLSRQTRIET

SEQ ID NO: 965532 - protein, 84 aa, Homo sapiens
TPRLSEAEAPCQPLTHNEHTARLPDQHSDCPAVARLGLPGEPRPAPTLYLGSLTGADSLAPPSMDTALLLIVTLEERRGLVSSS

SEQ ID NO: 965533 - protein, 62 aa, Homo sapiens
PAGYEEMIFHGNVDKDAPVLSELSKPVVARLIRMYPLTWNGNLCKRLEVLGCSEAHVYSYYE

SEQ ID NO: 965534 - protein, 49 aa, Homo sapiens
MHAFFKAILFICSGSIIHSLNDEQDIRQIGGLYKAIPFTTTPPISPSSP

SEQ ID NO: 965535 - protein, 91 aa, Homo sapiens
MSRISTIHDILHSQGTNSAVRETATEVGRGCDFHNFTVIHKTDESSPRVISQGKPSSPQSWHFFTFTIFYADSYLTRQQHSRSYTMTMNAE

SEQ ID NO: 965536 - protein, 125 aa, Homo sapiens
PVLLLLLSRLCLDYETATIYYILTLTDEQVLEQDQLPETPVSTLRAESRQTARRLLTHYGKRQSLVISQMLRKSMETRDWLSTLEPRNVRAAMKRMVKDTTVIDVQMWLLYEECVRKAQSSDSSK

SEQ ID NO: 965537 - protein, 54 aa, Homo sapiens
ILNPLSKGRYRTRNLLVPGWICEPLSHGGNSLVLLFLSIFILIINDISCYTFVM

SEQ ID NO: 965538 - protein, 82 aa, Homo sapiens
  misc_feature (49)..(49): Xaa can be any naturally occurring amino acid
SPNGLYFVCIFDRMLKKQICEFTGFLGQPFDFCFQPFILFFELSDSLQXALCFLLAFQPALFHSHVVPLSAVRYSSLFRSMG

SEQ ID NO: 965539 - protein, 44 aa, Homo sapiens
LNRYLVQDQFPVTPVSTLCAEASGNGAAQLVTHYDEGAGPVVIS

SEQ ID NO: 965540 - protein, 110 aa, Homo sapiens
MPVMGSEYAHEGWKLLSPTIKSPLSLMKTDMWYRHTEVGGNRFHSAYLQTSARLALLLSHQCTSPDAHDQPSAILSDESTGFTSITAGLHSRLVVVGLHFDPDSEYERSE

SEQ ID NO: 965541 - protein, 40 aa, Homo sapiens
SKSCRTATTSLSDNVLVEDGSCRYAAQENLEYNVEPQEIS

SEQ ID NO: 965542 - protein, 45 aa, Homo sapiens
SIRSYNAERAHMCHWKPAVRRDCYTGTQADSLKSHWFPDHYPSMC

SEQ ID NO: 965543 - protein, 72 aa, Homo sapiens
VTTMNRVQTGSNTRSDFYLHIKYHPDDEQDKRNKAYFTKRLPPIHNIISNISIIPTTLPIELEESISDVDLQ

SEQ ID NO: 965544 - protein, 34 aa, Homo sapiens
FIAKAKEDFLTKMGKSRIRTQTTLDQFERIKTHR

SEQ ID NO: 965545 - protein, 118 aa, Homo sapiens
GVDCSWWLSLLQQPMMAVDKKISRIANRTDTFHRPPYLMAETREHVKLIKEFENYIQGINLVQAKKLVESLPQEIKAKFPKAEAEQIKAALVAVGGTVGPGSSLQLGGLVFRGPGPIG

SEQ ID NO: 965546 - protein, 69 aa, Homo sapiens
TRMGVYVCISAPLLQLKSQNTTDHVHLCSLHCSCSLLWFTLLPFTVNDDVLCWAGRAHHPSALHAEWVL

SEQ ID NO: 965547 - protein, 76 aa, Homo sapiens
CCCRSSRDPPRPESSMTSTVYHAPVFLIDHLHQQQLYLPLQSPVTNPLFPRAGQAQAAVLGPVGTYFKPLNSTHRR

SEQ ID NO: 965548 - protein, 32 aa, Homo sapiens
MALRGDSWWLPVSSFMPFVFSLCKVSTVPLGV

SEQ ID NO: 965549 - protein, 38 aa, Homo sapiens
AGRTLAAIPHHADGYGVALPEAAATSQYTFWSQPSRYR

SEQ ID NO: 965550 - protein, 45 aa, Homo sapiens
MHIIYGGRRLVKYALFLLSFRTGEEFEVSLKPTWITPALNLTITV

SEQ ID NO: 965551 - protein, 71 aa, Homo sapiens
KHTHKNDSTKPTSINTSNMKLMIGQTMDIQMYEERNHHRHHGACHSDAPLKSQTSARYKCGDRPREHRSGR

SEQ ID NO: 965552 - protein, 37 aa, Homo sapiens
PSIHVPSVRQMKASSPGIYGSPVKAATCSADPTLQDR

SEQ ID NO: 965553 - protein, 43 aa, Homo sapiens
LLLVVSSPGADSGIEAQLVMCELIDELANQEYQRLMDINVAAG

SEQ ID NO: 965554 - protein, 33 aa, Homo sapiens
MGRPDPCDTVLVETSACRDGTFQNVGGCGGAFW

SEQ ID NO: 965555 - protein, 36 aa, Homo sapiens
VSLIHYLYHLNHTLYNVQEMGTNSHGILSGFNNDGS

SEQ ID NO: 965556 - protein, 35 aa, Homo sapiens
VYERLGCTIGSWYEMMQALLVSESPLTLHRNESLE

SEQ ID NO: 965557 - protein, 62 aa, Homo sapiens
SSCHCSIDIPSGAGIRRMGRGEGKCWRDQPDLLISLTAPKKSATQFTGRYRYLGGRFVPPAL

SEQ ID NO: 965558 - protein, 86 aa, Homo sapiens
LHGWYTPLVTVHDLPQFQVLPVCSSHLLLSSRFSSCVCLYHCIQVLLPVLGAGPLIGPVHMGWAPMAGNTLGVGPGTGKCPCAPNE

SEQ ID NO: 965559 - protein, 56 aa, Homo sapiens
SLLDQSLPLSARRPSSTVTQCEGMDEMESPRLRANNDLVSEYQQYQDATEEEEEDV

SEQ ID NO: 965560 - protein, 47 aa, Homo sapiens
GGILHLAGKGYWHTVHVGITPASGYTRLNWTKTCKNDPRTESQISPS

SEQ ID NO: 965561 - protein, 38 aa, Homo sapiens
WWLTPPNLKSVNELLYKRGYGKINRKRIALTDNCFDIA

SEQ ID NO: 965562 - protein, 43 aa, Homo sapiens
LTSTPQSNHRPKQHAPQGQPGCPCPGHCDRRHQEARPVAGDPP

SEQ ID NO: 965563 - protein, 59 aa, Homo sapiens
NIILVIPVVTYLNFPSWSKLKLQELVAELALCPRSTADKSHSPWLPKDNLSLNFQEQAA

SEQ ID NO: 965564 - protein, 43 aa, Homo sapiens
PRLGYTVMYVSSGPGICPGISGKQWPSGGESITKSLATQPGII

SEQ ID NO: 965565 - protein, 68 aa, Homo sapiens
SIRYPGGASGEEQRYTCHVQHEGLSEPLTLRWEPSSQPTIPYLWASVAGLAVLAVLAVLGAVVAVVMC

SEQ ID NO: 965566 - protein, 36 aa, Homo sapiens
CYSSSNELTAGQRMNPEDASSSPVGSPQFRQISRLH

SEQ ID NO: 965567 - protein, 60 aa, Homo sapiens
IEDPVSKSATSPDGKTAARTYLPVDPGPHLQWCLMLIMNFNEDEETMQKLTRETWTYKLG

SEQ ID NO: 965568 - protein, 38 aa, Homo sapiens
MCATIPNHNYYFKDRIFSITQEVETADESIITPLKRYR

SEQ ID NO: 965569 - protein, 122 aa, Homo sapiens
VGSRMLYTYITVFLAPMRHRADSNGVLMGSSNVEGGSMGSSDDLSCGEMYDSNIDDWIPVPELRTNRCNAGVCALNGKLYIVGGSDPYGQKGLKNCDVFDPVTKLWTSCAPLNIRRHQSAVC

SEQ ID NO: 965570 - protein, 43 aa, Homo sapiens
SSLHSSHKNMVWCPSQSSGELSPISVTVRTAMQELQEPQTHHA

SEQ ID NO: 965571 - protein, 50 aa, Homo sapiens
MTVLHRRTYYYTYTVITSFMVLILGIRGKLQFYSSDDENNFPKQVCQGRR

SEQ ID NO: 965572 - protein, 34 aa, Homo sapiens
TVYSVAKELRRLQLELTKVREEFKELKARNTKEE

SEQ ID NO: 965573 - protein, 46 aa, Homo sapiens
MSTGKMLLNGLSRCVALLQWVIENRNVPLANAHTLHAEPHENWNKA

SEQ ID NO: 965574 - protein, 43 aa, Homo sapiens
LLCVILLAGGTRMSTGTFPINDHLLPVEILYSGVVFVHKVVLD

SEQ ID NO: 965575 - protein, 53 aa, Homo sapiens
ALVILLSVTFPPRYQKCRHLHWQQHGIQELFKRISEQFTAMFRAQAPSCKWYT

SEQ ID NO: 965576 - protein, 63 aa, Homo sapiens
CWYFLGQLSLLLGNTFSVTSVVEQCDHAAREAPPSLLLHQCPQDLQPPELQELLLAIRGSGAE

SEQ ID NO: 965577 - protein, 56 aa, Homo sapiens
NHYCHLIYKVRWHRQRTIEKFEKEGAEMGKGSFQYAWVLVNLKAERERGITIDYFL

SEQ ID NO: 965578 - protein, 54 aa, Homo sapiens
MVSIPSFGVLRTVNVEPVRPHRGGSMGPALVIVTSNFLSMDLTVELSLKQLWLR

SEQ ID NO: 965579 - protein, 58 aa, Homo sapiens
PLVDPFQTQFLISDRGQSCEEVKAPALVVATLIFCYIIGIIDAGLPSANNDLGKSNPC

SEQ ID NO: 965580 - protein, 37 aa, Homo sapiens
VLQTDTVAPPVHVGILGFPHAHVEGDDSDTYVLSCFP

SEQ ID NO: 965581 - protein, 153 aa, Homo sapiens
MERTAHTTLLLKEDDYLPSKLTGCTCLSSRGVTQGSWFSLVFEVGLSLYHKRGHPFFPVISGTVLNTRVSSPNLLPSVNVISKAAFTDSLGIAYYNCRIAGNFFCTLDGFFHQCLNRTNLADKTCNTRKSVSDVQKQHLSIPSRVSVRGTQLE

SEQ ID NO: 965582 - protein, 41 aa, Homo sapiens
SFDLRAVLIWLSYLIVVHILRWFLFMQQGIGTGYILKLGVY

SEQ ID NO: 965583 - protein, 66 aa, Homo sapiens
SSLEYPATARANNMVIRDDNQTIRLQEALNLFNEHLDTTERVRTISADPCSSTQQDSARLSKVPCL

SEQ ID NO: 965584 - protein, 79 aa, Homo sapiens
RSIPAQHALNKRLKQKYSTRILSSSMVSISAEIGVNALDLVAMQHMLMSDYAPVSYTFFSFIHCFLLESMADIVVEDER

SEQ ID NO: 965585 - protein, 61 aa, Homo sapiens
LNQDAQDGLSLAMLNVCCYTSQDGQLGVSDVRDESGYRALVHGRGCDAEMLATFLWSEVCS

SEQ ID NO: 965586 - protein, 57 aa, Homo sapiens
MTWKRTMKSETAISIWVCLVEPTLPSTLSRTFIFFGSNTGLKTLSKYQLLSNLSIKV

SEQ ID NO: 965587 - protein, 62 aa, Homo sapiens
MAKLGGGISPIPPYHYTTLITTLIPPYHHTTIPPYHSHQPIYPIFLYKEMMMDIGSLHRWYS

SEQ ID NO: 965588 - protein, 71 aa, Homo sapiens
MWIIAPAKFLYNSYCATFDRPVTITIMSHDPLHSNNHIRSHLVDHKPCRHCDALHVSIAESQVASVLKPTM

SEQ ID NO: 965589 - protein, 72 aa, Homo sapiens
IPRRHPDLFSTGRPSCCSAGGISAVRKGIAFMCCICKNGCLNFLTSYWQVIDKNWWEFHDMWTSLEIASQMS

SEQ ID NO: 965590 - protein, 33 aa, Homo sapiens
TEPGCQIYSWPRVLLLLLRQGPGFGCSADSDEG

SEQ ID NO: 965591 - protein, 93 aa, Homo sapiens
RAAALVTVTATVPGDGSLRLGEVGALCDRASESGLRPALARAVTRTVSGGRDSRRVHQQEEDPEEDRTPRDRIAWGRQQRDPSLRRARTVCGV

SEQ ID NO: 965592 - protein, 125 aa, Homo sapiens
EKSRYLNNKNTAQHGTALKSQTLSFSMTIPYTPQKVSHRSSFTNCIHSECLLPHSPPNSQVMPWHSAMHLSTVQAQCHFLDTHSIITTFINHYIINITHICHHPHKSSNIAVITPSTQDFQHQHH

SEQ ID NO: 965593 - protein, 34 aa, Homo sapiens
PSVTPKLIAYKESLQPRLCSTKAAVLYVLGGAVT

SEQ ID NO: 965594 - protein, 75 aa, Homo sapiens
ATSTRGSPCSRTIPSWGQRGIPLGGHSNGFPGPQGPYYCGARADRAYGRDIEKAYYRACLYADVKIAGTNAEVMP

SEQ ID NO: 965595 - protein, 333 aa, Homo sapiens
IYGSALTDSPYRGHRDAKIATCDFRLTMLIPGGTFQAAATAGPLHLKNAAIPRIQGAIAVHTRTFSYRDSHTLLPVTTLIPAIRSDKALVMDLTPLRNSFQVIYISLNPGVTSDPYGYIANSGLHLVTPLYLTRTPYYCCIHAHEQPLHLRPYQATSAVHWILLDHQQHFMAPRLRLATPLYWLLTHTLTLTPTETYATQTKYPQRPHRNGLRHFPTHHFPAKLAPLDYMDDTVHQPTGPLVFSPNKPRPISTLLTSHSLGPKADTYAHFGPTLGAFRHTVSPLHPAGHTRTLSSLAPVPSFTPRARVHPDTTAPPRHTRVHTYPTSSDQPPN

SEQ ID NO: 965596 - protein, 84 aa, Homo sapiens
SLEHRSQHPDTTAARSLHDRKPHFSHLHSSTSFPKRHEVCTKEEHEVAMLLRGTQPKITIPYTRYQPYNTKIPQEENTPMHRSM

SEQ ID NO: 965597 - protein, 235 aa, Homo sapiens
MQNPQIQRARLSFVYRCYIRRGNIGSSTLYSSLLAELVIQTTSFQMIRGEGLSCWISDIWAVATGHRSHCLTQQGHSVTNYHPSSSQLHAVPNIVSPHAQYPYPANLHPDPDHHGSHPSRTRSGSAPPRPQPPTHAHELESQPPPAQKNKNRTWKKRLYNPEQQQIHATGALAPQAPITPVNTDLPPRPTHKCAHDTTIDSQPESSTRDQQTPEPHTTSVPPTPVHLLTHTQSQT

SEQ ID NO: 965598 - protein, 337 aa, Homo sapiens
VGYVKEYFNYNGMVCFSPLKFDEALDMYYIIMAGKYYNEEQYYYIKPINKKFVKSTNTFGLFIKNNTYRNVSSSVYISQSVCDCLKKFNSKPLLKMIYEHRKLKTTDPIKDSTNILPIKLIACHTVTTVSLQHNHNHKTTLHHTHPRPQHHKTPTHPNPNMSKIRIHRRKINTDLKKRVYKETRRVSIKEIENSTHNTDTPVINKIIKKNPTEQNQKKHKTTKQNREYKPHNKHSYARRRHKTQTTPNKQNPIKMTQDAHGTDRGKNKKKTKMKHAKSRQHAREDTAEQNNQASQAALAPRARKARQGEDRDERAYDARRRRRRRETEIQRSTDKRS

SEQ ID NO: 965599 - protein, 97 aa, Homo sapiens
LSGCGRVDDLQTAVGFSTQNPGVGATQNRISSPSHFLYIGFCEKPYHPNTMASNVTNKRDPTLPGGSRVYIGNLNTLVVKKSDVEAIDSESMAQIVG

SEQ ID NO: 965600 - protein, 108 aa, Homo sapiens
MLLSRKWMAVNVPVKLRSVNSFMLSNVVVTAYRTRITADSTVQVTWQRKFVLLSAPTEKKAVSDELTTEKAQKMLVLSAVSDYRILIDRHIVHRERNIRTTQFTHNTY

SEQ ID NO: 965601 - protein, 219 aa, Homo sapiens
MGHCVQPAIEPDIAALKPPPRTLPVPHPNTTRPTHSAPLQQPPPTTIIVPTHGHDKSDNRLSLVNTRNPPQNTRDKKRPLYTAAGNSSPRTQTLTPAHESGNKTRITQPMDPSTESHDHNHHRIVPHHQQATPTNSRHSPTHRTKQAHHGQPKQQHTSRIHKSQQPRPPITTLHHGLAPPPPQPRQQPLDERQHSKVQHDYAQNTKYHPPSNSLTTNTQ

SEQ ID NO: 965602 - protein, 338 aa, Homo sapiens
RSTTTGHLIYKCGGIANRTIEKFRERRLLTMAKGSFKLCLGSMETPDKPDAVTLASHPLTIVACWQISAALEHTYLSSTDPFDSHLCTTSTHYIYNKPCTLQRHHFLTRPAPAAMPPCTPASTCPGLLTTSTLLDTPPRSLLTQAQLRHPRHHTETARHTCPTLYPSAHPHPIISSAPGLDTTHTPQHSGSRDLIPTHNTTPCATLVPSIDTPPSSAPLKASPDHTYARQRMSFDNAAPLPRGTLTTDATKHFQQPSSFPNPNLMQPRHTHPLAAAHYPTTILHRQTKSRHQHTNYFQHATRHLHIPWRAYNAATNSSLGTKHITLCPSSSTHHTLPS

SEQ ID NO: 965603 - protein, 469 aa, Homo sapiens
NAGCLRSPDSLQCPLNSLQGQQPTSKQLQHGKQAVRDQAINPSPWAHYTTPGKRQRPTDTGLNGPEPNVHPTHTTTTTVQNRQQRIRVIPKSTQTGKPTRLQTNQTTPVKQQQRPNEGNDEATPTNDNQKDNNDTKREHTPHTKEKEKKQNKQTTTTASPNHTRNTPEEITGAPSNTHSERKKKAPPKPDPHTIDTTTSHERQALEHQYETQQTYIHTDQQPDTNRSEHTRNQPHSTSTPPPTDPTKQPTQDQTTSHHTITKTIGAHTSTSSHKQTTTQENKKKQRNIANAAHTKMTHKHGKQRRHRHNEDSYKQQRTQEQNKTSNQKRQQTATKQRIQEERSTTTDNHKREQAEAQRRPTHPPHHTTANSEIETNSNDEQTRQNAKESPETTQPRHTYGSRHHNDTIRTNSATNKATQHNTAEGLRTASSQPQIDLDITSHETQSTTHTILNNTSNKQLTQTQNYYIN

SEQ ID NO: 965604 - protein, 250 aa, Homo sapiens
MIIYREPHQNTDEMFSDIYKIREHRWTRLCLEVDGDDGQRDRSVPLDDSASLVRHASAEGPDRRNVIRVAHVNHCVLTYTSMNQSPAGTTCSHHYTIAFQARYILRRLYTGQTQLHTVNTFCTPPRTTNPRNTTANQPYILDTEGDLTNNTIQGTTSLRPTYYRHTTNPTFITHSGIDTRDDIPNDCDHSDIGLPLSVPYTEQTLRLAAPPDNFYFSYPYKRALCYSSKPLAHPDCNNHNLNGPPRITRT

SEQ ID NO: 965605 - protein, 162 aa, Homo sapiens
MNNDKEKQVPLEDTSQDEHNDKCNRKTKYYQNQRYTNGQRMNTNEDFTTQRPNQPKRTHQARKQNKPNKNNHNTKTTGTKSRRPHRITRGTNDDENTKKKSKSHKDTNKQEHRRKTKEDEQPDATGTTNKKQERRKKENPKLKTQKQTKPNTTPHHTAPQKH

SEQ ID NO: 965606 - protein, 108 aa, Homo sapiens
MLMLIMWDRELSQREGSKTLSVYTERYASKRVPPVQKHDKIVTAIREVTGSTSTLLLSTEGCKLCQNRYRTPRITSSLTIPLCEYSTSRYEQPIAIIFRYQPKTRLTH

SEQ ID NO: 965607 - protein, 101 aa, Homo sapiens
APTKFDSQGSSRPIEVAKLVMPFKYSPPYDSICIYSRLLEVDKRIVIDMVSAQEPIRLSRNPPRKTTPRSAYGDNGTCYLITFAYALTSHCAKRKFHSRPR

SEQ ID NO: 965608 - protein, 168 aa, Homo sapiens
QTKFETLQAQLASLDLDCVIAEVKSQIMSAMASCGRAEELNPGTTTKFETLQAHCVRSMGDDLRNTRKEIIQEMKPGSTDGCAAEICQQSMNHACNRLGGRTRRGQRARAVGSRSKTAPSQRDRGASKARPGRRAPSRDLRTGTLACTYPVHLHDDLTPGPGTSTPIA

SEQ ID NO: 965609 - protein, 119 aa, Homo sapiens
MSKSKYTIKKNNSKIKADARASPKQNSPADTHPEEEPQADTTRHEQNEAHNRERTITEQRASEVTAGAKRETPMETAGADETRKVHEKKKMSRGRGRLKLEEERGQNQREQRRRSSEYP

SEQ ID NO: 965610 - protein, 322 aa, Homo sapiens
LAQLTTAVRLWDCETVKAAGPYSSTNSASPDLRLYDYWGQASSMFSSGPSQTGATKVHFVTLHKTLRRSRCQHMTKQVETLHSKIHIWQLELLIHPPRCYSSGDAHERRSCSHTPGPMQTCAAASKPSYSVAQKLIGRSARNALHTRSKRNHLTRDHDSTRTNPRLNPQGNPVDRAMGYMGGHLLGFTHVVASIERCRQAILSGMFPTITLLYCKTYFLVTRTHVTHGTEKKPYAVRADAISQRRGPHRQMRTSSKPSNDIAYIACRLPHETHECYGHTHDDTCPPITRTTGSTSRPQTHTIHKLHARTSATHTPLTDKSYA

SEQ ID NO: 965611 - protein, 106 aa, Homo sapiens
MRLKLPISMHDTGRHFGRLLRLHVVDWDQWCETLLQFYAFNRVNWDAHLIVGGHDQVIGATGNALGSFDFARTIRTYSYRKLYGYPVVRLRTLTNQNKDFFVRENN

SEQ ID NO: 965612 - protein, 119 aa, Homo sapiens
MPGVHDSSTACHCDRGRSVDRRAYSQHIQDILDKTPWSARRFDTLANAHSARPPNNFKPAHNVARSTQGDRWTSTNATARRSNGTIPRWIFNTQLWSKTTDTITANQREDNDPTTQAAR

SEQ ID NO: 965613 - protein, 416 aa, Homo sapiens
KAIQCFQSTGSNTSNNPKRKPAVMGNFRSYTESILSSTNPACIPTAGTCTGSIPTKWKWSNNSNNFINRTITVASASSAIRDYTPKSTMTLTSLKITATAAPSSAHSFAKHPMGHVAPGMLQQSKVGNTFNIHFMWMSSQQEEAAPQEHSDGKTEGVNSTDRSTSTLQEYLERIHLPGNTTQPPHRLHWVTENLNTDFTTDYNTERVSYNRTNSYLNKPRLTRRPATNPLIEQKHWKASNIFKGQPETQWNHGRHQNPIGATRQIQRKTIGPRVELHRPKGPPGRDTATSPGTSQRHGTRRLRNTRKRGIARDTNERKITGAQSTRKSGPSKCQLRIEQKAQEIHKDNENEDAQREDARPWPAPEKNQDRETDNELGRVQRTKTTTKTKGKAIVMTHTRLKRKEAKKGESAAAKEE

SEQ ID NO: 965614 - protein, 533 aa, Homo sapiens
GWTDCRPSNKLPTTVAGAPGIFISAQPQHAAEFIVETCSNMHRSSFAGSITMHSCIKPFQIMHHLRQHDGKQSCALTHQHNCMQAKPYAQPDHYHNPHAHTAHYFPDASFSPEGSMSGYVHRYGPITHAADWHANNKSNLVHCHWNNLWSTFVPWWAFFFNKVPSSNIINGSTHLHYQYIMIIYGHRTISGGKFISQLTLQTLTRSDIFAQDLNTSNQSFSYQRASPIGILLLPLSHFHRHTFPQLQTLFETTPNRHPPNSKHQETKQQHTPTRVATDTDGEITAAQLNEENNEKKRESEDKQRTTTSRFGAHRTQRTPNNMRETLKHTAEDTTKTTTERIHDRRSNHVTPNNKRRCECDTYTTTHEKRDRDSRRDKSKMMRKSGRKHTQKRGTRKEATHRAPNTKRTTTAQYQDTRSRKRSTREREDDEENGRRRRGTHGSKRSTKRREQREREEQRRITEETHGESEDGRQAGRRRDRAHESEQAAQADHAEPETQAEPREGDGQRRTEGTGRTTKNAYRMRQSRREAKTS

SEQ ID NO: 965615 - protein, 108 aa, Homo sapiens
IFNVSLHRPPITQQQAHKGKSYTPLHHVPQHTHRMCSLYCMLSTSMSIHHNNINTQHSISRSTYIKLYSRFHRSTMPFITTQMQSLHHHAIICQNSAVCSSTHSNCTS

SEQ ID NO: 965616 - protein, 318 aa, Homo sapiens
MKSPLQTNTQTDLGDMLHSLLLSEIGIIAGKRIHKTQAVPYICNLPPNISSSVNQANVRVEAIVYPIHSWCTLLQDRKTASEVLLNRMHIRRPGLPKHYETCYNQNRCKNNHSHDMTHCSGGTSKPGPTIHLLQILKTHIPAGARGKGNTSSWPGFQTSTNRRVEHSACDLSLRHLQFGRPRPVTSAETWCLVDSFPYYTVEIRVPNTLYHMRTADQPDKRETEEGRSHPENTHQRQREPRASDDRPARGRGKAAENQRTIAAGSSEGTTKEEVRPPARYQPRKGTTTRKRTPQPEPRGGERGDESGGRTTNATDQEQ

SEQ ID NO: 965617 - protein, 559 aa, Homo sapiens
  misc_feature (325)..(325): Xaa can be any naturally occurring amino acid
VLWTTMYLSLLGVCMGCRPGPCQPQWHSKFAPHHGTLLQRSSTMEHSKSHQKHIPATIHPQSHGNTLCQLASQHTSSPCSSQQQQHDKPRLCNIIIVHIGESYSAYLFMEHTCLHHPHGEPLQATQHSTNTSHSFEYCPSKHHERTLCSVGYFHFTPHFAHTQGMQHSLQGVGYTTSHPCHALCATAKVHRHSLVAHILGYGPPTSHQWHFTFSIHAQLQIYVHPQFFLGLAPIPQDRHTVARTGHKAPPPHTYRGCRTWRFHESNICDPLGHFNFKNNLGELVGHASRIRQGTPPVQSPVSTLTNIPTGYQDHISSPRCKHPDXVNTKSPPHTNIHHQYNLPAQYRSVVPFNYNKLRYILYSTDTTMAIVPFRRMSVTQLSTHDNLHTLCANQPTLVSSLHSLKQYDLHNTLHNTQYPPDHPNSCPYDIQTRLIPLAFQYYSKQLTSTRQTAYRQTMSHRTHEAWKRRSHDAYTTNEQRETRARENKSACSLPLTTVKQRKATQTTQQQQLKGALRRTILPCTPRQLTSCNDRQAERRSRGTETEAAEDSADGERRAR

SEQ ID NO: 965618 - protein, 357 aa, Homo sapiens
KTLWSASSGAIAASVALAGDPEPKSYRQNVVAKIRIEIFPSRMAQTIMKARLKGAQTGRNLLKKKSDALTLRFRQILNRSINQRLNTCSMGASALAEAAFITSCKPKVQQPGALRATTVIQNVHNAQVTRFERKTDNVSKVLLCQYLTITMKELNSYELDWFTQTVGNSWLNYTTALCQSQWNYWMELRFSADLLRSLWMHANKESHNRAMVHCPLQPLSSIPPGFSPLLLAFYSFKQLQQRQPKQSLTKRNTRPDKIKRTTGPGQQHANTVKSSGTTKLQDGRKGQRNASAHKHGTGHNSTTTGHDRQRGRTRTHNAALAATTKIASSDHHYTDHTAKKRLARRISDLPRYLGRPH

SEQ ID NO: 965619 - protein, 434 aa, Homo sapiens
LNAFNAQSIFNIIILYNSTFISNIKHQSSWRYWEVNNSQPYTHLRKAQIFTSYTHHYHFLCTAACSDTLTNYLHTLAFSTQSVTHITHLSYYHHLTNGQHYTNSISYQTQQQHTSLVRYPIYHIILSLHLTSLHPFTNDLTANAATLAHTSILQRNHTATVTDTDNRIHVRSSVILSSNAARTYTGATSPQYSSQTARLQRTRTRSHTLTSYSDITTCAFLTCYTTLPEGSTLNPHQLTKLYCTFNHAPSHCHSRTIISPYTLHTALLHRTHILISHLTPFAHTNTRHNTGQAPLPRNLTLTNSSSPRANSSRQNHDITQHTQATTTHPAEQTTTLKERRPKQEHQAEGNKNNIQQQEEPGPRQGNTDHNPAPTAQKPARKRGTTPPHHPSTTANATELRKKKGEEVSILFRRRKQETNQRGHTDTPNNPHQST

SEQ ID NO: 965620 - protein, 136 aa, Homo sapiens
MYIDLYVHDVINQLIDSCGLVRTLNTVRPYMNLGMCSRTSWACSLAPPCKIEKVQGPLHVTREHITILTSLLPVSTDFIRIRMERPGCKRSTVVDRHVHRPLHPLRKGESGPFTDHTVGTDPLETETYEANVIVRC

SEQ ID NO: 965621 - protein, 408 aa, Homo sapiens
MCTAQHYFIHASCIPSCHHLIDKCVSAQQQRLGHKSTMDLFLWLCMHRSVPHGITLTHACQIMKPQVPFHLGCSSDHTCIGSHSGRHILQCTGHITIVQTKNMHRLVGAISTQQQVHSKVGQHSHNQDFHLRTSKRLHFKIAGHINFVPTPCTFTISIHHETRSTHCSPIATIINTIVVHPSRFITSSNSPINTPKNNIPGNPNCKLHVCTDSHNPIHQIIEGPRTPVAFFKDHSEATWALLDGDSQEWQFNCFPGFSDCKFYDNQLNTVRHVFQATTMAFTPHTWMIQRPIHVTTQASTFDTSIAPFTRLRATDGSSHRRIDPQQQNIGVNYDADSFDQPVTDGNGHWGPLTINLVTGINQSLDTHGDQMSLTDIHVHTLERRTTMGYTLATNNTTMNTPPPTSDAT

SEQ ID NO: 965622 - protein, 506 aa, Homo sapiens
RPSQKLSSTHSVWLRECPSQVKCNMVISCIPKRASMVMHSVLRILHQSKNALGGKPRRLHEQTPRCEFLTRHIPGLYSTRSPRRASTINNYAPTPVKHTIETTTRKTRGRATSERREEETGTEEKEKGGPERVNDTGGERETASAHGKRGRASDGQRRAEPTTEHGAGRTGKASARQEQNGHERGRSRKAPKQRRDKQGQNRKSDRKKDRREEGGEGEEQEESNTSGQEKKKRRDADRGGEGKKEEKRERQQKGKERKRAGQEQDRGEDKKKAEKRRKSRRAEKQSREGRDEKGRRSKQGEEREKRGRSGGERGRRREKKEEGERREKKRMTSTKPTRRGEREKETARQGNGDRKSTREQTREGTDEKSKRKRERRAQRSERRRAGRERGEEDGERETEASAAKERGERGTGGIERRQATRRRENRREERERGEAPQTDGAKTEGERGEPARRGERVRDEARGSAKEEERGAGGAGRSGGTRRIAAGRGRREGGGAERAQAGRRRP

SEQ ID NO: 965623 - protein, 147 aa, Homo sapiens
MVNLTECRKIYDSNGLITYEFRAMISERYLKVCLKLESHTIMFDIDNGDKTIATHGLLTGSAVILIRYPLSGSKCLMHRHSAQDVLDRYRRIIQDDSWSRKASVSNVTPEITNHVILITSEVESCTAIERIMSNSDSFEIFRLHSSE

SEQ ID NO: 965624 - protein, 373 aa, Homo sapiens
  misc_feature (60)..(60): Xaa can be any naturally occurring amino acid
MYRGSEDGRRESADHRVGSMSPDYRAPGDGEQCQPWYLGATLGVVGAKIVDNAATSVYLXSTSCYAILTARQDEDCELNAQVQAIEVRRETPVEGSPVFGPCENSEGRAPSGWRFALARMRFSEHRWAIAVNAGRLPEYRSCMGGLDRRIRLRVNGERMKLPLIWSEMERLSNVGEQYMCYIGNSDGYKYRMIGRIVFIFSHMHMICREIMISMRCAWPERDISPMDGGFVERITVTKHEGNTVQRETTMHGSRGILLLMRGDLPMGNLRSSVVLNVASQAVGNQDIPVGSRSNAGRMLLQTSLVSAEMATWGGTHTRGGPILSLGKVEWPQKGLVGGAPMPWRRGLVVWLRPVVKNRLWGYNTRANPRAHTP

SEQ ID NO: 965625 - protein, 316 aa, Homo sapiens
  misc_feature (316)..(316): Xaa can be any naturally occurring amino acid
MTNKNKHSKKHNTNAYETQTGSDTTKRHNNHTQNTMNNKTTRNTNNTNQRKPKTEQANSTTPTNTHERQRRAHNNTNRKHHPRHERKKERHEQPNQPRKTEHNTKKDKDTTKVAKQDHDKNRNETTHKTTNEQETERQHKTHTQTRKGDSKETERTNKASRGDESKKRREAEEEQKKERRERSEDEEEGHRQKSRTRETRNRDREHTEHETTRAAQTETTAKHRHDTKQKEETNTNTRGTAEQHETNRGNRTDETRLRTEDTKIGRKKKKNKTNGNENTKQNEKEEEQQKKNRRKRQTQMKQIKIVSLFCLRPHTX

SEQ ID NO: 965626 - protein, 124 aa, Homo sapiens
MLMKAFKASSTSSTLIKDAKAYEAELLTPNLDPVYSTLIMNERKLFSNYKSNLMKIRYLPSDIMPRRENLKNYLENWTILTGPIDSTNSKLNEVIILPVNCQTPNKRGHGSLSEKGFPQTVPRH

SEQ ID NO: 965627 - protein, 372 aa, Homo sapiens
  misc_feature (77)..(77): Xaa can be any naturally occurring amino acid
RFKGPAALAPPRPGHAAIQCRCWLGLLGLVVAEACRRTSRSQFLERRRVEFPLDRIQRHKSDYWAKYRSQFRQDSTXERGEKIRVLQYKPGCTLVYALSASFEPFSEAKARRWGVQFTVKHEAEHRLWGRLCEGCILIVWTRQSMHGDSEVQHHVRSRASVALAARRFMSSSIYKGKNVRINEDIRREDDEFEWPCTQLMVRRERAYEVKIEERQVESGRGKTTGNYLPAKKLRIRMRQKRKDRTERGKNRESQEITPEDGKGPGNPEPYARSPRMGLEKWGQRGPPGVDTSVSKGACGNPRSINTIKEGEMYQNCTQDYTDRDIDENSAAAQSRSRTEVRTQNTSSAEGARRNTCEKISSEVDHGRRSLLS

SEQ ID NO: 965628 - protein, 95 aa, Homo sapiens
MGTHTALEKRHSAHKKLRGHLHSTQRRTTNTQPSHAAEKRRRHKTAQTTEGTARANNSAETPERTQGARAPGAPEPSTGEDYYNADHEPRPKHTK

SEQ ID NO: 965629 - protein, 148 aa, Homo sapiens
YSSLGDRVSETLSPKKKKKKKRSIIRGGPSEVLASGQGGLCAGSSLPSWWRSSVPFLFLEWFSLRVVEPTVSLARSGPIWCWGWNLWSPQTNGPQGWKPINPQGHLGYGNLVVVVRDTDGFTNRWIKVNNGGHMGRGPNFNLWIGGPG

SEQ ID NO: 965630 - protein, 139 aa, Homo sapiens
MYIERHAVCGYLPHSTIEEESSIIPHFLSEYSPCSIHYVRRVYMQYDEEGLCAFVAHPRAVGAECCGGTDSGECGLHKEGPVALRQPLAGEQCGGHQLSSVGAVRRGGVSLRFGGKKKVFGRGAAVGDQTREGGGRRVL

SEQ ID NO: 965631 - protein, 339 aa, Homo sapiens
MVTDGWGDAASVKAKGVGCKAENHVYVQASTVLAIIKLQSISCGVVINGELTLMVEWDGTDNNDSTDLGANVTLLVDVSLGRRCNGEGQHESGTDPVVIDTHVDYGEHEEASRDVESLGMLQAPAIANSEGVVLVIDGYMILDKQECNALSRGGAVSLFRGFRATQCAQVSHRGQSVEVHRGTNVRLEQGWRLWEDVKRWFGCTSFVVQHSFALGAGETKAIRLRLALGAMIAVVWMRCPESLVVMGPVAWSSGLASSCDSGAAAPGVAARSLQAFPGPVWALAGLGAGNQPREGPLVYLPINKFVGGATRYLARHTLLAGRAGVVPKHLGGAASRGVA

SEQ ID NO: 965632 - protein, 264 aa, Homo sapiens
  misc_feature (63)..(63): Xaa can be any naturally occurring amino acid
  misc_feature (164)..(164): Xaa can be any naturally occurring amino acid
QVTDKYRKPEGGSPEAVGQISVGIPLPQQKQGEEGGPLQPFYVGRFRAPLVLTLWCARNLLEXGEGPNSFPVGTVGIARLNPSLCQVPPSPFFPQKEELFLWGEGDRVAQDTTDAQCDEMRHICAALWYTPGTPMCTGMCSEQHVDHNVVTQRNTNNKTVCHTXGTTLWVENERGEHIVWDPQEHLCGGAQSGIETAHERAAGCGRTRRPRGCERLPLEIIVGCAPTSVDAKRGGDKWCAETSGGREHAKKDRGVYGGNGNASK

SEQ ID NO: 965633 - protein, 281 aa, Homo sapiens
MRAISLHGAEKNAGALGAPSAPYFTSFAPPEGYVREAVQEVNWAVIQLNYSNTDALIVEPDSNIKLRFQTQTRPGTHGQGFQTPRKRREQTRRRKREKNRTIPVPVASGAQAWRVLTKERGEKQMCGGKIYISPPALFRGHHTQGAPDANLWPTTTHAEPPHVWFLLLWEAHRFLQLFAPRGVENLPWCPHLPISSGIAERAIMYQDDPINQRGHRSKLRRELVGSNPIPTHSGAATGRKNRVDHSEFLTYQTGGATNTSVQETTHNHNTEPDYQRKQYDG

SEQ ID NO: 965634 - protein, 292 aa, Homo sapiens
MTEAPLKPKGNREKMTQIMFETLRTRPRACTWPSRRVLVPSTPSGRTDWHCHGLWRRGRPTTAGPSLQGHMRLPPTPILRSGPVSGRVPERSTSMKILLLRRGLQLSSTTAEREIVARHSKEKSVLPFCPGYLRRRDDGHRPHHFLFVLGTKSYELDRWAGHSPVGNERAPGVREALYQALPSVGMEIVAASTDEHHAKSIMKCDCVSIRNRTLYADHGACRAATTMFPGFARGMQRRSSAWWPSTGKDRDPRTPRSASTPVWLRGGPLGAPGPFHAELVSQRVQQIGPSFL

SEQ ID NO: 965635 - protein, 527 aa, Homo sapiens
  misc_feature (54)..(54): Xaa can be any naturally occurring amino acid
  misc_feature (150)..(150): Xaa can be any naturally occurring amino acid
  misc_feature (163)..(164): Xaa can be any naturally occurring amino acid
  misc_feature (316)..(316): Xaa can be any naturally occurring amino acid
  misc_feature (396)..(396): Xaa can be any naturally occurring amino acid
  misc_feature (527)..(527): Xaa can be any naturally occurring amino acid
MWLRFRGPLWSTSCCDRISMRGEGATPFRCGTCGESKSPCVTPQALCHMCATGXRFFSPQQERGFSCWGEGEISGGRKTHRRGAHVRRYEHIVRRARGDSTARRHMCTRHVSSEEKWHTMCDNKNKTHIHTECVSQRGDMCVCVHTRATXHKCVHTTEKTLWXXRGPRGLEKNPREESGADIAGREAARRTRRVLKSLLPACVVTVVGGSRPNFRETAEEGGDNMGALKVVVARKHAPQKCHEGGLTGGEQNQAPNKRPQASLSGVWWRGRPPRGVSLMEGPLKTSWGDQHQRRSRRGEVPSHNYPTPREIYIAVXIPKRIPPKGRENGGQWAGVFVGSPNLAVNKQAEFWARVFTAPFPWGFPLLKAPKGGGFVPTLYSPGALQRALLRRNRASXMLGRPPCLVDQHHTVWASGGKHTGRGAQKAPPSHMWGQHLCRGLQRRARRQYTEVRTHKQTRTRADTQLKDEGEATLTAATLSSNPHEHSQAKRRGAAPHKDREESPPTQEGSEQTTAECEVRNCTYNQAX

SEQ ID NO: 965636 - protein, 134 aa, Homo sapiens
VSAWGARYRRPSPGGTAGGSGGDGSRVLMAERGTIWRTRRDAFISGCLDSIEPRLYDEFHRTANPRRWNASRRVRASNRRRSVLCTVLPERAVRTKVLLVSMHAVVPRPDGLSQEEEWNREEEAWTVRAVREVY

SEQ ID NO: 965637 - protein, 132 aa, Homo sapiens
  misc_feature (9)..(9): Xaa can be any naturally occurring amino acid
MHPPPSAVXEGDFNALSLGTNTSQQRTCEIICNMDPLVAEPAVNGSARQAYFNPPSLFAHAGERIRGRGDFGTHMDPLEPRKGSHSHIQDDLIDVYGQVHTLNCKPLWVSLTNRFPTAKLGALNPRVSGRAW

SEQ ID NO: 965638 - protein, 272 aa, Homo sapiens
MSKDGTREKIAIPNTDDTFQRKAAFVVRHFPSLMSYRLSGRRSEYGSAYYTLDESLEPNWRRRIPGPWEPPNIYPILLVTGVRDKKSSESPRCILTIIGEPMGTSEHEKARLFIALGMLKFPRTETVLAQHKDGTIVMQVVVQITVTQGTSSPGGPLRMIWECAQGVLLLLTPTASVMWVSLGHKNRLPLEVDTRAVTINRYPSANVGSRPQGEPLLAWLPGGRPRDRLGHGGPLWCGFQAPGASHDFPGPRLGSLSARVEGGVVSARTASF

SEQ ID NO: 965639 - protein, 40 aa, Homo sapiens
MGRVLHHYIRHTTIPPFHPSRHTVHNLTTIIARDSNVCLG

SEQ ID NO: 965640 - protein, 231 aa, Homo sapiens
MLSSCSVLKFISVLKKENKTERKKIYRTTITRLQQTKVRRGDIDKSLSLGLLIPNWTNSMTLVEGNFNLVTPSLYTTRMTPLLPSVLQPWRPSCGKPVGPPAGMTLAAKEGHQSHREAGPPYSGHQTGPPPGAFEQAPIRGNGSKPPAQKRSIRGTPIPAPVYPSVYNALATSRHYRTGFKGVPHPLHQTTAAQQQPTSNPKHLTSTDVTDPPRPRYLALARLHISQNRRY

SEQ ID NO: 965641 - protein, 89 aa, Homo sapiens
MRYAAIIITISLIISEQQRHDDDESSRAETQTHILTQHVMNILRSRSCRSRGERREKKYNIVVVDRSRYSSSRIIMILLTDSYPYSTCR

SEQ ID NO: 965642 - protein, 541 aa, Homo sapiens
MSRLVYNYVKASKRCRAPTGYYNPFADAIKLFTRGSPVKHRHDLPSAPLHRSDADLWVIVTSRRASTDELHHAEVARKRRQMRSQPINTTYGKLTQLRHIIRTTPAYDTSDRKQETKGIKKSRRYQTNRKTIKQPTSTTRTSAQDQHGRKHNETATRTQNTYQECQSTTKKHASKQNISLKSQNRKPSHIKEQKRHRNRQNITKNKARQKHKNNRTQATHEDNKHQTTTKMQPHNRDSKKKMKDNETQNHKDTKAPTQHAKRHERAHHKNRTTNSNQHKRTTATGTTKKTSRDQHKKHHSRQQRTRHRAPQTPTPKQQHKQDTHQTQTGTTLKNNYTTTNQHKHNNIHTPTPTEATKHRRKDINNTPPHDPLTTHNNKKATEHSHTTARQHHHHHGQRYTAHVTATNNRHTHTKQAGTKHTTNASIHHDQHLARSKTEETHKQDQTATERTTRQQHETHEQRSLTAQQMNSTTTHKARDHRRKSDHTQQEPREDAAEDKQRREDTRHSTVRTRAHNNQPEQPDTTKQPQKHKQREDTKRKE

SEQ ID NO: 965643 - protein, 383 aa, Homo sapiens
MQRASNVTYQAHHVSRNKRGQVVGTRGGFRGCTVQGNRLVWSGKDYCEHGLGGSTWLVMVIPMLTTLGMVTTSFVQGSPITHILALVLQDQQHSSNVRTRSQHSLANTLFCKALLGFSCAIHHSFHHPPFTLPGIATHMRQAQNSIAQVQRLTLSIIGQVIWLDGFLMTSARGAPTQGHCQTADIVRTQQAPGARGGHIFINGVLELGRTSTLLGTSLKQGPKKEAALPALGCLEKTWTSTGSRGPMDLVYRATVRRTPFLIHGNRGTPRRTLGRPRTIFIMTATTGQLLLGATTTSTQPSTRGTTPDMGDTTATTTGKSTPSGRKHRGSQRRAPTGRATHSSPGRQHTNTRTRAPDPKKQGTKENGGKTDPSHQTPQSTHQA

SEQ ID NO: 965644 - protein, 106 aa, Homo sapiens
MLLSPEEQKTLTVGPLLRQSEGLSAPQENVTKPGNPPGNLGSYIILVASENERGLGGDRLFPLPGEFLGTVFAEFQGDSAIIVEKATLLEHSEIAQRFVVSGPPLR

SEQ ID NO: 965645 - protein, 82 aa, Homo sapiens
LGERERKAPAGMAAARRYGAHANTSERHFIEDNLWEKAEKPFAQGHREQAKAARNGYPRDFLKPLFSAILTSIIFNQKIQCG

SEQ ID NO: 965646 - protein, 321 aa, Homo sapiens
SRWWRCKRAEGGARARRFQAEQLGRERLRRRAGRIESPAPCWEEEPRGWRSPRRPTSSTACTTGLRPAGAEVTGLPRRVARSRDRGVGSPAQAPRSDPACNKPPSSAGAPKEPSCGAKQKVAESMGALNRLLLGPMFEKHCRGDRYQLPAERTARSGAGRARRETGMPEEPGHQGARGGPREGRQAEGGYDGHKEEGGGKWLTGGRGGAREKSPGPRGKGQGGPTESRGKKAPTGDDVGTPDCGSGQWGKTALGGLKTQRGVKTPPPRVRGTKRGPRPKGGEHQDHLAPRGDAAVSTHGRERAEKEQQEQTHEDRRQTILC

SEQ ID NO: 965647 - protein, 348 aa, Homo sapiens
TEPQRLTAAQRLPSGVAAACLAVRFLLLTGYRCDRRLGGSALCFPSETGNSTLPASAWGVVRIGSERQWRTCNSRFEATAGREPRENLVTLLARKFMLLAWQENAAWGCQETSNTTWGNPRSCPRSLEGPIQPFRPKPFQALSEDCGEPWPICNYYQRTGANNPPYLSNINPTSHRDFTRLKNARGRSHGSNRLSWLAALGHTAISLVNRPPFWPPGRTKQRAHIKGLGEHFGELWAPRVFGTYYSPFQSMARPSVSEEIFPPVWGHTMCTEERITKAGLSILTYFYPTVKRQTADPRVCPLTRRMLFGTRIPLSNKQVFHTLASLTQTISAQKARKKRAVTPSYHSD

SEQ ID NO: 965648 - protein, 122 aa, Homo sapiens
MFWVMETAKPPVSEDSFRCQKVGVEDRGYSSTLAPVPQSICPSVHTPPDARTDCWEPDCPCETASLFSTHSGTKPPALTSVSSSPSYCKYVKKEKMQTLESGLELLPPAATFNYCTNVQRKL

SEQ ID NO: 965649 - protein, 264 aa, Homo sapiens
MPVIYTNQKLHIISCTTKLLKYMMKNLLLQQRHTLYYNTCKTCVNHITLAGANSTHTPHTRGKAQSRHPTRGRNPSHTPSILKRGYTQRRDQKDKTGGKKNRSSRRVAQRQLPGRTKTVEHNRFLDATNTSYNHTREASQHDRIKNPDDKHETSETTTTQHDTTKRAKRRATNKPNARSADKHQRESLRQRICSTHNDRSATERTAETTGVTEARELTNTEQYHTLRKHHNTYRDSESIHRTATERHWQSGSASSSIRRRRGDN

SEQ ID NO: 965650 - protein, 162 aa, Homo sapiens
MIGNVQNHVQFQYRRTVTGSRGPEFLSGMYIRISPIPASRNPSATISSLLVHLLIYNNADLLENYIPAKLTPAQPQNHSRTSALWLNLLHYPGENAPKPQPGHAGPPLKRHKTTTARTHTHIHTAPTPPPPAPHTELTDHILTRATPTSRQPHTHIYTQHIT

SEQ ID NO: 965651 - protein, 34 aa, Homo sapiens
MIMYTRVTLSPPISHQHHHTHTGRITNPTLHPKE

SEQ ID NO: 965652 - protein, 255 aa, Homo sapiens
MGNGEGRTLNAIWSYSGCHGHQGMLTNSGKRGLLSPSMTPIIDLNIHGLHCTNMIPPTGNIPWHQSRLRTGKLVINGNPITIFQEQRSPPKSSGAMLALQYARESPLALFNTMRERLEAHICREGAKRVIISAPSADAHMFVMGVNHSPTYDNSLKIIQQCLLHHQLLSNHWTNVIHDNFSESVERNHDHMFMPITVTKNDCGWTLRAHLCACMASWRYTINIIPCNLHEECKSMMKKGHTLDLELVKLIDMDIT

SEQ ID NO: 965653 - protein, 125 aa, Homo sapiens
MNTWTLTPEDLTPKGKSVRTVIFTTRKTSLNQMDFGTEEKTIHQSSKLEIPKGSHMSKWAGLDFVEHQIETVPKMEDTKKADQMNGKEHDVANEPVIIKEKLPKNPFGPTWGFNPKRPLITFKKE

SEQ ID NO: 965654 - protein, 387 aa, Homo sapiens
MRETEAEENHEKQEHEQRFRNHKTHNRRKRKQQNRTTRTKTDHKTQTKHTKKIPPQRGKYDSQEPRHAREENESLKKKPKEKTDGTGEERTTSGAREATKADSCTPPARETETTQHRDKQARTTHPKKQRSARPIKTKTECTGPKRTPEHSDSAALRREKKHEDKRTEIGDESTTGEQPPARKRGTDHTDTATTTSPRRTRRQKYTYDDAKKKHSAKTQARNRTADKTESEERHGHESKNNTNTMKHRYKTELTSNDKLTDTTQRDERQRKRKRELHEHNTGAADTNQRGERELTVAARERQEAKRAIRAERAKEQAEIEDIAERSERAEYNQTQDRGKQSDRTRQEHRERQLVPTAVTESCAACRQHEREHGNSRRRPEAGTGLRY

SEQ ID NO: 965655 - protein, 515 aa, Homo sapiens
QHFVVAECSVDYLSASEIETMCVPTWQKPCLDEQYRKYLGMVAHACNPSYSWSAQAGESLEPKNVDVFDAVANDWYYLQLQRLVYNRTTSLPSNTHKQTNTTTCHFTTHLHSYTDSDPSVILKVKKLAPEQHLSPKAQALHTLNFVHDVNIIAFIAENINQYETYRTTHMHHLTFHTIHPIHCALPCAHTYQPRVISPTTCKHLRAIVHTLHSSHQTANNVQMNSETLNFKPPIFISYSSHVGIVVPPRMIRRTASLTWDPITHYPFSILIIELERELRTCEDNRECKIRYTSVNEVTERHPCINWSKLGPYTLARGKVEQVQQRKLPPPALRSHLQEQHGQLLGHNRQNRQAQRVITLVTVTFSICYTTINAFQTIQTQEKKGDQQRNDRSPRNNTAENSAKAQVDTESRQEKRAKQRDRGTGAAGNSKDKTGQQARDREATPTRRTGNKRNNYEEQAQHEKQEREQRDHITSSRENTQGDTSKTRTHREQKTERERRSEQTPSSTRQERQQTN

SEQ ID NO: 965656 - protein, 438 aa, Homo sapiens
MREQNSRLNRLRFLSERACRRGPGDRVPAVLIHGIHSPAHDALCRLHPCTHLPLSCARNIAYVPDTMPYQYPAHDPRSSTQELSDIAHRNRGTMATGILAAELSPLGAIAKRTADHEGNRRTPTDGQNRQPTHRPACEHEQRDDPQIKPTMTIRRRRSTQTFPDEDKIKPKDKAETDMKQLHNHRQRSRKVHTARVQRSDNSPAQHQTGAEGHPSETDEQTNRTRYNTRPRGTRQEAFDQTEARSPIHHRHGTWKHEIFRTKVVKHGECVNTTYGKNYKHTQTRADATHHNRNKMRKSNRNENTSNKTQPIMNKQPHGHMRTRDQGRTQTAPPTDKSRHRHRKAEHTKDTRPQQKSDYGTQANPTLPEVRKRTAAHEQREHQRTRRQRGTTTGESRRGNVTESTERPSGAQHPNTGPEASTQRRKQKKGENRREDGAA

SEQ ID NO: 965657 - protein, 385 aa, Homo sapiens
MPPGVCCGPFSFGYCIYFDSQKDEVTPNFTEQASQQRQKETEACQGESWAFQDYLHLQQMLKLFSKSSYASKITSYWLQPVKSAQQVAIIAAQGCHNIMHHTCHIGIVVSRPADSEFDFASVFTSRTLYRNQRKCLQDAYTRLKLPTTFSQSNMYSAQSLRLQRMHVRHARHPTLSHINSTPLHLTTYSHTQLLANVRSSPSGGHYTGTLLLTVMEPTTLDSFNKSSLFHLRCTDSQYGLTHPHTRTPVTTCLSARAILHLYSTLNEFTTAYGRCRRPGDRRVRPYTRATCPSWQVQTNHRAPIGRPPRPKDGAQRRQPPRQGTALSRRQDADDGTKTAQGARHDTGTRHSGTPRRGRTPSTRARRPQRRKNETPTTAQRERDPT

SEQ ID NO: 965658 - protein, 85 aa, Homo sapiens
WGLMRAGLAGVASGRVVVSDIEKSDYYRERMETSTVQGILPGYHEEKEQAHGRHGIKSSAHTKKCDPLRDLTIEFLIYRSIGVAC

SEQ ID NO: 965659 - protein, 195 aa, Homo sapiens
MYEARTLSCLEHVISLLPCGPVTTEKIITRGPHRRLEGVPGKHGQDSRKAVESFSREHTGPDEPGSSSKVKLLFEPREGGPGVRISQADDAAQKVVSPCSSWHLISGERLIWKAQRGSEPWEHLARRACTRDVNFAILPDGVGGIMGATTDFLERSYLADYGSQPLLERVPFTRRGESLLLTGARRITQRGPHTP

SEQ ID NO: 965660 - protein, 149 aa, Homo sapiens
MGGSRGLWKLPGGAPGRQVKPRKRWQGKILAVGISAFGLNQALKGVRGSPGNSIEIPSSLTGSIGSANSYILPQFSPIGGVRLGECSNNGSKQTLGQTHVEQQDLRSKNPRKQKKTFLENLFGKGQKAIKGGSKRAITVAANPPLFPHS

SEQ ID NO: 965661 - protein, 273 aa, Homo sapiens
DAPVGGATQVHHCPEREEQRGSRRDSRTPGTLTWRAGARPLICPEVAGDPRALPCHAGRYPLQSRWCCDRPAVPAEGSVLLSTSYISSLSVRHVRESRLVHVGPVVTYGFFLGDGPSHSREPGTMASLEPGDERTYGDPGLKARGRPSRPRILSSGSCIHQRLISRSSPGETVSQVKSQHQRRQFQLEVAVPGFRTEQMGPFQSKATDLCARLHKTLARDTTFPGQLGANPISLNSAVPMRTVGSENSDGTEMNCLTVRSTVAFRWPQMEIPV

SEQ ID NO: 965662 - protein, 202 aa, Homo sapiens
APRPARRPPPSRCPTPKPQALKLRYPGRGRVAQRLSAHKNSMEQGAEPRTVRVSCAPKSTPERLHGWTTLSIQAVDNPGHPSIMIDWLRGGRRRQSYRSVKHLFDPSFEDRNGGLTRRQAGAPSTEASSPDNHEGGDTPCEHKPRMTGDSRDGARGPDASGENCRTPTRQQAAEAPDANDSYAEKTPERRTRPRGRYKRKTY

SEQ ID NO: 965663 - protein, 135 aa, Homo sapiens
MAHDTTTSEYCFLCGPAPITPSTIPGVVSSSLDFNPRPQNRCAWTFVLTVDYWSLRKRGRSRTAKTVVLRTTRPQNRTARTGTEEGPHTYKRSRHRPGMKGHRSETRRECPVVPPARPPDKCVCPRRPADGTGTS

SEQ ID NO: 965664 - protein, 44 aa, Homo sapiens
MHERNARQHTNQPPPRNTHLAQRALPRPKNPHNGKPEPGQHTAL

SEQ ID NO: 965665 - protein, 202 aa, Homo sapiens
KNAEYKRYLEMLLEYLQDYTDRVKASPRSEELFGKIQAEFEKKWENGTFPGWPKETSECPDHDAGAHLDLSAILASMGGVGFIWVWSRLKIVLSLACRLEMWRVRLEERAAETDSSYQRKVPGVDCDTSWLAKNPKSKGSQCETPEKEQRDCFSRSPGSMKYVEILGEQRDLTHEGVYSASKPGQEKSEKNEEEEQISESDE

SEQ ID NO: 965666 - protein, 262 aa, Homo sapiens
MPHLMDPDDDLHYRNPILQAFIMMTTSVTHIPMITYGGPTMNMMEHPTSLHSVTHEDPRHPTGWTAPWETDNDLDIRHEKGLYTSLVLHNRMQDNVLQHDRTKQGSRRSVNGPDDSTQHLNGSLNAARDAPVAWVMFTHRTHMGITMKSISRAIRTHHHEPDPTSIWHVAETESIIPTYAKGSDKEITWADPSSTGETRHNHMGALRCLGWNMHRTHSKLPYMTPGHRITDTGPTTEGTGKGLNGTRLDKDKATITRCTRQA

SEQ ID NO: 965667 - protein, 553 aa, Homo sapiens
MKDSRACYEEYKVVGSHALPTRHNADERSPSSSRNGRSAVLAAHTVTVRFGQKSPGSWVALVLLQVTMNDEECLYSGEEFVGNVVACSDASRCQSRHLGVGERHLRGILGMRLLKSPEAVIRYSDGYAGGNKRSEPWQTTLQGQAGAHTELAYTEENALRVSHMWYTRRAPRRPLTDAEYRRIPLENGLGEEKKFGRGTQGHMAWRHAPEERTARLYESNIAHGYSRNEEHIPTKDIPRKSYPPGHWRTANAGGDSHWQDTGRSQGAQTKNGQLKQRQLLPKGRNTQEVKGGATHRRQATVCAINQLKEEYDNVVNRTLRGHPGEAWLGATKDNLHKASEGRKNLARVNGGLQITRYHVHTLTKGQQTTSDTEKTATRGTTPPRPREGRYNRATTHSRGSDTPHNRGLGAATRKNRHQAAVTLSRVRKPNMQRFNPGHPGVDDMSGYQATSGQPERNYTEAAHELHLGRSTHCPNVEQLDLQPSGSQLNLTEGAHIAELKRAEQHPHRTLSSERGERNNHNGGGYAQAQPDTRQQQQLDKARQQAEDKHTDTQ

SEQ ID NO: 965668 - protein, 115 aa, Homo sapiens
LPGAGAAARHRLGREVAIAESAGVADGGPGRLACEVGLPVGCRTCTVASSEWRTARVIERADWPPKRGGDKLPGAAMGLRLGILVLASWAPCGCSARATERSSPGDSGTEVLLPG

SEQ ID NO: 965669 - protein, 136 aa, Homo sapiens
  misc_feature (119)..(119): Xaa can be any naturally occurring amino acid
MTISYYRTQGDIRITMSAPSRLIENRTRNQIIAGTGHYNFGLGLYCTLLSSRQSTSSTPFSHFRRHRTAQTLICSHRLPRDLHVISGQVSSLSASSATNISLYIQTSVWLRSRRLILTXADVEDYFCMSPSMMRVL

SEQ ID NO: 965670 - protein, 357 aa, Homo sapiens
PFYFFIGQKLRSRYSFFGRGLTMWKGSPNFVKRKTHVVTDHQEPGQTTDGGGRGSVRPNGPPRTAWRVHRTIGAIAPKNKLTSDEQTTNKCRRNSLHTQNNDTENMQPTQEKYTTHSGNTPTKRKHRSPRHPSSALITQETESTRTPVLEQYQRNHHSTQPQRRRAPTTRRRRHNNGEEQQEEEKDSVASHENKRRSRPRRDTQESRGSRKKTNTYKEEVAQQKEQQKHRQTEDTERGRQRQSENNTTTKSKKTGDRDGVSHTTRRHKETPHITPYTQPNTPDVTQTRRRQSRETDQKDHNQRDKQLEDSTSRTHAHKIDVLTIHRQPEEDVENTPEQGEAHTTAEHDREEDHPRQT

SEQ ID NO: 965671 - protein, 570 aa, Homo sapiens
VSEARQDICLLRQRCSSCNTTGWYTRNSPLAHLHSSTSAYCRLHATNQATTLWQGNGHRTQLRHDTAPHAPCLSSPHAQPTAPLTPYLYTRTSQLPTDYPILIYTRATRTLPPSPRASLSLLSSPLARAHNARALQPLHPLRPSRTHPGAQTTQLANASGLAAAQLHACHTLCAHSPHHTISHHPHTPAHSSLLSPPSNTQTPTLPTAHHNSPLRKPPPTLLLSQRTLSLSLQSATPIYPPTTGLPPCLSPPPHFLLRTSFFPPRGTPTTYSAAPHHLVSDPPGTLPPRAPSTHRAPRPPFYRACRPPPSPTLPPPGVHLPAPPTCALTHTSLGATSITRPAGLLSPPHALLATRLASAHAPAPDPASPSTSSPRATLLAPFGFPSPPWHTRGLHLVLSTLSHAPHIPSYTLDRTLCALPRSLRVPTALAAFAPFSAADLLPPRLPAPTPGPARHRAPSRLANLLLHAALDLTNDRPRTLDLAIPLLAHHLAAHLNAPRVPPPLSPLIPTGLSYHSNGLLLLMRSTSATAPPSTHPAIASCQRRHHPVLPRDAPPSLRPAVLSPPSQSQP

SEQ ID NO: 965672 - protein, 275 aa, Homo sapiens
MGDFDGELVSELQSTRHTCCHEPVYLLPEQTISTHGRSIASPFADNYRATPRGHQQPLLALSIPAHRINLYRSTPLGTCHTPNSSYTRHNPHDTLPTHWHNRKAATTEQPPQHSDPAAPREMYPTDILDSTTARHCLTARHGMATDSSALCRPNMGTTTLAANISESAAQTARIPQQLAATFSHNANRTSISRARNSTGGFRWQKTVARPEAQLQLSPFPPATILHSIDPAGAQNPDNLGATGTLGTTIHNKRTLDSRTHTPLSEVLPTAFEAPQ

SEQ ID NO: 965673 - protein, 175 aa, Homo sapiens
MFEARLVQGLHPQEGVAGTTRTLIQRGLAGILAPDGRTPDRDMDSYHVSLVAASHLTSLRAIRQLPDEIATMAMGVKPHTVCPTNTTNAHVQQNASHYNYTGQNDYTAGIPILRALRYSTNGNNNTQTQTYITAPNRTAPAEATLRHVDTKHGTLPDTEENTTLGGYATASPFME

SEQ ID NO: 965674 - protein, 455 aa, Homo sapiens
FENKAVMGVIQEKNNNNNNNNKKKKKKKKKQQQKKNTDQHNKQHTKNRKHKERENRHDNTTTQRKQRHEAPRETRSEQRRQKKKPAPQTRHAQHADTTDRKKEKRNHTTERRERSRPGGDKRREKARETKAKRGAEPTASTTDEEEKKKERRERRDRTSGRAEEGRDKNAQAKQRHRARTEDRKTTTGGTKRNPRTRETGTRSEEETRREEHRREQKREEKKEKRGRGEERQEAGRRRAERAEETEAQHPAGTKREAESKREAQSTRTQQDSCSGEAHPERGARREEEGKKGQRRRGARGGERQQKSAEKTRKRSGAGGGQGKSDTTGGTERRRQESDEHRSERQRRGRERGRDNSTTQRKGREQGASERGTARNSGRKRRVDEGERAARDDQEKRGRGRRQRQPSAHSEHGGGGAEESDDTRETEDGQKGRDAHGAHNTHAKQHTNEGETENRA

SEQ ID NO: 965675 - protein, 465 aa, Homo sapiens
MNIFDRKINFDERFIKFFSYNPSQRSSTWKKVYASYCTYSMYVGGMQGPMSIWSLTFISGWPALSALWASHASLHAFRPASATHHPSAHAHTSNEHTQHCGTILCLGISAISHSPSAGMALGGHMTPCDSYMATMAECKPTKDHTTITPPSLYYIGRHERDRNTNTNTGPYTTPMQTDTVHTGPREGPATTTNTDIKHMRNAVNHTHRAHKTHNAPTQRNSPTKQVPLTPHGTRTHTRSNHNNTETIPPKRREQTHTQAATQQHREYNRQPATSRSTYPSNSTQRQPDDRPPRHHTLPPPRSRIRTGRGHVNTLVPPIPPDKHQLPAAHRANTDHYASRSRPPHSEATATLQPQQPTNQRTHRGHTITLIHTRPQQHTHPDRHEKHVPRQTHTPHEAHERTRSETHHAQRTADRDVSSPDAPPRLTQQQRTDTAGTQTQTNQNTTPLRHATKHHRPTDRTDRTTT

SEQ ID NO: 965676 - protein, 242 aa, Homo sapiens
TPDSGPRAFSSASAAASSQKPLRALDSARPAAAANPRVHQHVPLQDPWHADGGGNPRSTAPGTEQQQPATSPGIPSSSAAAQAGNAGTQAQKAGRQRRQRRHKTGNKPVVTYREATRAPSTGTHSTNRPFRQQGLSQPIATRPSLTHIAQATKPAPIPNHIRPTTRGTQRVLRTAPPPSPRYGNATSGTQRALPESATLPPSHTVHTSSRHHTTRENLRTPCVTPPTPFHPTRHNPAGAIAP

SEQ ID NO: 965677 - protein, 299 aa, Homo sapiens
MAGSGLCPRGPGGTHISGNDSFVDDRYKISHGDAVARKGSNVLTSHLGLGNRLRVWGPRNARTMKRGPCPQGCEFAMSGRVRKPALGWDTGGPESHFRLPAWGRRPQGQDEALNTTQLGVPIPPAGTGTQNATCNSHTAGALWSSGTGSRGNTFDVTKGQAIWWGNRRQALGALGRQNRMYSYGGKFPLSYTPCEIYKERTAHHVGIPRLRRGNIGVAYGPGGTNNPGGDTSEGGNDTVSHQEEGGHRRKLKSPVNSCVDTPEKPRERERGSKEEEAQEAHTDHTSTQKTRRGEETASG

SEQ ID NO: 965678 - protein, 145 aa, Homo sapiens
MRERNTEEHPNSSGTLAINPNSSIHSEGSNHQRGTARESHQYVSLPQQDTSAAKRTRGRAPNDKRWAGAQTPEDTQGECPRTPKGAVTLITHGRDEQPNNTYPPMKEGGLSTINQDTTGGLQQPHGITIHGPTGDIPPGNPPTKG

SEQ ID NO: 965679 - protein, 43 aa, Homo sapiens
MVSPLKAIGLSDKFHLNKLNFENRGQFAGKKSLSEKYNQTRFA

SEQ ID NO: 965680 - protein, 267 aa, Homo sapiens
GRVGQRKTRLRNGKENEINQQFMRQSLRELWHHQVTVPEVNRREKSLLTLQMRRDLLQEGVQPEECVAIAGYACHQIETRAQFCEEEKKFLSCMTRTICRSARLGGDACGLLWVHSGKPCVGSTWHAVTDPGGTSWPRGMTRVLQRSYGILETPLGGSFGKTKRDEQLIYQQCLSCRIKNPCPDNKSVLDVALVRTGIIESLLCSSNARPERVYGVGRPSEMAPATRGWLVLRSGFADFFTCPAAGWAVVLPGWGRGGLVDGAGRRL

SEQ ID NO: 965681 - protein, 104 aa, Homo sapiens
MVIGVNPEEYQETYWALDVIWSWVIIMSSIYEPLILLRRWHYARMSAAKHSNYKTAMRDQGRFNKRPRKYFVARIWAGRRGADKFEVFSTHSSLKQTELRGRGV

SEQ ID NO: 965682 - protein, 131 aa, Homo sapiens
MPCARPLISVYSEQGVNAHLPENCHLAYLLFKAPKYGPSYGLNTWVHTHNSLSAKIHNQDHALMAEYIVEITGRLHSELTELEAPVGGNWARKFCRASEFSPKKSSRKGMAYGGHLSTLDILGAPRLNVPI

SEQ ID NO: 965683 - protein, 356 aa, Homo sapiens
GDHVRGQQLQPDPKPGPSPPLAGVVLGDGVQHPAPGTTAQTPAVQRSFSNHPGRVPGIILLTGNIPDAHVSELTYVTKNNPPRESAQPFRGLTKAPFPVMKPRLWKRHAQEAHLAPHKPPEEHYREPATWFDTTSTRLCTHCAHCTPATQANPLLHAHYPKGAPPSSAPFPLAAREQFPQAKAPWRPSHCEPLNSTTLGSPRPLSSRFAPLQQKNPETPPYISPPHHNFKGAHPTLPPPSPHTLPHQKTTHNATEIYLTHHFDRPITNIRIIPMHTPLPHHPTKGLRPRIGNPPHVAPTTHTPPLSTTPNTRDATEADTRRGDQPRVHAKRRPPVDRIYPGQQVGHSRAIIVSPRT

SEQ ID NO: 965684 - protein, 268 aa, Homo sapiens
MAPSREWHGLEAPLPQGLQRRVAQWFNQPARKIRRVRARQAKARRIAPAPALGSPSGPSVPLPNGFRVPTPKVRRRAEVSRPWKERSGVAGHSQRRVAPDTIGISLWIQEGGGQGPTGIPLETKRAERVESEVTGSKFNLFPQEKPSAPKEGGTTRSVAEDVEMWATPMFDRDRFMPRFRNVYNGGRNVESSLDGRRRLHRPAKSRMAGQRPVLRHRTKRARSPRLVFEKKINGLPGTGHRGSNNTQRGAIESQRPIRIPFAGALRDV

SEQ ID NO: 965685 - protein, 196 aa, Homo sapiens
GRTGSRLGSQMVRDYLRTKPEPECAQNRRRTDEDAAEIDAGSRQQADPRSFEIEMCANLAGETRDKQLERSIERSGSVIARHGNIGRPFNRFTDGLFAPCVGERVALARKDYLIVRSIQAAGGPWRGKASTGCETDLLGGTLEEYTSTVARIGKGGSRVQVSQQLRQRVGYKKVGSTAGSTHGVTSATGVTLEKPN

SEQ ID NO: 965686 - protein, 161 aa, Homo sapiens
GGGGTARPSSDPRSASRRREEVPTRSRSAPADRLVPVVLISVRNHRGPTSRGRKDADLSDKGKRRRWLLVERARNIKKLNFQAFAELCRKRGMEVVQLEALAGRSRSRAPLGPFIRIPEAKRPWNLWKQVPISLFCATARQTTEALEYTPRSPAAQLVHRF

SEQ ID NO: 965687 - protein, 113 aa, Homo sapiens
MLLFRSDGGCVAQMERALRRSQVVRRCEIPLGSGKFDRALVGHVLPFGTRRSGCAQYWACQWPLNRWTHAFTRWGFHSNQTLVAFYYQDSTHMTYRLGGAKLNSATLGRYLVQ

SEQ ID NO: 965688 - protein, 488 aa, Homo sapiens
  misc_feature (58)..(58): Xaa can be any naturally occurring amino acid
MGRRPRPLLPVFVRNKPWHDKSRFCLSVSRALTIDSHCCDRVELEIRPQQLDARFRLXWPRWCRDDIIAARLVLVTARWRRCPEILVPISSHDWLRKLCEENSIELPIILVLQRSQPVTHVYPAYNNRMFVPSALGLDKSVPRTSDHCSRCLCAKAHPGTLVRPGVQHMVNGLSMSRSATRSLARNKGRHCEFRGPVGQGAKVTRLSWTAHEDPTISTDSGVLQPKLTHADLKYCTSPWLSWTNAAQYPALDLVGGSHASHTPSYAGTTPGTTLERDPLALPTKGGIPRWKIGPPSINKVNPTKIPNTSLRKNTTTQKRQGQRDRRTTPHEEEHQKHPDDTQHHQDQREDTNRGAEAVKYKHKTQHASRTVITPSSAEAGDKREDHGGHMSDTATQHPSAGYERLYDPSDHKTTCTNDRPSQTLTTDEQMKTNRTDKDDTTTHISKTQTEPTRPSRKHEEPPESPDKAGTHIIDQSTAKNHEAKPALA

SEQ ID NO: 965689 - protein, 158 aa, Homo sapiens
SVGSITPSAASRPRLSRRAPCSELPVPYQAYRQLHLAVITYILQPDHVYRMLGARQSTPLLRRRIVYDLSPTVVHPIARTWRRSPKSTAYLGNSSPFAVVRATFLETKHEQTAAILGVAHPTARNSAACTTEDLPGRHQPLPSSTSHGCFFPLATTEY

SEQ ID NO: 965690 - protein, 308 aa, Homo sapiens
TYPENWRAFKALIAAQYSGGQVRCALRSTSTSIWGNSNRTPEFLRKFPAGKVPVHWRVMMDSVCSRATAHCLTYVSNEELRGSTPEAKAAQVVHGWCDASLIPDIVPPASTWCVPPPWGIMRTTMKAWPLRMLDARTCDVPNSGRLLDAYIEQTEGLFWLGERVTNWLTSHVVCALLWLYKQVLEPSFRQAFPNQPLVSSPAFNSGPGSRAVLGGRCNSCCEDGGRLMLKVAKSPSLKGAPRKRNGPGENRKPRLCGRGDTRGCPRPRREGLNLFTRRVLATGPDPLFTAQNLLGDERGPRNQRRHFT

SEQ ID NO: 965691 - protein, 360 aa, Homo sapiens
GKRRKVDEELVVPEQSLRKTMVIRADSVAGAPCDDGTAPIILEAVLQADSGARIADRFLLYAMDSYWHRRCLKVLLLPGAELGDSLGTSVLHRESGMIRFRNDYIRLFAHNSRCYAALARQMDSCRVNIRHEERKAHARIIFTRCWYMLYLDGISLVPGDRIHYINRQLKYIGEHDSDLQLFINGHANSVQSTSHYCQTRRSAKRSEECRMRDFISDLSSRRVDPEVSSRTTRSLRKIANKRKLHAIDSIMRTKLTLPDVIGGSNCLEYEHLRAHQKNRDQREQPGTPQEQRTTTPEENTRDSGRSDQGGEQEERQQRKERKRKNRATTGPKTTDGEGDSKAAVDTQHDREEHREERGAH

SEQ ID NO: 965692 - protein, 450 aa, Homo sapiens
MGKMQTIHSQAIHHQPQDITPSYHSCHQCTLHSAQSHSLPTAAAHKLTDPPQHPARSLPSQQRRLTTATPHTPLLIARQHIRLCEPHLFIRVSMCLHKPSPERLASHSRLGLLPHHITTLPLPLSTPFTHYPHPTKPTPILHTSPPMPPHSHPHALTLTTHRTLPPPPPLRAQPYSATPPPHLISSHTLTTTLSHPPPPLRLTPPQHPHAQPQVPPTRPSPTLNPPPPSPSPPIPNNNLTNLENIPTQPQHMPPQYPHQSHTSKIKTYNVHALTYNHSPTTYTTPAIQPYTLTTYKNTRHPPTSHPPPTPRPTPNNNAHQTPNPRERHKQRPGPTRHAHKNDTRPRPRPPPGRHRHHRTPKHHPDTTSTHSTRDPRRTSSPAHIPRTGPQPPSPNTATRSTDPRNHRHDTHNPQPGQGRNTASRETQATTQTTPHTRATRDTHNHKPQTK

SEQ ID NO: 965693 - protein, 231 aa, Homo sapiens
LSRRLARLVSLPTMEGVAVVTAGSVGAAKPRELQPCRSASAPVYPDRLTLHRRGERDRASVLRRGQPGCHTASRRTPELETERADRAGIRETGYRRTEGQRKPHRRRRAEEEEGTRSTEEDQRRTQFAAEREDGRAQKETTEARRASGMASTTSGRMDPQNTMRIPVRRKETQQDCQLTNHHKLNYKRKDERGHRQEREQLTGHQTAPKRHIETHTDDHPRTNTHAGPTAP

SEQ ID NO: 965694 - protein, 33 aa, Homo sapiens
SEEGWFLSFAIPVSRFWSSQPAVVAMIPPAGAG

SEQ ID NO: 965695 - protein, 125 aa, Homo sapiens
MGQTSRALPFLALHNLGCAPIKLNLSVLTENGVPAEPAYSRRRSAGNLCNGSHARYISRKNWWYQPRTELAICVPKFSWLGNWCQTMLEAEVSNIAFGFPTGMGKSQPVKGLPLPVGNPGLDGGA

SEQ ID NO: 965696 - protein, 395 aa, Homo sapiens
MPSVRHPGSSHMIHAPVYSAATWAEPHPMGAPRRIPHARVPAASPEHQQRALSAWRCNRLPRLPTVNQNVPSGGPSAIATAPTGKTTRSGGETQPGSRDSCRQAPIGMPSTACKRNRAAIKASRLSNRWRGEEGLTSCHGMPPSTISHTEAQDARQCRPRQQPTTYGQPLTSIHPSQIAVATKNVRDPTTSILPHPRRAPECTTETYAPRWTIHGPFAPTEYGILDPTQTPKQETDTDITFHTHHHAITKQMNCWDDESHPLVSGGRDIWRHHIGLSSHLLHDSAQTQGQPFIKQEAMTRPQTCNNSTWAHEHFDSHGVQLTPLHGLSVRKQTVSPRTIHPVSPGNDKTKTATPPSTATTNQANTQQHRDTITTTTAVTAGQNTQRQTPSSAPTP

SEQ ID NO: 965697 - protein, 181 aa, Homo sapiens
VKFDLDESMPEDIPKQSWSSRIATDDSKAVCRLTVKFGATLRISRLLLERAKERKVVDAVGVSYPCKETRLYRVLETFVQAISDARCVIYDMGTERRISACICLILPVALPGSLRDCDNRYHFEEITGVNRAQRRTNTFRQTRGNVRIIAEPGRYYVASAFTLLQLTIIAKKIVLKEQTGS

SEQ ID NO: 965698 - protein, 484 aa, Homo sapiens
AWCSVGWPGGPGVPCVMVEPLVAFLRRFRQCASCGPGVCWHCGLVCRGLRPAGALRECNGRRDQGSGCPVNHRLGQHMSQGTMQASMSPVAGSIYRRSRRATFKGIISSIHLHFLTMEWPSSPRHAEVIGTAFMPQLPAKPAHPLTLAPDCHPGVPQAHSAPPSSRGPYQQEANRSGTLGVRQRLHTQTGRAGHPRGTTTGGRAQFDFAGTQRRTSHISSHTSRPPSTRAYPERGKHMEFGGNRPPLHTLVPLILAKRVGPHEPRIDSDFLAGIGYRAYHIHHWTTRKEGDTSGHLRNRLPGHTRRGQAPDTRKRPGPSHGTCGPVGHLPDTGNVATKQHPSSDTTEGDYARLAPPTLGANTVRDPEAPRAFDRAPHTLKDNMIRGITRGATAPRQQCWDTRRTASGQYCTAKCTPVNHRDRLQRGAHRLGARHPLDTQSPAGKREHTAVMACVRSNLNGKPDTKTRTRKTARTATQRSARDHT

SEQ ID NO: 965699 - protein, 184 aa, Homo sapiens
MVSREIPFSRYWPPIESQRLFGKILTTVFSPVYPSNKPVYEDATPEGITPCNTWTQTGTTGLSHDPSKPFEIRAIEVLEVLPLQWGDRALGGTPLCVFVGLPPGRCSQCPPRASIITLLAGCYPEGGPYLWSAHRRASPLIPPLAGVAAVPELARDLPVRPIALSQPWLPQWAPGHDTRLRRSF

SEQ ID NO: 965700 - protein, 406 aa, Homo sapiens
IHISAPVLRAVLPFRCPAHATMTEQAISIQPKTSWPGGIAAAISKTACGSDQSAVHSCCLPGPSHAEHSSISRRTKPVTHRAISWHLAISPAIHPKAARGDDMVHIVRQVAPPLCHNDHITDITLPPSIKGPHRNISDTLQSDSRIHTQGVPLTMRAGARIGQQTRPHNTPRNNHSRTAINATNGKRANKHIGAPITVDGDIEQRTQGHDRQTQFPPYHDKSYSGMNNTTHKTQLGDTLTLASATPTGTTPPTGSQMETTTSPGTPAEKRNHNDSTQRANPQSSARPAPRYHPTTTGTNARSNDNTLDHTWAARTKGNIPTPTDNQVHSRKHASTANPPYGGTHPMNINPQQGGQRYHRRTSELQSPRKSANQRGPRAPNVRTTTINPTEVARLHTSHQQVTANGQ

SEQ ID NO: 965701 - protein, 110 aa, Homo sapiens
MVMGPLMKTASIQARTVARFSIPKTMAAHHECMHAMVWAICATIGSIRQSVGSLRTARHSASNNIHTSIAQHAIGSCYMLKSSSQGTGYVAVTTATRIVNNMHGPVYMTH

SEQ ID NO: 965702 - protein, 274 aa, Homo sapiens
MSRAPVTGYRDCLLGICLIRRSVRPGCLLSGPRSHFPRTSDGEIHRMKYVYVFIYNSTHNTMPKKGSPLARPNRHYISHTAFSLLLLAMRSMGCFVVFSMPWWCGYQTSQCSTLLGVDACASRLARPIRSVIYSGKPIESLSRGPVPATVSLGGSHPLLRWCNGYAFVGGSSSSGCRRLGSALGERLVFPVPPCASLRATFLRDDLWNPPKVLNTWRRMVPPGNAPCSESSHRGVALIGLACSDRASRHVGGSPVGYDAGACSLVEGCYARGGP

SEQ ID NO: 965703 - protein, 313 aa, Homo sapiens
MEKQCCSHPVICSLSTMYTFLLGAIFIALSSSRIFTSASHSAQCKQNKSCIIFQLLCTCVLQNWCKLSLLCACVILCYHKQRSSKSAQFEICFLARQFSDFMKWSIPWLAYIVLDKLMGLLCPVPIFKQTMAVIFSNNSNYNNRSSIQDSAEEGSYLGSSGASPPGLHNSLMVALTWRGLKNYYKEQFGQGRGYHITAGPYSEPSPVHGRSYISTGKGTQTKERWITATGTVHTVPEDKRGNHNRPRENTETNSDWYAGQEPDIRTQETTPARRTHHLSKNTDHESTTCSTPTTNDHHDENTQRHAGQHNSDD

SEQ ID NO: 965704 - protein, 160 aa, Homo sapiens
MDLMTKTKLYCTLLCAIGHKRSTVAQLVKRLTDADAMKVPPLWCQAKARECSPHLQYWIRIIWCAMGGAFEEDNGQHCSLIYDDVIKQVGYPAKGLGSGGPRRRRHRDGLLNPGAGKRQRQRVGGALKRGDKPAGGCANRKGRRGASREGNSAQRGSAGR

SEQ ID NO: 965705 - protein, 189 aa, Homo sapiens
  misc_feature (88)..(88): Xaa can be any naturally occurring amino acid
MVRVQGPQDVPPTATVNVSVGLAQLSCIAYLIIFPLDTAKVRLQIHLRNVRGQCGAIVSAQYRGVTGHHSDHGAVLRGPRRLYNGLVXPAADARMQLVPLSASGLSDFCRIRFFHPMALMHSPGLGSWLLRRHAPPGVPWVWLWAPPGVQGPGPRHAGLGARRSTGPPRRGPLPLHGSGREGPPCFALS

SEQ ID NO: 965706 - protein, 109 aa, Homo sapiens
MSDLCDRYVYSLQGHLSPSKPAKSLHTQKNRQFFNEPEENFWMVMVCRNPIIEKPDKDGKPVIEYQEEELWDKVYSSVLRQCYSIVQAFNWYMSESMEDGGVKLLKEQD

SEQ ID NO: 965707 - protein, 154 aa, Homo sapiens
  misc_feature (95)..(95): Xaa can be any naturally occurring amino acid
MEQYGSRKNDVNYHELRWRKCNEKLNIVTEVDVNDRVCMEKACDSERGKQLRCPLAVMICFGLAKKCQIDLRMGPSSEIIVVQYKVYDRVDSDGXRVRNAGKESQKHVFLKETIGVRNARSQYGSYEKVKWVLQIIVPSTWNAMCNTVFACQVE

SEQ ID NO: 965708 - protein, 367 aa, Homo sapiens
MKRRRRAQSRREGPDRLLTGAGGSSRRVRRVRLTPGRLPSIRSRDLSIGGSQEEKLQPKYHQSEDHGRAQGRSNWSRKEKRERGQRPKREGAWTRGEAVQEQWIQVSLQSLEAGPSPKCMQAHTGEPGAFTNTGIVSSTSGTFLEYLIKSQNKETEERQDRTETLTPDLGVWVEKGSDCHRMTPGLGRERDSGKLLALLQIGRSRDSSSRDGRLTRACKNVEKPAWLNRWDGCDPREQGTWEVRNNLVGQRVHRGKPPSIDGRQSPPHERASITKGRPGKDCRSIHERQVSRGAETVKEAETNPREETPGCRAHLRKEPPPWGEETTRQGGLTAPSKHTGRRRRAPVVLHTGTDTSIESEKYVALCG

SEQ ID NO: 965709 - protein, 147 aa, Homo sapiens
RIRVADHVRPSPTFCIAGFEAAIPPRHLTDRGAGRIVRGSDGGVGRILCILATCGSKMSDIGGLDYRSIPAITRYWFDATVADALGRPNSSLISPAYLFLWTRSLPIIAFRFGGQSLPPFIIPVGPGTGLPLLWSINTYLISVFYAT

SEQ ID NO: 965710 - protein, 94 aa, Homo sapiens
SGSGSRTAVRSPEARMSTGLRQSASALDLSLDSLITVEQRSETESVERAGPDSDVIHHGGPGFFYWGTVLDTNFWVLVEMGFRHVAHAGLDLLT

SEQ ID NO: 965711 - protein, 189 aa, Homo sapiens
LALKQQQQLQKQLLFAEFQKQHDHLDKGSMRSSCRSTSSSSRRCWQPSSSRRCVAAKRRAGAWSSSGSGSSSGRKSWRSRRLEQQLLILRNKEKSKESAIASTEVKLRLQEFLVVEVKGAHTRRLNIPSPRPQMLRSPPCFFVDQEFPLHRGGPPWDASLLERCLGRGPYDSREDIPPSEKTAFVNPNL

SEQ ID NO: 965712 - protein, 385 aa, Homo sapiens
GTEPCGGRAELGGHAVVPVAYGYVQPVVTGERSFCEDAAAARGSVTLDGLKGLSLLSWLLGWRYDDGRREALGRTEPESMNARQNGILVSGPRGATIQTRGGVEEPEGERLTDALGNERNPESKQTQFCTHESLTATMTEPRSTGAGVELRRESRNGNNYIAPVGKNLLNPCGRVNSENFPIRENNTINDQFATRTDTNTEWFQGHTQKQRQQPNAWEQIWYNLSYCQGAHKFGMTKKTVVKRKQGKRFEQRHKRDEHNQTMKSVSPFPTLHCWKLATIEINASQKRLKTNQAARDKFTRAVFRQNEGHQLHLDRKANTQVVNRQLTITISEPHHEGREILTRRGDHRTHPLQDHITIGHTQHSDINTRSNTLGTKIQPQFATRY

SEQ ID NO: 965713 - protein, 263 aa, Homo sapiens
SAAGAPGVGAAVLLVLLLGGCSGRIHRLSLRGEASGIQLNSFGFYTKWLSGVWQLSVLRAGPSVEGQNEHSPMLVGRTDLTPEFGSGRASAPSYNAGDIQWLPSSKKRTVSTFILSPVFSRSSTHRIMPGSSVREAYWQSTKTDSCTLFPGSSFPVKDTPSKTRVIPRSPNTAHKFPPDKDDIGRSGPLWQHRTKPQRSNHTLQSDHKWILDGDTRHRDPALVAALQPLCNQLLRKSSVSPVVDRRSQGGNNGQVHSLNFQQP

SEQ ID NO: 965714 - protein, 95 aa, Homo sapiens
  misc_feature (15)..(15): Xaa can be any naturally occurring amino acid
SEDIPGRVNLPALGXGGSKRPWTIAEQSFARWKSVDVHGAKPLSVAGGHCTPGLRARFREHAGVHSGAFQQGYLMKGLLGETVKRRNPGKEPKKR

SEQ ID NO: 965715 - protein, 233 aa, Homo sapiens
EVLSPTVKGKLSLELNLHGHILPNQSCDSGRGQRSQSHLYFAKSCMHLCLAVLRSYCSATKSKDQSTTHLPPPPPSPIHFQPAQLHVILALQQPINQCQRNLISATASLENNSTVLHLAGMHSASTFTSKRSWQVFLPMTGSNPSFSLSFIMPSAGPTLVGSPPTTCIGSIHLQQLGQTCAQARLAQHRILEPSLFRRHHSIRPHMSTHTLKVAQPSTHMQSGFSSDKQPGVR

SEQ ID NO: 965716 - protein, 52 aa, Homo sapiens
VSRGPERTRGELLESGGLCAEDEADAEGVLRVLRACEQEAGGQNRVGMCARD

SEQ ID NO: 965717 - protein, 146 aa, Homo sapiens
MTQTHKHTTHTNQTGLDAHTRRSADRTHEDERDQGGPTRKTHKPEQKDQENREKKQETNNAGGPQQTTKADEQADTQRHDKIKNTRERQTEQKRKRSDEATHRQYKNSRQTTSLDQHADCDEATTHARQRKLQRQISDQKHDPKLT

SEQ ID NO: 965718 - protein, 327 aa, Homo sapiens
MEPILEILQQKFCSSPSPLDVLIIDQLGCLVIIGDQYIYQEVWKLFQWDQCDAPAPYVLLRPPKIDEDHGYRALLPVSDKLPWSNIAAQYPRRVTWCHELLMNLLELFVQLGLEEDASQREGKRKGPALKASRQCSVTWQYSFLYIAVLTRRLSSIKEALASVTGSSFETSGCIPSDWDSAVTGLRSLDRQWYEGRQEIGPKSPCAPIPPKVDQLWADLPVLTSAHDRMSLWSPRVSCGNPSIRIIKLGGPRSEGVGVTNKELQVHQTRLLSQHGARGRYHTQADKAGTQTTKSEAGEHARKHREVRTNKREHCGHTGGVSEDDDGR

SEQ ID NO: 965719 - protein, 470 aa, Homo sapiens
KERYRLYCHLFQLHLSVCRHVEHGTKANGGSGDSAVNAQLQIDGLCGTQTDNQTLSRKKDKGNVKLFKELLIGSGCRKIGLKLPTAFLSLSTQRMMLTFDESPNIRWNMMREPCAHGTPLDSFLHVGPGYQVPTIPKWLNALTPGGDSLGNFSKSQTFTKPWPFETNPVCNSTLVIPIKDRSWPKRSLYNYRAAITSTVGLLIKRWTCRQRCATPAHPRTFYPSLRRDFDNNTPKILHPFWKATNWFWQTNSAPHSGITCHKQCHTLLDITTCPKQWWTPTVHNRNKLDTWFCQHIQHFEIWAPTPCDNARQHSIVRRQQISQQDVRSRRNKKELDNTNKGAPKRIRDVQTPRQHQHTMEEETLTACDPTHDPRATDKDAEQTDHRRQPSTAEQYKKETRREGEKKPPPHQREEKQMPKTIIKHTKELPSRESASPECEDREKRSVTSRGGGGRQQSKSAQRSKDSRNAT

SEQ ID NO: 965720 - protein, 131 aa, Homo sapiens
GRSPGNMELLNPSAQEHVLLLSLQVYKVTSGHAALSIEALCVTRLGRAGLLSVHYAPLPKTFVAESAKVVCWPRTRGHVLKGTRHGFKGSGSEPCGAHHGWGPFNTWQPCEPCLPEALNGSTQSMSSSPTY

SEQ ID NO: 965721 - protein, 392 aa, Homo sapiens
  misc_feature (127)..(127): Xaa can be any naturally occurring amino acid
  misc_feature (131)..(131): Xaa can be any naturally occurring amino acid
  misc_feature (140)..(140): Xaa can be any naturally occurring amino acid
  misc_feature (204)..(204): Xaa can be any naturally occurring amino acid
  misc_feature (229)..(229): Xaa can be any naturally occurring amino acid
  misc_feature (232)..(232): Xaa can be any naturally occurring amino acid
  misc_feature (238)..(238): Xaa can be any naturally occurring amino acid
  misc_feature (298)..(298): Xaa can be any naturally occurring amino acid
  misc_feature (315)..(315): Xaa can be any naturally occurring amino acid
MVFLDVLESGNWPLMVVSNLEIEFPGTRDLGDVIEFEFMQFQVSLHDAVHTREATKIFAPVESPRRPFNYGGVAVDACLTNTRNAMQNANTGVSPLNYRMTRQVCRSTRVRTDPLALQRDCLSSAYXGSEXFESTHTNSXVNRTVGSDDRLLSVLPTCSTSNQIYMSSSGSYANDYNVGTSVHLRYISLTATSYKYCYGPVPIXQEDENFTTSTNRSHHMHRYQQASSXLVXAYSSEXVHHTRSRLTQRRAYLVTLRHRGTRAPRTDVSPRRFSYYYRTGDLAASSLDGRLIVSSYGXQALTYTSRKRSIIGDKXSSLNTTHGNTDIPNLQQPGHTQGRKSLQHTRSITNSLQFSFSLQQQFPANGTQSLRTVASLLTTLFPSDSPQTHFQS

SEQ ID NO: 965722 - protein, 169 aa, Homo sapiens
MHECHIACFNKPPTDLTRTPASLLLLRHTIPTPAFPAILTCCPPSLTPPLRPAGATPLRSLPCFLLTPPLCATRPPRTAAASPCAGSPQRPPQHPTCPCTPTSGPTNPRLPPYPYHQPSAHTTPAQTYTPASPAPYATPQNTSQRSAKRTPHPSSRPLRNAPRRHHPPP

SEQ ID NO: 965723 - protein, 231 aa, Homo sapiens
MALLRHRGKNPPGCQLPTYTTLPSEPHIYNRSERRTMSGYRLLSQKRSWRSYPKRPKKPPNMVPLLPVPLFRSQQRDTMTKHRHPPPSPPHLLHIILFQAPPHSIYIQLKNYSYPPTYIHTTPYIYFFPPPLLSLHHKTRSNKYYLLTLYYHPPPPSLYIHPVLPSHTITTPTLLNTPPGAPTTHNPPTPTTTIRLTPPQQPLRTHHLSPTLSHLITPPPNLTSYLPHTRH

SEQ ID NO: 965724 - protein, 183 aa, Homo sapiens
MVVQLKPSFIADVETTWFTWYPKDVPIADGMRIGPSLPTLRGIGGHPSYAKEARPGLTRPGHLLGTGDNDTHDPQHCRESIRQGTSLCVRSITITLPAESMRPRQWASTYQHKQRTWLIDRVKGWTTERQERCSIEGPLPRKPLSQGATSLGCKMGAHTVQETDSTHRGTSAPRCEKCLGTPH

SEQ ID NO: 965725 - protein, 87 aa, Homo sapiens
MNPFNSAFQFVPRGSYANNYFSYCLSHFCANNDYPQKNTTNGRRTFALIHTSTSAFNPPSVQPPHDKQQQRTLPPNKQPPSHTQPSS

SEQ ID NO: 965726 - protein, 66 aa, Homo sapiens
LLLFSETSQCRLSDDKKKKDAGKVGQRKTKSQLNYSGGKAIERRSGPQAKFGTSSINLVLFDKSYL

SEQ ID NO: 965727 - protein, 366 aa, Homo sapiens
MRCSGPARTRGHGPADDSPPEVIRAAQKDEILPRWAAETRQGGALHSLRGCEEVAGVEEGGESCISDVAYFGLTTLAGYQTLGEEYVSIIQVDPYADTCALHRCASGDAGDACMPSVPYLTGQEPMLTHWSRSMQADPDSGQTIDTGSLGARWAWLLRGAALRCDTTHRTPLHLETTPGGAQQRGGHTEPSRQGLDLTSKRLHVAWYNINGGTYPRCATEGLHGDQETTEYRSPARNRTKEDRVKQREKKPHNTGDTMGRDHRGKQTEETKTPQEPSTRRQKNSEREKKNPQRAQTKRKTRPPRPGAEHDKTTRRSPSPTETTEREAPGDAPAGPKKQHRQGHETPRTRERAPHARNTNSNGDTPN

SEQ ID NO: 965728 - protein, 309 aa, Homo sapiens
  misc_feature (309)..(309): Xaa can be any naturally occurring amino acid
MGNPRGKSREFDQSSWTNSYVTETLRPQEGKPYNVGEKPCELEDGQERQAHVGVMTSEYTEGRGLTEVRESRGLRGSRYAYEEFGAFQKDTGTHLLSLHRFEILVDFPVPLWNLTRETLGGQGPPPWVLRQPDEAETPKADRKDPDWRQGHWNLSRQSRPRNLGRPWNQPQGSGSSDKHPRQTAQHNDPARRLAQDRDHPEHLANTKGETYKSNGDRHRTDVEPPAARGYTNEPKQGRNIHQRVPHREQGEEGQRRTSNERQREEDTKSEVTTKGNTRPEKHQQKGTHQEEQDTKKGRTHRRRTSATVX

SEQ ID NO: 965729 - protein, 217 aa, Homo sapiens
MTTQTSQRTTHTKPGDLSSTKHKRLHPNQVKHARHPQPYNAGERHAHHTTHHSHRTTKKEDPANHHTSRKPRHHPPNNRAKPPHTPHTPPLTTKHRSPPLPRQQQTTKQTTGHHEQTPRNTRQAMQHVPTHTPARSTHAHRPTTQHTTQRHQPSPTNTEQRQHNTPDTATTPPPNAPHSDQDTDTTPQQHTENAHAHQNRPTHTTPANRPTTANRNT

SEQ ID NO: 965730 - protein, 455 aa, Homo sapiens
AVQISKKRKFVADEPSSTADTAMSFLLGSLAAQHGSLVAVAGAQLTTDTRTRHIHSSLSPPATTSNVSLRAAQGQAGIERNLHLPAQLPRTPRLSALFPRSGQLVSTLLISYAQQVVPTTARSRRSPIGPQGQELILTLYKNLHIRDSAHAGAGSGHMHYCAADKPGLPTPLATQLRRPKQACRQGIRRGRSWDAQASQQGTSRGNKATHCHRPRHGNGPLALNSHTRRAENHKGTNHNHTALAPPWAQVAAHRKLRPRKEPERKTAQKSQIQTALHTEHPLDTAPPEAYRQTTWATATPGRTINRQRPPGPHRTPRPLTAPPRIEHTPDHQRTSPEHQPRPPQDGEHATRTIVPEATHHGNKRVLRGTQRPPTEAGPPVALHVTPPPERTYTARSTERSSYTPTGGSLRLQRDQAPRLHYTHAHDALPRKPDTPRRHITKTTTGTDHTHHAQGH

SEQ ID NO: 965731 - protein, 367 aa, Homo sapiens
SSPGREDGTGSAVSGGLGGLVLCGAHTQCGGGPGVLGPLRGCPGSTEHVEQPTHGLSQIQPDPWGGRVTACGPSCGDAGLEGPGGRRPQPGSYEIRHYGPAKWVSTSVESMDWDSAIQTGFTKLNSYIQGNNAERDEHITDDSSSDKLRGALVQVLIVSLHITMSLYFPSEQQFDPPRPLAVRLSSLTDRGEMTVCVRSIRWITSAQKNQDQLMTLARISRDDGTRRHEKGYYTARLQHDLTTCLTRNTCTAGGSPHLTPTTAHRPTNTPARRAPAGHTGTSGLKYQTQGDHITTHAHTQTNTGGRTTHTRAQQHHNNRRQKPKHRRTNRATQAHSAQLEMNQRTSTHDIKTESHIANAKPTRHDNA

SEQ ID NO: 965732 - protein, 391 aa, Homo sapiens
SQCRRPSSDTCTFFYCGKKYKAAHVMCVAGAGHKQLCRSSPLPGVCRGMWLQGKRVCRGESPRVNPPSGGQQREREAVKEAAGPRAEPLLWNASGGTRCYLCSPLSFSRGGSYEEVSPKGGVAGGKKVVPVGYLISRYTQISLYEANHTPFDPVALWEKPSYPLFLSQKQGGAYPNCEKPKPRAHNYSVSCVVNTLFKKSFVRHRTSVGLPTTSLSPPAGGPMWCGDTGSEQKSQDRKNPVGDNWVWRSGAIDNHKVLPLPLCNCFPICEALCVSPKPLLCGENSNKVFPRVKKLLLPAKKRILLPEKAHHFIRGARLKQLLLFHLLWCVFWAPLIFIPNYRWEIVWIPAHGLWPPRESGQYSPQKIKAVTQTVEGTPSQKIHSLIPNSSL

SEQ ID NO: 965733 - protein, 410 aa, Homo sapiens
MKTTPKSQKWERKQTHINIVVIGHVRFGQVHHYWPSDLIQCGGIDKRTIETFEKAGCCSMGNRAPSQYAWALGSNCKAAAERGITIAYLLVATFADQTSTTVNYHCLPQDNRDTLSNNMIYREHLKAELDAVLNCCMLVIEVELEAGISKEWADPRACPSGFTNWVCKQLNWSVVKQKWIAIMKPTRTDQKAEYEDTSSHASSATLHSNAKLGHTNPGQPEAVGAQNQGMNSEHTHGMLTPKAAQTNAIAAHRELTTVNPEKEMDNATGTHTPDKTRTMDRTHTKTAPHEHAHGRTPHTTDTTHGRNRTTNRMHPQRKTQNQKKEKKGQNNQNTETHADNNGATTKKTQNTNPEDRTEQRKTQTNRAHDNRHKNRRRQHTKRRTQKTTYNNKKNKQTHNGHKRYQQNTEE

SEQ ID NO: 965734 - protein, 136 aa, Homo sapiens
MCNFPPVMWATGHKQHPNQKPTSSFYLSRITLQCICERDMHCHSTLQHHLHCNHSSLTHWITTCSTAPVVHMCLGFRVTRLVITTCDILLYISKISHAMYTIYMVVYYTKMSPGCNHTEHTRQIRPHISSSVMGIA

SEQ ID NO: 965735 - protein, 305 aa, Homo sapiens
TRIHDKLEGLQGSHRCYSTAGAQVRVLVRDHPTSIVAKPTAPLNFSGNISLPGHRSQPSAGCMHGILCVCSSTRHCLTHVSNAGSCGASTPEAAAQVVQLGELADSDIVPPASTWVFPTLGIITHNHTPGPLQHMPTGRHSAGAILGLPGMLYLKHEALPCVGERVTSADITIVCTLSWLYKQVLEPSFRQAFPNYNRWFSPALTDPVRAVLGEVKLCETMAHVDAQHVRQRPTPHNGPHPRTSTKGTQSNRSHTPQVNRTQDHTGGMHLESRRKKTDQSATTARNEDKAKDPRYLPKNNKGSIK

SEQ ID NO: 965736 - protein, 298 aa, Homo sapiens
QDRLALRNSMFGAADLLVVPTKVKLGDLGGAGSMIRDPQILSGKRRVAVGGRDLFGMEPNDSTSTAVEEPDRLGGVVKTSDISNSYTYIVGAQMNVKEFKEHIAAICTAIPSEKTTDHNQGRVLQDDKKLQDLTNSREGTGSSNMDGNRGSTIRLNSTSWRALYCDGVMPQPHINGGRRYHTPGTQGSLEDQPDTMNRTCPNKQMYMGGHQQNLHPRVTGSSRRTDTIKKGKQGPEIQEEKPQGNGEDDGSETRNRAINRKIRNHGGADKRETHGDTDDRPERHRRNQETDTEHQHKQ

SEQ ID NO: 965737 - protein, 437 aa, Homo sapiens
EDSSCADPHRQFDPTPQAGISSSQALQAHHTHTLWLACTLSQPFTASNRHTVIIRHTHSNQQSYSCSCEHRHTAHMLALAAATAIIMAQCNVHKQQQSPTATISTAHVQAPKHRYNIHRTHSESTTVGTIAADTITPTLMNGHYLASGISLLPHPYFFVAVVRPNRYNAAKDLVQPRTRTMSRTHNSQLVTTPRTGGAPPHRHDNAESTHIGWTTGLVAVVHTPTTRSHTHHTWPSTGSITTYERGLHSTHIHPPAPPLTHACPTEGPPPPLPPPADTRPRTSPPPWRQHNTAPAHDLPSNKPPTAHHMAASKDRDPIDNTRGYKNIAVMPAITGNSHPPNTSQRHHEVTLISPLKEHAPPNRSTDNEIGTSATWTGPQPEGTGPGQRPNTTTRTNKSLATPNTTSAPYTHRDRENDGRTTPTHHSKKTTQRLATTS

SEQ ID NO: 965738 - protein, 398 aa, Homo sapiens
MNSSAACIACGAHVIRAILVITACEYGTTVSTEHWRRIGKLASKAKCGMKRWLDVKIGQRLPEGMAVLREMRPPRKGVNRHCRLPHVNEANKKGDVRVSFRVAFRALTRSLALSHRCGATSHFHIQTLVLVYNTYGYLYQAQSNLGSGGAVGSQVFNTQEKEDPNMGVRSTGGVSNLYPDRIPIEGHEVKPQMGSTVLVVSSPSRWYSAPHAMCAAYKAPWKLRARTSGRYPSKKRNTDSSETAWQKTTGRPDGGTQDRLLRCANQPQESRISATGPAIQRTISRLCKPSTLGWKRPARHNVAHPAKWGNNRDGDDVWLDTQRKSRVKITRRGSQRGETVPGPHSNVGRDRVGGSPRGRKRQIETTSSMGGTSTSGLRAGTTERAGQATGLQQPCAVE

SEQ ID NO: 965739 - protein, 314 aa, Homo sapiens
  misc_feature (105)..(105): Xaa can be any naturally occurring amino acid
  misc_feature (212)..(212): Xaa can be any naturally occurring amino acid
MPSVPSVITGPQECGGSPKQSACGAGAQKSGKWGRLGGHKRGGGVRAHQGAPLAQGKGGPRGGGSPLHTAATGGITHNHGPNVGVVRGGVSIKEIPGEKAEQTGXPERRYHHRLGEGGPPNSIIKAPDNPQSAFSLGVHHTRVGPPNIEENAAGDYINEHSNREVRDAVLQHHAPPANSCATNPGAVPLWGTPRVGKRKPLHSRLRVWATIXWGDTIPPQTRINTGLQGTIYTHSPALLPVWDPPHYLDAAHNVSDDSNYTTYMYACNCTGSEHAERDRRERASSTASCTATIASDTQTDMQRSTTIRMHTSSA

SEQ ID NO: 965740 - protein, 390 aa, Homo sapiens
  misc_feature (364)..(364): Xaa can be any naturally occurring amino acid
  misc_feature (372)..(372): Xaa can be any naturally occurring amino acid
MEDYTTGDNNPYTNTHHRGVSPKDQNITTHETLPTALRGGKKSRHDGRTHTNQKRARTPRDTNSQARLHPGGPYKEYLTVHNIIKPQRLKQRTPGRGHHKEGRIHIDIEEDTNRGSIEDSVHKSLTRWRTPFDTGIGQITKHRYEAHTEGRHTPHKNRRGLSRGESTTQSGIGIDKHTSPGRAPRRSCTRKDDKLDERVGTNDNNVNYAKDKYDDEPTYWEEHETHCNGAQTHKLNEPRMANMRTQQERVSDDKLYVASKQTQRAPGMAYNDKRRTHMGEDNTPTGQRTQGINTLNRQVARHRSKQREHGNSIHIPRHDEISQHTQLRHCAPSNLTSRDEDNIIRKKKISDKSRIRKILDHTQXIRKRRRAXKQGRLSTNKYDRQEHKHT

SEQ ID NO: 965741 - protein, 416 aa, Homo sapiens
MSSEAETQQSGDVRTERAGYEVRWDPQSHGNTSYQRDRPYARRTEAGTKNYTQPPTHTKGNQAHDRPRPNTNKRQDSSPHRPTTTRRTAPAARNATQTRRNDAAHSGPPSQQGHPTPPTTTGRYARTNTPGATTKPPTTRPIPARQHPTTATAHPFNRQQPPTTNNTPDAPPTNQSARTTRPNDYPEHQATHKTERTDNSTNTNENATTDPSLQIQQRTHKAVTDTASTAKKRQPRAEPEARSQGKTPTPHHTQTHKHAQTSPTTQQPAQHKPTEAPQDNRASTTVPIDRYDRQSARNQRPSTDETERQKTERASAPSPAKDKTRDEGKRGGRGPTTDEENARRRTGQERPGGDPTKAPTPHEQWPKENTDSSKREREKKNGRRVTSGSDHASRGKAEEQSERESRHAVQDEPKKS

SEQ ID NO: 965742 - protein, 355 aa, Homo sapiens
GPGPQLGSQGLETMLATYSYGCKRGAWLSLDDLLQLIAPQSSAIFHLPPQEDTYVEVDLEHAWTITQTTCPSPMAHWTPFEGQKVKGTDPHVWSCEGRLPISDGQVLVPPGAMDRMYAKWTQRVLYLQAPTPQHPATREMTTTPERPQTMASQGFLMAASICRPESIEPSDPGLPAEEPQEKSYSEAVTEPELMGHHAWHMLTSTNSTEQGISQNLRTHGLLNRRNSTLVESYRWANFLVVSRLPRAQSDSMSLWHNTLVYGARRTEHDHPTGQGRAQRKKRNGTDVRCEPRPGDEPRHDRTQDGEGSPRTETEDRTPPATAQHNDNAAEEGRHGSKEEPTKHSEDKQPEGTNHP

SEQ ID NO: 965743 - protein, 214 aa, Homo sapiens
CSSSSMEINPEMLKQSAVPGWEGARQWSFVDVLGVEEESLGSVTAPVCALLLLFPLTVHDENFRRKQIEELKGQEVSPVKCIRIMKLSIGKFCVVRMDLFTHVVRVIKKNLGFEDGSRCETVIFLKADKMSPEDRAKCFERNEGITGSHDAVGQEGQCRVDDKDEFPSNYCVTSVECASSMNLMDEVPFPVNHGASSEDILLNDAAGLREVHES

SEQ ID NO: 965744 - protein, 164 aa, Homo sapiens
MHKEKETVIGKNCGTSGKTEVLDKYKNRYWVVGTIDTIPNIIRRMTKSQGKDLKKLSRQMGPHIDPQGELGKRGTTGGTTEGNAHRQCTQPVGQNRGGHITRTRDRFKGTNNRGRHIWEANNCKPRVRTMIYPCNGSSIKNTQHDTGAGDKKGTTGDVRPTQRG

SEQ ID NO: 965745 - protein, 355 aa, Homo sapiens
MPLALLATKHPATHAARRCNLLRYPPHLHYSSLCCAPTFSHAPTANAYLLLTLPPLCTAPSDHTHAPLTPNNTALYNGHTLQRLHPCCLLPALCSACPGLLRACTLLHTAWPTRPKQLRCTTLQQPLAPICDLHHLRLVHNPTNSLGCFETNTLGTSTLRPTPYQLTHTHHYCRHTLAKTRNLQAHLYDSTPHTLWAYQPPRTTGYATFCWPNSSCLRAHCVTQHCPGRPTLPKTLPFGPQGDIATVQRRYRIRHMPNGQTTASPVTPHPDMAAPLPTPHFGPTPWTRAPWPAQANPHGRLTTPTGGHHSGTDPQVSPPSRKTKRLATTPSKQQPSPLCAPRTSAITAQQKHTSR

SEQ ID NO: 965746 - protein, 113 aa, Homo sapiens
MHLEQTGSRCHKSMDGVRNDVQILTFYPILVLFSQGPPQSGAQAGLDRGGIITRLDATSGCLVSSLLRHPPKVVAPAGVPPGVVAGVVLLCGANVCHCARCAPPALVALSWAV

SEQ ID NO: 965747 - protein, 141 aa, Homo sapiens
MTAASQTLLQNTELEADDPYPGASHYEGAQYIRLEVYPMMQLSLTPANYPAEIDSVFQLSTEDYMTHAITRENTLTRRGNRRSQNVMRIICQQADDFMASERSILHSIMSSLMMEWYGYITTVLDWRHGYIATLHASVRTL

SEQ ID NO: 965748 - protein, 288 aa, Homo sapiens
MPTSGKVPRKENLWVQREWGSCSFVCSTMETVLGACLLSICISTCMALGDGVQGRGQRRMTHVEETAILLTSGQGMWLWFSGQFCRDLIRPCLLPLLPQLELQTVGAAGLARARLTLAPAFLRLSSRRNVIPDIPASFPVSVAATVENSFDNPDGGFIGVWIAHYVCAVNSEAVGKDNPGGAVWLAKAVAAASRTGSKVREHLRKHIPGESGRLPSTVGGNVLASKYKVLKTHNPRQILMWSQPKKVQGLNWFQQFGPGDGHGGAIGEPVSLLALVLIGVAPLDTWVE

SEQ ID NO: 965749 - protein, 215 aa, Homo sapiens
MCGFAYDRIAVQGSRLVLPYPSAQELVSRLSSGEVTSMIAQWPLARAPWHKTTPRSGTTSLACPQIDPAAKLLRAYTVISANEDATIRHESTSREQMFCVAHTETGCPGMHAPGFHGVTKCAPNGERSTCVPSPAAKHLGLQVHLCSNRPLRFFIPRAFTGGNATRALTTRPPGVLTPYADIPLESRPVAICIDPRRTLGRTNHVAEGPSLNVHA

SEQ ID NO: 965750 - protein, 457 aa, Homo sapiens
YSNNFISLARSKKVDRLPGDFSTPGPSSRSWCGLPVSWEITSVFPLWQVPWLWVHPQWFGPVGLPGENVGPSPVGVGNMWVREEAPGLCALGDHVVVASGLGARAHLSQVGVWANLRAQRVCEGSVLSRSGRKSLSREEVKLSPPNLSKYPTILLRKTEEVNEGEHPKKSLRKDHEGAVGKAVAYNEAKIRGGTIIRRRKEGEGNTAKELTPRKEGRQETGGGRGTVEQEGTTARKNPEIKGGGEKLQRKPPRKEPHQVSAIHRGAPPKHLGGSWATTRGERFIKGCPREIPRGTLKPWKGDGEIPEGKKPEGHTAWRTKGALNQGPTKGRRKGKRTTEGRDVRRGVRHTENSGEEEGGAPKTGVMPPHCSPAYAKWALQKGPRGKTQYRGGLPHPPLIESHEKGLPNRGSKKPGVTGEDEATKKGEGPPDEVETSGRATVADLRQKAGSKHNHTRG

SEQ ID NO: 965751 - protein, 98 aa, Homo sapiens
FHREDLLEWLRLSVLMTPVAVRSRFTCCRLGAIICTCTEEDSRAPRVLQQVKPFSDSPPWSPNETSVDDSVTFDEFEENRYMSYSWNVRGNLDLRDEA

SEQ ID NO: 965752 - protein, 107 aa, Homo sapiens
WEVFISYVVISFIIKKKKFKNSKKNVSVAEGPRIKTNEETFSRNSRGRGEEAWCGLSLSLKRRRCGRGCGEERERETQRLSVCHTERDLLITDIITPHPTTPPHPSL

SEQ ID NO: 965753 - protein, 66 aa, Homo sapiens
RELAPLIAMLRVISPVFWQQLFDHLFGQVVSLQNGGATMGYEPSSAAYKLEKCGRKCGAHALVNPT

SEQ ID NO: 965754 - protein, 122 aa, Homo sapiens
HPFPYTKINSRWIKYLNVKPKTIKSLEENLGNTIQDIGMGEDFMMKTPKAIATKAKIDKWDLIKLKSFCTAKETIIRVNRQPTEEENIFAIYPIDKGLILVYEELKQIYKKKTNPIKKWART

SEQ ID NO: 965755 - protein, 317 aa, Homo sapiens
GGRKKNGGGEKGGRGGGPPPGPPVGGAPGGVATGRARVYTHQPATQRNRTPSRSQKNNHIIHAGGVQAPARPQTTRLTQEERAREDNELGCTNGGANSDAQKERGAPPTTPPSGGGNRRRRLPPYYKKKTSRGRRPQQGERHHRDQYTHPTRSSEEGSHQHCGCSGGDLHTTPRRAHQSGVAEPPRLPVVKKDRQTNNYERTQELWWRDHATPDVTSHASGAAQVETRRQLPTRRERGTPRSGEQRNKMLRASNKPSRGEAETGGRAPSSYKDQTHKRGAGAAPQRHSRRGGTTTKTKRTYFVNRGPSTEEERLNTA

SEQ ID NO: 965756 - protein, 139 aa, Homo sapiens
MACARPLMNRCTPTEGESSGQKGHLACSYARAPIRARYCELGATPSSARMTDSPMLSDELPRSSSTSAEVSGVLAEPVARMSQEIRWWWDLHPDRGQQGCYEGKHVFVVGRMFAPDKIWPPIGPRTDETANSKYTHTRI

SEQ ID NO: 965757 - protein, 326 aa, Homo sapiens
MVTMTGHVVYSRLASDSMLIASGSAGQVPAGPMAVSFDASMSSKAGNPQDICSQCGREAAILQTPIADSVRTITPQGRQASAGCTIGSSRARQLEGGRGAQKHEVTRDSSTSKAKQQPRRQPIVSEQPPSAPGPKQQQKAQQQGTEANKHRGNKVRHSIQSLRFHMTHIYLPARPPDNTAHCGFSKAHWRVKRHTRTLTTNRTKTQARQWDTHQGPEPKPEEPTRNNKHNPTTQLEAVDRALIQEQQPEGVWEEQAPALDTTGPKGPSSGQAHGQRKLRTTQRHTAREDTQKAKHTRQQYQRNHTKETSGENETQRTGMHRSPHLA

SEQ ID NO: 965758 - protein, 367 aa, Homo sapiens
NYPIKDQHMATAKQYSYQHCRHWTRRFGQVHHYWPSASTKCGWHSTKATIAKTLTKRGCCNWAQGLHFTRTKLTLESSMRLTPCNRPEAVATRWILHPLALLLPSDGEHYLTDTRTHDYLSDETITPCLATCHPPRETNKHGPLKTPHNTSSMELQPTRGTQHPSKASHDTLAWPKNSPLDLQRPDPRNRSGSSGDQNTSRNRTEEITHTPNAQQAKPSHTPERTTKVDPLTVRTINTNQHWRPCRKKSNTDTTSNPEHASTTPHNQRNSPTLETPTPTINTAPKNRTNHLKRNTPAPPPATHNTTNPIRLNSQNTIRDTPNPPRNHRDQHHHSAPRTQQGAQRHRDCNTNTQPQNPPTTSKDTKPK

SEQ ID NO: 965759 - protein, 374 aa, Homo sapiens
MDNLEQESPSLSVKTTKQDPTETKLQRGQDSQTSEHANDTHDDDHFYDLFDYNTQHDTTHWDDDDDATTCRRGQPGRTPSTTRTTRVREKTQTQAERDRDRQTRTQRALTNAAGKGSKATGITARDTHWQDYELPRDHEELESVEAQCETGSRDERRKAALRRGSSRAQGKEAGKRTSKRRRRQKCRLAEEQKTMEHQALAIHRTPRADESDPGSRRGTRTRTPWTPRSYSHCNSHTLDAQNTGNNTYDEQQGEAATRTIMRMTETRYTPRDTGTQNTEVTHAPLSDNHMDTTGSVTEVDRVTHRTKMSNQASEEAHEKGTKSEGERATKRGEHERQEHNVDKKCDNRRHVNTTGESQPPAKEDHSREETTHTG

SEQ ID NO: 965760 - protein, 150 aa, Homo sapiens
MRPPPLTRLPRGPPPTIPPPERRHPPSGPPHPPRQARAPPPTGARNPVISTPGAPDGPPTGAAFPMRRTQPKDPLPHLSSPPPTPPTRPGHPTSFTGRRRSIPPNALNASPPFQRNIGVPSRATTKPPPYATIPPLWRFPNGGISRPCRH

SEQ ID NO: 965761 - protein, 76 aa, Homo sapiens
RENYPYKSKMRKEKTHINIVVFGHVDSGKSITTGHLIYKCGGIDNRTIDKFDKEAAEMGKGSFKVMPGSWYKSLKC

SEQ ID NO: 965762 - protein, 426 aa, Homo sapiens
  misc_feature (377)..(377): Xaa can be any naturally occurring amino acid
RIPGNMMVAGAEVRMSICGPLAVLLWYVLTPASRAENVDGQNQGLSGGTKRRSERYIPHIRLSSLAHVMAWPVMRPGTPRHGVGSALMGPGQGNSIDDHRGDPSPGVDLPTPAHSPPVSQPNLVHTGRKLPGRIPANTPYAHPWARRHPYLLATTLASSYDNSYPPFPHSHPHIAAPGSPAPNSAPRASRSHSRNKPYATIRLPPPATALQHHRETEKTGHSTIITRHTAYAPSRRHHTTPLGYARKTTRRHTGGPGGPPLHPPAPRPLSLGAHSPLRATLVTACTRRRPAVPPRNAATRVRHPPLGPNNDGPGTLCNRSVGCPPGMAHTSVRMESSPRPIAPWSPTTPIGNRRIPAIGATHTKASHHRGRYWHDYXKPHRLLPTTPVSNTTLSHYTSGSCYPGITHLDNVTTSYSPTPYSRPPLW

SEQ ID NO: 965763 - protein, 68 aa, Homo sapiens
MGGRSCPGAGRHHDYSWQRRHEAKGTTKERLVQPRLRQTQTEGPNPKAAPPHHTTPQTLDGVTQGQAH

SEQ ID NO: 965764 - protein, 520 aa, Homo sapiens
RIGRGNEEGGGNRVSCYCRYYSTKSCVAGWILELTKEMDNIMGLIDSVCLLLLCEHLEIVCYVLTRYTGTHDTYRQLGRRDLVGLVAFDLFTTFANASTTDLVYPIKPDGRTVMPTAFRTTVVSLTLYEKDDTDNGDTNYNTTTGERYNLTNLKGLLDNHWTWLNLRLPQGITAWGSTGHEGSDNVAPRVPTKNPTRTLGKALNAGRQLQTRLTPRHHLAELYHGPGGPRQGVHTLKPWRPNTDATQCDTAPYHYQRDKDSNNPTVPFSTDAHAYTEVDTGPKSPLVLGFGLHRPLKNLIRLEDNPRRRHGRELDWAYFVCNCPPKLGKLVTYRDRCSDHYYSARTPNERRNSLRQGLERQRVPGPARTTQSVTNISEPGAMSRQETNLVRKTTGGDNHFETHKGSPAQFTTSTQWRRGEQIDERRHMRAPGQELDANAEGRRAHHTTTRRDDIQIDDEDSHDREHGDSVRRTQWSSPTVLRRQAAHSECNTRDNVHSKTSIARRNRGRSYETAHNWRTS

SEQ ID NO: 965765 - protein, 359 aa, Homo sapiens
MECHRVAESSSAIKVFPAMPLLEFWHLVGGSANDCEDPSPPDWSVASQCGVGLNLHHRLWPGAASGQWSDPWNSITSGALTGGCAGCPTDGPLAMVELSNDGGHPVMALIEGVGILLTSLTQTQKFRNAPPFLEDPSQTDPYGWNPGPRLTQLSAVPTEEDNDTMRSYINRYPHTMVLPTKGRAGYPVRPGTIQRGYYSELPKFQRVESEDHQCPDNSGAPKTTTRDTEPKKQNVEGITPDSYVRTRHKITGRSDCQDRRQEGARTEHRTRAKRRKPRNVDQRATKSHKKPGQGQGNQPPRTPRQTDGQRPGGGRGQTQKKEERHEQHDDRRTRGEATTGEATAKRDDTHEATDTNAAK

SEQ ID NO: 965766 - protein, 218 aa, Homo sapiens
LPYFLLVITPINRQLLPVMPEPSKSDPCPEERLQEGRDKGPDEGRRRSASAAAQESYSVYVYKVLKQVHHRNRYLDAKVHGASMTLLTINDIFETHRLERLPAWRINNKRSTITSREIQTDVRPDADRGELAQARGVRRDTKADSKYTSTKKRHKKIHRAALTQAHGLQTAQDKATIKSQQPSLQHAHIIMGKHMQCRKAESRSLTINHGHSTAFAKL

SEQ ID NO: 965767 - protein, 424 aa, Homo sapiens
WTRECGGAGGGGRPELGSCWLCAMSCEHGLSSSTSVMINQILCCLCWAARPTRRSNCCSACPLAVRDSPQRHFSMETNIPYSHHHHQMMCTPANTPATTPTSSLTALTMILPIIKAIRELPQTVCSSAAPEWHSDIAKDKHTGTTDSPPNAAETRETLAALTDWTPIVARHVKPTGGAQQGNQACHATRPRELEGQKATDNTSRRNKQGHKPTSDHHEKGNTVEKATRGAKTITMDRTKESYGRHSHNAHHEPDAARDNDQEEKGEHRGRKDNEGATHMKREETGRQHADDKHERHRGQEGDKERQRGNGRRTQRTQRRGQSGASEGTSSEGQERQAEQREEGAETPTPERPRADRHHSTKERAAGGSEEETRTGLPEKNTQKALARQEREGEAHATRRKRIAKSERNKGSTGRRRKAEKGGHD

SEQ ID NO: 965768 - protein, 208 aa, Homo sapiens
MYMQHLHSLTNTNKGLTPHFPCHTSQRTRGPPRTATAQTRTDKAETRHTTRKTTETQWKTRQQHTAPTARQTEKKRKHRGSNNQTEHKQNRDNTPNNTTQAITTTPSPGKKAATAANHQQEPGNGDQNTSRKQSERETHTGGGKGSTQGTTERRERKSKRRKQNERRPTDKQGDPRRKRGGNRRRNTKKQKNTEGNDRRLHQNDGKQK

SEQ ID NO: 965769 - protein, 284 aa, Homo sapiens
MPTPESTNSTTLGGHLHTIDPSLAHNLATDTQLTIGRRKFRSSNKGDTKYIPASRVNWVTTNFATAHSTPDTPIKITITFQGRSPLGLARTDIVWAIYTPNFITTAIKTRLSSDHTLPTYCTSGWPFMTSIIKNTLGAPTWEPPALTHNPHAQRPNKRRSRANTSHRARRHPQPTYATHAKRPTLDNWYDIKRNPKRTSHQHRERNPQKHTAGLADTTGTSYHNQPQPQTEQTHTYKSPNLTTQNQQTRPSNRASEQRENTPYNTPEQPYHGTATHTTRNEQTR

SEQ ID NO: 965770 - protein, 422 aa, Homo sapiens
  misc_feature (41)..(41): Xaa can be any naturally occurring amino acid
  misc_feature (101)..(101): Xaa can be any naturally occurring amino acid
SKALRELGTPPASDPAVSRPASPAAQRSHGDHGSVTGPGQXHGTAPARRIRHEVLQSSYVSRECSNHFKAVLTPTESLYLMQFCCAVRRDPEETHWHSLRXIPSEEVWRKEEAKQIRRILHSKARATQYQTLRCRIADVLARSHPHPSWLTRYGMATVVADYRRLTVLQRRDYVCGSPYVRNTDYTEKDLSTNKCARLLSQTRHLTKNVLSCHDSGCINEERVHDLLMPCLQVSFYRQAADLLSPAQGDFARGINVLSVDSDFKGAGRHCPNAETPLKVWANLSWFAADPGRAEPYREEKLVFAEPTREPTRMRPRPPRAQGPTETPWSQTFAGAGSQPGTSRTRRESPMGESPPGETPNDRYRGGNPSENALPSTTPLVATPVATHPAPALLRPPTPALARHRRPPLPATRLPHTQAPADP

SEQ ID NO: 965771 - protein, 137 aa, Homo sapiens
MALALFVHDLRANIGTRTRLNDNRGLCRWHHNDVTKSHLHIAQHNVCVNAWWVCSKGASRTNTLRDKLNTRGHSEPNTTNTCTLGLNKLGEHWDTARLIDLAARKGRFSLYRLLAIGREDLQGAHCACFAKLVPSSR

SEQ ID NO: 965772 - protein, 342 aa, Homo sapiens
WGAPEGESHQRYLRNKELSFLEVKFVHISVSKTFDSVPVVKVSVIFSSHCQAVSGYSDQVVHQRRSATSSLRRCLLTELPSFSVCGQSTSYRSAIGFLLHMTRSAEYETASTDTDRRELAAKQCLLNGAPELAADWLNRRSQFFPEPAGGLWQHPTLRTGWYYIQDSRTRRAYITDRWKLSALDVLLTRTPVSQGYGYPIYYQMHHGRIDQLEGLHGKQEDIPTSRLAAHHSPIRAEQRPPPWIAEDPHNRHRTLSEQPSAIPPTPNHRHGTTGPPPAPTALAKQTSAHYTHTGPAAPRPPPHREATTAGHKPQRDNAPRGPQQSRQTKTPANTHKQTTQTT

SEQ ID NO: 965773 - protein, 414 aa, Homo sapiens
MTDRYAHKSAETPIRGSTRHKDRAQNTTETKLQKTNTQETTAPPTDRPHDNRTQRRQGKPYQKDTTHTTSPPHQQEQHRNKTNDNTTTETKHPKSPKEQKANTTSKERGPDKNRTGKTTADRDSAQTTTGGEAINISQHTDRRNKQRNKTKKGANRRTDRTKERQDTPNPPRPQQTNPERAKEAHDKRKDRDTERPQNKRSEQHKTSQGTQKQKTMTKHPVHNKTPKEKTKTNHHQNKKTEEAQTHTGTRTTGRKQGRRQTTKEHNKQRGPNTKNTGAKRKQPRNTHRDSKSDQRNKKTTPSPTTTSQTREPNQETKQRTKHPLKQRAKTTEKRQRARREQATNRQQQLKTRHEAPENRKQQSKKRPRARGTANQQEPKSNIIDHTTNSETKSTLTTQQQAKDRNRESDKKREQ

SEQ ID NO: 965774 - protein, 301 aa, Homo sapiens
MDDDIAALVVAQRLLACCKAGFAGRRCPPRPVFPSIRGGAPAHQRPLMRGAWRSEATSLMWPDERPAASRRPSLTPARYPHRRLGHRSPNLETHMARKICAPTTFLPMQPAAAGLPQRRTTAACLHPQATPLQPPYTAPTRRPPHCTSTTHCSRTTLSTPTPKPTAHAQPSSKRPAASIPVPTAHLRTIPHCATPAAPRDLLSAAPRRSQPTTRVAHLLTHARELAASSTLANPVDQITCDTPGPIVPPRGNPWQHRDRSPAHLHTVSPRPRPIAPARAPTARPTSNNANTVYPLNVLVTY

SEQ ID NO: 965775 - protein, 208 aa, Homo sapiens
MCDNEHETPYRKSQNKRRWRVEIRACKTCLSTGPLYYCPTRSLIYCNSGKNGYALSAHLIQATGKDKFTAGKSIERQRHNVSTSGNLHAMGQAPPATNEQKHADTQQDHMELKTETVYTVKQNYHLNHEDTSSNSRSSVTLNTQERPPDDPGTTHGRDLEHGSAHTLTLSREPTPQDTITDRYLHQPSHDSSNRSTCHDSSDVTPFQG

SEQ ID NO: 965776 - protein, 254 aa, Homo sapiens
MADEGGRTWRKERPPLTRGGGGRKQEGATTPPHKRRIYNKPPSGEKINTTYQALQPAGNQQPPGESCCAAAERRNGLALPEGGNYFLDTTLFYHRGGSSLTLTPEKRETNEKNNQRKRREAQEEGKAESRGKQKREGSRAREMRATQRKTKKHTTRKTSNTTKKTTEKQRRKGQRGKTSAERSKQKQNKQSKRSRQRRGTGSEGEPQGPDDAGRGQPGQWDARPQRRRQDERGAEEPSRRRAERERPHESTRTE

SEQ ID NO: 965777 - protein, 466 aa, Homo sapiens
PAHHAVKDHGLQAPRADLHPVQAVQRALQRPLSQLAGHMLDPSGGGRPSLSRDDAPQPTSPPCCSGDPRHLIQRYWLTRLLLPGVRQRPCRPARLARYAAQASTPAAVPTTPSCGIRSSAGARTARLPCSSLSSALSPSPEPLGCTPPHMPRPSRALAARRHPPCARYEAPPLAPPLTPSSFLARPPSVFPPSPSPSPLRSPPPHPTPQRALPFPHQHAAHRRQRPTHPLLRPLYAAHDFAPPRTSPTRPTPRPPPSPGLSPPFPYSRTPLPPPTSAPPHPLPSAPLRAPGSSSLPLLPPSVRATPPAVPPRRRSAAPAHPPSTRHVLTAHRSCDSMFIPPATRFPFRCVGVVESRAHGSRPRLLVSRIVGSTLPADTPPLLLTAACSGGPHDPSLTLAPVPPTGSTYNTPRLPPLAPRGTEPPLRPRRAQPHDSPPPAVGPPPVGSEPRIDALGGRSRSAHQPRR

SEQ ID NO: 965778 - protein, 291 aa, Homo sapiens
MNGASCEGSYQFSSHLPCVLVTTVFLRIIAGGLGVAHNRYISEQEGDAMEANSWVSFHLVRFVKETWYKSERLSTMTSGFPTNGPWKRGFDRGNEGWTRSERHPGGQMWTRFSKGPSMVITYEYPREVQSAFQGKTWRGGTYNGEDHVQEAEDTWVSFNSTKWKRDFHRGSAIIKIIPNRWIAIGYTVWVDRYLLFAMGFPPQGEARSALVPPSLGTRENLCPIFRRVAQDRWACGGVTGVCGSVDHCYVLRGERRTCAPTQAQVVRETQSCIMLNRGEERTFSWQQRAEN

SEQ ID NO: 965779 - protein, 156 aa, Homo sapiens
MGNEQDIFNEEDLDDQQDCAFFNKKELLKLYSRFYEAGPQARAQMDYRKSPDASKRCPLKRHQYNPDARASRAENPVANRTERCVRRAAVFRRTGERRTLNISHRIFVDMYTRDHAEIVTPTMQLQETILIALQVSMNFKLHVHSFNLARGKDLET

SEQ ID NO: 965780 - protein, 134 aa, Homo sapiens
MLGRRNSAMCSGLLELLLPIWLSWTLGTRGSEPRSVNDPGNMSFVKETVDKLLKGYDIRLRPDFGGPPVCVGMNIDIASIDMVSEVNMRFWLQERGTKTVVCAFQGCLCGFSKAAFLDWETRARHRQSLSEVLT

SEQ ID NO: 965781 - protein, 310 aa, Homo sapiens
ILKYQTEIVYAKTSPHQKLIMWKAAKDRVHIVGVTGDGVNDSPDFEESRHGVAMGIAGSDVSKPICMTMFCVDDNLPQIVLELEEGRLIFDNLKKSTLIYTFNQNSPGYHSPCHDIYYANIPINTGDLSTNPLHDLGTVTCFLPFSLAYEAVLMHDDIMTETAQKSQIQTKTCEIERLISHGYGADWYLIQALGGFFTYFCDSGENGFSLLTVGLRVDWDDAINDVAKGTSSWGRMTRDSRGVHCNSSQKIGGHGHWNRKRESGPAEQKDRIGCNTGSPSQGADQPGGPPANARLGNPLTPHVPPRVLRA

SEQ ID NO: 965782 - protein, 153 aa, Homo sapiens
MFVSTWDGVGIIPGKWSRTLGGSAHGVGLNHTWGGGGRQNGRPVHPNMKYHRVANTIARTKQMMSTCVVAGGGALVEFYENWGRLHAQRNLFGDPNECIRVVVDTMNGGPRWDKGGEGPWSAKDNVPRLRWTPWKPGGGGRGLNPTGGNALEL

SEQ ID NO: 965783 - protein, 238 aa, Homo sapiens
NFPCHNTHAAISPQRHVTTKRVAPWHPYVASATIKTWTTLGTISDRPTVAYITWRGLFLVVTGGSIAGDQHVGCVLRFVCVRCVPCGGDLGRASVVPWCRGIVTRVVCGVSFSPVVCTRRGRGSRSPHNKRKNPWLGEPQRAFSFILSNASVGHKEYSWPTGGTEPGAEYNIFLWGVTHTLYHQRVGSDVGNPPISPSLCALCVGDPNLQPVGGVGGRFGALFIAAPRKFPRRDVQSP

SEQ ID NO: 965784 - protein, 138 aa, Homo sapiens
MDKKSKEYSCKAAATIRRENTYSRATQNKHTERTKNRQKEKKKQKKKTKAKRPQKNTNKSDAQRANTKKQATELNRRNANNTGSREQNTKDRRNKARNNKREHRNEEQKNERNPTNKTKPHTKQGTNDIANEIQDQIT

SEQ ID NO: 965785 - protein, 206 aa, Homo sapiens
AAHRTEARALAEAPSPKPEPEPAPVGRAPQALAGSLRLWEPHRWGTNIDDKELTKREHRAEEVPGLWMILKRSEAAPMTEAQACHVEDGLPDNTITRHVCRVMTQQQSPGGSWPGMGLTARHATGLHTHRVGPRFSRQTLTGGASSNHMLMDRWPILMTSMDPTDIQGRAPKERPHLGLTTLIPGDIQMLSEPVGINPLAASSIAT

SEQ ID NO: 965786 - protein, 267 aa, Homo sapiens
MRGRTASAHNATDARGTHKEDHAATPNARSGQPPPNKENVTNKTSDQQQTVPKQVAKSTPHAPTHPPPGDTAATTAAPPHERTYMASAARATKNRHTTEAASPRTTETHQGAPDTRGGEGTGGSTGGRGRGGGGEGTEKGGERGTEGAGRGRGERKRRRRGRQEKQSRRGGGAREGGGRGERESRGGRGRNGGGEQGGREGEEAEGRGETAGADGRERRTRRAGGGGERRESGGRERETGERAGTEEQGRERGGGEREGRRGGEGRG

SEQ ID NO: 965787 - protein, 530 aa, Homo sapiens
KYSLNRLKNKSHTYVILLVTSAVFCLICSSLGIINPFHHQPLKGKGSIFTASIPRAAFPTTSSKSTTPSVQHESSTFPVTSQCITYSQGHIIRHSFWTNPPHHNIKLSTPASTGIMRIPTHTVAFTVQVVSGHCITLWTLSNTAQATIHLFCRPTPIHIGHLQLILPHNTTRHGAHHGSNTKHRRTKQPQISRDNALALGIPHIVIQVTIQLITRGTCTLLLGSLQFTSEHSTHVEDYTAAITNDTDWTLWLIAHHISLHVNTSGEADTHIHTVHSNNTTTTTRNYITLLHSILHTRQTIDRKRREIGSTTTTRNTIKRQDMTPTQSSAPCDTHTKKRGRGHMAAHQWRPQTKFTTIDTQIPTHTINIAKNGGDNNENATHPDTKTYTHNHHPHTDGKRVPPSSTGNTTSRTPHRVLQQVHKMTRLRKPHRSLTRKQATDAATPPNEQHTTTTEYTEENTTGTQINTVKEQNTDPGENTSPQTTDKHCRSCDTEAHTSSNQHRKHTTQQRMDTTKMRALLTAHKERQPLP

SEQ ID NO: 965788 - protein, 136 aa, Homo sapiens
MARAVGGTQSHSISSVVLQETEPIRSPARGGAQEPAPPWGRRASRSSCAVHDLIFWSRCEEEWGNVLGHHADHAAFPGSFQLSSVWLSYLILALLSVTIRLQDLQVRHPSLTEVRRRHPFKAYLDVTLRLSSEAFP

SEQ ID NO: 965789 - protein, 437 aa, Homo sapiens
LGAGEKQALLVLCAAHTFVLAVGGIHFETPLPRLHDPGGDTGRVDTTDGCNVVDLRADMGRCRSSVRLAERRLLEFRGTYHPFKSFRILRATSLVSRRSVPCPHVQVSTCGDHSTPLPLSPLDFPDILPGSSFTSDRSVTLQLDPILIICMIPDFFLPRQKGWWTTGRWISFYTLTHNLNTAQSRRFGQVARSFSNLVRHSKPGIYDLAPSTFTLLHNKTPLQKSLNNGPLSISDGNYSAKDQVKLFTKDQVEGTWLDAQELWPWVNARDSNAPRGRQCIRPIPRAEPSYNGQGRQHRGTAHHEPHIQGMTARQRRTTGTLPHGGTGQRPTSNVATTEQKGDTPYVAKERQRTSWYSEPRQGQMTGASTRTTRARRADMKGKATKPMTQTGDQQGRRATTENSTNQQALALHQLVKSKQQAVVRLVVVVLRCSTART

SEQ ID NO: 965790 - protein, 199 aa, Homo sapiens
RPRVGSLERLGGWASPLRPRCGVPRGCSWPSPCTQRCRCPRACGLLLCWCAGPAGPADVPHFLAAAAGLRLRMCSDAGAPAGPGMLLHTATLRHLQCSSASTSVYTGAMCYLPEFNLRHELELSAQPLTPGCSSDTTLRAYFPDCPATWCCYLGDFCWTRCGLRVQYNTTILPTVTLDKDLQAWNGHYFILTDQKGRCI

SEQ ID NO: 965791 - protein, 142 aa, Homo sapiens
FQSSQEHQVLILLTSPPTSYHSTVNQSPVNDAHTGLQEIVHACQTPPVGLLRAPITRRHLVPRSLHPILAVEISTQDHAGQILCYVHTGNSLTPEVPPIQLLADHPQMEPETRATMGPETHPCKVVLGTHQPTPDTAMALGN

SEQ ID NO: 965792 - protein, 180 aa, Homo sapiens
MGMRSTTPCELTPRCAFWNESVCLMPRHIAAEQERNRHASQMVVTGENLIEKMKTQNINQPEHRSRDANSMQLCKFSFRGSGKNPWKYMPQASTVRVMRELGSNVYVDANKFKPVTYTDMRQDRLLPISADIKREQDEARGPNEDCPAQTGAPREDSAELWKRKGKLYIIWKRQQVDQEE

SEQ ID NO: 965793 - protein, 195 aa, Homo sapiens
  misc_feature (8)..(8): Xaa can be any naturally occurring amino acid
MWWWQLWXHFVVEKQPSNNHDKYPLSSLQSSAPGAMSQGKECPVCRRGECEPVQRDLRSLGPLRSISTVEVLSTYCCVEVDIATNSYAKRIRYSTYCWWTNKSDGVLSGEHNFPYISITPNLRCAGEELHSILSARAIISVGGDPTRGGAHARDQRRGRVRHERGGPRRAGGAGASLPPAGGRTAWGGAPLGTFS

SEQ ID NO: 965794 - protein, 359 aa, Homo sapiens
VSSRRRGAADTGRLRGLARPSIEVSASESCGAHGDLPRTLYPRGFLGLALDDAFAFLLPRIRRHAHPIVVVHGGGSRSHLQGIWKERVHQGMVKSRTPMGIRQSYRAGRERRWMPQRELYDRPGRRSRRSTQVVGLSGTKIGEVEMDASIMDGKRLSAGAVSEVQCIANPIKTLTRIVMEKTPHSFLTGQGARTDMEAAMGVQKILETKLVTQRTHKRLAHEPPAHRCSHTDWSQTLGTRGMMMPSDWHGHDGLRKHSPRGTRQQQCRTRRGPHETYETGRELPPQGTSVNTDHTTRECGTAPKRANPCTNAPWATKQRTVQHRRHTRDTSQRHTKETHREQTPREEYTATSDHDNKRP

SEQ ID NO: 965795 - protein, 75 aa, Homo sapiens
GLVMAEKVNGLTRVLYSVHGSDPGEGGRTTFADWVFVIIDREEVQVDFYSWSELIEGWGRRRNSTTGTETGCHTA

SEQ ID NO: 965796 - protein, 224 aa, Homo sapiens
MTQARVLVAAVVGLVAVLLYASIHKIEEGHLAVYYRGGALLTSPSGPGYHIMLPFITTIQICADNTTNDEVNPVPRWNKLVRVIIYIDRIEVVNMSAPYAVFDIAAENYTADHDKTLIFNKIHHELNQFCSAHTLQEVYIATRPEAAARIAPSGTQFAFHAHPLMAPATLTQRIPETRQMLHFLAREKAKADADYHAAHNLCTSNKHKLTRQYLEPQKVPGRCF

SEQ ID NO: 965797 - protein, 210 aa, Homo sapiens
GSRWEIGPRGAVVAVWAMARRPRAPASSGEEFSFVSPMVKYLLFFFNMLFWVISMVMVAVGVYARLMKHAEAALACLAVDPAILLIVVGVLMFLLTFCGCIGSLRENICLLHDFSLCLTAVFLLQLAAGILGFVFSDKAPGKVSEIINNAIVHYRDDLDLQNLIDPGQKNVSCCARAFLHRTWSQNMYSNCSDRPPQSRALLCALLLLLA

SEQ ID NO: 965798 - protein, 343 aa, Homo sapiens
RPARPRTEAGGRDPPPPTTTTTTRVRPGHRRGVMAWGKGAKGSIFAQDKRRGLTMTTRKGRGPISRGHEVGGEEGTSSPYSAPFLHTLALEEGRGHRLPATEGRQGLWGGTPTGFQGDQESECGETPLPRPIPGPMLPPPGLPITREERTPQVSPGGPRDYPSGRLQPGLISRVGQLEESYYIIYLPKFEIVCRVGGRRWMLAPSLHRCGQNPELQGRRAPKYTQQIGLGQSSTSEHMNCTLVATDHLKASQHWDGAPGGAITNRAVKKTAAKPKRGEGTDQHSTAARKDPTGSQAEAPRKRKRKEGQATGGAKHPLREQAGEEELAGQNRETRTQEQQTDDN

SEQ ID NO: 965799 - protein, 177 aa, Homo sapiens
DHGVAHAYRPTSSCTVVFNYFRMGGEGASGHHYLISTTIFAVPISEYLKLNLNRYPENQIPYLALHSYRSLILLELRIIIIQPPPPSLPTDVANIKKVTDRYSSQVNWNTRLDERLWKSISTVIYLTVMQQAYSEPYQETHSYQTHASIQGQPFCDDADSIISPQVAVDVLAHVAYV

SEQ ID NO: 965800 - protein, 69 aa, Homo sapiens
RWDGTLAPWLPVLRGKKLEILGQRGDKLSLKSSLGVSLFKSTFTFVYWLCDFLCTHVYDAEYTMNTQKL

SEQ ID NO: 965801 - protein, 336 aa, Homo sapiens
EGSGHVCEMVRQMYDGMTFLNQNASEIELAAEKPVKLSIITSGGATRDRALEDLDTCMTLCCTSMTLNPKGKSIHSRMLRPVILGLMKLELSILDKAHGKRYQIHMKEQELPIRSRQEKRKHGINQYEDRHSTKKEKKAGTPKTNVTSRTKDRNKKDNTSPTTIRPVHCTQPIQPDRVTRHGSNTRERTARGPHSPKHNNNAEQHAQPSNRQHQQPRHTRPQKHTNTHTKMKANGKQCDDYKKSKYSAKSTDHTRMPKERQHNHRGKKHTADHNNDERRQEKEDEDKHDRTMHSQQQNDKTQTRREPRARDTKRRNDECKTQSVTRTEQSRTHDYV

SEQ ID NO: 965802 - protein, 131 aa, Homo sapiens
FPSSSGAPVEDHSPEVQVVKNWLQVLVHASPQNPTQHHPVKTKRHAKRQASTKQRIQYKQQLGRRTEHNAAPPRAHKDRKPGARTQAPPCSQAHRNHDRPPSRNGVERLASADADHHIRQAKHTREPAPTR

SEQ ID NO: 965803 - protein, 447 aa, Homo sapiens
  misc_feature (233)..(233): Xaa can be any naturally occurring amino acid
MPACAKHHIVTHGGHRCVPYVRLGPRSQKAIHDTIRYRVIPTRSIHYILCLLYKETPTIHLAIRSDIEYIHGGTPNVLLISTYPNNMRAKGNAYSVALHITKKARTPKLASRMECGLSSSIILLGLGPKATDALFRFCKDRAKERQQDKTFGGQQTRALFYPRHDPGDTGTSAFNKREILPFMGDLYLAPPNRHPCLLTLGRYTRCRIPYWTLLHPSGGSRPLPPFKFWFSHXNSLGFGNILRFRLELLDIHHWSHTKTWTRYTISWHIFWGAMKRSPLEQGHSSYVNNAEPAVRVLWGGHTLLFPPLGVADITLITPKIATHQGVQGVSPHWVTLRQGKEGREAGEHTGWALTHHAEKETAPKGTTTPGDSLGSPLIWRSHPRGDRHSNTQNPQELYNKQTTHEELRPADNPQHVVAEPVSRPPALRALGGQQTYGRWRPHYTQSR

SEQ ID NO: 965804 - protein, 131 aa, Homo sapiens
MKDRTRPKSTTRHKKTLQCEERPHARRGQQERRQGEQARSTTTKTKHNETGERASSERPRSRRDADGARGAEKAKRDAGTRRLAKPSTASYRPGLSVAARVRRLDEPIILDRASAARTPELAPYLTESRGG

SEQ ID NO: 965805 - protein, 76 aa, Homo sapiens
HHLSIVTFENHSCTGKHTTYPSIFILYTRESISSLGIIQDKLNFQEILYIILIICAQDDTYEDDFGSNSFILDFHN

SEQ ID NO: 965806 - protein, 105 aa, Homo sapiens
MTRIISLQTADARLSTDGQAQIPARCLRTLRSPHAHGRLTLLGPATYRMPAEEVTRILANTPGPPSTTTIDGGARTQTSCYKSDHQPTSPSRRLLRAAPLIASAQ

SEQ ID NO: 965807 - protein, 86 aa, Homo sapiens
MTSTSILLDSRESNDNNSSTPQNSSATRDPQAVCHHHLRLNLVRDHDIDQVGQRWLSDSWTLVLPRSPAPKRVGIHSAIPPALGQV

SEQ ID NO: 965808 - protein, 254 aa, Homo sapiens
TVAVRTGLPSETKKTGKRIGSSELLWNEIPHFRMSRQQSHLDLKVWSCHTLRNELLRHRSVNLSNVLKSNGGKMENHAADPEPADGEQRQRKSTGGELTIFLDGPTCDLGNVPNGSALTDEITAAFERLQWNRVSSENGTAPSTKPGKEEDPGRTRPYGCLSQNNPRSGEQSPGARSRHRSRQELTPQWVQAMAQWMRNPTALNRRTSREGESHWTLEDRSNDSPPHTGRRPPTQPETRHSEKTGAHHRPNGAS

SEQ ID NO: 965809 - protein, 98 aa, Homo sapiens
  misc_feature (12)..(12): Xaa can be any naturally occurring amino acid
  misc_feature (31)..(31): Xaa can be any naturally occurring amino acid
EKAVWTIDTSVXKKRRHGTRIRDIHQESSQXAPLLRSCPKTPHHTVYIRMHNRYTRKTHLSPEQQQIIEQTQHNLQHRWALHSIIRYQPQVQQHDNTL

SEQ ID NO: 965810 - protein, 107 aa, Homo sapiens
MFTQHQAIQLVWIWIMYRRPMTYTVMLPATDNFAAPHRYRVWKRVTLRLADQCVTLILYSELSPTWHLCCMSIRTHLIYTLRPPPQLYIVLQINEYPPISRSNPAPE

SEQ ID NO: 965811 - protein, 169 aa, Homo sapiens
DSYQSIVRHMRSRTYSRQRYHASYHATNLESINMSVWHLTQQNHIEQRILDAEEHVRVLHGCAKRARFKVLPGFYESEYLKRHESVQTLVVSHFEYLLSGQFREPGTCTTVTIIDAPGHQRLYRNNDDYKGISLEHDFSWSVIVAAVCSRCNFEAVYRRKNGARLRMEH

SEQ ID NO: 965812 - protein, 338 aa, Homo sapiens
GTQELDSLLAITADPAGGPVRGSGERGPDDIMKGPGEEMLLSIRRVVMPMSILQCFGRGFRERGPAGLGLMLRSEFGAPVVLSLCRKLAGFHLADPQRSVARILACMEDGSPAGAAAALVSSLRSRTMLSCTHPRVLCKPARCAVGILIGRLIAQVLNFLDASVEIPSLQATSTAFSTARTTVYAMLELRVQVCGASAGMLQGGASGEALVHDLLSDIYPAVLMRLSCVPAGEPDVSLEDWEDYGPAETHHAESWGEGYWGRNKRQPVKGAMANGGTRENVIRRQAIQKAPSRSPPMLVAPASSGSTHNTNTLEQRSYPGHGCINGVYRMSVPRRTTT

SEQ ID NO: 965813 - protein, 428 aa, Homo sapiens
QKYRLRSNCKDAVQCALLRTWSAPFLGGPDWSPEMLWSSSFIAATGNFHASQPLHLHNSTGTAADVLIILDSSVILVSCITSVASLHSNTWDVSFKSFGAWSLPCVTWSCRHMFQASTAHMVTVPLSRLSHRVHVPLSTLRTPCHHIVTRRLVRCKGQHCINTPIPRQGTIHPVSTARHQCSTISLEHVSPRYEMAIATMQAGYDGPGSHCPLWVPHEASIRIGTQGCPPIQGLPNKHTPAQRRQLLGPSGHQTPPVAHSHIPSGNNTPRLAREQTQNRQSTERHYFTTGLVRTIKTLEDVTPHSRATTMGITVMIATPSSHLPLAVRTQKQRNAGVDKQTPYPQLGHTPGHTPTSPIHNQPEQHTGSPAAWQLTNTPSTRHQHTTARPAAPQDTNRTTVGPTTVRHTPTNRIPHQWASPHRRGRHND

SEQ ID NO: 965814 - protein, 466 aa, Homo sapiens
RFVVLYSTKPYQCHTSSLQRHTLYAAAMTRADRPYRGTLQGATTASALNPSTTLTNPPPASHATIAYHSYRTSSEAIQTKYHTIASDKPSTPAALHDPTYMRTLTPTQPQLGPTLPAQSYQHNTTTPTTASTPRTAEERTPHLPIPQPLGAPQDNTRPTPCHFQNGPIHLAAPPCRKHHHIRPTTITMGGSTLPIPIPQPRRRHHSTRRQTPATGGANLSLGLGRRSPNLQPPRTAGTLGLAPFATHYDRTPPVSFLIPPIFRLHTPQTPTGAPTANLLGSSHSHMDHKLLITSTRRTFTPSSPLHIYYKCVPYIVWPHHYKAAPLGGGLWAWRFGPTSSSLSATPLWGVPPQAVNLGDTARDPNEHIPNTTRPRPAPRALTMAVHTASHACHPYPRRPPHAPTSPPRPHPAHPHNHVPPPTPPLHHSPTTAPRGPPNRTNQPPNPDHQAHDFTTTRGNHTHWRAT

SEQ ID NO: 965815 - protein, 301 aa, Homo sapiens
MAAFNFIQCQTSHLNQTPPGPHNYRTPAIQHTFQVGAHLVQQATPSLRSQSPCSSTSTQIHKRTLTHHSNLHPNQLSTNRQHSSPVKASHQRPIHHSSAGPIIQPPQRYSSTVRIVGIQAPSAHRVARTRVISNKRLRLPRYTTPQYHNAPIHRLQSLHVFHANLSTLKSPRGPGYIATYIHLDTDSYPQYPPWLKQDKRDTKEANKLKRGHNISPQNKRPGHSFTPAGEKPGTYFPRSFDRTYSRPPSHYTPHQASHSPNKEKPRGASIEETEKAAANAKRGAARPRTTTNEDDITPGER

SEQ ID NO: 965816 - protein, 446 aa, Homo sapiens
LISTPLALTDESHNPRVPHGSANCSARLVPSSRFRPTFERHLLTTGRTVARCERDRKHGLLNYRSMRRLTFNVTSGKQYPFSHTIHSAHVACMHSNISLPITPRDSMIRDSESSKSVVVTSTVHVQPLDSSKLAARQDFRSVIKSIQVHYQPRTHGRQHILGASKTQRTLATHAATKHTLISSLCQRARPPPEQLSKAQQENFKPLHSGATSPLSPLTRRRPTATSRAHRALPCIAYSFYKLTCVNNTALHLLGEIRTTNLASSGNTQLTQTHPSAPPLTHKPHIHVLPHNTTIAHQTRTNTPTTPPRNPPIGANLASHNSHDNTHRNNPNQAGSNGHPNDRQLTSYSRGGNPSRLDKPEHQQRQYGPAHANQRRPNPQLKSKHQHHQQTPMPPQGYHNQNVKPPTARTTRDNTKCKNLREPPRRQQHNTKHYRAVAPHRRKRNPP

SEQ ID NO: 965817 - protein, 453 aa, Homo sapiens
LARCWINDEPAVSCVLLLAVCCLMCACANAVMNCLNAAWTLDCVAVLCVHVAACLLCVPWCCCCVDAWAVLCVLCACGVHALCAGCVLPLVIPPFVPIELEVRLTQFSPQFTTGVLFPYTYVNSTMDFQRIRRACKRGGPHYHPQNNQVANQTKRDDHHLLRVPPPPAPGPTRFSIPHLVAPLVNEHPGPDDSTPELTRPTLPPYGNDLARPHPEVDSDHPRQHQRPPNMRSPTRGTTTRTQHLTKNPPRAPLNTRHAGKTHDQEMAAIPNIDRIPPSRFPAARKQPQHIPGRTRPTARKGQKARCAHSTERPQNRRTSLVPHHTTHSPQCTGTTQSVASTGKKAAHFGHNTEDPTRSAPPIKIVNTQQQRKPNSLTKLLRSVAGAEPKHYHQSSPPNIRKLPLDTTSKITVAHNGRPHTKTNFAEHQQKPPEPNNKPLTRQLFLIANKHPTT

SEQ ID NO: 965818 - protein, 515 aa, Homo sapiens
MAQKQKNELEEMPGTLQETYTAYLIDNKAQLEHTDWSELLLTDITMAADIAEVGACSRSYLFTLNSYHILVVATSDQTKLGRIEYRHYNYYWLHNIGYQHIMLRRVRTGNLRLSRTKPYILLCTGTSGLSTNYPKSYGLHTTTPNPYINSMTSHTPTPAHTRYNTAKRARTCLNLAHNLGAYHDSPAHGPGTFPRRPHHTAALTPLAPPTFPRKLDNTEAPMVPKTQALSAPLHPVSKPSINYACTCKPVGHGTVASTSLQTKYNSPYTPTVSPGRALRQHTNGPRQVPSTPYPKLARRPNIPFDSGDNHIGGARNTHVGRPPAHRLQPKPLAKQQSERPKDPTHNRHKPPAETTMAATAHHWDTPRCNAKDRQVAHHNFTTNYGGHMPRTTQPTHTDTSNNADPGNQNHDTARTTSEHPDTQTHTRTSPHLRPRATSAIRHTHKPHTDYEPHNDTQSRNHRPHHIGQDATQAKVFTKPKETRSTAYHRQRIRDATATDKAQKPQPHTHTSDTQT

SEQ ID NO: 965819 - protein, 184 aa, Homo sapiens
MSDAAVDTSSEITTKDLKEKKEVVEEAENGRDAPANGNANEENGEQEADNEVDEEEDTTRRGANDGRDATDRTVTGDGTRMDDDRLPRHAESATGKRAADKMMQDDDVDTKKQKTDERDDYTAHKEQVTLTTQKAAVTYPPSTSRLRIYTWTPNELERADPPTEGNATPDDTRTHTPNQNTEKR

SEQ ID NO: 965820 - protein, 358 aa, Homo sapiens
  misc_feature (39)..(39): Xaa can be any naturally occurring amino acid
  misc_feature (135)..(135): Xaa can be any naturally occurring amino acid
MCSVITQIRCNSHHQNDSIPQKSRIVQCGLAQVGAPVRXHTSMTETCTDDPDDVNVAHRRCNEILVVTTGSDDERRGTDWAAIEHGRRHSERKRDTMQPEFTCPCDLTCPNDQWQERRNTGLGRTCMQDNESIEXRGEFDDLHECYQEMRSYGQNAEFGKIVVRLTVGAPFGKDRIRRDVLKDPVSTHAPKEPSKQFTELPTRGWYASCSAVWLGTTCGFRDMVHVPKRPWVNPSKSRAQRFKHRIGVPQIVCDPSLGVSSGVTGTLCHSPILAGGPNAEGGAVEPKGPRGQQAGMHQDRPAEKKRPHSRRPKVTHTEGTHGENIDRETRTTKRYREGKEPQSHKWSDKTEGEQRREE

SEQ ID NO: 965821 - protein, 190 aa, Homo sapiens
MCNRSPVGSEQIGGGHLCIQQAWELCIDPGPGGKIGQLSGASPMLGPRVGPRNKRRHRSMVQVTAGPGEKSPGGIGWYQDPWSGTSIQGPKEPGRRQPPAAGVTRKKPDVREPFGKKKVHRVLPKNPGTIKKGPNKKRLTCGAQYEPKSLVLKHTGILSEHTTNRGLHIQPAHEIRQLKQNTRQQRRSDD

SEQ ID NO: 965822 - protein, 75 aa, Homo sapiens
RLMAAAGSDSSELRFEAVPDSFLPLPYPTMLCKSSLPTCTTITLKDYSIAELLRDEGMTCVQRKQFGSISYRNYT

SEQ ID NO: 965823 - protein, 237 aa, Homo sapiens
SRMRNTRAGRVVCGKDLVFIESCTRSMRVLCILWEALTTLSSLLCLLERRCPPKVRVGKDTQPVDLRSEDAAGTDLTQEQPSLARHSSRAFPDPCDLAPMRAAGPSFCGPCPRPVRLHLPRDGTSVLCLQQAVFHLRLSHHLNTWRLHVTFWIFRVTAYTSGCAGPTWRSCAPRPRRQGIASPQPQSKPSEGGQRTHATPVRGKDLFPSSFHPRRSAWGPRLSLEPHWRARHGLPLA

SEQ ID NO: 965824 - protein, 298 aa, Homo sapiens
MAETNICATQRRVKQPARKVCPLPKHPSPLIEERDLMRKAAQQHHAGCNTNQREEGGVQTTRGARNSLLREQQKAGAKEGADHQTKLFLLAHNLGCGDEKSAPQHDFYNQTDETVCRLPHRGVGGNPPSRLLLCRYYPNAGPPRGSYLTPRAGLSPNPPDDLARRVRAPPPPENRKSAYVDAANSMYRKQELSPQKRRPPLEFVSPPQTCYYVVGARQRTHLRELLRERNTRTTEKKNGACGARTATSPTYRRGERTPTEGPTIMSARRKNTRTHHEEHPHRGGHTTRRTNSTGKNTA

SEQ ID NO: 965825 - protein, 317 aa, Homo sapiens
MAIGRSRGTNTKSHAHKGNTEVGPLGQTYLSRNFARTERGSDRTIQIVPFCPQRNTGRVPAVKNNYRHFAKEKRGLFRGTTQVSILGIRYRALGSEILQFLRYPYFPNRIAFGKPIGRKNSVSDTYCAWKKALPSERFFGRVCADKGLPMGARRPPHRVEQRAPTQDYHGESTNPTFGADDLTQGDPIKKACTRTHGIVASLFKTVHDPTQILVVQQAATTAQILLGGNNNTNMRQLGGHADPKHRLHRGGARHDKIAFHPEGTQANRGPPDIVSQVATPMGRLIPNARAAYNAPSSTQHLRMVALPNVIIVTEQHI

SEQ ID NO: 965826 - protein, 90 aa, Homo sapiens
MADDQLVNAEDRQHTCLSNPRGTKSLGFWTLQTRDNSVSPKSKDTCEIGSDQVMNPRRLELKSFGECSRFEGTGVNRFPLETAGLHGKGL

SEQ ID NO: 965827 - protein, 85 aa, Homo sapiens
PAEYTAKMLSVLRMLRAWSAPFLVSGRTGLQKCYGFIFHCCEELSMPLTISSSEELATADDVLYSGESVFLELIPLSILKKLGVS

SEQ ID NO: 965828 - protein, 165 aa, Homo sapiens
SGQGRCGSRGARGVRADAVARRAGSIHSGRIAAVHIVPAERAHPGRCLSVLDPRQRLRRAVVCTRNPWRTQSSCCPPSMSSGSKGPREVTTSTPLGAAIRYAVYQQLQRETSPAKLVQSTLSDLRVYLGAFQTRLAVAASLAPAASFKSPEDTPGLQQAGPCTKG

SEQ ID NO: 965829 - protein, 98 aa, Homo sapiens
MTQALPFVPGSWEPGCSRIQLRDKAASNDGWVAGRQRTTVGETAELGAKQPAGSKGLTAINTNTRMNAPGGHPSLATAGGPRDRHQTCDREGNVTRRT

SEQ ID NO: 965830 - protein, 297 aa, Homo sapiens
  misc_feature (161)..(161): Xaa can be any naturally occurring amino acid
  misc_feature (192)..(192): Xaa can be any naturally occurring amino acid
GVAQTLNRCNYLFYVVVAYLVQEMSDYSVAGDPERTAEPSSDPAVLGSNNSRRRAVLAVDNRSFVLGTVCLSETPIGRAARTPSQYCVELCDSLPMVCLVLMLAERWGVNAKRLAVRAFAQEPSYQNVLNRADEAEACMTAMRCTRVSTHAERGILCLYCXSRERIASHKRELQVPGGSRPKRQIAQETARXNPEWRQERPSNTEAPEEVLAKLALRGTIIDYWSIDALPVTHSVRNIETPVLKQLKQRLVTRNRDMCSRRESGTDNHWVSEVCDTRRHGDLEEFRGLQKTVVLLNI

SEQ ID NO: 965831 - protein, 226 aa, Homo sapiens
DFCVRTLLLLTHRCSLIAEEQCRSWKPARNSHGFLRIPEKHPMEPDGRQFTDIRTHPNQAAHVQTPLDTGVCLTFDNDGAHTDPELSTAEHGPAIELPYQRTSDALTYPTTTNSLAWSTGLPKRNRSAHSAISPGTAATIAPNDGASTSPLLTLRITLLGRNFGLQRQRINTTPPITNALFGLAPLGTVSDCVQKRYNPNIGRAFGLFDVFKPYFHLTSDSPGPQP

SEQ ID NO: 965832 - protein, 303 aa, Homo sapiens
SLPPKKGGLAPEKGGGPFSFVGFFPPFWFIFITLISHNVQKRAWGEADEWGTLGHPRGVWGCVYEGEPALCTSKNKKMKGGPSFHEKPVTRVSPAEFPRPRRKKKHEGITYYLAGDTEGRGSESGAHPNIRGDTAYPPGENMGRTYGEDPKPQKGHGAPPLHNPAITLWSEHQGVVYAPVGIKGDKRYERGITSQTRWYNPPSDRTAQPAGLITPPPRVMWRKIYTTIGIKKDKPLRNHNTRTDQTQPTRDGDARHKTRHDEQATDKMSADDDKYGKRGPQQGGDINKRNKRRLNNSRRKEKE

SEQ ID NO: 965833 - protein, 117 aa, Homo sapiens
VSGPDGRRRLRWRRRECGGGGGGKMAAPVLLRVSVPLAGSGWPGMQCALPESCSPSTHYHVRAERMELWTPEAPGGTIMDETIGGPMVDGKCSSTALSPRRIERIRGIMGPIIGDSN

SEQ ID NO: 965834 - protein, 107 aa, Homo sapiens
MHTYWHTLATTKWYWIDIGPWFSAHNRIHTPHSLNRAQRQHSSVHKQGTRKTPFGWDQIVHDLASTAHALHRGSSGQVCKCPLEYNGLPKAEGNTGVPNFGLPNRPP

SEQ ID NO: 965835 - protein, 181 aa, Homo sapiens
MDCPWAALVMHSVAIHNRRMRSMTLDVIATSTSKTAVKHCSSSIRMQPPQYDYGMNASIFTSAMESHTLACTRIHCRRWAAQCSTSFVCHLVPMLSLDNTSRERACVVPICILRAVHRMSCILFSRTYSRGRIHYGGDITTPTHDHLFYTRDVELKGRPCVYLRCAYVVSPSSRWWKVRPR

SEQ ID NO: 965836 - protein, 278 aa, Homo sapiens
  misc_feature (220)..(220): Xaa can be any naturally occurring amino acid
VAENIYSKTGIEKICTEVSAAENGAPWPSAIPPGTWLGPPFGGAPVNNAHAMLHSQSNVVLSRWECRQKNSAQVGWGEKNAWAPVNPRGPPSSDLPQGIAVRPENALEEYGESAVIDHPPSGCGATIAELSCGHASLCVCPRHESMRKDRAPCALWVLARQGFKTSCGPKKNVRPTVLQKKRTPSHVESGTGSGHSRGVPSHNATSWGGGYNRGPFSGRXPRGLETLSPFVRSARIRGAHNAATPPLSTRVAIPEPIARHLPCGSPPSEDVGPLIEYG

SEQ ID NO: 965837 - protein, 271 aa, Homo sapiens
MEQPPAPKSKLKKLSCRHVRPKQPETQFFCCIREACEKGLMDVSLTRTTQGIRSSSLAIQHQYLLCISIFSEIIKAHFHNAATVTAHMLVPYYGSYLNEYRPLDSLMEYCGAGSALTHNSDYEHKTIHYARCTLHHSYIYIERHSPLRTSLQPPYTRRLSTAATSPPPYRPDHATSRRTPATGWVTSPCLPGPNVAYRSSAHFPPRLAPEAESPPTSGPLTRVCHHPPATLALTSISTIALQHRPPMPAYSLTLPRTLTDLLQDHPPKLAS

SEQ ID NO: 965838 - protein, 466 aa, Homo sapiens
MCVRRGEVTGAELARMCFLAQTVTLLDIYTHWQQTSSSLVVQAASAAGQIAALPSSSKNRVSSTPSSDLGRARQEAGKHSQTACTHRHKPTPTALSIYQTPQVHGGGTMPIHSMTRNKPQASSTEHSWQHWDIPMRTTLTTREGTCAHNLSLLGEVSTVKSARALSQILTLVSSKLAGRAGPASQALRQARSQRHGHQGVTSRAQGTKAYKRKDQPPSSTELQNHTLAGVTTCQLATQQYYTRIQPDDDHQAPKTPTGTPLDGPRRLTPQTHPPGDNCQREQQRQYQHHKAPGAKDTRGTNRQSETRESASSGPQLDRRPTARPPRTAQEDATTGQPTPRRTARTAQQQQTARAATHAAEHEMTQQPPRHRTAHGEQRRAERTPTHGRTQDRRKRRQQRTANTPEQHEGPADARDAGTHTPPPRDKTSRKARDGRRKDGGAAHNAHDSETENHDLKTTERRKRARR

SEQ ID NO: 965839 - protein, 374 aa, Homo sapiens
MRRGCHPTRRAAHPTTKMLEAAARTQDGGPTQSTIRRTDDGATTHNDADALPQNKKNSHRSRGEPQQHNKKQQTQPTIVRQGRLHKQHKHTKENIIQTTPRTHSAQQGAPPSYSRRTHTAGRRILILERYHTTKANQHNRRHKLHTSEVINTNPQRHKNNHGENTKGTQQHNVTHAHNNSAPNTPHLTSEPPQQLSQRRDNRMNKHHTRVAHTDQTNKTQKNKKEINITKSRHPLNKRPGIHNNEHRRARINTIYLNNTRHRLTARRNTNKRWRRNHTRHMTAANHTHPSANHESSSGKKARQRDTPKRDHHAIPHPVGTTHHHTQNAPTTHTQTNMSLHTQHHHTAPTQHATHTHNTPNEAPTDHTTRTKHSK

SEQ ID NO: 965840 - protein, 73 aa, Homo sapiens
CAATVSSPEVVNGVLCSELETEDDEEEEEGSVGRRPKTEQVRLHVWRGKQGSCRAPIEKDERQYNIVFGKVSF

SEQ ID NO: 965841 - protein, 251 aa, Homo sapiens
MYWGAVVTEGLRFKLWLQVDIGMPSDDPCQSDLRLAWFSDVPGMSSCTHGQEFACAPVNGLRNGKRCSSDWKSRIYQSFQVAEIRSQESSVGDAGAEYCRGDPLAFVHSPWRRLGLMLQGGARRVIDLLLLLCCCPPMFVMGVNHEKYEERPQDHRALPPAPATAYELVAKVIQMTNVGIVKGLMITGPWHRLSPRSTGDWPSGNMWRDGRRGSHITSSLSSIVAAKADGQGQYLKLNGKLTGMAFRSHAK

SEQ ID NO: 965842 - protein, 172 aa, Homo sapiens
MWGPPVHLTPLLSVSPYSPTEYYDPRAVGTCEVEQGKAPTKCRLSNQWRGHFPTGGTWCKGTQSVAERSPGLYYGDHGKRAQHVSGTNASTLHGWGDNRSPCGGEGHREDKSNRGHIMLLLRSLGKQTCITKGTPKRLTGHIHAGHDSNRSATTLRGNNRTEKMQPDVNDGT

SEQ ID NO: 965843 - protein, 135 aa, Homo sapiens
SLCKHARKAGLVIPPENIGTVPYIWPVQLGIFACLCSSMRVMHAYPSLSKEGLIAETLTRNAQHSTMAIHHSVQSRQASHTALMHAHTFNTYTGNFPLETQAHRHHLYHWQQLDAICLTSHTPSNQLDRALSDNP

SEQ ID NO: 965844 - protein, 82 aa, Homo sapiens
KGAKTNVVDPFSKKALVMHVHTATCSCSTSSQHTSLAQARSVTQAPKATQHIAICMVSKGRDVCTVQSCCICQHMHAQLPFQ

SEQ ID NO: 965845 - protein, 204 aa, Homo sapiens
MLALADGLPVVGLLSVPAPCGALPRGLVWRGSGDRRLPPPPVTRSLYLDVTPTESRSAALVAVLKADVVPKTAENFRALCTGEKGFGYKRLHPSTGLNPFPFIVANAGDLRPNHKLAQAGNVQSNVKPVSLTRTFHTWKHCWGQGVPAPIGYGWFPKQPKTGSPVAFNLAPYKTRTWLADRAKAIGRCCGSTCTQSALDVVTDT

SEQ ID NO: 965846 - protein, 131 aa, Homo sapiens
MFENPIKHRKPGTPGYGGAASRCANRRATPTKREQRASHHTESNKRQPPVCETRVHNEATYKHHRPQSHTTEPDLALYRNNHTTSRSHPQHKHPRPKTETKTPLPTLVKQRDKITKVEMDDQHDDRPKDTP

SEQ ID NO: 965847 - protein, 88 aa, Homo sapiens
VYTDSPGGLLCTFNSDTHSSTFERLGLAIVLNEHFVKAHFLVMTSEFGYQQQGGGPHGPHGLQGVRPLDHQPQSYEHEVGARETLIAG

SEQ ID NO: 965848 - protein, 267 aa, Homo sapiens
ETRVIGTSETPIIIVGNKRDLQRGRVIPRWNVSRTWYARPGSAVYVDCSANVQTWLHRCVLFSERASSASAAPVAMHVHAALRFQGALRRDRCAFMCRLGAPRVARLADAEGWCRYCADLARAARREMTCDCPRAEGPCSQAASRVDEALSARGRPSEMAQALPLGPAVAPWGTGRLPAAVLGCSVPGAGPAGVCPTTPYGGEGGFERGMERWGLAQLPALCRAPPVVLLPDVGSGLGRGLPFAVFGPTHSVGGAFLVSPTSEPLAV

SEQ ID NO: 965849 - protein, 178 aa, Homo sapiens
MAGPRITYDVQRTLHHRRTKNGDAVRLSVRRTRNALHQQSARSNNSSAAGCPEKDQTLTVCTRHPKKNTDMQARYTHPEEMKSHLLSKPTPWLSEKREYIGGASLVVNQGNPQNAYKDHWNKPTAATLNNSSRLHTRHPRKPTAPAWAIPTTKKTNRAKGTPDNRHPSEDNKGAQYSK

SEQ ID NO: 965850 - protein, 110 aa, Homo sapiens
PGPWSGAMSGCDAREGDCCSRRCGAQDKEHPRYLIPELMQTVLPFGWVTGTGGGISLTHGDEIYIAPSGVHERNEFSLTTCCMWYHMKRTYSGPYAIEEANTKPVYSSFT

SEQ ID NO: 965851 - protein, 252 aa, Homo sapiens
RGEDGGLLRDGCNAMSIAQASGTADGIGSIHNCIIPGVNLITQLASSGRQVHSNFIGCSNTRHSGHYHWLLIRSYPSFIPASAFMHTLVHKHRHAGHRPQHTGKHTNHIQQLGCVQLHATQMAQMHTQIMHSRHRGILLPKLGDPAWVLVWRSNQPGAEVNRGHEAMGDGKKPQLTGAFDMQHRGKRRYFMEQYHLIQWQPNRGVYIAKRDYERMRFLTPTGQRGPITSSGTHISGLTSEPNGIHGKSPGPI

SEQ ID NO: 965852 - protein, 419 aa, Homo sapiens
KVQPLLTSSTKSPEPPGALASHGQGCTWLHGEGKASRRALEPDCKRQKTELERKKGKRERRCNNRETDNKREEPQHTKTRRANHRPRTTNHTEKSKKGNKTENKEQHRKKNKNKPATEQTHAQNNEKEKKKEKQIAEENNHRSKRQATHEKREEATKEPKERREKGEKRKEERTTTEQKKTTKRRKKEDSETNEQKEENNTKRDEEAEEQRNRSEREQQTKGTEKDTEAKRSNENKRPEKPTQKEANTQQRKEEQSTRRNEQESKEKRTQHTGQQQTTKQAQDTQKHPKTVERPRKTKQKPQETHKEQRETHKHKSQNTRQNKRKGEDHQDKTTEGQKSHRATHHKSTETNKEGRQRNTEKDTTEEQNKRRTAGHQNTNKTNESSKREDEGDNKGEETKTQQEKTHTDTATHNHTHQKK

SEQ ID NO: 965853 - protein, 151 aa, Homo sapiens
MFCGNSRACPPKREQHAILSTNEQRRGVTHTRASRAETRASRATLCGRRRKTQLYAWWGGEQHNLRGRHHTPPRRESISYAPPPGGHNTYQHHSHQVDSRRGYQQTAAQRQLATRCDDTTKLPPQRGVYTTIDMKTLFLLTRGTSPSHISG

SEQ ID NO: 965854 - protein, 125 aa, Homo sapiens
SYFISVRLLSYLSAADTRWKIRVDMDMSPTEAPELSYRVCALTGRQSIITYKVDNDENEHQLSLRTVSFRGWLQRHEYAHCLTAAGNAMYAQAVHIKVTLATSTNVLYSTTGLPVGGPYDNNTTQ

SEQ ID NO: 965855 - protein, 498 aa, Homo sapiens
  misc_feature (287)..(287): Xaa can be any naturally occurring amino acid
HLRDLRRHPHTRPPPPPHAAYTPAPHLHAPLLCTHAPSLHLHPPAHPPPSAARPPPLSLPRLRPTSLTRPPYLRLSPARTPPPPPLPPTPHARTAPHGPHLLLTPALPLLPHRAASHLHLASHLSPLHTTPSHHSSAPHPSRRTHHPRPPPTFSCPPPSTSALSPLPTAHAPLATPLTHLLYHQHAPLTSTPPPPSVRSPSYALTPPTPFRHAKTFGPSYAQQLNTAHALALHWPPYAHAPYPLRARPLPCLTRPLAYSARAPPIPAARCPDGAATHTPWHDTAHTXSPHHSTPLRAYPPLRPSLLLSASNLPLTPRTQYPGFAPQTTEHFKRTASLAYLGICKRRDPTQLLYTPRWALSHVPPTHSYCTPTFPKTGLKLGQPPPELTVLLALLPSPTKLALFLQWLASGKPLTTTKASLAREPPTFRRLPPWLPPTRATEAFEPPWDAGATPAPRLPPHFPRLCYAAPPPAPAPFRPPPPSRAPPPLHPPVPLPPAL

SEQ ID NO: 965856 - protein, 118 aa, Homo sapiens
NLKLSVLSSGGPGGTDDEADAVKDAGCVMPGDKDKEHGCCLERWINMLQDELGDAVERLGVRIDTSLYRPAAGANLLKCRFCSYYNVPMTFRLPQALSNIILLSQQLLCNNLDMGHTP

SEQ ID NO: 965857 - protein, 100 aa, Homo sapiens
LLSSVTMVHGRDAYVSPSGYLLQLVNTEWNLLAERGTVSARKINYGRRGEYVYQMTILTVDKEFRFEVGLKRADQREKITTSLMLQRKDYMYQVPRSTTE

SEQ ID NO: 965858 - protein, 158 aa, Homo sapiens
MSTRKVSLDHPPMMLDAEDHRLEAGATGMKKSPSVNLTLVLEPVHSASGHIVLGRHQGKGPGGTMRSQVRRSCPRDVKGRGSKTPRGREKRSPRRLHGTGLNRKEMGWRAKVEIPWYRTLRFLSRNKIPPLGHGGNPVCCPRKENNQLAFANCENQGK

SEQ ID NO: 965859 - protein, 125 aa, Homo sapiens
MSSDGLGSRDFSKRWRPRRIVTWSSAQVKVEEPRDHQVWQTLCLTGTLSYMAVYSRHQSLEERITEPYRGWAHFLFACTGEIMETFVYFSGTLQEALATRRYAVTDANPVKQGRINPGNTQIRGP

SEQ ID NO: 965860 - protein, 127 aa, Homo sapiens
PCSVTVKALQGRSAVCSVPEDELVSQLKRWLQKLKSSVPEGVVKAGLGWERVSDYSIVAKSKLNLVVKPLEKVLRRRRRGPEAGDSPPREVWQLISKVFVPPLQCRADASRVLEQLPEGLREVPEVA

SEQ ID NO: 965861 - protein, 309 aa, Homo sapiens
YLHPGSARRRLGRPGAILHTSAMAADLRAGERPGYSYATYGLHIVYLADRWAPDPGLERTLTECLLRDVQALTLHYDRYTTSRRLDPIPQLNCVGRHQLVCAFFITPNSPSQMSSTPPGWAWVMHVTVGTCQARHFSIIAITTHFWHNDLWVAAVAQAHAGPLASTSHDTQQVLCGLWQSHIPAFIARNIEPARQPAREFLEPASTRDLCAPIRPDLITPSRRDPSGRDYTVVTTGRCALDMTQSNGYVHRGYSARLDTSSAAVMALGDPAPGIPFHPTDDILKYPSQSSHTRTQKQSPSFSRNAQSTR

SEQ ID NO: 965862 - protein, 193 aa, Homo sapiens
MLHKYLAPGGTRLEMPRMTGYPGGTLTVESGGNIHAEETAEVTRGALEPYDGHEGPTTTNARALKVVPLPEATRKDLSPEFPKKRTTGVYPNLTYKLVHVTVRGPQTNASSDKTKEQSARSRRRTRNHLPEEGVRKFPCHHRGQSHTCALRKSKTRDNPNIAKSKEQPTNDHCEQTGGKRTYSEDDKTSTKNW

SEQ ID NO: 965863 - protein, 400 aa, Homo sapiens
VRAVMAALRQPQVAGAAGLRPWLSLPGMEFVWPDAQSMACVMLPVACVNLICGNTLDYNQWPGAAYVLCELMTVLVGRPRKDGLVSLLTTSEGADEPQRLQFPMHHKHQRSHGDLGLHRWANYVKASDSVLPKLPPSLASVAVVVSDQVPTEERRWTVHGSGSLGKWTRYNLPTDTLQSRARSTNRLARDPGDVTRQDRNTTQHSTRECPDEQFHGPTSILLTGTGHSATRIDQYDVMRSLADTQLGDGKHTEKPPDAMGPDEPSKKRDEVVAHNTHEPPRERSPCDERRPTEEGQVHRAELHSEKPTGKEQGGTRNRPARQTQECANEGMPRGTRAHVGGRNRAREPNSDIRDAARPRKSTNSAPRPKQPPTNKSQPTQTTRHKAPERPRKCKHAQQDQ

SEQ ID NO: 965864 - protein, 247 aa, Homo sapiens
MDLACGAVATVVQPCLALSDPQTVMCPGNANGCSLRSATGCPSSQRSTSCAPLCSSCTQRILCNHTECVLLPCASVHSCHVSDAQVVWPGNFTTTGVGPRTICAISWWITTDVLEHMSNWRSTCNVANWLHAVLERQYQPPKHHRSSPVNAPRHPQEREDQFMRDQTLKPGTPKRDLDRVTALSVNVYNDRRPRSRSLTEDRDKNLTAFARSPYGPCNARIYGIRAKRRQRKAAHTRCCNATLTPSW

SEQ ID NO: 965865 - protein, 529 aa, Homo sapiens
MRIEESVIISVRGPSILDTGMMFVRNDFKDVQTFANLNCHKNFKQEAQSSQMLVWTKAFLETHAGKRRLHVDYLHFDTFEHNRTTHLNPIHNYHSEKLMDIQTYFDCLTDRNARLTRHSQTPTERRPTGLTNCYYTDNHGPLTRKRTLHTTDLRRKHGFHRTYLTHRRGSIVPQQALATSIITDDPQSYGKGQHGANTQDWNTDAKHELPAMFNTVQAMVENMWHELTPFERQQSFVVIRQFRTSNYVISTSVYHRVTPIYGEITSGQTLGGNNFSIQIYHATRSSGSSVLQRCKQRRSLKKGTTSYVTAGTIVPQIPYAFNSTSRTYFSGGMCPTKSGLILHSVIEHIIYSTWELDMGEPLTGLKLRTATRKIPYYCNQLYFDKASNFVAGPDHTQCAMSKPPNHGNDNLATPHARHTSANIETSTPAGPKHNHARTDRTASPPSPHDLSADNDKQRLPNIVTLAKPTHPSRPPDNRHTNTFSTRHTNTDTTKQKNTEQEQDNTSTTPQRIRIRIQTQKYSTNPQPQH

SEQ ID NO: 965866 - protein, 114 aa, Homo sapiens
MDYTPTKSYINTASPRHTKNSPHISANTTIAVHYYDTPGAIKSTVDDLHTHPLLHLRKQIKYEQNNKVYIPTDKPDLAMNQDNTPKRANTIIYTTTIQKHTHPHRQPITTRRTY

SEQ ID NO: 965867 - protein, 414 aa, Homo sapiens
MGAAILPGEREVKAGVSPVGSRPLTQELAGPGPVRGSTSCPTLAHAPYRTLARWTDAIAYHPLVIGAEGRKRGASNQGIGSTGMRADAGRGSTMTITERVPQWSVGQGPSGLQIAEQGPSTPCTGHAEQRRTAGPNELHTARGAPTPYPEAATALSELEPLTLQLDDMAPWHPDSGLHLAGSPFERGTSQSGDPSLVTTTLELTHRGHTTALKAFILTLDSAAPWSHPTRDTSTYLELPVAYPSNLADSQLELETRHNHKGRIDKSHATERIHPNHLTQPPPPRPRLSTQQRLCTIDITHSIQETTLNRPLLRSHSSPIPGTTDTDDSGRSHTASAPSPPTQPPWSRKYYDQHEDDAMIAQPGADVDRASQLKLSQAIPELTHDTIAPPERRHPASARDATTPQEPLQTATCIA

SEQ ID NO: 965868 - protein, 96 aa, Homo sapiens
HSDVIDSQNLSKVQTVNYHSHEFHSHEDMLACRPRKVKEEDKPPCTIIVFSHAIQHSCHPLCSVNLNQAAQTHHTVSLYLYRDYQTQDSTTNCVSQ

SEQ ID NO: 965869 - protein, 75 aa, Homo sapiens
WKGIDDVIVKHGRCIVDTLDSGKYTTTWPSDHINAAWQRTRENQIDRNLETGGCSSMRTEGSFKYAWVLDETRNA

SEQ ID NO: 965870 - protein, 526 aa, Homo sapiens
ARGPWMALGWGTADGFRGGFGSGILGPGVAGLWTWAVGLRPAELRGVQWPEDKEWMPSTPSWAALDQGTMKHHSPLDRQISSSYHPVPYIRQSSSIHCIYFHGRAIISKLLQSYTHSIHCPDCSTASTPEHVPKLHPVLPKCHTSSSIIRESTHEWAQRSENLGVRYKLHPDMERVVHKHRQISLMRGTIQYPGDQRRPSQSVHTRMLAMHGLNHGGGNHKNFRRKMDTQQTNLVHPYWTKRVAPWGTRHRQTATLVSHMEINRHATNNTRWRQPTQGGEPHRSTTTGTLTRVNLWLGRPHTDNGSGPYQLDNDAVEELFQHLETWRKTTHYKEPPGGALRHDYRDQNTHLVSGPHLLTDTTSEGTTHLNGNCDQVIPSKEKAVNTGVKRLKTPPPGPNQWDNRKEPRFFHRNSVLSRINPTGKDLRRETHTVLTKTNPKQHYERVTPEQQTGKHTRRTPEDARRNNNETEGSNYPKTNDNDGDINGYNNKTQQRTGTHPQETNKRTQAENDPKRYRQQGDSSNGR

SEQ ID NO: 965871 - protein, 176 aa, Homo sapiens
SAWTEPGARSPPRADAIARPPITSSPHPRNDPRTTDEAPAPSRHQQRAAIIHESAATLTERRSTISRCDQKLHTKDIREHEHHTDRLKTRSISRHPTVVPDTMSLHTFEQQMMWLQKNFAQITNTITNSHMKRGNMLTTLTDPAEPKRWTNLSFRISRNQTVMTGESGLTCNGLVP

SEQ ID NO: 965872 - protein, 281 aa, Homo sapiens
MWMRLGLVWDLWHAYQGVPQCGPQEPSPLLDRAIVVPLLPRPFLGLWWMNAVLCCKHYANGSYRFVVLCRALLGDYSATHAACSMRKEHIPSSHTIMVSFSKYLDGEMATETLDTIQISSDLLPPVGPGMVECWHSVDIQSLFSQTVLLQLEPSERILTRGNVGQGSDPHRTMTRAQKPSRIISGEAPYDLTYTTVNPPANHTDRLQGTKLMKDRRTKAARLNNHRNPEETHGYGPRGQTLQADALRYNSKHHLGACLDRWEHKRGKPEESRTGDKEARHQ

SEQ ID NO: 965873 - protein, 237 aa, Homo sapiens
MQLHVRRARKAGSSENGASLNNSFNSCSDMTARASKKQGHKTKKESQGTRNRSDTRGKTTHSRQRNKKKKKHKQQQTAKKNETQKRKNKNQKKKTQKKEEKTKQKKKAKTKKKRKKTTARKSKRRKKRGKQTKKEKEHKREGHNRITRQHNKEHKKNRRQRKQEQHKKNKRQPQEQKEKTRKARTQHTKKKDTQKRRRTNKNNKHEHDKQTEIDTQHTTERHKKRTERNKHEQQRKR

SEQ ID NO: 965874 - protein, 93 aa, Homo sapiens
GRSRSCRCRSQSLMHRNHEQRGRDPAADQLANSRYGSDMIRRETQLLGLFRVRGLVKCIRFSSSLAPVPSPLQGESLFTVSRTQGSDRIAIPI

SEQ ID NO: 965875 - protein, 325 aa, Homo sapiens
  misc_feature (246)..(246): Xaa can be any naturally occurring amino acid
MDAKTGHAPWRYEVWSQVGRSQCTRPAREKRERPGRRRWGPADRRESVAGEEEREVTAVEMGAGPEKSSQICVGGVFLPSPSEAGSSSGNPQGVWYNSWGSQGSPPGRCYRNRAEDPPLRSEVAGGRRSRPPASVGSDKSAILAAPTRRCPGIRAHGKCGKNEADNPREGRDAAKSKEVGRPNGGSAAPGLFRGWYHVGEATQPKAPIGPNPSETGGHAGVLTFQVFLTAILTTGPSGASARGDVXFNRLRPRVGAHNLWLGNLAPQIKIKTVPGGSMFVGSEHVPELLPRNGVNSHTRRARRIPLGGPQHSVGCHMMCARRPQV

SEQ ID NO: 965876 - protein, 322 aa, Homo sapiens
MSRSGNGRGKGKCRGVWFPLSPCPDRPNPRCVCLCLSVAPLSHHHSSQWWPRRKAQEAAQGVENNEPSLPVGACVRTRGRTNVAHETAGGPHVIRAMTRSPISHPMRWPSSGPIVRESASEQQNGEWVQGSYAAEEQASERQQEGHCGWARVGCMAAPLVRGCFTAQRTSRTACQKSSSSNRFMSPANRTGNKETTQHRTSQERTRSDTTQPQRQREGPRKKPATEAETPTREDAKTDSTAGKESRAQSTRREQHEHPGTHHAPVSINRREPAGTHEATEETPEKRNHKKQRSRETSGDHTAEASAQRRKKQDSAVKADNRT

SEQ ID NO: 965877 - protein, 170 aa, Homo sapiens
TPAAPIASPPSTSSPHPRTAPRPPPASSAAQQRAAPLSLVAASDDRGPTSQVRQKYHQDSEAAINRQINLELLRLPKFYLSYVLLLLTRDDVVLKNFCQNIVCFTNLMRRGNIAEKLSEAAEPTRWPNLPSGYQETRCDDWESGLNAMECAITFGTNCVNQSLTGTAIMP

SEQ ID NO: 965878 - protein, 540 aa, Homo sapiens
  misc_feature (196)..(196): Xaa can be any naturally occurring amino acid
YQTTLTKAIYPNKVLGDEKLKPGATRYSTARERLTHYTPRHNTSKDYTPTTFCHQCNSTQHNNYVQGAAKAKPPPHNQHAATISNSINTQHHPVILLSHTHQRGTRIHTQRTARLNTHTNQQPYGCIKHGYSTQNAISTRSQYPTLFTIYSTNTDTPLHQDSRTYCYNTLKTICLQAFTNTHENTTPYYTRTHHQXTHKHPYASRHARRTTQTKYHTTRPPTVRLKATPIKNQRPKAPTPTTIHNTHNNGTPDQQGNSKEPDTTKPLTRRYTTQTRSTHNNTQRYVHNPGKHHNPTKQPPQHKRGHTKRHYLNPPPLPTNATPTRRQPQTTPPAHHHSTTHNIASPHHAHTPATRQIEEKDNRPRQGQPQHNQQTDAPTNNSEPHSHTTHTKLNHTKTTQHLDEHHQPTGNSPKHHTGTKHTPPPATPTNNDTTPAHTTHPNNNRTTHNNSHSAHTRRQHQTQRETKVQQEHRNHHTEAPRQQKQERTNTQQTHKISTQKIARRRHTTRKIKARKKRQTNTTTAKKRHNKKQKHNDTAHT

SEQ ID NO: 965879 - protein, 587 aa, Homo sapiens
PPIVLPSDGFQSGLGSQLPGQTASTSTCSTIRHLSVWDLLETEPDHRTDPCAGHGQIGAIPDHDVNPEEYDTTVVSIDSGKPVMGPTERLCPPWASPGEPLVTQEDPGGRLGHHVKTLNLLTPFSSGGVAHPPVGAHNEDHTPHLVNTRQTPGEPDREQRLPPRGSWRTHNPRTNRDTYRSTIDTFGLQQTHTHKTKQHKLRGPPWTRPWEGKPPRERGGPRTVPGDGDPPYDSHTHNDRMPPKAGTGHSTRKPGEHVQEQHTIPRGETRAKQIPRRKKRQNNIHAKAPHMQEQREVTPPIPQRHTGEHKDTRKPIHKDNRKEERITLATHDHKQTGDGESTVDTGKARTTQRQERGTWEPPRNTQKEEHDKQQDNPNGNGNTRETPNQKITKETAGETTEQNKNSTENAETTDKRRRDTENNNEDEETENNTVEKENRTRDTSNAHHTEGEQPAYITALDRSTRRRQHGNTGRTVTRAKHHNSSEATRDRRSHTRNEWRHQHAQAHENSDSRKSTPLTQQTEQAESRPDHKDARDTPQQQRSIQRCNVTAARHTDEQTNDQKQTQSRHTQQRQHRQTTRRDRKHEQ

SEQ ID NO: 965880 - protein, 370 aa, Homo sapiens
EGDLREGASAVVAVEATVIQSPLTPFPSHSVPVPNDLLSLDNQGASDLDFQGRISSEDTVNLLLPAPCPYRISEPLNPGAEEGAVCTSAHRHRGTLAGASWLQMSPHGEHCQAAAVHWHREHQRRTGASTCQLLLTADDLREPHAMGVSSIFHETLYQKADDGRPFPHVIESTERCTWASRYDKGRGSTLAGHHMERLPPNRVGCDWLKRMGPKYNDGTRRLTSAHWPIVRLTDSGTHTPLTPSTLIAHMPMYWPPTPRYDHAHCASPPTTRHLTPHPDARPQTETGTQTWATENSQPDGTEHRHVSSTRNRTREPTVRQAETGNHGPRSETQRKPRNEQHRSPASTTHQIPPTDVNPTDGRPPTRRNSR

SEQ ID NO: 965881 - protein, 444 aa, Homo sapiens
LDDTNAARAAERSPRKGSPGQAGNTNARTLFSCHSCFPLRLLPNALRDRPCDAFPWRNISSLRTERYTTHHRPPLRYAPHGSCASPASPPLDYSSPPHCPPPALRAHPAPCPLHAPLPLRARALHATRPAPLSRRLPAPTRTSPPPPAPLPHAHLPPCPTRTPHAALSPPPPPPPTHLLPPYPLALAFARFHLFSAPSQPPLSLSWRWYNWGATAHLANQPLLALSPPCPPPATPPPPTAPTAAHAPRTHARPTTHLRLPPRAPPPAPPPPTPNALPPALPPPTPTPQPTHTHPASPWPLRRTAAPAPHPPPPPRPLCPPTPPRGPPPSSAPSPPQPPYLPWVVQATFPLDLPRCTPNPNLAASALGEALSSDPPSLGGPPPPALAPPPPSSSHPRRHASPPLPPLHAPPPSLATSVPLAPRLRRTASPPWCPPPTPRGFQPLA

SEQ ID NO: 965882 - protein, 213 aa, Homo sapiens
CPPRLLDVGVRHVHPPAASHGTSGHQSCRLGDSWSVKSLVVPVPAGTGLGLVRPWGLRLVFLCLRFAYLLALLVETPRPVHPAKTPQAACGSRHSAPISPMSPAGAGAHPKPAGLRPPLGQALAQPAEWGVVGQSPRSWAPAQAHRSRPTQRPPAQPPVGCCLMPGAGNQLHVGVVCVVFQEMIQMCVWLWDIYCNCQVYTSWTPFHFYTQLW

SEQ ID NO: 965883 - protein, 264 aa, Homo sapiens
SLSSVFSPPVSVRPVHAMLALRWAPAGLGCSPSRLRAVASRAGLREGLRDRLFAPPRGTRYDVPGRGRQREARIGRVVLELKADVVPKTVENFRSPVHGEKGFGFTNGSTFHRVIPSFIVPGRGDFTNHNGTGGKSIYGSRFPDENFTLKQWGQVSLSMANAVLNTNGPSFFICTIKTGLLWMASMLCSVDVKEGMDVVNENRTLCGSTEWEDIPRKTCHHQNCGAVELNLCGPGCWSLVGRLQCSLAHSVPLGLFTKVLKRTW

SEQ ID NO: 965884 - protein, 513 aa, Homo sapiens
TKPFTQIKYSAIESGNLAQSAYQYQHRESMQTHYNHSHQSSAKALTPHTIHASMHIQLSTINVCQGSSPTATAPPANQHAAHHKQPAHNSSHTTSYVSQQSDLGKHIHQRQQCSTTTITRSLACITLALSHHTHSAILQYTTLLTHCARQATPSKHPPFVNILHLSQSPHAGNQTRYVHHVSATHNHVDRSKSHTDMFNDPHQVSAHQTQPSTSTQFRAHSCLPSFLSTTRSLRQHPQRTIHQTDNSPRHSTTFVTPNVIQALISKANYIVTRSLNGHTHVKTTSSHPDITAMRSRQSHTHVEHVDTTEPSHDPAITLTESHKPKQKVPLHTNHLNWVKHPNNRSTAPPEAHTRYTRHSHTGTLATTSVTPRGSTTKHIYSSKESAQGIRTGTRLVHKQTHHVVTQHQRKTPTRVHGITNPGYVKSMTEHSEPNGDTVTTQNNDDTTQNKGDGQNKSNSRHKQTKNKTDETGTESETHDSNKQNGPSLTDATATASSPLEQQARKTQARTKKE

SEQ ID NO: 965885 - protein, 218 aa, Homo sapiens
MEGHCLVRVVRSGALRMYASYPNTSSFHHGCIQQHFPFSSGTAVVVGPSQPAAKGHQHTPVIGHNEPLLALMHATASFRHKTKLPNGPYEAILLDRQSAIRRCTRTMWDPGSGKCPKPFHANHYGHTFATERVVGATSCRCRTHVSAFDTLLTTVTVPAHITQATLYPVVRQYKGTSQTERLLKDMYVEDETKFKTLSRFGQERYRVQYDEEKFNITL

SEQ ID NO: 965886 - protein, 48 aa, Homo sapiens
MPVARRQDPLPGQLHPGFQGPYGLLIGGLPNGPRTASGVVHGASKGSV

SEQ ID NO: 965887 - protein, 209 aa, Homo sapiens
LNVMRLPFMRKLILKNLSLAKSYLFFWDKVERCYFFFECFWLGTTGPRTKGSLEGLGRWLAVFGYNEPCKIDGWAQIGDYCFGLILVWKNNWCLSLKKMLSLNLYTTEAPEEMNDILNHKMREFCIRLRNLVTQWSNRKEKSRTHRTSLMEEIFRVVCICLGNPPETFTWEYRDKDQNYQKIGPITPLEFYREHVKPLFNMEDKICLVN

SEQ ID NO: 965888 - protein, 217 aa, Homo sapiens
MTMTRTNNGPKRASWVSGVPGAQWRPGVRVTNRFELINIDDLEDDPVVNGQQVLAVRSQTLWPQGTKARGQRGNTESKTDGDDTETVPSEHVSCKWQTPEERKNKAEETRKAAREKHRKTGLEDIDRILERIEDSTGLKRPGPDPLISRNARLYVEHRHLNPDTELEQVFRCPGNPWGTQRPRRRQPLCTPSAHWVNTLKSRWPRYSKPGPALRSLD

SEQ ID NO: 965889 - protein, 123 aa, Homo sapiens
IPRVARALLACLLASTLLSLLVFPRGVARCRDQRGLGLSASRLPRYHPGEDAGRVCRFVTHVSDCGTLWPHISTLEAVRGGPSPTSSRSETWPPERGQRVPYYLPEPAAALREQPAGESICYT

SEQ ID NO: 965890 - protein, 76 aa, Homo sapiens
FLKGRASRKPLVLCGDLKVCSMKKDLRNPKGNKKNAGFTAYKSAKVFGELLQAVPLADIFRAPLPNDPMRYTFGLI

SEQ ID NO: 965891 - protein, 132 aa, Homo sapiens
RCDAVDVGGSGERIVVRRVLSRERRGSSWDPPPPDVGSKNAGMGPGRNSAHTQWFRGSERIEAINKSDEEESYPPYYHSSPVVVILERYRYMIGITISNCHLRVIFPKQRERVSNVDSLESNIRKGPLKEDH

SEQ ID NO: 965892 - protein, 205 aa, Homo sapiens
MLPSPEVPVAMILRIDYQHYHLTMPHVPWQYHKVPEIELSARPQHPSEKTERTSCDWSAPSSGMYTTPPIDPAPALDTSRHRLDQVAHLNEGASLARAAQYSDISDRFSAPGPDRELKCPTVTAEPIGDRRDALADQHVSKMGSPARSSPVKQDPTCETRSKHADHSEFRTPTHTDKTGHPTQTDRTQPTVCRGRTRKSNKPAHT

SEQ ID NO: 965893 - protein, 97 aa, Homo sapiens
MDTGGEISPVGTKKVLRYKKRECSHEEVAWSLKKRRGPEWVRQGSCLGKEGISKQQVAQQTEGGFLPEKRLGGENTSLSSRATFTINSCRETNHDYD

SEQ ID NO: 965894 - protein, 248 aa, Homo sapiens
PLFLFYNQKCCYIDKIGCHKYIIYRERGDMNKSKILYSAQKPSRDVLLKRWLHQGYPMRGQSPDAASREEHRTPVPLRGLSPGYWYESGLEVNEVPDALFAVNLGKIVLGFMEVLDGSLQSFCFSWDDRRKLLKPPGHWATEEHGDDLVSRIAPSAKMGSIGHVEKTEGLSGIPRMSWAKAKFSTGVRGKYCNRNSWGGGAKPEELGKRDGTGTKIGSKVWPDSWAWSHSGSPRSDMGPIWGKLCALH

SEQ ID NO: 965895 - protein, 362 aa, Homo sapiens
EECLMTDIVWKQKEWRDMMLSQYPITSQARALKRVQADFIRLAGPPHHCTPSRCLDQGYSAHPEQVRFSVSFSRSDPSREMEPRHVLMPTLVVDPRWAPDQHQSPDQGHVHIHVLVQHQATAEKSLSPGVSRDSSTSYTETKDPSSGQEVATPPVPQLQVCEPKERTSTSSSSVQARRLSQPESAEKHVTQRLQLSGGAQRSVKLKRQEQQWPHSPNSGDQNSHLAESERIHHTVRKKEEVTWPQVTTGLKMMSRSYKSMETHQDDDGEDAKMRQEKSEPNIRDTRANTRTPLDNVHKVPTFETPCDTRTSEKHEATHLRDTHNLERENKDDPQDKADTTTTRRRCNIILFILLFFLLPSMW

SEQ ID NO: 965896 - protein, 85 aa, Homo sapiens
IFAEHGHHSAKLSTDPLPELGAINKDASFDSSANQKDKASLPEIAARIIVFLHASKRIHNHILIASFFNNIRLPEYRMNAINTNT

SEQ ID NO: 965897 - protein, 105 aa, Homo sapiens
MFRLLSWSLGRGFLLGRGAVVPGLLRAPAPGGWQAGPVARGAGAAIPESRRTAGAPGLLPLLASASTWFSRPAAAEEEEQQVAEGGSLPEAGGGTKGLGRDHPSC

SEQ ID NO: 965898 - protein, 232 aa, Homo sapiens
GGVIPATEAKGDAGVPLRYTGAQWCLWVLEKRAPCAMPGPEKGGPGPGEAAPVAHAWALRRVALDLGLLSQEGEGGTQHVAAGGHRAVRVPLLGCRLPYEPHEPLLQAADELMSLVSRTSRRRPLVATKAYLPVVDVGGRGLSVPAGSTVIASTGGWCGGSSRGQTRGLTHCCGAAVPGSPFTPPRELLDTLGTAKGVRNNPSQYLRGWASESEDEDLLEQSWNLQTGTGSR

SEQ ID NO: 965899 - protein, 240 aa, Homo sapiens
SGRPCPPRPRGAPRKAPVGVPGAWEAAEREWRGTGRTLRGTGRASMAAANKGNKPRVLEYRFAAGHDAHGSHSHVHFDEKLHDSVVMVTQESDSSFLGQGLASRRSCTGYEITFSLPPCAQGLSKGLSGEGTLPQALNLQSVLQAVVPGSREGLYGVKVLRYSRAQRKGVLQRGDTWLSLRKGGTGHLLCDVTVQARVMDRQQGTPMLLDGVKCVGAELEYDSEHSDWHGLTEARGPACP

SEQ ID NO: 965900 - protein, 251 aa, Homo sapiens
  misc_feature (213)..(213): Xaa can be any naturally occurring amino acid
ASCGRCCCGAAVLRLYAAGAGAGGRAGRKDQFCVLGGPQPEMAAPKARNPSRESLRARTTVQATLDAPMHKEGSPCTRLSASTESVQGSISKHEFQAENERSLWTLSARSLLAQKRGGVIYGSCSPMASDALGKTWVTNLVSDGPSTCHEIGDSLLQTNAGEKATITIQDTGIGMTKEELVSNLGDDLPDSGSKAFLDALRNQAEASRQDHRXVEVGIYSGSWRADRVEVYSRLGTPGNLGYPVVPDGLEC

SEQ ID NO: 965901 - protein, 307 aa, Homo sapiens
VWTRVNKFGIKRLPFLQKRPKREQITPPSQCSEHTSETCRCRWSPRGCAPSNEVPVGGGRSSLTRAGAAESPGSSRDPVTRLGNPSSWLDLRPLASVARSFAPGPRDRLAGGGLVPLRVLLGDLHLRAAPCVVFERPALTGRGSPVRQISWGPSVPRRADVAALAAPWNWPPGLPGGYRRPLEGYASAPGCWGASGLLGGRQHPGLPAELGHPAHASCQWCSKGARTFSGSPASESQSVAVFPPSCRPFAPGPVLRPIFFGQRRPGVSGIKAGEPSYALEDFRAGETHARHPGVGVRAGARGPAGGR

SEQ ID NO: 965902 - protein, 443 aa, Homo sapiens
QCPHAPRWMALRTSCASPAHRLSCARDVPPMTPDSWTSPVPASGLKLCCALEAGPGRDCWPGVDNNLRGAGVQRGGVREGGASPCCGSQAARDGDQVEEAAEEASSGPCLAPRSRECAGGSYEPPRWRLPKKLLGRRFGGALRGPGRKVGQGPWRPALSAPPGYVQALGGGDGRKIPSPRGTGGQNYSKEGEEYKAKSWQWIDPPLVTTQGPRDTPFDCDYTQEVLGSIHNRLGNPVGNNKRLGHNHFLYGALVPFLKEKPMHKAAPSKRACVGGTHRPGRRGIPPKGGRVKGKNAKEGPEKGRDLQGRKRLGEKTRGMVNISEPPQRARKKFGAPKQRQRKAVKQDAQKEPPERKSWGSAPNPLFDGNETGGDLETPPDREREGGGRPAAPTKRGRCSSQPTRQEENDHKDGEGETKKPTEEDKKQDTGDSETNEADRSSTQ

SEQ ID NO: 965903 - protein, 513 aa, Homo sapiens
WVPGSASRSPLHWAIAPVPRASASNTNALQLRHRTQLQPPGNHQLPAKHLLCTHYSPPDTLLLRHPQRSTALQRTALFCAPPNLRQRTSAAPAPKLHCATTAHSLPHARTLTRSHANSQAAPNASHCTSDTPSRPREPHGHCNTQRLCGRNCENPSKFQRYDLLRLPRAHAAAHIGLGSLGYGRGTATLIPVAGRPTGRKHLAIRLRKCKMAVCVGSFPQDLRPFLNLPGRNERVSPHILGRQSEAKLQASDTSRHDQNRTSGLHNNAVHTSTLLRTLLNVLPPKSAFLVKHNDSVKTLPNPNALGNLNLVKHLDRVCRKAQCFPTVPRHAQSRLIPPIRLLTPDINLQKNNRPPKSFPAPLIPPDLAWTDFPNTYPPSMIERRPFLDRTTRTTLFHGAPPCRGPHIWPIGPPPNAPNTWRRLTPEGHSSRHTRPHTANNRRPGPPGADTTPAHRTTHTPRTPHTLYITTAPATRAADYVVLATTTTTHRPKCRRTINLATRQTTYRSPLSES

SEQ ID NO: 965904 - protein, 549 aa, Homo sapiens
ENAPSEGLKNATALRTLEGYSLSCFIHNTLFYSCLLLSRHWGASAAHTALTQATDHVNAAKPCPRSAPAPIPISLAQPGPDRPTLTLRTRSPLNHPKRHCHHNPEGPSPPAPTLRTHPPTHAPTRTRHLPKHPSLPRTRTHQHLPLYPLPTQTSTQLGLNRPPNAPRRTQSPPTPERTVSWCVNHCHTEKEDSNPIRNMDGEWGGNNGTKKKTTYKCPKEPRPENQPLTANRAFNPIKLNPTPAQNNPLSLIRPLDNNATHYSHLTTTPPLYKKRPHVLHTGRTLHPNSHSLGKPPLTYHISPLTMADTYIPKLPQTIYPLGTRAQLSAQQPLSSNPTSQQTQRPGPPTIHSGDTHEPVRPFDNPLVRQRRHKQRTTFHPHYGRGDPAAPPQQTGLSPISARQTPHGQHTHTHLSPPTHTSPTRATARALPNPPRDGPPHIGAQRARNRNPNKHYTTRTPHASRASRTHAHTTPKPTSYHHTPALAANTTRGTTTHHTHRHHPHRTGTPYPPPPRAPHRAPQHQPGAHHTHTTPQSTLQHPHPPRAPSP

SEQ ID NO: 965905 - protein, 118 aa, Homo sapiens
RGDWPDLVCSSARAPWSWTDGRLESFKKQSFVLNQGLSTDKFFGYEMAANNQTSGSVMKMTNVELCRRESSLTRERPVCAVHQHESVKRETTLLDESTSKMKDDHRGGVNDDETDRRM

SEQ ID NO: 965906 - protein, 174 aa, Homo sapiens
VHVSENWRASRLSSHAQYSGAQVRVLLRTNPTSNYGHNNLHPMNFSANFLPARSQHYEGDDGFCVFESNAIAYYVSNEELRGSTPEDSSQVVQWVRLADSDIVPQTEPGCEPSLGIMHHNKQATENAKEERDGELLGIAWMLTCRRGHFLVGRRVTMADTHRCLHPDCGSTNRF

SEQ ID NO: 965907 - protein, 408 aa, Homo sapiens
MYINQFFDSQYPIINRAGIMANMHLRYPTNQVGCPQHMDVSAAHTRHIQHIIAHLYTHTHLLTPSVAIVHIRRTDREQQNTDIATDTYTSPIGKGTIDRQTHERHIRTDPYDHSIHPLTHIDTDDLLRTHLGDHSHSHQHTNYIPSTSKPHLEHKTKSTNTATLLDALESRTIHSHTQSLPILTYSHTTGYLKLARANPLKAKRKRGTGTRYNNNKPEHNRSPQTRRKEQDRTHAIDTETQTTPNEQEIQDGTTLGRDTSQHKHPNTGHTDHNKPSPTHRAHHTLHTDNEQTKTHAQSTRGIAADQRHNKQAHNRHNTRSNTLRSKQQHRTQQSKHKGNNEYTTDAEKQQKPQPDHTDSKRTEDNRDRKTSAKRKHQRNHITSGPLQLNTTHEQEIRKQKNTNIQRSS

SEQ ID NO: 965908 - protein, 123 aa, Homo sapiens
AQVRIGGKGTARRKKQGGSSEPDTASMHHNNIFSSPFKAQLGVKPIISGHCKQVNHVSHTPKATVIHIEQTRKDSGIIWQRTHFTITGHAETKQLTEMLPSILNPRLVTDTSDLRLRRLERTL

SEQ ID NO: 965909 - protein, 224 aa, Homo sapiens
MVTLVLEEAHFLPGRGQVCAHPADSCCVLRCIILSYTPGPGSFSLPYPPVPSLVWNKEHQGVPEGTQYVLSLWNKAGPGHWRRVGVSHLHKNSAPLTHRTGKTLTRHMTKRDGHETPANCHLPLWNIAEKSTNLTCELRRSGGASETHLAIQMPTKEGSCARRNKTQQQPHTSLNREGERSKRTSAAPSTESPQAERLTETDEPPKRQGDNTRTQDTQAQAAKN

SEQ ID NO: 965910 - protein, 364 aa, Homo sapiens
MPIHIQEVQCGHLAVPPTGRPPSTCSIQGTMYAYGPTSQVPQDLQTQMHWMPTETTNMMTAPHECQGPTDNTGDLPRTTSDTNTSDIKPRTYQGHSHNIQQHIPRGTHPLDTITGPMHRATHGIPTQLAKHHHRCGQPKRTHPRPGVEPMTYKRAPPHNIQALLRTGVASQSPRGSSTHRARPNHHQPPAKQRSANSRQTGPPQWQSIDRHQGTRELTAPLHTPDEQYGQYQQWSNPQQVMDNRDTKLTATSASKHQRSVSQVTAGTQSNKPDHQSRHEQGPYEDNKTNSETGTDETATKSTSQVTPQLDTNNKQPEQKRKPDTTNNMHKTQEQKQDTNRPSYSRTAEPGSEERHEQKGEKVSK

SEQ ID NO: 965911 - protein, 489 aa, Homo sapiens
MTYGQPINGYVTMGGNAQGTAAYPQLQHRRANIAAFGTHIIARGDPSSQMSASITLPKPGSAGNWVITSMARTQAIIVLNAGRMGPKASHRIGTHSPCGNRNSSQSAQQNRGPSTFGGQAQAQQAICGTPGYAQPRSGHASRIRMTEQSQGNSTKRHKRWRKHATETTQSQKGKEKTGKRNHIPIGAHTRHTRIARDASHRAHYSENTEGHHTIQIGERNHHKAVKDTTNSHSHEHSIETCTQDTRYTTGHTYTPGQGNIDNEVNTPPNTEANCNVHYRRRGTDTSHTYTVGTHGTMAHEAGATAAPSRHRPNELQVTKMLLICGTPIDAHTQENTARNKRATDTSYTARTIHTTRGESTHETTQTSGHDHQWHNTTTTGHRLTPKPRRATRRNTPRSTAPHVSDTHRATKTGGTERYTRTRNPPSTAQERQRRHTGEMNSTKDDIEHTEEQTAHREHDDTDRLRHTRTEQHTTNRTAYRTPRQTNSNS

SEQ ID NO: 965912 - protein, 591 aa, Homo sapiens
QFGRLRLVDHLRLGSLQHQPGSTMVQTIIAHSHTHPSTHSAWHDSNAAPTISSTQHTHTQHNNTTTHTHTTSNKHRKQKVQKETRQREREGDTRARFTDRTHKTHNKNNTNNQTPQNTHTNKNEHHYNTQQTRHPQERRAGERQESKTKERGSDRNKPHTPDTRKQIRKKKKRNGERRKTRSDKNMTTTNKKTREDDRRRTHKTNTKARGQQARATTAQTRLRERVEHRQGECTQHRDNAKGAKATRLHNKSAGSSRNDQQSTHRAQDRSEEAQKQTREQEEKRNTNKTKDHRPDDEQDLQPTQGAENKQTEDNDTQHKNQARQAGGRLTRETTYRQAHDITLQGERKRQSQTARNNTAPRIKNRETREQESQHTGKANTDAQDKKHRRKQERKDNSKITNTENKEDRSINEKSGDSKGRREAEETQEEPGEIQQTETNERERTADLMQAREGRRRQGARASGEAHQGQRKRHKKKEAGKRAGKTRQHSGSESTTSRTQAQTPDTTRTARRRHRNGDPKGENKERVTGAYRDKDEIAREQAEHEERRQTKEEGHTETKQTGSSGRKKQADESNRHEPAEERRESRATERKR

SEQ ID NO: 965913 - protein, 359 aa, Homo sapiens
MSSSVISWGFQQKPESLTEGTAETIVGIQHVMDIENQRHLVFTTRKKYLQGRFPFLFRGSPGSMNPLREWHCPKPASGSTRSKQCRLHTGGAHGTAAVRAVQRQHSMQDAMLAMHSHSSVVVPRLDSHPITPMRGRRLGLIWTRVPVNRHSRVFIYTSNGPTGRIKRRMSRRVGRLAGHATWGLDVTADKKEEDKPPTIPCKALSREKMESGFHRIRANINCSILVAYTRLPLHSPEPEHWVLDNRAVYLHIQYDYSRTHSPSCQGTLQIRQTSTDTQAQRKDGHNREEHTERLPIYRITQTTNKKEITQTTRNPATNHQKRTNKSRQNREDKQEKQTRTTREREQEWHHKVKEQRKQR

SEQ ID NO: 965914 - protein, 402 aa, Homo sapiens
  misc_feature (281)..(281): Xaa can be any naturally occurring amino acid
QAEPASLTAYPWLHSLTPPGTLLLPAGGTWPAAPAWLASAAISSCEVTPDGQTHVPGNLRMGQLQGPRDRASDSPHASQAAGSSWHSTPRKTCEHQDHAGSTPAMYNVWDHRRGSSQRDRTKCRRQADARALTCIKFMRSRNSDKVAKTPGHQRTPGLTGAPPHGRHSLPRAQRTSRPHISTHRGQSLLTGNIRDPACTDGTCATVSQRSASAGCEGQTMACTVLAKRCRTSSTSRGMRDEISTAAHHIADPPYGAKMTAWTLESEVAFTSGPEMYKHTAXNQPGRSIRGQSTKSTEGTSDAAREPVKDNSGNTELLLKGTEMAAGHNGRGPTTRRPDAQQRENRCTGPSNDSPGKRHDDDGARPREHHTRNTTKHHGTTRHDTYIDAPQDDKRQRNPRGTH

SEQ ID NO: 965915 - protein, 116 aa, Homo sapiens
MKTTMRRTAARQRYKVPYRAHHKKGRNYNTKRTQKKEKKRAKATPRHTIPNRKREHSEAHSKPSESQGTTGGREEYTTKGPWTTVDEEPLKRKRTHPTFDGEHNIKTYLSEFIVTH

SEQ ID NO: 965916 - protein, 299 aa, Homo sapiens
MRTSLGLISNDSELTSVAAATPRCRRHGGNAYVTSGDQGLPVWLHQLGPALPSFSNLWISLKHACKPSSPQIMGLDVSGCWLSLLQGGSHRRVFWAFGQWMSPSMVRCVPGVGIYFGTLYSLKQHYFELDSPPNWPWMSESHAWEVGPQHQEQRDMALYHISWTTQRPSQTLANLHQNVSRTHVGNHRNDTACPRGHTNGNGTRTPKRKGHEARRTIRGVDHRSRGSRGACNVVRTTGRRNEVSRDTRSSDAEERAGEEEERTIGGVRRRGHLRDGVAPVLGMRRHSEAGRVAPEKEDE

SEQ ID NO: 965917 - protein, 220 aa, Homo sapiens
TRTGGRVVIRPERVQSGLPFSAKRAGELDVPRAHEDGKRFGAVLEALEKGQPVDLSAMPPDLEDLKPQQASSGSHSTSVIPPAVERVQQLMALTSQTTPVAIQSHRQCWMPAERLNKYRRRDIQAGVVGTSARSGCMSALPSEYQRCYSSTASKDGKSHLADIAWFPPGLPPILAWIPLWVWTEDAVGEDIWRWQKKMASAEDSDRLLTTRTRVAPSKAT

SEQ ID NO: 965918 - protein, 113 aa, Homo sapiens
PLEPLASRRPFPPAAFSRTRALRGDHEEKESYRCPYPELISTLADASTGDDVLPAGTEHNIQYKNSPEKRQEDPYYLSTGIADDHDKKNIVKASTQKVACTWYCNGSIRNMEK

SEQ ID NO: 965919 - protein, 333 aa, Homo sapiens
SPPLRQQSSVCGMWIFYPRGGLLAHNGVCFPMCRVRFFFATLDTCWPPQRILWGFVPQNPVPPISMFSHLLCLSLPLETLEVAVVSHTVTLGHQTTEDGAWEAAEESHRGVRNEKVRKTGRKEQNKQQRKPPKLLGGRITKHRNTTGAQRTKKRQKETKETKRETKENKNKEEETEYSAEQKKIEQRKESGKTNTSKTKNIPHNEKRKKERNTTHRRSPKDKRKREKPKARKNSTKRGQRSGSTTSPKPPTESKGSTNTNKRDKQEKENTQRPGCHTIRRKDDNYTNNQPRTTGRRRQRHKHREARTPPRARPIQKQNREKEKETRPLDKTTG

SEQ ID NO: 965920 - protein, 233 aa, Homo sapiens
  misc_feature (161)..(161): Xaa can be any naturally occurring amino acid
  misc_feature (170)..(170): Xaa can be any naturally occurring amino acid
  misc_feature (188)..(188): Xaa can be any naturally occurring amino acid
  misc_feature (196)..(196): Xaa can be any naturally occurring amino acid
  misc_feature (201)..(201): Xaa can be any naturally occurring amino acid
ASASDSRLGEVYLGHVVLSTLSSNGMSRTSLRAKPLQAGTSSGHRHNESAQSVHGAGRWMREPEGRTEPLHYTLDASGKIVIHHFPARYRISYDAKTAGETDEQSAYHLVLGTRVVPYVTIESWSPPVCVSPTFMYPSETEHRRGSWNPNIWLGSGNIGYXRSQSNEGSXDFENPEAKAPARNPEVCXGRSELRTXEFLAXCRPPRKKNLRNSLTRVVELRRMKILFSPFVDW

SEQ ID NO: 965921 - protein, 431 aa, Homo sapiens
LEENNSDKNSGPQGSPKNSHNATGGGSREEAPWSPAGTHNEDNHKGSWLKEIFAEAYTEVEPQADDANEVACQLFYPKTECKKSILVHILDDSEAPWSLKKKGGNRNTKTRSQTQSTLMGNHMTRALNTSGFHAANCTTGLKGKALRYTGSKNQRVPSAIQRTPRIERKPRRTYIQEESLQSQDLGGRSKQRYTGGHTGSKVARTHQEEQPRETLPDTWHQKIPALQRQTNPRESTEDKTITMKSVGKETQAKPVASAYNLTRKHPNHFEQERLKEETSNGRAHRTPPTSGRPQGCDHENPRTNQTEHRRAHTTQAPFLNLTGKQTLNRRRPTRRQKPEPSKREPYAGESRDSTKAHTNKKTEHTRTPLHNTQPTLSGTRALEATSENHCHQPAADRGEGDSTETTPTENDGNRAHRKNQRRHPDSERTTY

SEQ ID NO: 965922 - protein, 76 aa, Homo sapiens
HIVRTQYQGALTGVLIWTLVMTSGDLAMLIFNIRISHNCGLNTYGHTNQSITNAIDSRMDGADVTLTKATTTTTDH

SEQ ID NO: 965923 - protein, 103 aa, Homo sapiens
MRPHQSWVQGHSRVRIPKHLQQLRQWHHPNIVWKPRINVPEVAVTRECQASTHKARQRRHRPQPRCTPSNKKSGSLTAGERNSPGPQGGANESRRDEEKSDKT

SEQ ID NO: 965924 - protein, 209 aa, Homo sapiens
YGCDLGPDGRLLRGHDQLAYDGKDYIALNEDLRSWTAADTAVQITQRKWEAAVRQEQLRAYLEGTVRAVAPARYLENGKETLQRAETPKDTVTHHPVSDHEGTLRCWPPWVSYPAEYHTDPGRGEWRWTQTQDTELVETSASREDGTLPEVAQLWCVPSGRRSRRYTVAMCSTRGAAGAPHPEMCEPFFPAQTIPIVGLVAGLVVLGCP

SEQ ID NO: 965925 - protein, 181 aa, Homo sapiens
CRGLSHARPPGHHERRRRSSSGGGEGCAQVRVRQAGWGRPSLCQRGAVPASSGIKGPGGLTLGKLAATRTGGRQGRDERLRWNKPAEGWGTGSGPNGTLEDSDGGSVLDSSGTPGTRTFRASRGPLGKPPGGATIFPFQEGTRVIQKNAFQGEGTGHFVDPETPFAKRERNAHWFEKRANG

SEQ ID NO: 965926 - protein, 245 aa, Homo sapiens
INKQTGQHAVIDSSMPSQVYEGVAEFFTDLLNHIATVLQGQSTASGTPQGTMARAEATASFWPSRRDDRGGAADMQRQPRLLREDDGPGRARGRLRADRGGASGQSLRTRDSGLQSRGWSPKLPGSQLCGLRWAPKGLPSTDTPKGAGDPMRGQRRGDRSNNPGGPKGGSHKGRLAYKHKKVRKVDRGSVPGEQILQGGNCGEGHGMKHEGEEGARMRSTRNPGVAHPDEKKGGPAGRALNGWRP

SEQ ID NO: 965927 - protein, 397 aa, Homo sapiens
MALGLTVASDMVQPTFAIILQPLSDPVSEVTLKTVHERQHGHRRIHGRIQLYQSAILLPRKPKPKGNRTVPNQSELLMLPWLEDIINLEEVNDETEVCRENALNGIISSDSQYKDLTRIPLTRLASGNLLHARRYALNHVISQISMKSPQPDLGAIWPASPECTAAAIKAISTTWTESEPRSGRDANSGTHSPSNQSSPANMLVHLDKQSTINGQRLFTARFAPSSLHKLVEFPRLPLRGTPYRLFAEADYAIQGGFNIVGRNLDSVTSASVHTNKALGMHRPMRPEHTLPDSPGIMAANPHAVVDHSGTILFDSQLFRKYFVTPTCIKSTVSCIVDTHQQGTTDSVKYLPKHNEYGEDDFIKQLRGATRPSRSSTNSNHRLPVPQQHNYNDRNYMK

SEQ ID NO: 965928 - protein, 123 aa, Homo sapiens
QRGGRGPWLALGWGNRGGFRGGFGSGILVAGVAAVDGSGPRRCSSRREAGIGVDARQQFGRLYEDMKYQVPGGDLSLLPAIKESEIIDFFLGASLKEMQVEKIIASCRRKNCAGKRTRYNGNC

SEQ ID NO: 965929 - protein, 293 aa, Homo sapiens
PFLPHLAWPRASVSRPYSRLSLMWGTWRRYRPGDSKPSGARARLGYGPGRRRLVVSAPVPLSEQRTGEAGAGELGSVQSSGRGPCPCAPAGRRHGLRECGRVPAAGGPPGPVCLQYFAEPMMLDCRPEHLCARASPVLGAPVETNVSCPQMPGRTFPQKATCGPTGYLAERDPTGKSKLRQTEQACRGPGGEMGLFGKKETGEPLKAVTAEEDQDAPFGVCVRTGPGEHRATVVLAVRRRPVEGFNGHFRAARAIYQEWRFQRNFGPVGHCEGTLSLPMEGTMCGSTSFPKAI

SEQ ID NO: 965930 - protein, 127 aa, Homo sapiens
GGLPGDQACGCTACCADSEVFCHRNAAPRRRPEPAAASLSYPELPSSGAAAPGDGLKLLQARALPVYSPSPSPAERCWGDFQRPGSPYNCSCSSFTSGQLFSPKGNSPGAHTFSNEGISLMTDLVEE

SEQ ID NO: 965931 - protein, 69 aa, Homo sapiens
ARRGQSALARIFGGVEDGPEAEAAGHTYDRSIVVDGDEASLMVYDIWEQDGGRCVARPTAWACGDAYVD

SEQ ID NO: 965932 - protein, 193 aa, Homo sapiens
LIAELAAACAPCGSNCTRPRDSQRLRGGTTETVDGGRFIVDGQAMPVSEGLVDRYVPPAKMPAVLRAGSASLPGFFGPGAGLVEAPSPGACGQGNGTEGPVALTMERPFRLLCVAGPGTNDGAARVGNLWEPNGRTAPPRGGRHYSLGNLFSNTGGQQNLGKQARKSPPGGQGNSGKANGFSIGLTPNGNPGG

SEQ ID NO: 965933 - protein, 229 aa, Homo sapiens
SFTNRNYDLEYDSVQPYFYCDEEENFVPSSKRAKSELQPPAPSEDIWKKFELLPTPRPMSPSPPAPGFCFARPTSRVTPFSLRGRQLTAVDGRFSDGRTSLELEVTELLGGDLVNQSFICDPVDETFILKSSSLQDCMWRRFSCRRQVRLREAGVLAGLAREDSGSPNPDQDQRSLIELQICYCRDLSAAGSQVRRPSGYFPYPLKTGGRQFLGSKNSGPSSGRIFEPL

SEQ ID NO: 965934 - protein, 271 aa, Homo sapiens
QNTSTAPHAGWASDPRPPGVAQAKASPWERSTVVDPAQRSRLEHTRQRTDSRHEESMILQALQLDCVLPVVPTEETGQTWRGRLCGRPPGHTEDRELPPGLALYCCRCSLGGPTEPPAPESLAVQVLRGVAAVRAKRVPGTETTWLTCRTGTLRKCLEQWVRMKQLRESDGAKVTQLSLCGRKQDVRLCTPQGLEPVAGCSGPGQGQQSQAGPCRMLPEWPLWRVWENRVSGQWRSFSRLADDVTRLMWLWGVAVPNGNLVGPGGPLLRRP

SEQ ID NO: 965935 - protein, 571 aa, Homo sapiens
NYTLVHPLNTLPSHQPELIFRYFALHMSLRIRSLAQPYAHARSLCHPPSPPSLATSPPLTSATLTTSPIITIITYYLATPPHPTHPPYPYSLRHPPYTPHTITHSPPAPTHYPPANTTIHPTHHTPPSTNSTATRTHTPNPQHTLTPPSLNPPTPLSPTTPLTPTPPPPLYIPLSTHTHTFPINLPQTTYTPKTITYLSPHKPLAQYNPNTTHTYQNNLPPPLNTTHHYNTTHNHNTNHTTTNTTNTTPLSPPHHTYAHTHTSHFLPLTAPPYAPAPILCSFRSLTSPNFNQYICRYLSGSSLHPYHPAPSQQPVADTQHAIEVSSILIHPLSDKTPHHAPACSRSTTHRTLAAPRSHAARHLYRSSHLHSNPLQLAATSHSLPTPRPPSSIADDSPVHSSQLKTHHRDQPRRPSATQNNHGRLLTTPSTHAHHTTLMIPATSHTHSPDHPPHIPTTLTPTTIKHNNTTTQHPHHHTTTTTPTLPPPPPPSTHPHTHPPPPRQTHTQHHPTPSPPPAHHYPNHNPTHPTPLTQPPTPVPHPNNHLPPTPTHLLHPDPGRTNHIKPRNDQPT

SEQ ID NO: 965936 - protein, 399 aa, Homo sapiens
AVAGASHHCLLPGCRVVYIAPPELPVPGELLMWTRFFNGLLVKILECGSEDTDMVSVDALTDSAVMQMMLFYELKLAKTLCCVTRRNLLSIGPRPHVRACPAYRILRRTLDYWLHTKNRGRALNTGPSLTPRTTHATSTIYSASRPQLSGHTVPGLPRALSANQPLHTDLLIAGSKPHAARTRLETSYLPHELAPSTQTGEPCHHTHLPTAARLHLPHRLPRKLLLILPGNLPWTTYERPLGGNTHRTSGATWRHTSCEHRVQPLAPNATPPTTLPATSNALLTPATQKATQAVKPPGYRDTRPPARSPLTVPAPSHSAPGGQASPTSSRQGGIQSRRITVRDNRTECKQLLPPRAKRATPLHNTAPPTPAPGAQPRTRHTHNAALGSPRSPIHSHKDY

SEQ ID NO: 965937 - protein, 234 aa, Homo sapiens
YPYILLRDPVGSRLPQPAWGLHAALSRGPRDGTESIMGSYCPAAPSSVLLLLLLLARAEQPCVGRAHLRDCRTTAKHVSSTRQVEHGREVLPGITRSSLEATTTVDCICRGPPGEQHLQRNEASSSDSFTYRADKSQGVYQLSLQLMQFSTFSHKTVYFDFQRGADEPPILPDHGRTGSQSLTQYGRHACVTIHDGSDTVIDSQTALSGCGTAHEPGPERQHLNTQSSLTGSAW

SEQ ID NO: 965938 - protein, 200 aa, Homo sapiens
DGRGGEEGGSVRSGGWCPDSDPRGRFEPPSWSPMAPAASPRPVAAPSLHPWPLPLHAAALMLSPWCSASWPSCVRRGHVRSSLCVLCGQRVTHPLHSTRPTGSPRLACATALWCAGSCHGTGLGWVACPPCPQTEQLWLASFAQLQRNPAGSYSPMVALALIQPVSELLLLRAAIFRQPPIHPPTAHRRAFSVGPTYRST

SEQ ID NO: 965939 - protein, 219 aa, Homo sapiens
PKRDFFLIQVTANRKQKGDPRVGTTMGYPSQKKRGEGWALNPLRVIWAPLWHTRGCGHSLGAGPHLSRGEGGRLGAPSSCRCPSPFFPKKESSGEEGTRGTKTGGQVRNDLLGAWLAQASEGVSKKGTWNKKHPHVWFQRIAWGQPRRKRWNQQPWGGQVATRRGVGNRHRVDLCVNWCAPSEGGEMCVMWRKQVGFGRAQPEPTSGLGQQGWGLHWNQ

SEQ ID NO: 965940 - protein, 176 aa, Homo sapiens
MPSLLTVSLNLEKRCCKDDVNYAARMYTHVKILMPAMRYLQKAFCALVALKTIHLAGPDDALQVFVHENPPAGIAHKGKSPLQDQATKRVLTWYEAARESTSILLPNLTDSCMDQPGAGYNVITDRAPAIQEELDLIQAVGCLGELWGKRSCLCSAMVPDRISLIKAVYCQSRNGI

SEQ ID NO: 965941 - protein, 72 aa, Homo sapiens
QCKSNTFPQGRHYEKQVFSALEAEDVLSIEKTAWQREWPSFTQSDRFCIGLGSVWHQQAGARHQEQEWRNEW

SEQ ID NO: 965942 - protein, 122 aa, Homo sapiens
MVEAWVTPGQGWFLLPPVTLPLPWVGMSWRQSSLWLRCGWEGATGSSAFSSKVVSPSKRAVGGRPGSLWVTSHSRGTLLVPCRIFRLGNWQCPLDGETRVCVSLKVECGEEVFPNTGPEMCV

SEQ ID NO: 965943 - protein, 216 aa, Homo sapiens
QRRSRAPTTTHPPAPSIASYSGSQVRATDRRPSAMRHPPQPCPPGPVSSSSYRRMFGGRGTAEPAELQIRSYVTTSTRTYSLGSALRPKHPCRSLVAPRTPGRPLYATQLLLPCCSAGATRARGGRHPAKALGGPPSLGRPAIEQRQFPEKHPRHPNRQNSASTLARAPVDMKPANRANLTFGAHGLPPSRRPQPRHYRLPGGPSSIRRSLTGPTA

SEQ ID NO: 965944 - protein, 420 aa, Homo sapiens
MDQHNTSDWSKPPNSALTQAHPEPSHCRPNVHAIRTWHSLTQRDEEQLTRRISNIKKAKDPNQQHHSQKLTTLDSHPTRPLHKERKQKSTQPLIQNTHHPPPRHTPKPQHPAATHTPSPPTPHYDQPPTTSTTHPHPQAPHHNTRHPTPTQRTNQNNNPENDHKSEHTTTKQLQTSDTVPNLTTNQPEGAHKHVPSHTPPDHTRHEQPKPDYPNPHAENNRTTTDTIATHAHITATRPASSHNNTPGTNRLTNPRTRNAKDNKQTRPPQHSQHDNNAPNTANQPTPEPHTTNSTQTTRHHSKHNTENTQGLDARTSDHVTLTIKNDDAKATRSIAKGTHGSIRKKLTQQRPATKRELRTPRSNRNTQPRGRDRHQTASRNAKTSTTTAAADDSLRAASPARQTRNPQQQARPHPKRGPTH

SEQ ID NO: 965945 - protein, 321 aa, Homo sapiens
MVAILWRSWSACKPGDVNGAGAWKARLDVERMLEHQNERDVYKTPCSTRCVSGICSDCHWQARFHVTTMELLLPTFGHPFKVPPTSTPHEEAWCLAKEQRVETVLTFKEVPCKTIVDNSKRDQEDQAISKTSLKDVQLCLYNFRDSSLAGIYTWDPICSFAALQAWSGPGLIMAVTCVRVQGGCATELEQPLQKLHTSVATLSDYRNHRATNARKGTQRHKPGEDTKTKPRTRAQPRLRKDGRAQPGQVQHSAHIITDPTRERKSKAQDTQAAAHTAPKRGPPTRPTTPVPTQGGHPTTNRSHDTTKHIQQQGAHTHPQPP

SEQ ID NO: 965946 - protein, 684 aa, Homo sapiens
  misc_feature (524)..(524): Xaa can be any naturally occurring amino acid
RGGRRSSHHCSGSRHHSRSLVIRSCQTHLRPPQAPTNAARTRETAGPRADGVQASMTRTCSHPAHQGHEKDHGTKYYHSVDTSFHSGQGTQHPGTDRNTRGYQRIPKISNEEEDTQTVNRKESETHTAGHGQEQHTTGTPDRVTQHMKTHGEQQTATSGDRQMDLGEQEQSENDNTDTDTRESNRRPHEQKGTTTKKVAQRTHSEQHRLHRAKREPAHEHHHDLDHDRAKETTKHNKRCGHIMSGTNLLTTTRERRHTTEKRGKHHPTKWRTQEQTQRHTYTTHHASDTRAHTKREERNNDGEDNKTYTASMTHTTGDENIDQETKEHGKESEYTRDRTTLVEINATTGKETHEEHSSSTIDTNINSRTSKETTQMQTQNHKKKNNSHIRQETANRTSELVTEADEGSEEKQQTTEQKKKRRTPERGITDERQQYEIDEAQQTTRTAKDKQHTSIESKEVADSRTPAISETSRTIKNTSHHDAEQDAGMHEPRDELTETQTSDTQRPEAESTREALIMDSRHTXQRQQHDAEATHRTLIDEANLQRTGESAPEDERNGRTTDQQRISHMTHMATADSPLTQRSGATDEERDATRAEQSARRRAAHERGKAQDRSGETNDTRATKQQRETDRLRNRARETGHAPPAAKRDSERESTRRLRAEHTRRAKATLSKHRDRQTQQNQRK

SEQ ID NO: 965947 - protein, 363 aa, Homo sapiens
MHIFHATAVQNTRHTHLTHGLESLNEQKLHDYQILMHVASQEQHLNQVQENRPDRGPVHTTRLVTAQTYNSRLHSIVALSHLGNFYPNNDGSTSAYRLNSPLHQPLTIFLKRTLTTLYLGTSTLIDIPRGQKPPNGTSPVKCPSSQGGPRTAFFYPIHRLYIYPASTTIIHTRPPTNNDLQIQHTPWGTNHTTNKEEHPHNHPIHSAARRTTTEPHNTRAANNTTARYGALRTHTNTNPWYTYAHTPRHKPYRAAQDKPILYQPTADITTYMPDQLHGTIPPSSEHTPTLTTNKADLLTTTPQETRLTNTSPPRRAAPPATTEYYDSQASNSSATAVSHQHAGQRPTMHTQPRGALTQTAPDD

SEQ ID NO: 965948 - protein, 118 aa, Homo sapiens
MKHSCCGAKRVLPGLASCRVRIWAPETRRGEPWEPAQQGAHPEPGAELPRDQCTGEAILQAPFAHTFPYSKLADLAANLSLRAPLGNCVVRHRHARLGASRWPVKQPATFQHSGCFDR

SEQ ID NO: 965949 - protein, 165 aa, Homo sapiens
  misc_feature (94)..(94): Xaa can be any naturally occurring amino acid
APGGSDAARGGPPAAGLPGCPGLAQDAEGAVEPGGTKEKHEDGVKVETCWSTRCPYFAPAYRAPSRRSAFFYEGRPVRLSVAAEEVASINGRMXDHEYTTKEVYRKNFFNDWRKEMAVEEEGSHQEPGQVWFTEIHRYFVDKAWSRKVLSREEKQKLKEEAEKIQ

SEQ ID NO: 965950 - protein, 231 aa, Homo sapiens
ERRGPDARAWREPDLECEQIRLQCIRKEGFFTCASGTQDRARDTQTDETCRTDTTVRDGPRRTDGIPIQQLAGEILLLLRLRSSEHSVELKEGVGHWSISWDGTVSGLATSEICTPSGGSGSACAAGVRAQYLTGLIIHGPEVQLAHDDKGGEDGIGWPARVQYSMTQVVISVRALTAEGTQQHHIDLAVAVWPTVGQALPDSDHNVTPLWEPWNCGSSACADAERTPAIS

SEQ ID NO: 965951 - protein, 186 aa, Homo sapiens
MRAAALFIFFGLISAHLSTYIHTVTHKTTVYGYLQKQKKNKKTKTKHNTQNKQTTKTKNTHQTHKPTKTTAQGPGTTNTHPRGADNTDTDTHHHEESNQAAATTQKRTQNKQRTEKQRRHAHKPRAHDHSGGRHTPQPDRGISTAKNKTKTETQSRAQEEKTRETDNKNKHKQHRTTTTKHKLQTN

SEQ ID NO: 965952 - protein, 57 aa, Homo sapiens
MAGYSSDSKHETGGASKQGRWNLVKGNYPSQVRVAMNLAASGYMVNCVQNEGTTGRD

SEQ ID NO: 965953 - protein, 296 aa, Homo sapiens
MAGGRCLSVAQPVVWTWGLPRMGPEGECSGASAEGARDAEALLRLSEGEAVWSAGGLTPGPDDLNWGAFDPEVHLDKLRRECPLAQSDGQCDWTWCGRNPGSRQRMQTLVYENYNKFISATDTIRQMKHDFRTPGGWDVTGLANKCSDHRLRLALHQRHAAGPHERITKLAGVHCAAAEAASPLGAALEPHKCVHLCAYGQAVRIPGSRAQGTWCKYDQTAAIVPEPIQGGVPGSYKRPRGQKLGEQLKDGRTQAPGRRKVRESSRRPWGAWSSCQTTGTQGRWEELELGGAHPDQ

SEQ ID NO: 965954 - protein, 168 aa, Homo sapiens
CLMMKTRTHPNIETLPVSSAGGIMARVERMETVLRRRRRNWYQGGVPRVHRRKGAECQRKLEWSCEVAEWRQRHELEAPACRVHWLAASRSERELGTQRACQENAQARMTDACPWNVDTLSKRTGSSGPEEANGVKSSRKPDEGTGSEESSAGSGGEQKQKTFVEELP

SEQ ID NO: 965955 - protein, 117 aa, Homo sapiens
MQQHLWAWSSSHVVWPGGAEVSESAPGEPIASTQFPEGEVWGSGCLLSRGVSPRQTSPGQVLCDAGRTSQTGGVQSGRVWTTSRRPRPSGRVWRPARPGGKQMDTKKRAHSLTTRQT

SEQ ID NO: 965956 - protein, 360 aa, Homo sapiens
SLYEQQDAGLCTAGWVLCSTVFKHIKASLFTAASPKMQHFSTARTQQGHTHCIHSCSGTTLGENQSIKTSHITHHHPHTSPGMHQIRLCTNTSSIIHFVQHMRIIATSSAEWASCISLAPASCHHAHCHNIMVVAQSLDRSTNISCMHSHHLVTVASPSVAAARLYLQSELRANGAQHAIFMAKSPTDEGKASPHGIAEQINRNRLGTHAHLAIGITRPRIATYTTLGLHKGGMRQALMAHRHTLTANFRAHTTAERFTGRWPPLNKGGRLGRELWTWLLVPSYHHTNRMTPADSVLHPPWGLHWQILRQHAKRVHYFVTWAHGTRINSIGGKGKGSNIGERQQNWVWDTTYNTSWAPWE

SEQ ID NO: 965957 - protein, 389 aa, Homo sapiens
WEHENIHPAVRDSVNWELSHLTSLSLMANSYEHSIHARVYPQHNSSGSQHCSKSKSSEGPCMHSPSTHHCDVDSVSAQTAPSVSIELQPSITGWPSMYHRLSEESRLVMHTTFRQTNTGCWPDLHYQQGRQSCISCCNSMLPATLLQSTASSSSQHIMLQFQHAPVQHISQCRQQLPTHSSGALRYTWLSNLQQALPALSRRELIDQNYGPRLTKWDGRCSLLTASPRSHTRRSHVTDKLPSGYTPAVSRWCIIIYLPIHLHLATSYQLTNDETTALRSDDCDNNKRNQTKDNNKHTRDEADSMEQSNRAPDWRRPNGDYRPPWLGPDKPSESAQNTTRRAGVHQARSNTACKTTRGGKDREEERPTPRPTLTQGEEDHKEDNTRDTGT

SEQ ID NO: 965958 - protein, 113 aa, Homo sapiens
MQSSPYKEAAVRESRFLQRSGGASSHRIECGVCDNGGCGRKSIVAAAERKSYATVATVSRRGVSGENQCKSYEIEMPINSGECTSTNNRSEDMGLFTDRHCDLYTDSSPEYGT

SEQ ID NO: 965959 - protein, 82 aa, Homo sapiens
MNTPKRQGERTTTQRKSEEDNETRRTRGNQKTRSQKPRDTTQRNTKQKTTPDDETERQKNEPEVTTQEEPASQTNNKSRPSS

SEQ ID NO: 965960 - protein, 367 aa, Homo sapiens
MSFLGKLGGTLARKRMGARGEVTCRKKARYAITFTDVPRPVADVHPEDTQLEENEERTMIAPTFHRKPQVQGTGQGPPRLELMTCWWQAEDHCEAAGGKTCMHGQGACSKLLEKLAVVQAECGLEVTQIRNRAGNTKLQTVLEAVHDLLRPEAGRSGGAVDSNSREDTCCTSSTCMDISGHAPTGPPTDYPEHVTVHRWRASARHRARPAAIPATHLAKSGTNTYSKTDGLGRNRPNAYSRTAYLRQAPKKHNQETNCNLDVQKGRHRKTSNACCNGDTGQQHADGHHTAHPHPTSPPSDTTSQHDRGGQTQRPPAPVKQRQKLGNSHDETQTTQPATAPRTRRGPTRAATHRAQTARDTKKDDATT

SEQ ID NO: 965961 - protein, 176 aa, Homo sapiens
  misc_feature (176)..(176): Xaa can be any naturally occurring amino acid
MGKSRVGGVKRDKHVAYQYRHVHMTNRRIEMILWTQYYRDIQRVIRTHRNRDKISAAQDSLSTVARNSMPHTCAPRHTPPRHASNTDNAHAPPTTQCATQTAEEKARQNRTPKRQQRYKEQETNNKQKQRPKASGQATRQAQQYEKAQQREKEKHTQQEADNKTTPPTVYQLPTQX

SEQ ID NO: 965962 - protein, 72 aa, Homo sapiens
KVSIEGSPSKVGRGTPREESRCRSLLPRRRWEEPRVPHALAKGGCACGGSRGACAQEVTVPRRSKPGHPLAF

SEQ ID NO: 965963 - protein, 107 aa, Homo sapiens
MLLAKSMKRESTWKFITSLLPTMKSTTCIWYQAGRQMRREEEEEEEKALELPRGDKHHTTSKQQYNNTFSQESIQTFDSYTHITSKYKRSLSGSYWSKLISISFYLR

SEQ ID NO: 965964 - protein, 221 aa, Homo sapiens
MQSVSHSRDLWRLSRFLDSLILKHTYYKLSLSGSIYSREKIIQKKKNKRHKQHPNKKTKQHQQQPNKGAGRGRAHEKNHHPRGGRPQRLAHPPATFVTPRGGPIRGKRVETKTHERGPSGAQDNNTAPLARREDNRQHVRTLLWREPPPTPAAGGATTHAGHTTPSTEKIYAQTGDKQTPTRAHSAAATPTRRNKSSHAEQHGNQKSTQTTIQTAHQKQHR

SEQ ID NO: 965965 - protein, 195 aa, Homo sapiens
TTWFPIWMMKKEKEKKMMHACMQAGMAACKHAGKPESSSLGQAGPAAQHACRHARMSHHPQHSQHSTARRHALSTANNTGKQFTHVKTHNTQQCRLLNLYQHSPTFPGPPDNRHTRGSPLRVHHERPGPGHATRLCDRLRTTHRAASMNQRDARPPQHKATDPPRSQCSHPLRQTPGRAGHHHGTPTQLSPKGHR

SEQ ID NO: 965966 - protein, 331 aa, Homo sapiens
LGKLRLECADLLETREEWCSVHPTLFSFLWVVSISHVFLPKEAKSTEQLAIWPKQPIYLLPYPVHIPSPVPLSPTQGPVSPTTDALRFTTIGHMQNQAGWFQIRNSTTCQSCQAVVIIAAPTIEHNRQACAKIALTIMLPGLSAFIGSTHPPLAGNCHSAGTEQELEYCTCSPWTSSTDTSEACSIRHIHPTRPYRGHQCTPHCKPNYTRDSHDPITLNETPDTALDSLHTRRYSQKPTTRTSQIWHEQEALTFETPLALASAGKGLTAKTSKRDRTMDYPRSPIKHKNYHQLLHTSSKQHNAFYHCHEIQTKTYYHTTKKTQYTNNKVFT

SEQ ID NO: 965967 - protein, 340 aa, Homo sapiens
MADDAVCSGGGPWGPVWPWCWGTAVCFRGGFGTWQSGGRGRGRGPGPGPSAAELAGVQGRRITELECPVTQSWAALGSRDFDGSSSRGGRSSRLLPCPFKGTQEESLCFPSVGAIFSGHEVFEDLCQCRSRPVPASRTRFKGIGGYRGTTIGHVGLGCYGAPRRVATAIREGQSSLAKLLPSSPCARGYWREQDRQAPTVPLQTVTGRCGRCAGTPSIPCSQGALASSPTPVPKKAAHDRLVIQMTATPSARGLHLPPLGNFGKAPLNANSKTYSYRVSRGTLGTEHWYFTKVSQYRELHWTTLWVKNTTPRKICWRGEPRAPQWGLTTTGVIFSNNTVP

SEQ ID NO: 965968 - protein, 188 aa, Homo sapiens
MPVMPTPLRKHGDPYTPWLPCTRQAGGQAQADGSGSCHSFPTLLRFEHCVCLLLWCSVACARETCDPFLTSKQAEVALRRPTGYCRLDSCRLSRRRFTMLCQNLRVTLVDCSRYTFAQGGSLKETYRRELWPERLNTHRRRHLRTLGNQHLSEAPEAPIGQQAPSGTPGIGVLAFKPDYCFIPPSEPH

SEQ ID NO: 965969 - protein, 94 aa, Homo sapiens
CAETPGSGGRRLGGREKPLWPALRKACEGGWCPLPSSVSDAQCRRQPEAVKDVSRGQLMDAVREDYAKRDDMRNIFNDTITKKNQIEFWSGLET

SEQ ID NO: 965970 - protein, 97 aa, Homo sapiens
RFVVRPLLQVVQAWDLDARRLGPGAEAGTPVKVVFTFRIGVGTRKRAPGKQPRTGPPILKGPKCPGSNEEKTTRSRKSDIPALPKQLGKSSGAFRSR

SEQ ID NO: 965971 - protein, 232 aa, Homo sapiens
MRPRPPSQVRQKVPPGLRGRHQGRQINLGASTPPTFTCPCLTYFDREMNVPLKDLAKLVSSPNLMRRGNHAEQSDERCRNQGGLPAIFLPGLIQTKPSNCDDPGRSGLEMPHGRVPYILATPHCDFSHYCNLHNAGPLDKKMTPIVCDFIVETTFSLTLSSVEMAINRHLAVTMVDPICRQRWEPPKSGLGGKYPLLTQHTLGEPVINDTLKARANFPNKRGGDLPGSPKAA

SEQ ID NO: 965972 - protein, 289 aa, Homo sapiens
SLPSAAQLFTPEIMAAEDVVADMAPTQAIWRAAGCCSEIFTSPLNLLLLASDIFAASTSIVRGEPDRRHSGDRRRPTSRPHLTPPQASATSTPARAAGRFDRRPRTRAYSWPIKRQGWSMCPKRAGTNSYEAHERPSNGGSSGPRSHHAIPGLPLPHIVGPWNSREATLERRLADTDMTPSPGTLQLACPHAETQTLLRLALGKLLRAHTCHTAATRSHRVWRATTPWPCQRTRGHNGMHPRMYAYPHTYLTRERKPPSRDLETQWAHRANTTSWLNTGHIPPSPRLYS

SEQ ID NO: 965973 - protein, 227 aa, Homo sapiens
PAWQSLTHRRDAQGTRHGRPGSPTTSLRSSKLLWMIIRKLFIVGADNVGSKQMQQIRMSLSREGVWCCMGKNTMMRKAIRGPPGKQAQLCEKLLPHIRGTCGLAVHQGRTSLQHQGTCRWPIRCQLLPVPGAIGPCEVTVPAQNTGLGPEKTSFFQALGIEHVKSPGATIENSYVMCKLLSDWQTQWEPAKAKHAEHAQTSSPFSFGAGSSSHVIDNGQTSNNPESA

SEQ ID NO: 965974 - protein, 341 aa, Homo sapiens
MPPYDEQTQCLHRMLPSEALQQVRGGLERSLKDMEESIRKPGSRRFLYGLWTLTGKFCLPVQPVLRSSAATNTSSRLCPFRAMSRRKRQTRWALPHSLGTWGLMDWPRPGQVQCHERMSKGTGLLAVAPTCSNTVLPPCAGKRDHWLTSEQREPSTLASYLMGADDGSASLPGSQPALESNQPEDDQWRSSSLEWAPKSCPERQIERPRIGQIPQTKDEAESPFGKSAPQCAILINPRYTKFTINNETETYEAEKYTPPLGAHDYRRSTEIQHHGNCQETSYTYREDTHTRASYKRPQEHAVSRACSTTSMLQHIMKQRVVYIRSCRVATTNLTLVAHASV

SEQ ID NO: 965975 - protein, 154 aa, Homo sapiens
MIEGGYGCNSGVANLQTDTGNMADTLQEGECRVSSGDITHFRVVDAAMVEHLRDDQPKGERGRCRACSAAWLRGLPLGLQSVISGTSLRISRGPRGDSGVIPKAVEKGRSSSGPRPSCPGAWHSDFHMGQGEPARAAAWHPYGQQMSRISGGPW

SEQ ID NO: 965976 - protein, 125 aa, Homo sapiens
MDHGSCRLGIRSDRDLSTGLEASPLRKRLCRSELSLVKFDYDDIVRTVLQSIIVSVEDVNRFSRGETFQRETGGLKWCEIKGLLYEVKGLLCNYSIKEGCQIRSTSVGETTYVMKWTVFFVQDLE

SEQ ID NO: 965977 - protein, 160 aa, Homo sapiens
  misc_feature (73)..(73): Xaa can be any naturally occurring amino acid
MATPRSFRVHAEPPDAAFKGRTEVEPGTETTGKREAANHQHCQQTSSSCALVFENDLKVLIPPRETMDLAPRXHNTWCAQESKAHIKKLDKKRGKRNKPSTKLENWEREQRFLKWRLEQLQGPQEMERIRMDSIGSTISFQKFRIPGISRSEEGALQVDV

SEQ ID NO: 965978 - protein, 112 aa, Homo sapiens
DGIGVMLPQVLKGMTSESDSIGLTPGEKSELALSALGGCVFYLKKWLYFGITELLSMANFEEYIPLDSDTVSTTRSGAIFTKAYQRMVLDAVTILKKNQKLGDFSEWNKWFY

SEQ ID NO: 965979 - protein, 306 aa, Homo sapiens
  misc_feature (129)..(129): Xaa can be any naturally occurring amino acid
ERTPESPEQPTAALASYHHTPGGRRSCRAGPVTITVTMSSEAETQVPARGAAPRRYRERQRRGRIRKSRRTDALQMHPSSSGWSPRLYVTLAGSLACRRGNPKGRGATEKPVEHAYNGHTCTRHGALLXPHCNPVRVGRPNSETRGIWVPNPMYGCRLAGTNLSPHGASVPLSDTYRRGYFGTTTRGGVVGTPARKKEGRNQGVCRTVGKTIAHQRRRAQECPPPDTGRISKHVSQQEPVKPSILDRLSSQRPSKAGSVRNDPNDTGTGFSPEHTSTRCGAQRHGRGTGRTGSRKAPGVTKNAPAR

SEQ ID NO: 965980 - protein, 116 aa, Homo sapiens
CVNASAVRRCRYLLPGCQLQEMLVSRRKTERRSVESPSVSSRHRGVCSQVPPPPFKRYLIIKKGRAKDSQCYKVDLRVSEHRYPEFSSESKRETEYGPCRREIGRHIESPEVPSMC

SEQ ID NO: 965981 - protein, 297 aa, Homo sapiens
MATFRKPRTLMSAARTAWGSTGHSQKPTSPMATPGTLAARSTHGTQVPGRDRAKSPKANGTGGQLRKSRNRHARRALKYHNVNAATLAHAAQWKFAKLEHTESREPSYATRPSTWFDKLQHHLGLYSSRNHNTRGTNHLVSHPPKAHSLPPDSLPRTHVRCETPCHECTHIVPQRIRNTHKVNGVWHCLRLPPHPRQHPRGTKAPTQQRTKHEEQGRPSTKGEHRQPPRHSPLRANQPLPKQRRLQATRSQPLKPTRPTTPPGDRVTTRAPAHMWGEPHRSTSDKPYRENPRHPQQP

SEQ ID NO: 965982 - protein, 46 aa, Homo sapiens
MRQEAQAKADKIKLALEKQKEAPVKTHVSYVVSRKYIILRFLQLGV

SEQ ID NO: 965983 - protein, 255 aa, Homo sapiens
TPVQRGGPGALVARGMGNRGGFRGGFRQVAFRGLVVAAVDGAGAEAAELAGRQGRGYGVYARLASWAALVTGIIEDQVPGGDLSSSRLAQLEEIERLIVIFLPGGASLKDEVWKIMPVQKQTRAGQRTRFKACVANRGLQWATSGLGVKCSKECWPPASVGAIILAKLSHRPRAQRLLGEPRSAKPQSGSLARVTGPLRDLCLVRLIPVPRGTWNSSSHLVAKKLFNDGWYRMSVHSAGAEWPTWEFAKGHFDAF

SEQ ID NO: 965984 - protein, 87 aa, Homo sapiens
WATTLYNPYKSLTTTLITDYYDTYERPSTWGQVPARSTALAYFQLRISHDLDGQTHYYHPALPRYVHEDVHDTTCSMRGVSENVSGP

SEQ ID NO: 965985 - protein, 54 aa, Homo sapiens
DWMSYTKGLCGHRVSRESLCTRPRRTLREWCHTLPVCGQAAELLAVCVRAIYVW

SEQ ID NO: 965986 - protein, 119 aa, Homo sapiens
RSEAVLAGHSVAWEPSAAHLRMGYCPQSDAIFELLTGAEHLELIGRCAVSLEAQVAQTVVRAWASGTLMVRRPVLQAPTAEGTNCKLRAALVLFVGPSRGVPGASRPQAWTPARGASFG

SEQ ID NO: 965987 - protein, 125 aa, Homo sapiens
MNCTRLCGHNEGKEHECVGSRVEDFQRAKKLLCRSSRVSVCETFPSCETWQALVQKGELLGGKAHYSQFGTISVTVRQGVGRLGAHQRQAISVVRAPGLGKGAKTLSLRGHWSPSDIERAGLVSA

SEQ ID NO: 965988 - protein, 85 aa, Homo sapiens
DSTRIPPEKLRRPTAQSPYTPVHVGLFLPICKKHFTSASNLSHQKSLSTCSNIFFPPANRHDHLGMLPAKTSLRHAVVPSAFLST

SEQ ID NO: 965989 - protein, 38 aa, Homo sapiens
RIPPREADHYEVPNNDDHMIPTRVLITTRPLTTIRVQD

SEQ ID NO: 965990 - protein, 363 aa, Homo sapiens
  misc_feature (360)..(360): Xaa can be any naturally occurring amino acid
MMWSREVDKFVGEKGLTGSLHCEKGNCIEKSSTNARQNSGDMAQTAGAARIPRAQNPEKEHTFPFRGSLSGAGTVGASQGRPREVTLAQGHYGAAQSVSGTAGTTCRCALQFGNAQELTSSKGGIPLCFKNPVALKKPLGPGQPGCRGIPKLKGPRKSLSQRGKYTSLQKSPIIISGDLVFGPFATPGGAIGGHKLCGSPSFSGNAFVHAGTRTPMAPCAPASGTKTPFPGWRYHNFLHTGGQFEHAIGPHQGTGEVYINRAGTPFPPIFYNGTTKGALIGNGRGPNHLWSQQQFEGCGNCPLFFAHGGLLLFRHRQTRPHPQQHKGGQGAGTSKKKYNSPWEGGATPRGIKSAGITPEXFCG

SEQ ID NO: 965991 - protein, 140 aa, Homo sapiens
FLLVVSQDPPREADPCSPLMAPCVGPCLWPAWDTLTITGTHWTDTSMTPDCTPACASQERPRDSGSDLGVVHWPNTRAGRHTVIARTLNGTLCSAAVATYPSRITPFLRVSPGLCSETPSADTMGTLPFAYDSIPHAFSG

SEQ ID NO: 965992 - protein, 260 aa, Homo sapiens
MRSTLACGRAWARLGAFCWALLPWVGDEQPGPPRCCFGEGTGPGARAQRARSIGARPAIRLWPELHTSGHWGNSRCPDKHSSARLRPRHNCPLRSWVPGQDSDSWVGLELRIRNANGAPDVRINTGVKLDGHWCSPWPGLRAPWVVMAQLPLAAYRRGPNSTCSNQSLNGWAPCRKFGMAFIAPYMQSPKGEDQRETKTGGGNGDAACYRDDRRQPGAPSGMSCELPWAKVREKPAGQTQRSAPRIQGDTTRKRNREWPV

SEQ ID NO: 965993 - protein, 74 aa, Homo sapiens
LEDPAREAELPRWSLPECQRHRISEMLGDPQGRMTGPMKEINPYSLTAHSVVVSETYAWPPTYESECLCSLRTL

SEQ ID NO: 965994 - protein, 319 aa, Homo sapiens
ACVFCRSRYRRVTSAICAPGDRRTCCECERIAEYGNLRSGAPDWCRRRRYRSWNGKTEARVFEAIRSSHIVRHNCDGRELWIDVISGFEDRARIYVSVGLIIYGSGIGLQREQGDCDMGFGSEMKGVWQKMVASHRLGGLQASRRRHTGSMYSQGERVPRNHACKHGGSLPWALTIPCRSMSVRDGMSRICSKDHLVIVNPAWSMRGRTDASMQEEWWSESVSGMPNRFSREKGLEAQGGWLVEPSETCPGSSLEPKKKRRSVRTRLLRALRTVVGAIGESEAPPRLRPPKKPRGFPRAIRGGWALYPAGLENPGDHLD

SEQ ID NO: 965995 - protein, 72 aa, Homo sapiens
MCIALVLHVPVVLPEPFGSHTHHLVHRSISSSWSRFRDFNVVFYRQEIGHKLVPYLIHHATNHGLRRHLQCS

SEQ ID NO: 965996 - protein, 291 aa, Homo sapiens
TRLTALDSLGSTRGSLDKPDSFMEETNSQDQRAPSGVQKPVPSGAAPGCPNTGLVFKNPLGQHPTSMQAGPAQCLSTPRSGPRAGDYTYREGLEHKCKRDILLGGSGASEDQTWKRIRPRPNKSSFVGLLRTCAKDSDLTSRTCKYGGYNCTFRLPFRREIDVWTEERKGTLKRELSSTRWGVPSAGGLNHRPKLLEGTTRASSTFHLGRIWVVTSKPRDHHGTGPQDSPSVCPNLVCKQQFLQQQVPGDIVRSTSLRYPDRQSGALHVEWRLRWAGAAEKCHCKFRTGWC

SEQ ID NO: 965997 - protein, 88 aa, Homo sapiens
ADPVSPMAPARPLPWPAWETHNYDRNTRGLIQNEARHTHACASLMSDPQEQLGLDRWCLQLARNIRAVSHTVNAQDTIRRRSYCRPGP

SEQ ID NO: 965998 - protein, 68 aa, Homo sapiens
AFSKLSLSVTEYTMTYASPMAMQWPGSQLAPILANTDTHKYTQESSCPSYKAVTPCSPYPNPALALSL

SEQ ID NO: 965999 - protein, 217 aa, Homo sapiens
PASTVLGRNPDARSPPRTDDHSQPSVTSSPHHSDCTQGHHNDASSAEQTTDGRTTSSSLDRRHDDRGPPSERCAKKVTHQRPQECRTIQPATIQTLELLTHSYGYTFVTMVIYLHFLDPAEIDRWSIQDEATLLAPKVTYIIQTHIRSIEGDRWRDTFGLARKTHGIETDIDKTNHKPDVLPPANTVSPLCPAAIITKGKQHARHNWIDIRNVGRKQ

SEQ ID NO: 966000 - protein, 70 aa, Homo sapiens
AVCSCWWALCGTLCGPEDGGTCGGFQREGYLEQWTSCEAGGRRPVELVCLGPRGAARRLGVERKDQRITE

SEQ ID NO: 966001 - protein, 78 aa, Homo sapiens
AARYTEKEIYKDRDSQITANEKTFEDAQKSISQHYSKPRVTPVEGSCLIIPRNKRCEIKSMMLRDESMTQNPEPQETR

SEQ ID NO: 966002 - protein, 71 aa, Homo sapiens
MTCAHTMAPCEAPTHGLPGETRTYDRNTLDMIQNEANTPMPDDLPSSDPMDRWGRTEGVYTCADNTGLDAH

SEQ ID NO: 966003 - protein, 304 aa, Homo sapiens
LQQMLGRNPGARSPPRTGAHSQTLRHLFTAPSDCPKAPTPSSAAQPPARRRRLSLVAAMHDRVHLAQGGAQNYPHRTQEAGHQPPGSTLELYASLRYTVSMSELLKHRDECGAIDRTLPTIQLLLCTNTHAGEGPHAAEHVTDKACETPTRVWPPSYPSGYQEHPGLVMNCRHAGAECTLDVCLPILGNTTCASQSHTVSNDNTNWANGQKVKPPNLDDGLQLQNTLNLQLTAGETDHHKNLGGPRMQPHLTHSMGRRQNSGLGGKFLYGQSKPPGQPCNTKGYAYRANITNTGGELSCVTQDR

SEQ ID NO: 966004 - protein, 111 aa, Homo sapiens
MLRADKAKVKDEPTEKIREVALLNLLLRKPEPKPKKAPVKQGRARYPKGTKGNADAGKEEGITHAEQWSIAKTDQATDKLHRCCEMPSESVLPLQDNWCTIMVTVQLEPTY

SEQ ID NO: 966005 - protein, 121 aa, Homo sapiens
MSGFQINLNPLKAGHSAFIKVLEWIASIFAYCTCGGFKGQTEIQVNEVLLQITENKTVTATYGYPFRLNEASFQPHSRCKNDVMYHGKRLRPHRRLLFYCTITMKPIADFVYLYSIADLSA

SEQ ID NO: 966006 - protein, 49 aa, Homo sapiens
GSPPKMLTLENQQTPRTGLNDLIGTLSKKTTVTGLERPGSSLHALAEPY

SEQ ID NO: 966007 - protein, 134 aa, Homo sapiens
MDAPRQVVNLWAWSRQAAALSVLEIQQELLDYKGVGISVLEMSPRSSDFDKMINNTENLVRELLAVPDTYKVIYTARRVEVRTVQCCPLKPHWLKAGNGVLDYVVTGAWSAKAAERKPRSRDYKYRTPLNLGRL

SEQ ID NO: 966008 - protein, 74 aa, Homo sapiens
MRLTCRFPQLVPAGPRREEAKLWLPGKHSKKSSPMDQKHVTSIGYADRGTTWSVKKSRLKSKLKAQDTLQRVNQ

SEQ ID NO: 966009 - protein, 145 aa, Homo sapiens
MSKPHSECRDCLQFRPSSVQRSHGMTSIPWTHNVLALVHLHSPTPVTAPGNTWRSILYLLVPDFPNQLADVEPDDWLNDSLGNDMLGLGSCTPLTSVDVAHRPVNAYHKLPPEGNPKFQHGTLARRANKGAQPRHRGPYLARSRG

SEQ ID NO: 966010 - protein, 103 aa, Homo sapiens
FSASLSDKGYVIRLYHEATTDTYKAITYSVVLSEKSTVFHQNDVKVPNSTHVFTTFYAKTKSLLVNPALFPNPKDYDHLMGYDKPFTFDMEEDSEKKQLKEDK

SEQ ID NO: 966011 - protein, 83 aa, Homo sapiens
  misc_feature (47)..(47): Xaa can be any naturally occurring amino acid
RNAFQLKEDLIYGPVCATAELGKDLSQDKLCHAAKEPGITRRQLSLXDKLVFQPLEDIDEPQAAGFRRLKLKRGPRRSKPLKP

SEQ ID NO: 966012 - protein, 44 aa, Homo sapiens
RRSPSLSSPSDPARPRPAMEKLSMIQKGKLAEQAERYDDMATCM

SEQ ID NO: 966013 - protein, 134 aa, Homo sapiens
MALMCSRKVDAHKCAHALITQTPGEVLDSSWEHVQARTERRGFQEDLWQKGTKCMTVTRPVLSSRLWCDASTGANAIKGPRIREVASDVWTRGPGRWVTGERGDQEGPERSKGGEQEGEETPGKGKGRTKKVKQ

SEQ ID NO: 966014 - protein, 210 aa, Homo sapiens
MSDIDWHRKAFWGCLHRLCLGLGLLSCTIRMCMVLLTVCSPEVPGRCRVLDSQPWSLPLPVLTLRTDSVREGKCLNGLSPGSHSYEDAGGAYSVILPCRISVSGDAFPFLDLQWGLPSGDHSVFLLPSEGSDLKGFCIENCGPGTTLRGDLPQKVALSAENLYAPEVSDVGDMLGVLRAWGPAGAPNAGWQPGVAPGDAGFWEKPTLPGV

SEQ ID NO: 966015 - protein, 197 aa, Homo sapiens
QVLGDQTVSDNELQEMSNQGSKYVNKEIQNAVNGVKQIKHSHQKTTRIDMELPQTNCFEHNRSKKPKTDRTAGCPEMQTRESRDKAERSSPGVCNGDHAWPFMAKKLLRPPWPLGNTKNPLPIESSTHSVCRSGSGLVGRQLEEFLNQSSPFYFWMNGDRIDSLLENDRQQTTMLDVMQDHFSRASSIIDRALPGQV

SEQ ID NO: 966016 - protein, 210 aa, Homo sapiens
  misc_feature (84)..(84): Xaa can be any naturally occurring amino acid
VSENWRAFKALIAAQYSGAQVRVLSDTSPLPFGTKPTVTPEFLRKFPVGKVPAFEGDDGFCVFERQAPIAYYVEQCRSCRGSYXQMAASPAWLQLRCSFCWIPDDSCPPARYRGCSLTLVHHCTTTKLGHCRMHKEEVRRILAAAGCLLEDEDFSGGRTSDIGDITVVCTLLWLYKQVLEPSFRQAFPNTNAGSSPALISPQFRAVLGEV

SEQ ID NO: 966017 - protein, 45 aa, Homo sapiens
FKYHTIHYNLIGVVNPANGIQRKYKNATFYCPVLISREGGFYFTH

SEQ ID NO: 966018 - protein, 174 aa, Homo sapiens
VPVVDPQEEERRRAGGGAERSRGRERSGQVRQSPRGLALSILLDLNDENSNQSFHSGRFPAKGHRAQSWGHPPAQPPCVTLPGPPEGVPEEAQAPRLGPRERSRGHNCWQAPTNPQLLTKGRKPCFPRTLLGNAGGPPKLYPGFEPGANLFPLKASPRVDHRGPRRVAPRLKRI

SEQ ID NO: 966019 - protein, 46 aa, Homo sapiens
PLVVTQYSCQSDRVVQPAKGIQVKYKNATFYWYLSDLLGKEGSTLH

SEQ ID NO: 966020 - protein, 67 aa, Homo sapiens
STQQHLKKVYASFGLCMFVAAAGAYDPYVVSLIVIAGWRCCRALRRPLILMSLAEWRTPSIADGNCN

SEQ ID NO: 966021 - protein, 66 aa, Homo sapiens
MSHYYGPHLYELLYSSKRQSGGPRLHLQQRFEHIIKEDPSFLARRKRTAAIVLYCRIAAEFSLLIT

SEQ ID NO: 966022 - protein, 111 aa, Homo sapiens
PNRALIQTSIMISGYPCDHSSTPYRSSYSGLVSNSTNHIPMMADVTEKAHTKDTNTTVQKGLRYGIILFITSEVFDLRRIESEPFNTSSSSTYPANEEGTGPKRHQPAKSP

SEQ ID NO: 966023 - protein, 221 aa, Homo sapiens
ALVSRTGRHSERTVSAGKGMRHLQLEEDAPQQQAGPLRLSAQAWRCTMSSIGRGLASESTSCDMIPPRVQSPQFSHVEICAMPGPRGKTGSLSPPTWPPGLEGPTAPASAGLREDTVARTHRASTGHAAEARPQFLAAKFHQRLVRAGAASIGRPRIIAGGPFPWAFFLSLFAFSLPRPAETVDLGGWFCSVAPCPAPAGTRGGQPGPPVMRMGRQRPGLL

SEQ ID NO: 966024 - protein, 215 aa, Homo sapiens
ADPSAGGGDCSGASTGCSGRGPWRESHVRAAAAGRKSSDLYRDTWVRYLGYANEVGEAFRFLCQRTVAVAELWRGQLLRAWRMPLTTGQEGWRGAQPLKARPAAARGWTVRCACDTLCSGRLQRLWPSRAFTINPRVCCPSLYVRGHVPTLVAPGLFRKWTTTALGLVDHRPSLSRPHWNRSGGIALLGLPALAQARNPEQWGEGPRFTPDQYSW

SEQ ID NO: 966025 - protein, 54 aa, Homo sapiens
FNASYSFPPKDLKVKSKHMLYNNVCSAVKTPLNSNGKHPYQLWLKAGHCGQPSN

SEQ ID NO: 966026 - protein, 454 aa, Homo sapiens
  misc_feature (56)..(56): Xaa can be any naturally occurring amino acid
  misc_feature (97)..(97): Xaa can be any naturally occurring amino acid
  misc_feature (158)..(158): Xaa can be any naturally occurring amino acid
QAEASARWVPVRGTSFQSCMSDGAITRSVNPRSWVKRYMRATREWARDTRLICAPXSQCAVNTQEIPPVESSIMDTMHGISCVNLSSVYVMCARYPXSRKVAWVMSGTLVTLHGGCTLFRTLHIVACIHGAPSSAFHMRIANARKHLYASHLVRMDTXAYVLPSSIHARVPINPKPTANARMLSLSHVDLQLNFVHPPQEKPPYTPTRAHSLELPSLANAAQVPFPVPLSCTGPRLLSRTCPLVPPLTSDLSHASLYAARGVPFYAPFQPLPRTRARQRTLFSHFPPPGPHCTTRVSPNASPPGSQHPFSLRLPKRKMFLVPQSNARNFHTVGTLWVPSRGVGGHPRSPLLRHPPLLSFHTHRGCASPLLVTRLGPSLTPPLLSAASHRPSAAQHLCPQHFSGSRRTPPSPVLRHPTPSFCALPRLGPTPHLRLPPLFPPLTHPRCAPHAACSH

SEQ ID NO: 966027 - protein, 44 aa, Homo sapiens
MEPVQDTYRPPLEYVKGVPLIKYFAEALGPLESFQAWPDDVLIS

SEQ ID NO: 966028 - protein, 150 aa, Homo sapiens
MWGRVPRISGSFELFEKFKGKVLGKFQGDHLGTGEQTKRHLLYAGFLEQQTLRLEVCDETSFLNSSFRDIFTGGCDGAMPTFWRPHSNFKGVGGNLKAPPFSPFKEEFDILVEESFTQRKLPLKRARPFRTRPGRKPHISFNFREGGPDF

SEQ ID NO: 966029 - protein, 64 aa, Homo sapiens
MDRAHSLSVTIPFSAQVRDKFLLKGVWACRLNTWERHEIRVNRGGSRKSLTLTLEKGDSSQSIR

SEQ ID NO: 966030 - protein, 80 aa, Homo sapiens
TDFVEGVVQEDGLLGPVGCLMMHFRGLPGVKSFQALNGQVVHRVNLVVVRRVSEGQRQQALSLQVGLVDPGLKLVGDDGP

SEQ ID NO: 966031 - protein, 244 aa, Homo sapiens
MGRCHVRRLEEVRELEGKNGFSSDQDRAAPSGIYGMLSGDQPTIAHRRTSSMCPDLELNPIRSKIVRAFFDNRNLRKGPSGLADEISFEDFLTIMSLLPGPSDYSPWTEEQVELCPVMEEAEYFCIHMYDSEQTTVASLWTEYRTVVEELLSGNPHIEQGVRSLHRRRGMIGGGSCVHGADEKPDQVCDGISFEDFLKICQGIDLEDNDAVGSLNMETMAFGTDPRTSGRNWLCMGAAPGSEEQ

SEQ ID NO: 966032 - protein, 232 aa, Homo sapiens
MPVSCEVRSRPKKGSNKAVTKARKKDEKKRKRQPSSEELLSDSTVYTGAARRSILDIPGIISVINELNGNSVNSLRSTSILRIGSRRVMGFLYLAGSYRTMQLERSTLRGRIQHWSVRRGSEPEGRFGRYGTARVRTGTKVRQQSTIQVRKVERMLKDGDFSRVCSLSVTLSKAYLSIGKRNLAFGLPAFIYWRKMKNVTAMRYLMDLLAEGLRLAFMDSHADSKENSFPDA

SEQ ID NO: 966033 - protein, 149 aa, Homo sapiens
MPRKDANQVHSIYQEEEQTVRLSVLYEPKKAGPLVEVGGQGAGNIQEDWSQCTLASLPDSSLATSAPAVLLASATSGCRDTHFVQCPSVPSHKFCLPLLQTIASHHAGQLVAQVYGPSGDTCPSCGPPMSPGAFYARGTLPPSLLPDVP

SEQ ID NO: 966034 - protein, 341 aa, Homo sapiens
SDYRKKLLEHKEIDGRLNGVTEEQLKELTTAVLQQSETLICRPYRVLGSIVGDSASTQLTEDKTSLVKRYPTGPKDYVVGLSSDRLTNNVHADRHGTNDVALGILTTATLLTDDYFSPETTVDSNCVYYTTVLTDGPLGTLFSYFLTHFAQGSSSNQNPGAHSTQPGASAIHLLYDNLRRFHYTALSGTSHNHPTHRACIRVLLGPHPGTGDTNTSMATEAGCVAQPGPATFLHKGWYLSSYMSDPSLHLGDHAATVRPTADNQFTFIDQHDSTQTMAITLPLRLHTSTANSERTHRSLLMTRNPSTLDTTEELPTENALTLAGYPWKYKWEWDLGVTPAV

SEQ ID NO: 966035 - protein, 132 aa, Homo sapiens
VQDDDLKNVSQLERNIQTIINTFAPILCDELGHPDTLNQGNSIELVRNDLQNFALKNEEQYPNEKVIEHIMEDLDINADKQLVFEEFIYAAWSRRNLGCSLASKMLEAVTRALVTTISQVSGRAPPKSTSGQ

SEQ ID NO: 966036 - protein, 78 aa, Homo sapiens
MFPEGSQALGLRQIHRTVDPGQLREMLKAFGLTASAVHILQVDSTRTVGHRILKNGLGELLQNLSLYVAVVMFRLRSG

SEQ ID NO: 966037 - protein, 114 aa, Homo sapiens
HAYKKYIKDYMKSINGKTSSNMRPERVKPFMTGAAVQIKHILATIQKLPVLYCVTNMNPDGMVALLDDREDGVTTIYDLLFKDGLEMVNSETNVAIILALSPVIITGFCSYSKQ

SEQ ID NO: 966038 - protein, 278 aa, Homo sapiens
MTNGVEDCLSPVHLKPALDNVMKPFLYQKIKIQTKKECVKNLAAGRWVVCGAVLVPSRGVGTGRGGVKRGMKFKPPNGRFQTPVPMVDTSSGLSNSTLVHSPQTLGDMNKKDKITLEHSPIKEHNTQSDRTSLSHHRVSPPTPFYTISFTHKISACIYPLFSLFICHSVPLFWLPHSIISNRPQEIKTKYPPLFDDNLPLHTQTQYHTTLYNTQPFSNIQIPHLPKKKTPLFSYHESLSSQQYSSMSTKQHLPHLLNPLCSPPQNISHSHKPPITNTL

SEQ ID NO: 966039 - protein, 343 aa, Homo sapiens
  misc_feature (161)..(161): Xaa can be any naturally occurring amino acid
  misc_feature (163)..(163): Xaa can be any naturally occurring amino acid
  misc_feature (166)..(166): Xaa can be any naturally occurring amino acid
  misc_feature (169)..(169): Xaa can be any naturally occurring amino acid
  misc_feature (175)..(175): Xaa can be any naturally occurring amino acid
YLRANTIGDKAGEAGGRKQGSAAAPAYCELCSLPLALNHYATCTLLRAHYLHACACCGRLHCHYLLCTRPRSLPLPPPSSYCTPHAPLCTHPAQPHASGASLASSLPRLSLPSPLCCPTLAHLYYNAHSRPPPTHTLTHASPTKRPAHPPTPLQTKKCLSXSXFSXYAXPPEAMXHHKKGCGTFYTPSPPPHHPSASPPARTPTPLHRTTPLRRPLPLRLATRHSFLPSTPTPPPPLTQHPLLTPAPLPAPSLPSPPHLCTLLLSHPPLLWRCASPHPSPAHFLLENEAFEAPEYPTVDAPEIFVRDEKPPSCTGPQCPFPVDPLDPPPSPLPSALLTLPLTL

SEQ ID NO: 966040 - protein, 200 aa, Homo sapiens
GCQSQGPVAAISWILKTNWPSTLGVETCLPYVSEDMLSRSKRYIWQLFLEKAHWVSFITFLSFWVFIISCLRKQSGCMAQAAVWWPPITVHRHPQSPRPKNPPTLFAGHYSSQNHRAKIHHQVETDYLCSPGRVTGSGAQDVVPRWTQFPKGQGTSWNLGPLRCCPTAGHIPLKESLSQLVHCRRSLHLQMNVLERSLHS

SEQ ID NO: 966041 - protein, 257 aa, Homo sapiens
SGAALDNTHTCVFQDMNQPLAHYFISSSHNTYLTDSQIGGPSSTEAYVRAFAQGMPLRCELVLLETGPARREPSHLSLAIPITIQAFSFRGRASNAAALTTAVHDMSPLPLYIRIRWHEPTCAALELARAGHEPRPPYCDRVLAANMAGCTQRAWHSAKLPQAAAYPLEPRCNGPGSWLTGNSNVAPLPRTPRHGRGSVGSATTEEEDDRGGQTRTARGCRAPGGRPPRSPRSLSALAASATPPPADLHLPPRPPPA

SEQ ID NO: 966042 - protein, 67 aa, Homo sapiens
MLMISDQSDTIANRLFNEQCDSVKVNFHPEFSTSASPLLAVDYEEFVRGCQLWQSSPPTMSLGGYTP

SEQ ID NO: 966043 - protein, 112 aa, Homo sapiens
MSYAAGQPTRARFRLVGAEAQAAWSKPHSYIFHILLLITASHFTKNYTKTMNNRSPPPTPPTPLPLSPLTILTLLLSSSPPPLRLTLNISLLLYHLTLYISTPRTNSLPHLS

SEQ ID NO: 966044 - protein, 35 aa, Homo sapiens
GFANGGIFEQEHEGSIYYPHCKFIAINIRIKKCIH

SEQ ID NO: 966045 - protein, 448 aa, Homo sapiens
  misc_feature (129)..(129): Xaa can be any naturally occurring amino acid
MHRFELVPKTILKRIHLVASLHINWAHISYMVHIYLRRTMWPPLWVNVDLKAVVSRRGRCIHCNSSPVFLGARSWTPSCKLRGTSVEGRPYHMITTAFSGWGAIPTRGNGHISGRIEMRVVQLTGKLVXRDKFLASNGEGTGLRPHTGTVALGVRTWALEPASECTRAPNVGCRPFADSFELLGWKGPPHSRCRSLFKHRGCHNQIGQAELIGRALLCGKRLGLIIGHNISAGPMCWATSWPCGQENGSHFRAFGHGHLALYICREQGFRGPCLILSIPRYGVVGNVSPGCPLARAVGQENLRSPRTLGRLVGPTGALFRFADKQGLEAEPSPPCTCRPGKALGQCVNGPPVGPVGQIGCSHTTHSFSPYLATGDCLVYLISETQRLVLLRGHKAPSIAGCVPVVRCTTIALPGRHTSAPLQQDLLFPGSRHNSDDTVVDDPAVRRQL

SEQ ID NO: 966046 - protein, 34 aa, Homo sapiens
ENQGVFGNGQTNKMVCVVYRGGKGVHSCGELVQG

SEQ ID NO: 966047 - protein, 37 aa, Homo sapiens
MIGLKSVLWDLRPQVHIMAAKAVANTNENITCDQMGL

SEQ ID NO: 966048 - protein, 42 aa, Homo sapiens
MRALARRSACCGHLSRVGNPTVGPYVTEATRVQLVLPLLVAE

SEQ ID NO: 966049 - protein, 283 aa, Homo sapiens
  misc_feature (167)..(167): Xaa can be any naturally occurring amino acid
LSFERPGCTKWSLKSSAQITGVSTAERRLVMIIRVPARHGGDADPGACGPLLLGRTGANRRARPSPGAAGSRMPPRSLAANYAMGAHFPVPTRRYLGRLLLAELVPWYRAPCAWAAASSGLVAHGAALGPFREAPEVKSVLSRRVLGFGKAAGTVFRISGFTYWDPXLAKVIGEVLALGGNLGHKRNTHPGRPPWWRRWPCALVGSRGNRSVGNRGMSGLLSLFPVPAGPRARGIRLGARAWERPQGGFGRGSWSLAERPRVGFARRGANRAVCFPLAPVAQG

SEQ ID NO: 966050 - protein, 70 aa, Homo sapiens
MNAPPQMILWKNTREVERNNSQQENDKQQYDDEEGEENNTDWMTRACYHTTERYDEPNRHNANEAVVHKQ

SEQ ID NO: 966051 - protein, 44 aa, Homo sapiens
RWDPCCIIRPSPEQTVGTSMSAGCKHIHLALHTVCIVQERRLLH

SEQ ID NO: 966052 - protein, 286 aa, Homo sapiens
  misc_feature (52)..(52): Xaa can be any naturally occurring amino acid
  misc_feature (206)..(206): Xaa can be any naturally occurring amino acid
MGVTRDTVEVRRSVLSFQEGREVWVECAGQTRCGVEISHSGLSCVALRLLRXNILLSHIICGRVSEQTSIPMCAWVCPLCGQIIAPVIFLTGSIVGNDIGLSLRVTQGGVAYVSVEREASLCGAKHGGTTTRGYNYGLAIRETPYIIYLLQCEALWHAEGGARCVIRQSAAVSALSDKEIMKKNPLMCCVEEQRTRGGSPHLQEGXGAIKVVLVSIVGESDEYGFFSTLRGYSCGVRAAMLSLVAQLYIKGPHNDGTGAPPLFSSAVGGPTLGRVHKSAAEERYKP

SEQ ID NO: 966053 - protein, 40 aa, Homo sapiens
ALRGIWYGPKNKMVCVCMGSERGANAVVELVKWECGQTSV

SEQ ID NO: 966054 - protein, 38 aa, Homo sapiens
WDTDVKRVAAVLVVLCSESVPRFIKYTGYGNAVAFWLP

SEQ ID NO: 966055 - protein, 285 aa, Homo sapiens
MWGHPRDGGDVSRPPRGTCGRVGVTRDQENQEPGVGCGQGGLSEPLEGANSTEGPTEKEFSLWETSRSRHTERREPPMRDGGISHTRHTQRERETLWGVHREKSAMRYTSARAYSPTKKSARVHEERGGKKMCALWRTSVVCLCVCPLTRCTHCVCVKNLCVCETPMWRARPHKSPWWEPQHSRERGEEKSREEIRERKTERTKHNKYFHSPWEEEQRWSPQRRNHRRGSLQRNTPTRGVVAPNAGGPVGISPEEGDQHQTAGVAKSRAEHIRPPKTRRVSSTKR

SEQ ID NO: 966056 - protein, 301 aa, Homo sapiens
MIFVGENILEQSENLHNADQALRVRGCILISGGTNGGRIYQNNAESTDASAPKRYVEHLKDEAQVCAIIAMRVQRYLEEKGNYRGGLPASTCLRILAHLHTSVIHRPYQRQLTPPEGSSKSEHDQAEDVGLRTGLCLMEETVQVLFYSQGPQETGSAHVPSSAISTTDGLHSRWYQGPGPHGHEPLAGQHSACRPAVQILYRAYPGCRWASVASVKGCTMTLDYACGHPVEWLGEEFCAKAVWAAEEAQEWEVAADGPSLGELGRGVVPGWRLGPIGPIGARCRSPCGGNSGPSACPEAPR

SEQ ID NO: 966057 - protein, 407 aa, Homo sapiens
WRLPELLELLGVPVCVLAVLAAGWSECMAGVPLCVLPPCDLVLLALCPVSLNSAVCVCCCALLLAPDPCGPFLPAAMALACYVPSSAEGCCCWSSMVACRNEPVSRDSCVTLVDDGDLYNWEVAIIGPPNTYYEGGYFNGAPQVPHTTTPYYSTSLSRSLTKMWHPNIYETGDVCISILHPAGGRPPERGAASERWQPSRTSGPFSLSCDLPPERAQHLLARKRGRLRDVQERATRCNGERIREYTRHHAAHILLAEHGGLRDATALTVPTSPGRLLALLIIAPSAPTSDSRTSFLRPTLLTQAPVIVNLRHRRLTSSPSNQRHTWHERRLLSACDMYKYRSLNSRSCWIPVALLEVQVTAPEGNSVLTEHSLRDMDGLSYVPRMVDSTLMTTEGGPPTIQLRFTTS

SEQ ID NO: 966058 - protein, 513 aa, Homo sapiens
  misc_feature (274)..(274): Xaa can be any naturally occurring amino acid
MHLSSVGRVDSGKSIHYWPCVSSNIDGGIRTNENPCDEYLYDTDVLHEYGQTRARFNVCPVRVLCIHMRDTGMHAGESSRSSTRCAYRRVCWESSEELKHYVLHVTYHCDAPLGRDKRKLLINTDRMACDRGNQFIDVTRSLLGLGPVVLSLWTWTRVRLVLVQFYDMPGIIIQSNVVHRTTEESSCSLVMAVINKLGAVDIAKRIAWFRVAYSIELGSLPPFEAQPPTNAPGKGQIMARGTYFAFHRDTLHVHHLTAVKTDTYSVGLSKGRLXEQGYVQILGGARNLGVGVWGPRGWQQNRLSRGSPKGGVETIEPFGRCIRGAIRGKRRFHRTGLNTGQLGPYSGLRKVWENPEGALTLSSKEELFLGATIADFPLNTTIPKGFRGSNNLVIETKSPPLVDETIVGLPFHHTGQTGVTQPRQRGALRANLGGRPWDFPCICCTRMIVVQNRVVCTFFHHKKPGCSSDVRKFTTHWVRSHSNAHRFANHVDKRLRTVWVAMIDATTCHQSLR

SEQ ID NO: 966059 - protein, 274 aa, Homo sapiens
MPSVQTLVDPNACPLLCPAFLVLLVHCLLLVLCAVPMCCHLHGSCHVPSDDCFLPLLTCTDACAYTCLCAIDASEMPLLHNTPNSLASELIALQDTRQEPKVRHRGRGGPGGPSGDPEVLEILKHVFLWTPVIDGGLRPAMLACAMAGCGCSSTAGSRRLWTLPLRGPCPCRLRSVTVGAACWEALLDESRPLFERYRAMFCPVQRRECEEAALCAGRGSALWERPLPARGRLRPGTAAHEAVVPQLLAACADFTENPMVRPDCAEGLGAIAGC

SEQ ID NO: 966060 - protein, 139 aa, Homo sapiens
PGSRPTAVEGLALGSSCIIVVRATEIIINPADRRWSRSWPCTEDGALTAGAAVVQLLSAGAGTGRPGPKQVRFRASVHWADPKSQQSTQHPGPTSLAAGGACPGKEAPHARHTMAVHLGTYRASPPGTDRPPCPTLPPK

SEQ ID NO: 966061 - protein, 60 aa, Homo sapiens
GGGTQDDRRPAPEAKSSMQFTAEASREASLSLLAEDGALAYLASNFISTSVSPIQMGPNL

SEQ ID NO: 966062 - protein, 126 aa, Homo sapiens
MGDLWRQWTKMQQGEDAEQLLAEKHLLRTSKRCLKGTQGDRSGTTRWSEMRGSPMGPRAEAKARPTGHCQAPTQVRSNLRLWPPKGSGRTPQGRRVSERPDNLAMNHRRRRVERNSTVPSGNRLKS

SEQ ID NO: 966063 - protein, 246 aa, Homo sapiens
ALARLQEDAAFATSGGRGRTQAGPHAPSTRRSRLTRSAHLIGRAARARASQRIIFHLLLREGKDDVSRARESSPSSYGTPMLMRKGQALSKLGPRGEACPRMQAIQVDVPGHYARWSCEKYREETTDAHAAKSPYWSNFAWTEPEGVTQKNHTRCLAEESSRRNHREQTPSATVKLTGGHDSLDIQLGKTGRESREGGIISMGGPSCRQWTQDEPQCPEPDRDYRSLAYVRQQLPLPCGRGPAFSF

SEQ ID NO: 966064 - protein, 151 aa, Homo sapiens
GALCDRASESGLRPALAGSYQDGLRRPGFAEGPPAGRNPRRKKPQTDRRGGSAGSQPQACADGVRVSLPKSGALVMSRTGLPVCPWAAVSPVARSRGDQNPAASGAAWGWVFPAVCLCPLWVCVCVCVCVSVCLRVCARARARVGACLCAH

SEQ ID NO: 966065 - protein, 245 aa, Homo sapiens
TSPGRGPAFPAASRRSVPAPRGRRLLLPGACCLLVPVMDCASHCPLPAPVSLRPGLLLLHLEGALCVLLGSVAWVGRMASTEPAWLRMVEPPVDACAAALRWLASCWNALAPLMLLRALALVPRPECVPMNVLPWAWPSAGLWLEGDPGLGCPELCPSSEARSPEPPANRLQDFDTLVTVGKQLEAICVKVTSGETKWSGMTNVPTGHSPAPICKTEPAARGNSLPGGTPSHQAQLVRGTAPREN

SEQ ID NO: 966066 - protein, 74 aa, Homo sapiens
GKNVDEWKISENVSNLVIEDTELKAGGLHIQVCQHDIAISRAKVNSITVDNLCKQSLSLDIRMTWWSIVEIINR

SEQ ID NO: 966067 - protein, 172 aa, Homo sapiens
  misc_feature (15)..(15): Xaa can be any naturally occurring amino acid
MCRRKLTALDLTIEXPARAYILQTNEQQEVYNTFIDLRLDTHQNEIRHYKIEDRGNLDETSTVERSWPNVALKRYLRDVKCPFIDSRSIKNAIGLACLVFSCIDYEYGGLMLMNRGFEYLIIQKLLTMQLRNAEPLDPIRHVHISPELPTAGVMALANLLQIQRHDDYLVSA

SEQ ID NO: 966068 - protein, 235 aa, Homo sapiens
RLYQHEDEDEEGSSGAAYLFLKGKEIRSSFCAEESAKFPLEREWMSEDDGTSERFRKECNEVSWDTGSTFFRIPTQKEEVRDNKSALAFIGFLKKGQSPPEDEDKKGRREKKSGVTRAKNEVERAGNYQGAWYEEEEENEGGAVVNRGSRGGDAGYVNGEGQENVCARGTDIRHGVVIKKRRMRMVQAERRRRELIGDCPEMELVQVLVQMGSGRRTWETGVIVKIKFNIDRLSL

SEQ ID NO: 966069 - protein, 286 aa, Homo sapiens
  misc_feature (230)..(230): Xaa can be any naturally occurring amino acid
  misc_feature (234)..(234): Xaa can be any naturally occurring amino acid
HQGRAKRTRVFKSMDLKELLIFKKQLKCLLGSREILDRVGRWHGDSAALLRRGDGMLGDRAGSSKQQSSLLLLAWGTSTALVPRVLWFKGLQNEPKHGIGSWAKRPIQEFADERVVSTRQEKLEWLTEAATDDIRTARARREQASGRRVHGRPTPCHKLVSAPCVAWWNVASGLQARMKHHYHRHAEILDISGQRVSRGTTDRKSHKAYDVKKAPRARNVAQGHGPEHRXVSHXSIRQPNNRYGGRTDEVQKDGGKFKGSLKSELCLRTSVQDVIRLHQEPSVSSA

SEQ ID NO: 966070 - protein, 85 aa, Homo sapiens
LERFEEGLCIMAGDLEFSVTHEEDWTRWVQTRSQGLFGPGSSCCGPKLTGPLVRHFAGNVAGSRLGQDARRQAPWVAPFSPVAPL

SEQ ID NO: 966071 - protein, 240 aa, Homo sapiens
MRFELTEQPPSWQFNKIKEIAVTVKKADEVEQRKLLEISVPVIALSLQADLPARKLSWLMMVVAMQMMMLDDLLQLKMIVIKMVQVGASEDSQLKLVLLQDDLSLSWVEMQPNKYHNPKIVFECRLSWKWEDQLNRIPMENSGHGEAMKGHPMTRVEKTRSSRGTKKFCCKLPMGGFGAKTLGQGTISRRGRYQSDDCDQDVGSTAARRIFNVGTGRVTDGMRRRWPHRYCATNSETLTG

SEQ ID NO: 966072 - protein, 44 aa, Homo sapiens
SLGGVEKELTLLQQALELNKRKAVEAASWRGPKVHLAPCTPAPA

SEQ ID NO: 966073 - protein, 275 aa, Homo sapiens
MEIQELDKDDDEPAEYTTEGPAGGRAGKVSSKTAKRSSIRRMSDMDLDPLEVMQSIWPPRTPTCEPEIAERGRLLAAACPTKARRLCCLRGQAVVGVHVSKRESSFSRGLTRCSISCPGHDSHISVTITVSEGRQAVQEFVARLDLQWYGQLSGASRGRRQSRSFPCSAPGGEVTGRTQWGSLSGGPRGATLNKTIQDCPIYTSNARNKDAEQRGSLGEDWGDLQPNANGKGGGKGDIGVPQALRRPGTQGLEHGNGNGNRAAPGGLCFSRGTHG

SEQ ID NO: 966074 - protein, 124 aa, Homo sapiens
VETRWRPLLSSQRNCTIAVHIVHIQLRKRYVLGSICLLTHRYRSPCNRYIPLTSPEGEPCGLSFKRGPRLSSVNLGDAPEVVEGTASRELVVCKEQSRRMSLDLTSTRKNSQDSRCPWTTRWLS

SEQ ID NO: 966075 - protein, 60 aa, Homo sapiens
CEVSVPQVCGKVGTTAGQQNSSWQREVCPQRDEDICFSFMPKNELTSCCCKLNIGLIGQG

SEQ ID NO: 966076 - protein, 164 aa, Homo sapiens
MKRHLGEQRTHHNPLASRDCDFFTIRTLTPHGIRSASYPGNNTYTLPPKLIKNRALASAPPNVGTQNGENTGTLQRRTQSTETKPNETTKPTHTGKALAKRPQNSGKRDGPADTMHRQRRAPKTTATNRSGNRDQHPDRTHRDTRHAQPVICQHIKDADRTKQQ

SEQ ID NO: 966077 - protein, 77 aa, Homo sapiens
RVRVCCNVGEQPDAICGIMSHTQQGCMAASPRATSAVILQSSSTVGSAATAALVYTWLSGSLEAEGSQRQSATMTST

SEQ ID NO: 966078 - protein, 47 aa, Homo sapiens
YGRRSTHCILSGKSVEVGSCQSDRNSSSGDGMLLWLRLRSFTTRTGS

SEQ ID NO: 966079 - protein, 94 aa, Homo sapiens
  misc_feature (6)..(6): Xaa can be any naturally occurring amino acid
CVYLHXCCSSRAAAEYLAEYACLCGVDSCSKAAPRKEQQAEAPADVERGTHLPLLPGGHQRIVEVLNDVVGRPGQPALFTIGPANRKHHPRQDH

SEQ ID NO: 966080 - protein, 49 aa, Homo sapiens
SPGFYQWVAVVLTCSCWQQQSAQQNTWRSTACLCGVDSCSKASPPPKEQ

SEQ ID NO: 966081 - protein, 40 aa, Homo sapiens
GRGPTSVMALSADGYYARSEDYVDIVQARRVGVWNVPYIS

SEQ ID NO: 966082 - protein, 40 aa, Homo sapiens
RGALDRWTSATPGTWVSGAQSGTPPTGLYGHSAVYHGHPC

SEQ ID NO: 966083 - protein, 66 aa, Homo sapiens
AEEERSLALKNFCLWWLNSDLDLEIMAMATQKGGYWSKRASVIQVPCEDAHDPRVKAIEMGSVHLI

SEQ ID NO: 966084 - protein, 48 aa, Homo sapiens
HTVSGASVSLRALSDNFLHPSHQLTETPALAWNTELMCQQRTVIYQGS

SEQ ID NO: 966085 - protein, 41 aa, Homo sapiens
SVHKENNRWGLLKRAKSAFYLVRLSGVFKSNGGSPMFSMNH

SEQ ID NO: 966086 - protein, 137 aa, Homo sapiens
PISRSSTGLGICLREHADILHPSTVKRHTLAGHDGMCQSECHLHGSVHIAAGRFGLCAGSPQVSGRPGSQLGSPHQCRLPFMALRSSCTSYSTVGVIIPTITCSKLPLSSDFKVVYQVPADGALVGWPDLLALGGVA

SEQ ID NO: 966087 - protein, 100 aa, Homo sapiens
MSAYYTIARLALHEYCGYYYGPSDRRVDMGFRGVIIGARKEVSLLYTLLCKLVIPKLVIPKLVIPKLVIPKLVIPKLVIPSSSYRSSYIPKLVIPKLVIP

SEQ ID NO: 966088 - protein, 68 aa, Homo sapiens
KATMGVNSYSLYKVLSYVSKELFLLWTQQLNLQGDLTGLQWANLEVELRFYLWTHPAITMARISFVAY

SEQ ID NO: 966089 - protein, 95 aa, Homo sapiens
MLTILRSWVWFNPPQLPAMMATIERVQEQGFTFNEGRDLVIMIEMGAQFLSCEQATGLDVSKGALGNLWDSEVKGGYSSVFIAIAIMILHDEYVI

SEQ ID NO: 966090 - protein, 61 aa, Homo sapiens
MDGTTCTLLSDITEEDLEELGVQDPAHKRLRSGQPCSVSKYTREAPRTLLNVRGPLLWIPK

SEQ ID NO: 966091 - protein, 37 aa, Homo sapiens
VSLTSAGRSGLLLLGRGCFAATVHPAQTSLTPPSILL

SEQ ID NO: 966092 - protein, 83 aa, Homo sapiens
KHKGYMKCRCAAEEQYSPKEDKYRKKSSILTEYTQERQRPCAELAAKSVAKLEKTIDDLEDKLKCTKEEHLCTQRMLDQTPLK

SEQ ID NO: 966093 - protein, 64 aa, Homo sapiens
QGRKDCVEAAEKRIQEIIEDLEAQVTLECAIPQEIPSSLSWCPKRFQQSRQITQGFHVFKIKLP

SEQ ID NO: 966094 - protein, 117 aa, Homo sapiens
MGPRQSNEESLFRGASMGAVPLAAVTLAAILRQIFKLQDWALVAFGGVAAFQEVEGVVVVENIGARAAGKVATATEVEVILWSPFFTFLDPVSPTSRQLYFRTDGTVGSGCRPLSQL

SEQ ID NO: 966095 - protein, 52 aa, Homo sapiens
RPRSYILITILPSILKLRPHSQSRHTPLSRTIKHLLPLLALLLTSSKPRLNS

SEQ ID NO: 966096 - protein, 125 aa, Homo sapiens
GFQQPFWSDYTPAYQTTSRLFLVIRVLSIGGDLMFHMQSAEVSSLTEHARFYAAQKICIALDFLSRRGGIIYRDLKLVTTSSCMRTGTSSSQDYGMCNERSGSMPDTYEQVSVEALIPSYPAPGL

SEQ ID NO: 966097 - protein, 93 aa, Homo sapiens
MALLDQLGQVLLHYTPFRRRDSTSSMTRILSSAEHRTTSRSPERSSYMESLIYLPLCVGTHGQVPAPHYTDYYHRALEVLHTIHLLDDRCGNI

SEQ ID NO: 966098 - protein, 59 aa, Homo sapiens
SRGFSGVMPVGGHSHAAGKARVLSICDHLSGPVTGVTWLAKNERIYSMLGRMFSHNRCR

SEQ ID NO: 966099 - protein, 73 aa, Homo sapiens
MLAQFVSRNVLRLKMSPPALVPPIKCWVLQRMTPPMPGPDKLYNTHKLSSVPNSLVTKTNHTYSMKENNLLFI

SEQ ID NO: 966100 - protein, 56 aa, Homo sapiens
MIAKDGDKCGFDEDITYDYSVAECSHYGDMQGDTYREVEFYSVNVQLERSHVRISR

SEQ ID NO: 966101 - protein, 56 aa, Homo sapiens
QLGLSSASSTTYAKIHFTIIFIGRKSKLSSHNTILEPIRQCPERHLDRAILLGRRP

SEQ ID NO: 966102 - protein, 60 aa, Homo sapiens
MSAFPRYHNHAIPTGVKVFSCLATLHGSREYGSREYGSREYGSREYGSREYGSREYGSRE

SEQ ID NO: 966103 - protein, 33 aa, Homo sapiens
VIRTISFMKELMQWYKDQKKLHRKCATRFWYRS

SEQ ID NO: 966104 - protein, 77 aa, Homo sapiens
IPRLWPPLTAACAQRCPEAMICVIANPVDSTIPITAEVCKNHGVYQPDKIFGVTILQNLVGANTFVAELKGLDPARC

SEQ ID NO: 966105 - protein, 131 aa, Homo sapiens
LEHSDMRYKNRVGCSISGTEGCQEALTCRRKCGVMVYIITQLFGVMISEDMGRDELQEIRNGMTNEAPESTRWPAVVAGRQICVTCGKCRKKNCTYTQVQTRSSDEPMTTFVVCNECGNLLEVLLTPRVDV

SEQ ID NO: 966106 - protein, 38 aa, Homo sapiens
RTCAECTPTHACMSMPRISSGSGDPGETKMLITKQADW

SEQ ID NO: 966107 - protein, 65 aa, Homo sapiens
MALNDQSTQIRPGEELDASLIDPYLKAHISGLSGTVKISQDLVLGTDHSVFVENTFDCIKLKKLA

SEQ ID NO: 966108 - protein, 38 aa, Homo sapiens
GHGDVILFSPCDLSSAVTLKNTIHIYLKGDFNSVGPHE

SEQ ID NO: 966109 - protein, 33 aa, Homo sapiens
MLRLTGVPIEEIMVIFRLSEFLGHLDTVVTAYR

SEQ ID NO: 966110 - protein, 50 aa, Homo sapiens
MRAVMSFLPLLRPCVIMELVTALHNSDQLRLLRKREAAIPLLHGEEGTWN

SEQ ID NO: 966111 - protein, 100 aa, Homo sapiens
ELSLVTAGGAYGIILTYDVKLPLRSWLKLSDRISGLTDTYSKDCLFTIVRNKVDLTEEGAFAGQEKEECSPNMDAGDRVSPRAPKQVQPGGCGRPSIKMI

SEQ ID NO: 966112 - protein, 122 aa, Homo sapiens
VVDSCVSPVCCPTPTHIPAGPCQAFDHPGRPRRVARPGGPLESCEVNSLGAVQQRTVVMVSEQSPQRLSGLMQVSDGRDSVHEGHHIRRVVEVNDMDVEDEHGRARDLVSSSILPIGEVRGD

SEQ ID NO: 966113 - protein, 91 aa, Homo sapiens
VDERIDESATVNMPPMTGAHTCTGSGLKDLSFSVSFTSHGTRAHSRTKTPEKALLAHTAALATILMSGHTRTAFVLTYHLQSGLHSTTVGT

SEQ ID NO: 966114 - protein, 43 aa, Homo sapiens
EESTAIGSPIARMRNGIESSSEDYYLKKLLGAAILYYDCIYVK

SEQ ID NO: 966115 - protein, 65 aa, Homo sapiens
VANTSSSYQWNPDCLIKQSIAKAVWVLTRCDFLPSALEWSTVKKFNEAAGKRREELIDSLKGSQN

SEQ ID NO: 966116 - protein, 55 aa, Homo sapiens
MSLDHLTAHDMNSLLPSMCNSFVVQLEETCYPDRNSWLVQHDVHDGIIAINTQLN

SEQ ID NO: 966117 - protein, 49 aa, Homo sapiens
NGLIHRKTVGVEPEPLEGVVVVIKRRSGQWNAATSYVRTPINKNARATL

SEQ ID NO: 966118 - protein, 67 aa, Homo sapiens
RRHICRLPDSCRCPVPGHAQQVTYSNKDFQEEMDIETKESGSPIYDKSTIQSNRQASTKLFKHATLY

SEQ ID NO: 966119 - protein, 53 aa, Homo sapiens
LAGVLYSPSSIPPEDVRPHSITNTYSDYSANLQVEYSYSTRRRNNLPYCYLLL

SEQ ID NO: 966120 - protein, 55 aa, Homo sapiens
MRNCLIYTVNLSRIRRTQRLLGEVSRIDHTGARRYERTQTQNPDLDALTPIQPMR

SEQ ID NO: 966121 - protein, 68 aa, Homo sapiens
TLEDLANLSLSRDKKTPEANKRAQTNRKSAPPQAWTTTKSCSPRSGVKAKAVPGLAKGQAGIDSKPHT

SEQ ID NO: 966122 - protein, 338 aa, Homo sapiens
SLQAPPPGFAPFSCLSLPSSWDYRHAPPRPANFVFLVGTGFHRVGQADLKLLTSNNPPTSASQSAGITGVSHHAQPSFLLWLNNISLYGWTTFGLSIHPLVDIWVVSTFWRLNKLFGTFGYKYLFKDLFSVLLGIHLGVELLGHTVTMLNFLRNCQTIFLNNCTILHSHSNNEEFQFLHVLILIFEVFNSCKHFTHVLVLLLSWCLNLCVATGYAWCRSRGSKMATGGPERRTKPAGEPQRWELACRVRRSLGLSQTISEPSTPGSLGRPMIHQPRTTPRKSNDDTQRTPSAQSSDETTTSAETPHRANNAQTNTQEPHLQNSPARASDSRSTHRREE

SEQ ID NO: 966123 - protein, 60 aa, Homo sapiens
MEAKRSMCGDHIIKMTAENGRRYTHMDEFGHSFARGVELRGGPQEAIIHNNGLGFSNIES

SEQ ID NO: 966124 - protein, 391 aa, Homo sapiens
MVEWSEINGLWSYWAPGSPGAAFNIWLKLDIAVPSECTPFIDLNVHGFYMFQILIRTRWAKFQWHRSTRLENREAYRSNRHNPYHRSILGDPTIPSNKSKVGADVRRRRRMLQSCESHVALFHQPDGSIGVWALIVLSGGHAERQLVDLIVFAPLVLVMPSLCCVLWRVELMKNVIEKRGLIGLHRAIGLRGASLTVVQHPLRHRSIQCTIFRESSEGNSIDHMSYAIYLCTQIDCVMAPPGNCGVMAAGALQNIIPAFYWRCKVVGKSSLELNGKLTGIGLSVSHCNVSVVDLNWPFEKNLPNFDDSRNGVETSRLRAPQGLRALIEPPGGVPVFTGEPISPFSTGAMAPKPCDASWLHTCCRHRGVCVSARCDWSRPTRKKSCGCLPLT

SEQ ID NO: 966125 - protein, 138 aa, Homo sapiens
GTLGWVAPAERPKRPDAYPGPALQKPEIDAPCAAAAKSQQAFPWMDASVPGDLRLENYPIPDPGPNEVLLRDAFYVGNLVCSACPRTGKYGRIGNYYCENSPWCWDMKLREQCEKSGIIGKAPKILGDRVAIEPGAPR

SEQ ID NO: 966126 - protein, 131 aa, Homo sapiens
  misc_feature (58)..(58): Xaa can be any naturally occurring amino acid
MDPESTDSGSKLLQMPPGSLGFVANVASTEPQENVGPRVICWSYDMVRASLAGSFGAXCCNCFLTVQDCQNRKYGEARTVGPFELTKHLYSLYLTPSPSGDSPDSNGHVHTPTFLFPHRRRVPSGMLALLV

SEQ ID NO: 966127 - protein, 200 aa, Homo sapiens
GEVYRNGGDRVSRTQSGAYSYLAAMLRSCSLNQPKFSNQKVNPEIENQVYLYDRRDVGSRQDSLGSSGPGIRQQWSAVISSDQQDPRPDVIGLHLALVLGLPKDEASCDMQTSMVVTYHAGYDAKVDLKIMSYKCEVWFQSKCNGEVFQGGFKLQPECGKPGRLGTLHSGNAPTSTPSRIMPLDASKQPGLNWSTWFHPF

SEQ ID NO: 966128 - protein, 137 aa, Homo sapiens
MTLVVLQESTYSILRVKLREGKVQAPEVGPQPLTLSSSHPTGTLTRNLNDLIRCLYPPPHRCEPGDCSAVTLGVSASLTWRRAISREKAWTFRELSHSSRLGVWVHEEDQDARQAQEAPVSCPNDLVDVEGPRKQAW

SEQ ID NO: 966129 - protein, 33 aa, Homo sapiens
MHDRMPTSPYGSQKRGTHKHSKSTHLAGIPSLP

SEQ ID NO: 966130 - protein, 225 aa, Homo sapiens
MWRAKAYIIPHRNPTGGVGGARDWCVCNRVWRQGRGPATQVWASGMPWRPVGFWLTTSSHSSGEHWGPPGHPSLVPKVNLRRGKGKACRSTGGSPMWEPCTLSVCGIIPSCMAKNSEGKTAITIYGRKRVRGIQAPGEINCIIRRPILPQCAENPNPHKSYGAVSHKRENPTDGRQHSGGTRDDRLWLAKTRNKEGFLPLSSRVPPPLARPSSYTTTERENSTKE

SEQ ID NO: 966131 - protein, 224 aa, Homo sapiens
  misc_feature (32)..(32): Xaa can be any naturally occurring amino acid
MGPPQPWGHLTSTSMLAPMILAISQVTQGHGXRAISETDWTMGWCQHRTGDGENRSKVEFLFPSSAWEVEVGWMRRRAVNARYEGHYEACDIPVARAVNLSVEISPQAGICAYLFGQQPHSMARTQVFRIVTGNSTQRWQVGGQPSWLREGPGRGPWEETELRVCLSLMETGWYDNLCILDSRRNADANGRDAGVQAVIDDWKEAADNDLRILEQEDEEDQARN

SEQ ID NO: 966132 - protein, 270 aa, Homo sapiens
AIPVRTVVMPRKTGRPGKSNYFLKIIQLLDDYPKVFHCVEHDNVGYQSRCNQIRYVPCGKAVVLMGKNTMMRKAYPRATWNRSTQSLEKSADLISGGSVGFVFTKEDLTEIRDMLLANKVPAAARAGAIAAMRSHLCQPRTLGLGPEKDLLFPGFRVSPLIISRGTIEILSDVQLINALVDINVGASRRPRVLKHVSRSAPSRLWAWSSSSVFDNGSIYKPEVLDITEEMSAFSLPGGVRDVASVCLQIGTDCCISNPILSSRVQTSSGL

SEQ ID NO: 966133 - protein, 343 aa, Homo sapiens
LQNLIVRDIGKQEKGMFLIKRSPYLRMYEVHTAIPGNDRSTWIRVIQLRACAQCPSREDFPLIDDQRMRLTCGRIKMELQSLGPGYWLELLLSRRSGLFAEMTLFPWLDRMRMVCAVGMALPTLAQGLFRSARPLSPLVASGWLEDAISEVEGLKDTAWWGPVSGRRASLTPLSSPALSPWNPGPSVLLDESWRSPVDLGDGQNRSVAPLNFCIADSDSSQEGWNVDIRLRSPPEECVHAMGPLSMGRSTVGYWRLWASGHSVGKPLPEGLTAEKYVPGSSRVGPWRVWLPVGLVNRGRPGSLGDASVRGWPRCCGRPWLSRVLAVLERRVYPAAFAGCPGSL

SEQ ID NO: 966134 - protein, 90 aa, Homo sapiens
NILSELIQVLEQRSKLPKGYQRYPILESISNNTVYDLDVGITDIPSGAAAIEVFVQFNELRVLRDLSSDRTNPGRSLSTSHSSLYYRTRS

SEQ ID NO: 966135 - protein, 258 aa, Homo sapiens
RGEFGRRAYKGDESHGSMFTESVYVLANEPSVAWTRLHEHVRRSLPEAGPQHKADMQRWEEQSQGAIYTVEYACSDLKNLVDSIVYFRSVVGSAQYRPSAIRDHMYCPRAQATGSLLGPLRPPLPLPAARIRLSAALGTAASRLLENCLFPFVLVSGDLLLSCGIYTPDVHVTEVTVGPASLLCAWSLGLGTGDIGSDREQTGSTRRHTINQVNMADKSMSDAAVKNTAGPPSGGMSYMRQRTIQGQDWSSMWGSGEG

SEQ ID NO: 966136 - protein, 52 aa, Homo sapiens
RHCIKQAVNHKLRVDKAAAAAAGDYKRQSDEKACGCSARMPVCSVMKCEQNV

SEQ ID NO: 966137 - protein, 208 aa, Homo sapiens
MGRNQSRKAENSKNQSTSSPPKDRSSLPATEQSWTENDFDELTEVGFRRSAITNFSELKEHVLTRRKEAKNLEKRLDEWLTRINSVEKTLNDLMELKTMAQELRDARTSFNSCFNQVDKRISVIEDSNDEIKSVIASYFNDKTGQQHLPECPPILSKAITGRQEVSGVTLLELVKVTSSGMGLGTSLREAKPKDGYGGANGSRKRLPT

SEQ ID NO: 966138 - protein, 280 aa, Homo sapiens
YNAEEPQDFSSPVVPLVLNCAPEDGQTRSDARLALTLPPWLHLDDPSARRSYGKVNQWTTQIPSTLSFNMSDKVIPFKIRNSLKLKNVIQVTLNCPRNSRYEQLREKKMAFQSSTGDPLPEISKDNSCKENCTCTSCLLRAPTISDLLNDQDLQHVIRHKAGSVSANGDRLAELLRANGGMSYDELCFLEEEATDAPPWKFYDFRNSQRTVGHAEWSSEGSTTRADVEDGYAHGGVDEEWPSGSVTKTIQALLEASILLHFTWPLGNVKQPRVTEGNVTQ

SEQ ID NO: 966139 - protein, 239 aa, Homo sapiens
MRTGEQQRRLNTHQISTEEEADDADDEMIDDNNDLEELKVKASPITNDGEDEFVPSDGLDKDEYTFSPGKSKATPEKSLHDKKSQDFGNLFSFPSYSQKSEDDSAKFDSNEEDSASVFSPSFGLKQTDKRSKKTVAAKKGKPSSDTVPKPKRAPKEKKVVEAVNSDSDSEFGIPKKTTTPKGKGRGAKKRTASGSENDGDYNPGRKTSKKKQEPKKTLCSGSDVESSLRFRVSTYLQTG

SEQ ID NO: 966140 - protein, 281 aa, Homo sapiens
MVSMPDAGALRRGRGEVAVRKPQSHSGSVLALPLRSRKIRKQRAKVLYPAWQLREDAERCLAITRRNRGVESTGLTIWGIALTRGAAVAVVSGLSAGEILTVTWGPQELLEASPAGVSLAQYPDLGCLVSVSVSARAPGVRCPPPPVRSVCETSGSCLCTRATVKLASSRPGPLRSCVWGRRWTNTGVGRRSGDSLLPGVLGLSCSAFPHQDRAASGPGLFEWLIAPMRANQFYRATYEERQRVLVRWEDQTEYRGIFTVTDSFCAKGDGRHIAPAYVREE

SEQ ID NO: 966141 - protein, 110 aa, Homo sapiens
  misc_feature (51)..(51): Xaa can be any naturally occurring amino acid
  misc_feature (56)..(56): Xaa can be any naturally occurring amino acid
  misc_feature (103)..(103): Xaa can be any naturally occurring amino acid
RPAPCKLGAPKNAKDDKTMGEEMTLNTFFSETGAGKHVAPRAVLRLEPTVXLTDSXPGTGTYRQLFHPEQLITGKEDAANNYARGHYTIGKEIIDLVWTEFAXLGGWNQV

SEQ ID NO: 966142 - protein, 199 aa, Homo sapiens
MLYVSQGSAKVQPVTWCVCVCVCVCVCVCVCVRVSLSKEWFKACIGLKKKKNPKKSVGPQNKSPLTKIVWAPPRTVLAGKPESVSSDDTRRGSSPPGVGCCKGEDESSVVTERPPPAGGTKKFRAISLHDVRWGSKGVCTNTDSHTYHEGVHHHTKKIQRMTPGDGGGLQRPKVSIGTCPTSCGGRQQLLLKQIRSLDC

SEQ ID NO: 966143 - protein, 525 aa, Homo sapiens
GPPGTLISVVYIVRSATTTRPLAPAVNPEREGDLRANKGETEKSSHSVEWSKLPGFSHHAWQLLQVGQHENDSRSVTIKCELLTGCCKEIGIKATSHLRLPRTTSTESERLTEGYSYSLLNWQTSYLLHVGYPYVHAYPSEKLARTHTIPVEATERQVHSDLPYSAIRSTTRDLRAHCALCTYGTPNALRRNTIVALARDVPSQYMQPLMYHSTHFGLTCHKRAHLTCRANRSNDKRRTTEQIVREFLHSEKAHTGHAEQWIRDARQGIRHTKATAGANRNRQMEPKDHIPSIAKPKLPQPRCNPKHIAPALTKLHAGPLSSIGALVNAQGLITLNTGGLAIQLSHGARACCLTPLGPLQGTFRYDIWRNKTQRPSSVDFSPTPLRPGAHTQAFTSQNTLVRDTLQRYTWLTHSNREMYHKNPHTRGHHNNTHRTDTKTKGHNLTETPAGAKQQHIGREARKRKPPPRNNQRHAHKSTTTNSTHARNTRPPTPQHRQHQATTEVASTLPPAHNKHHRHTAHQATR

SEQ ID NO: 966144 - protein, 178 aa, Homo sapiens
MPTVKKARKEGGSGPVVSEKKQEAKKSGESPVGEKAKNEGIGQDIQSNKRPHPLVKWPRYIRLHACRVAFLYKRLKVPPAINSVHARPWTANSYSAALMLAQQVQSHETSAKRRMHETVVPGPRRRAAGQIGDVPTKRPPVLRAGVNIVNTLCGEQESSAGGDCNTTVDPIELVVFLY

SEQ ID NO: 966145 - protein, 135 aa, Homo sapiens
MAEIEKFDKSKLREDRDAREKIHCLPKKGLNRRSKQANRNEACAAYMLLYSSTRALPFLFYFCLAVELCKDAKEVGSSLNDVCCPFHIKELRDNERPRHAFPICLSYLGLAGNAKELANVGCKEEVRVRRTVGWD

SEQ ID NO: 966146 - protein, 425 aa, Homo sapiens
MKKYVAIKRGDDYMACPPSIAHIRREPVYIKSRRKRKGIEPHQSWYVKPSPMRLHDFDQKRAKKRKKQTHTKKQNNPTKNKRRRRGAAKEQPRVYCRTLRPRRTQKTNTLNPTRKHRGHPTARHTTSNPKTPHKRETPRHKHQSEKQPTGKPPDNITDETRQQKSREHNRRQKNEETKQSRDTQNQKKHNTDKTGQHAKENTKKPRETKRTQKNKRKKDKQQQQTAQNTGDNKPTAAETPHEKQKKRRKTAKKKNEKKRKRTTKRNPENKGRKKQRRKKTKQTKEQKKEKTRTEGPQGHQTRTQDKNQNKKKKEATNDDHNERNAPQQGHKQKQKQTEKDDRDKQTETEEHKNETNHEATRQQRDKGGERERERGRKREKDEEKKGKRERQRTRGDSKTGRGNKANTKTGRQRQARNKRKGAKRR

SEQ ID NO: 966147 - protein, 274 aa, Homo sapiens
VTASPQAGEKEVSEAADEVFKDIMESSPVLLSRTDQTSVEVTVACSGSPKKVKGQCLGTLLQLSQCHHSKAGSGAQGAQKGPARVQVRRHKHSSESPGGTGEIVQVKPAPPPHSSLCREGWRKALRRARARRRRGGSPGRTRHKATSLVDAVNSDAAKTSQTGEGLKKRVLPSTPKHRPPSRRGPNQASTTLPPKLHSRIIGPGERPPYFQLTYIASHITRVSLWKPASITADSSGAITNVNGHAHHRTRRAPNHTTSDTNDSSVIAEGRHNYK

SEQ ID NO: 966148 - protein, 332 aa, Homo sapiens
LAVRVNGRGDTGCAVVAERNVECYGGIIGILHHGIRARPASSEAMILSLSRTLAEARGVLMALTSSPGVTFTIEDESEGLLGTEGPLQVKKRMDEELIGDGMERDYRDHPRDWTPMRPRDWALDDEDVEELTARAEGSTESGAMRQGDREAGRGLGPHAPGAPDMTSMTRGRASALRRQAPARRSGPRSDSEEDHAHDETISNLADLDQDHSDGRVARGMEGAPGVAGSHIESHYTYPGAVTIGTAKGPQWPEQGQAPQAETDAREETEPQPRRRTESANSRSHKPAHQAGLSPSLQHPGTPLSRTTARGGPGARDRARTPAGRHKTHTVPL

SEQ ID NO: 966149 - protein, 69 aa, Homo sapiens
  misc_feature (16)..(16): Xaa can be any naturally occurring amino acid
EKNGLMVIEVPCGFLXLGTQEQQQQQQQQQQQQQQQQQQQQQQQQQQQQQQQQQQQQQQQHADRQQKYQ

SEQ ID NO: 966150 - protein, 143 aa, Homo sapiens
MQVTGPARSFHRLRTADKDPRGSVHDSGVLDGCGLGSSGASRCARPDPVSDSASQAPKGRERSPPWRGSADDRARAAWTLSRGSHLASRVLRGHGGGSRGSSKSGHFRFRSLAEARTEGGRVGGGGGLGRWSTQRGMRWFGPR

SEQ ID NO: 966151 - protein, 195 aa, Homo sapiens
MQICLGITAASNVPSGFLAPVFAPVGYALFDVAPYQESKWRQISGSAVHATNRDICMLYGWDCSFSTSGSYIWYGSRYSGLYVRSVATIAILCQVHQVLCIPQLDGRRFFVLDYFEPDLRLLQNPPGKPESGWEPGLERQRQLRMELLYRAADVLVQLPRGATGTRGGIDTGMAVLLRQDKVTKAAELSSGPSYF

SEQ ID NO: 966152 - protein, 140 aa, Homo sapiens
NGEGSDFAFLPVTRFIPELLRWSLQVTNGEGLVTSAGRVTGNQRITSAGILGVFSAGDSPGEAPSALLPRGNPCVSLKPLSCQGQNGLDQAVSVRDEALWLMEGSLFLQDVLRRSGQSPMKPFNSIIEHLSVVFPVLRQH

SEQ ID NO: 966153 - protein, 262 aa, Homo sapiens
VVIGEDCCHPGGEALQMWKMAKFMTPVIQENPSGWGPCAGSRVRFRDMPYPGVQQRRSGRKGCRLDREPDTKIRGTQISTPLSGWWKVRYAELSTEEDESSFQLVDTCALQQKTGYQLDIELRFAPEEPPQRAKIVGDMWQFNLQILPKSANTERERTHCDVQKKFREDEFGVQAEIGIRISSEYPVDSSVEVRSDWEVKEENGFSSVMKMRYLEVSEPQDMSVWGPEYYDKAFDRITTRSEKPLRSIRRIFHTVTTTDDLS

SEQ ID NO: 966154 - protein, 220 aa, Homo sapiens
MHSASNTVPSENAPGGSEGEFWGLLDALLEDEDFDWWANEVIHWPDITVVLRPVVVVYTAGSKVASFLTGLTQSTNRLVPHLYEPASVPVVSCREVKLCEKMASLMLMKFGRDPIEKGHRHGMRGSREEKRRPAEGLGEQGGGLDPERRGDVSSAGGGHGSTLVHAEYLVVIRGYTRPRAAIPACRGPAQGLKPHTAQSRRKTSPLHLGSAVRAGKPAHS

SEQ ID NO: 966155 - protein, 307 aa, Homo sapiens
HNCYARGLRFYIGTEDLHGPCGTACSLDAWSCGACCVREIRKELKLNGGCYENLLLCATTDLVCLHACVPLEMLLLLCVLLLLPASTCCTMQLHVMLHCPLWCFPDPVLATQLMAPQSPVCCGVPQPASVPTKPEPLWLVPVTNAQFVPVCWPDTVLTRHVGVLCMDTIESRNLIMPTCAGQLKGGPGQWLGLLAQGTKATELFCHVTTVRNANDLDHSIPATCEAPALGAALHSGLVVNALEEPYGQWRPAYSNNTQNVAHVPLDHLGRDFCWRRHGWTYTETQGLAVATQLFTRMIGKATAGMGP

SEQ ID NO: 966156 - protein, 251 aa, Homo sapiens
MCDAAINARPHKVDGRVVAPQRAVSSSKILNRSGAHLTVIKDIFALALHKTLKNITYEIILCQYGPIDVIELMNVTEACGLEKGLCLCDLLTTMTPEIMIVIQNISYCELATSVNVRKQPVTARDGLDASTPDQRGRTRGFLVDFADGRRESVRAQMTAYGPCEGNSRRIDRWAPGGHRDSWCDLGARGDVISICDAWLHMDGETKKFGFTQSAQIWPYCEFAQLAFHGTFTPTSLAPHIWANTPWETKNA

SEQ ID NO: 966157 - protein, 98 aa, Homo sapiens
QENMVQKLTNQKHKLLKGIELGSLMDNEVDLPIEDINQNVLLMTPPDSDSGSQDGYSPYSIDSEPGSPLLNDAKVKDEPDSPPVALGMVDRSRILLCV

SEQ ID NO: 966158 - protein, 297 aa, Homo sapiens
APPRMGSPVSALPSLSGALQGASRRDHARPVSSRLVLLALGPLAWWPSGRDVVSLRACRVGEDSCLIHRLYPRRCGTTWCLVGVTFIAWNIDEAHGRCPSFVVFSHEHVETCNAMPRLEQHVRHQRCAQGSLLESNLCVSVIHQDSPKRRNRAERDQPNPPYPKGSLGGRVDARPSPVASISMERIQAKLDVSNRMSRVSDYTGLQGYWLGNFHPLTFTNDISVRRLERGEGKRIRSPEERKGTLSVNVSLASSFFHRQEGTDTCQYERPPVKDESGRFTLSTREFRGIRTSAFPFL

SEQ ID NO: 966159 - protein, 116 aa, Homo sapiens
MCKDYLSSKAFKMWPSATNSLCSDVGANEDLNLELTFKQEAEPKSWEILQPSQVVKKKTIFSKEFKQAVEQPLADICILKGIQVVISNDKWGKGLKGISETYGAAPPVIGPEAKED

SEQ ID NO: 966160 - protein, 239 aa, Homo sapiens
MARQAQRSTTHHPHLLGLPRRHLAAPRHAPPSGPAPPSCLPGRPPRLSRTPHGFSPPPCSLPSLHSTGPWNAAPCATHLTWPPPDQPLWPSPRGHPRVTPLPHAFSPLPAARPWGTHRVAWAPGPGPNSVRAHSPRRCRPCSPLPQSPNGIVYRTTKQPPAPTLLPLNIPPPHTLLKPPLSNLTITNLPTTTLHPLPSPTHEPHKHLNHSHRPPPPTSPPPTPHHIPLTLPRHPHPSPP

SEQ ID NO: 966161 - protein, 53 aa, Homo sapiens
MSAGVSSMTLGRNKDERKQGPGGAIISLAYEHIWYPNMGTPGNMKDRKAQLLA

SEQ ID NO: 966162 - protein, 268 aa, Homo sapiens
YCGRERGVGKSRDFGFVPPGAISPPFYFAGQNTVMGRTKKKQLKPWCWYCNRDLDEEKILIQHQKAKHFKCFICHKKLYTGPGLAIHCDAWYIRETIDAVPNALPGRTDIELAIYGMEGIPEKDMDEQTRLLEQTTQESHTKRSNKMILMTYDDDRLREPQALISATDLFNLSKVIFLPSGHSRTSTSTRSTRNASRHTSIKCQVVPPLMPRNATSYARLATWTCIIQRKYTQIIGGETHIDGDGWNDCTLDGKYRSDCLTFHSIHQR

SEQ ID NO: 966163 - protein, 66 aa, Homo sapiens
MTRRRLLLHAVDVPGIRQLNTFCHPSSVVDPHSTLPRHGTTEDTGACTINTTHERDASLTYVYVVH

SEQ ID NO: 966164 - protein, 302 aa, Homo sapiens
VIHLHEPSLDFLLGFSAGTEYMDLHGMDLGQTALHLAAILGETSTVEKLYAAGAGLCVAERRGHTALHLACRVGAHACARALLQPHDPGPLGEGPPYHLTSAQDPKRSTRKQTYTLSGLSNPDSDKKKEEKESEEDLEKTCKAERLKTLQVGAKTESDVGHNRIKRLWRWSGGSEDAGADLDKIESPTDASGTPYIWQRRTQAADVTGASPEGRRNPADRIVLESYNVTARANRQKAHESQTAIIVAAPPEQDEEPRESARSEGTKKILGPFNKVVRVKADRENKSVSQSRRYRATQWRGKE

SEQ ID NO: 966165 - protein, 314 aa, Homo sapiens
  misc_feature (13)..(13): Xaa can be any naturally occurring amino acid
WRRDRGPRGWVLXSDEAQTASEWGWLATRSCHHAAASSGPSSRHELGRAFLAICPCKCSSSPFCTLLDSLPDITKRLPPLTGGLHHLVVVDPIVTPAAVACRSFQRWEISCSGILASRYKTPPSSQGLELGGSITGLKFNPLNTNQILRLLNGREQLCCKTLKATFYEFYASSDTINIWFSSLDVSASSRMVVTGDNVGNVILLNMDGKELWNLRMHNEDSDACGSLNPCCDWFLATASVRSDQCKFGTLRQSLEGKGSFLYRRLPQQASCPNAACFSPDGAGPDHGPKSETELLCFQRELPWADPDLNVFRLK

SEQ ID NO: 966166 - protein, 103 aa, Homo sapiens
MEKNRNSREEIKQKTIEKQGTNSRTARRGQKRHTAQVQEKNQHRKPHMIPRKNGTATSAKGKKTRTEKWEHGENKTRDKKDTRKRDETQETTGNITGKQKRII

SEQ ID NO: 966167 - protein, 304 aa, Homo sapiens
  misc_feature (232)..(232): Xaa can be any naturally occurring amino acid
MCAAMHTENCAAECVLRTVHCWAWLKAGSSVDEDWYKQLWMCILCMGLGDHGLQTPYPVLHQQLPQLFQDEINLCCLKEWTGGMCWVIIVAAPSSCYVDYLGQLVLCLEHGQPPIERKVIELPNIQNGRSVPSRTAACPGTMIWANLTLYRLQTYLDSIGLVLSTARERFLGGAPVKTLGFGPRNSEGSLGEGCMTAHITGYSNAALENWAVDHHGSSRKTRWHLAQMHSVXVNATHTCRNTIRNSKVNKAFVANHMGNKEYHETRPLRCSGNVHQTQRNCVQKVNIVEVKIVSRWMKGENEGD

SEQ ID NO: 966168 - protein, 58 aa, Homo sapiens
MLGRTIMPPDLIRCSPNVDFPQEQVTASLGGIQEGAMEWSRLKPEQALHTLHGGNAGA

SEQ ID NO: 966169 - protein, 41 aa, Homo sapiens
MGAKTGGTSNITSRIVDSRGGPIPKEVVSGQPTRGPEGIPC

SEQ ID NO: 966170 - protein, 80 aa, Homo sapiens
GETAGWLKWTDGIAERAALEELVKLQAKRVRGLKQQKASELMRGGGNLNEASGSDESNRNLCSNPKAKRLCPRRWIARRC

SEQ ID NO: 966171 - protein, 75 aa, Homo sapiens
NGSLQKVNVGVLGPQRRGHFPPGPPNEGLGLRGSRASSSRQRELPLLSQALFWRLTLVPGECAPTTSLQTALITP

SEQ ID NO: 966172 - protein, 138 aa, Homo sapiens
MIPKVEWSGVPGGGDNLRLIQVLKGPVEGYEENEEFLRTMHHLLLECEKRAITCFPGTPASRTEASSAQHLYTSPARMVEVIAGHPAVPGILDVCSPSAAGIPKQCLLSEEETEQLIVPVRQYILVMTVYRSVDLYPM

SEQ ID NO: 966173 - protein, 65 aa, Homo sapiens
MEGANLVKTSGNKNGETTDPGDGPIKPGGHTEPQQLKKARRATRQTTETLRDSKSTKQQPPNKGK

SEQ ID NO: 966174 - protein, 323 aa, Homo sapiens
VQTGWWNCPGERSVYNAFDSWVTPDQACGQHCLLSSRVSCFFVSSEGGPSGIGSSVGAWAPLTSIDRAWTLALHLIHRPFPGPKLGHDRVAWPLGSLLCNCKWFLNPQSQLSCQTGQTGVRETGPWPCGVVAGCETHCPRHDTSLSSMEWSLTEAGASSSLNFNPFKSFTRNLVGANPQQKGVKERQIHDLLVGWLPVGADACVTPGDTGPRPCEDSGPGLRSDLPALGDGNGGGRKAPPQPGAGNWKCRKWPPKRERPALNPGNPTYPARRGPTREVGNTAKPEKPIPMPGGGLAPPVDHEGVAVGREKNAEPNSTVTDTTE

SEQ ID NO: 966175 - protein, 273 aa, Homo sapiens
METLNEGLAPAGPEALTFQKCVMSVTQNRKLDMTNYCMDDLTGETEYILARLLSSIPWVVPINTDLCLTDVFELQQRGGGAPKNPTSSAGTMSQTPVYRYVLNHEGRPQDHPKGRHTWADAVVALQGDGPLPAELEELRNRVRAGPKKESWVVVKETHEVLDIAVPKVLEQDCSDAGWKTEKHQLHACLHCRGHMAPVSRTEGLVSSPRREAQSQCMNLEQDPLGHRQRQWHRQLHLSLRAPEQDWPVPHRTSCNPCNCPVHMRPATGHRTFT

SEQ ID NO: 966176 - protein, 49 aa, Homo sapiens
PEEGAQQQEPKSNRIGKREGGDKKFQKAPVTAISNPNLQEEAIVKLVAP

SEQ ID NO: 966177 - protein, 250 aa, Homo sapiens
MTQAWSSSCSPGHTPRCCCLLLPGGHACCPSSLAFQAWALAGEGWKRALPGVPLGLGLAIRVRACVVVSGLARPVCVWGGVKHAAAPSPRGAEPPGGRLPDGVPPAFQLQARVPGNGPAWRLLRRGMFVQQLLSRGYGFDERAFGGVIFQKTALDPAVGWALGFMLNVTNCSPPTAGLGKAQLQLLVVSAVFARACWLSCCGSSSPVQTTWPGRRQYKGRTKSTTQQNSLPGRPKKRRRNTIEHERDSSA

SEQ ID NO: 966178 - protein, 512 aa, Homo sapiens
PEHSSWIEARGVLYSRPTDDDDDDDDDDDDDDDDDDDADDDDDDCDDDDDDDDDDDDDDDDDDDEDRDETDDESEDDDRGGAGGSEGGRRQAGSQERPGVLGPESETGARSCARRRPARPPGAPRPGRPLHAEPAQLTWLKCVTCADVTERTPPPLPFTKPQVFESDCILTRPIPYLYSLPPHALATTRCAITAIPMPCSCPICRAVATRRDARGPIYTNKPAHHHYIYVLDPSPPPLNSPSNRIALLSAIRHRTNATGNSYMFCYSDLYMNLQTYNLVIYVSLSTEHRTRTEIHNLISYTLPPPFSVYPQRSGSGSVRSQLWFGLRLARSGQYAFRFGSVRFRSDRKRIWIAYACFRYLSHVPVSTLPIPFPSRSVPFLCIPFALESDSRSARPPRLMSYAVVCREQARRMSGHGKGRGKRCVRLGLVSARLKILVGSAVARMFAPPRCRDCYLFSRFCLFRDAQRRAMASGSGDSIGRCPYLCTRCCIRLSYTSHHSLPLVVLPRCPHPP

SEQ ID NO: 966179 - protein, 317 aa, Homo sapiens
MTGNSCTLQAGSVLAHHASSDQAFMATADQLTEHGIEPTGTYHGDSDPALLAPPSLLLLQLNATSVAKYASLVPSLAAISKPAAPTGPLLQLRLHLCATTPLSTTTHSCYSCVSHARARLTTCGPNGTLHHDGSPKPGLTYCTLELCAYGNGRAAAEPRELSMQGTYPACTTHPLCAGGATAHLRNCGTSRSITQRLRRKELPCILHHCNTIQVLVAIHTNKCSEQPTEHQTPPYQMPQTLIPSQSRKARRNIPELQHPTQHLHQRKATPTLTHSYAYSKHLTQHCPNTESLPTPTLRDTHNPCDSYRPTHSTVALD

SEQ ID NO: 966180 - protein, 84 aa, Homo sapiens
PNHDAAAIEGTDTQLRWEKLLPHIRVWAGTKEDLTEDSGTWLANKVPAAARACHAPCEVTVPARTLGSPGVPRDRPPFSRLYGI

SEQ ID NO: 966181 - protein, 463 aa, Homo sapiens
GPTRVYLSFPRSKSSEPAKRGRTALGRDGTEGLLRYEKEKGFNESSYKEFYQDDELGKKLVHSMGNTVGSGMELYAGTRMDSVMWTLDDVAEDDPELAGLKFGENCQGYVEAHMAECAYKRLRASDTRRGKLDKEEMSWTYYIDGNRANCLEGSGDRDPGDGSESSRRTRVALLELDAQDLMVVIYQGLRRRETRPRGESGHSAGAWTPVEERLVNLCVASRSSPWFFLERSKPQGMRWMGALYSFVEHSGGVQENHNSRVPDLPQLLHCLRDHGGTKAQCRLAQKPNRRPRERSGLGIHGLNHRGASQQSLQNSPGRTARHGQEALARVKCRLCGRKNPSGRHTRGRRQTSGGHTTGEVGPKAVRKETALEGSPGGYFTWAKRPGGKPGENPAQGWKHDGSTTGETMTLDTHSSVFKETTEYDRQTSGGRKQHESKEYPHRQEQKTHSRHNGEEERGETEKD

SEQ ID NO: 966182 - protein, 48 aa, Homo sapiens
GEGMMHLGKRPNPVEDLAWRSQMLSERSVSHSGITDCWHSRYNILLIS

SEQ ID NO: 966183 - protein, 258 aa, Homo sapiens
  misc_feature (156)..(156): Xaa can be any naturally occurring amino acid
MARRIRDAVSCVTWRLCGGPCALVDVPGHSLSSWHAYSPPCYALPCVPVLARMCWRCARCPSSDVVPDRCVDVRAAGGTLARVMMLDLRGCNSPALGGPLRKAGDAGCVFVLMSLCPCALGILQIECRIAQSVGWLGRTDVVDTNSNQVNKPVACXECAIDRCQLTLGVKQSHSWVSSGNEDSTLGLLEAPGQPLESGGCFPGVRFPAPAAYFSIGATIGCRFIRGELLFTTAFGLRGPNMHLCSPRSLGTHSFDSVD

SEQ ID NO: 966184 - protein, 40 aa, Homo sapiens
SQFLYQLLMILLRVPTDTEGHGALSISPHQQKSRFPCRLS

SEQ ID NO: 966185 - protein, 99 aa, Homo sapiens
TTNCNRIRAPAVNTPRPDGDDDDDDDDDDDDDDDDDDDDDDDDDDDDDDDDDDDDDDDDDDDYDYDYDDDDDVRVSHQRSCIVRCCCCVVSVFVSVMHD

SEQ ID NO: 966186 - protein, 293 aa, Homo sapiens
HEGRLYCRATDASDNNRDRGDAYYDATDYRHSYEYQRENSSYRSQRSSRRKHRRSEEAQNVTLYADSSYDEIVSTLGEGTFGRVVQCVDHSQGMRGLELALKIIKECGEVQGIMLDYEIKRAREISMRIDPDKQEASGVQMFDWFDYHGHMCIILIELTWALAALPSFLKRPSKPTPDRILASPPRCATSGLPAVPGCQGSSSDNKLTHTRPQWLKSILLCELHDYELTYNLEKKRDERSVKSNRCAGGETWAVPTWTMSSHSTHCLRLGDYRAPEVILGVGLLTGFGHEVEY

SEQ ID NO: 966187 - protein, 111 aa, Homo sapiens
SNTWSTVRVPLRYLRSVTRYLMQYITWPADQYNVGASIYRCSVSNEVSLTLSCCYLHKYRLREQITVEADKESDYESKMPISRRIYVMLEIRHSNGQGVIQVITPRIPCVA

SEQ ID NO: 966188 - protein, 457 aa, Homo sapiens
QPPLTNGTRTHALPRRQTARPHTQPHADLLLPPCTRPARASTRSTTTRLSPCAPSTRTPQHHPTHLSTPPRASACSATHALCSYLHASAHPTPPAPPLLPPPLPPGTALPAHTHLHSLSPCAPAQNTPNTHRASPAPLLRAHPTTPCTALLPARLTRTAPTPHTPLHTRVLLQHCPPACTPGPGAPRPRTPAHFPSSGPPRPAPKRQLPSTLFFRSPQAPCAPRCATLPPPHTRLCLAAPPCFPMAPLSQTPSLRPQVSARTQAAAIPAPHFSPAPNGTPPKRKPTLTNQATTHAQKPPLTPPRPLPNRAARGKAFQKAAAPRNGPPYPWAPRPCTGPTTHPTLTRPLGTSLSVLLQFNTPTHSPLPLHPTPPTNPAPPRRITTPPRNAPHHNRHSTDLPDTNPRRRSPAHVGPPPVAPTTQGSRMVPPAPLPPPPPARPTPPDPPHPTYANPDYSH

SEQ ID NO: 966189 - protein, 78 aa, Homo sapiens
IHLSTPRIPVSLSPRKKLENDVSPLQSEVEEVSKNHAMQNEKAKKAITDAATMADELKKEQDTSAHLERIKKNLEQTV

SEQ ID NO: 966190 - protein, 143 aa, Homo sapiens
NVEEITDFLSNFDELDTLRSGYRRPDLCWKLSVRDVTKTLAAMKEQNGDVKEAASIVQELLGGKPTSQGNRKSVLACTVGANEDLSSDCERITMRRAQIDQLDNLSPRIGPESKIQSKLESTYYHSSEFCWHDMRDPICLLGR

SEQ ID NO: 966191 - protein, 285 aa, Homo sapiens
VVLVAQCCSICWVPQSSWRVFKPAQLCLCDSSGPCVPPNASCEGNTCPWDVALASASVMDGNGCPHLACWLPGGRHLGPHLLPTALKRQQQQNWIPGQWSWDSLQREGLSPVGRRGGGVAALQLPRAYNHYSQGSDLALLQASTSHTEPKSNRVLTMEPKPWTQYDVSHVWDAMPCMVGPTWVMRDSSVPPRDDLHRSWRSRSGQLRAAPDGHQYEIRTARQLLSKVGSIVTGAATRIAAIAHAGSKNLLLPRDRALGAHGDTPVVNLPIDGIGGGVPYPMIALQ

SEQ ID NO: 966192 - protein, 151 aa, Homo sapiens
MPACLAIGAGREGTCSLALAAEQGANPRTSCAMASQCASPRTSRLIASAHAVGVPCAHALMSHFAARAFQCPLRSCPTGVGLHDMPPGGDECKYATSLLVQSARLEARHTVPCALRVSIIAPVSLLGSSPNTGCISLRRVPCSRCALILGE

SEQ ID NO: 966193 - protein, 130 aa, Homo sapiens
MRTAGNTRGDRGPGKPLVEKKRALRINESLKELGMLLAGPRGAGPKLENSRKCLDLERGERAPGCWLRGQGRAKRKQLQAKTKGNASMPGNTQCMSRGGPRSVSPCQATEATECEVPEAIGPNQAVVRGA

SEQ ID NO: 966194 - protein, 77 aa, Homo sapiens
SSVPCKLGLDWQYESLDVKAGPREPSDLMGNTQEVSRKVTYTVIDRLCAAKRAVATSAYRSFGVGSSYHCEAEFTKL

SEQ ID NO: 966195 - protein, 274 aa, Homo sapiens
  misc_feature (129)..(129): Xaa can be any naturally occurring amino acid
  misc_feature (134)..(134): Xaa can be any naturally occurring amino acid
RPLLALAGGLLRCLLLLLANGGGVRWGSRAQDAAAASADGPPAADGEDGLRTRTASTCSTGLTCFTHRDPLAPRHFRYMFFAPMVVVTSVQSAVKPNFGNDLRRTKYNSHCARCPRVYGGIKRWTCQRXHVRAXCVRTEAGCSRIAPTLKSFARASGQVELLKLPGVLWDFQNTWKHWIAAEHCNVGAQCHQSPEGGTDPVPPRLKQWACMSSQASNFELHVVQGDHVYQVLRSVLVVTSKSSWFQAVEQLDLVPVNIPKAVNDWASVDCTQHY

SEQ ID NO: 966196 - protein, 39 aa, Homo sapiens
MHTWLLCCREETRLVCMCLGVSLPCPRVSAVRMTSVDGH

SEQ ID NO: 966197 - protein, 266 aa, Homo sapiens
MEEEIAALVIDNGSGMCKVGFAGDDAPRAVFTFHRRAASAYYSGRPWWAWCLEGLPSVGDEAQYVEAVDILTPEVSPLESWHRRSTGTDMEKIWLHKLLQLRLRVVLRSEQPQVLLTEAPRGTPKDQTREKMTQDYFRDLQLAPGACTIEVIQAVSCPYYCRRGGGTTVAIVMELWYDRWSSLTMVPIYEGYALLYSDSGSGAGWRELSDQLMKILTERELELHHLWASGKSVRDMDAHGVLRSAWMFEAGDGQRRIRAHSLEEEL

SEQ ID NO: 966198 - protein, 97 aa, Homo sapiens
MTIDYERVCQERTVTDQDITRFRNSLKELQLQKQKVEGELNRLKRTASEDSCKRKKLEEELEGMRRSLKEQAIKITNLTQQLEQASIVKKRSEDDLR

SEQ ID NO: 966199 - protein, 524 aa, Homo sapiens
LSRRSRASSTVLRRGWREGPLTEIANGRLTRQPGPVIYDETARNHGMDAQTDRTARTRMTTTEEGHYRPGGHDTENTRHHPHVHNEQAGKGLLRAHGRSRCYTPYMTHREESPHSTPHANTMQTRHSYTHPKGQHIANASKHMRTQRPTTDQQADAADTQKRESIGQQTMEYEPDENRSDTRRNTQRIRPTTEPRHTQAEATRTPPTATQTNHEQTRTYTYKGPSTPAQRRTKKHHHRRDTGLHPPNDDHKRDTTQPPHCQHKPTTPTHAEPHTAMHATDRRVAGEPPTTETPHNHTKNTHRHVPTTHTRQLRTRPRKRTRGRSARTQAPHDQPPYTQHKPEDTNCHTPDRHHDRHPPPTAQLARPRPPKRPHRTTPPPHPTPRHNSDPSTKSTDTRRARHHTTPTDDTNRRTTPRTQPTTNTPALPTAPTPPTHRPDERSTRPNTRRRHNHNRRPSQRATASHDQTQRELEGAQHHPDDKNEATHKQHSASRNHTYNHITTQQHPNAKHKDGPNQTITDKQKI

SEQ ID NO: 966200 - protein, 76 aa, Homo sapiens
MAFNSNNEQRTALWKAGFKGKSKPNLLKQETSSLACGLRILFRMYMDESRVSAWEEVQQRLLNVCSEALSYFLTLT

SEQ ID NO: 966201 - protein, 339 aa, Homo sapiens
MPSDQDHVVEGDDSFTTFFCETGAGKHVPRAVFVDLEPTVIDEILKWPIQTSSSTQSMLITVERGCLLNNYARGQPIIHLVIWRSIDPVAGIGILSSMSDRECHSDIRAAIHGLFPQTLSEWALGSWLHPHVLMERLLSDYGKKSKPGEFSILPMLPQVIYRPAGQMARSKRLVLTTHTTNPCAVSQNVCRSLGWDRRSIVYDIVRARDRLMTSSAQGYKRMLKSGSISQNLSSSDPRDFSCAFDGALNVDLTRKFQTNWCPYPSHHVPSWANYAPSRSLAGKGIHVAAVGGRDHQWPVLKPCNQRLNVIPGTGSLGLLLCPGNWGHVEAAWRIKRDSL

SEQ ID NO: 966202 - protein, 66 aa, Homo sapiens
ILLNPDYVRDLGYVVEGYMALYETEDGVPDNMKGKDKIVFGNIHQINRAGTETLNKVELEKCLEDP

SEQ ID NO: 966203 - protein, 131 aa, Homo sapiens
MMDSVLFDEQRHCLTMLSNEELRGKYSYRHAEPSVVSVGDAFADTGVLCAPQHYVPEMFPIRWAIMQPAKQTATGPNPWKEHWHIGGTAHDRMGLEFSSVRIGIGHLPLTYGYATKGQRIFLRLRDGKAGS

SEQ ID NO: 966204 - protein, 222 aa, Homo sapiens
MAAAVGVRGRYELLGLAPGQVWLLSSFRLAVVWRHEGPSGDYATGDRHGGRRKSEQLVDSPIELATHPHDLVILLRQEAAVNLPQRIREAIRLLKKFSIEENEGRGETWTGDRDSNHRTTQTAVKGKVPVSGTWIYTDGTYITLETQRHQSVNDYIDTESPVPPDPEQPDGTKNSRTSSIVYMRCQHLRGVQERVNLAAPTGTLTEDPIFNIFHRKRVGKES

SEQ ID NO: 966205 - protein, 110 aa, Homo sapiens
VSVISKEESSCWTVSGTPCREFRSRFREEKEPVVVDTVEQKKEPILVVSTFTKPEHTHTPEDLQSRMESYVKEVFGSSLPSNWQDISLEDSRLKFNLLAHLADDLGHVVP

SEQ ID NO: 966206 - protein, 376 aa, Homo sapiens
DSRSGSELQTLGQAAADHPRRARDTTSPRMDPPIRPETPELLLPEADAQPGAPKDSRLPGVTCILIRLGPGTPVSLPGGGSQGGTSRSKRFRPVQFEVSSGFPMMPDYNSQSHDSCCECAEDWPPRGPQKPDGATRAHPMCQPPDRGPPQWKKTQGKIGRCVGHEIVVIAKGTSMWSAKGSRIGEETMRVNGSDKGHSGTKTEVDRGYWSSIKVNPTEQVIARPTMKARGGQRECATSITWLHAKGWYAPPGRPKYTGAGEAKQLKNGIPNEEQTPKQEDKIEHKETKTAIQKTTRPVSNEASRLHMCKAIQPGRTPRARGAITQKVRAIDSRTGDPDTKVIERTSHAGGDYGQSGACWLQCRKRKHGSHMGHSGG

SEQ ID NO: 966207 - protein, 111 aa, Homo sapiens
RRDDINLYLVRGTASADFPLTLGKPVARNRMVHSKVIVDGICVNFEAELPSLIHRRGIEKIPWTLEVGDYILTPEMCVERKSISDLIGSLNNGRLYSQCISMSRYYKRPVL

SEQ ID NO: 966208 - protein, 471 aa, Homo sapiens
SGAVGALLLALRKRGVLSVRRAECWAVTWRVLMAVLCPSALMCDSAVMLDACCAVLCNDPLPHSVMCCAVCCDVLLLWMLCVLPAPCVHCVAIVQLCDLCACLTAPVCASCAPSCAYCPCCKPLSTVLHVCALPECVDAVPMTTKCDDVIVNLCCAAIVTCIALVLTCCALNSFAPSIVNQLMLAMLAAVLMHCRLPSACFGCDDLHCAQASHGVLPDGQTTRKTFHVTNICCALSPFLELQLVCLVTGLLDFVRNLIACCATPAQVTDPPHVEHDEAQLGPPVRTFNPEYGHDIHTLTRTDIDTALPVGLPFMGQPSWISLPLALGTALLFRKSFEAARRPPKTRLRQSRGVLGGTTQNLLQAFVSREALGQVHPARQGAKRAKRHTHYLQHHQATTTTTEQKTNTTSRQRTTQPSHPRNERAKRHGRSTHDTHEKKTAQEYDAPHETITTGPTQTGKKTNEQGADEARH

SEQ ID NO: 966209 - protein, 204 aa, Homo sapiens
CSLWTDPTEDDEKLIEEIQKEAEEEQTRKNGENTFKATCDSSDCEKACGEGARGVEALPRIRIPAVDLTSSQQMLTLCLSRHPSSFRSLILRRWRLCDFNIEFSHLLNDGGTVIRRASVNVVAALLSTDDGRGCRTKLTSLGFPNAQKYEPLVDDSYLVCTIDHYMRNHAEIRPGEYEHFLELVTTSESTPPLWKLVEQNRTKG

SEQ ID NO: 966210 - protein, 33 aa, Homo sapiens
MKAHALRDNSIHGSILWRTKAPEIDPYQPIVQT

SEQ ID NO: 966211 - protein, 47 aa, Homo sapiens
RTRSLADFERGSDRLPVQSSGMTQSSAHTWSSCMITSLEQNLIQVAC

SEQ ID NO: 966212 - protein, 297 aa, Homo sapiens
MATWQHYVQEGRIYAKTQQASLNSPHSTPVPNPEAESSSKEGELDARDLEMSKTSQAFLQRGWRPWALHLSSTQAARSCIWHSRWLLGAEDLYGVSPVVCSKLTEVPQDTCKCLRPRSDSPWKSRQQPRKQNTVENEEQCKHILENRSCAEWAWGHELASEKLLSKLEMSRADLRGRRGERHHGQASHQTGHGNKATYHMREKDTYRDHLTTGYAHRKKEQAKTLADHATPGRAYRPTRPRKLGENKTETEGTHHKRRHKHRRTRQRKNTEEKCEDRLHKQASNNGTQKVAGESRTT

SEQ ID NO: 966213 - protein, 72 aa, Homo sapiens
PTLDGPDLENPCEHRHPTDVTNRLRQNELTYYCCKKDLLFTLTNPLEQWWDILITENSSSAGDSISGNSLEP

SEQ ID NO: 966214 - protein, 298 aa, Homo sapiens
EPFAEERRTSVGMAPSGGASWSDKQELEELARHGLWIGALAEGCIVEDLTGVHFLGGGELCPILRLFPSLVPSVLLEQAYAGAYGLHICVDGMHVETERCPSWSKLFPRTINNRYDIYLLSHLGDDRTKQVSEKRALARTVFLGRESVRLDVSNAKRQMDHQTLIIVMRESNEQSLRSFGGAGLGRTRAVHRDVLSVLSEDQPKLDRSSLIIAVEGLDLGMAKRLGALRSPNALADSDSSRDGTEAIFDQASANERMSYVAKEHPCDPMNIRGLSLKRVLDQHEGVCGWQELGGNSGC

SEQ ID NO: 966215 - protein, 158 aa, Homo sapiens
MCILHGKLESGPLIQILKLAGGQISRVGYLGDYEMIYFRGQRGEKILLRAGVTAGTCLHQKVAFVNGNARSCGNKGERSCGRQGYELRTVARRPWKSKTASKENLTKEALQERAQLLYEDPPVSENLTQMVETMRTLKICSLRMWMGFEPGISDMHED

SEQ ID NO: 966216 - protein, 46 aa, Homo sapiens
PTNHNTYRYRMGSPPPAVSNNVVLRLQSVSNIVMPAARTVRDRRSK

SEQ ID NO: 966217 - protein, 46 aa, Homo sapiens
TAVHLDILIVCSRVLPGVSLSATRMDSKLIRKISATLWTWSSVSVE

SEQ ID NO: 966218 - protein, 324 aa, Homo sapiens
MGHRSWTRKLMLSPEDARSSYESSVGGGEGSQRTSFLKFALYCGFWYSRRQARQSSVQACLETNEVSEDGVLVVLVKLSPYVAPAVFTHCEQVLGEGALDRGTYYWEVEIIEGWDQQMGVMAEDFSHTRSPTTASGWAAMTRVLHAMLGGKWTQIRPSGFMGWRLPCPSPFSPTGGVCLEYADRGLAFYAVRDGKMSLLRRLKGSRARRRCASPDCPIEAHSRGRLGKSSLEGLFRPEDSRAALLPVRVMEAQLGESGANHEKSGNIPVLRRQGIPRGTGQGRGRSGLWLQLKGRTNGGHSHTEEKGATLETEQPGHKVVKGTA

SEQ ID NO: 966219 - protein, 53 aa, Homo sapiens
YPPGASLAWENSTPPRSCSGQGVPLSLSKEIHKHFLPLISHHHHRELLSGNIA

SEQ ID NO: 966220 - protein, 302 aa, Homo sapiens
  misc_feature (232)..(232): Xaa can be any naturally occurring amino acid
CPVGTPVSGGMSFTTRSTFSTESTGPWALSRRPVYGARLGQQRGSRLCRRWVALVARYLLVSRSTSFSGRRVEVRGLVCHRSIVRGVLAGMGGISELRKETMHKPERPVLARLNLDRVRSLETEIRRLDESYNRCGASLCRRTGALMIRRRGSPYTSKSHRRDLRDSNLSQDTCGPMPVSVLQIDNARLAADDFRSQSMMTEPGHVDHSCGVTTVHGAPTKVIDDTRYHNDXQLETEIEALKEELLFMKKNHERGSKKAYKPRFASSGVDRGGRMPPKSQDSPKIMADIGPNMMSGRKTERS

SEQ ID NO: 966221 - protein, 65 aa, Homo sapiens
WGEAVLSRKVLLDGVQNPRADDLVWKSLYVSATVILHSCSDMVQAERSGIPICRPLPDQIHFTNA

SEQ ID NO: 966222 - protein, 321 aa, Homo sapiens
PRTDQSPRAAASRVSTYVPAAVAAATMPKTTTAERGLLTGRLTRNTVNGRTTDEDPRGCLLNLLLQSQSPSLNKAPANRTGEKVPKRATNGKTLMLARQGNNPAENWQHAKTDQAQKAEGAGDAKLNAVCTSPTTLCYSLADCTASNNTYPIITAPIHTTASNFSLLNPSLHSLFSHHAIAASQRHTTAHHHSTVTASPRGAKRARNTSTHHTQPTSAPPTAAQPLRKARAHTPPLTTPILRTTAARTSPINRAPHPRRGRRRRTIPPVEPYHDPTAKLGPPPLNRATTSTPPPKESTTTHRKHTPHKPLRPTQSRNTNRM

SEQ ID NO: 966223 - protein, 252 aa, Homo sapiens
MPVARSWVCLENLCEPRGEPSRNLVLETMQLRLYGEYGLRKKREVWRVNIYPGQDPQGRPGTADCVACREDPTVQSDSEKSILPVQQAGMGPAVWGCMDDRQTMNDLDYNRFVALTNGGIALYEYGLLGTQDLHSWALTQASDPTYASRRCIPSRRQLLTGSHSQVVEQSSAHCTIGPLVAFTQEANDLDFFILTATSTKGEWSDRADVKMDEWHRNGGQGWVLVAWPTTDARRHNMSNHVTSLAAAGTLSA

SEQ ID NO: 966224 - protein, 379 aa, Homo sapiens
YLSSAAPEHIKQTGKEESDMAQSHPELLLADNHDGARVSPAIWHCTECGTGTVLLISQHSSQVRHVLGSVRPGEANWRPQQQVDVHLPWCQIQLSKCMDAQSFKPKGGYVQVAEFPLHLVLECHLGTIAPDVFRTAYPAPQALASGRNSRPREAGPKPQGPRDTTCAASRAQRGSACLQRELVSHPNHWTPNLHAPLSTLSVDDQRREPKKRNGRRAIHPEDTSGTRKADRHTRLPPPQHLRNGAKAPDNEIAIHNTAPSHTPDPNKHDHDCMPHNNNKPNADHIHTSPPHLGQTPGGTPEMGQEQATATPTGPTRTHDDNRTERHSAHTQDRDHAPKGPPTSTHAYTPRASNKQQPTHETEPQPPEKVHSTRDQTHER

SEQ ID NO: 966225 - protein, 115 aa, Homo sapiens
STEREDGQVEEERGFARGRYPEASGTAAREVGLSPRPRARSRVQGRKKEGEEKERRRKESKKREKKEREREKEERKEGEKKEEMKDNRIDEREERRKKEGERKEEEEEGGEKEKR

SEQ ID NO: 966226 - protein, 131 aa, Homo sapiens
MLRCFCGAITYQPADSTKMCDAGAGHRVAERTRRRSGRRRPPEESQPPQSQSQVPPAVPHSTSPPFALGAGMISRYYRRAPRLGSATAGAKCWERVAVQIVRYDRFDNITKSTPQRLFLTAEELSLINGNG

SEQ ID NO: 966227 - protein, 57 aa, Homo sapiens
MLVDAILGQPLDSRRVLPTTGLPPAHDDGTYAKLKRENEEGQRAVGRAPRARVPYGR

SEQ ID NO: 966228 - protein, 242 aa, Homo sapiens
MSEEQFGCGTGPRVHAGNVPAVGGIGRAMQEGAMVAADTRGQPVCGGNSGARDRGCGNRALAGTDRSGRRRDRSVARQLDGQLTNRRRTARPFKSPPLRTPLAGHADPAPRRATTLGTTLVYIRTRLTLCAPSYQSRKRTRRTVTYLSPKHFLRCRRSASHPCPAVPRSRLTESAEVHARSVRIHTAQHAGAALALHILLYSANTLRSHVFRTSASPTSCTSNHAQEHTTYPLCHYWPQTAL

SEQ ID NO: 966229 - protein, 125 aa, Homo sapiens
IQEPYQERHEVAIQSSYYNTKLKRIQREDHKEIDITKIPVKQMETMRETHMQKQPERDKSVLTPLRGDVASCNNQVAEKPAHTAVPGITRHLTKRLPTKSSQKVEVETSGIGDSLLNVKCAAQTL

SEQ ID NO: 966230 - protein, 375 aa, Homo sapiens
RSELVTWYTMCLIAVLSFFENNCEIGCYCQAHQHLLSGSDLECSENFYSCVLMCELSDTILLCVHCCTILPVLPASYGLHVCVCEHVHCVSWYPTIPPTSELQHIRNSLPDTVQIQAWWSELALSLGQCHHLTIDYVALVHPDYGQWSTSKKFLAACAQGGKSSAHDQLACPLCSASECYLCLSPNPMDWLASIPHTINLNTPGMSLSSTSSSPTLCFRGYTCCTLHPPDSYPASLPTSPPSNLTLLSPSLCHPCTSNPPPPNLLPTRCHTLSIQHLNYTPILLTHLPIHHPVKSHFICTIPHLQTALTKFVPHRQTTSALCTPYRSKPSSPTPRSQLCNPTYITTATLPYKPPSHITAILPPNPIQTLTTPLKP

SEQ ID NO: 966231 - protein, 232 aa, Homo sapiens
LVGEPWTLSKTCSEADILTSTITVTKFEMHRMMRPRLEARVAARDRRPQSTLCHVRALTALKQALSCRVHLPDHVTGEEVELCEPGPATILVAWENKDIYAAAIRSLRLLELQNVLECRDGPVLGRAHGASLYIARMTRLLDTVLKHHSEYGAADHVVIPIHQPRVPSRSATSTCTKVAACMETDQQHRVLLGGPGRCSHQEELCKSHQVCLQPGAHPVHLPVEILRSENAD

SEQ ID NO: 966232 - protein, 224 aa, Homo sapiens
MKLVSAHNVKDDRDEEQRAPAGAHVRWSISFLPYRLVEPRIASSVSPLRLREFLVLLKSMLKHYRRGSQWRRGTMRGPLWDLGIFGILLKINMSGQTANILEIVPKGYKSSTLSVRLSKCLSGDGGRHTERVAILRKERDDHRGLHYTRCCSRLRPPPGNFSLGEPRRAGKKNLGAEGGPRTAYTMRRGGDSNIGYRYTMEAPGWVFPPHGRGFTRESRPWYGE

SEQ ID NO: 966233 - protein, 185 aa, Homo sapiens
  misc_feature (51)..(51): Xaa can be any naturally occurring amino acid
LTHWDVPNLETLHQMLKLGRSNRGHRRHRHEPAQSFSWLSAFALGFHCLTXCARRLHRALQAPQARCTWWTWRDPNAHGRQGRPGPAAGGRPRRGPGAACGRPDHKPSLLGGLRKGRVELAGNLRGGPTGPATVALPRFAVHAIVCSRRWAQAHTAVLRGCSGWVRPRGGGGGRCVRCPCVRLTA

SEQ ID NO: 966234 - protein, 39 aa, Homo sapiens
MIPGPAPEAKELHAVHQLRPRRRGQCLVDKDGLMAYSAC

SEQ ID NO: 966235 - protein, 348 aa, Homo sapiens
HTMEEEEDDDWGEDTTEEAQRRRMDEISDHAKVLTLSDDLERTIEERVNILFDFVKKKKEEGVIDSSDKEIVAEAERLDVKAMGPLVLLKFFFNEKIREQIRKWRLYFLIWFSNSSHEEIQAPFPTMFVTTTKKPNGTFFMVQECVVAMHQAQLISKIPHILKEMYDADLLEEEVIISLDRKRPLRNMSPKNCQRDRVKPEPVYKMEKEAEESTPPAPHATNDGTDENHRTWRIPTADREPQPPPLATQTAQAKTTTTLKQRKRATQATYRSRRNSTKIPPTKQAARAHLNAAHKRKMGHNTREHARVTNQKEQQTRNKQHGQHKAGHTPPQQHTEEQDNAPPRTTPA

SEQ ID NO: 966236 - protein, 307 aa, Homo sapiens
HAHCEQQAGQTTFSARTWCACVFSSLPTPAMEAVWHVWRGMASTVRTREELRSLRTPLGAAGSFQMTWAPVLGKKQLPSPVLTAEEGASFCAGFSTARLLQHFSFKVHPCVPNEKDMICMWPRSMCCADIPQFPHPFTCGWSGSTMWLPMTGFQYLCLAEECSIVNGHYGFCIPSSVDGYGTLIQHRTEHLLHSNMTSGDILLCYITEILGPYFREESLLKADDFSCAKRQRCALMMASSSPQVDDSRLSVSGPWAMCSSPKTGGIMPGSDDAHPGRSRNRQGLGTGGTVSHNRRGGARNGPPRKET

SEQ ID NO: 966237 - protein, 373 aa, Homo sapiens
ANLRARPVLAPASDTAIERAELAPSAHHADIVPTSKSGPAVCYQITISTIHAAPYGPTMATSGALERCTMDTAKQRVRAICAPMLLVHAGREQHHASPIIPKVVHGLAIHRPSTDLRAWQIHAIDHNPVNDDHQPSTQSFHPDMAQPDLHRWRTWQTAPATTHAPFGRIRANRWGARMDAAGRHPPQASPPEPNIAGSQCNPVNLVTRSRPRRVQSEPVLKSYVTFGSAPVNSRSVPTGRGYARPDASAGAPPEPPAPRKEESYTRGSRGNPGAPEPRPHTSRTDTPAQQQDNIDPRTINPAQTTGGDETQAPSTAHHKKETEELEAHPITDEPTRKDRAIREGYATIPAIGAARHARATHRNEQPHRETTPA

SEQ ID NO: 966238 - protein, 92 aa, Homo sapiens
NGSDEWSSDLHRPQLKSKMTFSIVDSDECKILSRYMPTISERHTRSREEGNKTDAYRAISGDMRGSTLLVTVEAQELALMLSTRGKECDSST

SEQ ID NO: 966239 - protein, 31 aa, Homo sapiens
HWRGKTGTQMKGPPRNPQPSKAAENKDSEEE

SEQ ID NO: 966240 - protein, 223 aa, Homo sapiens
HTGNKEKTEHTRIPEQGEYGETKKQTNRHTNGTHTTGRIAHDEGKGDTNSSRMTEERKQTKTNRRRDNQTPTQGNRTTTGRNRQRKTHGRRDRAHRNNSTKHNKSQRADNGQRRAAGDQRKPDEAEPQRDERKTERQSRTRKEETRNEARKNTHHRKSEEQTENRGHGQQENHGKETKTHPDTGRRRRKTPRRRHPATETDAHDDPPTLTPISVRGAHDKDET

SEQ ID NO: 966241 - protein, 303 aa, Homo sapiens
AGELPRQVVSLIRMRNPWGEVECDGSLEDSSSEWNNVDPYERDQLRVKMEDGEFWMSFRDFMREFTRLEICNLTPDVPQEPDIRKCEHHTLREAPGGRGSTAGGCRRLPSRTFWVNPQFKIRLDETDDPDDYGGTASQAAASCSPVMQERTDRRRAPLRTADMETIGLRRSYEVPPELVGQPAVHLKRDFFLANASRGRSEQCIKAARGQHPVPAATRGVCWWCASTSSRNKEGDFVLRLLLREECWDCGAWMNRNQGNFPDEQGLSKRGWQELQALQAWRGGLRSLRGWGNSLVFNKPGTVV

SEQ ID NO: 966242 - protein, 138 aa, Homo sapiens
MPRRYSDYPVCIHHMKHPIICRLIHFSTRSSINNVHDLRSLRFEIDLVLIVEEGLHIPGVTIWMSPHPTTHSREARIHKIYTKKGRNRTPPKLVVKTKSPWSSNDVVLKKHNENGHFGFCMLERVAHPGVLTVRPVGR

SEQ ID NO: 966243 - protein, 321 aa, Homo sapiens
MDDDIAALVVDNGSGMCKAGFAGLTMPPGSVFLLHRGGCPMHQDVMVGMGQKDSYVGDEAQSKRGILHPEVPLSEARQSSTNWLQTWMNIWHHTFYNELRVAPEEHPCAADLSAPLNPKANREKMTQIMFETFNIPAMYVAIQAVLIPVTPLCRTTGIVMDSGDGVTHTVPIYEGYALLPCRSCVWYLVWSGPVLNLMKILTERGYVSHHGEREIVRDMWREAVLRRLDFYHRWARLFSSSLGKSYELLAAPSPLDERSVLRAFQLLLGLVCGPELLLPEWWAQPSPVWWPFPSVGAPPRNAPSAALLWDPHGSRFFFSRP

SEQ ID NO: 966244 - protein, 103 aa, Homo sapiens
  misc_feature (51)..(51): Xaa can be any naturally occurring amino acid
  misc_feature (58)..(58): Xaa can be any naturally occurring amino acid
  misc_feature (63)..(63): Xaa can be any naturally occurring amino acid
MVRLASHSDDWYARVYASCSSGLACEVQPKSACSSHCTRDIDAPREGVTFXDIRLDFXEDTQXRCFWMKAFAGRLYDSIDVTRRVLTVRKVGAPGENQIRGLR

SEQ ID NO: 966245 - protein, 298 aa, Homo sapiens
CLPVGPDNHSQTPGLVTPTQQLTKHDVERLKASVDRPFTNLESAFYSIVGLSSLGAQVPWMQRRACTLRIRSNAWIPANVGFPSSTAWPGQRRPSQDVRSLFQMRPNDLFLAGVSEDSSVTQIYHAVASSKWLMAFPWHSQRMHPQCPLRARSHAKGERTGACANRGPRALGQTSIRNRVPSRRRPELSICVTEIEDLVARLDELGGVYLRVVKKDWKRTALFVVPTYRAHGSCGGTEGMRLRRIEVIPRLMESDTLSTEELLGSSFRNFKGLCELLGARINGTRASWWVCRGIGPDI

SEQ ID NO: 966246 - protein, 327 aa, Homo sapiens
QTSYYVPLVACGPGAPGLQLCRDLYSSDPELTREREREARERDLRDRLKSGFDVKPNELEPLAWGPWALGLDPFPRKWGLWRLQPGPPWPVTLSPFIRARGAPRGSRRTSERWQVVSGLRLDMSYAERLACCRGCIARHGWRPMGYLMPLARLGCVTCDSRCQQIGIALIHSHLLLHQQDAFHWGLLPRCEPSHGAPGLWVSDLAGSAYPVGTLANPAVSHPLHANGVLRPGSLVVLTGLRAPFWPDVCGSSPGGHGLGSSELRRGAGQQTWCGPQPVARCRAAGDISAEREGAWEPFNNGPVWDPPRGRHKRWAQGGRLGDEILEL

SEQ ID NO: 966247 - protein, 364 aa, Homo sapiens
  misc_feature (311)..(311): Xaa can be any naturally occurring amino acid
ANLATEEELSEAKDLLKKGRKVVKKVPKGTSELPSLTWHFGMVASHKWLVTGSMHIMQSCMHHRNHARIFIGRQAIVQACSSQCTAQQAQQSMQHSCTYCGQLLVRCMHLVMHHTNTQHCKQQPEGPTHMISAAQLIKHHRQSTWQQQQMLYPSNGTGGEQQASLCEIRAALPFENISGNYPGRDVPCKRRISTGKAIVRRDKQIPVPKLERNSSRVTTGARGHNPSARRFRKRTTSQLGPVTGQDAYVVSRARILHTQGENNRCVSERQLTKIEEHYNRCPITNGRKSFCFLGSTHTGHTAESLSTTTGXHDVMHAKSTEYIGIPDADTGALCETSDYTEDDTCAALTFGVSQAKQTVSSHND

SEQ ID NO: 966248 - protein, 82 aa, Homo sapiens
  misc_feature (66)..(66): Xaa can be any naturally occurring amino acid
PVLLGRQRGIWKNPCQKPQRKGGPPLPRTDTSGTAGNRRHLKGGTGNRGRSDTQAIRRQFLVRNYXRLPMEKTGNAESLRAR

SEQ ID NO: 966249 - protein, 401 aa, Homo sapiens
NTIFWSPQHHELSLGAPEDGVGGPEEYEGALAVCGHFRHCTVMNIAEHYMDFRRLNGILLVRYDRLPSDVLVEPIRWTTRTGMWTFQGRLLQKNNKDLRSASMLWRPRPPTLLSQEQINAILKQDLKKYSKIFEQKDRLSQSKASKELVGDRRTMMEDFRKYRNNGPGALYASRNNERRGVARRAWTLTSVRTGNVDDLGTRRPLECFVTARTHSPRGIRSDPGALCRVCSWSRGVLPGSRRDSRLVPCALCVWPVTCAWISAIATHFWTFSPWGLHAGTSGPGRLLPCQAVFWFKPADPMIRKHLSRAHGGPPPPAAQGRFTGVRLSRGRTIRETQNYHEDKRRYRKHRWAHSDPPGVCGSQVDTRPADINCLVAEAAITAHGDRLCIDCSEIQSRYHYD

SEQ ID NO: 966250 - protein, 303 aa, Homo sapiens
IDLDTLDGCPEERDTLGHREVRLYNAVVQRGSEAECSGEQLQVTPENRRKVQGKALGLIRFPVMTIEGVRCSVPAEQSTEHTLGRDREGGHALYRCTFTVRPPMTIDMEFIDRRPLPWLRGKELQASNRLPAGGESLEATAGPGDRIRCSVNKRIFVVGFEGCNGSVHGPTDYQVNIQMIATDSNSVLSHNRDWTSDLADVVRPNTFRRSMLQRRPVCECACLQTFNLSSGPVDTPAFKVLINPTYGHLEGTVTRVTHTESADTWLAKDTASTLCYAAGTNSGTFVRGQAESPKIIFITGRLP

SEQ ID NO: 966251 - protein, 236 aa, Homo sapiens
VSLREVVRYLVGAAWLCAGGRLTRGRVQGAAGGGGWLARGLSVERTLSRSCLRCPAGDMALDGRRRPAMLPALSRSKRAWRQSELLEKEEERRCMMKMKTEEDDVSEGSEVALRVTVLQVPSSTMLNWRAGTSECQGEGQGVDPLLDRTRARMKGGGQPRAPAPARCLHGSHEQGRRNSFCSHRARLPVPVLCPQANQPYLLADGTPFGCPPGRHAEAILIPSELTRDGMSLKLYY

SEQ ID NO: 966252 - protein, 218 aa, Homo sapiens
AGPWQAVEPGGPGVGAAGGPGRCLVARWSRPVCAAGRGWSLLAQLSAFTDDGGGSSRSETDQRAKCWRHVVCVLSVPNSMNGKYDTGQLFLHSIFRLPRCRPVSLAGQTAMTADVCVLQSPEKSTEVTRVWPWLQGGERLKTHTYYQDAVLDARDCPRVYRHEISEQKLGPSWLTMMYSRALYAIPGLDYVSHEDILPYTSTDQVPIQHELFERFLLL

SEQ ID NO: 966253 - protein, 116 aa, Homo sapiens
MACAQSVGRRRGRFAQGRQKFVDFGSRENKRNNWIKGLLLLCEMGMKFHWDVVVGRKQLGKSSIELEKESSPKQERRVNEQQNGLTTEMLYGIAPSNIVNKRVRLVSHYTGQSSYA

SEQ ID NO: 966254 - protein, 322 aa, Homo sapiens
SRPPRPVPVVGGGQEDLQALGFGLFHGSRGVKWTRPILQPCWHSYKSFYDAAVLLCDVTIEVVTPVQRSLALGRLLFLQYATCQQLRVPTYKSMFTGRTCTEDARQCQLLTHSHAELRPLDVPLLRSYRYRQLANSGYDEYSTVEANVQRLYAASDMLQPGICAGSLCLLLSPNVLSKTNCTAILKFADAFDHHKLRSQAQSYIAHNFKQLSRMGQIREETLTDLTLDQMLAVLRLDSLGHRQCSGLYACELCHDWTLAAKSGVPVLIKSPSDVRMDSYNLTRIRLIYTAVTQPSLQQAFVLDRLHNGPRRSAYCSHDDNGS

SEQ ID NO: 966255 - protein, 421 aa, Homo sapiens
  misc_feature (36)..(36): Xaa can be any naturally occurring amino acid
MTKRRMKRSPNALAWSPGQVQGAQGSTTEGPCGLPXAQAVTYGPEELTYILRILASSGSKFKTRRAKDECACLTSLSLEEMRKRHLLARLLQLTSFRDRRVTDCRTDAWKGRTSLRPCVNLSFQRLCRADMGRIGKWNASVLMQSGARFGEMQDEDYGGVNFSAGVCAGGATEGRMNSEEDEESLRGMTEEREEDNWLTVIWSSCLSIWQELSDSIQKLDLYEEAEPEEHVLMRSVQRRPKLHLCILFKPGDSLHDSGAVFCVPQVYGEGGVNGIYPIEVLNTEDPGFRGAEHVPVEGTRYRLFPTHFLDKLENGRPLRRYTRSRTTDDFELHVKKRPTELDNREIQRPQKTITHHQLESTHSKETSYLVRGEQRTTLALQQYERTRAQTRPANKRQITDSTEQQTNARAEHSTEAERGQE

SEQ ID NO: 966256 - protein, 44 aa, Homo sapiens
MAQIPEGGCGARAGTTRSQVQAPRAPGREASNVKNPRAPAPRAP

SEQ ID NO: 966257 - protein, 302 aa, Homo sapiens
MADCGGLPQISQPAKLAEAFKDFVQGMGYMPSASMTRADAVPHSASWIPVDHILVEWATREAAFPQPSEGTRRPSHTRRGHPLGVSHRPARGPTMDITRHNSGAAGNSAGAKSNGGLLRGGLPRHAVLRISDSRVSGRNTIRRNPFTTPRPAILLPRSVEIRKLMGQGGELWLRDTMSLITWVTLSKARIGGGPKGRKDAEVRSRNYMQEKPGRVPLSSPCLRDTKCTKEQRSRTTLHKASLAPEHRGTSGMQVQKPGRTIRATLTCRTRSREDNNQHIARGEKKSPVPEKTERARNTTAPQ

SEQ ID NO: 966258 - protein, 227 aa, Homo sapiens
GADDVVWDKAVATGKMDERAEFVAVTSTNAAKIFNLYPMKGRIAVGSDADVVIWDPDKLKTITAKSHKSAVEYNIFEGMECHGSPLVVISQAKIVFEDGNINVNKGMGRFIPRKAFPGAPVPAASKSGIRFGDCKGFPRACMTVLCTEVPGVHPRYRQPHRFLQANLRTSKQQCPPMRKLQQSKLQSYQVAMIDDNNRRRTVTIVAPPGGVQHHQARLNVDAAEELA

SEQ ID NO: 966259 - protein, 76 aa, Homo sapiens
MFTLEDTTLWLYERELQSEPSRSKDADTDENFLRPVWCLERNPGDNAHASVTRAPLATAPPVWLTITASDTATDRR

SEQ ID NO: 966260 - protein, 428 aa, Homo sapiens
DAEPGARAEPLASRCHAAPAAALKDGCRRCLRPPREHLRSAGGCCYYRASSSAPPCVEPLVRPCRMYADLLLGVLDCALEEAGKVSSWMHMTCVALPSALPGGPGKGSVCPGCAGLQAGAGPSPGLEDEIDFLCPGCLSRKESGHLNSAPTQGPIRRLPGAWHPVASRRRGQGLELGLPSTPWNPQSPRLTKSVLLWVPVCRSGHRCRAIVGPCEPPGEGNGDGASPASMLNPWRSCLLADWIRFRSRRRAIVWGCDDCNVVKIQDEIKKGLNNVTMVMGPLGRACVSQGIIALGTYGLATERGTFSLSSTRANQCEQWRRLKRPTNRDWKTNPPRKEDNVGRETNVETQCTGANRNRKESVATTRCQRTGQGHEPPKTRALDQRRGTTDRHPRRGVRPTKQHAEKQSATNSNTHTTESATTHMTSEH

SEQ ID NO: 966261 - protein, 259 aa, Homo sapiens
MIPTARVRRCEWGCSIERSAVADGGHNWMQCQTPKGPDLVGVSSQPASSHQQMTSSKRQEGAQMTAAQDKALRELWPPEHPWFHLSPSTWYSNMAGLAGLSLCVCDTQVCTCMGMCPGWGRVSNVARDCLSSTAGGYLSMDPLNTFTSLVLGWCLTYTWGSIIPLKVLGSEHATGDCPGGSQGTLSGSPYESFGGVPKLRQAAKTEEPTRGQSKKGTPSCPTGGDSASESPNKTCAWRHGRGAHPSNGGEDDNAKRHTI

SEQ ID NO: 966262 - protein, 31 aa, Homo sapiens
DTKKQAGEATLIGADGRERTRKHTREEKRHE

SEQ ID NO: 966263 - protein, 213 aa, Homo sapiens
MEAFGGRGPNLGRGVRPQDSLTEFRPLPIPSGIRRLHFTEVQSRGPKTPRVDRDLSPRRKCSRAEWVIGRKLMLGILRLLGSFPQLFSRYYAMSTTVPWLGVASGRTNRWEFPCYLERKFLRRQMGEIGGERRFLGRRWGPQSNMSSKELITFHGLDQGPMVTRRALRKYEHLFGVRNHQWVHPRGLMRWMEKKTSSLRYMCGDYGCGVCNAL

SEQ ID NO: 966264 - protein, 273 aa, Homo sapiens
MREIVHLQAVAVRHPNLATKYGDGDHVMSTASIPTGTYHGDSELQLERINVYYNEATGGKYVPRAVLLDLVDPAPCDSDDARGPSGRSSGRTIFVFGHIGAGNEIGLLRGYYTEGAELVDSDAVMSVSKMEVLEAVTVTDSGVPRLEPTFPEDGGRLESGDGYPPHSGKIRGRMYPMTKEIVTHVLSVGLAPCSGPEIRLVLEIGPGSGWDSPRKRRIGLQLALRYKGSAIPKGFRLRKETDHENRKETLNLGQFLAFKPREAYLLKSGKPNY

SEQ ID NO: 966265 - protein, 179 aa, Homo sapiens
RRLGRRCTDVPGPGSAGLRSRAITQVHRIMVMRSTAQPDLAGLEALRERERSHHGQQEDPDKIPVQLVLSRGVPPEKASDLWGTSKDRQDWTGSPSEAMFGRGAPSRHQGVSNPRGTSIHYVGLQKLLSSSSVEGLGSLGVPGIRVCLISRKVNGYTFAGAPVKSVRSCTHFHFSRSEC

SEQ ID NO: 966266 - protein, 532 aa, Homo sapiens
TVDSNGVITVKTDFTGLKGPYRIEREGEKQELWEKYLIDKCLPPLRSQCRRDGCRVKRVEVVQGIYYGRINGVSRAALVGTGLVEMNWCTSVGPSRASFRKYWQTCRVHGRKRPYRDTELESSYGRTSPFDRKLARTKFDVGSKHPVDSKAMVALRVGNEEETLATKAIGPLGPGLGTKWVASTFIAYAQLQLVDDTRFTFSFAVTGVDNSFLTANVPRAVLSHSEDFVLWLNALLVLRPVGNFFLEQEVLALLAEKGAIFMGIATSVARSLDSHSQGSPTNNSLEQGLPHRWGKNPWLGRSYVGHRVGALTCLRNSNGYSHQVRGWSMLPRGTPWQCDTLHTGNCYRGITLGEVRISHGGWQHVPCSARCFVGTLRATQVCTRYRVRPGGTHFTRRFEQLVCAAQSACALSLEESDSSSRVCTTSEYRYVGLSTPADKWDNAQGEESQYHKRGNRGQPEQHKEAQVSRARETPQGRHNRPRENTGRDINQTGGTKKRQRREYTDENTSQHSTKHWGTHNKEAGHEQQDHTN

SEQ ID NO: 966267 - protein, 149 aa, Homo sapiens
MTLRAAVFDPYGVLALPAVFGSSCRTEEALALPRGLLNDAFQKGGPEGCHYPAYERRVSHVSQWHTDSWEENCREVAPEYRLKFCLPKAFLAGKNIFDKVVFQPRKINSPPCSRSALMLRKKGFTYAILTNILAGATVLREHGLAQLTV

SEQ ID NO: 966268 - protein, 340 aa, Homo sapiens
ITGSRMRPFRLVQFIIMETRKNRWHLAQRQLHVMNNNMSEEDEDFKGQPGICGLTNLGNNVLLNSALAIASTIVPTAHLRYIPSTIACYLEELQGSDKPLGMKGEIVRGHMQTCEELERESGHHRPLCHMCSRTEVGHLASQFLGYQQNESQELLSFLLDGGCMKTLIAVKKNGVCGAVRCCWVIRISACVAHDGEWLKAQNGGTISVIVEHFPRLFKSTLMCPDRGSVSCDRSTPFVTLCSLAITHMRVLEVSFPMVRAQPSARLVPKAKPVIVGRPPTSSLKEKCWSRPSLFRFRGYVGPGFHRWQAGQTGLSGRSGLPVHPLAREEFSPRRAPRTLL

SEQ ID NO: 966269 - protein, 68 aa, Homo sapiens
HLSEDDESGDASGAGKGSLTPVVLILQNSHVPEVEVQVNTHELTASLTQPRVSVVPEAVTQHAAKYLW

SEQ ID NO: 966270 - protein, 103 aa, Homo sapiens
AALPALRFPHFNVFRGCHSPGFGRPSPAFPAPGSPAPCHASLRDRVSTTSSMSLAHRLPDNADMWAPGNMTRAPWDKGDRGNVIRWDNQETGEQIAIKQLTGE

SEQ ID NO: 966271 - protein, 115 aa, Homo sapiens
NHLLESCRYAEGRCFQESAGGRPGGATYMPLDGSGWPAGRRSGYPQYPAPRVLGTICAPSWEEAPEAELSQAPAERARAWLPGSRWDYACSQHAPKLLTVVVLVTVLCVTYIASA

SEQ ID NO: 966272 - protein, 158 aa, Homo sapiens
  misc_feature (106)..(106): Xaa can be any naturally occurring amino acid
SGYRDLKWKRFGGRGPDLGGGVPAPRNSFIPHFRSTSRISFSVNLRASLCTLYRRSPISAAEPRNPEGVTRRPSQSPLRALSSQKGRECGVDCADKTCARGISISXLSCVALRFSRHNILLCAHIIVRESLTHTHRVLTPQCALVCALSVAQTLFTAP

SEQ ID NO: 966273 - protein, 243 aa, Homo sapiens
RRSPREEEAVTHASACSHWRSSFLLGLDSFAPLPPAGATSQVPDIQACEITSSGIEGGFQLTKGGGEVEQGKYSTHGWLVGIVGYVESPQGLPDLQDVSSLSTSVDECKRRSYKNWHKSKKKDLNQVLQESGTDEDGKKQLEKDFSSNERSTCQGHPCHCPHPDEPAMLCARRRAELMEIQVNGGNVAEKLEWARERLEQQVTCDQGVRQDEMIDRHRGDPRGEGYKGSRDDGKRRKLPGMSH

SEQ ID NO: 966274 - protein, 48 aa, Homo sapiens
  misc_feature (27)..(27): Xaa can be any naturally occurring amino acid
RSINKKAKALGQLRLANPKSLGSLQPXSCSQPAMPEEKPRSQPMKGQG

SEQ ID NO: 966275 - protein, 100 aa, Homo sapiens
VQYELWARCWRSGSPGCCFVAAAVALRWSGRRTARGAVVRARQKASELWPWDEHVTGRRSASWLHENPKNLVTFRRALAYALVPLPSSWVATNAYHHGTE

SEQ ID NO: 966276 - protein, 271 aa, Homo sapiens
GSFLPHSQVFAQYCAVYGGGFSNLVPLGEAQGSRSPHVQGVCGDFSGRVPQPSLQYPICSLAGTRRVGADGARMNRAGPGGGELQRHALPHHNSQHSPMTTLKSPSLEDPEQVRGLSLWLLQCAEVTYDSMRRVEKDGITCCGSLARSDDGAPSVLALYWEDWLILVTAKFCVCLAAACVVVAVPGGAAPGSVLVALALIESGMKYGGSPSQFDNCQNRRGAMQHSSYFTYLWKYRTKQRLGRRPTHAQDRCLVCSQDLLGCRMSVTTWLD

SEQ ID NO: 966277 - protein, 267 aa, Homo sapiens
MVTMHDVLDAQWLYDNHKDESYLRELRLPFGKAVDISETGGYESIRAVNAICYGAKIMLPRVYFRYDDGLEVNQEIVVITTKGDSICMAIAINDHSGQSLPASDGIVAKDQESDPWREKSYPRKVGLRSKGQGQTEAGDHSEGLLDKHGKPTDRTRCHLEDRRYCCRTVESSKKEVVARKWVKAPTGQLAKARKTVKRKRDRVRVKCDDDSSSYASSGRSRKEEEEEYERTRRAKTGLRKAGAEAVIDGRQVYTKQRKERKHEEEKP

SEQ ID NO: 966278 - protein, 136 aa, Homo sapiens
SCVGLRRSLLKEGARGWQLRLKHIGTGDSSQELMQRQPCETELRPSGNPVLLPGSGSAHGSVEICKAYPCKVSGSREGKNSMGRYQESNRSMRSQTRRHSQGSMDPKKEAPEKGTYDPGRARIFAYPSLQLAPGSR

SEQ ID NO: 966279 - protein, 96 aa, Homo sapiens
  misc_feature (40)..(40): Xaa can be any naturally occurring amino acid
HLLSPRSQAEEGTANLCPLTLEISFNLQSWRCRGFQWSSXLRARNVRAGPVSESWCYTQIKVVKFSYMWTSRITFMLLPGRKWVKSFNRVLHLSLE

SEQ ID NO: 966280 - protein, 239 aa, Homo sapiens
  misc_feature (152)..(152): Xaa can be any naturally occurring amino acid
RAPFPGRDFQVPDYCAEHCSRCTEERALKNDRHKTQGDGCASFPHEAEGDWATSYSRMYQYERRIGEDVHWHLQLTSVASPNAHDSNVPAAWIHGVQWMYPTLRLVSSMEMLCLRAARRHLDSRPPIGARLMNSPVLQPSLASMHCLLLLAXTSVEAIVCTKCKEQENQESFVCGGLQKSRSRGYCAQNSLETLVLEERWYQYMIHWYGIFLEPCNPTCFITQGYSLSIHTLHALWTWL

SEQ ID NO: 966281 - protein, 350 aa, Homo sapiens
SLNPAWQSLTHRRDAQEDRTILEDSTTSLRSSNYWMIIRNVSLWRADNVGSIAGCMSDPAMSLRREGCGADGQRTTMSAARPIRGHRGKQSPKASWSNKRACLSIRGECVGFVFTKGGPHVISGTCCLANKVPCMLPVLVPLPHGECQLVPDPSNTCDRSGPEEDTLCYYHGLFSVCKAILRILPGGTIEIPELMCSLINDLEDKCRGASEATTAEHAQYLPPSPLGCSSSTVFDQWQHLQPESGLISLMDVSAFSLPGGVRKVAGVWLQNGTHLCAFCTPILSSSGFTESGLVWGTVSLPTGERDASGGHCLGVCPCWPPVSVLWPQWRRCACLVLFPPRFGTRFKTPG

SEQ ID NO: 966282 - protein, 48 aa, Homo sapiens
MPSWENTRTLGANTCLPPSGVSPSWVPCRGAKGAPTTGAGSLGRARPV

SEQ ID NO: 966283 - protein, 83 aa, Homo sapiens
MESTGVRSRELRLQVHGLAAMLHRHLRPSSRVSNMLTANKQVQSTRRVNQRTGELSLTKITGSGRNVISYPSPKKKGRGDECT

SEQ ID NO: 966284 - protein, 70 aa, Homo sapiens
MLQPWRHNILIMATTAGPPEGGREDAFPEVVASELRVVTVTALSLPRLRPRLLPLLRLEETLTTGGGAET

SEQ ID NO: 966285 - protein, 54 aa, Homo sapiens
MKALTVLSLSKLTAIYAFYPDSSNQLFVARRILLDTLISCTRSVYYWDIVVQRV

SEQ ID NO: 966286 - protein, 70 aa, Homo sapiens
LNIETVNAMIQDNGWHSRPDQQSVDLCTERQLEDWRTLSDYDHPEQSLPCHLVAPVSEGGNADSSEKTHD

SEQ ID NO: 966287 - protein, 91 aa, Homo sapiens
SFATPIKLQLEEIAFDASLRVIPPDLRTPPLQRMLPGLQAPLRTLSGIPEKSKSDILYLFDCSPNLVGHFPISLYTYSPSMIDELNDVARN

SEQ ID NO: 966288 - protein, 159 aa, Homo sapiens
MITGQGWHSLLSQQSVDLLPESCWEDGRTLSDYNIHNDHYLAPGCAVSEVEMQIFVKTLTGKTITLEVEPSDTIENVKAKIQDKEGIPPDQQRLIFAGKQLEDGRTLSDYNIQKESTLHLVLRLRGGMQIFVKTLTGYTITLEVEPSDTIENVKAEIQD

SEQ ID NO: 966289 - protein, 87 aa, Homo sapiens
DLEDPSSNKTAEGIAIHLHSSGGWLHETHWEWSKQVFEFSNTQAVRLPIVDIAPYMTLVVLIKNFGVDVGPVCYIIKQKFYLENSKK

SEQ ID NO: 966290 - protein, 107 aa, Homo sapiens
ARSHCLSIEVLCKGYPSEYATYLEYLPFLANDDKPDYSYLRQFSGICPIARATPNDYVFDWNMLKLVSRTASTFAECGVRGMACQWEAGGRLVESYTLPKKIMKYDP

SEQ ID NO: 966291 - protein, 59 aa, Homo sapiens
MSILTSALNVKVKNSNEARYTARVTMTLLKVGKCLVIYISDAHEWMNEIPTGPYTYYTS

SEQ ID NO: 966292 - protein, 116 aa, Homo sapiens
AHFSSFREIIVSSFSCVFCGWNNTEIQCGVWIQDQGVRYTLSVRALEDMNREVVKTDSAATRIPELDFEIPAFSQKGALTTVEGLITRAISGLEQDQPARRANKDATAERIDEFIV

SEQ ID NO: 966293 - protein, 46 aa, Homo sapiens
YSLIPGASLYDQQPYPLPAVTGVTFLAARPKTDCRNSFLSHWYTCD

SEQ ID NO: 966294 - protein, 115 aa, Homo sapiens
PLLLRRLYRISGSKSFFRDLTAIYESCRLGQHRPVSRLLTDGIMRVGSTASNETYPEKVWYARTGYSTGSCMVTNEAYFLKLQAFIGTKSCKIIDPKGPPFILCFPMAIWDKLPT

SEQ ID NO: 966295 - protein, 60 aa, Homo sapiens
MGAVGTHRKTSHIPGGASELQRRRVPRKHVPACKRKRDGWLLRNCNEFGPVRTETATDTG

SEQ ID NO: 966296 - protein, 79 aa, Homo sapiens
WPACRLRERGVGVCTRHPGVLFPKNRAGSLTWWSLLSPSASLAPDSEEHSLEGQMEDIKLEDSSPRGTKGALLLPCLIN

SEQ ID NO: 966297 - protein, 95 aa, Homo sapiens
MVVVSEALSMNTRGIEAAAFLPVVDCWDGPDGKPVIYHGWTRTTKIKFDDVVQAIKDHAFVTSRSVADFWWCDLKGKAARVGYDRWTDRQTHTDN

SEQ ID NO: 966298 - protein, 73 aa, Homo sapiens
MISPEEEERAEYRPSGTSCCGKCRNWRKELTDFLQAETDKLEDEKSGLQREIEELQKQKERLELVLEAHLTTA

SEQ ID NO: 966299 - protein, 35 aa, Homo sapiens
  misc_feature (4)..(4): Xaa can be any naturally occurring amino acid
MITXFRGLSRLSVLVLSTFRTPPCPLELCQTPLTT

SEQ ID NO: 966300 - protein, 54 aa, Homo sapiens
VSVRTRLYSGGGQGGLLPQLHIVGWEEPVPGPMHTPCHQPDVNHLDSMVMMSSC

SEQ ID NO: 966301 - protein, 56 aa, Homo sapiens
VTLEDFAVSVEVPQKLQLPAYYYSLQIYALIGPMFHVDNVPSSYSGCIPQELINDG

SEQ ID NO: 966302 - protein, 76 aa, Homo sapiens
  misc_feature (29)..(29): Xaa can be any naturally occurring amino acid
MAVVVVDGQVFQCRMLHVLPSTIKKESSXGLPSAWDSSSYKKKKECQDKANSASSHSWNTLFMGPNAVADAIALTT

SEQ ID NO: 966303 - protein, 94 aa, Homo sapiens
DLRIQALSEASVVSGVILLMALQHQHVFTSKPFLEFLREGLVDLDGVQAAGAEPLLALLLLVLLHGLLDAQLGTAPHTLLEGFQLVVEALHALT

SEQ ID NO: 966304 - protein, 45 aa, Homo sapiens
LLRIPVESHDIGGYTETEEAENLEDLLKAAEKHACPAFQLIHQFS

SEQ ID NO: 966305 - protein, 64 aa, Homo sapiens
GTDSRQESEVDMRSQYEVMAEQNRKMLNACVHQRGLKKLNAGGRWHTRQQLHIKAEYASSYFVD

SEQ ID NO: 966306 - protein, 64 aa, Homo sapiens
KVKMDVNFRGAACCVLESCKRKVKSGFRKDSSLYKGTVDTCARIWPSADKVKRNGQLNLSRARL

SEQ ID NO: 966307 - protein, 58 aa, Homo sapiens
TVEEVKEEVDIVVHLPSWGQSPVEHDYRSEESSYLVAGSPQKEKLLSSAEQFHISAGS

SEQ ID NO: 966308 - protein, 33 aa, Homo sapiens
SLKAESIRPRRGSLVLASDSLVPRLSPPDPPER

SEQ ID NO: 966309 - protein, 79 aa, Homo sapiens
HKTEQLSPSHDSEQQQHSPQQIGYSPFNRPTLQPRPTRPVSALTVRVHQTTRDSPPGNSWQPPSNTTLSSRCIAVLPSR

SEQ ID NO: 966310 - protein, 49 aa, Homo sapiens
MGNAAPRACGNEENRFCMLIAIYDLCFHVFDFNRRAAVGQVSRLVMPTP

SEQ ID NO: 966311 - protein, 84 aa, Homo sapiens
  misc_feature (33)..(34): Xaa can be any naturally occurring amino acid
MRFIQRQIASQSLSLKSGQMFAKEDLKRKKLVXXGSWFLKNARRRLKEVQAVFLTDILVFLQEKDQKYIFASLDQKSTVIFLKK

SEQ ID NO: 966312 - protein, 36 aa, Homo sapiens
RACTLSCTRDNEVEQEDLAQSLAMVKDVIGAVDSKV

SEQ ID NO: 966313 - protein, 101 aa, Homo sapiens
HSIRYPMRVQHLFSSSFSLGIPSSSSLYRVVDCVLNDLNPAGFVPPWRLAWTSTISGSVIPMLIRNKPFSSCATSLAISFFKEITVDFWSNDAKMYFWSFS

SEQ ID NO: 966314 - protein, 39 aa, Homo sapiens
MRAPKRNETSWIQIIQDTINTLNRDEDEGILVRMRKKRK

SEQ ID NO: 966315 - protein, 142 aa, Homo sapiens
YRTYLSARGARFISVGYVDDTQFVRFDSDAAESEDGAPGAGIEQEGPEYWDRETQISKTNTQTYREDLRTLLRYYNQSEAGSHTLQWMYGCDVGPDGRPLRGYNQFAYDGKDYIALNEDLRSWTAADTAAQITQRKWEAAGQ

SEQ ID NO: 966316 - protein, 37 aa, Homo sapiens
MTVCSPDGPGRPSASAARWALGMAGRLLQLLTSNVSA

SEQ ID NO: 966317 - protein, 33 aa, Homo sapiens
MPSSGKSSQRKETQVILLDTPGIISPGKQKTAS

SEQ ID NO: 966318 - protein, 41 aa, Homo sapiens
PASSLSSDAGRTSQKPWLMGRYPGILALPRQQNPGAGGPLA

SEQ ID NO: 966319 - protein, 46 aa, Homo sapiens
KRGHLLLQTDQPIYNPGQRVRSRVFALDQKVRPSTDTITVMVENSH

SEQ ID NO: 966320 - protein, 48 aa, Homo sapiens
VISTPDWTTVVYLMHSVKVYYSTSSPSSSRDARVSELKKLGLTQVVRS

SEQ ID NO: 966321 - protein, 56 aa, Homo sapiens
MYPISCHLTGYTLTYRVYLGTYAHFVLFMKDCQKTAMYRLNKTLRGPSHFIEYKTG

SEQ ID NO: 966322 - protein, 43 aa, Homo sapiens
MAYPNFVRCIIPNHDTNRRRAGPASRAEPACAAYGFPRVASGT

SEQ ID NO: 966323 - protein, 63 aa, Homo sapiens
VYTGLLNRRPNGLVCVKETYYIVPITEKFHVIGIEKPEVSSPSPGTFFLLGHESPWRIHSDSF

SEQ ID NO: 966324 - protein, 38 aa, Homo sapiens
ATGSLGLTTVIGAHEGDDVLDPLRHLYDSSMQIHPSDV

SEQ ID NO: 966325 - protein, 112 aa, Homo sapiens
RTVLHSSFHPWGRCTWEAWMGQQTQWDQQDPRDPHFHHCHGAPDWASGHQRCPLVTSEAHGAPCFDHGCSYFHQGGTMVHHFTPWSTWCCPIHITSMTYCCPHKCLLNAMEC

SEQ ID NO: 966326 - protein, 80 aa, Homo sapiens
TVVYDNVTFDASSGIIVVFSPGRAPSPRHGIFMITSALLGRPFDQATVLQGFVSCRILIYFIIPVWWEPHHTYVASLFCP

SEQ ID NO: 966327 - protein, 100 aa, Homo sapiens
WSSLAGSPHTPLTELCLGKLHLLTATEGYFATLLLQVFCLDHLSQWGTAVYWMSRIDRYACGPQSVLRSFTLYLMDLLNRLMSSQDAKLELKCDIKPVAN

SEQ ID NO: 966328 - protein, 59 aa, Homo sapiens
AQRNPLITSVASSGPILTTSSNSPGEELFRDSVDALEGAAPEACLPVLWFTHTVQPTRH

SEQ ID NO: 966329 - protein, 139 aa, Homo sapiens
GRPLSRGADAHGTTHYSIGGSEPNGDSRMHSHAPHVLACVRYSRRNITEVRVGRVGLRYSYYCGCHTKSKVLPKPCGPLSQLCFGDLTIGHGYTSQEMFKPLDVGKRKQQIKTVTVYYLEGEDLRDYHLGKDLYFKQIA

SEQ ID NO: 966330 - protein, 42 aa, Homo sapiens
RSHHRPTGALSVVELGSVSVEGRLGPTVVLHVLPSNSESSSR

SEQ ID NO: 966331 - protein, 110 aa, Homo sapiens
HLAALQRRHRTRWLERFWWKNVKIIVLICVIVFIIILFIVLLATGAYLLRNREPLPPALLLQGQPSINVCHEGLLSCLPTTENAATDLLTPNYPRPCCHIVSPDRGTLSE

SEQ ID NO: 966332 - protein, 74 aa, Homo sapiens
DKQCTEGLSENSAYRWTVVNTEEGRQALEPLPRVIQESLNDSSPGGSSRTLLMMEPEVILQRQNSGISSELRRH

SEQ ID NO: 966333 - protein, 77 aa, Homo sapiens
QFYTYWFEVGYRHCISIIIELLSCGYEYPSVNKFAGRLMALSNIVQPTKDLDTIVTVKPIMDHAHKDPSYGLHRGEG

SEQ ID NO: 966334 - protein, 33 aa, Homo sapiens
LRQTVLLLHALRNKMGLKFQRYRLVPYGNHSYL

SEQ ID NO: 966335 - protein, 87 aa, Homo sapiens
QFYTRLGGAAQLPLWLLAEAGPCAGGVVERLLLRRSRRGSSSARRAVGCDGELAEQVAVTAATEGLASLLIIVSLCFSVSPGLVAGL

SEQ ID NO: 966336 - protein, 37 aa, Homo sapiens
RSFTSNPSSAPQTYSQQLCGVPFIFVLILEFLHQGFD

SEQ ID NO: 966337 - protein, 35 aa, Homo sapiens
MGYIFYPEKTTIALMKLKGEGGFSSTLSVELERVP

SEQ ID NO: 966338 - protein, 55 aa, Homo sapiens
STDLILIMICHGVTYHNLPSLCDLPVNIGDISTMRVRMKKKANPSSLVLGKGDEV

SEQ ID NO: 966339 - protein, 67 aa, Homo sapiens
WGMIYWHCGGISKWDDKTLRLSQSYSAFPSYYSTIVLQGLMTVIETLHRSPSSKPFKSSFSSFPYAA

SEQ ID NO: 966340 - protein, 47 aa, Homo sapiens
MQLQFPTVIRFLQAVGTVERGIGGFPPSFGSLIRVCVCVCLCIKLNG

SEQ ID NO: 966341 - protein, 87 aa, Homo sapiens
SRGSRSISTRLQYQNSMVLVQNRDIDQWNRTVPSEIMPHIYNYLIFDKPDKNKQWRKGEVCNMTKSTVTHLELAYLVTALVPSDTAC

SEQ ID NO: 966342 - protein, 68 aa, Homo sapiens
  misc_feature (26)..(27): Xaa can be any naturally occurring amino acid
  misc_feature (30)..(30): Xaa can be any naturally occurring amino acid
  misc_feature (38)..(38): Xaa can be any naturally occurring amino acid
GDYYEHSLNFKDWVFISSRGAVLYRXXRSXSHLLLSYXTRSSANPDEGYKVSASTHVKTLGLPGGTEL

SEQ ID NO: 966343 - protein, 52 aa, Homo sapiens
LYQDPPADWVAKDRHLSLPLRKAPDLHISEVKPLANYSTLFHTLLFPVSLQF

SEQ ID NO: 966344 - protein, 67 aa, Homo sapiens
MVSYGIGLSNPDRPARQNNMDSMTRPLVEIPVTLSPVHCEYQLHSISRLLCHTVLTKTTDSVFHKTR

SEQ ID NO: 966345 - protein, 44 aa, Homo sapiens
RNNSSHYYIYKLSKNANTVTLSMGSGCTSGIPSNALHSSPPSSS

SEQ ID NO: 966346 - protein, 44 aa, Homo sapiens
IPGINIRDSLWGKEWWHRPCSLVPTLPLPGFLYSITHGKQVISL

SEQ ID NO: 966347 - protein, 80 aa, Homo sapiens
RVQFYTINGNLDSTDDQKCVQPIYDRELQIEIKHILANFKNYQYFIGEKMNPAGMVALLDYREDGVTPVYDFLIRMVEEI

SEQ ID NO: 966348 - protein, 68 aa, Homo sapiens
PTHRTTAEKYTRMSMEASVMLHRCVPVISCPTTDPRLGSLMDIQMIQLHTSAKKEKVIGAEQSRFKTP

SEQ ID NO: 966349 - protein, 42 aa, Homo sapiens
MWQSFCVRVQILKTTPDWFVTGEKPFQMHGSNGCGETHFHCD

SEQ ID NO: 966350 - protein, 53 aa, Homo sapiens
MCIPDPEFPVTFDRFCGLMVQLLRKLSVRAADEPPESGRTRTWFLYSRGCGLN

SEQ ID NO: 966351 - protein, 61 aa, Homo sapiens
MKPYRPHPSHKYSRTIALRSIILILEIPQNWFESKVLIVLHPHFRSKSSAGMNESSSEVYS

SEQ ID NO: 966352 - protein, 191 aa, Homo sapiens
LPYAISRCVIIGYATLPCDAVKMVQYEENGRKEIDIEKYARVEKIPGSASLEDSMCLAVESSLTMDVTHPLYAGCYIKKPRIVLAGFFSWNTMKGESQTDIEIYTEEEDFSRILQMEEDYIQQLCEDIIQLKPDVSSLKRASQIELSNTLCGPISHDIRSSPEEKTNNRIAIACGARIVSRPEELREDDVG

SEQ ID NO: 966353 - protein, 68 aa, Homo sapiens
VSTRIPSKCYPPGHCSWVHDRRDTGLVLPLPDDVFLPLLSCSVRQEPPVLTFGVCVFAEEPRGEATIC

SEQ ID NO: 966354 - protein, 75 aa, Homo sapiens
VSLQDPLQCYPPLKILESVKRMARSAWHSASLVNSVNMTAVLFCWFSELRPSLIGTAGGIRLAPLEVKFLDRRKT

SEQ ID NO: 966355 - protein, 63 aa, Homo sapiens
RNGPIYHPIEELIVSISNMKTFSSAEAYVRLNHPTDNEQPNIYNQPTSHYYPHCQPNTGIAHK

SEQ ID NO: 966356 - protein, 85 aa, Homo sapiens
PLEGYEAPPGPLSFKLVARSVLASSFDDLTDENKQLSIAQTSNHQTWTLSYRELRYVKSTKLLARPLRATVKNSKDLAGLNIPLE

SEQ ID NO: 966357 - protein, 52 aa, Homo sapiens
RYQRLAYAPAGAPKRASVPASVSSNGSSHAQLCLQLRLNTLKGAPQVSNLGP

SEQ ID NO: 966358 - protein, 123 aa, Homo sapiens
PGARNAEWMIIVCDGFAALSITVRAEVVGSSMGACGSLLVAAFEELSRRAKDLKAFAVKIPGPDSSYSCFEIHICWKVDSEARMEPPIQTEYFLSGGAMILILMVDGARAVISLSIPRNRGTE

SEQ ID NO: 966359 - protein, 55 aa, Homo sapiens
DEVVVANQGNWSVALHLGPQALPRGWASDVEVPAGPAVTTYPSIHVVRGSCLKYV

SEQ ID NO: 966360 - protein, 49 aa, Homo sapiens
NIRIATGKEVLQNLSTKDTSDLSPYQGRQNRQMMISPFICLIFTRIVCS

SEQ ID NO: 966361 - protein, 60 aa, Homo sapiens
AYYWSLTFGCDETGGVLIKGLIGTVLVGGVHMVGEAHSGRALVLVLVVIGVHRRAGENQE

SEQ ID NO: 966362 - protein, 45 aa, Homo sapiens
ITRLTRVFYCTFSTHQSQGALEACEKDVHKDAAFLDVVVNFVSAC

SEQ ID NO: 966363 - protein, 33 aa, Homo sapiens
VEAAELEVLSRVSADSYGHDAPELNAVHLDDEK

SEQ ID NO: 966364 - protein, 59 aa, Homo sapiens
MLRYWNFCRSLRGTSLLRILTKIARVFETLDIGVAATPRSSPEEMLEENPSRAPSDEFY

SEQ ID NO: 966365 - protein, 58 aa, Homo sapiens
STLVVSPVTASHQCRYDRRKMVPYYDIFMPVTKAYVELAVQKELKLLRGKTIECISQI

SEQ ID NO: 966366 - protein, 42 aa, Homo sapiens
MIATYRMLLEREESRMSLPLPNFSSLNLRESNRDSLPLVDTH

SEQ ID NO: 966367 - protein, 68 aa, Homo sapiens
TMKNAGIVMGPISLLIIGIRGQCTSMGILVKCAQHFCRRLTKSYVDYGDTVMYGLESNPCSWLRKHAH

SEQ ID NO: 966368 - protein, 84 aa, Homo sapiens
MTFSGGFTRSNKSGTHSAIQWNSRVLFHRSAYVRSCFVIQEGNETDHQKGHQALSGVPSLGASWSYRGVRLLQLLLVEHSGTVL

SEQ ID NO: 966369 - protein, 64 aa, Homo sapiens
SYTAPTKLLVKQLNTLINWLQSTSPAAGRNRRERSRQKWTLLLVNLQFEHDIHLGTWENRGLNL

SEQ ID NO: 966370 - protein, 67 aa, Homo sapiens
NFPIFDGWKLCFSIGKLDPMKDMLILSALRQMLRAADDLLEDSPLEETGAIERALQPSILWTFMTRL

SEQ ID NO: 966371 - protein, 49 aa, Homo sapiens
SRGPPAVIIPWTTSTTGILHPSSSMYPGQQWLPMDMQQWLLVLSHGWVH

SEQ ID NO: 966372 - protein, 70 aa, Homo sapiens
AHSGGRKERLCQHLADPKAAESETPVKGQEKKPKIQEEAVKEKSPSLGKKDARQTPKKPEGQRFFNHFPS

SEQ ID NO: 966373 - protein, 139 aa, Homo sapiens
RIHECSSDLRAWSPSSSSSQISVFCPLYVFFIFFILIIFIPLVITVIVIIIVIITVILPSFYACILEWVCHGMLLCSQINARLKCLFACFLSMNDSELAELTFYHPFIISSSRHIINVLVDITEHTHAACRFIDQVRQD

SEQ ID NO: 966374 - protein, 41 aa, Homo sapiens
VSSRLNVKGTDTTPPKSVTCTPAFPGRPGPKLTTALQNEDL

SEQ ID NO: 966375 - protein, 128 aa, Homo sapiens
  misc_feature (32)..(32): Xaa can be any naturally occurring amino acid
MIRGHGCRARYASRDSTGDSFIQIIILTVKLXSQVVSLQCGLRVGMARSRLTIEGVCRMEALAKKIMMWLLLMALTDVGIGHLAEAQWCGTLPHAERLANGLVCGILAHRGGVILDAEGDSLCRYRRE

SEQ ID NO: 966376 - protein, 116 aa, Homo sapiens
MTLSPLLLLRQDHWRTKLQDESMKSLILLAILAVLAEVTWCYESHDSMGRYELNPFISRRDANTFIVPSAESGELESKRWIRERSSGLSMSSQGKPCDDYGLGERKARGDGYNAAY

SEQ ID NO: 966377 - protein, 44 aa, Homo sapiens
DVATCNSQLTSPNRVQGVLALKNLSGVECALVVPLMLERGARAP

SEQ ID NO: 966378 - protein, 94 aa, Homo sapiens
LDLEDPERSPPVSAASPMYRILQPLTITLVHAYSPLDFIAVKGPLRPKVSIATGIRIFKNLVSLRYITEIHNIRKEVTLIIPPRESPIYMWGFS

SEQ ID NO: 966379 - protein, 97 aa, Homo sapiens
FSEGTFTFFLQGNTVGSLGEYWIFGGQATYPGRRSAKICINGFGQNRWYPRKNTSSHGPGRERRTKRLPEKNASLLWDVPSPVYMSSALPYLGAVRD

SEQ ID NO: 966380 - protein, 79 aa, Homo sapiens
GVMLRRLSEDPSSRKDINEKSPDGIQSIPGTHIFIGSLDIEAHYLKHFVVPKNHLNFYEFLNFEQDYLEPGATLSCTSD

SEQ ID NO: 966381 - protein, 69 aa, Homo sapiens
MLMEESGAIPEVYKKAPMVGIWSSGVRSGWPLSTVILMVAGYITPVIKVPSYPHLLLGQEEKTNRQVRT

SEQ ID NO: 966382 - protein, 40 aa, Homo sapiens
SHLTCPPGRSPPDVAHLNVTTPRRLGSTSAHDAGKFCFSL

SEQ ID NO: 966383 - protein, 43 aa, Homo sapiens
SSGSARPPKPPLPRPIIPRPLPPIPTRPIAPRLSYPRGYPTSS

SEQ ID NO: 966384 - protein, 100 aa, Homo sapiens
LLRGMLRVGQAKADVWPRTAPKKDENRLDSSCARVWTAIGESDSSDRVPVPSWQNSFGQAIEAAFMKLDTPATSDPLSEEKGGKKRKKQKQKLLLSIPRN

SEQ ID NO: 966385 - protein, 48 aa, Homo sapiens
VTKDPLSAYNSDIAVLWIQVDAARMIRPVNYPEEIVCCPLPIQWMLYA

SEQ ID NO: 966386 - protein, 166 aa, Homo sapiens
WHAGAAPKPCNHLHLGMSLGGGCAQTPPPLMPSGFSGGSGDSSDIGWDNESKDPDKVAPLKTMSFYHSHIFQLLMCVCGKEYSLLTISTVLHSVGTIPERRLHYRYLVLYPDVQYQNDTEAQKKGILAKVTEWHMIQTDMLSVAKKDPSGHAWDDMEKIWHHTFYN

SEQ ID NO: 966387 - protein, 39 aa, Homo sapiens
  misc_feature (22)..(22): Xaa can be any naturally occurring amino acid
MSSSMLGADVVADNSPASQAQXSRLLNVLRHWAAFRIKW

SEQ ID NO: 966388 - protein, 75 aa, Homo sapiens
QDVIRNAFACFDEVSKEAPYRKITMRELLDKHGGIGLQIRRVDELYREAPIDKKGNFNYIEFTRILKHGAKDKDD

SEQ ID NO: 966389 - protein, 87 aa, Homo sapiens
MSTYSGAQVGRYENPYEHVLRVEDQTVQHGAGALDWVHQEQGPVRALHGVEPYQGGALRDHQQVAQVQLSLLLDQTILLGRGHASSL

SEQ ID NO: 966390 - protein, 52 aa, Homo sapiens
MTAVQGDMGLLMATNKCASQPVMTAYGTRSHLYDPKNHILPPRDHSTISLEM

SEQ ID NO: 966391 - protein, 54 aa, Homo sapiens
RTGRSETPGVGEGCTSVGRIQMLKSTKSLPLTFSLSSLSSSKIRAFRRDLLELP

SEQ ID NO: 966392 - protein, 80 aa, Homo sapiens
WACLSPIFPQPLGPALRVSSSCANGRCIAGRWKCDGDHDCADGSDEVGGETRRRERWHPKSWGRATGALRSDQDACFCAD

SEQ ID NO: 966393 - protein, 96 aa, Homo sapiens
MRLKHAETVEMVVIATVTGSLSLVTVVGNILVMLSIKVNRQLQTVNNYFLFSRGVRRTSIIARFLHVTSYTVLPHSTGSCASRAPWLCDPRLRLRH

SEQ ID NO: 966394 - protein, 113 aa, Homo sapiens
MAESTRIRAGGGAGPELVVWPGSFLLEAGESSLPLPFAAPVGSGLDRELGLTEPGHRVLPLEQEGWISLAAHCSHSCLPPRLQKRTLGRQISRGCPLLFWHTEGAKVGPMKGT

SEQ ID NO: 966395 - protein, 63 aa, Homo sapiens
MGMTLFEEILAQPSLRATQPVEVGQVVTHLLDKLHFLIYGSESPGSHRDGGPCGQNPGHEDPK

SEQ ID NO: 966396 - protein, 34 aa, Homo sapiens
MFLDASSTLVESKAEVSDEGQVVLFCEGAGLISG

SEQ ID NO: 966397 - protein, 34 aa, Homo sapiens
LVREKLGLPAAVLIILLPPLLIPSLQEYLINKPD

SEQ ID NO: 966398 - protein, 35 aa, Homo sapiens
LFWGLVLKVLPSCGFLTSRVGVIVEEESPLSDGEV

SEQ ID NO: 966399 - protein, 96 aa, Homo sapiens
IRNRSREYHTDAVPSTTRSSEKSNRDPQASELTLRCYQDKECHCQMLRLPANLSQDITDNIKIVLQLVHGTGYAPGVFQDSESSVYIDYTSLQMDA

SEQ ID NO: 966400 - protein, 72 aa, Homo sapiens
LEELDLLDDLDLVEDTDSFWNDMDELEDLYLMEDLETYEEDMRFPGKTWHFPAEDLDFAWNDQLTCMDRLDF

SEQ ID NO: 966401 - protein, 100 aa, Homo sapiens
RGHMAESHHVAPRIFVAIYNPSMGVSVLAPYRERVEFLRTSFTDSTIRLSRHELEDEGVYICEFATFPTDNRESQLNLTVIAKPTNWIEGTQAVRRAKKG

SEQ ID NO: 966402 - protein, 77 aa, Homo sapiens
MHRLVDERILGCDDRSGTIFIIFNASASAISVENVSPQPVISNLLVRNSDAKHAIAKLLTCSLPILVLINAPDEEID

SEQ ID NO: 966403 - protein, 144 aa, Homo sapiens
MKLLKYSLLNALNALGPPTRLTRTGYLSPLPSNATKVLSVPLSLDWVECWAPGFAARATYMLNLLIHRKNLNYLQLDYNFNLQPVKTLTTEDRKTSRFGNAFHLCREVLRLTKLVVDSHVQYRLGHVDAFQLADRLQYIFAHVG

SEQ ID NO: 966404 - protein, 97 aa, Homo sapiens
MCREKLASWPARLNGILPVYPPNHCRIAAIVFDGGFQIKITIKSADQKTADFVIEKDEGPQQQQQQQQQQQQQQQQQQSQLPQKSTYLKLPNISRTN

SEQ ID NO: 966405 - protein, 120 aa, Homo sapiens
QNMTHVPRKSLEKLVIGPDEMLEGDYKPSTIFAPERVALWMSRHDEAYEATRPTAEQLAGGCTSETRTLVFLVVLDAAGVTTSANVVKISTEALTSALNHCQGMPTDMTQGHMQPGTPDH

SEQ ID NO: 966406 - protein, 94 aa, Homo sapiens
LISGGHWTSLNVPRPSRNSPSVFAAEPLQHLPDRNVVVACLVQGFFPQEPLSVHAWRESVQGVSGGNIVPNIQDASGALYNHEQPADPAGDTVP

SEQ ID NO: 966407 - protein, 32 aa, Homo sapiens
MVGVRITVYIVVAVIGGPMGRFYHLFKVVSQT

SEQ ID NO: 966408 - protein, 112 aa, Homo sapiens
DREETATCHEHAHRLPWHLLLTLTKNAACKATEVKGQLNDRWAKGELPLLGARKVTNLKMLLPAQILNASSQQLRGLPFAISTTDSCQHRYRSQRCEQTMESTLSLAVVYIF

SEQ ID NO: 966409 - protein, 115 aa, Homo sapiens
MMNSEHVLIIQWVLFTEMVVIYVLVNLQQFIEVKTSYSLQTRDQDNSSDEIGCIKGETFAQVVRWESLWLFVVPDVVTVLEVVEGEGCTVGLAVELAVGTGVAVETEQKSVVFPT

SEQ ID NO: 966410 - protein, 33 aa, Homo sapiens
MRTESTPTTASAISYECLWSPPSNEAAKLHFDS

SEQ ID NO: 966411 - protein, 92 aa, Homo sapiens
VGGECSLRQSVRSCAGGLQGSESTAVVTRWTRRSRRAECDIYSYDPDLESDPFGEDGSLWSFNYFFYPMRLKRIVFFELPFPQWLLLYTLIG

SEQ ID NO: 966412 - protein, 120 aa, Homo sapiens
LRYMRSTLTLLINMDLKLNEPNKTWTPDLKRLIKLVYIVDPDVYECGVLEFARLNSNEDVKSVCDHDNDCAWYASGGLDENGCFYYACSLACEEYAMFRILVCMSYADGACHKLCLIGRV

SEQ ID NO: 966413 - protein, 120 aa, Homo sapiens
MTSPERDDFTAHLTNCNLGAGDVPPAGQHYRNQKPVKVETAEYPVIMLAVVNTTCFRIECKYESYCSHNSTVSDCQVGNTTDYCTYHGHSSANSQYYSYTHSTALPYYNYQDSYYIRYNK

SEQ ID NO: 966414 - protein, 87 aa, Homo sapiens
VNKAKRTWRAWWPALQHSLQPTPALAVGKPFKWEEKPKRVLQGGQQDFPESLKSLWVFEWNLEAPGGSGLMSSSCQRRLVKNNCAFA

SEQ ID NO: 966415 - protein, 192 aa, Homo sapiens
MTQYPNVTNITPIYNVNYGAGDVPSRMDHHYRNQKPVKVKQLRILFKCKRMLNTTCFWIECKDESYCSHNSTVSDLSRWGTRQTSVPYPRPIQCQHANSTAKPTVQPSPSTTSKTVTTSGTTNNTVTPTYTTCAESLPLMQPSFIGGIVLVLGVQAVIFFLYTFCTSKEEITTLCKQTHCLHKDWVMFCGYR

SEQ ID NO: 966416 - protein, 35 aa, Homo sapiens
NKAMVYYGNGNSCCGLSLQSSNNVLPSFHDSIQLS

SEQ ID NO: 966417 - protein, 131 aa, Homo sapiens
  misc_feature (55)..(55): Xaa can be any naturally occurring amino acid
LRIRRLSRIARLRSVGAALRISSQQEELKPPERAKQDIATAAALVPRNFMSVKLXLDIEIGTYRKLAEGEEEPVGLRLSWNREYLCDDSTGGSSSGGGIGLTLGGTMGSNALSFSSSAGPGLLKAYSIRTP

SEQ ID NO: 966418 - protein, 71 aa, Homo sapiens
LGGVVIGVSTVTAEGHSWRVEGLTDILHLDGKVIESPALTVQVAHHNELWLLLLLVLCQLKPKEILDLRFS

SEQ ID NO: 966419 - protein, 47 aa, Homo sapiens
KDLGGESHCEVRSVGAALRILVPSRRSWKPALSGPSRILHGSCVEYQ

SEQ ID NO: 966420 - protein, 43 aa, Homo sapiens
MESMNGKTLVHRILMTASEPIFREGISVCSFCNVCTWTWVMFG

SEQ ID NO: 966421 - protein, 46 aa, Homo sapiens
GYSKDPEVESDIGEAEERRELALKDSRAKQEELEAGLQRAKQDIGT

SEQ ID NO: 966422 - protein, 58 aa, Homo sapiens
ACRECLGDSPLWSHGILEQLGGLVSGKDEGTGQHMAIDADTWRIAILVLTQASGKVHP

SEQ ID NO: 966423 - protein, 38 aa, Homo sapiens
MTRRIRHRPRRGGISSGTAALGSSAATSSSSIPRPSLI

SEQ ID NO: 966424 - protein, 53 aa, Homo sapiens
IRRLSLDYQKISSGSRSVPMSLPLEPELSRSDPRTTLLFVLSLIALCILFRTS

SEQ ID NO: 966425 - protein, 121 aa, Homo sapiens
GSVVTCVVAALALLQVTGLDGNYRITCHTVMEVLREHKDSVMAVLEAFVYDPLLNWRLMDSESSCLRTGVCTSQRGSVGVLRVSDLSPSHPEPEALPSHLRYIFTEQLWWLEMNFASIFIN

SEQ ID NO: 966426 - protein, 111 aa, Homo sapiens
MTQSIEELWDKLQSYSVYYCHDYTVDSEYQYYKAAVKLEHSGMKILSRERIQSVKQSIDFMADLEKTRKQKDGTDTSQSGEDGGCWQREREDSGDAEAHAFKSPSKENKKK

SEQ ID NO: 966427 - protein, 48 aa, Homo sapiens
ISNTLLSSYFTELLLCSSSDFIILHLYCYVSTVPIFNIKSRIFQRAES

SEQ ID NO: 966428 - protein, 57 aa, Homo sapiens
LEGSLQIRYDQPGNSRLENLPPVAASIEQLLEEAVELKDQPIFTKNQGYSSVTFYGM

SEQ ID NO: 966429 - protein, 68 aa, Homo sapiens
DDDNTGYFRDSAQCPVLSACSDILRLINGSWLNYDYMEEHVILTEKDLLEDGFGEHPFYHCLVAKMCH

SEQ ID NO: 966430 - protein, 141 aa, Homo sapiens
DSRRIPLRRPLDLTQRGPQRCLHLPYIFSALEGFIVDQSKAPRKGDILPGKFTSWSLFRSKSSISLAISASCSFEPMVSSFWISSFSSFLLRVCLSPSLPEYLWKMATRRPMACSRGHAMAEGWAWSGREAAKCDASGRRT

SEQ ID NO: 966431 - protein, 49 aa, Homo sapiens
RNDPVPNVTTLGAHLQRNSAPVTSTPGWVTTPSTSKPGEESNTAAISWF

SEQ ID NO: 966432 - protein, 58 aa, Homo sapiens
PSLDRSLMFIFSWYYVIVAMVIAGMMYKYIETKGESVDTTWITAKTIETSSFVRASLV

SEQ ID NO: 966433 - protein, 119 aa, Homo sapiens
EAKGVPVRERVVHVLLVTHHETLMHVAGPRVGEIPFDTFWGSGNGEEGMDVDDPSSGSLNGMGGFSNVNFGRSLLMPKSPAERKQDPPVTHDLRVSLEEIYSGCTKKMKISHKRSTDGV

SEQ ID NO: 966434 - protein, 52 aa, Homo sapiens
MPLLAMIEAGESFEPGRLQIAVSSGHVIALHLGKESTRRQDTRSPTSSFLAT

SEQ ID NO: 966435 - protein, 45 aa, Homo sapiens
MACPSDQVMWLLSDIFHKYSGEEGDKHSLSKKELKELIQTGAHRL

SEQ ID NO: 966436 - protein, 83 aa, Homo sapiens
YRIYVRRPLVRRPLVTAQINWKPPVNTQERSISASDAREINQNGLRVLNLVPEIKCTMNGGYKKPLAQRLRFGEKLPSPPSGR

SEQ ID NO: 966437 - protein, 68 aa, Homo sapiens
LDVYACREVESEVMMSDKERGTIEPLQRGDRSRLWHSQQAHGSLTLNSRQSAWALGEPTGHVSNPRCS

SEQ ID NO: 966438 - protein, 33 aa, Homo sapiens
IGSPWLRGMLSDTGLVLRKFLQFYAVVSVIDPV

SEQ ID NO: 966439 - protein, 90 aa, Homo sapiens
  misc_feature (2)..(2): Xaa can be any naturally occurring amino acid
VXRSWNHCIQSGCILISCMESIQSSRCMDSTAYSRDPFITLLEYTGFNRDAFYHERSTDASVDRGPRRSGIELADEIANSSGKGALAVRG

SEQ ID NO: 966440 - protein, 99 aa, Homo sapiens
ECSRCREYSADVIEHKHWYCNDRRHDQWKMYRRILDPIYPDRCSSCIHWPSAIVSLPLLQSIIPFYLLPEPQVPVELQGLTFQNSTPGVTSSRSAFLAT

SEQ ID NO: 966441 - protein, 69 aa, Homo sapiens
AHAGVTLNQKARFPRSYPPKEPWVQEYSTCARLKDLVTFRHQSCDHLEVTEAGSCPPLVLPHYMTRNWF

SEQ ID NO: 966442 - protein, 47 aa, Homo sapiens
RTLRGGRLKGSGPVAVAGGGANGTSFSYTYPWRPYMPCYAEYFWWQK

SEQ ID NO: 966443 - protein, 44 aa, Homo sapiens
EEEYIRLGSTDEGYLPEYQLLISFLTGPGKQGVGFLFTLYSTTR

SEQ ID NO: 966444 - protein, 71 aa, Homo sapiens
VHVTLAVNVICELARCIRKKYLSLVRLFFKLMNSSTNKWVLIKIIRLASVPSGLCSSVTWRGTLGGPAVDG

SEQ ID NO: 966445 - protein, 50 aa, Homo sapiens
QNIGALFEVKKLEGCQYYVATLNPEQLVLSRVGIILSNSIGQGATDRHPP

SEQ ID NO: 966446 - protein, 48 aa, Homo sapiens
SSTAGFDSERTPEGVYIFPINFQPFEGFIVDQTQGPQEGEYSCEVTSW

SEQ ID NO: 966447 - protein, 59 aa, Homo sapiens
EDPPSVDRLLDSVCATVSSTNLKMLLEHLVTYPKVPLAGPSVTEAAGSHMDVVKKRSTD

SEQ ID NO: 966448 - protein, 74 aa, Homo sapiens
RCMRVYDNGDCTCWKSAPWDKDLCRTTIVALCRADGEELEHGGEKLYPLQRKTNRDPEAHRTGLDRLTSLYREL

SEQ ID NO: 966449 - protein, 122 aa, Homo sapiens
EDPPSTFEDVTQVSSAYSEDSTCEAVTGKTSNIRANFENLAKEKEQEDKRSNISQFIFLLNLKPCKHHESILKTLVINNSRQLKTTMSARSTLFALTMTLTPAQRLGGSTLRHGVWRSGRRT

SEQ ID NO: 966450 - protein, 84 aa, Homo sapiens
QYLPGDSVALDTLQTDPSSGSSIGGGSHSRSNLLAITDAEVASILETGTRGSLSFNLLAILSYSGANCLQCPHPWSIKLQQHHQ

SEQ ID NO: 966451 - protein, 57 aa, Homo sapiens
PPSVDRLLDSVFSTVFSTNLKMLLEESCHLSQVPLAGPSVTEAAGSHMDVVKKRTTD

SEQ ID NO: 966452 - protein, 138 aa, Homo sapiens
RIPRPSTAGFDSDRTPLWCLHLPYLFWALVGYIVDQSQGPQEGDILLEVHLLVLVPVQVFHQPCNFSILQLRANGELLLDQLLQLLLAQGVLVTLPAGVLVEDGHEEANGLIQGAAMAEGWAWSGREAAKCDASGRRT

SEQ ID NO: 966453 - protein, 65 aa, Homo sapiens
VVAEVSRGSRTCPGRLVFTLNAAHIDLGSVATDTASLHTLPGSVHSAPGLVACEVPCLCASPMVC

SEQ ID NO: 966454 - protein, 45 aa, Homo sapiens
VLLLRRRKKLAIMHRGRVAIYSPVNIAADAQCMRPSSSNSMQHHQ

SEQ ID NO: 966455 - protein, 172 aa, Homo sapiens
  misc_feature (53)..(53): Xaa can be any naturally occurring amino acid
SRGPVQAAFRPWSLNDSSSLINSKTGSLSHGTLETGGRNGGWKQDSQLQKARXDIFMETLKDIVEYYNDSNGSHVLQGRFGCEIENNRSSGAFWKYYYDGKDYIEFNKEIPAWVPFDPAAQITKQKWEAEPVYVQRGLVRVQGPALEPILIPKLRLRLADFPYLHCSNMPEV

SEQ ID NO: 966456 - protein, 49 aa, Homo sapiens
CCEKFAEEDKKLTERIDTRNELGSYAYSLKNQIGDKKSWEVNFPLKISS

SEQ ID NO: 966457 - protein, 52 aa, Homo sapiens
RIPYSRCVVEAAGAIATDSAQLPPAGSGRGSRIIQRLCQRLVGGITLRCAAE

SEQ ID NO: 966458 - protein, 85 aa, Homo sapiens
GQSSAPKFLPSWVQTFEDMIVVIPNYHCMLPSPPKIASIITKSIICHPHCHHIHHHHGCHQYATMTTEVSSTTEVVIPTETTTTT

SEQ ID NO: 966459 - protein, 81 aa, Homo sapiens
LRYAAVIINDLKFFNTTVKTGSLQPMGLWRQVEGMEDWKHGHANFSEASEDIFIGDPMKDIRGDITTDSNRVSLYSRARFV

SEQ ID NO: 966460 - protein, 45 aa, Homo sapiens
LSKLSLDRGVYFLVYQIQEIFSSLQPFRSQVYMHPSLSPASTMIL

SEQ ID NO: 966461 - protein, 43 aa, Homo sapiens
KRTCGAQRYGGGGGPDRVHRSYRELFEFFCNNTTIHGAIPPVC

SEQ ID NO: 966462 - protein, 70 aa, Homo sapiens
GPNNPRTIVVLWSDLVLARTKAARLASSLNARSLHACSLHDWDLMCTERDKERFFHTSHLGNQKRVITAM

SEQ ID NO: 966463 - protein, 52 aa, Homo sapiens
TTYFREELDPNKEGGQRGERTFCLENIRFLKGMGYSTHAAQQILLSNPQMWW

SEQ ID NO: 966464 - protein, 45 aa, Homo sapiens
MGGILGPVHTGLLQAKSAFCAKEKTLGVGFQLRRPRGKQQIVRGL

SEQ ID NO: 966465 - protein, 115 aa, Homo sapiens
MILSQDALGLRFVPTAEFPFAECSSEKRVWCRFGDRPLVGPSLACSAWVARACQKMDSSFQISLLCEGEDVWCWFQAAESISQAAVPTEPEAAQTLLGPMGSLGLGENYGKIVRG

SEQ ID NO: 966466 - protein, 93 aa, Homo sapiens
  misc_feature (5)..(5): Xaa can be any naturally occurring amino acid
ASGVXRIGGIMIVMVLVDCQQLRGGDRGGFRGARGMDRGGFGGGRRGGPGGPPGTLMEQMGGRQRRTWRTWQYMDNRRASSGTRQKSALLDAE

SEQ ID NO: 966467 - protein, 66 aa, Homo sapiens
GPYQQHKEVPRLGVESELQLPAYATATATQDLNHVCNLHHSSWQRQILNPLSKARDEPESSGILVG

SEQ ID NO: 966468 - protein, 108 aa, Homo sapiens
QYGFGINWNQVVYMGFSYKTLTFNFLENEDSSSAGCILYEETVLGNRFRVLGREHRKLGNVWSSRCDAVVNESDYGTMRLRVRSLAWLSGLRIQRCRELWCRLQTRPY

SEQ ID NO: 966469 - protein, 56 aa, Homo sapiens
MPEEDSEEDEEKEEGSEAEQAQGGSVLSAQNAGQSLHQEGEDSGWERHLKWHAEPR

SEQ ID NO: 966470 - protein, 52 aa, Homo sapiens
MKARASRGTSRFRKNFRPSKSFLCFSCASSSFLRSSSCADISPSVGNSSTSA

SEQ ID NO: 966471 - protein, 86 aa, Homo sapiens
MSHTYSRDQSEIDSGHVRFTISSDYSNGSSSGSGLGLGEGSGYSYSSGHSLGGGFSSGSGRALRSGLSSTQGSSSTIRYTTSSSSS

SEQ ID NO: 966472 - protein, 47 aa, Homo sapiens
AGCTKASASLVAFQFISPMNRCVKTVQQSYTLHIVWTCQTLEGDSDG

SEQ ID NO: 966473 - protein, 48 aa, Homo sapiens
RILGRAPAVSAEAGVGHESVEELYLYRSKSVCSVIRSSSSSSSLISLY

SEQ ID NO: 966474 - protein, 116 aa, Homo sapiens
ITADIRSISISRHHLRLTLRNRGDIILIHVVLHNRVWVGEVVSVLPHAQALLGDIVVEVGRLHGQVSGVNLMELTFILRGLMGRLTHSQEVKSKVVSVVKEELGPNSLDDNIPGIH

SEQ ID NO: 966475 - protein, 41 aa, Homo sapiens
MGPGYVIIQDFHRHSYQLGLKSRDNTLSKYSYTTGLCRASE

SEQ ID NO: 966476 - protein, 39 aa, Homo sapiens
SHFNETLKQKLGIYDAMNIGLVRPGTALDVAGSPSSYWL

SEQ ID NO: 966477 - protein, 42 aa, Homo sapiens
LVVVLERHAESGVRQQFADGAGKLEQFFLSHAASHARLKCVQ

SEQ ID NO: 966478 - protein, 67 aa, Homo sapiens
IGERYPSRYTLAEIPVMAVTHSRSELTFTLIRKVNGVRSNTKKNKILEIRKIICKHVSPLWLTEYRL

SEQ ID NO: 966479 - protein, 64 aa, Homo sapiens
MQSQPFTVKTAKPLWAGNPNMLLNAARNHQEGTYIIELSTHDPGQWLGLIGQHLPNPVSTCTPE

SEQ ID NO: 966480 - protein, 72 aa, Homo sapiens
EGTATRAHCKMVLQTTYYYIRKTHGSHCLTRLDQPSYKEASTGTLSRLSEQLLAGNRIIVTDKIHRIPQSPL

SEQ ID NO: 966481 - protein, 101 aa, Homo sapiens
PGVVIQIEIFLICFSGMYTFLLLPFRVSWLGSPGLSTGCDQSSGSKSCIMSSVTSTVGTGVPGRSASIAVRRWCWFWGRRFGCAWFCARFPFKGAWLGSRR

SEQ ID NO: 966482 - protein, 58 aa, Homo sapiens
GVVKSRWFRSRRDHVLDSAMSLPQCQDGIKSMSRSKSTPKSPEDEVTVSLKKMVMSVN

SEQ ID NO: 966483 - protein, 53 aa, Homo sapiens
LEDSVEYVNELEQLDTGEETAGSTTDPGPVFNVLRRMNVFPGDGPLCLSFPAS

SEQ ID NO: 966484 - protein, 31 aa, Homo sapiens
MIVGRTKVQVEYKGENKSFYPEEVVFYGSDK

SEQ ID NO: 966485 - protein, 42 aa, Homo sapiens
MAMPPPRSGGGCTVATINGCRTVNTKELLLESTPADAHMEYM

SEQ ID NO: 966486 - protein, 34 aa, Homo sapiens
MRTVEVVKSLQWAGTCELDLDLFLGVLKPLGRKK

SEQ ID NO: 966487 - protein, 86 aa, Homo sapiens
AVSICRDRAYAHVRHGWMLDHIFIYSGSGDSLVSCVSDSADSVLRGLVVIISLTYLPRIKEYLDQLPDFPYRMPPGLGVQLPPANV

SEQ ID NO: 966488 - protein, 153 aa, Homo sapiens
MSYAVSLLKLKFYDLDLWEWSTRATAGVQCCVSLGGVCVEFIKLPACESFLTVTSSSCPKMPDAADMMCHSIVPLLSPVIMMTLDACLPGTASRSECHLDSRSDSSMPTQPTKCQTGLIFNKVGRVLNVHFFSSQWVVMSWHTRHRSVSLPLP

SEQ ID NO: 966489 - protein, 190 aa, Homo sapiens
YQCTFFPKSGHRCPECGLSRPRRAPKRCSTVKMPKCSHAWLQEEEGPDVDVSLPKADIDVSGPKVDVDVPDVNIEGPDAKLKGPKFKMPEMSIKAPKISMPDIDLNLKGPKVKGDVDVTLPKVEGDLKGPEADIKGPKVDINSPDVDVHGPDWHLKMPKVKMTKFSMPGFRGEGPDVDVSLSKDDVDVSG

SEQ ID NO: 966490 - protein, 137 aa, Homo sapiens
NQARYPETSYDDFETAIRMYNERKDKDINPQSFYRRNPSRHFLYVECLTDKLAYYGTQSTSREGLGEDMYQVRCYLECSTIILAVIMLYSDGFCTPETLTLAASGLLALEIDLLSADDCFRRPLYVLVRRSLCWGDS

SEQ ID NO: 966491 - protein, 65 aa, Homo sapiens
DRARYRSARSQGLLRLKFSTHIEILHVLYGHHLVLNWFLPLLFLLLVFESVFCVFAGEIAFLVYS

SEQ ID NO: 966492 - protein, 113 aa, Homo sapiens
MIVGICLVYTRTRMEASLRENGEEYENQPARQVHLALSVAKPMMSRRSCGELALWFLALNDSGWRCRDVQYHFRWSRLESVHHKTEGVERPVDAPLLFETSLAYNKWVNLCIK

SEQ ID NO: 966493 - protein, 77 aa, Homo sapiens
MQVAGHEDSNGCINYEALVRHILSGVSGAHGGGARPYGAEWLMIFPVSPESVPFPCVNLVSSLKFAYAFLSQRLTDL

SEQ ID NO: 966494 - protein, 57 aa, Homo sapiens
KDDMLVAGHRTAMVVSTMKRLCGVSCRGDGPMWAELVRMVLNGVMTFPVSPDSVPFP

SEQ ID NO: 966495 - protein, 66 aa, Homo sapiens
VRTRWAQQLEVYSTYFCSDRLIAGFIEKTRADQGFCHRTGVAVCRVGYDASRVTLLLLADSPGNAY

SEQ ID NO: 966496 - protein, 116 aa, Homo sapiens
CEKRRDDLWSLKFINARQYLNKATGPKLRKAALKISVGATSEQNPSLRAVHAKTSPVKANYYTQLIQNLTNGTSYPRDNSAILVLESISTIGFTTSMLDQDIPMVQPLLKVRLFND

SEQ ID NO: 966497 - protein, 52 aa, Homo sapiens
MVHPEYRPTRPANQFVPRLSGFKIHPMAYQLQLRAARLFPSQSRCFADSLPH

SEQ ID NO: 966498 - protein, 122 aa, Homo sapiens
PFEKREMTYGVEFISARQYLTNPQVLNYQSRALKISAGATSELEPNLRAVHAKTSPSQSELLYSIDPVTGPTEQVTLGITAQSYSRVHINNRVYDLDVGSGHPDGAAAIKGSFVQRLKSYVI

SEQ ID NO: 966499 - protein, 87 aa, Homo sapiens
RYRRDEMGTLLNRKPRETLVLDTKFTQWNTARDSGVRLVNVSSAIQHHADDAPPHGARHPELDMPHKRFIVDTTIAVLMPCHQHLVS

SEQ ID NO: 966500 - protein, 70 aa, Homo sapiens
FSVPLDFLPHTYPESRTRNVTPGRSPGHSPLRTLVVVYTLYRTDSKSCHRSVLHCGPPRELGCNGAWKKS

SEQ ID NO: 966501 - protein, 81 aa, Homo sapiens
LRETTRGGISTTWGGYSGMDKRCNDTAFTDGQGIVILPVFVKSLKQKFLQMIFSLRNTITSMCLTEALCVLLRCFCALPFW

SEQ ID NO: 966502 - protein, 49 aa, Homo sapiens
VDSIIGLRVSLVVISTIGYTTSMWDQDIPSGAAAIKGSCVQRIEESYVI

SEQ ID NO: 966503 - protein, 39 aa, Homo sapiens
MRDELCLVDPIHRCGYALPPLSRGYPSYSRTDGHASHGL

SEQ ID NO: 966504 - protein, 92 aa, Homo sapiens
GGVKICDLSAYSPSPFWRFLSQSFTLLSAMPCFACESVWYRTAQEGDHGCHVYPIALLSYAFALAGYQDKRNEVLKSLNEEAVKKDNSALSG

SEQ ID NO: 966505 - protein, 89 aa, Homo sapiens
MSNDYRVYDREVKWHRHGVLKSGTFLSHVVRQMTEEGVEMLVEHGMDVTAMCCINYDAYVRHILSGCRAHGAELVRMVLTVLVPSQSPQ

SEQ ID NO: 966506 - protein, 61 aa, Homo sapiens
RDEMLVARHEDSMVDINYEELVRDGAEWVTTFLCLAQQFRALPWCEFCIYAYNVTLGFLCL

SEQ ID NO: 966507 - protein, 37 aa, Homo sapiens
PIQETIEAGEAGRQNRNEACAADMTPYIPQDIAFLLL

SEQ ID NO: 966508 - protein, 114 aa, Homo sapiens
LLLRSAPVMLFIRSAADGRLRVPNCASGPARRSRHIFVACEGSPLLPVHFDASVEDSTFGQSCENLTSLNLILSTAASSLFFPAVKEVTTVRAPIQHTHASLSGGHQKGQKDQV

SEQ ID NO: 966509 - protein, 61 aa, Homo sapiens
PYLEETRCTREETRCTCHVQHEGLLKPLTLSMGAIFHRSTIPIVGIVAGLAVLAVVVIGCC

SEQ ID NO: 966510 - protein, 66 aa, Homo sapiens
SFAHSSHALSPYCRLPVGSSVPTCASDTSPNGVDIIFVACEGSPYVPVHFDASVEDSTFGQSCVIC

SEQ ID NO: 966511 - protein, 64 aa, Homo sapiens
NEPALLKKRRDGDTSPNSRNKKDDWGGNTGQHGNSVSQLDTGVGLYSPPPTQLGYQGTQHTYQS

SEQ ID NO: 966512 - protein, 46 aa, Homo sapiens
MKAMLVECAVRIGGAASLRYACLLLLCNRVFGRQWIFLLRLVSSLV

SEQ ID NO: 966513 - protein, 102 aa, Homo sapiens
MRCTCHVQNEGLPKSPLPETGSELARYHHPHCERCLAESWHDSSGTMWSLVCCGRSCDVYEEELMCEKEGCYSHGCVQRQCPMALMCLSQLENAGDSCLVRD

SEQ ID NO: 966514 - protein, 50 aa, Homo sapiens
KDNRIYRKQMVSYISTTTTVIKKARQYEVGPIEHNRTVEGHSCDRAKRYW

SEQ ID NO: 966515 - protein, 118 aa, Homo sapiens
YERQLGKLLNVADHASPKTGKNVHVAHPMNTQYSAGTQATIKCLGQLYFPNPEYEKGFHMVLILIFTVSLDKSKLLLPRLACTGAIFAHLNLRLPGSSDSPASDSRVAGITGMCHHHL

SEQ ID NO: 966516 - protein, 50 aa, Homo sapiens
MRTSSAPCGPITPERICLANASTSRYNLQLRYSHDHAAPSISVSLCVVGR

SEQ ID NO: 966517 - protein, 148 aa, Homo sapiens
MSQRINILSRLCSQTILGSIRYPTSAKCLSIDFGFVSRKADLRNSCILEPNAKMNYCTQVEETLKICSQGSPNFHDSIYRWLQNKYNLSMVIQVRRVARITSGGNDGREISGVLVMFHILIRVVFQLACILGKSSSSCMLKMCPLYSI

SEQ ID NO: 966518 - protein, 34 aa, Homo sapiens
QLGPSLPAHFSILDILVSHAHGQVAVAAVGVEAL

SEQ ID NO: 966519 - protein, 115 aa, Homo sapiens
RKERSRELVPCFAALLQYRLQATAMGGIVQTLLSPFWAPEARRLEEGGSGTRKRLDAMAEGTLVLWTGGGIRVPPKFTCWKFNRNATVTRGETFKRLLGHEDSALMNGLIPLSGE

SEQ ID NO: 966520 - protein, 72 aa, Homo sapiens
IETCKQHHGGLTDAAFGLDEFQILRELAFNYRYAYTRVHFMHHNVGVIHDVKMDMIILYNPTKSADSMYDVI

SEQ ID NO: 966521 - protein, 46 aa, Homo sapiens
SSSAHISIAEKGLNNNLHAGTGDVVIPGIFIALLLRFDISLKKNTH

SEQ ID NO: 966522 - protein, 36 aa, Homo sapiens
SSSAPDFIDRGEGYSRENCGFGHELDRDTVFALVNY

SEQ ID NO: 966523 - protein, 40 aa, Homo sapiens
RGNIPLMSQGLVAALLLAEDVTGLHFWWGLMEPGLTMTRP

SEQ ID NO: 966524 - protein, 41 aa, Homo sapiens
MKKSFIPFSYGKRICLGEGIARAEYFLFFTTILQNFSAIEV

SEQ ID NO: 966525 - protein, 37 aa, Homo sapiens
LSGPVAAKLVRQPWLQLPGPLLVVGDNAPDKTGVGVA

SEQ ID NO: 966526 - protein, 68 aa, Homo sapiens
MDSVLRDLGITDAFELGKADFSANVPEQTCSLSKVAALVYRCEVNEEGTEAAAATAAIMMMRCARFVP

SEQ ID NO: 966527 - protein, 36 aa, Homo sapiens
SWPSLCAEVWPRRSADTGAEGLARTDSSVPAPDLNS

SEQ ID NO: 966528 - protein, 114 aa, Homo sapiens
PHLFDRTRKSSEITKSCCTLHAQRCRMEWLTLERISYTPLDICDQQIILLWNGLIRLRVADFGLARLIEDNEYTARQGAKFPIKWTAPEAALYGRFTIKSDVWSFGILLTELVT

SEQ ID NO: 966529 - protein, 66 aa, Homo sapiens
GAQRRSQRRVEVSCPFLTGHSCLRYIVRDLSKMTGCRISSCDLTYFTPFLLLNGLLGRQGVLLRDR

SEQ ID NO: 966530 - protein, 102 aa, Homo sapiens
MCGDNTIIRSVYALPTAILVDTALLTRRTPSRPRLGSRKSEGGKTSSTILGHSHSVFFLLVVPLVRRVFFSCVSVFFSLGLAENLAVRLGRGPFRDPQAGAI

SEQ ID NO: 966531 - protein, 116 aa, Homo sapiens
RSTSAAEESIAPCRQDRCRAVKEVLMESPPDYSAAFRADFGIPCCPSAPETPSYSWLVVVVLIVVMIVELLLMGLHMSQKHTEMVLEMSIGAPEAQQRLALSEHLVTTATFSAIEV

SEQ ID NO: 966532 - protein, 116 aa, Homo sapiens
HTSIAENGTRWGGGPVSENREDECASARSALVHSACLWIVYILTRGSSSHHDWGLEEDGGRKSSRILGNFTPLLLLNGLFGGRVFFSCVSVCFSLALRRIGQSDRGGVPSETHRPF

SEQ ID NO: 966533 - protein, 103 aa, Homo sapiens
TGYAFTTDKSAIPQENGMTASFVFRVAPYVIQKAVQDGRRLVFHSLVCSQTSRAQDEKYFRVLGDGVPSEAGVLGDNVGHTHGEKVSKSLNFTDDCLCVWHFG

SEQ ID NO: 966534 - protein, 35 aa, Homo sapiens
VDLEDPPARIRFTLNVTLPHHLLPLCCRRGSRPES

SEQ ID NO: 966535 - protein, 40 aa, Homo sapiens
PHCMQDARSMVDKYFRTELRTGSGSALDFFPTQRDPPSFQ

SEQ ID NO: 966536 - protein, 101 aa, Homo sapiens
MRLLNQYHRFGEVLFWKNESRSGEDVSSCKAWGRRFFLECGHLHFSSGILQRRKKVSFSDLALLTVYFALFTDSDESTARGTKTSSEVSMSQYSCKSCNML

SEQ ID NO: 966537 - protein, 35 aa, Homo sapiens
MSLGYNGNTLGLDSTQVGVFKKANQIGLTCLRQMW

SEQ ID NO: 966538 - protein, 36 aa, Homo sapiens
DYLQDSDIEEEKDGIRKAREVLMRLGLDTIWQILVS

SEQ ID NO: 966539 - protein, 52 aa, Homo sapiens
MTYPRLRPGKHHRHCNTRLPEFSELQGCFREELMYSFTSVQCAMASHELLTV

SEQ ID NO: 966540 - protein, 75 aa, Homo sapiens
ERRVSTSDCVRGGDCTAVVVCSSLTSNHVLCVSRSKKSCLLSPPSHPFCIGTTSIDRSTTSNLFVTLVETSTLLD

SEQ ID NO: 966541 - protein, 44 aa, Homo sapiens
ETWKTSSPLYNRLLSSQAAGCFREELMYSFTRCRCKASMSSSRK

SEQ ID NO: 966542 - protein, 34 aa, Homo sapiens
RGSPNKESVFIAHEPSLSAPDAIIFCSVFTLQMS

SEQ ID NO: 966543 - protein, 30 aa, Homo sapiens
MSIYEEFVQMMTAEDEDLLSTSFFPPSSKN

SEQ ID NO: 966544 - protein, 52 aa, Homo sapiens
RSTAGSVDAPEWKREPLCSLWDIEYPSLDLACGHYPLRSAVDELTRQTLNHS

SEQ ID NO: 966545 - protein, 87 aa, Homo sapiens
RLAGLQEEGDECIIMQHRYNSNKSPFNGLACRPDGDTHYACHARRLIVQISTLASLMPQIRKEVKKHCYALLAIQTHRKGIHHVYNH

SEQ ID NO: 966546 - protein, 120 aa, Homo sapiens
MKRVACTRLTPQEITDLIAWILRGLTSPICARDTGTCHLFFPRIIGGIDHSLYTGNLWYTPIRREWYYEVIIVRVEINGQDLKMDCKEVRKPRESLGTYGGRQYNVKEDSGYHVGTMRQT

SEQ ID NO: 966547 - protein, 54 aa, Homo sapiens
LLLRPASGGISSFSLSTPVILSLALGRVSTFATGRLLKVVCLRAISVRHNVCVL

SEQ ID NO: 966548 - protein, 66 aa, Homo sapiens
SDKPQKKKKHKPQDGSSGEWNERTIYLFLQTRDYRKSFTKEEEMSSDPKETADRTQYTREEEVYTQ

SEQ ID NO: 966549 - protein, 47 aa, Homo sapiens
RPHLTLCVLCAKGIIIVLSAKCKCKLWPRSPGQPSRGRLHLLITPRL

SEQ ID NO: 966550 - protein, 70 aa, Homo sapiens
EDPLRRTTTAEFTEASSCLTEQVMADPVQPVWGLDEGLGQNPTNAEMLKVLGNPKRYEMNVTVLDLEHLS

SEQ ID NO: 966551 - protein, 78 aa, Homo sapiens
MDVEKWSCHGCVTSSYLSLTSMAQSYATRIQQRLNSEEKTKSVEKVENCRNRRWMGSALNREDSKPGRNIPFSNLYQF

SEQ ID NO: 966552 - protein, 60 aa, Homo sapiens
SWKIISSAPAPPLLAALAGHPYNFGIVKDSDHVHAITATQKTVDRPSGKLWRDGRGTLQN

SEQ ID NO: 966553 - protein, 76 aa, Homo sapiens
SSRIPFRLKNNGSSNPSAILIHFGFSAAFYIYSNLTRTELSSTLNITIVELQEFWGYFGEITKHNRSYFIQLYCDQ

SEQ ID NO: 966554 - protein, 106 aa, Homo sapiens
RRRTTAGSCPPTDHRWQVGTRKAMPLSFPFSSGGYLAQRLVPLPSRGSGIMFLRQPRRPSRHSFPGGALPQSFWVALDWNWTCRVYQLLPRIPIVVPGCPLFLSHE

SEQ ID NO: 966555 - protein, 43 aa, Homo sapiens
SATVPGLYYFTYLRQLRGNLCVNLMRGRSVRQKVVTFCDFFLR

SEQ ID NO: 966556 - protein, 48 aa, Homo sapiens
SNNQRRVKEASSCLTEQVMARSCTASVADVMRALGQNPTNAEDLKAPG

SEQ ID NO: 966557 - protein, 37 aa, Homo sapiens
MLMAYRVFIEGILVTVLTLEALPVDDGGPCLIILRLA

SEQ ID NO: 966558 - protein, 37 aa, Homo sapiens
MAIYKQYTTHEEVVSALHPTMERCSDSDGLAPPQHLI

SEQ ID NO: 966559 - protein, 76 aa, Homo sapiens
PGHILTHASSTPGVNSLAPLLSALLPIATTRTVCVNGPIGPPDNHWIVRSLSDVSSHHASNCAGRLPLHNSFLQNE

SEQ ID NO: 966560 - protein, 48 aa, Homo sapiens
TSIKMNLASEPQEVLHIGSAHNQKFDVNRKIALLHVVNKYQHKTGFRG

SEQ ID NO: 966561 - protein, 92 aa, Homo sapiens
MILHLPKHLVLCRHVILLVENLLSTSSPIPLALAYWPVVFGLFSVHDYCHDVSCTVCHAWVYTDRCEDIRLCPLLLASVFFKLSERSFFWCF

SEQ ID NO: 966562 - protein, 45 aa, Homo sapiens
MSILGIWQEKWLRSVRELDDAKKVQREPLFTLVTWHTSSPHNRAL

SEQ ID NO: 966563 - protein, 49 aa, Homo sapiens
ENAIIRQKRGLSDHYEAEDGLRDNPETGLVERGPKRGQYWAVAAPLRAY

SEQ ID NO: 966564 - protein, 34 aa, Homo sapiens
RALSFRLVAKFRQSNRYGRQGTGQRELRLPGPES

SEQ ID NO: 966565 - protein, 35 aa, Homo sapiens
ISLIWRDSHRGYAVRIHKNRRLEVGSGGKICVESQ

SEQ ID NO: 966566 - protein, 61 aa, Homo sapiens
MEEQTLWWWRRIQKCNHPSLAEGNKATLAKLFGFLLEYVGDLATDDPPDLTVIDKLVVHLY

SEQ ID NO: 966567 - protein, 34 aa, Homo sapiens
MDTSHKLHCEPRHSAPMPTACGSLKGPPPHRTSQ

SEQ ID NO: 966568 - protein, 33 aa, Homo sapiens
CAKGSYEAGNLYVKISTVDILEESRHTDFHTNL

SEQ ID NO: 966569 - protein, 152 aa, Homo sapiens
ERILCTLEESTNKKGMTQHPRNRERAITLSLLSPQLHTGTSSLLHSGPPRSSSLLHSGPRIILTFTLRAPRNNPHCYTQDPPDNHHCNTQAPGESSLLHSYSRDLQMSLCPPAKYRKELQSITQQWVELQLTTLESRTSQIDQARSQAAPAP

SEQ ID NO: 966570 - protein, 49 aa, Homo sapiens
RIILPPSSFETPVDDVEEEPTCKMDTSHKLNCEPRHIRADTTGLVSLRR

SEQ ID NO: 966571 - protein, 196 aa, Homo sapiens
MSNARILQYQSLLLDQPRLTFSPTKCFNPATLLPDSDCTIPAHDCQELLETIETGRSDLKAVPLEKADAAVFTASSSFLKQEVGKASAVVTMETDVLEAQALPANTSAQKAELIALTQALLIKSKRINIYTDSKYAFATVHVHKAIYQEAGYSPQQLAVIHCKGHQKENTAVAHSNQKAAEESLEFLLAEMVHESG

SEQ ID NO: 966572 - protein, 128 aa, Homo sapiens
DGNLIVPQDLRSPEHGAVYILSGLVNIQPVALRNIIVQASKLDLSASSLEIEQPEWEKRRSINLSELIDVYSDGVELLQMVKAPDSNCSNLLITTSKAYFEDEEEDSSNVDLPYIPAENSPTRQNHKY

SEQ ID NO: 966573 - protein, 46 aa, Homo sapiens
IPGLMEVGWVARGGGMGSYKKICFPSSCFRTSSVRQLEDLKDHMRD

SEQ ID NO: 966574 - protein, 35 aa, Homo sapiens
GGPGHGLLETRAPFRQVAQMGPPMFCIQQLFIEYL

SEQ ID NO: 966575 - protein, 37 aa, Homo sapiens
ERYRLSSDGIEGGEWCGSVILTSGSMHRGTEKLIEYK

SEQ ID NO: 966576 - protein, 68 aa, Homo sapiens
RIPTTTGCEEDACVGEKNADSRRHLGQVSVQVCSTNSEFGGTIQIRLRHDRELREIAVRFPKFSEFGT

SEQ ID NO: 966577 - protein, 38 aa, Homo sapiens
IELYLLLLIPVTVTLITWRSLAEAVAVKLLCHIFLLFT

SEQ ID NO: 966578 - protein, 64 aa, Homo sapiens
EGQYGPDEGVVKRERIDLKACMDSMFMSLDDIQHAVPVQVLTLILYPENTVGHYYDLREVIFLQ

SEQ ID NO: 966579 - protein, 42 aa, Homo sapiens
VGEGVFLLFKPCTLLVAGKITGMCWRWIIQNFFICSSLQSDT

SEQ ID NO: 966580 - protein, 65 aa, Homo sapiens
GPSRDIDTAAKLLVLGQPQLVWLVQSAGIGTVLAAVIIGYARNPSLKQQLFSYAILGFAPSGHLE

SEQ ID NO: 966581 - protein, 113 aa, Homo sapiens
DDSKAYINTKINTDKNTYKKHGNTLLKHQPDLVLEKTLKQKCKQVSKKVVSLPKVEAKFINYVKNSFRMTDQEAIQDLWKRRKSLYEPRINNKKKNNPSYHITVTVDIWLSYI

SEQ ID NO: 966582 - protein, 71 aa, Homo sapiens
IFGVVQYVWGIRIGRDSVVGRKLDLLPMNMIVTMDLVRRFGLGCSLRIGDIREMKPPMMCQYSSYCIGHSG

SEQ ID NO: 966583 - protein, 85 aa, Homo sapiens
MCILHHMLTGKAARDIFTKDWFGLVKLDVKTKSCSGVEFSTSAFISIQTLVKLLVTCETTIQCGVQYWSRLFTRKVEHCITTLWN

SEQ ID NO: 966584 - protein, 35 aa, Homo sapiens
RRLNSTVNQKTARQNTTSHRLKTQRDLAVLHLPLE

SEQ ID NO: 966585 - protein, 72 aa, Homo sapiens
MIYHALNAIMCLINYWSSANQEHESSHRCNAINEVTKTKSAPLNWHQFNAGGWECRMCHLKLLTKQIIKYAA

SEQ ID NO: 966586 - protein, 41 aa, Homo sapiens
MIVKLDFCAYGIGTTGVRLRHRRNQWMNASYDGQYSSYLIG

SEQ ID NO: 966587 - protein, 177 aa, Homo sapiens
SQGEEDKTTWLQNDGSSLTVIEHMSTPESTIAVIILNSVESNLSIVYHPAFNSQLDIQKGNLGIVVLYGLHFKPRRKRKSTLNETPEYQLRILEGSNLNFLIPIILRSSKSSSIITAYTTILAKKAFCWEISLELRAVMAHFSSRFLCSNFICLLHGHSNLFDLVNCQLGGCADKLE

SEQ ID NO: 966588 - protein, 67 aa, Homo sapiens
KIHEGLPTPVLYRDPKILMWRKSHLQDGHETTSCTDEPWHSAPHPPACGSLKGPPPNRTAKFSANRS

SEQ ID NO: 966589 - protein, 118 aa, Homo sapiens
MSTNMEHLEMQQGDAPFAWSLKRILSIIADDFAAFVGLPVEEAVKGLLEPGRARLISPKRMVLGPEKAMAGGLGMFPFNKFISLIQSPAPKFPPKYPKWNQGKFKPRTGQGLMVGFPL

SEQ ID NO: 966590 - protein, 74 aa, Homo sapiens
MGGLRIPTITLSRPQVVMWRKSHLQDETQRPQDCTVNLALRRPNATGTVESLDRDPPPNRDCQSSPTDRSDGGI

SEQ ID NO: 966591 - protein, 60 aa, Homo sapiens
  misc_feature (48)..(48): Xaa can be any naturally occurring amino acid
  misc_feature (53)..(53): Xaa can be any naturally occurring amino acid
DLEDSGVVKSQHLSYINSCCKIKRSLQIRKRVLRFMHPLHTIYLLCYXTIELXKIHSKYF

SEQ ID NO: 966592 - protein, 63 aa, Homo sapiens
EADLVEQRKLLDSVPVIRSKSPMLISQHNSFLCYMTVVDASDYCSASIAAKADKVEQRKLLEK

SEQ ID NO: 966593 - protein, 36 aa, Homo sapiens
ADLEESRQPTGSTINFPSTLIIFTILILLTILEIAV

SEQ ID NO: 966594 - protein, 105 aa, Homo sapiens
VIHHILKCLAKQHQPDRERALDSNKATARSKTVLSSAAALIRRTMPRISGVWDTLQLFATDSHSSLVRRCPMTRLVRWCFHRFICMFPDHPYCPALKTHGDPVGW

SEQ ID NO: 966595 - protein, 220 aa, Homo sapiens
VQQFEDCHRAHHRPPVSTPSMYYTRVIVWDIGEIQEYGVSSDLRQQRGLFYSMVEDAGLVVSARAGISGQNCWAYMPEHREESVPLVNQASHTETKNIKTKTRVRKHIRSISHRHPVPFLELAVTSLERQRCKPTKTCTSCAWCTEIDTQPHAPRNASGFLALPTEEFWQPDFWRNRLYEKILVTKFSLLPRISPAEVCGLQVFEMLLAPITSNILVWVY

SEQ ID NO: 966596 - protein, 137 aa, Homo sapiens
MNSESSLLYVDSYRNSVTLYKSFYETPVLGKGCPSGDNIWLVGSIGLSMSLHFRILYVEPQPLIFQITPLNVTQWLMVLKISLPVILMDETLKFVARNYLKPGRDGVQAAIKSCSFSACTDGISWPIVLRIMPLVIW

SEQ ID NO: 966597 - protein, 118 aa, Homo sapiens
LRVSPPVPGLAETGAGNHVPRVVFVDWNPLLIDEVRTGTYRPLFHPETTHHRLRTMLACYYALTGSTPIGKADHLHLPVGTDSPRACLTSAPLLQGFLVFPSFSEGELVLRSPLLLME

SEQ ID NO: 966598 - protein, 44 aa, Homo sapiens
EAWEQVEEEGLRQALQEEVELAEHALQSLAPLTPGHTCTGGSYG

SEQ ID NO: 966599 - protein, 100 aa, Homo sapiens
RYPPLPGSRLTMKQVMPDLPWSKAVLSIDIAVKCESNGQPGNNYETTPPVLDSDGSFFLYSMLTVYYEQVAVGERLLMLRDDEALYNHYTQKSLSLYPGR

SEQ ID NO: 966600 - protein, 52 aa, Homo sapiens
MSEVSYNVLRVVYYDVYVREFAITMPVEATYGEQKDESYGSEHCSRSFHIAS

SEQ ID NO: 966601 - protein, 46 aa, Homo sapiens
GQHALTTPMTKLMDTDACCDQTSRRRTFQKWAAVVVPSGERAEDSH

SEQ ID NO: 966602 - protein, 68 aa, Homo sapiens
LYLLVILEDPGQHALTINTIPSIYGVRFEKKSPEVPITKPTLNRNNAYIIILARTTSTIIDMINHSLY

SEQ ID NO: 966603 - protein, 54 aa, Homo sapiens
LLTRDEMLVAGHQTAMVSINYKALGEAYPVRGDGPMEDESSYQQEVAAMARETL

SEQ ID NO: 966604 - protein, 111 aa, Homo sapiens
QIEPPAVLSGTRKMTGEETQVSMGTGVTVDTRVGCLSTSSHYANRDADTFRCFCRKRCQRLLKSQRGGVKKSCISVPHKTAVSGFSSCERHIRALGTVAGRSLRVAPSFST

SEQ ID NO: 966605 - protein, 55 aa, Homo sapiens
MRRPICTCTFHKHCHTSITHFLLYTFVSCKEVGSSLTDCAAPYHIKEILTTKAEP

SEQ ID NO: 966606 - protein, 43 aa, Homo sapiens
TPSKLDTKLHTGKGTDSWGDWKGSISHSAPMRTSSSPMGPVHP

SEQ ID NO: 966607 - protein, 83 aa, Homo sapiens
SSKNNGIGVRGALVSIDTLICLASAMVLMFRKAASRPPVHSIPDGLVHTVWAHTSTACRLTVPARPMRVESSRGPLLMMAFTR

SEQ ID NO: 966608 - protein, 146 aa, Homo sapiens
RRRSDPSLSRPLAMPTGRCGGLYSHSPAGASFRVHQSSPRLRGEYGCHAEPYQELTGMAPPGSGACRLPFDPITGNLTRPGHGTVIDRLIALSPFRAVVVCMARFLVVVVAAYVCAYSDSERYSGMLTSSATPERSASPNFLEGLV

SEQ ID NO: 966609 - protein, 43 aa, Homo sapiens
FLSKKDNINLVPRYIPQKQTEDMHAFVTEVGYKVELLQIENMV

SEQ ID NO: 966610 - protein, 32 aa, Homo sapiens
  misc_feature (5)..(5): Xaa can be any naturally occurring amino acid
MQTPXGNPVFVHAGPFANIAHGNSSIIADQIA

SEQ ID NO: 966611 - protein, 77 aa, Homo sapiens
SGSDANVKGTQIWRLLRGLPLLRGLWTCNGSTCPGPHRGPPITTKQTRGGPGVLCARLPSGVMGSGVHVLMLVTLSW

SEQ ID NO: 966612 - protein, 109 aa, Homo sapiens
MSWPDFGQRACWDGQCGIPPSSTLIPTQDPVVAKGQKCIATRYGENQVMEPAPRKEKPWNIARENTEDQRHLPTPQSGLEEYRGWWSLKPQSWGESHGARKGKTESRVQ

SEQ ID NO: 966613 - protein, 46 aa, Homo sapiens
ELVQRCGRHKIVQGMVSKKCNENDIRMMFSPFGQIEECLDPPGDLM

SEQ ID NO: 966614 - protein, 40 aa, Homo sapiens
MSTVAPDILVSPKERSMEFMAAPDSGVGELEAATGLREWL

SEQ ID NO: 966615 - protein, 54 aa, Homo sapiens
MKGSECMYHMENSIIDHVTNSATGMNIQLGRGGHEAPEDGVNATFQHDPPGGKK

SEQ ID NO: 966616 - protein, 106 aa, Homo sapiens
MRVGAAPEHIAADIPEVGVSLVSGTKAWLQTHPGSGKNMACYCRIPACIARERRYGNLYLPGKTLGIVVLSLQKKKYELKMRCESYRESLLLLSLLLNFLPSSGGG

SEQ ID NO: 966617 - protein, 103 aa, Homo sapiens
RYVRPNIIRRGATVITNCTDHASPHTLGHDLFNESEEATQYTGASLDDDACPSTSSCPSLLQRLAALTTVPILARQTGIKPSPHRKSPSRFRLENRDFPPISY

SEQ ID NO: 966618 - protein, 44 aa, Homo sapiens
ISDIPLCVAIMLYCVPAGINPLKGWLTCAETTHTLMPVLGGVVC

SEQ ID NO: 966619 - protein, 44 aa, Homo sapiens
GVCRLMHSASAAMFMVKNGNGTACIMANSSAEFSILNLLSSTYQ

SEQ ID NO: 966620 - protein, 52 aa, Homo sapiens
MVAKQKLKATDIPDGSTESSRTHDEQISKVFLMETDQVEEVTYDVAQYIKFA

SEQ ID NO: 966621 - protein, 36 aa, Homo sapiens
DCSIIPSHVRITCVDHYIGRSTNLNTGRTIIITIGF

SEQ ID NO: 966622 - protein, 138 aa, Homo sapiens
LQSRIDQACHIILELAKNRANGISRELISNSFLYGLPAIINHKAFNVYFPHVETDIFNVTLSCPPLLSAFPGDCGRMTTNGYTHRGGHGGRRTSERTEDETRWGTWHAPGMKMRLSPDQGPQQQQVAERSKSQHAAAG

SEQ ID NO: 966623 - protein, 38 aa, Homo sapiens
SVYVGGLHLLCLTTRMDHVRKQTPLLNSQFKFVEQQQQ

SEQ ID NO: 966624 - protein, 32 aa, Homo sapiens
ARYRLLGNSFSDTHNQGISASIASLMAAAAAG

SEQ ID NO: 966625 - protein, 34 aa, Homo sapiens
PSYLVESLFVSDKELGYGRGLHLIRFGGQQQQQD

SEQ ID NO: 966626 - protein, 106 aa, Homo sapiens
VEMHPLDEAEAEHHIILRFLGLHQTHLDPAHSYPEGEELGVRSRDAFKNHCRPHSPLCSLTIVLATTSSDMPQNNSQTVPSGFFGQQQEEDSSRRRTAAGGGQQQE

SEQ ID NO: 966627 - protein, 54 aa, Homo sapiens
LTACSFNRLFFTAMLFLSRRCPYSSIYRSMGELFKLCLLGATALPPPPEASMAP

SEQ ID NO: 966628 - protein, 72 aa, Homo sapiens
SNYKHTKEGSITSTRISIRHGLVLMPHNMITLTSEKESRQRTLQPFLQEQPEISVLRCCILLQDCGSKINPP

SEQ ID NO: 966629 - protein, 46 aa, Homo sapiens
VGVDCTRQASERTSVVQAEEERPSKNEGEVAGAICVSKPSWNHDDD

SEQ ID NO: 966630 - protein, 76 aa, Homo sapiens
MSWSLGGKISEYNIWAWSQINCSLNTVSNSYSLYGIHQLRVCLSVWWDKGGKIIISNDKFEYLFNFDNTFENHDDD

SEQ ID NO: 966631 - protein, 137 aa, Homo sapiens
DSRRISGFVDQLREDSRRLALAAKRDTNEQRREGEPGEQRRKLEEMKPEIKRTLNSKLLKKKEKLKVEDEPEVLTEPPSATTTNYHRYILQPGQLWEVLMGKRNYTINYNQFKEEKPGKIKLLPENFKLYFDDSTKS

SEQ ID NO: 966632 - protein, 42 aa, Homo sapiens
RFSISNSISYVKVIPSTGFWGLQGFLFSCQEGHRINRNHHDD

SEQ ID NO: 966633 - protein, 73 aa, Homo sapiens
TSCWTLSAWTLSSKLSSPQKFKVQTGRVSLDPECLAEKYQDEEVTARILALPSLLRFRQILCQIQLMRNTFQS

SEQ ID NO: 966634 - protein, 55 aa, Homo sapiens
KAPGFVDTNKLVTNGTETYEYTDYGGLILQLPTYYPPLFLEPCVIYEIHGYLSIE

SEQ ID NO: 966635 - protein, 108 aa, Homo sapiens
MLVTEHVPRTAALAAASLVGPRVPETEAPGPGPSRGKKLQPFGGVPPPQVPSISRAQDQDPWTKHLGDATPTRRSQTSAGPWRQGALLTCGMPYWSMTCQMYQSSFRD

SEQ ID NO: 966636 - protein, 50 aa, Homo sapiens
MERGYGRLGRYILQGKCLMLSFDAGNLIRLLQCRQACHLLPCLPGPLFNP

SEQ ID NO: 966637 - protein, 40 aa, Homo sapiens
KLMLVVPASQCGSLIGKGGCKIKEIRESTLCSVSRWQGDM

SEQ ID NO: 966638 - protein, 140 aa, Homo sapiens
MSNHIRVVLPTLFYKWTPMGSEATGLLSNFQRLLWGGSSFCILVKELVGWIFVAVPVASWDRVALPLGVTAAFNSTKTMMNGCVLFSSFSITKVMTITVAMTTPPTMSPMIAPLFEPTSSERTPIFDDELHILSHVGILH

SEQ ID NO: 966639 - protein, 58 aa, Homo sapiens
GRKEKGELQDANSTIYPSYEKAERKPQTLRSAGPELRRGGVLSLEGGGRLKKRGATSS

SEQ ID NO: 966640 - protein, 157 aa, Homo sapiens
  misc_feature (40)..(40): Xaa can be any naturally occurring amino acid
RCVFYEKRMAQKLLLTLWVKNGKGYVVPNQVVRTDQYKGXPQMNSRGGLDPMGRVRLLLSKVASCYRPRRTGERKRKSVRGCIVDANLSVLNLVIVKKGEKDIPGLTDTTVPRRLGPQKSYRIRKLFNLSKEDDVRQYVVRKPLNKEGKKPRTKAPE

SEQ ID NO: 966641 - protein, 92 aa, Homo sapiens
RYRTVVYRHSSLATPDINPLSEGRTCTHNHHGFPWTYGGSQAKGRIRLTKPLAHTKATATWDLSRVCDLHHSSRQHRIINPLSEGRDRTHNL

SEQ ID NO: 966642 - protein, 67 aa, Homo sapiens
RTVVYRHVRNLHHSSGQRRILNPLSKARIKPATSWFLVGFVNHCTTTRTPYTHSFLKRESPPGTDQF

SEQ ID NO: 966643 - protein, 62 aa, Homo sapiens
MLADIIFFREIEKASRIRKLFNLSKEDDVREYRSLRKISVNSLGPLGLGFSPLVVGKIGYPL

SEQ ID NO: 966644 - protein, 39 aa, Homo sapiens
MGGLLGPVHPGLLQAKSAFSTKEKTLRFGSSCGDHQASS

SEQ ID NO: 966645 - protein, 74 aa, Homo sapiens
GVRIWHCLSVSKVDYDVVPNQIKNKQTLWQESTLEPDDNHLSIVTLEEAPFVIVEDIDPLTETCVRNTVPCRKF

SEQ ID NO: 966646 - protein, 107 aa, Homo sapiens
VLSRIERKACGMYHIGIEWTGLWNVRGPRHLAARSSEPDSCTGCMWLPGIYTPSPRGLAGLSSRPFLSRPDAHMEVLQNGNHLLNAPASVPALTALPNLCFHSDTRS

SEQ ID NO: 966647 - protein, 104 aa, Homo sapiens
AQVTRRSRSPKARLEMKRLGTLRMDFTVQKILIRDDVANEAYQNDDPINGRDDIEDPGVEPVVVRGEIHTEIRDVAVHETVRFQVQRQTVIQSHPPDSVSPKTC

SEQ ID NO: 966648 - protein, 57 aa, Homo sapiens
LAGSPAYPGVDQRPASDISTIRHTLVFGRFVSNLLGSGPRHIDELLSPSGDTTGFLE

SEQ ID NO: 966649 - protein, 65 aa, Homo sapiens
MLEKMDLKEFDLACPVGLLDYLDKPLPDDLLTTLGLTTCTLFCSLLDPVMTNYMQSPPRTAVDPS

SEQ ID NO: 966650 - protein, 52 aa, Homo sapiens
GRLNPAARKKDVERFFKGYGRIQILTLKKRLWFCRIFDGSKEMLDNCCVLSF

SEQ ID NO: 966651 - protein, 119 aa, Homo sapiens
WGVCMRENGGYHCECWGKPGQGLLRGSSAAKAVPSFLGVLRMLNAIDWRRSACIVEAGAAFFWASVLLCLRPSCRSRVVMGRVKQLVAFLDSGVPGPRWGSRETRLRCCRVVMPVPSAI

SEQ ID NO: 966652 - protein, 62 aa, Homo sapiens
CNSFRLEVAVALLPVTGDEALCQGLVLDVAFFLCDPLQQPVLHPCVVSDGVFPLTAQHFTEA

SEQ ID NO: 966653 - protein, 67 aa, Homo sapiens
HDACDYTCASSYILTQDIIAHRRGTLDHGLLFDIGTFRAMAKVIIAYALFLICVSLDSHSRKHHERY

SEQ ID NO: 966654 - protein, 68 aa, Homo sapiens
IIRDVLMADSSATFTPMAPQYTILASSLHIRKRPYSNGSLSLAREILITIGYYHSLRCNILAHSTSLE

SEQ ID NO: 966655 - protein, 70 aa, Homo sapiens
CHIRDGTVTIPVVRLQSCANYINEPAARPCCENAKTYIASQGCLEATAYDFWLALRGRSNSLCSSFMTIP

SEQ ID NO: 966656 - protein, 41 aa, Homo sapiens
MVNHPLSFAPMAPNILYVCLFLQLGSMAYITNHFSYSANLE

SEQ ID NO: 966657 - protein, 102 aa, Homo sapiens
SISCRSSLAGIPCHFPGTDYQITVNGYRSQLQWNPVCCELSDWLPAGNDIAFHFNPRFEDRGYVVCTTRQNASWGDQQEGKTHIPFQKGMPFDLCFLVQSSH

SEQ ID NO: 966658 - protein, 77 aa, Homo sapiens
DVSVIGKETETVTERASENEIGHRDDASGPEVESHDWTRRDHSSFETPQVDAEPTGRCHRTRVYQGDEIKSINEKFA

SEQ ID NO: 966659 - protein, 41 aa, Homo sapiens
RVCGLLCWMTEARMAQLQSFGSYAGRLSRGGVTNVNREAAV

SEQ ID NO: 966660 - protein, 83 aa, Homo sapiens
LMLLVALEIPCIPGTVWVSEGPIWQPDPVCDIWSYSRLVGGSWLAEYEGTGPGSGAHLGVAESPALPPYFLASLCFVPPDLQG

SEQ ID NO: 966661 - protein, 83 aa, Homo sapiens
IAEVELPEKLRHLKNTTGDHQYWKVFEQLDAPFGSCFENAAGTPCDQKPNCTLHLHKQLTGHLAGPCLLVLVCDRVRSLVPRS

SEQ ID NO: 966662 - protein, 93 aa, Homo sapiens
TSLDGGGLSPGQAQKVNLTIFTARLYYFWDTDYQDGLRCPESVTGPPWRSCATKILNIVGDNFVYYDNKPFEPWTGLKYNFLSLDCMLQEILE

SEQ ID NO: 966663 - protein, 86 aa, Homo sapiens
FAEGSGDAHLGERLSAQPLQFLEGLASSLPAQPLTLPYVVVALCLRISVYSYLASCYDKYCKSVGMLQELKIAHEMYDPSWGENGV

SEQ ID NO: 966664 - protein, 131 aa, Homo sapiens
RVGEHQNGRLWFRSPRVIGLLKSTFIVPDHVVPCESIGRVLAQRCFEAGINCMVYQLTSRGRHASDSMKRLPCAMKTVVSVYGNLSRIYERMEALFVLEHFTFLLSATTAILREHLVEQPDWKFTASPVAV

SEQ ID NO: 966665 - protein, 67 aa, Homo sapiens
CSQNLAGSHIAISKVRGMKEISLTGFLSCTIDSMTDWREDNGRLGLEIGWVGQGMERKRQTTNAFHL

SEQ ID NO: 966666 - protein, 60 aa, Homo sapiens
MDPRAQNDEVIPWTVIDISACVTYSGLIQHATTVVNQDFRTSSDGIYLSEKGICSATLIN

SEQ ID NO: 966667 - protein, 50 aa, Homo sapiens
MSIPEDYTQKVPNVLRQHGIPISLPGPQSQGSQGSSLAPSSMPASHFTAK

SEQ ID NO: 966668 - protein, 69 aa, Homo sapiens
SVRLYDGLPEPGQYSLQTGFKAYLYKPVCSNLSDFRSGFSQLNTSNLHLFSVAVLTTVLAHYSTLRHSK

SEQ ID NO: 966669 - protein, 89 aa, Homo sapiens
AGGRSGVRDGARCLSRLQVYTTVYLLAYSQQAAHARLVLTTDAKSLRSQVIHCQGPIQRANSCQSASNCISPCDATRSVTPSRPLSSQR

SEQ ID NO: 966670 - protein, 128 aa, Homo sapiens
ARSDRRWDDTLPLLEHYRPRGTGTGSDQDCLKIVVILDALSSACLGPIPAWQICNLTSDTLTSDSYKKWRLSSMDRELEAGLHRGRLQDTHPNILLSCTLEYLIPLRSRSDEDQEEWGERSHRSDRGS

SEQ ID NO: 966671 - protein, 83 aa, Homo sapiens
DSSRSRAQISSTCCLVQYEQMLPYALQLRTFNPQSLHVPVIHEILTHITSVNIITARSPLTIVLHILFLHIIKQTLKKETTDR

SEQ ID NO: 966672 - protein, 66 aa, Homo sapiens
MLPTSRIFTTYYALPVAFAHWHAGLGSSTQLRLARLPPFWLPIAKPPVYLSSPYLHSLPFLLIRGS

SEQ ID NO: 966673 - protein, 69 aa, Homo sapiens
TRVSNMKTGHKPCKVWICVEHTLNGPWKNRADKNVFPDHTQYHGNEFLLTVRLFDFISIRIGSIATQTM

SEQ ID NO: 966674 - protein, 78 aa, Homo sapiens
MSHFILASRGSAVRVQSIITLDRRVCGRWDVLLCKRDGAIYAPSLSHVLTSVLVHILVGRSLIYDYNPLTATPNCGYF

SEQ ID NO: 966675 - protein, 58 aa, Homo sapiens
MPPSHLQADYGTQGSASVPSDRRVTSSGSVIPNTRARSDTLIGCLGAITSRSALHAGP

SEQ ID NO: 966676 - protein, 42 aa, Homo sapiens
LSKVFRAVQVKRSGLKCGKNELQAMCPPLVFQEPEIFVQVDP

SEQ ID NO: 966677 - protein, 63 aa, Homo sapiens
LLVDLYQDPRNSRSPESDSGAMKAGVPTDVERGCHVHMPLHIHCITPRVSASLMLPSLALDQE

SEQ ID NO: 966678 - protein, 99 aa, Homo sapiens
PYEVPVCSETASTAASLRYPLSMTTVITRALPFLSRWQRVKEFRNHPKHYIVNYIQGSKQDCPALGSPSMLFKARVGVRVSGRVRVEAGRLAGPPYPRE

SEQ ID NO: 966679 - protein, 30 aa, Homo sapiens
MTRCSGAEVLDSWVHTVLTWWTRNCGDNAI

SEQ ID NO: 966680 - protein, 91 aa, Homo sapiens
IPRVVDEVMICSQNVPRLDENTKEKSTGCKASIPAYIFSLIFIFTIYRRAAYFLAELNLSKLDFPPVSLAQVPTLAVLILFAIFPISQRDL

SEQ ID NO: 966681 - protein, 53 aa, Homo sapiens
MVTSSIWLSRTDLISLHCILFNQPHSPRSNRHSHPNPLKLHRRIRSHYLPPAY

SEQ ID NO: 966682 - protein, 74 aa, Homo sapiens
AAADARLTHDQQAVPPGQLRVGERQPLLGPPESMREHVVADSKDMKNMMTWKNCQRFIINEKMNGKVWDLFPRG

SEQ ID NO: 966683 - protein, 83 aa, Homo sapiens
LGARRFGLVHTDLAILLYKCWCASTHRTLATFEKDAAEMWKGSFKYAWVLDELNAERERGIIIDISLWKFETSEYYVTISAPL

SEQ ID NO: 966684 - protein, 67 aa, Homo sapiens
MSYVASLKALSDPHSQLIAVVDDVIASHRLTSPLPPTINLLEERSVLVTIFIPESNITLLVTGLIIL

SEQ ID NO: 966685 - protein, 126 aa, Homo sapiens
RNNWIRPRFYYCGFLGKLSAMINEEIGAGRIRIAPSISDILGPAPDGTYSDRICRCNVFINHERKSEAVDDSSVYRRHSDHHPDADRRFGGVLPLTRRASFRETKVFGFREESSYSRSSSKFRMSR

SEQ ID NO: 966686 - protein, 69 aa, Homo sapiens
MPQGHRDFIMYVITGTSQAACAVRIVAAGVGYFEAGLSMNGQTPRAVPFWRSPRGVRPLIVSVNSNGFH

SEQ ID NO: 966687 - protein, 39 aa, Homo sapiens
SRASVHAADRIPGNQVFDEARTERASDQAAFRGENWIRV

SEQ ID NO: 966688 - protein, 83 aa, Homo sapiens
RTPIFVVLALALDSRDMLATADYMTEEGLGESGLSWLQEAASFLTYDTLTRSPAAASPGTSGIKRELMCLDTLDHRPVQELSE

SEQ ID NO: 966689 - protein, 57 aa, Homo sapiens
EDKQSVRIVVEMGENDISAFTLREDTNDGAEVADAEADATLSKNEQEREAQLIHDPN

SEQ ID NO: 966690 - protein, 75 aa, Homo sapiens
FVEEQRQTRIMGGKTLALPWGVMLGEREEMWLTPAGSIRLDTAKAHRLPGREDMSACPALGLWSVGLTPFSLLPF

SEQ ID NO: 966691 - protein, 71 aa, Homo sapiens
DHDYWTSQAVHGHLQTPLTKIWSGLGQAPAGRTLSSALSLQELQAHFLIGNQDNAATLFNSPVSGARTTNI

SEQ ID NO: 966692 - protein, 41 aa, Homo sapiens
EEKQRYGSCKRMTVSMTELVKAGPRAIPGSQEAPMGFYLFL

SEQ ID NO: 966693 - protein, 78 aa, Homo sapiens
SSKNNGIYNTKTDNALSYEMNKNVFSALFLTDSKLTSFIEIVAILTVLYFSSIKVHWVPGRSRSTAAYFHIFQSIWLL

SEQ ID NO: 966694 - protein, 59 aa, Homo sapiens
RTPIFVVLAYCQVTSTDSVARQFFAIGLKVMTNSSTGCYVAKQDWSVLHRWGSVRPYAV

SEQ ID NO: 966695 - protein, 100 aa, Homo sapiens
MVNEPNWITAGAILSMEMIPSWLNPKTRGDSSVSWKSSRSWPEDDDGPSVTEPLVGARLDEEVGFELLSTAPHQLVKDVEAALVLVLADGPRLIQQVGSQ

SEQ ID NO: 966696 - protein, 103 aa, Homo sapiens
PRVRIVAERLHGSHIAESVRQLLADGFVLQLLSVQLVLEAINAFLQSRYWPLRKLSPSLSLLQLVVKDLDLFLISVFLLEYLSASAFSDFKTRVTVLNCSSSS

SEQ ID NO: 966697 - protein, 61 aa, Homo sapiens
ISYRIPFVEEQRHLQSNTDYCPQLEMKNNFFSALFLTDSKLNSFYEICGYLTVLYFSSIKV

SEQ ID NO: 966698 - protein, 36 aa, Homo sapiens
MTDYKQIIHLSLSCLAFSTFESLSYIIHSGIVTCND

SEQ ID NO: 966699 - protein, 71 aa, Homo sapiens
VALARVRARMHFPMPRGRRKVWPAKERKLGMFSPKNSFTSFNVARLLTTRTWACDCDHHFFPESMVLAVIP

SEQ ID NO: 966700 - protein, 69 aa, Homo sapiens
IHAPSDHWLSAWQIGQLDCRVFTSWSSFLCVHVGLVPLPTVEVIHLKLLVRHGLLQMTRRLCLLLFLAC

SEQ ID NO: 966701 - protein, 74 aa, Homo sapiens
PAPVLYRSCGHRTCGRYVMCRRKSSGGKGGSYSQAASSDSCPVALTVSLTADKACRQLVYVKGLENAVISITPP

SEQ ID NO: 966702 - protein, 40 aa, Homo sapiens
MERQRIFGEVGLEGADEPSHSGLNSRAEAQVEVGGGRWLG

SEQ ID NO: 966703 - protein, 44 aa, Homo sapiens
ETEIETSSPTSLDKKDDWGVKHSVSIGTVVTSGHKGWLYSPPPH

SEQ ID NO: 966704 - protein, 35 aa, Homo sapiens
PPSRGCPKLMLTASSWCIFLDGQSPVTVQSYFIVD

SEQ ID NO: 966705 - protein, 34 aa, Homo sapiens
MRSSAVALASYLLPSSYCRFATTSCIWRRLVAGG

SEQ ID NO: 966706 - protein, 42 aa, Homo sapiens
LEVVVIGAVVATVIVEEEELRWKRRELLYRLRSSDSAQGSDV

SEQ ID NO: 966707 - protein, 101 aa, Homo sapiens
KQLMSISQSYDDTKGKVKSFSFEDTEDSFCRLEGKEEELIGTIQEKYMLVDRNKMHIKWMTATIFKGRLPAQREFSKARLYERVRSSCIDCKKSKKRGKEE

SEQ ID NO: 966708 - protein, 35 aa, Homo sapiens
VSAIQLVTFPYQKVYEGLLRTQRIVAGMELLPFSP

SEQ ID NO: 966709 - protein, 38 aa, Homo sapiens
QSARPRFTYKLWSSQAVFATVMCRRNSSGGIGWELALT

SEQ ID NO: 966710 - protein, 77 aa, Homo sapiens
MCQRPIYMQKDRRPRSLLPESCKQFSLYATWEENNEAASHDLRYTNTVRTERARQSSATPMRASSLYGPNRGTRARN

SEQ ID NO: 966711 - protein, 178 aa, Homo sapiens
QLGTVNLEVVVLYSSPDCQFSWYRGWVVESCVSSCVVELPTVGRAEPLYSKVTTVQILRREVEGEEVTVAFEIRERSSPFVLSSQPRRASVLSGPSFVIFIIYRCPAMSVVYSVFRIFISILCITNTLILSCLATSAPAYLPLLRLNVSGQPAGSPFSSLAFPLAGASLPFTAYFHNS

SEQ ID NO: 966712 - protein, 64 aa, Homo sapiens
LTGTQIGAGQAMTPGQTKPHAVIHSHSYPSNKTESTKQRLPFKLLSDIRISRLMSARPLTPGCI

SEQ ID NO: 966713 - protein, 72 aa, Homo sapiens
AYARATATRDPSCVCNLHHSSWQHHVLNPMKEARDQTCIVMDPSRVLNLLSHDKEFLQRILKVSVRNLGPVT

SEQ ID NO: 966714 - protein, 122 aa, Homo sapiens
ARYQQNMTSLLSHVGRDTTLKPYSGPGYVWEPELELKLACCCLGLVRSLACGLGLRAAQAEPLGNTGTSTLPKLGVGNVGKSIELAADTLWDLGLNLLGLYEDLDSLGTCTHGLGIVGLHLL

SEQ ID NO: 966715 - protein, 71 aa, Homo sapiens
MHTMFMSLLHIGLTVLADCEVGNICMNTSVFTENDNDDDEDVQVEVAEKVQNIVFPQVTLNTQEQLMDGPD

SEQ ID NO: 966716 - protein, 93 aa, Homo sapiens
WALEDPPEHSGHAVYRKRYRGLGRTIYLFKFNGLGAGRALSRRGLRVLGGALFGKQNWRCGMNRTPGFMAPDADAHQTPEKVLVDIGGRRWLG

SEQ ID NO: 966717 - protein, 129 aa, Homo sapiens
LYVYTSWCEKLAEIIWQNRQQIRSDAPLQAAAYPGPVKEMLAEGNATIRDIISALVTGTFIIEKQPPQVLKTPDQVCSHCAPVDEREARTFTLNPPQGKGHHSSGEQQAKFSAQEREHPPSFRGTELGI

SEQ ID NO: 966718 - protein, 37 aa, Homo sapiens
MTAGVASTYPGEQVTAAETALLNDATVATTHTACGAL

SEQ ID NO: 966719 - protein, 54 aa, Homo sapiens
GVLANSTTAPGWGPQSSPLGDDLGEDDEDAPMITAFTDNVPMVIAESQADQGAC

SEQ ID NO: 966720 - protein, 134 aa, Homo sapiens
PYVDRYLLVIYHPSSARTSEGPAWPGIACSVTWGTALLLTIPSFLYRVVREEYFPPKVLCGVDYSHDKRRERAVAIVRLVLGFLWPLLTLTICYTFILLRTWSRRATRSTKTLKVVVAVVASFFIFWLPYQVTG

SEQ ID NO: 966721 - protein, 127 aa, Homo sapiens
VDRFDKTALQVMMFGMHRHSPWSCLTCTGASPYCPGHLRYQSSPDAARTGFLDTLKVLVEHGADVNVPDCTGALPIHLAVQEGHTAVVSFLAAESDLHRRDARGLTPLELALQRGAQDLVDILQGHI

SEQ ID NO: 966722 - protein, 80 aa, Homo sapiens
TIPVRRSAVLLSSICCPCLKSGDFINGCALILLPGRRQVAPVQSPGTAHTLHRYQWEERIQVWHEEHRGLLREDALLAIS

SEQ ID NO: 966723 - protein, 30 aa, Homo sapiens
MVTISGVQRLLQVEMIRNTGRVFSWPPEGS

SEQ ID NO: 966724 - protein, 85 aa, Homo sapiens
AIIVDRHRRGRSCARPLARPKHLDQQTIIAKTFNGPKGSRREKDKELLSTGQAPSRKEDGLQPASVQGGIYEATSPRAKKSKESV

SEQ ID NO: 966725 - protein, 91 aa, Homo sapiens
RLELNGMIYFRSSCKAPYIACCSGASLALLERRRRWDPLLSLLSSGRIRHILFWGASHVEFMDRPNEFTEQEAVLALEDHQPYCEADDAIQ

SEQ ID NO: 966726 - protein, 117 aa, Homo sapiens
MHCGEVTAQMFNHLPEVYSPTAWCTSSLTCNRQYSSNSILIPTQGPYCLLSHQPILVSFLMRRSRISTPGKRRKFKQPTSGPIIVISGCDVYPEYSCDELLLGDVHLTRVMAGYRAR

SEQ ID NO: 966727 - protein, 54 aa, Homo sapiens
SVPDRCHGWFPVVYSVWDQLDHLPFLSPLLVCEVSLALFFALSYSYILWLCGSS

SEQ ID NO: 966728 - protein, 94 aa, Homo sapiens
IGNRMDHHFIVEFRRTHGKNSSENKRGVRRHRTACERAKRTLSSSTQASIEIDTLYEGSDFYTCITRARFEELNADLFRDTLDPVEKALRDAKL

SEQ ID NO: 966729 - protein, 51 aa, Homo sapiens
GDDSDLRVDSKKYCTFPGRLIKASGGGGGAENNRSAGVSLVALALKNIILA

SEQ ID NO: 966730 - protein, 78 aa, Homo sapiens
NAFKSNCPRTLVPSTNSVKECNRSNSSSPVDKLNQQPRLTTLTRTCALHTAQQGNNCTSLATEHRVASGNMQACKAGL

SEQ ID NO: 966731 - protein, 44 aa, Homo sapiens
THNRYCDGDDCYTLWDFDPWGQGTLITVSSASPTSPKVFPLKMM

SEQ ID NO: 966732 - protein, 45 aa, Homo sapiens
MSYTRRQNCLPGDEVLLQVPIVVATPSSKMLLVCRAAPSRLCTVL

SEQ ID NO: 966733 - protein, 55 aa, Homo sapiens
GAAELLQAFFLRADDIIGFRPLPADDRSAQYQKPGVFLDAINDANLLEACIYRPL

SEQ ID NO: 966734 - protein, 82 aa, Homo sapiens
RGRATDSFSGRFEDVYQTAEKIVLGEGAHAPSADLASNLITSQEYAVKIIEKQPGHIRKQGFQGRWKIAVPGAQGTQGNVLA

SEQ ID NO: 966735 - protein, 105 aa, Homo sapiens
DYMDARREGWTFSKIPGRADSVVGYDHERCPSQQGEEREEHDLVGIPGSAGTRLVSTRGPVPTCESSHIKPLVTGDGNGLGLVTRAGDRSGIVVTEALGLPAARP

SEQ ID NO: 966736 - protein, 47 aa, Homo sapiens
RSAQDQGDIILKRLPESESLSSGITRQLGTSHLYDVSHPCASAPPQY

SEQ ID NO: 966737 - protein, 79 aa, Homo sapiens
PTSCKRCNGEYSSRRSTLTGLCACSCGSHSGFWLCLLGDHLHELLTQDGRGEDALEEPLALVCPPDPEEVDLQPAEDVG

SEQ ID NO: 966738 - protein, 30 aa, Homo sapiens
MILPLMTLYLSASQVFHHDVNEAVPRGPVR

SEQ ID NO: 966739 - protein, 108 aa, Homo sapiens
  misc_feature (17)..(17): Xaa can be any naturally occurring amino acid
TSADDGGRKSGTTHISXAADKGGAEKALSSWEVPRSLRRHWGEGDERRSLGQWPGVPLGPCLGFKGVPWASPYCPPHTARIPPPRRIQLDHVCVHPPLARTGDDIVCR

SEQ ID NO: 966740 - protein, 81 aa, Homo sapiens
DSRPGDISHGWNEKQVYNHKHEIHMSQRLTEVQLLTASSAQHGPWHHEELRNEDERYENKNGACDHEGQLISMSINAGQSK

SEQ ID NO: 966741 - protein, 67 aa, Homo sapiens
APPGPECVRLTVHEAAGAARRHIITHRSSSAQAWRIANSNTEVLKNMGYAAQAMKAAHDNMDIDNVA

SEQ ID NO: 966742 - protein, 46 aa, Homo sapiens
LYVSYSDVLLPLLGLLQFILLGLHLLRPCRVTVQQWLHFGENASTQ

SEQ ID NO: 966743 - protein, 45 aa, Homo sapiens
LLPVRGHEYRNFYHTVDIKLTQWTDKQLPNKAVEVAWETLQEEND

SEQ ID NO: 966744 - protein, 51 aa, Homo sapiens
VVHNLVPDADIQRYRNEFEKICRQEVKPLGLTVMRDVTISKSEYAPEEEND

SEQ ID NO: 966745 - protein, 76 aa, Homo sapiens
YTGYNSSLQTQDEELSVDRGISALDGEYQSASEVDFYIDKDKIHIADTKVARRYGDYFSRQIHKFEELTRTRKKKM

SEQ ID NO: 966746 - protein, 67 aa, Homo sapiens
MCSCYHSQFIFPFSSAYSICVNKALNDCTSPCVDGFQGLKIHLSCIIVFLERSSFKVILNHPDRRKL

SEQ ID NO: 966747 - protein, 64 aa, Homo sapiens
YTGIVSDIDNWHILPWHGGTSSGRHSDQWSVCEGAHPELPPSEIPYLDANVEWVMCGGPCNKRS

SEQ ID NO: 966748 - protein, 89 aa, Homo sapiens
EDPPHLTPPCACIGNTLDLKGGKEFVEAVVVLRKKNGPLEVAGGEVGKPPCLSGCDTCSIRKAILGEGLEFRGVWQHSRIFKMEAKDSL

SEQ ID NO: 966749 - protein, 114 aa, Homo sapiens
ADHIYTRNEASLPSILQYPPNLSNQTDLQTIHCEIPPCLGWLPRHAYTPENNTAGAQVTNVPRCNDSRAVPRYRGPTSPEPKTLTPGALLQNRPFTKTLMCSHRVTTRYHKQQR

SEQ ID NO: 966750 - protein, 46 aa, Homo sapiens
EDPTGICAQALEQLKPLLSLLKVAGREGYLIAIFHEEHSRVLQATP

SEQ ID NO: 966751 - protein, 70 aa, Homo sapiens
RGDLEDPTGICAVSSKIIHSRLSNSHEAADATLTIHLQDGMVTNTSLTSSTKYHPQSPSDLYSITSGMPK

SEQ ID NO: 966752 - protein, 101 aa, Homo sapiens
MLEKYGLDVGAERLILKCRHIVFIILCKRGVWQEMAGESQVKHYLLVPSPFQIPFSLRATFIGNEIPHIYHLQFVCETLFLLDSRPKLRVPQEWAPNPRGT

SEQ ID NO: 966753 - protein, 67 aa, Homo sapiens
VTHRGSLFACDIQTRGGPPMPRKASSPGTGNYHRGTALIAAYSCNPTAHTSSRSTAKEAPIHGHQAC

SEQ ID NO: 966754 - protein, 88 aa, Homo sapiens
LAEEGAPVTRREETRERLHLAQRLHPFQTGPDVGEVKHVSISTSCRRGKAPEPHWPRRNEETMPGAHTRQLLYENGDLRALFSSNCRA

SEQ ID NO: 966755 - protein, 84 aa, Homo sapiens
MLRNMDRYKQETEQLVSNLKEENTLLKQEKEALNHRIGQQAKEMTETMEKKLVEETKQLELDLNDERLRYQNLLNEFSRLEERY

SEQ ID NO: 966756 - protein, 34 aa, Homo sapiens
MPALWLRLRLLSLLGLLLFSFLLRLRLWLRKKKM

SEQ ID NO: 966757 - protein, 41 aa, Homo sapiens
TVQGLVISQMLRKRVETSRLAQHYWSPGTVRAVNEREWWQD

SEQ ID NO: 966758 - protein, 92 aa, Homo sapiens
MGSVPTLAHGWRLRRLSSVSFTLPCPAQVLLLSSPGLEELYRCCMLFVDDMAEPRETPEHPLTHIKVRAGVQEDKMQSLTVFSPVRTTYNTR

SEQ ID NO: 966759 - protein, 94 aa, Homo sapiens
RKGKEDRGDGKVLSHSAHADELRPMGPSPCQDMPHKRFIVATPFYIPTNRSKCSNISTSSPIIIIVHFFDYSHPGSNKTVTHYGFYLHFPVRFI

SEQ ID NO: 966760 - protein, 101 aa, Homo sapiens
MITLLDAPDEHVAPVADGYVAAALSGAGKLHGLIALEGWTRQVVSPPLLVAISHLEAALLLTNNAHTREGSQQKPKEKEKNCTAAPGREHDVCYVLYLHYQ

SEQ ID NO: 966761 - protein, 112 aa, Homo sapiens
QQLTWDSVTMSATHHGRRTNPKKTIYYHTNPTTTIPNYPLHRQRTNPILYPIRSNTSTHTNYHHTLRKPNRTTQCRTLFPILHPSRIPTTASSTSLYPKYHRLTKLPCSVYT

SEQ ID NO: 966762 - protein, 56 aa, Homo sapiens
EYFVCGYKNVMGAAALSGGSSVALSRRHLPYGNEKKIEMVRAYREKIEHELDAVCH

SEQ ID NO: 966763 - protein, 103 aa, Homo sapiens
WTPRICRAQADHHVHLLFYVWTKLQHVLLAGRFKLVRKPKILHLHQLEVRNSDGTLLVHDLLVCDRDQTLHQDPRVYLVICHIVAEVLNYGLTGSHQHGFYLN

SEQ ID NO: 966764 - protein, 72 aa, Homo sapiens
EAYDVQRQGKARVLTHYEKVQAWSYYRCCAQSVATRDWLSTLEPRNVRADMKRVVEDTNGTRRAGWGSMYEA

SEQ ID NO: 966765 - protein, 58 aa, Homo sapiens
MAQRRLEESRSCKQQSYDITEKARREARTKYPLDESYSACLIWGVTFPASQRMRETMD

SEQ ID NO: 966766 - protein, 37 aa, Homo sapiens
NDTQKQRCSPNVPKAWSLGSGSLILVCCSAQEMSKAE

SEQ ID NO: 966767 - protein, 77 aa, Homo sapiens
CLSMMNLMVRDGNEKLDLLKINILCHRIRNYLYIFRKFDLDKSYSMRAYETRMAIEQAGFKLNKKLYELIITRYSEP

SEQ ID NO: 966768 - protein, 112 aa, Homo sapiens
MREREKKDGSNPAHLLAVANDEELNQLLKGVTIASGGVLPNIHPELLAKKRGSKGQLEAIITPPPDKKAKSTSQKKPVSTKAGGKKGARKSKKQGAVSKAASAGQRAPGGTE

SEQ ID NO: 966769 - protein, 86 aa, Homo sapiens
  misc_feature (68)..(68): Xaa can be any naturally occurring amino acid
LGICRAYHGDHRIDGECKKTTTPTKNLNPLPDESQDDGVLVAAVAEAVVAAQVCEGPHANGVRKENLXPRIYPHLSRGFNPLPDTE

SEQ ID NO: 966770 - protein, 145 aa, Homo sapiens
NSDPRYSPQKQSVDMHAFVTDVAYNMRLMQIENMLLSPWTLIVAVLLQNRASMVFDALREKTLCLKGLTQAFGGFIIFGLIINLLKMMHRTRILLHSNIASTCQRRGDSVSGAPLTRKGALGFMLEHMTLLMCSAYSIQVMLYRR

SEQ ID NO: 966771 - protein, 104 aa, Homo sapiens
SLYEIPGITELGSITLLTVFVVEEVHRLKNSQSKIFSRPNGYKIDAYVAADRNPIAEVICEELFHLLSFLTRERFNNLRGLLQEVADIFKEVQIKKLHEMLEPH

SEQ ID NO: 966772 - protein, 72 aa, Homo sapiens
QVDLTQLDLTQVASDTISMKPLERVWPPSCPPMIITISSRQLDVGVPSPEIAARLSFQSMNAKAQWWYEYGP

SEQ ID NO: 966773 - protein, 84 aa, Homo sapiens
QVYAPFDHWPVCCAIGQLDCRVFTHGQLSLVHVGVGHTHIEVIHQSFCQAGRCSDSLSPPLFLQLLAFILLGLVFFLGWRDSMV

SEQ ID NO: 966774 - protein, 142 aa, Homo sapiens
MTNLNLPLQNSKPRLSFSTKPTVLASRVESDTTINVMKWKTVSTIFLVVVLYLIIGATVFKALEQPHEISQRTTIVIQKQTFISQHSCVNSTELDELIQQIVAAINAGIIPLGLPGLTRNNFARRAKAKTPETRRATWVRST

SEQ ID NO: 966775 - protein, 47 aa, Homo sapiens
MTNPVDLQVDLTQVDLTQVDLTQVENACCNLHCCWDNHLSLIQHSYI

SEQ ID NO: 966776 - protein, 58 aa, Homo sapiens
QDPMHHSDSNRKDGGSSQKLMLFIRGNGYIVELRLLADESVTKTPNHNGYYYKEDYYK

SEQ ID NO: 966777 - protein, 63 aa, Homo sapiens
MSEEEEKEDPEKGWGTLLENRKLENKNAFFENKTVPNKQRPQDRSEGACKVEKLIPVSAQKPM

SEQ ID NO: 966778 - protein, 65 aa, Homo sapiens
GSVTSLLMLAGPADSATDMKLILFSRKQIASCNCSKIEKRKYEDNQRYLEDKAQELARLEGGYWH

SEQ ID NO: 966779 - protein, 41 aa, Homo sapiens
MAYGSSQARGPIGAVATGLHFSHSNAGSEPRLQIYTTADSN

SEQ ID NO: 966780 - protein, 101 aa, Homo sapiens
SVIEVVTWKTLGDECSDRLLILDERSALRMTTSLFRDSPAGDHDYSLPMGKQKQDLLEEDDSAGGVCLHVNKDQVSVEFCSACARKASSDSKNVASSNLLF

SEQ ID NO: 966781 - protein, 75 aa, Homo sapiens
LRLTTSALRDSPAGNHDYSLPDGKQKQDLLEEDDSPGGVCLHFDNDKVSVEFCSACARKASSPSKSVGSSNLLFI

SEQ ID NO: 966782 - protein, 92 aa, Homo sapiens
MGGSLAGRLRRVAADATSLFRDSPAGDHDYALPSGKAEAGPAGKRTTRREESVSMWTKDQVSMEFCSACARKASSSLKMKSQVICSYPRLDT

SEQ ID NO: 966783 - protein, 34 aa, Homo sapiens
MGQAELTAVVFGIEEEETAIEMPAITFSIPAAFC

SEQ ID NO: 966784 - protein, 184 aa, Homo sapiens
RIRDTPANKRVFDTKCLPVCGQIMKIKLLLRKGNLEIIEPYFETNWKHRPSFPDVPGEIGWIGIGAKSPPNLNQRDGWLLFGTRNGSKSTDSPVWYTFYFTGPEHLGKYACTGFYLVNDIYEYKTIMNWMKDTDYEGTFAEANRDKTALDSHAARSLSWETFQVNSFSKEVGSRVPTLEYPGTE

SEQ ID NO: 966785 - protein, 61 aa, Homo sapiens
MQVSVIAASISRGSISSTSEVHSPPNVGLRRRENIEGVRQMHSNALMSEIATERVASRGYR

SEQ ID NO: 966786 - protein, 75 aa, Homo sapiens
  misc_feature (23)..(23): Xaa can be any naturally occurring amino acid
  misc_feature (26)..(26): Xaa can be any naturally occurring amino acid
  misc_feature (43)..(43): Xaa can be any naturally occurring amino acid
PVTLRILVNTPAFDIPDVVLSYXYSXSNKTMAVPEPLCIMNCXTFIPRKVGKGHQNSACGAVPMADFEVVRAVRT

SEQ ID NO: 966787 - protein, 41 aa, Homo sapiens
MRQFHPATGSILIRKRQKLERQRGCEWGVDAGTGCRARIRD

SEQ ID NO: 966788 - protein, 38 aa, Homo sapiens
SSELSACIILVLIALPSLRMLYITRRVLVIAIALASKS

SEQ ID NO: 966789 - protein, 52 aa, Homo sapiens
  misc_feature (21)..(21): Xaa can be any naturally occurring amino acid
MYNMKTDFKCQLARCQTAAGXAGAGAQQRCAPDDLHLTAVGLAINRAINICA

SEQ ID NO: 966790 - protein, 57 aa, Homo sapiens
VTLEEPLNSYPQCLIVMSLDCQTLLQRITRENDRGPKIGYCTGSREKFIHATRKIRL

SEQ ID NO: 966791 - protein, 55 aa, Homo sapiens
  misc_feature (8)..(8): Xaa can be any naturally occurring amino acid
KTNDIDVXMKTDFKASCPLQKLLEEGRGQNACSEIYIHGFVPWPINRVTQKLGLE

SEQ ID NO: 966792 - protein, 30 aa, Homo sapiens
MHYEGVIMNGDKLFYDRGGSVLETYLRCLC

SEQ ID NO: 966793 - protein, 91 aa, Homo sapiens
SKSTADSSPSSLIQISSPGLISSRAVTCKEDSCVLERRSLHWAHHCGCRSSEAQRGQILHSSETLQLLPTDVLVYLVNGGVKLLTDRECFN

SEQ ID NO: 966794 - protein, 49 aa, Homo sapiens
MILTEDYEKHLTVMNYDPDVVLKQVHCEEFIPEFEKHTQNFPGRTSQAE

SEQ ID NO: 966795 - protein, 43 aa, Homo sapiens
YPPKPITIIEYYNTETVKNTPKVQSDRQQGFNCIRLKINYWYK

SEQ ID NO: 966796 - protein, 142 aa, Homo sapiens
NEKEMVLATVTTPVGGDSNGRTRGGLTSQNALIFPTEDVPRKLLSHGMKTLQSARVITASQHDPRDHSDHPHCTPQGLRGWLSCKQLASGVITCDLDLWSVTRVPLPSNTPANSSLPLQPKSISAMLNSLNILLMLTLRRVP

SEQ ID NO: 966797 - protein, 66 aa, Homo sapiens
SSSRIPKATRCERYRGLAFTCIASLLHILQSKVEIAYQIYKVDRCAFYKNISLEYITLNNINLYIL

SEQ ID NO: 966798 - protein, 44 aa, Homo sapiens
SHIRAQATEELIFRGIAYWGLWHSPVYFCFTNSSVMSFFTSPKS

SEQ ID NO: 966799 - protein, 54 aa, Homo sapiens
ADAEVTSRGSLKSYPEVLHECYSHIISADAWRRRPTRPRFRENFGSHGSYCPLY

SEQ ID NO: 966800 - protein, 132 aa, Homo sapiens
HCEVQQKKMTCNKHVATFRQMQLENVSVALEFLLTCESIKLVSIDSKAICVDVNLEADTWASSVTLDPALLPYSMPIVGRGWRMSEANEADPQCRGSCGWIHEQAACSCPYTKHQPGTGMSGLGPGAPWLDS

SEQ ID NO: 966801 - protein, 73 aa, Homo sapiens
IDTIELVTRKTLTYQRASHGTTENTSIYSHIESYYWEDPLQEHIVEGMCLVNDVNGCPSSYLPYSGTSIGYEK

SEQ ID NO: 966802 - protein, 112 aa, Homo sapiens
MCVFTVLAVEQCSALRVLTRLTGSSLSDLTDVGLHRACITVTLLLVDGTLSSQQATCLHLSGEVWGASGFSMKAEADVRCAQHVTGYSQPPAAVAHIKERALVVTFDLSCDA

SEQ ID NO: 966803 - protein, 64 aa, Homo sapiens
  misc_feature (51)..(51): Xaa can be any naturally occurring amino acid
LIRGSPSALVGGVSQKKMHRMHPVATFCEMQLENVSVALEYLGRESIKLVXIDSKGIVDGNLEA

SEQ ID NO: 966804 - protein, 47 aa, Homo sapiens
TPGACMGRLSILYSQGEEGPRKVHVQVAEVEATGSYHEGIVNANKRL

SEQ ID NO: 966805 - protein, 65 aa, Homo sapiens
GACLDGAQPEEDAPQATTSGHFPAKMQLENVSVALEYLDRESIKTGCPSTSSAIVGRGTLKLDSW

SEQ ID NO: 966806 - protein, 113 aa, Homo sapiens
EAISEDFPRRLLGDVIQRFERRGFTLVGMKKLQEPESVLAEQLPGPARKPFYPALIRYMTLGYVWHGLGRVQCRPRLEAMIGTPTRMRCPGTIRGDFSVHISRNVIHANKRLG

SEQ ID NO: 966807 - protein, 41 aa, Homo sapiens
TRGSPGACWRPKSPSQDTGRAQLSTSAPVPCRSAVPAEVGD

SEQ ID NO: 966808 - protein, 36 aa, Homo sapiens
PHLYDFLETHILDEEVKLIKEMADHLTNLHRLDVPE

SEQ ID NO: 966809 - protein, 78 aa, Homo sapiens
MANGSQSASGTSYTSQPRIASGSGTQSDGNNILVARSSKVTDGSQGLQDSDSAGTGPHMAAVCTRGNQQCNLHSAHHL

SEQ ID NO: 966810 - protein, 97 aa, Homo sapiens
PSRVLSAAVMLSPFFGAELTDLEDFIGPSQERPKPVKVEKRAGSGVAKIRIEDDGSYFQINQDGGTRSVEKAKFSLNDCLACSGCITSAETVLITQQ

SEQ ID NO: 966811 - protein, 139 aa, Homo sapiens
EVGWVYYVSFGPHAGKLDAIVDVVDHNSGFGLMDLATQVRRQAMPFKCMQLTDIILKYTAQCPPEVCPPMPGRRQTSIPKGQPHDGPRRLKPETGKHKMTDLDRSKVMKAKKMRNRIIKNEVQTLKRQLSCKASPTKCL

SEQ ID NO: 966812 - protein, 119 aa, Homo sapiens
YRIYRAVGRMESSCDCARRGDRVKPGPESKLSRGTSFAWGFKNLPSIPIPETGVTVPFWPSHPTRETDTTVSGWLLIPLGQTCSLAFIPYSRTPGAESLAFSQEALPAWGATNKRLGVP

SEQ ID NO: 966813 - protein, 49 aa, Homo sapiens
QEESPALGDDILSILKAGSAQRPSSLGMPGHTVHFSTLVSWWVPRQRTV

SEQ ID NO: 966814 - protein, 91 aa, Homo sapiens
RTVLNSSSALLCRQAAEGQHPGLSHGRSGGAQFKGHRIAVLELGPCQLPESERGANWAVNALSLAVDDFLFFYDRDSNASQAPDGLQAGVT

SEQ ID NO: 966815 - protein, 69 aa, Homo sapiens
MHTALRRISSVGNSFSSNSSNINVIFMIRRRLRLEAKSPNSRRTLHKPGVTIVDAPHPNRHLKNPYASR

SEQ ID NO: 966816 - protein, 37 aa, Homo sapiens
QLECAAVLLQELQYVAGQAVSRLDLLEEELLCQSLMK

SEQ ID NO: 966817 - protein, 80 aa, Homo sapiens
MTNPTLTQHNLSLQFSQISIALFYKRKGMHLYHTGTSSYNGHNNSSHDSYQLYSIRLPNARTAGLSRRTIVQSTTEGVGH

SEQ ID NO: 966818 - protein, 104 aa, Homo sapiens
MGDTSAMNAVTAARPSVSARPSANIDLIAPSWWIGAFECNQCGRVYTQLGPLIQNQRIHIGEKLYECNQCGTAFSQSSLLIEHQRIHTKDKPYGCNECGKSFSQ

SEQ ID NO: 966819 - protein, 127 aa, Homo sapiens
MRLDKMVATSCAGRCVCGPMLTLSVVGGGIVPVGIEWMEAEVAICAWVGVMTVEYLESPKRWRKVEREWEVWSEGVMGLDEVVVVWKDVAVIGPVEEKGLLPVGEECVVKGVVSLLLVAEVVWASTG

SEQ ID NO: 966820 - protein, 65 aa, Homo sapiens
MRILARCIRDVITVFQRLRQLRDKKKPCLYYWITDYVHLQNQIIKAERRVLTAVGFLASIVKHPH

SEQ ID NO: 966821 - protein, 67 aa, Homo sapiens
THLRVLSSVGSIISLNASNHSINIHDMRSLRFDAQVLIVEEPSHKPGVTIWMPPTLPHIRRSRMHLG

SEQ ID NO: 966822 - protein, 110 aa, Homo sapiens
HRWQFSSDGADIGFGVFLKTKMGERQRAGEMTEVLPSQRYNAHMVPEDGSLTCTEAGVCKFALGGWSHLSHGLGTETGVVFRHIQPRSVPFIHTVTHSVHTLKCTFGALG

SEQ ID NO: 966823 - protein, 36 aa, Homo sapiens
ERKTELEELEQKHSQLTEEKNLLLGRQPHPHLLSLC

SEQ ID NO: 966824 - protein, 76 aa, Homo sapiens
KQLVSSTTESLSAALPEKPGDSEVSASAASLLEEQQQPSFPRLLRKLLTLIKKNLFLPSPQSATLALQHLVLLRCK

SEQ ID NO: 966825 - protein, 49 aa, Homo sapiens
MERAMDSRSVTHKRSSSTWRRYWSCSREALQAPAAIPHGLTQGPELLLH

SEQ ID NO: 966826 - protein, 84 aa, Homo sapiens
MTQGAVFGHKQPEMRLGLLPRIPHHASHGRPQREVCDCLTQVPLVSQDIPALSLPWVSPDLEPLLLHFAASSSVTNWEPTIFLK

SEQ ID NO: 966827 - protein, 70 aa, Homo sapiens
KCFGDDARIEQGESVRPEILRWCQGNLTIFYHLGNCIHSAYHSNWFCRGRLLYHLCSIVCSFLNAKINAP

SEQ ID NO: 966828 - protein, 73 aa, Homo sapiens
YYISSFHKFGRVCADISDVFTNIVDINMAILINLDEIDRGLWLLLYEMTMPDPFRTIFLGIFHLFAYQAVHNF

SEQ ID NO: 966829 - protein, 69 aa, Homo sapiens
GRSLDGSPLVPREIEDVQTAAYWLEGEAYAPKPYYFAKVALQNVCWAQQGSYVVLEMDAFRKRYSAHAQ

SEQ ID NO: 966830 - protein, 54 aa, Homo sapiens
LSRKATSKHGEEEGQPVNTASDFITKIEYPKQTQRSQVLPAGRDETTTCSRQIL

SEQ ID NO: 966831 - protein, 55 aa, Homo sapiens
RSAVSGDHIEEDHHQYSWQDEIVQGTRRGTQKDGAVGEKVVNALVCPSALLWRGD

SEQ ID NO: 966832 - protein, 88 aa, Homo sapiens
NPKSGTKTFSVSSGCYEATRATMEDDAPSVDGRDVSGSGEDFNEGGRQNFNVRPQSGANGLPKHSYWLDLWLFILFDVVVFLFVYFLP

SEQ ID NO: 966833 - protein, 61 aa, Homo sapiens
MKIKNALDHFLTRGTPTPLIPILEIIENIRLLIQPIALDSTPKRYHYCRPPNHAPNSKRVL

SEQ ID NO: 966834 - protein, 42 aa, Homo sapiens
LVREKLGPDSVPDGYQASQTFHGAPLTSCNYWPFLLLLLGLL

SEQ ID NO: 966835 - protein, 49 aa, Homo sapiens
MESRGAHAGKHYKVRLDEYDHSKPIQVQQTEAHLSEHWREAHHCPTVDV

SEQ ID NO: 966836 - protein, 33 aa, Homo sapiens
MQYGWKTCGSTSLSLYVNGISALNDCPLVSACG

SEQ ID NO: 966837 - protein, 69 aa, Homo sapiens
VVSQQDPPLVREKLAVPGPFGIFSALGSARPDPHLCDFLVDSLPRLGSAAYQEYWVTTVTNLLSAWDGP

SEQ ID NO: 966838 - protein, 95 aa, Homo sapiens
YVVVVLQDPRTSTRYNHDLYFATPFSEAWARAYWSCLSAWITHNVPSILLPLELELKRIGWYIDHESVGLKTLEYLMEDTSSSSDVSLLNPDPLC

SEQ ID NO: 966839 - protein, 43 aa, Homo sapiens
MLAEMSTALNYLMQSFSWTTPTPTEPLCCWAGWKLSPYASGYR

SEQ ID NO: 966840 - protein, 51 aa, Homo sapiens
VPGSIDRHLTLNRAPKGTISDTRVQESIRECGHSRVGNNVSHSAVGHPHKA

SEQ ID NO: 966841 - protein, 37 aa, Homo sapiens
MASLRYVVYMYASFPYHSKSLSPFMCHALIIISPYLL

SEQ ID NO: 966842 - protein, 33 aa, Homo sapiens
SCDTVSRLHLDKGTNQQTMPSLEFPTDHLEPSL

SEQ ID NO: 966843 - protein, 85 aa, Homo sapiens
MSAFTVSGVGQQLLTGQTLVSSKASYTVRSLGIGKIEKMAVHGPVRGARAEKIWEKGLQVREYELRENTFSDTGHLGWGIHDHID

SEQ ID NO: 966844 - protein, 91 aa, Homo sapiens
MIGLVRPCSHDGNGIGHVGHRLAVLAKAEQLNHSVMQRPEPQLNRTKISFVLQSELFTFTSGISVLVVLHSLQRLISYMLRAASSSILSLC

SEQ ID NO: 966845 - protein, 62 aa, Homo sapiens
MAHDGDIRNSQTTSTKCQYQAAASKPNSDCLDVKCIYEIVLDEADDAGKVDANNDVKSILSL

SEQ ID NO: 966846 - protein, 50 aa, Homo sapiens
MAILDPHISVSDEDKWDSHSPQNHHENSKDAGVSLMHGPEGSLKSQYHAT

SEQ ID NO: 966847 - protein, 93 aa, Homo sapiens
MDVTLKRQESQLGEMDHAEADTSEKDEMDSGTMVRAVGDEMGTVRVASNMTDGANTMFEHDDTLPSQLGTMVINAEDEEEEGTMKRRDETIQP

SEQ ID NO: 966848 - protein, 70 aa, Homo sapiens
VGVPERNWLPCGLFVVLLQNMIKGVTLGFRYKMSSVYAHFPINVVFQENGFSDEIRNFLWVEKFFPQGSD

SEQ ID NO: 966849 - protein, 76 aa, Homo sapiens
LSVTIEGSVDNAKALFKPPEDSQDDESDSDAEEEQTTKRRRPTLGGYQLRATTRKEHAEDGTHYYCHSSTLEVAND

SEQ ID NO: 966850 - protein, 83 aa, Homo sapiens
MATYMAGTLKVSNMIWVIFSLLALGFRGASVSRVGLLFRCYTQLIVEGVVPDLLHVIPVGDDAVFNGVFESEDPSLALSLILP

SEQ ID NO: 966851 - protein, 78 aa, Homo sapiens
LRWFWSIDREDAAGQNDKILYTKDIKPITCQPVKEGFQTYALNHNKTTRLPTSSYCKLHCISRPLRSTLRHSSQTEGN

SEQ ID NO: 966852 - protein, 53 aa, Homo sapiens
RARDTVKLVFLRTVHPYPGCHMIILEGFVVLQDLLHPTGKHRKCSHAQQVLRI

SEQ ID NO: 966853 - protein, 67 aa, Homo sapiens
LQDMPRKYAVDVQPIRIGDGTTRPFAEDGERPPSPAGYRRVQARRLAPIFRWAIPIYADHMIGIGGD

SEQ ID NO: 966854 - protein, 35 aa, Homo sapiens
SERTCVRESDECCTNAGSGMPKVLARIKLKEVDRT

SEQ ID NO: 966855 - protein, 36 aa, Homo sapiens
MLRFCVAVLGLIHTHRPYHATPTYLPTLIALSIPRN

SEQ ID NO: 966856 - protein, 133 aa, Homo sapiens
ESSPQLPGELNYSEDELTSNTCGKAKFFNYSELHCITQMGTRDGKNATSDALTSVLTKINRIDIVTLLEGPIIDYGNIAGTRSLADENNVFHDPVDVRPNVLSSIGYPSLQVERATPTGLHYTPPTPFQQDDY

SEQ ID NO: 966857 - protein, 49 aa, Homo sapiens
VRQETLYLPCTDTVTCLPQKVIHTQDGNDILEGFVVLQDLLAPHGATSV

SEQ ID NO: 966858 - protein, 77 aa, Homo sapiens
HRIITSTAIDLVGEAQSREIQLSMSRPVVVLIGQPTRQTSLKDVDNNNKKNLITTQQHMASMCNYTYHISIQSSVYT

SEQ ID NO: 966859 - protein, 61 aa, Homo sapiens
QDYKHASQKDYSSGFGGPYGVEADRVDKSAVGFDYQATRRITSHREITPKVSAANTVSHSV

SEQ ID NO: 966860 - protein, 33 aa, Homo sapiens
FRTAEIRAMLLKTVLLHGTCGPELLNAGQMGIL

SEQ ID NO: 966861 - protein, 54 aa, Homo sapiens
RRYVGTSADFVVEAIGDDVGSLGFSVERGHRRLKDRMLNDKVLNGFLLIVAPTG

SEQ ID NO: 966862 - protein, 110 aa, Homo sapiens
  misc_feature (54)..(54): Xaa can be any naturally occurring amino acid
TRGSPRRLWTHMGHRDVAYIVVCPENECLSEGSKTFFRDLSAVYEMCRLGQHTXICKVLRDGIMRVGKTVAQKLTDELVSEWFNQPWSGEENDNHSRLKLYGKFAAIKRL

SEQ ID NO: 966863 - protein, 72 aa, Homo sapiens
TDIMYSKNSISIQDRDMKRNTLVKLLHFLENLAFSSTARFDSKDKILLTLEKHEGVLVTSQTSRDTTMYAVY

SEQ ID NO: 966864 - protein, 117 aa, Homo sapiens
SQWLRHLRIANNHKVKIVLYPKTTHIIYGSNVNSTLHTEALGIYRLVYRQETPFTARGWARYTKEKSISPMGIVKLNLPSGEVTAVRQFTTLYQTFKRQSSFPAVAKNSPSGENFIK

SEQ ID NO: 966865 - protein, 131 aa, Homo sapiens
YRIPSKNGIRVYLKNIMVLSQSFGYGMIWKRTEGIIPQDIHTLCAEQTERSRKVFYKHLRCTMQGPASSYSCLLIHICCNVDREARMEPPIQTEYLRSGGAIILIFIVLGARAVISFCILSAMPGFIVMPL

SEQ ID NO: 966866 - protein, 120 aa, Homo sapiens
MINKTFCYWPFMWASQRPGIYIPLTLLDIIQRELPKLARQANISNSGNIEKRHKDTSREEQTQSHIIYQDSPKVEMKDKTCNGAARGKRSGYPQSAAVEVTWLAGFGRERKSGTKLFNIS

SEQ ID NO: 966867 - protein, 48 aa, Homo sapiens
MALVGHGSSRRSSIPPLRRRTKVQGSTPFWMLLSERVRAIFQLACLQK

SEQ ID NO: 966868 - protein, 60 aa, Homo sapiens
LRLLVRNLSPADSRVKPPSAAAAFSNSMAAMFFCSEWAVRSWSRRVDSWCILTIELQVLL

SEQ ID NO: 966869 - protein, 57 aa, Homo sapiens
CEVAHIRSPAQPGDHVVVCGPLTYGKWTCQPSRTGGRKSCPVKDSPLVYADVVHLLI

SEQ ID NO: 966870 - protein, 36 aa, Homo sapiens
MDGIYVPHSYLVGLYTSTSAESSLNKVHKSVYRVAA

SEQ ID NO: 966871 - protein, 58 aa, Homo sapiens
YSALVGMSADFVVEAIGDDVSTLGFSCGMGHRVANDRTVTDNGRRLLVIVRYLACRRL

SEQ ID NO: 966872 - protein, 51 aa, Homo sapiens
KKTIKERVAGEGQLQEQLQCPQRVLKCHQCGSLEEEKRSAADPWKSSLLLI

SEQ ID NO: 966873 - protein, 70 aa, Homo sapiens
ETAHGAALMSIWESVLPLKLIEETYKSLMQKGQRMLARCPRSAETNIDQYINYLKEKWASVETKLNEEAN

SEQ ID NO: 966874 - protein, 47 aa, Homo sapiens
KADEESIGKCSTCIPCVEHEHARHGSIASKTVDHILTGISHHSSLST

SEQ ID NO: 966875 - protein, 71 aa, Homo sapiens
MSLAGQSQDHQEAAQRDTSNAFAMFDQSQIQEFKVEAFNMIDQNRDGFIVTKEDLHDMLASLGDRTPHDEY

SEQ ID NO: 966876 - protein, 40 aa, Homo sapiens
AFENANERLLDIMSEEGNSDGGIVVEDVEILATKTLLNKQ

SEQ ID NO: 966877 - protein, 84 aa, Homo sapiens
LGQEYEMAPRLIPDSDNQVLNKKYLTSTTFQDEIRDLAKFGQCLSTCENRKLVKVWAGDVLQGHIQHTEKENIRQEISIMNCLH

SEQ ID NO: 966878 - protein, 38 aa, Homo sapiens
AVQPVTAGQFSPDQQGQQQFSQFTDGQQLYQIQQVTMP

SEQ ID NO: 966879 - protein, 46 aa, Homo sapiens
LQDPGLHALQSQKELCEFRESLVNSHLETIPRLRTLHHAEFFSSVI

SEQ ID NO: 966880 - protein, 39 aa, Homo sapiens
ARCVIHARKLQELSSRRMRPASWHAHAQGRMCLGPASRL

SEQ ID NO: 966881 - protein, 81 aa, Homo sapiens
SLAGADVIAPLITPQKKGMERQYFSPKSNSPPRSIQKQSPAIRKMTQVNVCSQLFTNSLSGTIHGEASIIESGKVNDNSVL

SEQ ID NO: 966882 - protein, 99 aa, Homo sapiens
LGVASSDLELNASEVMQQPKCPSLRRTVRVSHRTFDRCHYRVSRVDVDVRIDDGIVLWDDVYRKLKSRALSCRHSCTDGKSSDLAVRLHLDSLPLFTFL

SEQ ID NO: 966883 - protein, 56 aa, Homo sapiens
CRHDPEHPSPQDNESDSDSSAQQQMLQAQAPSLAGSHWGHPSLPPSAPPGDPIRLP

SEQ ID NO: 966884 - protein, 38 aa, Homo sapiens
TRVFSSDVNPPRKFRAGHSPWTVIQTAGRPPRLLLAGD

SEQ ID NO: 966885 - protein, 71 aa, Homo sapiens
NTVSGLQHLNLLSLYDNNAADHQQGALRPSAVHTRHSTIAQNPFVVRLHTGMWLGLTHRPSDNPTSDDNAG

SEQ ID NO: 966886 - protein, 70 aa, Homo sapiens
TTKKRHGAHIQCTSQLSDQSQIQEYKDGFQHRLTMNRDGYHCQWRTCTDMLGLCWEKNPTRLNTWQGIDR

SEQ ID NO: 966887 - protein, 53 aa, Homo sapiens
MQSPLATRNRTSVDFKDTDYKRHQLTRTISEIKPPNLFPLAPQEITHCRKKKM

SEQ ID NO: 966888 - protein, 83 aa, Homo sapiens
GGAVACSSVWIQEVVIFEHLERDPQLLQLHVLRFSFAQVIHIEDLLPELEADEGLEEDEQSLDEHGWMQMYKALMYFLYLRSN

SEQ ID NO: 966889 - protein, 67 aa, Homo sapiens
DLEDPIYTSRVAGEHHVVEVAFLIQVGASRYISYHYPTPSEGGSPNGELSSSLDGVPTWIETVRLPL

SEQ ID NO: 966890 - protein, 75 aa, Homo sapiens
DPYIFFFRVSRARLDFSSSWTFLPTSSLELSRSSISALSILLNRSSSSLTSKASSRARARHRHCDCFSLASASAL

SEQ ID NO: 966891 - protein, 69 aa, Homo sapiens
RYRTAYRRKGALRGTCWLVLLPLDAAVHVAIPSTQLLKHQADQQMTYGTSSPQKLRRRHSASTEAPLWE

SEQ ID NO: 966892 - protein, 75 aa, Homo sapiens
IPCSEIGGIAVRIHKNRQVRNKVLRDKICCVSTGESASYVVPTKIVLFRVYIIIMFVFPAIKNRATGPAAYSMLI

SEQ ID NO: 966893 - protein, 42 aa, Homo sapiens
LWCRAPYGTGWLHLALSACRYRRLVSSGAVRGYCQCPHVIVP

SEQ ID NO: 966894 - protein, 47 aa, Homo sapiens
MNNSNSTVQALNITHSLSFLIYIILVYYRFRRLNVISGTTTTYYYLA

SEQ ID NO: 966895 - protein, 35 aa, Homo sapiens
EIALVVQINNQVVQLLLKPVLGLFQIRGGEVLLRC

SEQ ID NO: 966896 - protein, 149 aa, Homo sapiens
PRWHSLIIATEIISRTTPSFPSSIASTATASQSTPIFPSSITTIETTAHKYFQQMNIYDYYNRGHLTQYVPASLLKVDHHCVHIPQIHTSFTSSITTTETTSPSTPSITSSIATTEIISHSTPSYTSSITTTETISHSTPRLDFFTHNQ

SEQ ID NO: 966897 - protein, 80 aa, Homo sapiens
LVQQQPPVHSSTAVLGSLLDVTICKILWRSSDFTGTSLSAGRDYFFIWNPSDQYHSAPICPTTNYCCHSPSNIIPHIVIW

SEQ ID NO: 966898 - protein, 112 aa, Homo sapiens
PSTCQTDTDNTLPGLGYEHPVQVEQDTFYTASAVLARADELSYFGQEGMTEVQCGKVAFQFQCSSEQHQRELGSRMGRSLSSFSMPEVPGEGCSRSASEWRGSQDANCFLTP

SEQ ID NO: 966899 - protein, 39 aa, Homo sapiens
DHRYRPAHPSLPVIEASGSLIFLGGRKSQSYFQRSQDYH

SEQ ID NO: 966900 - protein, 60 aa, Homo sapiens
MSREHTHIIVVVLSGTVKHVEPAALCPQAVAQHRRRLGSRLVLNHGDDSIPKWEGHLDFT

SEQ ID NO: 966901 - protein, 101 aa, Homo sapiens
MLLRISMMLHEGKAWALQGRMVLLELPELDKPMADRTESLAPADSGPPVVTSSHSKFLKRLGFFKLKHLTSSVQFSVLQRNDAEHKLKRRIPSYFSTSKYP

SEQ ID NO: 966902 - protein, 49 aa, Homo sapiens
WDHPRPTLMFPRRLKSCTLITADANIDSEDEMETIPTDKTVTYKRMGPT

SEQ ID NO: 966903 - protein, 77 aa, Homo sapiens
CGAIQYRISLQFDFFETEGNDVCKYDFVEVAVYSTADSQSCMASSVVLRKPRGHSTFPSTNKQLRIGPDQEPELRIR

SEQ ID NO: 966904 - protein, 84 aa, Homo sapiens
GPFSKKDQYDVKAPAMFNIRNTGKDLVARTQGTQMASDGLKGLLFEVSLADLQNDEVAFRKFKLITEDVQDKNCLTNFYGMGPT

SEQ ID NO: 966905 - protein, 83 aa, Homo sapiens
MQVTELSDADTVSSEYSDEEVVEDVDDAAYSMSTGAVVTETQMYKKRADSLTYADYAVYVGGEQHYGVPELENFRKSWVLGCF

SEQ ID NO: 966906 - protein, 55 aa, Homo sapiens
DDHVQELSIIDKPRLTYQPLSIQPIYRHLQQTRNKEQYVSTISKHIKTLRLSVKH

SEQ ID NO: 966907 - protein, 61 aa, Homo sapiens
MSAFMLVYQVGGVTAYFLRGAGQSIYQIPSTAIRIVLCMTFFIIPTSLKRYEQPCDIEVVP

SEQ ID NO: 966908 - protein, 34 aa, Homo sapiens
HINPPRRDASEYRPELEISLRNLEVLRQTRMDGH

SEQ ID NO: 966909 - protein, 126 aa, Homo sapiens
DIKTEDITRPPLEEFASKHKQEVRKNPEFRVQYTRDMQCKHIDVNPLRPTENRIMVLKCWGVGNFYYELGIQIIEVCQQLKHRNGGLIPLEELHQQVLKGKGKFAQDVSQDNLIRAIKKLQALGTG

SEQ ID NO: 966910 - protein, 45 aa, Homo sapiens
MLVDRCIATDSSVNQTKSGNVWCVRPWWHREGPRPSATCPPMSPH

SEQ ID NO: 966911 - protein, 40 aa, Homo sapiens
FYVKHGNPGLVEKELLSIIEGGIIGPAAWKYRLQEGQKHR

SEQ ID NO: 966912 - protein, 39 aa, Homo sapiens
QASMPDNTATQKVCHLMGIHVTDFTRSILTPRIKGWRVA

SEQ ID NO: 966913 - protein, 32 aa, Homo sapiens
YLRRLFHAMPGKPWRTEQTDLLFPFVTAIVTV

SEQ ID NO: 966914 - protein, 70 aa, Homo sapiens
FQRHLMDPSRVQYGNTASVWTPLVLSTSQGICNANALSCGSTDESERQQCLHAKASLVTSERIVQEMTCA

SEQ ID NO: 966915 - protein, 55 aa, Homo sapiens
ISHRKSMYRGSPTESLTKVYRQMDIQMVSSFSTTVSVLRRHQIGVLGHILGNQVT

SEQ ID NO: 966916 - protein, 101 aa, Homo sapiens
RTTSQIREHLGLGIQEHIDLGIKYDPSIGIYGHGLHIMDAEVGQDNSIQTDKKRRTGCIEAKHRISQGGGQCAGFQQKYDGIILPGKEIPDTIQKSNNKYT

SEQ ID NO: 966917 - protein, 45 aa, Homo sapiens
HLPSYSSVQLELNMDHTVVLQLAEKNGYVTSDEIKASLKWETERA

SEQ ID NO: 966918 - protein, 123 aa, Homo sapiens
CTLYTIEYAVERVPRPGAATKEQDPVHGKKQKVGMRIIESGHAYGGLDELEHTEAVMKVLPYTPRTNAALGYATDSSPETSTSITKEQHKERMCIALGGRASEALSFNEVTSGAQDDLRKVTR

SEQ ID NO: 966919 - protein, 61 aa, Homo sapiens
KLYSSHPVYYMREPRSATTYGSCTPSSDLRPPNNPTPNTNYLTPTPHNHGKPTPLIQWTVR

SEQ ID NO: 966920 - protein, 70 aa, Homo sapiens
CQNEEVANAFGLADELAACQAKGIGDFFVYAAQGCRLVLDVAQIPPRVCVQGQLCKTLDCDRHHTTPNKK

SEQ ID NO: 966921 - protein, 36 aa, Homo sapiens
TRIVDGSGEISHINSHEVGNFLSSCCHLGMERPGPV

SEQ ID NO: 966922 - protein, 61 aa, Homo sapiens
KSATIYFKIQKHDGQDEIMKNAPLKKMSERSRKFQILNDAIITILHKSLKSGDGERTPVEH

SEQ ID NO: 966923 - protein, 110 aa, Homo sapiens
GNDQQAGNSLAFLGRENNYQHVKDWISYYNKAETMMNTDEIIKNGPDEGDEQERTRRFQILNDEIITILDQYLKSDDGEDTPVVHVRCFQPPYTSPSPAADGTRCTQKLN

SEQ ID NO: 966924 - protein, 56 aa, Homo sapiens
QQAERSLCGLNSNQQLLALAARHRTLHVQELIHAISILGLLFLAARGAELLQDHSS

SEQ ID NO: 966925 - protein, 78 aa, Homo sapiens
SSYPDHKSGKPRFMGQGSNPSHSSDLSCCSDTHQILNPMPKRRTPKKADFVCFLFFRAALPLLCGTQKRKETMAEFPS

SEQ ID NO: 966926 - protein, 66 aa, Homo sapiens
  misc_feature (52)..(52): Xaa can be any naturally occurring amino acid
SAPQPQQGYPCCILDPESWPVLLPTITRSLFIPFLPPLSPSGHLSRAFQNRXLGSSHRGPVVNESD

SEQ ID NO: 966927 - protein, 36 aa, Homo sapiens
MLVVYVADLARIQRCCGSGVGWWLQLRFNPYPGVLG

SEQ ID NO: 966928 - protein, 64 aa, Homo sapiens
ALLHGVFSEADMRLYAADIILGPGSTMHHRFVIYRDLKPANILLRRAFATIRDSRHLGSLVLVH

SEQ ID NO: 966929 - protein, 168 aa, Homo sapiens
MAADERHLTYDRREWNEPQHGADDGAELCVREAEPGYSTYTTGTWSRNLCERGFLPGSVRGLQDPNKLDSPQLHPCETLRYGEKPPCSTICLMKDMTLWVPYESISGTLIYITEQHQPLSKLNRSHNHPIRCAPVLAVVITKSSEAALDVVTLEKLRPTTSMSGKARR

SEQ ID NO: 966930 - protein, 126 aa, Homo sapiens
MGRLQAPTNWILPRLQPMLDLRYGQRLRDSTICLMKDMTLWVQYLSISGKLISLTEQQQPLSTLNRSQTHPIEVCACTRSSDQKSSRSSSGVIALEKLRATTVMSGKARRALQSVMVLPRPGGPQR

SEQ ID NO: 966931 - protein, 41 aa, Homo sapiens
MSGKDRRALKTAWSCQNQEGNKTGLVSAAKCQRLVADGQVA

SEQ ID NO: 966932 - protein, 51 aa, Homo sapiens
LCPPPAAVLLLLLEKGMSLQMIGGIMWRMHQGGGQQQEEDTQQEELPLASI

SEQ ID NO: 966933 - protein, 34 aa, Homo sapiens
GLFLLLPPPAAVLLLLLKAKVVYAARRERRKHRR

SEQ ID NO: 966934 - protein, 108 aa, Homo sapiens
VVVEPPMSFIFILCLGEGEELCQQQEEYVLLLLLTGKPYSDCFVEEVLLNSRITIKPILVFKFLVILSFGTFMCFKEKIHTHTHTHTHTHTHTQRHTELLSHLNLPQL

SEQ ID NO: 966935 - protein, 133 aa, Homo sapiens
  misc_feature (131)..(131): Xaa can be any naturally occurring amino acid
AGLVLLLLLSSCAPPPAAVLLLLLASSCCSKTCSQVLILPTSNSSFPSLVSSSSCCCPLLLLGSGFQTESQPLGIRVHCWRHELWNSASGPRLVLLLPSVALSTSPPLYDLSHFFEKLEDEERADVPIFWXGA

SEQ ID NO: 966936 - protein, 48 aa, Homo sapiens
MDPSPSAAVLLLLLTLLLLLLLLLLLNITVHVYFGGHLYLFEAPKQQE

SEQ ID NO: 966937 - protein, 40 aa, Homo sapiens
TLTKNERSKPRASLIVYEGGSDLIGMGGDWSQVVTGSRLC

SEQ ID NO: 966938 - protein, 98 aa, Homo sapiens
PCRNDKILAVKLANIRVVSEDLLQDVSASIKSLQEMPYRKLSHLGADSNAEPRRLWPQEGSQGLRSPKKARGLDTLWACTNEKGECVYLLKAEQQEEY

SEQ ID NO: 966939 - protein, 40 aa, Homo sapiens
  misc_feature (14)..(14): Xaa can be any naturally occurring amino acid
  misc_feature (22)..(22): Xaa can be any naturally occurring amino acid
  misc_feature (28)..(28): Xaa can be any naturally occurring amino acid
  misc_feature (34)..(34): Xaa can be any naturally occurring amino acid
MHMHGPGMELCVTXVNQSVPPXPASLQXNEWISXQDLFIA

SEQ ID NO: 966940 - protein, 46 aa, Homo sapiens
MSTVSGTNFSHTMCYKIGSYLESPRMVFEFIRTGRLEAGSWDQHNL

SEQ ID NO: 966941 - protein, 46 aa, Homo sapiens
MTEACSRPELGWASWTLGRTAAMDTQTQKVRLRLMKTLPSWQPLGS

SEQ ID NO: 966942 - protein, 63 aa, Homo sapiens
SPGCLLTALPGSPSAPLSPHVSCWSVTPQNRLGVLWHNSDLPIALALHQAVFLVAGAVSRTIR

SEQ ID NO: 966943 - protein, 86 aa, Homo sapiens
ADPAVRLDLVTSVTFIPMRWRTFCRSWCDLAWTPWSVFLAFLQTIFPSCRTDDTTFAMDRCSSSLKTIIAMASTVSWNISSSWASW

SEQ ID NO: 966944 - protein, 87 aa, Homo sapiens
VLVVCGPFLEGERSLRLDSALQAHGLVQLVVVSAYPVRHCPLLLQDVLLAVPVLLIRAAPAPLTVPVTPPTSALERARHSSRVVDCI

SEQ ID NO: 966945 - protein, 39 aa, Homo sapiens
MSKYTQGVEGIASLGKFTVFRFLPFPPPPESSTTRTGIL

SEQ ID NO: 966946 - protein, 35 aa, Homo sapiens
IHIEGGIIGPRLEIIVFNEGKKSTDQACMPDYTAA

SEQ ID NO: 966947 - protein, 82 aa, Homo sapiens
KRLPGLSRETRGHSTSLYYMIAGAKETDEKLTCFSEGFNNYTFLSNGFVPIPRSPGMTDDVPEKPLVGHGQSWSFKRRTDAD

SEQ ID NO: 966948 - protein, 95 aa, Homo sapiens
AAHLSLITHCLPDGSLFNELHEGTNFGVDQSQAVKMALHMASGMIFLHTLEPLIPRHALNSRSVMIDEDMTARISMRDGKFSIQRHELASSQNPR

SEQ ID NO: 966949 - protein, 40 aa, Homo sapiens
MYLSRIALCPIKRVAFLPYLVHVILWSGPALDHRCEQHHQ

SEQ ID NO: 966950 - protein, 62 aa, Homo sapiens
  misc_feature (55)..(55): Xaa can be any naturally occurring amino acid
MRTFHIFYYIIAGAKENDEKDFAFRRASTTYTCPSPTEGLRPIPVSPTDDWRVFXATTAGRA

SEQ ID NO: 966951 - protein, 84 aa, Homo sapiens
SRYLSQSHQETKRHLAAGFGIIPVGGTYLIQSVPAELNMDHAGSADAGREEWLRYCLSQITAILKLGDLSVRGNVRKHQRYESI

SEQ ID NO: 966952 - protein, 42 aa, Homo sapiens
MLFLQIEEADDWLRHGNPWEKARPEFMLPVHFYGRVENDDET

SEQ ID NO: 966953 - protein, 91 aa, Homo sapiens
MDLVTIGHINSHEVVTFLSNYVICAWDSLRLVCLAFWKTIFPNCRTDNPHLQYGLLLLLAETASLPESPWFPGTYHYPVLLSMGTKSIGGY

SEQ ID NO: 966954 - protein, 69 aa, Homo sapiens
WFGNAGSLTHGARAGTEPATSWLLVRFINHCATTGTPPFLILILACGLSLFLQLQSGDDINIYLNDDDD

SEQ ID NO: 966955 - protein, 39 aa, Homo sapiens
GTRPYLWDEDSMPVPMINPPAETGAFSPAGLEKGATTTT

SEQ ID NO: 966956 - protein, 51 aa, Homo sapiens
MLGVSGMKFRHSEAYELALPVPVLKCSEFIRTGRLEEGLGDKICCVEFRVL

SEQ ID NO: 966957 - protein, 71 aa, Homo sapiens
DPATRPRLGLGLLSDGTQPVDHVDDEDLLRVTLGAHCSGAADDEDHVQGATALLTVAAPAGLPHEGHDDTL

SEQ ID NO: 966958 - protein, 74 aa, Homo sapiens
DITCNGPFTVLVKESCDWNGRREAEAGSSRHALETVVTDSRTEHNLLTIPFSARVSRRGSEPHGAGPLRRGTDL

SEQ ID NO: 966959 - protein, 93 aa, Homo sapiens
CASPEFRLLLSCLIFVVRPGPPASMAFVCFGHPPATITNHTLCWLQEITFLAAGGPLHTASSCVSRVLADGAESMERAQNAVKHGSCVTGQEA

SEQ ID NO: 966960 - protein, 40 aa, Homo sapiens
SPSVSPMLGSTLGFISTHAQEGPFHVFTEGFTTHPVHNAV

SEQ ID NO: 966961 - protein, 45 aa, Homo sapiens
  misc_feature (4)..(4): Xaa can be any naturally occurring amino acid
LLRXPEGAGHVGKAEVQQSILSQSHSRSRRVDHDSQYHCHSGPDH

SEQ ID NO: 966962 - protein, 91 aa, Homo sapiens
STGGYRPQTGSLPLSIMPLIMACRHHLQRSCPTRVLVGLGLSPRSPEHMDVIHILKSGKTGMTSTGYDYKIAREYNWNVKNKASKGYEEVT

SEQ ID NO: 966963 - protein, 36 aa, Homo sapiens
MSRFQDVQRFLLSRQSDSMFLNTVTAELRHHLRTPT

SEQ ID NO: 966964 - protein, 165 aa, Homo sapiens
MPLRVPAWSSLNCYLAECHSGTTTLDLMKTKWNHFHFINSFIKVPMMNSKKYPVAHLIEQNLESQGWGIVQLSHNLSIGDPVEPTTSNIFLYICCGLSALLFFKAIMEKLEMSKFQPTLLTLPRIKVTTSQDMLSIMEKLEFFDFSYDLNLCGLTEDPDLQVSAM

SEQ ID NO: 966965 - protein, 46 aa, Homo sapiens
MLCAYPFASILQTLWILLLLQAGDRASSNPNATSSSSQDPESLQDR

SEQ ID NO: 966966 - protein, 81 aa, Homo sapiens
AQVAAHGGSGLLWLCGHCCLAGGLRTLKPTPSVFSFGEKANVGMKRPFGHMPHPLTLSQVLMGNRRSISATAQNSLLGAAF

SEQ ID NO: 966967 - protein, 92 aa, Homo sapiens
MLTACLAFCCLASGAGAAGSLVSFPSLGVGCLAEVIHQVEEALDTDEKEMLLFLCRDVAIDVVPPNVRDLLDTFEQVKSPHSVEQLSQVPDR

SEQ ID NO: 966968 - protein, 37 aa, Homo sapiens
ARYPMHWYQNTGACQPQCSLQTSNVLGTLYESDLQCM

SEQ ID NO: 966969 - protein, 115 aa, Homo sapiens
AGPNSITLSDYTLDNKDIERGQSKFSSHRIQTSIKESTQNVTLHEGVHARSEQRVQGDHSLLCHLHTYIKPKQETDPLDPVVVQEMSVLMPNAKRSGRRTHSSTDMGTPHSIHPY

SEQ ID NO: 966970 - protein, 122 aa, Homo sapiens
ENQSKVGEARGGLLLVEDGYRLADTQEASSGTRGHDSSFSAGAHSDAAGNRYELTLSGGRVLRELELAGLIQLQGMGEPLYILEQAMTSPKDFSKVSPATEDSVDWTGRVGGQVEKALVCKW

SEQ ID NO: 966971 - protein, 99 aa, Homo sapiens
LLRAVALAAAAPGPAGQEDRTGRCITDRDSSPIGPSTKRLDGGYLIGDEAVEKLDTMRMHEGSRENDKPGQAEDPARHEHYGWSLQNLHHDRDRMTHDS

SEQ ID NO: 966972 - protein, 67 aa, Homo sapiens
KHAGVFVGSDRGLLNLGRQFRNEGIVLTHNPEFTTCEFYMAYADSSRSHGYSRRMIVSGIRRCIVQA

SEQ ID NO: 966973 - protein, 92 aa, Homo sapiens
MVRSSNGFRRWVLFSGDHSSAQCMKIGLSQCFNLTRAVSWSTPRSLLEPYDSPHQMTLAKSRFLCGQGWLADWWKVGWTKGGHVSSQHQFCN

SEQ ID NO: 966974 - protein, 92 aa, Homo sapiens
AVPHLGASTLFLLEEAVVVYLDVWNCRLQQSYEANPNGSANDGTEANSNAKNTAIGVAASSTQAYSHRRHHWNRHSHWRRRTEPKRCSLSEK

SEQ ID NO: 966975 - protein, 108 aa, Homo sapiens
CGCSPSNSRWLWRCQWMSAVALGLGGGSSYSYSSGLGVGGGFSSSSGRAIGGGLSSVGGGSSTIKYNTNSSSSRKSYSTKVRLLALGPTVLRPLSGCRALSSCCLSEK

SEQ ID NO: 966976 - protein, 77 aa, Homo sapiens
VVLSVGGGYQYPAVAEPLAGGLSYYRRRQYHHQVHHHLLLQQEELISTKVRLIALGPTVLRPLSGCRALSSCCHTEN

SEQ ID NO: 966977 - protein, 67 aa, Homo sapiens
MTEVQCGTVTVHVTVLLGQHQRHGGTRRARSLELIFYHVTSTSPERRMWAPEVHIHIHILSPACLDA

SEQ ID NO: 966978 - protein, 86 aa, Homo sapiens
QVYRQWSRSNNSSSAVPEKMKFQWIRVKRTHVPKGWIKGNANDIGMDYDYALLELKKPHKKKVHEDWGEPTRQLIDERAHPKLHEL

SEQ ID NO: 966979 - protein, 98 aa, Homo sapiens
TVGPATLADRTLGASLLFLLEEAVEVYLMVELPPPTELRTPPMALPLLELEATSKAKTTALGVTTTSNQAYTTADTTGTDIATGDGGLHHRDIAFRRT

SEQ ID NO: 966980 - protein, 45 aa, Homo sapiens
MQAGGGDAHIKRCPTCKVYIERDEGCAQMMCKNCKHAFCWYCLES

SEQ ID NO: 966981 - protein, 86 aa, Homo sapiens
VERHISVAQSILSSSGYSRCQMVSAVALGLGGEKQGTPMADGLGVGGGFSSSSGRAIEGWPQTLLEGGSSNIKVHHHTPPPDRTEL

SEQ ID NO: 966982 - protein, 82 aa, Homo sapiens
TSLYASTYPVAMGVQWFRRVAYRLGGGSSYSYSQWSCVLEVASWSTQWQSHCVVGSATVGRRQFHHPVHRSTPPPAGRAISD

SEQ ID NO: 966983 - protein, 90 aa, Homo sapiens
HLSDAKSVGSRFDECAAPFTINRTTDNVGRACLSHLSIYLAGREGKNLHVGEGRSGVDEVGWDDSEIYSKTKLAHGVLQAVMQFNQSAIY

SEQ ID NO: 966984 - protein, 50 aa, Homo sapiens
SPLVSSGYGGASGVGSGLGLGGGSSYSYVTVVLALECGFRFQQMARADWR

SEQ ID NO: 966985 - protein, 85 aa, Homo sapiens
MLIALPAGGGGGGVLNGGTADSNRAEATPNGSANDGTEANSKAKTTDIGVAASSNQAYATDDITGTAKATWRRWTAPQRYSLTEK

SEQ ID NO: 966986 - protein, 55 aa, Homo sapiens
DQEDPRSVDRIEQQDLQTVIEIYPDLSSNDMLLFIVQGHPTCPHPQDCPLCDLRC

SEQ ID NO: 966987 - protein, 47 aa, Homo sapiens
PFLSIAASTRQLALATVRTLAHARWLLMAPDNSRCTAYFDGTRGCES

SEQ ID NO: 966988 - protein, 54 aa, Homo sapiens
EGDDVWSWFPAAETTSQAEVPTETEAAQTLLVPMGSRGLGEKYGKRWDPEPSHI

SEQ ID NO: 966989 - protein, 39 aa, Homo sapiens
MVFVLLTGAASFIIGGPTKPSMLPRTRKESTKKEVSIIN

SEQ ID NO: 966990 - protein, 132 aa, Homo sapiens
QIFTKAFFRSKAKVIYIGPNPRVTMWSPSIITPRSPGSYKDPGTPDQFLRDFLKGEVQLGSCFEHIKGWLRMKGKDNFLYITYEELQQDLQGSVERICGFLGRPLGKEALGSVVAHSTFSAMKANTMSNYTL

SEQ ID NO: 966991 - protein, 41 aa, Homo sapiens
LLTDRKNSRILITGESGDREDRQHQEGSSRYFAVLAGQLGT

SEQ ID NO: 966992 - protein, 130 aa, Homo sapiens
MSDLSLQLPRRRIPALLSLRYYTPTYTLIPIRLIAMLAKARRVDCTCVWSVFLNQVEGLKNVVRLHPILGDGLNEVADVLQMVPILGRLIDLLHGAWLQLIDKLAKNDAIFEADHEVVADATACHPLEPL

SEQ ID NO: 966993 - protein, 51 aa, Homo sapiens
MAQWLTNPTRNYEVAGSIPGLAQMGERIQMLPVSYVCSVADTVSDPAVAVC

SEQ ID NO: 966994 - protein, 49 aa, Homo sapiens
YKSSRKLIDRAYKGMPINIREPDVVSPPEHRENAVEKTRKDNRIMKGKG

SEQ ID NO: 966995 - protein, 112 aa, Homo sapiens
MISDHIIHRLLLNRRPGDHRFLYVSPCRNGCSLPVFVLSMMRMSIVMTVQVLKTCVCISMADPLKLIVSDTTQPKKRDTQCSPTTSPHIVIVCHVSVKYQFFFLSLESSQLH

SEQ ID NO: 966996 - protein, 117 aa, Homo sapiens
MRPHWTLHTSYNLIVICRAAEIRQGAQRWKYKIHVSYAELTGPRLRFHGEGGKPGPQADEKIGDEVEGADAEENSSSFSRIAEVEGKPLKAEIHNAPTDHGHADISTSDTASDVCGA

SEQ ID NO: 966997 - protein, 50 aa, Homo sapiens
NPRASPNAVAYCAAPYSGCHQLETVWENRCGERYTRQTDFSLSLTLDPCE

SEQ ID NO: 966998 - protein, 49 aa, Homo sapiens
MPNELHHHRGTCPQVPAAKYHRNFLVQVSLELFMLSFSGLASTDNAAGM

SEQ ID NO: 966999 - protein, 110 aa, Homo sapiens
RASVLIARDRGYNWRLGLLVSRLLGVTSIGIRTKSRRSGQPCRWGGSPGCSILSAGDAVVHSAGIHREDTPLRYPQSHAPVSAFTGFHRKLSHHACLKDKKNSALVDIGF

SEQ ID NO: 967000 - protein, 67 aa, Homo sapiens
VCLEVPVMAQWLMNPTSTMRLQVQSLTLLSGLRIWRCHELWCTSLTQARIPHCCGSGVGWWLQLQSD

SEQ ID NO: 967001 - protein, 35 aa, Homo sapiens
ELVPIPPVCSPRYPCCHDPLSTDEIKGMFKRKAEQ

SEQ ID NO: 967002 - protein, 112 aa, Homo sapiens
MVGLAMALSVSTVRPCALAVHLLHLAMMRTAEDNRSHSAHFFEFLTKELALGQDRILIRFFPLESWPDWQDRDGHDFFMIGHGGIQDICELAASSREISWQSEGLEITSFGL

SEQ ID NO: 967003 - protein, 57 aa, Homo sapiens
SELAPIPTCVSTLHNMRFTWTSCLIFLLLPSAVRIRFFLQLGSHGCRGFQKNGAKAE

SEQ ID NO: 967004 - protein, 66 aa, Homo sapiens
RVGTVTSSVASPAEGNCLGSTECVGEACCWVFLRERGRAILWVEDREKHSSFSPLKDGDFPTPEAC

SEQ ID NO: 967005 - protein, 35 aa, Homo sapiens
VLTGSCSYVVLLSSLKFRNKLDYLSVIEFSCCGII

SEQ ID NO: 967006 - protein, 44 aa, Homo sapiens
TCVLHLLLIPTCVLQVAQEAEGALGSILERVLPGLKVPHARKTG

SEQ ID NO: 967007 - protein, 37 aa, Homo sapiens
HCVSSHLFHPTCVPISTCVLISTVCSSPPVCSPPAVC

SEQ ID NO: 967008 - protein, 124 aa, Homo sapiens
MAILMTAACGLPAALPGVLALSQLWYILEADLLRPCPWRGSCSDRGSPCSLHALSACTVKSSSFWFVSLTLLQDVIFIINSCSVTCSLSSSLSTWDVVYKSNFQNIVTAAELQNEGKGVTSLTL

SEQ ID NO: 967009 - protein, 37 aa, Homo sapiens
MSWLPFTVSPVCSVAPAGPVLLHCISSSLPAFSLTRS

SEQ ID NO: 967010 - protein, 55 aa, Homo sapiens
DSTEKEEAQPCVCCDPLFHARPVFPPQLIFLVPERWGWMSPSLSQLCAVSCNFLP

SEQ ID NO: 967011 - protein, 40 aa, Homo sapiens
DTEEVDRTEGGGDGSFTWQSTGKPSFLRQRPSPNGPRTPE

SEQ ID NO: 967012 - protein, 36 aa, Homo sapiens
EDRGMAPVVQTLPRSRPHAPGLLLLNGVRLEVLLCA

SEQ ID NO: 967013 - protein, 73 aa, Homo sapiens
LTSLDLLSWNVLLITCGIDRQTMATQASLGVTSELPHSGKWVRGAKSSHSVSFVVSLIGVPALLQVVYELSKG

SEQ ID NO: 967014 - protein, 102 aa, Homo sapiens
HTFARCHHTAYTEHMGAQRTVARAHSIQIMKVEEIADTMCRRPAVKQFHDIRRSSSRVPHRVLRRQHKPCFTTKRPNTLLPRLHGPRPGVPQINSGMPLVML

SEQ ID NO: 967015 - protein, 38 aa, Homo sapiens
GAADLMAYCEARAKVRPLLAPVRLQKTRLGRRSFSVPS

SEQ ID NO: 967016 - protein, 111 aa, Homo sapiens
MIKVVQVVCDHLRDSKVMRRRREKNISEIEYAAFLAREKAKADAECYTAMKIAEANKLKLTPEYLQLMKYKAIASNSKIYFGKDIPNMFMDSAGSVSKQFEGLADKLSFGL

SEQ ID NO: 967017 - protein, 36 aa, Homo sapiens
MAKFVIRPATAADCSDILRLDQGSWLQYELHWQSHK

SEQ ID NO: 967018 - protein, 85 aa, Homo sapiens
YLWSQHLQCIRVAQRRYAVHAATTVMEAAASIDLNGLGRLTSMLLVLTFVDWECPCAILITDSWSTFFFFFFSFKKLPVNQFLEY

SEQ ID NO: 967019 - protein, 74 aa, Homo sapiens
QVDLTVVVEPNAIHPSGYRPVPETPDPSDAHISIMRGTLLSIHVEFFRYCSGYFFIGKGERDCVDTSARWLPEV

SEQ ID NO: 967020 - protein, 55 aa, Homo sapiens
LSDYPDALHHMKHPYHHVGSFISSRQAGILIIFTRFDEAIRVSEAKKSVSSRNEP

SEQ ID NO: 967021 - protein, 65 aa, Homo sapiens
CRLTSFRGYLRLLSRPSSGLHEDWRYMAEQEVVRVDRGVSAYRYRSPSSRGYDTTGLVSVCMFER

SEQ ID NO: 967022 - protein, 63 aa, Homo sapiens
VRWMPDSSEPTTDGEDDESSVASILNLYSHLRGSLHVTRRVMLHPVAVARLLAPHGPPSSPVF

SEQ ID NO: 967023 - protein, 88 aa, Homo sapiens
MALVLGWVDAAVLAPSAQLSSSLFWNHSWISRWGPSTAVASVDDIPADVDAEVTPYGCWGGLSRVGVSNHGPRGACDIVPFPDHGHPL

SEQ ID NO: 967024 - protein, 148 aa, Homo sapiens
RTEGGRRTDRRAGLAGVYSMEGEDMRTGHGSVLATHHAVAARWLAVVDLVLGSATAQEDSFSEHKVASVSPLDQGGVAAVAPQWQCPSGGSAAWLPRYAMFTLVLSAVDDGVRVFAMPSQLPPGGHGHEAVSAGLARLAVGDDHGHPL

SEQ ID NO: 967025 - protein, 57 aa, Homo sapiens
HARYQQWVAAVDAVKAVHSVRAELPTSGGLLTSVWVSRLVTCQLNRALQGAVLGGSW

SEQ ID NO: 967026 - protein, 50 aa, Homo sapiens
GKSLEWAERLAAAFLPGSVSAQSPVPSSQWPVAVALLGSQPALSSVQART

SEQ ID NO: 967027 - protein, 93 aa, Homo sapiens
GSFCIPPRSPGEGDPCSPPCVKEVDTWRQEALCRTLAGAVIVGGGGKEAKELVRCDPSLVIRISLCSCPPVVLKPEQVSLRAWTGSSVQGEQC

SEQ ID NO: 967028 - protein, 71 aa, Homo sapiens
IELGTSRGGVIWEGYIVVLRLEGHDWTQSDSDEAAPVNHKGVTSPVHISRNVIHASDSVYVGPYERSNCGS

SEQ ID NO: 967029 - protein, 34 aa, Homo sapiens
MSSVQRALYPYQLSHLLPGDHLNESPCPAMVVAD

SEQ ID NO: 967030 - protein, 31 aa, Homo sapiens
MASTSSVSQANAELACSPRRSGENLPAPRAS

SEQ ID NO: 967031 - protein, 131 aa, Homo sapiens
MESYGAITCGPLSCSQTKLLPRNVRVLQAQEACKEDQGSLKATLMPMTEVDLYISTQRIKVLNADTQETMMDHPLSTISYIADIGNIVVLLARRRMPRSNSPGERGSVPPIPGWEKAVQDDLPRLRVDRVP

SEQ ID NO: 967032 - protein, 141 aa, Homo sapiens
ESSSVSLTMLRAKRDLVYTAIFVEAVAAMDRLLVAQSTDDRVLEGVIKGRSSRTPPVGPRPIHAAPRAWAALLLDTQDSLVILKESGVSTPTCLTEQTRYPGPCADKAPGVKSSPEGGYHELFTWRGLAGFKTCEFQKFFL

SEQ ID NO: 967033 - protein, 55 aa, Homo sapiens
MPDDDVYYITDVKIDDAGVYNCTAQNSAGSISATATLTVLGLPIGLLCVCVCVCV

SEQ ID NO: 967034 - protein, 73 aa, Homo sapiens
WHINLLQVTLTSEEEARIEEECRYTLEDPKGAAILKSSRCHIIITVYGYTQDSRVEVVACESYFIMIVCIHST

SEQ ID NO: 967035 - protein, 56 aa, Homo sapiens
MYAGGDSSRIPADLVGVDWRRPLSQVSSSAIFFVPGFLLLVPGVYHVIFIYCASVA

SEQ ID NO: 967036 - protein, 32 aa, Homo sapiens
MIPGRYVTLNDGAGEGAHLHHALLIAVVASST

SEQ ID NO: 967037 - protein, 33 aa, Homo sapiens
RYGRTNGLTGSRFPTCVTWHSEACFPRLLVLIC

SEQ ID NO: 967038 - protein, 61 aa, Homo sapiens
ATDALSIVTADFCTVFFRAVSIHVLSLVNFIVCVHSQVSSAKLRLFRDTGARNSVSHWSYA

SEQ ID NO: 967039 - protein, 34 aa, Homo sapiens
LLRDAPQDPAEEVTITALLFGEDDLEALNGHMNI

SEQ ID NO: 967040 - protein, 54 aa, Homo sapiens
MTSKGNSYVVVRLGVRAVAATDADRSRVAILVSMPESLSRYSELIQTISLHASK

SEQ ID NO: 967041 - protein, 73 aa, Homo sapiens
AHRGSSLSRLTGTHTRLYMYKIEYRMMGVTRQVIYAQTRKYFIYPNSTLKLLTDMLKLSQFGYQIRQVFLTFV

SEQ ID NO: 967042 - protein, 118 aa, Homo sapiens
  misc_feature (14)..(14): Xaa can be any naturally occurring amino acid
  misc_feature (16)..(16): Xaa can be any naturally occurring amino acid
  misc_feature (18)..(18): Xaa can be any naturally occurring amino acid
  misc_feature (41)..(42): Xaa can be any naturally occurring amino acid
  misc_feature (55)..(55): Xaa can be any naturally occurring amino acid
  misc_feature (99)..(99): Xaa can be any naturally occurring amino acid
  misc_feature (102)..(102): Xaa can be any naturally occurring amino acid
GGISDTNQIFGLSXTXPXSFLYYALFTLNLGTSYPSISSLXXTHLIDNNRNQSLXFQDLFCVYLTLEYQTEERATVEIFVGINSYRHCMNELATCYPQXLQXNNHTQNYHEPRAHSLI

SEQ ID NO: 967043 - protein, 65 aa, Homo sapiens
VDSSRILLALYMISVKNYEPQKDKRFSAHRYGRKSTPRAQYSVCVLTPPPYGNEAKAAGYSPYGP

SEQ ID NO: 967044 - protein, 58 aa, Homo sapiens
  misc_feature (5)..(5): Xaa can be any naturally occurring amino acid
  misc_feature (17)..(17): Xaa can be any naturally occurring amino acid
KEIFXKATFVLKSATIXSSKYEQRPRAVHSDTPQQQDSLEIDTCHRLAFCLWQLLTFY

SEQ ID NO: 967045 - protein, 107 aa, Homo sapiens
  misc_feature (11)..(11): Xaa can be any naturally occurring amino acid
PISPHWTPLMXKTMSGRLLMFVQLTTMSPSELALAPMSLLDVGNGAGWAGQQRGAGVNNGLAALSTGDGLSVHGDAVHGDLPVTLDGNRHPVQTSSVVRRVNATKDH

SEQ ID NO: 967046 - protein, 34 aa, Homo sapiens
GIPVWKDVQLPEVLSAALTDSQGNEEDNGQRNHD

SEQ ID NO: 967047 - protein, 189 aa, Homo sapiens
LLLMDMYVSCREKDPCQNTSSSGEIHPAIPLMISDYLEIFIKIDSQQHFFKQTSSSTSIIYIFMNTMFKEQTAASKSSKRRKKKSMGQNVSSMTRPCTLLDKLWHNYLSIQRKRHTKVHNGFKIAHLDFIKLGGSKFNPGMTCQPRALFPKETEALSGEKIFSPDRPARQNNGFLPASREIPEHSALTR

SEQ ID NO: 967048 - protein, 123 aa, Homo sapiens
TYYSPTLNHRVLEHSPIHSGEGGWLMPEAGYFYRFHPKEQTTVAEKNLYVDYGCHVEESIDYAWGSRYNKANTCTKPQKSDQIGAGRLNRAADIRQPLPLHHESMDMTLIDQLADDMSQARRG

SEQ ID NO: 967049 - protein, 172 aa, Homo sapiens
FSPTQESTISADLRLKMDDFILQQNGGERKFGKVFLAEFKKTNQFCAIKALKKDVVLMDDDVECTMVEKRVLSLAWEHPFLTHMFCTYQTKENLFFVMEYLNGGDLLYHIQSCHKFELSRATFYAAEIILGLQFLHSKGIVYRELKLDYILLDKDGHIKIADVGMCKENMSG

SEQ ID NO: 967050 - protein, 33 aa, Homo sapiens
EVYTWALLCLPQRRYQSGSVVIFGGIDSSYYTG

SEQ ID NO: 967051 - protein, 36 aa, Homo sapiens
LLVTLDDPLMGYIFSPENYDSPYETLMWSEVWVYLM

SEQ ID NO: 967052 - protein, 39 aa, Homo sapiens
EAEVVWEPLLETRVGTREVTGGEDEDLTAGSEATSKPSK

SEQ ID NO: 967053 - protein, 69 aa, Homo sapiens
TPSESSRWTGPRYGEGLQRSSAPGEAAQSWERPVATAVGYSSLILSFLSQIEGQSEKSGGALGLAGHMG

SEQ ID NO: 967054 - protein, 42 aa, Homo sapiens
EIASVEGEKDDPRPPNPPKPMPNPNPNHPSTSGSLTDADLAD

SEQ ID NO: 967055 - protein, 106 aa, Homo sapiens
GFSLKTADVSGSRDENISYGIPWVCAITLVRDESHSEWVSCVRFCPTAAPYIVFLWLDKLVRYENLANCKLKTNHIGHTGYLNTVTVSPDGSLCASGGKDGQAMLW

SEQ ID NO: 967056 - protein, 62 aa, Homo sapiens
MILIFIVLGASDSDLSSAYCRQCQCYMDGACQTALCMAYRSIADVHVTLHDGVEGSYVDATG

SEQ ID NO: 967057 - protein, 65 aa, Homo sapiens
SVPVYGFNRQEVTVWELISSECFTAEQWQELLCQFRTEKVTVEKVIKILITIVEEVETLLAGGGC

SEQ ID NO: 967058 - protein, 131 aa, Homo sapiens
CVEEKIDSYIKNSFADFYMFQNNLSDYIPSYGCSERCVDHRMKCWQKWEDAQITLLKKREAEAKMMVANKPDKIQQAKNEIREWEAKVQQGERDFEQISKTIRKEVGRFEKERVKDFKTVIIQYLESLVQT

SEQ ID NO: 967059 - protein, 57 aa, Homo sapiens
MARMPNPLVPDHVSSNICRMKKRDAPVSPHGLVNTVKQVPVYNPSCSEHKRLRTTIK

SEQ ID NO: 967060 - protein, 58 aa, Homo sapiens
SAQLGTSDLAADPSRVMDQHTFQDQWEDRIQVWHAEQRGMLKDNALLEYLKIAQDLEM

SEQ ID NO: 967061 - protein, 71 aa, Homo sapiens
KCQADGNGHYQTVKELPGSGEAQAQEEVGGSFIRSSLHAGNGIAPFWMLQNRYHRFHGQGLLQSRPVLDDS

SEQ ID NO: 967062 - protein, 70 aa, Homo sapiens
WRSISAHRDAGVAEAWLLGEEPYLSAERRPERELGAEKLIKRHEALDKSAATWDERSLPWKGCTTLELLE

SEQ ID NO: 967063 - protein, 53 aa, Homo sapiens
TVVRQQEKKLLLHSLIFSILLSQYSTLAYKDGGILYGANCPVGELSLWQVEAD

SEQ ID NO: 967064 - protein, 49 aa, Homo sapiens
EVILSDSSEQPHRLEVCRQSCQMNNRPHLQVVRLTWGHISRDLLALPPQ

SEQ ID NO: 967065 - protein, 53 aa, Homo sapiens
VVQFCMALSSSFLSEDTELCCRFDVYFLESLCWPETFLCGSHRYTYVGLSEHT

SEQ ID NO: 967066 - protein, 48 aa, Homo sapiens
GPVKGLSYWFEALQYCISHFSPTWGWRGQALNYCESVVTENSWLHYCS

SEQ ID NO: 967067 - protein, 80 aa, Homo sapiens
PVSKREIHTVDTTDMNSMIMDDDVAVPGDDHGIGAGIIGCYMYYYICICHHVQVQAYGVSGGVINMYLELDVMLAQLGEI

SEQ ID NO: 967068 - protein, 109 aa, Homo sapiens
MPHHPRLLSDVRGFHDLLLHWAAGPPAALNWSRMHGEEPYTPSVSSQGTQHPILSQVQQACADARTQITDSTVVAYAVNTQQAVILSKKHLGRFGSVTVLAGRLGLAGA

SEQ ID NO: 967069 - protein, 35 aa, Homo sapiens
PSAHYYDKSHYIYSHKTCICCCAELIITFQHVTRN

SEQ ID NO: 967070 - protein, 138 aa, Homo sapiens
DSRGFLHFLDDKSETPSQKKRKKKKEGAEGKGGRDILGRGGRLARMKQSRAWFPALFFASTNIGLGSPPDFLNSVLASLSWLSGGLFFLIQAMFCKFMLGFIFLCITQGIINHAKASCFATTKRGFESKYKVDIRGGL

SEQ ID NO: 967071 - protein, 100 aa, Homo sapiens
VLVACTSTLTSWTSSDEYLEVIKALKNHEDKIRVGLNMGDHIETQQLMRVYVSLMWSLGKIINTPEVVSGYIGSFWCHQLFIHDNRMLFEAEEQDLLKDI

SEQ ID NO: 967072 - protein, 44 aa, Homo sapiens
SSTACRYATHAGEDSTICGSHVASTLSDSDVLSGVTEVVVKLFD

SEQ ID NO: 967073 - protein, 102 aa, Homo sapiens
MFIRRADIWEKSWLRWSRSMSIVRLPESFLALETLTKSSAVTVLPVILSVATSILSQTCLHVCEDVRQGQHRHDLAGQCDVKLRLPCNGPFSVYTPPDGYFA

SEQ ID NO: 967074 - protein, 56 aa, Homo sapiens
MLVGSGTTSVTSNNEIITSSEDTCNRNSDSGGPFGVPDHLRQDVEEYEARHIGVPS

SEQ ID NO: 967075 - protein, 91 aa, Homo sapiens
MTSLHNSFYSKDTSLRTPLYEYPKAHVEAPIAGSLVLAAVTLKTGGDGDKYALTLNIQNPLTKHIMLPLTCYYTLSGLIITSASGDRALNI

SEQ ID NO: 967076 - protein, 31 aa, Homo sapiens
MSKVPSVHTHKICMYWWGVLSPKDQARRARH

SEQ ID NO: 967077 - protein, 52 aa, Homo sapiens
MQLHPQLQSLENKDQEQEAGGGHVEADGDEAGQSGEQVEEEQLVRVSKVVIP

SEQ ID NO: 967078 - protein, 44 aa, Homo sapiens
ILCMTSFWADLVTCQLSSFLSLFDDTTEMSVSYHEHASVPRWIV

SEQ ID NO: 967079 - protein, 99 aa, Homo sapiens
GDLQDPLEGEVGWGAFILRCGRPERAQCEVRLQFLDVGGDIFHQQCKRNELVIPRAAQTRAVYTKDDDQEAGHCSSTPEESELDLDYGNRYKNVKLVIT

SEQ ID NO: 967080 - protein, 37 aa, Homo sapiens
EYNEDVVCGDYRMSGGEASGGLDENGCYYEGYVADEE

SEQ ID NO: 967081 - protein, 115 aa, Homo sapiens
GDLQDFGMRAFWADLCDLPAPADFYVTTGLMTPTGNVCLHIHRKQCKGVPKVASLRSSQNKWAARNHINNWQHHQTSKNIGPSSSFLPERRSIFSFSSANLHATVSRGGNPSTGG

SEQ ID NO: 967082 - protein, 51 aa, Homo sapiens
MSKPHRWVNSTWRSTSYELGGLWYNYCLNTRFSNPLTKTHRPSPFLVLNPY

SEQ ID NO: 967083 - protein, 44 aa, Homo sapiens
MGYMMAKSTGDHPDHPIVETLRKKAEADKTDKAVKDLVVLLFET

SEQ ID NO: 967084 - protein, 61 aa, Homo sapiens
RSPMLIIHSAEAWHLGEGSTHCLLRGSWTTRCNKGEDGILFLPYTKAIGNPESKSHHCLPI

SEQ ID NO: 967085 - protein, 60 aa, Homo sapiens
LRPEDIPPSMTKSAQLKGFGTSPGHCTASIRDMWPFRPWESRTLNDGTQLGVPTPVFGSF

SEQ ID NO: 967086 - protein, 138 aa, Homo sapiens
GSQTTRRLCNASLPTSPVTSLLTCGPCHRVLREQSLEAVWGTGVQAPQLGGALCLLACCVLVYFCVWKGVKSTGKIVYFHCYIPLRGPGRAAGAVEVLLALGPWDGIIYYLKPDRSKLGSPQVWIRLRGPRISFLYAH

SEQ ID NO: 967087 - protein, 60 aa, Homo sapiens
DPYTTEETVTKESISSKEKEKMETCGPRRKVHYFVAPGKCSILHDDPRKKTVADYKHSIP

SEQ ID NO: 967088 - protein, 68 aa, Homo sapiens
PSSMIPSRQWRLNILYLDSILHIGRGLYYEIIIYYSRNLKTYGNYPPDLTNYRQTDYHRAIDPPDEEQ

SEQ ID NO: 967089 - protein, 111 aa, Homo sapiens
RISRNTDRIIVRLLRMNSRRKKLGKPGYRNRIVHGLLSLVYHLKEGLEHGVEVQGLVRRAGHQAADDAGLGKEEVRPPVGQAEGQVVVGILGLPGEEPVLEELVYDAGRAA

SEQ ID NO: 967090 - protein, 69 aa, Homo sapiens
MCVYASRVVRTSRRGPFRDRPTESVVGDRGNRQGVPELIFVDRESVACFPAVTKPSAIPERARTLGRPP

SEQ ID NO: 967091 - protein, 39 aa, Homo sapiens
MPVFGLTARGLSIDLLVDCQMLGCLLSVQGLNLTAGLCG

SEQ ID NO: 967092 - protein, 103 aa, Homo sapiens
LLVVSRVIPLPGCSTALIPILHMSINPLCVALSTLVTVTYDFVMPKGCVVGTTKRVLTLRKSLLVQTKRRRLEHRLTFSSLTPPPSWAMAASRPYQNRSIATG

SEQ ID NO: 967093 - protein, 95 aa, Homo sapiens
MFITLAFVIGLWLAVIILDDCCDDNLLAPNHEPDTCYDLGDNMVRLYGGSRVRASSLLTLGRLFNPVPAPASTIADASRSRIEGGTSQKLMLSLL

SEQ ID NO: 967094 - protein, 36 aa, Homo sapiens
RIVLETGRQCTADTTSYLRLLHGVDWDYDLGKDCHK

SEQ ID NO: 967095 - protein, 53 aa, Homo sapiens
CIANPLMKLGAEEQASKQQFVVKSGQESRSPCDLVKESSEEGRSANDLVVKLG

SEQ ID NO: 967096 - protein, 69 aa, Homo sapiens
SGIANLLLYLIHKLDLGTSYPREYSSNPILRVHNSTIGFTTYYLGSGHPDLCSRLLQVRLFYDLKSYVI

SEQ ID NO: 967097 - protein, 74 aa, Homo sapiens
CIAQSFILHPPFPIERATLTQQGTTYASRADRGSTGSCAIGHRAAYVLFQFVNHHGTGFEDGIGGPSRSDVSHW

SEQ ID NO: 967098 - protein, 45 aa, Homo sapiens
VSTSIHCKYMVCSHDRTLGTPIEYHTLRPVAMYPNGSFFPECYTA

SEQ ID NO: 967099 - protein, 66 aa, Homo sapiens
AQYKTPLYETETGPDQDNLLEITTTSTTLSSQTHAYVIIFFIVIPIIIGGFDDTVVDTEVERGDPL

SEQ ID NO: 967100 - protein, 76 aa, Homo sapiens
LVKGTICRMVKYRTLVARGPQLCMETTGSQAHRGLMPTSYPSTSTKAHLHRELDACVYAGSESSLLPSRAVTPDSD

SEQ ID NO: 967101 - protein, 89 aa, Homo sapiens
TQSTLTPGEYGDSPVPTTRSSSAASMAEEEASAVSTAAAQFTKLRRCMNAKEFTVQIKDEEGLKLTYQKHKKMANGVMGDGHPMYHNTT

SEQ ID NO: 967102 - protein, 39 aa, Homo sapiens
HVTRVTHPNPRKAEVEPEREPAGKLRLGVERRIVVRAQT

SEQ ID NO: 967103 - protein, 98 aa, Homo sapiens
VRTDATHMEDDSVTCRWVYKRHRRLESLHNGMDRDPDYANAQIMIKKEEERERASIRRESQQRRMREKQHQRGLSASYLEPDRYDEEEEGEKSISLAD

SEQ ID NO: 967104 - protein, 98 aa, Homo sapiens
RRPNSTFSDIPEDQNSSLSCGNRPGSAMECALHLEKKCDISHYWNCTTVATDKNTPICVTSLKTHYLIQPVKAIIELGDHVTHLREMGAPESGLAAYL

SEQ ID NO: 967105 - protein, 120 aa, Homo sapiens
GNSTPHHASENGALRPGMYALDRTYPVPLCPTNQLMSLVCCRATSMMFHDSSLLSYQLARLMPNFWAANLGPREMSDLSTAYQLWVILWAVCMLCRDIDCSLHRPLSAIPSRQDSILLRS

SEQ ID NO: 967106 - protein, 36 aa, Homo sapiens
MRTVSCVRYFAVCYGRTEYLSDVMSVGDLFTTDWVP

SEQ ID NO: 967107 - protein, 135 aa, Homo sapiens
RNCHRDIRQVHAYSCAPIYSQVGHGGSPLYFDWLSPALSGIVSQLCLTHGGHFCQWPVCAVPRSLTYSHFFPYLMLHSDCILPALPVLIVWFLDILKARFGHLVGSAASSGFELIFCILVLAFSCVHSPGYPGGS

SEQ ID NO: 967108 - protein, 78 aa, Homo sapiens
RTLLSDGGCIRIHSAAALRVLQNAHKTLLLAPEEASQRLQNQEENMQKALSFLGPSPQLEIKNLSPETPSDGHSNSPS

SEQ ID NO: 967109 - protein, 31 aa, Homo sapiens
MACGHTSTVHCCHCYIGFFWGGETHKTKPFA

SEQ ID NO: 967110 - protein, 45 aa, Homo sapiens
LDQSGPHICDGHFDTVAMLRGAMFVFKGRWFWRVRHIRVLDNYPL

SEQ ID NO: 967111 - protein, 60 aa, Homo sapiens
MARPSLWTPGDRPQATCLLCAEVKPTAPCVGEALTEEAVGGRSWRTPGVGCSSGCLELRG

SEQ ID NO: 967112 - protein, 33 aa, Homo sapiens
SFWPRLETIRGRGCKSRAGPRESDCLIKTKHRE

SEQ ID NO: 967113 - protein, 37 aa, Homo sapiens
WLGVVPGPEVVLVVEAEVVLVVVNRDCAGGSEQWLGV

SEQ ID NO: 967114 - protein, 71 aa, Homo sapiens
ASIRTLELQQRCSCLGRQLHNPQAKTRPLLPVITSFLTLELQQNCSSLGRQLHERQHQNEISSAASRQFPV

SEQ ID NO: 967115 - protein, 74 aa, Homo sapiens
AYNSEPTSPSARKWVIWMYHERCSLEECSLHREVHPASLTVSLTVSYTRNEAQIVHHTVMYFNAGMTSRSSFRE

SEQ ID NO: 967116 - protein, 49 aa, Homo sapiens
SSSVPSSSASHTYASLHNRRGQLIPPFTIKSIGTNGTEPTKTPELPCEY

SEQ ID NO: 967117 - protein, 39 aa, Homo sapiens
YREELRPQKALNPNPQNEDTDREQQKLWNCFQRACIAWT

SEQ ID NO: 967118 - protein, 56 aa, Homo sapiens
GREGAGIVDTGTFSADRPTSPIANIQSGIGASENSDGDMVVSCSAISSLPDIVVTI

SEQ ID NO: 967119 - protein, 43 aa, Homo sapiens
MGASYWGNVLSGWVDGCDFLRHSFSRPRSDRVRLKDFFLMETG

SEQ ID NO: 967120 - protein, 79 aa, Homo sapiens
MQSSLLVEQVAMPWRAIRPPVHQHPSCRENRGTEAAMSAMVLGAPLQTRQLSTIYVTQNGGGGGRSPTFYSPESNQHLV

SEQ ID NO: 967121 - protein, 77 aa, Homo sapiens
  misc_feature (2)..(3): Xaa can be any naturally occurring amino acid
  misc_feature (22)..(22): Xaa can be any naturally occurring amino acid
TXXSIIMNGEAIACPEGCQSIXDLALLSGPTSPIANIQSNIVASKNSNDDMACSCSAISRLPYIVLTIKGIQYPAPP

SEQ ID NO: 967122 - protein, 71 aa, Homo sapiens
LARYRLDSDSSNSWYLRHDPALDIAFRAFFHSDSVCLYCLVLHRFHAAAASWACCVLAWVELLFFKLWYLI

SEQ ID NO: 967123 - protein, 82 aa, Homo sapiens
MSIHEFTVTIESKALTETLEANSTLRSRSLTALGNSGGYAFRFLLYSGFAHHIDPHLSCCPNVCDADSVSPIACIPSDPAHF

SEQ ID NO: 967124 - protein, 76 aa, Homo sapiens
MTLGHSVGFISTLTQSTIRTPFDLAEGESERLSGFYIYYAACPFALFFIAYYTILILTSLLGDPDAYTLAYPLYTP

SEQ ID NO: 967125 - protein, 54 aa, Homo sapiens
MISQGCTEVFVPQNALLGSRLKRTIQSTSISRRGASDLSSEEGRRVNKIDKEAL

SEQ ID NO: 967126 - protein, 95 aa, Homo sapiens
PCTYPLLSALTYNKAHLAYNKRDAQIAHCTTPSISHMPSLLTAILIQNPLKLHRRSSFFIIAHRLSSSLLFCLAHSNYERSLQSHHNPLSRRLTV

SEQ ID NO: 967127 - protein, 115 aa, Homo sapiens
TVSPSLSSSFHRWIFHHLVCEHSTFQPLVPLGDLLIIRAVTESIAQHLKPLGDELLLKTSHQAVRQTSSPLPVYSPLSNCIPVLLVVVNGSLTKTHPALAALSYRPLMLPSMLTG

SEQ ID NO: 967128 - protein, 118 aa, Homo sapiens
MWTMRRNISGQYYLVYHPHVSDCVLSSLLLYCVMVVKKLESVLHQQRYEIEPERPVSIVSLRHFVWGGTESVTQGFLGRQQHTGFHGTSVRLKLVLEEHAIQQQFVMNIVKQSRSPCD

SEQ ID NO: 967129 - protein, 111 aa, Homo sapiens
SLTGSPLKCGLSEIQRIRGHGTGLRQSLVLGSGWITYEHYLVDLIRKLQRTTTRIPLSPHSYTSASHALSPMPSGSPEEPRGTFSSSPSKDKMSQDLRVGGRGSRIEASSL

SEQ ID NO: 967130 - protein, 77 aa, Homo sapiens
VSTGIPPVVASEQEWGVLWVGGIWWTLVYREITIDWSIMTSYQLQVTVQHEYARGAGADPWIPSQSALEREGHQDLC

SEQ ID NO: 967131 - protein, 52 aa, Homo sapiens
CMLLVVSTGIPLWTQRCSAAGSANETPENTGQRGTLASGALYRILPLIWKLL

SEQ ID NO: 967132 - protein, 56 aa, Homo sapiens
CRHSYVVCEEGMQRQDRTGAGVEEGRGTLDAFPRTQEAPHRALRHPRLTLSPYRLH

SEQ ID NO: 967133 - protein, 66 aa, Homo sapiens
MASTSERSRGEHSKANKPISCLAYLSTAVGCLASNAPSAAKLLVQLCTQNLISAATGVNLTTPRRR

SEQ ID NO: 967134 - protein, 69 aa, Homo sapiens
TPGRRIYLSAAYPIELSGSPETDEEPLGEEHQHNSTSTNTLSTSTNSLSTSTNTLSTSTNSLSTSTNSL

SEQ ID NO: 967135 - protein, 40 aa, Homo sapiens
LSISTVAKNSCNSRWSIPFGGSAVTARQNSQDSSMVYPGA

SEQ ID NO: 967136 - protein, 128 aa, Homo sapiens
EVHISQLQHEKSILRGDPDEGKLEDPCPLCMLQSYAMRAMAVSYQLERCIVRAVSWWRHRINMNTHTQYQDITRSMPAAKSPSAQLMEQVAQLKSLSDTVEKLKDEVLQETVSQRPGAKYQQNSLSTR

SEQ ID NO: 967137 - protein, 69 aa, Homo sapiens
LHRCRALRKSLSECGLPWSSRRNGLEILIQGHVQAIAEVETYADVLTHAFTQKANLNKHQHNQHQHEFP

SEQ ID NO: 967138 - protein, 74 aa, Homo sapiens
HSWSQIDACIRIVERDCSAEAAALKPAAEPDERAAALWNRATWCSAPSTSTNSLSTSTNSLSTSTNSSTSTNSL

SEQ ID NO: 967139 - protein, 121 aa, Homo sapiens
MHPCNDSSESGFSLHRECNNMEIHSGHGQTKTSDYQLVSGNAARRTRSHVHAQMAENAEEGSGGGGREEDPPCRHQSCEQKDCLASTPWDISLAQPESIRSDLESSDAQSDDVPDITTRIT

SEQ ID NO: 967140 - protein, 122 aa, Homo sapiens
RNWRRQANIIRTLPDDPVCAHPMESILPGPKPPLSTTPGPLGSLHRSPPRTRVAASIIASSATTTIIPVVTPHVRATWIPHRGPSGLGALHWLHTFLQEKFIFSQVGLGHYPVTSSLLSSTA

SEQ ID NO: 967141 - protein, 75 aa, Homo sapiens
GYGITARSYAYLCSLMKDFSLCSITSSHSYTGQVLQYPEEDVGKISLHQIDLLSTKSFPPSMRQGHKALRENHHQ

SEQ ID NO: 967142 - protein, 86 aa, Homo sapiens
TPPLSPPPPLPQTRVPALSQTTGSKLGLKLRLQLSPKLRAPPRSLTTSHHLCVGLSTTDSSQPADRYRRYKITTRILPGILLKVDL

SEQ ID NO: 967143 - protein, 93 aa, Homo sapiens
RSEVLTMRDQKKLGLEIRYTSDATVKILITKVDHPIFENWITELHYGYQSIAECLSSHPNMPAWFEENASQSTVKVLIRLLKDLRIRIPGFEP

SEQ ID NO: 967144 - protein, 110 aa, Homo sapiens
RSTQHCISYALTERGVSLVLSQDPMHSFRDYETLVDFCALHAGLPVSTGSVRASLIPCQIYQRELAMHFSLSARRIIWKHAWEREELELANVCPEVLQALPISIILMTSP

SEQ ID NO: 967145 - protein, 80 aa, Homo sapiens
RSRDNKPLTSSFRTDNLYAPVAISEDDQNGPGGYAGSQLSHVLTEEVNKPMASTAYEAHHTDKIISRHLAKINHPGTADI

SEQ ID NO: 967146 - protein, 69 aa, Homo sapiens
MEEEEGTRSPTLEPPRGRSEAPDSLNGPLGPSEASIASNLQAMCTQMFQTKRCFRLAPTFSNLLLQPTT

SEQ ID NO: 967147 - protein, 32 aa, Homo sapiens
MCAGRVSLTCPAGEVFLKLGLMLYRNVNTEFI

SEQ ID NO: 967148 - protein, 49 aa, Homo sapiens
RACGRGESFATLAPPRLYNASRWSESQGSDAVAGVGAARGSVLRLSGPR

SEQ ID NO: 967149 - protein, 138 aa, Homo sapiens
MESETRDAVKIAAEECGLEEPTVAMAYGYLEKLCLKGKFNKQTRTLCAGACVLLAATMEVTSQKHEVKHLLDKLDKKYRLNRRELIAFEYPVSVAWNSASSSPSTQSLAPIQTGGPEFLGNAPEETAEGNYLLKQVNR

SEQ ID NO: 967150 - protein, 78 aa, Homo sapiens
ANEVTDEVQSEELIQVGNSSYTNHSLHLLVSEVSLALYYALSYSYIQWLCGHDSTDHFCNCFTGFIWGGDTYEIKSFA

SEQ ID NO: 967151 - protein, 126 aa, Homo sapiens
MWFVCSPPQKKPLKPLQKWNGRIVGTQPLYVALAQRKEERQAHLTNQYMQRMASVRAVPNPVINPYQPAPPYRLLHGSYPTDSDSVLRTILLAKLLKLKTKSSLDCSGCQTSSIPKYARCYPAGCS

SEQ ID NO: 967152 - protein, 46 aa, Homo sapiens
DRARDRTQTNTSLMADHGNREGEAGMTLTYDPTTVCYTERLLSFTI

SEQ ID NO: 967153 - protein, 80 aa, Homo sapiens
VPGTGYKDTFLLISRSVTVIKFDYQDKAHRDIMIDCNICAMDINVYTTILVSFFLKSNSSCSLEVVGNCFTFGTYFNPHI

SEQ ID NO: 967154 - protein, 87 aa, Homo sapiens
SSLEHLLFFPSLFIFYCQLFKERFTDLLVLLPFLHHFALMGSCSLRSPYHSRLRAARCLARLSCTRGGSAHAYLYREILLGVRPSSA

SEQ ID NO: 967155 - protein, 51 aa, Homo sapiens
VLYGGCVGPKGTRSSHHLLGRRSCCASGRRILVWLCNINGHGTYLVSILIL

SEQ ID NO: 967156 - protein, 68 aa, Homo sapiens
KQHRRYPSGSGTERARAHQTIVVKKGKMDNEDHQNVLMKMLDVEYKHGWWKKEKCAQVRIEQTACRRQ

SEQ ID NO: 967157 - protein, 60 aa, Homo sapiens
MVAVLGRHSRPYSYYRYLLLRPGSAEDSVALKCVFLLFLMNILNSFNKHLVGACCYPYIT

SEQ ID NO: 967158 - protein, 48 aa, Homo sapiens
AVATELLEGEHTANTHFMEYLLHTHTGKGVQSQPGPPVSTDNNADNYG

SEQ ID NO: 967159 - protein, 137 aa, Homo sapiens
MSLLELYTFEPDLLDRPYYRKDEDRGILPCGQRIPYWQRSFKYIKNNIVDTMNMILFGTTKQKQELIEEERKAARAEYEAEKKGLTMRINIPTGTNLPPVSFNSQTPNIPFNRGALSAMSNQQLEDLINQGREKVVE

SEQ ID NO: 967160 - protein, 68 aa, Homo sapiens
RPCRAYAEQYRIDARKLAHLFQLVSPLDLRGPHGRSSPKGTYQALWMTTWTSSSEYKAVGRAASNIHV

SEQ ID NO: 967161 - protein, 133 aa, Homo sapiens
YESNKKTPQAVLDVLECYDSNTVKQKCLSFTPPEKDGFPSGTAALKAQGPEAPAVLTEEEDDDEETAPPRYGPATGSYELSLHTVMSVKHLFLAPVGDSHVDGAAKSSDKQKKKTKMTDEEIMEKLKNYREHR

SEQ ID NO: 967162 - protein, 75 aa, Homo sapiens
MDLNLRKDHHQMDRFFQKDSSLTRITAKQKDQTGTKSKLVSATRTCQRNLQSTLKWIFLFENVYYQSSSEQYFMQ

SEQ ID NO: 967163 - protein, 46 aa, Homo sapiens
MENRDNTGCTGVMLLMYGYMYSNCYKYNPPDHDVVAMAQKSYRDGI

SEQ ID NO: 967164 - protein, 44 aa, Homo sapiens
RRASSSESEHSLSSTILVLLIYPPPLPQRSSHSYFPHWRTLKTI

SEQ ID NO: 967165 - protein, 41 aa, Homo sapiens
MLVVILLKCWVILIMVGCICLLGSISLCVIHQPVETWDHGS

SEQ ID NO: 967166 - protein, 106 aa, Homo sapiens
HEQTRSSADNCEGMEQGRPGSYEPVWAIGTWQDCNNTNRPRRVHDEAPEDGLKSTRLMMRVAQMHPVSFHGCALVTCVANLQGMLGHAKHLMLDVLHLMVWLLTLQ

SEQ ID NO: 967167 - protein, 62 aa, Homo sapiens
TTFHHGRVNRHQAQFNSDLCWIRRAGRIDIQMVQASQNHQCTRQCGTSTGTTQTDKGRRLAN

SEQ ID NO: 967168 - protein, 35 aa, Homo sapiens
MLLLLLLLLRRAVRYAAAAACAAAWLRVTARGSTT

SEQ ID NO: 967169 - protein, 66 aa, Homo sapiens
LRQMGYCSRVGHISGQLLSYTKCVASPDGMIHSEYTDTVDDLDMEVPSKTSSCLLRSCATFERAPY

SEQ ID NO: 967170 - protein, 220 aa, Homo sapiens
MAVLVGCSVHQGFAFVQCVNDETARAAVAGEDWGDCLARSTVLDINLVGDAKCATVVTMLVLKSFLQLEFVLRSVTERPSRCPLLSSSLTGSMTFDGLFMLGCTGTPACVPSSFLVLPGLSGPPTGLACCQGTLPRGGKGGSNQCGRGGDLQGRTGAGEVLRHEEALTHKPKGSPGKMREERKGEALREIKERTQNRKLTRRRKKETRKGEKKKETKTEQ

SEQ ID NO: 967171 - protein, 198 aa, Homo sapiens
MRHSPSVSGRYGATLLFLSGKKTIAQKEGREEKLERDDERRRIEGTAICPRQYPAPELRRTTASVSCHGRRVYVTPGRDRPGIPVTTGTVCLGSADSLLFCFVDSDDIAFIPCRRMMRPNLEIGEHIGKMSHVVNRNQLEAKLAVVLYDDGVVHVGLLLTDKYAMSGGHSKGKDSVKVVTGLSCDPEFDEQLPQNSYF

SEQ ID NO: 967172 - protein, 190 aa, Homo sapiens
MQYGRHPHDCCCGGEIKALPGLRTHLSIVGVAEAGGDPAREASRASDMSTVTFQEVPGRQASLQLASTLSKVLCSHLKQGLNLPKIPVKGSHARSPLHSSSPEGHSLLLWLASTGSTAWTDEALSHSTGPISESTNTPQTWMVTGTRQIPKHIRHTQMQPVRYQWGGSNQAMNYFPNMPLLTCIQRLRDT

SEQ ID NO: 967173 - protein, 105 aa, Homo sapiens
TAYSSFSNGGRFSCHKAPTSQVDPRLLCSRCHWGMKKTPAAAGPDVFTAEFYQRYKEEPVLFLLKLFQTIEKKGLLPNAFYEASIILIPKPGRDTKKKKTSSQCP

SEQ ID NO: 967174 - protein, 94 aa, Homo sapiens
MDHISYVRRTPHTHTPPPPTHPHPATTVRAPSTSPPTGWLWTTPVYPKHQEQTIYSQARPTHSPQRAPILVEPTGTAIYVATYIHERARTCTNG

SEQ ID NO: 967175 - protein, 74 aa, Homo sapiens
VSGGGYSFRGVKGSVDQSQVFRVFHSGIYKRFMKTCARRYDYRITYILPPEGRFIPNVEYAMEAIVDAGILLGN

SEQ ID NO: 967176 - protein, 132 aa, Homo sapiens
KLGSVAQESRQSTDYQNNYPDPCTNDNMISQHEHAHTTYNRHKRTKIKREQEQTDPQRPRSTGTKADKNKEKTEHTHTLGKTKPRDEIHNKYTLTAKKEHKKHNRKNKRKIKRAKKKENKQGVTTKNNTKDK

SEQ ID NO: 967177 - protein, 69 aa, Homo sapiens
AAAVGPVCSERRLPDNVSAISLGTFCHCSPQSLLLWKNELDKYIVVPGSSQAKLIQHQFLMPCTCCHPE

SEQ ID NO: 967178 - protein, 53 aa, Homo sapiens
MGTDGTREATVPKGRATTGVDKITSMYQERELGKEGPIKDKGLTQRKECNREQ

SEQ ID NO: 967179 - protein, 77 aa, Homo sapiens
VTRIRCSNPGENMRTFDLISSETRVMFDEMKRNTLAENLQLLVDLDRWSTTVFRLHYDRVYYVSEKIMKLADNISGD

SEQ ID NO: 967180 - protein, 294 aa, Homo sapiens
GAMDLPHRASIWLRNRVTDRYFRIQEVLKHASALPGQGKIACYRLAAQNLIRAFVKLHQSPIPERTKNMRTLWHQLELQLLAQATWHCQLSSATKGNPVKRHFQARLNTALPIGPAVSSAQGWLPKDPEQGDRYPGPTTQRLHDPASLHAYHSTPGGAQPGQSYTDLAIYQPQDYPNPCLALAQHETHHTDNARLPSPECGHDTTPAIPPRADAVTHAGLMTELQKANNNNKTKQTPSTAPRPPFEQRSNKPTTESNAANTATTHGVPAAPKNTCKDNAVHATRKKPHGPPQTH

SEQ ID NO: 967181 - protein, 239 aa, Homo sapiens
MTRRHPSATLRFHLLRPSRTLHRRRVLFPSFRAPTAHSTPSVYTTLVALFRLPWSVGGPPCFLLALRPLCPDNPYLRKAHLLNAYATWCAAFSPHALFHTSEPRHALLCCSANNDSLLAPLTSVDGLGAIARLGVTLEYLLHISATWVPYAMCSRTLVTQWATSQRTLYSSLALNGVCNPFGTRALSSPWHLHNAWSIGLWLGWRPVPCVSTPYNLLPPPGIIDYLIPPLHLSHVALAL

SEQ ID NO: 967182 - protein, 66 aa, Homo sapiens
MSARGGGRGMDSGSGHLLDINSTPEKLNFTIGRIIRTLNVNSISITKKVDTYMMTVKQFRDAKLVR

SEQ ID NO: 967183 - protein, 123 aa, Homo sapiens
  misc_feature (51)..(52): Xaa can be any naturally occurring amino acid
RFGFCLWWGACSRSSHKRPQDVGTSFPCASSFTQLATPPILAPLPELPSPXXLGVPCGLWSFKRQGLTVSPRLEYSGVIIGSLPHSKLHRKISKRRISSLASASRVARITGMHHHAWLLCIFL

SEQ ID NO: 967184 - protein, 85 aa, Homo sapiens
RPACMRAFFVGNTCDTPTSAKMGDASVMHEVGPCRKINSDIVFSLHYGLNAWLECENLIGLHDKGDFGGVHGFDGRIVVGQPVLI

SEQ ID NO: 967185 - protein, 296 aa, Homo sapiens
MPEHVSAIPWGIAGTAGPQGLLHVERSELVDQEYDIVVLWVPRCEVSHDLSPANSFPRCPWWSMACQASNATLIVKGVAAVRPYGRSIMDLRPMYELLRGNSYSVLSFYAFGMVTFCVCYRRIVRLCSGQKTDGLHDVNLVEDVAVLRGICQLWGHARAGSNDIQGRNGGYGGHMTHGRSVSRTSTKQVSRRQRCAREKVLGCTKRSLHKGRKESSALGVKELPVGRRGRKLVGDWGCCAPWKRQEGHGFKKEVTVRAQKEQIRVAFRKPGTLIQVPGTGTATGGNRAQQQGNTKT

SEQ ID NO: 967186 - protein, 69 aa, Homo sapiens
ALYAVFWLHCMGVCRGSLAAHRSCVRPLGDMYEHLDELKQRDYKNPDRTRCNTLESRICSSSQVMEWLQ

SEQ ID NO: 967187 - protein, 76 aa, Homo sapiens
LPDVGTLWGRVLRPALSLLAFPTLGPRMRASSRGAWAGGCRPRLRGEALYLRLYPYEGYAVGLLRNYTAYSRWRTR

SEQ ID NO: 967188 - protein, 289 aa, Homo sapiens
MPTVMSPEPRERGREVRFRQRFVRRKHALVSRLMLHVCSTCNFPQSLLKYVLNKLSWVSYVAKQVMMLGVSHPQDPCLKEFRITKPHGYEGSDKDSVLHRLPAGSAEGLIKTSLDRGTRKVLYRLRRVRCRAMRANLEQACYRHAAGYPSRCGEQKDLSYRGGLPEGVPYSFSGVIRMVSWRVSPTEFLSGTTKRGHQNYIPKKTVKGTSQGMAISAMCVEPQLGWLATPRKRRGRKFRWPPGTRRSQRTHGRRGKLSQLGLTKVLTPFNKVDFPKVDTKGASRTAIRE

SEQ ID NO: 967189 - protein, 156 aa, Homo sapiens
MYILIEAEGASNCGVKISDAQAGETFTGDTTKSCGTEKIREKTIAGQWDTQAVANKGGVKYTQVTVQTKDAPSPTRPEGDPNEGLQRDVRVRHNRLGHWRESDGAQVGTTGVTAQGEQHAAPRKATGEQSYNDSKQGACRVARTNDSNNREETNKD

SEQ ID NO: 967190 - protein, 315 aa, Homo sapiens
LGGKKDFGSLWPRLDCNDVISAHGNLHLGGLSDSSCLSRGQPVAKPLLKIQKKKKNYPGGWGGGAGLPPRSHVGRAGGEEISCGTPRRAKGGGGNPKTSCAVWFASIPGGCTGEPKNPRFLQKQTTKTTTEESLTVETSGRNSGGSPAVCVLQRARGVLRTCAGADGVFSPPRVGPPKVGGGNDGGGEPRPSLGGTKRHHRFSLKNTVVLVSLCCGASLLRAQGGPGFERILLRVLAPSVVGRPEFCLFFQFPRFSPPDVFVFSGVVPPSFPRRLGRTEGGCSGTTSVFSAYTSWGRGAGSGGSPPSNTVGKFVR

SEQ ID NO: 967191 - protein, 126 aa, Homo sapiens
MCGGHPRLSSPQGQLSVCVWPYVAQPPREVSNWGGSVPVVRGGWVSVVPVVSPGGVAREKPEVLDAGGCVSSRRGAWHPSGVVEVLSRWGVIRRQAEVRFIRGDLTGGRGRKNVEKAKEGKCVSAT

SEQ ID NO: 967192 - protein, 156 aa, Homo sapiens
MALYYTPASYTHRRERRARRQDTRERNITRRVKQLRGEGQREWAGGEAPEEYGGPCGGSPTRGGDSREAKQIHLLAPIKKKYNRVNTEDRIDNPARNDIEKFRTPPLWRERGRAPQPHDQTPLFGGAPRQVLHSSHHNSVGHYSRGGQPSSGEDTL

SEQ ID NO: 967193 - protein, 272 aa, Homo sapiens
MNHKQQEQQETTRGTQDKAHTNTDRTRENPTSSTTNQPRTNSRPNPNAELRREPRPKKNHIDNKTNRKNQHSQQSENSKTTNNRRHRGTTTMTTEQTDKRNRDTNKTKDYQTKRHDKHRNKNSPHTRTTHPAKKRSDQTHKNNNQENNKRTQRERHNKEQGRHRTETENKDNTQQTKAKRTNNDIKPTNKTNTTHSTEQKRDEGKSKTDTSEDRYKQVERKHQIAEKDVKAEQQANNTKQADKRRKRHHINRPQKQDETQNRDTLNKENNPT

SEQ ID NO: 967194 - protein, 159 aa, Homo sapiens
  misc_feature (104)..(104): Xaa can be any naturally occurring amino acid
  misc_feature (106)..(106): Xaa can be any naturally occurring amino acid
  misc_feature (128)..(128): Xaa can be any naturally occurring amino acid
  misc_feature (152)..(152): Xaa can be any naturally occurring amino acid
AHRAGLAKVVPPKGVEATASYDDIDDLVIPAPIQQLSDGVSLASLHQYNIQKKAMTVRRVPARICHIDEYRTGTPRYSEFEELRAEITGHTEVCDIQSPPILLXGXDVNGTLYEKHVDEWNIAPAENXILDLVEKERGSPLRAVKQPPITLXPFGHVED

SEQ ID NO: 967195 - protein, 216 aa, Homo sapiens
LPVQLLGGARGALCGPGMGNLRWLPAECFAQWHPGAGGLLGVDGAWGLSACGARGGKDEDKECDCPSPSLGRLVKDMKINVPVEEIYLFSLPINGIRDHWFLPEGPLSQDEVLKIMPCARSIPCARPAHQGSQAILLLSGGLQLVPRQVWRVKVRPTEEWPTVYPVVANTFLVPRLSICHPCGREQLEVEPMIRRRHNTCPIAHVLTCWRCLTLVT

SEQ ID NO: 967196 - protein, 73 aa, Homo sapiens
  misc_feature (73)..(73): Xaa can be any naturally occurring amino acid
KQEEVVADGIFKAVDLNELILLGSWREDGYVWELRCELIPSTRDRIHYLRPPEHQKVFLVLKKGPEGIDVATX

SEQ ID NO: 967197 - protein, 106 aa, Homo sapiens
MSAWLPGCLQPATQCSLRLRPFHLAAGRNEGCVISGRKLAQQIKQEVRQEVERVGGLIARTNGHTVSVILVGENPAEVTSIMSSNKDQGMLQLWESTVRQLMKPAF

SEQ ID NO: 967198 - protein, 288 aa, Homo sapiens
QRAGVTENGWQLAASRLCPVLCWWSDGEVSEWCAVPGACASCSLQEFVLCWLLTLVEPALMSSSPLSNETVCCVLGLIQMPGSNLLPCPSPVFVLNVPSCANQTEWPMNWQLKQTYDEWPLLPVQLVCCWAMSAMNACSRHPCVLVSVPAWALGCGRSANEHHPLVTVNGCYPYMTSGTAQWADLSSQFYLREDDIGPTGPRYHSPASLSSTAYVPVTPTLGPLAEDFLTGNTAGRAPQHPPGGTRCQVRSPPAAQRCPPSPPWSNTRGPHGPHTRPSHRNHIPNSRA

SEQ ID NO: 967199 - protein, 83 aa, Homo sapiens
MTNVGSLIQRNIVQQAFLAQWTIWVCRQLDTRAEETIPLSGYPTRRHATSCADTGCFHHGSSSLNFAMQALGFIHYWGTPNAP

SEQ ID NO: 967200 - protein, 198 aa, Homo sapiens
MQRRPIDSPLHRHVISPYYGPLPEQQPGYPFKRMSRPNHKRLSSHVFNPPPSAKVKPPSPIQAYTYPNRRPSQVHRAYPPRGAAPVTPAAAKSQRTPHEQIAPPERYPSFRADEDTRRQVTHATLTTAPLTSPALKDRTQQRPPHSPRKKLIQARDNEPLPTRYTTGESTRQTPPRTHNPPPIPHTRNATPSLTPARH

SEQ ID NO: 967201 - protein, 505 aa, Homo sapiens
  misc_feature (274)..(274): Xaa can be any naturally occurring amino acid
MGRNRRRIQLGRWSSVMALTKRHGIQGISLRSTDDKSWLLPHALRTMTYDTSRDYVLPDSGLTQEPGCPTDNRSREHRCHTTRHITVEDPYRARAHPQDRIQNTSCYALLTDTSTQALSPRLLRTDMRDKQAKVQMSEASSYRHEEHHEKSDRRTGQNRPTTTKQHTKQRRIRRPHKTTRRPTQSDPRKTHRHPPHTQENNTQTNPRTTKPNQKHNTTAPSHSHTSTQTDQPTSAAPPAPYPQQNKQTERDIDRPHNNEPRGHTQASNNTRQTXRTQTKELDQTQPTNSNTDTQTPDHQPRTYPRCYQERKKETITNKTSRWKHTTHRHNPRRTRTNEQADQMESSQDKTYERHSHTITQETTNTRDSHSHTTSSMSPSTPHHTTHPTTAVHQNTTTSRKQKKPRIPTNNYRSHNATTKPNTHTMQLPTGKDKQHTKNRQIEQHTPQRQTQPSTTTNVTSDKTHRPDQQHSQLCDQSYTDQNHHHDRQQDNTQTHHDMTTEHQKN

SEQ ID NO: 967202 - protein, 131 aa, Homo sapiens
MCVIEGKPKSGAQHVWSMCLDSCEKYIDVTTNMPTLHMENSMKHACIGQRRSSRCNVTNEETHLCGQDFCDATRPPSLCDRGSSCQPMSTAQMSAYRGHRSCHRILSRIRNLHYVSSGLKSGAALLSQLGP

SEQ ID NO: 967203 - protein, 151 aa, Homo sapiens
RRPRVRISRCELISFPTTGGPTRSQLCLSRLSAGLHKPAIPNPGCTWKLPQELLENVPCEPSPCTEPWWVSGGGAQAVGVYLKLPGAVRPRLRGTAPNCPGNSDCTRHSPRPSSLLPLGRLASSVGENPGGERQPYRAPLLGGLQVGQGEV

SEQ ID NO: 967204 - protein, 99 aa, Homo sapiens
MVHCVLCLLLLLLHGPGCAWVGSGECCNRACPVRGVTDEASIVPVLTNTDQRPRTNVEWGCWNWTASGARATGDDELQKMFGIWCRRLSAACRAVEALT

SEQ ID NO: 967205 - protein, 217 aa, Homo sapiens
  misc_feature (159)..(159): Xaa can be any naturally occurring amino acid
MEQERTGFTCVGQRWSRSPDPCDSHPASRPPRVLGLQPCVLRPRPSRRPLMVGGRSQEMMQDVTQGRLSPESYGADSLALAVVLSLGLLTVPTDQSLILETFFRRSEKRKGHTLDVRRRPFVSSSFSLPTLNSFESRPASWVSMRTSVHYIPKQRELSXVRRHCRARQTQSQVAIFQELPFVSDILCRWSFVPAFLWTVLPRTSARACGLAGSWVAC

SEQ ID NO: 967206 - protein, 130 aa, Homo sapiens
PAEEYETPESPGPQSKPSPASQGGEMYPGMPSRAGRSKTPGSRGVKLLRRAAELIPAMPDGTGVRNYGLKQRGPILGGRTRAALRPRQRGARQKEEARCAQAGTATQRRCESQRQDARCLKRQREGWLRR

SEQ ID NO: 967207 - protein, 184 aa, Homo sapiens
MASLALCECRRWRGIQHLGRPGPHVTPPLGPMPNSDIDLSNLERLEKYLELQTWYRRRSRACAGAVPQHWWLDLPESISGRRQDPKEKIDIGLLHPNVSLTQQLLERKQAIQELRANVDRGAGLTDSAQPVSRLDADAGTSGRGPGDTYTQDSGLALSITSDFITEEACIHWFATLLVPPRIPP

SEQ ID NO: 967208 - protein, 403 aa, Homo sapiens
MSFWQQRHIHGTQHFKKVQQLMEPHNTTTTSSHHVLAKKPNTKTLVSSSHHTVLHRHACNRHSPQHRLTRVNIHRKRTKQHANAPVNRQNTCAKHILALRLLPTRGHIIIIYEAMLKEEGTKNSGSIASNCNSARYRGEKKTKKCIWQGLAHGKQESVSSESTEKPTVTNAHTKHATKICGDGPCTGNGPPHTVTQHDTCKTMVHPTQQEQYGPPGTNPKEQRNHPQSPHDNDQHRQRTAQSTRDITRLRNTTEENIMTGKQQNNTKTYGGNIPAQAITHSGTQGKKPQKQNGFQGTTHHHQAITQPTGRNKREQPSNSGKQVKPYRHTGTTQQTKHEKHHERTTIDKQNPQTGKKRANENKTNNRRNGNNRATRTNRVTNRETTDNHTKSTENTKRQGKPRN

SEQ ID NO: 967209 - protein, 303 aa, Homo sapiens
MTARRHWLHRAIQTLHMTSCSPEDAPGVSDKHAHKTGVRPHPPWAGQQEVIAHHTCHPDFLSLLPTHPESSSRMNKRPQPPRTHDLRTPHHERMLLLHTKPTPLRPGGPASPRRATARAPPYCPKHLPDSQQRCTDTTPTITNEHPLTAPPPPSTHAANSTTGHPHSPPTTSTSNWHTSHPHTHHQAATPTTTPTAHTPPYPHTENIPPAQKTRTQPPPKPHTPPHNQKHTIDPTGTPPTHSAAKTRPNPPPHDQKQNEEEKPDTAHERQNTRQKQQKPTAGQHTTDDRETHNNAQTPDHTPQ

SEQ ID NO: 967210 - protein, 384 aa, Homo sapiens
LGPELDICAHTRCRDHNYESDTLLHSSQVLSGLLESPVTQDIICDVGMPVMHRTVRYNCTSDIPQQEDPAHSDPRWPWPTEGNYRELLLASPRWLEELAHHRGSTYCLGLIQDLTKQRNRYPSADAVLADMGHLHREVRSVRSSGTPTARTSTMAPGLALADHHQRLGQATHVLRTQPTTKRLDLVPTGHQQERRDTLWLATRNAVAHGRTACTTDGSCHDSAMNRNRLGSTDPRPLWHDRATPTHTAHTPPHTATTPPRAQIQTTSIIQTHDPTPDNTRHSPTPATHQHGSNRSVSPKEQKQEPRTRHQTDRHTRHQTGQCHHNPDTLKTDALPARHAHSLTDEDAPTTTTRTKHTNIAQHTHNHTRPQPATTPTRKNTPTAQ

SEQ ID NO: 967211 - protein, 125 aa, Homo sapiens
  misc_feature (62)..(62): Xaa can be any naturally occurring amino acid
  misc_feature (95)..(95): Xaa can be any naturally occurring amino acid
RPTQKTTAGSGAHRSRSRDGPGRGHPTRFVHSRRVVTRDWKLDKSHHGCHASDQCRWLSCHXRTRRACGRRGMLGMHVMRSSNCTGRTRTDQSGXRYGESTSAWCTRKRVAVSASGVNPNRRDAF

SEQ ID NO: 967212 - protein, 288 aa, Homo sapiens
MATLWTVHQREFLALYDRLYAAEQESLKRSKELNLVLDEIKRVVSERLALERETAIAPGAANRGPPIEAVERLTPARADTCPPSSISCHTWWPRRGSLQPAVRVGQGRTGSVVVMGIPSVRREVLSYLTDNLHSLILRAETRQGRWGRSSVIVVLIAETDSAVALRAVDREIKALFPTEINSGPGGHLTSPSCTLTFRIESRFGTHDESQGGETQEKNLDVLRPSMIVRSTCQRHYLTCSGGIAIRGKDEYESAHEELALGAPSKTGWNRQSPEGLREKQGWLTRTKS

SEQ ID NO: 967213 - protein, 202 aa, Homo sapiens
YQLEAELPEKYSQNIYIQNRNIQTDNNKKYWMFGQSKQESKRAIPGRADAGGKEQPKGVEWLWHSIVIRMYLSLIAKSVRNYTQEASLGALQNLTAGSGPMPTSVAQTVVQKDKWPAGTRKMLHVGDPSVHKDSHLAAEESVPESFSARTDNWPQETLPGFRFPIHSLTESRVLTFSLKLQPLPVTPLHNIIHNSYQNARDF

SEQ ID NO: 967214 - protein, 321 aa, Homo sapiens
MSYDIYVYMIDNLSTRYCTPLTKVDKSATLLAMTTVSANHYLLLQYCCLILPHAIIPSTTNRTASSYQPLRHKQTPHSPTHRPEPPQNNNHLTDGRHHNDTTAHHHSIHNRTNRSDSPQQRQDTTTHTTPTEYPSPPTPIPPPHPSSTVLHPPPPDSAHYPPPNTPSFPPTSAPAAPPPPAHPTSPPPRRRPVNDTTPRAGTSITRTHPPATVTPHARDRTYANLLITCYCPDHQTQTLAAHTRAAPKNRTQHARTSNPATRSATNHLGAADTQPKATHGHRITIMNHTIADIKQTNMQPHKHTTRRPSTTYRREPHTETR

SEQ ID NO: 967215 - protein, 117 aa, Homo sapiens
EPYLKSGVVRTLLLLVRDVLHVVPYKVYSIYSTLAVKLIRLHVLTRAIWCSGVAIARLDHTHGVDMELHPRHGECLSVYWWIVVGASLVTVSSETTIYDIFDAFYDIDFLKICSSSD

SEQ ID NO: 967216 - protein, 96 aa, Homo sapiens
RRTAVLFRRQYLLVLWRRMCGFISCYPCTSKKQVSNVYYLRNRHSEDIDMPSGLKTWNQWIERRSSDDSVELETLEWVYCIVDRGMDRVLRRYATS

SEQ ID NO: 967217 - protein, 232 aa, Homo sapiens
MHNFGHAEFDCHFLDEGFTAKDILDQKIILQSLLLMITDAFYVADPGRPFYHDPPLRWLKALPRVTPFYAVTCTYTHTPREDPCCYRDQALTVLARLNIQLVPGVWGVPSQQAGIHLTAHIPCYASVFLKIKYLLVTSMQFHACVTLLDSDRCVDDSWPEPHPTAQLGVADCHLMLPGQPRLTCIVGPSDPRLLGRATQQYVLRADSSSASLRLCALRVSRARPIRRARMSP

SEQ ID NO: 967218 - protein, 228 aa, Homo sapiens
MPANPSYSRQAAAGYTHLHLRRAAVHRANTRPTALHPAPPHPHPASPKPPTPPTHPPTTPPHTLLLTAPTSALPLSTLITPPPLSQPPHPTHTPQPPTLPSPPASLPLSPPLPPLSSLLPPSRPPRPPPPAPPPHPPPPPLSLPHHILSPPTPTPTPTPTPPHSPSHPPPPPLTTNTPHSPTTPLHHPLLDTTPNTTHQIYTHTPQNPPTSQPIHPPPPPPISHPHKP

SEQ ID NO: 967219 - protein, 471 aa, Homo sapiens
IEEVKSTTKTQRIASHRPRAKGWGWTRAAWPTQAASGHCGARRHARDGTVSVNSELNSKAKKHGWKSCLSKRRDLLATRPSTATGIWLICYRRHRDSNRYPLLAQSEERVTRTPQADDSTNDHESADWTTTIRQRTNSGTKRHINKDDPQGHALTCTGRQISTARIKFTLSSNTKHIPHWRTGLLRQNTRNEDPLLPTLSAHHKTPRPNAGDKPTKTTSAHNHGNRPGRHPTGHTAISARTTRNAAGLRNTSHGEDREPATKTPAPKQGHKTIAWEAAPVQETGKATPSGTNRDGATVTPDTRDHHTSAQIYATPTAHQAAMNTGKDSYGIATPQLATNQQGRKMICKKDTHTRQHKAQRVHNPKREHECTPISTSMTTLEGNMDRPLQRWRTAGHHRRGEQEHKTAQTPEESSQMSTEVCTSIQSRKARTKTQHQRITRPPNGHAEANTRTAGTNHQLIGVGRERHRITM

SEQ ID NO: 967220 - protein, 350 aa, Homo sapiens
RTHLEEKPHVCQFCMPVASEMKGSLDADTVQTTTHVRRMPFKCYKCGLWLRRARHAEPGTCCTKGRLPACESAQAVARCLRTAPRQSSTSSREDPATTVLVEFSSVVADTQEYIIEATAETIAADQMRPTEIIAGHPDRGGTSHIMKCGDSRSVHQAETPAHQYHRCTNVTMDRGDGARSPQMAGMPDRHPSPIRPTPRQPDKSSVATLDAWPRPSAQGTCCLAAQGRYKVPNEAGPTVTMMSIQSALEHPAACQRHWHIDVPAGPTIDCCITVICIDIKATRENLGQGKDKSTIGASRRRPELLPRLRPGDTRNIQRGICRARSKETVTTDIIAALNRSNYNKAINNTR

SEQ ID NO: 967221 - protein, 344 aa, Homo sapiens
MDEIMLSVVNAYLANPSPERPCSSSSPPCQDLPDDSPRQPAPGTGRAPGHSLAAWEQLHGLSLPRWSRLPLLTCTPGPRTAHDDLTGTHGPIMALPRTTAHPTPNGLPTGVLATLHYVRLFTLISLQHTSHPTTSHSPHSPPHTPHTTPPPLPPSSTFPPPNAIPTLISVAPERHISNNMSPPYTRSLNHTTRPGPHTTLPPHHPHTTTHTPPNTIPPPYSPTHHPTPPQRTPLPNLTPPPTHLHTTLRPPPPPSTHTATSPPPSSPGVTHPPPANLHQNHHLHQPPTQSRPSNHSNTHHSPPPSHPPPTPPPPPLPTPPTPPPIHHTTPPPTNPPQTPPPHPP

SEQ ID NO: 967222 - protein, 152 aa, Homo sapiens
MAYRGPASGISEEDMMVTVFILYTLQTVVIHSLSLSAPRDYSGYQRDETISRKFQARLWAKWSHGEPHEVVEEPPRANQRDAANESLRQVTQSEFIKDDCLSRHVTQWPVYRNYVTQKEFIHHIVFSLFRANLYGKGDCFRPSNALDYNRHY

SEQ ID NO: 967223 - protein, 84 aa, Homo sapiens
GGGTTASADPLRGSLPRSLGRVRGKRYTERSWYALCLRHYPAGRSVSGGNEEPGGDITAFPDREEQYGTCVLYRVTEDNQSELS

SEQ ID NO: 967224 - protein, 323 aa, Homo sapiens
MPGAVKRTISRYNHSHIDTRQRWIAHEPNGVNQNHEQEWAYKTHIRKRQSRSATATTQTQEHTGTDTMTPTQHSERAHEGLTCIKHDRPPSNSRRRYKSQAQHKWTNRQHKREPVTHCGPHSATHASSNMTTPMEPPHTHDEPLNKTKYNIHQHTTHEKYRTEAPQTSVDDEVDEISDQKNDNNNRTTDDRKVNDTEHNIIQKQYNEHIRTQPTIPQQRSRLPQRNRIDVDIRNSTELNTNWHKAVTYGRANRTHNENSELPTAPRNGRSQRSRTKRELLQLTHHVSAHNVTDYDTRTEGSTAVNAQRTTQTAHTRAPQETQS

SEQ ID NO: 967225 - protein, 306 aa, Homo sapiens
SLIDLPTPSNISAMMKLRTHSLCACHDPPQITHRTYSLAHATTHTDAINQPLFHHIAPASTRSTYNLMDRHSLTTYHITDPSGHAIQVVSIYSWTIYTLTHIQEPARPYTLSTEHSNIYYLSYPAKTTCHTSTFRAPFNFPSTVAHHDQHAFTLPSNKLGPQCTTYTRTHINIEIPHISPTSTSWQRKTTPQNHFNFPDTYYHIENEGELTTQLTQVQFNHTILHANHNQPNEQNHHFNIFLHTHGVPTQKNIFPLARKTFTQATTPFNVDRTRTTSTTRVRQRHPPAFYNGAYYEFPHQHNALCG

SEQ ID NO: 967226 - protein, 147 aa, Homo sapiens
GYKAPSTYCTPYLYVKKRMSQVNHIWSKKKKKNKKTKKRGEAAPNKISPPRRVTRDQQLRTHDHIWATKGRPHTRTRRTHTHTTDTVDPQKPTTDRETEKTTAANTTSPTTRERRTPNTHNTANARENNTTLGDHQQTTTTTKRGEN

SEQ ID NO: 967227 - protein, 265 aa, Homo sapiens
MGVPEITLTNLRKTPQSTYRRAHIGGNLGHTWGPSARRKEVSLFVQRHRSHFEAHTSSLTGAVFISKRRFLICCWDNLRRAICHDHSEGKKKHQSAGANHSRRRTPQKFGPNRARHGAGYTQRIQTSTKKRRKRPTLRATARATISRTRGRSDKTNGRSSWRQTAPPLGGNDAQKKWGQEPTTNRRTSQPSRQRKITPNRYRKQPTMNNQQRAADTDHRQTINESTAWPRKTSSGPQNGRAVHRQHTTPGRAEASTPHATTHGTH

SEQ ID NO: 967228 - protein, 117 aa, Homo sapiens
MTRLMALNRLVHTRGTTLQRLWTTALNELSYRTHLHQFLTTCSNSQPAGYCASQAQAPLANLGIPTELTGKMDLGVSSPFNNLATLDNFWVRSPKGCYLDTSHRWSPPFQYRALVDD

SEQ ID NO: 967229 - protein, 248 aa, Homo sapiens
AKDKVVQESTAHEVYAKEALASSNTKQTNSAQQAQHNSTQSIQCKQHVVLWHFAQQLHKQQQQQISINQHSSQQFHSLMCTASFVIMAQHMSIPAGISHPCSVAAHIGIASSMHMHQATTSQHKHSCKHAHTSQQPCIDRSSMHSSIGLSTASSKHRVDGEHHIRANTAWPSTQQQNHAHIHAQKHATHGSHHQHPINSQQPQHVLYNSPKAFQHGMPSSCMGPGSALVRKSARDIMEASIAKKVVIY

SEQ ID NO: 967230 - protein, 154 aa, Homo sapiens
MYHNTCQFRPLQTYTGGPKAPPGPEDTHPARATHRTATHPTKKRKNQDPRQNRTREPYNPQSTTSTSEPAEMAQAGNQERPAASMQQGNRTEAEDEKRAERERQRKEQTTRQRQHYKRRQRRLTRATEKRPAQQHKTQRNEKRESKTRDRETRR

SEQ ID NO: 967231 - protein, 81 aa, Homo sapiens
MMTAARHLGPAGRSRHFNHERADNMIVLHVDRGPQIEFDAERNDPGLTDRHAPSPQLENGVDHTGMGRYGERLRHSPAQRT

SEQ ID NO: 967232 - protein, 396 aa, Homo sapiens
MAPSRKFFVGGNWKMNWAECRRLVVELIWHSELRPTVPGRHRRWFVLPLLPISTSPVQKLDPKIAVCCAELLQSDYMGLLLEEISPVHDQRLRSHVGGPGALQQSKAMSSGAVQMQLIGQQSGPCSGRGTRSNRLHLGAKLDERDGWHTLLKVVFEQTKVIADNVKELEHGSSWPMSLAWAIGYWHDCTQPKRAQDSTPKKHTRHGSQSQHVSDAGASEHPRNPIYCARSVDLGSHNLAGEMNCTGMIDGLGYPMVDMVSYTYSHRITSNTITAKQRATINDPVHYSGDEQRQNARPENPDISQHTTICYTKGDARQRPRERNTQTAEHKNGKTQPLNVGQHTGSRPHSQIGGQTAHGAHLSNEKAVTSTPDTPRDTTQPTQRRPTRDESDEIEQQ

SEQ ID NO: 967233 - protein, 353 aa, Homo sapiens
SYEMMMQCVSQHVCDHPTAMSIINAAAMVPVMCGMVQAKSQCVLLAAPIMGKHLQQQAQGCLGILLLDESLTSWDDVVYLVRCCNLLAHFINAYLVDDSFSQALCILELIPSSVDGACSEAMLTYPYPAELGDLHGCAPHLRAASWSSPLTPQCSNPGFTDWKYLSVQWPALPRLQPCLIQPGCPSGSCFALEYPDIISTNTVSTLATVVCKLNKLGATLPARIQTQQTHQLVLQARAGLTVPILAMVSCTGCEELTGGLRPHPTSAVANPRHTIRARSGQEDERLGKDPRQSIGKIRGEPGHRGTKEPKDRAPGGPQDGSRTSEHWGRNRTPGTPPRQPAAHSGEKVKHSND

SEQ ID NO: 967234 - protein, 207 aa, Homo sapiens
MLNISATKSSLPHKCASSNTSHPINYSFDPHNTWQPARYDLPVACLPFSPCACPPIHVPSSLSSAVASPAYRHALSASLGLSADTPRPLPFPAAAPSHYTSYPRYLAVGSRNAVTSRLEPELLCGSPISVRLPVPRHISSRPIVSESNFVEQHSMTTGTTLGVRVPNTRDFRLATYTATLVDATPCAEPHNAFQLLAKRNAHAPINA

SEQ ID NO: 967235 - protein, 420 aa, Homo sapiens
LDSQHSHLTLPYYKMSGLSHGCKFWPATDWAPVSRHGITSNITQQQAFTSFTFNPFHFHATHLACKQFKCKHIKPDKQSVSSMIFIVAAANSKCPNILCQSLLMHSTSFNPINVPCSSSHRHSCDHSLAFINQHPSVHHVHPQASQRLLHNMGSILHHATANAQCTHSPFQQHAQLDHVGLPFLATFGMFAFQPAATGHSIVPNQSIATPLAQETPAWHCLWLQYLGLQKNNEHWTLTEADSFFKVLRAEDEDTQPSAHGHTYEEAPDSERKISQMVVTPGPLNKTHITRNSGEWIKRTDTLTQTMPTTRSTPINARRTYRPYRAHGITLAKYRTPQTEQTTKDAATNRNKMRATHSNPQTERGREKPRTNQHNAKSKSASDTAQAASANTPQATTHDHTTHPRRPTCTAKPPELRGARE

SEQ ID NO: 967236 - protein, 377 aa, Homo sapiens
  misc_feature (140)..(140): Xaa can be any naturally occurring amino acid
  misc_feature (238)..(238): Xaa can be any naturally occurring amino acid
YYKWPARCRPLRPAMLVCRAAACSVAPSVIGRSADACRSYFKWSDVWLGREMGEDFPAGSESKHKVREFVVKIPCPQVVLGKDYLLDARMGDRDKRFAGQCLGMATGFVIASLFRLSRVRSLVFECQAHRSHACRWVALXTVSPGVNIPSVGPVNHSVNLMRAGETYWHVHAWVVPFHIMLLAHTEQHRNQLLHGQGRASKITTNMRIVSWVPLDQSLLGPHCATQEEEGIHESTSCXKAKTEMGGTRKSGSLGLPNNRGNRVLGFVTKRALSTGPFLAQTNFMVYPSTYGTFCLLVAHGTTTNPKFVSGSPPRHFWHPKTSVPRVCRHVHRGPFPFWRHPETQCWVGTFCPCVQYPNRNASQAAGITLDGSSKEGR

SEQ ID NO: 967237 - protein, 231 aa, Homo sapiens
  misc_feature (210)..(210): Xaa can be any naturally occurring amino acid
MARKKVRPRLIAELARRVRALREQTEQAARSQIYAVDYETLTRPFSGRRYAGPGPGPNVRRESRLLQLARPPPVLRPWAACVTRKVLGWWQQRGAGATWGASRGLRPEYTGRRTVDHGKGLGQSDLHKGRLRARAREIEHVIGTHELDGWCPSTEEEAFHRVTTPGRRERTSCGLQKSRNTDFILRGPWIYSARTRREKNWEDNKGTHEXAPWPECVRRSDYGMGTHGGLP

SEQ ID NO: 967238 - protein, 148 aa, Homo sapiens
RQTAGTSAALVRKGTARTKKTVVHRTAHSSMHTKTFSFSINSTALSCWSQQSSSRSLHSRLTSCYTNTQGTPVIHLYKQHPTTLHRPIIMRQTDTHLTAQYNIESHLGYEDHKARRDHEHLTVNHNGEYICTTHTKDLLSVAAKLRLT

SEQ ID NO: 967239 - protein, 78 aa, Homo sapiens
MHYLSTLQHQAHAAPPPRGTRHRSTTDRPEHATAAPDNSDTSIQHLHMTPNPGEPNHQPQQGHTLEPHNPARRTHQRT

SEQ ID NO: 967240 - protein, 291 aa, Homo sapiens
AFLTQVDHLSTPLDDRTDQLALPSKKLRRSSGSGVWLKDGGPHYPDIGTEDETSGSRTVRATTSATTGLAYSTHGDVLAVCQGAMTQDDTVEDGREWQRLPGMQYCSHARRWGGPRVSYTWRGSSTRTRPTEAYSLQVCCGRLRDTAPTLVYMATRAGDVDAFLEPLTGHSDESQVVEIYYQVATRSGLGSKGQLNGPHCERAPVAYGEPLSNDLILSPPGEAEGSMTAGAHALDNWRAHKADNGRLGTWHFNGGAPPSRGTGDRRANHTTAHVGRTPDYFNEKHDPRGHQ

SEQ ID NO: 967241 - protein, 254 aa, Homo sapiens
MLLCYVQSFSLCLLRLAGPHLHPCLRAPARYISKPEMPAIYCEPRLCLLLPCLPPCSFYVLSCTFRCHDPLSYWLGCCVAQLSTTWLCVRLPSLLGIWPVSSPVLCGLPVSPTADAPLPSVGMAMYWLPVPWLQRFSLWPQYSVILSLARRPLRLPAPFPPALDPRPRHHPAPIVLARLPGSSRHRHAQSISPSLPAHGLLAADITLLLGASGSHVPLDSALIYGDSSLPLRVAPCCHSATFPWRTALPSLLLL

SEQ ID NO: 967242 - protein, 97 aa, Homo sapiens
TTKYNPVGASELRDLYLKTDNYTREESTYSYGWSRRYARELGGEHVPVLRATATPSTAAVPEEWPKLAYWFIPAHKVYFSPNIAAVHTIPSVTPGYI

SEQ ID NO: 967243 - protein, 66 aa, Homo sapiens
MPEQGTTNDQSTQNNTADTQTKSHAKQPTRTLTPTANTHDLTTHAHQHRNYMTAPPSHSQLYAKAP

SEQ ID NO: 967244 - protein, 179 aa, Homo sapiens
QACYHVNSVQRIVIFLFLCGGSVCVIDVYFLIPFPQALSIMRLCPPVSRSRKLVATRHRWGTWAQRRTSLPFAVFCLIVQLRNIILFFTMRKCVALYRRLIQVTCNSLQRAVSILSPSHKRSGGVEKTREGTLASALPLDSPCLPDNRAQVVNPRIVLQLRGPRLPLPQEPQTPEVVCN

SEQ ID NO: 967245 - protein, 239 aa, Homo sapiens
SAEVLGGVMACALCGRLGPWCKPWDDRCLLENVQPCCELEVTEDSSRSEDLYDYERVPWYDLVHENTYLHDNDDYWYLNVTHWLNSLTHTGTVPHLLCDHHADDERPDYIAKVLLNYMRREGYRRYVGTGTDGFLSWTDETYESRNESIYGHLNPGGPGLPSRTNWLVHVTAFQLEPRGCLGLVRYVGTLRELRGNIHTLPHQVDLSEHNARTQKSVSVGIAHWHQRGTYTSLPRQILF

SEQ ID NO: 967246 - protein, 351 aa, Homo sapiens
QDVVKRLPLKAKMGTGKDSYQHCRHWTLEIRAKSTDYWPSDHINAVASHHKEPLATQFEQGRLHENGQRGSFKAMPVVIAHHNCTQLQRATWYHHLILSLLEHLRPASYYDDLVIDDPRTTDDFYQKPGLTRGTYLPGLDLPAATMNFDIASASEMIRVDTSGHAWAYYFHTTLEVSTITPDVSPIGPPFSLGPLSTTTHGAALDCTNNHNHINAIAPELGYINEINTGEHLPNIEEHQTPNLTKPPTAKRKDTSTYHRGQQQLGITHERTQAHTGPHMSNPPFDTGTQQPLADPITKHPTHGNDTTAKRPQMRSVRTQHITHPWRHHTANPASLETKQPNSAIENEPQNA

SEQ ID NO: 967247 - protein, 82 aa, Homo sapiens
MMTMVVCCTAHQGRNCGEHRTERSDWFLRLLLPQECRPSRDSISSRVLTHPSPALLCCSLLYFPPPLVSCTMRAPSGPRLPV

SEQ ID NO: 967248 - protein, 373 aa, Homo sapiens
AVCSGGCPGCPGGPGMGNRGGFRWRFRHVASWWPVGLLACGRGRGRGRGRLAERKADGTTGAGMPCHHSWAALRQGTGTLNVPLRRDALLLLFSSLAPTHSDTHARHSTRTLPSPGGGHHRQRTDGFLNRISGQGVRKAGPRCPRPTSASLTRFSPAATSPLRPSYRARILPPCAPPLRASLPAASPRCPPTTARAWPPSRPHSPPARGPTPTSPVPPHASPPPLALPPLLSPVSSPARYSFARAHPHTALPPPPVSLHSPLLLPLLLTRARTPAAPACGARPPSPVLFPPPSRSPLALPPPPAPRPPFRLLPCPPGLLPLAPRPCPPPALPLPRLLPPSTCALPLFPPPRPPSTPAPPPMSPSPSPPPPLPP

SEQ ID NO: 967249 - protein, 506 aa, Homo sapiens
MGRPTRPPTRTAETQHGRRHARRSRRHCSATFMQLDSARAREPASSYSMTHRGNKHDLPVTDAQITMQVPANILSGYQHATWISTAQRTYLRAARPRPRMADRAHTRVRTDRLSAPLSTASDRTTCGTQGWHTSLGPTRTLIRSPESHPLQTHQNSVRGRTSPSTPGRIHDTHALAHPSPSRTPTGEPRTPGATMTAHSRRRPQYRDHWAAPPSPGRTTLSPSPDPDSPHTRTTPHIRLAHHCALAHTDTRNSRSRRTYTTVMRPHAPDHRNALIPLLTTAHTPIYSPTPPLRATPHNSHPLLLHTHNCAQSIHPPHQHTPPLPPLPTPQHTTQPPTPSLHPHTTPQNPTLYHHRPQAAGRGTTDATHTRPSSRRRVSRAGAGASSPVGPPPPPRARARPPTPTPTYDTTTYSIEPQNPISLATSHTYCHQQQHYSIKATLSQTITHNLSTTHTNHHRQYTTQTNYSRYIQHTNYITTLTQPDTSTHTKSYHPTHQDKYNNTQSTS

SEQ ID NO: 967250 - protein, 102 aa, Homo sapiens
MPPPLDLRHAAVTRIADDDTPTPVNHNTTNNLTPNPTQSPIKPLPSNIKLPSLFTTPLITQPYHLTPISPKHNTYLPITIHPHPYASHSPPPTPTIYPPLNP

SEQ ID NO: 967251 - protein, 76 aa, Homo sapiens
SRFKKLADMYWRLCDGLTGDSREAVPQTHAAGDMQKSRCWWFFTLLFPLQHDVSGDTPRDWLLMQYSIRFILSPLY

SEQ ID NO: 967252 - protein, 354 aa, Homo sapiens
AATITAPGIGGTRAGCAGGILCGRLPSQYPSSPRSSTSEVLAAPRKEARKDAELCDERDVDATKLTLKHLFHRTKMKHTGGAQHNGWAQFIRQHIEHPRSCASLRLGILARVRKSSPFLGGQASIAPGPTTCSVLQCRVNLCALPVTTPSQDTHMRFAALGTHIICDKSSDDIDRGNSKATLNANDIVVLLFTFPLPHMAHESLVTNSVLRLSLQAWTIALHSYNQQAHEKPALKSPLARFPGLTVHDGIQPAVHLPSAPMHTPSSHGHTLNCHMPHSPKNSEANHRGGNIKTIVTGTIPLTCNTSGASASTNVTRAPNNFGRCLRNSPRLTISWLATLPHHTANVQRDEHPNA

SEQ ID NO: 967253 - protein, 362 aa, Homo sapiens
MAILATCRPAGRRQNCQPRSWLSFCGGLSEERQAALQPAFRLADFPARTSWPQRGPLLRVSTPLAFCTRTRSRQKATRSLTDTTGHSSRRPPYRAARYSAHSQNLALTPRALHSACAGQPTRQHRHTTPPGAQPLLQPASSAQRTPTLAHWPHTPHARQLHHTHVRKLPHHAQTRISCSALLGRSGSPANTARGAPRSTNEGDLHATGRPRHRAAAPPRNTLRRTTPWTRHATGHQPTGTRAHPRLPPTRHSATHIPTPRLYRQLTTCHQAQSPAWPTPGKALNRQGEATTHPSSPTNARSTPPSQQPGTLRIPQTDAAEQPPRPHHPTVATRRHPQTRALHHHHRAQASAHTHRTSRSTTA

SEQ ID NO: 967254 - protein, 428 aa, Homo sapiens
PRSQTEQTQPLSLSLKPEPLGATMSDDAIRHRDLHASLRTSTRAHAHLSPTWDHGTCTPKHGILQPCRHPPHQWHSRRHSSLHSHRLPGRDHRHQTAVASIAKSLEYIYASVQPPTALGSLGKRYPTIAFNFMTPHTAHNLANGYMEEDKSSISNEDEAVVGVKIKVDVVYYGGYDGGRNSVGSRKTVKLTKCNIRFKTVLVGLRRKGRRQSDVLTAKESGEHRRRLVYERLYGEAGYYTPSINLVIAIKLVKCKVTGTRRKVIREGLLKYKKDAAPQRPHGHNDRTQPPPPHNGAVGELTTDERKSTLRSASRNPSPPSSLKGNHTGQRARRKRAAPARHNDNTTAGRNTTQEAKTRNTTDHRNTRGNSAQTQDPEQHMRKTGQNDHAQTAQRKKNGEKLDSKHPEETRSERTQRPSTQRTPVDTAD

SEQ ID NO: 967255 - protein, 342 aa, Homo sapiens
SPTRPVQVGLLELVCAEGTALGLGERVPECENRFPGPALPVPPGRHSWSPTQPWLKNNRGRMSRRLGTCWGQHGRTDTSPRDMSKGYCGSRESPYASKHRQTTKRRTADRQQSRAPEREQLPITCQHGTRRCTHDNNKIAGHCHEQARQPQCTDPKQYPQAWQNHDTTRSSKHQSGTGQIIAHKIRSTYTSQRLRTQANQWNSRKERDTNEKTVTGYRPNNRHNRPTQTEGVTQDARRRRGHSRNEQEGTEVPGLKNRGQAHTTAREADRMRDTEQHGGGDGHNTRTPRKPEGGRQKKRRTAQGPNERHTWTDRTHAARRAQQNDATATDHNKARAAHRRQT

SEQ ID NO: 967256 - protein, 33 aa, Homo sapiens
FSLPGQHELHHIDSTFIHATYRIPWDSDPGAQH

SEQ ID NO: 967257 - protein, 487 aa, Homo sapiens
DVKRDLALPSPGPHLTLTHSNLHAHSCFAHLVWQLACKFTSAAQATSIKSTAHQGQCHTGQPGSLVMLFLSPQHSHSTHAPISIMHLPGALAQRIRYRRALPGSSKATGIKGFQMDKHRAQLPLHGHTQIPADMCISSDQHSSTSSKHHRSLYKQGSAQPKSSRGTSHHKRFSAHKAIRTYVERGVASMTTISRKKKITSSRNLFIAREKKEDTGDYDQFWIKPSGIYGKNITVRGTQVLAINYRGNTAGSLTKELMHISKGPSTNYKDRNRADHTQALVNPGVAHAYLPRTPGPTHHPGPPFDYTSNPFGKHQIAPGSRKYNRLELGHRGDYEHLDNVPYPITYNGGDISIPEINEDKKIADHYNKDTARENQEATTRKTKGRNNKRTQGQRTQWEGTYNNDDTQHDQPPKGKDDQTNNDINDRAAATHHNRKQKTTMTPDETTHNDEDQAATPTHQATKQENHKTTNDTGSERTMESVAQTRERA

SEQ ID NO: 967258 - protein, 295 aa, Homo sapiens
MEPTRHTIIANYGPRVNLTKTMAQNGEHQSMASNPMYQQIFTTKQVQRHTHTQHKCCWDHNSGARFHPRAHTPLGHDKRVNRPLDEYEHTARDKAPAGHPRNTHITTQQLPLLHAMRTKDHKDTQRIVTTSRYTHFRPKDTQRGTTEHGQGDDRVNPPYNAAHIKTQIGTALGNRYIYKKHKKRERPNDVDTRVRDKLAPNCALTLLEGRNHHSSNSRRTTIEQENNEPHTQQCERTEHEYTTRRKTTVTDQKCNEVTSKQQKEETHTTERPTPRTQTVTKRKKAKPRRHHNRRT

SEQ ID NO: 967259 - protein, 248 aa, Homo sapiens
RCAGPARVGGRPRGPCRAGGAAGRVGIHSGRDRRLVHKRAVELCSLLAGCLSCVGPRAMVHEPRGPRSGEDPEQRAPPSMSSGSKGPREVTTSTPLGAATSYAAYQLNLQLRDHPRQGLSMSTLSDLKGVTWEHSIPDFAVAASFGTCCHLSRAQKRHLALQPGWAMQNGISRGAFSLHLARGSDLGTPLTGYKALDHCTVWEPSSHSVTIGSWLTLEALPEKENQRWALKSHVLPESKFPRTRIPLH

SEQ ID NO: 967260 - protein, 242 aa, Homo sapiens
  misc_feature (107)..(107): Xaa can be any naturally occurring amino acid
MSSVEEAPSRAHLGTRRSNGRRGQHISKARALRASTINKTVIFRTLAPQSNAERKKSRERSSSLLGLADNVKLGLTKNVGNMTLVRDLKTSEGRVIPRCLASAHVVXRDSTTVEGLGPERGYSRSMEQMGALLHLQGVNVRESDALASMGAVQKKIGLANCTFFGATRRESIHSGGSEENCCTWRMGTGQTFVVTIGNKGVYPHWADRRSTAKGPGCVGIASLQKKAFQLGQQNVKPDSYLV

SEQ ID NO: 967261 - protein, 167 aa, Homo sapiens
  misc_feature (94)..(94): Xaa can be any naturally occurring amino acid
  misc_feature (107)..(107): Xaa can be any naturally occurring amino acid
  misc_feature (145)..(145): Xaa can be any naturally occurring amino acid
MGTMVQRSHINIVVIGHVALRARSTTYLLLILIYIHAVAIDEKNRIDNNLSKAGCMRLGKGLPSNVVPGLLRLKLYSLSRGTVDIIHCEYSSLXANLCSNQINVIYXCTTQLTGPTDIKTTFNQQSNDFRGSTRHGLIVLLVREXVACCVIGEFDTLVVVQEVGSTR

SEQ ID NO: 967262 - protein, 188 aa, Homo sapiens
RPSPHLKLPPPNTAAAGPSSPTVSPRPLSITGRPQAGLSHPSNPGPPGTWRLAVFSGQRPPIFPNSCSTSDFINPYCEERTLHPSSPPDPGLGWTERVAIQIPQKKPSPPLAAGGGDLDKLETKTGGPRGEQWTHTWAYHDSAPNHAFKRRKQGKNQSRPHPNTTHSRGEHHRRGPKDKAEPTNRPTT

SEQ ID NO: 967263 - protein, 400 aa, Homo sapiens
RGLSARRERHAMTVARCAFSSCCHAACRCLHRTSVVPIGVPAPVVGRKFRVFTRIVSPQAPVAARWGQGTLHPVPLSETRTRNARSQEESEEEEDEDDEEEEERGQKQKSLNPWQGTAGQQPTPSQSTLRTIASLFLTEQSHLQLHKDRGRNFVTIEQDTFVFQVRQKTDATLEIYSKLLYNRPGTVSSLTDRLWVSSVAFHLKPGKCSNIHNSTDTTMFAPTLENAMFKEPLVKVLRFGHITVYNSDLVHSSTLNLHKLGIPKAILCANTIRRTILHKPSLRHNGTDNTDNVNTASRAWGNDQEGYTAKPRRLLWTKHRPAINTMTSEQKPSTFTPTQGDEFHHTNATINNTEGDPPNNQNRPAEHTTNHEQHTNSREDSSKRQRTTHTHKTHTKIRRK

SEQ ID NO: 967264 - protein, 284 aa, Homo sapiens
AKKSRFFFLKSGEERGGKGAPVFEEGALKQRVEEFIAKSPVGFGGIARGASDDGASPRQSGLAFSDGRCGLVVRPEPWLPSRLPALRLSGPRSVADLAVPIVARLKRSLKKHPVGGALHACIVLVVSGLVFTLGVYGFISRGGEEVALLPLALDWSSRAHAGPSFGGALALPEVFLPHTEASHLCYIPREAPPERDPRMVCPLGDKAPHSGVVGPKALGGQHTSRVRGPKGRPSYVGPSKVTKGPHRNVAGREHPTLDDVLQKLAQLHNGFCSSPTKLAHIMCR

SEQ ID NO: 967265 - protein, 275 aa, Homo sapiens
MGPASERALCVCVCVCVCVCVCVSPSDALLCVCVCVCVSPSARAAVCVCVCAERAETTRSEEAETQGYNTTHPQHVTSCHHPPLPTSTRPTQPHHITTRPSFATKTHTTQHRNTHPSVPTTNTCVVRSTPSPCFTLPRRTPTPTHLQRTLLGHMHHTRRTGQSTYAFLTYPSPRQTMHSNTPLPLSPLTARQPGSPAHNIADPTQHTHTNIPPLTERRQPIPPLPNLTTPPTTREQPKQNTDMAKRTNTTPAKHNHRKPDTTNRERTEASTKPHK

SEQ ID NO: 967266 - protein, 233 aa, Homo sapiens
  misc_feature (62)..(62): Xaa can be any naturally occurring amino acid
MYEAKAPGVTVAIATEVKTIKAMWLSSGLSCLVSEKAEPTVGAGCKGPGRGLAGKVVEMALXIAGPRAGPHLCPSIFPGSSLILSLDLTMQREEVESVAGKLELFPGPSCLRWGHLCRGRVPMFMEIRGVLTVWLEGARGGEQESIPGVPALAGRKGGLKRPSVDGGGPDMDWSGGTGGRAKGTKVSDSVRVMVARDRAGGREITRSGEGNERQVSKGRGQTPGGHQKGGEHG

SEQ ID NO: 967267 - protein, 497 aa, Homo sapiens
ALFSLYYAGANTLNDRPWASDTWGKNRAGGARAPNTEQGTPTPSAYDRHSVLQRHHETREAQFLSTSTIDTLYFFLQCGYFLLWCGVVVVISSQHKTNTNTKDKSGTHTQRSHNRPERHHTHTLYTRAETRAGGEMWPTERSEIPPKEGRTRQPRDARHTSGGNAGGSTEEREKHSGGPPLCEDPPEENICGESEEQTHRETRRVQVHTHTRAGEEVRDHRTQAPSVSNITTTGVEKEERTPPQVEWQTSEWRQDEEHQTERRSHLEKQDRRPTRKNNYIERRETTNSTPRGEATHTQTQQNRESTQRGNITPQRDADPPLMCTRGGKTKPTQITPTGEQRNSTQDEHTTNTTNNKTNDTEVATQHNHPKDGTTKQRRRTQTQTMKTQGGKTTHRQDTRHNDSSNATWSEPNTYQTRKDERINSPPQSNRPRQEETEQQDQKKDYTSIEGQLTNYDVAMTDNPQQHYNGGTTHNPHVIINDTNRQRSLTKKDINAAR

SEQ ID NO: 967268 - protein, 256 aa, Homo sapiens
ASDPRVGEKLRELCGTPGYLAPEILKCSMDETHPGYGKEVDLWACGVILFTLLAGSPPFWHRRQILMLRMIMEGQYQFSSPEWDDRSSTVKDLVSGGRRGTVGEGQETWPSIVSRVSLSDISRGGAGGTPEATPEQMSRPYSTPSLSVVKAANPGTSPPQGFRVAVWTVLGAGRVALSTHRVTALTKNAAVEGPLCAAGQSGTSSTTVAFRALRALGKRRGAAERGLSPSTAPGLSIMGLKRGRPVYNEVKRLSGK

SEQ ID NO: 967269 - protein, 265 aa, Homo sapiens
MCLNTTEANLATLLNERILNNSYYGLTTLLSELLYKIGLLGAESYVLLTIVTILLPLGKILYIFLNAFKLYQQNHTCMYTRLSYTLSNSPSTHSKSLLPLCTCYNVNEFRLLVDTILTLMSIRYLPINDATMLKVPGSPTGSIQAPPGDHARTQNTDQLANTKQKDNTHTNGEAPKQNMPPRESTQLNEDAEARKKQSTPQETPNKKQTREGRLTRRGRKTGNREKRAHQTTAAQMENPTKTSQPHKQTLRTNQTHEKKHRNESQ

SEQ ID NO: 967270 - protein, 405 aa, Homo sapiens
GCGVCGAGGCRSSSSRNMRRVLMMPRVRRQTTAPPHPRTARAGPRHQPGPPSSRGDQKPRWPHRCDILWTRPQSLPAGEGGRLAERTPAVFPTIIVDVVPRVVRELCSGLERPLRRSTLTGEGTGQQHKTTEAAGARQKGPERTVRHVQGRVLPEDAGPDAPGLEEHWALAGTALGGVAPSGPGGIGATCGKTRVLVSTGLCRDTLPERPSRIFTDSIIREIPEQEASDDVFNLAPPLASGTADRQPCRKEQQNLAEEMPRKQCEMRWRKAGELTSHMNADRPGQHREKRQKKARDQDNGPKKPAGLNVGARPCDREEGKKRIDLMRIRVTRYERYQYRAHQKIEHEVETVIIYHNKMCRCHRVERTPRKKITGEMNEEREVKMNVLADLSENRNLEILIAYEID

SEQ ID NO: 967271 - protein, 486 aa, Homo sapiens
QSRLGCCAQSQPGCLEPGCPELACSMPHACAVMPAAHVPVWPVLCVITVNMLVAVCCAGCLPWDVLWPSLDFSVCRPHVIGRSLDVHQDLRCPWVWHTVPELDLTTSHAWLCTLRGYLAWHTNPPVPLANIGGYVYQVCPDGNETSANNPSLVRPRHADSWLFQDWWWQPDTKARTGSGAPGYLSDVGIVQDTCVDQFFSTSAGPYHQNTVAVVLPVDIATETKTPLGEFPVKSIVRFKTVYHSQQETVRGMTCAEPTGLYRRGQNRKLQRTISDKHRQRFMSVTQVESRYFGAYLLKKERTLWDKFGHALPRLSLQEPWIVGHKAVVGIHIEDWEMDWEDVGHREDIRGTGHSLTQEDPRSRGTNQPTGPNGTKGTTTGCNVEHAMEPHGDNTLLCSIQLREPTKVATAPEDRYQRYEYRTNPDERKRDTEGHRKDEEHQGAEQTGRNMKAKQQEKNKEKARKKEQRTKHNEPISRQTKNERRQR

SEQ ID NO: 967272 - protein, 187 aa, Homo sapiens
MQSRLEKSTLAKEFWPLRGGFLMVAAPDFLQPMRSQTPELCDQQSAHKWGGLVGGEGRLLLVGDTRGVPAGAGLSQEDISNESRSTKLAAFQDLSGRSYPKTLPFFLIIWESPFTNLPYPERGGGTTPSLAGPDARAWDAMERKDKTGQGPFQKDDRDGPSWQWKRQDRHTRHTGQHPNEQTPNTNP

SEQ ID NO: 967273 - protein, 356 aa, Homo sapiens
PEAWPRCDPCRRYTARRCLPMQLAAQARPYSVSVGTGHHRRRLRSIGHWLARSALVSQPCSCSVARRPARTRVPGSRNMPWRRGPPERDSAEAERGRPDPGASRPLDSTPRWLATVGPHPTCHRQRRRHPPRPAFRAGKCRSQPAIRVPAQTRPRLFRRGQLHKGPRPPGGSEGSTEQGMAAPLDPPGTGAGLRSNRQAQAHPPQPPPGKDAPTQAACLDRRVDATATPGTIHWTTNSRAPAKGSSLTRTLRPPGTHERPRLGRPATALSPKPDRRPPNPAGSDHKDRHHPTGNPCPSRCFRRPLSTIPQAEITRRLFSLTTDRCFYSQPPPYLNGHHLHGLIDSLSQPMGHFLTR

SEQ ID NO: 967274 - protein, 113 aa, Homo sapiens
MRIPGFVQCQAPSIGGSYPMTHLRHPVTCLKCVQTHAVWIRLAYQLLPLDPPPLCCHSATLHCLIFVDKHSVMVPSLFEQAIMGEAISEDMTIARRPPPTVKEKLNGLRYPHV

SEQ ID NO: 967275 - protein, 118 aa, Homo sapiens
MAVKCCLHPSPKYKSGSSKTTAENEDSQATGGTALKPASAYPAAGPGATKDERGRRLHEISIATRGRQNARTPPLGPKRVGYNTPRHESRSHSTPWPEPRQHLPTTVVARSKQTQHLN

SEQ ID NO: 967276 - protein, 329 aa, Homo sapiens
MQEVTIRTRVRKVISDGDFCIVPTEIKKSGAWVELLLGVIMRRYHRLQCGPRSRINEGEGKKSNYCWNPLPHVSHLLLNYWYKREDSWQKRLHKETAQAQEANRANAYTNMHMTATYRNSPTMGGPAIMNNGLHRRFIDSTSPRMLKNAMREGTEQRIHLATKPAPYCKLATITNRPTCRPHPSEPKPARSTTHNNGHTSRKNTASQAQVKHYKPKTAHKPTSKRRQQRKPTEPTETKSKPRPGPPKPAQSPATTTRHTPQRRDAARGDPQHDRAKTGPARQQRSDARGRREIQAARHSGRRDRHTARRAPERRANCETRKLEMETKPH

SEQ ID NO: 967277 - protein, 82 aa, Homo sapiens
APTHILPPPEGTASKRRETEQVGGSEVPQRKRAEGGGLEGECQGLEARNRELKDRAESVEREIQYLKGPAHRGLQGPEPEDP

SEQ ID NO: 967278 - protein, 207 aa, Homo sapiens
MVTVYPGDSIGLAHTPHCTGHSKDSTHNRTLNVIVDFTSTGGDTTWGSTQTTGKNTHSFHRRRDEDNIIHVELDDTPQIWRKTIEQHTRIEDVANGIPFDKVGNHTRWETITQTSTNRGGRTHVNRGRGPMGPTYIISPFINGHEDIENFFTRGLNITTHKNNQKPSGGNDGRANIVETTQDTPTTGKAIDASPHFGQHVPWRQVTP

SEQ ID NO: 967279 - protein, 323 aa, Homo sapiens
FSLPGQHELHHSLPPFSTNYRSTWALSRLPSIQEPGPVSSAAQRSYAGAWVALDYPDLTMIHDPHPASRAPAIEGPGGAKAHQGISQRCVLGQGTLGRPSPSTRSTRQHPNDRHQPPGTTGNPHLVHLPLHRWRHPAARKCKPLAQQPCQQTLAGHGQPAHPIPGPRTNMGQHHTTGNPQGTQPPSGKPHIHLTHASHPPDHHARVPIQKQCCQAQHNLSKDQNSPPAIPVALGQPSSTTEGPRYPSGSGSNSHYSASSKSSPDSHPTGPGPTRRNKTNRLGQTHGHESHMRGPPRAHTDARLAQNTTPPHKVPDTGPQATDT

SEQ ID NO: 967280 - protein, 77 aa, Homo sapiens
EFRMCGLLFDYPVVLAVQPYFLQKDQINCCSDIWVEATIGMEQTASKHFETHWISLNAGLTRQTQTNCNFIQNTNAH

SEQ ID NO: 967281 - protein, 90 aa, Homo sapiens
PAAQPGSDWCSLQCLLHGPALPACVPGLVSPWESRACASGIGTWGAGANISGSSQGPSVQSHSADGVVPGGQTSHSGQWNAGMERSFHSI

SEQ ID NO: 967282 - protein, 160 aa, Homo sapiens
EVALAGPALELHNCMAKLLAHPLQRPCQSHASYSLLEEEDEAIEVEATVCTIPVHLHLSWLARDGPWALKAWVLQTGRLLCGPPGVRGVPARQLLRVPCQGSLGGKPTDFQEGIPGTVRHPFFCALPAHFHSYVRHGYISVLPCCDLFAINNYTNFRDSY

SEQ ID NO: 967283 - protein, 220 aa, Homo sapiens
RGLPTRSDAGGPGQCAMCLRVATMATELMLATKLDAGGLQMDGLRAGGWDPGAARAERWQLAAVWLGAPDECVPRRWCIARTAELSCQACCGAQTSTRASCEPQSPSRRVFNPYTEFKEFSRKQIKDMEKMFKQYDAGRDGFIDPDGAKTHDGRNFGGPSDPPGPEKHGSRTVDEDFDSKLSFREVQAINVVSRFEEEIKAEQAEQEEAGGSEMKQRKAA

SEQ ID NO: 967284 - protein, 86 aa, Homo sapiens
MKSLSLLLDMWLMGLGRPCLSLARHPAGASAVFGSDGRHAAAGTRCLAQAAPSVNQHCEQTMGHQREQPASTQCRDHTTPCSIISS

SEQ ID NO: 967285 - protein, 396 aa, Homo sapiens
LLGPPGAGKGTQAPSMAENFCVCHLATGDMLRAMVALDSELGKKLKATMDAGKLVSDEMVVELIAKNLETPLCQKWVSLLDGFPRTVRQAELLDDLMAGQQEQSTACILCIAHPSHPETLCCIRKQSPGKAAFTPKSGRSYPRGSPNPPTRSPCKAMTSTGATRASAASSMINAHQASPKSACNAIHTHQSQPHVIEYIHGNGGSTPALDASQHHRRRARQPPSRPPPQRHHPRITQGPAQHCRQGPLHPAGVHPCVLTRTTRRERAATETKHHTPRRTRDTTGPTETHTPTRPRHPTHIPYPPPPHTPPSGRQQQEQKHPASALRATATPQAPPHSGSPPARYLPNTQHHSYPPPSPTPDTERQPESTANHPHHDSSDHDRPLTAEPTREHAHPP

SEQ ID NO: 967286 - protein, 312 aa, Homo sapiens
AESSDSEEDEKPDQATQHKANSQAKHTGQLAEAARQQKATVHALQAGAAWILGGSQSPRMHFDRLVLSSPNSSILWLQYMDFHLQATEIEKARAVAERALKTIILQQQAAGRSCTRVGGSARTWQNHVTASQAVPDPRSNERAVQYNEPLKVFLHLADIYATSENFQDAGELYKRMLKQYRQEKAGGSTYGAILLRQEPGCSQQRVLQPSQAVHATTGSMWLSLPKDLPQLDAHAGGMPSGPTPMRHTHHTTQAHQSGRPNRTTSQARKPEGRSGTTDQEQHLTWPTNTETTQDIRETATSEHTTTARTAQP

SEQ ID NO: 967287 - protein, 260 aa, Homo sapiens
MRLHHIAPPSPPTTGPWALSRRPATGARTVSSADSVYAGAGGSGSRISVSRSTSIQGRHGAPGAWNTGIAGGLAGMGRHPAHAAQAAHATQPDTHRLASSPGTAVRSLEHEQPAGWSSPNPGSTWQQAQGPQGQQHWSPFTSKHPSEAPAGLHIFAKSLWDNARISSARLHNAHVLLQCMTFSSHSHAGQQLAHAPGLMLSNDIHGLRHRSSDDTNHPPHGSCRTAHRRLSRTELLFMKNQPRPARNRPQSPEWPTWVTG

SEQ ID NO: 967288 - protein, 475 aa, Homo sapiens
QLIMPLLIPEEFHDFDQPLPALQHAHRMWPQPVPALHIQQSAVASSINPCSSKQVWATIESFSPSKMHFACILGQWHASVQHHMQHAQASSFTQSMHAPWFKSSHSLTSQPSSFSSLAQQQPPSHICTCSTQFTPSFSTSCTASNITGHASHICAARHTCMGGTSFSMHPHFIQSITCMAGSSFSMHPPCPSSAGQGREHGIAQQASPATNARIIGHAEHAINVHPQGASEPCTHVHANQAGHPSYATQMAHTPCTCIPHPTTWSHKCRAQTRQSALERPILGSTQTGNNSKPTKAATTAHPGKHITWVDNDATHGAWALTPRTTRTTPLADTQDVTPNIIADDNTHWAPMPPPHTPQRRDRPQRPAHPGRPHAHYTGDAPSPGTGPVDRPTRRHNHARQPNTPHNTEQAPERGTQRSNRTHKERPGAPARSTTDDHESSAAQPRPTRRRTTKSTKHSADPGGRATHEQPEPSNA

SEQ ID NO: 967289 - protein, 316 aa, Homo sapiens
MPLHSSLGITARLCQTHNKHKNQLTEVIIAHTYLMPADINKLGPILVLQTKARDIYNSSMDKPWHRQAHPLTGDARNGAKQISNQAQPPDDQAVTHINLQSRQSSQATPRQTFPDTSHSSGWSHSIFPPRPEYPELLEQDSKTNTHHEDSPCKLHANRIPHCPKPIPVSEPAHAKTRVAYPFMTKEGKECAHDTANTWLHAIITISRADIRMPHMRWHTPSRNYTYRRSTRNTSPYALYDHQTPELVATETSTTRVNATELNMAEKGKPSIQDEIRIKTESRHANGKKTTEKRMSEERPKNRQRRWRRKGERSPNA

SEQ ID NO: 967290 - protein, 340 aa, Homo sapiens
AGLGAGAKFDTRRFSASTPARIPSIRQQQAHIMHFAFFGRCFQGTGTFIGKPSKSCPQVCSGSHPPHTSIQHSPPTHRQQHTTQHSSSLNMHKGKQGSQQPQHTTTGTARIAIPAHMCKYPHSTAQVCSHHHTVGIVTINGQGTATTHYATALQHTQYPSQHEHSSNSQTFQATPVRHEHRDQHTPDKTQQFHTYPMTAAHSQTHDHTFPTVPHSGTNRQSYPKVTPKIVGVNHYIHAHNDCTPGDTLHQRHFEHLSNSRKSNALSQDQRKYPSHALGPRDNPTHNWPKKATKISTQTGQKDHSTPTDSNIALDPLGVRRITVYDGRIFTLAFTKTLRST

SEQ ID NO: 967291 - protein, 103 aa, Homo sapiens
MKTRTMMTILKKNMDCFEQNNPYARFLDNRTISAPGTSRSECFPRDVLQRLLKAKHSGRPRLAICGLLTFDSVTCQHSRAGRARGDLKDGLPLEWCLTPVFCL

SEQ ID NO: 967292 - protein, 263 aa, Homo sapiens
VCESQAYLCLPTQWQHPGASFSPYVEPQQFPTFSNSLANEPCHSEPPLHVASAFTYRTMTASLLQLLPPSLLVLRCTPLLRAARGTPARCSHPDSPRHTVSPRNDSFRAPTWSRPTSPTATPTVQTAARLTSHLPSTPPGPLPQRSSMASSALLRLGALASMRLPYTRPWTQPHACLPAFRLHRLTSPSTHPLHFTFTSLFHTLRPLGTARLLVHRTVGPLRHLQPSPPPPPCPPSGLNPITAKTVEPLAPLRQHLTTPIIHT

SEQ ID NO: 967293 - protein, 431 aa, Homo sapiens
PSITTIVPLARLAVTSGPEQMASVNGSSQNCVSGQERGRPGGPWPCPASMNSCPQNCVPHGISEAVFTAVMFQQTFSPPCQTTSPRHNTCPHSDRARLSTAARMQQLISQQVSLHFSSRSLVQMFHHKTAIAVFTPRFPCWLRRFPDHIFQYQDTHSPSAILMTVHFIIGSALSGTARFLGTYLTTVTFHTVRTLGDQGNAQPSQQVPTPMPLAASQHSPAGRMRHRTPGPRHHNTKATQAWERDSSGTATDHFVGLNGIQNDRDVGHAGTLTGHTAKRRASGDHKRMASITATHSTALSAPKPGTQATSKGTPVTDTLTSGEVTNEGHEQRPPPRCTPGQTTGFEPTHRGATNTTRQRTQTPATQVQKQPNTTPRASDTPAGSQPPASKQTIHTPKRVHTAEQTHHEAAQQHERQKMRENHIPEQANQQM

SEQ ID NO: 967294 - protein, 175 aa, Homo sapiens
MATTRDATQTQPGDHPAPTHPQPTRKHLPTTTHNNNELPGPGIDTSTPTREPHTHTTTQNGALAHITRHAPTQHDSNPHAEISKPHNRTHAVSSRRRHLHDNTTASDQTTSPYTPLHSQPPPAPHTQATTSDRLKQPANAPAPLQRPRTNTGACTSSTETTGQRHAPRQYTIHRR

SEQ ID NO: 967295 - protein, 81 aa, Homo sapiens
VVERRCLPGCRRQPESLGELRAADARDHVEAAWLALCAAPAGALVRFLGTPPRQCWREDTAPSTKFEDRFPFLKKPKLMIY

SEQ ID NO: 967296 - protein, 44 aa, Homo sapiens
GRGLRTHDNGAVPDSSRWRFEVVKPPHETLARRDEAPSDRHKTA

SEQ ID NO: 967297 - protein, 368 aa, Homo sapiens
  misc_feature (41)..(41): Xaa can be any naturally occurring amino acid
LINSPTLSVIESQPGTLLRNSSAFSYQRQTSNRSAHPPGAXPTISTASGDNQLASRQQQHVSMATCSQHRQASRACRSTNVQAQSRTSRSSQCSHYLNTTSSMSPGHDRHRPGGHSSRTSSTGPCQCLSGSRDPPVSYWTPYGSAYMRADPESLVAVGVVPVVMDSREHCAGARTWQYTGPAAAADPSGIHSHKHIWGRQTGTRPAPPTHSPHHPKARQQSRHSIRLNKIGPKKRHTTHPHTTSKLHYQHMAPNDSGTSPRTTAPPETASPLNHRRTHDRQTKSRRQTPTKRKHPNKQRRTTRRGGAQRRTHDRTRKGRQNDQRTAKGQTKRNRETTKATTTPQASKEGGKQRNNTEREQDHSQHRDQ

SEQ ID NO: 967298 - protein, 338 aa, Homo sapiens
DPTACAAWSPNRKAGAAADTPPLETLSFHGDEEIIEVVELDPGPPDPDDLAQAAWQACGTLQAQHSRQASRANDSRAAVLSNPRQGAGRPAMAGPRLIARSPLHLHSASVFSCEPGPQDQYLGSDRGLKHDKAFVWRLSDGELLFAVAGHKDSVTCAGFSPDSTLVATGDHEWPLAQCGQVAHSRQERLVLCTRGQTWQWHGQGNPRRTKVLSGRHTRLTAKPGLTAQSRTADWTERTRVPKSQATRGPELIHMIATHSRGDGHYTNADPPKKTGNTRTQRERPHTRHRQQGDGTGTPRPTHTDVPRHHSLTPNPPRPPGSRSPTVQAHQRTGEGTQR

SEQ ID NO: 967299 - protein, 419 aa, Homo sapiens
MTRGVRTSLVEQIYSTLGAYQHMSKECTLTTCHGHTSGGHRRLKKQRTHRTRSVYIKRNPGQRGSRKWQKLTPILQTVAQPRRISHRKRNTRAKESLLRRGALSEDPDRVLSYNNPYMGEAPSAPKYKPLWRNHEFPVFLGVINTRASSRGVALQNTRCGPSASPRGFFTFPTNTAKKGVVTRRVNLFIRYKKRTSGGASEGNRGPAEQAKASIVGDKSANNVESQPNRGAPWFPKGAPGRLSQKFPRKKGTWVLLKKKVLSHRVSHDDNMWVFHVWNFHLFPLNAADIIVHNLPLLQRERTNAPWWGGPGGHSLRREMKTAGQFPKPIFITGGSHTVRAVGTLEIPGLVSTKSLPGDQGRKTVHCEKRVAAVQGDEHEEGAHASRDGYTRNEATNNPKTRHVMSSLSKDNPAIEHEST

SEQ ID NO: 967300 - protein, 77 aa, Homo sapiens
VFTTLRVQSLTHRLCMPQGKHQGDRGKSNITSIQASIQTHLACIHPDTLFPYVGQPAHIVGAPTARNASHASLPIVS

SEQ ID NO: 967301 - protein, 67 aa, Homo sapiens
GDAKRDQAQKAAGAGDAKMKCVYEVDNCILSGDCTVRNTIYFSSFIKMQNFVLLFFFLKRQCGSSTT

SEQ ID NO: 967302 - protein, 98 aa, Homo sapiens
ETEYERGCTSLTQKGKLEPAEEDTKVYLEKHSDSRFKSDRSPEAAVIAGGVVGFLLAIFLILLLVYRMRKRDEGSYDLGERKASSAAYQKAPTKEFYA

SEQ ID NO: 967303 - protein, 143 aa, Homo sapiens
MRNNCIEGLMPALESSDAESTEMEAGTAWAGSISRRALTTTSSSCIAGAAAVSAAGACSAARPSNPSASTVDLRPISALPNPWYGNHGSCECAALMRGTQRVLAGAVPGRDRWRRFVRCTAHRIRADRSGKGGAWSRFVGAGS

SEQ ID NO: 967304 - protein, 33 aa, Homo sapiens
YNGCREDDRRGIGKAQKNPFGGNWMMINKLYQI

SEQ ID NO: 967305 - protein, 193 aa, Homo sapiens
  misc_feature (193)..(193): Xaa can be any naturally occurring amino acid
VEHRGRHFLDALIDVEEHDEEHQGHAERDLGPDAEPEPQREDRRQHHARQCVDHLHIGIEHGGDARLPREPEADQDAAGRADHEGKDGFPQRDRKVLPDHSGREPLHNLAEDVDRVGEEERRQQHLAEHRHGGEDLPQRQRDDRNQDLQRQQRDARHQAAPACVDWAEPFITSSFSTPQISRCRAWKSFSILX

SEQ ID NO: 967306 - protein, 219 aa, Homo sapiens
  misc_feature (161)..(161): Xaa can be any naturally occurring amino acid
  misc_feature (164)..(164): Xaa can be any naturally occurring amino acid
  misc_feature (168)..(168): Xaa can be any naturally occurring amino acid
  misc_feature (170)..(170): Xaa can be any naturally occurring amino acid
  misc_feature (174)..(174): Xaa can be any naturally occurring amino acid
RSWPTVPGMRAFVSASSMSLDFRHRPVTAPDILSVCERTKVLIGSSLDSSTSSSLRFLYGKRSLSRAFVISDFSASEGRNISVIQSFSSVYFVMGPQQGLPGRPFGTCRSYVSPLMPPSRGSFMTDVWLRLWRTLLGLFAGKQAGGIWAWTTRPRSKVGEXSSXGGAXGXGGWXPHTSHLHCSPSCSPNHHNQPIPQSMRDSSCGKGELFQNTELISGF

SEQ ID NO: 967307 - protein, 91 aa, Homo sapiens
EEMTLKQFLDYFKTEHKLEITMLSQGVSMLYSFFMPAAKLKERLDQPMTEIVSRVSKRKLGRHVRALVLELCCNDESGEDVEVPYVRYTIR

SEQ ID NO: 967308 - protein, 103 aa, Homo sapiens
  misc_feature (4)..(4): Xaa can be any naturally occurring amino acid
  misc_feature (21)..(21): Xaa can be any naturally occurring amino acid
  misc_feature (94)..(94): Xaa can be any naturally occurring amino acid
KAIXAGQKRGHRNQRQHTALXKIEGVNAPDETEFHLGNRGANAKKAKNNTGTPGGKPNKTRDIWGKETRAHGNSGMVRAKPPTNLPAKAIGHRXRGTLNPSRI

SEQ ID NO: 967309 - protein, 247 aa, Homo sapiens
RVPGLRALGGGGCERRHCGAGGGGQRAPSAAGPVGRGMRKRTEPVALEHELLRRCWCSSSSGSGRRWLLDCLTACLKQNLTPDWALVAVLSRASAACRWAMKLGLPGAGAKARVGLAPRGMILFLVFWGWYSCAFHFPHHNYVLDKQAKADFLLTFRTEFPNFIGFEENHRIRVRITRVTYYLQPEEDVTIGVWHTVPAVWWKNAQGKDQMWYEAALGSRHPIILYPAWERRYQRRLTTAVELYQGA

SEQ ID NO: 967310 - protein, 392 aa, Homo sapiens
VVKTTPKSQNGKLDKNSISTPLSVDRHHVSIPEQVPPTHWPICISSTCGGIDHNSTPIATNLAARQAAAAWAHRAPFNVMPRVLGSTLDKLERATMVITHLHHLLAGTILQTQPTYSCDYHMLPPGHRRLYHKTCITGDISRLHCAVLTSSMLVLVTSERCVSPTHGADPTSMPFWLHTLGVKQLNVGRQHTMAFHLSHPTASNSICRQIAPGHSPHPTSRTHWPHNPAHSTPRAKYQDRERVHNNCLLTANVLNMPCAHAAWQVTRQDATCPATPRSIKALAGNQHQHVQMNHAHSSLTTTPERQKTTAPRGAPPQHDRQTRISDQQQHSTATHANHRSHANQTVTHRPPQQPHQTNTTDTHKQHATNNHTIETNPPTHQTQQNTQAQPKP

SEQ ID NO: 967311 - protein, 205 aa, Homo sapiens
MKSLLWSRASQRDSVVFFSISYRISVEVQIRHDLPGGVSRDTWCHACAELSRASIHHITPTEVSSLCSRMGWQCTHSAEEKSVSPGKERRKHNNAPEGLGSTLGSATHKTAVIPGGCRDRDSQGSSSGHRHHGVLPGQRTLTQPSAASRRSTLTPPGLMQKGDVAKSTDPDTTDPTPKLGRRQWPTAREKNNKESGDTKDNYQEN

SEQ ID NO: 967312 - protein, 547 aa, Homo sapiens
  misc_feature (177)..(177): Xaa can be any naturally occurring amino acid
MGRVVRASREVLQCECITCEDKRGRMNGGLEASSLHGGHLDRGLMDGGRRTGRLDLAAVLRFSAFYYLNVIVLSDETVTSPQALACCEVMAMMRVSQEIVVNWGVVLNIGAYINVRVEHGIHSGLASQPTLAVGSLVGCVTRTERVHDACQRGMFRIGGMIHERAAHAPGAPVTCWXTKGEHAARSVRSGSIRCGSSEHQRGGRKGHRHLGTRCELDVRGELICRKGAMDSKADAPATRECIACERGLMADAEQGTLWAWRARVLVTLGGRFSGPAPWLCYVGRQYCDVKLGGPPSKLAEEPPNGGKVYGPEGKRGPRTRQGLRRVRIGAFRTGDLAAVVAFELSGVAREHRNAHTSGRCHSFDGTRRVAKIAIARGGKASRGAKAEGPVGLVGEIPHVIPVGYGGCDRLVRRDIEGARNPSQWGPDSNSEGDPIPDRGGAPQIHRDCPRYHLSWAKDRYGAHKHGATKRPTAQQRPDSTGSNHAPGKRGNAAAADHGGATHEEGDYTTRSGFNTCAAKMRPGTRGERPDANNTIERRKRANKRRHR

SEQ ID NO: 967313 - protein, 70 aa, Homo sapiens
DCTACGVCVWQEPVTGERGVSRLLELAVQKVVVHPLVLLSVVDHFTRIGKVGNQKRVVGVLYGVMGKEST

SEQ ID NO: 967314 - protein, 118 aa, Homo sapiens
GGPLSRYLNAVTESEKALKSNHFELSLRTESHAGAWCSGDGRPQERADYVALAIVDVALQTELQLGSQPVVLRSTSDPVNNNRWLRVVDTYGSRGKVPCKVGNEAPVTGPPRVGATAD

SEQ ID NO: 967315 - protein, 304 aa, Homo sapiens
MTFSFEQGSSNSCVISHHQTNFTFNTAVMQAHISIKRHHIASPGTGRWQQAGQAAHIGPACYIRDSISSKAPASFTLAATSSSKHQHYQASTVRSKLICTAIETWLGIQSHGYLLRASNHDTQLFSVQFIDVAIYHKNPWNILELINSKSDSECAEQLRQLAARIKEDHVNQHGAGSGWDQAHLWPPRRQKNIKEASETEKRIRRRRTLKSTTQRPKQYSVETNAGTRQAEGRRQTKKKKKNETGTREPDAKRHPPHKERKRGQQEPHTNSDTPSVHQTKKASRQREKAASRHHHKDDNIRELK

SEQ ID NO: 967316 - protein, 437 aa, Homo sapiens
VDPPPRLLVLLPQEPGGSRDIHVRAGCGRRHDGMMWRTREDSLGPYISYPCMLVHASMDDAGAPDQCTAILTGQTIVRIIHATSFRHLRPDDPSFDTGPRDRMLTATVAPHISCTYDTTRWTARPRTAHQKNPRIGHGQYPARPDIKTCAARRRADVAVWHIEQFYRSWHGGIPESFNCNGMTPQDEHQGTHWHRVPLGVASRRQHSGTTLGHTHHNQATRWALPVGRGPHTPTRHSRRHIGNRPARTCHHTRNAHSEHRVNRGPPATDDHDTMAAYNTRKYRPVHTKQRKRLRHMDSPTGGTQGTHTHTGDHTTSAGPPYTSHPTLAQSIARTLRPSQHHGKFTSHNKDGVAKQGQHSDHIGATAPKEQPRKPHTPGTHHTHRPTRRQWYHSTAAPVQPTPPESTCETPPQSPNDSVDATEATTHPAHMRPHSPAA

SEQ ID NO: 967317 - protein, 153 aa, Homo sapiens
MGDTPSAATEHRQLYTRINAQLTRTASPPERSPHTGKGISNHLNVFVGKSPNTHETKKKGGEQLRVTAHWDTWPANPNLPGTGLKHTGSIHRPGENTLMPLVTHTPLQSRGGDHRRSGDTAKFPDDRQTQREDESGVATKGGRRRPTQTAQER

SEQ ID NO: 967318 - protein, 114 aa, Homo sapiens
MAQASAPWAATLPRCGWCSATAMNQETGRTKNVLVTPNRAPMERAQGRRYKRANTGRQRAQNLGTRTQSPPQPRTEAGDGAHERHTHGHRTRRPPARPPHTGARGHGAQAQAPA

SEQ ID NO: 967319 - protein, 227 aa, Homo sapiens
MCLIDDAQPCALNDLRVSDPVPLVCAICPQTWLGISAFCSCELDIKEIAEPGVSSDCYSSKFLNALGPTSPRSRSQSSLLSHGYAFGWGAVSLPLMCDIIFAGETRPSFAHAWRSYIVNHSQCCVAVYPEHSPLCSLGEGRFGHRKIGSLTWLPGDLSPRHAQAQQGLVMQRFRSLVEDTWVREKRPIPWWPATYPFPRHISYTHPEPSAVMCPHPTYGVQIARISC

SEQ ID NO: 967320 - protein, 398 aa, Homo sapiens
MSFTDSLHLLHTTYLVPGALSSAPSYVCPGLVQQLLAAVYACAAGGASVIPCDSPVIPAHNQAFRGCGIGGPGETLWATCEIRQGRTWRRRLGTRIPSTRADRTDPIDTHALNTEPALVAFLTLGTRTCSETLCDETGTTPREGLGPEANTLPRRRNLMGQDNETGGTTSAPSTHLRHGPLQLSKTDFALRHWDAIAAGTLPKSFPGEHLTWLGQNMDPGTTGDYGKHFGPNCPRTISLGLELNLFTDRSRPLNWTATTQLFVAQWASPNGQWIGTRQRHKSTLRPSPAQTVVTFGISHYPQLHTTADLGPATVHATTHNSEGGPPSDGVMDAMAFCSTGITETPTRHMHGRGHTGAPSQSPATIGPRPSVAIVPPHGSALESGAPQNLRATSRTQHT

SEQ ID NO: 967321 - protein, 347 aa, Homo sapiens
KRVSRLSTSTTIENIEITIKSPEKIEEVLSPEGSPSKSPSKTTEEIPHSFVFCNIKNKQTRQKVEAIQYKSLLELIIIHNVTLHIYNHHIEVDHSIMPMVRSELRGMSAQLDFQAHWHKQAFHTEGQHTFQHLIISIFHIVPSNMALLHTSSQRNSLRSSQSQPLPHPLQVISSIQFPPHKHKAHLLLHIVPSRAFLAIHHPVQAHSKFAPAGSPRCSTSCHFSQYPRLPLCITSHISIHYYLIPMHSFEASLILHIGRGYPQLWLIHAECQFLSPGHWALLTHTTTSSLLGTQVANFLKLQPRLTGYITHRGSTPLQASSRPPTTRASTPKGNHRGFAKSVGGNIV

SEQ ID NO: 967322 - protein, 104 aa, Homo sapiens
AALPATPCSHKMPSDVNGRWGSSCIRYMQATQYERRRDALGPKALCSMAGHLGAPNIQSQSIDRSSLPLELVSLRELSLVGSEVGRVTTQYSCGQSLDRDMPGT

SEQ ID NO: 967323 - protein, 152 aa, Homo sapiens
ATPSPFTLRARSPAVLPFRVPALASMTEQAISFDQRLLGRRHRRRHLQDGRGVRSERVKLLLQVQHGHASRSPSRASGTRRIVDCIVLHPRGAGRAVLLEGQPCQRQFATSLTPMPSDLRLHRSRVQGEIFPGGLQGTTTTAQILDVYFAGS

SEQ ID NO: 967324 - protein, 334 aa, Homo sapiens
IRPRVRGEPAVGLSLRQSHLQGHDKSVSSSSVTQKGKYRNASPDLHTAHTGDREGVDVIRNQSNAVSTSSMPMTHFGTMRDSAARYCVFGYNRGETWGSWPRQSCRVSGATAQDGCSSHGSGASGMDGHVGHICRAALSRLDDVALTGSPKVLRRGELLSAGMGLEDIGKGDLALAVPLLVAAHVGLEVFDLFFCAIAGVPRGRRCHNSSGEADGDLVSQGLWHVVGGPIGASELLSLGQLGGEEQLVWQSLLLSHFLGLLKNFPGELHTQVTRSLSRGEGPGGLDGQALFLGAGPWDLDECPNLENATREQVSGLFGDGLRKAEGVAGEAKDS

SEQ ID NO: 967325 - protein, 80 aa, Homo sapiens
  misc_feature (50)..(50): Xaa can be any naturally occurring amino acid
DEESLDGERYHGVPNISVYVFVCSFVRPLVPNNIMAKQITCESKPWDKPXEVHQNTDIFAHHEHSSPEKLCVAKNAIVRL

SEQ ID NO: 967326 - protein, 282 aa, Homo sapiens
WRFHTLYGQGFKRVNIKEKDIWIITTALGAVINKKFINKEVHFSSHKYLQKSSDKKLYSGHSAQYTQPKACSNLQPLNTSGSFHPVLPSPFEEAISTVSKRSSWPCKVALNRREFQRIKAPVAGNNGSDKHLENTSGHLRATPAIRAPTSWDWLQSSKKRVVPIAGSWSTQSSRPTRGHIVFRNHPTVSNPPFRQHSSQKSIPVGLSPCKILRRGTTTDVPNRVQIEQRSSQEPSLAQEAMFRAISIRPQLLHDTARHQTKLHPDRGEPNPTTTEQASNRHP

SEQ ID NO: 967327 - protein, 270 aa, Homo sapiens
MVVHACNPSCSGAWQQEHNSSSKKNRTKRKLDAGWLRPSPFPGLELRAQTLRTLCRVAAAATAAHGASTLIRSEPPPLLLSAVRSLRSALPTPPARCCSGRRLLQPPARRTTGTPYSAHPHSRCPAPGTHSHTLRPAHRHHTPARAPPPKAREHTSQNDPDPRRLTQGHEHRTPHAHKNAKNPRHPATPPPHQPPPAHTTRRPTPRPTAPPTPSPPPPTPPSTHPPNHATPQPPHDETRHPHQPPPQPTNNQPHPTHHPRPHNNHTRPND

SEQ ID NO: 967328 - protein, 143 aa, Homo sapiens
MDIRGAPSGRGRTVMLWGSRGVKSVKVGKQSKVAFFKSPGGFPTIEEMAYKMAREEGLYMLWLKEVGSACARVRSRSQWVGGPHPVGHGGPQFPRYVLRRANYAGTRGLGAGATGVTFPEACKACVRAGEPGKHRMRWEGCNN

SEQ ID NO: 967329 - protein, 155 aa, Homo sapiens
  misc_feature (49)..(49): Xaa can be any naturally occurring amino acid
MIIRNVSVVWKQTIVGSRRRWHAVSVDVAVREEGLLVHDGAQYIIPSAXAVQHGASSRPWAALSSLGETLGIGIPPPKVVPWRKKTSCLAFNIPGVDTVALVDGFQPHTWPRGTPEILRAWNGNSTRVDPSGFLGLRGPRSLPRGGSQGPLALVP

SEQ ID NO: 967330 - protein, 177 aa, Homo sapiens
  misc_feature (70)..(70): Xaa can be any naturally occurring amino acid
SILNEENLIDEDFQNLKLRSTGFTNLGAEGSVFPKVRITASRDSQMQNPVVSRHSSSPALTIRIIRMWNXAMAPNHMYISIILAVFDKTAWRSEHHVKTLASGSFFFHLDILPVLICNGNVVQCLANDIHAHLLNEESMTLTCSSDAISACQSSVRSLSTQATNSTCRQLGFTGYAT

SEQ ID NO: 967331 - protein, 444 aa, Homo sapiens
ARRLLNRFGMDQASHARPRWQVHWCMHITHVAHSIAWSSPGAVHPAHLGMQALAQQLTTGTSHSLLGAHDRAAVSMAGLSHPSTVTTTHSHAFMHSCTQQRTFHMPARYIGTATIHRAQHMLRQHSPCCLSLTWPQQAIATASLHQYAHTSFSSTSRINSNQPLTLTQHHASRWQHVITATAPCFAHHAAAIPVSCTPAQPHTHKHSSHHSTAGWHPRPLTLVPLSPRQHRIRGSLPPVKARLPSSSFQAAWAAVTQASTPSQVLLHPSPSRTTPSFSHPSLHHANTLTYTPRCCTTPTADTPHQERPQDTHGAPRPRRDPTRCTTRARRNPTQHHWAPTRNHSHPTWQDGKAPPLRTATHPHRDHRTARTHSTPRTIHFGGYRDNATGRPHTSRHPPSRARIPGGATTQRRARDADANPTGRSPRYTNHAASTTRTDATTAPT

SEQ ID NO: 967332 - protein, 245 aa, Homo sapiens
MARSSILFLAKMGALHCDIRTIEGRGLPYDDGAYTDYDIQSGSMTAMQTSSPRYHSHGILRTTREGLERKQKDTGVPPSTADTHDITKSKLKPQADGSYSLETPYPTGTYSIHAQKEHHYIDTGQHQNGSDTHITWHEQADTRDKKNTERNNRQQETANRTHHLNKTRRRNSEKTSLETRERRPAQRDKANPGPRTERKNADKHNRKRNTKYPKQQNTATQNKNTRPHNPTHNNTKPKHQTRRQH

SEQ ID NO: 967333 - protein, 352 aa, Homo sapiens
RASLARVLSDTWGERKAWRGPPRQAAMRLYAEPPGASPLSRLPGTWAPPRCKRALGLTPLACCPWTRDDPYRTRTGDFTCRRAWRQLETHRVNRPMSQMSRPRLVDVSSDHQVHQIIQMAMSHKILQGNKQRNCSNFKDNFELEVLQAQYKELQEKMTVMEEEVLIKNGEIKILRDSLISTESVVEEQRRSHVLLSKRKPKPLSDKGQGTLQKLQSCSLHSSFKDAEMNDLRDKAQNKMNEANKLADTSVPHVKPRNNPYWGDTGRGCHTSVENISTTKRFKATCLFHLSAGALQPGGPENKHNQGEPTTQRSHTVTRQSTHATRDKNETNTKTQQSSPTRTKRHNATNSTS

SEQ ID NO: 967334 - protein, 414 aa, Homo sapiens
IFFYFKWHRLPPKHLVGKYDTQCSLAGSRELQHGRIGQEALAPCSNTAHRSSFIGNTPQHTSTRDYGDVTPHILPHRYSGFTASTTPQFCAQVLEHLTLSLLRYNHTHTTTFYTARKTAIFMILSQPTVKHAATPAPIRPNSLTETLPQSVTASTMPQGTLPTSPSSFLTFSSTGDSAAQQKVRGRAPAYLAIALMPSLYTNRTVASAPNSPQPRTAPDTPSPPIAPANGTTTFNPPAQHGRSTHPSTPPSTSLHPPEHYHKAIHNTTTNDPHHAKPTLQTTLPPNPTPPPHHLYIRSTGAQTTLIIHNKSHYYITRSERRDIPSTADQPRRASWDTAQKLTMGNTNTPDMTNDNTTTRQRGHTNNGNYRPQYGKRHVDSNANQALSTQTNTQRQLTTTKSRTTHESCDAHNAT

SEQ ID NO: 967335 - protein, 117 aa, Homo sapiens
MKTYIRNIYATAPTTQRTVDSKDRSIPYRGLVNGLGPSSYRNTSRSEEDRNRDLGHSALGAASCRPTLETEEKEKTMLVLGPAAEANEGGQSHACPMLRDVLSHNSEFTLTRTYAPT

SEQ ID NO: 967336 - protein, 67 aa, Homo sapiens
NASCTTNCYSNPVPRSSIDNYWYRGRTHDHSPCHHCHPEDCRMAPTWETVCVMCLRGYYQNIITLAY

SEQ ID NO: 967337 - protein, 234 aa, Homo sapiens
MHKPCTNIDQAAAWHQLLNTLFGGFCQKGTSGKHTNMWRILALIDGRLTICTISCFFAHSGFDYRDYISTPIPESKPVIGYCRVISYFADDREILTIYTSYKEKSIFLVGPQEKILQDMDPDDYPRTAVLPALNPRPDRHNNPPMDSLDPHQYKIGVSNHKASTRAPRPIAPKTSPIRLTVLTATPPTLGTPLGTLDLPLCHPPDNLITMGIPNFEASCSWPLYEHAKHYTRKP

SEQ ID NO: 967338 - protein, 269 aa, Homo sapiens
MRRGRDDVALQLWPSSSEALFILLPSPDSPGGSWTQCSSSPLASHCQMLVEVGEEAIDDSSAEMVGGTMGSGHRGLLVADVWSEVGTGHASWILRPTRVLENVPTTLEPHCRAPRAQTQGVRPGAALQGPRGLSLEGKCTRMITRQYGHLSRDTLSTELLIRPDIGSSGLCPQWFEQALEFTQSEKELLESLKEALHTTRTSSPSAILEAESRMPREKLLYISSQEWIAGQKEPYWEGHGPAVMGRLGPQGAEEIVNWKRIVLSRNGKP

SEQ ID NO: 967339 - protein, 476 aa, Homo sapiens
GKNKRLTKGGQTQGSPSKQSGCIPFSSSTQHWSCMCNSTVLMFNHQAHIIGTSTLRTPGTPRHTQHIAILHGISKASVLSCTVQILPASMPAHACTVAISATHSTAAFTAQHVPEVNTTSLALTLPMAIGIYHHVTPHTCCSHWSNKHEASTIALHSSTVACPKHSPAWFTCFPYCSCVSVFYSNTTAKQSSITAQHLLHSCQPTNKGPPKITGKQSMHRDTSMNPQQGCQQNMHLQQQVGQNTIGIPQHKHLATSTSGQTGFAQLLLLFLLPLHWSFRFTHTSNKHWLAKTGPKVLAPLGRHTASLGTAFHEVNRAGHDFWGTQSSTWGAHQTHHGRPNTALQTRRLGLGVIDKPNARTHKTIRAITRSTELRNIMLLHTKYKKECPFCGATHTHNTTTGAEAAHTQYTPKGSTNQLQTPQPLTTKGTLILTAELNKHSVDDYHTSRQRPVPGRKLRDHIVLTDANNAMHPAPPT

SEQ ID NO: 967340 - protein, 519 aa, Homo sapiens
AGKQELRRVLLKVENKEREPGDCPREASPAVALTRYVVGSLLGAYIVRGQFRRMCTWVDKQRDQITMNRRPLDDFQLSTSQNMCSSQTWRGHPVGWYSEGLEEKAHSTHKESPLHKHSHLDTADLMELAGATCEAGGCKGRVGVIESFGCGPMRSWCPWLLGVQGRLGMEAYRSSCTAIDLACSGEPERVGATVKSVSTIEEEQSKKGGEGVCGLKGFESRKDGMSKQACDLVDKTMRTRGKHRQHGGRQQGYEVMTGVITNVYREMANRDRNWDIRGNGLAKSSASLCGPRQPSWASKRRSEHVNTEIEGRTWMGRGEYMHRVTGAANYMGELSHQNMWDSKPPQDGKGTHSRPAGVGGNNTWVVTRRHGRGVRPNMGAVIWNTPGHGVRRTFDRRGKKRLTGGTKKGTCRKRDSVKPVKEQRVPTGGKGTAGGTDKRGPTGSPVAASVNNRGPLNEHNIGAQKAELPHTEGRRCPAEQGPGDPHYTAGQDSWLQENTLTETTRPHPKKGNDKENQTE

SEQ ID NO: 967341 - protein, 562 aa, Homo sapiens
RRPALRFEADPLRTPTPVTPGTYISGMSPTALQRQTQLLRRPAVLSRVGGRQGIRQWTVDVASNRPHEMQPPTAEQTLTASMSPRPGYREIMRTQRSDKSRDIRQRRSKHTAHRHDPVATQTTATCHYTDAPTTGRLTSSCQDESSHDSAAERTISEPQAGASHTPSTTRANSRATRTLNHTHQLPRHTGGLSHSNPIQALHHLIPTLRINSNTSLAATGAPSRLSDHAGPASPHELPRNSRTANGRHLARTSRTTHQYHSHTRHTTRHTKQTRTRGHTPRDLRPTGTLHAPYQQPGNAAPPPTMERPHTSRFATAGSAPPRTRLRGRQPHSARPAPRTPNDTTLSGHHHHTARPPTHLTFTTRRTHSHHGRHKHGKQHSHYRAQPDRSARHAPTRRPQARTNSDKRPKEPADSRYPAGQPQTTPTHNNADTHAAAPGPCQPPSSDNHTPIHSLATVPDHHRPQRRQPTHGPRTHTPWQGRQAQTQTTHQPTPSAAHHRAHARHHQRQHTIHPRPPPHTWTSDTDAHSPPSASHPAHAHPPHRATSTTHTDTSDPTTTTQPA

SEQ ID NO: 967342 - protein, 406 aa, Homo sapiens
MRGLTHGADAPTIGKFRTDLHTDFGHRFPHRTLTSGTWVTNQLGIFGFIRFALVRVTEGTHNVHHKRHPCKTTNNIKSQFTCGPSDTTYPYRVGLTKRSTCQNRTGVATGAKQTSRGDSDTSTSTSENTPPLSNPPRDRTEVGHPNHQNVGRRRRNPEHGSGYTTSKQRSRIVPTTPQPTSGEHNRHPFTEHTQRHLVAPKTTELQELTRRVPQMPPDTSTRTTESTQFQNNIALEQATRPRTAVTATSAAHNSPSTGPALIHLDADTPRNATRSHAENRCPTLGRTRTTHGVAPTTTSQRQPGMRPPLPPPRDRYRQKEDHGSQRNHETYHHTTGSRPIRTRAHIKADTGHVANHDARRTHANNQTDAALPVTTATRHRGHHPALTDTTTNESTQTAAPITRGDD

SEQ ID NO: 967343 - protein, 115 aa, Homo sapiens
MSPALGALTKLFPNGPASQYERPYRFFFSPSPPGSTGGPPPFRAGPQRTRPLGPPNPPLAPHANGPPDPPPPQDRPTARKTPERAQPAQPAHHLPAATHAPPPATPAPPDAPLTP

SEQ ID NO: 967344 - protein, 423 aa, Homo sapiens
SSRLEANDYFKAKDYLSNCHQCSTAMAIELNPSNAIYYVQPAAMAYLRTECSWLLLLERLPLRGHLSLDKKYINGVITCLVLARQHGTGQVPGACAEETTMLVVKVKPHDKDAKMHIPGVQQDREAEGLLSGPSRADEHKRSAVDSLDIESMTIEDEYSWTQACTTANVTNQFHRSELMHLVQGTQNETSTWKVCHTRILGTRSQGGPSPKHEHASWKPSSKQTDAPIHTMWGNRPWAQTLCTLTQPYPSSNGINLGRHNATSPSMVNYVAPKAIPVNVHLTLVRVHTSCTRIQAPTTVRAEPRQHDTREPQQQRPGGAERTGNSDRERQRRKGRKTGEQQATRGGQGTTRRSRVPRHAAVQYSGYPWTAQARAQADRRPGDGSEKVARRTHRSGRERSERIETKQRSRPAPLRPHSTTGRTQ

SEQ ID NO: 967345 - protein, 546 aa, Homo sapiens
FLRISAICVQPLLLSVPKHKLTLAVFVPWLFCASYQPAHVQHQPFTCMQFGQLTTLAAEGPCNCAPVHTSCARSKMQCTAHMAASGKHRPHSSQLFSKPGRPVGASMSPVTHAPHSSRTTPPQQASNRPSTYTSNTRLLITLQIFVNTPHWHNRLDHNHYTLTSLAEEHTHFNTSTLLRIPHTPRTPIAAFAGTNSQHTSWGSNFITSSQCKRHAHPGRPFTGSTANGCSPWLGRAPSKAQAQANARTNEVASPIRKQDTLALVNDFQINTNTNLSTDHPFEAEDQMKHASWVILGPPNHLITSNTHSQPMVTHPKQESCTHPDNCRHYWTRLGHYQWKADTTPTPQTDSLTCPHTRERQLGKGAHTQPTPRNRTRADDTKTSTPQTTEQGDATNQSHDKIVVACDNASHKTRGPTTPDATPHRHRPPELPSNTQLETTKLRRQTAHTSRTGHTTNTERDTRDQTTSRTPGHGASERQTANDRNQTADKSPDENTDQRERRDTRETTDTETERGHTTQRDRTRTRHRRRTSDEHQRDRQDQTRRSK

SEQ ID NO: 967346 - protein, 245 aa, Homo sapiens
ICCWWSPHHAVPVPSVPTVPVCPLHATFLSISDGVALMFTHDVLACMDSSGTPVGRVAMATMAMCPDGDNSLRTRDMGMEPEPCGPRDPQATQTASRAALATQSSHARADAADGGRSHPLSSYTYNNNAECTFCRLPNISSLAEVTTTAHESWAACIPKKSLKVIPKDPYDRYPSYWYPVFLVRFTGTHGEPPTLLQRVAPEGHNPKDPKTMTGGQIPQTDLGITLALTGPERNGQGIPGGWGTV

SEQ ID NO: 967347 - protein, 259 aa, Homo sapiens
MTLVHDIAKLGREARHPTSPSIRPATINAVTYKHAEHHDAGTPAEPDDTHTTGPTAALPSHTTQEVAHPAEANAPNHTVTPTLGNQRTEPPGQQETQTHDDASHENERVDNNKKQTTPKEDHRLSTITTEDRPTLAIRPHNHRATAEEGGIVLTPTLRTEQLHMTPRSLVTTPPPTSSNNKQPKTRHSSQQPNTNHQTKPNIQQRDKHDPNAAAAREQTGYRQTERGKKQRGRNQPALTRNHTLSARNTHSQNDERPDT

SEQ ID NO: 967348 - protein, 389 aa, Homo sapiens
VHVILGANTYAACLYPSNLVNSTSQGQAPIPGYHLLYMGCWSHSTHSPAILETKTDAIVLPLENVASGDGSTVTIQQCNVLATAGSRCQPRPKPNRHASQKPIFHSETSLRQCTVRPYRPTPDPCTLTATTTPISYRQGSGGEGCGEEMNLPVAPQCYPSDLRSRSGCQLHLEIDDATAQPHHHTHLHGTNQEPDSPTCSLMVQMDGTPPWDWLKASPATWHFGDHPGLDDIEIPTTPQSPTREVADPRRTMNISSPTAQLRHAPREPKLAATTDRPTSPTTQCQLGTRSPAWRVHATHDSQLAATEQRKRRRNQTPPTPPPRNQHPPTKPKKQVEAKTKHTQLTPTQDHTDPTPETNHDGSRTRSARENDKRRDRPLQTEYKQAQQHE

SEQ ID NO: 967349 - protein, 97 aa, Homo sapiens
MDFRSGCPGPSTLSASDTLTYRPYLLSPASTIGLAVPGQTPGIPPCPSLLLPSSDVAAIISSLDRVHHSRYSDDFFITEPEVPWWLLSSSSLAYLYV

SEQ ID NO: 967350 - protein, 286 aa, Homo sapiens
ASAPRGLAWSPRSPRGLSPSERGSSSGTPKLIQRALLRGTALLASLGLGRDLQPPGGPGRERGESPTTRPPRQRPRPCPTDAAPLPRLICFSLKTPDYPGHLRATPCQLSDPGRIPMKRTTRATRTHDAHHDTMQATDATDAPRSPATRPPRTSPHTRKPPPCPPHDTTETHNGHPQYRLPRQANLEATTIKTDTLSRPTRHTTRQQPRPRTTNSTTHLNAHSPSPHSHPRNESHRTRAPLHPHYGSLVAAQSTELRNPRPPMMSHPLLAPTRNASKPHALAAQPH

SEQ ID NO: 967351 - protein, 232 aa, Homo sapiens
LGLVSPGFVKCGKPEAQSCRDSTILAFSTAYSFGGDAQADEGQARKICMLQRRFKEFLRASYLHCAHQNARASPFKLQRMNIKRHYNLAGATGLERGTHWRTLARLSHERPWPTTSYQSSQPEHLQLPGSEAAQARYPALRLHPAPGPPCRHGRCLQEPSRVIAQDRNAQHLSKHSRQPEKHQNNECHNQEKTESHGNQSIAGHSCEYRSQGINRHSHIPVTATMPANTPTP

SEQ ID NO: 967352 - protein, 175 aa, Homo sapiens
MLARLWRTKDRFHNSRWECHLSSTIVHDSMATFFKDLESELPFHPASPITGYITQRTLHWSYHYDTGMSSVHSQPYCPYTTTGLRHRCRSGFAWLRPWLLSAAGSSPGFSRLGLWSFGALARLGGHPVTICGPVRMRALGVSPLAGIRAGTLALSTFLSHRPAVSCVHSPRACVP

SEQ ID NO: 967353 - protein, 487 aa, Homo sapiens
VVKTTPKSHNGERKRLISTLSSLDHVSIRATVHHYWPSASHQMRWPSHKQQPIDTTFAEGRLLQHGQQALTSKLMHWDLVHQHCTQLAAVHTWIITNCHPSTICGNICSTQTRSLMCNNPLHAPRHTSRTFHTTTPCNYPGTSQELTSCMIPAFKPASVYRCNTSDSLDISTGTGDRHTRRLPSLDLTTPWSVEHNTLTTIGCNTQNMDFTMQAHTLHSTKKTKNTLHGNKSVHRRNAHRQRDQSTRNTRWHYHTPPKAPADANNGHQITARSRTSRRTNTDWKAPTKTNHRPRDHTGIATRSHQSRDETTPRREQPQRDNETNTRNLANHHTTTTENTETNPTDHEPPNSQDDVITNKLEGNTGAQENAGQSPDCNTRMLPDTAQDEEHTIDHPTTQPTKKTHTATPETTKTMRNSTLADKRRHKEQQANETKPTRNATCQQTPHETRQEEKTNKQKIRHTRTNRTDTTTQQNENYSEVGRSTNAT

SEQ ID NO: 967354 - protein, 350 aa, Homo sapiens
AEGIMVQYETVWPRCLCASVGLPCACCFCGWCAVCLRCVLVLPGLAAGVLLVVLVLLTRGMRAGAWRTLDMWRLQRFADPATQHLGLSRRCIARAPCTQLCAASYTVRELGPCRPVLYHLMCGTGLGKDTKGPTVVTSVSRLTVRLRMSQCPNGRDMLLWRTHVSLKECFTYKGQDSTLGLSLNCRGAGGVATEVMVHVLKLQGADALTCNTNVPQSMFSYDLQYHLFWPDREPMGQSSKSPGESSGGDRGLIGSRSSTMGIRAPDIEQGSIRIHLIISRGHLRALQTRSETRDHKVGLQGTGTEQRKDTEHTEGPKTREDRPDRRRHHASTEDTSDPRGPGPTKRGTQD

SEQ ID NO: 967355 - protein, 311 aa, Homo sapiens
MAAQADGGGLRHEGESPHTLHVDGDTTRLGQRRSTISTGGTRRIQRPTKKHRTDPKKHKDHQMGGKEQLQTREHDKVVGVSRHEGTNGQKKSTEDPRQTEETGDRRNHDTDRQRQHKKGAQPPGHRRIYATTKSENEHLKRFKTTHNNIEHHMKPTMEIDSHQIKGRPQPYRARDRPKEAETTMDLGTQNEPKEHCPRETDTSDTNSATKGQHDSTDNPEKHHRKTEKESTKDTKNNAENHHREHNTSTPLRTKTKNKKIKDTGKQERKRKRNNHTKSTKTANAPGKKNNEGNKQNKENTHTEAHTYHRAA

SEQ ID NO: 967356 - protein, 392 aa, Homo sapiens
MFYILYYISIYVYSSIYIRHTVQKRQRKNTQTTSHGTLGSHSENSSSTNADDRTRDPGTRNSTPTNHTLPAGFLLTCKHSRNLSHLSDTRGSMLSHASPLHHTRHPWPIKQNTNSLPMPLATLLLSWPIGTLRYHDAHLLLTRSTLPHPAGLPDAASPSLSPPLRTSFTTLYPPSQSPPNTPARGAYASSTHPPPPPTALRLPPTHPSHPPTPSPHSTPPHTCHAGHPPTPHPTPSPLRPPPPTLTLPPQHSNAHHPLSIAATAHQTQPHTKLPHNTPPPHPAHPPAPLLTPPHWLSPHSPSWQCPPAPFFPSPSPPYTRQLHPPTSFPAHLPSAAPSTLPPAPPTPPSRSPLLPPPQATFPHLIPLSDLLALTPATPPPTLRALSTPSLSL

SEQ ID NO: 967357 - protein, 653 aa, Homo sapiens
MAELSERQAQLITTYIHSLTPTLPHHSGTLHNQTQQQNTPTHTTKKQGRRPSANSRYLSRRRGAPQRDRSHAVYTQGYHSDETKKKRSPTYNTRESAETHNTPATTDETRAPTHSTNNSNHQPPTQHRDPHTQADQHNLLRGTHHPIMRRDKDEKTTIETNRTRAEEVVVDDKHITYLMRNPQNNNRTQQLNEKRGQISPPDCPLHISAALTHTLSTKRHRTAQTRRADYQPTRRSNNTKHKNERNTNYQRQTATQRNTAQHTHPTAATPTTQHSRPHSHQPSHPAPPTHPCLNTPTPPAHAPPPPEKIKKQHPPPGRRSAIDQPHTPPRLTTHGALQSHSQQRQYHRAEPTHRRNIQSNQETRRRITNASLHARDDRHRTTDSRKPGRADERHQSPGVRTHPARRAPPHTAAHSSSGPTHTPSAQDGRQHRRRARPRTCSRRARVHSSARQRLDEHTRARRAAANTTAMRHTAPHTAHRNRRPTQQPAAQPNTTHRTPPAAEGAATHTHVSGSGQQQTAREDSSPRPPLHPQRATPEDERRHDTGLRESTRRKTRTTRRESRENTRGRRRPSSCAAGPPRRRASPTTHQQGPTQATTTHRTAPRPPLHDAQHRHSGTAARQPPRDSRTAKQQETHARTTHSNRPHAPHSPPA

SEQ ID NO: 967358 - protein, 221 aa, Homo sapiens
SWLSLKQTLYQGRLRPVDFNVRDGKISKCFLDLPEKLQDPFQKHLNSTEEYLAFPLRTSASHFFLPVSVVYVPIMVGGVMGNVLVCLVILQHQAMKTPTNTTSSAWPVSDLLGSCSFGRPRGGLMTCGSNYPFLGRARWGCTFKRALFETVCFASILRITPSGERLRGNPTPVRAKLRSTRVPGLRNLGILWGYSEHFSLQNQHHGLQFTNSNGPCPRWAL

SEQ ID NO: 967359 - protein, 426 aa, Homo sapiens
ALTIQVHPVLFRNGTYESNQLKILTQSSCCDYTEEHARPRYFLDYSRTSNDASAAMSSNSLLLTRPGRHASPATRLFSSLTTTSSAAIRTAQLVYSYSTRTSTLLHDATQGISCNGSSPTCIPLHSRLTYNATTPEIHSQTHHALHNHADTHTRPQPALTPTAPQPLKRRYTPTTTERNRHLTALKRNLNSNGTVGYTYLRHRPIPHLAPPMAHTGAFSTTRNKTYSPQEVHRRTTWLPIPFATRTNSSHTYRRTPGTPATAPNAPSAPLAPTIGIGSHALHPYRHTSHPIHSRRASALAPTHSGTTDGTSKRPPRLQDPVITSLIDTYPPHEDRTPNAQLPITAILGAVRTIGSDSNSTPILRPPTTTWNTPTTNSANTAHVHAPPTKQTSASGRPISPTPPSDSHAHRTRAVNDRYTRHTGRPH

SEQ ID NO: 967360 - protein, 63 aa, Homo sapiens
MRAKCDSARRGWNLADDGLVDASRWCPVRGEPCLSAVVCDGGAWGHPGQLSGHHGRQFLNNQR

SEQ ID NO: 967361 - protein, 317 aa, Homo sapiens
FLGMKMVGELLRMSGAFFMRRTFGGNKLYWAVFSEYVKTMLRNGYAPVEFFLEGTRSRSAKDIDSYIRSSELMGRGPYFTKRESLMNHTHVANSSYASHDWNTVSLSKPTFLYVVMKLARSVPKPTKNSTSWVAEQPERFSLKIVEALHVYLEDPVSLRSLARWEDESELNNLVPRYIPQKQSEDMHAFVTEVAYKMELLQLTNHGFEPLDLIVVSASETGNHGLDAPVQTDLYGYQVNPGMGGSSWLIITAESCPARISGFQLPPAHQGPRRARNRRARARQATPVHTHAHWAIETFATGQSAGHRESPTPKGEKK

SEQ ID NO: 967362 - protein, 361 aa, Homo sapiens
CLPQRMHLRGPGGRAWPQRSKTACEGAFTGRQKFLRAERDQPSCIQSWMAVEHWSRRKAAKRKLGRHRPSGGLIRGFVLRHAPRCPENAFFLDHVRTIFILLNLRRQHAPECPGHARGPAPTTCPDAEASELLRESCITTMVGNYCRSISPELEAAACKQKAAGYVSIFQGKKDNSPSEVYPRPLSSRIDAWYTIAITPRSACRTLGSEPIHALRCLACDNPTRKGLKASSREAEREKPNAAPTRERRPNAYHHDWIGPTPREHRHTQRDKYRATTYTESDTKHKGNEQNKKHTRNEKPHTTTLRATAKKCNTTTGETHTKETNKDGRLNPRERPVPTDKAAVSTQNTQNKTPHNETPQNT

SEQ ID NO: 967363 - protein, 135 aa, Homo sapiens
MDVHPPIIVLQRCCFPQWGEILLDPNTVCLLVGEPRSSFPIWVCCKLLYCALRVACCFWEQFAYSNHLLCWDSSFQRCRYTLFSSRLDLLLSWCPWCKYTSHVLCSHFFSSRHIVICDPLRWGFPWGDLGCDITA

SEQ ID NO: 967364 - protein, 287 aa, Homo sapiens
MAFPRINQHKLHDSYFAISPTPASHTAYRWRPEQEQVEQIYHLTLAGNYVHTLAAILVDRKPVFVHYTLSQVISILSSGDHQVYSQQQCITLVKDPLAINPHTHNAASIVMITELNRADVTTYLRIIVSPSPKPAGHSLIVTKQIGNDINSEHSIDHRRDGGAPTVSTHKHIILHINRVHPESLLSYPTTGSDHTYQHDNHTYGQTQHPLPPYDEPTQNHNREHTDNQKTTQDYTKQNDANREINTRTKKPTTPEATYHKHNHQKNTKQHNRTKSTRSKDTRVQNKN

SEQ ID NO: 967365 - protein, 199 aa, Homo sapiens
SRVRGKCILDSVDGAPPVLREMELPAVAWLCGPWRTLAFVLGNYGLTSFLIIKDQRSMVRVLMGALRPLKSHITGPVIGCRHILHMRIIILDQLGLYKMMVDNGWGCDCYYMSGVTILSMMDVDHQIAKRDGGTLSKSQRDDDPLVMESRGVVVPGVVPCSDEAEPVAEIVAFIAIRIVDGYEQAARVLLKHWELVSCE

SEQ ID NO: 967366 - protein, 48 aa, Homo sapiens
MRVTARQTLPLAPSFACCPPTNCKLLSKVLLRNRSHTLVVSNKQRAWK

SEQ ID NO: 967367 - protein, 396 aa, Homo sapiens
KRLFTALGSASAWDHQALEAGFHLQLGLPYFCFSLGCGKPRRFYLSFIPQAAGVPSFFPRGCLWLQLHEHPNGVRPVAMASRSLPTEHHFSNFFSCPSLPGALHKRFCADLHHIAPLVPSVVAHCTNQHIAAKLMASQCTQAHLHVMRVQPAQQVGRSSKAANIHQQPQSAATQFPQHAQQGSTQSCCKTTVPSPCSPAWPPVSKCHELPRTGGITHHPGSNQHRTNTGATTIRPPTDHRPRQSARGFKGTTSPQLDTRTLIGPPPGERTTGDIGWPIRLHNLGTTKTRDPNPPRVDTTARTRQTLQAQSTTRRQTNPPNTSPNRGTLARHDRKTAHSTVAHNPMAQTQRHQAPPAPHDPRNTYTSLTHCTHRSQKTNRPTGTEHKPTQTNAETDN

SEQ ID NO: 967368 - protein, 230 aa, Homo sapiens
PWCPGQSPLQPFPRAEQRNFLRSSGTSQPHPGHGYLGEHSSVFHAAPGHLPLLHISGRGPGTPPSPLPTPAVGALPTPITQQSFKQRITMGFPGFEKSGGTARARGNRGGRLEEQRVPRGRGGDTKEEQTDVRLRLRCHRVRINSTSTQRASLGPLQVTGLGYGYEKTLETLPDDVWYVREKFEGDIKQEGVRAFERGLPNKAGVTCSCGNYGGWWMNKNCHSLLEGAGM

SEQ ID NO: 967369 - protein, 115 aa, Homo sapiens
LEARWVSAGVSRGGCVGLQEKMAVSNTELYTASLLTPFRLARERTLNDSDHKHGASANRAPRLTPAGPSQTTALHTHYCTPSNHQAWPHGHALNLPPPPTRPHNSTAHTPRTLTH

SEQ ID NO: 967370 - protein, 41 aa, Homo sapiens
YDVAHFHYVLSIGAVFAIIGEDEDENEEAKQTERKRERESE

SEQ ID NO: 967371 - protein, 113 aa, Homo sapiens
SNHASDHRSRDPRDNGSRSGEPPPMMWRLLEEAVRKNGVARRGGELHNGRDGRRPMAAYYPSPAPTPRTRDDRTRTGRPEELHVLKNHFGAREVRETRLKFGSSDSYAPFRAP

SEQ ID NO: 967372 - protein, 144 aa, Homo sapiens
MVRSDHQTTRGAHRRGARYTHFTGGQAKPRPAVQRTNTNKLIKRETDENTPHTILHERRREKRTRANKSSRPTKSKLEDQYRATQHEDTNYHNTSSGEESNTPRGARAHPNRTGTINNSTQREENTTSWRTRVKLRSGNINKTR

SEQ ID NO: 967373 - protein, 106 aa, Homo sapiens
MREDYLVEAMEILELYCDHAAGFGFGLIQSMKELDSGLAESVSILILWLLLVSPVQERVLGVWQQSVADQLCAKYHAQDIIGIAMVRTKARLRTCGIDRLKCTELM

SEQ ID NO: 967374 - protein, 173 aa, Homo sapiens
ANMNYVHRDLAARNILVNSNLVCVLTWLPVRETEHYTQCGDPRDAGPSYESLCTTGACMSCGGDTYGRPTDVNTVISINDVRSQHGLPRSPVMIMLERACRAKSCLVAPDSSSAPILNLLIDPVLSSHREVEGASDGSMLGPQIRVYGDHGPVHGIESVHDNEIKDCVRCRAK

SEQ ID NO: 967375 - protein, 259 aa, Homo sapiens
MPSGLSLLPDYEDEEEEEEEEEGDGEKKKGGRQQAALRRTGQGALQVSVLSPVKVDQRQCACSKLIYSFSYYIPPQWPPIMSSFQGQVDECRNTLKTVVDRTRKHPRKRYRNGLCWIDSLSVAMQGRYEHGFDCLQRNDSDWTTRGGTDTCQTRSNEGMVDSYIPTGPIRCPTERVRERDRVGNRSKPLGGRSECSPRLAVCEPGTVGGKQSLGVIRPQALNTLQNNNPLKEKSLHPINKQPARTKGRTEAMPDRRTMQ

SEQ ID NO: 967376 - protein, 184 aa, Homo sapiens
YRADKHVCVHVCVCLCVCISVFCKLNIQHNTQNQLQPTSSIYHQHILYFIFITHHQMQHHVITQCPRLIITHLHTHSSFYAAFQASNTSRSFHHHLLCPVVPDALIASQTLRAHTSSQTWHTHTNGFYFGPDSKATSSQLAHSALSGNTFYGPSVISSGTPQISKLNPKVLANTQSNTPIVPNY

SEQ ID NO: 967377 - protein, 412 aa, Homo sapiens
REKNFPCVRYRLSECLLASSHHVHHAHIGGGVAHISPITHLIYHTHLHCQSKGFYIILFPISTAAGSISIETIPHTIHISISTHTYYQRLILFMYTVHTSQPEHTSGLDIHETDRQVTSQPSTQPLRRSQAAINIIITTHPLPSPLGQPAQGEPSASPDFDPQHKHRLQQFFASFQLAGFKLNTHMFTIGSSGLMRSQKLRLFSHLCPSCSAIENIVAFSFHPVDWCHQTTRSHQYCNLQSEFANYLDNLSTPEHYSLLTVHHCNLPAVPGPPTPKRNTSPGAQLPAATTGTYAAGDTHTKRQKTAGTPRSHNRTHPCQAGKVQTAHNGEPAPPATPAQDTGHPFGKPRTVTTAGHDMHRGIKEQKQREITDHKQGTNHSHHTPSGQNTAQLTQRDNTEQRTAAPPTLLVAA

SEQ ID NO: 967378 - protein, 521 aa, Homo sapiens
CSLPEASRSSCDVCRGSQAVLPPDHPIREQPTSTYCGTAGMDVPDHLTRPTTMHRDLPIIAWHLSLTDIQNTQTTLSAVDIASCYQCTDYDDAAAYNTKCADRLIHRDAILYTILADLGPRDGCAETRVMRVVEPQTIGQQRAKATENSSDRSPIGHGAHKLHWRPESKDTKKNAGAKQSTSHSTEPPEVETFGKNGAAEYPGEKATITPVSGAVRPRMGWKGAKLRPDQLDSPGGGSSNVGITEPADSTQDTRPTKGQGHGHSGLTSKPQPRSPSATKPEATKRQQSKHNTPGPEAQGLGTTMEKPTSYGPFTTATTKQHRDSGAQTETSHSTHGSAANPAGNNEHRAHMSDSTGTEHHDITTEDKGARSASRRGSKTEAAYRPTRRRKPPHTHSHPPKPKRHRNQTQHTCQKHTQRRTAPHPRRRPDNPKAGEDGPRRNTQNGQRQGKMSTPPPEPRRQPDTSSNRNTETTGTKTTGPHASHDPSNRSRRRQRPPRPERKERRETTVGRTTPTSQTTDN

SEQ ID NO: 967379 - protein, 216 aa, Homo sapiens
GSSFPLASVPSSPRPPYAYTHALLDKANIPLSRTLHLLRPHSLGGGDIALLGFWFGGALSAPSLFPLASHSCGLGTLPLRLTKGPNPHLILARPTPLPWQQQVWPMDGGAGPQDSPSQTVFVTTLRLTYHPSPPSLAPRTQAPHPAPYGSREGTALVSPLLPLHCGHSPLALRLPSALHTAAASPLPLPQRTHVTPHRALRTPTSRYAAPRPPTPY

SEQ ID NO: 967380 - protein, 130 aa, Homo sapiens
ELVHGIGRLTAYEFAQHFTTAQLVSLGIITIQPWTGRQHQLPNMRRALGAKVPYSFVVALRANRSKHHFTSSCQQHRCKASTHWQHVQSFIRQTSMRGVSLITSSIMFSSPPQHPSQHSQHSTLICTRFT

SEQ ID NO: 967381 - protein, 132 aa, Homo sapiens
MFPPSSGFWRTEQLVRSGGGPLSLFYSGSPTSYFTKRLQAGLEQSHLSEGNRSSPLGSGEGLLGLRPGPNGHSHLLKTPLGGRNAALTTLLPSTEPSPEGSYVGQHSQASDGHYADSYLKRKRTSLSGWHQR

SEQ ID NO: 967382 - protein, 315 aa, Homo sapiens
PLPTSVQNLAHHARSRVDRLSRPWMVSQYNPAQTAATCVTPPAVTDCYDSADMALGCCYYSDYWQIGEVPAAQPLDAPHYPPRSGHASPVAGSPKQPAAWLLPLAAATGWHRYDRLHNRPHRCSHQMSRAILDQGAKPDASGSSRPHTSCPHTAHLAPPAPCLPTPYYSQPCRHTILHPQLPMDATITAPSHGHNPPAPPPPARTPQTSPPTCEHKNPTPPGRPPACPTRTADHSRSTQTAPLPPPPALDKLNPHGTSPRTTTPDADRDPRNLRAQPHPPPPPPPTTHNKAPHRHQPPPPPTPPTPRTPPPPPAP

SEQ ID NO: 967383 - protein, 314 aa, Homo sapiens
MHTVGTSHISRLGPRTLCGLSTHIPSHRPHHTRQAPMRMAQKKYHGPRTFSAHTLYPLAYRYTRCAQATSPTSPQGAFLNVTRQCNAKEPSQRTAAVSPSPPGIGTAYPSGTHTRPYAHRRQLSLRYAHYTPRSQRGSHRELHPPRRIPIRQQAFRNPHSEQRARDSERRNSTRHYRDTPSLRPTTGNDRPRKGPAQANRHHTPPPGNALAPWPPPHAPHHTHKKQQLPDGTTSPRRNIQIRAPRDAQPNNHRTRQGERTQRDLKHTNDGKKNTQTGSVQQTQPAHPLPPDKIYGQPEHTGTNHHTRAEARRQE

SEQ ID NO: 967384 - protein, 487 aa, Homo sapiens
KAIEKMNGMLLNDRKVFVGRFNVSKEREAELGAKAKELHQLLYIKQPLGNEAGLTDESAKQLFSPVWSRPSSVHRLHAEIPNGQIQKASGLVEFTHKHTQACPHQRPAWQGSMHMATQANITAALNTSIHLLSGPAATTPSKAKANGPATKERSPHTPANNTPRTPSPPGTPPHAAGKHSLSDPQSIRRRARLPHIPPYHFCTSHTLWANWATNLQFRHIGNCHRTTLIQRGHTTTPISYPYAPSIQGPTSHRFVNPKRWAHSTLSHHLALRHQRDTGATRNKRHKHTAGSSQDALRHRRTDSARSALPTVTLPRWHKRNTEQHPPANRPTRYTPRVAPHTSPTPGRTPRKPHGTSEAHTAQTGTPEPKRYAWRTGAHVGPHTHNTRKNGGNNAHGQTPHGGTPPPWETPHNPQTHLTYMCHHSAQKSEPWANNGEHYGRTTPPPRRQTPVTATAVNTERHAAPTRTRANNESTWANHPNEGSTNRQ

SEQ ID NO: 967385 - protein, 221 aa, Homo sapiens
MGVDAQAGRWTLGAARFGEQVRPGSPAVQGSFPSKVAWERDGVQNQDKGDPWVHRDTKLAPQKRRNASGPQAGMPPPRRPRGGVRSSGKELPELAEGGVADDDPNVGRPVLGDQVNLLNGGLLIRPAELGPWEPHTESEDRVPARPQNRRIEPSSAPGARDPQSRTGRRSGPGDVPGPRGSHLCCEPPTGSPRERGGHWPATQGGQNAGYGSPIRGGCVHR

SEQ ID NO: 967386 - protein, 573 aa, Homo sapiens
LIDSILRESEPAPGSVTDPHGRQGPHGHRGPASLPPDTNIPTPAKVPSDIDMTWNKNETQEDTLDALMDNPTHEQKPSTHHCMSTRQRQYTAEETNKMPHRKRTIEQAPLRVTQKTTEPLRRAREQARIATSTRPHGPTEYIPQQRPTQSSITHKAKNQPPKQTQTTEETSKHTQERSNGTTHGHSKPMSSHNTTHNGHPQPETPNDDDNTHSAPQLCNTTAHSQHQNPTDTENAMQTRRHDRTHAGIPNRTYTAHRTSTGAHSPHQDEATTTKRTEHHRTARTQGRATGKARLPPQTGIKKQEHHPHIGPVPLPTRTRKRERRAYAHPPEPHARQQPHPHLPQQSETHDQYAQHHGTTRQDDTKHYHASTTKTANTGEQRHTNSTTKSHTTDQQNPQTTKTERRATRTHNEQESKEPTETGSTQKLKQQTKHNSTKERMRQQQQATQRETRSQSSRISTSRQRHQTQRKQTEQKGTAAARHHQTDKTPPRDAHAEHTRTATEHAPPSTPREEPDQRARAAPRPRHYRSAPESRRNESRESPTTNNRQAHKRQTAEQQTTPTEASDNKRDTTG

SEQ ID NO: 967387 - protein, 402 aa, Homo sapiens
TEPRHLPDPAALSTPCRQLTMDDDIACCSVVDNWHPCMCNGRLRCGRRCPPGPSSPSIVGPPVHQGVMVGMGQKDSYVGDEAQSKRGILTHEVPHRARHSSPTGDDTGRNIWHETFYNELRCGSRGAPPMLLDRGPPEPQGQTAQTMSQIMYETFNTPSHVRLLSSACAYSLLLPSGRTTGIVMDSGERGQPTLGPSTTGMPSPTAILQSGPGWTRTLTDNLMTDPHRAADYKLHNTAERNRCVTHHAESRPRTPRDPTHMMAHERHQHTRRRRNAPHRHGITAPPTEPRRESPPHTTGPQPGTPEEPSSPPTRRPAVRRHGSAERASAAHRVTTCAGGRGPCSTEGPEIRRDRSTRGHQELMNGRLAALINVFVLPLSRSSAIKATRQRQRRKRENSRPRG

SEQ ID NO: 967388 - protein, 425 aa, Homo sapiens
GVRGLGRLLLTLPLLRQTVGKVLAHFYGAMNALEVQGAHAQAVLGDALGHDGLSARGGTGWWFWQDLPSNAGHSPKGMAAESLGSGQCHSHAGRASAMPSAPGKRGPTTPLLTPPSGVSRSWGNVVCRLLVPQLLPHCEAHIRAPKSVAAALLEAHKGALHGIAVGVLSNSVIVRARDSGHGAPRSRPRMSECIWLTGLSPYAPYFISRSGDVGRRQTWPKMPPFDASSHPFAIWGIYVLPPLKSNNFQSRTPRRPWEPLGVGTWLSRKSGSPKKAFLQGGLDRSELPFLNCPRSMYYTKARITENSEGLSSPGKGSTTGTCGGPRPRGAPRKTPWVREKPRKTATHKRVNIWEGDERKTRSMERMNAVLLEDTARPIVKTEGAEPHNDTAHTKIDSRDRKTKKTTTARDARGTPAQTEGTDAIH

SEQ ID NO: 967389 - protein, 366 aa, Homo sapiens
MTTWCPPSSAPAQLTALPLCGSTAVFSFGADTSSVLLETTTHDRQQQGAAARMFMAAQHTSPIHDLGVLADPADGSRELLGSTVDTTRLQLPAPGAFSFGSRTEWEHSHLPTPSQGAIGQNALGTTGQSTPIAFNVGQHNWEQSLCLEAPTPPPYGQNTPAPGDGHIGQQPLLWGIFTQPPKAPSVSDRRIGGPYIAIWCGIQDPGLDSDCRPAGRHTQNSSTLSPCPCTRQPLPLNLDIGTYTQDAWPFTWIRTLTGTMELQRKGRSSWGHSPRGNHTHGRATRVSTSRAAMGRTKRKKEKGSEKAAARAREDKERNNDSRTVEEGREGQERKKETHKLRDTRHRAEGTGPEHQDIVLVERKEER

SEQ ID NO: 967390 - protein, 353 aa, Homo sapiens
MPKLDEDICLTHEHQVSPTNRRNDNPDSNSMFRANLEHNWIFLTQDVEPNLPQLQAHCHEKQNCNEYGTQQLPLNDRTTDTRTNDTDNGYTGTLDAATAPRLLRTTNTYDLYLLQKRLQRDQTTTPKDWLYAQQMPTGKAKTSTQHTQTANAPKTEHNPQDTQTGGTNRHTAQAQGEKAHNERDAATEGPTNNRWRSGKEITHTAGGTTLNETTTHSAHQQNKREHPPALTNNTSGATWRARAHNIKPNTNTTMRQKQKKRHNQAHTDRTHQKQNKQTNRYDKKGYKTTQKPDPANSKKTGEVGDETGTNFRTHEQSNKQINSKPGYNASYNPDTRRTKSTRAKDTAPDGQQQ

SEQ ID NO: 967391 - protein, 286 aa, Homo sapiens
SSHHRTVHRHRPTACSMLPQDWHAQTAQSLVLRQGPLAHTHCCPSHAPLLTTRPPRLRDGDPNAHTARRPPPYTRPSMPAPQQQRASHLPPNRLPAPHQPPRATANPKAPYTPATPPPPPPPETRSHLPPSPPAPPPPNAPAHPAPPPPTPPQHPTAPSPRPAPPPPQTPTPVPPPPPPHTADTPPHPRANDPRHPAPPAPKQLATTPPPRLPHPRPPTRPPPPPTHTPHPFNHHSTLTPRHLSLPLTLSPPSSQPPFTTSIPTPPPPHPLLPSLHPPTSPPPHPT

SEQ ID NO: 967392 - protein, 417 aa, Homo sapiens
LFGRSRQGMSEARTLPDADRQTRMEGSRNQQESLSPEGVHQGPWDHDTRLTPRYRESKPDTGCLQGLPSLGDELKDLCMTCHALSPGTNAPADYTLKHPWAYARPGLKGTLSPPPAAPSAHAAARFNTGQQKTMRTPCLLTRAPDSRHVESKGTRTELLLPRLSSLHTEATDLRLTRSWQRSTATAHRATPAASIPPTAPSTGPRSLVCTTHAHPPPELTAPRQPPAAPHSRATLAPGPKRQPQAAPPQRPWRHTPTHTGLAPLAPRHRRQHPAPQPETNYTPASNTAPASRDATWHELANLAGPRANNHHRTIPGAPPPAHTPADTTARRTTPSPEPTHKGFGSPPPTRAPLRPPDDRNHGHHAHAPHSPRTPPTAGPDTQRRQPTVPVHTGTTPPCTPPRAHHRPPPPTTPPHAM

SEQ ID NO: 967393 - protein, 199 aa, Homo sapiens
MHDEDLIHGDLTTSNMLLKPPVEQLNIVLIDFGLSYISRTSRRIKGVDLICPGEGFLSTIPTNEDTVLEAFLEELIPLLPKGQAVLKHFSCSAPERHTEVLVARTHRDEQPPPGDLPAQDIDSKDKHDMDLRHGAPHNATDHDTDKQTRPATRPQGTTPAPAKEATDGQLPTNDTQRRATKHPKTAANARPTPNPTSNP

SEQ ID NO: 967394 - protein, 151 aa, Homo sapiens
MRGPPRAVTRLGAHGDWNATRHGWQRQMETKQREGQRTNHTPKSTNEQPKGLPLKESTQTGGKARNSCRMTQESKTGRRPHWSTHRTTQAQRRRATTRRTHRGPTAKSTHNTRADNKDTKTKPATQHNHTTHTKKRHKEKQPECRSAALHQ

SEQ ID NO: 967395 - protein, 85 aa, Homo sapiens
CCQRRDASDSPIVINHGSTRAGRQGDRRARVSRKPYTIGQDISDSAQIVGGLVALELYLDERAIEALRQEFDMKTVHWPVSSNQV

SEQ ID NO: 967396 - protein, 439 aa, Homo sapiens
VSAIGYPRGHWLQVPQWPIISCALAHLWVAAHGSRGHVSCTVTGTVHCVATTIHHSWHKHSNPALSSCTHGIGSRSACMHCVVTTCRHATVACTLCTAASQVACIVRQAWVTPTCALKRLSADLTLDVGGTDIHIQVAQAHMHSVAHYVSSVLQSHLFISGLVRAMIGLYRPCYITKATIDGAPECHGAHHLQVQGDIEYPAVTPTLRRKAPVVLLNTTTNNIHAWDVHGRGALVDTADYIGDGSTARTQLALQPTDGAQVDSGRGGSIATCTYQIWSAQRRNDNWILKNNTQEQCQDTAKDTLQYTAPPDKGLTHSIVATTNAVAHKVRSVTSSKEAKVTHRAQSTDTTGPQPETEGDHKRGPKRDQETHRESVTTRPGTKQHMKHRQTETIEQTHRSEEQAQRRKPTTDRQTKATAKTQDTNQYHSARTYTTAVSRS

SEQ ID NO: 967397 - protein, 364 aa, Homo sapiens
MSQDLPTHCFEAATCLWLCSAVLSADKNTSQHPNVTTLAPISNVTVGAGDVPSRWSPLRHQKPVKVETAACPSVNVQRRFNHHLLSGISNVTQHAAAHRSHINSNQLSALSTVGHHDQTSGSDSTATPVPTGNSTAHTHSSDLPSTSSKHSYLHQVQQHHTTVTPTSHAVRTVYLLMQPVSLEAIDLDLRVCQAGTQARWHHSPAQLYTELTRATTSGHTDPSGTPTRHRLHPHDVTHCSTHTTYSGPQWIDGNAAEPKTYLEMQHRKYGSDTRRAHSHIPAATTATSAPPRAAARAAQQPKHHREHAPLAGPPPPRAPPTDDTTTRSSHSRRAAPPQREPDAAQPPHTAPPQRGSADTHPTTA

SEQ ID NO: 967398 - protein, 313 aa, Homo sapiens
MPHSMSIMYRFAIAIRSEHQIPRPSMRILLQSVQCQMANGGVQQAAVMATQESTRLVQPSYGVVCSLLGSDTGRCQTQLSSVPELERVLKAPRRTSEGEVQRSGELRFEGDEENWQICNCRQMGKIFDQDDAKSITVPGHGRWRRRGILKVSVECNYTLKVLCECELEDTLKSRILLSEEDAELCSPQATLGETQMAHVRYHRIKITRPKYIDEPMTNGLRTGCRSSTVAGADDDSNVADLTTADRTLSDARNGRDKRKNSTEDAEDNSGERATPGPVTPDTTRQHRPGAEGKEQRDDRQRREQASAHRSLTE

SEQ ID NO: 967399 - protein, 143 aa, Homo sapiens
MTRKLLPLTESTPAALATCGLLPCHSLRPRFPARAQRPPFVKGVAAVRQARFHSTPVSCGPQALVVSLPSIIRTVRAQRLPPLVPNAAVDAQTQHRARFRPWCLLPALGVAIPWRRTLSVRSPPPHTCPPVAASYLVVQTISL

SEQ ID NO: 967400 - protein, 235 aa, Homo sapiens
MRRCSRCVGAAQCGLQVDDACQDLAIGPFVGERTVGALSVRRCNTLWMSAECHPEGSVEKQARLWRNLVPHIRGNVGFVFTKEELSENHGTVLLARLRCHAGGSDAGDIAPCEVTCAMPRTTGLGREKDYLLSRLYGISHVKLSRGTIEILSDVQLIETGDKVGASEATLLNMLKISPFSFWAGHPAGVRQLAAIYKPEVLISPEENSAFSLPGGCRNVAGVCLQDGYPTGGSVP

SEQ ID NO: 967401 - protein, 394 aa, Homo sapiens
PESPEQTHRLPTALVTITPRGGASSCLQPAPVTITATMSKRGRDPADERMDTQEQRARHKDRRAHTTEPPLAPYTGTTRHLQKNTEHEHRPARHPQTVTSPEAKHVTPPTRQTAPATTQKTRGEKRSTTHRQMRKQPHPAAKPPRVDSTTANTPGPTRRRRQNAHARRRHSEPTPPTRRQRQKKRARRGGRESTEKGAPDERQEARRRTNTESRGNEGEELRRTIENKGKKKRSEDRAKRHAKKRERKKQRKEREKRKNGKERGGEGKRRKERKQGKVRDGRRKRDASNKERGQEEERRRKAQTRPDRNRKKTQRTHATRTKESHRTRYGQAEQDKRMRAKKAKEEEGRAGRNSAAKTPKKKGEPERQGKEEAQKRGGKQRRERKEGTDVKVGE

SEQ ID NO: 967402 - protein, 52 aa, Homo sapiens
MSALQAFAKLRPFRASQPPTAAHFGTEGGRYKGLWGRTPGKKKRNGLSDSNV

SEQ ID NO: 967403 - protein, 100 aa, Homo sapiens
THLMGARSLEQHGERSGSVTDDQCLVPYRTKYVRKDLKYGTFRVTNSQGPKTLVSLAVNEECELKIVDLGLARLTDDEMKGLRGALGGTGGPEIMLKWMR

SEQ ID NO: 967404 - protein, 325 aa, Homo sapiens
DSQELTLLQRGIMVIGHCQGSLAPSCQPVSIAFSILIALIAGKSLRQQLRHILIALLHACSRQHILHGGASHSRNRFHIPGHVSHRQQHRHLRSSPSEDPRPSKARLQPNNHLQPQQAAMVSIVGMCRRNPLRQSFGTRICTATHRQTTHSQCPIYYTDGQTWGTHSEETPCSAARSQSNLDETQGKPSGTPTRDRHTPPHKAGHAMQLFPSLGATGLYRIGSGIFEDDTPGPNPGTVLPPMHSTKPEPISFTHGSGTAGRVLSTQALGKSKGLLEQQEWMVIAGQGNKSQHYQVGNPSKLGKHAKELGPMITRLDVKHTEGIME

SEQ ID NO: 967405 - protein, 256 aa, Homo sapiens
GADVMVERVLRKPLCHPPPPGPLVRDVPWTCMCYAGASGEALLETLWLQFLVLELGGLEQAEAWASVSTDLLQLLLPMIELEVPIELALLLAVVQLDAGGERASHDEVEGLVEKIRFPMMFPEGGSLSCCSTVPVLEPVGPVPEEDSAGPGNSTLCPSICCARCMGLNLGVDIYEAPVLDLDHLEAFVSDSSWSAGGLHWSISQHGGFWSRYSSDYFHDPSEYQIDILTVLLKSNKPHSSSEDIWCLTVEYSRIQN

SEQ ID NO: 967406 - protein, 73 aa, Homo sapiens
PHVIPAPRAMHVCMEEVLARIHRAAAPPPCMPQDMQAHSEHDPIDHENVRHSIESHRRPYPHTARDRGMCKSL

SEQ ID NO: 967407 - protein, 190 aa, Homo sapiens
MAITLEAAARDTRDQFLEYFTTPIGPMSDQHPFDAGASGFAALITRIVQQKDLPLTRFQAVVASAVGRLADKSVLVCNNAIQLLARFIHRPIILSPEAIDDADLARTTCITGSTQKLPAHEGPEGELQQLLQCWTQRRSGKPCMPDVEVYPAADSTDFPRERRRSLSKIANTETTEDVNRTHHITCLAKS

SEQ ID NO: 967408 - protein, 79 aa, Homo sapiens
TIQPPDSQTLRIKKTLAKMVESQACKNLHGSNPSAGSKLVALQAHCPYRMDMAWHIQQWTSQDVNLVLRLFLHYVFTGC

SEQ ID NO: 967409 - protein, 74 aa, Homo sapiens
RHTILGKRFSNLLHANVKFHLAEHYTHAQQQSTYRKCTVFNYMLTGFNIFCSTGSTIEYYTKVGILQGEGMLSS

SEQ ID NO: 967410 - protein, 322 aa, Homo sapiens
MTRLGWNGQSHTMTNERMPEGNPCSTGGVVAHSRQASETAANTSAGSASKACRQQQGTQQGCTVAAQAVLQHSSRIGRPESVASMQQGSNGSPQGKEQAGKCCTGKWWQSAGRQQAQHKGGSGHIGEGNLSTSLLPPPWPPPPVKAKHLAAVEEQEASNLWWPCWWRPRCKKLEIKLRHFEELETIMDREREALEYQRQQLLADRQAFHMEQLKYAEMRARQQALPTDAPTAAAAPQNLPQAPGYPPKWLWAPQPWLVWLSLCSPVLCMGLQKLAFEKMEQVMEGHERTWNHNGETRSTAGQKQRTKEPEQEKEPRKQEAEN

SEQ ID NO: 967411 - protein, 231 aa, Homo sapiens
MGAHPTERYNSIQPGPDQECCRHNSRSGEKKEREERKERKTRRRKKERMKNTKKQYQKEQERHKKKQEKKKKTSEEKKEKEKKEKTREDNKKRKTTKQEKKRTKEKRQKKRKKKRRKRKKKTKKKDKQKTTKKKNEKKKKKKQKTKKKQTKKQKKKKKKKKHKEKKRKKKQKSKKTKKENEKQTRKHQERNEKSTTRKKNTTRNTQEKTQQNKTATQQQQTETRKKTKEQT

SEQ ID NO: 967412 - protein, 139 aa, Homo sapiens
IPPSPGAIKRKNIPHEYCIQGPTVCYTKMMNADMDAVDAENQVELEDKTRLMNQVLAHSNHTLASISSAQAVRMPVSRHSTHICTAHTIQHKTQVLRNQSYQQHHHVHALLDALFSHTNMQHKTAKQTKSRALHHPFVL

SEQ ID NO: 967413 - protein, 276 aa, Homo sapiens
MHRLLYILAQITGTGHIPAIASNLHALQQELRNTASTKQKQIPTVGTYRMMIQQSSNSNKDKLCHRIMRKMTIYSRDTARGKLTSHQIAAIHTATKDKPHLRSFLQNQGRERHERQQRRKEEARTTTRNRTRSTTEHDDNCDRTAQDTPPGNAIKQPPAENQHSRNGTQLTDDPTDHQRHNAANASPQCAHHDQADMDTETSSVKEHIRQQTNCQEMRELTKTDQTSTHRQHKRRKENNTSNYKSERTSQNSTTATPSGTKNINETKPAKNSTHTH

SEQ ID NO: 967414 - protein, 520 aa, Homo sapiens
SYTEVSGGNESVSRCNVASYISLFCIIYSSFGSSTATLGKQHRHSSHHFLFSCEQNRLKQLHSIIISTTVNPASKVSTMCIWFKQSHKFKTVKQLHHNAQFTTVSIQHNFHHHLLDQIIILHNVVMRHSSHRHNINSCAANQQAHYINSRSKASKPQHSQNMPSFRVFSQTCGVFAAKKRHRQHHSKNFNFKTSKPKTKHRGHPLVYSASATNSKISPSKSLIRDSLGENLRHVPSSALIVHPHIFKLQYNVSNEASKQFHGFAAGNMAKQHNQHTNSTLGEFTLNKKSIAFYKLKSQSTFKDLNQRNITPRSTYTEQYDHGIARWRGSKQGQPNKRDERQRLDTLKLRRTTKNKANTENSSSKAKTTEIGTKHSRKNPMTMGDKRQEQKDKYDQTTYEMNTKRLIEADEEARTETVIETPRGNDRQLLQHREHDVHALAHTEQQSHTVEEQTNCQELDHDHTNCQYTPRGNTTQRGKSRKNNEKQRRDRTTQGRARRKQMNRSVNAMKDTHTERRSGHN

SEQ ID NO: 967415 - protein, 420 aa, Homo sapiens
PVCASPRSSPGPFTMHMQQQCMACNAVDAAAQGTIHGAGPCALLLPDEALTLAVGTARFSVLLAAWYSLLPPRPGRTWVHCTGWTRLATGLWPLTCQRLGGTPRKTAAPAPIRGARPLDSFLGRLVVDALRARGPPASVIPVHSHELALVLHMPLTITGPLGITKTTTGHLCEPSETTQLLQLAHNIKMLAHTYCQVGEQNSQLLTSTHGRPGTPMGSRASLMQATMTASMPQTHPGEAMDTPDTRPEGNPHDQHLGTQTTTDVGPNQAHARNYPPRTRAAPTMNDTQHTYLRTWTDSRTSPFPSPHETHLSIWYTRHIYNTNTPRRSIATTEPCHPRTPPGHHSAGPPRPKQPAHKRHHAHPTLLGRTAQPRRHPPTNNAPHTHPHQTGPQPSTHAHPTEPKHPLDEPTTPTTTHKQPA

SEQ ID NO: 967416 - protein, 364 aa, Homo sapiens
MQNELIIFTVFLQCKVCLKYVQARMYINLYQSMCDFIDQSYILSKFCPFRLTFIIDVNHSMQRVLYTQPYGWYEPYLHTLGASMRTSLIAFLRTYENHDNTTLVNWYSELPVQAHYINTKLSNHGAKSSNIRNTTNYHFVAYQHGKAPCALWRTTHNGEIRESIIQAYTNNNFLKNMRILHDTHNCRSTTMIRLRKTTGPWPQVRLIQPRHNLATQRRKHNHTSTRNHHKHTTTPTPTKENQQEKHDQNRPASTPRTHHRSQPTSSTQRHMDNRKNSPDQQKQTSGGAKKGDSDGQQPTKDREPHAESPDKQGARATNSEATANEQNNDEKTKRLQTNHGSHKPPQTEEDRLKTPTKHKKKSRA

SEQ ID NO: 967417 - protein, 246 aa, Homo sapiens
MLEGSTLLKSHHHSLISSTQGHKNCGRPQGPLPRKARYVCLRELQMAQEAAGALKEFLGKYHIREKIGSEQRPPDTELLLMTRCLQVSFIVSFLCSATLSVYQATPPDKTIYSEKTEANYKIQQVPHVDYIVPPTGLGGKAPSKIHGRDTAKRREPTVHHPNQAHGQQAKQRIRSHTWTQQPEVAKQKQSPRDSPPSNMMCPGRKTVWCNPTRRVCCQFCPVHHHNHCLLLYHFYQLSPWQRSKRT

SEQ ID NO: 967418 - protein, 106 aa, Homo sapiens
MLHWAYLCTQHTSEVCSSQCINTCISEVTAHFSGHITQDKLWHTGSIRDIKFHISIPEADITSGLRGGEINTCTRLYTISSHTPYLYAQDRPRSLCGKTHVVSIFS

SEQ ID NO: 967419 - protein, 170 aa, Homo sapiens
KVCNQNLHAMQMQAGIHFGTSEWHWLICENKTVMPYISTTPAKLRNPCTSEQNCTSPIIAHKNVLTLTNKGEVIQCNLSGTTSAIILANLAFSQTGGYRCPSCTVAVCGSLIGWRNVTRLLVFSTRCRVSLSLEHGQNLVRIAITQMHAPNADLGTHQSCTTHAANSFID

SEQ ID NO: 967420 - protein, 290 aa, Homo sapiens
  misc_feature (17)..(17): Xaa can be any naturally occurring amino acid
  misc_feature (165)..(165): Xaa can be any naturally occurring amino acid
MSAESVLYECIGYSHIXSWIINILSYTIGGEPGMRTRLEPLRHASGDRSKRYFATHGQQGPELWHLHPSRGSNGVTRLAPIAHMVAGSTEEMAHQYQRTRNRCPGPGVEPPGLPKTFTYNLCIGTPKWALFSRIVLAGGNFRQHEEVKHTRVACFTPRTHGNHEXCAFLHFMRGNHKRCVWVGGPSVHKLRTCSPSAGWTARLPPPGALCGLLGILVFGSQGQPVSLDCLRGWLVTPTCGLLFLTDVILSPRQYPHWIPFLGANGSRGGRQEGEAHLPTWGVWGAPPKRI

SEQ ID NO: 967421 - protein, 97 aa, Homo sapiens
STSPPHPTSPHDETSAHSLALSTDPPKINATRTITQPSATYIDQDASNRTFHLIAHDHSETEIMVCTHSVYLQRQLEPLIFLYAGARIATNNRDESL

SEQ ID NO: 967422 - protein, 239 aa, Homo sapiens
GLGSILSSMEKPPSLGEQETRRNGPMNEAARPEMKLQEHEKEQKVEFRKRMEKEVSDFIQDSGQIKKKFQPMSKIERSIHTMMWWKWPGADSPSPLGKSDDCRYVMIFTTKEFAPSDEELDSYRRGEEWDPQKAEEKGKVEGSVAQRQEEEAAQQGPVVVMPCQRVQGLVQPPHRQWSRRKTQPHATGPIRSTVCAVANKEGHTLHLNEADELKIRAKKASAAEGERVGAKLLMAPPVL

SEQ ID NO: 967423 - protein, 137 aa, Homo sapiens
MARVSAECSLFAAEVGPAGQLLVTSTVYQRYRHIAAMHCVVESNFYQVTTTIQVNPARRLGQIWTRYRTLIESVAPCNYRQCCAGDQTRAIYAWRDLVYRPVIIAYIRASLSAYSGEGRERGYPVRTVIPSPLARAT

SEQ ID NO: 967424 - protein, 312 aa, Homo sapiens
MISVCSERTLKWAPGPPTAPSFLRALTKGGVSLSPSPQWPARSNRCLRAPPRRSPRTCSGPLRHKTYDVLAPGRKEIGLVCSQVGRQDGSWAMLLPPSFTGTYNRSGAPGNYPSGPLKQFAELGPFIDTLTVWPEVKLRLLVMGYSHPRRAAGSVRQIVGQGTVRTNRGNSVRVHILYEKGRTVSMRMIGVLAILVRDQHYESGTPPKQGRRGTTRPVGGVRNQRKITERQRRKNREGVFLQEECARDNERGQAQLMIMSPETFRNAAPTGRRKKTQSKRQGTERGFTRKRDKGTRDTAQSGAGARVTKIAV

SEQ ID NO: 967425 - protein, 350 aa, Homo sapiens
GHQASHIAQTSWKKSDGRSQEDRGRMGRLVTTSAVNSGKVDMVASNDPFIELKDNGVIDVSKYEFHATGEEFHLKCGDQSRGLRTGSCVFAHVRIAMRPVLPGVEIPPIIKWGDAGAEYVCCESTVIFRHQWKKRSGLHYCHAVWTPKRVIISCLASCCMPPMFRQLGCEPYVRSMRKRLKIDRADLPRCDHLNCLVHPGKVIHDNFGIVEGLIDHSHAITAPRRTVDGPPGNCGVMARGLQNIILAFYGAARLLGKVIPDLKREAHCHGLRGPQLQVSVVDLNLAFTENCNLMTQSGARLKAPQGFGDRASAPDSRHISIYGVTHLSVFVMSTGLQQTTTRNGPPPQRI

SEQ ID NO: 967426 - protein, 250 aa, Homo sapiens
PCSHHTTPTEPSLRLFSGSQSGHRRRPGHRHPPAAMSTRSRDPSYLLPQGCIEAARDTVSRPSSSRSLRDYVQPEPTAWAARCAPRTSRSLYPLVPPGQGVVLHNDGSPLPGAALQKDHAWPGGQQETHLAQDLRRGLLPRTGAREPIHIPVSFNETTPGKPTEKGDTRATEASTRDPAYASPTHTLGTTGAAYPGHRSRTYEFRGLGRTRRSQASTRPTAQDSPPRGATIIPSAPKHASTRPPDKLAPS

SEQ ID NO: 967427 - protein, 205 aa, Homo sapiens
  misc_feature (31)..(31): Xaa can be any naturally occurring amino acid
MPVEPSSSDEMRKRSQESCAKTVCVVTFQVXRGTSRELWSEIIIPSMSLHRLLHRYRIGARSIGTILDKNQIKRTCALTTVSNVQDKLAGLHRSWYDCVALTSLTLPGRGAYHWVPPRNKRVERGRSRMRSTMSLEQQRPWQLGRTSPPSVGLMETSLEIPSATRCDKEPQLQDTRLETEQIRGCPEEDNTEWTVSHWQMAILTD

SEQ ID NO: 967428 - protein, 94 aa, Homo sapiens
VKPMCVETRLRLSSFARSLGCALGYETDELRWVSIKAVDKKAAGTGSVTKSAQKAQKATDSVMPNYSAMPTSYLMAGGYNGSQNLCCVKLDIYV

SEQ ID NO: 967429 - protein, 134 aa, Homo sapiens
MLPHWKRHLAISIINLPSTLISLHNSNSTDDPRNRWRVNPGYVFTLLVSLYGREPLKQTHREIQQHTRATHKEGARAKNSGRRPLWTPVFVKGPKERLKAETRVKHSEKRARTGGHMGDHGARETRGKMGGPTR

SEQ ID NO: 967430 - protein, 117 aa, Homo sapiens
  misc_feature (45)..(45): Xaa can be any naturally occurring amino acid
  misc_feature (74)..(74): Xaa can be any naturally occurring amino acid
  misc_feature (76)..(76): Xaa can be any naturally occurring amino acid
  misc_feature (84)..(84): Xaa can be any naturally occurring amino acid
  misc_feature (86)..(86): Xaa can be any naturally occurring amino acid
  misc_feature (115)..(115): Xaa can be any naturally occurring amino acid
FLAALYGPAEPYRSHLRRICEGLGRMLDEGSPEPRRRPSAPLAPXGALLLGAGGVRGFFSTSFLPNRTPAKLPXDXMGLEPWFXTXCDDGLLRHLVAAGFKTPMVTFSSLAPVPXWA

SEQ ID NO: 967431 - protein, 151 aa, Homo sapiens
  misc_feature (94)..(94): Xaa can be any naturally occurring amino acid
ERAAADEIAVDRDVPWGVDSLITLAFQDQRYSVQTADHRFLRHTGALVGAAPELGPLATRLEFRSGKVAFRDCEGVTWRRRGPAARSRRARPPXVRQRDRMLLVLWTQKLAAQGISAGRRPTRGTCPRARYGPVCQSGRGDRTSENLSQAW

SEQ ID NO: 967432 - protein, 117 aa, Homo sapiens
MCLATTYRESKSETRRECKSTYRQCADERSPSHPGLQNQRTPSDLLLFLLSLMTLNSYSQQTLLGDQTIVPLVRALCNEPASTIKPNDIALFGYTIRRIRSLNKLRRASLPYYIILI

SEQ ID NO: 967433 - protein, 98 aa, Homo sapiens
  misc_feature (78)..(79): Xaa can be any naturally occurring amino acid
ADAWGRNARRRESEKSLENETLNKEEDCHSPSFYNLPNPDQPLKGKCQARSTKGRNCLWCKRSFYPLRARISDALDTXXSSPAYKWWGGKSTLQLQAI

SEQ ID NO: 967434 - protein, 121 aa, Homo sapiens
QWADRITFEIIIVFEPEMNVVPQSYYQKNRIQKRSDAVILRSSATMVPLKVDLKCWNDRKYATGQSTYDVDVWTVIVNSVCTTSTSEVSQDVASYTYVVEAMYCKVVEAKVLALQWVIRKV

SEQ ID NO: 967435 - protein, 141 aa, Homo sapiens
MVGDQESATECVTKLSCSNHLVLIVGWRWTVVPYPSVADVDQWKRREKLVDKHMVKERGLASNFVIEPNTSGEQGNEEVDREQRMEDVKKIKAAKVMYCISRQDCCVCHSLCDRNMVLTSEERGEDKAYRDWRMRKSKEEG

SEQ ID NO: 967436 - protein, 246 aa, Homo sapiens
AGCKSMWSGAWTLAAKRHVGLADVHAPERAAHQPPAGATIFALSSGQGRCGIAVIRIHAAPAAVHALRILTAPRELHLARACQPAPGSSCFPCFRGSLWTAHWCSGLPRSPEFQPVRTGVEFHCDGGPVSGERSSCRPLGSVPGLLTVRRQAEYTRTGRSPLAKLKPDRSWSGLGGPYPRCESRGAAVRARPRPGSLGRRSLGAPLPWLGPRPVTKGFWPGWRAYSRFRRRLTTWMDGVPWWQRIV

SEQ ID NO: 967437 - protein, 91 aa, Homo sapiens
MAYRYELRLSARPAPGAPLCVCRGHASATHHPFVGEESAPWPSRSLSRLCRFRRVSTLSRVLLPAWVFPFKSARGFFHGNSFVRGWTFCVA

SEQ ID NO: 967438 - protein, 224 aa, Homo sapiens
CISKADLCTEALKLRLNLVGGMYDTVQRSTQQTTEWAMLLLEIIIERHCRHAVANNELFTDCVGTCWAVLINGHIGCKYMSSDLSKVACEDNQACILEPWRSNLQKELGGSGQSDSLAKEFASVACHMTKQNLRCHQRCEATGHPVIDTKANKKIAGFESPSFNDGRALQVSTKQKISSLGIFTEGLDSRQHHFSWSWFGNSPEMDRRSGSSKREQHAGRCSTH

SEQ ID NO: 967439 - protein, 142 aa, Homo sapiens
MLRTLETAIKTKGVAEVTIVNILDQPQQCTETGLLPSPTREGPHRHLHQHCIVSLIWPPGDGASRAYRMTPAQHDASELTASMKGLGTGEDSLLAIFCSRSLPGSSRFFPCPPRLASPPPRPRPSPAPLPSAPLVAVTGAPG

SEQ ID NO: 967440 - protein, 398 aa, Homo sapiens
MKPGKVVLDLAGRYSGTQSCHREEHCMMAPHASPLQPMPLAGLHIDPLPPPTADRPPTGATPQTPLAQHHSLRLTHSSPVKRCYYTYNLTPTLAPHRLPPASRLSPPRAPPHLLRLNSPACSPSATTPVPSPPPALRPRPAPPAPPRLPPSRNPRSPHPPHYAPPPTPTVRLPSPPPPPCRRSLPALAPLLPLHSILPPTLLRQAARASGGQPLKPPAAPAPTSPAHTAPSRVRAAPPPPPLCTRPTLPPSHTRMPTHHPHSPHTTHNTPTRTLYLPTHQHLSTSNTQIHKRITSYRSPVTYTTPSPLPPPLYHTSTFHGRARAQTRAAHLNITPPLPPPNPTNQHTTSTTPQHPIHSTHSHHHPPPTQPPPHPPPPNTNTPHHHHQPPPPPPPPLTS

SEQ ID NO: 967441 - protein, 116 aa, Homo sapiens
MPERKRKSTFEGLYWVLIRNDKNLTGRLCYYGESQNSTISLSATVAHSNAHSNNFTEPQPGTSPIYQANAMRTSQHSLRTGFIGAPIVAPCAFSRQVEQDPLHGRKGGIVGLGRMH

SEQ ID NO: 967442 - protein, 130 aa, Homo sapiens
MRLAYSYTAYSAIYRSTYSSTRVYHAIAHGQLRTSCDYRHTHMAQYVPPYEPPSTDTYPPHPIVYPASYLEDMHTSYLWHTRHPLTSRVIADSRPYNAASLPATVIGTSYYSLHLNVPYSTLSRARLTVP

SEQ ID NO: 967443 - protein, 218 aa, Homo sapiens
RNIQNVYMQLTTHLCTHNKKNPIPISTAPTYYTYKPTSIILFYNTQTTHYTNNIKVYITTQSTYDRPTQLNITPPTHTTMERTRMRSPTHQTNHHHYMESGQRTTRTAHLRGDRRHTATHKREGADASIRTPTLATCTPRANKPSILHPYIHKRHPPISQHYNPNTHPLPNNTPTTPTHPPKQTLSTHLTLNSHPQNTQPTHSPHPHLTPNTPITHYL

SEQ ID NO: 967444 - protein, 348 aa, Homo sapiens
PGRGGGSGTGNTLSSVAGNWRGSSYRGGETWNGHTIKVKFKAYEDWMMIQHHRRSKRPSTLWQLVAQFRYLIATLDICTFQKCTSNTIHPAKPGASTGYYREQLPTEQDATAATSTEATTLTCTAPICLHQASFPVETNCGHLHTSVTLLLPAIQSEDDQTQDVPETASRISMYTKRSIPQGPPQNSTHARATHGTYPTLLSSMQPRPHTTTTRARLNCDRYPAITAILPLDPTCRSILNITTIITYQNSDTLKAHAQEPSREYLTNHTNSTLTSNRTTSLTISQRRGSPPPARISTNRAQLATRNTGSPRPSHTLGNIAEPSEANPHNEEQDTTTTTANHQSDDNTT

SEQ ID NO: 967445 - protein, 187 aa, Homo sapiens
MTDCTWRISAFLCDCQQVSLAFRSCHDLHMPPLSYQLMSILRSFSFCTWRVRSVLSYVSLCRPLRGVGPLCGFCASGSPSGLLLCVSSICVGLRVLVCVRGSGMFVFVSPCVVSLCLPVSPASFLSPAVFPLAPGGFTPPSVPLTRFARPTSFWGSSGVAPRCRVCFLACLCVRPVLPPRPPRPPPR

SEQ ID NO: 967446 - protein, 88 aa, Homo sapiens
MASLHAGIVSMTHPDPYLIHVSPTSCTHGSRVLSAPWSCRSDKDVALPNRTGSNLAIPNRAENNHEPICTPFLSRHIPARSQSLPYRL

SEQ ID NO: 967447 - protein, 328 aa, Homo sapiens
VKKAEAGAVGPSETGDAHIIGRIESYSCKMAGDDTHMFKQFCQEVPCPTVSGVHYSPPPDFSDLMPHARLMPPHAQVPVCSDVTWPPLARPPHDPPLSSRLTCPPVSNLTSSLSCLLHLTLPSHVPYVPLPCPSWMVSMLLRDCSHGSFYCLAGFGSITCPPLHTSCPWSFALPLWPFARPGCTVGALAIVLSPSLRPNPIHRPSLAALSPELCVPGRRQELRSLRCVPSVTLGLHPLLPLRHGASRSPPAHRPRSGAPLFWGIFPPISRRRVTLHLACRGRRSVAPSPDSAPPFNPLNLYNRLTIQSQHGPAAPVTKHARKKIPRPH

SEQ ID NO: 967448 - protein, 467 aa, Homo sapiens
MIHALIIIFLICFLAPVCPFPNTHNKHKHNTNISRRSGNRTRLQLSCPPIILAPHRPPTPYALLYHNSSDVTRSLPYHSLSHSRTPTPTATYHLHRTTPAHLTPSNLPTLPPPHSLPSHPHARTLPHIPCTLHHLAVLPPRHDTPPLSLLPHLPSPPHPSSPPSMHPRPLTHSPPPHHTLPTPAPLSPHKPPSTRLHPPRHPYYSPAPHRSATITVPTHPTTSHLLPRSLSLHYPLTPTSLANIPHPLLSPLTPPPTHTTTPSSSEPPLLTPLPPPPPNTARPARRPQPYTLPRAPPPITLHLHTLPPTARTTPPPTQPTNTTTPTRHNTHPLLPPHTCTYTPNSWPLPLSPPLLPSPHHHNSTRPPPLSHQFPSHYPSPLLSPYPHSPLLHPLPPSFLPLFHSPHPLPTPPPHHTPTPHPHTTTPSHTHSPTHPTPLPPPPPPHHLTLTPPPSHPPYPSHSPLPLP

SEQ ID NO: 967449 - protein, 249 aa, Homo sapiens
MWADLHMLAQCMLQWLDPGHQCPGPLSCSHMTGCSILGSWTRTATFFGCPLEEQQPQKDGGTDGSWYPGSVQDDARAGGRMSRTTERQGWSPAPGRSMEPRPQNTRKKPRTTRDAGAQTLEEDRAQEHPRGWRTPAPRGGRPNTQSNKFNGRPPVTTRGAQNKDQTAEILDRLWPPPQNPSPPDRYPRAMPGRHEVTTEITTDLRVPIRAPREESWLGAIHTEPGALETGSPLNREITTGKPIARGSVT

SEQ ID NO: 967450 - protein, 116 aa, Homo sapiens
MASRLVLKTAPRCLILGLGTWESPPGEVPEAVNGGPLTSGTASIDCAHVYQNENEVGWWPFMEKLQCSQCGEAVRSSIIVSKLWCTYHENGPGEQEPAKKTLSELKLDYWTLPYSL

SEQ ID NO: 967451 - protein, 389 aa, Homo sapiens
MSGANVTTRKHIPRSSTHHLFQKGHSIRDKSYLLTVRSFGIFGRIFLRPFTTSRPSRLTRRIEEEHWNHATGINPLNPLRSPTPKHIRITRITELINQLTLTIVYIENNRNEDNSSTGYYQVHWVSIFTLLQASEYFESPFTMFRRASNGSTSTEPQAYHGPPRHTMAQSVLTICFIRQLIYTFTPNITLGFQGQPPEYWALSAHMCVGQLLAMIITLSTRGATSTHDHKTHRSTNPTAPPPHTHDATTRDTTRQQGSKEQQTARRMPQQRPTQSRHINTTTQAQAYRPQTRRRKQNTDRSTREHTQKLSESRNEHTAHQQKTHAENTTTDADRSDHPANARAAKSMAQNTSRERRNKNESEDSEANEDRNRDETTARKRTEQDKNSTP

SEQ ID NO: 967452 - protein, 255 aa, Homo sapiens
MRWVDHNASPVDPGSGTRDQKLSESDDRCMTPLAGSALLNLNASAAKSDAGTLWLAPQLQECGAIGHYLFMSPLHTSLIIRWVVSFIEEPARTSQLLSQTHLLQKTLDFTPWLIMIKLTYVSLPNNISSVLTVTARRYIGHVPFVITMHLQIRRRPVQFCQGTNRHPRLRRLTGTHVQNANLRYASHSGPGPKTRARQRTTTRTGKSQSRHKNKPATDKARHKTQNPDNNATRTRTDGAAPKADKTRTNRPDSLT

SEQ ID NO: 967453 - protein, 291 aa, Homo sapiens
ALKMAAAVGLVAPSVGCPRCEVPFLGAILATEVLRLLHVSREQSLTNLYVCLGYLVEAKLFSIRVPQCHAPAVTLAMHPDFRGVQACPNGQSKDLSLGDFSGEILVLIFYPGIISLCGVLQMDVACYVTKLSEFQDVNCEVVQQSQWIPILAILTDIVHQERMVVRGNEIVVLSDLIKQIPETTVCLGEGAGLPKRSRSYLTPMESTALRVRQIVTVGRGWKEPRLGWVRMDQPWETREEGHRSYEQPIVAKAARNQSAGLLTGRQGRHKGEEHPNKRGGNKESRDKTIPK

SEQ ID NO: 967454 - protein, 279 aa, Homo sapiens
ACLCSQHGCLCSLMGKDSAVHSPLPSTRATPGPDTYPACERTPGNERPPRRNGTTVLGPDDNMALDAPRTRALSGSHTTPHDTHSNNPPCQHPLTPVPHLRPNHTLTPHTAVAPMRAQRRATPPRKLNTKHSHHNTPCPHGPPTLPHPTHTPPAATPPLPTPHHSHTAPRAPPHAHPRPPRTQHTPTHEQAINPHTRPNSEPPPPPPSTPTHPHTSPDTAQHPPQQTTNIARPQHHTKTHQHHLTEQPTHKHTVHPTNNPPTTSHEHTDTGHPPPTHPH

SEQ ID NO: 967455 - protein, 163 aa, Homo sapiens
  misc_feature (95)..(95): Xaa can be any naturally occurring amino acid
MLVGHTVLGATLQRLATHTPRSGSNEISRELQSMATIGNTNGEPLRAETLGASRIIEGQTAYRENRRTHRRPCSTNTMYKGTLRGRAELGRGTPXKTSERTTLRKTAATRRYNNHEATQKDKRRSQRVNATPIPARGQHRQQHMQNDTTTEAGNTAETTQHEE

SEQ ID NO: 967456 - protein, 190 aa, Homo sapiens
MRHWTNKTGPLTSEMQEFRTILEHEVADAVPADIHSTKLLQHFPPRTLRCLHNGLSDCQAVKGHQTGTHGHRDVPPPLPAVSHARPQAANHPNTGPLRTLPPYGIHQFTHHPAPCHLHCNPLPTSSPDRTIEITPLPQAHTGNITRAAARPQPQHAHTEGDQNSTAPTPPAATAQTSTPTYTTRATPPPT

SEQ ID NO: 967457 - protein, 117 aa, Homo sapiens
MPDKYNPEDSDMLDWALEDMGDKSCVVNCCVEVQEKVPSSCDGVYTQKEETERDGISMWALLIIQWKKRNLNGDFVMLKIRLSRSKLSVNKNVQQLCCAFKLLSGLYTVVYCKTVGV

SEQ ID NO: 967458 - protein, 141 aa, Homo sapiens
LGSDEDDIDEDGPSTSFGSILAQARLHSMEHACKHWASTACIAEAALALAQAHSYQSIACMHSINPWLHAVIEHHFNSSSFETSFQNRSIHVVVIEGTDYTVLNATEPQGQTQSTRGTIRHTRALASNRTAASPMKSQKCI

SEQ ID NO: 967459 - protein, 414 aa, Homo sapiens
AAKGPNPSYSPSLTERKPTRRPARVTTVKKSSVRLSRDRIKEGLDVQWRDFWLTGNLPTISEVHSDISHAFKPSQIACGFTTIIGTCGFPGRCALCSTNCWPMHSPTGGRPQQQSLRTAHLTRITLAIDALAVSDRLTFSLHPIPSNSYHLALCMVCTTPQQWPLTRPTLIPRYHQIGDFLAISQTPRTCMTGDAEHWATLRVTTPHSLTGSLPSSQLHCDRYACTTTRGPLTRHHLRRAHLRRHLAEHRTHTTAPQDPRSTSAHHGAAGTRAEHAGLTTDTATTTIDTTSAQQQGKHKRRNKGQRTGRTTTLAAKKTGGSLHNRHQQNTASYRQNTHHAPAHTATPKRKRTATNSNKQLKREKRRQRSSKRDKAKTTQAEPATRDNHKNRRANTHQPNNTSNHHPPHSTTNKP

SEQ ID NO: 967460 - protein, 273 aa, Homo sapiens
PITDLEDRPILKIGEEHLKTLMRTNNGTTNKLHEYMTIDEYRTLERNTDKDEKRIKPTDNNTARPEQGSPPRTNTQDTRHKRAAHTRARQRNKKRKTHKTNNNHKRSKKQQNKKKKNRRTTQPYKQHRRKTHNKKRENNGSTKNQTANQTDTKDETEKKYTETQSKTTSNNHTTDAHEEEAKHSDKEANATHATENNTERVARGRANERRQKREHNGANASERRAKKRETTTTTTKGKNKNKGKPKTQVKEYEAKRVKAEPTTTKKKQTYKKR

SEQ ID NO: 967461 - protein, 52 aa, Homo sapiens
MARLEKVRHASRSYSPVCQCPFYVNCRNGSTLLGDKVSDWSGQNDRKGASLV

SEQ ID NO: 967462 - protein, 178 aa, Homo sapiens
MGSGYLHGHAYGEADMTDRRPGYFYLTQDRLCSYLRDRRPHRTERMNMLSLAQHQLTIRYGGYIDAEIQNLLEPSWRSCSRGAQQIPVIPGGTFSLGNSLSGRIRVPVVRAGSPFSNGTKREGTAFVGKGVPFRAPRPRAGPRIKKDGREREEQQQARPWEEISAGTGETSQSGGGEP

SEQ ID NO: 967463 - protein, 95 aa, Homo sapiens
HLRLRQLEAYRAVSFCLTELKQFSWLTAHVVGKRKYKMRLAVNCLGIMYCSSNQGGLLNKCGNKALQQVKICHTTLEMVARIAVRDPTYTVALIT

SEQ ID NO: 967464 - protein, 82 aa, Homo sapiens
PRDKALQDTEEVVEHKEIDGVFKELREQLTELTKQYEKSENDLKALRSVGQIVGEVLKPVNDRKIHVKATNGPRYVGVSVER

SEQ ID NO: 967465 - protein, 129 aa, Homo sapiens
MNWSLEVDLDLQAYYLGNSSRPMAIAYEAINLGVAPSTHLQYMYSTNYFGGPHFRGKLDPCANSQRKNYPGDRDPTIDKERCDNSYDERYIENTLTGNTTDCCTWTKRIRYLTGMDDKVKHNAWHTGST

SEQ ID NO: 967466 - protein, 75 aa, Homo sapiens
  misc_feature (26)..(26): Xaa can be any naturally occurring amino acid
  misc_feature (29)..(29): Xaa can be any naturally occurring amino acid
FNMRYRKSVISVFGAHLSWTRGIDVXVRXRMCTGVFQNFGKIYMVIKHFKKKRQSSQEVKGGGPKSHFRGTGKLG

SEQ ID NO: 967467 - protein, 101 aa, Homo sapiens
GGEHAAVLVDGERSHSGLVRGGWGCEGKVAKELGGGLLTDGFTKTKFNRNSGEYSGLRQIACRFAESDSKCGTKTAKCEENSSRTLQQALQQYFNLRVKFK

SEQ ID NO: 967468 - protein, 335 aa, Homo sapiens
VAGDLSSVRDVILSLGLPRLYVGGVPHVRDAQIRCDGGHVTLLGSTDSMVGKFCVKITWAENRLIMFKVELMMSIDVQVSLSRSGAVYGAVGMDVWGTCRWQVAVCYVEQGKFKVTGGENVAYIVMDTHREVLLVGLEDRQQARWIGQGLKCGSGQDDYKLVRILGCGGRHDAGSGNDEDGVRDCEILNVLVWDRGHDTGKAGSHKIELEMAYLVVLTRVGDAGRTSCRMQTHGGRHIGGPGTAEATPREVKHQQAATPHGNSKRTEGTKHLQNPTQETPEPAPRPRQNDRQTSVTHKTTEGKTRKDDHAHKHKKKARHSLRKERSQAYLRPRSA

SEQ ID NO: 967469 - protein, 353 aa, Homo sapiens
LRGRSLEQRSFISVRLLSYLSACRHPMRRFDWTLAHCSPLEAPEPIFFGCELNAPTNTHYSLLTRWHNCLTTLSHHVTLLTTRLSSPRGPWPAHSAPEPPPTLRSATPTHAPTPAHLSPHTGHAPKLYTAYTNLAHTFFSHPICLPAYPTAPPPRLFPPSGTAPPPLHHTSPPPPPPQLALPFHPRFAHAKPADSQTQDPTHTPHSLQNAAHHSPPIQPLTTLPAERATPHLPHNPPPDTRTRTPHTTRSTATPAPATNPPHTNPPYLNSLGPHHTTRNSTWPTPPLCDTRAIVCLHPPHKAALSPPTTTTNTITHHSYRKHPLRTPPPPSILTNPRTLETLHPHNHAPPAHL

SEQ ID NO: 967470 - protein, 70 aa, Homo sapiens
QRCMRNYIKCRKAGLEDMTPGPLYVLQKVAYTKLNMPWKLVDMQAPVAGNFSKLMVCSIGSGETQHPRAS

SEQ ID NO: 967471 - protein, 97 aa, Homo sapiens
VSGCVVASRNTGSACSMGDHLTVMEQYDTNVKEGLFHVISDERVGDWEAYYTNKGIGKPVSEIVWGRNPTEAELQDMSLVKVDADWVMAQVTSLKFS

SEQ ID NO: 967472 - protein, 198 aa, Homo sapiens
  misc_feature (155)..(155): Xaa can be any naturally occurring amino acid
MSGPSTRTDRNLARCLGFLDFLAFRTTWLDLGVTKTGRRQNVDEGDYVVMIMLLQDARWANIRHFYKRPESWLGHLCLGKEGWMAYGEWASRMTSGWLQTTRSISGLDVVLNEEDIGVSPKEDPDGYTNVSTSIQSRVACSAFFVADAEPGTWFXKVKSQMPEKKGYDSGSWRRLNLRIVDLGIGRTYFLGQWLGVEE

SEQ ID NO: 967473 - protein, 158 aa, Homo sapiens
TTSKHQTNTQKHKNKQTQTTAHKTNRESNTRREHTTFEGEKARRPRRRTEMRARKRTYAPYTHREATQHETAFDTLIRERTSSTMQTQKRTQEDHTRSKKRHNTATRTGRATMNETTAETRSSTDAESEDRRHGQKRRTSTSRTLAQMENSIREQKEE

SEQ ID NO: 967474 - protein, 119 aa, Homo sapiens
MTLSQALRSVADTAKPVEYDNNTNGSLPTSPSADKWSWPGRSEDFWGVTARGSCLPGPRVMTLYEKRSVRMVRVGVPDVCLAACWLFGCTGPGFHPPWQPYIVLALLSFLLTILPSVMY

SEQ ID NO: 967475 - protein, 356 aa, Homo sapiens
LKQPTHDYGKVFFLLTAELLWMMLTTPANWRDSGRRIGVVRKATRQQSPAGSNKADTITHSAELALLMEADPIHLRLRTSYTFSPPEAVLTPTHDCSYHRELTGDLLERRADYCTTAAGSTPTLGHSLWDGQHKRRTCLPATGRRALKASKLVLLLRPNKCTNYWPYEPFDTPGAGRTSGNGRDHDSVLSFIYTYDRSDHYAHERLLTPNCWKDTAPSEWPLGALPAQRRMNGENFFSRNSFKSRRHLRTLANRPGTWSGPTSAKRPPKAREHSSLEPWIQLSQIPCNKLSTQQTTAGRPLALMDPRARPGGPRNPTRHGTHNNTRHRAHAIPLPNPPPNPCHVRAHDKVANHNYA

SEQ ID NO: 967476 - protein, 80 aa, Homo sapiens
RRLVEPTRSGTYKYRSAIEKIDDWWSVPLSHTLQDDTCHIKTIRLRDRPGLYHRRYPIDNELTDVTSRQWTESSSSVVLM

SEQ ID NO: 967477 - protein, 102 aa, Homo sapiens
MNSAKIERKNKHSTFMMKSGVERTMKLVTLYKHRLFGTIPQMNQQFTTLDNLLSNDETTMTVDDERLQRQTIYINSAPHQHFTLVHALTAGRLTINSKLTIA

SEQ ID NO: 967478 - protein, 91 aa, Homo sapiens
  misc_feature (49)..(49): Xaa can be any naturally occurring amino acid
MLLHPLARSEQISYWVGILSGSRECFDKMNNTEWEWEPGIAPRCYLRVXSMSLMVTLANKKHKRNLKALYCPCATKLQRGGLWSWPRANMG

SEQ ID NO: 967479 - protein, 225 aa, Homo sapiens
EACLTDLQQGCGHTMILSRGVSLVLSGRGTLLACNGFKFETTGNFEETIIQRGLKSIKNIRENDQVYENGSGSKHMPELQRELKPCSTTTGIGIIQLLYEQTLTINGGHDRQRSKHPPYSRVSIRSQALLLAAHLIPSTCSQHMTPRGLPTTSTPSPWRNASSLPCLGHSADHTIQRALPLSRTSIPDPRFPRLAHSNRTAGARNSPPHHSPATHSWFNIHLDPL

SEQ ID NO: 967480 - protein, 111 aa, Homo sapiens
AVIRGFWYMHGLTEQCRARSSTPLVGMIALDDCASSGLLDSWCDTDSVQYHLKLPDHRVSGPVYGSWIPVTLVDSRTFRYHVDVRIILKLMGSVWCGMVATILACASLLVD

SEQ ID NO: 967481 - protein, 290 aa, Homo sapiens
MHSCRLLAATNRQQTPQTYSDVRRIPPSDRQFNEVSSQKPCANSASGFTNSRQGMKQGEIRNPTVLTGDTTESRELQLAVLGRLTLRKPDTHKFHSDSNTSHHRTYRITPLRLTCTTQHTHYPTYSHGLRLSTLHAYRPPIDEAKLTAIKTLPRHCQRRNPKRLAPKHRTWTDSLSHHDKALETCHYHRHTHNTTGQPPLRGPPHEDPYHHQHDDTPSKEHAHHVNGILKRNNTKTGPTPKDNRTNGIQSDKNKNTTLSYFRKRQLRHRTNIQHPETHPAQYTVTKHKQM

SEQ ID NO: 967482 - protein, 327 aa, Homo sapiens
LLKDGQNTRLTARLGFYMHLRNYSTDFTTRKLLATGGIGIIPDTSLITEANFTLDATRFQTPTRNPDTTTLNKRWTHDTHILRRKRTYWLQTSDCTDSSTAYPIQLLTVTTQYYKTHKHRRNKDYTHTGANPHTQYTYTSHWYLSNPLGIPPSTITIHIIPYERLISQYTTASVITNDYTTNRLVPIHPRSHTTQSARTPIHIATNTASSKQTTPHNQKTSNKSHHQGRNEEEPKEQHTQSKKQDQRAQANYRRPQITHPTRKHTFQELQDNPTPIDESTPERTNKNICDGFHKRDTLTDARTQKENELTSNKKHSKSPKRTLKHTT

SEQ ID NO: 967483 - protein, 116 aa, Homo sapiens
INHSFIDLPTPSNIIRMMKLRLTPWRLPDPPNHHRTIPSHALLTRRLNRLFINRPHHSRRKLWLNHPLPSRQWRLNILYLPLPTHRARPILRIISLLRNLKHRHYPPACNYSNSLH

SEQ ID NO: 967484 - protein, 371 aa, Homo sapiens
ATEAGDRGIGRHRRRRVDWEPAGYWSGRRCRWGRRAPGWCRVRDESEEPREGTSGGNMSENEEEAMSRAEEGSGDYDSRRDSSVGIERPRALGLSRRRAQSWKPKARRFEPESPGFESRSPGLVPASPELAPRRPESDSQSPEFESQSPRYEPKSPGYEPSEPRVMNPGALAMNRESSRYESQEHCSSKPRAQNLEAQKFQIPGKVLEMLLNPEAHESFEYLRRSQPGGLLHSGSQREQTTGHWRIGAPKRCDKERHGYNAVDSYRSPELHGAKEPRRRLASDQATGSDRGTKERGHGQKRMRGEHQVDDRTDGRKDKKEESTTSHNAPPTGRRKGANEQGDRQRYKTERKKELGNRDEERPTRPGPATKH

SEQ ID NO: 967485 - protein, 101 aa, Homo sapiens
DPFRFNEWFCHSVALSTRRVQILVSNQRNQGSLERWLILRLGQETCKMSLELLVVTGSKEALKCAPHPHTPPPLMELCQRGAETTARLLMANAGTMTARNK

SEQ ID NO: 967486 - protein, 105 aa, Homo sapiens
MIHKNKQQEDAKRKTHARRPSNTAKHKQTYTTSGPKPRNNTKKPRQSPPKTQAPTGQKAHTTNRKKTKQTKHNTKTEAANTRHTRQNTKPKTQPATHRAKKHTQT

SEQ ID NO: 967487 - protein, 69 aa, Homo sapiens
MSHRTNNIIQTAHGPGRRKQHHQTGATQTTPKSPSTSYHHGLHTHISRTTASQQRTTHRETHVRYSIEK

SEQ ID NO: 967488 - protein, 293 aa, Homo sapiens
RAAAIGAAKEGHWSKEFPTSIVSGRAGQTRPQTTTNCSNYWTQLQYSHYTMQLWGIHCYLQQLRYGALDAYYKRCRAARIRMQTAAQPASLRSAVLTYAEQTLSQLPQAPAIQPWPSSPSPPHSLDPYDRHLLADLRQLPATACLLPHARRCCCSPARFHFILRARIGPPCVALQPQLPTCRTTGYRLRGLQTCRLSQSLQQPSATTSPVRPWPGYEPGPSSCRIGPRHSAFFNLRGWHCVWADPPRCAHAHCRTYPAIRRVRPILASTTLTHLRRCNIHTGHPMHPHVNPFA

SEQ ID NO: 967489 - protein, 53 aa, Homo sapiens
MAWLVGAEGLLSGPSIAIPSTVINFHRGKGLGDVPMGRKGTRLGDAFLRPPVG

SEQ ID NO: 967490 - protein, 103 aa, Homo sapiens
MTVAGVPAGVEAWVMQSARRRRRKMKRRSRGWSSKQEAIRSIQVESSGVCDDVLRVYKYLSHRNLRNNVGDRNARKIRYQHCTRCNSTSDGTVFFKSWDCESD

SEQ ID NO: 967491 - protein, 51 aa, Homo sapiens
GPEPRPKRAPRLNDLASPIDHHLFVQQPAGRPCSEGNAHQSHRATRKKIGQ

SEQ ID NO: 967492 - protein, 203 aa, Homo sapiens
MMDVGKVLGWYRFFWFSFFGGWSGNRVWLWSLRLGVQGSILGSLQPWPPKFKGYSASWVAGDGRRPPPKPGDLGVPGGDRVHYMGQATLKLQGSGGPLASASKVPGPAMTHLTRTVGERNRGTGLWAQVDGGKARSMATLETPGRSKGLNRLKLTKGGSRGVSHHGPHHTTIREQKQLDRGQRVKAEQNIGTYTPEKNSRNKE

SEQ ID NO: 967493 - protein, 244 aa, Homo sapiens
MPRGKSDYPECIHHMKHPIICRLIHFSNSSNINNFHDSEKPSVRTRKSPNSRRTLHKPGVNIWMPLKRYKHSKNPYTSHLRPKNRTASKPPKAGFKAQAQGAPRLRSTDTDTEEHRHTQHTQTRGGTGETHKGTPQRRTQRELDQRRAHRRSAKQTTEQGEYNDGHKRQHGRHTLRTTPGGAAHASQPQHRPGPKTHTELTRPTRRREVYATKETVDRTNSTHHGHLNSNRETGRTSRHHAPIA

SEQ ID NO: 967494 - protein, 252 aa, Homo sapiens
QKDVGEKVPRKKWMSCNFSREVARVWVRGVVVPNGPRKAQLPRKGNAARIGEAPYGPSGRGKDDLVIPRSPHALWTRERECGRGLCGNGGIGAGGLWNLCLEEFPGTPVTNTKVVPFFRSLGRGPKKTPKDFEVAELAGLGETGRMGNSGGGSGCPPEPQELGPHQGRSPETAGAPRGMQALGKKKHLSIGAPEEPPGGRPYNTKQGPTGSRERRGQCARGPWGGRRVGGDCDPLLKDSTPQRTIVRANKKS

SEQ ID NO: 967495 - protein, 120 aa, Homo sapiens
MPTSHVNHTFIATCVHDLQDLLKSVGWLAVRVRVTTLGEALSTYVYHSRRVTCLPNGEYSHYIYTKKSLNVPHLTLCSSLVNFVNNTMINSSNCVASHGSERGGKRSNHDREHIAGTGVD

SEQ ID NO: 967496 - protein, 170 aa, Homo sapiens
RHDCSRAQCTITVDHVVTVRPDESDAVVMADVAEESEIISELVQTEDLGRQLSSEHMEPQLTDGLLVAHRLQEKASCCLVKWLSIKWGGYLCLQTMSRDAMWKTNYNICMVYRHEEIGMLYAIYLHWPENGVLNLESPITTSTTKDNNAGNSRRSEVVHRSSIRGLFIVS

SEQ ID NO: 967497 - protein, 166 aa, Homo sapiens
MPSRLSGYMHNSVLAYIAQVNYTQENYQNNAARIRAITHYIKRRDEPTEKPKPRRKPKKTKARIKRTQQRPDAHGANAQAPTTTSTRPRAEHKDNNRTYIQTKAENAYRMAPNISYSLLSLTHTAQQKKGTSTPKELRRRNYGTTHKTSSLPPRIHNRYKLRPGST

SEQ ID NO: 967498 - protein, 235 aa, Homo sapiens
  misc_feature (130)..(130): Xaa can be any naturally occurring amino acid
LTDNLYKDLLSSPPSPTTSSHVVSWEDRCPILTVTAWVDILHPEGGCSHRKQESRFCVLSYCNSVWATSQGSLLAILCVVKSRPEAMTICRPCSAGYRRIMLNGENSRDSVTREHNRWTLALGSMPPFSXVCRCPSSCESPFAKSTSLCSDIADPIRNRDSRDRSNRSTVPLGAVLGYVMLKITIISSDDPRGSSRVNVTITAIDQLALPGRKGTELREVTTEGTAELQEPQEGS

SEQ ID NO: 967499 - protein, 108 aa, Homo sapiens
  misc_feature (20)..(20): Xaa can be any naturally occurring amino acid
MRPFTNSKPSPITPKLGGHXDPKQASPPLNPARSPTPNTPIPYYSASGVSTHLQLTTSLHRQHNRKPNIHSQHCVINNFYLGVSYFYPILTKLSRATFAAHPIPPIFP

SEQ ID NO: 967500 - protein, 214 aa, Homo sapiens
MAISIDWYIQRPRQFNKAIIRSFGFNARQHNSSPSYPKHKPTTQLRPTGACITGINVRRNSYTQQQGEPLGAGARITHTTGYTDTVLNGHFSNKPKVHESVGKVGLREDSGFKPFKKTIKLYNSGDIEDERKKLQSKMEWLNLGIQDNRTGSPQPLWVTRATTSKANQFHNLTVQTNLAGRRIKRDNTRNLGSGHITYRVYHLLHPDTNTPSAA

SEQ ID NO: 967501 - protein, 464 aa, Homo sapiens
SIKSKFMVGLKKNNKRVQYVVRVQDMCLEFAWVVTSLSAGLTVWARLNSVPPKPFSIPLSWGFPFYISFSSLFLHILILLFSLYSPVFISPFFSISRVLISPFSLLWFSHYMCALLSRRSVEEAGLHGPWWNKRTLLSPREYVENIFITWCLITLHKGSITVHTYARPTSTTTPSPGAVKNYNKRKIRAKIERKRPQRSAPTQVGKNTQGDTDTEAVINPESARGEKEKESKERDNKFPAKVPGSNNSSGRKTRQEKSATKTTTANMKDRETIENKQPKGGQKKNQKRKRRHRENNPTLSTQWHNKPTRDITKTHTNNTPTQQTNTTQSKKSTHTAEQKEPKQNEKGKQRQKEETGTAAAKKTTVIQEKRNISDEKGADNETTNTDNIEEGDRETNDGMPETAREPRDQRETKHNRKRKRETEKRETKGQQRQSRRKQSEVSRNRAYKGGRGTGTGRATAADNK

SEQ ID NO: 967502 - protein, 99 aa, Homo sapiens
MHGNTVQRLMRAAGEVAPAEKSRAHTPQRTDWERDTGGHPTAVDTRDKGSTRGTQGVTNTPAKGEKPPYDDGNTNHSQQKHLESASNRGPRTTNSTHVD

SEQ ID NO: 967503 - protein, 133 aa, Homo sapiens
MQFPDAPKTKPLSPLHDRGYYLRLNALKSVEQNHQLFMPIVLQLIPLKHLLHRARYLPYSTPSTPLEHTTPPPPPHPPHPTGAPHNSPPRPPHPRPPLLSQRAQTTPQPPRQRTLKRRDTPPNLRNPCGHLAT

SEQ ID NO: 967504 - protein, 76 aa, Homo sapiens
MANLATLRPYPQYIYNYTPYTHYQSTISSPYNPLYRTHHERHTTPTPQLSPPPHAHHNTPQKHTTSIDNMDIYYYD

SEQ ID NO: 967505 - protein, 299 aa, Homo sapiens
VGSEIERMGLVMDRMGSVERMGSGIERMGPLGLDHMASSIERMGQTMERIGSGVERMGAGMGFGLERMAAPIDRVGQTIERMGSGVERMGPAIERMGPEHGAHGVAARYGSWAVSACGPPMVVSQWCDRRVQHIMANNKSCETGWAMERMGTNRLAAHGPGAHWVPTASERMGPDMGPALGAGIERMGLAMGWRWQVPALTVPSRWSVAPSEDATKVPRVELDGHAPGVDRKDCQIYGNICIRFSHGTMLPDQFHELSHDKQADSNCRRESPKGAVGSHKHRLPQGAQKARQHEERPSK

SEQ ID NO: 967506 - protein, 179 aa, Homo sapiens
MAKRGRWVDDNLDSRRTIGEVPMNAPRLGYGCYLCLDLTCVCPHYHTPPGRSMSTCTFLRSDLDWDNYSEFPLNGTASQQGLSNGTITLHLLGLNYYLQHNSWLSSAQTNSSSFTIPNITKASKTQAENGTRSQRGDRTILEVHPLWMQGLPKQDKTKRQQNRKQKGGTQKTKKGTNQG

SEQ ID NO: 967507 - protein, 184 aa, Homo sapiens
MKGAGAPYTNNPRKGEPKSRQHAELFDRQSERPPTRRTYKTQTSSAAEKHPNRKQGKPSRHGHTGKNPTLGAGAYEGTHPHRRLTSPGRHNQHEGSSVEHPQPVVCGRRTNWPHDKIQETIRAARQLHERTAATSNQPSKQAQRPDRHTTHTDQKQRDTDKTPNKEQHTLNTQREHRHRKTYSV

SEQ ID NO: 967508 - protein, 107 aa, Homo sapiens
MVHTYRARIFVREFALRRVVGECYPDKRSVRARSAEIVYESYLDAVRSERAQSPEVMERASSRDHSNDRDVVACMSGVPRPSDRCNNVTYIASLECYAGNESVPDNG

SEQ ID NO: 967509 - protein, 263 aa, Homo sapiens
MGGREKSPQEERRQAGGETKRGGGGAAALRREEEREGEQRQSGGSATTSAKRGGGEEREKKRRRDGRGEGEPKTQTQKDATGGAEQPPQETTTQKNTHEKKRNTRDGQAPNPHKKPEQHPPQQESDRQATHPYNRDQENNPWMTYTTPPHHVPASTKQTPNSRDNDSTTRPHTKKSEQQRWVKSRYERRTGERNKKPPPRRRGGDRHATPKKEAGPRQSPRPKNPREHERGTRANAPQTTRNPQPQPEGQQKTPPEQGKKAKG

SEQ ID NO: 967510 - protein, 520 aa, Homo sapiens
  misc_feature (75)..(75): Xaa can be any naturally occurring amino acid
  misc_feature (124)..(124): Xaa can be any naturally occurring amino acid
  misc_feature (144)..(144): Xaa can be any naturally occurring amino acid
  misc_feature (220)..(220): Xaa can be any naturally occurring amino acid
MLNTGCHMHGCPSIPLVRATRLGRMMPGLRGANGCAGVLAHVSYESRMLVTQWCYASQSESLTCPMSVEWSMSRXQYSAPKEESVPKTTGECDGPTLRGGAYPVEGESNLRGHNLLLDRNGLAXCTSSDAISLGSTDRMASLRXQTDRLASRACVAERAERTGRQRERPDMVSKGVLRGDQKGPRSYGKAAIRSYGARKKRVYGAMGRAKCASGAVNSTXTRFLDNTKGTHGDNNREARGRSRPKTPLGLAPRGWPLKEEPPLAKRVAPLSARVGPPWMVAVGRRVYVARGERGCVAVEAPRGAWRWGMGSRCLWAKANWGSSGAFDILVPLEIHTSRPKWGEQKPQLVVAHTLDTVGPYFQNIERGATTTYGVREDKYFPEGTQYITLHPSGMRVRTPKGPWVAGTKEHSGCWRPLTQGRHHRNSAAPWACFRHGTCLFFNKMFRVLNTPRGEWKHHPWLSESRAFCNTSTLATIHNGRTLSVVMVDPWIGTTYHQGPHTEGGLCGSRQPTAGPMTLSV

SEQ ID NO: 967511 - protein, 244 aa, Homo sapiens
KAGESLEIPVRQVGRLADKDRGEEDADGSETQELFRRGCAPFLNKLTSLQSVPCSLMRRYVSAAGASTPRNASKGLIDLIFDKAIDEPNILLMAYANMCRCLMALKVPTTEKPTVTVNFREAVVESMSEGDLRKTKMMIEVLEKKQKEMDEAATAEERGRLKEELEEARDIARRRSLGNIEVYGRVVQTEDVNRGNNAMSVWSNVLKNHDEKVPFEVPFVVCHHIGKELEFEKAKARMDQYSNR

SEQ ID NO: 967512 - protein, 255 aa, Homo sapiens
MIRTITIVVLNVEAHVSQQRLIGSPRVIISHRTSMPAEEKGGLPIGHKREAQSNPRSRSTILHEMKASSQSSYSSIYAHHSAVPYTIIRLVAYPFIYIHHQSHTYSPSNLTDVQKNNILIRVVEAITIDMHHRVSLCLSEPHIVLRVTYLRYPLRNPLVWSPPYFNIALRLRLPYELPHCAEDTLQHAHTADPQTSTKRAPQANTATPRPVVTAPPQSTLANHDTTLTQHDATNTPTPTPPVHHPTTITHHLRPP

SEQ ID NO: 967513 - protein, 128 aa, Homo sapiens
MVGELDVIDYAEFVRTKSCEIDTCRSRDYDLKMHAERDDSVTYDKSTQYLPHYRSLHNAIHNVHTSRVIEGDKMSEKYKLNILVSIPVSLNELMFIVWYRECSKVRDLMFWVSYEMISCPIVVECNLP

SEQ ID NO: 967514 - protein, 362 aa, Homo sapiens
IRDVPDTPVPAYHPYKLPSPTAPYRQDPASPLASPTRARSHLCCRPSPTHTPPTLFLLNPPCAASSRPAPTRARPGPLAPPPVLAPPSSLPPSLLLPPARSPRPPHRPSLLPLPTSLPPPPPLSPSPSPPSLPPRSNTPAPPPPLFSPSAPASLLLLSLYGPHHTPTRPVHPTLLFHTTNRPHLPSHPPSSPPPSSPSLCPRPPRPPPPPPPPPLALSHPSPPPPPPSPPTPSSPPRAPQAAHRLPLPSPPPTRAPCRVPNAPPAPLLLTPPRPTPCPPPTDATAAPPLPAPVNGHHVTSHARAPLPPPARCFPGVTGGGQRLLDKKETIRTSSQPAAPVPDVHVPDGAHPLTAARRARHSR

SEQ ID NO: 967515 - protein, 329 aa, Homo sapiens
AGAKKVSFFTKPIGPGEKKKRGGGPPRVPPGDCVGGLWRAGPSYYSDEWGCSQPGRGGGPPRGCVWAASAPCSRIYPGRRADLVLPRGQPSGWRQKPGVGGRLVKRAWGGSTSEEQPGAGGRPPESGGAGRTPPPQSGVLLPIARPPRVVVRQNTEQLGDPPPHSPQEGGSTGDSKTDPPPEKSRGETPARLPPGGDAAKTHPSSVGRASIHPRGGRNPHHHTGGEDDRGFGRKHPRKNLSIVPPTTGWRNPKKEEGGWCSPPHQRGLIKVSVPITSRRTKEGTKVVTNRHQPKAAIECDQERSRRPHTEPRWILSNKRTTRGQDVRVG

SEQ ID NO: 967516 - protein, 322 aa, Homo sapiens
PLEKLGMTDMFSTGSSKTSRVCSDHEPLHVAQALQKVKIEVNESVAVASSSTAVIVSARMAPEEIIDGQTFLFVVRHSPTGTVLFMGQGDGIPLTLGKDSLHLGQNVEMHRAKTNTPNKRISVFNDLFLKAEKTFGLCVKQMVTPGSSLQDLGSPWRTFRSNSLVSTVRPWERSLKHNSLKVSRTEGDACWEHLGHWFHRLSATRAADWFQGEGPWQDGNYGAYRSFCVPGRTYNWSRHIAIICLLDYDGGVEGKGSGETPSSKNHVDGTIQKGVKSKGCRLCATCRQRYKQGSISRNRRDTPYRNANINTPSEGISSITKT

SEQ ID NO: 967517 - protein, 499 aa, Homo sapiens
  misc_feature (45)..(45): Xaa can be any naturally occurring amino acid
  misc_feature (55)..(56): Xaa can be any naturally occurring amino acid
  misc_feature (151)..(151): Xaa can be any naturally occurring amino acid
  misc_feature (177)..(177): Xaa can be any naturally occurring amino acid
MPAERRTIMLGQSAQCTVTLACLEKDALLCVSHLTVCVSLYPLRXVSVKAPVTTXXAPRSVSASHIIVRVTRDSDQMIVTDSVTWSTLSTRHRTVSHSSYGISSFVFSAGHHFFVDSFERYHTERRLSWGGKFVWISPIRVLSSCQGPQRXLVGLGFDARPKGVDPFSGLCAAWSPXGHPFVGRLDRGTPAEVVWWVGSHPKVGGPLRIPPDPDHAQSCIPIVVSTPWVALFLGSFHAVRFLQARGMVQEGRGSPRLTLWDGTFPFFARLAQGEVNPTGAGGIGVSPLRELGPRQVQPRLAVADVGALYWNALLWRRTRWPWKLIRSRTPDGALELSSIPQGGISACGSQYENPEKGSLNWKDLTILVLISLRRTPHNKTQRNYVCVSRSRSVCGVPPTGVTVLSHTTTAPFSVVTSSQAPCCGANPRNCRRPPPCRDWRELGRQGRPQRDGFSQRRHHSLGRRDTLHTVASRKKRGDIHHETPAQAHAQRMGHPNRRR

SEQ ID NO: 967518 - protein, 125 aa, Homo sapiens
MYLTIFSLTPSRCTPLILGAINVIDEQVINDKKPRAITQYPERRRLRLIQSYITAVLLSAYLSRVTVAVLASRYTTEQTETVKPTSSTPTGGGEPILYKDYSDLRANLKLFAYPTRVRIFPFWYT

SEQ ID NO: 967519 - protein, 60 aa, Homo sapiens
  misc_feature (25)..(25): Xaa can be any naturally occurring amino acid
MAILIIPRTSHTRVFTSDQRIEPPXFILPCRNQIDPLGLVTYYDLDLTNTEPEERNQKPR

SEQ ID NO: 967520 - protein, 95 aa, Homo sapiens
MWVPQRERHRGEITMGHYLRPETSPHNAVDNHSTLGHHTTLGMHPKGMTDESSMRKTRDTPTYPMRTVQDKQLTRDEVKTTNPRERRSRERANTN

SEQ ID NO: 967521 - protein, 251 aa, Homo sapiens
MKLRLTPWRLPDPPNHHRTIPSHALLTRRLNRLFINRPHHFETLTSWLNSSAYLHANWRLNYSLSASSYTSGEAYYLRTHFSTQKPETLGIILLPCNYTNSLHQAMSSHEAKLLISAGATANYKLTIRHPIHSGQHLLQLNSDEATHLHTSHPHTTPSTFHFILPFIYRSPSNTPPPILARTRDPTTPYESPPIPITITFHPYYTTQRRPRLLSLPSLLNDIHPILTRTPTRPNHYSQTTPQTPPQYAPRH

SEQ ID NO: 967522 - protein, 400 aa, Homo sapiens
ELSFPALSSFNEAMHSALRAAGGARLWKSSRRSYSQGTTTGLAASPEMTEQPDYDLETFAEPTARNSASEPSHSHSHSLLTPPAHDCSLTGPLPPWAHLPRPAHTTATRPKPQHHTLPPRQRTTAPPHAAPHPANHYTHTPASLRSSGPNPPGPLPSPPAPPSPPRTHTPSARYPLALRALLRAHAASLARPARTTRLSCATHLPHTLLRARHLPACPPRGPRPARARARAPRHACTTCAQPTVPSLSLAIPPSRPSRSCPPLQPATHAHSAARPPSHASHPPFSSRLGLLPPVPLSSHLPPRAAAPSGSAFQVPLTHGPFTSFPDPHDQPPPGHPLGAVLPRPLAALDPLTLGHRAPPFPPWGPAFSPPPVGPSLWARPHTRAHPAHGPLSSSAYPAAL

SEQ ID NO: 967523 - protein, 278 aa, Homo sapiens
NHVFTVTDPRKHSVLTNETLSRVRDKIVDDYRLGIVPPGLTEYESCRAEDIYDYSFFILYTGEKDDFDRKNVSPQSYPMNMTIRVGCMYDYIQDYSRLCCSGSWIEPVLQCRRAITANRSGRQHPSLSMSWERAYVSATTGADSNSSRTQCIDQACLTTDRTSVPFAAVAAANCINIPLMRQRELKVGIPVTDENGNRVGGVGDAVKQAMHGQVVVSRILMAALAWHPSIHYDTLERKPFEEVPWMSAHQLAKRPRGFATPCCARSPKVRLYRWSVAE

SEQ ID NO: 967524 - protein, 483 aa, Homo sapiens
MPYEQDSTYNIAVTMQYIIQQSKRQPVDTPRLAKPSPISSVRTTAPITRRIQHGRHTQFIHKESSPGRARLTDHLTLTVTCTWHSSARHRHDTHTRTRPYLRRRISPVTLHSHQYSHKGGTPSSRQSPTVTVHANVHTKAIQYMDMQPQRHNGQTEHPTEQYKTPDGPNIKNDQTKNNVAERRINLGGHRKTPIHTMDKHVQALSNTKRELHLNHTWQVTRRRLTSSHTHNSYSSSKGGTLTDTNLTLQSYANAPPYDKRYPRPHTTTRFINNQTEDKRKMREDTPRTTRPPPTEHREEPAAQLTHNRADHKSTRSRHVKTQDSRTAQRVTTHKQPAHRMIDTPIKTEPHHNNNHTPRRTTTRQTQSHMKDPGERHTQQHAHKHRQPPHVDHKESESKRPQRRPAIKRLHATPTNTGAGPHTTRHHTSSACTDHRTVHTHARQTQQTRETTLNIKTLDETTKLKRATTYHTERRTSPAEHTTA

SEQ ID NO: 967525 - protein, 564 aa, Homo sapiens
MHARARLAGNPSLQSSARLCPPTGSYECKIVCERCTCTYTLVCTRGCALAMELHIHENAKAKGTVKLHEASYRTGDPCASPFTEPSPVGIAQGPTGVSDYLEECRLLPVRHSLRPRNKEPNSEVTGISTAHRIHKKRGRGLVRKEAQKLTRPSVRGPCNRPSQETTQANPQVGWTHPLASHRQFKVLPGQMKEDVRSQNRIGTAQRTANALRQRVTHPHGQQTSRRMREHNLYGIVDHRRGAPTSQALTRQPKEATVPCHTTMGKHTQQHHENARRHCAPHGTHGPPVATHISQQHHVVSQPRDIPEVGWYTSTGTQGQHARQMAGTQHQKHQLTGTNSKPTHSRDRVTQLNTQHEAPPQVNYKIDGREDDLTGLDLCSVAKLMNTNEPARPPHKSPALCDDKAHDQQSRHYSASKLRKLNNEGQERQRCTTHQQIRMHKPVGDDGTDIVHDAAANTRTERNKHQGNRMRTDTQTTYTPRPATTMPHKPQAAETHERRHKTTTDETSRAHTTNTHGSNTKTAHHSNGKPQRAEHTHSTNSTGSTKTDSKHYDYTYQQNNDEHTQ

SEQ ID NO: 967526 - protein, 251 aa, Homo sapiens
MGGYQSQNLHETLPSLTFTAQDMPGIPKQGRFLDKRLQETGPTPQSRESRSSTRPPKANRESNISNSRPVPDLGPSDGVMTQCPSSSGWKGAEHSGVLPALGPNISRAMRRRTMYKIPRGAHKQDVSPSTSPGQKPNGKEPRQISRGPGGNNIGEKPDTGGTLPTAKGAKVHRGGRKHEETKFRNKGPIRANKNKTPEKERQDNDRHTDDNRGGTGHNDRAAANDASRDGDVVNNTAREEAERRTGQSKKQ

SEQ ID NO: 967527 - protein, 264 aa, Homo sapiens
HRWMKMPLPVDQPERLGERLEVANLSEEVMYWQKTKLITLLLGVGPGCEGLVPVGCVTVVTSVNEILYDEGRPGSIGEDGVLCGSLQQTSERDVVEQVNGQEACTGGCKYGSMRVTTGVPSRNDRGNRKACLQMDVSYANRQREECWRNQSIAGQMQGYDELRDRGGTAQGCVTVKAIPNGGLDMREGTIGDMGILGITESVQVKREVLLSAGDQQQRVILRVDRHHQSGTRKRVLITTLVSIPTVAWIFGPDSSTVVSDRILY

SEQ ID NO: 967528 - protein, 95 aa, Homo sapiens
KTYIPVLSTETKPSDHEKLHIYMLYALLRHDNTQSYIILLIDYRCVHTNINLTALIGKHKAINYSEFQIHLHYYYRIHSVNCDLIDYIITYLRAN

SEQ ID NO: 967529 - protein, 287 aa, Homo sapiens
  misc_feature (107)..(107): Xaa can be any naturally occurring amino acid
LQVVRARKQIVIGVNYFLERVSLWSIPRMYQRTPAQSLCSKPARYPVSTAITHEQGDMTFRVSLPRSSAGCSLREGYKHRTLCRKSYLVSVTPNGCLVTRAEACCQXLPALIATSFIDHSNVGSLNHRVYHRWCTLHLVSDMASSRECCTGQHQRRTRIMYHTVHHEPVTFEFWLTSHKRGLLRDTSILHVRRIFPVLFTFIKRHTAIVMRRIVDYLASPSRLLGKPHKVNLRSSGALFNTWYRRLRPIGTWAHSGIIRRETAFNSNIKKAIPGNVERPEQPVTLTV

SEQ ID NO: 967530 - protein, 96 aa, Homo sapiens
QSRIGTAPRQSTATHWNGQQGILHYGTESGEGAAYECIDDNHIIDCRVCDADSLNPGGLTDRSCRIVLWARPLELEREELPSNLGLIRYVHRVLML

SEQ ID NO: 967531 - protein, 304 aa, Homo sapiens
MARPAGLHERRHGSTPRVTGFQDVRARGGHPHPPNPAPPGREPPQTPWEPTFRVRCCWPAILAAGLTRDPKPLASAPLGRENDEQYSGEAQLQGRPSRSAIAQFAEAAPDTSRLLMSMSNHLPVPKCPPGQTADSMVGLMCRGPIIPFTITLVGVFEWHVGWTVCGPSTCSAQCQAIRQMRELHEAVQQELVFCMGRTQGWYMAWPDVANQPLADSHWWIAATLACPLVPPSDSWVLACWGLHLFPGALGPLVVRGHILPTSEICPCDNTTGSVALVGAAPRLEGLGAAHTVSLRAHERPCGAP

SEQ ID NO: 967532 - protein, 147 aa, Homo sapiens
WHQKAYIPIGPKACRIVKKAANGLEEEAIRKKPYNLARGPYKSRWAQQGSYSCLKVSLSKRYSPSPASGPPSLLEVGSGGHPIFCDKLHFLHLGSESPGSHQSMGVRAGRNPGHEDPKRAVVSAFPPGQGELPVASGVYAHSSSAGS

SEQ ID NO: 967533 - protein, 311 aa, Homo sapiens
LCSCAHVKHRKGAAHLRSTVNYAERPGYIKGIVTGHHPRPGTDVRDPSAKVCLSGIRTRYLRERNCELITFASEGIHTGQFVFADKKAQLNIGNVLPVGTHALRVQSLCLPGGEAWRPWQAVPRASGNYATVISHNPESKELTRVKLPLAGSKERKSPQPTEHVVVLVPDVLAIDKPILLKAGRASHQILRHNEGPAWPQSYGGVTMNSCGSNTLWEVEPPGHIGKALHNPERCPCWPQQGSHAAAGLDVYRGTKIVRKQDTKCSRPPKVGSLPKRQKKRGAQNQQGTVHQFRQATQAKKRAGNTARNACN

SEQ ID NO: 967534 - protein, 116 aa, Homo sapiens
TELHTGRETKNITSILVSLILGFWSRVSVCRRGWSTGADDLGSLSTILPPWGVKRILLLSYHPSSWDSQVLCQPTDLKRKVGYICMRWSTGVIQPCLGASGLVIEILLYPWQEYCS

SEQ ID NO: 967535 - protein, 176 aa, Homo sapiens
ATNPDHDPPHGCCHLMLLLLALLLAASPVRRLERGAQAAWQGVQAGCPGGCVEEEAWGVAAEGLQRKLRAVSEREGQECGVYTPNCSPRTASAIRPRTTEATFAEAAAARPRPLTSGPERLLLQEENPKESKTQAGHCPTTGMLNRRDQQEESRHLIPSPPRPILAGCPRHLRWAQ

SEQ ID NO: 967536 - protein, 418 aa, Homo sapiens
VPHPPPCYAADRLRPRRLLPPPRTPCSYYRTESLNSRFLFNPHASDHRRAPPCQTQTVDTSSNIHPPKALHTGKDSTGNVCGKQASNNGKQQLPTAYRRTWSHSHRTHMGAASAGLHTLPRSSTAHAQHGTRKGRRATRTRKAKATAHSHHATAPRHRARPRRPHAKRHPRTPTLLRPQPTDKTQATRRATTPSANAFPQRPFTTPARRSAPETTGPRRMATSADEANNTTHTTRAQLWDHTPPAPQQLWAKTPRVNTRRRTIPPGQTSSEAAPNKPRPTTDAPPANAGSHTTSRAAAHNTSRHTRSKHHPARTNSARRRHTTAFRRQTTAPGLYPPGATTPPPPTEAPTHNKQSQHANTHPTRPTTTTEPAGAANHPPATNSTAPPAAEPFAPTRPTQAQLERIPSLNRTQQQPCHR

SEQ ID NO: 967537 - protein, 254 aa, Homo sapiens
MGESCGGEKKPFISGEGENNMGERTTHTTNNKIQTHPEERKIIKLKRGREKEVRENTTARKIKQRERRERRKRGAAQTRARYGTREKKYYKSAGAAPPPHLKTPAKRREKKERRRTRRREKKEKEEKERGKRREEVKKKKKRKGQEKKGEKEEERKRRRKKRKQKKKRTKTKNEKEKKEKKKQEKKKKKREGGKQQRTNRKEKKKRRKNRETRKKTKRTKKTKRKKKNKQEDRKKGRQQKKGKKTEKEKQEREK

SEQ ID NO: 967538 - protein, 109 aa, Homo sapiens
  misc_feature (103)..(103): Xaa can be any naturally occurring amino acid
MEHLEYSYHWKWWGLTLIPIWSSTDMTSKEESLCLNAPNSSFLKSTARYQGCNPSTTWTYYPTYAPRLVRQNTHAFFATRKRDHLSGNRACVVPETLANMPGXTGKIAR

SEQ ID NO: 967539 - protein, 121 aa, Homo sapiens
MDQPPPCSYDIAVDGEPLGQSSPLSCNADKVPKTAENFRALSTGEKGFGYKGSCLHRIIPGFLCQGGAFTRHNETLGGKSIYGEKYEDENYTSKQHTGPGILSMANAGTQHKWFPVYTICH

SEQ ID NO: 967540 - protein, 71 aa, Homo sapiens
LEHYTYYSAHELEILGTATKTYLIRAELGQPGNLLGNDHIYNVIIRHSPCICNNTSIHSNTHHNRRLKETD

SEQ ID NO: 967541 - protein, 110 aa, Homo sapiens
MHIDIVLHDTYYRCSSLPLCPINRSWIAIIGGFIHCLSPILQATPLDQTYAKIQFTIIFIGRKSKLSSHKTVARTIRNAPDVTRTYPMDTPHENILSSVRVLHFSNSSHI

SEQ ID NO: 967542 - protein, 266 aa, Homo sapiens
MKDIEKRTHKTDEKKSKKNTRDTYTNNNDSTKTTGQQLTNTADRTTANPRQEHETHKEDTHETRTKTKNTKTQGPNQKTIRRTTQESTRNTTEQTREQKNETAATETHHKKQREGNKKTRMSKRQKQQQTNTKRKDETQQNEQQAAAKKERTKERGRNNTTRKQTTEREEREKKGGQREHTKGKKTQQNEQNKTTNENRSSRTAKKQRKTKRTEKETREHRQEENQANKQRDKKTQENKKDATKTKKRQDKSKRTRRTSKRGQRQR

SEQ ID NO: 967543 - protein, 115 aa, Homo sapiens
MTRCRSTSAGTHSVCAIDDRNLTGEAYTIPGTRRTEHATAPPAPEADATTHASNNDQQPNHTTSHPPTTPHSPTPPLTPTTTTPQHHTNTPHSHSTQPHTTPTTTHPPTTPPPPP

SEQ ID NO: 967544 - protein, 164 aa, Homo sapiens
MANPNSISVAPILVRQKFNFSPLEKVLFDQLRGRAIIPRNEDSTPRTNPAVLRKPKQYNDTPQQCTTTKQGGRDRHHTKKYIPPARGSPKGINAAGSRPLLRGTQQEGGHPKKGDDSQYIKPYRNQSDRAVKNSAWVSCRQIRDSRGPQRGKETTKSRRGRHQT

SEQ ID NO: 967545 - protein, 96 aa, Homo sapiens
MDNLTPTTESQNQKADRKTNKPTANHTHNPPHPRPNKPRNNTNTTHTTTKHTKQKPPTDTRNATHAPTHTENQKHKPHKHHKHTNNPITKPKTKHK

SEQ ID NO: 967546 - protein, 153 aa, Homo sapiens
MDTDRLTRQHRDRLKIFRRKEERHLRTLANFNRRLRAITWGQRDTRMMERGAVEITTGLRGPRRPSTIYPRKTRRTRGFTADDTHKSGLVPVRGQHVARSRAPTNLRRHSDQQPNNRAAKQPNHAGQETQRKPTDTETHKTTTPPTARNNPRH

SEQ ID NO: 967547 - protein, 104 aa, Homo sapiens
  misc_feature (68)..(68): Xaa can be any naturally occurring amino acid
MTRVISIRNFYQKPRGLPVEPCGQSLDFAGQCNLAAQCMVNYSSCQLSTLMCHYDVELVRHSMSISRXWTQAKSPGWIVLLLQRHKEALEMILNDENKKQKKKR

SEQ ID NO: 967548 - protein, 38 aa, Homo sapiens
MLTYPFRQVLSMASQHHRIPAMAACTHSHAATSLPPSS

SEQ ID NO: 967549 - protein, 122 aa, Homo sapiens
VILLLRQVQCKPLLESQKPLPDAVLEELRIKQSCPTSTLLFHAWPVAWHMLYQSQGMMQQLQSMCYQQQQLYDIWAIPQPRARSGTLRHSSPHVLVRSTQPTHLLPFSTHTVLAHCAFTPII

SEQ ID NO: 967550 - protein, 74 aa, Homo sapiens
SLPLSPVPSRPCAFRTRALEAARGRSYRMSYPELHLSTLADAVRLMTCFLLALTIYPYKNQRETEEDLITVKGS

SEQ ID NO: 967551 - protein, 230 aa, Homo sapiens
RPEPGNERFALVAQLECNGTISAHRNLCLPGSSDSPASASRVAGITGMRHHARLILYFFVVVVGGGGSLHCWVRRGLETPEPQGDPPCLGLLKVRGIYRRWATCALAYLKFYKHFILGNCVFPEKEKWQTIFSLHDAYIWASGKPKPSRMAGRMGEPRLLGAGGYPGASYPGGLPRGRHPQGLILGQAPPGASPWEHLELIPGALAPGVTQAPSGPGGYPSSGPAMCPEL

SEQ ID NO: 967552 - protein, 125 aa, Homo sapiens
ENLNGKESTQSSSPTYEGLPSPVTKRTEQTLGEMPRNLPTILKYHIGDEILVSGGIGALRAAKVIIRKVTTLESQLVINESVVSVNEWSLLSEPDYHGHKVAVVRCQSTNVSAASSQARPQEERG

SEQ ID NO: 967553 - protein, 98 aa, Homo sapiens
MPRRILGLPRMTYTEMRHPIICRLMAFLYSSNINKSCTDLEKPSLRSEQSYIVEEPSITAVAVTIWMPPSATHIREKPSYIDLYDQPQDGIEPRKAGP

SEQ ID NO: 967554 - protein, 463 aa, Homo sapiens
KKSKPAPSESAGYGIPLHTDGACSKTDASTAAGAILQIHADVNTTKGFEASQSHATSVQTPPTGRHQQVAVTGPLKHHTSARNRTHKVSYFYSIITTSKVSQRTAFMPTITISTSIILNHASSFQAYSPPFTHMHLIFTHLLAQLHAALSTLYNGTIKNWIYRICRDTQSGRISKLICTLPKRARFLAKHVRNSPCSIIPQQQIHKATHIEWIRYRSVPKHFQSKRQATQPSALAAFIKACTHQHKIQTRIITYDTRATAPITITQGLQRGNYHIPTPLSDDWYLGCLLTPSPLLGSTQDNPWRYNLQNSRGTSKKFTRPSCDPPTPHTGGINLQLGTTDTQHIDNAPREYHNILTITRHTNNISKPQKHTQTNTTRHEQKLNNRPDRSHAAGNRHRRSGTARRSTYANNKPQREQPTHTRRTPATNNTMTRGHKHQRHNQTTKTGNNTKALTTTRNQTSTRT

SEQ ID NO: 967555 - protein, 147 aa, Homo sapiens
MDRVRCRPTVVSGCVTYLWIVFACSIDTPWGSGARQCQDEYDITLIGYVYNNSRDTHRLDPSYVEIAASSTNKTMISFLYEKKAKDYGVGTIDDDVEAWLYLGNVSLVQQLAIQEVWWSWDQYPKMCKFGNEYWVPRKAHTMWPLKE

SEQ ID NO: 967556 - protein, 228 aa, Homo sapiens
MAQLSLRLLIGVEDWPGGPSPIYPGLGTDFPPYRTKKTARPPPTHSNPPTPDRPTPPSARHRTQRNSQTRPHRSHPPRHPQPHKPTHVPHPPPAPSTTQQHQHTPTDTPHGSHTTEQHAPTPPSAPPPTHESRTHHRHAAAHPAPRRPPSPPAPLHPRTRESERRRHRLPPPPGTPAKGGNEGETETSPSPPLPRPRRHHSGPQTEREQKPAPPPRRQARQNKHRQPH

SEQ ID NO: 967557 - protein, 191 aa, Homo sapiens
MERRIALASRDGGPIPGAISALGPHGTVPHEVCALSREAFKSGGCSRGCDASYHKERVARIIEPFLVRYREEVAGTKSTDSLKARRVEDEGVRSKIILFAQEALGPMTGDSSAEELKLATQLTDRHARRNVYKKEKAQSHHLRKRQNFKAFASLRMAVARPVFGYGQKEPRKPQNQDVDTRKNKPPGDLES

SEQ ID NO: 967558 - protein, 337 aa, Homo sapiens
  misc_feature (251)..(251): Xaa can be any naturally occurring amino acid
  misc_feature (279)..(279): Xaa can be any naturally occurring amino acid
MAKVGVAFLKYHRVGRGARLESSRLNREEPGGPNELTSYSARDKESRQSLYRPRRTESVVWTEMRSLNQYHRPSPGVTPEAVPLYEVLDTVESQVGNLIYITADADVSQEKQTSRWTLQVGYAKSVAGGSDPRYCQSCCDNPSSNETSPEIMSLETRITLDVLVFRHDNILWQYNHYNYWAHVSSGIERCTPDDEEHNQVYPCRSEQEPQVHNRRNPVRGSMKEEVRSREGIPIVGRQTLYCRAQGGCHKXVPEESTDKNVRNGAVDCTPWTARTCGPXPGEGPYYWGGHPGKTVRKNSSGREKFHSFVVPSDIRRQIDINNNTPNHIPTHSHSYHY

SEQ ID NO: 967559 - protein, 111 aa, Homo sapiens
MGREEERSIRNLPKMWISQALNQQVDSGRGAYSYQTSTPFWLYCGQQRAAGLFLLPVLPPTVPTGLQGLPLFLSLVLGHPQWFLSPMRSWFSHTLLAHRHPTVPPQPRRGR

SEQ ID NO: 967560 - protein, 221 aa, Homo sapiens
MARCNTRKHIPRPPHELTVSKKAFDTGESYLLPQKFFSSQDYSEPLYHSSLAPTPQLGGRLAPNRYHPAKSPYEVPLLSTSVLLASGCINQPESHHSLIERQPKRKSNSRRLLYYQFYWVLYLYPRYKASEYFELSLHQFSEGQSTSSTFSRSHRLPRTSRHYGSTFLTICFIRQLIFHFTSKHHFGFEAAPDTGICRIVVRPYFLVLSSILIGFEGSYPN

SEQ ID NO: 967561 - protein, 124 aa, Homo sapiens
ETSGNLDDLEYKLHDYGLREEFLFPRDCLAIGASAHLAELQEEQIQEQDLLYLKKYYGTKDPAARLMSVPAAEHSDHNRLGGKTHEKDAFEHIVTQFASVPVSVARAMSYDIYNACDERYGVKI

SEQ ID NO: 967562 - protein, 318 aa, Homo sapiens
MHAEPGMPPRNIEHRPIKNLTGCGHEVHQYVKASTTDANRQANGHHADPGIMPPCAAPTRRSTGTPEEAGNYCDHATSHTSRHIYSSRRHALEEAATDLVIVGRVLRTETPPSIQVDSNAPYTCSPTIDGLSNRTLRRPGEHSDAVTRQPSSHLRSNRNSRSVPLHQRTTPHTPNGGGPGQRGTQFTTQHALGNPAGETQMRSQDEPLDLPSGTRNGDTTRQSPQRAPHPTALRLEPLPPAQQGAEPRAVGPPGGQPRQSAPETRHSPRHAAPWRPTPSLHAQAPAAETISTSEPATTTLGLPRRNIAYSTCNSAYAD

SEQ ID NO: 967563 - protein, 544 aa, Homo sapiens
SAEDILLKTNATKEKMDQAANAGSCSTISHRSHTSSKRFWTRGISAAFGTAIDSQLLNEVIEQWQMPSDPHSQFTAHLPPAQHHTCTRSCNSLSRRQQVILQHQCCCTLPELQHVVQTASSHKQQANKCHTRCSKSTGQHHGHTGTALAQHSRTTGPQGRPAKQHTANFKTQPASHKHHSKGNPQDNIASTYQHKQVCTHKRAFLAGQHPLFQTADPPSSHSSRQSQASKANGRAKHTFQAGHQAAPTQTHGRPRPRHIHIRHTHTASSTHSPARTRPTQSAQAQDMSPTDKATYRTQLGGGHTTRTRQTTGSLHQQHGQTKHPTHPRAPTQNHNPSHRTTQRPWKVAKHNGTNAPTMARPDNRTATTTRPPTNPHQQTTHNHRAWHTEPPNADLRTQDNNTNGPPPQQTHTTHTGPTEQLDPNREQEDTSTATRHHQESFKNKTNRTDLQQQACNQQHNKHGTQRNTGPPTNTRERIKHHHQNYTHTRTTLERPNHGRNTQARRYTTKAASEDRTQDKQNVSSERTTPTHNLTQHTQNHETPT

SEQ ID NO: 967564 - protein, 451 aa, Homo sapiens
RSRLLLRGFFPARPGGPDRGILPLDLICAALAGAAQKEQAGAVVRAVCVGRPWPGAAAGKLGWDCSAASCPASSSDHARLKNWTYLVAIFLSPSPSASSLQNSPAPGLASRSAAATPARRRPRGLHPSSHASCAPHHPPASLLRPPTTPRHLRPLHSHGPTPCLPAHRPLRLLAPATSPHSTPPCSQPAAPPALPRGSAPPPPCPTHTNAPLPPQPGCHPRHTPRCPPAPSRPAPTATLPLLPPPTPRKPAGPPRPNRAPRRPTHPGRATLGHATSDMPPSTRHHHPTPPAPHATPSHPIPTHKAPANPQTTDKHAATSTNDATTNHRRARRHDQPPDPLAPPPDPRPAPRNDGQRTTSKNTVTTAATPDGRAATQQAEPTQAHTRSNPSARLRETRATHYHRANTRTAAPTPTATPTPEVAPPPGTHTASDPHRQQRENRSKPDNSSRCE

SEQ ID NO: 967565 - protein, 223 aa, Homo sapiens
QLLTASDPPASASGGAGIADGVSFTRCSSVAQAGVQCVISASYNLHLPAARLGLPKCRDYSLCPAATPSGKLRSVSAWPPIVWDVRSPSARVPVWGGEERLFLVRDAIWEGGVSLADCPSSEAVEEHLQATVQIAGLVRCEETPLLRSSRLPVLVQVLAPVAWAVHCTVCARMAPTVQNSTCYERKLMQHLRTALMGHNPINSTRLGRKGKTITADDKACVEK

SEQ ID NO: 967566 - protein, 149 aa, Homo sapiens
MHRNNRTTNRPHRTKKQTENEHKHHEDDKTNERENKQRTATNKQKTERKPTSREGTRDENHSAPPATTEDRTQQKHNQTKKTSEDRKPKKSTKQVEEQQKRNQNTKDKKRRKKKKKTQRTTAEEKKTAAARETEEKKNSDSQRNNGARH

SEQ ID NO: 967567 - protein, 125 aa, Homo sapiens
MAEEQNGEKNKDRTEEKKGKRNRRGEEEKKTERQKENKERRERKKGERKAKKRKEREKGGRRRRNEERRRRKKRGKRREERKKKKRKKKKREENRRRREEKSKKEREKRRRREAKSANGNVDKDK

SEQ ID NO: 967568 - protein, 205 aa, Homo sapiens
MVEKNNARKTRDEGHPHQPRRRATTPQAKRQNEQRHKPNQQPATGAMQQHHTAHRGDKNAATTTQEQSSDIIEAPHHYIAEQTQQHSHHTRRQGRRRRPKPAPDGGTTRHPTHQPRKTKHLRQTTRPDEQQPANRRGSTSQASADHTQPPETEDDQTAAVPPTHRVGATRQETTQQAEQPQQTRHDPDEKPGTQHHARPEHKPHG

SEQ ID NO: 967569 - protein, 277 aa, Homo sapiens
MPIRTISSRCAHQSLVCSPTSGPLLSFLQRGGPQRKHIHKLSVKWWSEPCRRGGCPPLCLKRPRSTKAALLYTHTVEQQNEKLFFCGRTKNISQGGRGNRWRFENTQPQYNPLSVTNALSHINRHTHHKTKDKNHTIQRHSTHQPTRPDKRRGGGRRSTLNYKRTSTPPTEEGGEPTQRYTNLSRPPPSKSVMAVCTHKQRRDDATHRHKREKHERELLIYIANSSKQKQRGSRRQRLVKQNISADTVIGRGRTNQLTTTPGGQPTLAKSKDNQLHR

SEQ ID NO: 967570 - protein, 110 aa, Homo sapiens
WGIKNFWDPAPLGGHKTTLGAQKGGGWRLGGKGPRRGGSRSVPSPGEEKRRRIPYNRLSARSIGGVAPPPMVGRGRDTRDTNTGNGGGPPTKLHRVAMGGKHRRRVASIK

SEQ ID NO: 967571 - protein, 108 aa, Homo sapiens
MASEYESLTHIVYRKQRNQIIKHCLLQFTGSLFTSYKPQSTSESSLHHFRLAIYGVNIYCSHRLPQDFTVIIGSTFLDYLLHPANIIFHFTSKHHFGFRSPPPDTGIL

SEQ ID NO: 967572 - protein, 105 aa, Homo sapiens
  misc_feature (79)..(79): Xaa can be any naturally occurring amino acid
AAFFLFFWTSLHQFYYKTQTSILSFCKGNGSQINAEHETLTNHQVLLNYATPTIYFFKTSTKQSTAIIITNRGHRGIVXEGDSQTHDNKSEKSQWVNTVNYSSPS

SEQ ID NO: 967573 - protein, 85 aa, Homo sapiens
GLTQDYKNGNGEGDSSRLERASPKVQMWPRIGMALGGFLNSHSKYEMRGHRKSLAILKATPLLSKEKGPVLSQVHTGEVISMASV

SEQ ID NO: 967574 - protein, 51 aa, Homo sapiens
  misc_feature (24)..(24): Xaa can be any naturally occurring amino acid
GGEAELENYIEHVLLRRHVTALPXSRRRHEGAGQGNIGAGAVGAGARPGVV

SEQ ID NO: 967575 - protein, 506 aa, Homo sapiens
GVGQSWQGELPTECFIKEALLDATANATIAPVHRRTFTARIELHWKRKLSYCRQHDTTLAVQKDSCIMTCLLPLSTSGFLTLSHLAHFETVTQLATTTHIPSSLTSLNHHWPPFCTLTLPLSTYYYFHTSQAANPGSLPTPTQPTLGNNCSLTTHSWRGTSLAHKPFFPNKHNTQTLRQTSETHMATRAAPHRDRPSGPHNTSTFHRAYHSDNPPREHTPRQPHHTHHTCRHVDPHTATNPTQTSNRRQQLTPRASPHTQHQPHTPTTPPQTHTPPRNSSQQPPTPTAARSSHTTLSANHRPPPPMRNDSHTEPPRRSEIPPPPTRYGNLPPKRGGPHHTIDSRRGRKNTTHTLRALHSPTTQRPSLAPRPATPTTPQSATTPHTRRRPHKRAARPTTTGRPHPTTPSAEHTHQQGTNNMNHSDNENTSMGPTTHTSAETPSIMNDQPPPNPLHTARQTPTRPTTHNTYSHTPNTTQRPVLKTRTETQPAHTARSDRLPTKPPPPA

SEQ ID NO: 967576 - protein, 273 aa, Homo sapiens
MTETSINTCTDNCEKQSPHRTINLYHQGDTTQLQEHSHTQEQTWTKQRMITAKAINQPCRTAAKQGAPCHKTPLAYYTHTISQMAKEAEPEENVGNTHIGNNEKAHRTWGHKLAQTIPTYNRATKKQQQQDTQEAPPKRELGHHGIAGHTGATWTHTMRTEENPTESSTTEPTHTPTQRTKRQHHEAPAKPSAPNRQRLKTKENKPTDTTRRHTTHKRAPRYTSTNKKANKQPPTTTRQQRTTTTTTRHTYKHPSKPGTPQHAHTPAQTTHNY

SEQ ID NO: 967577 - protein, 122 aa, Homo sapiens
  misc_feature (46)..(46): Xaa can be any naturally occurring amino acid
  misc_feature (53)..(53): Xaa can be any naturally occurring amino acid
PGETPPLGGEIPRVQFGTSDKDSDLRLVVGDSLKAEKELTCDREFXRWAKGGXHPKFIRQMEVSSARLGSQLHHVLGLAPFPFGPLGEKGPPKTKKFPRKGKTPWNSGHCVPEPSSSGQRLY

SEQ ID NO: 967578 - protein, 256 aa, Homo sapiens
TRTSSHKYVPRAILVDLEPGTMDSVRLRGLVDISSGLTISSMGPRVGAGYRTGDQRVTTSEGAESGGILVPWMWCGRSVKTCDCLQCVPADPLAGGAARGSGMGTLLISKVREEYPDRIMNTFRRRALTQGCQTRLVEPYNSRLSIHQLVENTDESYGIDNEALYESASAPQAWHAHYGDLEPPGIWAPGAEVTTPCGFAGQLKADLRKLGLVNIGALPALDFFHGRVSPPYKAGKAWSTGPWRAGVTQRFSVPEL

SEQ ID NO: 967579 - protein, 96 aa, Homo sapiens
RTVILQRTYKNRASSGSSGTSAAHQLNCSDANPSTKVISIAEIMLRVKDPKESHCIFILGVLGPDATSTKCDFPIMKFTLYFLAYEDKNDIPKEAR

SEQ ID NO: 967580 - protein, 135 aa, Homo sapiens
VCGAKDGSWLLREIQPRSPWLLMRLAWLQRQPGFEPRAGAPGGGYARKAVRDVRTAWRATRKRASPVRHECQRVRKRARVEKPSGRGAPGGVRTPWRKPNRVEPPRGGAEGPFPFIDGAFDGGGDNHGLSGDRGS

SEQ ID NO: 967581 - protein, 313 aa, Homo sapiens
SRCRKQQPLLFVSASDRKSAKKEPMREMLSIHVGQAGVHDGHACWEPLVPENGIQPDGQMPSDTDTLGEEMIPSTPSSDETGAGKHVPGQCLRLGNPRSIDEVRTGTYRSSSSLDNLSQAKEDAANNYARVPLTPLPRRSCDLVWTRIRKAGQTSARVSRLLGFHSFGGENVVLGSPRCSWKRFSVDYGKKSKPGVSIDPAPPGIHSLIVEALTIHRQQQDNLEHCDCALMGDNEAPKTSGKTREMRDHRDYLEREGQGAPHRPRNGEAECDGESNHGATGHTRESRTGKPQKAGDTRLAHGDPAKCARGNRD

SEQ ID NO: 967582 - protein, 32 aa, Homo sapiens
MLQHEAVDPSYFGAGLRLTLSAGDNHLEDKHN

SEQ ID NO: 967583 - protein, 39 aa, Homo sapiens
MCGRLPSFSVSFSTLPRGQYYFDAGSAVSLRRPTQSCGS

SEQ ID NO: 967584 - protein, 329 aa, Homo sapiens
  misc_feature (185)..(185): Xaa can be any naturally occurring amino acid
  misc_feature (301)..(301): Xaa can be any naturally occurring amino acid
MRTTAQVVTHRLKRRASDEQIRNLEWYSPQEYAFDYIDVCVTPFELDHYEVSITDHFFEYANLSLVRRIGNSPSNGHFPVSAIPRKSKKRKGTLDFLHETLARGKPAPPSVNMRRRHFFRSSAKFRLTALTCDQSVTLEDHIGEKVGAQLVGPREMSCNRSFATTKFESPLNGFVIVNVHVGLPXQGPPCFAFGDPFGRMWAANGHNASASSRKELGLGRLTQPNTLRNAGPCAPSRAVPDNHIGKSHRLASYQTIGRKHTTIPNQSAGCQSASPQSLYHRAGHDQRSVAYTRIYERVPAXLSEPSYNRNNVNVTGTCACLISSVHDKL

SEQ ID NO: 967585 - protein, 209 aa, Homo sapiens
MRPGEKDNREFHRQVAWSARIDGFYAASLYGSTWLLCCAVCEDGRQAPLHSPFIEDSLDNTAPDTASAHPTVHHDRARLRHNSTTGKKEPLTHPINHLHTHSKPTQQLTQDDPGEEHELLTHYTYCSPGNCESLTAARPTHDSRNERIADPPQPPAAPQQRPRIDRETTDATNSHIPQTCNANKQRHAALDNTQQQDPERNKQLEPLRQ

SEQ ID NO: 967586 - protein, 267 aa, Homo sapiens
DASEEGLPIPIAGRLDLPYQTVPLWLPRLLPATRRVDSTLQRQKLMAVTRIYPPRNQPSTHHALSISYPAPHSEEIGLIQAIIRREHSSQSSTDNLTARPSARIVALTCRGHSSLMRHQPAGNTETPDRRILAPRQVPEALPATDSTVPDILACRLSPVGGTNHCCWIQCTSPNAHTRHGHGLFNGPVGASPRPTAQRSAALGVEHTNPPAHATGPEIHTHVTQDTTKHKATRNSHRPGANERHALTQPPARTKNTHPLGSPETNEP

SEQ ID NO: 967587 - protein, 129 aa, Homo sapiens
MRDPTPKQRPSRIKQALPYARPKSFRPTHNVYLISTHTVGTPQGRTHRYQLTTLSAYSSLTTMTDKRREKSREHKHETHRARETDRHPQVDRLYPHSSRERYTSILVGKQPPTYFTAILASHRLLKRTC

SEQ ID NO: 967588 - protein, 323 aa, Homo sapiens
MLTWLVSTPETQVIRLPQPPKVLGLQARATVPGLNFASYKGVFQRTSLQTFAILTLSCQGHSALTERRLLALHQNSALLTHDTAHSSADQRLGNTHASYHSYSQQPMQIYSISLLTDDRHVHGEHHSTIYAISGGTLKLFRIWYLLSECALTPMSQHCLALNTPPHGQTPAAVRQNVTHTDDRPDEPYFPGIQRGRDLVCVSSRTRPALAPRLARSPMSLRLATGSPAAPDHPRPLPCPLTPPESPPVSSPHAPTRNLSAAPPGSRGSIHSRNDAPGSTNGSSPPAPTRALPHPHAGSAAAPWTSPSASPPPRRCTPVTCLAL

SEQ ID NO: 967589 - protein, 309 aa, Homo sapiens
CEAVGELLLEVCRGTGKDDAGIKTLCHAHVQEVCALAETTKVQVNSQVSPVYAPYRRMVEKMNRNELIVALLVEHDIPCHMEEHAKYKMRIATFPRTSRRVPKVKLPSMGRKSRPLQGYSRRGGSEVSEHSIEDQLKALYISDTRHQDSCAMRQGSHEQVGARLWEITSWSENTIAYAVLSILVELSDCALFGRTMRYVTGLRAGPLETLGQLGGSVPVSPVRRCVARSDSRRFRAVPVSNRSHLGWYSLVVLTPGEASAGGSPDAPRHLFSRGVASRFATAIQLGLAGPNLTAFTLGPLVTKLAASGS

SEQ ID NO: 967590 - protein, 84 aa, Homo sapiens
KGVVLNLSLNAYRIAESGSDEAQEEYDRQVRAGGDGAPGAPMARQRDARRAYARPWHVQGMGERSETGGGSWVAWYMVDDVLEN

SEQ ID NO: 967591 - protein, 376 aa, Homo sapiens
RGLRTALRAQSLAFADPDARPHPAWQLTMDDDISLRSSIDNSAPGMCNGLCILLWRQMHPRGLSSPPYVVSAPVTPVAVMVGMGQKDSYVGDEAQSKRGILTLKYPIEHGIVTNWDDMEKIWHHTFYNELRVAPEEHPVLLTEDPLNPKANQREMTQIMYETFNNTTMYVAIQAVLSLYASGRNQWPLVNGLQRDGDHHNCAIIRPRSATTPHCILSMDLAGRDMTDTHERLLHTEAPSYRVQTANYDHTGYKSWRYPYGRQDEQKVDHEPPRQKIATREQIQPVETATKLAEDKDITRVKRTDPLPPGRRLTATNFRNKTGTTTTPPTLRDSRENTTRCTTELRAPRRSNIDTRQKKEAVETQNTRTKTDDTAGN

SEQ ID NO: 967592 - protein, 208 aa, Homo sapiens
MLQIQILANTQMITFKAFKSTGFYPLFLQTDYCQLYIVFSYNILLFSIIANQFPATFIHHTIPDPIIHTVRLSHISLSSLAPTLPLVIYTIRRCAHTRHCIYQVFYHTMELYKLPNITCTGRLKIAFHHDAHSFAHVLGQTNTTSHYVKSNKQLTVTLMLHKGMALSDLRRHNTDVPVYRQNTKNKKGADPDTNKRFSPPRRGAHKRP

SEQ ID NO: 967593 - protein, 222 aa, Homo sapiens
  misc_feature (176)..(176): Xaa can be any naturally occurring amino acid
CCPLVYRSGLAESYISSVEYSATSRIGAVRWPRTVGVRFLEKGWSRLTGRPPFQTLIAVVGTASLPLLSPVGTTVRGVSEKGWMNMQVSALLVSRYVYQSCESESTTSLTRDRKKLDETRERIPMASMARARDVDGDSTMYESKTKLRPRESERPCRATKRKKSVKGGPMGAPRRXSANTPGVPGQVGATRKRKSAATILGVKAPPKACGRFAKLGDSPGDL

SEQ ID NO: 967594 - protein, 207 aa, Homo sapiens
MFVDVGVTGSVQCPRFPRIRQLEPCCTRMRIQRSTCPSPCVTSSSCDLLRMRFANSLVGNPLYISLVVLSALGIRCRSGDIGFSSWSPLCVRWPLLPGDCVVWLHAPGAAPGAHLPGPCLDSAPLGSYSPGFPPTTHRSSGWGSRSYDGSQSSQPVAPHAPHPSDVFVPAIWGPPGRAVSGGFPRVVSLVVAHPWGPLYIGDATLSL

SEQ ID NO: 967595 - protein, 440 aa, Homo sapiens
MAQVSDKHVSIHSLDLFIILFLSITALLPGAENLTSYMYMTRWAIFSYHVLHYILYIKLIENELLRACTILHTLLHGLYAVKYIPVILKAHYEPWHMGRYSLPRSAQKLYRALYLFRRCYADNKNRTRPLPSLSSVEPRDKSRCVGRHRSALPWIALRQLIWVTIATLIATANVMTATPDTTSEYGCAGLLMGYRTNTIKGAVTHLPELLGSPLPFTPSLFLHTTTDHRTQCPTTRTANHVTEARSAPFPRLSIHISAQPGSLLRAGRGATAEALTSHTRLTVRSSELKRVTNNSTGCGTTRPSMGVSARPPVVLVGQRSSTSPAPGLRHRHAARHTKKHREPTPPGSPSRGREPSSRQQGEPSTRADRGRARETRSRAQHPAAPETKAAVTQKAARSHRRISSAASPRARQGAHTRQQHQTHTQERKPRSRARGAERAT

SEQ ID NO: 967596 - protein, 126 aa, Homo sapiens
MPLLVFVLGGPGRLGEPVRPHFREIWLRTHFLQESCFVMKGRNPDSQYGELIEKYIIEGKIVPVEISISLIRRGKWIDTMACQCIRRINALIDGFPRNQGQPFKDGTKTWMGRQMSLSTCFFDCKY

SEQ ID NO: 967597 - protein, 192 aa, Homo sapiens
TGASLALDDCSAGKHTDLRTYPKSDLDVDERDGMRSASAFHDENIRSSDVIDTLKYLSDLENENARSFLQEELSSSLGDFIYGMPIGNDRHRGVMKEAIEQIPILHSSGALGERAARYLTLIPQQDKNTILSSIVDSVIAVTKACTGSVTCGTIRQSLGHQNAVQCGKLLQAWSLYISIVLARYGVGLLSPA

SEQ ID NO: 967598 - protein, 344 aa, Homo sapiens
MCTDERDEAATERQSAAEVSGLIPELPQRRAEGEAANQESITIDASYAARWSGDDHSPAGPRTGRTQYPARADKQIKTRRDTPQRVKRGEGTEDSTINRTAAPTPPGTPTHGATATASVRQPTNHPAATARMAPRTSQNDHPTTPTRPSPHPAPPRARSRQSQTCTHSITGGTREQQRSTTRTGQAGREGNTTLRRHGAVAPAPRQGAPQPKDVPPVRRAPDHQHQLTHRALPGELTRSGMQECHTDQKRDRADGRASGDARSRTHSRAAMPRARPRRGTREARAWLDEEQSDRQSSGTASNHRGPHHQDEHRRQPHHSRQHARANSARQDPNTSTAEQAHTHR

SEQ ID NO: 967599 - protein, 83 aa, Homo sapiens
LYTVVLEDFHHSFQYVVLAQDMHCEWYRNWCSIDSLQWIDEPVCIMRKLGTFWTEFILHSSRVTHEDLRTMFSGVDTQANQHL

SEQ ID NO: 967600 - protein, 178 aa, Homo sapiens
MSKRNSVVIISTKGCVNGPDVLLSTRRRSREDALSAAAGMDNTDRVAGDHSHGSNNQCMATDSVDHEIGPVQQDSVVQVMMLMRRSNKGPLLVLCEDHRGRMVKHQCCPGCGYFCTAGNFMLSVSPESSISHRLHEDCASRVNNASVLVPTVGEERAPRGKEVTIAKARHDSTVMTSS

SEQ ID NO: 967601 - protein, 344 aa, Homo sapiens
MDHGVVQLIYALQTFNTSFVLIITREHRKTKSDQEDEHHDEMDTQMINRDNKREEKQKTSIKARTARKRAPKVHGEPNERRTPTAREEGGKRPTRTDKSAVKDEQGLGHPLDEPAAAPRCETQLREHVNLRRAPSRDDAYTETRHYRKQHTDPQQMPRETSTEHNKQTRAHNQGSMQALCGEHPQPKDTQNINGEQQAHWQEEAQTGRMNKNTQETKYAYRNTTRGHPNAHNKTNERNCNHTAQRRRKAKEPTEETKFNTRAQSHIKNRGPEEEERRSRGEDGGPTGHTDSEKSTAIAAPGTAGPDGNAGTDTPAQRGAKERGAQLRQARKRARDGRIGEAESD

SEQ ID NO: 967602 - protein, 391 aa, Homo sapiens
  misc_feature (391)..(391): Xaa can be any naturally occurring amino acid
QKKNKTGKTISLTDFLSEDGVRTGRSDSHLMYSRTRSRVRAALNIGMYLSDTEYVIRPRCAQIHDDDVYRAPSKLTRSSRFPLGSIVVWLRESQIFDSEACLRQSRHPTLRFLGNLPYDVTEESIKEFFRGLNISAVRLPREPSNPERSTGLGYAEFEDLDSLLSALSLNEESLGNRRIRSGTLLIKHRINTGHDRTFGRDSRNRDSDKTDTDWRARLLQTASDELPSLEEVMIASDDQVSTIRMNHDRHRECGIGDATRRWHTPGASWTRKCERRKRQMKNERSRGNLLQENGRLKYPPGILAQQLTQQNAHLTEHWAEHPASVTGTTTEKTVTDSEAIVSTSRAIPTRGRSRLMGSQTENTLQRNNHTTGTVGGRPTELRQSSRSTIYX

SEQ ID NO: 967603 - protein, 153 aa, Homo sapiens
MRFWSRLNAISLYTDWLGPPPGVVLPQYFVQLKPCSQACRDRDTGPIWNPDHHQSPWDGYGKACHGHSPSYPRAASPVAQGDLRTHRRLCEMAQVGGPHSFSSWSSRAWAPFFSGFPRPSPFVAFQSGALGKGLETLSLGGPMGLPTALRTGS

SEQ ID NO: 967604 - protein, 227 aa, Homo sapiens
MCPFRHISGAEDSCVQPPGCVAYGKKGDQCEFLHEYDMTKMPECYFYSKFGECSTQGMSLPAPSTPESKIKDCPWYDRGSEATVPFAGSRTHRRSHLCELPRWDSARRGPRVKFMHPRFELPMETHRVMPQVAISKDTRLLEKQENLRRVIGGAMASVPQQQAVAQPGDPGHLKRPPGPFVGEKRAVTATGAQKGTGLFTKGTLHPLEAPPQARGPWWESHLKVIAL

SEQ ID NO: 967605 - protein, 77 aa, Homo sapiens
YEKHIISNSDHTIQATDFYQTKKKQWCYNCEEEAMYHCCWHTSYCSIKCQQEHWTRKEHSAPAAGEDECWPFPESPR

SEQ ID NO: 967606 - protein, 93 aa, Homo sapiens
AGAAGGALEALVSLGWGTAGGFRGGLGSGIRGRGRFAVDGAGAEAAKIDVGKAEGSGVDCPSPRLLAVLARTDMKINVPGGRFYLFSLPIKGI

SEQ ID NO: 967607 - protein, 143 aa, Homo sapiens
MRECISIHVGRLVFRLECLLGALLLEHGIQPDGKMQVTDSEEMIFKLSSVKGWTRARVCIVTRLMKSHWLRSLHPEQLITGKERCCSNNYARGTTPLAEGGTFIDLVFVSPHSAKLADPVQPRLPGRSLVVPTTLLVGGNMVS

SEQ ID NO: 967608 - protein, 78 aa, Homo sapiens
SLSLSLYVSLVALDSVDRNLKDSRKDENGDNETIVALEAIICHQMSIIIGDFNLPLDKFLQEQHQNWMNALGTFRDNA

SEQ ID NO: 967609 - protein, 245 aa, Homo sapiens
MGRHAQTPAHAATQHQHLGMPQHHSMQAPCFKHSHIPANVTQPAQRPPQAASQLTPDQSAQRSPPVHTACSLCDSHNLSTAISLCTHSQVIVTHAVSHSKTTSQPGHNHSRLPTQPAWLAHSQATHSHYTPKTTLEHTSATAPNTLTPTSNHKTRTITQQLPPPSPPTTLVSFPAPTSNVFTMYPNTDTDANRPIRTTTVKLSNLPHLDPPAFGTTGTTQVITLMSPDITSNYTPSGGLSQKTPL

SEQ ID NO: 967610 - protein, 148 aa, Homo sapiens
  misc_feature (103)..(103): Xaa can be any naturally occurring amino acid
  misc_feature (121)..(121): Xaa can be any naturally occurring amino acid
MGVQYWGGNGAATPAGGLNRAQIGPKPPKFFGGKKKARTRFGKGGRSPLDAYSIQGQHTISPLDLAKLNQVARQQSHFAMNAPGPRATPPGGQIFPPREIDSXLSRGERLLGKFGCISLKXQTASWENRSRRNFPNNLIGCIIGRQGA

SEQ ID NO: 967611 - protein, 498 aa, Homo sapiens
MAAFVFPGDDIPSASFWSLHTVSMNLGLASRGTLLDALMRLEGRLALCQNRVVSPRSSSRWRLSLGACLPCERRGVLRLPCLALFLVGRTLLLITCVRELRFRIAGFAWFQALGLTVLLSAFCAIDQLAGPGSAGQTLASTSPLQGVGQSLPFPVRQAPGMGILHKRLCAPEPFWRPFDEVTLGAMAPHSPWAQANSIAGWSNFPIPGGHTRCAHARRRGFPICQGPGKEQVASSWGTGKKRGQMHQQSNTRRNTEAIAFAGAPPQGLTTRARLQAFGPQRGVFHKAQWALNRPTPVGWHRRPAQMTWLSNVRAPAGPFYNPVFPHFPCPKRGQPFYAGAPLRAPNGASPLGRAGPLCVVVPNLCGAPIIFGGRLHYSFGYVVSRKTADFGGELAAQDPLVAPKEKGAQQPLWWAPHRGSRFATPTAVWALVGAPLMSTRSSVAPTSSISWASSSVRLMEGTDLSQYFIITHSELGYTSGTTTSVGPTTNAAAAFTKA

SEQ ID NO: 967612 - protein, 32 aa, Homo sapiens
  misc_feature (31)..(31): Xaa can be any naturally occurring amino acid
ILISSASDLLLFGIFKIRTPIFWWLSLGSPXT

SEQ ID NO: 967613 - protein, 169 aa, Homo sapiens
QRSRWWDLTVAPISLFSALVAVIFSGNLEMALAGKAGKGLRAKSQDNRRFTRSQRAGLQGPQWGRYTSTSKDLGQTQSWSVWCATAAVYRRSHPGSTLTAEVLDLAGNASKDLKGTSVLTPRQVATCKSVEMPELDSSHQGYNWPGGGVIPRHPEISDGDRKDQQNDLS

SEQ ID NO: 967614 - protein, 411 aa, Homo sapiens
EFFDAIGFQKVFFGRSGSGGPPEEFYVLSETTLAQSQSLGEAQGDSVLACGSPVRGQAWTGERRRTFLALRALGSRSSNCLWDFVQASQQRRSSGSRGSGPEAVGGGLDALLGAPRPDAGKKRASQPGRLAPVYQFTRLMARCGHSPDGLPSWQRDHFSKRLRGIPLLPEAVCTQEFSHQVKAPLHKARIGLGIGGSLAMPFGEVHTTLCPGCTDKSLGLWNRILHHLDRPFWPSVGPFLGGQHWLALDATTKGPGGAQMRGPPFVRKPPELLLARTAGERLLGELTNRGVLSPQPCECFLCTRVLPCELHPQGTPRCFKHPFGIFGSPLETWMAPTVKFANVPLWTPTPLGCGIPPAVWVCPVFRLIVEWSRANEFFGRPYVSRSCNTCRGESVTDKFYVFRLNSVSHVV

SEQ ID NO: 967615 - protein, 79 aa, Homo sapiens
PPASPASLGSEGLQHLDQQLLCSISHWALAAFLRGRAGDLQPAMPEPPPSPPWVPAQSEPPQRVLPPAQGTQSHRPPKG

SEQ ID NO: 967616 - protein, 422 aa, Homo sapiens
MGHLPDGVRNRAMAVVNRRGTRDTKGCHLISTQQGHGFGNNAPNYAEVGLLSKFRVRPIGFAQPWLLGAKIHGVKTLGWDKRGLAPPIWRAPRDSALVRVPKLRTKGWRHETNNQHGGAAKLRPGGIDDRSICRTEFAARCVAPQSRVWLKQIVSLGGQQWLGPHKLVPAETWRAQHFGELRRPLSANNSSAPIVLSSPQDVEEWGFAKTVPHGEEGLRVAEVARALYGSGRVMRMMSPECAARDPYGEYAYGIELAFILRIAGMGATSLLTPSGMWREKTPKAHYHSEDLAKRPHYMRETPRGELGHANVEYDPGQFHGKPRGHGAKTTASNAQGGDNTTQGTLKVHTPHGDITGRQPQTGGTGATQSVAIRPTQEDAYHSYYEVDNNTGQTKDINKRGTDPLMSTNTKRSKQREYHAVHK

SEQ ID NO: 967617 - protein, 204 aa, Homo sapiens
MVIRSKKDYPSEVRISSVPWNIFRLLTVGLCEVDMRMTWVKKLRKLDLSHNILKSFSYNWENSIHLSGIHSGGIHCGHLVCNLCRLPLPKYFRSLGPWENNQGLRCVGTPGIYKFNCRKVKGSRPCGQRGPLNTPPVDAVTKEPKARITQTHEKRSSRKSDQQSPKRHTTAVTPNKRALPTSGQRYGHLTQPTARHHDKIDLST

SEQ ID NO: 967618 - protein, 321 aa, Homo sapiens
MKVFVNRRIAAEAVEVEQCGSRIEPDSPERRETRVEVWLGAHRAALTPLRSRGLEDPGMRDEWGPILKVIERPMIWGGYLTTWVFVMEIDRQAWDLCSMAYTTRWSLRSSSYRRTSTNCPLIIDQHARRLSGRPSEEIDMKMGWRVHASMRTSPRPGNGGRVDAALNRQRSDMIRVYHRCWGRIGQAQCSESWKPCSVSQSITCDTGRRGQGCREAAGNSRQSLCVHLKLVGPVCFHFVGGPAQLQHLWRGTSGDDCTSASEDGMDTGVVQRASAGGEEVADKEDLFPRRWQVAGIGLVAGFEGARRCVSPFLGRELGIAP

SEQ ID NO: 967619 - protein, 129 aa, Homo sapiens
MTSENHVNDSDEEVTTVDCCAYRPGDDSGQGANVSHLGDTNFQFRNLAVHYPEIEAQKEGPAQGPSTHGGTPRNTRHNLVTQPPGETRGRPRAPKNPGDRKKPPVKHRAEVAEYGHTSKTARTGANRNT

SEQ ID NO: 967620 - protein, 116 aa, Homo sapiens
MQSALLTNSQWCVIVEASRGARGLMNGYRGPANGFRGGYDGNRPSFSKHSKAVVIHSLSSVSPRDYSWLSTGMDIRLEFQAEALGQSGPRWSPIEVAGWARPENQQRDAANEHSGK

SEQ ID NO: 967621 - protein, 116 aa, Homo sapiens
MNRSSYLLMGHRVADKHIPSCPNSAWKGHLSMDKSMNPMLLAYFEELLHVAGNRRFFAPYQNKAITVASTHIELEKSIGISLESAAPGGRGGTRVCFPGAQMRVNPVDKWGAIPVP

SEQ ID NO: 967622 - protein, 126 aa, Homo sapiens
MDKNIPDNRHPQKRTLATPRDEPHRFSHMREPALGQSKRPTTAEKSIKPLNQTTRRRDHHPGHNSHMNSNTGPHNTDRRRTSQPTKTDEHPKEENREQRRARHQQQSTEKNHNTDEPRRIHHHESG

SEQ ID NO: 967623 - protein, 127 aa, Homo sapiens
MGGPLDRPELGGGPSQYFACQGVSPRKGPGFVDKNSQPGFWQRKHISGGNGSEADQIQNECSPSGLCTKSARTQEVPEENPYHRGGNTLSTWCDQVVHPLENSHKRISEQERKYAEHNAREENSREQ

SEQ ID NO: 967624 - protein, 535 aa, Homo sapiens
  misc_feature (239)..(239): Xaa can be any naturally occurring amino acid
  misc_feature (333)..(333): Xaa can be any naturally occurring amino acid
AVPSGTGDCLRARVRHNGEERRTRSDTVSMHELVAGTVRAYSRGYAGGTTRLARSAGRFARIRCAAGRLLSKNTRVRSTWIVDSACQDTGRLVTWCDRRAQDDKSCATTWVAEKVARRYETGGRLSQAMWATDSGDATTLWLVKRPCRSESGRVAAVGPLRREATRYVCLELTQSGHARMKRAQKGADTEPGRESHGTSEEIYSIGEHLFNKRPEELMITGGHESPETQCHGSHIVTAXSECQATQTVLQVCSTGNLLEQSLARVHAKTSCAEYQFYYKKGEHNTRHSRAHTTQIPLAVLREPLGALGPREEPLELEKLNAFEFGHVHFPFRXVGQAERDLINGIYQPKIGTRATEVCGGPHFRGRQERIPTRGDDKELVWSYQVLGPPCVNIFRMSNGEKFWCSNRVLGEIPYTVETTRGRDRQRYKKRISGPESVAPKDSQLQPRIGGQHVRHADSERSTHRKKPRRSIQKSKIIITEQQYDTPQAKETSPIRTRRVSNHTPTSKTSEAVCDSSEEDTEKRSETRPEWTVRRG

SEQ ID NO: 967625 - protein, 131 aa, Homo sapiens
LSRYGPSNLEPDSACELPGVLPARYPEASTEHYKAALCVPGLRIVGHRVVPLKLGDHPLPFTRIAVGVQSPTSQAELHHNQVIRLSSAVRGATMTANGEPAQRDLERTEPLRRRAQPECLLGDRLLAVHGW

SEQ ID NO: 967626 - protein, 360 aa, Homo sapiens
  misc_feature (277)..(277): Xaa can be any naturally occurring amino acid
VTSACSYWVSHESPPALSRHHDRLQSSGAVTRTHYTSGNAGVLAAQLCASSVGQLAVQQASEPKSACDTIGAGVPGAVIAGWIAVSLCVSQGHYDFESLSSCGFAAELLVLPTLDRLRMQGVARTRRTYDAQYSPHASLTILEAPCTGALPVRLHPWTLDRNGPLIHHYVAPLLARPQGDALDKRPIVYGSTCRRIGELWPHELEIERPRADSHTVSRSFARAREVGSPDEFAPVQAELRCRYRSYPALLVGAYPRRESSIYVPRGTPTKKEGDLRXMKGRGPPLRITGTSAPFEGYRVVSRENIPPPPSREQLYGGTKMSVPDYGSTGTREVRQVFTYYHTDIEKNAYCTPTISLRKRN

SEQ ID NO: 967627 - protein, 229 aa, Homo sapiens
MGTTRPHQQTENLRTSNTPTQQRRSAPSTAFQQITPPHPGTAHRQTHQGNTLPDQNEKPHHITTAAISPTKPTGRTNTPHPNNTQDLNAHAHHAPPSPSQSPACSKPPAHKHAASNTHTSTELSTHTGPRILTQYSAAHTERKHTDTLLAAASALHTRTATTTPPRQTHPAVASSRSLRDHPRHDVRSAAPTPPYTTSPHHTHAAATSTSTPTTTHPLPPTPPTTDATA

SEQ ID NO: 967628 - protein, 559 aa, Homo sapiens
MNATSELRSPPPNSNPGPRTVEESSTITPTARPTNTPRRDRKPTGPEQRHALTTGYTYSTEDPQLARALLRTSTRKRRHSRTTKTYRATGTHPNAPQTAQLPHKPTRHPTKKATHQTNHARHGPEKHALHGRQRPDTYTEAEQGNRYNQHTQTNNQSKHIPRQNNSRAPTRDNSHKLEHSTAIRADSHTTKPTTGYSPHTMGISTKHTGHKRQDRHAERDDIRTPPQDTTQIRTNTQTPTQKTRELNTHRPPPPRRRTAHNIDDHSGNTRTHTTASHTAPHDTSSIATRIDERTNNSTSTLDTPAGTRLHNPHPDATRTTPASRTHQLPASHIYQKGEHTPQRGTKTYTQEAQQQDNEAETCPQRQQRRQRSPKYNIGTTDNRTRAQSPAEQYNDRPRGKIEKQQPGGTNRRRTTDEHKQQEQRETTRTGNTHTEPPRQHQTEAHTHATSNLGDAAAPVAHRAPQRCTAEPSHKHDTQNRDAAQTDRTAQKNEQTQQHTPDEEQAGHKTRQSAQSHTERQQKNGTAQTITKHDTQEEKEENANDTREAPHNDTDANQSP

SEQ ID NO: 967629 - protein, 329 aa, Homo sapiens
  misc_feature (307)..(307): Xaa can be any naturally occurring amino acid
MYKRGEKAPHKGYFTYKHKAQDIENNNKIFGAMVRKRCVVGLGDPPWIRRPHGYNSRENGLMQTDRRTKRWAQQKTPGTTGECSPSDQRRRAKKHSRDPTHVRTATHPQGETTRGVDKTSTKRTHNNKNERKLIEPLEGPKNFAPPEEKESYTAENGATDVTEIDTMSTEKENEEKKERRGHCQKKNQQQQRRDHPRGTKRAPEASNEMMTKKRGNNIYCRMMNTQGDANATSEHQRNAAAPHTWAAKQKGADKTNGKSKPRNHKHRTRKQQRGRANKPGAGSSNDTTHTARETPGSKPTDLRKVTXELHHSEGRRRKRKRSSSSKRDT

SEQ ID NO: 967630 - protein, 315 aa, Homo sapiens
RSQPSSTQAEQAVGCGSYEHGGTEHTTSTLDTGEAALRFRAGGRAALARHVPHRAQPQQTATTFQLTDAANRTRRLRLTRSAGDSTQLSQALAPSLLVDQQLALGLDSGPYQPAGKVVWPAAEDNSSSGRLLRTIVSRSWTAAGKARSAHQPCPAPPPSRPCSSFTAVTGSICWLLAVGPPLTLTDKTLPGPWHLTTNGPQTPNSPHRTVTGFGILVFPCQDPPGSLRIPSAPQLPCSGQDEHFALGSPGPPPLHSGCLQLLTASGTQIHSEHGANNAPQNPPTHPPTRGQRGTAHPRPPWTAPSCRLTPWPPRH

SEQ ID NO: 967631 - protein, 121 aa, Homo sapiens
MRLGLICTRLMARSVFLVCYRLNGIYTFEHFWGKKITYRGNQWHGGGHHALARPFPTFRFAPDWRRGQRRNTKLISVTFPKMEFLRHSLSKIRPLALLYQFEPVTWETLAPKKGHSGTSDL

SEQ ID NO: 967632 - protein, 30 aa, Homo sapiens
PEPGAHAAPSQGIPEPEGEAAGKMTTEEQQ

SEQ ID NO: 967633 - protein, 55 aa, Homo sapiens
MHKQKDEQQRTKLTRQRQRRREHDGQKPREGEQTEADGTKSTETGRRTQDEERRQ

SEQ ID NO: 967634 - protein, 173 aa, Homo sapiens
MCNRDLIHVLVNTFPIPKLVLINKRLTSFHVCIPPRAILPPCALIPNRSNMGLYQGRNFFQGPAKGVLSGPTKVEKPKTEGERPPNLTGSPPRGQRAHPRQRNPEYKARRDKPPDGNLLQTNLSQAHEVFGNIFKLPLDLISTNGGSYNRLSQTSTRRHIITQPNLLGAPGSV

SEQ ID NO: 967635 - protein, 96 aa, Homo sapiens
KEYLTSALTCFLHIGHFHTMEVLSRILQFTLDIPIVHQVIVNHICNRSLMERQPSSYRQAVSSLCALLFMALSNSVWDWLTLIAIHLDRDSRDTAL

SEQ ID NO: 967636 - protein, 150 aa, Homo sapiens
QFQSLTHQSPPQQNVQPKKQELRAASVVQPQPLVVVKEENIITTSQRAFALRCGEPPSTGELSPVTATRMNCGCRERDRPKQRTHRGLTDNRTERDQCAKTESDMALAAMQASTPSHSSHQRSRAVAASERDVRGPESATAEGESVETLR

SEQ ID NO: 967637 - protein, 127 aa, Homo sapiens
MTPVTLVIGARRKTSLFPSALGITTKISRGHLLKSWVVRYVASVCLQIGYPTVASVPHSYHRRGTNEVLGLSVETDNTSHCLNTVKASLVIIWLCVCALLVVPHSWSCCGGTPEGEAREIEDIARFG

SEQ ID NO: 967638 - protein, 242 aa, Homo sapiens
MACGVGCQGEARRVLVYCGKWCSVFSMRVRLFVSQLVGCQRYDCWYVEMTEAMPHTIICLNTDRLVHCKQRMTQRDCWVFGKPLGMKENGGMENIFAVVCACELWSVGVTAYHPRSLFNETCCTVFVYEPEAFLDRRIHSPMSICATQASLRASEASYVLGLAHIAAPGWDLPVYDRVRAMAKWVLFYQLLPRDWLWEEIACVPPRGQATIAVLPVTLDDPDEEKSNCLRLTSTLDTLRNSS

SEQ ID NO: 967639 - protein, 126 aa, Homo sapiens
MNQLGEGELAKICLEIMQRTGAHLELSYGQRQGLSIMVSGKLDAVMRSSEGHRLLTEESGLSNCCHSPKNSHRFVDGKQWRETGGFGAKHWEQKSNPPARVTGHSVRIRGHKGSNSAAEVNHLREK

SEQ ID NO: 967640 - protein, 264 aa, Homo sapiens
MCSSCTRLSFSVSRDGASSRGARAVRRSGQVHRLRPHGIQGSSIIMETRRTVAAMPQQSVAAITLTGRLCSAGSSHPLAKSGTQEISHAWLQHSWHEPDRRLATLTTDIRQDPLPTHDQPTRHSTGPRAQPHSPNQRPNHAYRPAAYRPHEHGFTDSLTPEPRLQQQQLQSSDPHHTCHAPQDLKAPGIHPALQGVPYTSPQSGNFPQQATHEATHWDTPPTPTMDAHRLRTPERGHMALRPTYHYSNTNDLTPRTHRFPKLEP

SEQ ID NO: 967641 - protein, 545 aa, Homo sapiens
KCRDYTLSFHSQFPCFLMIFSISYISVQALCVSSWATPKVCPHSFRQLNQEEALYSKSAHSSFRLYCVIPALWVTQESSIAYSYCTILYWACIPSAKALDSAYSPRNINRIYSVDTTIRPCSSWDLPSRALHTCTIQSIYYHRLNYTTTMTERVRGHHYSSISRERYAYFKTHITRLHTKIYGGTPCWVMHPWKDSLASCNKSKKHLHMVHRPLVDRLTGSHTYTRSPIDQGEHWKHGYPLTTIYAWASLTPPSNRQGKTNRQRNTTIKTTTQPHPPKSSTQQKHHPRPTRGDNHQRPTDTYMRHPHTQTVRTPHATGNTQGAKDKNSTRNRGKHEKKYERNLGAKHSRQEQSQRQLAKSEQPQRATYPTNPGDKEQHGMAYAGQHTRETLTPHPASDVSQAWRKKDTSVTQTPKPNPDQLRTNTTATTRRKTQQERAPQNERTDNSTSTQEKRTSATYNRKNQLAQRTTTDAQTTTRSTSGGANNQPQQQLAQKPNTSTPRDIERTQNERRKTTRKYNTDTSQHINANQRITINQTIQPPVQKH

SEQ ID NO: 967642 - protein, 251 aa, Homo sapiens
MATSFRRLALLLGREASPKSSGHIWKAADPGIVNLECMYETPEKVCVVMEKLHGDIVEMIHDQCERPVPDRLTSPHHPRSVVALRHLHFKNIVHCDLKPRKDVAGMSRDHLPQVTLCDSRLWIAIIAPTKPHTADVTAARERPEHNHGDPDGGQPQTQGTPNRLTTGTMVGQGPQLNTLLPYSHPEKHITREHDELEDHHRDPQPEKSRPTKVPETGNRTTLHRLHAHEPPHTTSCSCKCHNAPGDPNTAH

SEQ ID NO: 967643 - protein, 262 aa, Homo sapiens
GLSLRTWTFLKNQVESLQRRVEDEVKQWSGPGWLAVVLPVSSRDSWLRYVVCQTEGHQQLIVAYADEAPVTGIYAASGMMLCPNVPEDIKRTSLQVCYRKWARLALGAMARGRMSSLMPSGVRHFESRIPQLSSDLPIVGTLPCHRSILASRFLQIVDSSSSGCTLDSFFPFLSSMGVAPRLWLQGTTMPLLFKPLTVGVWLDASVSSVFSLAMFHGFLFPGELASRNLMFPPTLLQSRWPLSPRRLGGHHLSSSGFSARGV

SEQ ID NO: 967644 - protein, 197 aa, Homo sapiens
MDSLATRVEGTIVYGTLCTLCKGQSLSRESEARGDACWRDRLASTVGPKQEHIRSQEHWRQCGTLQLRIPSVVEETRDTKPKQIVDDPRCRPIFMNGWNPSAFRPGIPLCPLLHLRGLPTGARPTFPIASRLTGHRNIAPCSTSRDDSIQRVPTQLRNHAALPAAHLAHSLHARVYPLVHTHSRKTALPLEQHTHPE

SEQ ID NO: 967645 - protein, 170 aa, Homo sapiens
MTPSCSAKTSYVTYDVRTHISQRENSRYLYEKVMIIVAELRASNKCRRTQREHPASAQTIWGEQLGKRAHPSCATASNSKPVGRRRQNEPHSRADEDKDDATNSRVKEEAQKGKDKTQTRKREKQEEGTKGGARADHAWEKRPHATRANIDGDTRALGRQRSERASTNSG

SEQ ID NO: 967646 - protein, 343 aa, Homo sapiens
GGPGVEFARLTDQASRVTIRVMASNSTKIFLADAGYGEQELDANSDPYGIGQRPEDLANLVNSVKQIVRFPRLISEVSIPYSYQFCIPNSELMFSELEIISCRLCVLHSYPTNSETHIRQKHLTHVASTSRASSTSLLCIPSVTCILWPRAITLRHVAKSWHQSIPERKNAHHSIRQSLDSHDHCRSQTAAWRTREATTHTCRKANGTTATEPRNPRSELIQERDTTTPKHKTKPRQTHRNKKKEETSSRKKEHTAPHQPTTKGARGADRHRKRHEAATREKRSNESGRTAEREEERDDKTTQRDTEKGKEAREKEHDNARRTARPEGNRGGGGKRRKNKARD

SEQ ID NO: 967647 - protein, 184 aa, Homo sapiens
RVGGPQEGVMGKDYYQTVGPGPRMRLDEEIKRAYPPTRLLQLTTRTKNKEPGDRGELFKEIAEAYDVLSDPRKREIFDRYGGGRPKGELAPMWQDELAGGADGTIFQRTTFQWQTRHAMFGVSSSSGRNPFDTLFGRTWNGGKEGSGSIDDPFSVLPYGHVGGFSNVSFGGPRSALRALPESKR

SEQ ID NO: 967648 - protein, 251 aa, Homo sapiens
GCLPLSDGTGTYQMAGFNLGSKLPDSCKWSSHTVSRDRGIWMQNVVALVVVRRNPEGGVGDAPFRACWLSGSWSLTSDFLPVLELWPRFVVVTLSFVSEVVAVRYLLVACSFQRDPGDCRMRVQGATSVGPGLARLSLCIESYTWLAQKSMQLVYGNDDYRVITCPIHFTSSFALRGHWSRICHIARGEVTRKVSKFTGTPEQTILTQVVGVDPCGSGLGPIQGPGPTKPWGVPPGRPLKRFPGGRLTLAI

SEQ ID NO: 967649 - protein, 93 aa, Homo sapiens
LHTSESHLAACERVGSPSTEEFSVSEFHPLLRNMTRMDIIRFEITVQMSSYYRDSECNGGWSMCIFSCGSLLYMSVSDARFSSPRVSNGVVHV

SEQ ID NO: 967650 - protein, 30 aa, Homo sapiens
VAAPGDVAGALLKPRRFEYQPRCSRAPLAV

SEQ ID NO: 967651 - protein, 105 aa, Homo sapiens
DRERRPFFLSLALSPRLECSGAISAHCNLRLPGSSYSPASASRVAGITRAHHHTQLIFVFLCSERGFTSVGQAGLELLTSGDLLRPQPPTVLGLQGMSQPRRGPL

SEQ ID NO: 967652 - protein, 106 aa, Homo sapiens
MPFLNRSDMVLTSSIISSQVLRLSGHSAISYHEPMNAAKPSHYQPLFRHPGRQWSEDARDVLITQTTLSMLDISSVFNPEMFDHSVSITTGFWNKSPHIVDLLHPV

SEQ ID NO: 967653 - protein, 115 aa, Homo sapiens
MALIFPQLPTDLTPLLNAPPSPWPPCRTSHRPCARDTPRDRSPHRSSRSRGRPHVAGLPAFPPRLSPGLTRLCRIREGPRRSTAGPPLVRSRPRGACRSGALPARASATIARAPL

SEQ ID NO: 967654 - protein, 322 aa, Homo sapiens
MSQTPRVGVIFVVIKGDDQTRGIKQLRVVRMQRDDIVMRVLLTETWLRSNGSDGFTYPKFYLLGHVVRGSVDSSARSMRALVSLDFRERRILALHVIHNGSTCSLGSRAFRLGNDALKFPLLGRRLFVPDACRGTVGLVPGISLFFVPFVLCPRGGWLCLVHVPVASRLFSLLIVQECPCAFAPVCAREPATVGALSSCPSSLVAPFAAVERPGDEPRRASLLGLWPSVAAAIGACDPCLRPCSGVPRRISSAFLAPASFLVRGRSGCRCHYVGPRFQVLSVWVPCALGVLQCSWLSARFSSPVSAPVAVAGGPLLCPSVFS

SEQ ID NO: 967655 - protein, 154 aa, Homo sapiens
MMVPWRIDCPSVLLASCSARSSRCLVVRPLVGFGSPLLVCLLAAVSLRRFASSLSLLAWLHVLSCLSLPCWPCLPLVCGVCLACRGCGAVTARAARPSLCPLLPLCVPALRCGWLVGLARALAACVACVAVLWGVCGAAVLCGGPVAAGPCSSG

SEQ ID NO: 967656 - protein, 91 aa, Homo sapiens
PLSQIQQHPATGNSLAIAHSRHGQTRDRVHDRNVKNMYPPPSFPYNTSCALVQHSWRRCLPPSLKPDRATNSLSPSTPITSLNCKPITNPH

SEQ ID NO: 967657 - protein, 341 aa, Homo sapiens
MPRDCGPDVRDDDGLTECSATGAPVRPRSASSVLIGARRHTMRPSMTTAGYLHSISQRPCMPIARRDLAQKSANHTMSSSGFQERLATSETESSRLPDGPRASSRIHPRLRYLTGTMTYAEPTLHGTETDRPTRQAKKRGPPLASMDSATRNVRLRLTGPPTQAKEKPTRMATRAKATGCAGKHPGEYRENHGPTHPRHEPRGSSDKQTHRPPGYPRKTNNPHNNAATPAPKGAQPRTHKTHKHGEETPTTMCLAGHQTPDDILTTDTRGQQLMTPNGDALKNSSRATPTKRPAPNEGPQGAQCSQRSNKTEPNHPRGQQTKQRTSNDTTHTSARQDKQTN

SEQ ID NO: 967658 - protein, 336 aa, Homo sapiens
MAHRELPRSLTYENRSSILGISASIYITDWTVARIFRFDMRFNLAIGSKNARTWGISHWPNVCVCFEAKLKPLHRNRPIRVSKRVASCGHGLNLGGSLPENGVELGVYPLVVPLYANIVWDTQGDIFPIWGNTVSVSVPLAGTPEAYAENVALRYPVCNTVWRPVVGGETNFCFIAILNLGVVWIVRGDSLGHVVPFFDLRDTLFGLAFAFGRHKSTRLRPGSVRAFHDFPDLFPGVGAFDVVNPELCFAPMLKRHRCFNARPRHTYGGAGAAYNRKVIRATEESGGAPHLTCAYFTRSIVCGFTQWRAANKVGHLRFIMIRTQRTRPYYNKHLCN

SEQ ID NO: 967659 - protein, 201 aa, Homo sapiens
ETVGMWNCLAPMWTGEKKPRVSVFVLGIPRQKTEVRNRLSEEDSHQAEKKLGIPKISSSLVLLVLLRTGMADLTFPGYCKKARDGRSYQLAGLVSQCWMFRYGFGKGPPGLQHARGREREERQKTEEDEGKGEVRTNRWGMWPETLRIQELTQDELLLPNCYPGLAREPLHHRQSSRVWAPNVELKERKETQNAAGRLQTG

SEQ ID NO: 967660 - protein, 76 aa, Homo sapiens
DKSRTAWLLAPSLRTKTRRTHFRGGGAGSSLSQVTLTQPSGWEIRLAYLMYSTEICDRVLPHLGSLESLSHGILAL

SEQ ID NO: 967661 - protein, 130 aa, Homo sapiens
MDKRYQKVAQRNTPWAHTKQNRTTHKPQAPRHRTHTTTPRAPSNLRNHHRTTLTTEPSRAPKKHSSTRQAAGAKNDTKHQHNQDKLDQAQPKDTTQSQASTTTRHTTPPAKPRHASRTTKHNNDQQHSKP

SEQ ID NO: 967662 - protein, 103 aa, Homo sapiens
MCYTVQRARLKILPPGYWVRSARWGIQRSLSLLLPDVLAGAVSVVEPFVTDISFSPRVLDYCEIPCVGSQILSCQRPASPEGKAFLCGLRLFLCCSLPATSIS

SEQ ID NO: 967663 - protein, 343 aa, Homo sapiens
MRRKNNLPNERAKKRNKQKTQTNRKETKRARHNKREQTKYNNTQKQNGGTQQAKNNKSREKKSRERTQNRQQQRRDTKTRKKEENSQTTRQARESDKTTKSGRRPHKTSHTQRKKTRTHTRDRPNNNTTDNAHNQDDAVTKNKGERSHKTQTKQQDQHKTRRPQNRERKTKRKKEQQARHRADKKTQQKGKKETTAETRHPPATAAHNQIKAHGGEEENNRKQEKEEKKKRKNNSKQNTTTNSHDQRRHKHKERADEDTREGKEAGSATEGKRRDGREKPRDGTGHERGAGPGTDERAEEERDGGHGGQGRDERRREDSRKPRDKNQQQEPRRQQQGRRAATG

SEQ ID NO: 967664 - protein, 213 aa, Homo sapiens
IAASPYGAPRYPDVPFPPDRHTPATAAERHIRTAVTTEEKESYSYVRLSTKPPLISTPLFDCKYSGDDTAILLAPCGLTIQYKKFNQTKPRSERTPLPPYPFDSSPPCCTFRPLPLVTYTLNIHTTTSHIPYSIVTTRRFLNVNRTTNSHQQHNRANLAQLARHPQATYTEPPTASPNTTTSTQTAPPHNRPTGTPLLGPKFPTQKHALSPTR

SEQ ID NO: 967665 - protein, 104 aa, Homo sapiens
SGGPESTDPGGRGGQARKAEHPPPRPRELVRGKVNRAAGRMQGGTPNARSPGQSELYIREWLDAGDGAAETCYEAGRKMNPQQQRMAAIGTDQGAERPTGLQCD

SEQ ID NO: 967666 - protein, 218 aa, Homo sapiens
VLYITSLVKNERIKTNRKRGAGLKFFKKRKGKRGKENKIRRFMASPQHPPWSPPSPRELLAFPPLFRHDHFGLIRAFFSLSSISFRAFLQTCVWNFRVHFLSISGSGLASSSWLGALVGKVSAVGCSRTQARIAYRAFGPSASIHRAVSLVWLGTRFFRALWSLRIEDGGLAPFLLVLQELEVTSASLLPFWEIVLRGKSEQFGPHFKKFLFIFFPVS

SEQ ID NO: 967667 - protein, 213 aa, Homo sapiens
MVRRIGEEVACKHTIGGLVGYYEVRTGGNPIDGSPEDIRRNDFSVITLNELTCNARDRVYEDIGRLKVLYVLYRGHFTEMYLAKQNSVWGIEGWANELAGWRKAFGRILTDSNCTYITVVRCSTPRMMPAYHHAAEKKKGQAALEIYGELESDVVRLRYGYGLPSGLRQAVPETHVFGARLNDEAIGVTQGKGNGVPTVGPRSSRKPRARQGP

SEQ ID NO: 967668 - protein, 112 aa, Homo sapiens
MTSTLHASGHCVSYLAQALLAHGLTHHESTLRAYLSTLNSTQYTQHPTAYASPHLAHKATNTQLFDTNSELQLAHDFLTTQFTCAQTLHKRFIQNTTCNSYQASYPNNKLNH

SEQ ID NO: 967669 - protein, 100 aa, Homo sapiens
VRQPFQGEWYVVIAILGKRCTTSVGAPWRGQNPYQHATSSSRCTDGSRGPSDSRHPTGTHRDQPTADPTTHLGQHDRPMVQQYKYVAIIGIPDRQYFIDI

SEQ ID NO: 967670 - protein, 72 aa, Homo sapiens
LPADCSADRFPHSALSRRTVPAAGRGASDNYTGGGTRQMLSNAHTGCSYVHGKILSEDEDQSKPCEGVPRDT

SEQ ID NO: 967671 - protein, 134 aa, Homo sapiens
LGVYSDSALSISHCDFTLSLADRSAIQCMMSDQMDGVFGYTSLGTNYIGCVKGVLYQYMSTRWQSHRSNENDGKIESYTPCLRGDSITNWEHRMARCDSESYLAGPRRPWLANGDRSKDQSLDLPEKIGVEFGP

SEQ ID NO: 967672 - protein, 279 aa, Homo sapiens
KERYSGMNMPQVQGREQGQDWNRRSARGLLRMGLVLSVWCWRLAPGSVLTRRGDSGLAGRVLNAVLVYSTIGGIAAQRYDIVIDAPDIRRCLGVADISTCPICKMSIHRHQTRVCTRKESLDDGLALAIRGQIRAVCTYLHARDGIAMPCRDVHNPSCSHPSFRGLTVVVVWDTLMCVRPQSDACVACSWAPPVVRGRCLICGTISLAERCRRGVPWPWGVLPHYGPRSTPSRMMGQLLVMRLLIGCPKWGIPPGKKGLQWACPSREMRALPPGNGRLF

SEQ ID NO: 967673 - protein, 234 aa, Homo sapiens
MLLAIYVRNSFQSNGQRGTQEWTYLTLNRWLCLAFICFGKASTYRVQAYSRAPINARWDMYQSPISADMWLFSQAWWLMPLTSLLWQADVGRSLEAEEFETSLSNMVKTHLYQHKQNKYQTLSRHHGGVHSRHSQVPLQQALSGQCMKAIETPERTRLPLSIPGPGMTNTLKPLYHTNLMTSHRHYFISRSHSIARRTPPQLIGRLTSSPSLIRRYAHIARKNTHTFNRERTPS

SEQ ID NO: 967674 - protein, 521 aa, Homo sapiens
AASGGAPDFSSLDPAALPNTSPMPQPKSKMFTGSLLTSPPNPSRIGGPKGKSTRSVRRRPFLRHTTSPPCVILASLFNTNMNSQQAQNKHNTGTISGNTFIEQTTKYITTPAQRLRVNTSKEGAHTPKRRTPPPTNNGEQTTQHHPEHKSSHTAQQPPTTPGHTHHRQRATRHTHGDKQQRDAPNEHPRAHRNEHTPAKRRKHNTQNHAHHDPPPTHPPSQPTPQHRTTPTHHSPGPPQGAAHNHNHTPARGATTPRYHGSKPVHEHTRHDATTHEPHERTRRRPNHRTPESHPSTTEPTTNTASDAPQRQDADTPHRRPRQKRKQPRDSERTKRTTPKQDKHPPNDPTQPEQHAPNTLGRPQTTRQKRPPNPTSTANSRQSNDHARTERPTRSGRAPPRPARVEAAPRGERPPIRDNESRSRVRHTTGPTTTDGRQNTHTAQRESSSTPSAATHSTQRATRTTSQQAPNAEKRRTHTPDTGTRAAQRGTQRSREHTHEREQRAAAPRTNVRRATAPAREQ

SEQ ID NO: 967675 - protein, 210 aa, Homo sapiens
ACEAGCGSARGDCARGWRAAPPGPRSGRRDRDPREPLWRTGHERSSRAQRVPVMPKKLRSGLLGCLELAGTVSVALIFFLETNPVGPPLGAKIPDEVDNDPILVQQLPPDIQNYFHNDYEDQMTHRAHQPLAFSQDPLQEPVTYQPPYTLVWEPHRRPSCILSWWLATWLEVKKGPGIETLSQQFAPLYEMSSLRQRLAMIAFHSLIVWT

SEQ ID NO: 967676 - protein, 119 aa, Homo sapiens
MLRKCSVPLREVPRLLYESCSAFYLFCVYPRCVGTRYIKMGATICLITVVRTLGGAAVYILPDNVFHVRLWEIPFAYRALGEAHVRVMKRERLYKFLFEERVVGHVIWVGRGSYGFGKK

SEQ ID NO: 967677 - protein, 296 aa, Homo sapiens
GECRAGHHGHGRAGHQAEPAVCRWRAMGGVRDPGSSPGMNGAACGLRRGHPDEAVEALGSADCELERLDACCGSQTSWQGIGEPQIAPARARSSYLRKPSSRSSPRKQIKAHGRSMFKQSGCRAGTGFIDLMELKLMMEKLGAPQTQLGLKKMIKEVDEDFDSKLSFREFLLIFRKAAAGELQEDSGLCVLARLSEIDVSSEGVRGSRASLTARSRPFDVSSRFEEEIMADQDDVDKAGEDDEQVEAGSIGGLPGPPFYVSRGVWIATAPWLPGPSCLWEKGWGFREPRLRILLRV

SEQ ID NO: 967678 - protein, 324 aa, Homo sapiens
  misc_feature (175)..(175): Xaa can be any naturally occurring amino acid
  misc_feature (190)..(190): Xaa can be any naturally occurring amino acid
MECLLCITRVLIADSACSLLTFQGRHVRPHKCAIPLYVCPVLNVMRNYLILKTSNGLRTTGHEVNHCSAWNAHYAKTWLGNYKDTRPYGKERLPRPTHVKHPGADASPRIDINSWLALGALRATDALICALLSCSFRPVTTGQDVTKEDVSWRIAKRSQRTTLTSGELVPEYLYXHVRRCRGGTLCPPEXAATLVTAGVDKSRETIACAIAPLAGALLPLRSPKEGNGRPQGSWSERRKHRKLSERFGSTYLSGAGDASSHSGSMHIRNALGLGTIGLPPIGNVPWRPGDFHLDCRFSVWGPALLAWFEGGRWFAPFPPEKGRP

SEQ ID NO: 967679 - protein, 86 aa, Homo sapiens
MNNKWTRQKLNSNSDTFILIRTSLFDTKGSLARWDYQCCGFNWPFGNNSPQKHLFCGEAAKGKRLGFHAGTGTLAVIEEPRLGPSM

SEQ ID NO: 967680 - protein, 580 aa, Homo sapiens
RPPRPTPWAGTGVWACHASTTHEHRAKSRHRLGLGKARLRLAQWCHLQNSSTKDFGVQATRGMRWARELAARLVAAHNPTSMGAPQHSSWGLDLYSCVPYVAKFIQYLSAAAKTYEHWLERGCTTTKGKPMRTEAIRHEKIVVRTRSYQGIRRQQSGHCDGWHGTAEEHTTTGQGVPTPPVEGHVAGESPQKSPPTQGATRQSTEGQPPRRDATPRRSHAGTRRRQCLPEARRHKRPDEPPMPQTPTTHPDTRKATYRRRGPPHGAHPTRNPVAHTQDNRQGEPAANNTRPHITAASPRVANPSHKAHSAIARGILGPPKGHIQRDPTTDNKRRHNDQHTAGASPMAHNAGAHQQSKPTLAASRTHTNAQWARRGEHTTTSTHSTTPPSVERHEKCTRSTNAGTDAPKTSQHSPKLDIERHDGPDVRQAETRAKARERRVGDTTSAADRRKSEAQKSGRQSDYTPARGAPRSADGSKEVVRRNKAAPRGNTQPTNTPHQRAQQRAARTNQQATTDAHSDLKRTDPEPRIRAWEDAGLNIDVTQAERRQQEQTQGDDTDRPTTQSDHTRSRCEQPQRTDDE

SEQ ID NO: 967681 - protein, 231 aa, Homo sapiens
MRECFSIHFGQCWMSRLAMPAGELYCLEHGGSSTDGQHAKLTKTIGGGDDSFHSTFFSLRLGCWQGNVPRAVCVDLEPTVIDEVRYWHSTSSILPPCITLITGKEDAANNYALRSSTSIGKVIIDRSVLDRNFASWRDQLHRLLQGFLVFQQLWWGNLVSGFTSLLMERLSVDYGMRSPQLEFSIYPRNPRLPQGCSWSLYKIPFVNERKSNPVSTSGLWPSLVRHSRAVY

SEQ ID NO: 967682 - protein, 374 aa, Homo sapiens
QTFPYGFGDQAVFGELPSGGGTVEKFQLQSDLLRVDIISWGCTIHSPRGQRQAGAEPRDVVLMAIAEIAKRYLQKPAIYMEQLLGRVANRIAKGTFKVDGKEYHLDHEQGTQTVLNGGSQEGYDTVLWTPSECCQMAVQFSAASVQMVKKATPAEFKVWVTYNLDGGELNSQLQEHKASQGKPDQPDHAILYFKTWQASFPRYHMTMQVTIDAEYYIQPCGMTTSGYLPGTKLATQYSKASRPYRTMRKAPGILGTPPEQDIPADQSRGTPDILHRKGAERLGPLLKRQGRRQAADKPSRYHHSDHTTRYRESKSSHQEQLHQDYTNNQTHSRHWHNNKTQIRGKSKHNIELYTLVQHISYYVIHYTTTAYIIN

SEQ ID NO: 967683 - protein, 353 aa, Homo sapiens
  misc_feature (87)..(87): Xaa can be any naturally occurring amino acid
KTSTFGASGGRCALRVPGRWLVHSSSYYVTRVSTPVCASLPDNPKKYKVAGPDVLPPGAEYSTIQEHAGSAVNATPGERMTVDELWXVVTFRINRAPAQVDEIRSIEDHHSLQLHVQSASDYALLSHVEQHAPGPSSLKISVMRCRSWTTNPQGCTFTVLVAHDEKPALRKMEKIQVIKDFPWILAEMSRMSTCHEPRVIPLKNMTSDILTDAVYVAERARYGSSGGRLGNPVMPNVNFGGSALGSGAWVRRIQRSYRPVCWKARPTRGDQGCRRKASQEGVQDDRNSTSQPRGSPAQRWCHNERGGHKGPSVCNTQKKGGQNSQGAHTPSDEATGKKEQGATAGCTEHLRDD

SEQ ID NO: 967684 - protein, 169 aa, Homo sapiens
MGLHCWRPVLGCFVGSRFVHEGGSPLVRRNKHRALVCHPSTDVVLGLSGALLILSHGIYGSYPGVWYIRRGRFVTLEGLVASHVRTSYTWDHDGPVDWAWTPSILSLRFASTNMVLGLWWISLLVRWGGGRHYRGLVACDARWPAAWLYPYLVWLAFREHSQVFAYWRG

SEQ ID NO: 967685 - protein, 104 aa, Homo sapiens
MQPWVSRWTSGFKTKRGQIYTVPTRVLGGLPPVQPLAGRGNHGGDTPTPESAADGAPQAKHHERSTNPPTRQTKQNAQHGEHTRRGHHRDKEGHQSRHKPEDHT

SEQ ID NO: 967686 - protein, 98 aa, Homo sapiens
PSYIRSQAYTTSNHVTKETCSMVLDLGTTYSCVGCISSTGKVEIIATDQGNRTTPSYVAFTDTERLIGDAAQNQVSNEPHQHSILDAKRLIGRRFDRC

SEQ ID NO: 967687 - protein, 95 aa, Homo sapiens
CESNRKVQGHGDCQSCCMMVAAESRVQRRGSKHPKDPMTENQLLWFRSKAPTGMRSTDRWCPGNTGCHVLEEVPQQVTFPPWASVGKKASRSFQL

SEQ ID NO: 967688 - protein, 396 aa, Homo sapiens
IRPERTATQPIPLETIDDRHYGRLPYRLQDPDLSHGMPPGSGHWPSSMDHLPQVLRTGRVTSTPLSKKELKELNPAQELTIGSKLQDAATLQGCMEALGTGNKDPEQVNFPGSHVTIHWGPYGLVTLQMKPSRAENNIGKMATPTEGSISESNPEAGLHRPIPLTPGSPLHTNKHTNRTQNTDTHKTGDSGRQPHNLQKERPPQSPRGPPQAHMTQPQETPKQRGTKTTERRQTHTEHGTTTHRTRERDTQGKHGRATHDPGQPHEHARGCPHHRDPPHPHTPTSRARQQDHTETEQKRTPTRSPHHTHRAAAPTTQTGRNGASQQHQNHNPRARHANNNPTPKPTSPKRRRRQPPTTKQKGAQATSRRARTNNTARPQPQQKPARQTHTDPTPAP

SEQ ID NO: 967689 - protein, 473 aa, Homo sapiens
MSSQAQVSSSHSSQAASSGRAPAGACRQASSRTLIGRPHGHVPCATSSMYEAKEGNVSIANTCTVSNRAQHKKANMPQMRQSIAIVAHLHSMHTHQGCTTWLVNPDNRAHSCTCKHLHTHAISRIRVHQAACTAEHSNSMVPWSHIITGSTNLPPHREQAQPHPRPTSGHSYLGAPPNATPNGSTENFTHTLPTRHTAEQQKQQQHYGHNNTHKRPTTSQGHTKGARAQQPGQHTAHHMREHDQLPHTRAGTSSRIHSKEERTQLISRQSPVKTGKTTKEDSAKLTDRDTKTAHADRRRAHNPHQTLDHNIIERPKYTQRHGTNNSMDHSTITPVATTARALQDSGSLTRTRPAKHARADPDTTEPSRRASPQLDATRESSISATDIDRRPVTYTQNTKRRQATRRHTRTSHTRHGQNTSQQRGTHTHTHKQHSRTRATPRRTHITAQDHEARQTINPSAHTQHSLHPATTAL

SEQ ID NO: 967690 - protein, 195 aa, Homo sapiens
FDRRLLETRVLDAMCRLELTYQLYELNWLWVLMVPCRITAHPDPPNTNDGGYLGASEAKLANLSGSCLWREGPHCSKLSIIVDRSILQSDDSVIKVPNKDEGDVCNHEKKLQILALNQKEHQQKKRSGFRDRKVMEYENRIRAYSTPDKIFRYFATLKVISEPGEAEVYMTPEDFVRSITPNEKLTRTLGSGSHI

SEQ ID NO: 967691 - protein, 304 aa, Homo sapiens
CTSRRTRVPTFPPPSLFLRLRGAMAKPLTDSENADADQRARLAGLGDVGGAEELQPDLHFMLVKDRNVATPATTSSRWRTRCATTRGPLDPHAADYYERDPKRIYESFPGIYMGRTLQNPDGEPGPSECLRLNPSISGVRLAQGNSRSYARTMLPWEWRPGEAGSVSLTHWLPWAWQHTAMGLRMNWAFYPEACHWAGRVEGGRTDLGMRLTGTPLGRKRGLSYMQPRARTTDRVEPTPTGVAVGDTHTVVLAMAKENPGPATGTTAQPSGGVRQVHRNQARHSPWPPHGGARTATHPRAPQEP

SEQ ID NO: 967692 - protein, 237 aa, Homo sapiens
MLPDRGTTTRPHPDPDAPRPRHLGAYCDRRLPPPTSLESLAASKRGLRRFRQFPNRGRWLPPGGARTAARRFCCPRRPGRPVAAPRWVPRWIQTACCGTGGRAGSAAATGRCSVSALGPAPLHKHNHPPVHFIKPCMVQHSTTKGNTVGAFSAQHVRWLQHINLSILHGYRCHVQGTLACPHLVTSIFCTASPSSGSTVQHAHPTDAAQQCTMLASRPSWHSTRTASTGRELTTILL

SEQ ID NO: 967693 - protein, 256 aa, Homo sapiens
MQAVKQEDGSTKDHSQTHSRHFREGNNMQNGNMQLKENDAMITLDAPSLTDSDDASTDKPWYHMCNPMYLRCTHGQLTTLHGTRVANSSDRAASESCTTLDHTSFIRDYEVIKKCNERLDSGPNSEARTSELATLDAKLKVTTYLISYTVLTILHRILKPRAHSVSQALSLNIAKRPSTCYLSRTDTTKHTQTLREDTHKETHDTDEACAYPRNITPDERTPYNQTNKTPPYRPEKGESDTNTRNCANRTTRTAPT

SEQ ID NO: 967694 - protein, 96 aa, Homo sapiens
MPPNHRQQPPTNATHNTPAHASNTRHHEHTAKQQATPHTHPKPDHPDNHEPPPDPTPNQKHTDRPAHPHRTPNNTQNTTTSTRTQATHHPQTHPAP

SEQ ID NO: 967695 - protein, 109 aa, Homo sapiens
MKVQNQENSKELVSLELNLVIALVLKIVIFFTAIDDIDLKAFKETERHINKAGDCSEGTACYFKHWHANKHNALSYVKLIIKQQNARNSNNANQICNQTSASIKASQAL

SEQ ID NO: 967696 - protein, 75 aa, Homo sapiens
AGLRISASNGFLHRRIKITINWWYTSYLTDYQLSCKKFFYQGVSKLSITQGRSTNLEAKGTRVHSWTDSMDAHQD

SEQ ID NO: 967697 - protein, 253 aa, Homo sapiens
RRRQEPETRAVAGWAPWTGITTIEAVKRKHPRFCSQQASMMPAGSRAERHPSAEVEGSNRRAREQAAGCRWPPLQPVGIQRGCKQAAGTVHQGSAWRTALTKAGKQAEQQLLMQSAAAGHAQVHCKTGPFTSMQAHQHGNSRQIQLQQHSSSTLRARRQIRQVMTARWHRKVGASIATADLDRNQRNRSCSWQKVPLPQTMAEPDLDLTGTKNSDTVYMRMLSERHTYLLTKRRYILTADLQDSLLIKLKAGH

SEQ ID NO: 967698 - protein, 45 aa, Homo sapiens
MCGRIPQTHTGRHTQTEEQTRRLLPKRTQNARYCTPHNLTATESP

SEQ ID NO: 967699 - protein, 152 aa, Homo sapiens
NYRLISLINIDAKILNKILANQIQQHIEKIIHHDQVGFIPGMQGWFKICKSINVIYHINRIKPKNHTIISIDTEKAFHKIQHFFMIKTLSKIGTEGTHLKVIKAIYDKPTANISLNKEKLKAFPLRTGTRQVCPLSPLLSNIVLEDLTRAIK

SEQ ID NO: 967700 - protein, 72 aa, Homo sapiens
MPLIRRGHIGVTRWCHFWGYPHKEAYGVSQPDFSSQGALKPCPSKLILSLDGKYPSRSDLRWPLKPIGGTYN

SEQ ID NO: 967701 - protein, 334 aa, Homo sapiens
MREYKLSLFVGSWSAVGKVVLLTLYQLSLHRQLFLSEQHHRSLTISTRFYIRTRKALNVRNAQPRATCSEHSLGYLQVTPGGHTLPLQLDVGISIPVATQTWTTRAPLPFYAIYYPNHQATRSSTLNLKFNKGTLQQTHALTFDALTRTTFDVTCFPSLELSNALRNLYTLVTLCGTDCTPNVATRGTREHLDGATTRKLLNAPAWEAQGWRHSRGFWFGRLSRFERQTSLIPMAPLSTYRKPPTVQQPWLTPPLVTRTVDIVNVEASLKELGRGAEKNYINTPSVIAIIQRFPQGIGAHWSGSHTARPVSVAQITLDRGFPRFPPLVLSHGLL

SEQ ID NO: 967702 - protein, 39 aa, Homo sapiens
MGLPTPDEVDAEEFSLTLEFRVYPSCKIRAFTGCAFLQI

SEQ ID NO: 967703 - protein, 312 aa, Homo sapiens
WARMPSSQFSMTSVPLGPVFSIIGFAKPDQSMLKDHLISVTPSTVIRYGESVHSTMMSPTVRCTDINGALLEGHQAPQQVRGPQWHLDDPELSLIVFLTDGKPTVGETHTLKILNNEPRGRRGQVCIFTIGIGNEVDFSAAGETVVGELWPSTTARVTEDGGTLGSQLIGFYDEIRTPSSLTIRIDYPPSSVVQAQDPVPNYFNGGDHHCGDLGGPGSWDHLQQWSVTGQHSKECIILKSKNGACAGLEADTMSQEAARLRAEKGPTTWGFGVPRKGGAGEGRRQRRERHTQKTVNLNKGGPYTSRVAQEEA

SEQ ID NO: 967704 - protein, 357 aa, Homo sapiens
MVDIDIETVDPPKDIASRVRTMPEGVAVQFAERPVFFNCTRAHVEREALHICIGISCDTNNSVSILNTDALGRINRLRNFTCVCAPSHAFVHSKTCVVVTVDNPLHTAERTAHIKARAHDKETARTSGHFLKDMANRIPYAIPTRGTPRSSSKKILGPTDGRTVHTVPFITAPGQTPMAAFRQRVCRAHPKLQIPATTSLESRTLSFPTCSLTLIRPTRREHTAHVRRLTDIIRASPYMSHTCPSIHEDRKQRTPFMAPFSTALQTEHTFVTADDLSRRTLRTKQMPGNNERGTIGDYQLRHSVPSAPYYQTDSDATPPMGINDYRNNFDPTYQLNRSHHHTKPHVFRHYTRQTART

SEQ ID NO: 967705 - protein, 371 aa, Homo sapiens
MQDHNSDHEPATTEKDQTIELSVDVKSDPSTSDTDAHTTPHTYGTAVPRHARTLEANPDPSGKGHRAATHHAGTAAPGPSHSALEADKATHRHETANRTPERLHARSERHDPHHNDTSLRTHRTASPYTPQPRQPQQQEHRPSKPGANTAPVTRARARLDVAPTLTAASDRATVLDTAQPETRERNRQHAPRDAKSTPDKTDNERAHRTGIAAHAKATVERTQRRRPLGTPNASPDQHAGRRERRRQHGDKQGRTTAATACRGIGRGDTCAHAAPGGQPPPTTALGEQQATTHERPRDAAPSAAATRTAAGAAASTHRRGERTGAPTHKSETAIPPTAREPDAQQATTHHTRDEKPDERQDGRDSEWDAQT

SEQ ID NO: 967706 - protein, 107 aa, Homo sapiens
MYNVHLCASPTLLHAAHALSYTHTRTDHSTSLPTTHPPALRQTSPDPPTLSRTPASPPTPHPPHTRTASTPHHTTRPPIDTRARACRPLFFFILSSHLPTLRIIPLH

SEQ ID NO: 967707 - protein, 133 aa, Homo sapiens
KPIFFAFRYIAFSLVLASRLEAVADFGAARASCFKSPACEELACGTRPNASHNCGDDYEALNFGVINEKGMVIHRSQREWLASRLEIPALWDGRDSNSLEDQDVDLILRIFASESISTNTQIVYINRYMLLSK

SEQ ID NO: 967708 - protein, 427 aa, Homo sapiens
AREPRVPRLGMQRLAVLCCAELLDVCVLEWMPAGWLCSMLHAEHELETCGLTPRLADHQCLLNSELTPNGPSQRTFPRRSDRCCNACKLVGGSGLGPAIITLQQIQLLNDQIFPTFSTSAIDIYLLRHEGIPRGPLKLAHADSDITRQTSSHTAPEDITPFPLGQHAVLMPLKPSPFLRRDDSMATLIICIDQLFYLLQGKAATPTLASSSHARSLLQTTGVMAWRTNPHSFVLTRNNRETPVHGILYHTPFCFFVYAQPHLDTTLNLRHFNHTAPLLHFLTIRYHSLQAPLWRHWIDSFRAKRKRWAPTYPVRPTFSALRSYEYTPPPPASNRKRFPITAFISRAHFIVCSMRKDALGLINQLRRFSNGNFRKAHLSSFIPTEDVWGVSWIYRGSVTRRPTWCHILPPITISEGLPSIIRGLIHYN

SEQ ID NO: 967709 - protein, 226 aa, Homo sapiens
TKVRAELKEKRHKKPFKKINESRSWFFEKINKIDRPLARLIKKKREKKQIDTIKNDKGDITTNPTEIQTTIREYYKHFYANKLENPEEMGTFLDTYTLPRLNQEEAVSLNRPITGSEIEAIINSLPTKKSPGPDGFTAEFYQRYKEELLPFLLKLFQSIEKEGILPNSFYEASIILIPKPGRDTTKKENIKTKILMNIDAKILNKYWQPKSATHQKVITMIKWGNI

SEQ ID NO: 967710 - protein, 106 aa, Homo sapiens
LRILLGPCAFRRGFSVLLTVWCCCIVAAVGSVSIVACSENISDKHSHSRDVIPSIEFGKFHAVWYTRNCGEKNLLMVDTFLVTVHSNAILGLPMFSYMEVLDTCLD

SEQ ID NO: 967711 - protein, 149 aa, Homo sapiens
MGNRVTESHPDGCPDCVTIHEALKTVIDSQTHYRLPGGQDRARAEDLNERVSLLVCGGDDLNCPWFVVSYHVQVLLFEKLPFPVKRPFGGGVPFYARILSQGPLSPGGARLYVTLWAVPTRGAQIVGAVFCQRFAPVGQPSRVCGKIGL

SEQ ID NO: 967712 - protein, 208 aa, Homo sapiens
MGSASVPLLAASPLPSFWISSGVGTEPVQGPHARLACETTPQRCDPTSHLTHIKVSLAQDFGHLKTPMLEYTRAMCGPTRCIHACSLSKPDRALSQDTYKCSLKETWAASQEQWTGRPEEAVVPHRRLVRASTGIGRPGLERIYPTCGLQRYLTTTSLNFTEGVVTGSKAEPCRTTPSTTPPKGETYNPRPPTPRCISRNVHKLHVGT

SEQ ID NO: 967713 - protein, 429 aa, Homo sapiens
MGERSSIYDNTYTRTAGPAPLYHNHIETSSVRKRSEKTQGETSLYEQPQPTHTSLILHLSALRQLKRSTHTHKRAHTTTPSTLNQQPIFIIYTHPNSHATHTQQSQHTSANQTSAANIIDSGVMISKNNASYGGALIRDPDASPRRHDEKTTPISLLIPHKYNEEKKKQRQGQLLTTLIEDKQKWLAIYKSDAAHAADATTQHIMNGSTNNNTTQHWQQPRDVNHTATLDKATLALTRNSDTHSHRDSESHTRADTKTRHITHSTRLHTRENDSRTTTHNTNTPTHTQASNQQHTTQESDKKRNEEHADSHTCMTADTGNHNDQNTTEKQRCNVRRLADDARTARLTQRMIRKRKKESTTRRASQMCQSARHASSRVTVSCRERQRTRETKEKAATREGAADSAHGQTETESTDETVSSAGGLQVRRGE

SEQ ID NO: 967714 - protein, 140 aa, Homo sapiens
  misc_feature (96)..(96): Xaa can be any naturally occurring amino acid
SCSRRALGKAEDQCCQVPRMVNCPPCSQRDGVWSSVIQSASSKRRASSTDTKSVRQEMDAYIPRHPTLWKLAHDEGALAWFEIFASRFRRTSDAPXFVHDMVANALWSQVDLSAKRRVQDVLWCCQCLLEPTLAIRTLSA

SEQ ID NO: 967715 - protein, 258 aa, Homo sapiens
PRVMHVLNADTIVVKLNSKLIDNDRFTCPVDPTTEDCAMWDEHPGIRTKKLLTLYDIRYMLEAREFSIIIKSLWGNEGRTVNGCDYHIDLRPGPSHTRPSALFFIRAVAWCHMSSIARTKRLHEAPLSGERLLAHPVNPYTRARIDDQRSSYYWMNLLCVARVPIAAYRMDNRSCPSRIRQWHIHRSIAGIYLGEYTYSKAQADPGSSIRGPGRPLKASGLESSSAGGSRLASILPESTGCRYQTYLRWGHLIGPKSR

SEQ ID NO: 967716 - protein, 117 aa, Homo sapiens
MVLVIAIMRTLDMACCRQKSFACAIVASHIRSRLSSLCSRTNTRRHASLVARKCSGRANDEAYTTCRHLGSTYAGSQAGQRRDRRKTRVDFRGAGRHSRGHKRTHWMTDGGPTWDVS

SEQ ID NO: 967717 - protein, 169 aa, Homo sapiens
MDFLQATQNYSMKHPESTLWLMCTGALTDLWLTACCTCAGCTPCSCPCADAAAPPRRPSASGRRFLRTRDAAAPGLPIHGCSAQPPSLAAALACPTPATSPPGLTPPSSAPSPCPPLAHLLRAPHSPCHCATFTQHPLRLPRDNSTPSAPRTPPQRQFLIHFPPKHGTP

SEQ ID NO: 967718 - protein, 76 aa, Homo sapiens
LYAKFISSAQLILIFYREQVAKDNDVSLLLPGSRPLHTHIKLLDSTDTLQYGVLTSSALQHGSYNSFLSADPASSE

SEQ ID NO: 967719 - protein, 178 aa, Homo sapiens
ISVCRTCMKKRRKQQQLNLHEVEEVVPDTGNPQQHAAAAAARSINTQGHRAAVVARSCPHASAARSPCQPSAGQALDCPPPDEMKPHDRCSEGKIYNCCIGAGMHAAEPSLADGPSAVSPWHLQHTAHIRQAYSQQAATDQQGMLQALAVSNHGLGNCGTIPDKTCYLGTTQGCETTY

SEQ ID NO: 967720 - protein, 67 aa, Homo sapiens
MTRASRRQNDADDHPPPPNPPRTRPNTHHTQGGPKNTHQKPGEGNGPDRQPTRATRRSERDPDTQEP

SEQ ID NO: 967721 - protein, 172 aa, Homo sapiens
WVGIRYRLPRQPPLSRSEPLSSGGLRRRQLCWRDWLDCQQWPRCPGPLVADSPHLSARRAAGRAAARACTPRRRRSSSRSTAAAPSGVTLANDESAKEEKSDLTGTILQDVRRPIDFILIQQDKNSGTGDKEGSEFVHRVPLASIPYDMTMASYYKHLMRAERRRGYIRGAL

SEQ ID NO: 967722 - protein, 78 aa, Homo sapiens
RVGSVLACGDELGPSAWAAAALLRWVCAGAVRLCGLLGSWAVAGAGWCSVAAVAVQASSGREDSLETCARVKGHGTKG

SEQ ID NO: 967723 - protein, 147 aa, Homo sapiens
PLKAKMGKETTHINIVVIGHDRFWASPPLLAHLHLITMLVAIAHKAHPLHTHICSTGRPAAAWATGLHSTVMPWDLGIKLHTAAAVQRASSTHTHHLRCWHTYCSTKPKSLMLQSSISIAPRHPQQTLFIHNTHTCISPVDTIITRA

SEQ ID NO: 967724 - protein, 148 aa, Homo sapiens
VEYGCKVESIFLNVAGVNTTPGQALRTWTSQDSRGSALYTVPAHQRPMFIHCDSLGSALSSDKSGVIPGPPVCVIVTMAMPGYILEATHGWTEPSRPPYPSPPGLLVDSRRQGCAWFLTCCKESLDQICICMGCAEVAQTQFSSGDSS

SEQ ID NO: 967725 - protein, 225 aa, Homo sapiens
VAIAWDAAEWSVQVRGSLAGVVSGVRRERRFGGRWFSTQSLQMPGRTASRDNGENLSPIYCICRKPRHLSCLHDRRVTICNEMVPGDCIRITEKMAKWPSGSGTVGSAERTYPKLEIRYLVQEVHGSVRMANEASDYGSEPPGLDGSDAARRGLVPDPDLRAAGAAGQGSTGVGGHAFASWALFSPPGISLSPQLPFGVPSPKAGDSPSSKAAAESLWVTPAMFW

SEQ ID NO: 967726 - protein, 103 aa, Homo sapiens
MLRTKGYHVHTKNWAGTAAILEREGPRERVEIWRNPAPRNTMPAARGGTNGTGHTLVGTLREQVNKGHGSREARGSGQQGNAMARWNLPTRTPEAGDSRGSEL

SEQ ID NO: 967727 - protein, 125 aa, Homo sapiens
MTPVATIAGFSRFYDTILCVIQYAMIRPHDIIANDVEAPSCERDRHAGEEVKPNEAMEIPGALKGTACAQGVRECHPPVVGGIVQGACSRGHCRLMSSVRPSIMSRHGRDMSPLNFLACFSTPTM

SEQ ID NO: 967728 - protein, 141 aa, Homo sapiens
SGRSSSKSSHCDSPPRSQTPQDTNRASETDTHSIGEKNSSQSEEDDIERRKEVESILKKNSDWIWDWSSRPENIPPKEFLFKHPKRTATLSMRNTSVMKKGGIFSAEFLKVFLPSLLLSHLLAIGLGIYIGRRLTTSTSTF

SEQ ID NO: 967729 - protein, 308 aa, Homo sapiens
  misc_feature (180)..(180): Xaa can be any naturally occurring amino acid
  misc_feature (184)..(184): Xaa can be any naturally occurring amino acid
  misc_feature (188)..(188): Xaa can be any naturally occurring amino acid
VIVHRQLDGRVLLNTTVAPLFFAEQFLQQSTSLPSQYIKGIAEDLNPLMLSTSRTRKTMWKRDLAPTPGENIYGSNPFHLALEDGGSAHGVFLLKSNAMDVVLQQSPALRWRSKGGILDVYIFLGPEPKSVVQQYLDVVGEKFMPPYWGLGFHLCRWGYSSNAIIRQVVENMNREHFPMXVKWXEMEXMDSRRTFTFNKDGFRDFPAMVQELHQGGRRYMMIVDPAISSSGPAGSYRPYDEGLRRGVFITNETGHPLIGKVWPGSTAFPNFTNPTALAWWEDMVAEFHDQVPFDGMWIDMNEPSNFIR

SEQ ID NO: 967730 - protein, 143 aa, Homo sapiens
  misc_feature (105)..(105): Xaa can be any naturally occurring amino acid
MSHGRGFSKTKHFFAARAAYIPTEKKRRPLLSSPCCALPVEKNATKGEDTKRRRRRGDLVAAPHQEDPTNATSAAWRRAHKRRRLVAGGALGLPTQKKGASLCNXPWGRLHDRGVEVYTTLVVENNGPKRLLVQGFVLTPTLV

SEQ ID NO: 967731 - protein, 324 aa, Homo sapiens
MGEPIPNQRTNATRIATGVIPVDRYVSPGKAYSVTNICNIHCAVGSGINVYKGRGSRGGRPDRRGNTRGTIGETPRTTKGTPPRGHSRSHMKARNHGALQTNSGTSLTTAEFALMVPLPPYTGRTVPPCATPARTCETERRALAGPPRKSPKHGTHIEDLRYEGTRRRQESAHDSTDYAQQTPIEKSSKRRRGTQQKPTDTKKRERAWEKNNTSGYPWTKERQTKAAEQDPHKGPKQAQAREDKRASPGDPPTGEQSADHRGAEPTSRTRTRAQGEHEQHDGQKARTALERRDTQPTDNIRQRGTKTKHHGQKREPTRETQPPA

SEQ ID NO: 967732 - protein, 315 aa, Homo sapiens
MQRLFPGCRSRFQVLDYKFTIGIRQCCLISISMWITNFINNPAGPGRLGCQEAGMGAFQTRVASRPASLKDEVGDEAIVELVDEWAEGEGEQSMTSRSMQPAQVLQEWRHMAELTCLSEASRASTKLQGALLLRGSSTPIQDCSCDVVINPYKNLPLYSAEIVALYTGKTTARDCPLTSYVHSQTPGQHGGPAVPDPVMNPATLSCTWCTLAAGHAVEHLNRYYRDQEVTWCTAQYNKHGPQTPLTSLLHRTTPPRTHTQAHPDPHQTHNTPQPPSTQITFKPPIHNSNITLRDNRHHTPTSKQPTTPTKHTKRP

SEQ ID NO: 967733 - protein, 617 aa, Homo sapiens
  misc_feature (314)..(314): Xaa can be any naturally occurring amino acid
GCLAFYVDTNIAALFRGIPISAYALSQTGCSLHTKNHKYGLYSQLLFVSYMSRQYCLSFLVLPAAQSSAEDHVSNSFFFTTATILPNHFIFNFVLSSDFPCLAFIHYPNLHLANQGSSFSSQGTLPWPHSFKKNTGLETAGQHQLGSHAKSGLIEYIGHSHLHQHMWNHFSTFLGSQRRSITASHPIQSSGHTSNTQGPRDKCYYDQAHPHHKFQRNWPVGFPSTLCEPILALETHSDYNKFLMNSQVSTTDSLRPLHNASSFGVRAIPLAESRYTQRRHYYSTEYTPSVEPVCDLTVWDRHSDYPCHAHTQLXNDVYTDNRIMFAVDTLYSILCAQTPQLLTRFICYYYTSSYSYKTTPSINSSHKLMDTHTYNAQTNIVSHQTLYTLSTQPVRANRNTNIYTHTNPARGTHTGADHTAGTSANDYQQTTATARYNLHTRLNTTQLTLTPQATTTHTPYRDDIDIHRLTPTHQGHIRATLTHAHSDLPQINAATHRSLTAQMQRKEYSEQTEMEAQHYNDEHSDNPPLSIQESRIRYRNQASDRADEQGQAAQTEHEIATTEEKDTTRKRRNRRQNAEGAVTTSKTQPIARPEARYTQAVRQKRTARATARSKRVQ

SEQ ID NO: 967734 - protein, 217 aa, Homo sapiens
MPGTIALSHPYGTYPGSPILITTSGDIHRSTYTTWKTLDLDDPSSMRRSLHFPKGITMDDIMAKALGDHQLQSGSITAIHTKDTKHMVTAETYSTSGSPIPGGEKTINIATHTYGGHTPPTRATPEDTRHRNQRGTLGRVTHQQGGVSTRDHPQNITPKEHTQQPGRKPDPPHGPIAGATTGAGTTIGSTAQETKQEEKTSTTKATHSAREDNTTQT

SEQ ID NO: 967735 - protein, 177 aa, Homo sapiens
MAIKYLEVIKPFCVILPEIQKPERKIQLKEKVLVDRILTLYYLSYRCAGQSSPVLGIMVSQSSVMTPLYGMRGDSSLYTEGTSMELGTLSYLVTVWHLLMSISLAGAKIIEVGGRPRKDRALFNGAQKLFGLIITIGQSIVYVMTGMYGDPSEMGAGICLLITIQLFVAGLIVLLLD

SEQ ID NO: 967736 - protein, 209 aa, Homo sapiens
MTPHFGNEELDCHFLDDKVLLPKDILDQQTYMKISSSDDKDAFYVADLGDILKKASEVVKKLSLVSAPLMQSNVMIAQRIVKTPCCYRDRIRTVLARLKLQVGAKSGVPPERISMQILCKQVFKISMLLILAFRMTHLIVIELTEVAETSKAKCLDCTDIPELGHSTLGQQNTVLDGEANHGGPPETAQRTADNAKQANKLRGKEKAAP

SEQ ID NO: 967737 - protein, 148 aa, Homo sapiens
RQDRCRLFAGEACVWRTPRRHVGGHRTLIVQVEKFFQDNMWWIVLPKSESILPMSKLFQNGGALDEERPAKPGNSLRKDNVQRLIVRHSMSVLQTKLPRGHWQGPRRPGSCQEPALGSGGSRVLVKTTTMFQKANLHSAHVRSALIRK

SEQ ID NO: 967738 - protein, 86 aa, Homo sapiens
KTTPKTCQHWERNRLDINELDVIATRRYGTSPPLLGIVDLVDSAGWESSKMKLLNKYYDEGGACLRLGIGRTFKLCHGVCGIDVKD

SEQ ID NO: 967739 - protein, 230 aa, Homo sapiens
  misc_feature (59)..(59): Xaa can be any naturally occurring amino acid
  misc_feature (126)..(126): Xaa can be any naturally occurring amino acid
  misc_feature (136)..(136): Xaa can be any naturally occurring amino acid
LIKYSLRIPKTSLFGSELSIPISLRRAFCQPLVLSLIDALPHSPRCVLDLPGDRAQWFXGARDTSGRYKSQWSVYTKSAVVSIMAIDKKEDLTTIYDLCDNMVGLASTDLMYTYVYTNILCARITXQELCDFVTLXSVKYRKRIAKIQFMHEDHGQSFYISTVHTLIHEAHVRKTSYLLRHEAFALPNSHGLSARLSSTCYCLCRNVSCILSCTITRAGSLPVFISVHEP

SEQ ID NO: 967740 - protein, 306 aa, Homo sapiens
EVCFRIYDMDKMAIFPMGNSSRYLKMMVGNNLQRYTVYRPTLLDKTIINCSITRLDMETNYPSEELLCLLCAWPRYSTASMVARCVTSYHESTTQHFCFLSPLLCKDLLQARSSPCLLLLLFTMRPSLSSSCWKPTTFLSHTTCTPRTIHAAPEPLSALTPATLHASHYTSACYATLFSTPPATAPPPPDPAPLLPCPGCAEPRPPRLRAYLSDLPVVRSCFVRTAKEQLILVVYSSAKVSLVLLAHSSVTAFPNTTCQPPASPPHPPVPAITFTEPPPRLLPRVPTWHRDASLHSHPTPCISHTA

SEQ ID NO: 967741 - protein, 184 aa, Homo sapiens
YNDCLWQRNIPLKYCAVTWEQCNMFFTGFVSTAEHKHLIRDKHNTKKQQTQNKNKHKTNNTHTQTDNTHEQRHQPTPHEPRAARTKRRRGGQEERSLRITERRQGSEPHARLAEHNGPARHRPAEDREQQSRRNHKKRKKRASNKKTEQGGTERDKQEGSTVKGHKGDTTQGQPREKKVQKRTQ

SEQ ID NO: 967742 - protein, 148 aa, Homo sapiens
QVPVRRTMRQVGGVLLTDRRALRGCTISGPIKTCMSRGGDSKRCLVGRAGVERLKIVYVYKSPRGATSWSLKDQVIAPWKIIALHAIDRLGTYDPSQPSLSHILPSRQTPEQGQWQLSGPDDLVFGWALGQDRLDEEHDAHDYMTRAG

SEQ ID NO: 967743 - protein, 139 aa, Homo sapiens
MRKTGKGNEETPDRQHIKRETHRKGEQGSGGPPRETKRGIGTHEKEQHTAEGNRKTREERRNTRKATARIEHGTESRKKDTNTKGQHDRRGEEENTQRTNKKKWERHNDEEELNKKQTKQRARTAQKKTQDERRKSMDG

SEQ ID NO: 967744 - protein, 267 aa, Homo sapiens
RFRGLQRFFPAVVLHLSKAEAVELEVLAGVKWLSTNWWWLEQVVLRETALLTNSQANPEPPWLELKYDPTIEDSYRETSGLEIGETCLSGHTGYGLDKKTYSAMREQYFEDRRRLPLCICRSIIGSHLRSINLYRERPYKRVKDSDDVPMVLVGNTCDLRTRTVDTKTKPQRTGQRVTGFHSLKPQQELQGVEDAFYTLVREIRQYELKKIKGVMMGLTVYGDCMCGGCTRCFKVCRKEPFKLHEPVSDSGERYTVVFRLGEGVYSS

SEQ ID NO: 967745 - protein, 148 aa, Homo sapiens
  misc_feature (146)..(146): Xaa can be any naturally occurring amino acid
MRRATRAGQSDKCEVTVRFRDASRRLRGKLVRSEGTTKRSQRLQEVPGDCGKLVTSDVGHSPGERHRGTMLSLELIILAILMALCRGYINISWGRGGGPARGGIISWAGVPLERRGLRSAELTAPRGVVSLSALPLYSLVGTHLCXRN

SEQ ID NO: 967746 - protein, 280 aa, Homo sapiens
MCRSRSRRPGDPRTRGDSAIPFPAPQSCMTSWLPRHRPHPVLAGKQDVNRYHVMTRYTTINRYSHPSRRRHRFRSGGSPVSVLGYCKQASMQACRQSCNTVNLAGSKGKQSPPSIPTEDQVALDRRLAFMRYNGHDRRSEPHVPSSGDRHTGVGPGAQPGYAHTMGANMGRGHQTFPSNERRYMPAHHSHFRAKPTTGTPRSLARRSTPSQGPWRGNLTPETILRAHAGYNDKTGMHKSIDNRGPTENRFQGPPPKEPPERTHGLATPLIRREACKNGKP

SEQ ID NO: 967747 - protein, 328 aa, Homo sapiens
GPEDLEPSNTSLGAAWIRRRFSWLIQWFGPYQGLQHERHSSVSVCDICDLLADLVFPWVLPWGLRSYECRESVRRGVICQGDGVSVRGKATNSPTQRLPQSVWITTGLVVGDAEVVLTIRELDSLALNQSTGLPTLTLPRGHDLLTPWLTPLPGPVPAACLLVGEMSFGPGKPPSCLHDSWNPNDASWCDQESKQPVPGGLNGGFNLLVFFVTVLACWHTSIVSFRQLRKEVLRKLSMWGKQWHPAEAAFQNANRNLEGDLKGANRKSITEGQQESDRRHSPREIFPGIVSPGVTPTAWQTGEHAEITGLRTLMNGSRNTGEKIKRHE

SEQ ID NO: 967748 - protein, 345 aa, Homo sapiens
DEEEDDDSEEDEEDDEDEDEDDDDIEPAAMKAAAAAPASEDEETEDDEDDEDDDDDEERMTLQDEAMADYTSHRQRTLQTLVPVKAKQRGSSACKMTKQDAEDEDDDERRSMMKMMHDEDACTRRSEDAARQDSSPVTQHAPATTNAHGNGHHTTSQPPCKPKHPTHLRRHRHRLTAFQSLTLAQPKPLTPNLLLESHTLGISDDPRLPPCILLPARLSRHGHSTTDTSRPIRGYRDLLADNPRTDHQQRTSPGPATPSAHLQPTPPRPTTNATHKPKQPDPGHAPPPPQRPLTDLSPHPRTNFRKDNLTRHRVRRMSHANPAYPRPEPGQAPRQLYRRLRPAAH

SEQ ID NO: 967749 - protein, 528 aa, Homo sapiens
TSCSPQQHWHSLLLNPSAAPLPHLSRRAAPPPSPQHGTLLHGLTLAPAALCTRTCPHARLHAHAHTHAHAHAHTHAHAHTHAHCTSLPPCTLCPYSVSLRTRTHCAHPHPPAPRTRTRPDAHAPCARPPCAPARTLSPLPLPNCATPPARPPAPPTPRTAAPRPRHTARMRPLRHPTSTMRRAHPPRPCPSAPRTTQHATRPMRHPPTRAPPPTNAHLPQRPPPAPAALHTGGPPRGTGGLTTPPRNPPTLDPRQPGLPPMGAHRTPCAPTPPGASWPTPQRARAPRQPPEGLGFSNPFPMPRVETPRPAPASQPSPTLAPPRQGNILPSHCLPPTPSHLAHSRYERGARNRRPTMRIHPGPGTLPNTASPWPFPAAPPPKRPPAQPNAPHLPFPPPAPPPGPPWLAPGTGLEPPSHTHRALAAAPGAPSAPCAPHWPSPGGPKASHPVMAPRGPPTPRETPRRPIRPRHNRPPPINPQTAAPGPHSPPQSPATNTPLLPATPRRPTPRARLTNPLPHAAPHNTCRPH

SEQ ID NO: 967750 - protein, 296 aa, Homo sapiens
MRRWALGCPVWPWDGEPAVASCGVFRQWHPGAWGLRPWTGPGAEAAELAEARPRIRSRMPVTKLGRYGQGHEDQVPGGDLSLLPAPLKELTRSLDFFLRGPLSRHEALEALCQCRSRPDAGHAHQRSNGIFVSYTADYNAATSELARSSSAPTQRGHRHPLRPLILAKLSIVPVRRTLLGWTPDRPAPHCSLARLTAAAALLLLRLIPSTRRPGIVSAPAAYQAAPHGWYRRPAYTLSPQHHLPHSSTYRQAPPTTLSPTPSTPYTQPLARNLSTQLSQLKTHYTTPTTNQTHHTH

SEQ ID NO: 967751 - protein, 229 aa, Homo sapiens
TEQKAEPQDDGKSTESDVKADGDSKGSGIGGFSLQKGPEFIKSYMKEPEKLLVSYEEEQFSVCWRNLRYLPKGPLEAVVISPSPTCMNVSCASSSSARYMRVTGRLCWMLFWMMASLSPHLNSWHALQIEYERKNVDLQLTVLSAKAVLSGSGRSLLRGLLLPELHAVPYRRGCSLICQPWGSAGSGYLHPQSGTVELIVATTKTGRNGRDFCRPVEAEGLEAVQCPLP

SEQ ID NO: 967752 - protein, 93 aa, Homo sapiens
MIFGGKAAELDIVNDITSPTMVLIRRFSNYRSGPSDVLSNIMGLQGCVRNGCLCMCEQNQLKNVTRGAGKEPRSKSTMHEGKWVTNSCISKND

SEQ ID NO: 967753 - protein, 111 aa, Homo sapiens
MAQDYRTAWCLIDPRPLAIVNIGEQATHGADKMSKITTPSQPNTKHDTGGAPPKRPEITPREHRKDKGDESMPAAVSVTNAGTNTKAAPSTLTPRETPHTIDQQQNQSGTA

SEQ ID NO: 967754 - protein, 73 aa, Homo sapiens
MPQTAHRKHNKDIQHGHQKVLYEKRDQKRKTTKSRANEELVTSHITGEQECTHNTGEPRKTHREPNKQHTEEN

SEQ ID NO: 967755 - protein, 406 aa, Homo sapiens
  misc_feature (31)..(31): Xaa can be any naturally occurring amino acid
  misc_feature (153)..(153): Xaa can be any naturally occurring amino acid
HAHAPHTSRTHCSLPSAPRPTPPYPASPNLXPAPLCTRTLTPTYPTRTPLTYTPHCTPAHCTSRLHACANAHTSPLPPLYTSPATPCTRSAPPPCPTRLRTPHTRTHYTRTRTALHPHGHACTRAPPTRNHAASLSRTLRTPPAWPATLLRTXLSRTQRARRTYSTTTRSGPALSTPPHTRSTPLLPCLGRQLAAQLTLAGNNPPTSQLHYSATALYASACTHTTTWPLPAAALWRLKQDPTGPLQLPNLHWHTLSLSYTITKTMNPTWLLIVAKLTSLATLFPGLAYAHFWNDRGLPREPVGNTAGLSNPGRSKPPSHLPPPPLAPPSPSPRSAPASPSRRASLPPILRPLGPTWRPNTATAAAPPPSPPPALFSPHASRPFPPPSPPPLLPPCSPPPVRAHPRP

SEQ ID NO: 967756 - protein, 198 aa, Homo sapiens
  misc_feature (71)..(71): Xaa can be any naturally occurring amino acid
QESSEARWQVLTQLWMLDKLTVCVMLRRPSTGSPLRLIECLPLIIFLRNILKYALTGDRTERRFRIASEFXLPPRDEAKGPELDYNLTRCCDSSRMSSIQFDGDRVTMNLPPGSIDDPRWSHFACTIVLHLGMEEPKSYVVQRVKRSLWVTQRNPSSGELMMPGIHPLPRSASIKVNDTIQIVFETGQITDFIKCETG

SEQ ID NO: 967757 - protein, 116 aa, Homo sapiens
MPWPPRPFGSPAVTDNRQAKTEDPKLSPSGPFQSKRRPPGEGHLSGRHVLEVKQGGAHRSQLGHDLARPQMGFENGLVHRWGGVGLGQMVLGPTLSVRDFGFPCGPWARLNPPNFC

SEQ ID NO: 967758 - protein, 135 aa, Homo sapiens
MLRAGNVNTASVIILPPLEPLWCRRRDANPRLVRRAFCVFLLFHRPFVMGAFLEGEISAPYRGGFLPVAGRTHPPVFFYTSVVPPHGRAGEATLLCFDSPQGVSSSTQETILLRTPSLFVVHTRWPPTRGEHPAR

SEQ ID NO: 967759 - protein, 140 aa, Homo sapiens
MTLPYRQVGTHDGPHGLLLPPMETPHNGAEHMLRPTTGTNGQASSKQSNPKLRHLPSYPQRLRHGDVKHVGLSHPILDSGISYHRIHTALVKHRLGHKHTTIVDISNYTTLFAGIHPHSTLGEPTTYAHEISPTTPLAIN

SEQ ID NO: 967760 - protein, 199 aa, Homo sapiens
QPEQPRLYGGLGSHALATRWQHLLPPTDGLTSDAQDMPKHPHDVPEEPELASRDTCPYTYPRYPEPTVDPMISENSRAAERLSSRMTTKPVQPETSPRHTNSATSSKEPQRQTERHQTLRQRTRTRHDTCIETQKTIQTQTTKPTKSKSKKHTTENKHNTHNTQTQNQKSYTYTTHKQHPAHDYNTPSPPTAPRERERK

SEQ ID NO: 967761 - protein, 191 aa, Homo sapiens
PLGTRRRARRSPSLPSQPSSLSRATLPPARVLRSVLSLVQALVFGTRRFVSEFAISDGVPGATEAGLGLLLPEQMAAIRKKLVIVQVMERCGKTCLLIVYRQGPVPTGVCAHRCLRTMWRDIEVDGKQVELARRDTPGQEDYDTPEDTSTIAQIPMIYSHCVYTIDKNLISARKQIARKKWDTTRNVTAIT

SEQ ID NO: 967762 - protein, 311 aa, Homo sapiens
GHLSCAAEAVWGEAKSNGRRWDRGMWAPNYGGSCYSVPAVRRHGGKRDRAAGLRISPNGRRWDRGHVGPKLWGQLLLSASCSSAMGGSEDQRPTGLRAFSRGRITPDCTYELYHDFGKDNLCRMTVKEGRLIVNFTHDTRHGVLELDTGQHQAEDSVFLLQDAAPGTTPPTSLSILGPAATLHRAGITHRSTTHATTAHWCQYTLTLGYTDHTRTICDGDRKRPLLSRDRGHKTRRKAGLADRHGEKGPTLNRTRTKSHTQPAGPTPGSTYQQRTHTTTMEETMTGDKGRRQQSTQNRGETHRTEATNQQQ

SEQ ID NO: 967763 - protein, 318 aa, Homo sapiens
MLLAILEKCGAIPKIHSARVSVGEGTVAAGYQDFIICVEMFFAALALRHAFTYKVYADKRLDAQGRCAPMKSISSSLKETMNPHDIVQDAIHNFSPAYQEFMQWASPMEPGPTRGVVAPYGLLTGSSTRPQWRPRQSEKTLLDRGLYDEFKVAGLQAGGSAGAIATVKAVLHLQTHHQARRWVVQCSGRLDLMDQTAFTCHFQRQRGDRQAPPMGLQDYFYVAILRGRAGAKDTGSMVHAPVPSVLGLLEQPTGHGVWDRVGSNLRRNPQGETVPHRDRQGVEKHAQRGTHGRWWTQQSQTNHQHQKDKTHNPALARP

SEQ ID NO: 967764 - protein, 105 aa, Homo sapiens
MNVGRAYADQAVDTWCYLPNLPASRKSVCSPVEWRGNLVEDQVAGDEASHVRSSYLLGVFVRSIVLRRSFGGTDLRNLSSFLKNCAGVEKRYGHRCRIRSVKKCK

SEQ ID NO: 967765 - protein, 222 aa, Homo sapiens
IPPRRPATMEEGPLTGGLTSPEDAMVTELFKPRRVQIASENIGLKSTPMKYEEDEITTIQQKKTYTRDPAEPHSEPRPCNGDTTADAWRRPHWQGDQRSTDESIRPAEDDKQTERGAAIHREEAERTEEVPRRHTDDDMRRKQSERHHDARDTQQTRTTNNANDDNLCLGPSHENNPPTDNNGKNPETSLIRHPHERSTMRRSHEKEQENITHNPGDQNHSK

SEQ ID NO: 967766 - protein, 227 aa, Homo sapiens
  misc_feature (34)..(34): Xaa can be any naturally occurring amino acid
MRRKPRHRGTPAGDPPHQRNSPMIGSVTPMWIKXKHRGGCKEPTRGPPKEGPTQRVCASCTPTTKKRGVAKQRWEYPHAERQNNLRGWWITPTAHKSTTSIISTRTYYHPTRKEGGAPIHQHTRMGGRKTFHLCTVDVSSSSDNRNQDFVGVLFFQETSLSQKELDTDVAVVDYYLPNKTRGERSARIPPPPKRRTQREGPTQRNEDDCSLSNIGPICLMLVEHAPK

SEQ ID NO: 967767 - protein, 563 aa, Homo sapiens
MCCTLGFAYSGSLAGSRCTAASRSRVRFLARSSTLTHRHHQLDDHTATDSLASRTLATRLALLLALNPTTGHCTQFYTLTTTGTLWFSTPFYCAHTQSFALRNNFPPTYTNPWTLGLILGNARQPSVAHGPYTTLRCPNIPWALTCEAAPTKQLINLAYIRPNADMAFRPIIPRNRLHLGHRAQTPQANINGTQRLQTDLQPPCHHTPYSAPRRPYQNYQDRHTPTHTHRRPQQPTAHNLPRPTLADLHIFGPKFQPCATPKHQHRGASPNPLTIKPHVLRSPPTLCRNTLHTLSGTKQAERHPHTPTPPRRGTTSRHSPRTHPSNTDHTDHTQKRTDTIHRQQTNQRPAQTAAASSPTHAQDITTHNHSTAVRTHKRDNAAAAHTQDTTRTRHQTNHDATLLTTHTAPPQRSGHPRILPPRWDATPPTQLPTYVRRTTHAATDHEPNANNTLAHNTTRHAGHPTPAGVANSSTTREQTPTPTPSAHRPAHATRPGIHCAHTNNEQPHAHAQRSTNEPLQQHTAPTNTPEPPHHAQEHSRRNCTPANKSRPPSHTTPPAKQTP

SEQ ID NO: 967768 - protein, 258 aa, Homo sapiens
RALGLGVEQLPVVFEDVVLHQATILPKTGTVSLEVRLLEASRAFEVSENGNLVVSGKVYQWDDPDPRLFDHPESPSPSPQEPLFTGPGCTSTEELRLRMDTTTETSYFQGILETQACTVTPHARLHSAKHTLAPEPSMYHHMPANCSIHGTQDQQKRPANIGQPREQTTQHTIQTYTNTTAKQHVTRNAAPTTQPQVGYTMHSRSRVSSTEQTKNHKDRHITHRSHKKHQTTQHKPQDKNNTQETANPTQPNQTHRQR

SEQ ID NO: 967769 - protein, 345 aa, Homo sapiens
EAREGTQGERCADGMEERLHLCCEKDGKALAGYVPSLGNTVTTPWSLLRRLLQEYQEKLQVDISGNWARKTESLADVSWKVVIIANEDEKQTGREIGVGNTEHLGFDCQEVCCSNGKNVPWLNEEAREHAEGAGRKDEREQLRILGGERGHRWCHESSRAAYEELILRARSRGATVQDWYLLQEVIIVLERSESVDLNGPGLLPLQNSGVCAMCQGEEDAEDMCVHIHSGIRHSNPWVDTFRKIGDKLGWEDPSRRIPGMRTVDRYLRPWGRTSPGHFWGGKSRKGAGRGVGQTGREGLRAKACTGGVKLWGSHPLGTAVQWGRQRGRLYAAGKNLIVRPELYLR

SEQ ID NO: 967770 - protein, 121 aa, Homo sapiens
MFRTFYYSTKLLECSLIDRLVVILHHVLSSPPSPPPPSPPPPSRPPRSRPSLVSIDRTQPTPIPLLIICSHPPVPTPTSYQSICTSPARNPSTPLNPLLLHPLTPSNHTPNTPHPLTAFTG

SEQ ID NO: 967771 - protein, 268 aa, Homo sapiens
MPDESVKKEREPPAGGIRSYRYLKQLHFTKGDKTATSGAHRAASSDEHAANESNREEGKLKKQRTKNKAKKKIKRTNTRPSNAQNTRQKNNTSTQQTHNDKENEQRDTYSQHAHTNTMSTKYRTKESKEEEEYSNKKSKARHGPQNRQQHTHKTQNNKMSQEGQPKTATTRNNTRQHNKPNHARESQQQQTEQEGKDEEARNTEMTSTRPPNGRDEKSTEKDDRQQEKQREEEERQIDDKETDKKRTTRKDEDKDQEEEKRQKQKRRE

SEQ ID NO: 967772 - protein, 99 aa, Homo sapiens
PTRRQQRILGEESGAPSPSPQIRHGVVLVDEEVWGLPEEIEELRVPLLLLPQGEETLLARRRSGDVAACGGRRMRVFWYEEFRCLAWGPVVPAILTPRP

SEQ ID NO: 967773 - protein, 147 aa, Homo sapiens
KASSLHNPQSTAYLFEESSHRSAFRSLSSNIPCIGQGILTHHGILAFCSHHRCNSKHPYTEPTHRGIYDLVVHAVVTKHQGSCNDAIQMHYVSGNDLLPLYLDTIPLTFHGSRVKVIFDIMIKSFANYYETQATIYWLADLEPSATT

SEQ ID NO: 967774 - protein, 192 aa, Homo sapiens
TRGSIDCKGAIHLYAGINSSSCSRRGGNDYSENCFKANRQLYTHFTHNERLCDVKLSAREAAAGQVWWLTPVIPALLERPKQDDHLSPGVQHQLGQHKKTGDLWRFRVMMNISRGHKRSNARLEITRIIVERLRREPRTHIEGTNGGIGTMKPKCDTWRTLLIPNPWGKTRVKSNQIPQHKHKESAWRDGRK

SEQ ID NO: 967775 - protein, 318 aa, Homo sapiens
MGFEAAGGIKEGQEGERGGGREERGPEREGRAEWAREGGRDRRGERRVGAERGERGEGDAARRSTRKGRAAGGDKRGREREERTSVRSAWQANKPGRERDEEGGRRQPWRTQRARHPFQERKKKLGHTEQRRTEQQADDKTQRLISSRASYQTETTYMRTEERQKMREAGTKRNRPCEGGSRRAQTQGEEQHNDPRHKGEHEQQGREKEERGHTTRGGAKAPDRAGAHGGEENDDEKAEESRRAQNDRALNARADGGDGRGGDENDDSDGRRGKAEKRRPAGHARRRGEDEGERERDKKHARRRTQSRTDQRRERAEA

SEQ ID NO: 967776 - protein, 322 aa, Homo sapiens
MHWGRRPCMPCHGAPSRSLAPSCAVLSKPPRCICTISSYAARSFIFNQQKALENSEELDDFSPFFKIIDSPSAPRHLSPYLTLCFAHLDFLEKGVGGDPIGRPPLEKCLTFYFNSQFIHERNKNRLIHRLNETTPGPSHHGRDSPVPLHRLGRVPGLDPRGLHLGCASGDNNGLLGPARGHPEALHGHPCLAKQNPPGANVGLGETEKEMSARESLDKQGPSIRRTIPPLITNSDSTPYTRQHQSKERNNIKHIYKECYHQKEQTRGKHTQPQHERRPHEPMPTQSHHPQCATKTNNLVRDTQQRSGNTTHNQQDVAPTDGT

SEQ ID NO: 967777 - protein, 182 aa, Homo sapiens
RSLRAGKRRHTAGKFQIVRPNSAHCDSRTIAFPWGPLQQIRILKRTHLSNGVVSQPHTPSHAWCHRFQIKSLTQREAEDAEARKRILGSRLGPEEEQDEYPVLDRGQGRDLRNREDSRQPNNVTQTAFGGPAWVSRVQTAHINAAQEHRCRRSAAVTGSWVVLAPGCAAVVDMLALDAEGTT

SEQ ID NO: 967778 - protein, 322 aa, Homo sapiens
FAAELRGSASTQIGPRSPRHRPTPRRPSSCAIPEAGSSSIPRARHTPRRPGAGKAKCERPRTTSASLLSRPPEPPLTHLHTTGPFLMGSTADSPTNNHSAFPPLMTHHPPPTTASSRQPRHTNHPPPRHDAHSGHHTLSHRLRALSPRALRPSTPPPCPTPPTNPTPTASPSPPTRPYPPLEPATPRFKLRTASPSTPSPPPRHPPPHTLPPTRHNSTSSPHPPTPLLPPLHTPPHPYNPSPPPRHPPPLTPPPPLTLFPPTPPPPPPPTLRHPPPPPPSPPHHNTPSPPTPPSRPHFSPILPPPTGPPAQPPPLYPPPPPP

SEQ ID NO: 967779 - protein, 108 aa, Homo sapiens
MPGYYIVNTEIRVVCQVRSKPNGLNTILLNDNKTLKLRITAGLQTTHGIDTKPTWATSTVHKILQQPDEHNTSQRTKKNQLAQGIHIHPATSTSTQIKRTHICLRSFP

SEQ ID NO: 967780 - protein, 193 aa, Homo sapiens
REKGRCPQMLSAVVGRAPDNAGVRAVVSSVGSYEEHADGPWGRRKGWRRTPVMGPDREPHAYMSLVLALSWLPPSIPSHRGRGSPGLADGAPALDMNPHGSCVAVGGIFTCRDPGLIAAVSQSPLRGRSGQGSGPDGGSWTLPLSRHGPSRSPCILPSRRLLSARVLRMPASRLHRAIALSPEQALPLDLHRV

SEQ ID NO: 967781 - protein, 106 aa, Homo sapiens
MAPRANTMPLTVRLELVDIPRGASTRGRILRNSRQQGFVCSIQTSVVNFLDQKVLLRRDFLRGPEGEIRPYTASIGDAKPSAYRGPLTGNSSENTIPESQVQTLGQ

SEQ ID NO: 967782 - protein, 112 aa, Homo sapiens
MLTIPLATQGQPSVSQNIQHAQQQEVQSSSRCPGRCQALYYQAVLQELRVSHSHENSTKPFMGESDPHEPDPSRKGFTSNTEDQHFHMQIKDGRSTPNLNMIHSCYIKHDYA

SEQ ID NO: 967783 - protein, 114 aa, Homo sapiens
  misc_feature (105)..(105): Xaa can be any naturally occurring amino acid
LGPHKNVYLDDNKTIQLVLDSTHKEQRECEKFVLQCATLEKTRLFYVVTHLLLFSIKYKCSTKIYLNYIVNISYHVEQTRMCSNIARHKSVPLHILQHHCGTFVXAPTCIPPIA

SEQ ID NO: 967784 - protein, 241 aa, Homo sapiens
VERAGPAVEWNVMASSSDSEDDSFWLLDQEDTVLEGTMDQDEAAPPSIGRLRRLDIIGPCRTLPARGYGVYPVLSLTSLRNTKLRPLSSKQWYRLINGVAHQCNHGNMTVLSSDGNIHMATAVPILYPGTPITSALSRHTCMLYLMHIKSYVTVQRHALLAAKTDGTGYLTHRHILKTSDTYSEHSQWNPDPDGRYKSANTRSTHSPLTAQLLGAERPRGDMGELAGLRALDLRASARYVA

SEQ ID NO: 967785 - protein, 168 aa, Homo sapiens
MHAGGAQGAARRVGVHTAEPRKDHVVERYYQCLRCNGCIVAVHSRKHHKSVQLEAKRLTHTYTETANDIAMDHSRQHKSTSMSVDTRTTLVSRHEQSVPGHTIVQAQSRYASSRLHRRHEITRRWSSTSMRAEPGDVRECADYAGWQYRYLSAANHESTQYVVHDQLS

SEQ ID NO: 967786 - protein, 309 aa, Homo sapiens
DAGSYLRLATVRASGPQTSKGPSQWLGKPLTTRSPIPSSPVLLYAHTTSSLDGFRSPASSVPLLSLLQKSRFRPRPVSCVQLPHPQQYLRWLLERLHMSSKLLQSKASRELGLGSYTPVPTDPESTGNLCVSIWAYLACGGHRCVYSLCPLPDSSSHRERASERQPGSTITLPEIQTVHQVESERPSQQETHIRSYYKGLPRTMGTSTTTKPLASNPNYTPHHSSLVTPRPPKPSSTHFLTLALDPPTPAPKAIHMLYPKPGTKPAPALQAKAITTNSHRANPNITITAAYYTALRSPNMASTNVIALT

SEQ ID NO: 967787 - protein, 139 aa, Homo sapiens
MSARTLIPDMERTERDTDKRKKRSPKPHYFTTQRAEAAHALRITQRNSIASNRSQITGPTEPHGNSISQLAESSHTAGAQSNRERGESTKTHDPPQYPVTREAKTSQNITQNNGNAIEHGLLQTTPTIEPTTLEREHEE

SEQ ID NO: 967788 - protein, 69 aa, Homo sapiens
YGSRAYTSYAEGTVILLPARTPSDDPRHRAKGYGIEASRLSGASKRRSMDEFGEYGIVVDAVDLLSLDC

SEQ ID NO: 967789 - protein, 107 aa, Homo sapiens
MGALATPLPTCDTFNTPRALLVALHPAPTHSTLSYLLRRTVLHLLHSTPLTIQLPPTLTRLYLRNTTHCCSLLHTCNIPHLLLPYATTNTTQQKDFEHLHFSKAPLP

SEQ ID NO: 967790 - protein, 369 aa, Homo sapiens
EQEVGTSEGKPISSLDAFPTQEGTLSPDEPGQTTQIAAGSVYAMYKSMNSTLKSISEMKKDGNKEFKMAAKNEVFSWLALMEEYEYTLHSDEFQSHSESSSSESDDECDVIEYPLEEEEEEEDEDTRGMAEGRHAVNTEEFEVCQGWKMKCRFKNVNAETVAIRERYELSDRDEICMQLTELILKVTPKLRAAKIMRYWSETSSSTSGIRVSSQKSASSHGGENYISWLMKANIPNVLRLVISFAEGEEKRLPYSGSIELEMVSWRYTARVKREYQTQKTNPSTMRDHQVRSTHQDRAAAHTPPSDQLPTQVTAQRNNNERKAVTDKSDQREYKAERTDVRTEAEIAETDKGNHTALHARACCMLCRAV

SEQ ID NO: 967791 - protein, 104 aa, Homo sapiens
MLTEIQEKWRDSRRWQLSVALTDATRTGDGPWGRTYRRVSQGDDAVEGSAESFQRVAAWTRNELRFRWTSGKAVESPEQDSDQEVVTKVTMMHENKEARSWSFM

SEQ ID NO: 967792 - protein, 75 aa, Homo sapiens
SGLGWEQSDPGAVVRNTLFPAQSSNHYVRRTCMEPLSTILRSHRRPDDQPQQCLNPTRYRAKDSSEVDLARYQCP

SEQ ID NO: 967793 - protein, 233 aa, Homo sapiens
MIKPFRNTKRRNLNEMIQQIKETGANLAICQWGFDDEANHLLLQNNLPAVRWVREDLNLELIAIANRRADSSPGSQSSQPEKLGFSWSRTGSISFGTTKDTMLVIEQLYRTPELYPLLIRGRDLRTDSLTTATRSLHDALCVIRNLIRDNRVGVMEEGLAWRYPDSPCQLAKRRNKLPQLRTVIAMRAYAAAPAGHPQGLSEEQSAIKSPSKNYDRNPKPDRSRTITADLEID

SEQ ID NO: 967794 - protein, 217 aa, Homo sapiens
MAIFPIEKWPHLGEPARQKGDHQSNYIWEQSPPRQGKGYPREGQATPGRRHTNRYAHRSSMRTHKGEVVTNMQLDGEESTRERGGGHQEKPVGTIRMEDEKRGTTSTREGTKWRQEKPLGEAPRFWEHAPEDETYRGPGTTDQTVIGGPQTQYGTPALVIVARNERHYEQQQTAHKRKKESIRYNEIRGENYNDRGTTERRNRYERQVELKKEQELS

SEQ ID NO: 967795 - protein, 280 aa, Homo sapiens
GRKRFGFIGNYLKRVPRGRGRGGSRGIKVETLLWSWRLFWEKKQKHKFLSVSRPRQSSKGPRPGVCRALARFSLVSLSWCLSLSLSCLCLVTLLSHSSWALFSPLSLRARRPPRYRGWAGARSGGLTGAWGVIRGKGEDHPPGPREAGGARGRLRPRARAGGVPGSRDRQEGAQKLLKIFTLPCPVHLLARACKLAGLEPSPGPRAAVGAQVEAVLLSVLVRNQAGHSGTNTQSPIDAGQGVSPCGTGKRTRNLSVPTRGCEPKTFKVTCFRAQPERDQH

SEQ ID NO: 967796 - protein, 253 aa, Homo sapiens
VPYRSHAVILRSPQPCGTSKSNLNLFLFPVLHYALLSHRVTEQHYIQLTLATSTSAGIAANRLLANMLDTLHSLDTGLPHGQPGLRHRAFAQRAQQLQTRQHTVGDKRLWKILLHEHLAIDTWPFRPTHHAWPRNTNGTNYSGTPAPQQDWFPTTALRHQLAGAHLWLIGAHPGPVQKALQPPYGSQLPISKGRNHAPEPLEISRPTLSSRPQFNEHPLKHAPYPAYAQHPSSRTTASHNRTQTNLAPLYGDG

SEQ ID NO: 967797 - protein, 278 aa, Homo sapiens
MPSSGHARAVYHDDACNYFKRKRILITPKKDKTSNMINVAYNNTAHMHSATQNDLTTSIKYDESKQTLTQDAKTTQNNDTTAPGTTPHRRNRQRINETQTQTHQRSTTTNQRRGQQEPTETGTERRQTRAPNTHQAERTTHTRNKSTEAHAHTDQATTTANKDREMKQGNEVSLFHPRQVGRREGRTARSGQRSTMNEPQAERNKRKQTNTRPQEEEDKRKKQNAADKKQQREEKTTGHHDTARRHGAHRRRAAINQPATPRKRRHTSLSCEEKERQE

SEQ ID NO: 967798 - protein, 49 aa, Homo sapiens
MAVTIVEAFKYMWKCEVKAVFNSRDDKKSMVINRKRKLVSKEERNEVEV

SEQ ID NO: 967799 - protein, 335 aa, Homo sapiens
MAGLYSLESEAYFSDQGGRKYMEDVTTNRSGARTDRLKKSPRRARVAVPQPVCLRRHVARPTYPGRRSTRGKGPDGGKTREATRTLYHGPPRALHTAPKPDSCPPTETSRWTLLHRPVMTNGATGRSEKGAHQNGAHGDATMLRGSTYKTSSKRQYTNEPDPGPTGSGGLHHPANGLTSAWTPLPLRQRHGRTWPKNMTGFTLATSGHQWPREGPHQTAANNPSTTAHGTEHPRRGQGQPTKTRTHSTARNSRRTRQAQTQTPPGRETSGTAGRRASEDTEGGPAQQQRPRRPPAPTKAAQRGTRATRQESATRAARHTGKDTRAATTRDHKGQP

SEQ ID NO: 967800 - protein, 248 aa, Homo sapiens
PGQAENKEHSREDHKACELKLGACTGHLLRAVTTRRGHTGAYGDGSSPLDSHQDPRPNPVTIDHHPRYPTNLYILYHTHGTTRLENPYTSPRSITARCGPPGIIIYPHSHPYTSPLQSQYAEAHNIIGYIAPISPYSQWGHTTFALTNLTHFPSIPQDRGMRGATLLNTGTATQHRFQAAHGAPHGHRRRDNPNASATEFPGRRPRAAPKDPIRPPHWLNRELAKWDPKRENASDWAKILDCTPTNVS

SEQ ID NO: 967801 - protein, 73 aa, Homo sapiens
DRCRRKHTPEEDQNGKGKDSYQTLSVIGHVEFGGKAPTEPYWVTEFVASHNMTAEEIRTNIEAIEEDLEKEVW

SEQ ID NO: 967802 - protein, 96 aa, Homo sapiens
  misc_feature (96)..(96): Xaa can be any naturally occurring amino acid
GINTWQFNFKFNLTEDMYSQDSIDLLANSGLQFQKHEEEGIDTLHFAELLMTSGVVLCDNVKWLSFHSGYDFGYMVKLLTDSRLPEEEHEFFHILX

SEQ ID NO: 967803 - protein, 70 aa, Homo sapiens
EDTTLNYGKVSQTVCNCLPIAAIVEGEDILLFMDGYITRSSDLCEQLFGEIMRTNMMYQNQWSSLRSFVV

SEQ ID NO: 967804 - protein, 74 aa, Homo sapiens
MDCEIGVQSRASMEASDVFDARMKRLIRREFSSWAKVEQGLYRKLRDWIDINESVEQEKACCDYFKEYVLVEMI

SEQ ID NO: 967805 - protein, 423 aa, Homo sapiens
  misc_feature (92)..(92): Xaa can be any naturally occurring amino acid
  misc_feature (121)..(121): Xaa can be any naturally occurring amino acid
  misc_feature (254)..(254): Xaa can be any naturally occurring amino acid
SCSQCYGREREECTMCARPLAHAWARIGNSCTGSSCRMRLRWASVSLLVGAPTGVRARRLGLVILPTHTEGFVLTSRFAHRGYRRMQVRTSXPEDDLEQDEKRVSICTEIETHGTPKHCDXMCCPFHELDDSVNAFRESTFTQVYTYMSNMHENYAIRVNPPEDKIHFIHQSSLGRKLISRIVPYLETLVCPHFIRLSGMEICLRLDVDIFYLGPQGKENSSFLGGKSPLKRKEVNAFGGGTFVPLKVRSLVWXMNSKVGLGNWLSQGAYSHISSGHPFGISVIVMGSHIRTSFGLDWRKSGSPKKSIGKNRTTERIGGIGFFRNLLEGVTSIYRKSNPLRLGTTILLGRGLPQWGFNSGDEIGWPTKQGTRIERTFVANSDPKRILFSNRDMGEGPRTRLRIIGTGKSTALVDKNEIADGLI

SEQ ID NO: 967806 - protein, 176 aa, Homo sapiens
MRHSLDALTKLGYRYAFGLSMRTFHVDVAPWSIGAKPDHVTTPLAINRGARTTSADAEVPILNPPNYTDNSHLLCQPRDSTLYGVLLQPKVTLQKPVVYVFARTHQLHEFAAPAVIGPPIGSLFACTGHLELALTWNQGPCVAALVLGSGLLILPRCARASSRHFRHSGLTRWWTA

SEQ ID NO: 967807 - protein, 144 aa, Homo sapiens
NTPILRSSYAELNSGGRRQALMCTINSVSTIRRVRITERRVFCVDPSLYLRGRGAFQSEISSVLEETRVSVRECLRDGSHQSEPRQRCAAWNTEYLANSPPIYSHTSWCSCSGHKRVLYSNASKMPHSDTYALFSSYTYLIVSI

SEQ ID NO: 967808 - protein, 163 aa, Homo sapiens
LQPRVPMLAEMDPTMLVRMWVMACILCSNAVSCCAIQMLHSITADRIYHVTFDLYDRHCTEVTAHYSLELDTGQGHTRVRLTDPSYAHRYNQHTETPTHPAPPASQRQAGAAGARGADQGGRRQEEGREDNREPGAAARKTTRRGASAAKRQRRDRRPTATPA

SEQ ID NO: 967809 - protein, 157 aa, Homo sapiens
MSGAPVASSILVFESHSYPLSFHCVCEILQWVENPGGVHSLSIISTRFLEAGVVSVNSVYFTPMRVTTLPAFITLLGRNSRFPLGPQRESHSAFGPHKTHTRGAPRYHQGTLPPLLDRATKTQQITTRQNPAPPARTNLLCVSTHTPANPSTPGISN

SEQ ID NO: 967810 - protein, 204 aa, Homo sapiens
MAHSDSQTAFIASNHRTLRAGHYRYAHSPTTASSLSARIWRFLLRSVQTAPLASPTSNKSHRFPEFEPTPQYQAAQYHPNNKQQQQQHYGTASLISHNPQGSGCQHSPPQHWWPVRLKQAPPTQREHHHEISTRKYNRHTWRQSGGDCAYTMVVTAAKPPLRTFVTSLKEAPQHSRTTEANRRTRANKDDKTHTYHTNKQPLTR

SEQ ID NO: 967811 - protein, 268 aa, Homo sapiens
MDNTLICCDFLSTVVSHQKATTMYLGDYVDRGHSSPLETICLFTGLHKSKYPADFSYFIQRDTMNVPSITQPHFMAFSCMHMLTHSTASPTFTTHGTNSSTALLLHTCFTSISQHIRGMQHASFQLVHGSVLIHPSIFHIIMRSQHIRRNLIAHPTCMSPSIQGPPTARTPTKTRPAHPAITQHAPSRPRRLQHMHQQAVTPLNNMGCQQKWDSQQIKSQEKPLDLHGPLHTSTCYEGPHVKGLRSGPALGTPRPYRTGTRRTSTGRG

SEQ ID NO: 967812 - protein, 55 aa, Homo sapiens
ELQRPFQACLKVEKFGDLILKATEPQMVLFNLYDDWLKTISSYTAFSRLILILRA

SEQ ID NO: 967813 - protein, 171 aa, Homo sapiens
MGSSKAFSASQHAQTPFQQRFDARQEDVASQYARLKLGVKDARAEASCRTGCRISNSKGMLQDAREMLNSSHSSRPRVPQKTPDRYADAREKISFDTRSSPAAFIKRTHWDSDPLTLKLTKTIQVPQTESHGNTSYPYCRNEINVVNNHQAKPESIMTWMTMTMVIASVPY

SEQ ID NO: 967814 - protein, 409 aa, Homo sapiens
LRYWSQAYTPATMSTGPAAGIDLGTTILLCGCFPARTKSRYIANDQGPPNHSTPMLAFTDTERLIACCRKESSQQLNPTNTALRLTNRSDWTPTQTTAARSRSDYCNTCTLLMRRRTLHCWPRAPRLQTLPTTNGHQHPHNAYHIPPRTAALPPWLSSHHRTRRRNTRQAPPYPPRHRRAHRKCHVRPTPRQATDPHAAPPPEPPAQYPPGIPEHPTLHGLNNRPLSNLTTQTQNCPPGPQPYAAKEQQRPRPTKDTAPPQPDTEHRCATLRSRTTLPTNWSDCATHPTQRIKGAQHNNRPHHSHHPPRQHDHNKRHSFTPLIAPGVSAQPGGGHTPQDCCVTHKQVQRLRSRGRKAAHHLDAAQTDLEPDAAETDTSDTRRSATATTVQAARRHSNPQGQRCRKQENA

SEQ ID NO: 967815 - protein, 161 aa, Homo sapiens
  misc_feature (54)..(54): Xaa can be any naturally occurring amino acid
  misc_feature (152)..(152): Xaa can be any naturally occurring amino acid
MATLSRSPAIASLQVNRIITVAGSHKLVTGSKEANKPTHSEALIDSAHSNTIQXPRDTVGCDKKDIEGRRMERTNETTRKWINDMQPRKSHENRHIGRSRRQALLACHACLGTHSMLTLLLRHYAKHARLDSTLCEHGRRSPWSVEAAKYAXDLDMCRTWN

SEQ ID NO: 967816 - protein, 40 aa, Homo sapiens
VLAACDAARAGLAGAAVEDAAAGVAARCRVLFSVENLERL

SEQ ID NO: 967817 - protein, 201 aa, Homo sapiens
  misc_feature (13)..(13): Xaa can be any naturally occurring amino acid
MTSCAFEQGTTEXLTTFKYTVYTGEQVILLLTGLSGCSSDIRQKLVIREHSRDVEAPLSSVLVYYGALAKRFGDCYVMVFTGSSFTEHSGSGRYLKQGYVSHERVLQEHNPGSGTLSPQTGPTTQRLCSPGKTFRPGEPPDKVASPPRHHTSSGNRGVNRNQRAPKKSPKPRRTQYSSSHCGAQPRTNNTAKKTEHHEARN

SEQ ID NO: 967818 - protein, 204 aa, Homo sapiens
MPSHSSLGDRPRLGLPPKRNHLTVTCEKRATSEVGWATKTCTFNHMCKPILATNLCLIYCQKLALAAVTVEPATDKTASQPKTWYYAYWSWHNSIANDMSRSCCSPHLSNPTYVLKPDNVERLLSDYTIPVHANILKRPPLNTLVRHTGHTGAARESRGRQTEQPTTLETTHTGQIPPRPQPKPAGHQADPGPPQPKLNDSEPQ

SEQ ID NO: 967819 - protein, 119 aa, Homo sapiens
QNLLLHTDVSYNMFLEIRTMRVHLERYGRGFGVPLSDNEDSGTYDETMKRAKSLMDQYFGPNVLLDVKYGIASTVIQYSCLQGYLWRVATNDQLVFRRKASSLDKWIQRRSIQILLKMQ

SEQ ID NO: 967820 - protein, 337 aa, Homo sapiens
QAPGRYSIGGGMETMQSAADAAWCGHQLGGAPLRDLLWPGVTGCACVCHLATTVAGAASRAHKRIHKASCHMTQGSSGHADRGGGAEHAVHTANGERRREAREETGPHSQRSREHTPKGRETTRTRSESYRERNPDRTTNDERKRRRQQNKSDTDPSAASRRARRNEQQNTGDRGSPQLTEHHEGTENEHGDRSSNEQSAAGTQPATGRPRPNEGHTADRDEKRQRQRTGAQTTGQEPQHANGAPARAPASRRQRNAAEGQHTRRKERGDEKREKRDRRKREQATSTADDREKKRRTGERTRRKRRGEEAEPREEKQGKTEGRERPHAGAKGRADAA

SEQ ID NO: 967821 - protein, 126 aa, Homo sapiens
MVVFGGPLSDGCRGGGGAACVSLGYVMVTRMRRTVSDGGKGPSTSLCGIPGIERAKREETAGAELRTVFIGSHCPTFRPLTPCGVWRSVPWSPRVTKICDVGPLYIEDLSLCRSERIHRISVSRVY

SEQ ID NO: 967822 - protein, 94 aa, Homo sapiens
KLTIAMSQEFPLGIELLLNVLEVVAPFKHFNKLREFVQMKLPPGLPVKLDIPVFPTITATVTFQEFRYDEFDRLHLYYYLMTTRKTQAVFLIFN

SEQ ID NO: 967823 - protein, 284 aa, Homo sapiens
GSEADGKRYGPWTSVEHGGTWRQAGGCVESQTEELSMRVFVLSACRVYTEIAQSDDRRSDGLLRMHGARAVASRRTPRRQCIGSGRIGATSDSIRDYKNGSVDGLQEEMKQPVNTTQSSTPRETKGEPERCPGTEINTRAVCKIGADGTHSGGPEGNKLWPDTNSGNDVDCRGPGHEHGESRVPRKIRTDKHGAHEFVIPIEGPTRDFREVPVGVYDPPKYALTKMGRLIVLLGNPKKRMGGLGGNVHVDGLHHIGTAHIASSGCHSEPRSTLRTDDLTRGNKS

SEQ ID NO: 967824 - protein, 339 aa, Homo sapiens
REHIKVQQLMDKGSDKRRGGPPGTIPSAVDFPYVDDGGWTTDDPISKGSRPIETSRLTKITKPGIHRFYNQLSAPGGRLSWGKGSSGRLQEPSPPARQHPAQLLAQLLVTFHIAISRPFNQAVTHSTSHSINSTCGCRGSQLEPQHEAQQAGAPAGRPDSETRVHTAARGAPTSGTRLCIRSQPSTPELTTSRASLSAKGNSATVTPRTVAETGLHPQSRDTETGSTRHRIRPSPRSASSKPVSSGEIARAQAERTHAHYTPPVTHTSEKAGHTSGTEGTNQRKKSPTRPQSNEDTRETQPTERDNKGRAHRDATELHPTPPTRYHTTNRQRHATTPDR

SEQ ID NO: 967825 - protein, 168 aa, Homo sapiens
  misc_feature (20)..(20): Xaa can be any naturally occurring amino acid
  misc_feature (67)..(67): Xaa can be any naturally occurring amino acid
  misc_feature (87)..(87): Xaa can be any naturally occurring amino acid
  misc_feature (93)..(93): Xaa can be any naturally occurring amino acid
  misc_feature (95)..(95): Xaa can be any naturally occurring amino acid
  misc_feature (109)..(109): Xaa can be any naturally occurring amino acid
  misc_feature (112)..(112): Xaa can be any naturally occurring amino acid
RKLQKEQQRSKDLESRQRSXRSQANRSLQLQKFKELELQAQIHGLPVPPTPGCFPWPRLRLLTASSXEQLDIEEEGRPGAATFHVGXGTLPRXAXPSCKPAWQRALRCXFVXTCTFPSDHLGDLGDPFHLGLEDHLVEFGKEEEGVVGGLSGGALSPLRGLPIPKNPL

SEQ ID NO: 967826 - protein, 170 aa, Homo sapiens
MEDLERGASKKSKSTGNVVEKISCHISTISPEEHSSFNQMVVRTYFRMFWAFLAGTSLVKRSTHRTTKPRKIHKPDHLSASAMPRNKAVTHDTFGALRNRPLDTHTARTRTKPQKERTGPCGRTRTRQASGVATERSRTKASKHHARYRGRPTQEYMRSDERHNMLTDHK

SEQ ID NO: 967827 - protein, 225 aa, Homo sapiens
LSVIGCDRRGQSMSLWEDSVLRPYATMTRRISLRSGSSGLTTGKIAGARPVCLWVEVLVALSYSAKLGFPFSGKVYAENHRLIFMTKLSRGWFLVPAAYILFHMPPAPLRLQCGSTKTSLVYQKNEQNLQRLPHNSKIAMRENSSFSEQQVIPCRSQALRFRPEDLVSRNRITLNLVTENPKLRLSRRSVLIYYKGASTEEVESRCHRTSRQLNWVLARAKKPGK

SEQ ID NO: 967828 - protein, 143 aa, Homo sapiens
MHVPPRTETQATLGTVHSTITPEAHHRLHTSQHLYNPWSPAQRANHRPRTSTTYDAHTDVRQPGQTGQRLDNTSNTHNRRLTRTTAAQQHNRQQTRKAPNTTPRRPHQQKPRNAATPPNNQTRHANPRHHPAHSHTELNNNRN

SEQ ID NO: 967829 - protein, 74 aa, Homo sapiens
MLYITDEVNDPSLTIKFKLWGPNAKVGTETYEYTDYGGLIFNSYILPPLFLEPGDLRLLDVDNRVVLPIEAPIR

SEQ ID NO: 967830 - protein, 178 aa, Homo sapiens
MSPVERPPFDYILDWRPPIGGTAACRSARVGGVERHAGLHGWEMVGIGGATPPKRGAASLAERHERTGCTRSVRVLTSVTGSGGESPEIALTAKWVGHVPWTWRGAEANKPGVVATTDVRPYSGPTSFQGDRGTQYHTGDDRSGYLRSTITYARDTMAKGLRSVLTYVSVPGEVTLPS

SEQ ID NO: 967831 - protein, 288 aa, Homo sapiens
  misc_feature (80)..(80): Xaa can be any naturally occurring amino acid
  misc_feature (113)..(113): Xaa can be any naturally occurring amino acid
  misc_feature (188)..(188): Xaa can be any naturally occurring amino acid
MCPQRKRFHREGLFSPQASLTWWEVESKRTHCVFTCVGLEEVATTRPHQRVVQITPQRECHTECARQCGENATPRGSPNXPAAGRWPPACVCRTTECVRRLKTSVVPSGVETXQHSHHHTQSGGETPRERHFYSLFHPSVKSLSESVSQQGPHISESYHEGREAPVVERHKSPRDEERAPVCSLFCGXGSLAIDFSPGERKGPPRRGAPRISLPSSKKDEGGGLYKRRRGRHKNGRGGYSPMIRVKRPGVLHTRGGFPQRRGKPLQYPTCVCAPNPVCFSPPRRRDLY

SEQ ID NO: 967832 - protein, 132 aa, Homo sapiens
  misc_feature (51)..(51): Xaa can be any naturally occurring amino acid
  misc_feature (55)..(55): Xaa can be any naturally occurring amino acid
MVSSARISLQTRIRISEPNAKVNEDIKVDHTSSESKAHSQIPSTRQGETHXDVPXPTRDIVKGRYRGGFYIRLSRFYYRTQGSVLLVPVLNILKECWSTAAAALPQVSITRVDVDSSGATGGIVPRKTGDIS

SEQ ID NO: 967833 - protein, 106 aa, Homo sapiens
WQEQAPYERREKGAQKKVVDPIFSRTIGPDVKAPALCSHIKTHIGQDARHQDPKGNPKLRSDGLQGSVCLTVGVLGLIFGATACKVLPFPRQFPACISLARIVPHG

SEQ ID NO: 967834 - protein, 359 aa, Homo sapiens
MTYYLTFQGTRELSLHRGGAEDTQAMPVAHLHPSLYQDKMEEVEAYACSQRPCKRWRDSLEVHERKVTLYLLDSLSISRDYNLNDILLQLGTGGTPSLSQMAELCQGSAVGQVTLASLPGWVHKADDYDVVTRRATESNLLPAAVKDQPPCCISVRQGPLVRFNQGTSMMSACPQQTPTNICFSEQSHQSHRSLELAIKHGEALGSGPCGCQLDCLASLRPRPGPVAPSGHGHVQPLPAYTWPRDPHSPCGMPSLKFPARAPLGNLVQTQHATGTRSSTAIHARRRVTHHPTARAPHSRPQGDAKIRPPTTHYSGPRKGPTRTRAPNTRSEHSAHIHNPSSNDSTHNTAQYRPDHTRTT

SEQ ID NO: 967835 - protein, 434 aa, Homo sapiens
IFSEEPHWSKTITPCSVEPSVIIHCRMSKAERFYMTKAGYPSLDRAAIVTHLPRRTVVDGWLDTHLSSTDITDKSSIPCHPECLQPCCGWTFIDALRLRRSIAPSIILTDDNDDSAATTLRHASHVHRLGDLLIVCPQRTNAAVVTPNHTMQVPDEGMAQNVRRLGILYTLAHRPRLFACLARFAPGCVPLGQDPTKYSSLFALLQLAPRPGQRKTTIHIDNKKGCGPRLLHEFNYVLRSAARPPGDSHRRVLTPPRLSSACALTNRDRSSTHHYRSLNRSPSFPLHPPDVNPAQAPRDAVLTRTHRAYAPATLWAHNIRLAPHPLCSASPIPADKPADQPPPGPCRALLEPLYPLQPAILHPYPNTHLPNRASYAWHPFITKAFTRAATQPRAPPQAPRQTIPAPGPTNNAPAHTPPRALPQPTSLSPTHPLS

SEQ ID NO: 967836 - protein, 295 aa, Homo sapiens
MALSFALCCCMCYPLAVLTTFVKPREHTTDSDGQENGHTDIRACAEMDLARMVHWFLGMRLRTSLGQEGRSNEDFKGTYDSEDDNVAHGIVNTNKLSRDGLVGFATRDTIRMVAGFVPVLPMNPSRVSWAEALFLLRSTMVTGWPPVSQAPKVSFLFGRRPFGIVIKGPGNFNLIPGVLELVFPHRQQKNPLGENPGARKRAQSRSPSTYLVGSSHNASHTVGGSHLRTLPQSGGTHTWLFPSPGMIAFQRGRVYQKHSRRTINGAVFNHATPKHRTILILRRKNNNKAVCVTMV

SEQ ID NO: 967837 - protein, 100 aa, Homo sapiens
MRSAPRRPLAPPPPPGAQGTTHHHPRGGHMTSGAAPPQKTRPPQHTTRQTPPTKPRKKNIPPTTRRSTPASTQHNRRHKRAHTTPQHHSAPPRPRDSPPA

SEQ ID NO: 967838 - protein, 223 aa, Homo sapiens
MSRGGVEPGVISLVLVQNLSVALQHCKFIHLKLPVLRYLLSFDVEAEPSRFRHAFGRGASFMEDRVGPKFLVGIRQTCVPVASLDERDLVDWVEPLRVSTKQARGKSSCYKPLAVHTEVCSGSARACFVELSPRRILFAGARSCRVRGGPFTGASAFQPAKQACPRPPYSFLLRAPECGTVECGSVQARGFATNFSQKPLGFSQNRQQQEPGGWSRRVFGKSS

SEQ ID NO: 967839 - protein, 42 aa, Homo sapiens
MYGDLKGPVWAWTKAPSFGSTRAAYTKASNGTKRPLANSKTV

SEQ ID NO: 967840 - protein, 171 aa, Homo sapiens
MGKMSLCLLVLQVLLCRARYCATLCIKPNLAVELIPNKTASICLVHVELCHVSSILYSESVRVLAELWLYFPEFEVRGTHRSGQDACVNHVSEGRMFVPTNKLAPLAVDRVNSYSHIKRTITGHHSVFLRLCLPYTTLPASGRLSQVVIVERKYPEAYLGSSRDQVEGYEE

SEQ ID NO: 967841 - protein, 348 aa, Homo sapiens
  misc_feature (44)..(44): Xaa can be any naturally occurring amino acid
  misc_feature (119)..(119): Xaa can be any naturally occurring amino acid
  misc_feature (143)..(144): Xaa can be any naturally occurring amino acid
  misc_feature (157)..(157): Xaa can be any naturally occurring amino acid
LWRTSSALRSGLGLLPCRRSAIEVQRFNLSIRSQFPLFPSNSTXSRNNPHRDRALASWCDVSAGPERGRYQTLLGMIVRGSHRLTVHTRRVAAHRRRRAPLSVASTHHGSSHRHGMYAXREIVYGTERCTGCGVALSPRDRNXXPGIDRRARASQRXPRAQEARCERKRGDASQAPVASIRRVYAVHRRSGALGPLALVPWPMDSRPMLTAPLQCVDPQQLAGEAAPWTREPGLGGPGLWWARVVVGLDPWWASRSGLECSLYVFFDLLWYSNWVAPKCVMEASHGQVHLWQEYREEAGEVRKLEDLLGGTPRGGKLLVGLALLGALAVKQALVPELVLAKAPDLVRQ

SEQ ID NO: 967842 - protein, 434 aa, Homo sapiens
AVRRSGGGRMSSGFGRVSGGAVSASPRHSLTLQYTEPQRHTRVIPTATRLSPETTRSRPTPRRATTLPPRRPQSAAALHLYPLSPHTTHLHINTHAQHTHARNPTLTAPHSKLPHTLLYQNTYTLQHLNYNLIHSTLYTHNAHTLTTLTPHTPPHPQPPLTSPANTHNHPNTTPSPTPNTQPPTHTNPTPAPPHHHPTPPPPPPSTHHLTPRPPHYPPHARPLPDQTSTPPPHPSHTPTHTTHPPTPSPTLQTIDPPPNPPSTSPPSPTHNTNTQTTTTPPNRTSPRHTHTTHYTSPSQHQNPHTTSPPHTPPPPPPPLRGPNTPSLPHHTTPLSPHPTHSTTPQPPPPPTPPPLPTTPHNPPPQPHPPPTPNHTPLTTPTLAPAPSTTALHSHTATTTPPTPTTHPTHDQDTPPQPPLLYPHLANTRLPLIIT

SEQ ID NO: 967843 - protein, 115 aa, Homo sapiens
KRYLCSIAKDLECRLSEDVNEEAVHARTSAQSPQKPGVLTHHRSRLSSRYSQKNSITLALHGDTQLEREGTRGLLIIAACYLQPEMLIQHSLLAASDKQRRDNQALDMSSIDNKM

SEQ ID NO: 967844 - protein, 66 aa, Homo sapiens
QAGHVTKVLGQDRFSGYECTQVRVEFMDDTSRIHHPQCKRPRCASWLTLLIPFVEIRAREPRRYSS

SEQ ID NO: 967845 - protein, 169 aa, Homo sapiens
MNINRSYTRCSDYDMKKYRTVLFYRGEPFKENDLLNQEKCPRILLQSLTCTRIGHTKKRIDSCTHTRHSPPESTGLAGRHHAPTAAALLTQEAYLPWGPPPHGSPKKTQLLANIGRIETRIPTTLTPTNTRPNPNIRASVHPQHSRTNPHQTTQTTVHRGTHHTGNPTN

SEQ ID NO: 967846 - protein, 371 aa, Homo sapiens
  misc_feature (299)..(299): Xaa can be any naturally occurring amino acid
MCDVVMYISNTKQPYFRTNIMEHDIYMMKIHAIIKRTDRRLVKSVYNTATRGACKHNDKTTTARIRRTHEQSETGEDTATDKYASHTHHQDTRQKTHDNRTTVNGGYDSEAPNPGSTQTLDPPINQSRPRRTKNSPIHRDSIHTLTPPRMAHDTRRGGTHNRARSNPDIDANPQSGRHTEASPYHERVHEHDTKTPPGKRDNKTENETQLKMTNTRGHIICTATQRTPTAQVDRRGQGTCERLPGSTTDHTTRHDAKQKQHHNIQSRCEIERWRDRLKHRRQTRSTDNPKRTTTQSAQXILSTRRRPAQGGAKHERHRCDAERKDKVHRRSAATLRPTCDTRYEERRDSEQPHSSDDDNTKPQRAPHQYDP

SEQ ID NO: 967847 - protein, 111 aa, Homo sapiens
MRDRPSVMMRRVTVMASLLRPLSHQSSCGHDRRGNTPCLWKIGVADATMQAASTQQCSTLIPSVHECGILDPRGLLPLNSHEEPLCMAVRNSTRRFVAPNVTLLRLKELEF

SEQ ID NO: 967848 - protein, 407 aa, Homo sapiens
EAKFNPRATFSEFAAKHANRFKHSKAIANSMQKHRSTAYGFNAALVARCSRKQQQNSKHSQDPAGAASINIGISLHTIHRQSIHLRQSSHRMAANSNTAPTVAKCIPRSQQPVRIVHPSAAESTIFPTPVTIMQHNISTKQFQHSSNTQQHRQLATGQARPLEAQAIRSNSSTQGRVSDTRTLVSGTHTPTPAHISISSSSSQQQQTRSKASSSSNFKRYFWSDHGYVRSRCVHGLDTRRTLRNRSPLGIWILIGPDDENRAAYLHCHTLNAPYQKTSTEHYSATFWTETSCISFTSTCTEVTHTSLNARTIDGPQKNHHTRSRNKQQRQHGAHTPRKRHIHRHQVTNGQPWTQPAGATQHQKNAKTRPPYTTKFKQTEQAQTRQQRTNESKQKEHQTKPETKQPVT

SEQ ID NO: 967849 - protein, 141 aa, Homo sapiens
  misc_feature (107)..(107): Xaa can be any naturally occurring amino acid
VRSGSRTRLHGIVFNENWQHKPRTWRETRQLRITAKPDRKRTRRTKNTLPTKAAPLTQRRTRTLQTFPNDSLRRHFPYPRSLLRSTPSLACTAWQRNAANPANALRXTAAPPQPCNLLHTPGPTLTPPGTCPPRPPAARSS

SEQ ID NO: 967850 - protein, 140 aa, Homo sapiens
RKNLLLEPSLEAKRQTVLDKYELLTQMKSTFEKKMQRQHELSESCSDKCPSGKIESSCTMKLQASTSAYILPDSTSWRAKHGTSACIFVQSAFNGKQQHTNLPTGQQAAKASRTLQTGASDNATAQFTVLPLISIFPGKP

SEQ ID NO: 967851 - protein, 114 aa, Homo sapiens
GLHDRSCCCSLVGSVPPLRAVTLTAKVCNFTPGASKTTNAPRGMNNSGHTIFKNRNTHRKGCNFILEVSEAKNPSIPYTFWWLLKETVTYHQVVRLLPSSEIFAKWVKNHHQSG

SEQ ID NO: 967852 - protein, 352 aa, Homo sapiens
MRPCGRGRLRRDALTANRERRPAAAGPGLPVRPGRRDGSLRACTPSPSASQCSPGTHVAAAGSLRGANTKSPPDRTADACGTGRQVHFSGLSTPLHTEFYPGENSSQAFSPRLGTPGGTRRMGSLDTPYLGPIRPPRERHPDPRAKTGTDKHTDEKSGGSPPEGRIKRLEITKAPTENTSPLSPLGHPRAQPFPKVDTCERAHMQGHTRSGGTPQPGDTHVWAPRSPQFRVPVGRLYPRPAKALGRANHSSTRTGRPSRGMRPVRRTHPNTPGHCHGQVDSAEERPEQEPRSALPTSERRRTPTPPEGHSSGRTGPPRRDHDARAAQEALQNTARTADRTHKATTTASNTSG

SEQ ID NO: 967853 - protein, 325 aa, Homo sapiens
  misc_feature (86)..(86): Xaa can be any naturally occurring amino acid
MTEIEAIDYMRMEVRRWTCCYSSYLAHVGEPAKGDLPSGEPIKVQVQSPGYYKGSAPWEEGLERNWAGHSGRGLVVAIVGHLPLEXNSETNTLVGWGDLVWNLIPRPLKKEWTLAGAGHCTNWKKRVCILARLALGKLAIGVIERYPGVGGEKRNLPFGETVRVYQQAEETVNWGRNMFRKGWDAYKMSSPRLFSVCPSGGRPPRGPSISAPNLGPRDETPWGKQGVVPAGGAQRECQSTNPRLARGATTLAEGGRHPPGEEKKVGRKGDPQNNTGQRRRRHGSSCAATHNTSRKSNTPWSKSRPVRKESKDKKRRARRGPTHIY

SEQ ID NO: 967854 - protein, 209 aa, Homo sapiens
MSNWPAQCTHGPTRSGRRDPSGVVVRDGPAELSDDASIGIRVGDDQARDCMPGHQIRRVRPTRQLSMTRRHVYSRKTHLASTIAHSTIDHRTEPCQIDPLDTKAFNTPKTDIRDPEAPNRGTEEMPDRDGTEMHKKPTYATPHETEEGPTDTSIELQTPERNKTENTTTHKKHQLNRKEETDETGNHKLHRMNTVNQHIHTKRTPHHKR

SEQ ID NO: 967855 - protein, 246 aa, Homo sapiens
MASIECQCCLRLVHALFISPALKEEDGNTSLSLNPRACGIRLQSRLDDPEMHDDASPDLAEELNAYLGGDHMNSCICDRPTSQANTQHGRFRRSPGEVLYLGYYQSAFDWDDEHSQRSPGSIVLNATKARPMGNGSKCDLVGGPGMVEVGSSVNEGAGFSGDVPSIAVDQPLSALIVADHFDSSGFGLHPVLAGPEQGSAPRANLMIPIPLGHVIYAMVRRYTRHTLLVNTDQTTKINAPESAINW

SEQ ID NO: 967856 - protein, 99 aa, Homo sapiens
MQAGMRKGGLVYTNTSSIGSNQTMDPGRSSWNFVVEDGCMDLAGLSTAARWTIASDKTHNIDNRGLDRKKPEFTGHETNTTPEIINNKAPIEENHIQIK

SEQ ID NO: 967857 - protein, 76 aa, Homo sapiens
  misc_feature (56)..(56): Xaa can be any naturally occurring amino acid
  misc_feature (58)..(58): Xaa can be any naturally occurring amino acid
TSVKSEDEPPALPPKIGTPTRPCPLPPGKRSINKLDSPDPFKLNDPFQPFPGNDSXPXKQQRKKLFPPFLGQKNIL

SEQ ID NO: 967858 - protein, 487 aa, Homo sapiens
  misc_feature (406)..(406): Xaa can be any naturally occurring amino acid
  misc_feature (438)..(438): Xaa can be any naturally occurring amino acid
MNKQRLGQGDRKLHSFVKLLGGTRKRLCRLTSRSVLCAPSIRAMRGTFPISKALANSPDMEKFKCLGQLPDQTEEEAPPSGGELGGHRFQFFGLAKELLMQQAVRVVNRLASAGDTGERANSECANILWLWGKAKTYMRKPHRGRITRYCSWNGKGQCTGYTRRRQNWLFINLTRPQSIKGAKKQVCRLVHESKQGRTRGPKSAGDAIFSNSDRKHSPGCLTLPGRRGPDYRQGQPNMIKQRFEGPKPIPSITEDTFRLKYERNAIGKMPPSRRKRPPTSYMAPNLQHCSVKFRGPAINCDRHKFIHGPQEDEGYIGAHNNVRSRMRMPPWLGTGIFIASLVFAPLITGTDLKYVPLVGRREQRSTPLLSWDKSNRSGGSFATVWPFWHALESLLAYSRAPSLREXLRKSSQKQRESVHHQVVPHNRWTQQPSSFGRXLIIKEESHQRLYAIRRMAVPKIEPAAADWETAHRISWHRLCGSFLLIVN

SEQ ID NO: 967859 - protein, 367 aa, Homo sapiens
RYQQSGAGLGDKALRELGTPPTSHPTAIAPGGDRPRENHGVWQYRLTSEEARSLRECELYVQKHYIQALLKDSIGAVVQLLDLRDPWHSSGKYFEKVGEGRRQNRFRICRTAGTRTDSKGRMQHFSSSSQPSGFTRSAQATQVLSALQVYHGGKMRNPYDRKVIPKDYKDNGRLSQSIEKNDADIPILMIMREVIYRDAMVYESPFIQGETVIQQGDEGDNSMVIDQGKTDVKIKMNGKQSWSTASTPSTNMQQNENTAKEPMPHHQTKVQGGITQKNENHRSRDNGNRSDPSTTNNGHAKTRRKKREEGANKRTEQRHGTRRKRGSGDRARDKRRRTMPRCPARKEDKDRRKGDERRKERKKRNER

SEQ ID NO: 967860 - protein, 299 aa, Homo sapiens
MLSGPPVYAYPDTHRQSPWDPNYLHIPVNCPIPCSSGPTYQRDGTDVHAGQLRAGAPNYYPNSLWCSGTTALLTLETQHPTSSGEVRRFNTANDDLRLLRCGPSTAHVLNERHRGTTSAAENTRRATHDTHAQTIIQQAQAVTNSLRSTLTTGATIQALLDQYMLANLRLRLTPTGRPDPLGAKGQQANTVKASAPCPAPRTHNRHPRSPPIRTHHPPPNTINASKLPQNKSTRTTHRVHQQQSPGQQTTRQAHRKNQTDPTQHTAQDNTQPTPKPMRKRNHANPAQPTPPTRHKTKDE

SEQ ID NO: 967861 - protein, 79 aa, Homo sapiens
MVAQPGMAWSCKLHLHKDWQRALGTRGVNQSVRQDPQTYGPGRRPEGATRIASAPPRLAAPDPRPIDAAANRGSRLTKD

SEQ ID NO: 967862 - protein, 117 aa, Homo sapiens
MQSEEKPFLRKIHASAKIAEVAEANVIPEHREISAAVRDLQEAPPSQQTPENKVTGRRAMRVTELGRSRPAVKAGNGGLSDQRQQDPAKEMGTPQDDGRRHHNCELTRDNTGYATGD

SEQ ID NO: 967863 - protein, 509 aa, Homo sapiens
MRQRPTSAHRAARTRHAHATARALQAPPTPSSRINQRRINTHPRVHIINNGTYNTMQTHHRTTHTPTHTFFTYLNPHTPHKQTMSVRHTHERYTNGYERSPEAQTQHVQRIATGEHPRRLSHIASSIPGKPSTLHQVKVMSWCTLRYGELSGKYSDSALFHSSAEPAHILRLQGVTYESARAHDSGTQITTKVSIHHCPRERNVLQPHEHCTHASRHSVINTTEAQSSSPSRARQSAALESGSDEKGVIDTTDSEVRRGGATNRGQELGFVRDERTAKSSNELNAITPKPNTTRENTHQCSKLETPSTSKGQITCYAMSRDFTQGNPDEEETQVAAHNYATTRTTTATQDADQRTYGDRQGDNPSGDDAGGDICITDSTTAWELQHLSRRKKKPIRQTSKDRNYTNISNVIILTDDRLTRPRRDSVAPRPCVSHDSKHSGTLQPQQAPGVRLHAANNVDYHTSAHPSCLHLLHILINSIHRSMLSAHMLPHTTTSSYLSQPLYVVTTTS

SEQ ID NO: 967864 - protein, 518 aa, Homo sapiens
QTVKSVRKAFNQILSALTRHKMIHTGEKPFQMLKSVAKASYRLFTTLTSSTRDNSQYLERDNAYITVKSCGNSLTGRAPSASLPEHIARRDFMTEREGRYKTAECTPHCHKPSLHWLHQPSRTTPLPQALHDTLSVRGTHETPYKSVEEAVATAPLRPGSSHLPYFEQIRIHLNTLGVQQDPHKTTLLQPDACWRTHDPYYIHDFVQPPFYPSNPSSPLLFPLACARRMAPVAQTWLDTDNTAGPTDAPLLHHARPFHPPAFHHPQPRDPQLQQSRPTLANRTNKPSATTTGGCDEYTDYARTGRSDNSEQTHSTNRVNAGYTVKRKNTLHRPRARKRAHPRPSIAWNETGGDTQSPWQTNQPIHKRSTTHTTNMSYTDARNLGPQQQRTEETRHLGYNNVTVATTDTRQTHHATVAPTKAPTLHYHHTSNPDTTPRQAHPEATGRVQRNTVAHTTYTDAPTQPPPGANQHQDKETETVAEQPNQEPATPAPRSRCLNIPPHNTGEHTTQTQRRKLRD

SEQ ID NO: 967865 - protein, 373 aa, Homo sapiens
WGLSQGGGWSGEVGGVLGLRRASWMRLRLVLELWLVAACEEAASGLAGVLVPVTERPEVAGQRLPVCVTPDGAGVVLVRRHALTPSRQSSTENSGEAPGVALGSVTQPLKQRDESHKWKKRLSYDRWTTTACNAGHEFLGYSTSCLNGRKRDLGCLEVLCLHMLLRAIDHELAQSNSLMVQSITLANMVHLQECYDELGNRYQLPVYCLAPAINMIEAKEDIETLDIPEPAPILDLIVQLRLRLSTGKDLELVVRRTDTVFTIDETVALHATDEPGRQGDKLEETLRDQRQFENLGSQGELADKGTRQQHQCSDLDTSGTVSRAEWRDKVQNRRSGAEHTQGENSESNREQQGPEDLVDRDVEPGHKHREDSP

SEQ ID NO: 967866 - protein, 403 aa, Homo sapiens
  misc_feature (50)..(50): Xaa can be any naturally occurring amino acid
  misc_feature (194)..(194): Xaa can be any naturally occurring amino acid
MGSGPMRRASAPTLTLEDEEAYAMAFVKPSSSYTEPTGGQFPVPRCKCVXPHTDRLSVHHDTRAETSPGIAPAQRCVHSGVCVIKMRIAKRLVALTWLRRKGALGATGRTYVQHAQSSMVVGLQFTKARRTLKNPGDLSIHTGLVVLGLDDFAAARLMADGRCLSNHAVSSVPHGDWRTAGARGTALTQEPPKXSTPCPRAALRHGSNEQRVTSIFATDNWLLAILGGYTHLGGAKLCTTPPRGAPNNGEFRTKLATPCCSKKNMALWSTETPGEKALSFQTLGQTLLLCNFPSTCLRRHFNHRGWVSQPGPMCGPVHNMSGPTRDRPNPQSEESRYSPYGEDNTARPTCVIDVIERTTTSIEHKHNQPTRSGLIQKHEDKNTPNPTAAQPTLSSSHNKQRRE

SEQ ID NO: 967867 - protein, 104 aa, Homo sapiens
MYYVRVAGKKEDYYPVVVKSYIATIRIETNSLADQVAQAITMMLEQEGREGFVVKVRGLRLVLFTRVESDSRFFLLIAKIRFDGHDRGHSFSSRTTQRTARTKW

SEQ ID NO: 967868 - protein, 306 aa, Homo sapiens
ATPAALVRTPAQKAAKHKAAEVVLKHLKGGSMLEPVPGGQHHSSSALRTIPVFYCCSELLPHSSMLYPQPRSPHTIGNLIGPCLSSMRSLELLKPPVGSSSKRGLVVSTKARRGMPGSYDEESQGSLGRKSDPDKGNANMTLSEMEDRCYYRNDLGKSRTFRIDNFGRTRNAWWSIIGHGRLECNAVTYWSAPRYGHMTVDDRYDGPTFSKKGVGLRVVGWVFRNSRGPRVCTLGITLRNLLSEEIDPLCPPETCVPWAPWGALGACLLAAFGSAPEGARLPVRDPDIGELARWLSIALWICPLTA

SEQ ID NO: 967869 - protein, 294 aa, Homo sapiens
MDFLIQAQYGVVIPADVTKFHQLINDHANPHLPITLAMCCRWNLVSRHSISTRLDEEFFGFPNRFDWHCVIERSGPRKISGDPADVTGAYQKSGNQSEGAGERRCHLSLALRVSIALAPVTSSTDVSRWTGKLYALVRTPELRLPEDLLGHRCSWLWRLLLCVRNALSASVMSVRLPVHPACAVTFYDLATCVTLSTTAGIGESTPAKMLPCSGTSNGDSLLFSPYWDPLVQEAAREHPGGFVWPNARDSSSVHTRSAPTGASSLLSSASSPPATGSWAQGHPPLNRAPPSAGR

SEQ ID NO: 967870 - protein, 54 aa, Homo sapiens
MALRTITLPDLMRWLREGCWWEKDWERPLLPDASPPSPGQQGCWGLLLRERGLA

SEQ ID NO: 967871 - protein, 185 aa, Homo sapiens
MNTQKEAQEPNADENDKRRAPSARKQSEGRGAQQTKGDDYASSTTTGRSPHRDIQTDRAKTTHKKTRRRRKKDPLQRGEHRHSKTPKEQEQAQTNTRTNKPHRLRTQHTAAAEPPTSIPGATITREQQYYEHDAHTIQRNERAGGNRNMRRGDRDGSDARQAGAAEGNTRQQADDTGTCTHHAGH

SEQ ID NO: 967872 - protein, 96 aa, Homo sapiens
GKINSAKIVARTNIKLMVKVVMWKNGEIIDTLQIVYGDNAPKKSVAVYKCITSLRRSKVLDEACSSRPVTSICKGKVNLVYANISIGSAYTILMEN

SEQ ID NO: 967873 - protein, 237 aa, Homo sapiens
CLGVAPQEPGARRLVPGDDPGSITYVRFSCREDGLIDSTLVILKLPDVRMPQALAECVPQLMVCLGERWCPTYGVIHGVQITDQLSLESDIWPVIARGFAMTGYGILWVKNSWKTQTYLRQRRNFVEQCYTHYVKLPTIGTELSYTEGLSLVYMAARLDGGLAAVSRAFHEIRARNPAFQPQTLMDFGSGTGSVTWAAHSIWGQSLREYMCVDKISGMLVLAEKLLKVVPQNLGEAF

SEQ ID NO: 967874 - protein, 264 aa, Homo sapiens
MQRIDHQQVSLITQLHINKKTKNKKHTTTSKTVSQTQTRHFNIKQQTVRTVKASLTQNQNVTTPTDRQKLKVGREEVGHAQGQATAGAGSYGERRRTTQEIRGEKEDGGEGRARRRGRNGKDTREHKGGAEERRGSDRRRGKREDEGTNEERRREGDEGRSKAEGGGERPGEKQRGERERSDERRERGEREDERGGRGARGKSADSEGERTTGENERGRRGRTGRGDKKTGRGRRSGAGSEGKTARGSARRRELARARRGGGDG

SEQ ID NO: 967875 - protein, 138 aa, Homo sapiens
  misc_feature (104)..(104): Xaa can be any naturally occurring amino acid
VRIDKEGVIEPDTDAPHEMGDENAEITEEMMDAGKMINTQWLLLKALNDGELQESQLTLCHMSAIQAELHRCGVILGSAKEGQVICRSTVYSKTETVCPSGVTXGADAKYEHKFRAFSFHAPYESWAGGTNATNMDFS

SEQ ID NO: 967876 - protein, 226 aa, Homo sapiens
MAEDAERWDLSSSLAVYCGLRCTELVDSGARAATVQQAPQFRLTRVGGVEHTVRCDCASCELTPHFVDPVRVPLCEAVLWSSMAQRPVGRGPGGPDGEQRLDNREPAMSALVHGAPRRVLASAVAGRRERLLTSQGLERHGIRRVRRGASCGAQNSGSPEAEGEEIRPGESPGLGGYRPCCPAACAYVSPEGAHSTGLWLRSCRPRQLELGAEPTRCCVDAAGQCS

SEQ ID NO: 967877 - protein, 144 aa, Homo sapiens
AHYGERWAGHRACVDDSERARLTPVPSHPRAHINGDLPKDLTRGLCTLYLRHRRQENSLALERATPKARATAERKARQKGKRKHGHTEHNRTPEEAKKRRDKKTPTTRRQPKNNKHNPSRKAHKKHKHKQRDTEANENAHETKH

SEQ ID NO: 967878 - protein, 243 aa, Homo sapiens
MECLLNQYRRTHNLLTNAGRNTPQDQTRGKKQRNTHTKTNKKDRDREHQGSRQQTAYKQNRQSEETDNPTQANRQGRERSTEREEQERKRERKSKKQDKKNRKEAERNEKRREARRKETKTKKERKEEKKQQKSVKKKKTERQNKQREKKEESTNQAQQATHDSSTAQAERKTTPSDRERREKGRNRQEEQSKQEQTHADKREEIKRRRKDRTTTGGPSQAKNEKDEDSEARKTEQETAARRD

SEQ ID NO: 967879 - protein, 209 aa, Homo sapiens
GYPGFSKNGKMASFHSQPLTPEEVSSCPDTLELGVGSAGFKKQNKLWRREPVNKHHSKSLLHFYKRPSNRIMHHLRAFLLPKHSSLRTTPRTHLLPAKLDDGFGNDENFEPVRAPQQFPESASSSADGAMSAPPQELTRMEPGVTSTKNNVNLNSATTDSLSLRSQDVPPDAPEPANLAQKQHAPEASFQHPFLSLHRADPSSKALHVG

SEQ ID NO: 967880 - protein, 275 aa, Homo sapiens
YCHNSNSPGDRDVTRIERIGAHIPHSGDWRLDDAIGASAGFARHGGSAWSVRRWRHGVVLEMIREGMIAWIGQSLIAWPWSASTAVIPAIFHGHVRMALGALTQPIHYAIAVSEIFSLGDEHRPEALTQCLPGGSIGRRIIGGDGDHRRGGGVDPDVIDQQQERAPMVKLILEAPQDHTEMGDHLRFWGTKMIEVPDLGQLSRPGNVITIVQGDLVTASPKLGRSLTTRPSIRRYWAPQTKFVLCPDGGNSKTPEVVHTGPRIYSYSPPGSGFSG

SEQ ID NO: 967881 - protein, 44 aa, Homo sapiens
MCLVYSGIFGPKAPLRAKGVSTWGPLEIRVRALDTRRGCGAAWN

SEQ ID NO: 967882 - protein, 128 aa, Homo sapiens
MVRTGKADAYSCTVVYLFGQRFHSKHDLLTHVRTCRLYRTQLMEGKDTKTRSIGNCLAITGACVSRKMRQNGGLPSRRLMPKRDTFVHDRRRIYACGRSHPDVLSNSIVHDFRLVGERLLDETRRDLS

SEQ ID NO: 967883 - protein, 361 aa, Homo sapiens
MARGAHHQSLALVATTTNNHSDKHHRQQDHYYLLPADGLRTRWRFTRTQSRRIATNTYTHILEHPRNAGGARRALSNNRLPVRTGSSHQQGRSSTHGIASSLTPHTSDAPPTFLLFDHTRTKHLFVGRRTNRPPFILSDTSYSIDTRAHSMTQPAHHRWLYSSSFDGARPIHNRPLVHRSRCVVSCVLPPPLLAITRCTRPDFNPPMAEPPRPRTILRPPPLAGAHSFRGARPSCCGKAPAPSHTRSDPPQPRLALARTTATPWHTQCPRRMPGRYPPRHTTQPSSTLPPGTTPEPPHLLLTADTRPRDYNRPRSAKHPHRGATADNIKTPRDLLADPTIADRGHQHRLRTTTAGPPSATT

SEQ ID NO: 967884 - protein, 137 aa, Homo sapiens
MLVGREQRCAAGEKDRGGAGGARFAQSMKPRGRCRRIMKCHEHFAWRAKHPVRVRAQRMVQSRLRCRDGYHTRVARCATCVRHLHVCIDVMVCCRAQFAPKRLSLRQVDHRIGVLVYSLVRAGPVDARGRGGGPRVR

SEQ ID NO: 967885 - protein, 296 aa, Homo sapiens
MWLIEHEKHATVSSNHDFEENGSMDNVMHIFINLANDPTIERIITSSTGIYTTAEFHGRTTVQKHVLPYSKPDMSSYAEARSTRFHASHGQEVPGSTDAFPGYLYTDLATIYERAGRVAGRNGSITQIPILTMPNDDITHPIQDLTGYITEGQIYVDRQLHNRQHYPPINVLPSTITVYRICYWTTDDQERSCPCIYPAILLLCIGNDVKPYSSPRATHPLTTRTPPYPHFAKLHCPNIATHNLQRASAGPSNIHATSYSNLDTSSSTHSQIIAPTRLRQNLPQPPQAPYTPTLSN

SEQ ID NO: 967886 - protein, 233 aa, Homo sapiens
LKVSVSGEDLVRRFSRSLKNKKSRGPPIPVTFQRMRASDSCRRVDAFSLLPNLPPVDRYWYDPCGHAGHAHSCESEEDICPACSFAYGEESSRERREEAMKSNIRSAHELRKGRKPRLRLLCLTQTRLITQSALQSRAPHYNRLLLSRKYRPVSPWSLCLPFPYASLRGRNSKVGRSVGNLKLRLATRPRSQQLSSAPERMSAHKEDEPVDHYLSHSKLWMDPRWTRSEWATR

SEQ ID NO: 967887 - protein, 82 aa, Homo sapiens
MEEHQYFQLTLNQFIGYVIPERRGRMYDPRTRQADRWSLHLGPSVFPTGRKETPKLLTRHHFRNSQTGLYTASPRGPHSSQR

SEQ ID NO: 967888 - protein, 101 aa, Homo sapiens
IEDASRVCKVFSHLVMTAVRTGDRTDSVSVPAPTVLSDVLYIRRYLPVYTNLLVSAILKIIYYRIMVYVCKVHAVSIKTQFASYGRECRTHSLVDSPNNHI

SEQ ID NO: 967889 - protein, 103 aa, Homo sapiens
MFELCHVRLYPRRYRLTLTSTAMSSTGRAERSECDFKITEGCLCRVTPEAVLIVNRDVNSTTCHRRQISGSSECFVTKSLDSIHSSGHNKGISFLVLRTTLSA

SEQ ID NO: 967890 - protein, 82 aa, Homo sapiens
  misc_feature (67)..(67): Xaa can be any naturally occurring amino acid
  misc_feature (70)..(70): Xaa can be any naturally occurring amino acid
  misc_feature (72)..(72): Xaa can be any naturally occurring amino acid
RGVGHTAESPLDAISGSSEAMYACTGMADLGIHMYRADDGGTDSVPYACNTQAIEEAQGGVHASCMXYTXLXSLYYRIDALS

SEQ ID NO: 967891 - protein, 143 aa, Homo sapiens
MSDGYMVSSDTSVLMRRHPEWTHYKDPRVARLGNHDKEVPLGCLMTHFAERRGCDRWGSGTDLNEIVKSSPVRSILFAWVSLGGDSNTRIVCMCYVGKFLWRKENSCRGTGKRAFKISTRTDYSRGWGPSYLNPPSRVELSWI

SEQ ID NO: 967892 - protein, 154 aa, Homo sapiens
VCQPTESLGTSPSKVPVLGLPSSQALVLSPEIRKAPLQQALLSNLCSSSSSSQKQKHQSFILWKRGTIPLSSGLAAICPRRLSLRPSSASMVTDIFHVEIPVVGQRCWQWLIFAVSSRRVRTRPIISFAVKASPGIPAELPVRIEESAKFTEHI

SEQ ID NO: 967893 - protein, 171 aa, Homo sapiens
  misc_feature (108)..(108): Xaa can be any naturally occurring amino acid
MVDYLISGGTSYVLDDRLTVHARLCATDGRQRAYYPYEWYLSSLLRLVIIIRSFQPAKEHHGWGTLNRMRSLSWTTRMNRPSNVHLIRTSHKHVVYSLPCTPIEHQAXVSTHEWDLGALGHQFTTKVGLTSGRRDSVILRHIEYTNASISCNILRYSPGDAKLADVLRATG

SEQ ID NO: 967894 - protein, 126 aa, Homo sapiens
MIRQYWGCMWVTNDPKFDVSEQSGSKVMCNEVKLTVASTRYLRPYLRALWNLDRKGANLDLGKRAPSSPHFTSSRIAFPWIARPNFYSLDFSPPAMFQTRAVHNLALYLSNAFTGGDPGLLATALL

SEQ ID NO: 967895 - protein, 179 aa, Homo sapiens
  misc_feature (14)..(14): Xaa can be any naturally occurring amino acid
MPPIARPWSGGEMXQGDSRYLSQSLLCSPEHNNDHLYLIRSHIPVVRQPSADPEGTVRQTVAPLLQDAQIVVSRGASRLCSLTIVTHPKATFVCAWHQGATAKNLAWRVSEMFRGSNSHVSKPLVDKQPSRTEGLTKILAAIALVNPTLPLGRASKGGPDSILKAHRTLLKTQAGPIIG

SEQ ID NO: 967896 - protein, 138 aa, Homo sapiens
MRPTLRLLGMFNECYALAEVGPEPCYSVGVHLSRGANASSHSGSPSGWPEALTWRETLQDAARGLPTHDRTLIKDVSEAGLRSLDAYGTALNPPDNPRVPNWGNLIFSLALMTLIESLAAFDGLAYSELTLLEPFRTC

SEQ ID NO: 967897 - protein, 73 aa, Homo sapiens
NEFSQTRITIRVWYTSVAWDSCEQADNPYYTQLLSSSSRGSRSSGIKVASRISNLHIALRSPFITDVEFINEK

SEQ ID NO: 967898 - protein, 265 aa, Homo sapiens
TTSCVCDYPMSAPSIIPSFLSWALRAPGWLLQWHCGVDCLPNKKLGRVISAIPATHSDYMTDTGLITKPQKIASKCNFLTCSRNMHFTENNEAIQIPDVTTDFQAFETNGHQKISKSAPRINQTLTCSSFPSGSSMMACSSASYPNSATLPRYSHHSFDNAKASKEEAPKAEPHYDLTLPLKTTHKQPPSNARTPPTHCSHTRSPQSTPYFPYYPPSQRQQQVPLPGTPNPPDAGHTPEDHNPATTNRTAPPHPTTRPPHRHTPP

SEQ ID NO: 967899 - protein, 126 aa, Homo sapiens
MGNPVSSSPQDLVQEKYREVQRQVPYQVIRATSYQVHYGGREEPSCMITLLQDMIESLRRLFRAHSNRSVCTISAAVVLITIARIIDRWRFDDGLTVMRTQHHMSSIADVYDAHGGRHLTGTAELF

SEQ ID NO: 967900 - protein, 324 aa, Homo sapiens
VASNRFSVKTTPRESNNRVGSVCQGVVRSVPLVRSKFLALFNDTSVTMSDAKKMYHYNKNCSTYDHIKNLSKNYDFDYGIDVLSRYWSRGSWIPNAIGPLRGITTGSLSTPNDDLCADARLQARFVDAPLRNASNLLPYHRYAQAVVETSTQYSTLQLHDIQLKLHNPFEPISSNNGTIGGHRPTVLASRNPLVSNNAGKIRQAPFLGRRAKEESPAATTDMTADFYRSKCPVQILTPLCVILQCSSGSARSCENLFTLTNGPPIRHAKTQRVPGMLATGNPPSPKVRLADIALIADRHIIGPSRLYNDDKLNATIQVCTATLE

SEQ ID NO: 967901 - protein, 214 aa, Homo sapiens
GELNQYSCKSGERVGELFKERSSRQIITDIQIIQGHDHVCDRVQGSHIGRQAFVTPQMSGYIMNDFPDDERPVQISAGTSPPNYDHVVLGRWSGTSMDVTTNSRQGYWTRFEAQSSSIWPLTEESRKESRRRLGSLSTSVATSILMASSVLAVGGEAWLRPYPLLRAYSTSNPRLEAYEAWILLPGVGGSMPGHTRCTLFIYMASAGHLRSRRS

SEQ ID NO: 967902 - protein, 175 aa, Homo sapiens
MYVDIQAVLVPLSPLGSNKSAIVMWTARDGEFDPSTSCALFSQMCVNGPSLAKRPILAVSVEPESGARVNLRTQYEPSIERYPCNSNGVRVPPMTLRSSPTGLCKTGRQFRYAAETIHKGRKGFGAFTCPGPWGLSDAKGNDCARPARSFPSLPVLPWAAQKHNGWIAPEWAQGP

SEQ ID NO: 967903 - protein, 72 aa, Homo sapiens
MTSGRKMAHVTPVTHLGFSETMANQDTTSSNKRDSARDRRNAYSSKTAQKATNEWSATTDTYKSCAHSPHQH

SEQ ID NO: 967904 - protein, 370 aa, Homo sapiens
MYQIERHILTCITMHGICSVLTTSNVMKTKTCLNEHGMPKQHVELMRDNRGSVGQTLSMPFLEETREAYQRKHHICAYGARTNKLIGWIHMVTVVTMFTDTTEVTTDGMAVHRIEIERIDSIYIQWARHVAGLAIMRMDARGCTYNIDFSLPPSNATLGVAVQAADIDNDLDHSTFSILQRSKDELTKVVKTGHTRLFLEEVGVVLESHKKLTRKIGKCEVQISTCRDFANLWQECKHAHYCSNILLGIDGVLRGQSCTEHFMTANGMAKTELGPTRGRTEASGTNTAKRRPVHSKPEVHNVPTSDAKTTTLAGGPRCRTHSGETGGDTQGEQPQQARKTTEQRNSAKGGDTKAKRVEKRKDRPRTPDVA

SEQ ID NO: 967905 - protein, 309 aa, Homo sapiens
MADVTRESTYQGHQTPAVQKGLRYGIIRIYYHQKFNLHVARIFSEPFTNSRHSPYPPQLGGHMVPRAGSHTRYIHLESRHFVRAHPYYSHQEYQSPERHHSLDRITTENQNRSRHCVNYKCYWALYLDPSVQSLSRYFDVSPSPFPSGIYGSTSSCSHRLHTDFTSIIGLKFTHYLLHPATNISPKHPKESKMEATAADTNTATCKTRSRPTTAGLPRMDERPTHTPDPHTNTTRAPPKHTPQRASNTADPKSGQSGTPRRCNHTDAAAIKTREHTQRGTPDTTTGGKRRPPRRARQQRRHNASQSKKP

SEQ ID NO: 967906 - protein, 67 aa, Homo sapiens
  misc_feature (64)..(64): Xaa can be any naturally occurring amino acid
WLSVDRQAWLSEGQMIVGFLLQNCKMDYRKGHPQCRFALESVRSPGTLRATCRYRRHIAIVIMXDFK

SEQ ID NO: 967907 - protein, 105 aa, Homo sapiens
VLYHRLSDRAVRLSSTYTVDVDVDWHCVTMQFVPHRDRRSATSVPQALQDHRHLAVVLASIRPRGIAHVETRTQSIGSSRPGDMRHQRSACVNTILAYGERHKGT

SEQ ID NO: 967908 - protein, 211 aa, Homo sapiens
  misc_feature (32)..(32): Xaa can be any naturally occurring amino acid
  misc_feature (165)..(165): Xaa can be any naturally occurring amino acid
MRRHNHHRSAITHCESETPYKRHPKEQVSHLXKYSNTRMAAKQASNAGRHNKATTNAHGGNHHVDLDQPTRHRQKGWRSHSEETQTHQRVPAGRTSHLRNTHGGRVRSREHDSNDHVTATETRADASTPHRRTATIESQLRLAISSSAHTPPIIATPLRLTHASXINGIDQHSSSTQYDQTSECDIASSHSTLDDSHRRVHRSSDRSDLIG

SEQ ID NO: 967909 - protein, 132 aa, Homo sapiens
MLTHLTDEEDIIKPPRMATSTPPGYPVPPPRAPRLTHTTRHHTHPDQNTHQGARTNTRGHEHTPDYKHQTHKTPPHKTRQQRPPRPRSTTNKTLTPTTTMNNKNTPPDPIRPPPHPRTQHTTRRPHRTTRAQ

SEQ ID NO: 967910 - protein, 567 aa, Homo sapiens
SLSLRREREFQKRHRGGVQQAAATPGLGDIRVHHSSSAVPMDCKADNKEEQRGVQREKKTERRPTQNDWHREQKTQENESHKSSPKTAVRDHRTGTKQGDTHDNKRRNELTRADTKHPRTEPKEYTRQTGPQRHPKQRKKGTTKRHPCNRNHCGRARRTSKEDELPHRTASQHGAPGEWTPKGHTKGTGRNAGPAGTRTTDTATPGQRDRQDQREEEGRQTRRNVARKAEKDRASRRHAPAPTKAHTTPTRESEKTEEHCKDATRTRKRNGHGENRENERAQKQRQRDKRASTQRADNRERREEPPPRDAETRAALKHTQADTTHARETRTRRTADQPRRQGHGTTREREPRDETPENDQASRTGEDQTLGRGDTTRRTQDRDEGRPTTTGNSATRNRERRRRGRTDAEADRRRRQRAQGTEETTRGRRERTPKREHRQKTARRQTTTQDGARRGERTERGEREEEKNGAASGEERGEGQHRAQRSDRGERAGESEHGAARQRRGNDEDESEDGSERSDRTRRGERARVAERLRLATPRRHHRRTAAGRANATDDSDEGRKAEQADP

SEQ ID NO: 967911 - protein, 82 aa, Homo sapiens
MNIAGIGWNIENWGLLWVTQGRSKTSVSTGGGFITKNETPSVGKNPLRTLTGGALGPRQQVLLIDHLIEHTRTQVSRARPSS

SEQ ID NO: 967912 - protein, 110 aa, Homo sapiens
WRLVRVAVMYSQGCLKLHTRDSLTTNRWQPDCKEVDKCASSGKNLSIMMSLIINISSRNKDVSLAEISLISYSCIEYWRMAATHPGEAISCDHDRQLEVESTGIDELDVS

SEQ ID NO: 967913 - protein, 99 aa, Homo sapiens
MRPGLGDSHRRAQCRKGGTTTAADTSGDTFHGDTTGRRENTWWANSGDVTAPTVCTGRTTSTFSARELMPHADMLDGRHIYMLPRNHAHAEEKHSMRDA

SEQ ID NO: 967914 - protein, 111 aa, Homo sapiens
VLSCLGSYPRGIEGAVTAAYGRFGIGVGGFYGGTHMNSGVGSSPRTEPEVASRQSTFVRMHPQTNKKGVKIPHPQRGWRDYLPVGQRYAWVLVSIAFTSPFCKISSDPSKL

SEQ ID NO: 967915 - protein, 340 aa, Homo sapiens
MTRRYEPRYPKGTQNLQSAWCSRGGVSWRVTCLHDLPAHACIGCDVRHIFKDLEFTGHHGSRAEKNLPARIAVHGPVAILHRGGLKHVLPHGSKRHTGQDNMQLHSIDSSGNAQENCSLVRYTYAMSGRDIIVVRGLLAYNKDDRPESKKYREKSPRITWHLANQNRGSRPKKFRNRTGLTADTVNRTPALRGCKNKDEACETRTGGVQVETWSSKNQGTLGPPLTIRNEAYAQNLNFDVPSYPMEWSLADLRPLMVSPTWAWTRTRPPKGFLATFGGNKRPSNVGTHLSHRRCKRAHTRVSLGAAPTGNWGVTQYRTEGVPQTMFWPPDKLCYLALICS

SEQ ID NO: 967916 - protein, 132 aa, Homo sapiens
MDMTRGAAPTILEIRMLAARDERTAGSNNYRERRQERRHDEEAMDRSDTTLSKDERRRTPPRTQIATHTMWRRGRTTDSDEYVSHGHAARKSEDRAEQQCEQHPATEQTEATPTPRIEQTGQPRGQRQREKG

SEQ ID NO: 967917 - protein, 66 aa, Homo sapiens
MPETTQREITQCVTRSSKAQANGRSERGIKRHSAQMRATQTRGDAKLDSITTIIHDNPKHTRTTPT

SEQ ID NO: 967918 - protein, 80 aa, Homo sapiens
VVNKEQLHVTERKGVQALLIEVVETPKYETDEAILPTAMFESYYRVLEDDDHDQRILDESGSVRGIDSSILGNGVFCDVG

SEQ ID NO: 967919 - protein, 254 aa, Homo sapiens
MNLRTQGRTLLNLAVQAGITPAREANPPQDWESSGDYGDHLYKSLSTGGTLICSVGQYRCERLGGSKEIHGNLYGVNPESTMSFYEWFYKTAKAIRGMALCVNTGRLWEFELNGIPMAVLAMYLEANANSRDSCRIDLYAVLVKNSYMCPILHPNLFWHWDWVPPYTMTRVIRHAPVLNARRGNPKRRGCYTTRGGQQTAGDTLRGGNLGSRGKTGRTRDKKPGPEGRRGITKARRGATGTTANTRTAGLGQRG

SEQ ID NO: 967920 - protein, 116 aa, Homo sapiens
MDNNHIISHMIQVDTKALIYTIYSGVLHGRPCGDALSEPTLHDQLNLQLTSIKHWHHDHHLVATTSWARSYTQLEPPLNTCSATAVTTGTHSNTQTTQTKRRPGPRTPVDQRSIPP

SEQ ID NO: 967921 - protein, 201 aa, Homo sapiens
EEEVEKAWARAAEVGFTRMAALHDNAGRDPAVGPQGKQERALDGPPHSFTHVHLILLSRVSGHPHTEPGTQSDADWDRSCIEHLSTDDDGDSSNHANDDWPMQEDGSVWHEPSTLSFTHPLNLYEFERTTWPTLLQCNNISIATGTHLNSCKMKKPLSPHSTTGGRARLNPKCQEVHQTLILDPAQRKRLQQPECSSMFSS

SEQ ID NO: 967922 - protein, 354 aa, Homo sapiens
RWGTRRRSAATAATTASARWRGKGGVSPGQRAGGRRRCREGRQVGKAHGRHFSINTQPSHQLFIPTDCWPVQQGPKRWSSNVQRSGRMNSEDCAYTSRDHLSQYSHILLELEAPLKICGDIHGQYYDLLTTLTRYGGSPNQNTATTCLLGDYVEQGNKAVTSETGICLVTGLYNTYQRILQHRIILLNRGTHECCSIQPGNSIGHFTARNGQEALQHKHSHVWDNTLPKTCFDLHNGIARHTRHVSRIICMTMGRLRQQHCSILWRPISANYYQPHARYTNNGTSKRTHGEPPPSETIHSLRKNTSGHEYRRDTGEHNAKIEENNHTHSTQPAQPHTTPTRAPRGSTTANNGTS

SEQ ID NO: 967923 - protein, 110 aa, Homo sapiens
MNPVKPPRPTTFARAGILSLSSKEMNNEMRGSLSRCSADLRHSYHTSAPRPDRHGHARRADGYDPSNLRAVKKLTINKLPVRFYLVPIMTAIGQSPPENNKINTPKKNKK

SEQ ID NO: 967924 - protein, 196 aa, Homo sapiens
GLSPGPPGNNEAYAELIVLVYAAGKAATSGVPRHLLTPRHLMPTLSPAKTQNPTQTSEFPWALTTNGYPGGYLETVDKEEPQLAGHGSILVTPPSAFRATRTRSVASDSPQWLPDSGQQHDDLMRVLSYLAHRAGHLRTILEHETRTEDRVERAKTMTITYHQRRLNGDLETHPAACTNPESRHDELTRTHPPHSH

SEQ ID NO: 967925 - protein, 111 aa, Homo sapiens
LKVRVRVHYLEYREVPQSSSSHIIEFPCGVRRALVHESIKGRKYVGEFIGAKAERKRHVPSSVSIRGSKDACVTRMWKRESLGHEIDDQLNELLNVSMDRGEKPCEFVIVS

SEQ ID NO: 967926 - protein, 394 aa, Homo sapiens
GRSQALGRTDPGRIEALYEKYNMWAIELLNMELQDIVRAWICRKSSCKDASMPKKTIYIVSVRESHFLAQLRYTPEIARDSQDKQYAVLIDDAMDKSWLSKVMYGELKQDIRFQNQCHHDEDKLRRSSSFVACPLPCLHDFRILTSLAVCSDTIPEAYILGVESMCVPVARLDSVLTQRSHRRPTGEQIYACILQREADAVQQLIYLVSTTNRVEQSISLRGLIYSDTSPRMRYVGSCQKPTTNLDAGSGMRLNMERAINEQKVWHEVTSVHILTKRKPHAQRPDIAFSYREGPAGLAFRLNISVLGTWRPGNGAHDETVRRRLEQKGLQKGRSNPRGTSHWQHTGPNHTRRRNNEARNVKQDYGKTLQSNGEPTEYRNRQHRAKIKTTQPHNH

SEQ ID NO: 967927 - protein, 99 aa, Homo sapiens
MVCSTTCSIFSNEGGRSQHKQPEKRGTLVITTRAHQGFQNAPHRGQKYYKGSRVHNLNHHKSETEEAFTPTAYNNIARIGETDTHRVHNYPQTDKKARH

SEQ ID NO: 967928 - protein, 295 aa, Homo sapiens
  misc_feature (24)..(24): Xaa can be any naturally occurring amino acid
  misc_feature (98)..(98): Xaa can be any naturally occurring amino acid
  misc_feature (106)..(106): Xaa can be any naturally occurring amino acid
  misc_feature (267)..(267): Xaa can be any naturally occurring amino acid
MRCRGSWVAEEVAAAEHCLCFMEXESARPPVSRRCLVWALSQKAGQESGDGWVAIADNFMLEMQCIAVLKHCEGTLMGPFRTCVLGKGRRHASRDTSXNEMSSTLXGNAYLEPPDITSTRVVSRMHLDHPTRETWEVVADTPRHPTPRYMRTHAYHISLSRRGLSYVRTYCLCAIVIQVQSLLHGVGAPWGRAQGRNCLKRAQDKKARNFPEVTMALIPGGFNRVSYPTFSTRPGWAPCIPGYLVCNKVYVRPTRSSLSHGGRRHTXGGTAVCELHKYMVRENRRKGIVRMCLAT

SEQ ID NO: 967929 - protein, 154 aa, Homo sapiens
DKVLSVYDLHDKSSEKTAVSVFLKMNWKLDELQQIISFQNPELYIRESVKGSMEQEEVMEQACTNRYKDPQDENKMGIDGDTRSSVSDRWTLESTSSIECVDYCMEVQSMQHSASSPKQEFMDGMTEVRMCQHRRKLKGQIPKMEQELIEPVTI

SEQ ID NO: 967930 - protein, 104 aa, Homo sapiens
ANATAEENRCTISQWSTPPVFFDIAVNGEPWGRVSLELLADKVPKTAENFRALSTGEKGLGYKGPVLSQNYSRVNVSGLVTSHAIMGTGVASSTHMWGRTFVTD

SEQ ID NO: 967931 - protein, 107 aa, Homo sapiens
MGFANPSEVTRLQLTTTNSHVIICSLRGSTEHRLQTTADFHDRPYCSLWKLKCHDCSMHIGFRGICIVTKMCELRFMLVFFQYLLCEDSKKAKTCEPVVISIIFLCA

SEQ ID NO: 967932 - protein, 72 aa, Homo sapiens
CFTAVAGWSVRERHLGSDWGRALACTSELLCTRFDSMSTCRPEMTLYSGSMHAARLTHWAMEEPMQICSLAV

SEQ ID NO: 967933 - protein, 316 aa, Homo sapiens
MNVGPHCGKHLGVEWNVDIEKDLENNGTLEREKITSGEEQKALPGRAVGVLEKLARKRFIHATWPGMGPSTERRHTRGTLHDLSGGKAARWDTLCAVAAHMIPRGDVLGGGTIRGVGQQHCSLSGKSMWGPTRTGSLDIVWRMALDRHAEECGWQRRSKGPGLSEGAHPLRIASGHTGGGRPRYDESPLTTGYTMTTTALGSLLTAPKKAHEYKSGTLHQCQIGTRTDGCTTCETNTAEDRPERGKMATRIDALPARSGVQRTTAHATTKDAHTTHTRHTDDNAAGQYDTPPAVATRPRGKQREDRSRQQTPRSLD

SEQ ID NO: 967934 - protein, 112 aa, Homo sapiens
MAQQMCIKITRDINRYELRLEGGWDPKLPEVEHALSQGSTNKDRAYIGRMQAKNGQGLMSCSVADGYSKGPRKSPQKAGLKPKSPKGCQLVKLDRLVYIATPPKHWGSCVSV

SEQ ID NO: 967935 - protein, 118 aa, Homo sapiens
IWSSHVQVVAVDSQGPPTSCEMSSTGTTIRGLRPELKGDRPGSHYSKVKPFTTMYTSSTYEHALAVVKAGSVSDGLVLTDCSHRDLECTVSVSVRMNYTIDTLAADVAHEACNLTTLS

SEQ ID NO: 967936 - protein, 387 aa, Homo sapiens
VGLVSLPCEDGGRTLIVVTHCDSDDIVCRVYIATSSSCPPFASYRVTSCPSRTASCDVYMCVYNVAHAGIICTLIIRALWRRHRGVLSNVVEGHGNRHAVLTQAPLHRVSSLAIWCKSSTNPWILHKVDGRFYVGIRPLIGSARTISICETKLGIAGPPIANWGTIDNALDLRGDFVWVRKQSKARAYLRATACVFVAYFAIGQRRPCLGTNIKYPSVFHLSSYDGEDRPDLDITRRNAILPPWTRNTLGKRTQWAKVAESGFIQPPMERPELNLLGVYPIRFTGPGDLVSIAHLTTGAKNPWHSEGFRGHTYRDPKIQALWKHAQLQVIRRPNNGFGYQLSITHTCGLCNPFFDTHTGHGGLTVGGKLIGGQMPFASALIIPTPVM

SEQ ID NO: 967937 - protein, 302 aa, Homo sapiens
ASLSVKGLPSGTRMDARMREIRALTASDCKPRYSEAGIRGCGGSGSHASRRRERWVGRSLFPSSRELCLAGYPRQTLTDDEDGELEFGLYPRDSSEMTVGMSYVNAHDIFRIYVNGKKEVAGGSRPPNPCSSMEASPAKYGWRPRMWICDGLAIGPLLVSEPCYQVARCPGHALRPLCVMRTSRRRTRGLTTRGRRSEGSQFCSPIRSSVCEGASRLKPLVSGKVTKREDFGVGQRMVTLGVHSRKRWTPDRPPSCCHGEEPQPMWAQRVRNSEYLGSNRRESGGGEFPERPVGRELCQVGL

SEQ ID NO: 967938 - protein, 167 aa, Homo sapiens
RIAAAGVLLLMPESDARGRRAREMHYGDRKESHYSEEHLCKGSLSLIVMLFYAGGIMTGPCKANIQAQKLCKNDPEGIKDLIQQHVKLQNTNRRPTKVEQQHKDPIKAFYDQQGLTHARSLSAPIFTTSTINLVENGKEISEKLIQRKWTHRLRNQNLTGGRMRGRR

SEQ ID NO: 967939 - protein, 89 aa, Homo sapiens
MDARHFEQRFHPREDENPHSVVEVVWAVVPLGRNTTILEPRHMRVPTPGRLKALHSVKTGRGLPGCRKQGGFKQGLEITRTGAFNAERR

SEQ ID NO: 967940 - protein, 193 aa, Homo sapiens
MTHYGAARYLFVVKLTYPCMHAQHVGVFLPKGDIITQAGGNSRHSASGKHIPCASCNHACNPMASAEQICLFVIRAGVRLQHHPIPRLRMAILGPYGSFHTRSHGPQGFYRTHVSVHASHARHYTRCYAPLIYHGVSMGTYPCKKRAVSPNKSLCNLLLSQLSFTCYPNLKQAWLPQWHLVLQDSNYERPRWN

SEQ ID NO: 967941 - protein, 376 aa, Homo sapiens
RGKGFISIKAIMKYVSLSTTGEGRKNIEFQHVLFYKCVQEECDNFSKRVKKVAEENGVITEASEDSWMSPRHTLAASSLGFSQKSSLQTLLSLAGGPRIMQEEKGIRWILGMGHFKDALSKMGSISYTQVLANQRSINVNSSKTFRHRKAGRRQRKGTYEQQGPGALATSLVHRIPSPEPKGVHLTVSPPCSSSEAQSTPKLHTSLGSYPACRGGSAYLTKAPQTGRPPLGTNKTVASSHVITSAHAWKHTHTRNGITQTALARTRIGQKARATPQGPLTENSRRTSETKSQKTPKGPWYPHQGTGRTSDNANSKETNQGTEKQRRQRNRDPANSTDETPTATQRQQRTKDTPTTRRTCDERQSAIHWTTANPIMK

SEQ ID NO: 967942 - protein, 100 aa, Homo sapiens
MKTDETAWNPGDDADDPPGHTLENKACKSNPGAKRAGRPHRARSDERNRQRKATGGTRKTYKSLGQRPHCTHTRQTATQHRGDMSKQRQHTDRRHNAVQR

SEQ ID NO: 967943 - protein, 102 aa, Homo sapiens
MLLHTILAHVCATDFAHDKKVRSVALHVHCVNHRIQLYLLDDLEPQVMTMSAWGHRSADPLRRPLRFNVKLPYIKVIKRTKIYARIMYQPHDEQTLVHKIVE

SEQ ID NO: 967944 - protein, 116 aa, Homo sapiens
MVVTEPLCLFLASGSCVDACPAMNERVQTVIVLGHRPDGMYPCQVSVSVTWRRKFFIWDRHTRYYGGRECIYNTIGRFIRQISNTRITTRVNGERKRLECRLVFPNGSLWLMVERA

SEQ ID NO: 967945 - protein, 107 aa, Homo sapiens
GRGRVPSPTRPRMDDALRPGGLVLGGGGRRPLMTPDGAVSGSVRECWFLPIARLLCAYGLLRQAIRPSEPLSLIARTCWGPDKNLTEHGMVFNEIYPVWTNVYTLGC

SEQ ID NO: 967946 - protein, 207 aa, Homo sapiens
ASRAPTTHTHRALGSPLLREPVRATVCRPGHRHPPSAYASTQVPWSFGPSYLQDVAAVPWHSLSRADAPARSYVIYCPALEPYSGVGMLLLRPLGIQVQRGPRTAFQSPVAEQYTLLSAASFMSLNACRMTSSLRASVSRERVTVLSVPKCNYRGEYSVGRTVGAREQTLVPMDRGMISKCKHQHSAQSRYADSERAGKALCQCGGL

SEQ ID NO: 967947 - protein, 103 aa, Homo sapiens
RTHGPRIPGVLHAVTESGLVAVSTSDPEIRPSHMALEREGPPGSGPARRSVEDAPLYCYFLDACHVSCASIRDRTTRSWCASNTSMMYERLVLVPTIGDWHRQ

SEQ ID NO: 967948 - protein, 164 aa, Homo sapiens
IPRLRCRRGWRLLVHPVLAALCPSVGLTGALSVYFYFAAVTIPLISRAVNLSDPSVSTVVEAPGGATCPVSPAETLMGPAAREGLREAHPPRDCPPMDLPSVRPPTPLPGGQAHVNQTCETARGLKNEGKSQRPDRARTERSAPGRRAQRHGGHQTSERGRANS

SEQ ID NO: 967949 - protein, 113 aa, Homo sapiens
MADFDNKETVMNLIKNWDDVEEMVEEEETGEETKSQSTSVNCSDDAKSSDFLQPFKKDLMVWVETPTGYFESLLRVVKRRVIALKNLQVKCAQIEANFYEEVHDLERKYAVLI

SEQ ID NO: 967950 - protein, 246 aa, Homo sapiens
  misc_feature (6)..(6): Xaa can be any naturally occurring amino acid
  misc_feature (71)..(71): Xaa can be any naturally occurring amino acid
  misc_feature (160)..(160): Xaa can be any naturally occurring amino acid
LVAVLXGTRVRDALAGGSGAGEPCLAEPQNGWRELGGGQKHGDEFSSLDLQMLLGFVGRSKSGLKHEASFXPGPSSWCSLTVALSCSRRSRSCTKERPGAFKSPGGPRRTRSLPHSRTGPWTPDHALHLRPGRRCAQDSAGRPQVIDYPVLYGKYLNVTXLGGEGDGLPAKTLKPEVPALVKLPFFNMLDELLKAPKPRGNLVPQNNEKLQESPCIFAFGRQEQVELIRNSRELQSGVKAVQVGPE

SEQ ID NO: 967951 - protein, 187 aa, Homo sapiens
MGHLCHLERDHPLKRDFETIKLIQTMAPMGLYFLGAAPSPPGSRFAMKKIKKQNLILRNQIQQASWTRDILTFGENPFVVSMFCSFDTKAPLVPGDLSPVDGGRLCHSAENYGGPALWPGRASHLRHLCALGITHYGWAVALTEPPYIAGPFVGFVVTVLLFRHCWGLTARSAPWPIARVSYPLALF

SEQ ID NO: 967952 - protein, 196 aa, Homo sapiens
MKNTRKKNDHTDEEKKTTPPITKEGEDRSEGETAITTPTDETNNERTGEEEHNTKNDEDGRQRRDQTQTQQNHRHLERATHTTEKGRKQLDEATTHHITWRCGVAVDNTSTPLPPRNDEAGPERKQEVEANTQTDTKRGNNKDRERGAPPNTKQRLPQREEEEDTHHAHALGSGESNNKKQPPARWRKTTHEQKLL

SEQ ID NO: 967953 - protein, 89 aa, Homo sapiens
MTIIHREGASKIAPNPHELTPEDMEDEMDGMEIPQSPGVEATNNSTVEKKNKPRESRGHHTVINVKPVTEDQQQDPTKAREHKHHRTNE

SEQ ID NO: 967954 - protein, 185 aa, Homo sapiens
MRRSACRQALLVSAAPRARSREPALRHLALSQSTPGPVRPGGAAHGPRSGLLPVCTQTLSRAAGHGGGACEQPRWMGAPGRAECASTPINHPGLAHKLMEPGSCWLQTEGGPSSSITSTSQGNPHIMANPGHGAGAQYPTGPGQARLDRRTICSGHILLHSRVLPVGRGKGAFLRWGHTIRERSL

SEQ ID NO: 967955 - protein, 230 aa, Homo sapiens
MYDEGGGRNIAKIHDETKGSEEDNLPPSKPDEEARIGVPGGDRGTNPPTHMSRDRRHHRTGSKRARVHIQRERPIPSNESRGDRSRVRATLRRPTPPSGVRGPQQPVRTKQRAGGEKAQHGSGENDHPRERETHAGQRHGGEPHHPMGARPPTIGCSTTGATIPAGVKHSHRGTARRGPRADRTEREEREAQRWGSKPRGRRKNQQQIVEEDAGHHSAENNLAQRAWAKP

SEQ ID NO: 967956 - protein, 112 aa, Homo sapiens
MFRGLLHTWTLLFLQLSHIDQVVLGRLAVGLTKVQFDCVLARKSPVAGAYIGDVEPKSSSVAPSGPRVLYGEDLRNILLFLNLIEWQLGEILQAEAQSVSPNDFMYVEAVLN

SEQ ID NO: 967957 - protein, 336 aa, Homo sapiens
CRLNSARKKNGNSQYDGYEQDVVAPTLCGLRLKGGRAARASVKSSYTSSPYRKHIKGSIRVQSTSVWLPGLSAEDRSSCWAIVDCGLEHPSEVQHECIPQAILGNWTSCDQAKSGMGKTAVFVLAPYSKIEPVNGQVTVLVMCHTRELAFQISKEYERFSKYMPSVKVSVFFPDGLSIKTDDRSVEDINCPHVVVGDPERILVLVPEEELRLKNVKHFVLHECEQDADAASHLRADLTEIPPPDTPGTAGMMSSHPEQDIDLLRTVLQNPTAGVGGRRNQINCGMKRIVNKTEQGSLTLKELQGNNTKHGSSTQEKSAPRAPERHITYHQGDKNQI

SEQ ID NO: 967958 - protein, 102 aa, Homo sapiens
DPELLTQRVAHRTGDPQRHGVSGSLSREPGLVLELAEPSPPSSPRPPVMQTAARARPRVCAVSPMVVRLRAMAKHEQILVPRIRPQDLKFKGPFHRCSHYKS

SEQ ID NO: 967959 - protein, 237 aa, Homo sapiens
MAGKSIEYLEQPTDVLGRWGPADMLASTNVSALGGEGGLLEPCSRNTMAISQLMQVIGSQPARRSWDGHGGPVTGPGLAAYWEQWASRSSSSSSSRSQSEGSPRHPPALPPVPAQPLLLQQLAQQRSPSPAPKFRGMEPSTASQPDHKPHPSERPPEHPWPRCTVPSSGPAGCATQSGTVASCADRREIMAPIHTDKRRMSRSAWFPNVPSGESLAARPGINPKYLELAQFQQGLGM

SEQ ID NO: 967960 - protein, 190 aa, Homo sapiens
MWMIAVEPSLWVSSSGGVFQAIKGFRKCPMLEFSATGLRGSATASEDPEPPKNWQVAFAVVRGRPCFHPPIDCGWCGFGARRIACELYHQWTHLTGAVLAARRCPTGPWWAQPMHAGALPAWPSLSAVGILRHSLHSASSSRNCARHSWRTPAAAPTDGTRAQATPAISQYHLREATATMAATFSRSLPR

SEQ ID NO: 967961 - protein, 316 aa, Homo sapiens
NLNLAKAHLTAFRSLWFCGEAASRHPGSLPDFSLPTGPHPSASPGQPPDRTSSAASSRYTRTATRPYHRVMSSAAGAPGSLYPCWTNSLRARNPIISNTMVKRKEMREHTEANPQARSFLSQTVPLDVWMSPKASRHCRVVPPLVHRPPELSTSKGACYQLSLCPGVRSAGQSGLFASRCKVHCRSIAIPSIRLRWTRRPGNQRLRGATFPVRNHLTGVQPTVGTDQPRNPAEGEPDYSPVQKDTRGTPVPSNVHEFIGLGAIPDPRVLAQEGRRPMGHDRGSQDGNCKGARPNARLKPSSGPDLGNEDPVPAKRK

SEQ ID NO: 967962 - protein, 276 aa, Homo sapiens
EDESAKVKTMIVAGVCVPARIGLMVTKCRTYWTAQNITPMDFYNPLLASVSESEEMGASLYVRLGRLRACLLLVPGGCFAAKLSTPQQTKPYSAKYSAVPLCCCQQLRVRCHGSTLFLSACSSLDSAQRKACDPRRALPRSHWHAVGTRRTGQRLSQAGRQKLEPSLAHSDKFPRPLLLARTRVHPPLDIGEGRDSDQVWEAEMGRLGFLRGQRWLTPDFGICLNRCWTLSPLPFTHYCLLEFLWCGRLEYLGRAWPPNRPRNGELPTLAEPPTRQ

SEQ ID NO: 967963 - protein, 141 aa, Homo sapiens
AVRSIEKLDQRRYHDAESICTNDAVSDEVQYQGSTTIRSILKVYTTACAKAADFLDLTEQEFRIHAFLFQTQDEEPRCGTSGISALDGEFQYSSEVDFYIDKDMIHIADTKVARLHGDLFIRQIHKFEELNRTLKKMGQRP

SEQ ID NO: 967964 - protein, 100 aa, Homo sapiens
PRPELCQHFPQVTVAVVQAHFSTTHHVQTEEAVIGHADLSEEMQKDSVEMLLLQERWEHTNHRERHAAQYQNDTHFDYMNVTSPHPGHCIVAARNFGQVM

SEQ ID NO: 967965 - protein, 84 aa, Homo sapiens
SPRVIESGASGTQVWRRGSEQPFRCRSGSTETGQTNGFTEAYADTCSTVGLAAREGELFHVLRKLLTKGRSVDVADNRWMDANS

SEQ ID NO: 967966 - protein, 401 aa, Homo sapiens
MGLYSTICARTHECETPHVPGPHHTHTRKEKLHIKTARTHVGEHAAHRKKKNNSPRREGGRPTRDVKSARDNQPPAGLSSVVENTTRVGGPPPHKKYMSGATSGKINNIPRQRGSRTEGRPAAGVIKNTRGRKITGVKPTAGQWLSGGEHHYVLSSKGDTPMHHSWGGGGRPPTRFENQQHTTPTTGGTNKHAYNEGKTNNIKAFHTRVLKTRGGSHPHTAAEKIRIRRAASEQIYMETNTGRYTMRKQHTYNPRRGTGTRQHNETNTEARKTKQNTNSRAQAQTGTYTTRRTTKRRTKRADGRHTELDTEKPAREKITRRRESKQINKAQLTKPTQTNKHKKRDKTNNQKKRQTTQQKEAGANQQHTATPTTKTIHDMKQQHEHNIENHEDRDKAAIHTI

SEQ ID NO: 967967 - protein, 88 aa, Homo sapiens
GWTALQASAGGGKMEVTGVSAPTVSYISSPSEPFRSEKRYRPEAQPSVRFKCNVELLVGSPVPAWNVELFGVDDKVLQQAWIKRMRSW

SEQ ID NO: 967968 - protein, 326 aa, Homo sapiens
MRTFYMETKKNTRSKMVSASIHEDKYIHVAKIIKPVLTQESATYIAEEYSRLRSQDSMSSDTARTSPVTARTLETLIRLGTDHAKGPHEQRLWTCRMQRKLWSRSSMLTLRQVLEKEKKRKKRSEDAIRDRQPAEEKRREDQEPASGTSREELASPEWPHMGNTYDPQGLQSTKRQEIASKVQTSQSREESQEDKDPGRGHRLHHGGRDYEAGPHGMDTGTGKWQQHGEKADEETKTGKGNKPIPRSGTRESERTGKNETREKGEINKRTAHRERQTKKSVTTKQKRDTTNNNTATMNDSIGDDLYHRERRTNMHTYFIIYSTALE

SEQ ID NO: 967969 - protein, 145 aa, Homo sapiens
VSIDLVQRCATTDTTLEPEGASLRNCIKLCSSIGRSVRDSRSRKLREEHVATRIERARYSSSNKMATPRMLRDTEFYRCVYVDELRVLTVNSECVTPKDHDEFRVSDPSGLTPEEYYATTEMYVERATRTYDSSVYMSDYEVSSV

SEQ ID NO: 967970 - protein, 98 aa, Homo sapiens
FFFNLKRFKEGNLGYRDPHKEEPPWLWGAQTTCGPTQKSAKTKKRAQEALKCLTVWAGFTSLNFSMNKPEGKVRVTPQHPQVALSFQVGVCREYQRVF

SEQ ID NO: 967971 - protein, 223 aa, Homo sapiens
  misc_feature (4)..(4): Xaa can be any naturally occurring amino acid
  misc_feature (209)..(209): Xaa can be any naturally occurring amino acid
MCAXYQSPRGEVNLLHHAGWLYGGRHENSFLFKENHYPARLKKPPRRSSTLVVLSPPQRKVGGVRPPRRSTQTRGGTFSPLYREEKPPTSRGGLKYYLTPRGGGNNKLRTEGNLYTSAQEEITPPLGTEPSHEGGNIIETRRVHLSLRTPKHAAGQEKPLIKWRVGETIRGGYQKGLSRGRNSAPREGGEQSYTPLPPTEPLVGRAGKXPNNNTEKTRARSST

SEQ ID NO: 967972 - protein, 311 aa, Homo sapiens
GKMTKGIPLLESVQKNPHFGPPWGSRAYPSSKVPWGKWWAHPWPRPQRSNVITGSWPRAKHTRNTTGEQCHNERRTIKMVYRKIQRMGSRGRRHNTLNPKKGTLVRRIPDLILEKSDPPESSAVPTQSARVGCNKTITTTQTKTNKQRKTNKTQHNKRNHHHRQPHNTTNAYCTNQQRRRADGATNNHHLPTNDATDTNNRTTHHPTLDLAETLSHAPTHTQTPPPTIQHDAPPRGALMTQQHAARRTKHPTPRPPVRVISRTTNTHARVAGPPNTEAHPHHQQTTRHHALTTKHPHRATRADTTTPQGAP

SEQ ID NO: 967973 - protein, 364 aa, Homo sapiens
MLLSSAAAARPSIGLAGRRDHAVYFKETAFWIGARVDFPPGLELHNHTRHDFSGHNFVLTFPAQLLRLTRETRIQGFADTRQALPRILTASARPSFSQPSSRTPTGPRRLAGSQLSTAAHPLAATQPLAHCCAGRPYCCNGLVFHTLPSLGTHAPAPLATANDLPRHYDTTSISYLASPRHIPSWDPLANPPRQPGSTWLHLPFYTYTHNVAPTPKPRCPVHFNQPHADTPFPALRPAPAPGTSPRPLQPHRNHPGSNPTHPLHPLGLRPRPTQRQTRPQPTHPSKFANTRFRTSSNSLASHKQRAAATARTLCQSASPVGSCSPPQCAPRQAQHPAHPFWGCANPSLARSGLPRDRSQNPSHS

SEQ ID NO: 967974 - protein, 413 aa, Homo sapiens
NNYPKKPKWDKEKTHTQHCRSLDTLHSGKSTTTGHLIYKLRVASTKEPLEQQFDEGRLLTMGKGSFNDMPGLLRLNLNSYALNAGYHHLTIYLAGKFADHSNVLLLTTHLTAPGHQSTFLNTHHCTYTRTLLTACTCWLSLDSALHRLRARCNLLTQPSVLFQTTLRAAPRRATDPLSCASTSTPARCRTTNPTLRSACLHTTTIGTIPTRAHTQYQSTQTHALLDAQHHCASTGQRVHATFIPPLHATHHRAHHNPPDPTSPPPSGSTNLPLRPRTHCGRNPHPHRPRRSPKKHSLQHTTTTREHHTADPARTRRTPRPTPTTAPPSAPTVPPPTRPSPLQPPPATPSPFPKPNSKSFPSPTSAPHAAHLDTHCPSSHTFSSTTNSTRTPQPNPRPPRTRPQHTQQTPPPSP

SEQ ID NO: 967975 - protein, 144 aa, Homo sapiens
ILQLASHQYETRPSPLNIIETRPPLQPLSVCVGRCWLGPGALQSDLCQDWFHGRCVSVPRLPLARPQAQVPTSSPLLGLAGKWEQSVSCVSLSARLEHPGLWSLQNCCALPGEPRAQERAHCRRPEPGSECDVFGGADSASTVN

SEQ ID NO: 967976 - protein, 151 aa, Homo sapiens
GGPSCFNKKNPSKNCENPPPGGGARVNLRGYGKNFPKPPSWGGRPIKPGDWGGKRRPEGVPTQRSSKHCANFVNMCSIQLLVLAKDHENDRYVGRIRMCVPPQSCSYREANMWHPFFLRQTSYCDGRRLFLHHFSRAGTSLEKNRHLTTRS

SEQ ID NO: 967977 - protein, 261 aa, Homo sapiens
PFIRIERLPRCRPVSRGRPALYDLGMWLLQLQKKQRTLLGHGSQEQVKGKTHDLLSGADCMHRALAPQSSSSQQHLQNQKLCTFLAQPCMHSRALYAIPGLDYVRHEDTYPYTSTDQVPIQHELFDRFLLYDQTTAPPFGGSGRRYGPGKRRITPGLELSDVHRETTENIRVNVTSHFYMGMREDQNYHVYWWRYCIRTENLDSAVVQLRKQALEAPPDSLAPWRQCEGQGGRWPGQPRISNEPPAIQSKHTVRMQLQWPL

SEQ ID NO: 967978 - protein, 351 aa, Homo sapiens
EQKKKRTFRKFTIPTDVDLDQLLDMSYEQPDADCTDARQRRRLNRGPAAGSSTPCLKRLRKAHDRGASHGRSRTVRSQTHLPATIIILPEHGGPPWWRALHTAHTTYQPRLARSSPSMIGPLPCAPHFSHSTYQAPLPAMARTRAIGGPPQLPTRIYNPVLKLTLASRAKLTQRATTAHPDTPPAHHRPSHTPAAAHASHNTNTAASEAARVLRGESAYNTAVPWAMPNTKRSAKRDESYQQTDYRAHATPPRARATRLHCAAQPATIDDRRPARNKRDWDAQHNQEITTNKKDSDAVGRTIVGQNAELTGRNYREQAEKPPLMRVCLLDGTNETSAHLLATASVLSTTSP

SEQ ID NO: 967979 - protein, 152 aa, Homo sapiens
MSEVDAHTQICAHKHIIYTCYNVNMRYKRRRRVCTAHYPILTPPAVLHNMSALYTYTRHTHLPKKNNRRSVVGSKNQHTTPRRQTRRVPRCRSPHIAHKNAATLRAPTADPTPKEPAPPPPTKTSLLNSHGQEHGRRKVGVSQIQKGSNKNE

SEQ ID NO: 967980 - protein, 154 aa, Homo sapiens
MPQTVVRALPAGSDAYSTSRWYRPYCQACEASCIRYTVIEGRYAHQLFILLPSKQNKLGASRKGSCMQSSTNPARQPNSGIAIYNIESLIVHSASIQQYKQPTNSTINQPQQQQDYIIPTPPHRDPASNIAYALATTWFRFHTQHNPHRKLRYY

SEQ ID NO: 967981 - protein, 285 aa, Homo sapiens
MVVIGHVDSRQVHHILAICIYNMRCASDQHEPLKHFEQGGCLRLGKGLLHSMPGLLDYTEILTVNVGIIHLTISFGGEFDDQYKVPMLTYQLIASSDTRDFYEEHDLQRHTLTGLHCCMLAESACLPALLRLTLLAQPVLIIPTQLAHAPRAALPHSWRYDTWRCWTTTYTVLSGAFTHTMGLRTVTRTPLAGPEQDDLLARNMCSTGQRLTAAYSHLTRKQLAPHQNPRRKQTKDNANLMVAPQPQSVGARSNIALNPTNLALQNPPQGCINTHIPFGDLQPRE

SEQ ID NO: 967982 - protein, 477 aa, Homo sapiens
QTKLLFWKNWAVQYLKKNVTLKEAILQLSFRLSGAVHCVVYGARCCHGVLQWWWELRGRGRCGAIHGAGLSGRTPRRCGRGDATWGILEKIPWTRGRGTVVPRPSVDIPPKRGNVPHECGETGGPNVSRREENSWTNATWERVGAPPFGPFPRVGGENVEDTSEVVPFLGNHSTRGTQRRGRKRRLGGECSQSEVEHEGSKTHNLGTKLGGWAHASGEHRGEESKTRGQKSAGGVGTTPGQPGEAPKASPQKAEPGNPSIEGSEKREQHRSKSNESTHFDPVTSCGARDTERGRKRPRWKGDATPRHTRDDEPHTNCASWRHQGKQVAQMGTEPKEKPFREQQHKGALTTEAHNGLVVGPHGDRKAGYTANGSPGRQEDKSGAHHRGPPGRVNLSARQQRSKKPHAVGPRSSGCHPGGIAKKKVGHREHHGNRVRKRRPQRIDTPGKRAAHTSLKRDTNGYPGEATKQAVANTREQE

SEQ ID NO: 967983 - protein, 423 aa, Homo sapiens
TTSDSCLTHLHQPHQLSINLAMDHPLMRRDAVIIGISRLRLKSALAHVHYQQRHTYSPIIPILDYYRNHQTYVSSTKLALAVRHKPLTLLQDHHTHATKLGSANPSNYQTTYTVPSTLIIFTSSNSSLTHPKKSHVAVNPKPYVVHTFSSSLYLHRQQHTQTQHANKTQTTHTKKRQHRTKIPTRHPVNRETQKHGNKVTTNKKQKTRTRHQDNHTTTHQDHRNNMAPPEKQPLQQRAGPTTEPPHADHHRAHTGTHHTTSRPQASPQPKTNEHAPPHDRPQRTTRSTHSPTGAEQHRAHTPKPHPHRPQTNGTQLDHQNHTADQTTPHTGTDSLETRRPREPERNDETDEKPKKGRTDTKILAESRTRQNRRDKRARDEKQQRREQEGKGTTKQEKAERNNAKNQKKRQKRKTKQQARQRKT

SEQ ID NO: 967984 - protein, 246 aa, Homo sapiens
MRWPTPAGGGAYRRGAAGARINVAPRRGPAALRGAGAAAGAMQYPAPRSQAVLGSRGGLPLYCAHSQLLQTARPRSATFTIEGTLLWPAVGHAAQPKGNEPYRDIDTEQTKNQSLSNKNSVIHRITGKAHEIVTKNQQPRKSTTKRAYIDETKSRHKTRGQGRGVEKQRNPRGKHSEAARHNEKTTAYPTREKDSCESRKHTPTKPPPPRNSQYSTERHGSEDSREPTITTGKTQHYAYEPADDAT

SEQ ID NO: 967985 - protein, 142 aa, Homo sapiens
KYGAVMAMYVLAMSLAELQSRWQREHPVPPKNRSALFRLRPLEELAVRGCGFSVNLGPIGVLREELVRNDLRSYCKERKSQVPVSHHGITRSLTRILAGLISHSEVPSALVYPMLTLVGGCHRPCCEPLRLDLGMCSTLGLA

SEQ ID NO: 967986 - protein, 146 aa, Homo sapiens
MTEHHWLECTGGNTSFYSLLKQQYIEQSHGRKFIITGLIAVQSAHRAATRGFTSLWLALALAELQWFVAYYSRQANTSLDLYPDTKDALSICVIAGNCTGSLLHKHRLRGWGLVAFWGLGVGTSESTSGSQHPETCPHHTTDQGPT

SEQ ID NO: 967987 - protein, 71 aa, Homo sapiens
ANQFAACQRALSPSPQESAGSSLPTILEYDLMTSIPRILRECTTSSLSKPACAQLILRLGILGPSTLLANK

SEQ ID NO: 967988 - protein, 40 aa, Homo sapiens
MAEKDDVNTNNYVWYQTPRLDSVPKNAPTNYDMALETRDH

SEQ ID NO: 967989 - protein, 196 aa, Homo sapiens
LKADCDSPYPHKGILTPLRAALEDSGPEAVPGGPRCFPPAKLCLMESMSSRPGEAALHRGDRLCHDWLLLFRTWTECTKLVASRRGFVLATWGVNELPCSSLTRVLGDAVASGCIDWRRRPVKSMFILGDNSTYGSCCVDVLGAEARLELRLSDHFGPCLVNALSALLRLSVGFVLRSRSVALGALCHGLWGPAYP

SEQ ID NO: 967990 - protein, 165 aa, Homo sapiens
MGNRSFPFQLFGKELPVSVGLSPRIHPQYTKVDRSLAHDGHNLSKRQGKGSLTPTGWKTTLVHQIGNVWTSFANEQNGGTQFTSSSRGTKQLPLGSLETFFPCAKRGVGNLKIFGPPLWWAQEAGFLRTQHRHRTGGNEGFTLCPHIAHSHSERPLRHFWEPPNR

SEQ ID NO: 967991 - protein, 82 aa, Homo sapiens
VTASHSLPSVHLFTVTSRDCPKGPPTAVSYSPQSAHPVRRSDRSSLLSTSAIDRSSESSSAWCAIDYHLMDVRVRVNDSARE

SEQ ID NO: 967992 - protein, 354 aa, Homo sapiens
MANNSISCRVCAIRFHDSMCSFTDVSQEKLEAFVWTGESTSVVLAWTPFQFLSLQRVLTPGFPHFSVLHPISSPPIITHALVRISRGWPPLLLAFGCFGIHFVVCKLETNCCFAARSPSRVFGLPDRIVTPLLKFSFSNSGGIMGSRKGSSTACLPFASWGIVLPGCGTPPLFPGGFEGGLPSGTWAIFRLSQSPYLAGCQHFGVLFGRPFVRRFCSFFSRRERWFSSHTQVLLLGVPSPGGAPMLIPLAVWAGGVGARMGVVPPQALLFFVVCPPRSCCPPGQHAFPTAAAGNAVVVECPHGTGFGVWRRHPPWAQPHLLVATLRHTACLLSTPVCRSAGRTPPSCSCHASPL

SEQ ID NO: 967993 - protein, 217 aa, Homo sapiens
  misc_feature (67)..(67): Xaa can be any naturally occurring amino acid
MAKTEALQYNLPPRERMDLVCPGTRERDACVEDRWCGQWSVECHWYTLLGGFVGLHLDGSFCPLTPXGIVRPDTMLVVEQFDRGTVLQRIVGGGHSLEGWHGGSGFVPRRPGPKPRAGKGQGAFPTGGTLGGDPTVRIMKFTGGIAAGRQMSSPKYGAHTREWGEPLGATMSGPRVISKNGKWGGVHGGSESHRASRNGDREPPMTEGENAGEDARK

SEQ ID NO: 967994 - protein, 244 aa, Homo sapiens
VLYELAQYASEPSEQELLRKMASSSGEGKELYLSWVVEARRHILCHPAGLPVPAVPPPIDHLCELLPRLLGPLTYSIALILQGLTPNSVHDLCRWIVEYETKASAASTRAWTDQLDCGPMEPVGENGGRAGCVSHCSCRIGPRFRLPFKATHACHHGGPRHRGWHPSVGFIQERAMAADQQGQGGGGDSCCTTAVRRSDEDYLYREELGAVPQGTVRSPSSVAFSREQSTGSTSSTVKQDREHR

SEQ ID NO: 967995 - protein, 92 aa, Homo sapiens
MDTLLSCDLLLIVYASRPPFVGSIQKLQFGVQKVRALSSDAEVVSVQGPYPGISSSYVERGPDLMVMQSSVEPHLSVSMSPGLFSSSQFCWA

SEQ ID NO: 967996 - protein, 289 aa, Homo sapiens
CCGAAGCGLCCVAAVWLGRALCAGWKTNSVSSDGPAGQYGHPVRILQTLVGLSSAMDCIWFSDRKYPPRHKEETPCNYDYRAAQEEACMGISSLHNMEFHGSEYHRECFCDIGCTGPCTQKLRGVRYRVSLYLPKCPRRIALCKYSLRSTQAWVVMTAKTACPDRWEEFHVAAPMHEKRALKLIDSQGSILGYQGMTITGIETWLVPTRRWNEFAHESGASKRPFLGMASCEMTTVWSAHVSRDESSPCPCFCECWGLSYVTGVFNWLVGPEVEGFYFRRLGQGPGGAL

SEQ ID NO: 967997 - protein, 226 aa, Homo sapiens
MWLIEQNYHFGAYCPGHVGGAPAVWAKCEPTSPLVQSYANHRSSAESCRVNPLKLSSRKSGSVVPGNLGRTFRFYTRDRECSRKARLLVWRENTSECEIEGSGSIGFRAPLKWALVVSLLRKKGGGVFLEKLFHKGPEEPSSRVPANPPRNALLKVPGGQFSGTHGNRVPGGPGLGEKEPDGTWTRLVQGVPPGGNKVGDPQGEGIARGGFHTVPEKKESAKPEWK

SEQ ID NO: 967998 - protein, 249 aa, Homo sapiens
MGTRERRMMWFAIELSYLMNTIRVGHSILYAQHCVWETLGCTAKVTALSTAVVALQYSAHCVLNASWETCKTGPFSREPVDGLVDTLGEVDKEPLGLEQLGHAKTLDLHEVKPICAVLEYHCVPKVVSPRGGSGVVRGRTSIIAIVREANRVVHVRALGGQGPTLGLGILEYLRKQEYHWGIRAAFGSEDNTQFNKRVRRLDVGILPLLNRHTGEFDIGIRAKCGPRIPFCPVIARRESILPKGIIGRL

SEQ ID NO: 967999 - protein, 117 aa, Homo sapiens
ANTNRTWSGDRYLDCQCAILLGEISDFDCELLIEGVTTQYHSVVKAISIVHGRRNLLTRDLIERVVPRASCSVFPGKWHGRLPVGVRVASTCLCVLPCQRIRVCAHCGCYLLHMSPL

SEQ ID NO: 968000 - protein, 57 aa, Homo sapiens
  misc_feature (1)..(1): Xaa can be any naturally occurring amino acid
XSARGLHTTVVPWYGAAVHRGHVSGGLFVTGLRALSVSVAPHRVGAGHSVLCAALVH

SEQ ID NO: 968001 - protein, 135 aa, Homo sapiens
MAKTRVNLVVRTIARFGNLAFEPNGSFEVAYVESYYWGIYEKNTINLVQLTNDRDHVGRSITVGPYVSVQVAHLWLCMKPKRIEKAGETLYVQGDYSRDKRTYLYTNAARRQPHNTPSGVRVNVDAPIVERAQSS

SEQ ID NO: 968002 - protein, 638 aa, Homo sapiens
YRVIYDEEKLEDDSVLRLCRETTSAIAVVIELRDTGSIQMHAFETCEQCTMKVPCHFLAAGTISSHPRLNARMQQRIIDTMEKVPPLMNDRDVLDVHRRVTGNDPGVRELIRNECPQWRWNLTHGTEESLLLTIHRSVPLFIGVQVDTYRYPEKRKRAKRAGNRYEVTESPVVGSRWVHTVSMGYNDWPKSKYQNPELLSPYSKSRVQWIYHNCKMELERAERNIRGFPYVRSPPVVSQCRERTKPIGGTSMKGKEAFSEKLKNENLSCKIPKWLTRYLLGQVLSRYTGVQYALCQDPGLIAGPPKGDRALLRGNVAQRLVCKTLISVHTCVVITPTVNLPCTNHVGRLRHTLWVAPHLGTPVQCANPDTPLRHVGGPKVRHWEHRWCMAQQTDTVIRLAERSPLGDANSVVYRYENATNQEPRVLNKVRRGERLVTQYHGRTSPTEYAPSTFHKTQYEFTGAIITTPTPVSRVANKRPRGYCETHILAYKDRQNIGGNKEAILTKHPYMMVVGEHNVELVSIQATRLHESDGDGEGRSSTPAEMCVMSCQRIGEAELVLEARSRSKECRLATCAPRAADCHSVKMIQRHSSGVCRSTERGMASSQSNEDINCLIAQTEAAPIPAVLDAAVTRRTTEV

SEQ ID NO: 968003 - protein, 108 aa, Homo sapiens
MTPGFRRCIDIYAKSGTKSLSRQDPRTTITPIGFFMRLPATNLALWQARDAWLIRHEILISSHLIKHVKRIYTSACEQYIGVLHVMNYDIEDRTVNTETEQAKVLQNG

SEQ ID NO: 968004 - protein, 139 aa, Homo sapiens
MGLESLVVLVRVDSHMRGSTSGAQYDSYLFDPCWNIESYTGKCDVSWRKLAGSACSHAWGRRESYMSVFECLSVGLIPIDLIRARRQSEQCRLDSFRVVPLEGSWCRLAFCVPSQSRYLPRSASIVLSIRECCMLAMTG

SEQ ID NO: 968005 - protein, 67 aa, Homo sapiens
MYHKQSRRGDTALAHDDLIVKRAPYLAQRHNRDRKPLSKNNRGKKNIQRDVYKAHSYDQVRYNNAGH

SEQ ID NO: 968006 - protein, 170 aa, Homo sapiens
MSNAIQLPSSLLCSRNTTTLIVRMTEHDRSLTVATLQGCTNGWCNPDTLLPPLVPGALSSPPLEIRPYIMWKLTRDETKYGIPRSSALLRVHSHLCYWMCVISSDGQLGLSGSWDGTLRLLVICINGVTTNDVDLVSVHYQRMLLIVRTCSSDKPVMICLWIYEIKTSQS

SEQ ID NO: 968007 - protein, 145 aa, Homo sapiens
RTRFFNRERPAIVEEEETKTYKDLGVKDVCVEASEQWDGQNPPRYRWSYSLALQGRDIMGLQETGSGKTGRLCLTILNSTDGRTPQQLSKPVSIYHHRTREDWTHTEHFNSQNRRPQGESLIKTGRTPADARKHTRKRSDNQTTK

SEQ ID NO: 968008 - protein, 266 aa, Homo sapiens
MCTRPFNWSVLSRKENRCAIRQGAGRRCVVLEVSAWLSVPHSRGLLVLRMITLGHRQTKRDPSSKMHCGAEAEAPGVSMDFVLVSPCQLKRAGVRAPGTVRLRTACYPCLGHALLLVNQGGVSTLYCVDHEPAVKEYFPVQVVQLHGLLGIYQELLGLAFHHEEGASAWHEDVRLYTARDAASGEVVGKFYLDCPAGKESTVHAAVWPAAGCLRQDGAAKIASRHGGNFTKAKRAPRVQHDEVRLLPGFGHVIAQVLPRDWHVRGP

SEQ ID NO: 968009 - protein, 176 aa, Homo sapiens
RIPLMLNDSGSVTVPCPSICRQFSLEHVHGSGPYSAPSPAYSSLQPLRRLMLWQLCDPIISDITELAPCQPPMGSPGGSIDERPLSSSPLGACQGGAPQPRFRDSPGKGGESRGPIFRGTPICVPEPASCELHPCGRVNLSPRPPVRALTGRQGGQQRDTGGARGPRTSPQRFQTS

SEQ ID NO: 968010 - protein, 251 aa, Homo sapiens
MKLLKRVAAPKHWMLDNNLIRVCLITTSIQRSPQVERVSPPHHSPEEPDVEYALRGRLKVGKSLHACGFINNSMAMVRRREYNAYPVLPSTGVSSAFDEGRERIFRLTLVTPRVRFAVTIVLHLREAKVQVCAKVRTQIYMWRHEEREYPSSGDLMMSRTMAVPRCPSFKVNDTIQIDEETGKITDFIKFDTGKPVSGDVAVLNLEDIAVITNRQQAPWIFDVLHVQDAMDNSFATRLSNIRLLGKGNQTM

SEQ ID NO: 968011 - protein, 219 aa, Homo sapiens
  misc_feature (175)..(175): Xaa can be any naturally occurring amino acid
RVRRMATDASSSSLEKSYELPMAQVTHHWASERYPAVRQATDIQTSTYPWAMVSLCETSSEHHPFKRPLYESVDVEQSATDLYANDGAVGRNHHVSGALLTGCRRRSPPWRPATMKINDHRSPQRRKYSVWLGWTPSWTSLSTFQQMWISKQEYDESGPSIVPPLNAIYRRTQQXAEAFADMGTSGRIDNLPRGKVHTPHASLTKTGLSLRKEIVLEAS

SEQ ID NO: 968012 - protein, 384 aa, Homo sapiens
QGCCGREHQPGTYTRGDGRSPHPGPPVMADGSLDRGRRRWVLIPRVSAGEEVVNRVWDKLSPVHERIYCALSGSAADAQAVADMAAYQLELHGIDLAEAPLVSGCCKLWPRKYSAYNIIERTCLHILMVRWAGTNVKRRVRYTGTLGRELLTRQPLAIGWLGKHLYLWLTVDAAYKPGHVSRGVHALSPTDAIGSGHEPGWLKLGVSSNWLTITSCRLWHHRVILLPMNLPQSTDAVNRTPGIPRAYWEIKLSQRPYKQSATTAATNRPRHRSRARPKRGPRHTAHPRAGTNTSQHPLARPRPPDGPSQRQHRAQHTPQAGAQTAEPTARDHPPVGGASTAPSDRPAAPHTQPLTRTARAEPQTTTTPRTTSPGAATRPRPPTR

SEQ ID NO: 968013 - protein, 73 aa, Homo sapiens
ILEVVPSPCSASRFSCFYMPEQFKVVAEAFEDDLGGHCIERAGPANVSTIMFLTKKYKNTLCAVRIAVYAPHV

SEQ ID NO: 968014 - protein, 86 aa, Homo sapiens
  misc_feature (40)..(40): Xaa can be any naturally occurring amino acid
  misc_feature (54)..(54): Xaa can be any naturally occurring amino acid
  misc_feature (67)..(67): Xaa can be any naturally occurring amino acid
  misc_feature (78)..(78): Xaa can be any naturally occurring amino acid
MNDDYEYLRSTTSGTCGIHLKPSLETNEDSTSLRDSILSXLFCERTLQSAYPRXESIYEIALSTPYXRCEHMLASILXKTGGTPLV

SEQ ID NO: 968015 - protein, 139 aa, Homo sapiens
MGKKPGVYIPQDLTAFCSQFPLRKPLGALYTGSNFAGGENSPNFTLTLTTTRGTPGEGTPRGTQDRQGYLRAKAPRNTPRGVHTWRTAQNWVQIESVPLEQHPGQFHKDEQQALKRTALPKRGEVVPKKTQGVVPQRPD

SEQ ID NO: 968016 - protein, 179 aa, Homo sapiens
MTLSSGHRRLIGSFHEHITNRTSPAIPGQSRIHTQTDSTSSTHADRTDTGVDRPRIGRPYQTPYIYHISFYEAYQDRQDLQRLPRRSMRQHILNYPHWSIHSHAAACPPSEVPTGSHVNVQPMKSGPDHRRHAGDSEPPKRATIDPTELSRLEKSISHANHYRTPTLCTTVICTKNPPY

SEQ ID NO: 968017 - protein, 253 aa, Homo sapiens
MSRSVHGTILGVTKGSIHKLRSPGRRAHWYLQAYVTAGHRGPCTLTATTRTQTAYLTRAWERMRKVASEAHSMRPPYRQLAADPCEQTATIDHMPVGLCSNQGRLVATCYCLFRCPTPQVTDPWGQYFDMTDSRHWYQKLNRSLGLSDSTFSTITDQGATPNIHKTAIHWLVTPLMPKVGFQDFWPLPRFLIYTLRLDTTVLHYEESYKLPPTWFLPPPLHNNACGIPNLLSSLQPYTVKNELNTASGQARAH

SEQ ID NO: 968018 - protein, 241 aa, Homo sapiens
MQQATRLTYKHRTNRFVRMRNRNCDHTHHHSLQFSTNLYLIISMTITLGSAPPHNRQPNHGRRGWYAPSTAAAAPARDRLRATRAAPAPPPNSTRRVPTHVHARPARQRTPHATSTNPTISHPTPTRRARPRTPVRLLALPVRRPHRQPSLGCVWLSLPPPPGGGGLACLRGRLVRRLPGSAPPPLTRVRPPPPQRALRVVAPPRRGAAALLLGGSSGRSVPARAPSRPSLTDSPPSHDVS

SEQ ID NO: 968019 - protein, 363 aa, Homo sapiens
MKERGCAFVLVVRIGDFLLIVTPRVSNPHVQTRAFIYSSSIQKTPFRTIGLGPLFLSPYITLRPDSARCGLQNRIVRKCFIPTSKSHNFILLPNNFHNNRKTIYKTKNSKEQHKKNSKSNHNHTYPQHNEKEQGHNKKNKKQRRNPQHNGNNEKQRTQKEEHMKKDQEKNDHSTTGSNSNKQKQQEARETKRHSKTRDKRDNTERGHTATQNKKDTRNGRAPTTDPTHEQHKGGKTKTDDTPAAERTTHTTGEREQSNRNTTTNRKKRGGNTKMDQHEHKRKSRKREQQHKRSKETRKEEENQRKNNKKTKRQTDKTPTTKRRRQLETGAATREDKDKTTTNQQAGGPDHNTTESRIQRHEAT

SEQ ID NO: 968020 - protein, 91 aa, Homo sapiens
VVLLGCWASVSAQTDASPAGDTEGLNSTEVALATFVNFARRTRPPGISQVSSGPPLAPHRSYHPVHRYSWADSQVLYSKSKCIYFIEVLSR

SEQ ID NO: 968021 - protein, 304 aa, Homo sapiens
  misc_feature (113)..(113): Xaa can be any naturally occurring amino acid
  misc_feature (159)..(159): Xaa can be any naturally occurring amino acid
  misc_feature (248)..(248): Xaa can be any naturally occurring amino acid
RVNYDEENWRKIQTHLSEQTTSADPVFSQIGHRIFNDAFNLVLCPEGSLSLLALNRHPSSCIEEMTDTDPWEVRPDAAMSILHELSLFDLLRASHGPTEEPTCKNAGHYPVFXSCFSNISSQCNAGSAAFPVRRPELAPVHADALSANHATSLALNRAXFREVLERRCVVLALCQGKMDCDEAPIVHIPRSQPRPWRFQLVLLADAYSPQGLGQRAQWRLSALGSQFPEIAYTWSHEGLTKASGQPLXLAVKRVRWIPCNRCTLEGLHPCGTPGTLNSRGKPGERRKPFFNPISIPGLLPKNKQ

SEQ ID NO: 968022 - protein, 223 aa, Homo sapiens
ARAWCFLSGRDHTGVTAETGQARHMLGLCWCIIPCHWVNSLPTYRRDEGCLPWALRALMRFVVCAGSPFHRGAGWLCARGMCGARGEWCMPLPVQVVACRPWLIPPTLLEPWHYWEGLSARGCIAIGVSATVQRGGAILNNDRREAGAIQSSNPAVANKSRTGEALMWPPWLVSELQPTSLSSHVHLVRWRMSARISPTPPSNSVEVQVNVMSENILTGAQKG

SEQ ID NO: 968023 - protein, 510 aa, Homo sapiens
MSFVFLVWSLGLCDCRCACVWFRCWSCSLSSLYVSSVMSRFCLLFVFLCSFTAVRWFVCWSPVVCVVSFRRITWWSLVCLCARLCLWLCSALCSVVLCFVGSLLFISPFFVVPAFCVLLFCLLLALCLFVSCVFSCPGRHVFLMCRSLCLLFVCAVASTLCVFLVLCSCVGAVLRAALFPAVWCLPFACAYVLGALSLRLVSSTLVHLVLSLRDTFFSASLSGTFWYVLCTLQSSALVSSVCASPVSLLVYFVRYVLAAVCVCCRCVAASPASCGHVADASAYRSCTRFRSFGSLASAFRPLWGCAAGLAAFVSRVGTCRDVSVVVPRVARPLSASVRARCSYWSVHVLASFRCVCAASSQCFSSVFADTVVSLSCLSCRAIMVLASVVRPYVYFLWSFSGCVSARLAPPVCLASSLLRFLGRSVARSAGGARAARGGRLKDVRSLIGVCRPGRLRYSSRALVASCLLSVPCLSPTAVSLSCSVAPSCRCGVYCLAFSVRRRCLLFCCCA

SEQ ID NO: 968024 - protein, 363 aa, Homo sapiens
SRGVYYRNILKPQAEKSVPIQVWMWGVEIPPSELHSISEGPSVPWHVSFFFPLFTLRPCENTPPSVSREKNPKEKAFPPVCGRGFPSRERVRVFYRRQETRSWSLSEQDSQPPTPNFNVVDLVVRQPASQCGLCTSAFFSGVSSKENTSGDTRGAHRVTDVLTWAVGAHTRHLTVPLQHSGDTRNFQGGPLHSLEIVKVEIRDTEGPLRHAGEPRPSGAAQHRDGGDFYISRLTSLGAALVTQGPSDWGALGRDLPRLITFTGTFRKHLLDKTADKNRGNSQVNRIYPGKRKSDVTFKINQKRGNRHLLQEARKLTKLTEGPSGTHQAPMGHISYKAEEVKPQECAYNEAYENPRNIPSHPGY

SEQ ID NO: 968025 - protein, 95 aa, Homo sapiens
DVDQPSLLAKQTFMTIARYQRCGTPGKLLNKELPLVLQVGDVPIVCFESSAFRQTAGRLTGTRTGELAREQPQSENCSMRESSSVTEIREIDMQL

SEQ ID NO: 968026 - protein, 193 aa, Homo sapiens
LGLELSLKLSYLEECLMDGTCDPQMTPVTSGPQWGIRLSEHRVSANKRFTYSMLGVSHHNVILAKAASAIVSAQCCYGLSDEPPALLLDWLTPCRCSRGWVWQLQGQHDEAWRLAGTGQLAEPFTVLTAPILWRSYLEWSRDARADTGRWLYTRVDSSARCNAGTQGQVVAPALRFMPDAVRRMIPDDRDYTL

SEQ ID NO: 968027 - protein, 102 aa, Homo sapiens
SVLRAVLPAGRGSSSSARLAPPGHTGFFPIRRSECGSSRACKGAAGGSFSDDLERGLRDCAPRRAACGSRHARRLRSRRLRARLGLPPASCRALGLARHRGA

SEQ ID NO: 968028 - protein, 347 aa, Homo sapiens
AAKGFSWDESGFCLSFWMHIPLKPRTALWYRLRVPGDSRISEDTGTGTRYETIPTLPSRRRQTYMLSKCTTTDTRAHTRKHTRRERNLAGPRQLCAPLLRYSILRTQTRPDTEHGGAGETGSRAASSRDRKLRRAVRDPEDGEALKYHTHFSELLDEYTQNVYRVQLLNDPFLSEKSVSIGEWNLPRQYPETISSRLSTSYSLLRGGSGPSRLHHITSDKLRVTDAGGKLKMRQCSERLSYQSIKTAPITENQAQHTSRLSSVHPTPPEPECTRRNLVWHIHKRCTQNEPVLKETRSVRANADAQKAVTYMDSSKSKTWKKTEKDYTREDKRNDNKANTRERIESNE

SEQ ID NO: 968029 - protein, 81 aa, Homo sapiens
LVSGIFGSYTSIAWVLDKLKAESVNVVSPYDISLWKFETSKYYSDYTYRKPQDTETIIKNIDYRDILRLDCSCPRYSMLAR

SEQ ID NO: 968030 - protein, 291 aa, Homo sapiens
MVGIDFTEECKCEVDMFKTLHGSALFSTRTHTGACTVTFDSLDSGIKSDQVITAINGIQDNNFMLHYESPPYAPNDNVAKSLVQLDRRTRAMVLLLRKLAYPVIPRDFPFTTHESHSANVLESPLAHLPTGTLLCRHAPPIHRIHGRSNIHSAVALRYPTTDGHPQPILTPPHIADPRTPTPLSAHWSIHKGQGPTHQPAPKLTGTPRHSQAGNSNNRDYALHLHGGHHHRFAATTDLVPSQTTAPPPSPPTDIARATDAPPTGHRAAPPNHSPPHTRPPRTQPPRGNAPR

SEQ ID NO: 968031 - protein, 184 aa, Homo sapiens
MSSEAELRVPPSTGELTARGARDIALGGADIERRSVSTHPPRGTGPQRAYCDCPSGQQCGFSKAMSTSGFVVDKVQVTGPGIVPSGATSMDDEVRAAVPPGLVLGPWTGLQTAAAAQGPRNRTLQRQDGSLLGSKVTPATTLTVRTTGQLPFRSPGNLPQPRRPEPDPTDDIPLASGRAPVLKP

SEQ ID NO: 968032 - protein, 517 aa, Homo sapiens
RLSCHSFPPAAQEFDLQGIWSRYRSWNIMLVDSKIPAFQPKADFQIRHVKVDLARFLLVFSLILNSSMRFKASSSLGLMRNSMAAWQLNTHTRIAPSLMHNPTHASPHWLNASRLKPHAVFNRIIPRPTTGSQQPHIVSLHSRNSLSDHSRATTLEHPRAVTLASLARSPRNIASKALRCAPHTIAHRRLLPLRNVAHNQAKHTIAPRTHRFITRPSGHASSSHPSATGGYPPGSGGGPNWAIDRTDTPRHNPLHPSTPLSANTDNSHPSQAEARNLAMDHEEGDHYALTHSLGLITTSWAHHSARHFIRNTFGFGNSAPQHTSPPGATTTVVPSSPAITKWIEDSSPFPLPPCPTPLEQAAAHASSCEPTTNTSQPAWHNILTLRSLTRAPATHDNTHLTTSPIAWPWSQTPVSTTRPHIREPTGSLHSLRLVCNFIYSGSRPDTSTISQQPSPLHTRATTRLRANHLQADKPLDSPTHNIITHTLTRMDNLLTACHIHTRRHSLTTANSDAKLNT

SEQ ID NO: 968033 - protein, 401 aa, Homo sapiens
DEMKKKREMDELRSYSSLTDNVDTHYCLQITDWQLTSDDTFMENGRHTRTTHTDPSDNDCDMYDDQLCSTVCGIHRVLLAHIINNHHTQHIHTLSIPHHNETSPSHYSQRLYTHTHHLSHDLLHLAIAPSHTTAPSHASSLINTISSRYTSATTPIHYTYTTAAPTLEIYSPNAHPLLLCVTTSADTTATAPLTSHNEVTHPAQQLSTPHIKHTFGHTLRSSLNTTKANHTLWTIAPSMAGSHNIPQPVEQHKPTALGFPSSAQPRRALSSLASSYPPFISDAALQTSLIHHPYSTPVSHPTHTANHLLGFSQLGSRSESSLHFGSARPRVNQRPHQDIPNPLGGVSTPFTAISSQRGTFTLGQRYHIGPTHQRPTRTLAFTTRHTSHVTGRKQTQVLTRS

SEQ ID NO: 968034 - protein, 234 aa, Homo sapiens
MSLPTHIYILFPSPPPLPISSTHSSALLRLSPIPPSSIPLYDHTSTRLSSPYLKHTLNPLYMTHYTIMHFSFTCTTLHWHPSSLTQPHPTLSALTLPLDPPTHRPARPPHTTTLHPRTQTSHIYRPPHSPHQPAPHYPILLRSLTPNRHTPTTYTLLHYLNIIHHRPFQIPQLSHYTITTLTHPHITHTPSPTSSHNIYLILIPTPHPPSPPSPAPSPPSLLPLAPLPTLLTPP

SEQ ID NO: 968035 - protein, 67 aa, Homo sapiens
NVELGLWLQRVEAPSCGSFHVVFSLQVQQKSRIEVGNLHLDFRGVWKCLDAQAEVCCRAEALKDNLC

SEQ ID NO: 968036 - protein, 101 aa, Homo sapiens
QRTVRSRKNNYYYLSSQYCRNFFMITLIYKSVPCMLSRCTAITATSQKACYFAFLCTSMTWKLLHRQHSSSWLGNKAQQSSTPRVSRAKGHRLLFPGESSG

SEQ ID NO: 968037 - protein, 302 aa, Homo sapiens
MTNTHLIYHPPYLSLGGLTTLTELIYSPHGPLSKNSQQHNSLIIPTHHSHHHPTLTSTYYLRLIYSTSITLLPISHNVQKSNAAHCNTTKANTKHSHTLSRRLTRQHLPIITLDIATNSAPTRAHPPQPNHTEQTRAHRTQPEKERKPADARGQRPQPPTSAHARPRERPPSKAGDSAYQRHGNNEAEELHAATRDCQKRSHRGVASSHRRTTPSHADDESKRSRADMRCPSIVPRTRRRHTIRAGINKPRRERAGRRRVQTSQRERRVLHDRDNNTNIMKRSDRSVADGTRSEAIRGGDAS

SEQ ID NO: 968038 - protein, 418 aa, Homo sapiens
HYRCRRRSACDSPGPWLCSLEPHLCPRPDHPELTTTMRSSASHLLSSDRGRTTDLILDMQTMAVFHYSTLDAMSSPHHETSIQRPSMPACMDAALIHDCHSGAQKPDATRHDHILDDPGSWSWTGTLLHRLVGLGWLDRLWEHSTPDPCTTTWHSHKKDTIERGRHKRRAQGIHTKRGQQTPGTRREWQSSENGIKMTAADYDFFNKASYHSPVMARALAHITDDTTKHRQPNTQKPPTPTRHPPQPNQQTNTNRSPHQTHTAAPTPAPPKPQHRKTPTHRPPTHTTTQKPRQHPQHSHHQTIQRHKHQHPTHPQQPPPRKARQTEQTTQETEHEKETKQRQTNQPTRGPADEAGNGQRATAQHDRGAAPEPRATDTAQKRKHEATRSTDDKTRHNSSTTDPDGVTRAQEEDSHRTKK

SEQ ID NO: 968039 - protein, 194 aa, Homo sapiens
MNVGVAHSEVNPNTRVMNSRGIWLAYIILVGLLHMVLLSIPFFSIPVVWTLTNVIHNLATYVFLHTVKGTPFETPDQGKARLLTHWEQNGLWAPGLPLPRKVPSRIFSHIGASYSPWPSFYTRVVSACASFPHSHTGLIAKVYCWPKLAPVPWGSCLWHQQILRDGFGDSSMGMGKALKQRTIKHQKQHKPHTT

SEQ ID NO: 968040 - protein, 500 aa, Homo sapiens
NLHAPTRPHTASAPARPLRHSPPPLRLPRRLRAPLPCPSLSSPTSLHPHALPARTPLHYTASHTPLPLCTRTNALHAHCTPPRTCTPPAHAHTHTHAHTQPRLHAHTWPPPRTRTRHAHCAPTTPSPARARAHDTHTCTRTRTARALHPPRTRHAPSHPHAHRTAKRTRTTHTHTQHLAPSDLTPPRALRTRATTRTRTPPAATPCNQAALSTTTPATASGAPLELPATRANGNASASLAEPPKPPTRKHPPSAPCLAASNFLNAAPVATTALFSNHCVPLTATPTKHPTHAHCKTATQTLPHRPTQQRKLAWAWPKRAQPPSWQLARPELKPRGAPHTPPSQAGPLARNQPFPNYTQQNQSKPVSPPWKRKPATALSPGPPSSPCNHFSTRLGLKPSFNLVNRTPLLDFPPGLHFRPPAVHWGPLLGAHLPVALVATPPGQHALRPAHPSPSPHPPPLLAPPRPDCHHLRRTPPPAHSAPSPSLCHNHPRATPPPPRPP

SEQ ID NO: 968041 - protein, 91 aa, Homo sapiens
MDLQQTPTDLQLRVLTVRRKTNKQKGYPHQNPSIHHHHQRPKVDKTTKMGQTRAKVKSKSSTSPLKECSLAQWTVVAVLAWRQSGTSVRSA

SEQ ID NO: 968042 - protein, 119 aa, Homo sapiens
  misc_feature (88)..(88): Xaa can be any naturally occurring amino acid
  misc_feature (113)..(113): Xaa can be any naturally occurring amino acid
  misc_feature (115)..(115): Xaa can be any naturally occurring amino acid
MLKAGVRSIGICTSVVRVWRSCIAVSAMMLHPSSSQLHPKWVMRDGKHIGDDDVWDHPPNRKFGKTRIVDVIESMAVEVCSLHGLRGXPIDATPFSSSQRRTSAVKEYLVRLXLXKGAL

SEQ ID NO: 968043 - protein, 224 aa, Homo sapiens
MEAPVMNIPLHILAWPAWLMTRGIEATRGIADPLQEVYLSMHIVRHCFTGPDRCSIALLTPADQRIPLLRSSHRTYSPCNTPSNNQMMNQKAEYTAEVKKANHTPSQSAFPPQESLNSRTRMASTGYHHAYTAITHGIQHSTRTDKHTCATRTLCNNPFEEHRSTSRTEKTRRLNTSNSRPTRRHHHQPNTPNTKTPTPDAQTSSPTATQVHHTQKRNPTLPPL

SEQ ID NO: 968044 - protein, 290 aa, Homo sapiens
SALLQRSLHTPLCGTAQARALRLPFARPSAAPPGARLPAHGPSHSRHFYQPLSVSARFCLSSDADSSSLQRPRRTQATERHFNLINPCNTHYSLQLASLSKHTPFGLVPASGKTSHGLQLIYESAITCEYLDEAYPGKKLLPDDPYEKACQKMILEVVPKVPSSVRKLYYEANITKTMMGLQHEFRKEFTKLDEAPDKYHNKTLSGVHTLSPINDILLVPGLTAVPTDLKAGLPTLKLHRAAPPRNPRTHRANSKTPAHTPHTTTSATTQTKNTGPPTKQNEDNPPRHST

SEQ ID NO: 968045 - protein, 461 aa, Homo sapiens
MVAASGFIPGISSTHDDTTATPPCSRPPVGAQAPRRLSALAPVVGGSSVERCQELDAEWARPPTATHTSPDGPSRRISELPSHHPKMTLNETSFVNKAAAMMPWSMPLVLAGLTCLPDYPAGEPRGFTGQALLATPWYIVTKVPNITLLSLATPNINPTPLKRHSLAKNKNTQLSATTPTATTSTTYGGTKDVKRDQPSDLTCDQKGCNPELDRDTAQTYAYSTHSTDNEHTNTHPLTPSPHYPCNYTPSGTTPISNILTHYKHILTCLHDHLPLCTPNINPEPHDLIKPILPPHTTNPTSINTFHPHQASHHITLFHIIPSHATRTIITDYLTTPNSPHHHFQPTTTSSTLNPNSHLTTTHPTHKNPYQHHDRFDRARPQAEAERARSQAKKHRRETKTRETKGATRHEATQGAREHRSREGATTQTRRPGATTGKQTTNEHTTATAAAPSAKHPSHAPL

SEQ ID NO: 968046 - protein, 365 aa, Homo sapiens
GRPTRRIRLVAEKMIWLGKKDPLPPLDPQAIKPILKALLDNTKAKNTDGQGLQRPGNCQPPQACGRAEEVISAPSPTILDVDSSGGADPRLHRQVPAHDTLASHGRLHGAGWTTPLLTLSSALGPASSICRLHTHSPPCFSIFLTKYTKLPHGRSSAQTGRCPGTALPHYSHYTHQPKRRYPSRTAPPPPCHHSGLPSNPLHPIYHDGTTAEREHTPHRNDSTHAKLGTPPGSMTDPTLTRHMGLGAPWHTYYNSPQRHQAPWMGSTTPSLHLLPTDNPRMNQDRQHGAPHPNTTLPDLVPGTHRRPHTHTAETNHTCTQPRRTKATRAHTPHPAPSLRHTARNMQAEPPQAPPTQANQQQHTHH

SEQ ID NO: 968047 - protein, 96 aa, Homo sapiens
LYVEAGKALVTVLVPYQYYYTCRSCSTGMWFDLFFKLLERERKQKWDIEGSGVLCAGCGMLLRPVPSAGSGKCLLALGIICGERVLKSSDASIFLV

SEQ ID NO: 968048 - protein, 331 aa, Homo sapiens
  misc_feature (275)..(275): Xaa can be any naturally occurring amino acid
VQAQLVRVITRYTPQVHMGLSQPILIFDAERDASNMKQPSKTKGVDEVTSVNSSGPTDSECTETGYAFAVPEKDQKGTCISTEVSLIWPPGDGDFGPMKTPAQYDASELKSFPCTGLGTDEDSLDEIIVRPEPYQELQEIETRVYKEMYKTDLERGHYFGHILVTCEGDGCAGKGKKSRGGSVIEYEVIDQDARDLYELELKRKGTDVPKWIRIDDRAEVGTGRKYMLRYKSYSPDDMCEAQARGEGDLEKVPEPGAVLQTAGIMLSGVELLMAXERERLIERSAEWQWIRQIKKRSRNTKTGVQTGRGETRKQGAPRKEQPGGPKALCTE

SEQ ID NO: 968049 - protein, 554 aa, Homo sapiens
  misc_feature (147)..(147): Xaa can be any naturally occurring amino acid
WKGKSYMVFLYKNVHQIKVKGVGGKIALLREIYARGGHAPARLFTPSLLRVQAPCALESSQRNSTGLRALEPGRRGQEGVRRALTTERRGEEREEISPQEALKRRQAHTNLTGGSQAARGLRQGERVSLKGGEERYISLTILPPSQXYLTPHALSRRVCATTLRRRSAFTRRTRCACVSHHISRPLCCVSLHLLVQRENPPDGLLIMRAHTCEDPHVLLREPETVVGTPVRAESAGMTQQKHPQDLCHTPSLWGPPYILWWDRPLTRRGSTAPGSIVAKKTLSHIYHPVCRVTPPKGGALYISPWGRHQHVLPSPPVCIVEPPTARCTVARFHKEKLLGSPPKKMFGDIPHEDRAPPLQRHLIPNIVPRILPRHQNLPAPPPPANITPNTLRRPRGRHCHRLANFRTKDIPPEETLVRKQGGGHQRPARERKHYSPHTKNPQQRTPWAEPHIKPHKYTMPEGSNMKLLRQLPQMRTNVAINAPTNNYETPAGWVAQRKVDTLLSELTRDDQLYYRRLFATPVSNEHYGTNALFDVNPPPTHEAEADRHEPPKIV

SEQ ID NO: 968050 - protein, 142 aa, Homo sapiens
IFKPPRLWSQLISKRGPEPYTIFHLQKDGGREVYFWTPSHAYTLISTNIRPGRGTPITGITLTGGAHQSLCVPPLMCGEAAPPYRNISHTPYIPSLPLITLYITSLSHTISLYISLLSVETISLYRKICGVARPLYISHDAL

SEQ ID NO: 968051 - protein, 261 aa, Homo sapiens
NQAVTLAAQSLACLRAGWNLGFHAPDELPACVNVEGETHHQCGANGSRLWRGRLWLLVVDQETDDGAPPCGKLTCYLMEMLPSEGSSPRSTTPGMPNARLGHTPVAHSSKAGKIGCQWAPEESCALGSGNCERDLRAYGFNLHSDKSRPGQYIRSVDPGSELPPALASGPRTWLIEVNGSECGRELRHAEVVASIKAREDECPAAGRGALRQMNTSSGFRVQTTEEHVGRSLTSPSPNGTSLPSSVVVMVSSEVTCWYDRT

SEQ ID NO: 968052 - protein, 524 aa, Homo sapiens
VAKKKKFFILETKGGVQLQNTPLSPSPLSLRGFRTAGHRGVEAKRVCVERPAGEVCVKRVTRETPREVEWEEAVPRERVGGWCLPLTERVERDEECEREHINLEGSTIRGARESARDERDGREKVSLPSERVGSREGCGACVASLCCESAYMSVSPLYLLCDKDVERQSHPASLTSHLRVAPNRECVEGLLCHESLRDNKRGASINERGGPAWPSLSRSPRVRRCVFSQTVVARVCVFFLSEERCCSGVFSRSESVMRVDPFSTLCVSDLCVPPPHPLSPPGGGGVSSLVWRRAVCRHRDVVTQRSGITHEVVVEKQEEEEEGTTPLLGRRQPDLRGGRTAVAEKAGVAHPPPTPVVGASPHKDESLHRRRKEPAVADKNELCKKNTLLRVGDGGRANINKHPPNGCAPPRIVVVTLPRKEIKSTRPTADDPPVVITPQQGGDQHLRDDSRTRSGQHQTPATPQGGELLTKDIQETQARPGTITKRVHPEPDGEKTPPDLRTRQAGDNHKAGGTNKTEATMPPL

SEQ ID NO: 968053 - protein, 128 aa, Homo sapiens
MERPSNRLRARETLVERPWANRKSLCVRLHVHIYMCVSHHSNKSVQASPDAPTLAGAGPTQQTHGARRKHTTEGNGGALRREKRTRNTAHTHTQTPPLYRPALNPRGTLPTRGSPQPKNHTTPCGSTA

SEQ ID NO: 968054 - protein, 103 aa, Homo sapiens
MYQPPPNTPPIGGRHKKDHHIKHRPPPVGPKNIIPTLLGDPQINNTPRVTTQSAYISKATCHRGAPLCNAPQRELTAPPRWVKRKARNTRNKEQSQNRHQRMT

SEQ ID NO: 968055 - protein, 151 aa, Homo sapiens
  misc_feature (6)..(6): Xaa can be any naturally occurring amino acid
MWRISXENPVGEIRTYIPSETNSLTRETLPCVTTGGCARRFKKNPKVFKTTLLLGGVGLMGDSWRNTQKPVLGLGYGPKPLAKNHFGVPSLLWVKGRGKLVDTQTAQGEILKFGAQKKRGEERILLGKRSSETNGCDTRYYTTRLPGGRHR

SEQ ID NO: 968056 - protein, 159 aa, Homo sapiens
MLGGPSYTKKNHSLYAEEKRRVRPKRHPNNNFFFTKKQAGEGRHTPPRERGACHHQGGGGPPPRGNQKPREHAVSTLERNTTETTTYRSCRCSPADVVCSPPEELSSHKSSSFCCVGNKPDGTTYECRSVRTTTHYEGSEPAKRARVKHRQRKKKRGGF

SEQ ID NO: 968057 - protein, 300 aa, Homo sapiens
MGGGFPQAQNILLSQTAQRATISLESGPPCANLLWPGTFFPRQTAGASNRQTKAHESPAEHGGRVCPPRRTMMPSSHTDPLQLTGGHANSKKNRAAAAGGKTNMLADHPQVRVDNSALKQYLIGSPPAIIQQQTRHQIHTAGPRRLKRQTGRTTPWAGIDAHTADPHDQQTETRAIGVGSPCNRQRGERVIPPPIDSSQERPLWTPHKTRGGHSGVDKRPPRREGPHPTAGGTEQGGTTHTDRVSLEKRVIAKGQHTEDNQPPGRDRQLHAPDDALYDDHRNEDRTTQTSSTDRLGSTND

SEQ ID NO: 968058 - protein, 214 aa, Homo sapiens
MAGCSQTIPSGAVRWSGGLASSGLPEDLLGGCVGDVLLLRDWTIGRNRSEVDFGCLQWAPRNGRADWEGLRNYQAVWVCWRGPVGSVPCADAWPWALPDRREPSKIQMAAGLGSRVGGDRGLGRETWPDGGHRGRPPRSTVLRTRRNMEGALVKRRCARKPGERLESPGSGPYYTSQDALLQPKRTDTSTNREEGQGEVSIQEYRRRKSVRRGG

SEQ ID NO: 968059 - protein, 278 aa, Homo sapiens
MTPEAETSLVLYKTPKNSSYYIFLTRSGGSYERGPLRKTTFLFWGQGVTFVGGPLCAFLAKTPEASHTGGQKHRRGAPKRGVFPRRARTGTQCVSQTENTRGALGAAPIAGKKGGEPRGGRTTNNRAQNRRYKREARREDIQDSPHPAHFKRYHPPEGVLPPWGKKPEMVPQVETPRRARANRAARGKQGHHLSVSREQGKSGGLTERRRQRETAVGRPNEIDESERNTAGGTKTQTTRGDEREKSTTCEETRMIVRDREHSRKPEAPLSTQMRGDSR

SEQ ID NO: 968060 - protein, 464 aa, Homo sapiens
MASFKWKQTQKMSSQAPSVCVQFHKACGRKHRHRTRTSVLEDTVSEVYTQDTKAVELVPAEGGIFFSWGEWQRGRRGAHRGCGATEARRRAHTGLLLFSTLCAPRERVPVSTEILCVSPTNFSQMMRIYLTPSLSPFSRDLYKREMSLRGEHLSAFSEREESISLSLSVAESHQRVDTLHRESSFLPAVSHTHTIEDTVVATTPWWRGDPLCGPPPPEEKSTSLTEKLLLSSSAGVVGIPHQKRENLISSRTKRATNIIMLGGGIIFYILHTQDEGVGELLQVALETKFSHISRNNSSLLITRRTNNHNQLRADNSPRNTNNPLVAERQTAPADRENKEGSLLPGGERTRRLINNPTRLVGRPDRSNRRKGRRIISKKSQSIPPPPFFCCEQTAGTYELTRSRKKTQKEEKSANQQRVVRHGAPPPHEHDGTINQPTNEKQSRTTTHATGPNIGLVHTPPLRVE

SEQ ID NO: 968061 - protein, 113 aa, Homo sapiens
PGSGQMQETRPGSCGCHLSKRQTMVTQGGKYTPRPGHLSSSAPDMRLTQKVLGHRVHWCQLRLQTGENPSMCLKTVRCQESCSLSPELYKLEISAKKQAGSAPLTAHVSVLPN

SEQ ID NO: 968062 - protein, 412 aa, Homo sapiens
SLPPLNTGGVRGGGGERERGEERVFFHKKNTNHAPARRREREREKTPAGRPAARAEDHRERERGGLSHNIEREGRRERHGAGERGRRGAGRENTHHKREREGKNKTQREREGDGRRQSHHPRARERDRTSADARPHSGRDKSERRAETNQRKRTHTHAAHGEPPSPVRPLISSRTPTTAGYLSAAQHRSPRAGAGNMGREKKKTMTPLRSPAGARGTPPRAPRRYTLASARETSPPPPTTGRGRAPLRTTQESRSHSRAQARGGPPHATPPTIPHPKLHNVSTTRKKHTQPNEEENIKRRRQRPPHPCRAAPPNSPPSITNPPTTSAPIPHTHQQTNQSLNINRTSLYNHTLTSSSLSSPCPPLSPHNHFHLYTNPITHNTLSLHPLTYRTTTPSPLSTHNPKLNPPLTTMH

SEQ ID NO: 968063 - protein, 150 aa, Homo sapiens
MFGRTNFPAVDEAANNNRRQPPTCKMYIPDHTTSLVSATQQPRPLCSPRAILNHHGFLRPGCAADIPYSDSPHSKGILRHPPKTDREKLRWGDTRWVRAWKPTFPPSGCSEPSSHVGRQAAITLLTKNEKTQQAWLFTQPYFVAHIIPYE

SEQ ID NO: 968064 - protein, 438 aa, Homo sapiens
GNKVSPFTQAGVQGRDHAHCSLNLRGLKCDSSPCLQPSQFSCGTYMACAPPVFVAFIFCVQCECESASEARERPTGRVSLSKELLGVSEERMLRPVVEQGGFQSLWHHSANTPHLCHLVNVGSSHKSSSESRNYLNIVEIRGDFKSVVTLLENSSFSYNFIRRSGAFSRAGHNWWPQGAGKHRGAQEEKSPNLQEKAGKVMELGARAQAGAKYQRYGPPGRISNTESVIAGSYTQKYRAREVGTVGEFLRGRSKVCVLGKNTASIRMFVYKCILNITEVGFGYPENLWVKRHAHSGHHSTGNNPVTEQGVTEVPNYRRLPPEGRKDGGGQDGSPEGTHDSFFNPNKTLLKKFRRHCGEGDQSVAPHQRSGEEKGTTGGSLGATATEADKSWHPRNFSEDKRSRPFETSAAAKLLVPPQQWVCPPQQNHLLLERSRPTS

SEQ ID NO: 968065 - protein, 130 aa, Homo sapiens
ERFKRFMVPKKRPSGMKGKAGSPEPGAMVCRAPKGKEGGEPGKDARPPAPPRACGPGQPRTPPGWAGAGESLTNDWEDHCGSEAFFSVKDSCGIQSPLYCVPRGCSFGSVGKQKEKEQHQMVCTQSFHQG

SEQ ID NO: 968066 - protein, 392 aa, Homo sapiens
MAGIRLPGSSLALDSPALARCCLTLLRDSRPWHAAGKNSSAGGWPGSCPLALKQQSLTSAAGNAPVRYAGLLLPSLHSRQRGSHSLTTGLAAIPERLQLYTPFSTATWRRSAGPTSDSALLDTCTTGPHHNQPWPACMASPPCHPTHPSLPGALTRQRPLPGSPAAARPRAPLRSRQLAPPTPPTPAPLLAPPDTPATWAPPTPPPAPPASPSPSPSPCSHALPPTAPSRPRHCPLPPATAAHPRPAPRAPAPPRRPLPPGPRAPSSPRLPPLPCWPAPCPSRPCHSLALPVAPATTLSAPSGSPSPVSAAPPPPPPVFAPPLPLPPAPLPLPPELTPWPSLAVSPVSCPPALPPPVPLTPTPHQGPSRFTAAPTLRPTPPPPTPPLPDPSH

SEQ ID NO: 968067 - protein, 175 aa, Homo sapiens
MSLCSFTRKVEFEQMWLVWRAMCQAPALKGGESVGVRVFEVSEGKPPGVLSVEPRIALEGGPSERRGFTTFLGVSSYWARFSIKRQAQVHTGDIVGMGATTEGTVPVELPGQARGMTCAHKPVGKAPDKRQGKMSWEEPRGPINGQTVPPGGGRIHKALGGQEIGMDLGGHESFQ

SEQ ID NO: 968068 - protein, 190 aa, Homo sapiens
GGGGGERGEPRGGGGGGGHKRGRDPHTKVFGGGEPPTGGGEKQTGGAGGHTTPHTPFLGFFHPREGAPHRERGEEQHTRGGGEEKTPGAPHRTHTEGQKRERGAPHPHTKKNIYIRRDERGGSHEGWYTHRRGERGGCATRGRGNKRGHRGGKSQKVGRPEVWVGCSAGEHPTPPARWVGGGRKGGVALI

SEQ ID NO: 968069 - protein, 224 aa, Homo sapiens
MGRKKRSHAIEDVQEETAVDLSGDSVKAIAKLWDSKMFAEIMMKIEEYISRASQSFRSDGTSGGRGLNTAVIVDANEAVTVEMKNELNIIHNGSSGISTQHEIALNWMSPWSPNANCDYIRTVKEAGQLSRGHVQMNNENLLADPHLNATIMVVSVTDSTHTPRGQQLSEEELERLQEACDMALVAETASKHRIYEYVESRMSFIAPKLSIIIVGIHARKIMGV

SEQ ID NO: 968070 - protein, 276 aa, Homo sapiens
GFPKGFSSGASLKWLVAAAVLLQGLRKIARIKATQRGVLVLQGRVLRSPVSEEGPGSAFVQKGVSWWCRPVTFVIFGEATERSLGVAPVGVPLKFRGVQLSLHEVPPERRYTWGRGAQVSEKATGGDASVEALEAKLGVRSRELVGNRWRSLWDISKERGIYSYIIATALRAQEVLRDTYGHRDRNRFFRGVMWVLWKGGDSVPREVPGNTFFGPRYVAVKPGDRKNECRATCDAREKIADLGPDSRVSGLGKQPFSVSRAHQVGGGPQGTKVEQI

SEQ ID NO: 968071 - protein, 342 aa, Homo sapiens
  misc_feature (173)..(173): Xaa can be any naturally occurring amino acid
MWGAHVCATHKDPNRGAGAPESAKTQRGEREAQRVPPYKREISKSLPRKGGAPWGRNTPQHGEEKAGGQRVRTAREEKMALSTSRLFTRPLWALERTMGGGPRRYYTRGGLLWAAVGAFSGRGGVSPLCGDFFYPLLGGGPPPEGFPPRRGPRCLLGGEDEGRDLSTRRPNAXPREELHTRGGGGGTTTRGRGGESFSLQGKRCLGWPRGVEGTKTIRPHEPTLRKQGGGAFKPKKRHPKAPQEGASPQSGAHTKCEKRKEGANFKNGGTHVVKGSPQEGDNDHRGRPKPSGVVRSTRMLTQECGPKKKFGRCGNQWTIWGDIPPGGVTQTHLSEDIKRSPK

SEQ ID NO: 968072 - protein, 149 aa, Homo sapiens
MRVAIMNSDSIIPSRHSREDMRCERNTSIPKSERVTAQYNIYGKAERPPLPVRLWPPRQGRPQPREAVKRKIQACSSRRTRRKTARRACRGSLNGKRKRRKKAEGDCGRPQPKHPAPLREDLDRGQERVSQGLKTGGAQKCMKWQRQEG

SEQ ID NO: 968073 - protein, 99 aa, Homo sapiens
TRGKIPLIGNPTKWQNLVPGLLSSSFFLCWQFRVLFFHVVPLWIWLFFLPPMGLEKRAYGHKFGRWVCQWTLKGTILSPKRPGRIRFWTPRQGDLAEKG

SEQ ID NO: 968074 - protein, 219 aa, Homo sapiens
MWGGEVSPQHTPKHFEVGAGRGKIFAPCVAQLQCATINTWGAWGPRTRNMWPPRVWSALHANKRQRPFWSAFQPQGEGGRGGQQPPTLVRRNQQRVVGNPGGVASLPPNIMWATNKLPHAAPRGCTKQNSPPTDVGCPLGKPTRPHEHGVSLSARAAVGETTHHHAPDGAPLNAQVCVRREHTHNAPRGKNTLGSTRLEQNIISGGPNKKARRAHPSVG

SEQ ID NO: 968075 - protein, 109 aa, Homo sapiens
MCLIYNIAHRYKRQKECGADLSQRGCVLYNKVLLHELSTQKCPEWVLSPIYVSPESLPCSCVSPPDRCITPGVSSPPVYKHRARVLSPRVLFAWGVVSCGPARGERDTS

SEQ ID NO: 968076 - protein, 86 aa, Homo sapiens
MSVEAPTHDGGAHHTVDRDKNGCDLPSSEKKHASRCSGNTTPTNPRSLTATAHTTLCAIPLSRQLKRSTRTITRWNRTNDSGSDAH

SEQ ID NO: 968077 - protein, 300 aa, Homo sapiens
WSGWTWIKLRASGAGKAIGVLSSGGDANGMERCCPGCDAHGHLMWVPRVFLIYEGYEGLVEGGENHQVRPTGCGVSNIIQLVRHLSLGRRSLPGLYHQGGVLGRAVYNLVQARHHQAVRHRRGWQASLGCQHSSRASGAACWKELLAGRKRVVTRTTARRLHRTLNIAGLVGSIDDDFWVHRVVTIGTDSASTASWQVIDAIPNTAHEPPEDLRCLEVMGRHCGVTWRWYLALGSGADWLLIPEAPPEDGARTSLCARLVETRSGVRLSVISSLGVPGRRGAFVLGRLWSGGCPVCGLGG

SEQ ID NO: 968078 - protein, 277 aa, Homo sapiens
DVNDLLKFIRPLHEGTLVFVASYDDPATKMNEETRKLFSELGSRNAKGAGLPGTAGCLSGPRVCTNKSPFEQHVKNSKHSNKIRSAGPRRWRWKAVSRGEARAKLCTVQMPGPGRGEARPWEARALPGGQRLRLTTPGTLEQETLPGSQSTSGAPSAVTKNRGLKVVGAMGAVQGVVLPYFVHGSPGYPLLFVRLFPPGQVHLALCSDSFTPVSVPDLESCVTALGACPSVCKSGSRPGGLGLSSRNLSLLSTLRCGLNLFPCDSFSEPNPGGGFEP

SEQ ID NO: 968079 - protein, 138 aa, Homo sapiens
MGVCFTSEDRHVEAPRPHDVLANKIYLSRNDLPDSSRPNPLIIITPPATRERNDHLYALCVENCDDARESRPQQLASPPHYSARHKRRATHNSASSYPNTTPARATTARLETKRLRTTLKLQRTDRPRGRANERRYVS

SEQ ID NO: 968080 - protein, 136 aa, Homo sapiens
MRVLPVDTRCRSEERSGKTLASRSIARDAQRPWEWPRAYVVVTSGVPGRSASPRRRLACAPWAQMAGRHARTSGRLSSGDEVDGRVGTIVAYHRFDGTTLGCTKVISWMYWFSGFGQSVTGRGTAPHPPCCVCVCG

SEQ ID NO: 968081 - protein, 100 aa, Homo sapiens
MRVRHAFTATEGRTSRGWCWTSRRMDDHAMSVRHSIEGYCQCPHSIMRIDIAGRDVSRLPDACYLRKERLQMFHSSSEFEIVKDQYENEPVTYPKIPKRM

SEQ ID NO: 968082 - protein, 215 aa, Homo sapiens
  misc_feature (174)..(174): Xaa can be any naturally occurring amino acid
GKFSLNLHNHKLNSEIQLGLGGKQGKTVEPQEETCSEEAQRIQGITCEAKVGVEGVPLREATEEEVNRGGKEENNKVSKLYIPECGSTSLSNVGDSFVWRAVCHSPVDHKGASMWPSNNIFSCAFSSHLVAQKTPYYGLEHIHKPSHMSLGDMWRIYETKWLGDLICVCVWCVXQLFVAYGETREWARDPVYMRYKGRMRMFLTILHKNYSPPLI

SEQ ID NO: 968083 - protein, 317 aa, Homo sapiens
MRKMSWNYTISPNKLGQVDFTHAKMWGGYGLETEERRNQAGNTTNMWALGSLRRERGRKMRQLGRSARPKGFPETSWLPMRTQAGLVALCGYPGRRSGATKQRWCAPESEIRAKHFPWTSYIFHIPRVWRTGVRGRTTPRDSKLLRTAGIEAKLRQAHPGEHPLLWSLVSVRRMCVVTTHTTPGGFATYRDPPGGEPPSGRNNKGGGSPKRSTNTGGGGSHTKTTKLCGAEKIRPTRGRHKHLRADTGSYKRSEEPPPVISKAPNQDEAPSGPPHNQLDDTTLMRQHSEENNNIIATTGGLPRETHRRGQQQTQRAP

SEQ ID NO: 968084 - protein, 134 aa, Homo sapiens
MKNGQKGPARYPDVERLRLVRTPLRQGQKGVRWVSASGGDKSYNGPRVIEGRSNQEVSWWLVTKACDRGQLEPLIQHMVGITQKARAKGDSHHEMVGATRSQWRRSGPTVGVRRPTRIQQAPELTTARPKGGSE

SEQ ID NO: 968085 - protein, 338 aa, Homo sapiens
  misc_feature (222)..(222): Xaa can be any naturally occurring amino acid
QVKKPVDLMARGAGGPGALGGGGSGFLSFTISTGLSVAAQEMWRRGPVGDVGCHVRQGWGGIPVGLLGEISVVSRRSGVAESAVGGEDILVEEKWVARAHTYERGGGKGYSRVGGPGESSRVYKMRPTHRRETPFLGACAELLRGGLSQERPTKKRSLMSERGKYHKDRAGEIKTRGQRGKMGGGEPSFKRVTIVGGGPPHEEKGRRRRRDGSSEANNNLSXYSCWRDSKRENIRVEDDDKRISPRRRKKKTQSSTNIGAEKNFVRPPNRTVCVGTREEESTFPPIMPETRRRGGGGAAPHKRGGHRRTKKTEQQVVGKPTGREKINTKWAPTPGGGT

SEQ ID NO: 968086 - protein, 268 aa, Homo sapiens
MIRRVLPHGMRPVCLLEPGGQGTLQRRLSLDWDGKVSEIKKKINVESVPGKVHGDRTARRPAHLASRAPLAVVISGRWRCSVLVLCGLIGRDRSLDEQQRCYLELLVVERDHNVYHSGLLLGLIRKVGIKSGSVSIAHENIQESPLIVQPSYSTETIKVSTWTGSRMRTVALDLRFKPLGYLLLASEEGMLQPWQRQGEQCRGKEGAKVSLMSSVISFVNKYPWINTEGVALSASYAESQDEGSDRSPGCPSPRGYAGKVQSFVRSFN

SEQ ID NO: 968087 - protein, 226 aa, Homo sapiens
  misc_feature (47)..(47): Xaa can be any naturally occurring amino acid
  misc_feature (85)..(85): Xaa can be any naturally occurring amino acid
  misc_feature (208)..(208): Xaa can be any naturally occurring amino acid
MCRKHLQEIPDLEIAKRCQQTCTWGWDSQLRLSSNMLSRQWGVFRSXWREEEPAFSGEHPLRNGLSEIWANQGEHRSNGKRVKEXQRDDQQTFVIVRQVLEANIERELTRVYHGDSLPDEAVSVGVLIPGAVRFPELVEGLLVWAREGGIARRRSDESRSGETVRTYRGKEICDPDVEWSGLLSQGAVIAFPLPTIMYGTNHGVNILXPLSVFQQMDLSKLSDRSV

SEQ ID NO: 968088 - protein, 362 aa, Homo sapiens
MRGGAKNRDPRRVLSFSPGGWGDARGVVGPGGRGSSLRGATERHTEREPPPRRGPRRDTAEERVEGEVVCQKITAGESHGASHPPLSDVWGGPTPGRAGVVVRREEHTPHAGGTPFLGGGGEKKEKWTVRVRGGTQTDALAPPTDKQVGEPLGRGPSGSEEYLFWTAPKQDKKHTFTRERGGGGRPTKQNPGSPERRKLKKETLLSGESETKTPTNRERRLRQQQNTPPQRDRILEAKSYSDLRPPTERGGTPPGDSYNTEQLDRPPGAPPPQSTAAHAAHNTTHKEGEETAAKCLTNKLGSPSVETNNLAGGKKRRTHSKKPAGAHHNNLLLPATEGEVAAPILHRSPPHNLLEHTSAPDY

SEQ ID NO: 968089 - protein, 241 aa, Homo sapiens
MRLSRKRRHETYKGASPSIYIVRSIQGVWGVPLCGADISPPPLFLWRPISIVYLFRGGVIAIIYQPLSSGESGSPLPSLHTHQTFHIYHTRKHDATSQYDGNFTGGALLYSLEAPIYKFPPHIKTNKRPTINERKHQQHAATKNNTPRWPPNAIGQRPTTHNTGGALPTNDTPNIYRHIVRAINTTALAGTTHGGEHPRVGLQRKTTQPRWRTGRATYKHVPPHKTPPRVANHGGGRPHTI

SEQ ID NO: 968090 - protein, 188 aa, Homo sapiens
MTSVSASCAVVTPPKSWGGCTSYVGERTVVVAAPIDTTEKGPPVADLPPPVRRYSQHPFFPARNNAPEKYYPRWYRTTQGYSTCCHHTRWVGYLIYTKRVWADAQYNFSLHLLTPQHGPQQKGRYTEASATTAVLSPRGAPPTASLYTAVVVGHDTPNNFPINQRGKGEEENVRGGGTPPKYGWDSPT

SEQ ID NO: 968091 - protein, 136 aa, Homo sapiens
WAKNWFSSIKPKVVFLLGFNLRGWIAKQWKQMGKSGHLRGGVRGASTKVCISRATVGKAERGQESTVEARGEFQDTHRLVHTTMWGTLPISVWSYKKIYKILYPRECGVARVPIYMSPETIRCGRGREKEEKICRL

SEQ ID NO: 968092 - protein, 218 aa, Homo sapiens
MCANYNENFSGTTDRSSNQGPQGETQQLALLRRGPKGGPGGSRESGGPSGAGSLAHTLHSTVRASLTTHIPNRLGSHWDNLVPGAYNKRGAGTINFPKRAWGILSSPGGPHICCCRIVVPNQHGATRHNTEVESPPGCDSANQTTPRGGTTGDTRPRTQRGGEYPKQTPHKHNHRANTTYSAHAHHKGVGTLRHKSKLDHLPAHGCHMRHQKGYDHSY

SEQ ID NO: 968093 - protein, 421 aa, Homo sapiens
WTNKAVNFTGVQVGWVQKVVREVEIGVWGRLYRIGEARWEITVKGDGSSCIGRKLGVSQGCSGGELWDPGMSQEKRNFHRGKCHQLKAGTRHFHFFGEFSSLLQAIGDAITVPGSPRGILSGLEAGASEEPDYFAWSSFPGVQEFTPKAWGTRGDAVPRGRFPQGSTLGRTQSFQRGLNLEERSGISNIGAETCPLGGVGYGALTERTQNSKAGHLSSMGGQSSPGRTRGHLDLPQGEGPPVNPELIGAPKTSIPPLALSQEEHQKQGVRGVGANKGLGLLTTGWGQADGDNVRGKNRGPMTLGPVGVSRGTGISQKHTFPVKQDVVTTINRAPSTHRGPTGVNPLWTADFNGAPQGAHLTEKRAADKLRQHTRSQKRFPREIRRNIYRDRTLIRTDHPHDTKTVQYSPYIATYALLYECS

SEQ ID NO: 968094 - protein, 80 aa, Homo sapiens
RVAGGEHLRLDDVTKRILQFMRNQHRGSTQTRSRFMGPGGKNNWLPMQAERLLAHTERQQWDYARDSDRRNNGENRNDQW

SEQ ID NO: 968095 - protein, 468 aa, Homo sapiens
GFKKLYSHLGPRLCRIVKKAAYWAVEGGGFRQNPLFTLCKGPFQKVSRGPQKGLLARCLKVEPFSKKIPRHSHSPRGPPKLVCGGCGSGWFHPFFSLNKLLHSPSFLEKVSSSRKRFTKKMWGSPGAGQEPQGACERSPQRWPWFSGFFLSPRGPIVDEAFLMWPSLWGVFNPPNSHYPLKSVRLLCVRVARCGTQTEAASPAPQGAVEICGHNSFSAEETRCARIKAPSTARVIFPLFGAQDVSRGRKNTTCWGAYHQRPFFHKKKRRPIFSTIEGGVHGTILKDNGPQIEERATVLQRGVALTRTHGAPFGTMVVPPTTFFSAPPMASCVIRQPAVVEPPHPQLGPAGVRGRTYQKFLPWRKGENSSWGRTRHPMGGSTALRGDTTEEGGGRFQTRTSKKHRGWSAGEVEGFPPRRKAALGEANNGSPRKQKVYGGVPPAEDDFLSQTTRRMKREKHSRGGGGAKL

SEQ ID NO: 968096 - protein, 158 aa, Homo sapiens
MFCGRLNMHYELSRIGKWDSDPSGTKTCYLYQGKAILQLFAKEVYPELQESPNVVEAKPTVDHPELRGKGGPQASARTQFPNFWVNFPLTGWLKVGEVGKLMPFSFLDKVQILYTRSRMDGFGKIHSSWEHASPKRELAVKKEYQFDMDNGLVLALGE

SEQ ID NO: 968097 - protein, 264 aa, Homo sapiens
PENQFSFLLAQGKVQGRDLCSLATVPPSRVQAISSCAFSLSQVTVGHTGVEHTMCPAIILWIFLSIKSGVSIIVLCAEAVVSLEHSPLTSRGVILHPHLCGLSRESVPWRYLTRRYEAQVWPPGPCGHLCDCVSLYSTPTKTHFCEHCGTLLWLSPRKICGHNQRHLYKCEIKPLCATYMPQTLSLLCVVGEKNREGPPLCVVLPKTSYHPVCLSKKGDFFVVSTKAPNRGGSLVGGFSLLVGAPTRGVVEPPIFWGGALIPSF

SEQ ID NO: 968098 - protein, 334 aa, Homo sapiens
CFFKNPSKTVYNTSEFGVTRGLSVGFLVASAGTRASKLLGLAATRVSYQQGPVIRDEDVLDLLLGSLIHIFLGNRPPGLGRWHWTDSINLGPGDHHPLHGHGCLHQQIAPCRESRTGSSSWSWKRARSIDLQGPPVHLDETMAALAVGPKLSLASGVRRPAQTAAGPWHGMWLRSVGLDNRHRACFPFQMEGCQGSQLNKRVELTIFQGQPEQEAPIGHNPREVQVPLRGSTYCAGPKHSGVSQEGFPGTWGADTWPHRGQASKAQGKFTQGWGPRSHRGPKRVCDTQTQGAHTWGNCDQVHADKHRGPQQYNENGTPGGPTQALGGQNTPCAT

SEQ ID NO: 968099 - protein, 142 aa, Homo sapiens
PGSCPLPFALSVPGKVGEPALSYDPPKTFILQHEGVEYKKGVGVGGTAARADEDPYFVPPAFQNEVTSAAWGLTRGEAKKGSLSFASCETREHIKTPRGVPLWCALCKACVCDTSKRREGSPLCVCVSSTHRLCRETRQTCV

SEQ ID NO: 968100 - protein, 166 aa, Homo sapiens
MSNERRGILNVQSRLTEAETAVNWRTSADVRGSLYGSRSRGRALALRGAMDSLAVLLEFAEEHVEPTHVVFGSDKKRVRTERAVLRTFMHYRAGDVETGAIPGLSPRDPKRCDKGLPVRQRVSARGEESGRSGLEIRPGATLLRVGEREGNPRVGRGAGKKPPGKR

SEQ ID NO: 968101 - protein, 289 aa, Homo sapiens
GESWAVRAEHVRLVAQSWNRARSPVGLEPHRHLLNRPADLCPRHEWALLWPPAWAQSPPCVPSMALCACCPPACRDRRLMPLLWPLLLLLAPGNRSPGCASSSATRGARPARWHRGAACATCCHHVPGLYISLVTWKRPDAPANHQNVAASTLDGSQLSPDRSLGSERVSFVICQGMSTGQDTEAELQDATLAFHGLTVEDEGNYTCECASFPKGSVRGMSWLRVIAKPQEASLRPRKVTYSRVTLRTVALCILEEGDHLPGSRGSQFLDLGQAQQTQVLRGPSPELVM

SEQ ID NO: 968102 - protein, 226 aa, Homo sapiens
LVAGGQLGELHKVHSIVRSASCLLSGSGHHLVAASTSSLVFTSEYLEDVLEESDIWTCPGSLVIIKSRASGISPDMVRMLNGEHTRENLERVFVLHVTRYGLDILAMLVVEHGDAPSGNVITGGLLLPELQPLGGSLRGDVVEGNFYSATRAGDQCFDVLELHFHFRSMEYSDRASVMVSSCDQHAHRHVSQLFCPMWLTPGRELPQRGYPPDPWIEDWAQMIIRS

SEQ ID NO: 968103 - protein, 125 aa, Homo sapiens
RRKAVVRATGKAEGEDEHDNEEPQERDDEERQRAQGAVRHLSPILRGQAPHMIDQSPGGRGDAGPGCRRAVCSVKSLGCGAVRGGLDSFLCLPATGGAPCWVLALGTARREPGGGGRKVSRAGFY

SEQ ID NO: 968104 - protein, 67 aa, Homo sapiens
LEEQLLLGLDSFAPLPAARPFPRRNITTTLCAPHFHCASPQLHSNQPLRAPMAEWGESLRISSQITL

SEQ ID NO: 968105 - protein, 277 aa, Homo sapiens
TPRRARGAALLTDLYQATMAWAIGARAGRGTAAEFELFFRRCPFGGAFALAAGVRDCVRFLRAFRLRDADVQFLASVLPPDTGSVRSSSHRSGPSTCSVGDGAEPCPRAPSPSPGCAVPAGVRAVLVVQCWMTTAVSAWVIYASLGGHQRSAASLDRMGREKLVLEMGLRRAQGPDGGLTAPPTVAGRFDSSEQPCQGGHAAEVVPVAGTRGPLLRHFLFQAGEGAPWTLNVGSQQLVKGPGGWTWGAKGQGVVGSGVVATWGLGVQEPDSGGTGQA

SEQ ID NO: 968106 - protein, 252 aa, Homo sapiens
MRGCALAEGPNSYPQLNPGSKWLTHLAGARLKKLLAGDDARGPIRRTPGGKSKSGGKEWTVKAVFEPTINTRGTGALEGGQNMETTRGRSARGENPMRILKDKPGNMGVAAGKNRCGRHTGPRGEGPGQTSREEHKGSTRIEAQVKPNNREEKWSTRRLSENRIKLLLAKWVQQAHCWQRNYSPRQKDERQGGLIVRHKQKTQYIHNRHTTRGEENQNKKDRQHSTPDKRESRRNIMMRGRGCRSLRCYARD

SEQ ID NO: 968107 - protein, 571 aa, Homo sapiens
  misc_feature (279)..(279): Xaa can be any naturally occurring amino acid
VKGLIRLIGQENENNPAAQGGNGGTLSPLLSFGRSLQSPKPQPCGPFLWISFLSFNAGPGRANPPVVEKPQRERKSRVVLIVGNSEGGTSEREREVFSTNRGCGGTRGLVGAWAELRKREARWCGCGTVWPKAPETLETHLWDSVERSVSSLYREDIRLYIPLRGPREIWVISQELLQIFWAPFQYPQRNADKIGGGTHCAVAREKAQWGPCLAALFRETKRTRPGGRGSPLIHPLTQQRRDCSTQGTNDYTPQQRGQEGGPPITEDGREKNYPYGGEXHRRVLLTYTQHISVVDEPAFLCTQRKNPPYNKAMSYVWCENRRRGRSTPQILKSSTAAHREQDHKKSTSTTSRHYPEEGGPHETNREERNTSQPPQQRRRGEVPHNQRRGGRAHTPANNTSVSLGADKHKKTPPNERPPGGGPQRLGGHMLRRATTAEYTPPAVLYVGGAPIKEGKHNPTHLLRGERSAAVATKKAVAAGDNKPPVRRVRAQTNTTNERGENRTTHKKRKRDVGRTAGREQRKEDGHNIAEEKAPRVEKTDTGRRQNIMRASVVRNNTHINGCAEREEHMHI

SEQ ID NO: 968108 - protein, 229 aa, Homo sapiens
  misc_feature (151)..(151): Xaa can be any naturally occurring amino acid
SLSFTAATHALAAAMTEQMTLRGTLKGHKGGVTQNRYYPEFPDMILSRLCEKDHHQWWKRDQGMRRNYVEFPTGVCSWRGSPPHLCEVSGGYLLRVASWPSQAPWEWNPCASWDLTRGTTTRRLGGPIPGSVLRWGLLLDNRKVRDLEINXQARENRGGVQYPARMRATQRGGLGSGSRPKGEPYNRLRGRGQAGQGYGTVVNGKLKTNHLWHTGYLNTGTVLSRWILW

SEQ ID NO: 968109 - protein, 382 aa, Homo sapiens
ARDVGALEPVPLTLRSSWADPNQHERRTHSPMMQVASGNGDRDPLPPWMGDQDRPCRPGWAFFVDHQQTAPLRGNDHAAVALMSGPKETPSSCQCALPWEGSSAACLLGEWPPCVHPRLRPGYISHSVCSIEGAENRAWCNRFPCLSPAWDAGEFRTEAELAAPQRSQSPLRGMPESTQPDKQVWTGGRGGGSHRPQAHQRTWGEPSLELTSDCINHSSILGQLHIPTGQEQAGRKQCPAERYDLHTGDTRREVTRQKAKHHYQQAKEQNKGKGEVKSTSWYTRPGTILGAPPVRREPGTTKYKGTGAPEEHKAGRERKPTAARCKRRNQASDRAQKHERRKKERQPWHKTGQTRRGQQQSHKRRDTTEHRKERTRDNRKKQ

SEQ ID NO: 968110 - protein, 447 aa, Homo sapiens
GKSPWGGGGKTLVTPGGCVRGGTPETPPRVAPHPEATEKTPLCVSQKKKKKKKPREREKDPIFRGEGETRRGWEKDTTPRVYTPPEGEKSPPQQGGEIRTRESGETPQKIFHTKKERGAHEERGAPCATPRGGCGERKPPPQSVARAPRERRARAMCGAVEPSERGDPPPPTPLCGGGAPINTLLSSSEEKRRTLYILAEQRLPTTTPGRKKNTSYCRQRERSSTLTLDGLMERTSMRIRSMPNPQSVSAPRSARSYTRTLRSSTRGPPAAAVRASRTPARAQRHTRAARPTTGTHKRRRRARRKRARRTRDHRRGHPDKPRSTPDADAGDRSTRTSGTGTGAQHINEKESKVDQSDDNDSAEHTNNDQQPSHPQHPAPPATTQPPQRDPKRTPLNRGTQTKRKPPTYTQYKKSNTRPQPPSPTENIKKAKTTIKPKTHTANAIRNE

SEQ ID NO: 968111 - protein, 118 aa, Homo sapiens
IKVFPSLIKSAILTKRRIWGFSPDRTTRANSPRASGVEEQWRGAKNHHRGCRFLSVVAFHLPVQPWSLALRGPQNNEPGAYTSSLPKGGEKVGRQKQREGWSQKEGSHRGVHEGAPPR

SEQ ID NO: 968112 - protein, 274 aa, Homo sapiens
PSGSAAEVEGPPSSRSPSPLSLPPSPSAGLFRVAAASLGLEFCAASRSLEPAGPLDLVWPPVTVDGGVCAGPQELRYGSTSPSQAAEMPPQGKGHGWTTVMACRMPLQGLIQPSPSPILGGPQVSKPIRPQEPGACEPLEPRPMSACPTGQAYRQKAGRQKRRHGGLANLAQVTQIHHPIQARKRHNDATHRRDRPHLNLIQEEAPRPMQQRQRQHRGPPAAPSALHAGYPTDETWQAEKTAEAGEKRDRKKEPEGRKQDKSQRTTNHSHGPKG

SEQ ID NO: 968113 - protein, 472 aa, Homo sapiens
  misc_feature (458)..(458): Xaa can be any naturally occurring amino acid
KGADPVNWGRKTKQPSPPRRGTGWTYKLLSSPSFGSLRAPAPPLGPFLGISSFFTGGRGGHPALGRSAKKKSQMWCFSVENLPGRNNCRRETRRLFSTHPVSCAETLREICGPRGEDLRHRQTRVGVRCELSWAQKPHESSKNTSGVSLRRRGRFLSLLEEKYLSLYNSLTRGPREICVYIPEIFQYIWWPSIISRREKPPPVEGGGKTQSSARAEQQRRGGEMSLLFAKKRRSRAAGGGSLYLLHYSTRRCGHRREKIPPGGEGAPLWGGRYFLRGGHRECTNICGQPLSRRRNLSTAVMRVPPGETPHIKLAGESKTKVSTHRTHWESAQKRTEKTISLAKKGGYPPAGGGATPTKNSSRGRTKKPPKSPPGGAQIGGAVGRGPTSIYPTGFWGAIKAQPGGGVGSPPYKTTTAGRPILLTTHGGSDIIHQRVAHKYAQRLLTPYQRAEIFLLADXKPSFVVDDHTDSCS

SEQ ID NO: 968114 - protein, 249 aa, Homo sapiens
  misc_feature (37)..(37): Xaa can be any naturally occurring amino acid
MGAPIESVRCVLAEHTGGGVSLHKEAWVPTSSCGAIXFAKAGKGFFSQKGDIEALSHFFVGPQPLGSPGAMCCPQREFFYQGEKGGPSFPLVLNTITQANAGGQHHNEHPGWWDQPSEEERSHRLVENIPRGGSSTHTFSCSPCVWGPTKRARTTNWGRGKDHADGRRGECQLLPTVVVTPPPCSTNTCSLSAEDNDDEGQSPQLYNEGAPLGVLKHSAGRCTEVGLYQSHKRGRHNTQTTQLSQQQTP

SEQ ID NO: 968115 - protein, 578 aa, Homo sapiens
  misc_feature (93)..(93): Xaa can be any naturally occurring amino acid
  misc_feature (307)..(307): Xaa can be any naturally occurring amino acid
GPIAPSARVIRGERKFMFKPKNIIIKITSGKKREISKLGISNWDYGQWWNTGYRSGSSMGYYGDMGLDIHWNTCSPAQNTYSRGGEFIEGNIXTERGVYTKTRVLRRHLSHNTPECVKSANVSEPCVSNKREITRETISLSHVWRTLPNKIYKETQHKDKEHQNRDLCVGHSDDVSLSPEVGVPPKGKCYIHREHIIKDIFLYQRKSRVDPRRERGGGEGPSGGDDTAIGMTTFPKSGGRDHVVEMRGFSPPNNKAVGDEAPLLWGAEEHYTFHQYTKVVIRQPPKRRSLRCGQMCGVYKINTREGXTPPVVPPPEEEYHRRKMSDQQSATGVCCTPKGYLARGEEKPPRRRDNVGATQKRFIFTYKSDEVFYSPSPHKKRLVVTKRRFPEGKKSPFFGLFPPSAAEKITTKKGGPPYINYSPIKLSEEVPPNFPRTSRKKNSNSKRPKRENQTSVRGGATKKNTEGGRAVLTPRSYGGEKTSLPPTKDETHTISVRGTADEEGVSPLDTSSEITQLSKNSNGWSDVTRRELKKTQPREWKRHHTKAMAQLEENTTLTCSKTKEATKRQDQRMDATEQ

SEQ ID NO: 968116 - protein, 258 aa, Homo sapiens
VSSIIMFFRYWHHNLINRDDIFGLKNIRKIVVNEEVGDTGRYNFGQKCVFWAAIIFLVLLLVSGVIIWRPYFAPAFSIPVIRFALMLHSFAAVALIVVIMVHIYAALWVKGTITAMVEGWVTSAWAKKHHPRWYREVRKTTEKKAEMSIRIIPQDELGSSEKRTADMIPPLFVPSAQEFIQRRPRRLRELEKIILWVITWAWVGLSASPGSGAVRTIPVEMVLGLRACREGRERKARWILTSAVIRLGKCDWRVVSET

SEQ ID NO: 968117 - protein, 193 aa, Homo sapiens
MWQGTKGAISAYPGRVEAPGFKKTHLGGEGAQKERGGGPETLRVKKHTHGRVGKTSHKSRAWRNGVGDHVEGPKEMCGQPTRESQTPEKNTGLSPGGERTRNKPLRTLPEGGVGGAQRGEEKHPIREEPLIRSKMARRKPLTGELPRPEKNPGLGGTRDYEGEGINGYNPHEEERKGGSPGMCPQKQTRQRKS

SEQ ID NO: 968118 - protein, 395 aa, Homo sapiens
  misc_feature (42)..(42): Xaa can be any naturally occurring amino acid
  misc_feature (387)..(387): Xaa can be any naturally occurring amino acid
MRDIPLTEWCPGDIPPKRKYPRSAAEDHLALWRASHKRTNVXPHERRGSATRIPRDVAPRGGPQQSIGERCTHNTKESPRGDTTQPTSARVLCAPGGAHKLWSPVGLCEAPPRCSKQEGGAGGASPTKRCARETTNTGRGGGEWADYSPHIKRGAASGLPSQTRRVTLGGQSSSHKWGRGAPPSRGREREGPPHLRTKGRGGSRERPASGAGGVCPAREGIWGPPTERKKKRWPPEEGEDDHPPREYSLVRKRNTPRQATQEGRTPLARVGDEKKCVAPRNKEETAVAKNKENYGPTCGRPHHGSGCGAADTTERTMRCWLPRHDNASETNRTRRCITLKIESNAQKRGTRNHYYDDNDREHEGSSCASPNKPQSEDGSNQSSTASXRRHSYKTI

SEQ ID NO: 968119 - protein, 71 aa, Homo sapiens
RKRAEIGGPRSLVWACLAVMLGEGDCCSRRCGAQDEIYIAPSGVAKGTNQPEDMEWGDIIEKDIQWTFVIE

SEQ ID NO: 968120 - protein, 152 aa, Homo sapiens
MTTTRGIPGGARRKKTECEPPTAQGRSRRLQRPPGGGHTRSTGRERGTPSRVTPTCGPSIPVCARMKGRHHAETGGAAARRDPPEWSRKWGPRKTGNWRPPTSGGQGGPGQTNITDVGAIPRSSKDGPNYEAKCRHRGGRERPGCRPSERSA

SEQ ID NO: 968121 - protein, 262 aa, Homo sapiens
RRVQAPVGSARRGECWGCDEQAVGPGTRKSISRCLQTVIQRDFFPDVEKLQAQKEYLEAEETGDLERMRQIAIKFGSAFGQRCPGEPPQPYVTPATLETPEVHAGTGVVGKKAQAPEAEAWEDGRGWRGRREKEAVPRLDCLPEAGTRVRTIASFPARIHGGLAKAEKPGHANALGSTKAEGTVGRRGQNRYISEIPGQQKQPRPFEKQPRPNVVENLGQFQGAKKFPSLSNSKRVVPEEEPLVKERPPVQVGYISKQGAIH

SEQ ID NO: 968122 - protein, 347 aa, Homo sapiens
  misc_feature (187)..(187): Xaa can be any naturally occurring amino acid
  misc_feature (269)..(269): Xaa can be any naturally occurring amino acid
FVFFFKVKKPADLMARGAGGQELWGGRVRFLFTISQGFVACAGCGAVARGDVAAMCAGSGGYVGPGGLSVSDAAERWGEHSGGMGGSAHREGAGFRGPEISGIRTTRTPWPSGGRLQAQSLGGNQSGCSGKEWRGLQVIGAQGWKVWVNSSGSGKLWTQFRRTIHGKMRRQGGGPFAGGTGPSGPRXQGQGALQEVLGGGNLEDERAEAESGGAHRTLNAAKVPGEPRGVGVPLMANRDRPGKLNPKFVGGLPKLVTREQSGGHPGGRXHWGEHTLAGPAGWAWGTTRKSALENTHSLWGKEGHTWGRDDRHPVWKEQEQALKETATRANKEGTLTRRERKKQEKDD

SEQ ID NO: 968123 - protein, 546 aa, Homo sapiens
  misc_feature (134)..(134): Xaa can be any naturally occurring amino acid
  misc_feature (288)..(288): Xaa can be any naturally occurring amino acid
  misc_feature (485)..(485): Xaa can be any naturally occurring amino acid
GKSLGGGGGKILVTPGGVAGTQEYTPGGLPSPKDKQKNLRVSKKKKKKKNSPREKTGRASEFGGGETWGSGESAPPARSTHPERRKAHQRWVIYKRREGGITRIFSPRNRERARAQRGGRVHTTPRGCVCGANXTRESGRAREREGARASRGARRAPARFIPPPSRGWWPTHISLSLERRRELSLQRESPAARDPEEGGGHSETRRVVAPLRNNHLSEDACVTPSEEGGGEPICVVEYSDNYHRVCENNTPLLGDETTSHENTQRVEKTYVEQSLSPEEGGQREEQPXTRGGVAVRPPRWGGGGPPPRRTRGAPPAELTTQLCGVADKQVGENKQTPMNVEIGTPPIVDVIIRVSSVPTRQRKRNDAHHTRSLSPPRGVGERPGRQNIELVGSSTDTTLWLVWWPPPKREEHPPQRVRRVKHEVKQNPPRVVVVCGEQADDQKTLRDGVWSPPPSRDSLCECTIEGGHTNTRLRRKKKHSAQEEXHPINSGRGRGQAHLNTNELGAFCVEPARPQTENTKTQHTRREVYTISSCGLAEHRTDGDSK

SEQ ID NO: 968124 - protein, 476 aa, Homo sapiens
ARQSLARSPGWGARVQSGLTATSTTGGQASSPWPQPPKLAWDYEARVPPHTANFGYFIVEEWGFTICGQEWSRSRVTPGVSTVASDLPKVAWDLQGVEPLGAQKRFYTKTLKAYSSRAHRIHNFLFPELYINFPEVWFSKSPNVGKFRENNQVRGEKISIVFYSLSCEVVFSCKGGPGCDPQTSRGLSLPQKRGYTNLVAIHKWYSRGEQSIRGYQSLANVSSGALFRERALSRRIIGGDGRSVHIRRIHFISTHGEHVGSGVFPKRHYSRISIRIKLSGGQFIFPKGQQVTTTLIEAPINCGGHTDIVGVMNGFIRPIPTQTGGNTDIWILQYNSWAPQRKFDPLETRFRVVGARGIHLGRENLCCGLKEHHESHGHQKRDSNTTMESEPSDATTDDTRHTPESGRWGVNHERIITPLVEGTQMKPPEEMKRKSTNRPTTEDSFVTRTQASNMNRRDRRSEPNKQHNERAARAPL

SEQ ID NO: 968125 - protein, 77 aa, Homo sapiens
SSLVCSHKTVWWSLHSNANEIGAITRIRDLPWEINPLSSCSLLHEKDPPTISAPQTNQPKEHLTNFKSDLLSLAAED

SEQ ID NO: 968126 - protein, 447 aa, Homo sapiens
  misc_feature (98)..(98): Xaa can be any naturally occurring amino acid
  misc_feature (138)..(138): Xaa can be any naturally occurring amino acid
  misc_feature (163)..(163): Xaa can be any naturally occurring amino acid
  misc_feature (181)..(181): Xaa can be any naturally occurring amino acid
MCHLVAYRARPCVKESLMWDKSLCGESSIFTECGLHSVRALCGENVWEALSLFSRETPRRVFMRGHKQRRAGGTLSHVCGPTQRGASQKCCCEDVCPXLWAQRGHYLRVGGPPSLFYICFLAVRAHLQRRNIFVCGLXSFSPHKGGLPYILYLSLFLSFGEGXALYRNTRGLIPCVPHHVXDSCGGGINPVQAAVEGHHVGLENAVKYNIVALREDNSGEEQRAEKNFLLVSQGKGGRTPFPQKVQVGGSYKPPKFLVGSSARKGGDPGPQGTFSVGVGIKRHFPKDTQRRGGTCYPPQRKGEINWGPLECELPEQKEGRYTKGGVSTTNTRLVVKGAQKNAGDQYFERVEKYPPPGSTGARKKGGPTKWEKEDKRAKEEAAKRGVARRTPNTEDKLRERGESTNGSGRTNQPTTTGDRDSIATTEDPYSEREMRNYRLRKGLEQRA

SEQ ID NO: 968127 - protein, 201 aa, Homo sapiens
  misc_feature (73)..(73): Xaa can be any naturally occurring amino acid
VAPERRRDANDEAAVIGGVGSICCHSSRGRSQALASKITDWTEYAVERTMTWALQVQHLQLLCCEVLRLGRGXYLYDSFHSRQTIGHCVLAMASSVQNGYRDCSPVIANVSGHTVVLSPSQGWLFATFTLGNNYFTWSQEDGPVVIGVYQLQLDQGGILAQREVGQAILRLIFWSWAGFGVMTLPSIGYPPAMWYSSQEEI

SEQ ID NO: 968128 - protein, 293 aa, Homo sapiens
MAPPNARPATLGGCGPDARPGSELSLPMEVFASRSVIPGPRPAGSSPRLHRQWAKWTTRSSVRLSIGDALRSQYGSGMPPRRPCDRAESGPARYWDLGSTRKHAEKAPASLRTQHGCGTAGEYPVCRGYIQNARSGRPGLIDSRSSRGHGSGCGLVEEDLSTCAAISSRCCYQAKYALRTARRYTRLLRRRDLRALDRVRTWRAQSYREQLMWGRRRPKCWTVISERSNNLVAATVPVYSGLRWDYRAKKPRDIDDRLYQGAQGEPHRKKRDSKLRTSVAWIVMNPIEKPTRG

SEQ ID NO: 968129 - protein, 176 aa, Homo sapiens
  misc_feature (19)..(19): Xaa can be any naturally occurring amino acid
  misc_feature (27)..(27): Xaa can be any naturally occurring amino acid
  misc_feature (81)..(81): Xaa can be any naturally occurring amino acid
  misc_feature (147)..(147): Xaa can be any naturally occurring amino acid
MAPRWTTILKPRVNSIPSXRIQREIEXALKVYDFECGPRKCNTCYGAEMPNRIVSRSSLMLAPLKPCSPATVGSIPGTSRXSPLRSVTYIFLLVSPVLCTSQPTLVAGGRRHPLPRNHPPGRRASPTDAPLLLNTRHAPVRRSIAAXTPALALLCSTRTPTDQFARLLHRSSSHSF

SEQ ID NO: 968130 - protein, 182 aa, Homo sapiens
  misc_feature (182)..(182): Xaa can be any naturally occurring amino acid
MSSPYLKGDTGPKWLHHDLFLIWLNFSRHSQISTSTATFEKHREHLPRGERRLGVKQREIIPQMVLVTMVPNEVRRFLAPDLPVPHDLWTPESRSISDSGDQLEESLQGLKENKTGGDGHTHERDQPAKVKRSLLWSRRRAHIKKNKERRDTQEAERRPATRTRAAHHKRRRHPTHPTTPHX

SEQ ID NO: 968131 - protein, 190 aa, Homo sapiens
AREARALEEANPGRNEIHQKRQHDSGQKQHDAAAYGLLDEVHPARWTDLHWQLQRLVEQDDMNCRYLCDCDECQTEIKSKRNSQTRATKGKKAQSSVWCVLRRGESGLNDSSRDLLPKILVLLEFPVAGDCRGTQGSGRAAGRGIPVWGSHAPGSCRILLGQSVGLCGPSQQVMSPQGRGTVAAAAAAAH

SEQ ID NO: 968132 - protein, 52 aa, Homo sapiens
MVIRGVMTLKRGPGPLAGQERGQTLSISLSKTFMGDRGVGLGKARMQGAATN

SEQ ID NO: 968133 - protein, 146 aa, Homo sapiens
MTVTRKQQGFAKVLLIMHFQGHDVTYRYLRAYLLILYFGDGNQSTSLSSKHCQSPRSPDFASSFEDLSCDSSPERCVLVTPVRRTFLLLSCGQRSSLCCQCGPRLGQAGGWLLKQAHRGKDRPFVVRGTTSLVGVMPRRRLDPTTK

SEQ ID NO: 968134 - protein, 134 aa, Homo sapiens
MWRTRYADGTRIITKSHLDHIQEHGYVLSHIRILSAGKQERGGITFLCAPWRQFSSIPIYCASYHPNDSFDSSILKQEPKPRRFMAVVTSQTDDLKEGMHEVDRAQHSHSAPPEAQRKGEPLYDNTEIEQTIIL

SEQ ID NO: 968135 - protein, 241 aa, Homo sapiens
RLGTRLGFNRPREGSAGRPEGAGRCGRRARGPAERVRAPGNADSRGVNPGRGPASPFWDLSLPWDLWRRPQTMLLGRLTSQLLRAVPWAGVRRLGPSLECWAAGLRAPLQHIAGGQVGRLSPSQGGPAGAGGDAGPQEDVRQPLESWSRAGVFLCQTCEYRESGGTVVSPAKIIPVCDAANIGEGAEQGDEGVADAPQIQVQKRAEDAAAEDEPHKYRKLVKEDAGSCGGRSREGRLETPR

SEQ ID NO: 968136 - protein, 465 aa, Homo sapiens
RKNSWGGGGENSFDPGEGWAGNTRESPQRAPTASEDNKKNLVVVSPKKKKKKKTPHERKRESATDFPGGDDEHGRVWEKHPHPGAHPPQEEKHRTPEGGENNNREEERTQKYSHKNKRARTGEEAALGHNTGGCGERNPTQEWGAPQKEARRAYVSAGRHEGPPPPRGGGPHTSLSLYEERALHTQRYPPEKPHEGGARTYERGAPPRETRPSERAVRPVWGAWRHMWARECAHTRGRAEKRARSVSHPRSCRASVQQRRGEKYPPQGGAQETHPRGGAVPPRGGVPPPTPPGGAPRCAPTCVLRLTNCAQQTNHNVGRPHRARNTVTKPAQKHKIISPPQTYPHGWGGGQDKNKMERAADKPTRVCGPQEKATTTHYSRIDSEKTPPYGGLCSREAGLTTRRGGWLTPHENSYVTKVATNKSTAAKAPCKKNPHNSEGLRGGLNQQIAVWGRPHHKPNNNTGRN

SEQ ID NO: 968137 - protein, 167 aa, Homo sapiens
MQSISMLLRGDLFEEPMLLSEALDSRIRRYAPCESKEEQAGYAEMSSLRVCVDYQIASLNADMELYIEVMRRSRYVLLLCEQHCIVGSSRMSWRLVRVALRIPADYRCVLHFNPTLCTTLRRADMSSSLNWCPVMEYSLHRRASYPRMRLLGMREKAAKLYVPPGLV

SEQ ID NO: 968138 - protein, 148 aa, Homo sapiens
MYARWHGDRLTPDRECADLNPSQHRVSRLITQRRIEAMHLGRRSDINRPTFPDHLVPTIGASQHMLTVEAPKLRKIPLTQLPPRPTWHVGGAIQYGLSTYGRIQSLTPIVPDSINIPTFQTSMPSYVTTTNHSELQTFPHRNISVDSP

SEQ ID NO: 968139 - protein, 135 aa, Homo sapiens
MKPGGAKKKTRIQQGAPTKKREAAGNPALNTHIKREATTYHRSHEGKQEYHREKTHKKWTDIHQQKKRVLENTRRRKVLSEPKTYHAGKKQTSKKQRMAQKNTNHHNNIATRNEKNSKKKETEETHTENKRRRLT

SEQ ID NO: 968140 - protein, 144 aa, Homo sapiens
GGDRDIVQTRTCLPIRWIGCILSLLLHGTDFSYSLDRTNYKLMDSSKRPFLAMPTLLLQPHSLGARKHWSITHLVSLTCFPIVSSSPPTCVPAVNVSGGNAQRANAQRQRHYRAYNRLCQSAIPYSPCIVYQRIQCSLLLLVSM

SEQ ID NO: 968141 - protein, 122 aa, Homo sapiens
CSLLLQLLLEGNDLRMSHQKKHPGSPSSAAVSPATEDEEEPSLCAASYFKLLAGGEGLTDVSPETTPGAPVFRCTFPRDQRNLLATPRTRNGHFAKGWGDTPIMKNQKKWAVERTRTIQGTH

SEQ ID NO: 968142 - protein, 184 aa, Homo sapiens
MTHHTQMTTNYDGGTYIPRPDDDNAPAGNDRTPNVGPPTERKKAFIAMERPHKPIFVSQTHENGGSNHLSAAAGRHDPSIDERRRVDVPNDRYSLPLLDASRLHGDQDERNTAVGRESNTPPPLLSIAETSVAIHDCAPNYNNEEPTQTPPASTKMTQHALPRKPPQLRQSTTSARCSTATQTN

SEQ ID NO: 968143 - protein, 163 aa, Homo sapiens
LVHARSHAVPKVRWQSVQVFGRKKTAAAVAHCTTREWSQFKVNGRSLVDDGAAHSYTYKLLEPVRPSRQGERFAWCRTSGVRVKGGGHGGPQIDAIRSVQSPKPWWPITMKYVDEASKKGDHKTSSSEYRPGLLLGSMTLVVCRVQKSLEALGARARYQKSYR

SEQ ID NO: 968144 - protein, 73 aa, Homo sapiens
WQKSQFFFYLVKLCHKSSSVCANVVHLCHNFAPGVCSGVSQQTEVLWPFSENRGQGEVCTWGVVRAFAWRGIA

SEQ ID NO: 968145 - protein, 320 aa, Homo sapiens
MRLGASLGVNRQRGSLVCYGGIICILHMASARPMSARQVILSPPALDEDSRRLMPSPPDPGRDLPPFEDESEGLLGTEGPLEGRRGWRGAHGDGMERDYRAIPELDAYEAEGLALELSEDRKELTASSEGGTRTRAMRQREREAGRGLGRCAGGSCMTGMTEDEERPDRKRRQVERATEDGRGRHAGDDRRRIEEPGPISNRAPLSRQWGEHGGPRLRHPPPVPRISCALTSTGPAHKRSLKATALNRTLCNRHPGRARCQNTPDTRPQRPTQPRQPSSLQARRTRADPRPRARNGPRHVPTTPTQQHTESTALPPPPTM

SEQ ID NO: 968146 - protein, 352 aa, Homo sapiens
QVGFYYPCSTWGESSATDLCYGGGYKVMWRAPVPGGFSGYTFRGTCRASGECKCPFKRKVLCLEGGVITAAGVITFSVEAPGHTGCPPGGRSHKCLSRVQSARGVLQAENSLLKHREKRKVCGSAECASLKYAPPDCAREKTPEGALKRGAHTKLWCCAQCGREKYSHEGAQEFTREAPHKRRHQRRRGGPQKGEQETKRREGEYQHATGGISLRDQKGTQAAHLRGLSSQQEGDQHNTSKGVLCAPQQKVLCSPTEERFLATSAGGESLPRQKRGGGTHVASLLQFSRGVDNLDNKEKIFPTRRGVSSTFYFPPKVLRIFHNAVVVDFGLPKALRFPTGVRPQPAAFRCFG

SEQ ID NO: 968147 - protein, 358 aa, Homo sapiens
MCEKSLPQRKCGVPGGLEHSVAWAVGLFPTKNISTARRAWSYTTERCHETPSPKRHEGGPTKRGGPEKSSRVYTSQLTSPRVDTKRGGGADSLISRVLHKCAKGGGGLYSRGVGSFYREGARGERETLSPGGPSGGGGKLSQYRESAEKAAGGEEISRPHTRGAGRAEKTARDPGAIENEAKTTKGGGGLPKGWGAPMGLPGEKSLGKGGAQESQREETALSRLWGTKTPKKNAWGRRDTTTQKQACRRGPSLSACGQGSPSGVGRQLRPKESIVPREIKILSLPRGVRTNTEKPPGNVCSTTRGGKEESHRPLWFPRRQHKNNQHTHGETNPVGGPERAEDDAEESGVTDDQSKWET

SEQ ID NO: 968148 - protein, 120 aa, Homo sapiens
MAVSPASPQVLRTYNHTTVINDPLLYSSAHNDTPTTLPRGLTPDAAPPTTYFIHAARPKNPSGRNPAHNPQPLHQLDRPASPRSETNKRTDYTSTPTANSTDASTRDSAKTPKRKNHIHR

SEQ ID NO: 968149 - protein, 165 aa, Homo sapiens
MAVLGLYRGLSSLLYGSIPKCGVTVFWNVLSSISKHMRDAQGTAGRARVWPAVRPGRWRVPSAVVVVLPHGDHHSEVHPPNMNSRKAQVHEDSSTGVREIVPGTRGLKGTYQGLTATVLKQGSNRPSASIVMTPCATGTEGTTPKVHESSDHWGPRSYCRRTQVF

SEQ ID NO: 968150 - protein, 178 aa, Homo sapiens
LGCVSVTFSIRRAPSHPPALPHLSQEGTKRDNEIHDCELRVHRTDSRHGPQLASVRVGWPVVGICVRGCGPWAAPSVCGGRRAVALRDLLCVALAPAGLRHLCAWRWPAGPGRSACVALRTFYEPGAIPGIDPDYLKPDSEQTARGLKLSVYVHVNVIIVLAEVQMIFMMVNKRRCMP

SEQ ID NO: 968151 - protein, 274 aa, Homo sapiens
SPAPPPSAAAPMHTATPSPVPGTCYYQAPCPYQISSTDPGCSKQGACHDTRSPASMAPGNGHPGCRMSPHGETLPRRHDRSTMDTEKHRRKNQAAFYTQHADMTSHDQHRRCTPHALGRMIHTSFHEDHLLPRNGETDARVPYPTKSFTQTSKRARMIDRRKSNGIQHKGRKKDPTTCDNEAKRKTSDRTHPYPNHPNDAHLRTLAAPLDTTEKTRRAQRQHQTVTPPAKTQSTHPVSITAPLDQTIAQEHQTKTWGTPNQTDIDVATTNTDTL

SEQ ID NO: 968152 - protein, 235 aa, Homo sapiens
MTVDHLNNAAYGSAGDTVTSDAHALAMDYSESGTFGNAWQKLRVILSIIDQDYMPLTRFEFDWFRISPTTLPSGEARERRPRGPSDTFLGDLFGHHPHIAHPLVLPQQRPPGTRATTALNHGTAAQGQAELGTIPEAAGLANAPTASSDRCSLRHLRLQHGRTPWDYHSGTPVRHSPYTNNGPSSHGAPPGRGPINTPARNLWSPELRAPKHSPKHAAKYAAGTNTQGHGRTPNP

SEQ ID NO: 968153 - protein, 332 aa, Homo sapiens
MGRTSVWCVPRTLALGYATCLRPISRKRLPMNDGKPAEVLVLDVVRASRQDTKDSRSGGSSHPEKVSCSSDDKTCVTVPVDPVHGCAVTARLRETYIRVELLAELRSGRDKKEPTRVTASRCAGVMRLLLHETAERAKGNAQGHMSEFIRDKELMIEEDYAKNLAKLYSGTPWLHRRKAPWGEAWAQCERRSLAGTERRQFTLRVLLAKLAQRRWRQRLMQFPENVKTRTMEPRCDQARLGRASASSAPADIASEEKGPERPTQTGQKGPGDMTKAARRNIKAEHKEPSTDLKNGGAKVPHRREKTTCAMGSQHSAGQRSRTDAPPKGTRRG

SEQ ID NO: 968154 - protein, 137 aa, Homo sapiens
MSGFFACGRVGAMVLQFFSFSHADDFAELSIKDAVITVPVFFDQAERLRLCCRLLVWLARKWCSVIMSNIATGLRYVCLPRKDFKHAEYHVYDMGSGPYALGASQLGSTPGLGFPCIRGVPPLGPGRLTRGSTADPV

SEQ ID NO: 968155 - protein, 214 aa, Homo sapiens
SKSKSHLWEFTDNKWKGRFPPPLKHAILFALRAHTGIKTPFRLSPEGSTPGGWGGGEGVLLRQAGGAGDRREDCAPSPSGSQSLSRGTGCWPPGPGGGLTNRAHATMSRQEVARKRWPWCPLAGAGGHKGAMLVATGGSKGKYSAVYTTGGLERGYLFPKAVPGGQERGEVTVGTAVPGQVQASVPPEGAQELELRYSWGGMMVRMYRKNVMMS

SEQ ID NO: 968156 - protein, 104 aa, Homo sapiens
MRDPYISADPYGVHVAHETVMYASRRRNYMIKTQYYRGYEQLKICATENRRWWTFMEPLWVLQGSTESPGIHTDSPVKSSNEEEREPHMGGESACQSVQFAHTN

SEQ ID NO: 968157 - protein, 97 aa, Homo sapiens
MAQKHGPEQPALGVMKEPSAHENKRLQITRIEPGAPELHQSLTSTKWTRTYEDENANAEDRYHLTRRNKDGLESVTNVGETKANEQQTGETRRTPLA

SEQ ID NO: 968158 - protein, 270 aa, Homo sapiens
MSRDSAPLAHTCGGAVSDTPPLSFLSRPFCATLCHCVCHLSPPEPSDVPVPRCVLSPRRHLFTQHTLCCARRVFCAAPCVSPPTLSTQRLSEWTPPPSTVSPHRSVVSPLPLVRAGHPSATFPVPTCGAPPSPLWCGAPGYSHVALSIGTPPFRTRRSPRVAPYLSTPAHPLATPPPLSLTQRTSVLPPSCFPPLLWPTFRWAFTQGGDLLTFLPGATPLGRFRGHPPTPRGDPSALPPFFGVAPGEHSPFLAPSSASPAQPHAGDGPRF

SEQ ID NO: 968159 - protein, 162 aa, Homo sapiens
MAGLGGGRREWGGRRGWPSPRAPQPTPGWPHAPRATVVPAAAVAQPLEPGPGPPERAGGGGAARWVRLNVGGTYFVTTRQTLGREPKSFLCRLCCQEDPELDSDKDEKDAYLIDTGTPPTLVLSSNIPPPTGKTHSSTKRELATNHRSARHRNAQLSQTLDS

SEQ ID NO: 968160 - protein, 136 aa, Homo sapiens
MQGAPRIESRSSVAVYAGYPRSSSSNLILDDESNRHSVDNGVIMLRLILMALTLFSGFAQASVLLQQPITLDTGSGELFGSLLLPRSDAPVPVVLIVSGSGPTDRDGNNPDGGRTDSLKRLAGVLASHNIASVRFD

SEQ ID NO: 968161 - protein, 185 aa, Homo sapiens
MGHEQTLDAEEELGGIRKKRPVCRATKLVELPGIVYLGHIPPRFRPLHVRNLLSAYGEVGRVFFQAEDRFVRRKKKAGAAAGGKKRSYSQGLQRRDGWTFRDKAAYAKDAVGGQFYMKSAYVGGPSGASPLYRPWIFGESRHSVLCNPFFDAVIPDLSARHPPDPFESGQGLAAGAGAFEVSRSG

SEQ ID NO: 968162 - protein, 362 aa, Homo sapiens
  misc_feature (123)..(123): Xaa can be any naturally occurring amino acid
MTPKLQALIFFRVFFGFHCSHVSSLLLVSLRPIHNPAFLLAALSVASFGPCPWWSFSLGKDVPDSLMVTELATVAELICQHIKTVGRCTFNSTRCMDIGLALERAELAWVSLLSVVSACYVFXRSRRAVQSLCSIVSYASYDSISRAEGRRLHIIIAHPETSFAELFGDAQSVDRVSLRGRPLYLYAHLIARVRFRGRMLARVGGGWLSVDSACRALGLVRGLLSLAHSVTAFQRSDSILIIPGLRVKLVVLGGPQAADLGLDTLRFHMDTRWGRNMRTRHGYPPRKRTLNIRIENAVRNNLLDKTQLLRDKGVHCLIDTFPYCPRKKDQITTNGKSKTPLVSDPQRNNREHRFDEYHYKNI

SEQ ID NO: 968163 - protein, 386 aa, Homo sapiens
  misc_feature (260)..(260): Xaa can be any naturally occurring amino acid
SPGGRRAVFYIGPPPPLCGAPPGGGPPRGGVWDTQVGAPRGGGRPPMCVFSWGDTHTPPAGPPLWGFFSSLFSIWGAPPHSPRRLLRLSLSLSPARVGAPRAVWVGAPARWRASLSLSVGGGLRPHLLLPPRAVRVVSHACSARARGCVGGWCRHTLYLSAARPTSVCLSPLARVCVMGVSLSRDSARVCVCGGGVVVSPLRARCVSLSLCAAVRGGVGLYLTALCVCWLCVCRATHTQCVVSHLRTPLVWGALCGACEXRASMTTLSLCVAHIHSQHTHNTYIITQHEGGGGARASHISFSLVSRGGVVLSLNHTTSVLRGVVVDVLLFLTNAVGRTLLASHLSDSPPSSPRKLDLFCAGRSAPTTCLPAPLPRSGGGGDPPLGG

SEQ ID NO: 968164 - protein, 108 aa, Homo sapiens
MPQGSLLTGTVRLSASPGPGLICDQVLPRCGLLDHASSHEAKAPVIYPQQVASGAMRFPRTARTSIAFEHAARIPTAGSLPEGAIPAKNPGHQACSKRASTVRGKGVA

SEQ ID NO: 968165 - protein, 111 aa, Homo sapiens
MCRHQSCREGRLLFITPTTKDQFSCWDTHSWSCWTAARFYTEATSFAMALPGPPCLAGPCVDHADHTTRKDGRWSLGRPPAWGSLYSIERTQRISILSAFPPPASTRPEYE

SEQ ID NO: 968166 - protein, 231 aa, Homo sapiens
MREQYDRMKDEVNLQFLIDSDCTTSYRLDRLVRLPQYKRIIYTMKKLLPIGLFTNSHLTKSSSDFDVQRGISWPLILTTLLELFTKLLIYTNNKPLHGPPPIELPKSAIIQAPHRSVNNTCPHDPYTLLRPFLLLRYHSYLHPFTKQLTDPLTIQILNEAHYISSSSLRNTYRVPNYTSTHITTSNLTHALNYTPLSSNHSHISLTPQPFLPSSPTICTTSNHLTSSSTYH

SEQ ID NO: 968167 - protein, 144 aa, Homo sapiens
  misc_feature (43)..(43): Xaa can be any naturally occurring amino acid
MFNRQRRAAVTRLSVLCRKPPRLVLQYAVSFPPPLIIFVRDNXLFDHPPGEGVCQLLSVRSITAYSPMSYDIVVVECSPCVVRVSWWFVIIENAINTMTNGGLARRQQAKNDVFKQITAEEALREKRERKQGEEGRQLRLGSLI

SEQ ID NO: 968168 - protein, 130 aa, Homo sapiens
WLKKLKGVFLPLASRGKILGIFFFPLIMLDAIREYQQKAGFALFSHNIKKFFHLNKNNTKGGAHPNKDSPKTGPHPLSTDTPILICTDGRLLIMESLSSPDALATAAAPSCTTPRPPCESEREDQVSNRW

SEQ ID NO: 968169 - protein, 163 aa, Homo sapiens
MACLIPRAVHSHGLASRIDAIGSPRNKNSTISGLKDVIISAPLTKTSRNLRKSNQVMARIGAVVREKVQGTLWIRLGSSISPARHRGTSCQQEYVVALFRWPRERLFPWSMRGALGYWVPGLLETDGEHGVILPTFLADITPADFNVTASIGALGGMPQLGTR

SEQ ID NO: 968170 - protein, 421 aa, Homo sapiens
MAAMFPKGNINSSYAKHPDGLRKTHVLSVPLSVHHVRGNPHYVSFKKHSWLYKKTFPLKEALQRRGVVGFTLSGGGPGEEIPAGLSQWAPSHVWEAHVGVAAFPPYGPVPQGASVFQGVCSLKMGCVQKEIVREGYTRECGLLFTGLYHLFGVRSAREICATPHANVSSWGSYRGSTSFSTPCSLPGTPSLSLPPSLLCGGDKLWVWTGLWGIPPIRSVFPPRGWAPRGPTCGPPVPLKIFVWARKYEGSYRESTRVRAPGGPPLLEVVASPRKYCCRQGDKNEAPPISSRRGHYLRTYKINCRFYPPINREGTHPPYDDTTASTLNYKGPPQCMDDPDNNPPSECPKRTSLFEQRDTNSLAQRTERLVGRAAPHINSAPPSNETVDRRPKCEPPTEYVQKESAEGANSRALTILACRHTA

SEQ ID NO: 968171 - protein, 425 aa, Homo sapiens
MEEQLDNETKERQAACKQVRRTEKKLKDVLLHGVMTDAGVNCLMQYNGPCADNGITLPECMLNAGSLEEAWMQDVPMLGQLPPDRKPCMLRRWTDRHVETGLSAIETCESHSLLYHEQRLKCCSGDPARFVSADHATRKLAPVAQVPPVRDCALRNRTHAHRHGQTHGPGALHAPTHPMPGQSDDPSYIDQHMQGPLQKLVNGTQPPRTNATRTYQRFTHSHLARTKAPGPFLQTQAASYMAETAYDAIHLSLHNHIDTITYNFTTPLTTIQTTNIIPNYNITKTKTESNETLLFTTNKTNPTHKNYPLHPYDPDLTRKNNNGENEEHDTTHRSQLTTVNAINWNRPEQRAIRGPDIQLRQEMAFNPDAPPKAARTDGDANDRLVSISEREHTSQQPPPGHAKDTDGSGRHKEDERAGDGIEIHD

SEQ ID NO: 968172 - protein, 241 aa, Homo sapiens
AEPRKKKWTLSLKNLRPEDSGKYTCRVSNLRAPFNATVQGGCDPVGPVGNARAHRHAPRESRQVDFEVWTTLLPVAKGAQRAVNAGDPVAEARGVRSAEGLPLKSTIDVGGQKICECVPHGVTVVVACPYAVSIASHKLSRSTLCPPRDRCGAVYICLGANDHGCYELPASAFLTVLPDPKPPGSPVASSSSGTEPAVARGHSAIPAGAVFILVHPAPVGLPGQKKRAPRAGPSLLGTAAG

SEQ ID NO: 968173 - protein, 325 aa, Homo sapiens
GWYQLLIDDDSRPLLNALVVGGAQSEMGRKGMLEGCPVMSVGASKLGEGRVRPRAHSRRPVTRPKWRAAGPAAGTCPGGLTLTHTRTETQGRLHNSNQCKMTWAQLISEGRGGNRVVEAWNLSGKNGKDRKAQNTRETDRLDTHDHTRDVCVARRRSLPAWRSPALGIDVRGAVGSTLSAAGVVAPVNDGSSPSAGVVSLAGRRLLVPDGRPRMIGADEVPGPLSSTFEKPDPELRLVPWFCNRARLLPLPQAKQGSAPGSKAPGLILGEAPIPPSCGSGSPEGRYWAPRGQAHTARSFAPPTQVSEAAPPCRAQTVVRCPRTGS

SEQ ID NO: 968174 - protein, 104 aa, Homo sapiens
GAVHVEPVALQVAEEDLGARHVGSPSRTTAGADTSSISLLHAMRRLWKLYTFILSERILIYTHVEETRPQMGRLEAHHPRNETCTMVGSAAERNIPHNSPQRNT

SEQ ID NO: 968175 - protein, 104 aa, Homo sapiens
MGLPSIGSIRTDYQTSPSRTLPRVGELVESVARRRSELLFDEARTTQEEVNRPRSTKIARALGCLICGRYDCAPKYSRYLRQRSWETSGSQYDELVRKNREELD

SEQ ID NO: 968176 - protein, 148 aa, Homo sapiens
VFFIYIFKFMSLINSYSYWSPGLVRTSKSDNYLATINGAGAKWILPENTPAPLFIKSALAVSTLSPGLARYPCLAPAHIRIALFPRRNRGENLVTTQPWVRGERRRQEGGEGASGEKTEAARGMGKVEKDCQRLMEDATKDAQLIRLE

SEQ ID NO: 968177 - protein, 218 aa, Homo sapiens
YGGRVGGPTPDFRTTLAYFLPHSRLPSSFPAAWLIGYLPRVACERQAKAWQGLSGIPMVPTAHQDSSARSSQTAPRAFAPVLEQSCISDDASRLAPTCPSRALSTWIARQSLSLSPSCGFLGSPDVSSLTPDSPKYCFGERARIVDARDCKARPHVSDIPKNISFPKLSPILEIAFLTQLLGLAKEMGKGASTYGRNRKSSEALEACAKGTQRVLGSG

SEQ ID NO: 968178 - protein, 72 aa, Homo sapiens
CSRVSVPRSFTMVSPNLIYLLSACLSAAFLLVRILPALCYGLPTQREDGIPCDFDWREVEILMFRLVPLMMM

SEQ ID NO: 968179 - protein, 321 aa, Homo sapiens
  misc_feature (229)..(229): Xaa can be any naturally occurring amino acid
MREAPLTVERGAPSGVTTSCCCCKGGGDHHELCVLRQRTFVAAKNTSVVGVFPPHKSSIRPLLLLARPTGGGRQPRQCWGDDNVLLLASPKMSSCCLLWRRPPQKEAMMFGGEGWWGHQTPLPLLLGRTTTSLFITTTPPTNEKAAGERLDGWRPPQSFVVDKDVSPPDRKKYRRSTNKRPTMNWLWPLFGGEQPPPCGGRLPAGDRLVVTAQVVHTSARRRILPCRDXIHSSIGQPTSCVGAPINNNTFPFFPKKKTTPVINKYIPQFYVIRRQHRRGGVRPPPPQMGGKKYSSTKHLSLTKSVENNTSRFADEKNIFYR

SEQ ID NO: 968180 - protein, 212 aa, Homo sapiens
MVRGSGGQTLAKTEEAAAGTGFPLPPWLSLAPKPGPTRPGRGTGGNVASPGPGRLGHGLSEPGPGPQQGWSWRTGELAPQSSAATRLRGHGLGTPRLPKLAEGRIPVLNAKPILSGSSSPESILLRIVRAHLRNASSTFSPVRALVSRNISSFLLGKREASRKVTSRSGSQVLLVATEDDHDVGAGQGAGIRRKAPLSCLSSGGDVVPGVRA

SEQ ID NO: 968181 - protein, 184 aa, Homo sapiens
MASVRPASAEAMILSPPALSEAPGRTDALTSRPVRDLPPFEDESEGLLGREGPLEEEEDGEELIGDGMEGDYRAIPELDLPMRPRDWARDDRGAVEELEGQSEEIVAWKRRHAGGRDREAGRGAGPMRRGLRYEQVRDRGRQETLCAASVRTGGCGGTEETVQEDKEDDCEELENLGDLQRALC

SEQ ID NO: 968182 - protein, 312 aa, Homo sapiens
  misc_feature (48)..(48): Xaa can be any naturally occurring amino acid
IPNAYRNEKFYAIYNYVIMAPNVCEAPYGAYYTPFGMTGLVEYSFTKXAPKTLTSTHHTLYYPPALGPYEPLYQYRSFVTHEPRTSRVTLDTTALEDARALKDCAHRILSATLYVLCPCTSMTSVSCREAMDSPCLPLLEYGAGDMLHAKDKAPTQHNLPTNLKSCDTLKRGYQYALAHAYLVSASQSPRRTFPLDTHSHHTLSVKQTSGGSIAYSNLAYAQAISVSTMCDHTSWTLSSKTRYERFNRITLATSAYWRSIETRSDGLTESRCAETATFVLITRYDERYLIAGHHKAASPNIVGLEMGIVNVV

SEQ ID NO: 968183 - protein, 175 aa, Homo sapiens
  misc_feature (151)..(151): Xaa can be any naturally occurring amino acid
MVTLPCSHCYELIGTDSSVYLVALDPVGGICAYVSVSAAIAKVACGCESLLDYFSELTSPSASDRSGDAGPCITSRTRHINHTLEWHSHVRAYEPELVCTPMIRNIGFAQISALVLYVGIPDPKGYLNLRALDKEVVPQGGPKRRGKLTYXIRIDYTRRVEAFEHSGQLERQYTE

SEQ ID NO: 968184 - protein, 147 aa, Homo sapiens
  misc_feature (80)..(80): Xaa can be any naturally occurring amino acid
MAARVIRRILSYPGRRITVQTFKEPGVAMCQGLPGIGRESMTSWLGVVSGGSMCLRWLSVLPSIFLANWRCLGNSQWTGXSFHMAYKSGIVRVCRCHPRTSNANQLEDLPGEQIAYAHERVVATIPLETPFNADYSQTPISFWDPIY

SEQ ID NO: 968185 - protein, 250 aa, Homo sapiens
IFYYFLSLYFYCTENAASSLGQYHLFIDPRKGVGTLHAAPSPTPGSIWQDWGREPLRGWRSTPSKHLGSCAAAEAVRRCGVSSELYVQVRYPERLASRDARAHRVYSRYARPGCPCAVGLGPSRACAQQVRLPGAPDLPQDPFGSSSRVALSPVSSADVNTLTVEGPVRLCGQLGAREAVSSRAQPESPVSSYDPAYASPSELQGDCCRGSRKAKPGPGTREQRAHDNASTHHARVDPRAPTNAPQVKAK

SEQ ID NO: 968186 - protein, 124 aa, Homo sapiens
RPTPESRAGTQSMTPQLLLALCPLGQLPALQWKERAPSELLTLPRVQVRDAVLEYPIAVDCSWTLPAVLQTPPSPDVLHCHVQAPAQCAARGHSWPCLQPRHARHTAPPAAPSRDCYPKALAFP

SEQ ID NO: 968187 - protein, 376 aa, Homo sapiens
IFCILLLKYVVLLIPPHNKNLTQAPHFFPSSPFPHTPSRNKVLQGFPCRHVAICGGVSMWVSKWWKPPRAFGGKKMGGGLEGMSQEGLIMEGPWRTWRHKAELQMLLIIWDTVGTQNSYPGCRHWRQVPIALSRKALGDGGIPGTILTTPPGTMVVTWATGCSHARVTLVAIQKLPLRDTFIFSTGFIHFFWEGGMSPSMCSQPSGASTESLSPDGHSNARIWNIQSTRTPWRHLFTPNSLGHTGHNSVTHEGTPAERATRPPTKTTPTSRGAFRGHHRRHNTREETTPRGKPHTRRAPHLVRQGGHPKRDRPCADNNTPSMLKRAHSHDARRTNNTMRAVNRATNDRRDDNTGKTNNSRSIGNYNYIFFIYVHRA

SEQ ID NO: 968188 - protein, 83 aa, Homo sapiens
AYRLFYVDGSSHSWVSPGMSVCESDSFNELSCNAKKKRSQRATNSAPRSDNTAQSVFAIGSLHVTAMQESFNDEGHSTTALDS

SEQ ID NO: 968189 - protein, 285 aa, Homo sapiens
MLLPGGGPLLESERPNLYCVEKRRVPPTKGTSLLKNKHGAGARDTKQTAARQVGSTKTEGSGLLVVRRTTPRLGGGEQKLEAPKTTTSETDRSDATADGGATTKLDLGGAEWEECTTTKRLVTRVDRRPKKNSELPKKDQLMPDTAYHHHRRRRPRYQPHARTSNHQPPDLHQTHRTEHTTTRKRRRREADLGSLEKRQTGRRVVATDRAQAQGARRSGTRGGRGPTGGGAARRRANAEQRAGQTHTSNEQAENQRKAGRTERHDKGSRRGSEKRATGASEAGKG

SEQ ID NO: 968190 - protein, 226 aa, Homo sapiens
MAPRYETLRATTTPNSSEGATRKSTQLRRKNDLLTHRPDHLEQSGPRLHSPTSILLQRKYTRASRRSSTRNTPVVVSTLGHGKRKTQTHTAQQTERHTRQHSKTIRSHTTRTPERENETTPTQNHQTRKQPWSSPGLSNNTNPGRDHNVARSRRQPQNQTHDARTNPHRPYDTSRERQHPKHSSNNSRATKKTTRRTRNNTNKQDKRSSARKKDKKRNTKRHNGTR

SEQ ID NO: 968191 - protein, 193 aa, Homo sapiens
MAANENHEMTNTSGDLFPRVIPPKYFRRDRVRTTGTLRRQFSASHAPTNATPRQDKRHHRRPSTATPKRGQQPQHQPTRVGGHQKEGRTTTRHTPGVTPRSTTSWRPNQNTPGRTKSTSRNRGIGRRRNTRRQAENRIRHTRRRIKGTNEQAGATETERTPRPAARRNKSTAKTTQEDSEKDENDSKGDGRKS

SEQ ID NO: 968192 - protein, 125 aa, Homo sapiens
MHEAGKRPTLAQRPPHTHEGNGRRTIDAHTRHQGTQPRPPGRPPHHTQAAEADHQRSAGSERNGAGDIAEQYERTQAETSRTRQRSRQQRHQPAHARSAAATHNSTDPSASQAVSQQIREETQNR

SEQ ID NO: 968193 - protein, 207 aa, Homo sapiens
  misc_feature (54)..(54): Xaa can be any naturally occurring amino acid
MGPSKVGLTDMLVTIGSLESMYVERVVFSADTGSGQKERKRKTRSEKSRSSLSXPGTEVDNTMKIGPIYPYAWHWARARHQSMLPTFVRVFVWILPRVEQNIEQVYTRERFTREGPWERLLYQSPVGRDGTTPGSANTTKCRNKGGQPTNGGRTGATLQQRRPWNRVSRIEKGPPMGQLVFINTVTAERRFYPGHPGTFDPYPGGTT

SEQ ID NO: 968194 - protein, 320 aa, Homo sapiens
LKNLAKYFLHQSHDEREHAEKADEAAEPTRWPRPPVRISRRTQCKDGETAADGEGTRDMDTPAHNRYRTTQAHELGRVGTKPRADTAPTQVNDHIEQQHEHTSHSLSQQGTTRLPPTNPDHQRVPHTSRTKKADTPHPNAQDQATQENHPTRNNSHRKHKQTHALNTETTQRRTIAPGTHSGEITHHDRRHTSSKQTRPDENLHQRTTELHTPGAHQKTDDKTRQHESTATHHRAYRTKREHQHTNSQKPSKSSSKTDRRKNTKQPHNQTATTIQKAPHKAAHITQRTGEQPNTSNTDTTTNSTQQTHKTQEPPTTHRHN

SEQ ID NO: 968195 - protein, 404 aa, Homo sapiens
MTSRQSHLNSSNPRSTWVHLAYEYTRAVTVRLTSRERSRLTTRPIRCGPPIGASHDAYSSAEGALHVTTPPDTASHPAHTDAESREAVTISHILLKSCHYSANDQANMGCTRFAARDPNTKRPRHRSHASRPPSGEKKPPEQSTDKEPDHVSRASHKTIDHGRKHRACPRRPHGQNGKGESHHTPQVPRQKSPHEQIPRHTQAQHKTPVAHTENTPQRQHRKRPHRARANPRRGHAEGTTTANTTSGRITQKRGTQRNERQQNKKHTSEACKRPRQNTTKAHDTNHDASTTAAARTPTPTATTHDAPTTGANNERPPHGRRNTKTGEHDTLRRLHPRRAHSTSAEHTHTQGARKTTTNHNPRDTPPTRHNERPPPTRRTTHRTNQTPGTHKEAHTRTHTHTGDQ

SEQ ID NO: 968196 - protein, 434 aa, Homo sapiens
TENRTLFQGPEGLFKIILHSHLWKFSVWRGCGPSFSRKEKSPFVCAATEGQKASRRLWEPGCPHVTGPCGAVVRVPEGPGVRHSHTVACEGAVTRGDDVTTKRHKREVFCGTLWRAVRAHDVRQRAHNATTQHTPEERHYTELERARPECTTLWIYTEGRRESHLCVGCVRCCETTQEQRVPPFRLSHTQESLTGGAVIQLRGPPVVGVTNLKESLLCEMCDESSTTRRACAAQCVLSTMWAPPRKRSTQARSERCARIKHTGVSSPWANHLPPLWGPPKLGTPPECDNYFPPQTRGSGDNTTCVGGDNPRAPLLPRLYKKLFSQHTGAVVPYSTEELTLRDKYKDTEAGLSRWAHTGVKNPPCRSRRRTPRGHHPRRGTTTNAAPTTDCTTAAHTDSGELEHPRPTPQAHHHDGVGENTSGGGPPGSPPPPNT

SEQ ID NO: 968197 - protein, 98 aa, Homo sapiens
ALLCATGAIVSLSVCWCPGYTDNSNYGIAFPPVADPIRFGYCPSYFDVDFTVVSAVCYTFLRDSYKKTGNLVISVRLSDNCTEKDKQCSIHRVLEKID

SEQ ID NO: 968198 - protein, 111 aa, Homo sapiens
MRAERNRLRPVVQCTRVTDPVSLRRVTVVLSEYMRMKDLNTDRRDVELASLVTAIACLVQHLCDRTGLRFIALLGLSRCRVCKEISLLNEAKEPYEFDDQLKTRWLIGDYV

SEQ ID NO: 968199 - protein, 72 aa, Homo sapiens
VDMTLPGLAAIRSCSCDMSLPVHEFNIWRPLHVYEEDSLPLIYRDETLLTSKFVLGSIETVRKHSLSIVRDA

SEQ ID NO: 968200 - protein, 55 aa, Homo sapiens
MVRHPKRGGAPQKEGSAADPHKEKRQNTRSEQKTLVDRGRSRGAPHGGTTLARGG

SEQ ID NO: 968201 - protein, 264 aa, Homo sapiens
MPSLARSLPHGSPLTARCNWPLYGSLAPRATCSLAPHWSPCSHASTRTLRCLRRLPGTPSRYLALRATARATTALSNLTCCARPCTRRACTASALLALLTTRQATPSSRLLTRYPPSHATWPTLLAAAVRHWLTHAARALRASLLQHLRSPALLHSYHLALCYTTPCTPSSQSSRPCTPSTTGSNTTPGVDPDTSPWPPRNLRSSPTPPPRTSSLSPHPGPHALAPGAPGTPPPSGARLLQRCPAGSAALTVLPHCVPVETPLN

SEQ ID NO: 968202 - protein, 111 aa, Homo sapiens
MQYATGTMLKFHYLCFLRYRRVFEEYMRVISQRYPDIRIERTRITSLNQYQYDRHSIFPVSLSNLVLIGLIIVGKDPFAFFGHASVHNHSATRCGAKKEIRFDAMYDWFSS

SEQ ID NO: 968203 - protein, 35 aa, Homo sapiens
MSLIVHSFMTGHYLLLTPGALISRRRQGYAVHHGI

SEQ ID NO: 968204 - protein, 106 aa, Homo sapiens
MCRRVYVRFDGLTTLLCTVDKPALEGMHVCLAALIRPYGGWNLRGRRCPSVKRDGRWLPITLSCFLMRANTCCFNVGYLLVGILNEPRRKRCREFRLFVINVLVVI

SEQ ID NO: 968205 - protein, 116 aa, Homo sapiens
GLPNLFYGGKWASVGVSLPGLFIGTVSRVPGASSLRAVLAGWKTVRCTGPQRLSSARKARIVGLLLVKLRDRHRHPELLLLCTDCGTNLKQKGHFLWWRTQFYVVRSLPGSEFTPP

SEQ ID NO: 968206 - protein, 173 aa, Homo sapiens
TAADMAAQITNAASGRRPMRREQPESLPGGPVRGVAPSDTWRTGRRRCSARTPPRVHMTHQPISDHEATLRCCALGFYPADDHTDLACGIGERPRPMDTELCVTTSACRGWNLPERGRLWWCLLERMQRYSCPCASMMRSAPSPLHPEMGGCLFPGLTIPIRGAVHCWPGSPW

SEQ ID NO: 968207 - protein, 490 aa, Homo sapiens
MAIDHHTQEREQPETRNAKTLQCSTQQWHATPKHLRETHTYTCKKTHKTHTHTQYVEAAAPPKPRIPHKYPPKYIPPYTYSKLGDNHEINIKHPHHIDRRSRQLTTAPPYSPTLRTTPADPHPHTTATQPNPDTQPTPRHTNAPTQTPGATRTYTTTSHAPPDNHRKTQIDANTPDNAAPHHTYRSPPHHLVANTTINYRKYSTPHDPADNKDTDRDEYHDNSAQRSHTENTNPPITHPQHTATHASGNRRRLPAPDHSTHTRHRDRTRTPRHHPNHQPTACHTHPDTQQQRTHNNDTHHPTPSDTPTNQPTTPPDTNHNHKSHHPTPENTPTHHLSTHHHTHNNSHSNTHTPLITTHYKNTLNYNHSTHITTHPPHTNPTPTHHIANTQHQPPQQHFPTHRPHHTITAQTPINTQQQYTNHQPPPPPQPPPTTDPTTTPLPPPPHPPTHHTPTHHPHSTPTIKTSHPQHQLPPHSTQHTILTIPPSTNH

SEQ ID NO: 968208 - protein, 424 aa, Homo sapiens
MAFLIAYRILNIYSRLYTIYCYIVPQRLYCSLRSTTNHYADAIKLYTKEPLKPATSTITLYITDPQTISSHHRSYYYENPAIHQYPKHPPEIQTSTLKNIDQVQLTEATHSHSRLRPITTSNRRETAEYRGIETIRSSSHRKARPQADRHAHEQTARQPPPTTTQPLMTHTPHTNTHINNVIPELNLNTLGSPIKTYNKPTHKQHTNTTPQITKTNRPRAQHMSTLRRPPAPHKHTSSQQPTPDTNNTGTRRTHQPTDQKKERTPPPKPPQRRGQRKENKTGQATMEPQPHTAQTADNRHTHPLHIHPHRQPHAATHQHTQDTPRNPRHHLPRPHPPTPPRTQTHTNHNQHRIIETRAPPTAQQRQSTPPPAEPTHQPSTTQERRREDHNNTKPTQPKKNQRGREQPPEQDHNKNAPTPHQRTP

SEQ ID NO: 968209 - protein, 160 aa, Homo sapiens
  misc_feature (87)..(87): Xaa can be any naturally occurring amino acid
  misc_feature (117)..(117): Xaa can be any naturally occurring amino acid
  misc_feature (132)..(132): Xaa can be any naturally occurring amino acid
  misc_feature (155)..(155): Xaa can be any naturally occurring amino acid
IVELESEEEVKLALKKDRETMGHRYVEVFKSNSVEMDEGVDSIHGPNSPDTANDGFVRLRGLPFGCSKEEIVQILIQEDMRKLSSPXMAMTHASRTFSGRKTQGDSPICCKIMTIHXGRTELEHRPLTESTXERIGHRYIEIFKSSRAEVRTHYXFPLGN

SEQ ID NO: 968210 - protein, 111 aa, Homo sapiens
GQWDEFYIVRQNQLHNTKSKNHPHFPPLCFPGKGGSCGGFFWPCRGVWGGPKEGQKRDKGTRGHRGRGCGGYSVRAPCALCSVELCPCGLSVCALSIRGVAPPVCCAAPDP

SEQ ID NO: 968211 - protein, 187 aa, Homo sapiens
MKWSTRRTPTRHGAPSDREKISRDDGPGTQHSPWKVQGTTRALNEGSYTENGAPCRWHHGRHLQNTWSSAHGPVPTFLLVPGQPGPRHEAAPPAWFNLMRSSLIHHPQTHHRTSTKQTCYSSRTPMAAPIHPATPHTWPQGRPKIEAPTNRTLERHTHHTRPPRASTRDPPGTVPSPQHARPTWAPE

SEQ ID NO: 968212 - protein, 366 aa, Homo sapiens
RSENGGFQVGAQGPVVLLCASDLLLAAATATTSLGPCAGQKDSPGDARTSHTTTLHRKQEEGYSAHLQVMHDMADSPSLARKVGHDKNELTHLTPHGRIVSQRRTQARPISGHHMHRSLVNRQQHLAAPTRPQAPLPQRPYVAQNNLHLQTTHERTRPIHPPGNMVYTIRTTWRQFHPRHTASPIQQMHRNQAASSKARRTQPPHPANGPSPLGHHGGDDSPRSAPSLDTIASPTNSKFGNTRVHPTSHTDALVHNSVGPGPAKHFHTSTPLALAPYSVRSLQGCAPHLSRLDEQHVHAKRTIRHRDPSPGEDTLATPRTMGNTTSHAEHTGGTTERISPHNGNPPRRSIGLGPQGTHSTFHAPPP

SEQ ID NO: 968213 - protein, 262 aa, Homo sapiens
MGGTSVFIGGTKTKGGPQGGVWGVGARDWAWNWGRRPKPENGRKNPNPTKVWPCEVRMAAGPPGDRGNNRGTGGSTRGLGGTNLPSPQMMGPTKSRHKGTPGGHGKPQVTKGTGKKSLSCETRGHTCGETSEDTLWSHRGDMEAPEMCGGTRKEIHQERTSRSSYTRKVPHQGEGTICITPHHQKQCRGDTGEPPHLWAGTKSATGAQVATHRCGHERDKRASEETHVKTGGEHPKGAQQTIYKSKRIEGESNHRGVTSTQL

SEQ ID NO: 968214 - protein, 52 aa, Homo sapiens
MRDQHTTASKTKADANRRGQEQEGKASEESGRQRHSARKSQTRTANQPEQQA

SEQ ID NO: 968215 - protein, 239 aa, Homo sapiens
SIQQVLIEPSTTCQTLFYNPGKGGVREPVDLLPAVTLSPKSEALQGNRVWGLPPCRGTGKAECYKKGGSPLKMRRLAVWRLIAWCLSQTEGEGPEEAAPVEQRRHAEKRPVPGYHSPFLQHRDYAEIFLEEAPDLAMWGCTTSTPGKKAGLEYCGYKEPRKCRLVPGRLWKGYKGERPECPPRTGARKAIQPSARRPHLAALRYRHNTGPTATCQRVIPKERPQPCAENGWRPGEASKP

SEQ ID NO: 968216 - protein, 173 aa, Homo sapiens
  misc_feature (85)..(85): Xaa can be any naturally occurring amino acid
VLLLLSAALALTETWAGSHSMRYFYTSVSRPGRGEPRFISVGYVDDTQFVRFDSDAASPREEPRAPWIEQEGPEYCGSGTHRICXDQSHETYRREPCGSRLPLLQPRRAGRVSTPLQRMYALRPWGRTGASSAGHKPSFAYDGKDYIALNEDPDAPWTAADTAAQITQRKWEA

SEQ ID NO: 968217 - protein, 81 aa, Homo sapiens
KKSNTFICAPLSSCVEKVAVDLSAAGRGIFVPVFEKPKSSACTEFEGVFLRQQVKKVGGQTSRCVILRGGRFRGLSTVGKV

SEQ ID NO: 968218 - protein, 110 aa, Homo sapiens
MLGFLVKKKKIGDPHVLKNGDPKRRYTTKYRSKTGYTIERPPIEINQEADATTEHTHRTGPRQKHGTNAGDIHRQRGNTKNRRKTTTKPRRRTQNRQNRPQTATQGKNHI

SEQ ID NO: 968219 - protein, 110 aa, Homo sapiens
VPGFRPEPALHNPLRLSMFQLPGQSLLGFFFSLTEINPIELKKGNMIRYKRTRPLIRTLTIDSTDQKRIKDEIQTMKTNQEHHQKRKNSKTAISIKQQREQRRQKDSDNV

SEQ ID NO: 968220 - protein, 364 aa, Homo sapiens
MWGATHVVITEGDFIYWPYITHKCSGYITICGSVILHIPECASTKLMAPSLQGTAFYVFQYTTQSSVTTHSNEVETVGGRGGAIPIDSRGSQWHCKGCENITLELPGREHIKGVKWDAKRGAMRHNKRHRERSPRSYPKGNIIQLITTRIQSSQEGQFTIQPSVGHTTGDNNWHQAPGEPSGAGHIGEGNAETQQNQRTTCDRGDHTETPPRPTTDGNSKPGDKHQETPMEILTTTGERRQKLHRQQTPPKQPGATPHPETTRQAQNRKQQSKNRIPPHAHSGKKYRHSGENRQTPIRSNTREQRPRRKPPQKDNDEDTKSGYSHKQRIWEKRKQGNQQRQKQPDRRSNPGSHRNGRRDGATTS

SEQ ID NO: 968221 - protein, 266 aa, Homo sapiens
  misc_feature (52)..(52): Xaa can be any naturally occurring amino acid
FFFKFDQKKFFVQLPTTGFDSEEGPPEGVSSIFPYFIFSPLRASCVRSNAKXPQEEVTLSPCEVSPSVVSFVFRLHSSFHSGLCAIFRHSVAVFEANVGEAPFVGSGSFQAPFLCAQGVCVLVCLPSLLCRELLVCGKMWRTEGGRNVACVFHGGTLSMWTCRGSVGSCESARLRGERGPNMCEAAENTGFNYIKSPVCVQTPHAGVFFANLFGPVETGGETPFVCARRFLPFCESACFVCKKPQWFPPKRHRAPGKKFFFRVALT

SEQ ID NO: 968222 - protein, 252 aa, Homo sapiens
MCVCGGESPHRGGSCVCAQECVIAHACVYIFRERSYYPAGGERSSGRDLSLCEPPITTTAPIICVLSVRIRTTMRTTRGVVGRPPPMLVWMQPTQHTRGGVSTTSEVRDNPLGGAHTTHADGRDRPLLLYPKKRYREEAMTPHRSHTNIHPRRGEQIVGWGAERMHDTPNKQRILTPLSPQHNHITFFLHQPDARCGLWVGHPTIQTEEEHLPSTESKHNQTYQAHVYPSPYKMEYYITTILYSSKQERTPL

SEQ ID NO: 968223 - protein, 38 aa, Homo sapiens
MVRHVHDRNSRNLTDSSLQVPVNCGHKCNTICMSYSHV

SEQ ID NO: 968224 - protein, 72 aa, Homo sapiens
SDPPPKVMRNLSRDIPPRPDTVRSHLAPRWLTWSPKFFDGFHLLILGMCLICSHTNGGHFCQWPVCAVSSRD

SEQ ID NO: 968225 - protein, 67 aa, Homo sapiens
MGVIFVSGQLVQNQYVTDTHQIYQMSCTLHCIQTALPVITVWFLDILKEDSATSMVLQLHQFLILWK

SEQ ID NO: 968226 - protein, 48 aa, Homo sapiens
LLCHNFKMQEAQVICCEESTSRQTCRGITYWAVLTLLASSIHTDIDEI

SEQ ID NO: 968227 - protein, 108 aa, Homo sapiens
PLPMDEKLLPMDKRHVWFGESMTDGFQFEYGGHGLRPLTAVAIQLTFLRLMSTEGLPERSRYHVAGTASSYMCPADVSNLKQGPAPFQGLHGASEIRAEGKKPFSTLQ

SEQ ID NO: 968228 - protein, 89 aa, Homo sapiens
KDPSQDRILAVVWRVHTRSRSVAAPSILFAECSLSGMNTGIAPFVCFCEIKIAAILGAMVATRADSTQGSPMLYLGQCTQILQTADDMI

SEQ ID NO: 968229 - protein, 38 aa, Homo sapiens
MILLKTLDSDVHSDWKSGEYWIDPTRLQLDAIKVFCNM

SEQ ID NO: 968230 - protein, 169 aa, Homo sapiens
MKRAGPRENKRSRGQVEEQLAPVGVLHDKAEAVVGLERVLQGCEEGVPGVLQDAVLGECVGHLVLGHDDLLLEDLHGVERPVAFSFTRITLPKVALHSSFRYSNSFMVTRCLGLCRGHSISSGPELHWVSRPEVISSSSSFLMRQPQSGWWLSTLRSQESPKVCVVVRV

SEQ ID NO: 968231 - protein, 38 aa, Homo sapiens
MALELDEDDLEAEEDALGDELLADEDSSILDDCSICPC

SEQ ID NO: 968232 - protein, 68 aa, Homo sapiens
MCLLGDLERQITFDSSLDRLAVRDDRVRYLDGDACVVLLQVLQADLQVHVAGARDDVSPDSSMMHCTM

SEQ ID NO: 968233 - protein, 40 aa, Homo sapiens
MQPTMSVDHNAGHHLWHTEGGKLSKVNTYCEEEGLLRLLE

SEQ ID NO: 968234 - protein, 33 aa, Homo sapiens
MRCMEKIETGQVRLFKKMVGPGKAQLGMIDRVV

SEQ ID NO: 968235 - protein, 76 aa, Homo sapiens
LAGSLWLPAEVNEEDAGEMELGLRKQTHNNAVVKDACLLRPGELPDGDRRMVDFLGPGILGVNQISRCACLGDKFR

SEQ ID NO: 968236 - protein, 70 aa, Homo sapiens
CGYSYCDYPCQQAHCPEHMNVCYQSATAPQQEADAEVNTGNTSNKYSPGELHRSNTKYSHPSSTTGTKRP

SEQ ID NO: 968237 - protein, 62 aa, Homo sapiens
MIRGTLETARSGDLAELDKLSGGAEICTLEMLPACSTLVAIPMRKAVTPKAAFCAGADLLCC

SEQ ID NO: 968238 - protein, 125 aa, Homo sapiens
MGRDMRTSHSDMKLRGDTLTYVIMLSDNEQTSKPRVNRLNTVAFKENSNEGLMKSSPEERERMIKQLKEELRLEEAKLVLLKKLRQSQIQKEATAQKATGSVGSTGSNPSPLVRGTQNIPAGKPS

SEQ ID NO: 968239 - protein, 87 aa, Homo sapiens
SRGSLWYCWRSHRVALQVTTTASGKSCVTLMEKLCYCRPWTSEQEMATGASMLLPWRKSYELACRGRVITHRAMSGFRVPLKASLSS

SEQ ID NO: 968240 - protein, 39 aa, Homo sapiens
YCVLLEELMKKREERRKVLEEEEHEDEARLKPDLKTQRG

SEQ ID NO: 968241 - protein, 57 aa, Homo sapiens
CARDDTQSGKSSRSACIYTAEHPFIMLKPTDHQHGVNTIDADVLHNVLQLPLAWVSW

SEQ ID NO: 968242 - protein, 57 aa, Homo sapiens
DRTILLLYSFMAKILTTTVRFVETTPTEGPKAFQRTLCLNGRPCSMGMEGVWRIPKT

SEQ ID NO: 968243 - protein, 43 aa, Homo sapiens
GGRIEILITLHTCFKRVDVEVRPECVDDERVFCCVDNVLLCCV

SEQ ID NO: 968244 - protein, 65 aa, Homo sapiens
EVGGLVGNRWYLSLKLSGRHRAGRGVRPGPCQDRKQEQNTIPRKTYGGTLQAQGAAGKFTPPVFP

SEQ ID NO: 968245 - protein, 87 aa, Homo sapiens
QIEVTFEIDVNGILRCDMLKKWVLGTKIMITITNDQNLPDYLKKSKGWLNEGRVDAGELVSQRPMARASSRAGACRNAGSLVRRNER

SEQ ID NO: 968246 - protein, 75 aa, Homo sapiens
AAVLVLVLSLKYPLNYQVATEVPVHPHPQLNGLELGMGHTMNERAPYVLPTVQLNACSDGICMHVGYLMLRHSVI

SEQ ID NO: 968247 - protein, 39 aa, Homo sapiens
MEYSAARDCIEALMEELLYMKKNHEEEVKGYKPRLQLWV

SEQ ID NO: 968248 - protein, 150 aa, Homo sapiens
  misc_feature (28)..(28): Xaa can be any naturally occurring amino acid
EDPRPFIILLFISCSSVTLFRTSTQTGXRHVGLDWRRQVPPVNKPAEFTVDAKHGGKAPLRVQVQDNEGCPVEALVKDNGNGTYSCSYVPRKPVKHTAMVSWGGVSIPNSPFRVNVGAGSHPNKVKVYGPGVAKTGLKAHEPTYFTVDCA

SEQ ID NO: 968249 - protein, 44 aa, Homo sapiens
GCSRGSGHVYMKDIHYSGNNRVQNSRLEVIKQFKREMKIERGSH

SEQ ID NO: 968250 - protein, 48 aa, Homo sapiens
  misc_feature (19)..(19): Xaa can be any naturally occurring amino acid
  misc_feature (30)..(30): Xaa can be any naturally occurring amino acid
  misc_feature (38)..(38): Xaa can be any naturally occurring amino acid
  misc_feature (47)..(47): Xaa can be any naturally occurring amino acid
SCTFRSSGCAVYWSYVEVXCGKVELAIVMXSHSKAAWXSLFKDHVTXL

SEQ ID NO: 968251 - protein, 149 aa, Homo sapiens
MNDGITRTTEHGSISQSSVSQPTTEGAPPCGLNKEQSNLLLDNSLKVFNFNSSSTSHSSWKSPSHMEKYPQKEKTKEDLDSRSNLHLPETKFSELSKLKNDDMEKANHIESVIKSNLPNCANSDTDFMGLFKSSRYDPSISFSGMSLSD

SEQ ID NO: 968252 - protein, 36 aa, Homo sapiens
GIVVLLGLRGAAVTAHLHDCLRFLLPPQRNLLLRRM

SEQ ID NO: 968253 - protein, 41 aa, Homo sapiens
TLRMLRIVVLLPFQLLGTAEFQHTMANGAGALVDELDRHGG

SEQ ID NO: 968254 - protein, 52 aa, Homo sapiens
  misc_feature (4)..(4): Xaa can be any naturally occurring amino acid
MCCXVLHMCQFKSLFYSGTVLICFVSFSVESELFGFINRKITISITISITIS

SEQ ID NO: 968255 - protein, 79 aa, Homo sapiens
AGKPIPEDCLGSLMTSTQRPGYGAYDAYKHAVSDPSILDSIDMNEDERELLINNINRRLTPQAVKIRAAPRFFPRIHRG

SEQ ID NO: 968256 - protein, 45 aa, Homo sapiens
MKRNRRVLHDVAMSCSRQCRCGAAYVCRLRPCVCLEVHSWASSTT

SEQ ID NO: 968257 - protein, 45 aa, Homo sapiens
MRSLRRTTYMGSATVIDDTNIAALQLETEIEALKEELLFMKQHHE

SEQ ID NO: 968258 - protein, 35 aa, Homo sapiens
FVSWYMWLPARRKRKYNVECQGYKTKYHDDEFRHE

SEQ ID NO: 968259 - protein, 40 aa, Homo sapiens
RILESSWWLDKVMACYHEGEIGTLAGVRSPRRRRAGIRLV

SEQ ID NO: 968260 - protein, 76 aa, Homo sapiens
  misc_feature (61)..(61): Xaa can be any naturally occurring amino acid
QAGGYQRIWRGSVPVMLPERPGWCPSVTDHVLALLQLFIREVPRILLGLLREPVGIPRELXFISGYCQPSTSTSTS

SEQ ID NO: 968261 - protein, 107 aa, Homo sapiens
  misc_feature (1)..(1): Xaa can be any naturally occurring amino acid
XLVLIVYCGQVLRSPPCGEELRDLLRYDSGAHHNMYCEYRDLTTAVAVTQCYRDMCAWHRARAHSIQIMKVEEIAGSKCPPRVCKPVHDFQDQVPVAPPESGTGARI

SEQ ID NO: 968262 - protein, 89 aa, Homo sapiens
CVVDLRIRKIWCDDAAGMSSRIHVKRSASRAAILTFSDLFQTRWCLTAAHKQSFIRVDALIQFFPIDDVLEKLLNLADTVEPNNQDNIM

SEQ ID NO: 968263 - protein, 39 aa, Homo sapiens
VYCGQVYEKSPLRGEELRVIWLRYDYPVAAPTTCTWEYL

SEQ ID NO: 968264 - protein, 41 aa, Homo sapiens
VKTGCGQQCGRAVSGACGLEDPGRPATQRQLSIEITTIVPV

SEQ ID NO: 968265 - protein, 39 aa, Homo sapiens
MYYRNSSSGCSCECNLLMYPQGQVWVPMFRAGVIKSYLS

SEQ ID NO: 968266 - protein, 36 aa, Homo sapiens
TLMLREENGCCSSVRAAPVLGIRTESARLVRLSAPD

SEQ ID NO: 968267 - protein, 62 aa, Homo sapiens
DPETSCLLPISCFWLRRMALALRMAAMRKVGAVLVYADSCVQIAAERGASNLVRWWSAHKEV

SEQ ID NO: 968268 - protein, 104 aa, Homo sapiens
VPAGHVYNIFYKSSDNYLVRHADGRPQSHILMHWDFYYVQYKRVEYLHIQQCSLETSAKVICQGREEGVPAITQMSSRIPRESTCYIISVLEGLLPIPLEIIFL

SEQ ID NO: 968269 - protein, 95 aa, Homo sapiens
DLLVCTDSAWDPARSLRTRNGQRKPCAISNTAPIVDSPLWCTRIAAYTNSYCGFVLMILQQSCTRILNSTTPPIPASHYQNNIQIPDYCLYYFYF

SEQ ID NO: 968270 - protein, 425 aa, Homo sapiens
  misc_feature (226)..(226): Xaa can be any naturally occurring amino acid
WLGLYTKNPNNQKIKAIILKHTLCVCGDLSPSPPTPCGGEKCGGVLETEKGRKKKPLSPTPTRGAHAKEHIFLCGVSSLGPACVCGCGTQRGVLEESLFPKKSLPGESWRGVGKTPIYNAPRVEREREAAGDISSGESQVVNLISPIISLFSPHISPACERGALENLFNKREKISGGYLWGRCGGSLEPLVRPVESALWGLLYERDKCVGVERVREYITERDKKNXQRHPQREERRRTPTRRAPLSPASAPRRALVSAVTRHPRGDEARVGNESSARERATSNHALWGGETHTQTNMWGPPLLLRGTLLKNDPLTKVGAPRGVPPTQRGGRAVDQQGGGACSTPRAPPVCRPPSIMVAPRRGKTNKTTKGERSTAEKTPCYFSLQGDKIRTPLNRGGERKNTSSCRVEESHRTAVCCSLKPHGTS

SEQ ID NO: 968271 - protein, 70 aa, Homo sapiens
MRLKCPGGDECVAPAGLNSPRNGLARRAGGDREELIPGPTSSRLQWEKDQQTRSSGKECLELSGGLNALR

SEQ ID NO: 968272 - protein, 39 aa, Homo sapiens
MSSSGPSVRNSVSECSRARKIPQEEDQPLPARRFSSDCS

SEQ ID NO: 968273 - protein, 41 aa, Homo sapiens
CSLDSDYFKYPLMALGELCETKFGKTHPVCNLVASLRLWLP

SEQ ID NO: 968274 - protein, 139 aa, Homo sapiens
GYPVTTIAQPTILTTTATLPAVVTVTTSASGSKTTVISAVGTIVKKAKQDLRGHPGLERTVQPSDHCPVGGATLYISGLGPTPQMPPERSFCLGIPRCETSTLTRETPTAAVNDVSVHATGCCLLIHIEKCRILTSWHL

SEQ ID NO: 968275 - protein, 405 aa, Homo sapiens
HQLSNDPLLEMFPFVLELAWAFPQHHVVECHRVIVSEDVGAINIYSPRDVGQFPEDSLYKWFQKKFLVAKDLGCRISVSRAMCVTILHSKGDFSHVVFNVFSRVLFIVSSGVVSFERRFVMTSGAKSAKRGHNPLSNVGGTCDRVSDMCAQFSLCVISFEALSQFTPVCLFGTFVHLTQPFFLWKNRDHRGGPDLFVGAPRGKKVLAPDFSLSRCHLEVIAILASAWGGSNLRTAIGGRPVWLSGMNPVFGNDRKGTRLWRNPEVSLGISGERGGPRPPFFFSSMSITTCRRYVSTSSIYSFLMLLMPYNLYHNEITYEHTPPPTQSIATSTRNPRNDTTGGGAASTSRHRPTRRQRGDRTNTPPGGYTTRWGATTRPRKNYTPEGRGRAILHRAGTTRPPASES

SEQ ID NO: 968276 - protein, 54 aa, Homo sapiens
SRPSLSDSELQVIDTPDASNTDVFRSGTSRGFSGSTFLVATGFHGLHVIIGSTF

SEQ ID NO: 968277 - protein, 156 aa, Homo sapiens
LNQVLMYLLFCLQSSSSWLGLEAVIHVVWPVGSCLDPVDHQSSCILELGDKPVPNTFYVGFYILIACGRCHDCSLDSWAATGPSRNPIACCGRSSPAWSSCFACEDGRRNLGLLSTKDQIAKDVKASLSPGPYSRAVVDDDANNAKDVVKTFHETA

SEQ ID NO: 968278 - protein, 253 aa, Homo sapiens
MTYQYPALTPEKKKELSDIATASDGTMAKGIRGMQHEIHMGSHCQSRLQITYGHQSNTAGRTGRLSTRQTCMHAQACKKQTDDTTMQLGGHDTILYPLTNTLTYHTAHEAAHMNRNASTYPTHTYNKKIHKAADELDRGPSHRNTPKERQIESTHTKTQHDTPTLNAQAQETNTKHRAHNKREHDTTNRTERPPHGTTTRKRNQRTPEQQYYDPHRIGPRTSIRYPLTTEHKRATHHQHTHNVSKRTNTAKSH

SEQ ID NO: 968279 - protein, 227 aa, Homo sapiens
MCLRLGGLSVGDFRNGADEDRPGAGGSWAMSASSHAALFHGTVLHYVGTPQDAVALPSTAVVNILSVIFRASWFIYLQAIVSHRVVHASLAYHPPALGPVFSSSVGCALLSLTCALGLLGSTLSMTFASQGLALHGCLHFLGSSDSTWVPRHRDCPFVALYAVILGSQPCASGGIRLGALRGGSTVLAVRCAQLDPPGCCESEALVGETQPTDDCGETPDLVRGRAC

SEQ ID NO: 968280 - protein, 34 aa, Homo sapiens
LYPSCIFQTAFSNMNFPIRYINHSGYGRSESFNG

SEQ ID NO: 968281 - protein, 37 aa, Homo sapiens
EHQFYETLPAEMHSLPNKVVLCAEMKELCLIAYLERG

SEQ ID NO: 968282 - protein, 217 aa, Homo sapiens
FFLYRLLKLILFFPNRIPFVENYSSLLEMCAHARKTRTYAGTGSLGKKLPPVVLTLGIEGFRGVLCQNKWSLTNAEQTRVSLCELEDVPTIFSRRVLRYKFHHRSPFFARRVESHVLTLIYSPPSKRRVCVKRFVLKHMCQVPSTHFSKTTLVIITTCVSHPKPWGYCEDHHIHNIHNLNHILTGRAFVPRSRQRVGFSDTLVATLPGPIDLAMCAQ

SEQ ID NO: 968283 - protein, 463 aa, Homo sapiens
FYIGSRGGRGGAIGKIRGPISKIFRGINSRTHGHNNCWLASTRIIKALTVSIPPSRVSGAKVDWSINTDPGNCNHVIKQPIKLVGAPASIAFAKNRLCCNVNIFIPQLEGSHNSGQITHSAFCSTRSTGSISQSSPCVYYYRAHLRGGEKFMFRTVCRNNNIRHPAQTDSEMITISIRGIHHKITQIDAEEAQTCRHNRTLRNQQRNGGHIEINTPNRHQCASCSQQGDNDQIQGHWTQSGRKKSHLRAMAIGGGTGERRNRQGINIFTAVTDLGPTVQAHQSKNNVMRDGCTEKRGAPQRAMRTRSSRGTRDDSGRIRPRQGDEGRSTIIDGKGEAIDKATKSKSRKDDRRDQQGEAQTKTERTYRETGTHVGGRQEGEGAHAAPPTAGRGTHRHERTSQNESTMPGEHIGGQSARDQDQAYTEEKRKREDGQRRGATQHQGRTERSNRLERGQDRRSRERR

SEQ ID NO: 968284 - protein, 79 aa, Homo sapiens
MVVLGGSPVYAQPAGLESVIDEGWMDDDDDEEAEEKAPVKKSIRETPAKKAQKVKVRSGKGLRNQSSSDQGSKGQGSPF

SEQ ID NO: 968285 - protein, 369 aa, Homo sapiens
MTPTLIAIRSTYNIITPYTIDRLIIPHNTYRRAHSTYSVNPTNNHLLQTPHEPLTPPQYAQNRPHLHYRILAVPGPLQMNTTIERKMYVPHLVFHQRSHRQCNVKLTISTSDTQPRHHEPPAPQPRRRNRQTPRPEPGNGQRSTHHIHSNRTAKAKRPQQTRTPPQTPGPAQRSRHKHPQPTHHTAATQTTSTRMRAHIHRPTRQHKNTKNPTNRTTTHNTTRAPGTPTQDTHSGLPQRGQHTDGGHAQDKHEAGERKRTRQPPRAEKDKAGDTHTTSQDTARGTKRDRKRPTARTESKQNNSTRSGATPNSHHADEAPERRTTAPTRTREEQANNQNKTPPGKGAPRPQVGEENKKHTAADTPQGATN

SEQ ID NO: 968286 - protein, 116 aa, Homo sapiens
MCIHVQNSPPPFCASNIRAWPYSLSCNTRDSSSPKCLSHLNCCVINTERFPPRSECVVFTQRGLLSLIIRVIKLYSPRLTRRCWCPRCTERSLLLSTNRKRCQIQHKRPRFSPTVM

SEQ ID NO: 968287 - protein, 124 aa, Homo sapiens
LLVFLCGLCHRISGSQPLDWHTPLRTSSVTEPTLPPCGRLRPSGPRVAAPLALDGMTSFILFRCIKRTELRATETQMRTEWFPMCSIDYSEHEHARGCMTYQDRTLPSVTALNHTSALVTHFNV

SEQ ID NO: 968288 - protein, 178 aa, Homo sapiens
PYRVVVALSLGARASRQTPKPSHRIPKQPRPYFPYNHRTRPATGPDRLSTSTSATMHLCRSISRLPPLHIHTRPSPAETLLRAIPPYAATTAHAIFELRRLDSRTPLSRRSLATAALPRPIAEVLLSVTPRHPPPPNSPSTSHTFPTTQRHAHPTTRLPTTLYPIFPSHPTSPPPDTH

SEQ ID NO: 968289 - protein, 221 aa, Homo sapiens
LRKRCGSRDKKPRDLFGPPGPPGAEVTAETLLHEFQELLKGQPPCTAQRPDVPGPCADPAGRLCPPPHRGHGAPVLRASGPAAAPGAGLRLVGEAFHCRLQGPRRVDKRTLVELHGFQAPAAQGAFLRGSGLSLASGRFTAPVSGIFQFSASLHVGEPDGAVPCAVTGLGWLSGGAWHRRPRVRVLLGTYPLPMGGLGLGMGSLLHAAQGPLPAQLLAVWF

SEQ ID NO: 968290 - protein, 104 aa, Homo sapiens
MATSSTTVSKKAFERDKSYLLPHEDSLYLRAGILCLMPFLANVHDRRHRYPPPKSRQGVTGTHHSRSITPELSIRPNKVPSAYKHYSLVHFKPLRAISRGSLFT

SEQ ID NO: 968291 - protein, 223 aa, Homo sapiens
MWATGRTSKNCVIPTSGGRDNSNYLMQPFLHREGKYYNIGQRSSKRATVSAVPDISGARYNLPFSQDAPPASGKDVTRRRLSRFKRIKNHGTNVGVPIFPKGASCGVWKQGLLFRTPGGKDPTAPEMYTVHNFHKCLGPPNIGGAVFYNFPFHSYYLKYTRCGRAYRAETNTLSMSVSSGTTGGPLSTQEVGARVFNTKFPRSFSSEAGRNFQQHGTFRAAKI

SEQ ID NO: 968292 - protein, 50 aa, Homo sapiens
GARYLLLATLRLIWRKLIYGLNCWVPSDDVCVEESFIGGTETHNARRLSV

SEQ ID NO: 968293 - protein, 413 aa, Homo sapiens
MPREDSAELEDPTTSLKIIPTIGMHSSSKCYPLWAASTMWASKQHASSIRNVPIAGKAVVLDGPSNTHDAPRPSSRAPEKTHPASGSKLHASIILVWNVRLYVFTKAGTSTEIRDMLLDTKGARLLPSSWCHMPHVKSLCQHTEHWYSEPEKTSILSRLLGITTTNLQWDTIDNPEMMCRLIKTGDHKMGAQRKPRVLTQCSPYSPFLHRELVHPKQACSDQWAQQSTNSESASNSETENSWISSNTLDMGVPRLDAKIVYDLKTLGYTELIAFTYPDMQRYNRGTNRLLSLTDHTDTQTHTYGKRDQAPHWARKHDGHIEDRDNPHTEVGTPQQNTTLVDCTKDPPPRYYTTGHTDEVATTDSTYAEKQSTQTHQQDTINTKKHTGGAPNTRGRTNTATYKLEQHHNDSQKT

SEQ ID NO: 968294 - protein, 144 aa, Homo sapiens
MGTTERKLYMWVSERVLPKERRRRGEPTTANSTNHSPTQVLLVRTPTKRKEQQACCQNSSATTTELLSGTHPLVGGGKDTPRQPHTLLHSIPYMIKITPPTKIRRPVSWRGARCTQGSHCSMGSAPPAPPHDRPGAALFTRDSR

SEQ ID NO: 968295 - protein, 154 aa, Homo sapiens
IALNANKRKQERSKIDILTSQLKELEKYSSKHHFQSSAAQASNITSSIQQQQLAQAHISSTRKHTRPSNNNPHAHPRQHRSFMHTHDRTNTSASARASATARHINSTATQQQHSNPHISTTSNTKCITQGASSTHRHHHEQITTHSPIPAEHHL

SEQ ID NO: 968296 - protein, 387 aa, Homo sapiens
  misc_feature (40)..(40): Xaa can be any naturally occurring amino acid
  misc_feature (284)..(284): Xaa can be any naturally occurring amino acid
KEESLEDEERDYGPWEVDNDQLRAIIELPCTTHSPAQHTXSSEHIITHESISGRSSHSAQPTLDKVQTQLAEVGASMQLQRKSTTHRFDSVSLLFHAHANQPNPFLQSGIRRTIVRCTTVHIFITNDTPAQWLDQEAAPKQFPKPNFTKKKVMVTVSDGLHAHLIHYSFLNPGETDYIMRSMLSQLGKMHRKLQYLLPALVTRQGPILLHDNNLNCVSQHTGASTQLKALGYKDIASSSIYTPDLTDNRTSSIWLAILNKLDCTGHNTSSIVLTKDAYTEVRHXAYSTAFNRITDINRHVYHRPTRLCNATATSSGTDRHNGTQDAHWLKTSASWTMRNERVMRMHCYVAARRTLSQLIWPDDWVARLMAKTKKKIQRADNIKDKKE

SEQ ID NO: 968297 - protein, 225 aa, Homo sapiens
  misc_feature (99)..(99): Xaa can be any naturally occurring amino acid
MILIRKQGLLHSRTVYIDSRGEFCPRPIVSPSDVGSGAYGSVCSAIDKRSGEKGGHPRKLADPFSPEHLRHKRALPGAVACLKLLLHAIENCHWVLLGXSSTLSAPPLQRTSYDFYPRWMPFMQTDLQKIMGMEFSEEKIQYLVYQMLKGLKYIHSAGVVHRDLKPGNLAVNEDCELKILDFGLARHADAEMTGYVVTRWYRAPEVILSWMHYNQTVDIWSVGCI

SEQ ID NO: 968298 - protein, 482 aa, Homo sapiens
MWIAKRPFLGFSPVEFAPFPMWQMAALPVCGLQLSSPVELKGLQGDTFSSRRGCGACVALWRSPRVSAEGALGPVALRRERCVFSLFYTSVVSRGVARLVGPVGYSACGCIEGLAGEESRLLLSGRGLVEAVERERSLCIQRVRVSRAHREPSLCVLLSERESARSVCVRTAPFRENNPRRVSCACVSVGGPIVSCVRPLFFERAPQQRARDLPPRFDKKCLFLRAPMRRGVCGLSPSENVALLCVEALFSPSRVCAFKVSPARRGSFAGGVSPPPKRGGGVLVWRGPRLFVVYDGVTRGGRGTSHGVGAKALPKREGSPSGTLFAPGFPLSVGGPRLLDTGLHRVPHFFGWTPHGGPETPYSMGGTALFSSYLITPCCAGGAPPRGGAPFGGNKHLSLLSGPRCRGYTRGVCAHAPVVARPKGSFLVGPKGVPGTGAPRPRVPSPLSLGHPILLLRIFVLSIISVSVKSTHAGGRASTICV

SEQ ID NO: 968299 - protein, 355 aa, Homo sapiens
DQEELDKTKPIWTRNPDDITQEESWQQFYKQPHSMHWARPTWQSSHFSVSKVKLAIPGHSLIYSSIGLHFDLFVQNKKKKNNIKLYVRRVFIMDRCDELIPAVSPIFIRGCGLTLAANLPLETSSRSKCSSKSQQSWKVIRQQTLCASKVALKLYLYQLGQASTKEPHTSKQHIPSWQSHFLLSNRHLQRPFGANPRTQSTSQIKPGADAHVGRWQGLGNARLSSSITPIHPKIPGKQTVHRHWHHTHNMESRKGSHGYNAQDHLETERNQPKQQRDTPKTLTFRNEIQTHGSSEQKGQKRNHTEDLETHTRFRAQSRRGGARQEEMAETQTRERDITQNRRWRIKKYKYNATTR

SEQ ID NO: 968300 - protein, 200 aa, Homo sapiens
  misc_feature (183)..(183): Xaa can be any naturally occurring amino acid
MIYEFVVQQPRYHSKNATTAIITTAETNQIQQACRESEIVAGSHSTESVMHNTERICKSQPTDNWEWRSTITYVKHSPPYGGETKIQPTTLSECLQQQPYKDVVVEGTTQDGHADKPLDDSIVNERHHTQATRNAPHTHCDVRARRGANSTIPRQHVPTLVVANATHTYLMTLVSWNAHRYGXGTYTTDIDLDCHTYVSC

SEQ ID NO: 968301 - protein, 443 aa, Homo sapiens
GSRSTACRPYWNKPTVKSLPCDICKDVVHRSWCICCTGQCQLRQAASLFHLAASNMCTGFQKPQPCLLHARQHSGTPTIPVTSMAHPFTRQHNAASPWEQDVLSLINHLQRSHPSKQLDSSCNHTRSQLAVQIRSQQLDNDMQVVAPIHGPTHPIIHPHHPSGRTTPARQDHPDKTGIHGRTSFARDCHSSMVHCTSKHMHVRDPTLPTHIDPGAPCARTHLTKRPEVVQPDMRDPCTTGPERIMRRKPNTQTRHNEAQSLTPEVTASPHFQRNQARPTGTNRGRRPGEQRHAEHEKTHTHHNTTDPTAAPRHTKKDSPDQRTSRNTMKERTRPSTRHGPLNDAKKETRTHDTQEKATPPTSNTTTLETDQLTPSPTRAGPDENAAGGPTNQRGGQPQRRRAHSQRRPPARATDDQLRAHHTSRHRDETRTNSTPTKQNEERH

SEQ ID NO: 968302 - protein, 242 aa, Homo sapiens
MSTFRCVVISIEYIIKTKKMSIGVPYQMVIQASSLSKWIKADIYRKVFNLQRHLQSPSPGRHIKPNISMARPKAGHSTENKKKKTKRQTTQQRQTWTHKDKHQTLTQRKQQDGTRRKAPEQEHSRSNTRAHKNTQGHRKRKQHTNKYALTDKPERPHQNKTDGPTQPHIAQTNNTKQQQTKIAHKKKQPQGKEKTRTTNTTPPQTTEDTGRQKANTKHTRKVEQTNTDSHEKENTQRDRGRE

SEQ ID NO: 968303 - protein, 81 aa, Homo sapiens
SPRSIDVVCDRTFEIWGDRYSTGEGEMTNHLMQKLNIRHKGLSRYTFCLMNKLEITLERRAERRKHPAKTQEANYLMLEQT

SEQ ID NO: 968304 - protein, 144 aa, Homo sapiens
MECVSAISLLIAYYFYLPEKTVIYNRNSDGRWNGDAYRLLTRSQFHGLVGRWHCAGRLTLSFTLTRPHPCVAETWGHLSDHDNTLKHTGARTCSPDRQNYAGYWAGAYWGATGDTPSRDNTGTRTQGTTTTRLGPREPTQGIVT

SEQ ID NO: 968305 - protein, 109 aa, Homo sapiens
MSPSRESGESRTPCADHCYPGLWASRDVGLGGLCVIRLSRCLRCSRVFCTWLLQYARGLWLARARGDLGSRDPALARWNPRDSLAGVVARCEQFSLLLCCAADSVRWRR

SEQ ID NO: 968306 - protein, 216 aa, Homo sapiens
MAINHSPKPKTARQPATDTTVQSSGPKGQRTGKTRYTRDSNTNQGNSQHGTPEQDHKQHHSRTDTPHTNNTRRTQKETEPKKKERTRQQRMKPTQTGRTKRNQGGRPRGHEGGTRGRETDQEATHKQSHTTKHDQQNTQTNSNRKEEPARKPQIAHASPTTPGSQTKQTETATQAPTPRKNRDNYGKRNAGAAPTQTAHHTQSPAPEAKEKKEERR

SEQ ID NO: 968307 - protein, 102 aa, Homo sapiens
  misc_feature (33)..(33): Xaa can be any naturally occurring amino acid
  misc_feature (56)..(56): Xaa can be any naturally occurring amino acid
MWYKACGAQRDETPSAWRSLARIARGKLFLRSXIATFWMSNPLTKLGHGWLINLTXSYNEGISGRLVPWRSHMTVGFTEVLVKNTTLLVSDSRRLDDLPESS

SEQ ID NO: 968308 - protein, 311 aa, Homo sapiens
MSRHPTGRTKASTAQCACNPQALSCDERTDPALRQVGPLTRHTRAPKPPPLIPISPSGQTTRASQCVKHPGTPPLRDTPLAILTAQSHVVPWHALASFPFPWRPWSQTRATHAHLTDLADIPQSSPLVAPTNAGPLRSCPRKPAPRPLGTPPPLASAKQLYRLWTGEPPPFAPPTSCTENRYQRCLSLPHAFGDPPPLLPARPPRYSALVTLEYTAPHRPRNTIFACATQRIMGATLLVRAAQPPSAAPPYSADGPSKSFHQKKGVWHAPRHPIMGGRVAQQFCNTTATADICYLTPSPSPLRRDATSSVP

SEQ ID NO: 968309 - protein, 33 aa, Homo sapiens
PLPVTNGKGRPASLAGAQFGGSGKSGERGAYAS

SEQ ID NO: 968310 - protein, 127 aa, Homo sapiens
TESRCRARLDCSGEIPAPCNLCLPGSSHSPASASRVAGTTGAHHHTRLIFCIFSKNSLFTHVWFRLVSELRGPSCIHLLGPPKVAGNSRSLSRRTRLSFLLLKAAQYYSVKHRVSTREILERIESNN

SEQ ID NO: 968311 - protein, 184 aa, Homo sapiens
MSTHRRYRIGELQWTVTVQLEKRERGRVSTNSATQQRERYYTIENRNRLESRTLYDHLINTSRYTPMRTHITPRYQHTIRVRQTELTPPYNQQLDVTERTTMTSPHSSLDHTSQTYNTNCSPAPTHSAQLLATIHRTSNQYIPTSSTSYTSTTHARYVPHSQSFIIYPTTHNHINATSLPPHAT

SEQ ID NO: 968312 - protein, 262 aa, Homo sapiens
YLSEVGVYDGHCDPSPGSGLGGQKEIPSTVSRLRWILSGPQQLAAELEVEMMADDVQQNDQCLATRKCVPPHYKEAELSKGRVCVPGPDVSLSTWTSMSGWANKLTELSMLDDELMKRVPGMRLWAIAMRSLSVYHPGVYPNPSHFNIRAPCWVSFGDRDAVSHMGRPSRLNRVGRQNTGVVEILTLKGLTDGQGNGLFARWSSCGRYMREFITSWLLVLKAVDSNKDAGNTLKGGADMERAPKYGLVRIMKLRGRGLHDFL

SEQ ID NO: 968313 - protein, 133 aa, Homo sapiens
GEWNERSDPDADLYKKTQETLYTGRTEDFSMPMSTVGICHQQEAWRHEELCDPSSQFEDRVGTIKSKVVGDRENGSDKLPSSEGSGDKPLSDPAPFLSHDGCIHPTDRAHANQTSASQNEASVQQETSQTRAG

SEQ ID NO: 968314 - protein, 245 aa, Homo sapiens
LAARELSRLGERRPRHPVTVGATRKDLIIMDLRQFLMCLSLCTAFALSKPTEKKDRVHHEPQLSDKVHNDAQSFDYDHDAFLGAEEAKPFDQLTPEESTDRLGMIVDNHRRGIQRWVCDGGGAEPPGLSTPRTNSIYDNCRKPMDRSSASESTHGLLSWDEYRNVTYGTEPGMIQITDDWITTIQTAWLRLAACTEGINMGTKTNGQTLQCHTRKRNTTEYNLDKHEGSSALTVTRILLNNKENK

SEQ ID NO: 968315 - protein, 400 aa, Homo sapiens
MNHYYNVETDKVPQNHPFQEWTLQSPRGAKARGHHRANTKIHARDSRVRNGRKRAQAIPSDNMEGARYDNKSLEGHKILKGRNTTSYGHKTCGTKSPETTPRAIPYKDMIEGKYRRRCRWDLNGLPGGSHTGHKKKAKGNPQAIRGERGATRGAATGGPPGKKKAIARANAHRRHNSRKIPRKPQSATQGLARHEGGSPRGDHEAHCTERPKETKGTPYERQNKRDVTRWGQLPKTARIPQIRIQRISANTGPELIEDNHPMRGEAPNKHIANETPKKLRIGTQQGVDPTINGRQLGNNQKAISTLVEAYEFYHKNDAHGPQHPASPRDNSKPKGTPEQQVKWEQHQPPTTYHSSLTSTHENQSHTLVRRNTLDTSGDTNPHHEPTPTRYNNNIRPSTAT

SEQ ID NO: 968316 - protein, 98 aa, Homo sapiens
ASQPRPGQEGGGWAAQQQHVGDFVLPLVPAAAVLRHATIRQPPRITRSPSRYGGGARSIGGGFELSRLCPYRLPRHTVSVFPLIPPIPGRAQWDGGGW

SEQ ID NO: 968317 - protein, 112 aa, Homo sapiens
  misc_feature (4)..(4): Xaa can be any naturally occurring amino acid
  misc_feature (44)..(44): Xaa can be any naturally occurring amino acid
  misc_feature (84)..(84): Xaa can be any naturally occurring amino acid
FFFXSTFHPVGALFSHVPTPTVPSTRQTEGRERTHTCQRVSQAXVCGPPTSGRRGPHLELPSAALALEPVLRICALTLTRERAXKAEGQSCQPTASMGALGGQTVERRFLSP

SEQ ID NO: 968318 - protein, 180 aa, Homo sapiens
  misc_feature (138)..(138): Xaa can be any naturally occurring amino acid
  misc_feature (140)..(140): Xaa can be any naturally occurring amino acid
  misc_feature (149)..(149): Xaa can be any naturally occurring amino acid
  misc_feature (153)..(153): Xaa can be any naturally occurring amino acid
MVSLKDYCTRMKENQKHIYYITGETKGPGAKLPRPLLCWGNRFFPGKHGLEVIYMIEAPIWEWRYCVPTAEGISGEDFRCQSTKKKGLELPEDEEEKKKQRKEKKTKFENLCKIMKDILEKKVETGGCVKPIGDISNXLXICSNQKATXYWLXTANMERIMKAQALRDNSTMGYMAAKKH

SEQ ID NO: 968319 - protein, 54 aa, Homo sapiens
TCTSLTPLKLTKTQPLTPSLSDTPTIAIYLFLASTVPGILVDPSTSLTLHGIAM

SEQ ID NO: 968320 - protein, 341 aa, Homo sapiens
KKNRDQPLASKDSQKQLLCGAAVGTREDDKYRLDLLTQAGVDVIVLDSSQGNSVYQIAMVHYIKQKYPHLQVIGGNVVTAAQAKNLIDAGVDGLRVGMGCGSICITQEVMACGRPQGTAVYKVAEYARRFGVPIIADGGIQTVGHVVKALALGASTVMMGSLLAATTEAPGEYFFSDGVRLKKYRGMGSLDAMAEEQSSQKTNISGGGINRAELRQGGVRGPIRGPGPLQQFRGLNSLRGVPHGCHGIRARNCVCFGTRLCQGSADLHRAVWAQYSGGGTGAEALFNKQGLRQGNREEATDWTGWESSAHDQTCGGAHSTQQGATTRHNARNHLTKERSNG

SEQ ID NO: 968321 - protein, 177 aa, Homo sapiens
MSKDKNKHQPTDTQHRRRHPGTENTEERQQRKRDNSNKYHAIGAQAKNELWYEYKSDERKEEQKNDRERKDSNNLQRDADATKVDEEAPQARTRNTHAQQTDGRNKLTNTKPESSKRSSVTTAKSRNQAHTRPSIDAASKAKTTTLIRKGEYKRRQRRELEEKQRRKEKDRLTYPMR

SEQ ID NO: 968322 - protein, 136 aa, Homo sapiens
  misc_feature (66)..(66): Xaa can be any naturally occurring amino acid
MTIFQLFSGEDQPLSDHEECLPYLVIFALTVLNGVIGSTSRVMVLSVSVFTPICIPPLIRSTMCEXRLSLDVVVRQGAPIFQLLSGKDQPLLVRRNAFLVLDLCFDVLDGCPGILFSRAALVRACLCPYLHHVSDA

SEQ ID NO: 968323 - protein, 75 aa, Homo sapiens
RLLTPNLNHRDEINGKRKTAKKQKMIHVRKSCGGELRTTTNATSSLLQERLFATEPEGRERSIGILKNSLTGPTL

SEQ ID NO: 968324 - protein, 488 aa, Homo sapiens
TVYYEPWLNPTVFFDIAADGEPLGRVSFAAVCTTRSQSTAETFSCSEQLDEHKDLAYKGFLSFTATYLHGPSMLLSGCADLHHRPLTWPLAAPTLHSYCGARNTSAHALHDTLSTSSNTPISRRSLGHSVGSDWPTTACALARPLQTALLPTPSSLRSFGTPVPTRSLARPAPPAAPAPTRALSLAPRLSRAPTALDPPHTGHCKVTCGWRKEASNVCANSPSPYSRRGFRQTGTRLAPTHETPYAQLTQHRYFQTPIFLALRLPIGFTEPPKSITGQHIYNGPSRRATLSRPGPTLMNEYRSKQPPSHQTETFQTCFPAISVGITRPFNRRHTTPSTPRPRFSSIPLRPQFHMGPYPSLYVSYSSPPSSADQPVLFRPGNGAYCPYSGASLSAPSRPYSLAAAFLFATAASFSPRALVPFSPPLRRRGALSVAAPSPTPACRSPLSVHSASPAFSVLPRSPFSTTPPSLYSRPSFSLSGRTTYQLHR

SEQ ID NO: 968325 - protein, 73 aa, Homo sapiens
MPPPTERGRPPENRKCSNARKSCGGEQRTTTKAKPPLRQERLWATGPKGRQRSTVIPQEGRYGPYLTAETLKN

SEQ ID NO: 968326 - protein, 312 aa, Homo sapiens
AAADAGDDARGRVRGPGIGLGGRGVRDGPGTRRCCSGSTLSAQPAMSRKKTPKSKGASTPAASTLPTANGAQDRQRIRDMRLSRPQTRRPNGPIAAPGTALALDETGVSTSTTVTFKVNAGGETRGDGEDLICWIDSIQGWMTYPGRGHFIIHREALTSGTKFWTVDGVKVQPADCGTQHGQERFRSVTHAITNGMLMLCCCSTMVTNEASFEQHPGLADTENTKSKPQQTCTLMMLGDPGGILTMNDVEEDGGTRKQGHKRRQATHDTRTQRGHNGTRHTSPQTEQDKHTKGTHNNSTVSTVQGDERPRTR

SEQ ID NO: 968327 - protein, 212 aa, Homo sapiens
NPKVRPNPARFLQNCRAPGGFMSNRLVETQPLPGRSIPASKAAQPQTANKFFQAAAARAWHAFPEDFCRHKVLPQTADRTSSSANAGDRLSSRHHLSRMGKFLSAEEYQQKIIPDEMVKMFSSTDRAMRIRHPCRQMEQFIQYLDRANSQHPDLTTHDRTWLPGHQPCHPGSRQVKSMLILDPKLNEANHQVELTEAHCTAYRPKDEQGPNR

SEQ ID NO: 968328 - protein, 136 aa, Homo sapiens
MTTMSYLWERSSLMDRMGDHKMAMDGIGVFKTFWSPSDGERFMQLARDMAKSYYEANDVTSAINIIDEAFSKHQGLVSMEDVNIAAELYISNKQYDKALEIITDFSGMVLEKKNSEEGTSEENKAPENVICTIPDG

SEQ ID NO: 968329 - protein, 122 aa, Homo sapiens
MEELSISARGHARAEAVMHRKGRESDDRRSAQHLQQVETGRAKQSEQRAGLAGTSRRTRQRDSNAKTAQEHHKPTTNHPATPAARPPPAQQVQHPLHATQATDNHNTRTRDRPSTDPPGHHN

SEQ ID NO: 968330 - protein, 370 aa, Homo sapiens
MPGHQSHAPARRQLPDTASASCSSPPFGACLRQLSGAGPPNGHTAQGECMHLHTDLGNSKCATTRCNTASRSAPLCTMHAFRPPPFPAGPNPPLLPNYTSDALSMPPPPGYQDQEKQPLHAGPARPRANPADGQLLGPRPTHGEPGDRAETPANQQENMEQTSHCCPQGAKRTDPGGNHRPPTNCRRRRPPPTQTNCHGARTHRTQHRASHTQHHRARLRAPHSPHAGLGTAPRRHRRAERPSATPAKTPSPHATPYRTQRKHTKETEKDTNREDRRSTHTAGPKRETPKRATRHRHEQRTASADPRDRSNAEHIADTPAHTAKNRQLAPHYRAKQTNSTHQPRTDHPYTTAQRVTTNEEGIKKQTNDET

SEQ ID NO: 968331 - protein, 198 aa, Homo sapiens
SLPHKPRAYPPEELIILFPPLLIPTSKYLIDNRLSHPTKQVTNQTNLKINDNHIIRRSNRTEPESLILVSLTHSYCSPSLSLLGVLPHSFIEAKPLQLSINLVHGIPFMSGRRDYRRFALRVNKCPSPLRYHKATPTPLIPILVIIETISLLIQPIALAVRLTANITAGHLLMHLIGSATLAISTIKASLYTYHLHRF

SEQ ID NO: 968332 - protein, 253 aa, Homo sapiens
AAGPYAGACDALAGMACVLKPHFHKRLVRRPRWTTVVQPGRGRTGSPHDVRPGQAKARRHRSAPRGRGPTPAHRALHSTSSVLTTEACAPAVGFSLAGCSEDGAVDSREQAWTRDHSDIILCDSERRAESKRSTRMSLTGPSGAGVSEREYPIPKLNPPSREEAASGPPSKWRRVRAERSVKREDTQIDQDKVMPCPGTSIRTDDSSESITDGRDRVSKAFAKSPSWTVANARLFGIRGTKSHREARRTGIVS

SEQ ID NO: 968333 - protein, 291 aa, Homo sapiens
FFSQGGLPLFLFRAGGPKQHFPLKAEQKIILVLSSWCTWSVSCTVPHPAWNKKRASRVLAPGREATCGTTRQHVACWPPSSCNLPVALDHAQGLRPWCVAIICGLMCPGSSLRWLPEPVRPLRVAGRHATRGSPYSTDFEKISRGAWGYTLFLVCFAQGNLCASSKTRSFTWGQVPKPQAPTATSKPYFLRYLVTQSHLVYTGKRLLSQSSVCPQNRVFRSSPGEVTQGAVFGLGNRETPGTVFPTVFRPRASQDGRPYIVFPRSGWRFPVGDHPGLREPTYVCHPVQPVT

SEQ ID NO: 968334 - protein, 34 aa, Homo sapiens
MANAGSQRCEPLVPCIFYAVKAHPEIVRHSGDML

SEQ ID NO: 968335 - protein, 149 aa, Homo sapiens
LFFLLFCWPKFILILAHIGNRILSKENKKEKRANCVCKGKRIAQTLCFQVLPLDTTDALREFLHHQERVSHLQRSVGPTPPIPHNVETKSGQESVPKVWDFPLLQESGVSTDSNNYLNAEFSGAQTKISWSYTDKTFGKFNNTVCLEPQ

SEQ ID NO: 968336 - protein, 185 aa, Homo sapiens
GLVEAVSGACCGMGEGLAYCGVELVGSLHWAYDIEGYGPVLIKGIDYGLVGGACEYVSEGAWITVGSGNGAIGKGLYWCDVGACAVLKGPDSVDFIELTSIVGADAGYGSCICGDTSLCSHLTGQSFVATSRPASRARSEQALGVLSMWWELGVSVGYVPQARAFLGASGLHLNPQSLPLYTYPR

SEQ ID NO: 968337 - protein, 347 aa, Homo sapiens
LLLVIEIQNRSQTWRLEDEQKMLPDIRQIREEEEAGKRRNSVASRSTHSDEQPHAEPVWQNMLYNGPERAELAAPADCSSDIHHRVTLPASRTLHRHGSHHYAPYPCHCSRRPNCSMEPTEASYPNTPSDTLTLLLGTITLRPPTKDSFESLMRATQANSWTHATALYARTWLPACRIYAFTPLGPKPWVHAYHDCKHPFNCALYMRHSPRLALSPPLTGLHVYGKSGTIHTSLNSLKKRSLINWNSLPAPQTDANESKARAPHARYPPATSTYQPTPGRATTNDDQRNGITPRAPHPLENTKRKSGRHQTSGRTHCATNQVYRSPKRTDNRQTPSHHPAHPHTQPQ

SEQ ID NO: 968338 - protein, 471 aa, Homo sapiens
YHRRAYQRFHDHALIIIIHIICFLVLYAHFPNTSQAKLTKYVTSSDAQDNRNRCELSVARTSSKIRQSALPVRYSSPFTLSSTRVKRLPSAYTSKSQLGHTKLASMQTPSAATNQQRNETSTQTYVQTIHVQYRNHTRVGMPHQPHPKRTDHMTEPPPLAPAVAPTRRHAYSSPIPTGSSRTRPPTHIARSLTSHTTHAPHERRRGSPAVAPAPNPIHKWKDTTASPSPKKPARADLLTAHTTQRTHATNNAAPRPGDTPASTTHTTPPKPTTAITDTHPAGPPPPNSQHTADEHALPYPTKRESRRETVATHGNKRPQRNLRKARKQTPTAKRQRRHNMTTTQRHRTHTHTRRKPNYAEDAHAPRAIYKTTEIPPDTATEQPHERATTATDLRHPPPTQHKSKHTRTPHIPDTDTHAPLPHQHQDDPPRHHAHGDRNQHHTPRGQRSTTQHHTTRHNRRRTQPPHDPRQG

SEQ ID NO: 968339 - protein, 127 aa, Homo sapiens
MPTAAKDTTTNSGQYAPQTEQPLYVATRNIETQQRKPERHHNWHRHDFRQAQRDTTQRSRTTHNAGAAPRASTATTHKRRAARPHSNTRRAATNRYGSARPPYDRPPNVQHPRQAEPPRADADPRRT

SEQ ID NO: 968340 - protein, 292 aa, Homo sapiens
KKKQFLISSPKGGSKGWINKRGRKQRGGPDATRGTRAGRDQEEQTAGVTPTQPEGEQHPPRRPPQRRGADNTRGEETQPAHYCHTSTHTEGGTIELEHDPRGRHKRGGRKGALTHTHTKRKEEQLEGSSETAPKRGEREEEETKTEEPARTTTAEKPIQHKKPKRRRRARAQHKKGGVDRHTTKKTRRGAQASPSEKEEQKEGRTTDRTNRKIDRRQVANQKERESRPQKKQKTGSKSNTTNVRGERQHHKARRQPGEGAEKKNDAPTRGHKEEREREQRHKKNNRQTTRST

SEQ ID NO: 968341 - protein, 129 aa, Homo sapiens
MRRDELRCKYPPRAEQMSLRAQAGHRYRSVKVITPARAGGAAQRLTWAYPTPFDPRLPRLVNGTRPRTPQVPTRAAIPRPPGDLRTIPRVGANTRHDHKEDPTDLQPSSSTKTHQHTARAQHNGRPCHR

SEQ ID NO: 968342 - protein, 284 aa, Homo sapiens
MPHTETYYIYSGGKEGDTPYRNLSCVLTLTAPLQQGETENPLWRNPRGCVAHKHISISPTDYICVHTPCVCCGRTDILWGGGNAPKRKKGLSLTKRGGSCNSRAGEHTRYVGLLTGGGNVLLGSYTSVRRHTFEENKAGEKSLSFTRVPSVGRSRLLKFSRDITQQKAKRVSTKKYIPSARGGGPHRVFSPGFYPHGSLFLWSPQGGVPLIRGEQSRLLYKTANETLVARVSFYHNRVGRSWAQQSCVNLWGDSLWWQKGHFILFWVGCWNIYLGHTIHLTAKI

SEQ ID NO: 968343 - protein, 115 aa, Homo sapiens
MATSVWAVKVLQGGGHRKIRGAIILDKLSIVPVRRGVLGDQDREVPTLVLDKVTGRSGSVLVRLIPETKGTGIVSEPVPKKLSDGWYSDDWVHFQPGAWTGNLGRISAPATLIAL

SEQ ID NO: 968344 - protein, 51 aa, Homo sapiens
MINIQKSGEFPSWRVGKQIRLGTMRLRVRSLPLLSGLMIRRCRVLRSRVFG

SEQ ID NO: 968345 - protein, 56 aa, Homo sapiens
EKTFGVGVELGRPPAKQQCPRCQRQPDPPWPYGVDGAGGETGKRCDPEPRSIGAEV

SEQ ID NO: 968346 - protein, 48 aa, Homo sapiens
DGYESIGTMRLPVRSLALLSGLRIGVAVSCGVGRRRSMDPTLLWLWRR

SEQ ID NO: 968347 - protein, 196 aa, Homo sapiens
MHRHKRRHTHRTPREAANNTHTNSRRHCTPPKQPAHPTRSAGHIDANRSHATATRPPPPHTHTLPTTRNNPPQDATPPLRNATHLPHKQPPHRKTDREEQGRRNATRRSDDSHQEETLAGTTADATKRREKRNRKRQHKTIATKQDATRTGEPPSGNPRTKERKPHAKQRQSEHRRETQPHHNTQPPEGPPAAARR

SEQ ID NO: 968348 - protein, 574 aa, Homo sapiens
RHLIVPHASSRQLLGPNAAALSRYLADLIYQPKPGSSRQGPWREGPPTDIHGAPGPSDSHVTGILSPNHSSTQTDNIPEKQAALKTYSHERANIPTNEARARWSRTRRDQAHRAQRFPDCNTTMASPMALQTTAKSTAGHISTADPRGGLLEWPTHMSQNVKTQRNNARLSRDRQGTLHSHHGQQDTAADTFEALGQGPKNDVADGKRPSHNLGIEKSPSPELPWGYILDIRATNTWEPYPRPLEFPPRGIPRATRDKLGEYKSVARRKHTVDSPTPHDTPPYTQTQTRGHRPTTKEDNTPSAQAATHKRLTPAATPKQKREHTQPRATYLEPEAREIYNTKRDNWAPARMIPQPTPGTPSGTQTAGSSIAANTLRRQTRPLSNTTEDDGTQIQRTNKRHRPTTTIHDSQGAQINKFTSTSSNNTKPREQAGSRQRANGGGRETPQRERQASPPTREGAQQRAQPNGAEDSDRSSSTRSTRHKNDDNDRQRRRTRQKRDKRGSAGEKEESERRDETDTEQEDTKKTENGTDRADDKQNDEPHDGRAAKTRRAATGRAGTEQGTQETRKRQNQSE

SEQ ID NO: 968349 - protein, 48 aa, Homo sapiens
MGSNLILNNECPNIPLIGLLLAQHKLRQLSKDLLVQISNPLNSTHSAC

SEQ ID NO: 968350 - protein, 72 aa, Homo sapiens
PRRCDTPMGHMEVPRLGVQSELLPPAYARATATRDPSRICDLHHSSRQRWVLNPLCKARDRTHNHMVPSQIC

SEQ ID NO: 968351 - protein, 268 aa, Homo sapiens
MSSEPCGYSVILPFTFQLRTFAQAWGFNYRVIQGRGFCASVGLQKARLRVSASVVSFPEGSFSVPPGVVTCSSQLSRTREGVRREVQITFGPAHLELHPGGGQGPPGSILQIRRGEPGLRILPVLLGNDLIWGFRCHSGFCGKLVPGSRNPPSQCVPVPTFGPLRDSDIHHRGLLGEDSFIKRLNGNPEGIIWQGYMIYDPVEREYIWAPTTMRKQFGIYKVARDACDRMIHRNRDVIGQIYYRDGIGLTRSANHERIIRRTLEECYS

SEQ ID NO: 968352 - protein, 68 aa, Homo sapiens
ASNKSYSCRPAPQPQTRQIRAMSATYTTAHGNAGSFNPLSEARDQTRNLMVPPMGASEPTNSPLCRQL

SEQ ID NO: 968353 - protein, 135 aa, Homo sapiens
GGEYHCVCLPGFHGRDCERKAGPCEQAGSPCRNGGQCQDDQGFALNFTCRCLVGFVGARCEGNVVDCLMRPVANRCHHAFEELNRHSPCLCPEGFAGRFCTINLDDCASQPCQRGAQLSETVSTEFRHGSCPQWL

SEQ ID NO: 968354 - protein, 35 aa, Homo sapiens
LGVNQSCCHQSMPEPQQREIRAASATYTTAHSNDG

SEQ ID NO: 968355 - protein, 151 aa, Homo sapiens
MLLCCSIRGETVLAAATILPVTASLASSLPRPGVSLLGCVRHVVLPARPRPPTVLGPPSSASLRLVCGRGGGGYKRRWQSHLKEGPLWRQSDDGWCSPTNRRRASIPKAMNHESIDTISSLIWYPGQIDALTQLSNHHTKRDFSSFDNTCG

SEQ ID NO: 968356 - protein, 46 aa, Homo sapiens
YIARDHRRVESPSCSDMKTVLVLYEFPLMGLLFAQDQWDHTLRVRD

SEQ ID NO: 968357 - protein, 240 aa, Homo sapiens
PPPPPPPPPPAPIGDTHHHPNALFQHTHATAPGYPRSRAHFPARTYSARTPTPPPAYLCACLRLHTHPITPPYTYVPHTIMREHTTNKHELLHVTPYPPLPRPPPLPHLPAVCTLSVAHHTHSPSPTLYPCAPTLPCNPHYLPHRCPRLRLTSAPTHHRTPPTSGTPHTFSCTAHADAPCPCTHLRAHTPRPPLSTRPYLPPARLLCRTTHPCTPRPARRLSHPLRLTSNTTLHTSSLHL

SEQ ID NO: 968358 - protein, 59 aa, Homo sapiens
HRRWSVAQWLTNPTGTMRLGVRSLASLSGLRIRRCCELWCRLQTWLGSHFAVALVEAGS

SEQ ID NO: 968359 - protein, 458 aa, Homo sapiens
  misc_feature (402)..(402): Xaa can be any naturally occurring amino acid
PSSLPFLPSQGLSSPEAQLTAHFPAILLLLAVTLHPFLVALNRKPAILHFTCIIIFTPANWLGTTAHIPFLHIYYYMAGNLQRSTNGCASPPLALQQHCAHARWTGALLPLMRAFPPSRPLACTEPRHARTHPQSLHHTSHLTPQTARGQQQLTQHPSDKRPAHVWPCPSPPTTVLPQLDRLSGLPLMDYIAADHQHPTCMHAAANLHNPGPTTKRTHTNTTNNTPHHNTHHPRAKRRRNSHLSDHHTLSTHPAPRRSAEPNKREHNQTPASFTPQTTHNPACDATHTEQAGERNHQEKKRRRDEPPTILTFHHPQSRAPPAAPHAPTHLTPTPPPPAHANTARRTPHTPAPHHTTPCDRYTFSFRCPYAITHTATTDTQDTADRAKSNEKKGQRPPKDNVXSNDNTQHHQLHTTNTNQERDKPDKDNTNAHKNREQHTKRTPHHRDNDAPTTRRDKN

SEQ ID NO: 968360 - protein, 75 aa, Homo sapiens
CANSWQRELRRFELPFDWPRCPVVSPGGNPGPNEAALPSEDLSQIGFPEGLTPAHLGEPGGKRREARLRNGAFAR

SEQ ID NO: 968361 - protein, 64 aa, Homo sapiens
CAVRMAETKKVNSPGRGWQMGTYISTMPSGKLAGISVKPFPRQSTMLLLQVQAEGQEMESRLRT

SEQ ID NO: 968362 - protein, 342 aa, Homo sapiens
PPRRARRLGFPRTPPGPGLPRHGRRCRFSDTSVLAIPRDLSGLPARVRAAGSSGFEAVEVAWRTRRRLRRLARAGESGAGDCTDTTRPRATKRRGHMGTRGPSPGDRRTSERELEQAVRNAKALGCPRIQLIGLDEYPRKLDRISSQGWQMESTNNPWENTWTGHMPDMRRLANPEEETHQMATLAWEAPIQTTPRVPLKPPQYDITWHNAPKVKDEQSTDHYTERDKDKNTKTSQVTTIGNKSFRSASRPHGMGTVDRQKYREDHAHEGPMAGATGPQGGGETQQTERRRVSPYSIMRRQRQQSNRGAPTDERQWQTTTGNQGTPSRREAPHQDDAKDHTT

SEQ ID NO: 968363 - protein, 45 aa, Homo sapiens
YIRNGRLGRKTGGRVNKNHTVSMEMCERTESEVWQKQARMPERGW

SEQ ID NO: 968364 - protein, 46 aa, Homo sapiens
YGIIAYLGLLMSKNLSLLGCRPYLSRKAITYNNFTAPNLHLHHHLI

SEQ ID NO: 968365 - protein, 106 aa, Homo sapiens
EPNNVYGGPGYGVKRELEPPVYTTATATPDPSHICDLHHSSWQRRILNPLSKVRDRTCSPMVPSRIHYPLSHDGNSGALVLKWVVPIPVGRNVEGDFDGQQGFSGQ

SEQ ID NO: 968366 - protein, 85 aa, Homo sapiens
MSGLNIKFALWEFLCVAQWLTNPTGNHEVARLIPALLQWVNDSGLAGEAVDVRLQHTALDPHVACGSRRRPGSMELTIRPHSRGN

SEQ ID NO: 968367 - protein, 73 aa, Homo sapiens
  misc_feature (11)..(11): Xaa can be any naturally occurring amino acid
AVSQSLALTIXLKVDEILHQCVVSLMDEGHVYGEMGSVHRSPAPSPSSRQGKVQGEEQCDRGLSPSTRPSASH

SEQ ID NO: 968368 - protein, 67 aa, Homo sapiens
  misc_feature (50)..(50): Xaa can be any naturally occurring amino acid
QCDLEIPEYERSEVIPFPEPYILVYANDAAISEPESVVASFKDTGISLLXLCPNWIATLGLPFLQKG

SEQ ID NO: 968369 - protein, 74 aa, Homo sapiens
ASYTNSYSQPIIFDGRRVLDELQNELHTIGFQIETIGKKVSSKRIPYALLVKFRSYSLQDPTNKKPKVYRLLSA

SEQ ID NO: 968370 - protein, 51 aa, Homo sapiens
MSRRDMEKKSRAWVQEKTERHKAPRQERQTHDNPDKTGRKEYKVRRVQEHR

SEQ ID NO: 968371 - protein, 34 aa, Homo sapiens
KPLHYAQFHASCSFEPMVSSFWIRPLDSSWPSST

SEQ ID NO: 968372 - protein, 36 aa, Homo sapiens
MVVLVIPRRQRASLLCGSPQYVFNVIVSESSLNACI

SEQ ID NO: 968373 - protein, 48 aa, Homo sapiens
WFLLRNDDMVGSQLLLSELEENCIMLSLLPSDSAPPGSRCRVLPTLST

SEQ ID NO: 968374 - protein, 105 aa, Homo sapiens
MGQNQYHELHVPRDPVASGVPYTCCIRNHAQRCCQHHVWLEYFDKERLSVQDVIYVRVRAATCRVSSWCSGQIAPSWRGILLGHLSPQLLGMLLTLLYITRVEDI

SEQ ID NO: 968375 - protein, 141 aa, Homo sapiens
MCRYRRESDSQVYGVIAEWAFGDTRAEHKSSDSTFLVLMSHGILERESAELCYDEKKPDVLLYDTIFQIFNNRDCLSLKDKPKVIIVQAARGGHNPVGNCGSETLQHPLEVASSQSSENLEEDAVYKTHVEKGFIAFCSST

SEQ ID NO: 968376 - protein, 70 aa, Homo sapiens
MVGMIERIAQKSDGRIIPTIIADHHPRVKPLAFYLRRESTPPRITLLPISDNVEMNDSCEHTKPDPIPPH

SEQ ID NO: 968377 - protein, 105 aa, Homo sapiens
MLNHTVVVRSGLGFQGRLHVHEQELDYLLKFGSMKSVSKDRRTEVDNHEDDSSVIHNDNEAIARLLDRNQDATEDTDVQNMNEYLSSFKVAQYVVREEETLGEIE

SEQ ID NO: 968378 - protein, 85 aa, Homo sapiens
FVPHSVGPSRDSKIRYESGDQVAVYPANDSGLVNQLGEILGGDLDVIMCREQSWMRSPNQEAAHFTVAYVPTRTVLTLLTEHECT

SEQ ID NO: 968379 - protein, 111 aa, Homo sapiens
MPSNKERQDTVQNPPLESHVGWVMDSREHRARTASISSSPSEGTPTVGSYGVYPSVIAKFQHPSHELLKENGFTQHVYHKYRRRCLNERKRLGIGQSQEMNTLFRFWSFFL

SEQ ID NO: 968380 - protein, 44 aa, Homo sapiens
LEDPVGEGDVGVIALLSVAAFGCVWGLVLCANAWDSSCELREMM

SEQ ID NO: 968381 - protein, 66 aa, Homo sapiens
MYVEVMIGVIDGITIQLYQSYKAALVTQAPNTTKSVDSDLHLPHGVFSDVARLATQNKMRLTVEQE

SEQ ID NO: 968382 - protein, 36 aa, Homo sapiens
ATWIYWIWSFLCPEIDIQIKDAIGRYLPVPVNPTFC

SEQ ID NO: 968383 - protein, 44 aa, Homo sapiens
GGRSDSEVHWSEPIGSNRCCSFFAIRQIFNGTFVKLIKASIKML

SEQ ID NO: 968384 - protein, 50 aa, Homo sapiens
SEFTPCVSFVWSVFNSLFINTCCLWLHSIRLLRECLVDSEAWLCDRDLWA

SEQ ID NO: 968385 - protein, 39 aa, Homo sapiens
EYSFFRFYVRAYQATESRRNQVVRNMAQVGLHHCGVQRE

SEQ ID NO: 968386 - protein, 37 aa, Homo sapiens
GSPSRRGLESEWYHYLDEGIGVADGAGISESPDEGFL

SEQ ID NO: 968387 - protein, 59 aa, Homo sapiens
IIIRGSCKGGGHLHWVQREGFPLSSKERLHSDPEAHIQMLLAAALHIQDTSWRTRTATI

SEQ ID NO: 968388 - protein, 33 aa, Homo sapiens
MGCDEDDDDDDEEDDDEDDDDDDFDDEEAEEKA

SEQ ID NO: 968389 - protein, 43 aa, Homo sapiens
WDFTGMVISLDCVASLGMGASTVSVVVGLGYSYSKVSTQSKPV

SEQ ID NO: 968390 - protein, 37 aa, Homo sapiens
GRMQVSAARGHEAQVSRPSSRMGRCVTVDYTRNAEAV

SEQ ID NO: 968391 - protein, 39 aa, Homo sapiens
AGDQSIPSVALYHIVEVHAVLTLEFRPNFTIMSTSLRET

SEQ ID NO: 968392 - protein, 39 aa, Homo sapiens
MTKRLQSGSTRANRTMHSSISSHHRALIWPIAILFQSSG

SEQ ID NO: 968393 - protein, 46 aa, Homo sapiens
QDLFIGSFFYRGGCNFHGIFLGSPFQLIPGIPLGLAIAYRKALQYA

SEQ ID NO: 968394 - protein, 38 aa, Homo sapiens
MGKEATRVMLTSPKYSSIMGASISIVILVQTGPDESKM

SEQ ID NO: 968395 - protein, 106 aa, Homo sapiens
MGLAIGKARQRAKTEIEKLQMKEMTCRDIVKEVAKIIYIVHDEVKDIAFELELSRDGELTNGRHEIVPKDIREEAEKYAKESLMGERWPSSPISCFDNQQEVNYRN

SEQ ID NO: 968396 - protein, 67 aa, Homo sapiens
VRTTSLDGLYLDYQQRGHSIESPLYGTKTGRFVCHHSGEKPYECNECGKAFSQSSDLISRIVYYTLL

SEQ ID NO: 968397 - protein, 144 aa, Homo sapiens
MATFPQYTWHLKLDGRAELVRLEGRVMVCIQSESLLEEEEEEEECLPCLLVLVVLLVLVHLFMSFLHFLLHLLVYYHCWSNHARSQGIHRREFQGQAVGMEEGRDPTVGILDTLAVAQDEGAHLVGKAGLPWGAPGGGGQALGK

SEQ ID NO: 968398 - protein, 46 aa, Homo sapiens
  misc_feature (1)..(1): Xaa can be any naturally occurring amino acid
XYEVIDHRMDCTLEKCDTEFPISSTCMILVSKYLQIFNENQVGELV

SEQ ID NO: 968399 - protein, 116 aa, Homo sapiens
RQYVVNGRFMPRLVQGNHRHGLSLPFYKQYLNKPGGLTDLESIDREFYNSLIGVKENEYGGMWLGNVLLLCDKEILGEIKSHDLETLNGGNILVTEEHKEEYISNGSGGSNDAGNR

SEQ ID NO: 968400 - protein, 64 aa, Homo sapiens
MEQFWELCQLGICEPKWHEEKGRLLRAREGMGQRDQVGPDMDRGAPVDMGAGCERHGGRWWKLG

SEQ ID NO: 968401 - protein, 63 aa, Homo sapiens
AFRAKDVLSVYGGMDERRFLLWRINWSKGPGIHPTSWRALGLRQADWTGNPGQPRLRVRERGG

SEQ ID NO: 968402 - protein, 55 aa, Homo sapiens
PDQLIAFGDESKRTNPISRSDSSDSSLVSTLAGAAACSMEHAVVAAATGCSSHKW

SEQ ID NO: 968403 - protein, 120 aa, Homo sapiens
RSSYLQKKLKKDVQLSKEGGLFPQQKRLHVATPAKKAAVTPCAKMCCCNTLPMNDSYTMPNAVTTHCARREPHQCKAYVEQLAGKKGAAIPANGVQRMARMPRSEDSDEEEDDDSEEDEE

SEQ ID NO: 968404 - protein, 161 aa, Homo sapiens
DDVGESVHELEKYKRALEQQVEEMIDAMWKSWMDELEATEYAKLRMLVNLQAMKAQFERDLQGLDEQAEEKNEAAVSELVREMEAELEDERKLLLLMAVACPEDAGDGPEGPGGCASTRANKNRDEPIYNSCGSYVVPDEGLHSRTGLPPSPLVRRFLAHA

SEQ ID NO: 968405 - protein, 89 aa, Homo sapiens
MKRYAVERGVYFKEMAEVMMRSQHQKVVVSPNKNGLELPHQPRKHGITPGKKAAATPAKKTVTPAKAVTTPGKKGATPGKALVATPGKK

SEQ ID NO: 968406 - protein, 126 aa, Homo sapiens
MCRQVENEAMYYSPDLLLNTLDDRRVSNKVEPDTSHLITQWLHDVDCFYGGFMTEQMCVLGLCALIDMEQIPQVENQVSGQIMPAYILLLYRIDNEHMPDMQNMSMTADDDDEAEHNDETEEPGSD

SEQ ID NO: 968407 - protein, 42 aa, Homo sapiens
MSSEDEEEEDVKLLSISGKAVLPLDGGSKVPQKKVKLAADED

SEQ ID NO: 968408 - protein, 43 aa, Homo sapiens
LLILLTVIILLFITVFLLGILAILGTGARNGKNAQTEDSDHGD

SEQ ID NO: 968409 - protein, 45 aa, Homo sapiens
SDQDYNSPRKVHLVTNSTLGSMWMASSSNVATHLYVGMIVSSGDP

SEQ ID NO: 968410 - protein, 88 aa, Homo sapiens
MPSGKPFIELFRLDHFFTKPLVLEIPSEIESQAIVVVKIRGSTFSAPQRLITLNFIVSVKEDPVEDYLVPELGISNLLSSSHGPKGYR

SEQ ID NO: 968411 - protein, 167 aa, Homo sapiens
QSLSRGPRSSFEIDLTSRIEQIAALLAFALTMSPCVLLRASPPAAGEFWGQDVAHCRRVTHKFYEELFSLLLPQVSLSPVLPNYDIVHPKYHKERFVQQLKVCADEVQQQAQFSTIRSFLKLYTTMPVAKLVGFLDLTEQEFGIQLLVFKHKLKNLVWTSGISALDG

SEQ ID NO: 968412 - protein, 66 aa, Homo sapiens
ALRIPRILLYKVSGIRKSNQQNRGPINCSNRCTELVEYTSKDEVAVGIWVSRALIMFVTFRTHIQL

SEQ ID NO: 968413 - protein, 107 aa, Homo sapiens
  misc_feature (1)..(1): Xaa can be any naturally occurring amino acid
XTAKCRIRSAAVRCCTLQPCIRLLARLGDAPHRAAGPLQLHFALRFNGGVKTRRELRLFTFRPSPYLLNPISGSPRRNGAAPGLLAGPFRTRELRGVRTKGGVLPWP

SEQ ID NO: 968414 - protein, 41 aa, Homo sapiens
LLLSKVLRASSRLLPSDFPPHNSRTQLFFGLFGGHGAEALQ

SEQ ID NO: 968415 - protein, 30 aa, Homo sapiens
MASSISDCWQGKENVNPTGNFLSLIFLFSM

SEQ ID NO: 968416 - protein, 146 aa, Homo sapiens
FNSEKDPEDEEEEKELTPGVRPPKGWKRQIGACRFNVDEEPFVLPLCWGDGAGLPRLQTCNEFHKRIQDIVGFLRDLGAQREEGRSRSDYLNRLKKDLAIYYSYGDFLLGKLMDLFPLSELVEFLEAIELPLARHPLNHYLENPTN

SEQ ID NO: 968417 - protein, 95 aa, Homo sapiens
TSRGSTQLTNRTGSALLNQLATLQACGPQKLRAPIVLRNHWEDSLRAGTSSCDSISAQTLGGKKIFMAPNPRKPALDPGVSRPPGSSCQVQTCLI

SEQ ID NO: 968418 - protein, 33 aa, Homo sapiens
LPDEELLRDPLYIWLKHQRVHGEGIDDLLDEFS

SEQ ID NO: 968419 - protein, 57 aa, Homo sapiens
PKYEKLDHHPEWFNCVQQVSQGYKPPVCNNTICFPGSPACQLQILGLVSLHNHMSQF

SEQ ID NO: 968420 - protein, 57 aa, Homo sapiens
LPTEYCTELVITGNPITILPVSEIPPKSMWGDAWRMSTSVSVHMAVFTYHWMNGLGL

SEQ ID NO: 968421 - protein, 45 aa, Homo sapiens
CHERKKSLVSVKQMALVIIMPHRDSDKEGVGYVTNVLIQHISYET

SEQ ID NO: 968422 - protein, 115 aa, Homo sapiens
  misc_feature (47)..(47): Xaa can be any naturally occurring amino acid
  misc_feature (69)..(69): Xaa can be any naturally occurring amino acid
  misc_feature (82)..(82): Xaa can be any naturally occurring amino acid
WSFFYQASKQKNNSPWFWLYPLDLGLSSESSFFIKARVCFYLQFFSXGCFFPDRILAGTMWSLYLYMFXVLFMFHKWRVFLXEYSKILVGLPVILLADLLHLDKSHTHKYLLYET

SEQ ID NO: 968423 - protein, 39 aa, Homo sapiens
YGTSWCLTPPKTMSYGRELERRVTVIGKEDDKSNSTLKF

SEQ ID NO: 968424 - protein, 157 aa, Homo sapiens
SRESPVDLEESEKVKLVSHKISNRSGVPPYRILLIEYNIEEQVGRAIRSRIADGSVKRGDISYTSKLGSTFHRPELVRPALKNSLKKLIWAYVDLYLIHSPLSLKPGEELSPPDEIAPVLFALCGSLYHLEGHGEVYWLQDWPIPLGLSNFNRRQLK

SEQ ID NO: 968425 - protein, 67 aa, Homo sapiens
INQDIYQQLLNGGSVLLYTVSATADVSTVLASWLDRFVEGVCPFSGLEEARGDQCDKVCATLINEDR

SEQ ID NO: 968426 - protein, 87 aa, Homo sapiens
MAVLLKYLSALELSPQVVLIVKVLMISEVYLLIVTGILLNGDAIHKRSPSHKDMAASIPGDLYPFTRKPLYLIVDSTNSVAYKNFTN

SEQ ID NO: 968427 - protein, 47 aa, Homo sapiens
REPGVIPFTPQSIRSHFQHVFVIVKVHNPCTENVCYRVGVSTDLKMC

SEQ ID NO: 968428 - protein, 95 aa, Homo sapiens
GPDRSIAATIPKRKCSSDVSPAIILLSTLLISGSFNLATLIMTKNTSDNTCHHDPVGINMIHLHTSIEHPNPLRPWPKGSPNYVSDYHILQVYLL

SEQ ID NO: 968429 - protein, 98 aa, Homo sapiens
MLAAKLPVLRYAARPQAVRRGRTPMAPWSLTRDNIRQETLHPRPRGFTWDALDLGDRGVLKELYTLLNENYVEDDDNMFRFDYSPEYDIVGSPATRLN

SEQ ID NO: 968430 - protein, 75 aa, Homo sapiens
RASSRVDLTQVEFWWSLIAYDIQQPASSRSHTGSASRFWSGTPPDLRLHDGHNAILLADTGITGQNIGIFHDGEG

SEQ ID NO: 968431 - protein, 86 aa, Homo sapiens
SQLRSDSPSYSPTSPSYSPTSPSYSPTSPERTHPLSPSLLARRSPSYDATVSQSTRPTSPMLLANFTHAIAHFSQSTHLPGLRVYL

SEQ ID NO: 968432 - protein, 55 aa, Homo sapiens
EPGPPLEELFCNRYNPINLTTSCSAYIPAIFSKTLMNGYKCNAASTHVNDVSVYL

SEQ ID NO: 968433 - protein, 76 aa, Homo sapiens
YHRYKLLTILLLLSSHVLLFTFLLLILVLLVFHYLSIFIILLLILILLLTPPGPPRCPQHPSPGPPCCPGHSRRVM

SEQ ID NO: 968434 - protein, 108 aa, Homo sapiens
MMTMLTSVSGTEFRKELLLVPYIRPGYITAMIILTNPMDGMCSIELVLLHFWLGKVTVCIKCSLNYVISNSVKKEFKLDPVVGACSLAATVTTQEAEIGASLEPRSLR

SEQ ID NO: 968435 - protein, 124 aa, Homo sapiens
  misc_feature (72)..(72): Xaa can be any naturally occurring amino acid
DVPYTTLEDETSRLSLGSLSHCIATTNLLGLLASLIYSQPPNYLYSLAMAIPSMTRAQVIIGVSRLRLKKCXKTHVAYQQGDTIHPYIPDTRLYINTISHTQFKPIALDRTPNRLTLLQATYSC

SEQ ID NO: 968436 - protein, 121 aa, Homo sapiens
MGRYVKAQMILLLLDGTGDVQASDSATDPLASVFGNELIGGGFADFNTLSKVFLEYPFRSATSSVFSNVVITKNVFEETSVKSEDESHKHCHQRSELQQDPALYHLGKDPSTYWILLIPLN

SEQ ID NO: 968437 - protein, 54 aa, Homo sapiens
VLCASSVLTPSWAAFALGVLMVRYCDWVLVNARGQPSTTLTTPIAACPGETLID

SEQ ID NO: 968438 - protein, 65 aa, Homo sapiens
ETPRITPDSTKSTTASLELILDLHATVVRVKDDNKFYSGLSHHHFLVYVLLIPLYSLDDSRVGFQ

SEQ ID NO: 968439 - protein, 47 aa, Homo sapiens
SRQPADVPSLSALTSWDACWLWIWVLVSGKLLLRDETSPVFIYTREA

SEQ ID NO: 968440 - protein, 45 aa, Homo sapiens
MRVSIDKRTIEKLEKEAAEMGKGSIQVCLCDLGLYCIAEPCNVDI

SEQ ID NO: 968441 - protein, 45 aa, Homo sapiens
YISWSNPVSDYAEYRCNVENLPTIAVKPGSPTCKCAWSQLYTEGD

SEQ ID NO: 968442 - protein, 52 aa, Homo sapiens
VGTPGRILSLVQNRSFSLKNVKHCGLDERDKMLEQLDMRRDVREIFRLTPHE

SEQ ID NO: 968443 - protein, 56 aa, Homo sapiens
IAVAQQKVIQTLTFARQHASFPTAKHIAFLPHLLVPPQSLLLVVGCVSPHGAPVAR

SEQ ID NO: 968444 - protein, 37 aa, Homo sapiens
TVAQADRQRGIQPSPLARSSELPGDFFNLTAEEIKRE

SEQ ID NO: 968445 - protein, 54 aa, Homo sapiens
CCGSEKVITSELLPGACLFSHRNNIAFLPHLLVPPQSLLLVVGWCLLMEHQWLV

SEQ ID NO: 968446 - protein, 77 aa, Homo sapiens
RSTGGTPSHKDNHLDELDITRGSWFHVNECISSVNHLFLNVFFTLLNLLSFQSIHQDDTLIKSFEIYLLLCFCKYFP

SEQ ID NO: 968447 - protein, 47 aa, Homo sapiens
IYHGFEDEYSGIHHQDHCYALIQNLHCPFEHLLIIITGSQSGNGYQP

SEQ ID NO: 968448 - protein, 37 aa, Homo sapiens
VTRWRTGKYPDKVNSRYLGINRQSISNLHVLLLQTEV

SEQ ID NO: 968449 - protein, 60 aa, Homo sapiens
RPRIQYDELNVEDKKRSVKCDILLPLYNTCDWEEVSGNSIMMKNLSYKVMEDNTWGHIDG

SEQ ID NO: 968450 - protein, 46 aa, Homo sapiens
GPHSYDEHMAAMTGNFSSQQCMAQNKDLTTIYEHCTATSRYVSIPE

SEQ ID NO: 968451 - protein, 54 aa, Homo sapiens
MLKLQLKKICNSYRPMTDRYKEYCIVKKMIKKLHTLTRYTRDTDARVSVIIGSY

SEQ ID NO: 968452 - protein, 55 aa, Homo sapiens
REEQKKQKSVAIGRSTDTSITIDSCDDKHNCSKLSTVSTESVSGTSPCDILSCIT

SEQ ID NO: 968453 - protein, 67 aa, Homo sapiens
LLFKERSHGGHGRMSTCPMHPRAGMTENVPNLHVMKGHCRSLKIPKCYREANKFACAVTFLQDTYTN

SEQ ID NO: 968454 - protein, 55 aa, Homo sapiens
TRHDRFWGLRGLMSISIESSIGWRHALVVGEKADGDYRPLLQITTAVVPSRFRNR

SEQ ID NO: 968455 - protein, 34 aa, Homo sapiens
MSQQNSSNSIAVPAGCEAGGYDLRLISSMVFYHI

SEQ ID NO: 968456 - protein, 45 aa, Homo sapiens
IGIRSLCWGAYKPSTRSTPFSSEDQPPEVKETAGYSRIPNQVASI

SEQ ID NO: 968457 - protein, 55 aa, Homo sapiens
MVTSQIKGHQWIPDFSVILILATMSNDNSCITVCITSVWILHRDLTLHVHAMLVH

SEQ ID NO: 968458 - protein, 49 aa, Homo sapiens
DQCRLSGSTGWIIHDQLTDMEYQIVFEVSDGKGRSGEIAIDDNCEMNQA

SEQ ID NO: 968459 - protein, 127 aa, Homo sapiens
NAAYDNRFSYANVAWIDIWLLTRGITTGLWVIYSTEASTGNMCRISTLNDTTLQVLKHLRIPSSYKPSASNAFMVCGVLYATRTMNTRTEEIFYYYDTNTGKEGKLDIVMHKMQEKVQSINYNPFDQ

SEQ ID NO: 968460 - protein, 55 aa, Homo sapiens
MNYGTLGFNDACGPIPHFILVSAGQVEVHLLYINVKPHGVGGFNFLRIPNGDRRL

SEQ ID NO: 968461 - protein, 47 aa, Homo sapiens
SARVTVTVGGLQLVSPDKVISELIHYAEGIGVSPCYIMLWFPTDDRR

SEQ ID NO: 968462 - protein, 57 aa, Homo sapiens
ALAPGSVMPPDLSICLEDQHWDDLMSTNGMSDAHESVAQTVHVHYGRVDVHTCPVCP

SEQ ID NO: 968463 - protein, 53 aa, Homo sapiens
LGLAVEDTDEVIDPSLTSKQLSTTWYLNLLSTPDYVWTNLQLLHTSPNGERRL

SEQ ID NO: 968464 - protein, 51 aa, Homo sapiens
QRKQIVVVSSTNREKRTKKTLHHLRMNTFTGVPANRFQLNASNSPTVTGDF

SEQ ID NO: 968465 - protein, 48 aa, Homo sapiens
MGLVNIRCQTTAVTLINPKRLTLATFCGDPSRMSDAAWRQQCYVHLVP

SEQ ID NO: 968466 - protein, 39 aa, Homo sapiens
AGPISPQQSCRCLPRHRGSAHLVSFRNLHLSAPKSPLND

SEQ ID NO: 968467 - protein, 117 aa, Homo sapiens
SGPGCVIYPPTQIAQLRQVLAGRSGCQTSSIPKYARCISDQLLLEPPFSTTETRLLHRVPQSHVNSSVVANTSNTDNWVHAPARCSQLQTTSSLYRTSSTRINTAAESQQSITTDPG

SEQ ID NO: 968468 - protein, 93 aa, Homo sapiens
SLILCEGGEASKIMETHWPCERDTSRCAAGYEKELGDGLRCWARMQKELDEYQELLDIKLALDMEIHAYRKLLEVRGGEATPVPQPYLAAQPG

SEQ ID NO: 968469 - protein, 81 aa, Homo sapiens
MEGAEAEELYSEWPGGLGSGTVLKCSSHIIDRLTPPEQSPRLPSPTDPARALPSSAPMTIREQPPAPPQPMTLWTMHNHVV

SEQ ID NO: 968470 - protein, 48 aa, Homo sapiens
LGAEIIGLRKLHLWGQNMPRLRGALYLGSSESQTACLVLHTWLCSVQN

SEQ ID NO: 968471 - protein, 53 aa, Homo sapiens
MAQEAKSVYGERFPDENFKLKYYGVLAVVSMATRRRPTPDVLPDSFIYRQIND

SEQ ID NO: 968472 - protein, 35 aa, Homo sapiens
MTLAVEGIQKTIPRATANLPHVYISLDESLAGYLS

SEQ ID NO: 968473 - protein, 49 aa, Homo sapiens
MTEIDKPSLHDDDEERTSPNFLTCAVTNKGTDLPSPDALCRNKDRERRI

SEQ ID NO: 968474 - protein, 39 aa, Homo sapiens
MSSKFVTCPICKHSFITITSTLSQSMHVHPANHCLAVIM

SEQ ID NO: 968475 - protein, 109 aa, Homo sapiens
MLKSLIIWQTIKISDMQFIPTSLQTPPESSTVDQAKRAGRNQSPPVGYMSQPKSLQLLKPSILSSLVPPPVSESSPSRTPTCKKSPIITTCNSAKLQPTSSQTNLANNQ

SEQ ID NO: 968476 - protein, 57 aa, Homo sapiens
TEIYLEESPDPGGNKNHTIQHDKDTRHVPSHKLFGSLSKYSRHRYTNTPSDMLPRGS

SEQ ID NO: 968477 - protein, 37 aa, Homo sapiens
MTIVIHGDEMYDIDVLLTVQVGFYRRSARPPQLHALS

SEQ ID NO: 968478 - protein, 95 aa, Homo sapiens
SCGDLEYPQCHGSRTIGLAFVYDLSISCRFDDERACPLLRERERVVIFEEYFEIYYGCSSGFLHYRERLLDRAPGSASRVSIAWGCSNSIWFGGS

SEQ ID NO: 968479 - protein, 39 aa, Homo sapiens
SQLQKVRLEAVGNIANKPTYFDIYMAVAGVVDIGVEVED

SEQ ID NO: 968480 - protein, 148 aa, Homo sapiens
MAVFIEMLSFVLNWLGIPQHHVEVIDDVMRMAASRLQATDWAVPRISLRVPESSLAKNRCRICRARLTISSKVIFPLCSMLFCYFLSLGGSLRGFDDQGRGRRHHLNLGLSVLNGQFHCNPQALPVTQLPWQCHHQLFWETDPGGRSW

SEQ ID NO: 968481 - protein, 175 aa, Homo sapiens
GPGTPGGACDGEKVVQIGHLRTTEKLWYMSSAWHQRCAAAQKWAGASAICRGYRSVQAGRQGRPWRSEPVQGKMCEIGWCRPSPQFHCTPSVMDYAVMAWASAMMWMWSLSLHMVSISCWQNSLTCPSSLDELLEELALALQVARGEQPQVDHKVLGGALVIEGGHKSATEVCFS

SEQ ID NO: 968482 - protein, 33 aa, Homo sapiens
DSGPAKVASKNVILPWNWWSPLRMHEVQQSLMF

SEQ ID NO: 968483 - protein, 43 aa, Homo sapiens
EDPRYNAKGIMKSANANSLRLIRKLIKDVADRPARPVTVHSLG

SEQ ID NO: 968484 - protein, 46 aa, Homo sapiens
SRVSRYKAKEILTSEVLACRNTIIETAGETCPSCWGKRRAPGLMRG

SEQ ID NO: 968485 - protein, 33 aa, Homo sapiens
SRVSPSLRNLNVELRFYLDNQLSPGSVGFVAIY

SEQ ID NO: 968486 - protein, 53 aa, Homo sapiens
SRGSRWPHSEHECTEGPKLYNGLVAGLSAKLSFASVRIVLYDSVKQFYTKGSE

SEQ ID NO: 968487 - protein, 37 aa, Homo sapiens
RWFYSSENISNFNHALEIKDCCQLGLEVISSTLDHAT

SEQ ID NO: 968488 - protein, 110 aa, Homo sapiens
  misc_feature (51)..(51): Xaa can be any naturally occurring amino acid
  misc_feature (54)..(54): Xaa can be any naturally occurring amino acid
SRCSEYLSLALGSQQKQDRIEGLKRHIEKHRYTHVRIVKTILAHAWTSDSXPRXSAIRKDQGTTVDCTMFDSLPVTPTFEGELSFSYDGPVTSEDISTGRLVANLTPPSH

SEQ ID NO: 968489 - protein, 62 aa, Homo sapiens
RDSVTTCREILSVDCSTNNPSQAKLRRDVDWNPFQVAERVDHGNTTELLKVLTMWKDAQHLP

SEQ ID NO: 968490 - protein, 74 aa, Homo sapiens
SLRQYGGRNSIFKFFTVVKLRSRVLWVSTSRTEHVGIGGAPFYYHLQDSRLGIHGLLEQQNPSFYQLLYQRTWI

SEQ ID NO: 968491 - protein, 111 aa, Homo sapiens
QESYWIAVGCRYFDPAKEVSKKPPARMVTLPRPFCQLILDPIFRVLDAIMIFRKEETAKLIEESGHSNLDSEDRDKEGNPLLKVVMRLLCACRKNPLWQMITIHPPSSVYP

SEQ ID NO: 968492 - protein, 138 aa, Homo sapiens
PAKSTLELSPSLRKSEDGMSPTWQCLPFRPPYDHTNNQLPITISLLPFLSVRLGVGPSGCYLCHLAVLTWKYAHLDCRSLSLIDMISFKISSHLVSHFAHWPCLWFSMGMLITSHFLFAVSLLSGMFFLTTLRSLFFP

SEQ ID NO: 968493 - protein, 157 aa, Homo sapiens
MLVLESRNRQFSYLIENSGPVTELEVAHTRYFRGGMLTNARLLLGPTVRLPDLIIFLHTLNNIFEPHVAVRDAAKMNIPTVGIVDTNCNPCLITYPVPGNDDSPLLLHLYCRLFQTAITRAKEKRQQVEALYRLQGQKEPGDQGPAHPPGADMSHSL

SEQ ID NO: 968494 - protein, 48 aa, Homo sapiens
VRSMMRSRVSFRNQSFDMDSDVLKTFSGKSIKVSFGTRRADFNRGGGN

SEQ ID NO: 968495 - protein, 69 aa, Homo sapiens
HEVIFFGDHYPRPNPACPVPVITRNLQRVTKELLGKGERRNERKVEEEIVEALVLEAEEEGGSPMDHRA

SEQ ID NO: 968496 - protein, 47 aa, Homo sapiens
SKISLTTSVRKCLIEHVSEAENTHEFTILVTLKQTHLKSRSNSLKFT

SEQ ID NO: 968497 - protein, 59 aa, Homo sapiens
LYEDLQLFQGYSAECNMKIISSIELVAVLTLVGQGTHEGPGRCVAAVHAIVNKGEELVS

SEQ ID NO: 968498 - protein, 53 aa, Homo sapiens
DERDVILRQYISTSCAQPSLPLQLSECEHTCCRWVSCPHGALMPHHNGGSHVL

SEQ ID NO: 968499 - protein, 44 aa, Homo sapiens
RPILSIPDSATTSYTSYEKTSYHSPFALFFIAEYTNIIIINTLT

SEQ ID NO: 968500 - protein, 57 aa, Homo sapiens
MIITLNSIHCPLPRRSGSRYSGYWTIWAIIERITKNNSLIISTIIATITLHANSHSS

SEQ ID NO: 968501 - protein, 61 aa, Homo sapiens
GIETAGGVMTKLIPMEQLVVPTKKSQIFPTASDTQPTVTIKVYEGERALTKDNHLLGTWAL

SEQ ID NO: 968502 - protein, 131 aa, Homo sapiens
PLLIIFAFVGCHTLHFRLVRMTMEVHGFHYQHFQILNVDGVSLKSHQRCLPSSPAWEVSVGDCPKGAASNPVAWVFLCCFPILQCGHGQGLFHASILCIIANLTLEQNVNHKAVHLIPSPLHNSTKHALKP

SEQ ID NO: 968503 - protein, 183 aa, Homo sapiens
ELEFVLVKELSIELLEEDPSWSSASHYDTARLIVLQRAGGVAHYLKHVIAGACQIGVGLANVVLGLHVVIEQVSRHVDAPAESPRSPPPSWIAPELKSCSSRRRSMGLSPSCRKPNPFSSVSLSVLSLSFSRYGIRSFSVQCKNLCRWMSAAQVVRMSMAVRRVCLRDGTKTMTGFLGECLVI

SEQ ID NO: 968504 - protein, 45 aa, Homo sapiens
ELAPVGILFARTVVLVTGFYNLQVGKAVRGVTAMPCGSTNGQCDI

SEQ ID NO: 968505 - protein, 145 aa, Homo sapiens
MTQRSSSSCKELVGVDHHLKHVIALAERLGEGHAIVELGLHYDQQVELTPEMPQKRVRKVTTGWIAPELKSLLQEASLHGAEPFMQEPIPFSSVSLSVLTLSFSRYGIRSFSVQCKNLCRRMSAAQVVRMSMAERRVCLRDGPKT

SEQ ID NO: 968506 - protein, 35 aa, Homo sapiens
ALTKTRAGRPNRLTLLAGHLLMHLMGSATLANSNS

SEQ ID NO: 968507 - protein, 49 aa, Homo sapiens
YPGQLLAFWNRIMVGPGICILMDPNEILDVETCLRGKDLMDFFQTYGAI

SEQ ID NO: 968508 - protein, 47 aa, Homo sapiens
RDRLCEHALIEFFHVARRGEYGRGCIHSVHSFLIEQVLLPAEVVLLV

SEQ ID NO: 968509 - protein, 79 aa, Homo sapiens
MWTRHQPRKKACHNALCYAHTPMVNSSDYTFSNKRKFNYAILTPGLVNFVPASALTRLTQVNRSRRKECFRSPPPPVHA

SEQ ID NO: 968510 - protein, 46 aa, Homo sapiens
VTATLWWEDADKFDGSTQLNIIVILIKVHNIIRTSNGDLMLVLVVV

SEQ ID NO: 968511 - protein, 35 aa, Homo sapiens
MYRGAEADGVDKSAVGFDYQGKTEKHESQRDYSKG

SEQ ID NO: 968512 - protein, 66 aa, Homo sapiens
PSSVPLSSLNLCRGHTYCAARGEILVTGALMDQMRTHIANECYINHDTKVGVFEDDQIPSQFLTIN

SEQ ID NO: 968513 - protein, 140 aa, Homo sapiens
ISNQETKKKLTKEFDEKHCTQEENISSKVLLKCGLLSSRSAPSARKYRLLRITSSQHGQLLDELAGVAQATALHKADLHGKARPRLLHKLVVMGPLQAVRLLVVESLDGETGEHLVYQQRPGVRVVQCGGLDEDGVPGVT

SEQ ID NO: 968514 - protein, 74 aa, Homo sapiens
  misc_feature (63)..(63): Xaa can be any naturally occurring amino acid
DPRRSRVNEGSMLLMWRASEPHCVDVNMYRECTAVTPMSSPVSQRAIFDHENVDTSTESSPNXLIVGGTARLAR

SEQ ID NO: 968515 - protein, 74 aa, Homo sapiens
  misc_feature (23)..(24): Xaa can be any naturally occurring amino acid
  misc_feature (26)..(26): Xaa can be any naturally occurring amino acid
GSFLSNIEVVNPIVDMDSRIGLXXNXKKIETDLDYSGLLRLHQSKRTLITRSFNNWCNGTRYPINIEVVNPIVD

SEQ ID NO: 968516 - protein, 82 aa, Homo sapiens
GRGGKPLGLCERINRDNQYIFESIFQAVVEVRLIQQNLSKSIILRFITTPRIDFVANIHSILLYQRSRREETFDLSGKAKCT

SEQ ID NO: 968517 - protein, 80 aa, Homo sapiens
DRALNAWSVHYIWNKNVNSDHYWKLHKHDQLTKNDPQFVMTSIETITMNEQVKAIKELGDHVTNLRKMGAPESGYGGISL

SEQ ID NO: 968518 - protein, 132 aa, Homo sapiens
SAVLRTVLSDCAAEAQTRVAMPQVHLSLPVTAAHHLNPVLPPGRLNGEAALESWNHYHRLTMLDHQWLSQFLCHIWSNGRGILDGQGGLALLVTSYKGVPPNLGPLHMRDEEAVHDTVLLKDDSILGGELDA

SEQ ID NO: 968519 - protein, 81 aa, Homo sapiens
RTGEKLEDGPKFLKTGYAGNDDMVPGKPMYVDSFLDYPTLGRFADCDMTQTDGEGFIKTLDNKAGGSGKVTNSAQKAQKAK

SEQ ID NO: 968520 - protein, 109 aa, Homo sapiens
CHTRRVLPHYTHKRHAEFEKSHSLLIFRQRADSQSVRSQRTEYGTHFMGPTPLTKKWLRCPKINQTPKACATLDCFENSWLVVKKVNALQNVLKTLKKKQHFLKKKSLL

SEQ ID NO: 968521 - protein, 39 aa, Homo sapiens
LCDATMEDVNDWLTDLEYCVRDSVIKTLPSCLCASSSSS

SEQ ID NO: 968522 - protein, 57 aa, Homo sapiens
QDSTRRLPHNKHSWRQQLKSMKNQSVHAKQSRELTQEGTEGYVHNWVFGSVTGSYYE

SEQ ID NO: 968523 - protein, 61 aa, Homo sapiens
RRSYKVHDRNATVYQLRETIINNMYQCLGVLCILMIKRGVTEDDGRPIYALVNLATTSSSS

SEQ ID NO: 968524 - protein, 66 aa, Homo sapiens
MEMPFFYSNGLLRRSPYKKLTEGQLMNLIERAVTYAQIARKTCESNMVEHSAPPHVPRNLYPAGIN

SEQ ID NO: 968525 - protein, 41 aa, Homo sapiens
GCHEEDVSVTVITMGREENDQECHLHELLGSHMSLPSPIAT

SEQ ID NO: 968526 - protein, 40 aa, Homo sapiens
LRGYGIIRLTLILNPLTKHIVSLYPELLHEALFLPATDTY

SEQ ID NO: 968527 - protein, 66 aa, Homo sapiens
LPASHVQLASISIFGDVLPPPRPAMSGSYGQKAVLQAKQTALGWNEPYLNALFDFATICHVSWANW

SEQ ID NO: 968528 - protein, 72 aa, Homo sapiens
EGPNMKETQTDSISRYETSSTSAGDRYDSSAVSLWIITYLEERKPYSSRLKKDDSTDFKKLYEQILAENEKL

SEQ ID NO: 968529 - protein, 47 aa, Homo sapiens
PVPSIATSNLCLAIHDWFSIEFQLLPPLGLMCGCLGGLLFFTLWYCY

SEQ ID NO: 968530 - protein, 35 aa, Homo sapiens
MTMVLCIFILVTTAIEDPTSNGHMCGDCAFLVNVG

SEQ ID NO: 968531 - protein, 63 aa, Homo sapiens
LLGPDKLSGFKMYPIDFEKDDDSNFHMDWGGVVSNLRAKNYDIPSADRIMSKLIARKIVPAIA

SEQ ID NO: 968532 - protein, 51 aa, Homo sapiens
RSRSAYLSEASRSVVPQLVRDSLKDHPTRRQPVPGPPPRPGKPVRITFTRR

SEQ ID NO: 968533 - protein, 34 aa, Homo sapiens
MGPSNDCLSSDHPNKEASSNNGPPSSSGKATRRL

SEQ ID NO: 968534 - protein, 51 aa, Homo sapiens
MDSGGIDSSDSESDILLGILDNLDPVMFFKCPSPEPASLEELPEVYPEGPS

SEQ ID NO: 968535 - protein, 40 aa, Homo sapiens
VNYYKFFTCCVQGFLISCLAARSASPSWLLVSDVRLYGPM

SEQ ID NO: 968536 - protein, 83 aa, Homo sapiens
IIHPALIQLESGLQSAMKSFYFLHGEKRDSLFTVLHLYPINLDNAVSLIGCAHPLAAMLVRVNLTVYKSLCRLHRPSSAPGIR

SEQ ID NO: 968537 - protein, 57 aa, Homo sapiens
MYSRIGPLYLTRRNTVIYELISSLWRSHIIEELNVRKVTLSTDQNKEAHSAKVWLTV

SEQ ID NO: 968538 - protein, 121 aa, Homo sapiens
GRSGGGDIHLSHPSSYVDRRTRRCTFGPVTARSMAGDSLDGHRLELLAAYEEVIREESAADWALYTYEDDTPMSSSWQLSGEGGLQGLSGHFENQKVMYGFCSVKVSLAALPKYVLINWVG

SEQ ID NO: 968539 - protein, 68 aa, Homo sapiens
MSARWTPIIHASSCMNQKLSACASINAGDEAGTLERDRARGRRAVEHDAAGESLRVMNLTDLLNLSCG

SEQ ID NO: 968540 - protein, 78 aa, Homo sapiens
MRLVAIDSVESLWWHDPGGRMLSACARHHGTGALRSSMNGEGVVTCEHVVAVSVTCEGDSQTHTCELQIQVSWWFTVA

SEQ ID NO: 968541 - protein, 58 aa, Homo sapiens
CRTAISSSAGDGNRMMALSSVPPQQGGQQQQGPPPPQGKPQGPPQQVGHPPPPQGGAT

SEQ ID NO: 968542 - protein, 33 aa, Homo sapiens
LVRYFGASFRIIRRYSGIEAQLGDVLSDSELQN

SEQ ID NO: 968543 - protein, 47 aa, Homo sapiens
TEISSSAGDWNQNYGPQQGPPQQWSASSNKVHHLLSESHKDQPNKEV

SEQ ID NO: 968544 - protein, 106 aa, Homo sapiens
MEAVNVSCPLHMVSQAGVACRDAVYCSDKGCWTLESVFVGGNSPGSSSSNRRRVVPECLYSVWERFQTGRCQSSLAGGNEGDQRSIAKRPGTQTQLEPDGEELDKA

SEQ ID NO: 968545 - protein, 58 aa, Homo sapiens
MKASGALSIVKVVTSQLLAPKRHTPPLYRMRIFAPSHVVAKSRFWYFVSQLKKMKKSS

SEQ ID NO: 968546 - protein, 71 aa, Homo sapiens
MVKISIKPTCTPGAGKAWNRQVLMYDARARTRLARRFQDIHAGRHCGDATSRVTYQATCVSYEYLAHYEGQ

SEQ ID NO: 968547 - protein, 60 aa, Homo sapiens
  misc_feature (31)..(31): Xaa can be any naturally occurring amino acid
VNISMMNSTGGSSSGGGIRADPRGEPWATMXYVLEWYCQGFLLEVFIGFKVYHFNVFNTI

SEQ ID NO: 968548 - protein, 42 aa, Homo sapiens
MGLHDVPAIGSVCSTYHSNMDPGGPGKPLERQPKGCPSVPVR

SEQ ID NO: 968549 - protein, 77 aa, Homo sapiens
MLSSCLNHAVATLGLRHSLGLLTINASPSLSVCLYISSLPQDCWVASSNVFQGSQEIWLHLAACVLDTGLKYGYGVS

SEQ ID NO: 968550 - protein, 38 aa, Homo sapiens
VKSSSCCWSHLRSGMRTKPSEGSRVLENNPDRFRPILS

SEQ ID NO: 968551 - protein, 51 aa, Homo sapiens
VVLYSKYSKIGEHVILKAKTGTNTFLSGAGSLSIVRDIPQLQLQQVALQQQ

SEQ ID NO: 968552 - protein, 43 aa, Homo sapiens
YHQLTIDTPGKVIHDNFGYRESDSGPQSMPSLHTQKTVDSPSG

SEQ ID NO: 968553 - protein, 44 aa, Homo sapiens
EEHRDTVLGQLDTVSCRTSSPLSSLVQDGGRDDLAAGTARDTAT

SEQ ID NO: 968554 - protein, 34 aa, Homo sapiens
SLGRTSGLELFTRGGDLFGWNFSSSSSSSTTNSP

SEQ ID NO: 968555 - protein, 53 aa, Homo sapiens
PLLPGCVTLSLRALIFWNHGQHIHHHQEPQQQPPGFQCQTQPWLPVGQPALAS

SEQ ID NO: 968556 - protein, 33 aa, Homo sapiens
MAHLGHIAGSRGAGLLGRGGWMALRVLALLACV

SEQ ID NO: 968557 - protein, 73 aa, Homo sapiens
  misc_feature (13)..(13): Xaa can be any naturally occurring amino acid
  misc_feature (26)..(26): Xaa can be any naturally occurring amino acid
  misc_feature (57)..(57): Xaa can be any naturally occurring amino acid
  misc_feature (64)..(64): Xaa can be any naturally occurring amino acid
MRTSHRWLPTITXGSRYGVLQRGGLXGSRALVSDVESSYIVVVVKSNSLHRFTVIIXCSEAELXSQKDPCRAG

SEQ ID NO: 968558 - protein, 37 aa, Homo sapiens
EWKLHLELNSESPGGEEDSGGGAGRTEKGSARQELYA

SEQ ID NO: 968559 - protein, 66 aa, Homo sapiens
ESDTKITANTKDEPHHTNHQRSTAVKPSSKPPNQLASSQEILLPSPLLGPSAQELLLSDLTWRVIQ

SEQ ID NO: 968560 - protein, 57 aa, Homo sapiens
TWLKRFCLSYVQSLEHSSDEIAAHEGLSEFFSKSTQEVDSLEKLSAHMGLPGTISTM

SEQ ID NO: 968561 - protein, 56 aa, Homo sapiens
MATRYEGGLWSRGEAAYSSATIRECAGLRLLDVTPLSLGIETAGGVMTPLIYSSTT

SEQ ID NO: 968562 - protein, 53 aa, Homo sapiens
RPPPPHEHERLHGMLSPCSLLVLQHSQVHFFCTSPSVQIHKHGQLRVAEQYED

SEQ ID NO: 968563 - protein, 65 aa, Homo sapiens
SVGCVRLGGCEAMELTSRLDRNAGQDEDHFITVDAVGCFAGAEEEAEDDEDEEEIEVEEELCKQV

SEQ ID NO: 968564 - protein, 45 aa, Homo sapiens
MGLVPPDQPPSQCLGYPKYQKSVASYVSSEQQRGAAPDSSSMQHL

SEQ ID NO: 968565 - protein, 86 aa, Homo sapiens
RPHTSVYLPSYGRPDTSASWWCMGQKDSYVGDDGPDAMRGILTLKYPIEHGIVTKLVTTPPRRNDDDEFRHHDDEFRHDHDEFRHD

SEQ ID NO: 968566 - protein, 73 aa, Homo sapiens
LSNKQPDFTPLNTISAYGNSFNLTGECNQQTRIISIVQSGLTEELERVKKWTFIPLGVDSERSQSFLASQFRL

SEQ ID NO: 968567 - protein, 38 aa, Homo sapiens
SQSDVLSSSCALAGVVVHGVLLLGGHVGHEVHDHDEFL

SEQ ID NO: 968568 - protein, 60 aa, Homo sapiens
LAYVTSHSHDSTLSLAAFHNDELLLEGRSCATHYTHVWYYQVVPDALNYCNTLCHMLVYL

SEQ ID NO: 968569 - protein, 62 aa, Homo sapiens
WCGRKLELQSWRLWGWREGEKEGNVTWVNDLCTEGSTAPLLLPLPLLLLLLLPLLPLLLPLP

SEQ ID NO: 968570 - protein, 51 aa, Homo sapiens
RSQDQWNGLRIRFFLQEIKATRAATMAATAVAMTTATMIPIGEDQHDEFHD

SEQ ID NO: 968571 - protein, 43 aa, Homo sapiens
SIRVCACLLLLVRRSGKIKEPLLLPEDDTLYKRLLLFGYLSSN

SEQ ID NO: 968572 - protein, 47 aa, Homo sapiens
SRDPPPLYGTYIALWARGMEVVLFYRELIHCVLQFVILSVAQEKFML

SEQ ID NO: 968573 - protein, 81 aa, Homo sapiens
MGLTESKTFVFKPAKRKPVVKGFACWHCRLQAGRARARRWDMHEVLGGAWLNPSTSTCESALFSAGSQVNLELCLFSQLSC

SEQ ID NO: 968574 - protein, 51 aa, Homo sapiens
MRLSSHQVDASLGLRSDSHRCRGVIHQVVANILLEKRTGYQPTTRIEAAGR

SEQ ID NO: 968575 - protein, 62 aa, Homo sapiens
MSRTENDHEGSRHMMRADYLEIHDLPEPLKEIRRISQTYQQQYGRSLEDYIRSDTSFMFQLS

SEQ ID NO: 968576 - protein, 46 aa, Homo sapiens
SGKPHDSPTGRHPPPPQGRPQGPPQQGGHPRPPRVRPQGSPPEIFR

SEQ ID NO: 968577 - protein, 51 aa, Homo sapiens
MALEMIEYTTENRFLMLTGAWNQAVEEKIEWLESHHDADIEDFKAKKKEEE

SEQ ID NO: 968578 - protein, 96 aa, Homo sapiens
KILVVMTEPTPNVEMRGQQDCGSSLWCPQCPRPLSTAWACTLRATLLISMPRCGIQCYHFAHQGPAAMDAHETHASVAKTPMLLTLCAPRAMVLPR

SEQ ID NO: 968579 - protein, 63 aa, Homo sapiens
DLDSDHEKERDTGSQCKWQTGQLGGFTLQLPKVGLNFFFFFFFTIINLLDDQISRPIFYDHHQ

SEQ ID NO: 968580 - protein, 47 aa, Homo sapiens
ILYTTPPNGGNSKEINLELLRISLLLIESVAGALCVFLTEYVRTRTV

SEQ ID NO: 968581 - protein, 150 aa, Homo sapiens
HCAECAPVMASQVLGLRAPMYRVLQVFNGETNVHRYSSDHDSSCDVSSNDWITFMPLFKSCICSMSSALRLLNFSEDTFSELKDVHLCRVCVIAAAQQCTEVRDSEEETLCLLTTLSRYLPSMVMASPSSLQPSSCSMLAPMTDRATCRI

SEQ ID NO: 968582 - protein, 45 aa, Homo sapiens
MANILLRNRTGSSHDSMSSREMRSSSRLDFCYVTSMSAGVGIESE

SEQ ID NO: 968583 - protein, 48 aa, Homo sapiens
RTSHASEAGEGSWGYSPDAMKAGMALEKKLNQLPFWIFMPVVFCPLRY

SEQ ID NO: 968584 - protein, 60 aa, Homo sapiens
AYCTKANKLVEKQNPAEDCTLWGLNMQCGLGCGNQLPKTDGGSETNKQRSKRHTEDGCER

SEQ ID NO: 968585 - protein, 60 aa, Homo sapiens
MQQKSNLELLRSNCCSSSRGWSPVLDPQEMFANKLVYDNSGQQMTHHLPKRKLKARPSNK

SEQ ID NO: 968586 - protein, 67 aa, Homo sapiens
RRGPQVYRPRHARKRREERLQAKKEEIINATLSKAGRDQEIKPPTLSVHTGLCDYIDQPLKYNNALS

SEQ ID NO: 968587 - protein, 160 aa, Homo sapiens
THRSSETGTDIQVAFIPCCHLNQESFTLELPRDVAPRIGYPKTSLVHSTFFPALQGCPRPKMKASDPHSSIFLTDTAKQIKTKVTKHAFSGGRETIEEHRQLGGNCDVDVSFMYLTFFLEDDDKLEQIRKDYTSGAMLTGELKKALIEVLQPLNRRAPGP

SEQ ID NO: 968588 - protein, 68 aa, Homo sapiens
GPGEIGRKKLLAVKAEARMSKANEARMRREERLRSKKEEIINVLYLRSEENKKENLPLCLYILASVIT

SEQ ID NO: 968589 - protein, 37 aa, Homo sapiens
PGSSESWCCSGIMVLLGETGKEKLPRYYKNIGLGFKT

SEQ ID NO: 968590 - protein, 99 aa, Homo sapiens
NKLDLNNSLAGGLKLRSLFKQASTNSLRGLLEFPSSTPEVLMKHAPSTAEAVIPVRGPAKDCIPAHSIMAQTNHYQCSGYPGSHGITAIDWSIYPGQAS

SEQ ID NO: 968591 - protein, 60 aa, Homo sapiens
LAIRRRRVVSVASVTRALLGWADIPQSGDKTLSWSACKSVLKSIDTHFIFGDHHDEFRHD

SEQ ID NO: 968592 - protein, 66 aa, Homo sapiens
MSHNLGMTLGSDDYAPPKGLEEASKRCWGGWKDGSRRTGQILKQTYSKFDTNSHNHDDTTTTNSER

SEQ ID NO: 968593 - protein, 90 aa, Homo sapiens
SIYSLIFRIPMALLTRCGVTKLFFIFLVIHLSIDITFYILLLSTRVLLFTFLLLILVLLVFHYLSIYIILLLILILLLIIQALHVALSIR

SEQ ID NO: 968594 - protein, 76 aa, Homo sapiens
HFQRVGGHNICFPLEQVLCLDGGDLSHSNEDESAVGCRPFHAVSGVDLPLPCFLVHDEALQDVVELHGTRTQVAPQ

SEQ ID NO: 968595 - protein, 62 aa, Homo sapiens
IIQDLIYLRKITVALLTSLQHLYSFGCDPISSSLFASNYTLCFAVPLTFFILFLRTFRWGTE

SEQ ID NO: 968596 - protein, 80 aa, Homo sapiens
EDLRNRRRGCAICVNLACEVCLRICQSGGCRFQPPHQRLDASSRSLGGDSHRCPRLSYTRLFGNILLRNRTVSSQDHDES

SEQ ID NO: 968597 - protein, 72 aa, Homo sapiens
TRAGALWERRGSGGFFVPRVLHIDINFNAQRAKSSCHTLPNCSSVKFTLVILLMDQNADSCLWVPVSGLPVH

SEQ ID NO: 968598 - protein, 62 aa, Homo sapiens
AQPDIELSILNILIQWVYGSKCSDYYEFCGVDEKQTMRSLVNSRSRMCNSRRLFLISSPYLR

SEQ ID NO: 968599 - protein, 48 aa, Homo sapiens
ILRITLSGAGAKIRVCDWEQSYSPVAVQQRLSDGTQESIITLSPAQPD

SEQ ID NO: 968600 - protein, 52 aa, Homo sapiens
LRILTVYHSMPTAHAQQSQPATLPTGSQPQSQHAAPVLSSIRRGRPHTWAVD

SEQ ID NO: 968601 - protein, 69 aa, Homo sapiens
SARPMFRYCRKKLLADQADGPQVYRSRKHASPVNSASRPGMEDIIKTLSKEEETKKENLPLCLYILCLV

SEQ ID NO: 968602 - protein, 35 aa, Homo sapiens
VLNCSGSGFKEAPLYLKVADSGVTLFGRGAQHQHG

SEQ ID NO: 968603 - protein, 111 aa, Homo sapiens
YSPHITSGANPTIGWSFFLPKKKSTRGISIQQQHSDLPATVTERVQALGVPGGQALPTESQEQPWPPSALIDAPPEGTVNHFAHTHVTTALSNATDNSHCSTPFSGWDRRD

SEQ ID NO: 968604 - protein, 59 aa, Homo sapiens
MRLLIYDAVTSASCSVGLVLPSLRFREDAFGGLGYFGIGSHYGPFGNDVVFPRRTITSW

SEQ ID NO: 968605 - protein, 59 aa, Homo sapiens
  misc_feature (54)..(54): Xaa can be any naturally occurring amino acid
MSIVDKEEKASSGLRWILFRIEEVELANSKVRGHYGTSVLSMISAPCALWSLLXTITVD

SEQ ID NO: 968606 - protein, 55 aa, Homo sapiens
CDVSQELPKSAVIHSHEFHSHEDMLVVDPKSKEEDETPEILVFLMNLDMCIYQSV

SEQ ID NO: 968607 - protein, 45 aa, Homo sapiens
AYGHSCPEYLVILNSQEKLLGILAHSFTPSHPTIYKPSHGHPLIE

SEQ ID NO: 968608 - protein, 157 aa, Homo sapiens
ELIAILTENYGGKWPFMLSPRQVMCSSSGITPVMNMPKRYDTNSTMPNSWQTYDTGSRLYLEYSTRYEMHSKPQSSLHTIVVGENRETSVGTVYIIRTRDNKVHGELHQFTETIERLTSNSKEFREQQQAEEDCTLPKLPQTWTMETRRTSVSVKID

SEQ ID NO: 968609 - protein, 52 aa, Homo sapiens
ILYEEGTQVASVQDHDKNLQDLVETMSEVATTKFGKLQIFDQVPCESWLQTE

SEQ ID NO: 968610 - protein, 48 aa, Homo sapiens
MAPKGAQVLQVKRGWKRQVSYDGRAPNNFTIQNQYPRLSIPNLEDHST

SEQ ID NO: 968611 - protein, 39 aa, Homo sapiens
LPGLKTRNLTPLLVIGNQNDGLQQDHPNKDASSNKVHHL

SEQ ID NO: 968612 - protein, 84 aa, Homo sapiens
FGVTLEVPGKYSITALSRRPSGGDSLISNYKAGKVVMVHQGHPVIVLSVDKIRRVGKGKHFYRHRDAHPRSLNILVHIDLGQST

SEQ ID NO: 968613 - protein, 119 aa, Homo sapiens
LQDLQTRNLNPLLVKGTRMMALSSDHPNTGGTQQQGPPPPQAKHKDHPNSEGIPHPPQGRPQGPPHTGRPSPYSSSKATRTTPTWRPSARSSLISSWKGPVTTSPRGRPQGPPQRQSPQ

SEQ ID NO: 968614 - protein, 108 aa, Homo sapiens
MMASAGPPQQGGSSNKSTTYSEKATRTTPTVRPSPTSSRKATRTTPTGRPSPVLLEEGHKDHPNREAISKVLPQRRPEKPQGPPPQGGRPQRTSTRRQSPTVIKDSND

SEQ ID NO: 968615 - protein, 78 aa, Homo sapiens
  misc_feature (44)..(44): Xaa can be any naturally occurring amino acid
  misc_feature (59)..(59): Xaa can be any naturally occurring amino acid
YRISNTALSMVDVTFADVAQPDQTDCGLNATPSCVMEDTFVISXKANCIDSTASAEAVXCLRKETRCKQENMKPAGSS

SEQ ID NO: 968616 - protein, 95 aa, Homo sapiens
GVSRGSQHASGLDCIIAEVTPNMRRFSEEQAEAESGYPDKVRGGLQVTAGQTLGDRTLRAKTKAGELLKFNRMIQKAESEIDHVKKQCRQTCRAA

SEQ ID NO: 968617 - protein, 33 aa, Homo sapiens
PVLERSLGWSGREIERASRLPNPCEAHFIIGAM

SEQ ID NO: 968618 - protein, 136 aa, Homo sapiens
MSDISSDMTMGTAQEQFTSQVREDTEVSEDAILRIVGELEQMVSEDVPLDHRVHACIIVCRGEAIRKIMDEFKVDIRFPQSGAPDPNCVTVTGLPENVEEAIDHILNLEEEYLADVVDSEALQVYMKTPAHEECKA

SEQ ID NO: 968619 - protein, 68 aa, Homo sapiens
RKTTPRESELLLYVTPRKKNAPLMPEFLMQGVRENNRTKNSCLIAFSSINAALSSSSLIIYMCGWMFC

SEQ ID NO: 968620 - protein, 50 aa, Homo sapiens
MTYRLLKKGYKAPPGPWSLKLVARSGSGEQFVWIKLVKVKGLSIVGVSNP

SEQ ID NO: 968621 - protein, 77 aa, Homo sapiens
SARFERDLEVALLGGGDTERACEGGAGSGELERDCLLDLDFDFISPFPCSLGDRDRDLLRDFSYSALDRLGEGEGEM

SEQ ID NO: 968622 - protein, 45 aa, Homo sapiens
VLVQQVQFIQKRVAKLRQALSRITSDVRQKGLEENAACISPDLRA

SEQ ID NO: 968623 - protein, 40 aa, Homo sapiens
  misc_feature (35)..(35): Xaa can be any naturally occurring amino acid
LRIGGPVVLSIRGLPYLIVRFSKTNTEQTKQVTIXYVLTI

SEQ ID NO: 968624 - protein, 40 aa, Homo sapiens
LRGESSSSFMVCCLFSVSTRRTVSSWSCSLDSSRRYSAPI

SEQ ID NO: 968625 - protein, 82 aa, Homo sapiens
MGTRFFQERNDSYEPYDAEIIKGAKKFQLIDNLLFVLDTDNVLSLWDIYILTPVWNWPSLHVEEFLLTTEADSPSSVTWQGI

SEQ ID NO: 968626 - protein, 74 aa, Homo sapiens
RQHLLQLVKVPISLSIDRLEFDLLYPAIEGHLSTERLTNLPRITRKASPGKKQKAEEHQEEIGPLGRVPSVSIF

SEQ ID NO: 968627 - protein, 89 aa, Homo sapiens
SFLICYRSGSNSELVQSSRSEVTELRRVLQVLEIELQSQLSMKCIPVRTAWMETKVPLLRCMLSQNPWDCIGTCGWSMLAQLLGYLSSE

SEQ ID NO: 968628 - protein, 68 aa, Homo sapiens
IIEPEIHTDTCHLIPRAVMWKKLYTVGNGSLKSGTKPFECSAVTRSVLASSTDGLNCGDIVAKHSVGI

SEQ ID NO: 968629 - protein, 105 aa, Homo sapiens
NPEYTIDRQSLNGLSLMNCRRRMKYPGRLGIRIVCYIQRLCEVFEEYAMNDFRSVCRRQIELVIIMPHRDSYKGGVGYVFCQGVENECEAYYTIAASVVRVLRQV

SEQ ID NO: 968630 - protein, 38 aa, Homo sapiens
REFVVLLCPPVLVAEGWRLTAGVAKQVNFAKDHQTVSQ

SEQ ID NO: 968631 - protein, 74 aa, Homo sapiens
PDSLGYGTYGVGKVGQEHLKIRDAYHLRHFTVMKTEKTVCSVNYSHRQITDPEHFKNSSNSSISLFDCVHRYRE

SEQ ID NO: 968632 - protein, 137 aa, Homo sapiens
MGPVIWVFPSNLLAHSSRSSITLKGIPRGRQVGPELKMAGQLAGGDKSWWCTHRSRSKSFFPRSWDKRAPRPSKLGPGLSPGALEGLFRGVGLSREVTDFKRGYKGGNTFTASDLGNNLVSFKGSMVGAGGHIDLRM

SEQ ID NO: 968633 - protein, 109 aa, Homo sapiens
MISRLLVSVDPPVVRGPQKSIFKSKFHEHVKNTFPVGVTWNRMRIRFQIKLVVWAYLRTIEKSIIVLAVQRDEGRCSANVTRYYVIPRYRTGDAVSPSTGRGGEKQELG

SEQ ID NO: 968634 - protein, 124 aa, Homo sapiens
DISPEWMTNPMQSGLHVKVSVKRHRHSLHIWWTTISPDTTTDEQSGARIDYFHCSGLLLGGHPHSISSELHIGWCPLGAQACGCDLSELQVSWCRHRGSCSLHQRLTLSAWILSIDTTHILHCG

SEQ ID NO: 968635 - protein, 37 aa, Homo sapiens
MHKRNLWWRDVLVGLRRDVDSSLGISQVYIPWIWPRD

SEQ ID NO: 968636 - protein, 130 aa, Homo sapiens
RSTDRHARLQQIGTVYQTQDMSITLREGRYKSINGEPRGDGAGGNSDSDNLDSTDCNRESSSGGKSQELNKGMDVNSSKYPSPLLHSQEEKTSTATSKTQTRLEGEVTPNSLSTSYKTVSLPLSSPNIKL

SEQ ID NO: 968637 - protein, 52 aa, Homo sapiens
LQVGMDKVETFLRMVQSRSVEGSMWLHKCPSSILGPLPRCLSMDPERCHIQM

SEQ ID NO: 968638 - protein, 38 aa, Homo sapiens
MLSLLSSQIVAPKDSERLVCMPLPLQALQAYRIIACPA

SEQ ID NO: 968639 - protein, 52 aa, Homo sapiens
LVTNTDTNNEVAAQIHYCPLNQELYKPSEEASYTDNPYSQANTLDQTYAKIH

SEQ ID NO: 968640 - protein, 49 aa, Homo sapiens
RQWDEGCATDILTTIVNDVILVFDPKELSKDSTKSASPLFAYSGLNRIL

SEQ ID NO: 968641 - protein, 53 aa, Homo sapiens
VCPLRAPSKVDINTEDLEDGTSRVTYCPTEPGSYIINIKGGDQHVPGRRLSEK

SEQ ID NO: 968642 - protein, 67 aa, Homo sapiens
LGCAAFMTFLGGKDDLLNPLQGATEPRIAKAGSVWRRPSVADSILVSVESASWCEKLIYYHLKLHYA

SEQ ID NO: 968643 - protein, 52 aa, Homo sapiens
LMRKKKATVCQIILKYRNDITAAIMDYGQEDVLYLQEQQTLTVLDLEITMPV

SEQ ID NO: 968644 - protein, 48 aa, Homo sapiens
IVLCAVCAAIAIWLQLAMSYRSLRCLNQHAGGHGPLELHHDFLKLESP

SEQ ID NO: 968645 - protein, 127 aa, Homo sapiens
HYSVDNILGSSSYQDRQLFSPPALLLSIAGSILALVPLLEATAYVEGSKSMTVKVSDSFRNRYIFLALIHYSRRDVVNVCQEDWQTVAYILPQSIYHQLQSKIAYEYKEIYEKTLTRTLEYEFLIDK

SEQ ID NO: 968646 - protein, 88 aa, Homo sapiens
GSITRRIPVIIISTVILGHYWEVQVIRTISSLSPSIDLLSIAGLYAFTVRDSAHMPIGAPKSITVIVSAPSGTVHLPGLNPLYARVMS

SEQ ID NO: 968647 - protein, 87 aa, Homo sapiens
MMRKSRHRSDPKATFLLRIAFRKQVIPVVTLLTPPAENPRGQKDREAPLSRSVFVLKIKIKRAYALLLHGRFLSSLSSPEDTCVTVC

SEQ ID NO: 968648 - protein, 112 aa, Homo sapiens
GQYWEVISYQDKQLLSPRLTTKHSVLYSFTVPISATAMYKLLIHNSHSLCSFRNSTSSWPSSIIAPVMSITACQGRLADSCFHSSSKYLPSATVQNCFLFKEIYEKTLTRTL

SEQ ID NO: 968649 - protein, 74 aa, Homo sapiens
SLVYQELVYKSPFHSLFHKLSWPVFLEIQKVTSRRATIVDYRKAKVPNPGGAMTLIVKDVELASPVAELRAEQA

SEQ ID NO: 968650 - protein, 63 aa, Homo sapiens
RIFCGQIIGEYQSIQDNKALNPPDYLQSIAGSMLAQVVTQTLLVESSKSMTVKVSAPSGTGHL

SEQ ID NO: 968651 - protein, 37 aa, Homo sapiens
YQQNILGQLLGSFSYQGQQLFSPPALLLSIAGSDACS

SEQ ID NO: 968652 - protein, 76 aa, Homo sapiens
SCLCLSSQDFREDLPNKSPRHRAQYNTYPIMLFYTSNIHIILQAALDPNLYVISHMLSARFRVILLLSLLCTWSNT

SEQ ID NO: 968653 - protein, 59 aa, Homo sapiens
QGAFPFNDAADIIGVDHGLSIDADWDVVFLETTSFCWGIRNYFNYIHSKEITLGGWDER

SEQ ID NO: 968654 - protein, 107 aa, Homo sapiens
MQHISKAISYKKSHTLNHSILPNILQKRHKNCLHLRSLSPYPASQLDVFVHNGDSLSVNGTQVEYLRNRPTRYAIASLLTAHRWLRSETSGSETDHPATIIPHQTLE

SEQ ID NO: 968655 - protein, 66 aa, Homo sapiens
RISLQIVDGEDDDAQIILLIGNARMAVDDFNLKYENEHSFKKDLEIEVEGLRRTLDNLTMVTTDLE

SEQ ID NO: 968656 - protein, 53 aa, Homo sapiens
QAVCLLVELNAVCCAISPTVLHWKHLHKLLLEDMTCSVKWWVILYDVDRAVHC

SEQ ID NO: 968657 - protein, 146 aa, Homo sapiens
IRTETENRMMRRIILSRLTRTRRLLLCSTLEEENASNVNKHILEMNGMSREGKTGLQSISTHKETEEKTVSEALLMEPTDDGNTTPRNHGVDDDGDDDGDDGGTDGPRHSASDDYFIPSQAFLEAERAQSIAYHLKIEEQRPQKGY

SEQ ID NO: 968658 - protein, 78 aa, Homo sapiens
MPTPPLFYPYHASFSQTPSAYEKETSDRSLPPLRSSPITLAAKHALLVQSPAEASPGAVILIIAQRTYILITILPSKP

SEQ ID NO: 968659 - protein, 54 aa, Homo sapiens
INTLDCGEVVSGNVYSKRSSHSGEAAPRTVSSCELTNVESSDQEWKETHMCFRG

SEQ ID NO: 968660 - protein, 33 aa, Homo sapiens
EVLEQLRQESEQALHHYMLSEHTESDSAVVLLL

SEQ ID NO: 968661 - protein, 70 aa, Homo sapiens
ISPSSYCIRALVLADSSCASTISRSAVLCTLTLGLFSLIGCENMSGTGYLFSCLCLICSLCLGLPSHLRM

SEQ ID NO: 968662 - protein, 39 aa, Homo sapiens
LFQPLKYPYSLSKSLSTVWAQSVILGCPILNGIQLMVVS

SEQ ID NO: 968663 - protein, 89 aa, Homo sapiens
HVDYYGSASEWGDEADGGQQEDDSGEGEDDAEVQQRMPAEHFPTRSLYHVNPPIFNHSARVYFHGRQGLHENVIQTLIMKTTPRVAQHL

SEQ ID NO: 968664 - protein, 36 aa, Homo sapiens
NVQFEDIWQKLHNAANANQKEKYEADLKKEIKKLQR

SEQ ID NO: 968665 - protein, 79 aa, Homo sapiens
EDPHYARDDVKARPSELALPREWTVQKTMDGAQGEHLYSMDPHTGAAVWRPYRNHEWTTYRGQSYNKIQSATYMPTDHT

SEQ ID NO: 968666 - protein, 44 aa, Homo sapiens
MYAKTVRQHSAVLMAPSCTLALPDRMSKEITALDPSTMKIQESL

SEQ ID NO: 968667 - protein, 65 aa, Homo sapiens
YFSWLTLEDPHYGSVGHRKDLYANTVLSWLATPCTLCIADSDAEWRSLALCTHAQVNDAMIICSY

SEQ ID NO: 968668 - protein, 38 aa, Homo sapiens
MDWSLACTLRLLFDTDGKIQWLLVEHTAKKQTELSTSI

SEQ ID NO: 968669 - protein, 53 aa, Homo sapiens
NHLSEGLRQPLMLYMACVSLLYSRRHHHSCPLLGMFYLTADLGLHEALVSMSY

SEQ ID NO: 968670 - protein, 171 aa, Homo sapiens
ERKATRGPEVDIKGPKVDIDVAAVDVQGPDWHLKMPKVNMPKFSMPGFKGEGPDVDVNLPKADLDVSGPKVDIDVPDVNIEGPDAKLKGPKFKMPEMNIKAPKISMPDFDLHLKGPKVKGDVDVSLPKVEGDLKGPEVDFKGPKVDIDAPDVDVHGPDCEPAGRVAHSDRC

SEQ ID NO: 968671 - protein, 52 aa, Homo sapiens
LVGELSSSRELILNIFFFRRSMAWSGFVAYSYLDDTLCMAEIFIFMSSMLMV

SEQ ID NO: 968672 - protein, 48 aa, Homo sapiens
AYAEEYGMWRNRRLNNLDKNHTDVRVLIPCSGIFNFSQCANCKPMTQS

SEQ ID NO: 968673 - protein, 76 aa, Homo sapiens
  misc_feature (74)..(75): Xaa can be any naturally occurring amino acid
ANITAGSTSVHLMGSATVAISSINLPSTLIMLHNSNSTDYPSKSLSPLIQDLSFSQLLDKPSTVRRHCALGIRXXS

SEQ ID NO: 968674 - protein, 103 aa, Homo sapiens
SRVSLGVSTERGAPCAQCGPSTTLTENEVVRPEDLAEGPRAHGVHGGGLQIHEHGAGHVLAASVGLIVVHVDAFQLQVCCPRGRCPWGSMPVLIADHLPKTTL

SEQ ID NO: 968675 - protein, 44 aa, Homo sapiens
MSLRIPGVGNGREFRYDDVLHGLIQFHKVFSLLVNTNWLGCDRQ

SEQ ID NO: 968676 - protein, 80 aa, Homo sapiens
ESISKYQKRQHIADHTDEYKPTQISPDGLRNNGMLIQDPLSTTPDRLLRVVARPIQAANFITTLHSLIPGILAPSFTSKS

SEQ ID NO: 968677 - protein, 223 aa, Homo sapiens
SSSYRSKKEEEKQYEQELDSGIILGWNSTQKLRAFRGHDGRRLISQTQRTKYDRRFKVCKGELTSSTPKVLVLYSDEKKSNRVPEEGPGERRPESENRDRTDLVGLRYLPEEDDIIILHEQEYDSVLESVFKTEFLSLLAKRYEEKTQKQLPLKFSNTLELKLKKENWGPWSAGGSRQVQFHQGFGDLAVLKPSNKVLQVSIGPGRAKNSLSYQKEHTQNTVI

SEQ ID NO: 968678 - protein, 130 aa, Homo sapiens
MTQITEIISDVSLAIKSEYFKHSRGCTEISPVERPTTSTAVLGTVTANPSYSLPKRTREEEEDSTIEASDQVSDDTVEMPLPKKLKSVTPDGTEEEVMAEESTDGEVETQVYNQDSQDSIGEGVTQADYT

SEQ ID NO: 968679 - protein, 72 aa, Homo sapiens
AKVTEEKRRDARNITKKRQAYREDQTTVENTLMSTIWATCDKFTHLVLINLPYYKLNYIILLNTTDFTESIR

SEQ ID NO: 968680 - protein, 77 aa, Homo sapiens
ERQMTYRVERMGKERREGKHLEQLTSGHPGVSKQVYPWGSRRKSSRWNLKMLQRNIEWITKNEENRSLETGSLHFGL

SEQ ID NO: 968681 - protein, 79 aa, Homo sapiens
QADLPGSLNTKAGNTKAVPAYATAIATWDLSHVCDLHHSSRQRRILNALSKSRDRTRNLMDSTRIHEPLGHDGNSAKGS

SEQ ID NO: 968682 - protein, 75 aa, Homo sapiens
DLVNTKAGGILSLCLQLHHSSWQRRIVNPLSKGSDLNLQLIVPSRIVNHCATTGTPIISFNLLEAGPQLANRHIN

SEQ ID NO: 968683 - protein, 68 aa, Homo sapiens
RYDELRYDELLGVINWRIPGNCGYSLPQYLIQVIGFLGCAGSQLAQVKSLRKRLPVKEPRWSPSGALS

SEQ ID NO: 968684 - protein, 46 aa, Homo sapiens
YRILRVKRVEYKRLFSKKFDEEYTARQEAQAELQNRDEKIKELEAE

SEQ ID NO: 968685 - protein, 62 aa, Homo sapiens
MRGEKWRKKRMRSVKRKRRKMRQRSNVNRQLVCTVECRMEHENMWMAMTLVRCCVQGCVDLH

SEQ ID NO: 968686 - protein, 38 aa, Homo sapiens
CWGDSTGSCEFKRVAQAFREGENTRLQSLRPVIRLYGS

SEQ ID NO: 968687 - protein, 131 aa, Homo sapiens
DLVADWRGLSSFCDREVRTRWRYCPEQQDKKGRVELTGLVGDINGPGALKLFSGSCPASGANTAAVPFPVAALGVIAHSDKNRMTPHKLGIVFGPNPCFWQSRRHLTQQPMLSTQGSLVQLMLTNFTSLFP

SEQ ID NO: 968688 - protein, 36 aa, Homo sapiens
MPPDSDPLCPHSPYRYLWTEATRAKQALAFNTDTRL

SEQ ID NO: 968689 - protein, 81 aa, Homo sapiens
VTLQDLRVSGVFSNGGPAWALDRLNLCARRRTRVSGYRQAFELPWNCGQDLRRDEQPFRGSVETGDGAVFGLVVPVPQRGE

SEQ ID NO: 968690 - protein, 102 aa, Homo sapiens
  misc_feature (1)..(1): Xaa can be any naturally occurring amino acid
  misc_feature (18)..(18): Xaa can be any naturally occurring amino acid
XTIMKSCDWKSPRFHSVXRMRPPTETLAWKHKLPQTSATQKHQHVCSPFHQSQTSIYSKHPVTKTMASSQEQQGRLLTHDEPARINPEKENCILKFRIVIHE

SEQ ID NO: 968691 - protein, 85 aa, Homo sapiens
  misc_feature (4)..(4): Xaa can be any naturally occurring amino acid
PSLXDDDNDVILGAKSRLRAPEEHMRGGFSDSGMEPQTNANQCYPEAPTRVFSIPPITDQYLLQTSSNENYGISPGTARQASYSR

SEQ ID NO: 968692 - protein, 105 aa, Homo sapiens
  misc_feature (4)..(4): Xaa can be any naturally occurring amino acid
LPKXRWMQNSDMTQVFKFIIKNWCSVQMYVGSNKGPIIGLMVGGVVIATVIVITLVMLKKKQYTSIHHGVVEVDAAVTPEERHLSKMQQNGYENPTYKFFEQMQN

SEQ ID NO: 968693 - protein, 91 aa, Homo sapiens
RDLRVTMLLLTLVKWIKYAINDPFIDLTYMVYMYTKYDIHTMDKYPWTPIKDYDERGSYVNHMEIPYTILPRSADPIQESMWGDSWRLKYV

SEQ ID NO: 968694 - protein, 36 aa, Homo sapiens
PFPPAQSPSSADGTQESVSPQTYGPYITKPQSWNDN

SEQ ID NO: 968695 - protein, 89 aa, Homo sapiens
MARIRDKVSSLLGSVGISGRRESSKALGRERLAPEGSPFSRCRLVMPGSVMVASRALMEEEEDIGRLGGPGGSWGRARELKAVALYGSA

SEQ ID NO: 968696 - protein, 33 aa, Homo sapiens
VLLEDPQRCAIPCIWGGGPSTGHGDQILPSQQH

SEQ ID NO: 968697 - protein, 33 aa, Homo sapiens
QCVCFIFLQYGLMGKSLDEGDTTSLWKLQRYSA

SEQ ID NO: 968698 - protein, 77 aa, Homo sapiens
MYTGTSTLPKLGVGNVCKSDRACWLTPFGILWLNLLVALRLALHSLVHVHSLALCIVWPASSLVPFFVVVLLMRWVP

SEQ ID NO: 968699 - protein, 91 aa, Homo sapiens
CTYMQFIEGGRRFQCCICSCINDVPPQYFQQLDHTGVVGERGFTVCSGPWGIWPFARAKRCKAYMCPFMQYKKEGGVSSAVLADVYNDVPP

SEQ ID NO: 968700 - protein, 40 aa, Homo sapiens
AHYEGEFSITYKPVKHGLARHRGTHSSRFIPPKYCSAGYR

SEQ ID NO: 968701 - protein, 39 aa, Homo sapiens
PHALSIEEAEPLLCVAIGLENAEDDCFQLEVKDCSIVQR

SEQ ID NO: 968702 - protein, 52 aa, Homo sapiens
MLKLFGSSSFFPSLIWSFSISRAIRVISDAGKSSPGSKIFPMIFRYGSALGT

SEQ ID NO: 968703 - protein, 60 aa, Homo sapiens
PRDPGILSLVLKVKAKWGYVKGFPCSCGASYYLATLYAKGIGVPQVYKPFYQKYAVWLSA

SEQ ID NO: 968704 - protein, 91 aa, Homo sapiens
ITKIGGRSSDQGEDFPASEITGIARLMEKNRMSDGKKEELQKSLTILTAFQKKGAEKEELKRAVCDFPGLGGGREGRCNLVVVSPLWNIGG

SEQ ID NO: 968705 - protein, 98 aa, Homo sapiens
CPFMQCMEGGRGFQWLFWQRINDVPPRIFSTGIIRGWWGREAPPYVVDQGESGPWRCTGGNAYLCPFMQFMEGGRRLQCCVGSCIIDVPPQYGSARVR

SEQ ID NO: 968706 - protein, 161 aa, Homo sapiens
GLPFGIVGMSTVRRIKTKNELSLKDKTFFLSKISKVTVTRIPSHKKNRGESKDLCLMAHLIAPVINTEPPGGYVQDNNDMDHEGSIQNGVQASRAHSLGICGEGGIDKRPILRGIKADGLKGSQDNNQAESHRAKEHDHMLGAIFQGQLLIFFLIWLNHRR

SEQ ID NO: 968707 - protein, 49 aa, Homo sapiens
MMLGHTVKVNLLQQGSVGLMALLLWLQMEDLPQTRLALRAVMAQARGYR

SEQ ID NO: 968708 - protein, 103 aa, Homo sapiens
MYVYLGEDLRPGGGLPSIRDDTDRRADLRDKMSEGKKEELQKSLNILTSFQKRGAEKEELKKAVCDFQGWVGVGRGELTVLLESLVEYKGVGGKVVLTHDSEP

SEQ ID NO: 968709 - protein, 37 aa, Homo sapiens
HRILFFNTPKKMTDYAKKRGWVLGPQQLLQLLLQRWG

SEQ ID NO: 968710 - protein, 119 aa, Homo sapiens
  misc_feature (99)..(99): Xaa can be any naturally occurring amino acid
EDPSAEQSRAEEERTFRKVTYRGVDLDQLLDLSYEQLMQLYSARQRWRLNGGLRWKQHSLLRRRRRAKREARPMEKREVGEDAPCGTLIILPEIGGQQXVGVYKWQDLSTQGGDSGRSL

SEQ ID NO: 968711 - protein, 100 aa, Homo sapiens
SEGPSSCDEGPEPHGNSDGIDGQQAGLIPGCSVIVSPDCHVGDSHTTSAQMPSYRSPSHSASKEHNLPQRVWTQDNGLRVREELTVSEVVRVKSPCGSQT

SEQ ID NO: 968712 - protein, 90 aa, Homo sapiens
KKEAPAMADAKVVMMHLREHDHATRNWWSSSVVVYVGKELHPGGDQARDDRARPWSESPFTYKSVKDGLPALGVAHSSGFISLKYSSGPG

SEQ ID NO: 968713 - protein, 152 aa, Homo sapiens
MKRRESFSGFVNITKYDSSWYLRNTLNRRMYHRLKGFSGGIKNRCHGWQGLQGFSLYHITTLFQGGRQIQQIGLTDAYGSEVKASTTWDFKDSISAVSGERVSPSKSRSLSPSPPSPLEKTPRGERSVNFSLRPIEIKVSAEAEEARVSLEV

SEQ ID NO: 968714 - protein, 151 aa, Homo sapiens
TPIRDYHTIPTITSTITELGLRDSSHREMRSGAALPLLSSRSTNVRRPKLTLDDSVHKADYNMQEAKKLKHKADARSEKFGKAVNNADAALSFTECGNARERDPRKAKSPYTMYSETVELLRYAMRLKNLASPWASEGAKQLAVLMLRMLI

SEQ ID NO: 968715 - protein, 113 aa, Homo sapiens
NKLLYPIGLQPVIENSGHFRITSGPRCKAMRRFHGKTFLRYPEEVLAVFTSYNLDDTQASRKKREDGNQEETMFIWQNFYQVKSGGIYNWSDSSFRRHIRWQYLILSQYLEGC

SEQ ID NO: 968716 - protein, 35 aa, Homo sapiens
GHMVGVYKGKTFNQVEIKPEMIGQYRGEFSITYKP

SEQ ID NO: 968717 - protein, 62 aa, Homo sapiens
YPFERLCALATVLAIPMSCLVTAQDTVCTARGTQQVEHCRKVSGLVISGDSIRVSIQYSASL

SEQ ID NO: 968718 - protein, 34 aa, Homo sapiens
VGVPTSRGRSSSGSQEESIKPKNLVEKDGLLTSV

SEQ ID NO: 968719 - protein, 46 aa, Homo sapiens
MGVLREKITEETSGFNGLYKAGQYYNPVTQWKAVIFEHFPSPNSHP

SEQ ID NO: 968720 - protein, 135 aa, Homo sapiens
FQGYVKFNLDEPAYNEQFLKEANMTGGVRISLMRNKTGHQRQNIKWGKSFLPLPPDYIQHISFQDYNFHHGLFRSHNLKPCEVIWRETNIKKGKLISEMRKMGSVYNTPPEHLNIPGTVQSSVRLQPIDNYGQLE

SEQ ID NO: 968721 - protein, 44 aa, Homo sapiens
SAQLTLNGSSVMVIEFRKIKPKNAKQPERNEKRVLGSGYGQRCG

SEQ ID NO: 968722 - protein, 103 aa, Homo sapiens
MGARRASGRLFSSFDQNEENKGGEDKLKLIRDFRQWFETELKLFCGDILNVLDKHLHFQQLTLASSKFFYNKMKGDYQQVFWQNFATEKRQDRRLAENSLVGL

SEQ ID NO: 968723 - protein, 193 aa, Homo sapiens
EGAVSTWAKDSYLLLGHCLLTELRAPLHLVYAIGQLKYLATLINQHACRWLQSGGFPIHDNRLAVSKCQLTEWYGSALALSIPKELKIMDYYERKENQMELAEETPDVHLDESGEIQGPQSKEMTLSQTYYIEANQRLSRWVKDTPRSQVRLDGLVLQGLYQLLEPRMIVRGRKQDFPLVRAAVQTAFPMYKM

SEQ ID NO: 968724 - protein, 82 aa, Homo sapiens
AEQYRADMIILPENGGQQWLGVYNGKTFNQVGRSSPENDRATTGGEFSITLQARYSMAGPGIRGHPLPPGFIPSQVMAQRRV

SEQ ID NO: 968725 - protein, 47 aa, Homo sapiens
MDTNGSTEFQPAAHQADTTHMASWYFSHTSEIGGGNGPGGKVGYELE

SEQ ID NO: 968726 - protein, 56 aa, Homo sapiens
MDAFEEPLSLSMLENSCSPKVQEPGPHKNMAPLLRLGKRPLNSVLGSDPGTGMAQR

SEQ ID NO: 968727 - protein, 46 aa, Homo sapiens
LLVMGDSGHVIGPFRTKGSYPSQWAKTLPWDFLPVLQHLLAKAGYR

SEQ ID NO: 968728 - protein, 56 aa, Homo sapiens
QDLENHYKKNSLWWKVLRTGDRFQYENSKRLMDWHSPSEMVKQITSISMEPGVEVE

SEQ ID NO: 968729 - protein, 82 aa, Homo sapiens
LSNTQQDSVLGEVPQLTEGDSGVYAGGGGLTTDGGKTQKVTLIVHSDYEPSGEEQPRPETPKGFLRPYWSQMPAYASSGYRA

SEQ ID NO: 968730 - protein, 40 aa, Homo sapiens
SSDASSSFNYIKSSYELSRNIELRIGRPTGWGLETRGKSR

SEQ ID NO: 968731 - protein, 76 aa, Homo sapiens
  misc_feature (1)..(1): Xaa can be any naturally occurring amino acid
XARALAAEQYLQPLTIEFIQEGHERRDATRVLAGKQKLTMKKNSGVSSDNEDDDDEEEGNNPSSLSLCLQEVYPFE

SEQ ID NO: 968732 - protein, 44 aa, Homo sapiens
WAYAGLLEQLGAAETIWESQALACSSHDGSYSPLGTDSCVGMAQ

SEQ ID NO: 968733 - protein, 47 aa, Homo sapiens
QIAASVGSLSFLSPHDVHNFKKVSYFQNANLNGQRKAKRASPVWLSA

SEQ ID NO: 968734 - protein, 35 aa, Homo sapiens
NVETDVATERNSRLLKQVHDFTFSDSCLLMNNNIA

SEQ ID NO: 968735 - protein, 48 aa, Homo sapiens
EESLIAVHLKYDGRERRRTCLYTCPPASVNVQIGDIVTVGECRPLSKT

SEQ ID NO: 968736 - protein, 39 aa, Homo sapiens
WTQADWSGTLVEMEEEAIGMALGISSMVVVGDQLHLSRL

SEQ ID NO: 968737 - protein, 135 aa, Homo sapiens
PTVATSTATAKPTTTGSQMWSRRIHQTLGGKSSHRVTRDLTSTRVEHRRTPHPTSPLSPGHPISRLLGATQTSSGHAHLMKISSSTSTVVIPGYTFTSRGMTTTLIETVYRHVSQAGLELLTSVDLPPGAPKVRE

SEQ ID NO: 968738 - protein, 34 aa, Homo sapiens
MIPNFLSTPHWQRYRDNPPFGSPRIIQELIQNFP

SEQ ID NO: 968739 - protein, 105 aa, Homo sapiens
MRQKPTGGGAWTGRGLWIHYGYFTSSISICKRSATESGRHSFRGVMNSSTNLILVNSLLRGLGATAGSRRGRTSKECLSGAHRVSYGSARCNPSWIWLRAGRPSS

SEQ ID NO: 968740 - protein, 71 aa, Homo sapiens
GTPIRDPDETDLQHSRILEYSSLTGGMYDGDLDSRKTDKNVHQLRNNILEYSGVVIWHINPKGQQAPRATT

SEQ ID NO: 968741 - protein, 33 aa, Homo sapiens
LTPIAVMVLPVRVFTKICIPPLKKGAPECKVAL

SEQ ID NO: 968742 - protein, 75 aa, Homo sapiens
PRGSRIWVSHCGRKEHTTLYNKRTVVQIFPSIKTNQTWLCFNPKVNQNREKTEPGEQSGSQTLPAGPLPGRLPTG

SEQ ID NO: 968743 - protein, 62 aa, Homo sapiens
MGIKGDTGNRMCRRKLRSLSGKSISFSLVKNLAKYTCSPPVFISSIFFLEAGVSSEFITLKN

SEQ ID NO: 968744 - protein, 34 aa, Homo sapiens
TPIERVGLQIASGQSGVTWHREALHSTGYSGVMS

SEQ ID NO: 968745 - protein, 72 aa, Homo sapiens
HQAVSWEHPGGGIRKIMDRVRGEHTCPWHLSCSLTSLPSRASLQILNRAKAELLKLVKELQCRAERPGGTEL

SEQ ID NO: 968746 - protein, 31 aa, Homo sapiens
MILCLFAYAILRSVPNKLGGVLALLLSILIL

SEQ ID NO: 968747 - protein, 37 aa, Homo sapiens
GSRVETDVSGIISQIPKLKRMRKKFLLAQVFLTLSVM

SEQ ID NO: 968748 - protein, 153 aa, Homo sapiens
AVLEDPGHWQRMSEGLSETFVLRRYICVLISYTIVVHNATLEVTLCKISDLNHVVLCMSNYLPCLVEVFPSLLHVSGNPRLPLSVTQAPSRESNPDSPSPVFTSGRHGDYHRELVVQTFEWVVAVTGDVRSGRGYLEAPKQPGPAPGRGRRGA

SEQ ID NO: 968749 - protein, 65 aa, Homo sapiens
MLLSIVARWRWAIHSAIHTMLRHSCSLSFTKAEKTPKWNWFRKANLFSFTSCSKNRSSSVLSGVV

SEQ ID NO: 968750 - protein, 89 aa, Homo sapiens
RRPRLIKKDREVSHAGASMSSASSDTGMSPSSSSPPEKVLACKNVGDTHLLVPSQKVCCHGHKSPNPELQPQKALNWIDIAQYILYTFP

SEQ ID NO: 968751 - protein, 78 aa, Homo sapiens
GVLKDKMCRHLFQLLSIERVKLYAASLRVCVLRYERMREHLTFQREMYIKKLMDIISVENPKMPYEMKEMALEAIVQL

SEQ ID NO: 968752 - protein, 57 aa, Homo sapiens
MGYEDEERTRRLWVEGSIAEKWKDRLGKKVKRWDMKLRHLGLSKSDSSNSDSTQSQK

SEQ ID NO: 968753 - protein, 71 aa, Homo sapiens
QEGQRKGEEEKVMNLIQGKLRVHWCLRDGTQRDDNVPEMGYQKGVFSCTMRGSEFEDLDSPHLKDEHKTAA

SEQ ID NO: 968754 - protein, 102 aa, Homo sapiens
CPDKALGHTPRTEAGFSSPDQSTPGCQVPLPSSLFAHLIPHAGCSSPRPSLTFSVHLDKPAVLPVRDARRSPNLEPNSGDETAGTKELVLPPPHQVNTYFIF

SEQ ID NO: 968755 - protein, 43 aa, Homo sapiens
VLGAEQLRAKEPTNAGRLSTRLSWESCGCGSINSPGNSCPGCE

SEQ ID NO: 968756 - protein, 42 aa, Homo sapiens
PLSTVGWWRQIAHRLFLGLHGASLSWMLWVLLCFSDVWRPES

SEQ ID NO: 968757 - protein, 38 aa, Homo sapiens
QLGPHKHWEVDELYGTWRKAASLKSNYNLPSASEPSAS

SEQ ID NO: 968758 - protein, 52 aa, Homo sapiens
PLYLLWLDDERDSLAAAQPDCSECTFLDMAMAVGHDSLDMLLLRSLQVLLLP

SEQ ID NO: 968759 - protein, 104 aa, Homo sapiens
LEGPPLPSAYNGLIHLQDCGRGSGCRRQEVSWWSLSGDPASVKPASSYVRTTINKNARATLSSIIHLIRNNKLPTLPAHGSHPQGQCHPAQAEACDGEEEADPP

SEQ ID NO: 968760 - protein, 47 aa, Homo sapiens
SARVSLHLTEKKNKTEETRLFNSPSYPGPMTCGYSPAPAALAHSLQP

SEQ ID NO: 968761 - protein, 81 aa, Homo sapiens
LSSSGSALSNGLNVRKCRLTSACAQQPDGLVHTCAVVVTHPQPVCLTVPGAPMCFMSPRGILSDVDRAVHCNAMCTVPVCS

SEQ ID NO: 968762 - protein, 63 aa, Homo sapiens
MHGRLWAWSQQPTAKVSVVVIKLEILASWNACHLLQCGPPLTQECSAPRYSSITTHRSSKNKY

SEQ ID NO: 968763 - protein, 69 aa, Homo sapiens
RSGQLEACHLLCAGPPSTMNALLPLLSSIRHMILQEQCTCPDLRMAAILQWPAPSCAARSLVIGEEEAG

SEQ ID NO: 968764 - protein, 34 aa, Homo sapiens
YWQACKLLLVGLQPSLLPQALQPLLLVLAPASES

SEQ ID NO: 968765 - protein, 89 aa, Homo sapiens
GPCLFVMCGILVKVCGVGRYQKVMSSSYSDSSSSDWSSLPSSAHRCAAVKRMPVPAGPCTFNICREHVAECYVEEQAGGHCQKPEAPIE

SEQ ID NO: 968766 - protein, 103 aa, Homo sapiens
SCYNGLIHSKTVLRGVGSQMEKCVCGGHKAEILASGKPATSYCGTTINKNARAKLSSIRHMIRKNKYRPDLRMAAIRMGQAILRSQKPEMVKRKRDPTHTKSS

SEQ ID NO: 968767 - protein, 47 aa, Homo sapiens
LFNTGEGAWPDANVLPDGTVWVRVFPVSPSRFSDGSLACAWLCDGID

SEQ ID NO: 968768 - protein, 136 aa, Homo sapiens
RTLITITNDKGRMSKEDIERMVQDAEKYKAEDEKQRDTAVHPRIRLHSYAFNMPQHTVEACRTLQGTALTHAGTTQQDAGQVYCNNQLACIRLSTAEKEASEHQQKAAGAKLANPIITKLYQSAGCMPGGLPGVGG

SEQ ID NO: 968769 - protein, 56 aa, Homo sapiens
RAMIEEEEEEEEAEEEEEEEDSEVQVEQPLPSIQIKRVMTYRDLDNDLMKYSAIQP

SEQ ID NO: 968770 - protein, 96 aa, Homo sapiens
PGSRLNGTVGKTTGTAYRPGPFTNSGNRHRPRQMIIADTDTATTVQQQSTQHQKSPDVWWYLDSRPDRLTEFFLSDIWGCGVSTYELRLDYNAQSA

SEQ ID NO: 968771 - protein, 95 aa, Homo sapiens
GCSRGSHSVYTTSAETTLRNKFRKWHYTRLGVSSTQTTKPMQGCMCCGKSDVFSAISLQCVQTSQNSPPKKMKAFLDKYSNSRVYYVSLFMCQLI

SEQ ID NO: 968772 - protein, 58 aa, Homo sapiens
  misc_feature (2)..(2): Xaa can be any naturally occurring amino acid
VXCKLGMRAAHRISRWVRDFRRALVSFVATNTTGLGGISCCLCFLTACACMACDAMQP

SEQ ID NO: 968773 - protein, 37 aa, Homo sapiens
NLNHRFHMYTCKLTNLTLSKKDSFYTLTKTTRKKQQL

SEQ ID NO: 968774 - protein, 49 aa, Homo sapiens
RIPIAGHAQQQTHDPRTGHGDGTGREPHCTPSVMCLMVLVLSPAHYGAQ

SEQ ID NO: 968775 - protein, 96 aa, Homo sapiens
GRPVGTAAWAVGGSSPILVPLTVSPVFHLSQLDGFACDLAKCLVNQTMIAASSPAVDLVTSPSELSFSYGDSEDLTARIYMFFFSTNGVIPVWYLN

SEQ ID NO: 968776 - protein, 44 aa, Homo sapiens
RPFQLVLMKLMRLDEKFGALTSGSKRSCAPPAAPFYPRSTTLQS

SEQ ID NO: 968777 - protein, 34 aa, Homo sapiens
THSGLVVVTLPSGAMRTLYMFRSDAPSPGMMREH

SEQ ID NO: 968778 - protein, 60 aa, Homo sapiens
LRRQEEIDDEEIERRRDMMRQEHRREKMKRWKSWQVEDEGSFVERSQNQESDDMKEYTAQ

SEQ ID NO: 968779 - protein, 47 aa, Homo sapiens
GHIITPPGKAWVSIGANDRTVPGVLLRNAPDNLFSNSLPPAVVGLPS

SEQ ID NO: 968780 - protein, 144 aa, Homo sapiens
EEEEIDDEEIERRRGMMRQDAQERKNGGDGSHVECGNMRVALRERVRIKSLMYERVHSTVEDEKWSLAYKPSLPFGREGTELTRFQETLKARSFGKREGALGAREAKNAIGLREKGAMYRTSNTMRERGLKHKAGRGGYPGSEF

SEQ ID NO: 968781 - protein, 109 aa, Homo sapiens
  misc_feature (62)..(62): Xaa can be any naturally occurring amino acid
NDPKTAWPRVVRTGEPQDASLQAPLLGFLPLCNDLQQPATMMSPLLHLSAPASTKLRGRLPXRVHHGVLPPPSPCFHGGTAPVTPSEVALAIPPQPLVSLPSSLVFGSF

SEQ ID NO: 968782 - protein, 58 aa, Homo sapiens
MKWAQRAVGFTQLLRIFEDSHLLQRRTCAFSPQFWLQLNNVTQTQSLLKQQAGGTRAR

SEQ ID NO: 968783 - protein, 81 aa, Homo sapiens
SLFSCVRGKGAGNRLRLRWLLNVGSAGEEERTLGAPGSLQKLEEAEKAADESERGMKVIENRALKDEEKMELQEIQIGYEL

SEQ ID NO: 968784 - protein, 45 aa, Homo sapiens
LGFVDHKQARRLSIWFKRVLVRRQPPTSRFLFTEEKLIQFPETKS

SEQ ID NO: 968785 - protein, 78 aa, Homo sapiens
TEWRSEIQCLWLQMLSMTGVAPEAGIAGVACLMMPSAGAYYWEGARFRLVSAGDLIGVHLSPVCKMSYPRMPVMLPVP

SEQ ID NO: 968786 - protein, 39 aa, Homo sapiens
MPVWYQDCGMLGTVCIINYSHRVFSSCCVMPLFTGGQFH

SEQ ID NO: 968787 - protein, 54 aa, Homo sapiens
DPDIIADTIADTSTDRIQHETGSDNPLGITSHTDKITFHPILHKSKTPIGLLSL

SEQ ID NO: 968788 - protein, 148 aa, Homo sapiens
TTDSSRSHTGRNKPITMTGCPCAGTLLDNRIHIKTDVSSNNSSRGCTWSSSIGYPLPGGMITCTTNSNNGSSSSLTSVNLTFRSSISSKSSDDSFRNIFSFSFTENLAKSFIDPCLSLIYLRHWFSKGLNPGDTKIILLQRYGLGAAE

SEQ ID NO: 968789 - protein, 37 aa, Homo sapiens
MVLCVARHTWFADSAQVLLSRAGGQQGQDQPQHAERS

SEQ ID NO: 968790 - protein, 48 aa, Homo sapiens
EEADMTQQDEKTLGAINNITARQYLTHPQVLRLPNPALKISGSGRPRE

SEQ ID NO: 968791 - protein, 65 aa, Homo sapiens
SIVVFDEGHIYYQPVTSQMSGDDPVPSFLVSVEYLYVKGLPDGLPFEKAIYLRAFLAWDTVVITM

SEQ ID NO: 968792 - protein, 33 aa, Homo sapiens
VQHVAKIAEIEAEMARTQKNKATAHHLGLLKAR

SEQ ID NO: 968793 - protein, 56 aa, Homo sapiens
AETTNNTPPNTNELTAAPSQSWQANANNPVNHYQKKTLTLYTKLTYKISLNDDIHR

SEQ ID NO: 968794 - protein, 48 aa, Homo sapiens
GGAGPTKTITAGPDQTEMTIEGVQAQRGVWWLGLCSESKRRESASGSD

SEQ ID NO: 968795 - protein, 97 aa, Homo sapiens
RGRRGGIPGPCKHAHHCHKLPHQCLVCSAFLDEANMSSKLQQARSCGMMTMEGHLCVPGSADWLQRAHEICGEPRVKAPFGKCGRSAMDHCHEWKSQ

SEQ ID NO: 968796 - protein, 79 aa, Homo sapiens
DDRTVCREIRHNSTGCLWMNGPVCQCAWEILSCGLFHQATPPRLELAAWSSHGIPPGSAEMVDHGKYKLSLLNVTTMWE

SEQ ID NO: 968797 - protein, 178 aa, Homo sapiens
QGVMWNSRYYHPYTYSHLLLLVSPAALLGVLSLRQHGFTLCVERVVAPSMPPRKDLPDSQQQHQSSKKGKLSEQLQHSNGIYEGVTLYEAMLPMLGLSIHQWMLLHLDCMTTMTSFSTPWTSAHVKRKMENRDYLWMHRSIAADVRLMYSNCYKYNPPDHDVVAMAESYQDVFEIRYA

SEQ ID NO: 968798 - protein, 50 aa, Homo sapiens
RVIKQHRHRDVERAYSYPFQVLHVRPKPGQGMHKSLTDVALEHHEECDYV

SEQ ID NO: 968799 - protein, 70 aa, Homo sapiens
SISWLEAPSRGMGEDESSSHQQYLKEQESYDNRLLMGDERVKNGLNFMYEAPPGAKKENKEKEETDGSKT

SEQ ID NO: 968800 - protein, 44 aa, Homo sapiens
VPQSSPISVMLQGYTVFPLCHYLFQETVMFLLLRKSMSLMGRRC

SEQ ID NO: 968801 - protein, 183 aa, Homo sapiens
RSSQAILQQEGMSAIQPIAADLEDIPRQDKKGLLGKSYFLARSERDSKNDLTSQLQLTKPQSLLGKVICPLAGFPPELWPSGHVEIHLIFLLIVFSVYNITDCQTSSALLYQYLLAVRLKSFWTGTAKIRELYTAACGLYVCWLTIRAVTVMVAWMPQARRVIFQKVKEWSLMIMKTLIVAVL

SEQ ID NO: 968802 - protein, 149 aa, Homo sapiens
SRILEKDKRSQQMRMQLVEGEAADAIPERGVQGADQAAMLGGAPDSDQADGRGDLKYCTRQAPEIPWEEQLSRAARQDAPGNLSLDVEQAPLGQHSSVPSSQVSSRGSWPSSSAACSLTSLPLAQHLLVVHHGQRQKRKLLTLDMYTAV

SEQ ID NO: 968803 - protein, 55 aa, Homo sapiens
MTASLMAPCPLEAFSDFHQMSASLQLCVGPGSSACRKMNDHDLNMAGAPLLDSPM

SEQ ID NO: 968804 - protein, 145 aa, Homo sapiens
PYSRRGEWQRLLRIVAGGGDCNVTYACRRLHLMHAEVSGNLYGMCKVSVCMCVQAMNRICVLGLGPAGLCGTSRPPICGPIYISVQPPSLHVLEQRLRAAQTLKPRKSLVKRLAALPQADMESSKEPGLYDVVIIKRQPGTRPYA

SEQ ID NO: 968805 - protein, 88 aa, Homo sapiens
RGLLLVFRIGIDLVVEILCFVVWMCVVWALKLDENPRPDIEAPKQHTSSETCKRTAHPEIFNIESVQTEETDGPTHSLCKLWGWRSSR

SEQ ID NO: 968806 - protein, 70 aa, Homo sapiens
SSGLQHTQSNCTIKSTTWSKKVFGVPCRDAVVNESDYGTMRLRFRSLALTSGLTIRRCLSCGVGSRRGSD

SEQ ID NO: 968807 - protein, 99 aa, Homo sapiens
ARYSDKITEVGGTTFCQTKAECTSYEGIKSKVEASKGAALQAQNSAKTLERLCETAEHDCQRSALPKPLEVPFVTAGAPAAAGERRDLKAASCHLTEYR

SEQ ID NO: 968808 - protein, 114 aa, Homo sapiens
  misc_feature (90)..(90): Xaa can be any naturally occurring amino acid
ASSDPAEQYLYVADLSWKDKRVLREMYQIYFWNIATIAVFYALPVVQLEITYQTVVNVTGNQDICYYNFLCAHPLGNLSAFNNILSNLGXILLGLLFLLIILQREINHNRALLR

SEQ ID NO: 968809 - protein, 51 aa, Homo sapiens
LPRIVAQLTPPSSVKNSVRPEPCCCSPAGSLGSYSYLESPLGQHLLRDQRM

SEQ ID NO: 968810 - protein, 33 aa, Homo sapiens
PRGYAGVKREVVSPSSRLLASGSILQEDEAYTL

SEQ ID NO: 968811 - protein, 33 aa, Homo sapiens
MSVQPFRLAAWDVHDSCDNRLADVASCRVLCTQ

SEQ ID NO: 968812 - protein, 73 aa, Homo sapiens
HCDTEEGGEIGPFTTTEKALYMSSAWQRGAAGQQGAEAGPICRGYRSVQAGEEKVDLGARSPQGMMCGLVVPP

SEQ ID NO: 968813 - protein, 60 aa, Homo sapiens
MRGTCRGVPCVGTPMFVVKAYLPVNEFFGFTLTEANTGGRVPQCVFDHWQILPLETPLNS

SEQ ID NO: 968814 - protein, 88 aa, Homo sapiens
RTKPPHTVRTRCDSELQREGVSHIQAHSQSPGASLISKYTLRELHLSFCHKGFLEGPRLLGGPTPYLAGPPYPGYKLREYRGSEYRNT

SEQ ID NO: 968815 - protein, 71 aa, Homo sapiens
SVTLPLSCTLRRTGKQEAGCPQCRGGELLRRKLAPHNESTSCSSARLSQVSALGGEQCALADSACSRLNSG

SEQ ID NO: 968816 - protein, 80 aa, Homo sapiens
AEKGKNERTTTNLTCSHKVNRSSVPSYLLAFSVNHFFVKVYTQQSLLICEHIDWRSEVLINSTHAYLPSVRAPVTPLCIP

SEQ ID NO: 968817 - protein, 71 aa, Homo sapiens
WRPQYTELFRIHRTEHAQDHLEDHDHSEHDGGPAYEVQLPGDEDIDLLDGSPPMKRYARCGFLYTGIPELE

SEQ ID NO: 968818 - protein, 38 aa, Homo sapiens
IISCRVFSNLVPFSLSLSGIPCLLSTPTLFGFTDWFFI

SEQ ID NO: 968819 - protein, 34 aa, Homo sapiens
MKLVESPAIPRIPCPMPETVVIRSEEQEQHHEFA

SEQ ID NO: 968820 - protein, 76 aa, Homo sapiens
  misc_feature (75)..(75): Xaa can be any naturally occurring amino acid
KCVAWGRCIMAVPLRALRAGSAYIQVATHRLGILGEEAMDWWSTEVHYTLEKNCESRHYVDTAQSCATVQNMTHXV

SEQ ID NO: 968821 - protein, 113 aa, Homo sapiens
  misc_feature (104)..(104): Xaa can be any naturally occurring amino acid
  misc_feature (106)..(106): Xaa can be any naturally occurring amino acid
CVSVCGGGEALDHFLSSSYRTAEGAPHAPQDVGPRTLEEGLAPLISDRSSVQLVVRCPVYMTVSSCCARDCIIMLPPHRCEAGRTPRLATDRHGSARSSTLTTXTXYDHDVIP

SEQ ID NO: 968822 - protein, 91 aa, Homo sapiens
RYQSTVTEKPIMSNKHYIMYLMALLNAVHTYGIFDLWRYKYDICRNHAWDSWYNIDIIYKHWPLLTDRKLNTTFFDPAGGGDPILYHHHEL

SEQ ID NO: 968823 - protein, 104 aa, Homo sapiens
VCRAGIVVVVDPWPAEIDSLWEISNADRMAIRFVLWVTGPPGLCRVCSCHVSAWSSEERDAAGEPKQHHGPGMAASLAHLHDDDRIPGWGLLLMSDPARTCNAL

SEQ ID NO: 968824 - protein, 71 aa, Homo sapiens
VCTAPWLIWLLMAVPLSPGGSSWRTCELDAVVMAATKGEAAAAGEFLAPPRRIPVHHDDEFQRLTTNSLRC

SEQ ID NO: 968825 - protein, 93 aa, Homo sapiens
TYQVVSVTGALVNQDDGDQHQHLMPRCPVKGQRAAVWLRTRSVDDGRGRSPWSMVPLHRVLAGGRPPVFRFSSVELMSRPPARRNSVTTDDRI

SEQ ID NO: 968826 - protein, 39 aa, Homo sapiens
GQGYGCMVEGFYWRGAQSMRGISTLSIPIEHGIVTNWDD

SEQ ID NO: 968827 - protein, 87 aa, Homo sapiens
LNWGAVWTQRDQEDYESAAVTRPTRKQTSFWICFSLVSPGSFENVRAKRYPEVRHHCPHTPILLVGTKLDLRDEHDEEFRQTTTNSP

SEQ ID NO: 968828 - protein, 49 aa, Homo sapiens
LGNLCWCGIVLVLEIIFIIVVALDEELLFWKEVSSSKATTMSENDFKHQ

SEQ ID NO: 968829 - protein, 44 aa, Homo sapiens
ADLLRATAYAGKRAHQAVGGCASARTTEPNMVATGGVGAGDGDP

SEQ ID NO: 968830 - protein, 48 aa, Homo sapiens
MEAVAGCEALNGQSDFPYLRRFPYQPSASFIHDPEKCVFRGLRCCCCT

SEQ ID NO: 968831 - protein, 97 aa, Homo sapiens
TLQLVHERWLWQRPLLRHHSAYEGIIYVLGSSILYAEELQTPTQDIDSLTVTPMQTRPQPISETGKCRSGGFAGKCFRLYTAWDYQHELEENTVPAI

SEQ ID NO: 968832 - protein, 71 aa, Homo sapiens
EKTSTICGSHGGYPHFCLRTFLSGVTEVVVKLFDSDPITVTVPVDRLQRRTLKYIGDRGETKRCSEYAQQS

SEQ ID NO: 968833 - protein, 40 aa, Homo sapiens
MDIYQWARAQTVFTGFATDPVSYSRRLIILVTCRWKLLLG

SEQ ID NO: 968834 - protein, 88 aa, Homo sapiens
SADLCHNTLEATSVPAVQAMSFRKTGIPARLSAAASCTLEASGVYLQPWSTRRSYAHLSVRCNYCIRVERGLTLHLRFLEPFVLDHQQ

SEQ ID NO: 968835 - protein, 53 aa, Homo sapiens
MAGKLSIEMSFRFPPCTVGGFLPFSAISRGAVYYICATVWGREQYTWYGILFF

SEQ ID NO: 968836 - protein, 81 aa, Homo sapiens
ESTTAKKITPEGYVLRDETAKERENALATALLFRTAGFHLACVDYSIYYRTSSFPIASWKTVHQYRRAQQKIRAISEFREF

SEQ ID NO: 968837 - protein, 51 aa, Homo sapiens
MSSASPHDCMEASCLTVPSSVELYYIFATVWVSGAVHFVRHPLLFINTRNF

SEQ ID NO: 968838 - protein, 54 aa, Homo sapiens
GSTVRLSVFPDVNLSEWNEEPTLSTFFTELNDCSCLASQRHPDWVYCSKEKAPT

SEQ ID NO: 968839 - protein, 63 aa, Homo sapiens
MVIMVNKERKMGQADKKNETLKGIRSAEKKTPDDKVRILPPCKEPSSLPNPALTPLLMALAEA

SEQ ID NO: 968840 - protein, 36 aa, Homo sapiens
VVVEAAPVCLVALAAEATVFPVAPAVGPWSRKSRLS

SEQ ID NO: 968841 - protein, 47 aa, Homo sapiens
LCAFDALGLPNCSPLLQPVLRLSPSVEPSSTVVSLAVVWMFSHAIGD

SEQ ID NO: 968842 - protein, 145 aa, Homo sapiens
MWSEHLSAHAMERLSTSRLPNTLPSVPTTTVCIPVIVEFINEILNIRTKGRTWYILSLTLCRFLAWNYFAHLRLEVLQLTRHPENWTLQARWRLVGLPVHLLFLRFYKRDKDEHYRTYDAYSTFYLNSSGLICRHRLDKLMPSHS

SEQ ID NO: 968843 - protein, 107 aa, Homo sapiens
MRLAEEEHLVASLMKEEGGLLVWTSDENGQRLLRMVLAGDQVFVGKMVSTMYSLKFLGISPLMSTSTRVSLGWNRVDENWTRVREDKLSMICLKRGCMLHKKAEKRR

SEQ ID NO: 968844 - protein, 65 aa, Homo sapiens
LSPSSSYSAIISKYYHRPFGFHYSYQHEVYEICGAVFPDYDVSCGSVENHLVEDINYLTHKFIIF

SEQ ID NO: 968845 - protein, 39 aa, Homo sapiens
LDSLERGSWGVGTVISFLLSSPFSAAFPILRRLLDVEHV

SEQ ID NO: 968846 - protein, 142 aa, Homo sapiens
MLDTIAGCCLMRIRHVSVNSSTSKTLIIYFFFGSKIPWKSWVSVSEKLRDFSFFFLLDSEVFLLAALVSSSSRQYLTRSRKSRKEAGLGTTKEEITRDAEGRDEMDHAERELARRPDPRVRGPERYTATKKKIWSSLWGAPL

SEQ ID NO: 968847 - protein, 94 aa, Homo sapiens
RIKVDILFPQSGNPDPNCVTVTGAPRECGGSHLTTSSSGVRNTYADVMDSEAAAVYTWNPQHTKRPMAPSRGFVVRDAPWTASSSEKDPDMSML

SEQ ID NO: 968848 - protein, 148 aa, Homo sapiens
MIFTVGIDVDTRAYFTSDYHEIIVYPTPDVKRIYADSPHIHVKQYDHDTAARALEPSGFIYSCSPVEWPALDIVYSNTHHYEHRYYTDTYYSCTLTYHYVLLNSELYLPSEEASFTDFPYFSGYTLDQTYAKIHFTIIFIGVNLTFFP

SEQ ID NO: 968849 - protein, 74 aa, Homo sapiens
MPEPTFLHKAHQHPVFPHTSYDRNRSAYSFNQVARAVRLTGNITAGQPYSCTVIGSATLCSINALTCTLYTIRR

SEQ ID NO: 968850 - protein, 210 aa, Homo sapiens
MVDQIELAPQDRDRNPASCGRKHRVCYFYPWSYLDGAEGRLDIEAPENKGCQLMDTATLKRNSGACLWVAVKRLILCYEIQRTKPFHREFTEIVWSRQLQGLAVLMGQALCRLPFWVLAAEHRRRRGSLKTVVNPNDPSLAFLSRLSFDALCAVELESEEYLLCFRLVGLYVDPQGRRARAQELMWPAAPVACSMYMFSVAYPCCCFPTD

SEQ ID NO: 968851 - protein, 198 aa, Homo sapiens
MCTSILWSVSYDGAGRSALTSMLPGNQMAASIMATATLNEVHSGTMPVLWPVKLADPFAMMIQMNEAIHRKFNEIVAPGSVQCLAVLRDRLCVGYSSGFCLLSIQGDGQPLKLVNPNDPSLRSSHNSLLMPFVLVELESEEYLLCVQPHGTVRGPRNAGGHARRSSCGLRLLSPEYVYVYCGISLLLIYHTKTGVDGI

SEQ ID NO: 968852 - protein, 78 aa, Homo sapiens
MAMQPTVYASNGHVAARYPFITYATGHTILPELHKNAMRATMESQLRRSYNVPDVVIQPSPTNAVDLDHTGSQTVMKE

SEQ ID NO: 968853 - protein, 154 aa, Homo sapiens
MTYGRIIMSSTLTNYRLMRRGGDLATRLYEHKYGAAPRVRLSGHVAARCPIIAMPLDYILADLRTNAMRATMDSHLDAPYNVPDVVITQSPSNDVDLIIRISERECRIPHEDLERVCGLPFHYCVRASTQDPRLRPIFGRLDIIVGAPVRDLDG

SEQ ID NO: 968854 - protein, 31 aa, Homo sapiens
MPIKKGLSYMQLPGDSVANMRIQAYEVRDLI

SEQ ID NO: 968855 - protein, 71 aa, Homo sapiens
MRTFSARPIIDELFQAGLTRSPELHYCLELPTGASLLLSKSRIRPQLDAPSLLYEAHNFHAMCQPFLEMIH

SEQ ID NO: 968856 - protein, 31 aa, Homo sapiens
MRQQLMEKFKKKFISCYDRGQFPSGGLYLMT

SEQ ID NO: 968857 - protein, 33 aa, Homo sapiens
MYLLGGLGPAPRSPNRNFNAGLEVKDLWDRKEL

SEQ ID NO: 968858 - protein, 71 aa, Homo sapiens
TRGPIEMCSARGVSKTPESTLHIRAREDEGLRARSGVAGPRRTVLDKCQEVISWLDANTLAEKDEFEHILN

SEQ ID NO: 968859 - protein, 62 aa, Homo sapiens
MRTVRRGELDHTLNILTENAFVTRDCGSSAVALVRNCRLCACSARSGACWQSLNGMGLVAVR

SEQ ID NO: 968860 - protein, 88 aa, Homo sapiens
  misc_feature (52)..(52): Xaa can be any naturally occurring amino acid
RAGRGTMSLRTPGPQCDHTHADAWSWFPLLNRNTIPMVSSTLGRWAVGHVCXPVTSESRALWACLSAVLEALSDAEETLRGPAAMDYH

SEQ ID NO: 968861 - protein, 45 aa, Homo sapiens
MISREVSITTSWTGTSPAGGGGPYQGNARALFILPSEGKMQQVKW

SEQ ID NO: 968862 - protein, 72 aa, Homo sapiens
DDEEDKEDDMRNMSRQARTSLYDDACLQWLDCRPERSCRRAVPRHIMSFVTLNIFAFFSRLVRIWGGFWFCS

SEQ ID NO: 968863 - protein, 96 aa, Homo sapiens
MRGGVICEEECSLTRRIARRFEAAWIGILGIDDRMFIVPGFIQPADSTLHHEDIESLLLFSHAFFPAMANLSGFSKHLLVQVDVVTMSFMVAEETI

SEQ ID NO: 968864 - protein, 63 aa, Homo sapiens
EDPRLVCSLAPAVPSATWLRCMISWLVMSLFWGHRPPRLPEGQDLPLQTLLVKRQHTEAMQGP

SEQ ID NO: 968865 - protein, 36 aa, Homo sapiens
SGSCTLWGSSGQAVSWRCRPRARVSTSSTLSFIVSV

SEQ ID NO: 968866 - protein, 152 aa, Homo sapiens
IEGLSCSGFCSSWRVFCHSGHCLQCSDCPTPVADCPTAVNCSSYFDACLITKAGLHSCMTSVGHFEHCNFNDVTIRLRSNELSYYCCKKDLCYFNDQSSSWWDILIREDSSSGGDSFSGSSLEPSSLCRHQESFSQTPRSCVFRFLLLPHSI

SEQ ID NO: 968867 - protein, 141 aa, Homo sapiens
MIGVPGRGLPGSHRRERPDAFDIIPGFQFLAEHSSFVGLLVPFHFIFDYQRQCTNSSISIPYIVPVLCGLRQPGQNMMVYSFLGCVHSIDCPRRPGFGLVQTFGLHCHMFPHKHPGQSGESHHLELWEFEPQLCQYPKTQR

SEQ ID NO: 968868 - protein, 128 aa, Homo sapiens
MRSGAGWFSFVEKTEEDGKSTTTEYAVLSEGRDQALACLTELILTNNSLVEVGDLDPLASLKSRTYLSILRNPVTNKKHYGWSVIYKVPQVIVLDFQKVILKERQEAEKMFKGKRGAQLCKGYCQGQM

SEQ ID NO: 968869 - protein, 118 aa, Homo sapiens
HRQLTFERHRSAKGFLCPLSSPVAQCSFLGCSLAVGDAEAALRCTCVTDQCKCSLSFPPNVLRWLGKSSTLSHCLRVSTLNNIKFLSARKSNERLTIGYTWSFQGWSAQSLLMSEFRR

SEQ ID NO: 968870 - protein, 40 aa, Homo sapiens
PNPRYSSPPGPAALAICVWALDDIESRNRLQLIQGCLLMC

SEQ ID NO: 968871 - protein, 33 aa, Homo sapiens
GDNALGSGADQDLSHPRITHRDTHSKQQPGKRT

SEQ ID NO: 968872 - protein, 58 aa, Homo sapiens
NCHEEDAVGPILHRQNKTNSILFYSRVLIPVDAISLSLHLEDVHLRDVLVKLLAGNNK

SEQ ID NO: 968873 - protein, 101 aa, Homo sapiens
LEDPDVDMSGSNSVYWISRYLFSVGLYEFPLNNVDKSSTWNHFLAKHVIFSSQPDSAVGVNERNGTLRGKTGLLNTENEDMHGSRPHESYHPVRPGNNANN

SEQ ID NO: 968874 - protein, 52 aa, Homo sapiens
LVSSLDLWSLELWYAADDMEKEELRVEQGESYSKAELERQMPRDTESHRLVK

SEQ ID NO: 968875 - protein, 54 aa, Homo sapiens
LENQSFARGPRRSAPPSALPSADFNQLAELDRQIYRASCVASNPYTWFTMEGPR

SEQ ID NO: 968876 - protein, 83 aa, Homo sapiens
GGERSTMIDKNCGGGEKSGAGSDVLLLGAGESRKSTIVKQIKIIHENSYSEKECRQYRAGESTCNTIQSIMDHCQSHGEPAES

SEQ ID NO: 968877 - protein, 65 aa, Homo sapiens
MLLRCGSALSTAHEVSPCSRLIALLVFFLLLRDPSAADETNTGPTVTVTVSFDLRVEDEDIGRVI

SEQ ID NO: 968878 - protein, 102 aa, Homo sapiens
MTTLVWGVLPSGPCPRVQLYAHELPVDAGDEALGQAVGPVAAHDIGLHLGAVRGNSHQYTMNSDRLHHFQTSTLLIMSAKACPHRGRLSNMPISLQPTALGH

SEQ ID NO: 968879 - protein, 68 aa, Homo sapiens
MLLYSLCRRVLEEPGTGAQLREGSSILGLYSDDALTLWTKALSVPGLNLELIEAVLTRIHILGVPSSK

SEQ ID NO: 968880 - protein, 72 aa, Homo sapiens
ADSRFLSARASEESWGPMTLCALVLQVSDFRLAVCWPVPGLEAERVVELSCCHVIPPPSILPLVIWIGVSNQ

SEQ ID NO: 968881 - protein, 56 aa, Homo sapiens
REFQADQDDGGEGTRYSSSLSIDVAGNLDYKEHSYVISSRGGEGGDDDPAWVNKPV

SEQ ID NO: 968882 - protein, 33 aa, Homo sapiens
RQKYIQMDSILSTTVSDLRSISLKFQTTTYCSR

SEQ ID NO: 968883 - protein, 54 aa, Homo sapiens
ARPPDSSSSYRITRQIAPPTKTACTSRLIPGSRRRGYTELTRQIAPPTKNGHAP

SEQ ID NO: 968884 - protein, 47 aa, Homo sapiens
  misc_feature (17)..(17): Xaa can be any naturally occurring amino acid
GLVGGAICLINSYHDDXIRPDTEVIVASKSEEHQGHSNSSPRHSEAT

SEQ ID NO: 968885 - protein, 71 aa, Homo sapiens
MKWLIYVSQSAICTGQSGRLYFLVSSSLDKVLMISSFLCLEAAFTALACFLGLRPASLSVVSQELLAGLIC

SEQ ID NO: 968886 - protein, 42 aa, Homo sapiens
MALDYSAEAVGLRPRKHASAEERLQAKKEEIIKTLYQGDPSR

SEQ ID NO: 968887 - protein, 34 aa, Homo sapiens
PVLIMYVAGFLEGYLTAPHINYHYTNLYPQLIMK

SEQ ID NO: 968888 - protein, 182 aa, Homo sapiens
MLEKLYCICKAQGDSYDLEDFVNLSAASRFGVTASDRPYDRKWCHMCLLIEDQDAQGYELFFKTRELKKKWMEQFEMAISNIYPENATANGHDFQMFSFEETTSCKACQMLLRGTFYQGYRCHRCRASAHKECLGRVPPCGRHGQDFPGTMKKDKLHRRALDKKRNELGLPKMEVFQEYYGL

SEQ ID NO: 968889 - protein, 105 aa, Homo sapiens
MADGKAAGRMKPEKYAASWMPSEYLMKKQKNLWNNIDGLSSSEMEEVIVPVAAHEKQISVKKKLAETPQNMSLHRISKSDLALGSQTDERKRSAISINTCTPSHA

SEQ ID NO: 968890 - protein, 69 aa, Homo sapiens
AKVVREIGGRAGSHGSGAMSGCDAREGDCVPGDAGRKTRSIEDTCSENCAKSYSSFEAGSLGTGGGMKS

SEQ ID NO: 968891 - protein, 275 aa, Homo sapiens
  misc_feature (168)..(168): Xaa can be any naturally occurring amino acid
MGVSMGTLCISVPDIGYLVLDAPLSTKRDFSQIWRSTNNLVDAPFIRVTGVRVDTTLGTSGWVNASAYLVFPCTSQYRATPGRLTTAREHKNFVVLLGHHTSRKEAWVRQPRSWPKQMCQKRGLVPPLVAGSFNPLGPPLTRAIIAPRGRARHSILIEWTTYLPAVHXNLLRIWMLSSVAPHEILVRPHTEYKNGNPSSRSPPVFPLRDLSFRGHLCCFFPYAANLFKDVPHIQLSARMSPHSIHAAADTRHICNCTAIGGWDHRPPPYAPISPT

SEQ ID NO: 968892 - protein, 436 aa, Homo sapiens
LISFIISSIPLHSFYSHHILIPSSHHHDIIHIPSSFIFISILFSSSSSFHYYHFTIHIHSYSTSSSSSPSSPHHSVYQRYSTTINQSGHYHATRQKQSDNTRQSHETRPPNQHTTQQAQHKQCRKEPKTKTPKTKQTKKTRKTHNKHKRAYEPSQEEGAKHRTPNTTSERHTRTQKNKNHASMKTTQTQTDYRPDHKQPERHTNRGAPRDTQHDKTQTETQMEYDRQRNTGRQRARHDRGSRAREEHADHRRHRSRKTQAYTEHVTETRNARPSERKQDNTAGTKATTQASSKETTGARKTRAEDGKRRRDDKKANIRRRRQDRKARRRTDKRPGDKQHERANERRRNRAAKREEAQAQGEEQRKIAGREEQTAADSEEEGDKRLNGHNNRVEEKKKTAEKQKREQQQKKKNKTKKEEQGREQTQTNKRGSLPEAN

SEQ ID NO: 968893 - protein, 58 aa, Homo sapiens
MALLVRWFLCSVVHHRVLAQEDGLGRRSRSHFWFVTLEVKTHCSPEHVSSSQHFSEYQ

SEQ ID NO: 968894 - protein, 300 aa, Homo sapiens
RLVTSMVQISTPNLKNGVTDLLSLKPIVAERRGHLAGTLFLMILTLRPRQERCFASVHELCQGCSFLLTFPWLNKQLCMTHSPPRTKLWQQLRKRTRYVAIYTCCYDRGHQRFGPLHSSDPAIDKYSVTVSDPLHCPAWRSYMHSHPPETFQQNACPTAQSYAHPTATWVTARTHGRHGLRPGQPAHGHHDVLHHHATCSEHLAPRRCPETPLPLRYFFHSCHTNHRCATHDNPGKRMLLPVEAHGFHIVLHESTLTLKYTPFIYSIPICHPPATALHHQGQREPPTPFCAYGLIPTLYA

SEQ ID NO: 968895 - protein, 119 aa, Homo sapiens
PLPYSPNNVYQLSVWVGKPPTSNPLLPCIQGPLVPAYSFTNSTNEHSISPLGSDSGTSRHRQSSQSVPYSLPIQPQGTSSTQYSALGCTYSHRPAQHTSLGKAYIGSTVRSASSPHYHP

SEQ ID NO: 968896 - protein, 142 aa, Homo sapiens
SYLNAVQMETGSRMGNAVVPEQYDYVGRVLNQEKNHQSIQYGGKIATGITNISRIELRKQIKVRGLQNCKSYSLYTDCPAVLGLIQLLRKTFSRCVQDESQSHYEDVLVTETLLYAATRSVVAVVVDVKWGFIILEKKETGY

SEQ ID NO: 968897 - protein, 79 aa, Homo sapiens
GSPKLTRFRMIGWQLCSENLPSKIKLPCVDPGYPAPYFPGCTIQDFRKQVNYQVDGGFHREFPKFFTFRARDKFEEDRI

SEQ ID NO: 968898 - protein, 89 aa, Homo sapiens
AKTCTYTVLSGGHTMYPGIADRMQKEITVPWHHSTMKIKIIAPPERKYSDVDRAAPSIGLSSPPFQTACGSSTAETYDRRPAPSIRPRS

SEQ ID NO: 968899 - protein, 124 aa, Homo sapiens
RRGHPPGVTQNRGKPGAPENPGEKSRAIGRPKKGKTLRRNPPPLPGKRSDPPNEMSGLLQPIKANYGKPSASNTSWPILYAFAHKLRKEDKGCLFVVISNNTVLEVLPELISRDNKDIQIAQKP

SEQ ID NO: 968900 - protein, 103 aa, Homo sapiens
CRPQARRLHYNVVANRFVEFRCGSRLLAYTEFRKRGGAYVTEKRKRSDYKWDQMFASEGVESTLYRARPTDQSAGHTGVILIEALSRWWLLRSKRLPMNHGTT

SEQ ID NO: 968901 - protein, 297 aa, Homo sapiens
RPPPAPKNLVGLDFHIPRISPLVYTPARSINVSPPPLHGVRDEGNRLAVALRCNIISSLRADVSRDTFRCPTPTYCCWCGDITPCRIPARHHHLSAHSIFSRISSRAAITRAPTQYRSRARGVLLPPPTLSRLGGALLSSIFCPNLRGDRSVSSPHRRPPLVLLPPPRGGELPLPTACLLWVGVPDRGGSVAPRRSYCPLGAHLCRSPLSSLSSGSSCLQSPPLFCIWVDTPREFTPRPSFLHKVRALTSLFYFLSGRLGWRGLLWPPLLASAGLSRACAYLSPARHSPLWAPPRPQ

SEQ ID NO: 968902 - protein, 133 aa, Homo sapiens
NSIGRDACTLVSGQLQPSQCNTPTKGKITTMRIAMICYLSPRASPGAISVYTGWFWEVLIDNRRAIYNKNTQMTVAHMAEACSHLRRQNLLVPDRMVMSSEETSELKRQETLPCKSNDKAVKHMVDMDDLRSE

SEQ ID NO: 968903 - protein, 274 aa, Homo sapiens
  misc_feature (125)..(125): Xaa can be any naturally occurring amino acid
LVCVWTHLVSSVARRDLLMSARPPTCVGARVCAPPWGVFPPSVKMVRPAHCVFPPAPPPAGGSFSRLVPPPREGTIFRSRGAIDEFHCERQSAQFLEASSEVACRILLVPSAWLTQTTGFSPSSXCWHHPGGLHWGVTHQTVHFSPSGPAQPVSRPLRLGCSHPPGGDSLRLLMLLRLFIRGRIPSAMPVTPPPSLRIHSSCDAYILYTRGSHHSFVWRPPSRTFLPTLCVSSMPPHSAPFIYLPRDPLSTPHYFFHPPLHINPLFLIPPKFIS

SEQ ID NO: 968904 - protein, 56 aa, Homo sapiens
MHETLVRKCSDVILPDCGAIKKHESSKSDVTVEVCESWVKEVTKLIDNNKTEKEIL

SEQ ID NO: 968905 - protein, 170 aa, Homo sapiens
SSLFVRVCDVVNFQDLNCACRSEEGKLFGGEGSTYKTDEQAGRRALQQVSDLSLRWSCQGSGDSVVQGAVSSTSASQEHASVAMRAMKREQSLDGRADPCGLMAGHSLARGTRGGGLWPMGVVDMDTLVVVGTMVMGVAGIYDQSNLVGYGYGYGSVPETIMEVELEGGI

SEQ ID NO: 968906 - protein, 120 aa, Homo sapiens
ALPTASCELRPGCGVMMQPDDCLLWSSLPAFGTRFLNLSGAGALQASLRAEQSLASIERALSYQVWKVVRLTTEDLLLSNFDDGSFSDNLYPEDIVSQDCLQFGPPAEGEVVQVRWTGRA

SEQ ID NO: 968907 - protein, 139 aa, Homo sapiens
MCLCHTSLAACEAAVGLALLVSISNTYGLDYVHNPKPTPMLKLIVPTNYITTTEMTFQKTHNGINTSTRQPELLASSLYYFLTESTTTYVAVPQAFLRPPNNAAPNINYLRSYPHNQWQPTPLYPVNHYQRKKFYALLY

SEQ ID NO: 968908 - protein, 102 aa, Homo sapiens
MRNKQLQTRCLRAVTLTAKVCSFTPEASETTNPSGGRTIQTRRLKSCNTHREGPSFTPEPARPRTHQKEETPDTSKHQKEQTPDTPPLRTVTLTAKVHGFIL

SEQ ID NO: 968909 - protein, 240 aa, Homo sapiens
MPVGWGVHQGAAQRGPSLLTRGTESVRRFALLAKRAKYVGVSLWPGDFASPFLILRDEKPDALETNSCEPPTHRRWTPPMCLSHRRRFITRGISITRVLSRNEQRLFGSAVPAVSPHLRWFLPAPSLGGDRHGRIRITEGHARQLRTTLPRPPQGWENPSLPARGSRLIYFAAGSCEGLHDQIAASEVTTMSQEGGRIHRRSITMLNPRDNEEGPHRGERGATPVHTPPAGDQQGPSPTK

SEQ ID NO: 968910 - protein, 244 aa, Homo sapiens
MDYCMSRVTNVQAASPNASRSGMGTGSHKKESTAINSPRRSNALTCMRVYAEIKGGEMAWGTRILEVENDESNNSRMHMIISPLGIGDLLHFALISSLQGNYESPVHQFLEGVDSPRGVPPGGDTGTSSDYGITFFTYMRIRTNYLPQSNRPLGVLADAERRYSMWGQAVGQQRRRPHRMTDEQYCEHAPKGYGICGASGIKEIPNEGGKGLQNGERAKERQMDRKRGRKRTEEHTKNRIYTKQ

SEQ ID NO: 968911 - protein, 177 aa, Homo sapiens
MVRSMIEGAPLQNSNEAWSLFDRDGDGIITTEEEGTCNEISWAESSQETELQDMINEVDADGHGTIEFPWIADNDGKKNERQDSDEDIREAIRVLIRSGLGIVKGCKNFASVMTKAWVEKCNRVTVSDENDQGSRYDGDGQVDYEEFVTNDECIVKTLCSMVLNFLFNSVLPCFGCN

SEQ ID NO: 968912 - protein, 285 aa, Homo sapiens
PGLLRLVTPLSLKPALGARAPPPQRPEVRCQKSSPHALSPHRTRPPRAMAAPGSARRVLLLLLLLLLLRPHALCVKAMFMVKNENGTACIMANFSAAFSVNYETKSGPKKMNFDLPSDATVVLNRSSCGKKNTFEPSLVIAFGRGHKLTLNFTRNATRYSVQLMSFVYNLSDTHLFPNASSKEIKTVESITEIWADIDKKYRCVSGTQVHMNNVPVTLHDATIQAYLSNSSFSRGETRCEQDRPPPNTAPPVPPSPSASAVPKSPSVDKYNVSGTNGTCLLASMG

SEQ ID NO: 968913 - protein, 201 aa, Homo sapiens
AKEVCLRGVYARVPLGPRGISENGCYFGHKWGGDKLTEGFPLEPSHVAPPQGANCVCPKVDVPLLWFDTISSKGLASFSVGLQWIPPLVDTLTRDMPPTRGEPPPVRSGQCGRWINTPWCVVTPARQRYKSPRLVRSKPGEKINYTPCAALYSKTITGSLSPNIVGQLLLGARSPFFRIQWLSCRQPSPPVSSLFEGSWSL

SEQ ID NO: 968914 - protein, 171 aa, Homo sapiens
MYGARPAFRRYSPPSSQSVISRQCCTSAGPLASLGTLPGDTEGKVEVTMATGWQEEGLPAGGASQGSQQGHHLWFTTYLVQGQYIYEAPSYCDIHSLIHSFIFETESCSVAQAGVQWHDHSSLQPLTPGLRLSSHLSLRSSWDCRCPSPHPAFCVFIVFFNFCGYIVSVYM

SEQ ID NO: 968915 - protein, 147 aa, Homo sapiens
MCYIEMLAEAFGNVIDRELGEKLGRVKKSTEIDQGKEEFAMVDGQVNTDEECSTDVMTVNVAYRVSRMCLHILCTTKGHQAFPYLHVTLSVQGASQRGGNICRFRHYGISPPGGCHPYCICLQAFETVSARWMGAGNITVTVLRADS

SEQ ID NO: 968916 - protein, 55 aa, Homo sapiens
MPKSRGVVYLGYVVASFTIVSITDHICCHWERSRFSCLNAVGMSLRTDIARKLSL

SEQ ID NO: 968917 - protein, 89 aa, Homo sapiens
RTVVGAAVAACSYGLFRKVGPQLVPALEKHTWDWPHSPSFFAPQEIAGDHIQGGFLNHDYGALNNLFRRNPGTRFPEDPCWGCAPCPPA

SEQ ID NO: 968918 - protein, 97 aa, Homo sapiens
CALPGAPSDRVESRLVANLMRFSLSFFSGGLCALDGLVQGLLGDGCIGWNHKMREEFLELLLLQIFGLEKVPGDLYLSPINFCTSDFMALRTAFPEF

SEQ ID NO: 968919 - protein, 113 aa, Homo sapiens
PFGVFATEGLVSRGSAEMLAPLAVGSLNADLHKMGPAGPVQALPSAALHQGPLQKPYAGDQPPGGPPSPDVSSEMALALTSCLQPLRFCCDFRPYFTIHDSEFKKFTTRTQSP

SEQ ID NO: 968920 - protein, 114 aa, Homo sapiens
HSCVVLLRAILMLRLVVGAVARSVGGRVPAMCPFLLWDPPPFVRSPTLPSSVASPARRPRLRSDRRCSAPRSGHSPATASGHHSWGVLVPRRSSLFPGSVRFDLLAATNRFSPS

SEQ ID NO: 968921 - protein, 44 aa, Homo sapiens
PRGSPSTAILHFRLLSEHGSTTQGIQEANSKKWNNIFKVIQVGS

SEQ ID NO: 968922 - protein, 359 aa, Homo sapiens
MPTTLKHKYETLTPILHYCTYYSTHRNWLTTSLLPLQLHTTASSHYSCSTTAPLLTYPNCAYSALPHNAYYSPDDKTTTHYAHYTLPLPRRRTPTLTTALPAHHSCTMLLPTPNSLTLSGHYCIHHTHPLYLFPQTRSTTFPTNIFRENHFWHSAHFSQGVTQRHRYPLLFQRTNTDLRHASHQLIHTLPYLNIVLRLAYASHISLDGSYPTHTALTVVPTMELNPRLSTARLACGTPYNNNPCAVSGAKQITMRAHRYDTPHAGTANLPPLSKPVAAQTHNPTTVPRPKPLVPTRPTHNKPGKNQLGNSTSDYLQPYLADASVTPLASKRRLSTSAIRSPRHRHTNNLGATTARRTPY

SEQ ID NO: 968923 - protein, 485 aa, Homo sapiens
MAYRTHATDANYRLCSLYCTVHCVTNIPEAALLHTPTISVNPPVYPKPSQLAFQCAPTASALSPDEHNLSDPVSAPSLARGDCPPQQATLNIRIEQVQNRRDPSGNQPLTPLGNWRPPRPSQLRYRDKATRPETMHNPRPLHATTRPLPPPSPTRHSLARRNPPDFPTPHQPTRRPPPPRAPKTRNRHANRRRALTTDRKHKGNGPWTQYGPRGTSRQASPRPSTHRPPPGLTRSPRRPRHTGPGARPRRRLTSKQPGTNTASHTPGQRPCPSTYRTTPAPSHPNHTPRTRWAAQQWNHGITTHTTRAQACIHHIPHTSRQTHTLAETANTSESPRQQTGKSHTQTTNNRTRPSQSNRTSRDPPHDSPHNAHHANRYLGHTQHITRQEAQSLTLPSTTHTPRTRAHANPNNPATTPHRTHSHTATNPTTPPSAPTTTTEQTRPHTPGTPQPHPPPRTPPTPPTRPHHITHPPHHPPPPQHTHPAH

SEQ ID NO: 968924 - protein, 198 aa, Homo sapiens
LDIPGHVAALSVALCPIAGITSPEQCMLGYRSWLGTSCMGRSRFRRPYLVPRAQFVAPLGATDLSASLPQGLCLSPGARSGVCRLSPWCRGVHHPVWSGLALPRVCHKGLVVAPHNGGSLPRGVPPVSSRAAPLGPHDLRRQTHCSNVAISPMAALNCTCLCRPQHERVCLAASLRAGCALSACISGRRSPREPYAPS

SEQ ID NO: 968925 - protein, 296 aa, Homo sapiens
MSAVSCCGGAWQLLCRRSEAPRGTLQVRPSRTRGSGDNRPRKTTRQSRPQKLRELAPRRKVPNVGNWTEYREADELLETTLRANTLHRSPWTKGTASKPTARPAAPAAAERQHSLGAPRTPRRPPQPPSWTPSPWNAAPRHPKAPEHAKGLRPGHPAATNPATGQGRCPKETPYTHGASRTDLPLIGAQDHKRATPPMDATGATPEDEDNAKGAPKLTQAPRDWTTAHPSQRKSHHDGTREATTPHERNERGAHRTAHLVRDSGTPKGANVKYGAHENSRRQVQAHPDRPPNDGNR

SEQ ID NO: 968926 - protein, 104 aa, Homo sapiens
MLAVRRSLYLPVEQMTQQTASVLEQTEIIRMSGTPMSSSFWQLVSGTFCKEHLRENQISQRAASFHERPNCATCRRTHWADTLRGDTHHTRSSPQIAASGPRVR

SEQ ID NO: 968927 - protein, 116 aa, Homo sapiens
MMSNIECVLCQQMDTNWLCALGIIHCNDGDMLIPGNDLTPDLTVIASVHHGLMMARTGMSSNVQREYYQSPIKCVKKDVGIDTPPMESLWQTIVCVVQVHAVCRHVRLHDVCVERI

SEQ ID NO: 968928 - protein, 69 aa, Homo sapiens
WVYGPVVHAQLKIFCLLEVETVFKHDSPVMRNSHLLIVVIRPTRIRKFLGVTGVMPRDPERTFYLSRSL

SEQ ID NO: 968929 - protein, 182 aa, Homo sapiens
MSTHNRVPRGLLLIPSPPTSILNPLYTENPLGNHPCPRFNFRTRPHRGHILRVPLPHKVWSAHTWRRREHPWAPKARKPFQMPHTCWGNNMLRTTRMCADILPGLGPTFGEPEARHVSPPEKRDGDICWDNPPGKHKRTPTSRVLYATRVPPSCTLLSEVFCAARPPLGSPPQGDVAWLRDF

SEQ ID NO: 968930 - protein, 195 aa, Homo sapiens
MSPIHTCAVRVRAVLSPQTRARGVREQIPWPRRPQNLVHTGVGNSCPPRPAHMRFAPPLRFRGQATTSVSWCPWRRPPPALLGGPPRAGTRLEMSEPCDKKACNPKMWAPTTPHSVGAWVTPHRTISGACRKHSRGAAGTTELYTTLGGNLPPGARNTGGKICVQGLQWAHPFSPRPQGGDLSPGINQSGNLGSS

SEQ ID NO: 968931 - protein, 113 aa, Homo sapiens
MSNTVKLGSVHNMIHMQSNRYSCEGAYQSVMSRQPTIAVIYPQSRLGVANGKRVDETDRTAMSATRMVDHRNDALKNNLLVTTTSMWRHENTTLGTGTCHETGLCQLTGTYHA

SEQ ID NO: 968932 - protein, 110 aa, Homo sapiens
TVGPAATQVVCTGRLVLFFLPQPLVCTPDGAGIAKIVGYSLVPLLLASQPASPCSLPRTVRSGGGSPPLDPSFMASSPPLIRLRCTCPHALALVACVKPLSVLCAIDLCN

SEQ ID NO: 968933 - protein, 116 aa, Homo sapiens
MQMGKEDDDHRSVPKCQTVEKGRLSKAKVHGPEISMVIFGRNDEVRPLCYVLHSLPNQETMGYLSMGRGYTVWSIWMNLQEDTSRGTKMSLRRALSEEGSNGQSLSSLSQESYLNE

SEQ ID NO: 968934 - protein, 226 aa, Homo sapiens
MADFPYARCPCTRVFRRDKFLAFGPSVKNGGILWVIVARPASPGLFPWNITAWGLPDRCRRALYLKRVVSPAHRQFLSNPKFLVNFMNPPCCVLKDPETPCGEPPFGSPHLIRPPLYFETRPQSKKPPKSVARHPHDIPTPLVLTRHINNYYRANSCPCRPPSNLKPSLSPFNCNLTHFENSRHKNSVTPLKSPHYFFTYNFIQTPYLVAKPFKSFMTTAPEPVPR

SEQ ID NO: 968935 - protein, 135 aa, Homo sapiens
PVNSGSLPTTRMLKEEQEVAMLWAAPYPCSPDVHRDPHPERDLSLSDHVVWSLFKTLFMNTCCLGFIAIRLLREVLADREDVVGDSDRGQDYASIGKCLNQSGPMIVGHLHDQFCIIIIPVLVGQAQRIDQRGIS

SEQ ID NO: 968936 - protein, 174 aa, Homo sapiens
PDDCGGTGGVVELRAKGGCTCGVPSCPGFACWGGRAGMPYVLVGAAWEGLVSGASVVGMAPRRPGSGCGESAGGPVGVVTRSCVNPRFLWGAHVLSAHEIVACGGGVGSPPSICSRGDVSALLVGGVCPRSVEARWVRVVRAAWWETPTGGVSVVDCSRAASRGRVLFRPRARV

SEQ ID NO: 968937 - protein, 285 aa, Homo sapiens
PVNSGQAPNYEMLKEERGSGYAGGAPETCSLDVHRDPQPHARPPWPDHVSPGVTVQTTLFMNTCCLGCIAVTPTPVKSRDRKDGEADVTGDRALCLQATSALNTLGPDRGIYMTMLIIIITSVGQSGPRDRSGGIHGGTRSSAVNLLPGDSIYPFLAMPQRKGALPLTGIPLHELPFLDHGPKGRGTGHAGTFIMHTQLLTVGLATQSVMCWGLRVKLNDKNKHHNKDNHHTTTTQTGTRGTQQNNTTRTTAPERTRTYPTGQYRAHNNNTRDRTKKKSQHKAKT

SEQ ID NO: 968938 - protein, 188 aa, Homo sapiens
MGRPMSVREYVAVRRGWGLVVRTGQCRHVTVSWVGGVRRGFRVGETGVEAAVIPPDCAGGGAPRSGCSSRLGRTHKAPACPFCLGTAETVAHLWEAGVRRKWLDTQIRRVFWEVLNRFSCHRSGDDSPGMQLPPLVGAALNFGVVPVPPHSLDNRAGLLFSMQDKSMGPGFSHKQYRAFPMQKLTAHI

SEQ ID NO: 968939 - protein, 245 aa, Homo sapiens
MVMAGHRFGGWRGCEVDALPYFDQGYEAPGVLVKLDVVAGGGGNSQIPTLTKNYLSYLTGPDYCCLGNMDIMRNMNLIDWLLDKQLNAQYGNDHRASSPPPLVEKNDINAWLKKCVDTIHMAQLEHQAVRIDNSGNNVQRMDVIDLESINENLVHTDGSTDTEGTSSRGKKNHIQDAEVAQKKNMELTGGIYIEKTVEVLMGILVQYEFEHDGLLFTLEDELFHLACTMAGTHETSGKSLTDIAV

SEQ ID NO: 968940 - protein, 307 aa, Homo sapiens
MGINERPSPAPNVDYPLDWTRQIPTLSLDQSRRFSCRNILLPNKIMNEQSACHFNYRIPVIPLSDRHQRQQLNRDIRVSSPGWPLSTARPAHSSHTTALPATYSVSATNNTQHISHKHLGHLHDTFPNFTTYQPWPKRLNPPLTPATRSRAALPRNPSPRHTHLSSPGLNHTRLLTHPNAPRIPCTGRTHTNPNPQGQRPRSDGAGKSPPTHLSTGTPAREKWKPCAQQSPVPHTKILQQRYANVTPREASSVTRTSGARHAIGPTAQQITYDVHLRGPHHRLAQSSPAKQDAEQQQQPAQHKAQTS

SEQ ID NO: 968941 - protein, 169 aa, Homo sapiens
MRGEKVQNLQGDSKTAGEFLRAPAEGANHIRGESPAVAVPHVRATSFPEPGFCSSTPQGTLFLLKAPSAGYAAPAFRKRGCSCPTGEPLLLPPYWEDFFPRARATQGLSQIFSATLGSNAFSSNNNCRTHNAVKNVPALIGARSLVTRVACWASPFFNAEGVTVSLFLL

SEQ ID NO: 968942 - protein, 107 aa, Homo sapiens
MQRGWIANAQSCRAVKRHFPRVAGYPDTKGTWRNLGRYMDCKLGIAGKPFRPKMQHLDKHPIWEERNRFQPTNLEDDKGFELADIGLAGGNIPGLTSGLELELACNG

SEQ ID NO: 968943 - protein, 169 aa, Homo sapiens
MELCAASPNGGGTSVSTRARPCHFFWGPKLVQTLSPPEVRAECSAGPFARDAWEFVALIKDARSLLVRVEVLRGSMYIAAPLMGVMCDHHPPQVSWNVRSGYLRPLLDPCGMVDKKARNILRSPPIDVLGASRGQYGVRPPCQQLRPNVLYLLRPPSLVVRPDPTPFLC

SEQ ID NO: 968944 - protein, 53 aa, Homo sapiens
MGGGGDVTALTIRPLVCRMPGALSHPPCAGPYSYKYGCHLKAIIEQEKNGDID

SEQ ID NO: 968945 - protein, 276 aa, Homo sapiens
PHRSADVTTSPYADTQNSYGCATSTPYSTSRLMCEICQAATSDSEFPIGTTGGYWTHQKSYLLGSPIYGVWYDHSSQLLLEMSQPGILVTTLKPGKRLWVTTWRVCTRGIPSGNPKKHSLSSSPTLLILDDYCAHFTPPGTVTPPRKVRSSSSAIPLPRQSDSLVSLTCKPNYARENSDLTSAHGLRLQTYSEKWTYTSMLSKVCICRTLGWSQNHCLGRKLSGGNPGRVQPTSHECNSRTLGTENHTPAPKGADRDKQDHTNKTPGRTPPHPPNT

SEQ ID NO: 968946 - protein, 138 aa, Homo sapiens
  misc_feature (7)..(7): Xaa can be any naturally occurring amino acid
  misc_feature (25)..(25): Xaa can be any naturally occurring amino acid
  misc_feature (30)..(30): Xaa can be any naturally occurring amino acid
MKPNKGXRLNTMRVCLNYLRRYYIXVWWTXANRESPINSSVVSEQLNILNRTPEDEKLNRVTDGGTTRTQDSPLRNRDARHNKPLIALQPSREQLISLLNATIWGKKQHNLGKDEFKFFSTGTTNTRGEKFDWVSVVQ

SEQ ID NO: 968947 - protein, 121 aa, Homo sapiens
MMLRLYLCSHKLTPPSHISGYNKAKRYPPCPKISSCNPPPFFPAKFFSTHRPCHNPCVSSPKGLSHKYRLVTLAPYPPVYYSICVTTTPPAARSCGLLYTTPQGVFGVASVHPHTLAPHHI

SEQ ID NO: 968948 - protein, 198 aa, Homo sapiens
EAEAAAAALRRVRWDQSRGGAAVSGAGAPLFLHPAPVPPITCDALMRCAVLWPTLPAGHGMTVEAAPHARALPAVGPSAWPGFCPPLPGAVANKWPAQCCFVGGPLRRRFLPVRASPPGGAPGSPKHMTCARIPDDDARIQAEHDRAPNHGTTPRRRARQGHNLFRQFKDIGPRAAIIHLCCMSHPPFRNYFNPNVGD

SEQ ID NO: 968949 - protein, 167 aa, Homo sapiens
VYSLGFFAWRALVPGLGLCPGVCGLARRVLPGRSSASSFTGPPPGVFHDTGLPWLRAPSGSRILAWGSHPRAVLRAPRIAVGIRHVSLSLGRSLCAHAPKCAFGLRIFAPPPLASHGFPAPSLLVPLLKGPPIGCPRTRPLPPRSALVWIPFHAVALLSGVPRPLVC

SEQ ID NO: 968950 - protein, 284 aa, Homo sapiens
SVSRHVPSFLSKCRTVQPKSCVKSQALEGEALYDHRKVQYGLRVKRPYNYELFDALAGCFCNIETAIRTKGVGSEVTVVKILTNRRQCIETGYSLRFQRRSQAGKLASDSGRQALSGHLETVIRAYVIERPARIVTLLSLKASMMGLRTDEDLLIAIICCRTKQEVGEINGVYRGNVCCEVIWSEDLIRETICDFRTAGRLPCAKGENSRGMVCHDYDPVGTDGRDLYVTLHVNTGKGLAVHTWVSLMTERTCPLQKVLTGHELPPLHCDAHESNGARKLRTAS

SEQ ID NO: 968951 - protein, 102 aa, Homo sapiens
MFSPSMQWQGCSVFGQTRIMSLDRDFYSEEAQLTRKVEVGPQANSREKQRLAIRVLTGGIKFHSADLHETLRQMEDSIKSIQLQELMEMKTIECAHVKSRFE

SEQ ID NO: 968952 - protein, 109 aa, Homo sapiens
MVLVPYEDASPLCSHRCIRPSLARPLCERAPPWGSRSPSFNSQINPPAFFVTPQVPVFSFYKLFCTPNDLYNPQMCSKILVNTSFVHHTEAGIKIFLTCNTLLTSNNIV

SEQ ID NO: 968953 - protein, 121 aa, Homo sapiens
MGFPWSQPKGPESRSWRDLRSRNVRQLTLREGVQPGKVAYGALAGEWDTGAQELNAWLKEKQTRRVDCRETALRLTGPPHGRKRHGAAPRWQPGRKAEEERVSRGPGRNSTRRRPRHKGPA

SEQ ID NO: 968954 - protein, 70 aa, Homo sapiens
FGDTSACCASISRMFAAGCSGFLLARQTFGAPPMIGLRAGLVCCDHDVVLSYYRCFPAVCLRAAVEVSCG

SEQ ID NO: 968955 - protein, 283 aa, Homo sapiens
PVYLASCAVVGPFVHIIPAHMRIPPGFLGPKPGPAPPPLPGVLPPAHVSSPGAPRQVALAPGRHATTVIVPLCPPLCHSLIVPALSFVSTLRVAPDFLPHDYLCTGVGPQHGVPYIRQRGPTRFKVYLGPYPNGSLCYVGACTLVQPHAQGGSLLVTPTDPGYRPGSPQGRICLPQSSRPPTCRSHQYGQHFRLEAPARQGRNFQSPAAPTRRSQLSLRTGGADTSSPREPRLQHTGCGEKAGSDTQGHPCGRRQDPGCAPLRTSSRAPTPTGGAPPMATPPF

SEQ ID NO: 968956 - protein, 120 aa, Homo sapiens
  misc_feature (93)..(93): Xaa can be any naturally occurring amino acid
SQKCAVTTNEEDDDREMRFQQAVTKGAQWVPSRLMDTSRGGPPSPGRGPPSAGSSPFGGTTLEGPISTNTWGPTAPVGRKEKTVFGTWPNQAXIWPGHNPFLTLKEPPLPLFKRAPPRYY

SEQ ID NO: 968957 - protein, 284 aa, Homo sapiens
MPPPMEIVSKQEGVKEPQASNRKRAAQHAWGPRRTSSGGTNRLTSPGFSVCIGPCRASHTPARCARPTPPRGPQAPRLLGYRAGVPRFGDLVTARVSRRPRLHHQQGPSFLGTKFGQNTGLARAPGQFLPRSPSARSVVVRPLYGKLGGLLRSPPHPSCVCGAAIPQRSSIGGRRNQPRATGGRAIKASPHYARDRPPPGPRKETHQVHPRGVWGGPTQETLFLGGCAKAGVHPPKKTRGEPSSGIPEVGILRAPHPTAPGAHEKEHRFKKKKPTNLLLGGKPH

SEQ ID NO: 968958 - protein, 126 aa, Homo sapiens
SVLVPRFVVGVPVSHVPPVFVCSTPGFLGVPPRPWLFEPLPGIPTWVRSTRAMASPRAVGVLFVRPACARGPETVSAGVIPPETSSTRFVLWQVVERSLGKVPCCGRPPLLPALLSPAEVPECRSF

SEQ ID NO: 968959 - protein, 112 aa, Homo sapiens
MKQGAHPLCRRVINFTPGAKLTSAARFRCPPPMTSRVRLFHPPLSPREWAPTFVLMDRQHRCVFTSINRFTLLEREKNTHVQTVIISRKKGGQLVDPSLHKGPHIYLSSMFD

SEQ ID NO: 968960 - protein, 225 aa, Homo sapiens
GLLVDSVSPPPPPACVGYDKYVYLSPARRFFLCPRDLARSICLFLSAAEELCGCGASTPPLPPLLLCVLLLPWMISFFCWWMISHCCCLLLRSSPTSGCVFVALVLLARRGLVAHPAAVGYHRRRGFSFPSGPSPVELLPAQGSAHLLFFLTRLVSRYMCFCACRVFSCAACTQSYAFRVPPRRRACGKTTRRFSTRCFLRVGSYVLPIATPPRGVLAAPGYSLD

SEQ ID NO: 968961 - protein, 226 aa, Homo sapiens
  misc_feature (74)..(74): Xaa can be any naturally occurring amino acid
LYADSVSPLFAASVPFWRISLSGPPPVHGYHCRVIRGSRKLLGKHGAPLRCGTGNPHGRASQAYQSWAPADSGXPPRAAGVLIFPIRAHNKVGHTRNLPSLAGNVVSARFPKRQWGSSGWPTPEGFPRGGPSPLQKNNGAHPNTHGRTFKCFPTHKMGKISQREGQTNVCVRAKRPNHDGCRVHRCACLFFPGAECKIRETSLVHNKKRPAPHMCTPPCFFLKKRH

SEQ ID NO: 968962 - protein, 406 aa, Homo sapiens
GGAERGQSHHPAAGAAIVDEKIFCCHGGLSPDLQLYGARFGRIMRPTDVPDTGPLCAIRVCVCIPPSRHVPRLAAAHNAIAGAIHFYLFGTLMLVQSHISIAIIRPCILSILHLARPAPIPALAVGTRMRIMPILSLASRTAPSAALPPRSTAFPMPSRHTSHPGCAGTPLSQFTLDLGLAQPWHSQLVRAPCTHPSLTLGYGSPNSRTHDPYSSGTHTSTSVGHTNRDTEAYNPVTTHTLTFAHRRTPSATFLLATSTSPLGYHTLTHTPYAHTLGLLKPSPGFPDNRKKHTAGLVTGNTTRHNVFPVRYQPCIPDLQLSLQAPTYGTYTRWHLHATLCTGYDAYPSLYSQLFVVRQPLATSKHPAIVATAPKLIDGQTTRHFYIGYTASYPTRPGYLTTLLHMR

SEQ ID NO: 968963 - protein, 153 aa, Homo sapiens
MFITCATRASSRYPYAAYPLHTPLPLTLHYTRYARYTTTLCTHAFPGSTRAPCNNYITLPLHNWLLSGYFNTPWQTSVSLYSTGPLTPNIVTPLTTCLAPFATLRPPLCLKTYPLATPRTNWLTSLAPALFGHVPHHLVAHFRPLQLPSNQTT

SEQ ID NO: 968964 - protein, 219 aa, Homo sapiens
RCHVVSSTTAAEVGSDERQPNTSCCRAAEWARAKPHSGIRDFGKDPQLETTGPLDKNHRAGPAPGERRPPRKQAVALSTGDRPTSQGPAPCRAAATPTGTRRHTSPHKGEHTRGTRPTVAPRREPAPSITKTLVQMAQTTPSPSSGTRGHARRPRRDPEWNAPTCASGRHTVHRIGRAESASKGRVLLHTDPAEENTRLVPSSNGSVTRREAVGRGYSR

SEQ ID NO: 968965 - protein, 109 aa, Homo sapiens
MNPQFSARTGDTSSGGVAPGGPATPPPPPRYVLLPTSQTDRGPVSSFAIVFPQGDSPTKNGTYSSEGFVVVRYSLFRVVDTTRSSLGAWRSQHPEEGYNRNWTFSNKQN

SEQ ID NO: 968966 - protein, 259 aa, Homo sapiens
RYRYLGRSHRYPYRGTPDTESHTPSTGLPAPGPPYRPPLGAPMQRVQSGRYRQYREDEEHAVTRTYERAQPHTRYPTHPTVSRVDFIAYRYCDCPVTMLPTPSRCLPRTATAATPQRNTLTPQPCHSTPARLAPTQPTMNIPEDTHLATEQRDPRTPPKTTTSHSAARHAPHPTGNTPDRTTLQQHSTTGHQAIQLPPMDRPTHSHRSTYYDYRPMENYPNRTYAPRTTPYDPHCPPHFKVLRHFNHSPHVLANKSLLP

SEQ ID NO: 968967 - protein, 171 aa, Homo sapiens
LVAFRVSQVSSRKRCLVCFCPNGFFPRCRGTMIVQAPFIHAGRPPPDSLDRPRVPPVTGGTHKNRGNGDPGKILSGPGSIPFCPTPPFSLNRAVYSLQGNREMLEIIGPLIQNQWSPPSEVDKAVNESLWIPEESRPSPPGRHYTSRQDTLGRLTPENVLQRKPAGGEIAL

SEQ ID NO: 968968 - protein, 264 aa, Homo sapiens
  misc_feature (61)..(61): Xaa can be any naturally occurring amino acid
MGGTNPGNNREASQDPRCCRGIRAPRRPGTGGGPTPRRAADTLVETRASPPTTSGVINSRXPRCTPQNGRVGIKPGALRPSENNPASVPPPGPRRTKTAATFRRQKYLPALTNPVLAAARYTQRLPTREDFRREATPTLLSPGTPASGDNPTSRHAPARAPHNAVPTLLKGTSPKHQIRSPPPHRQQDSILRHYTPASWGAPTRENTTANKSRHPLYTVPRKSTRALTLLWGAHTTNTLRDCRPPPGVPRRAGAPPNSVTPPTK

SEQ ID NO: 968969 - protein, 261 aa, Homo sapiens
IYPPKTTHTLISTRTVTMHSRPLTKTNFHTTINTLLSNISTPLNSFQYNILNNHLTGTLYSSTHTQSYIASQLTYHIPYPHPIHHTLNRVLDTTFYATLIPTITITYPSTIYTQLTHLTLTLTETLNTMISLLLTNTHIEYHRFQTHANTKNLHHPLLHKTQHTPYTTSHTTYTRHHLSTPPLSPQLNTTQSHNQSTPLLLRLTTPPHANSITTPQQHPSSDTTPTLPSIISELPYSHQSPTLSTPIPTINHPIQYTLPPS

SEQ ID NO: 968970 - protein, 313 aa, Homo sapiens
  misc_feature (36)..(36): Xaa can be any naturally occurring amino acid
KVFRDAEYCWWPVCSAITPRRGASCSARLIPPVLSXSPPGSFPAEGCYVHGANLGGVDKNIRAVHTCGRPSGAPPRRRQTLAANGPSPSFGNHSSEHGFSLLFPNLRACCISGASSSPPLLPAFLERVVRPKALLVGETLAPGKNHSHGRIFLREIFNTPSAHHSNTRGGIGSPKRGTHFLRVNPSSSKDTFLFREPRHHHVLSKSGRVRQYISRGSIGPSSPKLCLNAPLFSPAEVITTRAIPHTIVNWFHRVLFRPKQMFLFLYNVPAINSSKPPLSNPLLRTPKSALHKPPRPTRNNSVPQKPNHLFPTK

SEQ ID NO: 968971 - protein, 143 aa, Homo sapiens
MPARVMAPPFCPPGPVLVNGGGPLSPQGAFDAPGVAEHAPGISFCGHPPPADMFVSTRVSPIHPLRRAPILVWFFSPPRCCAIFEEKYSCTPAECLPTETLAALAGLIHFFFPPTQQARLCFFPHPPISTIFLQVTNMVPLIL

SEQ ID NO: 968972 - protein, 224 aa, Homo sapiens
LVSYIEVFDTGTHASNGPRATSISELCKFPGDKCVCVRPPNVAPWDIVPGSPCPVEGTPPTWEKLDTQGAGRTFAGATPAVLPVTKEQQGVVVDTQESQVVGAATNKGATVLPRKYLGTRLVHVLCKNAKNDSRVSPRSNTVGVFAPPQPRYILVPPVVGGVALPVDQPGNKKNPCLSCERQPYMSLMRRSPQPAVVLIFVRIYQIHLLTAPSNHHPIFYLSHK

SEQ ID NO: 968973 - protein, 140 aa, Homo sapiens
MLANCPPKHGLSFYQEVILSASNDFPQQKFSSDIFLINYDPAPYGKFLPPPPPPLIKVSLCATKIGYNLIDHSYMRLILYIFLDPTHTSGPQTSLSPPASRNEVIYISSHHLFAKIYLAPATCCLYNQYRAFISKWLNHL

SEQ ID NO: 968974 - protein, 115 aa, Homo sapiens
MRIRPLLCVVNKPTLFSPVRQKLHLSILTMAIHPNIVPHPLITPSCPKILPTHRHGGSHIIPQPPMYTTTSRHHPISHHDGTQPLSCSIQHLSPHFLFPNLPPNPDHINIPGFPR

SEQ ID NO: 968975 - protein, 223 aa, Homo sapiens
MPSGPHQTQYALPKDPGVRLVCNPRRGDVGCHAPRGVSAAPPSPPRFVGAVSLDVLLAALPGNYGGPPTGPPAAELRWVGTSPPSAGESEEAVFLLRKKIIIYVPGDFNEFGKNVGRPITGPPPGLPHVNAGVRALTTPVATRPSDYYAWFSPLAAFLSVSRATNPEGGCTTTHFAPVVTDAWPDAELGTGLGFYVWGAYDVYVLWGDKMRSGRSNDQPPKKN

SEQ ID NO: 968976 - protein, 101 aa, Homo sapiens
  misc_feature (12)..(12): Xaa can be any naturally occurring amino acid
CRVYKTPPSRIXLSRTSQGVSHQHNGCSLNTRAFKGAPPHDNALGNVFKPPLIFSLCLPRVMHSSNNPRGPSLSPFRRISPPPTRQKTWVVNHARPTTWGA

SEQ ID NO: 968977 - protein, 248 aa, Homo sapiens
LGQPRCFIYDPAVYRFLWLLQGDVFSMQASPSLFRGLPGVPRLFALPLCATGGNFFPGPFLIIKGRAFSRPIGARYCPCVFYKTLGWLRPNPGSAGGSHTACGQELTPRGPLWAPCPNMGANKIGPLRRLQRSRSEKPHKCGPAPSGRHSTKGSPVLKQVISYSKTPRAMAILRSNHQGVLFFLKSNHSISECSLPPPVVSRSKAPRPPPHCKSTPSPPHICFYAATLLLVCSLFGWEERDPHFEAPY

SEQ ID NO: 968978 - protein, 243 aa, Homo sapiens
  misc_feature (54)..(54): Xaa can be any naturally occurring amino acid
QSSNRPGRKKGEKQANNCEQRKAPGSAWERDVVKKRGNRAKHRTAGEPPTGVDXNNARIAPQLVVLPRVDSLRAVIRLLLAPSTPEENIIGRGRTKPPSAGIALILQQKSPNARVTVPPPKNEVIHVLLDAHTRVRGAALNPHQSTTEERYVPLRMNKGVPAPVRRICSTDAEDTDTSITQMNGTDADETSHLNRATRRIERVATQWRPQRLMRLMRKGFSLEEYASTDVENIPRRGRCPQTQ

SEQ ID NO: 968979 - protein, 108 aa, Homo sapiens
DVIFFQESTPPGFFTQGALLAHTQMFGERYIKTALAPTYIVSQTPSHSRWQRKNNSPPPPRVFLYSTHQLHIHYPRVILSRRVPSFYQCLFYPRFLYQTTPFVRSSFL

SEQ ID NO: 968980 - protein, 112 aa, Homo sapiens
PRGEISQLDPPIGRYIPFPLYYSTTGAKFKRQLATHVESIAAPSSRFRYTYVCRRNGWPPPLFWTPHVYICRPPLRGDRGDTNNIIMAEGNFSINKYRGHRTPMIPSKGIHI

SEQ ID NO: 968981 - protein, 452 aa, Homo sapiens
  misc_feature (73)..(73): Xaa can be any naturally occurring amino acid
  misc_feature (124)..(124): Xaa can be any naturally occurring amino acid
  misc_feature (136)..(136): Xaa can be any naturally occurring amino acid
  misc_feature (149)..(149): Xaa can be any naturally occurring amino acid
  misc_feature (180)..(180): Xaa can be any naturally occurring amino acid
  misc_feature (197)..(197): Xaa can be any naturally occurring amino acid
  misc_feature (199)..(199): Xaa can be any naturally occurring amino acid
  misc_feature (202)..(202): Xaa can be any naturally occurring amino acid
  misc_feature (230)..(230): Xaa can be any naturally occurring amino acid
  misc_feature (243)..(243): Xaa can be any naturally occurring amino acid
  misc_feature (249)..(249): Xaa can be any naturally occurring amino acid
  misc_feature (252)..(252): Xaa can be any naturally occurring amino acid
  misc_feature (309)..(309): Xaa can be any naturally occurring amino acid
  misc_feature (313)..(313): Xaa can be any naturally occurring amino acid
  misc_feature (358)..(358): Xaa can be any naturally occurring amino acid
AELSRPGPAVPSPCAPERILPGRGLKHKRHEGTHISRREENVYPENKEGRTNARANVKVSPHRELVTKPRRGXKCRAPPRKNCSVVCLFSPGENRARPPLRHMRCKHQMKKPLGAEINSSCRQXRDRYTGWFVTHXKRGNPKCRGRPWXIREDDPPQPRSVPLSADSLHKLECDPISSKXKRRAGDRKLCLPHPRGXDXTGXAMGGPTRPSMNPPTSLSGIPVRVGTEEXETYLGPDRLFATXNISELXSKXRKDENGSRRAAPNCEKYPPVVNPPTVGIVMTYYYRGKDHNSLGLVPRRPEYSIVYEXNPSXDNRFHRKIIECSVSNTGRICKSKVTDNNTCMRGQPLYRCNIPLGXTTGLVVCCSDVLTHTSLPRTHGSQNIMLCHHVRLCFTPTPPRTCQRLSSRNDPHPKGANKSCDRHKLEVLQNLITDISFLQSNTTNGERGPPTY

SEQ ID NO: 968982 - protein, 172 aa, Homo sapiens
MFPPTVPLAPLLPNARPPGGKFFGPQMPPNWVLTHRHTWGTYYTVLCMVAILIRARTLGVCPPWAPPFPSRSTNTMFVSLYKKISLHLPGTFSLPNRIIFSVRRKLGPPPSLYFPSGGGRETHPPDMTPPYLSLKKINSHVPHTPPFALTVSKGHGTHTYRRNTPVLTIYLG

SEQ ID NO: 968983 - protein, 57 aa, Homo sapiens
MISRKIFRGTPRVLCRRCGTMSTVTGCSNKAQHSGSRARQPPAKSRPKLGNPKTRLH

SEQ ID NO: 968984 - protein, 105 aa, Homo sapiens
MAKDPVTPPRGTHHPRSKVRKPNVGEPKRGLLALLCSEKKGVPKNFVAPAPYIQTLLENISRCSVAPLSRSQNTLSFNSKAIEYWLSAPQVDPSIIFFVHTHQTH

SEQ ID NO: 968985 - protein, 116 aa, Homo sapiens
MVTTYRRMHSRPSLCTHKALFDNHAPVPHIKDHLPLSRGVAKFDLVTPLLCYFLATTLSSLIKITTSLTKSHLSLVNTISHSPKNRVGTPSRRENPPSIAPHHCPHPAPPFFRPTA

SEQ ID NO: 968986 - protein, 193 aa, Homo sapiens
MISLPLGPSYGQHAPLFVREDLDNSACRESFPTNSPPPALGSYGRFPTTEDFPRATCRPLERREELVAPPTHPRAPPNSGPPALSLYGVWHLDAWVTRAMGVDPSARVSFHPLHPHVVVVPTPVPRSEASHEPFPELYPGSCHYRLPLFPGPPRRGRLLGCDAPPRLSPPRVPPSTGPLHRCTPIFLSGKQNT

SEQ ID NO: 968987 - protein, 284 aa, Homo sapiens
PKVVGPSSRGASPKFWDLPAPQSLGLPSPPGVALPFRFPGATRRVCQRCLFFWGAKVLQRRSIGATLGETPVLLCARSFGGEDIGSPFPPPKGSLINWVFFDLPRPAACVAVVDLTNARLSERLVKKNRLLLVNAPRVENSFRLRRTTLLLGDIPPPRSVPAFDNVPSRVQYPAFHLARNIKETTNPLYGGRRPPVGLRDPGSLSTTQSVCAPHCPPNRGVTPAPCSGRGYQKCECGRHTLSPKRLQIGKNWDPDNRQIQGGERDLGATPSSWRPTASNSSNKT

SEQ ID NO: 968988 - protein, 239 aa, Homo sapiens
TRGGPPQPLSPGGNTPALCKKRTCPHARGKISPPRDSSGSTNTAGKTYLRHPSSPTYKPARAEVIISRGEMQHATVRYMRASRDREQTVSGVDIYLPTPQRGAPPSTVTELSSTSGTHDYIVGKEENTKERGSPHDAQDLLSGVILTQKYSASAHATHTPPYAWHRGRPPRFAARPQRGTPPPGAERTKKYGGHPPFPSTEEILDTHANNTRPHQNISSRNPLLSSLQYTHCVKNHPLR

SEQ ID NO: 968989 - protein, 132 aa, Homo sapiens
DKEGPPLGISPPPRSRAKLAKKISPAVLGRRDTPPPGGRKTPPTPSSLGHARTQQALYRAPLSLPAVPPNAEICIAIKHRARVEICPRNTSGALPRAGTRKFWFPPLSDTLTRRHTLSLISFRSGPPHNLDA

SEQ ID NO: 968990 - protein, 131 aa, Homo sapiens
SLLTVDNCGSFEKRKFPECPPRFQGWGFCAGFCAHPVPPVGPMVPRPRVVVRMFPKWGGLFPGRPVYAASKMFGPSSLVAEHRCPPCSCLPSITSFLGNCFLRREICSGSIMVPGFEQVAAPHQRCLPMES

SEQ ID NO: 968991 - protein, 225 aa, Homo sapiens
  misc_feature (104)..(104): Xaa can be any naturally occurring amino acid
  misc_feature (110)..(110): Xaa can be any naturally occurring amino acid
ISWPMWPPKYGPVDPGSSLVVILAHPALFPSGFPPIRGSPRATFEMKSSLGCAERNCVSSSWLLTWRECPQNFCDILGEARPICVNRVSAANPTHRLLGNHFPXASYATXVGAPLSPGRRITTDPTTPVPARWGVLLATHHKGQHNKGRSLMSSARNASPNVLPPQQELSQETRADSNDMSTPLTHAAPTAPLLRHHSGAEEDTAPSQQTLICVSNTGATFELYD

SEQ ID NO: 968992 - protein, 256 aa, Homo sapiens
  misc_feature (17)..(17): Xaa can be any naturally occurring amino acid
MVREPHPSFTHPPGGGXPPSDPLSYRHHASAVSQTSLPSREWLSPGGDSPTLLVICSRRLFYPPRRVSHVATCSSLVGPTPARHLLQQRRRPSLPPATPHRQGRPPLLTTRSTARSRGPKAPNHLWRVEHPQQIKRTPPPDDTHLPARLKPPPGTHSHPLNQADDVRRPNHSVPERKRPACQHTPRGLVQSTSARRTPTQMGPLGAETSPHPDREDRMQDSTRRLDARDARMSDSMTSEYGPCTATKNTFPPFPPK

SEQ ID NO: 968993 - protein, 136 aa, Homo sapiens
LGKTVAEKVGGRRDEGVGGWLGREARFSQEVVAWSPPGVPVRCVEKSRGGTFSRGPPVGACVMSAGRSSTNGWGYTDAARHAARASVWRGLMAAAPGVWIICGAGVDTDAVWGPKRLVMGNPPANYGALHTQGEPL

SEQ ID NO: 968994 - protein, 294 aa, Homo sapiens
GVSWLRPPLSHLSRVRVYLAPELVRSIFALAVMREFLPYTDPGVVASHPRPPGGPPIPGPGILSLSAQGLIMSRALGGEHLLEEGGPPLFYRGVAPHSAESGGPFQLSLPQAPIIHDLTAPFVFQRTHSAAAFTFRPRVIPPRSFFFLLGDLPAVFFPALLSAVCSPREYFIITGGPLSPNPRAPRVPHCCPPGGVGHHASLPKSGATSVSPPVLGTLKAAQNAFRERQSVCLQSLLVERSASPASPCCLIGLRPLFRSRGVLGAQLLHVGPASVPPIPEPRARVPPQPTPSHK

SEQ ID NO: 968995 - protein, 187 aa, Homo sapiens
GSEQHADGDYSVSSRGRSKFSDNIGASLINFVFGMYVPAHAITTATLPIMASRVLELRGPFGGPPRRWIQRTYLLAGQGIPALGRVDFISGPRHCHSEGFESSPAVLLLRGHLFAPGGQPTHVLETGGRQPAGAHSSFPHPAGEVEKAHVATLLMRRESQQTLLGLRIGALPPPGSMVKGVSCFPPG

SEQ ID NO: 968996 - protein, 219 aa, Homo sapiens
MSLNSVFRVSPPLGPETHLVLFRSNLCIPWATIVQFCPRPNLSFQVSLGELFPRPLPRHMPGSTGRPPVVVLFSYRASGSFVVTGGRGEPRRAHFRGHTQHNLLCFQRRLERMLYAAPAPPAVNCPGVYAGRPPSHLAAAFLSIILSHDGRVLPPDLPRARPVFTISSSTPDHPHAPASPTRGGRNKPPYDPQQLPRNMFFFSSHYLMNTFISTSHTRV

SEQ ID NO: 968997 - protein, 206 aa, Homo sapiens
ACGDPRQPTGGHPTETGGWRPANPRWSRCPALFSALRLWHLTNAFPHRRSLKPRQRVSPPPAPLTSALGPTPSWSSLSQQGSRPSPVTTPCASLGGMFPPLGSPKSGANCTSLYRPPSASLPRANFSAQHPFAAWLTTTYDLWCPTHGAPCQEGLRLSRAHGGVPLSSPQESALVLPPAISPACGPLEVSCPRLLFRAAPPESSDM

SEQ ID NO: 968998 - protein, 300 aa, Homo sapiens
LVVAAVCPPLGVFICSWLERSMGLFLFRSCWFSGAHSLCLNPRLSNWAAARVTFAAGSSPQRAISRSSMAPFYVSPGQRLVLLPAGLPLVPHWRGSCPSLYGSAPLGRLIFSAMRDRDVLATPWVLVGPTAALLNSAWGVPHALWPSSRARALLGFLPRLQSDLFYPRVFPNVGSRRGTTLFFLTGISTPPLFLEVHLLSPKGVSPSIWFPEPPHWVDPSSILAHGVGYPRTLNDWLWFSSRGYNTAGVFTAITEILLPPDRRYHDEPKVPSIPTAAVAPLNQSTPPPALPPPPPRPGFT

SEQ ID NO: 968999 - protein, 205 aa, Homo sapiens
MRLETTLSLDMWNQSARVLPHILYQYLAGIIPENCFTASGTNLGFPHFRKVTPSPRFLFNPRRSNYYRQVLSSPPALSGVVHRTLGRKFPPGSPTPMVKPKVWDILPALNFVNLKEYLPPQGHRLFANTNYLVGRPPTTKHTRWEPRAPVPASCDPAPFLPSRKRFAETLSCPVQYPPPPPLSWINTMYVPTSSFNSQRVYHRVC

SEQ ID NO: 969000 - protein, 139 aa, Homo sapiens
  misc_feature (32)..(32): Xaa can be any naturally occurring amino acid
MWVTRFSQVPRDATPAPMYNRALTRHCLGHTXHSWPPKLLTRRSVKQAVNPECASHPSWEDREKPTIWKGCESPILTFERRTKRPRTSDPLASRHSFRRLLIRSSPGICSLRCVVPSGFRKGYAEREPLKPKHSVFPHP

SEQ ID NO: 969001 - protein, 184 aa, Homo sapiens
MCLNPPSLIFIRSSCCYYSKPLFFSFLRHPTPLCEIWPPSNWPQPCCPPPNYGASPPNNKNGPLFLKPPPNRESSLTRVFIYHQLDIAEHEHHVETLQENLFCRKNFQRITLGRSHTTICYKQESFYPPRASVTTVFSSPTSILHISRRQKIGHGQLIQYFFPVKNIHHDHFNPRSIADGPPKT

SEQ ID NO: 969002 - protein, 264 aa, Homo sapiens
VEDAEGGRPPVFDPLRPLVVKTGLTGVAIYVALLIFRYRIFWPRLSEALYVPKAMLRDPTDLLFHERSLKAVFAHTAVCLFVLPLPQDASSGHPGRAFIGAEQTTAVSIRLGSDRSTYPLVLAGYLQVAFFRQQPIALGSNTQFISAVWEQPIIRQESAPWRHKAMCVHSSPGRQTSAVETPRWGTLFSRDASSRRRTLPQEHTALENAVHKCIQTGHLPGGRHKHLGTPTCSPINMPQAIVTQRRFLADTRCGRLFIYELNRG

SEQ ID NO: 969003 - protein, 236 aa, Homo sapiens
  misc_feature (171)..(171): Xaa can be any naturally occurring amino acid
KDCFPPPLLTMTIGLRPPLPLFSFRVYLSNSRHLRDYAPRTLSRVATTHKSSGHMTSARATHFPCDTTRHITDNTSHTPLCCSIINHPRTRGSICLWRPTSITTSFPSIFTSLIYTYDTPLFPHTALFIKNFFCSTLFIIYNSERVLSPQPTVGETLLCNRSYDTPLHGDXSKKVPPQDDGVREVSPIAALCFENGERAAPRSGRPFPRVITAPSAPFESNSPTSSSTRHLKEFQP

SEQ ID NO: 969004 - protein, 76 aa, Homo sapiens
GIAYLLGYHVYPSAKRLGVPLSQGFVRAFQRRPFKHTGVVAAPIGFCPPCVWAKPAIYLSRAPPHDDICGERCCQL

SEQ ID NO: 969005 - protein, 125 aa, Homo sapiens
MADWAPPPTPRLGPADHFARAWKGNPPSLGKKLFARRNAPPLSRKNNSSGGPRNNSKCFKKNFRESFLQPKTLDSLSEQHVSPPPWEKKSEHKTVTHFNLPQQIGPPAPIEPSRNHAKFPMVCFT

SEQ ID NO: 969006 - protein, 179 aa, Homo sapiens
  misc_feature (1)..(1): Xaa can be any naturally occurring amino acid
XVSSSRVIHEQRRKQTVSVYITNIGPPGPFIPLHAPNAAFSGTHRTPSLNSVVVHNKWFPVSNARSNTPCNHEVSQPHRNRGSTTAALLYRVMRPPPAKYKSGKSPLWTISFARRPYFSNTMCFLICENMGPNCLDHYNSPPERQNCFPTPTGPSTSQQCERRASYEIPTFLKALMRYM

SEQ ID NO: 969007 - protein, 147 aa, Homo sapiens
WGETSRPEARRGRKRQGSRGRGSRKIWWDAILCVPPLRTLRNSFLGTRPRDVPRQDPGSFGRTLSDLGIPQRPARELLVGLTIRVQTRTFAFSAPFIVYQLPPVFSPTNMFQELLVVGTPLKEGSHPRNPWDRKGAKKICARPLITQ

SEQ ID NO: 969008 - protein, 336 aa, Homo sapiens
  misc_feature (5)..(5): Xaa can be any naturally occurring amino acid
  misc_feature (116)..(116): Xaa can be any naturally occurring amino acid
  misc_feature (220)..(220): Xaa can be any naturally occurring amino acid
VCPVXTQTQERTQRTEQLPCVRRLVCVLDHICVLTKCPVAGRRRRLLSPGSHHGTEVPHVGGSRRHSGGPRDVLTHYLVQNSRVASCQRSPSHAWPVWYTLFALVFSGHPPKGGSXQHQRSRTSFGRVSQKPAPRVVLNPESRGYRGSAPPVSSGAFPGPPPCLLVTRLWDHTSFAEDMRFAGTGSLLSCHPRGRSATVILATSRPCSLVGNTSVFSVNXPWGRLPDVASFQRANAVLCALSSMVGLPPPHTGGRFFHGAPCILAPLSARATTASPLTICEAPPCSGANAARRMPSEISTGLGGPIDGVRLLSEPRPPPFGVAFAGPPKTPPASTN

SEQ ID NO: 969009 - protein, 127 aa, Homo sapiens
  misc_feature (4)..(4): Xaa can be any naturally occurring amino acid
FFLXREVEIDDEAEEGGGGEREEVISLVLCGRLVNTSVWSSLLLCGKEGANPKSGASSQPKGGAHLIPAAQLVQNPLCVKQHSGSPPTACCVERVLVWPGNAPPSAWSGGPKPCFFPRFILMTTSCS

SEQ ID NO: 969010 - protein, 285 aa, Homo sapiens
FSAKEEKRGEERDQDNKIRESEIGVMLYMSRPQFCWPNEITCSVNPGLFTGPSTGCDVLDEDRLWPLYNNWGPPLINAFPMGTHFWETPEVSMNPSGASPVTTPLPSPRPPFFGPPRPEIPLAIIYQNSPSCKKTQCPVARFCNIMLPRATSVKNACPPPLLTDSSAFQNQKLGTGTSSQNVPISTVIRVSDGKRYYDKMTASSKKTPTTLGEHCIMDDPVESLRTLGSCFVHCTLLHTDANCEPNYPKPPNTVFQNRLTENHQKKVHTICIYAFFPPPPLENPL

SEQ ID NO: 969011 - protein, 235 aa, Homo sapiens
STRSVTSGAVSGTLMTQLGCGNTTGRVWTDMGHNKRGVSHQGVVTGVYGPLDYTGGDRSVRDVLLPYGGVPLPTRHGRPTRRGGQLVPRARVWLLGPSCPTIVSTTPAALFFLAGSGQPIFSGDQPPGAHPRQGQLRALPPPPRAKGAPPPERTAPHEVVPPRIRRRQIVHASRPEAVLCEPMQERWLVKSFRSLTAFFCGELRLKVQRPSGDTPQIGEPFHSGDHPPRTCSTSR

SEQ ID NO: 969012 - protein, 65 aa, Homo sapiens
MCPLYVGGISPPNGYKIGPDTTWGDIDQIQNDRIRMLPTPAYFLTARQNVFSQTKFFFKKILNHT

SEQ ID NO: 969013 - protein, 146 aa, Homo sapiens
MVRCFAILLSGPCCMQHTASAGAFSMQDIKSPAPSSLKNRVSHVAPNGGQHVSETPANQLIFSNYGKASSSSLFRINGCVVSFHCVGAQSLALPPLQVLVKLSPALPPPEGTFTQCSGPTNSCLSVECWPQESMHFLGCAIPFGLL

SEQ ID NO: 969014 - protein, 130 aa, Homo sapiens
SPCRVPQIPSAPPQIFCFPTKKRYSPHRLETLWVGPPHKTHAPVVVLPTYPTPRVYSFKRTPHEFFIFKPPTFFSQNICVEHTLSSSNKLFSRKNVGHTQTPLPLYNGSPMRQPLVHTPPGQITIIRWFF

SEQ ID NO: 969015 - protein, 226 aa, Homo sapiens
VFVPRRVRARPFVEVLAAVLLLVMPGGGPAESPPLFLGGTRTLRSTFLCRPRHLVCVFSARSRTNCAPWWALLNTPPAVASGLCSALHVGAILGPPPSLRSTTGPPPRLSVNRLCEGIPPPLSAPDLFWDPLPLGEHHTHPRFHNLKDWNMGEPRIILLREKKRGVYKHSLVTPHYLAAYFILQYWRDILLNASSSLPPHYLLRTHGGHLHNAFFKLPLRNPEFFY

SEQ ID NO: 969016 - protein, 138 aa, Homo sapiens
MREPAVGVENPRRHHTQINPAKTPGAHRNKDRKGAVKIGDVWLSRKAQLPKKAPQVGQEETKIPPEMHSIRGRGKQQRPLINNAYKAPPLDLGKPRRGQNMLRVGVSNSPQIPPARTKRVVNINIVDAPEIIPGVGPH

SEQ ID NO: 969017 - protein, 268 aa, Homo sapiens
  misc_feature (10)..(10): Xaa can be any naturally occurring amino acid
MYAPAPKVCXLLLSQTGVSDGSFVVCNNSTWSKRGSPPPCEANIYAASVQYIQRVSSVRPHKVSCPHLITVRLCASNTLFFQDSLLPTENNAATATGVYTLANKLLAPVPDHIMQTITEVLSSKKGGTFFWCLHPFYKEIGYSLGHGYHHTVVLYERGTMTNIRRGATKSTVPQHRGFLKYALFREMGGLQARGVLSPRIIRLSITRARVPQKTTILLFFVRTAVIIDLAVTPASNHWLAKPPNGCCPRPPHPHVGQLSSPKQKDPPP

SEQ ID NO: 969018 - protein, 152 aa, Homo sapiens
QVSGRGGGDTQAWWYKFATCLLTDIYAIVADISCIACHIWVFARPRIGAFMTSGFSIFCDPATYIRIHYRGCIKLLYAGPNLTPNLATSVGESGSERRVFRFIPRRGFVRGILKPKCGFPIVPPSLPLEKTISAAERPPFAYLNGRAGPKKT

SEQ ID NO: 969019 - protein, 102 aa, Homo sapiens
MCERPRCCFLPDEDVYRRAPLLSTLTAPPPFTPLGPFPLPKLVLVGKHKGVLFIWIVTCAHTRGVPNHASDAAVATSAEFTTSRLLYTFRQYKYNALLQKFG

SEQ ID NO: 969020 - protein, 281 aa, Homo sapiens
VPANVSTRAVSADAWWAPDTGTGSRIDGGNTQRVGLSPQMAPGPKASPRMETQPSVEGGEHTGACGAPAERMGRHQVRRDADGRAPRSVMRRLRPGEAVYSPGCLRERGGVPPDVLWREIGAPTTVGESTGGVLPVVPTMLFPGSTSRMFAPTRLRNPRGVPLPGLKSNFPFEICQGRGISPLLRSCRARKCPPHKEKPIPGRPWCHNAVPLGITEWNETPGLIRSCWRPTRGRNVPSAYAPPPPGGRPRSVITGRGRKLAWWQKTQNPPVVVNRKSLRTH

SEQ ID NO: 969021 - protein, 193 aa, Homo sapiens
MEEKTPACHDSCQRGTRTKQGAPGVGEQFRGKLSRPRPQTSVLPGLLGRIQRTQVGDICARPPKSEQEEAPPRNKGGPASSLPSASLQGCPFLYNALRCQNPCGGFNTRYVEEKTLSETNTVMREDLDHHAVVCCPPHQHGAYTPILDRIVIATIRVLLPSKTLVSPGRIFRNEKAVLTLRKKIRKNQNKHRQ

SEQ ID NO: 969022 - protein, 259 aa, Homo sapiens
MSMAIKVPRISAWHNRWLPPTQCQCRTKSGGTLYQISGDRCASGPLCKLSGSTSQCVWRAPRRKSDGEPPRSPFRAKAEETVGHQRSGGKTSDFSAPGVDDDQTSSCVVKQGNTSFCGKHQHHIGAPRRKVWAAQSPQVNENPVGVVIPENVPPPKIFPPCEHRRGALVPAPRRNRRPPTIQELVADKEASGNVFRGNCTAVLYGGQMIIRTRRIVSPWSGIGVPAVRTVVGKYRGVTCLTGRLPPQNEKPPFDTPNNN

SEQ ID NO: 969023 - protein, 257 aa, Homo sapiens
FAEDTKGLSLRECEGTNRAKMVRKTKGHIAKQQVAEDTDGDKIRPQLGEHPRGAVDAPRRGATPACPLFHGKPHKGGARGRAQFWERDLYTRRAGPANTRYDQRDVNTAGEETIVLRKATLASKARLLKSPLVPGLLLSSRTHTGSHRPCHEESAEVNTEGHKRTLLRESTPDLTEVVSSTVRRAHRRGTTPGAILLESMGARARPQMVLSRGQQGATTWHRALERTEPPTGPSVHSLYVAVLDEKKKKQHGHNNAR

SEQ ID NO: 969024 - protein, 103 aa, Homo sapiens
MLAAPCVSVASYLTGEPFGEKTSFGEAILSNNRSVPPFEKSPFRVQDILRWAKKPRPGSYPRCSSPSSLALPSIGSKIEGRVVKIFHQVEYRKDSSCDAIHLR

SEQ ID NO: 969025 - protein, 136 aa, Homo sapiens
SLCGVDVDMKYSYAAASGFFIIFSQMGSWRNGDIKILRPSDCLNRGSCHPEFRGFLTFWETHVVPNPRVVSRNLSGPPPLLLVVFDDAPECAPAKSGLCLPKLFPGPSVGESCAAPFEAQSRLSDASFRRSLGPVS

SEQ ID NO: 969026 - protein, 187 aa, Homo sapiens
MVLRERNLERGLQRGVLGAAKGRRNSPPYIGPCCVSPQVPRTSEGPGGTISGPKKGPPKLSPGNILCVVCRETQEATSLLSLIAAHHFSGGTLPLKNEDISFLQQASLLLRLLLLEKPPHTCRRRPQLLNHREYSKTKRASTTSARTLYGVIHHKSMRQENDRIEDQYMIQPPPPGQAPQWSPAAGK

SEQ ID NO: 969027 - protein, 118 aa, Homo sapiens
GGARKCAALCRKRCRHTLWVRREIRWATSSGGGQTQTWRAPTPPRGGMRSAVGRQTYQRGSAHTGITHNRSAGAAHTGWGKTPCCLAEKKDKRAPPGDTGGAVSRRPSGNWRSPPNIV

SEQ ID NO: 969028 - protein, 151 aa, Homo sapiens
MGAALCRPTTDFSGKNAPCALAPPHPRVHFNVNRHAHQRNFGGGPPTRTRALCVEGGKPGVLQTAPPRVCVPMPPPGDLFLFYHARQGECTTPVSLLSQGAADFSLRYPGYIAGRLRRPRLYQTCTAPPDAYFYEEVFRFKKKNPVPPPQD

SEQ ID NO: 969029 - protein, 142 aa, Homo sapiens
LCCDIVLFWAGVVLTSPFVMVSARLWSMFNYWVVANPVASRILWSPPAGVGRFPGPGAPGFFPTSCCMPWRWVLLLSLVTGGGPSFHVLRTPPLGVMVAPASPGYMPWFMAVASGRVCVSWGQYPLRGRLIFGCGLPVGVYI

SEQ ID NO: 969030 - protein, 125 aa, Homo sapiens
MWISCRKQAKKFLTLWIPTGYIRSEIAHTLEGFFLRNMHYFKLSPGEMNIVNDSAARTCRITAGACWDRMLQFMAVVVSALKTRGACRGRKVSGNTDNKSNRMLLTQQRRFFGGQKTKTFSTNMT

SEQ ID NO: 969031 - protein, 235 aa, Homo sapiens
  misc_feature (89)..(89): Xaa can be any naturally occurring amino acid
LPSIASRVLAPIISLGEPVFFMRDVVSPVKAFRWDLLSLSTRNVLFLVVVWSCSAPPDQRKHPSPRRASYIDGARHIYHVCGETQRHMXKVLYASRIIEAHTACPVCIYDIAGTWVHSLSSRSCVCISQNTCSCLSVRYSGHTMWAHTTVNVNLVVIKESYPSHAHIASLTRGHAHRASLLVGFSLWGRPRRTALTLVRYIPGGTLLHSPETELLFEYNQAPWELVDHKRANIVA

SEQ ID NO: 969032 - protein, 112 aa, Homo sapiens
MGAPAREYCFPERPHYVDEGGPVSLPLMCLFPRRGFGLQCRAFWGRAVSARPRACLPCWDVSSRFYEYRHCWLHLMGEFSLHISAALSLDSSHILWGAHFGNTAGRLQSPTL

SEQ ID NO: 969033 - protein, 303 aa, Homo sapiens
QSYGHAGVRDVRWGRMQMGRPTAVRGKTRSKGGVGHPSPFGRQTASVAAKFISCPTVLGRGNYDTRIKDGGQHQSTGGPWAQTNSHGSNNGRRPAQDMWASKAVYSDLSKGALSPMDKGAPCRRPPAIKPLPARTTPWAEPLEQSLSPQGILRQGNTGRRAATGAGELPALVAPTDREYSHRKPRINFPTHESGGRWAGSCNRPDTPGGQPQGGNHNAVGKWFAQDTTQAPEVRRTAESLHKRALFQTAGGDNPPVAHAVDETARGSGLAGTRNRRLTKQANSRGPPPETVQAMGQKTEAPQN

SEQ ID NO: 969034 - protein, 260 aa, Homo sapiens
MPKGSRRLRALREQFVALSPISVVSNPQCSRVPPLWVARSVYSRIAGWAGTPVLVYAAFINCLVVSGQKTHQLCITAGAPPPMIGGEPLRPLPSFSPNRRRCAMDQLCHPQSRPSGANSTGGAPNLQMPRSSPGRPLATAGLNEVEGSPSPRARDTWPTTSDTWDSRGSPTTSSPPDERPDKSVAITRLLLLPEDDFTTTTAYTTSGRHTRNCVAHPGRLPMATTERSRSTRVSHHPERRGDNKGAYTKNSHRGGPTRRI

SEQ ID NO: 969035 - protein, 275 aa, Homo sapiens
GLPLRPLCLRPGLCFLARNHTRLCWLASHHRTAGHLFMSSYTSSWLIYGRSFHRRESDLSLLPGVELSRVCPAVASTCAGYTPRSTLAGFAGVVYPPLQHAPTTHRVEPGARHQPSLCAGTHCVVWGDAAIFSPPCERTRFATVLPGNSPPSHSFCFRETCCVIYYIAPLARARFVLRGQRDRSSHRSYWVLSHHTQEGFSHREVLHLSLRRERPQGGTLVESARHTMRGDLHRTPGRFASEPTTQGSQGSEPPGVTPAQSPRLPLRSPAHPPKT

SEQ ID NO: 969036 - protein, 168 aa, Homo sapiens
MLAPPLDKGSPRCPPSMREVSSCGNRNTLLVSRTKFSPQHGVYPREDMARSPLVGVLNTDPMAPEGPRTILSRTPAVYSLGGSYMINRRGVFPLSPVARYSPGVLPGTHHKSWLAVPASAIVHGLVPVGREDSEEHCISARCYNRRRGIIIFMWPMVCVIYSSRARGS

SEQ ID NO: 969037 - protein, 133 aa, Homo sapiens
MGGRGGPRVGSGGRAGPVVGGGEERRRGEVCGKDRERTGWRYQAEEECWSRLGGRGRRGGGRVGVRCQGGVSSCRGGGAVACRWLGGRARERSCSPRWQHCGSCFLPTRCCVQMCGVVDEEYARPDNYHLVGR

SEQ ID NO: 969038 - protein, 216 aa, Homo sapiens
MSAPLVGGVPPMGRRHDFRPWHKFYRGRGPQLVGRPIDMRFRNGGAELPLLARTPPALVFCHTREVMLVTHTRGCHQRSAPTLIDIRPADLNTGSGPLLFWARARHGAAVPTAQSMGTRRQPCGGHHTSQRGRDPTPPCEAHPRERAMQHTRFLDGCSTDAAKRDKRREEFAGYTTPEEGHSIACPLVCSTKGRRTGRPTAGGDTSRLRPDAAKKL

SEQ ID NO: 969039 - protein, 300 aa, Homo sapiens
CAELPGVARPPVSGLVVPMGRLYFLGVVILPPMWYSAGPDFIPVPVTRDRFRPTGWFVQECLPARYCNSSRSVFQIPRVHVHRSRCAPHATWCLTCAYLGGSTRGNTLRYRPHSCWSHATALRRSERRLHFTGSPLSWATVDLGFPRYCPEHFVPPRTIFGDYSSINCRPPTLGNYRVEPPTPCGCEVSFSASNTPSAISHAHPPGDRTHLHVVSPHAVLAEVCPIIGASPTTRPRATASEYYMFQSEDSRCHFPDVAFSYPRACAYYNSSIAHSATGGSLIAHKSRLYANPLTTHKPTR

SEQ ID NO: 969040 - protein, 236 aa, Homo sapiens
ASSPPSMVAILANIVPLGPFFKGVSPLGAPLRVFVSYQSKKLCGQFITLDRMNGKDVESPRLLMVHATWGCADSPRICRAANDRLGRNRLEQLRGLSPRGEVSHTHIGVVPTTHHNRRVKHRRAWSWYAPHGVPRYKQTHAVGPTRTVMGPHTHTEVGGTPFWVTYKGGPPRDILPHMSAPLLYDTVVTPSATPHRIHRAYSSPGSTKPWSHQDIRREMLAKKNTHWGACIPSKHY

SEQ ID NO: 969041 - protein, 107 aa, Homo sapiens
MSTGAYRMSSCAAPWVFPETCGWPPAFVGRYLGTRDSAGSSTLPHRDHLGAHCLLADTDVASLCVRYYPPPITMRRLLTTTRSFPRVMQREFSHSGVHSGAPPVGGV

SEQ ID NO: 969042 - protein, 156 aa, Homo sapiens
MSSYTRGAPSGPFCHWDPGQGAPPGPWGRGVPRHPTPTATAWGKQRPPPGASQRRDPTPRVDTGRKGVKRGPPTPRPMESEQRLAEPREPCTRHMSPPFHGRPGPLRPASNLEAAGRQLRRALHAPGRMRHNRRGRGRDPGVGLGSTPTTRPPRPR

SEQ ID NO: 969043 - protein, 311 aa, Homo sapiens
MLWLSCKCVACCRYGGIHNHHIPGVITPTYVGVLNATTAVFPHSTLLGGAPPKEVGARYYVVKRKLLRGPMRPDVVCLPDTPFWGPAAQCPPHIGGEHQRHADINELGEKWWTTPAIFAQVLKEEHGAANFLLAGKKEMWQAVYNSGMTVWRDTHRGRVFVRSLPTALVFYIKRVGPPRNTFCAQNGWSPRGDMRRTIGVRAAADDSIIKKGPPPPAAHTHGGEPPVCTRKETPHKQFVPATSGGGHTTPVEPAQLLPARVRRKNRKCIAPVKRHRARRGTQSQTLPLDLPPRAGLPEEPRFQQTTYQTNI

SEQ ID NO: 969044 - protein, 149 aa, Homo sapiens
MSPRSPKKGEPSSCHTRPRPSTLLVWDADRIGMEHMCVGTPRRVINTGGTRKSSPAPTSSTMSWAIQCDHAPGTLWGKHPHGGRTPLVGNNPQDARRTPQMRPQRGRNTPVEAFSEKTEGSYRTEKWCMSRNKTPHHWQPKHRKFAQKN

SEQ ID NO: 969045 - protein, 141 aa, Homo sapiens
MVHAPAEYSAPFVEDVNTFVFDTIGGMRFDMNTHGAFILLLLTGVWMNPIMGAINKGVGFSTHVVLEVVKEREMKLFQMDEVLYSARSCTDQRVRILPNMSTGGVHHFVEHIDEDSHGPPHSLTIPHFVPCGTQNKPSKPD

SEQ ID NO: 969046 - protein, 207 aa, Homo sapiens
MYTLWPALRLTALLFLALSIFPGAPVDIGHLPSPGAPLRKWVPGVTLIGSPWAFPPRPQVSQRVWLQGRTPLYWRSRNHPRGSPYRACTRTLVGPSHDCEQTPCGGKKPELAPYEDREGQHSPQTISRAPQPTGQRLGRNQGTLVPPLSVDAVTSANTKFKGRPPGRNTRKAHCLPCSPRMTHFSLPGDPRPNFSRGIKNKKKPPHN

SEQ ID NO: 969047 - protein, 272 aa, Homo sapiens
FRFAACASNVGETAGGGPKNVPGVWPLSEGAFLDRGFVPTTAGDPLLCGPVGWGENPGPRSWGPSSCSDDRARIRHPPLRVRSPAGFLCAHRRVVVFSPRYGIPSLVFFGGHKTGAPHDVFCGGFHSEEHQTSIHPGKVGETIYSPAGRRLVVHRPVARVLTSVCRTTTDPALTFTKFGAYYEQGEEIHVQGTPEPRSVSSANPTRRVEPPTRRPRQGPGAAVQAQQSVLRVSTGDHNGAATWAQGAQGASPYEQFRADRLPKDKKKLPHIT

SEQ ID NO: 969048 - protein, 108 aa, Homo sapiens
MAQRSGCRVEFGEDTPGTTGGWCPGDGGTPQWGYNPGEAAGGRSGCVSDRNSKVARPFLADTFSVVVTLCPPGEDQPVGCVYALMAGCSLRIIVYSMGRQTPPLVPSS

SEQ ID NO: 969049 - protein, 182 aa, Homo sapiens
  misc_feature (116)..(116): Xaa can be any naturally occurring amino acid
MYIRPRVLFNLEACPISAPPRCLLRPRRCIKVHVRCLSTTPGLSVALCLRAFDTILRHARGVYLSGQLNYVAPVATPAMSKPITGEMLLPIKWAGELLVGQTAPLFKRKYDGFLLXYGGKVYHHGGIWFRMLMCAGEPRYKHKCVRVCNIECTRLPPTKHAGAFIKVTLHLVCPQRGACMLS

SEQ ID NO: 969050 - protein, 222 aa, Homo sapiens
RVCERGKPSSVLPPHHAGVASPKGDPAVNAPKAACVLDRPKLLLSPCAGRPPTVGGTATTRWGNGPQMGVVADEFARMSPLGAPDRSVVGQDTEKHQRGQDSRAHRRRASPHSLVSFDKQHDTTAARVEGVVGWKHTPHRLEPAQVRCKLTGNLAVRKKPPPRCPPKWRDTGSPSQPFLICPDRISPATRFLGGTHALAVTPRKRRTRPPLIQYPGQPWVHM

SEQ ID NO: 969051 - protein, 226 aa, Homo sapiens
  misc_feature (92)..(92): Xaa can be any naturally occurring amino acid
MGPNGNGPGDNATGSPNGHNAKQFGQPKGEKLLPQGAPEFGNGINSPTLVARNSPKSAYATEAHNREPQNATSRGRENNLWRPRPCARGCMXQQVQATPWAKYRENLFGKLQGHLRCNGYTAASTGRAIKGPPGGGPERRHRVKKLVYTAGATKALRKRGLTPGSFETGHRPHTDRDKLGRLPFALQRSTCVYKGKMFPRGSTYGRRFCLKTPSVARRMTKETNHD

SEQ ID NO: 969052 - protein, 122 aa, Homo sapiens
NSVPMFVCDAVLSLFVVIGLASWTYGFLLARFERPRSLGSNIELAREILLTSAAGLCLCVTEPDGCVSSTSCGEDTLMCARVVLLANAPSGGPSYCILKILLSLVSTLLWTDYSIAFTGIIC

SEQ ID NO: 969053 - protein, 240 aa, Homo sapiens
MGIFLVTKKVVLPRVPLSLPVQRAAPSRFCWPRSPRRVSRLHTSYEESFFRRAPTMCVSYAVIVLQMGPNIRQALLVVLADILAGTSGFLAPVIVVVVRALFVPPPRTPFICPRVCPRLLPPPVCLLLPQGFLGFTVHACLCARVGAPPYQFWAQEAVLALATRVSALGAPHGVKLAPLPPPLFGNITKGLAYPDVPPLQCAPQPLAHYPFKHGFLPSSWILGLGFFLSETPEKKMFQRK

SEQ ID NO: 969054 - protein, 108 aa, Homo sapiens
MYFDSFSSACSRERRVDTLDSIPHISVCSEVSDSLTRRYLYSQLLQTRSRTRSCLLYVQHDVSWRFVSLPREYGTHESRLRRLVKARPPPFMVSPRILYPAGPSLIQK

SEQ ID NO: 969055 - protein, 118 aa, Homo sapiens
MSGIIHEVEDTPVRPPQNDGDISWERHVHFSPCARHLMFLFSHRYPRSLISIPTNRVRYYIPVRSTLFFLALPQTFVKSCSSCSPNDSGPTKPKKYKFSFSSTTPPLLTRTSSTHNIT

SEQ ID NO: 969056 - protein, 118 aa, Homo sapiens
MFLRCRVPHPKLYAYTVTLAPPSSRPLPSRRQLNLLTPSDSFLGAKTMFVSQLTSSLPIFFLLAPRRSPSCIQYPLLCDFELYTYEQRMNISTRLHTYVGGHLREARAGPARSRPSRG

SEQ ID NO: 969057 - protein, 164 aa, Homo sapiens
MNVPRGIVVAPLLWGGLMNPFLIQWARPLGTNHRSGLLGRSWSFLYAHMDGVASWSALPALFSSLARPPPVVPRLPDDFVPHRGSLALLENLVDPPAAMFSHLPASLRSPRLGRRTSALPLTALVCILHPELGALLLFMDSLPPVTPCWRHFDAPTLRCPLPPL

SEQ ID NO: 969058 - protein, 104 aa, Homo sapiens
  misc_feature (83)..(83): Xaa can be any naturally occurring amino acid
EVRLVPPGGGGLPYVGGPRTAPLRVCGPTRRHNSGFSLLILYSLAPRGLIHASRPGYRSSARTRLSRHRLAIMARVGARNCAXRSAHALYILCALSLPKEAHLS

SEQ ID NO: 969059 - protein, 275 aa, Homo sapiens
MATTMVAPLAPCVAVNQPPGYRYPRECQPFIWSGTTSGTSEIVGRPKSAICKPRQGNLHDNIGSRLYSAAAEDWQYTWETHNYKDCPPLGPPFFGETISTKYGIGEPKTLGYLELASFSIQSVFKPSGALFCWNVNNSFGYHPTLFWTTTRYFPSHKMARVLQRDVVAGEDITRLTNSLVLGYHSLQGAPPYWWHQQTLNTERLLCCNEFIIFTRGSARVIHLVFSLWPTTRGRDAPGRSCRPTLPSFRYWLIVPFAPTGSVVTEGVDIMLLGER

SEQ ID NO: 969060 - protein, 149 aa, Homo sapiens
EGRTGAPTAVDGASRSATAVRVCSALVVSPTVVVSPRRSLQERAFLLRPHCLKAGFGARSPNKGWPPLLETMCLVGRHPPPLWVDCVHPPPGNLPPGGLFEPGFPPKEKGPALSPLAPQFGTQWAAHARGGPHQSILRLVWDATQPPQR

SEQ ID NO: 969061 - protein, 181 aa, Homo sapiens
MSFHHSPLSPQYWWGRSHSPSGSTLLLWLGDHSSDLVNDFSGRPHASAVTFHGYNPPTHLECAIENYHWGVLPPSLRGLPPIRGYPHHSCSYKNAFAGSFFSELLPHEYFFIAPPPWFLPHIIFQISVSHSSVYHACPISNGRRIKAPFSPLPPPSLRRAINMKQTTHLKGGIFFSQKTPT

SEQ ID NO: 969062 - protein, 282 aa, Homo sapiens
GPLGVEPVSSGTHLVVEQNFVVLVLCPCVEPTSSVWARPPYFSAAARFCIYGALWVPPGVYLVVIVFLFLSYGISLFKESLVVMLAPFCVITPGDGSPAARRWCALGVVRLIVPLSHPRCRPTLCVGNLTTVMSPVPPSVCRGVSCSFSSRCGPHTVSLSLFRRGGGPRICAARGGAQFASCLTPLWPVHSLVISLSSARGDPPERWFSRSNVLLSGKEAPLARTHWGAKRLFSFLGGTNSLHSGNILVVATARLLSGSAPPLPLHGTMWGSFKEKLAPVLS

SEQ ID NO: 969063 - protein, 107 aa, Homo sapiens
MIVSLALDADGGVFARALWSRVFARFECSSSLGRHLPASAPSFSCVKEWSVVDVANDLLCFSSLGVVSVSFCLCCSTSESRDNRKRVCSNHFNDCTASFFLLKAGGH

SEQ ID NO: 969064 - protein, 279 aa, Homo sapiens
GFPPVMGPRSRYLRCNNLPLGLSASSHGCSPPPPDVMARRHRWWRIEPIEGSSLIPPTECTIFLARTSFSPLGCTDLVYVATRAPAVLNCGPLLLSPGNCAFPSYVTHLLWVGRDSTSPTNRRFDSLRFGRACPEKVGVGVAHSTWLFAPGRTHVCVMKNTTRLVVHIDSAAPRGGLLIALVCGGVCAQYARCISPHATPPFVTCSRHLFAMARASPCMASVSSAYAPQGLRPPALRTSVSHLESLHIGGEPPSAPALGARGFHDAQGGKNPWIFPPHN

SEQ ID NO: 969065 - protein, 96 aa, Homo sapiens
KAVVILFPNATASPPTSGSRPRGGSSAPPPYLLVEEEEEQHHNTTVVVDAPPPHHELHKKDRVSFPTREESVVMTLRRDNTTVGRLLCCELSFSCL

SEQ ID NO: 969066 - protein, 246 aa, Homo sapiens
TASLGARGTLLSKLADSCVVEHQRGLTWALIGTGFTKPQSRTVPNGNHRWPPQVCRAPRTFRAGPPFPGVGSLIFRGTESRDIRGSQWAQRAPGNPCAYEGRISPRPIAGLIPTTQWTNYSANLNSTQDGLQSTKGDPCPPYPVPGGRADATLPPRVRLSTQKRRATPPLCDPQAPPLSNATGGTTPESPAPLLVEATGVTPPPPASQSSKPLFIMTAYFLSSGVEPTGVCATPNGEISDHQDSPP

SEQ ID NO: 969067 - protein, 51 aa, Homo sapiens
MVEVRSCGIFTKLLRKEFLGDPQSSTARLQPSGKFFFTAPRENPFPKPNQN

SEQ ID NO: 969068 - protein, 131 aa, Homo sapiens
MLRGTLPRSFTISFLCAIRYCRFPYNFRGIPLDSPQQVLDTFLIYPLLHIWFLKISPHEAIIILSAFPSAKFFIMTAHSFNDPKRLLRHPFDAPLLVARCLYMRDHQPLSLSGDNYISITPPEDLPLLSAS

SEQ ID NO: 969069 - protein, 117 aa, Homo sapiens
ESLRENCCVVPPHELVGWLCFWVLAPSRVGHLFSNVSVSVLQEMIVPSASLSPRSGGACVVSAGTPLETTSVPVVSDFPCVSSSVSLPPVRSVTLLTPSGLPSDKFPGVPLTAWSER

SEQ ID NO: 969070 - protein, 217 aa, Homo sapiens
RNSFRVPTVCPLLLEPRSVNTPDVTLGKRHVFGPRADLFAHVDERKVPPSVKHRVQILGNAAPTPVRREQMCGPPLSSGGPALILYCARVRCYSRSARDSTLRPGGHDITVGLNSEVQQNRGISLPPAAPWGSSPNSVADFGGTTTPARTFSGKIRGSPPVFATTGQITMTVVRLQCCAPGLAQPGGSVSLRTSLARFGFSCPTSHLITTPIKFVGF

SEQ ID NO: 969071 - protein, 205 aa, Homo sapiens
LGLCLPPCLGATSGPTTGAAPGCAYSAMSRPEVAIAPLLRCPLGRALLGPNQVRGGRRSMRALALLVRGIAGGGCIPRWALTRVLSTSCTGVLNLRATCSLVQLDHISVPRLLARIPQGGSLFPRSFMADAVVYYVCPGVLHSPPLVVARHTAPLSPFVDPPGGPKTFPLNAPGRSCATFPRGARTVRGGRTSGRPAPGGERPGL

SEQ ID NO: 969072 - protein, 331 aa, Homo sapiens
PGHTVSFVCSVDWRVLPLCSKRLRLVPQPGHCCEVYLCIARWPAPCGLRESTWRWKDLPAPLVACRLLLKGPRAFCKHYNPGVVSLAQEQRVRRFQQKVTRTRFGKNVSRKVHAWGRHKCLCMLSQRCSKILFPSRYLTGIVTSVASPLLYHYDDKIGRPSPLFNIGFYMTVCGARSHSEDCLSHTERGLVTFVRPHTLGGLLLALSEEITEQSCLPSDASFEDPGIVYEQFKILCGRFWLTSFVLHGVIPPDFKWDTPLSVQTINADADPSSFHAHALASITDFNVEAPPHDLRADRPERGARRHVEVQVEVDVFSTPHNNRYKQYFTRS

SEQ ID NO: 969073 - protein, 214 aa, Homo sapiens
MGRLTTLGAACWPTRARVCQAAAWALSLGLLLGTNPVEQLWRDVTNTGGSRGGMIEVSPPPDPGVLSVKAALFRGISFSAAKVDYNLSHGKIRVGLYTLFVHKTSVRNIQYAFEENDSLPPPQGSPPTTKLPFSEASLLGPDRTIVSYSLFTHTPVVLLGFSAFSPPTPGGFTPAPDSLRSKNPRLGLSDGRDPAEDGGSTLYSSTQVRRLIPV

SEQ ID NO: 969074 - protein, 32 aa, Homo sapiens
MWGSLSFLNSYPRYQHVLPHPKGFPPQTTGHK

SEQ ID NO: 969075 - protein, 113 aa, Homo sapiens
MSRVITLFENTEGAPPVRMLPRSFGIVLGTTFSLWFVGPRPPEVPEVCPLRGTPLCRKAPYVPNPSECISLPSGAPRSLQGGLPFLLAPRIEFMETARAAAKYFSEEIPPAPR

SEQ ID NO: 969076 - protein, 105 aa, Homo sapiens
NSHACNTCGGTLLIVSDVYPGSPFALVPRAWVPARTYVLSQVTLVPCEFRAHKESRRGTKGPARSRPRGPAALNSPTVLWCPTCVCSPPPGPHLFSWAVAPPVVC

SEQ ID NO: 969077 - protein, 135 aa, Homo sapiens
  misc_feature (18)..(18): Xaa can be any naturally occurring amino acid
TGKGVERMHILGATPMVXHRVVVRSVAQAEHAYIGETTRLVGATGLLMCFFARSTKAGGRSFIGEYFFFACTNCFALGERRRLCVCMKRAVPERCSSSVWHQSYGYSAPPTALFERCFFETNRLACYGTICPTSV

SEQ ID NO: 969078 - protein, 55 aa, Homo sapiens
MTHTIDRFYLFFGYSCNSILSSTAANPCGQPFNTEQDNNFFPIPHPPPAFPPSLD

SEQ ID NO: 969079 - protein, 154 aa, Homo sapiens
FNTCPPIIAGAKMLLGEPVVEPTLIAPNYWVDLLNASSNSPLRRKNVLQRRCYLMSDTDGARNNPVGVKERPSHPPQRDGGFFREALKTPKKGLCRKIQLQGGIVLPPVRRKLLAVENNNRSTSQYLTPRDTKRVVTKTISCRTRTRTFLFIFF

SEQ ID NO: 969080 - protein, 180 aa, Homo sapiens
MSFPVPCRRPRNSNFLTEPFFQGLFFKQPGGKVYSAKSFAVPLGKEHWFNPPKGAYIPVTPRGVGVNKQESCFETAFPVVPPSSETPHLWANPSAKPPKSGGPTKQISSTLSRSNMRKFETAAALGLSLMKSPPSCVTPRQTGMVFQHLVVNSPRGLQYVTNWSIRQGGRSCTAPASNTL

SEQ ID NO: 969081 - protein, 133 aa, Homo sapiens
WAPITIVVGAPLWFSLPDIGLPAVCERCFKVLPVAALVKRRPNSQVLRLPWRCIVRRVLAAPGSFVALTPPLGPRDWVCETWALGFPADFFVWYTTQGLFHSHCLGKKQLLGITTTGLEKNSSYTVDPRSSSL

SEQ ID NO: 969082 - protein, 215 aa, Homo sapiens
PARTLLCVWSWNLFASPTLLPPRSVLSFCDPLCVDHPLVCCRRGAVFYRSGVVGDDRDQKMFVLWDESPPFGRRLVTSDPSPSPLVFVGRDGWASRPPARTRPLSSTKRCVIGAPHRILLSLGLIKEMRFSLPPPADPPPACMRRGLLLKFFSSSISGRIASTAFVENDYVARDITKLLVYVRTLTRHSPAGQGLAPLVTLPVALVRASMGCLRA

SEQ ID NO: 969083 - protein, 198 aa, Homo sapiens
VSNVSQLYVICALLVAAHLLRSGPCHVSSGVAPSVRSQCDTLVAAERVRLCEAGHGFCLGPRTHDVLSFLVMCRWDNFPPWGRHNLGLSVGAFHPATQLFKSNTPLAGKITRRHFLLGSKQMCAIGKGGYSTATCGLIAVAAQFVVATKPSGVFNSVYSRCDGQSHYEEDIPTRCVSINFQALINKRVWNTIALRLQT

SEQ ID NO: 969084 - protein, 291 aa, Homo sapiens
ARVVDAKPRGQARPVNHDRGSGPTRVVGRVEARTAPDKINDGHASQTLTGKQATPPTADETDPTFRQTLDNPRRHTCSGAHPWPNMSRGSPHERDFAHPCPREHRRWPQKHIRRHQGPSKASYFVPGRNVASRYRALAPRHRPVGPATHTLAGYPPVGEPPSARHSSACYSTAARRPEALTDHTISTRRGRTVRHVGPTAREGYTTVLKSFYRKHIGTSERTQVRQTPTVSLGSLEVVEHHSTKVLCPLDLAPHRLKEVERDAGSTSDGGRPPVQMIPGVRVPTKSPRPHI

SEQ ID NO: 969085 - protein, 312 aa, Homo sapiens
APGVTQKGAPKEPWSPARALKGPPAGSQEAAGEIRSSCKTTGPPNLGMWRQDSPWVTSPARSGSTIHGAPPHWQPSVGVWGRARHRWTRQANEAQQGVQYTHTCQRLRLLSGLAPQGPTKPNSADSTRGRKTGQSTQRPVTGAGKRFPQRDEFPGAKSLNHHSVLVRPPPGVATPAPHQKSRATTSLDPTHTVPRPQEPPWEQPPPEEVTPVLRARISSMVRILLLSFGEEWFTSRMEEGRPMCTTNPYQEGNASRHNDRSLLARPSVHVGEGILPRLVGGRRPPESTVLLTRLPPIPPLRQKNVFFSPKQN

SEQ ID NO: 969086 - protein, 42 aa, Homo sapiens
MRPPPEEMFVRGPPRPLGGALARVFKPYPRGFAPKKGGGPKK

SEQ ID NO: 969087 - protein, 108 aa, Homo sapiens
  misc_feature (1)..(1): Xaa can be any naturally occurring amino acid
XVPSRKKVGLPRLFPGPVKRVDSLPPHPMVPRAHRLETRARVFTPCDKLGRAQIMCWDVLGTLLFDGGAPTLRRAIVGTRKALEKMGCRTIRCAAEGGFSSKKDPCVL

SEQ ID NO: 969088 - protein, 250 aa, Homo sapiens
YCGESLTGGVAALMKFVEEFISYKFSIGRQCVGPLTRWFPTRVYAPPRVCVPSCWFRRSQPFGGRTFSEACEPASLVGNRAGPSVNSSLEAYFYTPPVAAQQGLLASSEMGEEPDGRCVERRLCVATAPTGFRGALICLIVAPGFKPPSIGFVARSPNAYGWCPGPVARLDILLVHNEVRSYVPPQIIRFCGKLFHKGLDLVPVPPLCFINLVGDSFVVGDTGVVSVGPQQFVPPHYHGALTPPMSRRPA

SEQ ID NO: 969089 - protein, 52 aa, Homo sapiens
MRTFCSLLTITVRTKSLGTYTKRKRVSGKTLVEHQKIGPLGKKNPPSFFKHN

SEQ ID NO: 969090 - protein, 157 aa, Homo sapiens
MRDVLLLTGRVSVPSWTGTTQRGPPGGGTLYGCTRVSLRDLFSQVPTHRSRPVFLGHTRPLENPSVPWATEVCFSRWEPPLCEKIYVRLTRRVLFDSLGCPPHNGCVSHGAIFPGAVYTTPTFFPPHPDAGGYYRAQIFENFWKTNSPPFLYRRRCA

SEQ ID NO: 969091 - protein, 146 aa, Homo sapiens
LLVYERIVSGPGGPRWRVRSVIGEPPVVCTAPVHTPGPVCAASLYFERPFISQSVWFKARAHFLRGHNHGKEARDIIAESTALWSAFRFQMWGIPPRLYFPQYGGKELFLPAVVEAGPPTRAPKNGRSYYEQDVEGPRRIVPEKSS

SEQ ID NO: 969092 - protein, 282 aa, Homo sapiens
MTYVVRGLVWFRPLLVDYVCVVWCLLLLWWGAAIVVYVVYDCVASITCPYPLGDRSPLGLPRPGCFAPLWRFFPHRMSRPRILLVGSRRLNFRFAHPFTSFPPGPEIIAAGFAHFSAGSFLGGTNQALNEYRGVLWVSPPGGKPLGAPCLRKGFEAPGRLCADAGLPHARLPRVYTPCPGEEHLECSPPPSQERMARLRGAHSSWPRKHTTTRWAPHPRATKQPGQPNAWESHLRGQATLLPRDKMFARPDIPLMLSVSRTSLPPGGGKGGPWLPRVPPPGS

SEQ ID NO: 969093 - protein, 55 aa, Homo sapiens
MSAAILLLGEKRGSGLYECRTPHGWVKQVCKTHISFFGLQFLNVVFILQYKKSAA

SEQ ID NO: 969094 - protein, 299 aa, Homo sapiens
SPGRRGEEERRQGDVENTGRGRGRDGGWTPPVGSAAPLWWRPRGGQTTEEGVRTNGAVGAQAKGGCVERRSARGGMRGAPQGGGEEHTAAEWSPRASRLAWRGARRRRREDETLGGGSPRGGRGVASARGGRAERGEERPRWGARREEGREGMRSAVRRATAGRCLGGRQRAASDGVRESSTRRGRQALGEKERQRGGRRAQAWQGAAAEECLCMVVRVLLSLRRARGCRSSLGHRVRRGTRCGHCIAGLRRTLGPCPGGDGGRSHRRGCRAFHEAPSWCAPGPPPTAGRAGASPLPQI

SEQ ID NO: 969095 - protein, 120 aa, Homo sapiens
GNKSQGGHYSRGRPREGAGRPKIQGYKTQAGLLSRMGLQGPPAQREEKPRPIREQKAVSPPPLGLVTPRPSYTSGSVRAVQPPRSGCRTLPPLLAPQLHDLPLPLETQRPTKPFFRTQQL

SEQ ID NO: 969096 - protein, 218 aa, Homo sapiens
  misc_feature (1)..(1): Xaa can be any naturally occurring amino acid
XYMKKVEKSERSETQCHVGTRPPWRARRVSNGEAPLASAHMPLVYPHLWEAPCRPKSVARVKNGPQYLPTGANPKSAPGRRPESTTLGSQRGKPMAGETPSLGNNGESHCVGKYNITRQGATIKSRVANISKQGEVKELACTIVGGPGHPNELKVVCAPPPPARGTREAERPLAPEQNIKNETDRGNMKYSDVSENKCKSPCARQIHGCVVRRTHLNK

SEQ ID NO: 969097 - protein, 122 aa, Homo sapiens
  misc_feature (2)..(2): Xaa can be any naturally occurring amino acid
TXPDVGIDKIREGSLLAVFLLIDGWSTGIGDPFSMAPPNMARSPYTVLGWHCGYVMFRFQEYREFSLVIPQVCFPWHVYGPPAKCRRPLRPLVTSPSRGHSEIHGPSLRGEYKTVGISGIRN

SEQ ID NO: 969098 - protein, 67 aa, Homo sapiens
LIFSQSGKVVARQFLLWTPGLPLVQTSRIGVRTPGLDSPVWSAPLGIYCLSPQVFANSMEWLPPIGL

SEQ ID NO: 969099 - protein, 167 aa, Homo sapiens
MADEAAYTRSDPSGFGTGLRLRTWDTWEPKPPSGGPAPGSRPRQWRRSRFGATRGQYTSRLGRRRAWPACVKPGRCANSCSWEPPPDKGARPKPNECESLPEPTNTHAATLLAQIRQETPPGGGYPQRPRGHKKWAPAMTTAPHQAGPDTYKQHEENSLPLTRARPV

SEQ ID NO: 969100 - protein, 165 aa, Homo sapiens
MGFTSVTNNGLFAYTRLSASWSNTSTGPNFVSLGQAHRGKVRATPHPVGELFQATSTPLGAPLPLSVDKYTHRVAPGGLTHAPDDPQGCRGPGTSGTPTFPPTGTRSAPQQTSMPLFPPTPPSQTQRCEKDRLPRPSHSHNSPTTIIHFEQPLQYQQAILNLHQR

SEQ ID NO: 969101 - protein, 186 aa, Homo sapiens
NRGAFLMVCYTEIECLLSGKREPFPPQGRFSEESVAGPPRWAVRGSKQNTSRDSLDAAEKSWVPVYKAPWLRVGATRPTIAPLWCRKISPPPPCERYAKFSSSGGTPRSLGGDSNTTRLGGGHPFSGNNRGDQTHKGNVVNAQSSPPEGGFPHANTRQGSQIQCRGPDPVPEKHTTGKKGAPRVAK

SEQ ID NO: 969102 - protein, 292 aa, Homo sapiens
RTNRRGDLFREALHPHVGARRGHIRPGELALGKGTPLDRASHRGASEHVKVWYTKEDTCETAPTPLQDLGALPPGLHGTGTAVRHNCPGPRMTIKGSSVEQQIKQRGTPPGANARGRVPGDNTDKLGVVEQQKAPRGANSSKRSPQQPPPQSDLARPNLSLRPHSFKNAPPRSYRVQTWSPKNTGGDVGTPPPEDCPGLPPVALRRNKLARCTNSATGISVLASPRHVNNGYSSQVRGKACSLQIYIRGEAPYIWFGETPLLMLSQRWRVPPPHFGPSFFARVKSPYFSPKK

SEQ ID NO: 969103 - protein, 313 aa, Homo sapiens
RSLLRGGATTKKGKGPPNKVSTRVPDHEKVALTFVTETANRGILSRDGPPPTNGFETALTSRMRLDKVCRAGTTTAKKRFAVHLSGPGGAKPPRETQHGGGRPHHRSAVIARALGASGSYVYSEVPPSMAIGWYMVVGPPRERSKGYHPVPPACLNGDRRSLNRQRGVDFSSPSEASRCLLQVPTLPQVFPRSSRAHATGYTTLSAPVGERLHSFTAALNHVLSTAVLPPTSWSSPAMHAVMRALVLRDAQFFGGALAQAPPDGGPPASPAKSRVFAWHSCVPLSGVGAARPRFYPRAPVWAVKKIRIFPFHM

SEQ ID NO: 969104 - protein, 115 aa, Homo sapiens
MLGPPFVRPVLVDHSPRHMEKAFFGISSKTPIKGAISAQIIRVVHTPPPVVRVIQGPPPCLTNSGAESCSHSLCSFLHASHAPNQTDNDIRGCLFSTPNSGTQSSTSVSYLSGNW

SEQ ID NO: 969105 - protein, 75 aa, Homo sapiens
FSRDRHHTSNSYVSCEAPPEHPLFSNSPPVPTLVDVYADNKYLVFPPRPKIHFPSYLPPPPSFLVGGPPPSSCCI

SEQ ID NO: 969106 - protein, 137 aa, Homo sapiens
PPLVGRAAPARLFSPARQPAGETPPLWRRHVFRPQLGEPLCVRGHNDSFPVTCFRLMCGTRWSRSPHLLWTQLLQRMSFFGPAQCRPLRATRAARGGSSPPCSQPRPSCGPLPCSARAALGGVLNVREKLSAAAADE

SEQ ID NO: 969107 - protein, 243 aa, Homo sapiens
ACQKRWDACVSSSQPAAARTTAWDHPFRGAGVHPGKTRPAINGGAKLWLSGISRRRTPTAAEWVRQRRVSVQMFGAHMRAARVLSNKNGGRCVQKNAGPVEMCEPGESTKQCSNRSGSPKASDSLLSQVTCKPPLLSGEPQSDGGSSSAHNGARGDLCAGLAHHAVIKGSPGPLWSRANKKLREFGSSDTGEEGSHRQEQKRQCDSPAPERRPHVSRAHLGHQTYSCIGCVLCLQEGFLVLVS

SEQ ID NO: 969108 - protein, 162 aa, Homo sapiens
APPTRTAGGGQRRHTAGYASLAGPHIVGHRAAPAQTNTHGKQTERCAAAPTTNGEAPLPNDEEWDQQTTGSLPAWGRHSPPLDGAICGEHKLFARPPPRRGCFWRPPPKEQRVSKGHQHNRVNCPSLNALVCPHHTSPTEDTTTCALMGWSWVKKGLSLSPT

SEQ ID NO: 969109 - protein, 299 aa, Homo sapiens
ALWGPLRTVGNWGPKSGGRSSRLSGDPSPSGAGPRHYLSDTRGKKPPWVHRPARPRGCWRPPLGPRPPTNLPEDHEKGGETRAIQRPKFGKAYNSGAPLYRPTPPGGYRLLPPPPRAVKKACPRGVPDRAVTTEVHHDGPPPLASDNWRGGSPHYRNPASPPHTEGPLLRQVNPPMAEDFLHSNEMLANGRRQPPHKRGQAQGATTSANTQQHGRITCQRRNPSILKVRAPEELPFISWRLVRTDESALSLFLESIEFTRGLLLQQVTPPTRSKNGVGEHKKTGISRGHPKQTQTFSST

SEQ ID NO: 969110 - protein, 114 aa, Homo sapiens
CTLKWTCGVKTLVIIFSPRRFTPLEYSVAPITLVPPTALRIIIFTPRPRVFAEWCVATTHRSPHLFFYQHLLGVYPICWVSHTYVSQHLVRNFTKSSPPFFSHTSSHHTIIFSF

SEQ ID NO: 969111 - protein, 143 aa, Homo sapiens
MSAPRNSASSGYVFFTGKSVSREDVLLEKVCPQPQWLLGIVVNTRRAPNGVDIGTTQSYLMMRSPCCFKVWEKPIMNGCSVTTKRGGIISLAPQMIDLATCTPPQVFNCTLSVQSPPPMLVLAVCRLIPRIASCSNKLNRREC

SEQ ID NO: 969112 - protein, 205 aa, Homo sapiens
  misc_feature (201)..(201): Xaa can be any naturally occurring amino acid
MLGFCVPQDTRMSPFPQDPLPKGCCIYNTNFSEAQNNAGNPRQTHDLSPTLLQQRRDVLTLIKQSNRVVLFNTPQKSTFCFHGISKYPRSYRPLHKVLSCTQTNTDLYACRLLPPEVNNSLRGTACSIKGFTTLLRELHLLVVSPEHRRPLPQVHVRSPPRRRTPMIPKRPFSVWAPLYNTPHSECERVRESQRFSGERIXCPGL

SEQ ID NO: 969113 - protein, 97 aa, Homo sapiens
LKPRGGSNAGGTLSGDRKPVGKNDTADTSNAPGPPSPSYCGVPRPTTPLWGEQASFVIISPSVNHASPDKHGSSCHRKQEVLTTVNKNVPHTQCFAR

SEQ ID NO: 969114 - protein, 156 aa, Homo sapiens
  misc_feature (14)..(14): Xaa can be any naturally occurring amino acid
TTVAKAEIAWGGEXRTTHQPIIGGSQPEEHRVSCGFPTRLMPPTNAEKVDEVVLPPPAFSGMGRAPSPINARPLLADWALSSATNAGAPTPASGEKQLRFDLASLKNVSSPLLCLTYMSRRPDTSLALLLTKLCSCKPSPKETSSMSTPIARYRSI

SEQ ID NO: 969115 - protein, 173 aa, Homo sapiens
MSDRLVWRGRRTKLFLLLQRITTFWCFPGRMIITDMLFEHTSQFRLGECGQICPHGPVWCAASSARARPRFSPRARIFFIFGPAGGYTSTGWCGAVPSLVAVWGLVSPVSAVLVSSSLQKWSQWVFLLSPVIWALFGRRRFFSHGALCVDTALRGIPRSSCLLMLGGRTSSSW

SEQ ID NO: 969116 - protein, 78 aa, Homo sapiens
ANSSKVSHGSVPFVARLNPMGVTHHVFGRPISSGPPSEMLCQRRQNFDVGPHLSALPKHICSVLSPAAPLFIPPWIEQ

SEQ ID NO: 969117 - protein, 105 aa, Homo sapiens
MFYTALVCNSSQLPRVSAAPLKENNLGWASSPGCQHTRSLHVMVSTGPESSLLSILGSPPITFRHVWHAPPPLGIPSLLQGCFVVTSSLRSAPPPLVGRPRAVVL

SEQ ID NO: 969118 - protein, 47 aa, Homo sapiens
MALLGSAPHLLLRDGPSPHGLDRRWSHEGINVIWSSAKKLKNPSPTK

SEQ ID NO: 969119 - protein, 111 aa, Homo sapiens
MGSKTTRRHKCDPRFGVGDTAYIFGSPPQIAPYEVLVHPGPHDMVSQISCIPRPSVNNSRRVMIWPSSYAAETLPGVAYWVLRIPKIVLSSYYDNTSRSLARKRSIARNNG

SEQ ID NO: 969120 - protein, 155 aa, Homo sapiens
VTLKRNATTAPRLSGGCAPPPPYGPPRATHTRGCLTKRTETFTIKETQLGGPPPEHALSPPTCGDFEISHPLLPQQTMSGLDHSSPPGGWRPTSDPPTGAPPHKNREPPSPLPPKNMWGEIRAPRLSNQPPIGRPPPHTYSLQQQRGGTHRSRRP

SEQ ID NO: 969121 - protein, 267 aa, Homo sapiens
MGATPEQLASITCSAVRKRMWPPLVVKHRRGVPPYLLQLCSGPPPRMANQGLAPRDPPDFQGAFFTLHPTLGGPPMPVCGYNTRNARHPCVSAVFYPENNAGPTHNMVAKSNDYEAHTNLLPHITIYYKRRQYYSYCPHLTLPRHRPHSLTPTLGVGETTLIYQDMVGASYTRCPSQTLTFSKRNSVNCLYSNDRPPHFTTIKKKQYLVDHALSDSILVRVRRPMLDMSRFPKTQKCVLLGRARLCPDQHCVSRRLGPPEKIQTDID

SEQ ID NO: 969122 - protein, 162 aa, Homo sapiens
METHLLYDLSGRIMPFLNKTWAARVYFLADNSTDVVLGPAIVQQEPENIHRKCLRLLFPGAPFKYAAGVYNPRRVIVARTTPFGINLPTFCETHRAPTIGKAYSMVLSPKMMAAGFHPAHSVHAHTDGLPLRLSAHRLLSNYVRQKISWFRPPEINWGKAHI

SEQ ID NO: 969123 - protein, 162 aa, Homo sapiens
MELVESPLAGLVHLLYTISWGPPPTYCGPPTLLPAVATPYGRSITLGRPTWYHTVVVDARPALLFVYKTLGSLVDAHKQKEKKRDSLDARLEVIKYELCLRAFLSKCSFEATLLCQRGSQLYKNSSHPTGIFPGKLVAVEDLLRILVIYIEPKMPPPPAHKT

SEQ ID NO: 969124 - protein, 170 aa, Homo sapiens
ASWWWSSLSVGWFVFGYFGLSLVRGVRGGAQWDGVVSQLCVGDDLIAAGGTAILYGSPLLRVSVMSPVGLFFCFSAVPVLYTRPRLVITSFGRCLQVWTLLGFSVRGVCMVAFSGRSDFLGVLIVLISTVVFVAPPPRSAASHVGPPRAPADLTVGPPGSVWVFFSSPLQ

SEQ ID NO: 969125 - protein, 136 aa, Homo sapiens
MVSKASFFRPPPQFPARRIFWNQTSPRINPITYYALGEIFPTHTGQKNQPQNNRGSQTKARYETPFPTTSSLCHHHPPTIILVFFQTTVSRCTPFPDIFAAGPSFHSPPIIEPKSVAHFFIKRRLSYKMALYKARC

SEQ ID NO: 969126 - protein, 182 aa, Homo sapiens
SPVFNLWASYQRLPHLRRDALSPAAEFGEETLLLAEGNPSSAMRGSPHYTTRRMGPCLPPRGITNRFTVGRPPKSYSPCAEKFCPPNGDQQCVFSRRYPKKKRFDTTGFGNQWAMGPRLPPPKFLIWPPPPPGRLEEEEEQEGRDPKCNIDPPWGQPDLLKQRLTRSNLPGGLTWAKAASSL

SEQ ID NO: 969127 - protein, 90 aa, Homo sapiens
MAHKHPLANRKVLCSKDNKKRHPKFSPITPWFRIFGGRFIRQPDTRAPREPQHSYSLKELLWLCPSSPRFFLLTFNFFPHKNSPWNKPNK

SEQ ID NO: 969128 - protein, 50 aa, Homo sapiens
MALRSLLYAHSLEGRSHACLVFKVTSYARRLLVQFSHPPKLTTGLPFYKT

SEQ ID NO: 969129 - protein, 142 aa, Homo sapiens
MGDLPLFYTQTWTVLTPPLLPREIYPPYGIIERSRPPRHVPMGCTINLEGPSDLAIRVLQTHGQTFLFGGGYFLKTNFGGTKKFRAHYTVAIHCPPDYCPPKMDVPPNFSSLYLREVEPLPHFLERSSRLLGRTSLGKHKPG

SEQ ID NO: 969130 - protein, 128 aa, Homo sapiens
MCFCLRSALSREVSAPSCLLEQGMSRVVVCCRVGRRVTARFFCLVGRRRGLVVFLPRPLFLCAAHILVVVGRGCLVGRRHRPAVGRRGCRLSLYEVGTPRCRLCGTPACGVVCVRAPPPCVVPPIFGW

SEQ ID NO: 969131 - protein, 205 aa, Homo sapiens
MGRFPGYARVLDPLVCSLHRRPDLCRTRPIWVRTLTRFHCGPDISRGSAYISAGGPARMCFSTHHRGSSGAFLPNMPKVLREQPSATRALLPEGLLPGDNPPQGAMPPPKAPHQKYRGTMVSRTHTYGSFRRSPEHAWRCKPPHQHSPKIWRGLEHARLQAELLGWPLSAEPPASIPPPTSGYHSTVEPMDAAPIGVESKNPPSP

SEQ ID NO: 969132 - protein, 121 aa, Homo sapiens
MFVLGVPPPPPDVTPVVCRPAKRRPDYFLFLFVGEKFRGGLETIFCGGQLCRSPSLGVAPPRGAPLGALIARACLTTGVGCSPMAEVLLFCEGIFWALPPAPPPQKRFQTLCSHIHLAGNI

SEQ ID NO: 969133 - protein, 269 aa, Homo sapiens
MFVSLDADGGAAAETFSGTAWGTVSASVCTPPECVFTLPNGPCSPPSVSHRAADLLWWGPPPNLLVLQATFSRVLLSWSGIIPAGFSLLCPGEHHRGGVKLQPRRDQCCARGLLRGCPRRPNLGGSAAFRSPHLWGTPPSCCSSPRKKKCVFVPLYWEVLEPVKMILFPTGATKDSKKKMFAEWAKIGATNNVVAPLFTHFNIGGWNYYKKISRERYNHLIAQDEMFRWDHHIRAVAHVSVKKKNPLIFWAKPPLGVFSNQKIFFGGPP

SEQ ID NO: 969134 - protein, 160 aa, Homo sapiens
ECGSFARRPCVEPFPRAPPWVLMKRCAPYWAPGPPCWGVCTPSVAPRRWSPSMGGTRWTFVEVCPPRVWAPSLLGLGWCEIVPPSDPGAWVPESVASAAPPWARPGGPPIGPTGGPPARGFSGAPAPPPPAAFWSPPRGTTRVLLRRVCEPHDGVGPLFL

SEQ ID NO: 969135 - protein, 276 aa, Homo sapiens
RFVSHSKGARIRLAMCPLLFTGAHVALIGVRKKGSPLIRLVSPEEFLAFPRAGSFLKKVGVPPLRSPGRMNGVTPPVYDETTVCSGKKEEKIWPSGKTMRAGGFNPTSALAKTTHITCNQTVVLVSMPKPTSVRVNIFKGLFHCMSDNNIFPQKVWMGGPLLYRSALLVVAPENDWSHNGSGTCEKLMVTPRRRASYPPLYIEQERTAVDTLIEAWGNCVIMGAYSPRLDSRPTLPLYGKTIVLWGAKVSRTHSPTTDSGGNYSFSDDAPQIVVQS

SEQ ID NO: 969136 - protein, 215 aa, Homo sapiens
MAFSTQVFRGGLAHRGGTRYFPRGTPGSPHVGFLPPRRICRRSPFLWVPTGPTQHEVLLPIERHCPRSVCKHAADAPHFQTPCGEDHPTVINLVPPEEPPTFVGEALSQFRTPLCGAPFVRCLEFEDNRTANAMGGSIQKQRGFTHKIRSEPGSHGAQLTHSSLPGKTIPIGAHRVSFVPSLQLGTPPVGTQCGWQEPGLPRVGCIIDRRHQLLW

SEQ ID NO: 969137 - protein, 109 aa, Homo sapiens
RPLYVPCGTRGFIPNGVPPWPALVLRGAATCLHPNQYLCRPCKFSWFSLFARPGSPLLSAPPLAPLPGKVANLHKSVVPALTFSLPLGGKTIFREIFPPRESPPPIPFF

SEQ ID NO: 969138 - protein, 86 aa, Homo sapiens
AGFHPGVFFRGVFFWQFAFSLLFSCAFFVVMGGHIMWGRLFAAVLTFPFMSRRAFQVKILVLERVFCGVFSGGVAALLFRGARSHS

SEQ ID NO: 969139 - protein, 129 aa, Homo sapiens
RPVGRKAGGGRSVEAAATRQAGKRKEVGGWRRLEGKQPPPAAQEEAAPAGRWFFLLRGGEAVGHHDDDYYYFVGGALVAPLLSSRRLVRGCEEIESARRDSLSALSHTQNRNRNIKYILSPTTHTQYNK

SEQ ID NO: 969140 - protein, 348 aa, Homo sapiens
MVMLAAPLRFVLCFAAASFVGRGLYPVVPRCSYEAIIVSSRVVFRAPHYYPPRGGTTHFVSPNRPACLPPRRRTTVGGFCASRPRPPSLPAGGEKYILCASAWCWFPVVAVSRAPPQRGTPGAPPFCVVAMSVFLWTRPASADTNGGAPVDCPIVASRACATPLSLLLGGGALRIVPLSPSSPRLVLPPPFGGAPTFIGRAPRAAPFRCLEIVGLPPFFSVPTLVLAGGSQHPPLVAPMGGATNLGGAAPNRLAPLPPFWPPAPPCVSPWRRSLDTLFVPPASLSVPTAPSGARNRGLAPPAPQRCRPRGHLPHNLAFLPPLSIRLLFYPARSLKSPLSFLAPQYQKT

SEQ ID NO: 969141 - protein, 242 aa, Homo sapiens
SLSGTNLFRRAHGFGQPRRSVTITHSVWGGGVPQGRMTLVLGGETPHEWGACITTTWLFAVAAAPIRDVPNSASSHRGPPPRLFTYSFVGLTRGPYCAGATIFFIVRAHHIRPVNRAGFSHPQSMVHTHELPSRPVPRSSFLCRAPGENLAECVTPPQGTHRLSCLRGVSNFNCSTINAPSLGWTRVLIDLVLLLIESKTRICGRRRQSTSVFDLLTLFDNKFFIKKLGRPQECHPYYVRAI

SEQ ID NO: 969142 - protein, 34 aa, Homo sapiens
MGSRRISHIARVRILSISVASLLLFPSNTPPPGH

SEQ ID NO: 969143 - protein, 72 aa, Homo sapiens
LLCLCPPAIIGSNHAAAKRFPSLYPSTSLPNWVKLHLPPERPIYHRHEGLTPSPIAVYPEEIHHGGCTQYRL

SEQ ID NO: 969144 - protein, 104 aa, Homo sapiens
MEHTSYCSLGQNYINTPGTISLLHFTPLVTQIILPPRITDSCKHFALLLTGLVLYSNVSNYSQDFFPQHLASSAPPQIFYKKLKVFFQKSLNTNIGIIVPKILI

SEQ ID NO: 969145 - protein, 114 aa, Homo sapiens
MWGELRYTRVGELFFAPAKLFGPAHPPHYKKGLLICIHFPRVPSTPRESPFCQGVFTHIVERAGAFSQYIVRRNLGAPAPTRPQLSPRVMSTGEVTPPAWANPFGLYPNCQTTS

SEQ ID NO: 969146 - protein, 192 aa, Homo sapiens
ATRLPTAESMSRPFEMVFSEFPVLSCPECPRLVFSGKCFSDVEIVGTVGRNAPARASAVFRAPPLYAPASSGLGSTRLNDKQAFVAEDSRAPPLVNTWMAPHSECWRDPPAYRVPWPTNCCDPPPGPPPWGAFRPSVNKQDQPTPGGSHQTPGHTQTSVCDVGQRATKLVPRSILRAVERGYLFPVLRPPPS

SEQ ID NO: 969147 - protein, 248 aa, Homo sapiens
  misc_feature (19)..(19): Xaa can be any naturally occurring amino acid
MRRLPGCGSARVRKPARGXPVPPVGLPPRQVLLCPPLGACFPNPKCLGPRVSLLGVSARPNFRFATPFCFPARSPNKIPRGFRRFPPGVSFSHKTEVGAPRFRGSGTRTARGLFLSKWRAPHHTPGEIPPLVSPRPRFVYPVPPAGSPLPAPRDPLPRRPGVDFPNNPPEVFYARFLFEAPAPSLIGRERPPGRRWCAAAHKCRFVDTVGDFAPMYPAPPVGFQKGPPPPRGPNFPCPRKIKKNFVNP

SEQ ID NO: 969148 - protein, 170 aa, Homo sapiens
CAHGDIGDAPPCAKLCAHPLPRRGKHFFQGGAPPSFPNSWGIRPCAIALLPRFAAPGCARQFLLGTYAVAAENPVLRHNLAPAVTPCRDVMCTRTGRLVLLVPKQKLLRLFLSAESHSERFSRRRHLYHRRNTADRPPPAWPLNIKGVLGTLYMLRLKATFSHKVCFQYT

SEQ ID NO: 969149 - protein, 246 aa, Homo sapiens
SFSPLRMWFAWLCTNPCCVASRGVRATIWRRYYRSPRVAKAHRVTVVTAVGHTAYTLGETPWGSPDPRGGRHLASRLPGPLCIFRGVGAPPVGIYSPHVSPWCAPAILVGAFLPKPDPCFCASPSSQTWRPREGCSQTPPARKKGGWRRAPTREVVRSTRTSTRVYRTPTTEPGATRRSLKTRVGRERYSPHPLGGVRENIIGPRRLNRHTYATTTASFIPHVGHPALRCKYPVRLVFAHTCERGL

SEQ ID NO: 969150 - protein, 73 aa, Homo sapiens
AVRDVSRAPKLLPQMMLGVHTHVICGRPGLFVYDHNILEEGKPICGPHFFYNRVVWFLKSKKRLTHTIGYTHL

SEQ ID NO: 969151 - protein, 225 aa, Homo sapiens
MLAKPPLRAFPLWPAWPFARLRTPASPSVLPVPPPGVYFRTLRLTVDKIAVFRGVSPGFQNFADKRPTPASDIDNAPAQRLKYIVSATVVHGTRVVPPHTPRKFPPGSFNRASYPALINGRPSVGSSLTVGQLFPVPRGWRPPRGAPLGEVAARPPFMHRWEESVFPGIIAETITTRPVICKRALLPTRLELIFLLLRPREVLHNTFGAHKLLFQIPVTLVYQSL

SEQ ID NO: 969152 - protein, 248 aa, Homo sapiens
  misc_feature (174)..(174): Xaa can be any naturally occurring amino acid
HTSPASLFSSAPRIPPRPSSPHVRAYLGPPPPLLKPVVVSFQVATRGTTADCIPLVCPPHDGFPDSARVAHPLADMRGDSCWRCALLPLARENNVGSEPLPPPDQGVAALPSAMLFWDPVAPLRRERELPPLLATRCLASPRRRAALHHTFLGSNIVHRCARHMPRGSLFACPXAGDIVVSPRPPVRKERGAPQSYWPAPQPSPGEAEEVGPVATHDIQDAFVRGPTKNMVGRRKFKPQQPSNQTNKP

SEQ ID NO: 969153 - protein, 107 aa, Homo sapiens
ARCFAAWCRLRGPRLSPRSLSAFPLLFSPGLVCSVVEGTGDNTGAVCLNPLGTSRFSVFPSGSRCFSPKDGGDFPRWAWAVGPLRLPTGFRCQEGQPSFPIRWIGHL

SEQ ID NO: 969154 - protein, 299 aa, Homo sapiens
  misc_feature (116)..(116): Xaa can be any naturally occurring amino acid
RGGFFAPPGCFSPPPSPVSVIGGSPSLHQQSGSLLLGTTHVNKHGTHKSILSWGVLPLTGGIQPFRGSFYKESQSGMLESCDCQQIARPPHYAAARTRLAPRTKSPRLEEGFFSRXIPLHGGEHYHQDTTQAQRSVRATRAPIADHLVVARGRRNPPGNIPLGATPLRTHPTTTRSESPQFLRQSLPLPWGGGGVECSERTPVRVLITRGLGLRLLANVFCTFVHATACLRGAPRCFITPPAPPPSSRSFYTQGACGVWCVPPNIQSPYISSPTPGPPGGPPPPLQTTPPPPIAPPPNI

SEQ ID NO: 969155 - protein, 303 aa, Homo sapiens
RARRAGRTEIPKHKKTRNPRLSPDDVLWSSVFSPQVRGPMREASQPREGGNSKGASPTPRVSHDGKRRNSVVTQGHKGGKTISRWEETVLSRRQECFSGREHTPPHGAPFDRALLFWRPVAFRFVRGPSIGGPTALGGTPRALPPRRRFWDNWPPPPCKVLLTILSAVIGPPGRSPPPGPLVNEPLSSAPCRGRFPRRSARELPTDGNTLVRPSAKISEELCRARLAEHAGPHTGNTSRPPKITRSHTRHPEGGHSSIHSSSETGTNPGWDAPRRVPNSLVTKPPGRGSPVMSRGESPQPHHN

SEQ ID NO: 969156 - protein, 137 aa, Homo sapiens
  misc_feature (10)..(10): Xaa can be any naturally occurring amino acid
GVPPTRWGGXNYAAPPIKLVCRGINRGAAVVIRVSNNSFFVFSVGVSIIRRHHFVAPAVRHKSQLCSAPTQYTSRLVWSCRQKGAAPGVCSLQKIAPDREMTDELHDTRPATHASHITAVRRRPPRDTLSLVTATAD

SEQ ID NO: 969157 - protein, 75 aa, Homo sapiens
GVRLVAHCTNVGPPSGGALILRARPPKVRPSALVKHFPAPRGFRARPWGPRLLRVFPQTRSEIAARSFGSAFVRL

SEQ ID NO: 969158 - protein, 139 aa, Homo sapiens
SPEGPEGTTQQTRVTPSTHKILGEGHKTWTGDYQTRGMGDKQCTVLKGDPCSTLRGPSPDCGPVGTKTGARSNAHHGGKNKRSIWRNNMSPSIGASPRGVFPQRAQLTTKAVFHASHRGYTPRGLKKRESPIIHCVLWP

SEQ ID NO: 969159 - protein, 301 aa, Homo sapiens
VVVLLVCRGPPEFCFCRWIRVPPKILCRLAHHPFCPMFALSVARLTRAKNFVPAGFLRPHTFGPPRGGNPGSPLWSPPGGALSGGRYNYCPPLFRSARAFFFLAVCWVRSAAPFFDKMNAGAVVPTLRGFPLSVTRGLGGREAPRTSTTAAAVWAGGPTLSAAPRLLDAGVPAPHWVPELPAAFFPTRSFSTRGSSQVCLLRESSAARFALRLQEKGCGGTHLLLITGSTPAPGDAHSDKYSGASPPRWRARNRLASRVIEDAYDAPPRVTNSRPVMNFPHTRSAPYHKRAPPAPQNASSN

SEQ ID NO: 969160 - protein, 121 aa, Homo sapiens
MGGAALVRPHTLEVRTTNFSLELVLAAKEHFLYSDRTLSTVLENRVRTKTTPGSPPLIIPVDLNMLQQQPMPASRTYEIGLSPGKGKHNRPPVGNILFYTRSSSYLYPLYTLAPFIIKISS

SEQ ID NO: 969161 - protein, 321 aa, Homo sapiens
  misc_feature (22)..(22): Xaa can be any naturally occurring amino acid
SPLLLRPQREPPPVLPVCSTRXWFPTWGETPCVVAPPCGKSSSAACRVFHVCQFRSRCDAPEELSFGAWLAPHFRGSPPTWCRKFSVAAAPTMGPLAPRHMVSVGQRPCCVPTRVPLVSILSRGASFYVAARLHTGGLPYLFARPPLQSFLSVFYEPDTSERESPTTVYERERHVGRPPIPGTNTTKDEEERYLLSFMSLSDISGGGTPSFCHAYMTDILLLRRRAPPSLIIGAVLQIRDSRLVATYESRVPSFSRSAPWQPSSTAPTNVGTPYCGFQSAGQPTSESALGTGGFLRLHINEYTAVLSHDLPIKHKHPPPAN

SEQ ID NO: 969162 - protein, 312 aa, Homo sapiens
  misc_feature (195)..(195): Xaa can be any naturally occurring amino acid
PTTMVVVAPRGSPPCFPPRFGCSSAVTICRRRAPLFKIRRVIAAARAYFSRAAIIGWSLGTLPPLSGNNGLAHFLRRPVSSMGMVYTSPPGGLCTTRRHICRCHAPVVRAFVYVHPQRGVSPPPLCARCPSVQVGYARRTLFARTRLAVVAAGKVVRAAEHHSLVLGQHADTPRTCLGLTYSLSGVHAPLGVLAXSWSFMRWSRYYTPPFSATLVCTISARGASWSGLTLAFPVLWECSPPRSWLRSPPPHWSGVLCCSRPPLDAVPDSHGRTCAGPPVRGSTGDCRPFRPNAPHHPPLVSPFFFPNTRKKK

SEQ ID NO: 969163 - protein, 114 aa, Homo sapiens
  misc_feature (3)..(3): Xaa can be any naturally occurring amino acid
  misc_feature (20)..(20): Xaa can be any naturally occurring amino acid
  misc_feature (50)..(50): Xaa can be any naturally occurring amino acid
  misc_feature (59)..(59): Xaa can be any naturally occurring amino acid
SDXLPASLSATTQHEELILXTYLLDRHVLFLLLLLDDVVIESTTTCSWSXTLLQQLSSXRARRDVRRRRRVYSPHPRPPPPCRDTLLLLWCRRLLCSLSPPSRLLVYSRAEYTL

SEQ ID NO: 969164 - protein, 285 aa, Homo sapiens
PIAGVFSRASTSFIQAGDFPALTTRDSCASCVTPPLLGVVGARTPAPSYRWVTHAPFYPRGSRVVAPVLTTPPRVWSRSRTPSEFERSVLTPLSPLYALRRLNPWLLANRSTLWGKTPSCRPPQPSGAHSGYRPPPPAATAWGEQQEQRPASTHKEDRGGAHHEDKQYTHICVVGPHPHKEESLSPTNRHMRKKQGWRVMLTHNGESPTMHISGGARPPLLSSLILSLNGDKTIFLTMRHPFNNRWVFPANPHNIHTTSVLFQEHHYERHKLSNLQSARGVFSPM

SEQ ID NO: 969165 - protein, 235 aa, Homo sapiens
  misc_feature (130)..(130): Xaa can be any naturally occurring amino acid
AFISPPALIVAFFGPRVEHPFFRGNWRPLMKCGRGGSFASVLLPDWCLLSPTPFVGVRRGPFFFCPGALNHTSRSLSGHIQGLGRLFTSPPFGPAFGTVRRPPASRSGEENIGLHPPRRPLCREHFSLPXASGVFFAPRPTKTAPLSLFVRQLSPAKALPPLPLTNDSETDQETSHIHKQNRGGEHPPGPAKLLAPQPEVGASPPERRLGDRARGDNISSWETIGPLFSHDHARY

SEQ ID NO: 969166 - protein, 205 aa, Homo sapiens
  misc_feature (130)..(130): Xaa can be any naturally occurring amino acid
ALLLLAAAPASVVVDAASSTYTGVQVDCTHTPAVAGGGSAGGALVGRHATHGARRCAHSFVFSSRRGGVPPTLYSLFAQRSRTRGECDSHRLTTLCLVCLCQRRECFTFTETLWEVGGADRLRRCHTHIXRESYENRIAPSLSSCVVLFVGIFCATIRRGCNYSCAEPPPCLTLSPTGDVVCALTSTRHAAHIIEYEQYTRKHTR

SEQ ID NO: 969167 - protein, 47 aa, Homo sapiens
PTPHYINPYFTQQLGEVLFPPRGGGPPPWEKTPRPASASIYPPIMNT

SEQ ID NO: 969168 - protein, 215 aa, Homo sapiens
  misc_feature (160)..(160): Xaa can be any naturally occurring amino acid
ARLFSHTAGAPWNSGNPPRAPTKPGAKTASFTVKKWRSHLMHPFGPGIILGVNQLCHSLARTPPFCEVPFNMKIWSQANLLVVVPYCHNKKYVDCFSKWGAYLYNHWFLTLPPQYLSWRSTNTTRRCATWRNHQGVGNSTNIRRTISKRCFSSTTGISVXWSATIIKNLCRAVSTITTPQIRSGDALFFCACLFVTPLLFFKPIFFFVQKNPLGS

SEQ ID NO: 969169 - protein, 144 aa, Homo sapiens
MGRVIKWLIPPGSPTLCLKVPKRVFDVSTVISCASFGSPCPKCWEFFARNQTGSSSQGTPHRALFCTGIRPQKLFLGGGGNVVPTVVCVQLLWPSRAVPIAAPPVTSGLRQNHTHCLAHAWPPRAPPPRVFFPCPKKKFFLSPK

SEQ ID NO: 969170 - protein, 259 aa, Homo sapiens
WPPAPRYNALCELGPRFAPSWEHSLEGFLPRVSNMAFPMGPHPGWYRPPVAPGPPLWGWAPRGVPPPRRDGGTPWCLAHPFALGAPPSGPPLRKWGRNYAGPHILSSLVHTRMPPLTPPRALLAPALVEDTNATYSLCFSGRTHTITVRGCCLVLPARYTSPAGSQPGALPLVPRLFLRRRVHSPARRVIMTSGLPALSPRGGLLLFPGAPLVAPPLRPPRCGGRSHPSFLGETPGTPTLVRYHPDPPDYTPVLSGQQN

SEQ ID NO: 969171 - protein, 132 aa, Homo sapiens
MDRWQAIMWENALVCRKPRYANLYGPPPGNATGEGPPVNMLLLDPYAKKMNKARGHSVLISNHLFETSPPSFTLHREPFPNKFEKKATHPVILGDYPAVSICAPIYKTPPVAKLAHIAVKCVITVLVLNFSL

SEQ ID NO: 969172 - protein, 137 aa, Homo sapiens
MGVPSFVDVVFHAFVVSPCVVVISWFPARITPVFVGGYSGLFARLYGRGLTAVPPLIPRLSAPLYWARLFFSHIRDKRPGVAAAMLTGGRAGNRRAPIIFFGVGTTLYYRSVFHFAAVSRIQYFSRDFSPPFRPRGV

SEQ ID NO: 969173 - protein, 121 aa, Homo sapiens
  misc_feature (84)..(84): Xaa can be any naturally occurring amino acid
HGGCAPVAGLGKRLSEGAPCGGKRPQDSPRLCFVRSVVPHTRGLVIPGELKLAGEEFGFFENKWRSRVTAAVLVPQRQKWDNRXLFSIYKTTSVRVRPLPKKEYDDTHVSVGTAHKISITC

SEQ ID NO: 969174 - protein, 237 aa, Homo sapiens
  misc_feature (116)..(116): Xaa can be any naturally occurring amino acid
TKKNCISIHIRCVVRRGVFSMLSYRALSARTISGENLILCIRGNPLFEGDVLYTTGCPPPPARVYVPPPVCSVVIISGSRVISLSGTIVLRLSSAPALLENSLGGGSILSVQCSQXVADPGGGSKGGRPADHLINIGGPIDVVKIALEVRCLPPPSVNTHILLDPLSLLAELTYWLTTHNLSTVRNICASNLTIPFSLRTISDYIIGTPLLSSDPLLWSTPPYCTPNHPPIHFSGDD

SEQ ID NO: 969175 - protein, 248 aa, Homo sapiens
  misc_feature (90)..(90): Xaa can be any naturally occurring amino acid
MARGPPHFFLCGCTRGRKTFVSQRRLLEVFLAAGPRQICPGFSPPFPGGAFHTGVEMAGCPRFAACFCVKSACRPADSFPECLGSLLRLXQVSGDPLLVPRALAVMSPVPPGGQTAKGVCLPPGGWKRCYNTHDWVSHPARPTARPPGEFAWGVGPKTHNIFGAYSIHACPYSRLRFLRGVFLQNLEAPRRLSSQTPWRGGYTMSGQGPHMVRPPYLTPRRRQKVVSDSSSSCTVCPPHKPLAPPPWG

SEQ ID NO: 969176 - protein, 150 aa, Homo sapiens
MGFWAQARCAERNTRMLLCPHKLLVPRRLDAGLRGNAPVGLPPTWGSWIIPRTVSPGRIVCPAVTAGSFLTALTLVGGLQGTFFFDAPLTLGPPLGVENNLLFGRQRRQNNFFWTIPDGMSLFIHSLVSSRFLTKNLSSGRPEHHSNSPP

SEQ ID NO: 969177 - protein, 342 aa, Homo sapiens
  misc_feature (1)..(1): Xaa can be any naturally occurring amino acid
XSPPWSARPRQAGGRELGLSHRCVCCVVLVFGSSCFGCCPLFCSLLCLGACSLLVMLCTFFFMSGVVHYCVLVCSGVRARTLFVPPRVLVVVWLPSFVLSRSGSFCFLGLSLRVRLCACFLLFLVFVVPTQSRSRGAVVWPSSVARASPSVCVLAARGCFLLLVFLSPPRDWFSRLAPGVICCVFAALGVLPLCAMVAFARGSCVLPGWYFLRLVWGVVLFGSVFPSLALFGFLVECQFSTVRYVVMITLSVDPPPPLLSIRQVGFYALSLCAYALRVSYLCVPPRLPFSVSRCRGSLLSLSFFRPRPAPNDRAPRSLLRPPPPRRGTRALRLLSTGITAAV

SEQ ID NO: 969178 - protein, 194 aa, Homo sapiens
LLYVRVERVGDVFCRSCRFACALFGVPLSYPVGPPLGLVRPVVAVLRAGLGTTCAARFNNCAALVFLGCRARGFPKAGGRCNRGRGSRCVDVPGEAPGAAFFPKRVSPPACSLHPLGGPCSAYPGGSHVLGLEVVPAHTGVTRCVGVLAEDLPPLPLLGGPVPPRWCPPYRGSCPRRIFFDNTPHRVAYSLVYI

SEQ ID NO: 969179 - protein, 203 aa, Homo sapiens
CPRGWGPAFFSGCSFCPSFFRRIGRVKPPRPPCLIPAPAPPWGVKWPDRRAPLWWSVSRNPRGVFSPPRGPPSLLCGASPGGSPPLFIMGGMSGRSFPQDKVGSAPPAAPPAPPPWGSPGPVWLWARGYSLLVKALRLPRPPRFMAPPLGAPPRLFLKAPPLRHSLNMGVLAAIALSPSPALLAPSLFYYSLFPPLGAPRGTI

SEQ ID NO: 969180 - protein, 127 aa, Homo sapiens
MRYVCHAGAFFSACPQYAPYVVHRWGRTFSGCVTRGCLASSRSAVSPFAGGAAYLGPDPLISPFQIVFPATPMGVPMTSPQLTQLSSTFLTPSSSRRADTPRRLHTTHPPISPFPSPPQPSGFSLNI

SEQ ID NO: 969181 - protein, 78 aa, Homo sapiens
RSRDLAPGFGALPFYSRRGVSFPHCPVRSLLLGSPRWPISPWGPPRCDLYTLDHILWGSASSPLGRTLFDKFENTPHS

SEQ ID NO: 969182 - protein, 144 aa, Homo sapiens
MKKSAFYSPPQTPALREPYCRSSIMQNTSGLLPLTKQRQSQCPAPPPPYPLFPLNSNTSSHSSGKPPPPRILDPSAMTPPIYCLKNPPPPQFFRKKIAITLLYNTSRALTVQKTTGNLFPTHIFLNSFSRSDSLITRDQQSGSN

SEQ ID NO: 969183 - protein, 186 aa, Homo sapiens
MPQANHLFVLHKTIQDWSSFRPLQELACFLPTRSTQSKPHSFCRPGSSTPSQCWGLYTPRKPMPWQPSFPGQAFPGHSHCRCVACPPRTVLLSPRLSSCGNPPRVSWCACTSSMTPSGILSPPGKHFTNDSHLLAPKISSIINNLSPRLPPAFLLQDSTLSCHSVSHSMRYEPPAVLFTHAAAPFP

SEQ ID NO: 969184 - protein, 107 aa, Homo sapiens
MPSSIYQNSPGAVICNAVVATQRHFSRRSSRHLPPDSGNCGLPAGSAYAPPGTILIHSLGPPHYTFSEHARDNDSKISTEILENPFVFRRRKYSLNIKKSPPPLTLG

SEQ ID NO: 969185 - protein, 216 aa, Homo sapiens
  misc_feature (121)..(121): Xaa can be any naturally occurring amino acid
SPRGATVRLKASWHCPVFRLVSPLLGRPCVISLAQARRCNVLPPRGAPWSRGPLLGCGAGRSLFFKVPTPVHLPVSVCPPRYCVCTRGDCIRSGQNPDPSVHYGAPLCALPDAPPWFGHKXCGYRPPAEIGGSPKLGEHKEFQARAQTHETMETEAPLLEHGFYKRAPNIRQLFSSLHNSVCLQDNNLYDDVCRQDHGVCRTLRPMVVYERQLPST

SEQ ID NO: 969186 - protein, 177 aa, Homo sapiens
MLARCRLCVWRESPFCFVGEGVQVPPFILPSLWLRGGVTAEKACASGCLFFPGPKCVGHSVCSCRGAIFYYLVPRLPGGVLLFSPARRTTLAAALACHIVCEARLVGTTHHFLRLPAIFACSIPRFGGSPLVQLARARWQGWCFFSQDRGALRCIAAVVAPQGVSLTLRPNFGETQS

SEQ ID NO: 969187 - protein, 140 aa, Homo sapiens
GQDTLHARVYRVVSPMALFGALFRGSPSFGAPRGSVPKVLSRRVWRCEAFLIDLKLLMELEHRPPDSFGFSRSGPPIPFDWLVPPVCSRRLRGPDSFRQTRLSSLTPQGLCLVKPYPLLPPRFEKQGLLPQGKPHLHPFI

SEQ ID NO: 969188 - protein, 134 aa, Homo sapiens
YALRGPYHDHDLSPDTWVPFLLSGQLYTVPIWAFRTLPQGFRPFIRGGNTSERCYSAPNHTRRTNISPLPSLSRAPPWCMWGNRALTQGVPHPLGEKMLYASPPLLWRAHQLAPLAHKGAPPLGEPSLRPPYPV

SEQ ID NO: 969189 - protein, 256 aa, Homo sapiens
MVRPKRVLARAPLVPSASMFCAANAFLCGPPPFLCAPLSCGLPLSSPPVWFCPSAPSIWAVPTLTLSCGRCNPGGTLTGLRPTRGQALLRDILVLTQKLLLCDELFGSPYYTIRAAVLSPPFGAAGPPQESPPFGSPCGPRRFVAHPCRCCPPGVLTSPGGAPSVYYGLAPARPPSVQAPAVATIYRVAFYSRLYAVLGALGCPRTHFLPILLGANTLLVDHHQLPEDCLSLFGAATFPYYRAGIRPAIDVFRLET

SEQ ID NO: 969190 - protein, 115 aa, Homo sapiens
GSFIFRPPGHFQLVRIKPGGHTGLIEPGGAPLFQLPPVVLCSRALSQPQRLSPPRGAPTEKFSNPGCYPREQCGPPRPVYCRARGTHPTGSVVGSSGAGPCDPSCCHYVPLENTR

SEQ ID NO: 969191 - protein, 107 aa, Homo sapiens
MRKYSVLLGYVVSCALQKGCCPGVSMPCFHQTCVNLVHPYTVLVRGWRFMISMQCVVSMRRGQLYIMGLCATMFSLLSSMNHRVSAPGRRTAPPPFYRGLILKSKEL

SEQ ID NO: 969192 - protein, 180 aa, Homo sapiens
MRYNVDAKRRKIEANHTLVAFLCEARRLGKSDIKRPVNREYRPTRRPKTRRQSDTHVQRAQETTQSSGSKGPALDPGAEGPMGHPPAVLWLCGPPANPARSLAERRFSQAPVNGVELATGLDQGIWCPRPGTMDTARMTHSGLSDRSMGHAPGHNPAWMQPHREIKRQKPRWPPYGEKKP

SEQ ID NO: 969193 - protein, 238 aa, Homo sapiens
TKNKENKKEETRLAVSVSFLLYHVLACVMVHEFIRFHYMCFPASVLCGSPPVCVSLFSGVVFVFVYRSVFLQGCVHIYCAPVLALIFHTTCVWNPRGVVFYTLCGMLFPAPLGAIFGGVITPCFHSFGLLYLGSISLVEILVAGHNFPRKVGFVSPAFLCGGHFVRSTRPLRGLIFSLCSLTLFWASHDPVCCEPLCATNMRVCMWLSTSLVGLVCRHTFPWGPSRWVPASFFSWSAI

SEQ ID NO: 969194 - protein, 130 aa, Homo sapiens
  misc_feature (128)..(128): Xaa can be any naturally occurring amino acid
DFPPQRDSRSRASNGVFRSFRPLCGAHVPPGNAGSSPGFPSPPRSYCPAVPPLVVPPAPHMHIFLRVYKKCGPPFLVEKPGQRPILLRDVCRPARPTAYYEAPPAHTPHDMVEDLVRRITTLGAPVLXSL

SEQ ID NO: 969195 - protein, 219 aa, Homo sapiens
RGFMCAGLYVVDSVFAVLCAGGTLWTGVGTGSVWSSGCVGVPCLPGGKVSEPAVREPVGVAPGSRAGVFPRGRPRRVFSPGGGSVAPILGGGAPWGPPCVHITALRVGAPRQRMTFPVSWPTGRVCISRVDPQTVLLSGYFGCSLNVGARLCLASQGRAPPYVGEANIIVKTLPLGEARSRPQQRFQALQEPPPKEAVFVLESVGNKTAPIVSGQTRRC

SEQ ID NO: 969196 - protein, 193 aa, Homo sapiens
  misc_feature (2)..(3): Xaa can be any naturally occurring amino acid
FXXREARQEEADRLASCLLRYFRSKETGGQCGSPTGARVRSLSAKQTRCGKTEMVSLFEKCVLPLTFYKAQGPHQRWPRARLDTDVTRAPASASAPKRKFWRNISNSVTFGPPSKQSGSILPPGKPQVGSPPTDLFWKNPNAGLVNPPSETSLILTPRAYDHSEDLSITAPSNMGSKHHPQIEHWPGAFFPPG

SEQ ID NO: 969197 - protein, 182 aa, Homo sapiens
MRIPFLPPRVGPLCASYPHASCRVQPRANASNVLGNATAIFSGHYVIKHSPRCHPPSFFFLHRYPPPPFKGALKGCNHEVLLHSRPLCQNVWVYRKAVPPQFIKHERCGPYRVASPTSACSGLERPPRSCVPLFFSPPPLWLLSYTQGTRPMYLKWVGPGASTMGRSTFLLASHSPSLLGLG

SEQ ID NO: 969198 - protein, 191 aa, Homo sapiens
KLRCLGPCLGIKGVYMPPGVATNAFGSDRVKVCEVVSCLVGLYTPSTFPVSRRAPCTSMRSLGPCAPPAQRLSSQDGVTLFVPPKPNLREPTTPSPPTITKAVFLHHGTQPLCFYYEQMLSQGVSPHKAYSKFSCHQGETFLRRNNFVTNCAKKLPIVQLQSLCNQANMGVPLLKDHEVSQFFPPPSLEKS

SEQ ID NO: 969199 - protein, 70 aa, Homo sapiens
LRREEMSARRKKNGRQSVVTRSFCVAPLFSGKEPLISPSFKGLIFPGARGTWGLQRDVVIAGPNLGWSKP

SEQ ID NO: 969200 - protein, 260 aa, Homo sapiens
PRTGGPLRCRVCLCDSVCCVRFELACLSVVLTLCEWFVRSFCLVCCRACVRSLCLLSLSLVVRYWWCGAARHFSADPPLLGGRRSPPLRGFPPPPVFVYAPPYGLFFPSRGPGAPYLLVAADRRDNFLVARHPLPKVPFVRSRDNFPGLLRPFCRRPLSPWVSICVPRAPLGVVSSPGSCSPRSAPPFGQASPEGLPSGNGARCTLITKGGDPPQRTADPGRGAPTPGLAEQISFRRSISNQPVQKPLLGPRRSFHWPPP

SEQ ID NO: 969201 - protein, 179 aa, Homo sapiens
MDKPCAARALVTTRGIPHPLGKGRWGLLPCGPRSLAPPFGSTPAITPVLLIRVGRTSPSFGPYMREPCPVCPYLLTGWAPGIPPSPGSVGFPPMFSDGDPSFHSAGPLTCIVVLRLSTSRVMSHFRSCSPLRQPHNERYRYDRSLLPSAIGPLLAPPSAVPTPRALREPVPPTRTYIIG

SEQ ID NO: 969202 - protein, 259 aa, Homo sapiens
ACVLSQVKCGPFAHSLGSDNCNKTVGSPVICLDKEFSLPKGPLILRHVVERKFRGAATGGPPRLNNYLAKFIVDGPPAACCLKSRNGRTLSTPPSRPANGPPGTHWGPAKIFQGRIVGGPPQLMVYDMLVCPGEQGGPAGLHLPHFIGGCWRVLFPGSPPGLSCQHNKAPFWRGPLFRPGALFGGRRRRPPGVWSGYPPPLATAQAVCERYFATTNEFGEGVSTLDKGPRGTIFAPQESKKGSFKPTMPPKKLAGVRPH

SEQ ID NO: 969203 - protein, 212 aa, Homo sapiens
MSPPPVVFLRPLLCCLERPLLWFRRSPRLCRWLVHRVGNPVGGHDALPLGVGIAPLALPRAYGCLPSGGDLRWPAVVSTWRTHGVWKSAGIRRRLLSGLIWWVVPPLPPGGSQRPRRLEKCFFRGPPRWGGEMVPVLRPMMFFTPGVITSTTPPSKRGVFNYSTGAELGLDAPIFGNVSTLGGDTHSPGLSGRPQLTPVRRKFFRNITSEAV

SEQ ID NO: 969204 - protein, 169 aa, Homo sapiens
TLVSRNSRMCCPPSYGHKGPPETGSCPENPEFFSPPPMDVLRDPRCGPRKNFPLGDAPLFSWAGFHPFFQRTLQFQSNFREPGGGPPAGADVGQPSSPPAQLGRLGFFFAEKCELTPFPHGQHTRLWKNQVCTSAGTLVMPHLLPPPWGYFKNNRFTPPHVNYMRQHLV

SEQ ID NO: 969205 - protein, 86 aa, Homo sapiens
LFRAKSSAALFQKCETPKRSYHYLSPGETPYHAHAPPMYWAPPAHPTTVMKSQNPSPLRSFPKGAQKCFLFSITPPFGDQGPKAPD

SEQ ID NO: 969206 - protein, 73 aa, Homo sapiens
  misc_feature (8)..(8): Xaa can be any naturally occurring amino acid
WEALVYSXYVGHVDVVTSFFHVPTECGTCRKRLLNAMALRHWGAQNMCGAKNNNWGRGSPPPQCRVTVRAQYM

SEQ ID NO: 969207 - protein, 104 aa, Homo sapiens
TAVVHTVCWNRCMSRRLVRCFPPSVVPARCLNLGAFFVYAPDEIRGKTLTCDVGMFQEQAAPVVAPVVVPPMCVVAQTLREKTAVCAKTPQGEEGLEAKGRPKG

SEQ ID NO: 969208 - protein, 237 aa, Homo sapiens
APRGCLAALAPLLLVIPVSRGFLLCAVCHCDTSSVGCSPAVSFGVTTFFVVCLLSPSSFRCRRGFSSTRCGGRLPSRHRPRQATGSYEVRGFFPHQGYFWFASVLTVGGDITEALSLVGWFAPPATFGDSSPPWSLPGVLGAPASSGSAAAGAAPPPRVIVDIWRHSYDGAARLVPSALYMSRGRPQRSDFSPSAGFIRCAAVHFARIVLYIRRAEFSPTWLTTHQLNTIPIAATIQ

SEQ ID NO: 969209 - protein, 34 aa, Homo sapiens
MVQFLSGTHTGCPPTIANRYLEDPSIKATPTNDK

SEQ ID NO: 969210 - protein, 50 aa, Homo sapiens
MRGAPRPRGDTTRPLGATLTAPPPPRGDGTHNHAGSAQNSPPQRRHHMKR

SEQ ID NO: 969211 - protein, 112 aa, Homo sapiens
MTVGCYSLWDVLWGACVVCAGIFGEFPCGCRRNSCVFVEAGLVHRDVPVGRGVPPRPSPRESSVCAVGVYPPLFWGTTGDNTTSPLIHNGPPRDIELILVNCSPPNVNCSCS

SEQ ID NO: 969212 - protein, 132 aa, Homo sapiens
SRRAVGSSFAPRRCMLPSALWFFSFVGSLCEGGAWGGSGAYGGFPHCVEEPFFSARCGDLSLVAAESSSNGRWEWAPPTCYGMLGCGRAKSCGVGSRLVLTEGEFRLMHSSCLWFPQKMKGRLFLAPTIRHR

SEQ ID NO: 969213 - protein, 160 aa, Homo sapiens
YPGSTSRGLLQRCSPPYGRCFSPPFRLCWLLWICAGSTVCENPKGVRLTSQYARWCPLLPPSDLCHTRIAPCHRLFAHICSVFTAAPTEIGNRSPHIVGSRRNNCGEGKKWGGGPPLAVTFRAETPPTARPYISSSRHFTSACLYQGSTLFFIFLAKESF

SEQ ID NO: 969214 - protein, 108 aa, Homo sapiens
MLLACVWVPPPPLLRKTPLCGFKTHTNIGLGCPLASNSSNQLCSAYTHTPTGAPSINKIYFFNPSFCWSTLKIYLICKTHISDIQPECGAEKLYCSTAEGLPLCFYES

SEQ ID NO: 969215 - protein, 211 aa, Homo sapiens
AVLPGASSLRCFFRGVPPPYGLARFPARLLLCDRVLNGATLCRRDPKGPWLQVLSRRVGLRPRCRARRGETFPGAPTRARALLHFHHSVLYLSFCLLHRGKAKKAVHTRWVRESEKTMGRVKKNVWWWDAPPRDNFLVRVNTPTTSRRTQGYSSRRAVNPLDYYLLVLPIFYSFVSHTCDLCISVLENPPYFFFIYTPKHKKFSNPPKSKQ

SEQ ID NO: 969216 - protein, 113 aa, Homo sapiens
MCCGPPSCRALFRWPGPPHRRGHTFSESPCLGELHCGRFSHARTYTRSLTSKQDNFLCERPHPLPVGLRHTLGASVSTPPSVAPLTLHYCSCVHHESSRPCMCIYSHVSPHKI

SEQ ID NO: 969217 - protein, 78 aa, Homo sapiens
ALLVPATPLVAPHPYFGNAWQAPGAVSSVRYPLVGPRGVSPRSALVLSPASRPFYSPCGDTADEGAARCAPHMSKTTT

SEQ ID NO: 969218 - protein, 139 aa, Homo sapiens
ARLRCAGALLGVARSPVGLVSVFLVFVFGAPSVDCRGVVVVFERPRAYVAAGDLQCVWVATLPVLCKGRYFPVVAHDPPTFRLQQYVSNVVTKNVYFLFMHKSTPCSRKCGVLTPLFVITCAIIMWGRTYIDEELSSSF

SEQ ID NO: 969219 - protein, 115 aa, Homo sapiens
MVSLSNGVPFRHSYYPRCSCLWCFFPRRRRGLVTPRRAMGWSIIPPIRALMWRAARFPRFVWRRRIGSCLPPHTPRPPRLLYTLALVCICAQPVLRTCMRSPRVEIVRCALSRTM

SEQ ID NO: 969220 - protein, 64 aa, Homo sapiens
MRVHALLEPRLLNEEDDSGAILMPPVGRLFIYLAKQAIFYACNKMISVHNKIGEEETDTTIDQE

SEQ ID NO: 969221 - protein, 238 aa, Homo sapiens
FLEGSLVREQRSAPSTILWGSPLAPPFSVVNGLCSSTHRRGLFDHTVAPHQIVALYLALTQAWFVFTHRGPLMVIARGGSSRTRFFGPPHGGGPLREGSMVERAWGPYITHEPRLQQLQVRCTSDIMAPTPASRERRTSCGRSTPPLAVSTHAPGSHSSWCGSPVTCAALLAGSYLFKGVIYKGAPDGPPGKQMAPAPHDDTHPRVSPDHARRYGLLLDERGQEREQESYIFQNKRQT

SEQ ID NO: 969222 - protein, 125 aa, Homo sapiens
SKQTGGIRPPEMGCANAAPVPHLGGVRTPNLGWPRSPPVWAPPTIFGWAHTRDAFPPFIYFWGSIIILVSYRYDMRLCGLQIVAPLRTRLVLLADGPSRARRRAPTPSCCCAHARLERCGTTTPA

SEQ ID NO: 969223 - protein, 106 aa, Homo sapiens
WGKILAIESFPSNQTGPGQSCPEAPRWAPPPKGSPVFYVTPTPPDPVRLVGTTPSACLRPTHKIGPDNFFGGPSDPAFGARDLATASPQEYPLWSSRGTHTLEKNF

SEQ ID NO: 969224 - protein, 223 aa, Homo sapiens
RTTNCQPVGISPGSARDKKRGSLGKNRPKLCGRPGYTGDDIQPAHKGPKQPRRLRSFRRPPLGRSLNKPPPGELSLPRPNHHMFLGDPPPAWAPYSFTCRCPSLSPEGHPNLWVIPRDSRYPVCEASCQSCVLVGVASPPFFSRAQLCVYAGSPDTIPRKLRLLNKKSLGIPPRFLLFESPYITLFSHHRKSCLLTPQVLRGVVIDPPIEQTSILPPPNKEQT

SEQ ID NO: 969225 - protein, 228 aa, Homo sapiens
GRSRAGSGPTPPVRSPLVPQFPWGEAPPVRHNTWGLFMSIGPDLWPVTGVTLHAGRDHPCGRTRGRPLYKHDRTRRRIAHTRLLHRCPGQDTKRHVPPQQPARAGASPLRPSREKRVVVLPGAFLWRARPLSAPLSWGVPPPSRRYMSLYRGASTLPRAFIAESPGGPPGRLRLVGPLPAEHAPRPPTFFLMDSPWRSKGSHLRGAILPHVCALLLLSLYATTPPCYA

SEQ ID NO: 969226 - protein, 134 aa, Homo sapiens
MLFSPSGAPLSARVRYRGCSRSPGSALAPFRVAALPLYAPCLGCLPPQVPSAPVWSPPSGRPNLAGQHDFLRGALGTPSSPGGAPTRGATPEGWAPHPPTSGTTERAPAGPPRAPPGPTRHPMPLATTWRGTDN

SEQ ID NO: 969227 - protein, 141 aa, Homo sapiens
RAVLGRYFGCGPSFFVLCPSCRVVGRRCLGTSVGWMWPPPQRLFFGTVPRRAFVCGFPTVSSSEWSSDAPSRLGCLRTMVPRLLPLPLSCSPFGSRPFRLPRHRIVTSKAGRVVSPADRSCCCLSGVCVGSSLMCVAPHRT

SEQ ID NO: 969228 - protein, 126 aa, Homo sapiens
RNFCPAPPRPSVEGERCPVYPNGRGGNKSVCGQARHHHSDGGSPPHQAKEVNHKRGAMVLLRWDLYIKKPAFPPRHWGRSPLLRKLLVITKTEPLVLTKKEHTTPILVLRSPPSLIKHSLLETPLS

SEQ ID NO: 969229 - protein, 75 aa, Homo sapiens
MVLSRGRGWMVERDLLGTPRFVTDLSRPLDLLPGERRRRHRHDVFDVSCYSVKVFEPSLPPKNQVIFPPEQTETQ

SEQ ID NO: 969230 - protein, 145 aa, Homo sapiens
LSLSPTHTLSHTRGPPAGLYGYSGAPPRAPLGESVSVDPTLSSLSERTLLVSLRTRTLPHLLSPLLGGGPPSLGQRLLPRAGCGPAPRLVGVYHVGRPTHCPCLCFFFAPPVCPPPQSVLWEGLSLGETSRVCYISLRGGVAHPA

SEQ ID NO: 969231 - protein, 114 aa, Homo sapiens
MGYVGCNISTRVKAPLYLCVHVIRTTGVDTYITPRRTIESQFFLMFIIEERYGSSCAPSPLVESNFPPVLGCGLPPSTRRVRSYGLCPSLRYARRERGLNKGEKKFLFRTETKH

SEQ ID NO: 969232 - protein, 109 aa, Homo sapiens
ARPLVWSPPAPLCAGILVGRRLRGSLSLRRPLADTAHHPSHVAGGSFWAWRPPPPALVGGLVCFCRGKIAAGPTTLRHAYLSRRDNPPTGAIPPPLHLPFLSISYSSIG

SEQ ID NO: 969233 - protein, 167 aa, Homo sapiens
MGKASFLSGEYLPPWGIILPGPHMVSAPTTNWRLVNGAGTFVCPRPHYFPPGSLIKSEELNMDASFPRGPPSLLKTRNYWRASRWRPRADLLSRTTRIDRPPPTISPRHGWEQNPTGSPPGQDPATRAAADHTETNSSGSVECPPPMKRAIRHFVWRKAYYLPLLPI

SEQ ID NO: 969234 - protein, 183 aa, Homo sapiens
TRGAGNHPPWWTKGAPPGGPNGKGGPCRSPENTPVGIGHRTNPAITTEKPCTGDQALVATEGQKISGAPPQRLQTGVKRDEDPAPTPPRRPAHPFLPRACESPAAHLLRAAGARRSVSPVCPPGHPRPPSASPVLAGREHDLSSLRPFRPPRPCPLFLCGVVLCHSSLWGGKKREPFLNSPTK

SEQ ID NO: 969235 - protein, 225 aa, Homo sapiens
MSSNDCSQPEIHHALYYIVDSQKYSTRNQFYDSCKKLLLLIRVLTPQWLVLYKNFSLFNKNRGNFVWYHYCLYRTSNTTAAPINPPQAIWRANHAMKPSHIRARWSTSSLLVYMLLINKPDYFSPSDSLSTHPNSFLVRSRSRFPLAVALQPVLPGLSAIQVQNIRDAGNFVKTRDHWRRIAGQRQKCRYAKPKHRALYTARPARCRGQTSPRSHNSPKSNPHKT

SEQ ID NO: 969236 - protein, 288 aa, Homo sapiens
  misc_feature (26)..(26): Xaa can be any naturally occurring amino acid
SGVFVRRPENNSLVFCGGGPPPPPTXCGGALASPTSMRVGEIGRPPLSSCVSRCAPHTSSRRLDALSLCSPPACTPPHSGAKTILETPSSSPRFGIIFLGRALPPHKMVDAHPVVPSHTRRKDTHRGEKPLRDNVRICEEGASNQHPMGRRINPPGQGATPPTKCREGPPPLESLFCSSTRGCFTARDNRRTHSATHTVASPLAGSHHTVRLLSAQADAAPETLSSPEDKGCLSPSPRTDANNKTAPNILAGPPTTPLWVNNGRPEGNTCASIVFTNCQKLGPGKTHK

SEQ ID NO: 969237 - protein, 281 aa, Homo sapiens
CLRRRYGLSPLVGLEALGSVVAPQLLLEWVGRRTPPRGRANGGRRGWTPAQLVIARDLAIDEVYPHPLGGPPCYSVCAGYICFGQRHSFRRARGAELPTKPPGAPKRRGASVREVATGRTPTHVEAPRDGTADAAPNGSTALPCRDGAGHAPPACKMRAAREREGGVSEQTVAFGGPPGARRESPGRDIALAVIETTCADDTPLHKCKRDNILRAAPHGQVYHFLWRREERERLVNSIVGFDKSSSRCLCGQSHSMNAHIRYSPDRRESAPRKIQNERQHN

SEQ ID NO: 969238 - protein, 195 aa, Homo sapiens
FIKRALCLSPLFGEVLFNQASPRCSPRGSTLLPAAPPLKRWSSHGWCPLCPSRYGAHLSLVGVALLTTAPLFHPRARWSACSLPRHVSLPQRVYHTLPPPPCAGTSLRLCGIFSPLPPGLPCNNYLLSHRSPHAPFHYSTYELLSPSPTTLFISTLYKRPPCRLLLNLSLYYLPLFEIYHLRAFPSYDCPYIVVA

SEQ ID NO: 969239 - protein, 166 aa, Homo sapiens
GFFPPRFAPWCGPPVPLTSPSFCPPPAGFRPPGGAPPLFYLGHPPRPPCYCSAPGFLCHLCFGGVSIVYRPLRARVPPRWIFTGSPPLSHLFSRRTFGRGATHTFCCSTPAVFPADLRPPLFGLTPVPPHYVRCPSSRPPLICSSLSCSLPTSARTLWWFGTPAAL

SEQ ID NO: 969240 - protein, 68 aa, Homo sapiens
MNAPPTNFFPPPLKEENNPLFMVPKSSVVCFKLGENFCVVGYILFCVGVEQNLLFLLVRAVVRQKNRK

SEQ ID NO: 969241 - protein, 147 aa, Homo sapiens
RFLWYTFAPRRRMMWRRSSGKPAVMDPPFEALISPQARGATGGSQWKLSNQEPICGEGHITQGGVTMFAAKCALPQWRTFRGERSSSPVGWNTIPVKGFLPPGPKIRAPFRCGVPSPTGVCPQLSTVIGPQTPFLRKLLQEHSSTRA

SEQ ID NO: 969242 - protein, 279 aa, Homo sapiens
MGWQKLCKNGPFRHMVRQPPGGHNPVLGRIFPRSVPGVYYPGRLWAGLMSPHAGARTTVLLRPPPRHVVSVSVPPQQVSCYGSPLPFNVYGGHPQPHRSFVSASSRFWWRHKHSRAWAWGPNKKVHAARPGVMASSTGGSTWRHEEAALLYRLDQSVVCFSPNPQSRRLFFVVRQACECRHHKTDIGLHWEASKAKIYITLESYETRGRVIAPPAAPPSSFHKAIYGPKGPGNEKKSSTGAARSNVCNFSHKKGKLARREGHPTIIACRFTFLPPPPQH

SEQ ID NO: 969243 - protein, 56 aa, Homo sapiens
MTSAIHHNRPYNTSKRITPYHPTPEHTGYSLKGPHDRQNTHPMRSLELARQNLTNT

SEQ ID NO: 969244 - protein, 114 aa, Homo sapiens
MTASTATTASAVDTPPPVMSPPRVGINALRGGKTSWPLCDKKRTPRLLIRGCTDRQVRSFRILHSEAHSTIHVSGHNASVISTLGKNRFCSPPTQHLVGGLHTTPRRLVLRPYK

SEQ ID NO: 969245 - protein, 150 aa, Homo sapiens
  misc_feature (49)..(49): Xaa can be any naturally occurring amino acid
MRTYATCVCPIHPPVILGLCGRLNNGVVLRLPRDAICRFVHGFTHGPRXGQSFHVSLGCRRYPGVLSRLRKSRCERLAWKPRYLWTPLFLCTSSLMNFTNGFPTPLRLGEAPLSGSLEVMFPRLSYFGDLCSAIQYRINALGSRYTILCA

SEQ ID NO: 969246 - protein, 174 aa, Homo sapiens
KETDSSSASAATPSKKKSLIDQFFGVEFETTMTTVQNLNEEEVSQQERNHHTSSLCCFINQASHTYLVHRTLKLRLQEEITKTVSKRLQQKCLVYQKSSKISRLPAYLTIQMVRLLFIQTKESVNAKVLNEMLNFPLMSRYVLNCCTPATFKRQTRALFDPTFKDLEDTPRDSA

SEQ ID NO: 969247 - protein, 44 aa, Homo sapiens
MSDTREGEESTSDYLEKEKDGSRREAEPPPPPPGGTKKFSPKHD

SEQ ID NO: 969248 - protein, 108 aa, Homo sapiens
MFKPERAGEAFGPQHDPYASARLWVHQGFMRAMSVIREPLVVSNVNQNDYSVWCGMYYTSSSKMLQRESTEDVRYYRHKVKLNCGLMVSAKRKAAAGVTIGKLVVKWV

SEQ ID NO: 969249 - protein, 412 aa, Homo sapiens
PGTLHRARTLRPRRGWLQTRGHARAPGQSRRDLEGEGTAARNAPSLPSRTDTWHSPAHARAVSDGRPRRTPRPEPKKTLQLAGEQAGAALPSLLPHETEGHRDASETRVNPVPLKNQTALGTNPLLITPGTQAWKSRKGSGLQTPIQDTSENPDTSFLFPGTFPESSSQGWITPRDSNQSRPTPREQETSDRSRHTGRGSTNLANPGPWHSIHTRQELENPGATPQQAAHPVTQTYTRTHSSSSHNSCTTDPPLFQAGIDSLDFSGRPRTPNPTLWGPPPTTNATSLRWAPTLPMSFPCNLCHRNGPHTRTKRPLSKRKGKARTQHTTPTETPQKPVQSPRRQQPAAPGANERHPADTAIAQGDRTTHPVATAPCSSITDLTAGHPLLPRRRVRRHTAHSTTPTQTAPTHYP

SEQ ID NO: 969250 - protein, 184 aa, Homo sapiens
TSWAYGEDERVRRRKRINGLYGATGAPWTLPPEGFIFRHSWVFWEQHCGTGTYFLRQDYYVQRVLDYTRPSIGTPQNKNHLVVEVVVIAPENTPPGRCPTYTTIGKDGMQRLKEEVGYLMECLGIHTGGTPHVAHNSLRAHKILVGSHKERTHTLWGGEHLVAANIILENTYSGGSCGRLTHDG

SEQ ID NO: 969251 - protein, 178 aa, Homo sapiens
VFPWRLHLLRGCMRCPNGFVYKGPRLASPGLFSHPGVPRYVFLSAFSWSGIISLWPSGPQQCCWFSRPRAYKGGFRPPRSASLGHRTLGGCPAGLAVVLPKKGECPFKPGPRPKKGWSEPFTRCHPGRTFRYHGDTKEARRGFLRIRGRPPCSCLENKSPTSIVNDLSIGPFHCRTII

SEQ ID NO: 969252 - protein, 43 aa, Homo sapiens
MLNIYARFPTRTIIYNSLLITCTPKNEMQHILWRTKPKKFLKN

SEQ ID NO: 969253 - protein, 192 aa, Homo sapiens
MAKTENMIRSTTDGRKRLPGPHNADKNTPGKQKPITQTPTQHPKSTGPSHRTHNTTIHSTTTITQDHPPAPNIPAQQPHSHNTSINTTGHTAVHKPTKNRPPQTQTNDRTRTTNDKRSQKHTGQHHDKHQTSPNRDHHHRHAKATHTIEPGHTANKSPQTTKATPTNTKTHRYPLKMEHPQTRAGSTRKRDK

SEQ ID NO: 969254 - protein, 224 aa, Homo sapiens
MAYRIGNCFTLRGYIGYHTMQYKRIKRTSYEAIDSEGHRLYEGGKESKWDETVLVQCRWNFIKVLKIFQMTDPCECDQNTLLNLLLEDAEMKREDSRCKAEELSETFCAFHKVGDELSSLLLYQTGSETSIKIRDRHLNLLIQKCLAQWAVYVGQSSHTPYNNEEPMLDKSAMNARHTQDDSAVELAAPVQGLQQRRQRTFTPEHTMRKNQQEQAEPTQPQHQT

SEQ ID NO: 969255 - protein, 400 aa, Homo sapiens
MGHTHRAATSKATLAATSPNLRTRGRRTSGWYLKMHNVAHCRKSIIRHKMCQSHHWHALAQVCGNIEVEGQLEQCIPIGPSKMPQNVCQAAHNSPSQHKSSQPPIQAIHQLPAQHQCSTIPQHTSAGSSAVPERPIETPQPQTYIPRPSTKDMGKEDWPRQTGRMAATERQRTFNQNDTHLHITGTSSQRAPWRTPGQIRGTRNNPRSPHRARLLGRQPPPHRKRRQTPHPREGATTQQRRPHILTPRHAQETPKQETANTHGAQQNPPQRKRREHTQNDSSRHPLRTPEGHPKGRDKPTDHTQANTANCLALHNTRQAQTHTKQIQGTQLPTPHTEVQERHNNTADTPNHHTTPNTLTTRPHTATQNSRDQKKRNEQNPAKAKKSNRTQAPQKKEDKKE

SEQ ID NO: 969256 - protein, 101 aa, Homo sapiens
RKDLVFDDRCTVEQILARVYRKLGALGSVRKLERREVIRMKSSSVGQRGCWHGSSHAGVKIQGCNITQGLYSPQTKEKPTWKVEYKQTTSERRVSLLGKRS

SEQ ID NO: 969257 - protein, 49 aa, Homo sapiens
MTRHVSSSCSYTASSESNPVKDKSLLQSSDHHFKDPAPRASDTHTRPTR

SEQ ID NO: 969258 - protein, 120 aa, Homo sapiens
VATMSLARDVAGLSDLGACAAAMDSTIRIYGQSSEDITRETNRSINKASRKVTKSMKMVAVGKICPSSERAETSSNMWMGSLALYEKADIKGPEDQEETTSLWVCPQIEDCVVLFSSSIA

SEQ ID NO: 969259 - protein, 159 aa, Homo sapiens
LRAVRKEPPAGPAPAGPPQGKPRQQTSLNRVAPIPGKNYRNPPQGLSPRAEHNSSCGAKGGRKRENPSIQPPTQRNRKGKSPPEFCGSSGIAPLAANRFAALSCGFSKSLPRKSVYIFHDEFPRRWTIITPLCFLKQQPPSNNLFPNRQADYRTTLANL

SEQ ID NO: 969260 - protein, 182 aa, Homo sapiens
LLQKMEIAKPPNSFGKAKPKAPAPSLTDCIGTVDSRAESIDKKISRLAAELVKYKGNFRALQEDERGSCKEYGQAESLASFKAKEDVMSSSGTILPNSHSTMEPMPNYTIQSLKDIKTTVDAMQTLEKYKEMKKAYKQVKIEQQFCTGILQEQLEDMMEDANEIQEALSRSLWNPELDEAWI

SEQ ID NO: 969261 - protein, 95 aa, Homo sapiens
MGVDRDSHRECFHATRGSISAEHVVSSPLGHQLVVVDPSGRKKRYSTMTAGKILEYTTSTRQAALITRSGLATLFLADKDLEPVGDNTLFPVPQN

SEQ ID NO: 969262 - protein, 118 aa, Homo sapiens
MTNTEDRKREARRNNREPPVERCPLRDSTSSIRTNITRPELDTGGQANQGSGVSKIHGTQKIVQPSIRTISYTELGKTARPFGIQSTRKRPSLMGFKKGKHEKLHGRFQGGRRGTSYR

SEQ ID NO: 969263 - protein, 105 aa, Homo sapiens
MEIYYRNHAVYTLHLNVPSACKTVDIISPLRYVDEGCHVFRRGAVFIIVREVLWFIMVSRHGDSGPAKSAVVVVEKAWNNLTYWIHRKSWSYLAKRTCRHAPGEW

SEQ ID NO: 969264 - protein, 110 aa, Homo sapiens
VHVETLACGRCTEYAYKLRVNGTSITKMKDNVAQSIYMEPKNEVPWLMPLAALVAVTWESCCPVGQDGGADDIFHVKARKVRECSSQPRTLVYVRHFARRSIDGIQNTSS

SEQ ID NO: 969265 - protein, 102 aa, Homo sapiens
MGEEGIAAGACKCGRYSYDCCISKEGCLHNDMRQSLADVVVTLGDDGKGSADRLGQTALYEQAAQGPNRWCCLTLTKLVTSLCMSSRCRPYGLNYQTSEAYS

SEQ ID NO: 969266 - protein, 147 aa, Homo sapiens
MLHRDAVVSTTVFNHHAGFEAPTFFFANKKPFVSPTGCLNLCPPAFIKPCEHLLAPKIPSPAQEICRPLCKTVFPPPCVVLYSINCNNNWLLKRFRGNVFAPFNHNRGLSTLLGAEAPEEPTHLFVGKLHGEHLCGGEATNCQPPLG

SEQ ID NO: 969267 - protein, 67 aa, Homo sapiens
VGCRVEWFLSDPCFLFLWLVWDEMSSGSYLGSAARPRDRQLSSGSRKCDETRPECLKNFILVEQSDR

SEQ ID NO: 969268 - protein, 250 aa, Homo sapiens
RAPVSPLWGSSGGVGVLNCGVVAEGALLAGWQTGYNAEIVLCCTCGFDTPCGMNSPKPECKLDMDRLLEPPPASSLDDRIVKQHRKRWAVGRGRYHQLTDTPRGPPTNILRYCSRLTTTSNCQHTNEYPVTFDNCAWQKGAFNDNDESTGSVSSHTVSLGYTPVIRHSDYPQIIERATDWDPLRIAPTSHFAGTRNPHGDLPATYYPHKASHGPSLLANTTQNTFGSHIVLTHNSRSLRSTRIYLHPSLQ

SEQ ID NO: 969269 - protein, 188 aa, Homo sapiens
MCPGCFPAKGIGVSHDSPVVLCGRRTCLCESLPRPRCMGPGWRDKRGPRAGAARSSRGSCACRDATSFGRVGLLAKPVVMRYEWRLAPAVHKGFSGSPPFWNFAGSRRAPPCIWVGRARTRREWCHANRAPRTYIVEHTDMCAGRTESILSRTPWSLQYSPLYLWGNTYGGNPLIVCRCEEPAEPQCL

SEQ ID NO: 969270 - protein, 132 aa, Homo sapiens
IPENPKFSVPPITPRKKKKKKKKKKLGADRSPTGNNLQTHNPKRGPRGPRSAHAKHGPKTGTPEKKNGLRQRERRNSYTKKIEKTAHGRATRERPSEDKTNTQGEAIERPHNAGQTNTQAEDTQKTNNEKTK

SEQ ID NO: 969271 - protein, 62 aa, Homo sapiens
MTPKREHNKREQRNTRNENNNDREEKTTEPTKKNTNKDKRKDKNNTDASNAEQQRKEAETHT

SEQ ID NO: 969272 - protein, 157 aa, Homo sapiens
  misc_feature (72)..(72): Xaa can be any naturally occurring amino acid
GETLRRGLRCVVGTHKTDVKMMLSRAKPAVGRGVQHTDKRKKKGRKIPKLEELLSKRDFTGAITHVEFKRHXGERRTRILNLWDLGLLVALFNLGCDYRKKPRGGIQEIVLAKRATPGKFVKSWVNLAGTYFFLWDDINKLKQLDLKLQKADSKTRS

SEQ ID NO: 969273 - protein, 42 aa, Homo sapiens
LFLLWDKPQQGEESPPAGVIQQTGETTILSVYSLFLINRTRN

SEQ ID NO: 969274 - protein, 305 aa, Homo sapiens
EFFARYVSGTSRVTAYYQIALPAVRLVAMGPPILQLKISLLPENPMCHSPGVHYKFLQTVLLPPSPPSSWSGRGVTTRSPGTRTGFDHPCASSMRGWSPYIAPLVGDAPPAATVNYRRATGAPQGRQAPWSPAHYGTVLMGCCPPSDLNSLSDNPWSGLFRCEEAISPHEKGGRKQITHQHSSGALPEIESKKRGADYYPQRWHRPGNVSPPGVAPAVRQKRWGSSGPQGKSREIYNSGARRKPTLHTQFRRPQQVMMRDINSGRTLLVVSTRHCGCPLKVKCWFRRTNFYVLLMRQNKRCTNNR

SEQ ID NO: 969275 - protein, 547 aa, Homo sapiens
MIFKGPPRTNYIAGQPPHQKPKKCTLTPSLTNTPITSLTSEDLLEVSAHQCNLGLFYTLETRDPKVHSKRHNHAHHTHALTYYMTTSDPSPHNSRNHYTDTPLLKRALVLNLNPPIKTGIPPTTHSINQPNAMHPSQYRLARLTNSITDLTTIIISSTPKLSYHIQPTEATLTQTSHQNTTVTHTPTPFRQAASPRHIQAHPIPYIQREHLTNRAKTALHINTSPQRITMIIPNKKNDHIPPYKHRGEITQHTKRQVVTTPTSNNDHTPNIHSQPKPRAHAPPDDQQRPFTYTQQNTTNTTAEHTHWEPNTHTISHQKNYRRSIAPPRHSQPPIHIIDTAPIHHSTRSTKTNQQTPDEPILTKLTCSPNTKVNPQIVHPHTREADDENQETRIHSAQTTEETTQHKPDQPKHDTMHTTMTNYYARPAQSHKHTHHHSKHTNSDANKREAQNKQRVTKQTDETQTRKTNTHRNLHHLQKLCTTLTIIAEDTSLLSQNHNNQNRKDKHTEIDENSTTKHTNRKTKIKYSALLELKQHHNSPLHTIINTT

SEQ ID NO: 969276 - protein, 204 aa, Homo sapiens
MCAATELKQFPRMSGVRPLGYWGLVVICFLVSIDVGISCLHSTLAIVAVCHSFYQLAIVRVDGVLFSMFLLYDTQNSNQGVHEVSPMMEFKTYDPIQLDAEYLRGYIKYIMRSSQLCVVNYVGTPAKENDSALSVAGFSATSNIFVDWGTICLTSTSVQADFVGGYQRYRQLSHLNVLYVSPDRVVLDDNWRSLSKKTQLNLTE

SEQ ID NO: 969277 - protein, 106 aa, Homo sapiens
MTKRQYSSSKYTFSDYLFHSILVSDQHELNRLLCLYQYDYGGLQLGLPTMHRFDSPESIISSNQKSQDDPNPDWVDLLGKPRRNFRFLTCSDHSWGERTMKSLATL

SEQ ID NO: 969278 - protein, 296 aa, Homo sapiens
HSYVMVNAKFEEESQEPVADEARGTTVTDWLLEAILLTFYDSAAYVITSAAADGKLFTCTLLRNCHGPMPFPDSLQRMQRTLTHCTYALRRNATTALLRTATLQPQAPRAEHSAYIFYHRLLHRTATLFPVLSSHEHGPHVSPPGTTHSTTRAQLPFSVQASCCTPCLHAYYTTCALRAIHGHPAHALPTVHEAHSTRTALRAPEHCAAHLPPPNRNHRLRSCCLCPPPRIVSPLPPPSPSHPPASSPRPRPPPTSRRPPFPPPPRPPALRPAPPRTNTIHLQPRLGKRVFYHLGI

SEQ ID NO: 969279 - protein, 157 aa, Homo sapiens
MGSHLVWACVRTGVLANDPVGLPRTIPRLHGGGPGIMCVSLGWPSATETGMREGLYPLQETPFGGGRDPNLTWCRAAVNHGDNPLALHNWKRVLIVLDANACIYSVFVVFCFATVGCDSSEIARIDDSPQNRKLAEDWQGLFTRRNGKPEQSPGPIG

SEQ ID NO: 969280 - protein, 128 aa, Homo sapiens
MGAPPGAPPTAGLSPCVLCIPRPPPPKCGSVRGPSTKKCGCVLGFTTPPPWGAHTVQPLPWSPPPSAATFVVAPSLAPPLSPSLSPPTAAMRCRHDTLGGPGVVFLAPLGRPFAGPPNPPQGPPPHIT

SEQ ID NO: 969281 - protein, 534 aa, Homo sapiens
  misc_feature (72)..(72): Xaa can be any naturally occurring amino acid
MYVYKDGIHSPLIDKQSFIRPFTMIRWPLINTFHSLYQLSLSYLDIAHLYAYHTTTTNRAKLKLLENILRDXVLQALQYELYNAISANRHILDSRSHYHTREYTLSLAARYAQMRPNRARYSICNQGNTRGNLALMLRKNVVTALPTLITVEIHRGLRNLGKRATTLTENGGYSRLIGTPNATDGNNTTQNPRSIRKDARAKVADTTSISEFLQQSFPARETHNYTPYYHFRLACMGTICTTVQQHKLRRSGSQDALWAAVNALIHTIFLPDSLDLRGKSKYGYSRHSQFTELIKCPFILPSNGSLLNTTVDPARRNKQYAAANRRLLTTFITPRITRKNIHNPPHSTGPPSCAPLLGMHTAHLTRLDHTSGSQGRATPTPTRTHGTTLNQRTGTPARHQERDTTALHSKNTSDLNANTDAPHNYGESETTDTSAYRHTAGQHNSGPHRHADKDVVSQTDTGGSRHTLKYAMQARQSTTCQQVRRKTVADTSHNIRRHYKQPAAGRLTLHDNMNRLRQHPDGPTRHSVHHHGGT

SEQ ID NO: 969282 - protein, 320 aa, Homo sapiens
TPYTPTTFTGNPFLPPVSISLDQNSPASWFRVPVSHLWDMHSGRRSFPPSLLPGSASSRRYELYFVPPGLYPSCCRSASGTHLHGLGTARRHSYTPYFLLAPHRALSVQLSYYHWAYTPKCLLRHTSSYRWVPNAYIYAYITNSMTPALCMRTSQALALVAISKPLRPYIGPFTLSRTEVLNDFYAQAPHPQSQQSWQGPSFRAPAFSHEMRSSACAPRGTRSIYIVPWAHTPPPRALLRLTQPSSLCPQNTPLFEPTRGHFPSRRTAPHGDQQRTLLEQPPLGHPLSTPIVELVAPRAIPSTRTLLRQPQPFRITTLNR

SEQ ID NO: 969283 - protein, 303 aa, Homo sapiens
ALSFPIAPASVLGATTCGGLLKTGLLRRPRGAVVCHKTPFLRGHPSLGVPPRASGDFRAFIPQGADLGAPPPPVGCSGTCRLSLMRTPGIHPRRFLPEAGSVDGAWAYLLRVGPPLVTLPGALALTSGGTTFSSLFSHGRPPRFGFLGAPALWSLFPPRSILLQPARLGPNRLSNGGALSSRLRCAREALVIAARPSTPCGLSLRNNYSRLFHIPLSEITENILGNTTPQLVDPPSSFQPSVIHWEAPPPPHKRYLSLSFFHSSPPPPHIDQSPPSPTQRKDSPHNQESTAPYPDCHLVSRPK

SEQ ID NO: 969284 - protein, 114 aa, Homo sapiens
FGRHKWYNKISPLQRNCKVPQCPLYTYKWGTKLSQRFVKRPYFNNMVFPGPIVITRVHIPGQKYSHSTTSCSTPPPLHVVQPPKFSCFTPIAPFKYCSHLLMCATPPLVLLSNC

SEQ ID NO: 969285 - protein, 206 aa, Homo sapiens
MTQTKYQFDNGTLPLGAPERNHQQASRRDTRILHKKGRIKIYTKIGEHRTTERPNHKLQSKHDRRRVQRMERRQRTRHYEEQDKKETRQDDNTHTTGEAGGKDTPPQAANPPYQNKEGYTKTTNPHDRIEEKKEQRGGEATDEMRGKNERDTKKVQTHNRRGNARDDERRQKRGKREDRRVEAVARHATQQQNKKGTRGGKTTPET

SEQ ID NO: 969286 - protein, 205 aa, Homo sapiens
MRFAALAKRCWAPPPEGTWCPPTPRARTPLPPPGQGVNNSQNPPKRAYIGPHALAPTVEGQYPGRASIGDPRTGTPSGFWRHATFPLGQSGPQQITQQAMRPTRLQNDKVFCAHFCQKKIRPPLLPGSLPTILSSLRGVAILHTTPVCPTPSACPSLVISHNEPSLSKRLCVAPKRDQEVLVRNTASFPKAPGSPKSSLGQPLCF

SEQ ID NO: 969287 - protein, 227 aa, Homo sapiens
MAPMVPKAPASTHIFCCISQPTWQQHTVHSRVHTRCFHSVIPRSTFISQVAFHRVTRAALNFNHCPSHGHLVAARSILIGARTHSDRTQATLHPSQAITVAVTVAVICSHMVIKLHREPAHIKTCVPRVNNTSLPPVTTGTRTLAYRTSRHDNGRAGPGAQTTVADRRNAAIAPPSRSSTGPNRAPRPNGGVPRGTLGQGPQTNTTKTSHTNLACTRYRQHSETHSS

SEQ ID NO: 969288 - protein, 75 aa, Homo sapiens
MHVTPACGAPPGCSRQDIAARGDGSSLSIFSLVLHVHNTGWSTHCEQLGALAFPPRGSPPYNRGPKKKTPPNTQN

SEQ ID NO: 969289 - protein, 169 aa, Homo sapiens
DYLKFLCTVLLKRSSMESLWQQNRGPNSRGHPQKGSRRVSSPCDVLQTIFKSRRCCFTRRELLFGRGQREFSGPRFASPRERMSCALSGIPWRTSRLVGGLWKILALFAQTQKLEGYCRALKMLSCAPTTTLRKIGLWPPPTVGAKRWRTRQCVVAPGIASYNVTKKVE

SEQ ID NO: 969290 - protein, 318 aa, Homo sapiens
  misc_feature (1)..(1): Xaa can be any naturally occurring amino acid
XYKIATHDDRLMIVQVPAPQCLADWPYACQPSVRWTATHFQWGAYNTCVWENLEDAYSIGPRNILLVGRRLLLSYGRPGTGHWAVDPGPVAPTGLGTPSVAPHRGPPLFPLTCEMLLIQPCFESFGADPPRWSNYVPRRKGVRSMVLPPQNVLLLLMEDVRVLKTRPLACSDARNSVPPESLQGNKGSCVGHCLQKEDLPLCRPVAPWWTPPREVHPPTLGGPWRKCSFTTVHRGFHTQPSATISGTHACCVEKNGIVCTSRAYPQAPPYLAPTLTGESMATENIVHNPSDRTRGPETHQHIALVSPPGAQTGLRPQN

SEQ ID NO: 969291 - protein, 210 aa, Homo sapiens
MVASHSLFTTGVTRLVLTTAVEQESAVTSSQEVAAPENQGTAQAHPVSTEETTHGPYIQETALFNYPSGASSPTCEASHALNLICADFLGLHTVMLHNTRGTKVVRAKQRDKKTVVDQTEPRNAWGKSGKHSCMLTDPGGYSSPPHARAPPGSGVTSPQSRTPPGGARTQTRLSLKTHSGMEKPQVADTNLSRVITPAGHPTDTQGCPRK

SEQ ID NO: 969292 - protein, 262 aa, Homo sapiens
ERTRKEKGTRTKKRVVLCADRETSVERAAGDKHVGRLVQRHTTCEASWVCPPPAIVALGQQSRVPLQGGHPVSGPTGQAKGRVQRGADRIVDGAPPRFSHGGFNRCGCRSTFGAKFNARVSRQGNHRGQLFVERPAPGAWAKKIINYYGPHQNEVTISFAGEPPAVIVSFFRRANSFCPEKPAKICPRNAVGPPWSTFVSCSLLSVRRSRGRSVKQASRGKTTPEEVYGKRVANECFKCSKKGVVQTCAKSQDTTTVADTYP

SEQ ID NO: 969293 - protein, 241 aa, Homo sapiens
VDKKKRWETVTPLDRGISGLPRSHRGRFAHPELSTTKGTSPDRDQTKPPRVSRNPLGTEAPPGELLAARPGVPRPPRCIAPGCPLIGVPRGPQLNKAQLRGQEKSVGPAFRDKTWNGPTFSSASAPPPMRNGVPGDKHQLGEQFLRPNHPPGGGLHALFAKQANPSPRGVISQQPRATTNSSGSRQQDHPTCRATMLQQGRQHNVLPRKRLHPPAFKHRGGRHGFSDPWCDLQRGSISESA

SEQ ID NO: 969294 - protein, 208 aa, Homo sapiens
MVVPSIPLDRPSYSSGCQMISPPTVFETSAPPLRGLIRQFNVAVFRGTSLSYVGVWCSSNPPVCVYLDPARRRIVESRCRVCLIPQTVRIRWPPRPPIDWLSLIEPLRAAFLYMRRTKRASQQYPLHIDCCLRAIIPQKCSRGGSPHCATLLRRPCHTNCVPRGVWLDTDLDESRRLAPLDSLGRRALAGDVLCDDPISETIRIPPKK

SEQ ID NO: 969295 - protein, 192 aa, Homo sapiens
VNTKALRPTKASAPEEPNSGPETASPNDPFGGGQRRATSPEVVRNKNSPRRASGTHMTRPEAPTGEPGIPQGLRGAPGRPPTPTMDPPRRAQIPKWPRSSSAGVHANKRSRSPTRVTRREMLPCRKETPPQRLCIQYSPAQVAPGQPSVGHQSTRGELRPKDPRERMSGPSREARGGTPPPQQTIFGRPNND

SEQ ID NO: 969296 - protein, 112 aa, Homo sapiens
MRAGGPTLRPRYSGHKYRCQDVDVLLERCQHKKGVAQISCNRRDQSCWAVFPPAKCLVSLDPRAVNIIFWTSYKQSGNIAVLSKENILPGAICCTNAPGRPGLFGSNGQSRY

SEQ ID NO: 969297 - protein, 204 aa, Homo sapiens
MPSPCVVGGSGHALLVVLVCAARLRVLCSAGFPFRPIWGVYLRRRRLCGALEVIASRALSELSLSLSTHFACSGVCSPSHTDVVLALCKTGVSMPRSFVGRRPGLRPRARLPVRWAGGGAHRSPPCGEKRFGASPSLRPDSKVKAPVAPAPSSQEVAFSPAGAHAASGERIRPHYCFASPHWHSEAFQHPPTRCSPPSIRASTV

SEQ ID NO: 969298 - protein, 122 aa, Homo sapiens
RLWPKKFSPRVRPTVSLWGTTTIYGALCEQHSSLCFRETPNLLVWGEAKRFFQDEFPVRYWVFNNKTECLTVPVMKLRKYMRAEQSARRAPHSLGVLENRTGLSAMQRDARKQKYVMWRALN

SEQ ID NO: 969299 - protein, 111 aa, Homo sapiens
LLTGTIFVVGGPAVAEQHVRGYNLQRVFVSVVYHAGAPLVWSGSTPPGIISSGNISSLRASPPGDRSPVYTLLVEKQKRAKPHKSASLKVFPPPRSYVLCAYERSRGGYTK

SEQ ID NO: 969300 - protein, 288 aa, Homo sapiens
RVLWKHTFAVGCGGFPALGPPEAGSSPQYWALCGCGTWGGSCLGVGVYEHPHVCCCAMALVGPLSQEWYGAIRRGARHRKPRTNDGVAKPHCPPRFERGSIPPGHHRRAFVRVPLGHRPRGSRRSPLLQRMYSPARLLVSMQSGVSSPSRYHMLAQPCLRSLSSARDRGGGAFGDINRRLASDPCYKCYDHVSSAALLLQCFPLVSTHIAIYSHSIQGLYTSAVSGEVHGRPPVEQTGGIVGALDTGIKDCCRRPYSPPLSNEPPCTRLILGQQLLRNPGTQYAPTTC

SEQ ID NO: 969301 - protein, 56 aa, Homo sapiens
MDQRIAVCALSCVLFCRCSLLLHACAGAPRASCRRPLHSRVSATPPLIFVEARSPL

SEQ ID NO: 969302 - protein, 233 aa, Homo sapiens
GYGSPESQGLGPGGPRIAPRGCVVSLRGLVLPSRVCPAGPPCGGAPRCQLKPMLGGGRSRCSPPRWVTQLLLGSPPTSLRLRWAAPLSWCVAPSPAPPSWGARRRLQRLARRLGAGLSLCRTCRSRRWLPTGGSLPSTRWVPRVCRGNYVIRAPAVVPRRGSIERVSSQCFIRRGSRPPPLLLIPRGVTRPGASPTTPSLSISAVFTSSKGNNIGSYESPPVCSDILLENVHQ

SEQ ID NO: 969303 - protein, 164 aa, Homo sapiens
KNSVKPIISALAVTLDSNKRLLIPEQSVVGLTNCRGLPMTRQAGPAQMGNLLRKGNACFVVYNTSSSKGLLPRVCSKITALFAVVDLFNLSPQPCYARRHMSSGLIAAPETPLVLAKLCPPQETIQHDGSNLSEKIIMTPLLPPQSEPSSGGLSSQYGGNLLCV

SEQ ID NO: 969304 - protein, 198 aa, Homo sapiens
ASGADFCVAPRGCPTPSGLSVWPISLPALAPLVYLRCGRVPPGSPTGSPPPGITWVTEAPWIWAPTGPPIPRPPWEPLPWLQLYKEPPAHEVQKSNPGVLLQTSTSPSGYLSGCIVAAPPARRVVLQVHPCRMGCTPECLINRAQQGITSTSYHPHISTYKASLPHSSPRKLPLRSILPPLSPHEFMLGAPPLFLCLC

SEQ ID NO: 969305 - protein, 286 aa, Homo sapiens
GGCVGVCGFVFVLLCRVCRGSPVGGCHAGATVPDCVFAGRHTGCSAACGQNRRGGWPPILERLGRQGRPLWFGKEFRWLSTPVSEARLVHEVGFPHLGVGHSLLRALKCNNHHGIPRAMLSQNALATPKKGSPQGPVPHETLAQLFRLTEILAEMLDNEFLFTPLGCLPPPLYYIRSRRNPAFYGWSVYVRMRPSLTVDQLENRSSRQITLDAHVGRHSVHTEYGTIRWRRPTRSFIFFSSVGTVLCMESVIITDPEDFFLGGIHSWAPTNLCPPGVSTPIKRPHN

SEQ ID NO: 969306 - protein, 169 aa, Homo sapiens
VARRPNGSPRQLPSRWFDKKPPRNLRAPHRWWGIIRPPPSPGGQQCLQTSAPRSCGVTRLRTPPLRPPGPVMVHNTPVVTRGAPDLFQLAPQTDTRWARGGQPPARDYPAPHLAERNPGPSLRDNHTSCSRGPTLRRQHHQQRTPRACSHEKLRTNIIISAPQRQDDVA

SEQ ID NO: 969307 - protein, 267 aa, Homo sapiens
RPFFQGQENTQAGEPNNTRGAHPGVNRRGKYCSARTVPPVYYASQGGAQPRHNVLTAHAPRSVKKQQPAGHSEQRRRTPPGNTTWGQLPRLANERNQPTNLRGAKPPSSLLMCRTYRGTRTLARGENLLATIFLAKDRVIPRKGVFHNIATRVFAKHYTPVLRAVQTRPYTFVHNNTPPPDARRQAGRLLKPRLGHSNAHGGYSAWCENIESRGALQLDKVTLRWLFSPVTVTLNMSVRQLVAKLLKFLLWARTTTSRAQILIKDNL

SEQ ID NO: 969308 - protein, 142 aa, Homo sapiens
MVAECADRGGRGRSHSKRQNPETAPCHDALREKRDVHVFPNTWRTTVTRGENSGSHGRAQDHPLTRHPTKAPFNLDVTDDVEARRAPPPKQAGISPLLILPQAGALRTTGEYTGPAGAERPGCARSAPTGPKGTHHFNQTKT

SEQ ID NO: 969309 - protein, 174 aa, Homo sapiens
MARQHGLANVVKHMELTGLPCAVFYKEAPPIIFFRALLREHLWHTVDCPRQFQRRPSAPPGTCGVHNRSPLPRGSSGRQCTPQGTELKKRGVVTKAARTQELWPRVTPEGTPPRRSWAVSPLHKGKLSWALLEQGKNIPRKEREHANKICPETRVSGSQTTPAAPPQGRPTEYA

SEQ ID NO: 969310 - protein, 159 aa, Homo sapiens
MGAQHHEWARDAVSPPQQGGCRLVARGPPRPRGWGPVAPLEPPDRRATRRRGPKFPPENVLVRKAVHFLHRAEVLPWRAPAPMRGIHFLELPRSTETKYSKYEGKQAPTELLTRNFRGFPPTCFRQRPNSNSLHVSRGEASKRSRCFLGRDMKILLLEP

SEQ ID NO: 969311 - protein, 444 aa, Homo sapiens
  misc_feature (254)..(254): Xaa can be any naturally occurring amino acid
ALLALVSWLHSPFVALSFPLAAPLHSRWFAPPMRSPGRPVSHLSGIFPSQPRGPGITRFSPPPAHPSFLPPFSPSNFWAAHCYEDTKDGGPRRSRRVGVPGSPGIFPGDFWFGPPSGSPGPKGAPPRAPLCGQPHWRPHAPGIGQWVLWKPPTVVHPRDLGKPGPPVGHTVGCQNTNAPGTPGEESPQDAYKGPPGHNLTRGGSPQILLHSGPPADFGGVPTFRGTTFAWRACPPTRVFRVSTHHEKCCRAHRXPPRLFHALCERRVSHAVGPAHISHQGEGVPPRSTHLAHFSGGDPRGEARRTHRSTGRVPCTGHKPCTAGLKGEYPRFPNSILLSPGKALGPPKKGRDQFLPERELKTGHPTLRPEPVQCPLRKRLIRKEERLEVTHLRERERNFQSLRYFSVWPVPNARLFGKRAKRAQENPQNRMLKRKNKAPLGTWDP

SEQ ID NO: 969312 - protein, 106 aa, Homo sapiens
RQDGGVRVRGGGGGGGSGVRGVGRNPGAGVQPKTAERSGSLQVGKPFMASPAEERFSPLPTHLSPRCLLKMVRGNAKRPGSRFCPVDHDECPSGEVPCTGTPAHLP

SEQ ID NO: 969313 - protein, 104 aa, Homo sapiens
MVCIDIVLFPRPMCYNRCRSRRYLYALFFDEGPLGWHHKRCSIDRIDVGRAYTKIVANNIMREQCELLVSPIPSLRCCAPNLKCRKKLGKNGPEKKKINNPDKN

SEQ ID NO: 969314 - protein, 276 aa, Homo sapiens
MSDKVNYWTVTIPLAPCILHDPLLPPWRLCLCLLRMRVSSPYRYSPVSETSLFVQPAGLFFLGALPPPGSTTLGGKFLSPRVFLPPPGGFSQSGTPLSTLSPLVITQMFFSGATRIPGAKVLQDFLFPYMDTGPLWPQETLGRYGPTEPEKDQSLEMEKPRGTPSGSIPRSSPWRSLHALQTMKKPPLFERLGNFSKAKDLNRLRDQHQEIFWNKVVNRNYTTWALIKNTELAGERKNICNNPTGKKTGEKFSNTPSIHPNCYPEMPGRPYPRGEE

SEQ ID NO: 969315 - protein, 134 aa, Homo sapiens
MIILHMRRTIDRSRWTHTIVAHRYIFKYILERYILTFRSLTQRISWLGRIFSHTIIGTVSSPRVASVCVLSTTRARSSPRERQSQRHSLSCEVTPAVGTALAFSHTPCSLLRDRSSSPNKLKHTAHQVEDKQRN

SEQ ID NO: 969316 - protein, 231 aa, Homo sapiens
HLLRVVRSSIFYCVGRPSSVVDDVLQHLSVSVSSPLFLRCGRAPPPSFFCGIFFLGRHLVGHPHVGGIYNPPLGCGKEERPPPLSCRWSAPPYVLFVSRQGCFSSKTSPLGPQEENFCATHAVLLSEGTPPPLYFNEERRGCRPSPLAGGITPLSCRKKTLTVVWRRGAPPPLLPPPLHQKSWEGDTSPPRRDTHRQTWWVARQQRVATSSSREPHTHRRWAPFREKRRVN

SEQ ID NO: 969317 - protein, 210 aa, Homo sapiens
LCEGPPGAAVLTPLGWCISPHSSRGVSNRLLRARCPAKQSVEATPSFLREPRPPFVFSFDGTCLVADTYPVADSLVLRSLGPPRHLLGPSWGAEHMSGRALPPRLVVVDPEHRVPSPPLGAAELFRNLFIKKAGGGYHHQLGNRRRGHLDKTGPPAGWHPPLGAPPPQTPPGRRHIKRRASPLENVLIHAPLEKDKNRIIPRVSKKGETT

SEQ ID NO: 969318 - protein, 113 aa, Homo sapiens
MKCNGPLRLQQHIFICCGHHMLHPARVSSPPAAPLHSWRSPPQMVIAARRRRERKSWRDCVYLFRSGYHLSERQQRGFNTWGPLQYDEVVSPPVVPPMGSQNFPPWPPRSRRG

SEQ ID NO: 969319 - protein, 133 aa, Homo sapiens
DSSLFWRSRGNNTLSGSPKRLTQVMWFFQPQQWGRARAVRCCPKKGTPWSCHETGEPSPSWRTRHCCAVRSIPMKTTCCTVKQYLGSISPLRWKFHLLERPQVLSVLSGLYEGRVLPHITTSRLWRAILSVTI

SEQ ID NO: 969320 - protein, 108 aa, Homo sapiens
MCAHHSVRAPPQRCIETPLSDAHHPPPPSTQQSEKKESLSTPSAEVSLPHTHTHSSPPHTLLFFLLPLTTSLPTLKPPLYKGRGPLGTPPPFYCSPIPIKNPLLCLSH

SEQ ID NO: 969321 - protein, 282 aa, Homo sapiens
VVSPLLILSSHSIPSTVFCRLSDGGWWSWFFPGAFDAASVFMGSCCLFSCNRACGTFLCSLLTVSCVFFFVVSCPPPGKWAPWGHPLLLPSYCSLFRALWPHERVFPPRAPRVVGEHSVAPTPPSSVLLGNKNGNECVLGLFLNPSEGAPTGVSPPRHPTPVSPFHSALAECPPPTTPRLFCSSLLSEGALSQALSPHPQAPNAPHVPPVPRRYCPGGHISRGAHNTEGRHHHTTPERGMGETHTHDPLSPSFGPRTSHCPIARENGPLPATPRFATQKRRL

SEQ ID NO: 969322 - protein, 136 aa, Homo sapiens
RKQARNSRCHWAQTNWGAKTRGPGPGSTKWGSRTVDRGGLTGAGCTNAARTIWAARCTARIERPRTRGSPSCRRVGPPGRQPQGFRQTAARPPRVRAGGVPRRSCTRRGPPPQKCGKRLKQTLVLSRGAPQKRQRQ

SEQ ID NO: 969323 - protein, 118 aa, Homo sapiens
GAQTKSRLAARGSLLVTPPNEEWLKEGKPKGIASNHCGAQKLNKCAPPARESRPPEAVADGLFFQGETHISGDTWLQNRPEVGKSIGNFEARPLDYSFAQTLYFEMSLRRQKDKDFLL

SEQ ID NO: 969324 - protein, 523 aa, Homo sapiens
  misc_feature (65)..(65): Xaa can be any naturally occurring amino acid
  misc_feature (195)..(195): Xaa can be any naturally occurring amino acid
MVGVVSVTARFWSLSFVHLLALGCHITCCASCGGAPPRVRCSSLFCESTALPRWVYYFHKKTFAXGELSESHGFSLVLHGGCAPPLFRRFFFIEGDAVRRPRGVRPIVFRFGTTHEDDEDPSPRILNGGELFEHKAERWGRPPNFVGILGSPVSLCPPLVPHHRPVFAADGVLRSCFLPPPKGALYFGAARPSVXPPGPPLVPGPLFLRFAWGRLSCAPPPGRTSVAAKNTGGADRLRVFLLKSPTRGAPLWEKEPGGATTPHRATATVNLGKGGLIHKDTRLCERKKGGARTAPSWIPTTSHSSHGALLTLHLKAPPLFGPPPPLVDASHRVFGPTSGGRLSPQAPPRRPTHWSVSWAHANSSRGSSLASHTSQAGFSPRFTVKCVGPCGPAGVSASVLVSLGLSLVLPVATESALVEARGVSTSFEGGASSLHAWCFPTTSGGSGPSPLPLIPPFPSHGLEARMGWRLRVHGFPPRCFTPHLCPHLLRAREGTWGRGALVSRFLFPSGFWVFFLVCVLDSR

SEQ ID NO: 969325 - protein, 114 aa, Homo sapiens
MYCKPTASRRSRTRAPWQRTWGPVRLFPWRANPFEPLLAPCLEHLASPYTCPWGFQAVPLLCPDREGLWGIPTRGRPNPFNPTLPNHEPPTPLEFSFSLQSLDGFGLPQLLLIF

SEQ ID NO: 969326 - protein, 183 aa, Homo sapiens
MVFFPRTDDGTGPFSTAAITKCISLRGITPLMLLTAIDHANIHTSCDIQLSPRDITSNCARATLLVNKRLFFPAFFLSWGVDAPPPDCKVREIIMHRYFSLTPFLFASQFAVDHSSKRTLVKRFCWDNDNLWYLPTVGAVVLQTSSDIKCFSEVGHTPVACPARDVSPFHLHLVILSPHQTTK

SEQ ID NO: 969327 - protein, 218 aa, Homo sapiens
SESVIVYCCLLSVCLLLLSAVFLLSMFCSRHAWCCGLVVSVLSLSPCWLLSVGPFSLPSRPVGQPPVAGPRVLFGRCYVHAFDPGPSIAPVRCVIPCGFIAYWSSPVLFFVTGEFCLSLWARCAIGDLCLFLQNCPGLCGPTSQFLFVSAGPRGHAFTMSDLPHSAATLSLMVWEPGLKQGAFLSLWLHVKLKVLTFVGSQLFTHFLYRPFLAHTAGA

SEQ ID NO: 969328 - protein, 381 aa, Homo sapiens
WLHFPSYFPPFSVRFPVPLLLLVSRFAVVFACCCAACVCVSLLACCVLLRCRVVVFAVRFLFVFFVFFCFFCLFLCVIFSACLSFFRVAPIPLFFSSFGGCCWFFFLVLVVCVFSFFDCVCLVSPSPCLRLCFCVVSRARAGGVKINRKPLFFWDPPHIVSCVVIPQHHPSVFVTPLHVYLHRGCVVTHSPPGFFSIFPPAGWGYLFSPLRDTPCVHSWAPFFGSAHYYPPVLCAPHTHPPVGSSAREILSRAIFFAPHSVSLPRVVAAPTDGGVCCGAREVYFGGPPPPPHSHIFSIYHPPPPRACVVLYIEEGAPLSRGDTPVSLYEGAPPPLSERGVFLPPPAWGPPQEITSTTFFLHPAAGDNNNKKAAIVHTQRRR

SEQ ID NO: 969329 - protein, 290 aa, Homo sapiens
  misc_feature (290)..(290): Xaa can be any naturally occurring amino acid
GGGKNPGVEPSQTGGVSNPQRLLLERAGPGKEGAGTLTGWWTRTSCLDEEEGRRQNPTVEEVPEASPARGMKQSPAKDIHVPRGEAFLCPSNHPPNLVAPGSKNDGLCATKKTRQSKLLPSKQMVFAEGNPPPPEQGALLPKEAVLARRYHAVACRNPQLGRGGRITNDLLLVKRICRFAPPLSLDDSRSKCAPAGKKTSLALTEHFLLATKKERWCYDKAVSSLPHTGGRHLHQAKQAFPPACSPKEAVRAPSRSSANKFVAPTHVGASSPPQRGFRWTLHHPVDWFPX

SEQ ID NO: 969330 - protein, 312 aa, Homo sapiens
REHAPEAAPPPEGVGRHRVPRRTIVLRNSSHKDARTRGTHRKSLLKTKKPSNTFGRRRMHKVFRAPAKTGGLSVNTDGQKLTVPGGNGPEKACVHKGARGYLLETTLPCGAKTLDTRGHLRGQRGKYSPQPASRPPAAGGVPAPLRAPVIMGKTKVPGWAPTKKPVGTPCGGFSPSEPTRRHRLRYRRRGGTETSSWKEILVCEHKPLAREFPPKTGTPLARVPGGAVCTRVPCSPKPAPEEQRGTNKKVDTTPKEESGVKTRRSIRENRGKCFKKRVDNPRALLGPREGVTLHRYTKNDGHVTPKKKFRKK

SEQ ID NO: 969331 - protein, 84 aa, Homo sapiens
MKLTVELVSETRIVCKQQRSGDGWMHAPAHSFNVACGDILVGGVAHRQATLSLSMCEMKRHEVTKLMHHRERRVLLKRKPADKD

SEQ ID NO: 969332 - protein, 104 aa, Homo sapiens
  misc_feature (1)..(1): Xaa can be any naturally occurring amino acid
XSPPASSCFCIQRYFLYYPLLVLRPASLCLSRVVMYSLLRLLFPNNPLPSRYSMPGISFFTGLLLPCLWATFTTGCHKTRGSPSYSRIVQHTLSFPPFESYVIK

SEQ ID NO: 969333 - protein, 340 aa, Homo sapiens
  misc_feature (128)..(128): Xaa can be any naturally occurring amino acid
PLHSMERGQTQAILISRSSLLSRAYYCVDYRGCWFVSSSSSSLLRWFDVPPLCISVLLYSGVSTILVFSARPSLCGHLLHAQYVSGCLHLALGCVRPGCVRPTLWVVFPGAVVFCALSPRYSGLLVYXPALGYLRDFRSARRLRPLSPLVLCSVPQVCPTGLPFGQDIPWDAQLSPVLRNARWAKGRGIRVPLNQAQQRPYLGRIDVLQQPKAPPGSLSPKKWPCSHYVTPQDEVQLKTHLQPIPRAAQSLGSASPGPGQPPLSSPNEGKESQKVSQGLVVPPMDFGVSLRHLPSPSPLRLHPKGPTVAPFLPSRGSPPVHGHFFKPPFPEDEECFSKMQ

SEQ ID NO: 969334 - protein, 284 aa, Homo sapiens
MARDSSAWGRPESPFVNSRAPCAPAAKGPGRPNTPPSRRRRNRAPSQRGRDTAKRGSETQGKEPVVRIRPENTCCGEIIRRRRPPVGPPSGSTGPQFLRAPYATRTPRAPAGKPQGITCPGRISPGKDSTEPARYHPSWEGSPADSDQGIGREQPPPAATTLWGTTNELPGPASGLFGRTIRSPRAVASPDNTEAGQQRHRWLEDPGGKRCPRADKGDPKDRGWTKMVTLGRGAQARTQGAEAPPITAQTMRAGRSPAQLTSGERPNTPPGDMGAPQKKGPATK

SEQ ID NO: 969335 - protein, 146 aa, Homo sapiens
MFVCARPPLRLVPPPLFALFSPRLTIALLTYSRTPWSHTHVLLQAPHLHGETPESVQTPRSRKVAFVVFTSAAIVPWHTAWRHTPSGFPHALEALEEARRLCCSSALARGAELPRWFEAPFCFALSGGFFWSPTEGGWNTVDWNFF

SEQ ID NO: 969336 - protein, 238 aa, Homo sapiens
PGGTISASHRAGEFSVAPLGRKFSGTIPSNCWACIYRSARPPTGTFARSWTTSPPRGLFLIFPGSPACGGCFSPVELVTDPMFSRHRHFKKTRRIVGVSSCGNHTPSSPEAGASRPPNEGESKERVLTHEFEGRIRSTTSRASSHNYARGAPPATIDVLPAPGYPAPHSPVTSDEYAPRRGQRRLPLGGSNVEAAPHHADTYMCAEPRWRCHHAANIASRALTKQCRGGSEARPQQMN

SEQ ID NO: 969337 - protein, 159 aa, Homo sapiens
  misc_feature (154)..(154): Xaa can be any naturally occurring amino acid
MVMHIRGVVLSLRWKGLRPPARLQGGVGLFVAMKRGVPTRVWGTPVHDEFTGVNRRSAPDFGRSFSGGKMGIQRQRRVFQRNFSGPTFAGDTPEWSPPWKPAWLHCSGGLSWTIHGHISPRLCPRIGLPPRLTCKQDLLSLKERIESPFLVTNXWKDWP

SEQ ID NO: 969338 - protein, 217 aa, Homo sapiens
MDPNWAQDLPEEHRPCLAPWRQTASCRPRGFSEKAFINRAPVPPPSGAPVCTTMPPHLAPGIEGTSSAAREPPPLWRPHVPPPGLASPWCVFPPARSVLLLGRPTNARGSRPLPSLRMVVSSRRNTTLRSLSSTRCLLRQPACHPRPADVGAAPLRSALAERHTRLGGAPWGATRQAHTSARKQSRHCDDYERCCALRGARASSTNSMIVVPPTVDR

SEQ ID NO: 969339 - protein, 300 aa, Homo sapiens
  misc_feature (81)..(81): Xaa can be any naturally occurring amino acid
GARSCPPLLCYVMLVASDIVLLCLSCVSRGCFSPSGFPWRAFPLFPPALGPWVPKPALPPMFGPKSLAIHLSRGSRFQSIXGFNRTRFIPGSGPTLSKAHISFSQSWLFSSPQNLRNHTNGDTSVLLSVAELYWRSSSPTIALPMLLQALALSQEYRLPYLASETVLNLAFAPAHSLESPAQALSLSPTWPIEPHLGCRGYPGPRSVPIVLSGPVPGGFSQLPTIQPEETPEALELPIENLHEAQNYFAKVDSQERITGRSLYFHGHDSTTTLGKTPERNRCAMLFRQLHHGAALSLGYP

SEQ ID NO: 969340 - protein, 210 aa, Homo sapiens
VVFALAAGPPVAGSSLFLPQVGVFPSLGNDLFPGAPYPGGPPPGCSGPRVPPLALGEPLRKAAYKGPAIPVSDAVMAVLRTNARPVAVWASCNSPSKAQWVASSTRPDLKRRGALPPVAQDKCVKTGFCSSSRAILGGTVPADDGNYPGHALQGGLHQEQDFKSPPSVGQRNHRYNACPPAWERAPTQEGARHHTGRPRVAPGLLTPGVR

SEQ ID NO: 969341 - protein, 169 aa, Homo sapiens
GIPPPVHPTSGVPAPDRPPPPHRVENRSQGIARKTPWNQEARDGLSKTAPPVMPPPGHRRQIIRGAKTTSSNRSHPFRPQSQGGEATTVIGSTGPPRMSPVSLYPHHGASRITMARRNIACKRQNRQTRKAPQAPDWSPARHLEVYQAPPRPNREGPPTACGDPQSWVP

SEQ ID NO: 969342 - protein, 71 aa, Homo sapiens
RYNRYRAWLLPAHDYSPLMAIYGYSPGYRLPSGLVHNFRQSPATWVAHPEFTHQPYTEAGHPVAHPTDCTK

SEQ ID NO: 969343 - protein, 213 aa, Homo sapiens
MSLISAPVPQSPIRTSLLTHIPRHEGSQRFPLPVSTPNTNWPHPIGYWNTLRSYHRTYGRDLILSNILTITFPPILYSLGTPSGHCRTSLWTGWTTSEISTSPDWKPPISVINKYTIHQEQFCAHPWRLSPHHIGVIKPEANSPGQSYNPNPLSTRYNRPGGIHTGPMLLEILWSQTPPVSMPHLVLELIPLKIFVNRARIYPIAPPLPPLEP

SEQ ID NO: 969344 - protein, 75 aa, Homo sapiens
MMCSTMLPGFRGHLWYDHVMNARSDVSSTAPFPDPHIWWSQHLSHTHGTSWTLFMGSINDAPPTGIILVAAAHKD

SEQ ID NO: 969345 - protein, 131 aa, Homo sapiens
PIDVIALYPEIFGALLSRSRGPVGARSQNLGLSPVYTPGLSDTPFRVPALKELFRSDNSARSYRVPFPPRGIWDPIAQRLSNLLPITTYSMEGFAYPQLAPPPAGLLGKVVVPPVVLPASTFVPAFITTLS

SEQ ID NO: 969346 - protein, 380 aa, Homo sapiens
FGGRPNLCIASCCFAAAVSCYFRGSCSYSLFVGLLRCRNNCVLALCFFLLLGGPLVFLPVGALMGGPFFYRESFFPPGLREACGGHHQMGFFSSRGLFRGDVVMNMGRPLVSPVGAPSGGHHTPTCMVGSFWRGYFLSPPPCFVDTTSLLVGFFFVHTPRPPFFVLVGVASPPHYIVVLPATARRCCFLWAPIYHPPRRLGGFTQHQARVGNLFGGAHQMLFLSPARATLILRLLPWALPLFIVGGVIPPPPSLPLLGGRHPLLVLVVLLLAASTPPPRRYALVGRVVVARWWRSPPRHDIYLCARRPHYSTRGDVFSRDDDVYYIIHTDLYFLYTRVFFMWGTHIYIYVRDIPHTHTRGVICELVTHTPAREERYCEGI

SEQ ID NO: 969347 - protein, 102 aa, Homo sapiens
PPPTKASRAERARGSRTRLLWFLFSAVRVSPPLLVSSVVCCPTLLILFQSASPTLAGCVSPRSCCPPRGFLTGVFFPCASSLLCTSGGSYFLREGHPLWGAP

SEQ ID NO: 969348 - protein, 136 aa, Homo sapiens
MEPRRLDHLVVRSHFLEIPAEIATTEIISLLRVGHPTRLWRYSPFGRKIHPVPNRLEASEMYNATYDILDARPSSLYQPPRVISRARFYSKAVYQDYIWSNQNQPFQGKQKTLNGEHADVPSSDKQTKPHRKAKNK

SEQ ID NO: 969349 - protein, 290 aa, Homo sapiens
RRLSLFLPAGLRCVHPLGLFLVCALYGRTEWCVPPETEGRWVVIPPSAIFFPGGTFSASTPLKRLSPAPFFPPAAGLLFPGRYTPAPSPFFREFFSRGLPGVPTDTIGRARFGSCVVSRLLDGRPFHVSLFLPRGTLPIPSPPGLEENGFFPETMSYHRIPRGRIPPRNRGLCPPCGGWKRGKRLGSKLRGPTERSKNPLDEPRLSTCVGKNGPPRSERAPPRRGSHKVLSPQKAHPLKYTLGCSEIIVLHMENPLAHARHRGNTPVCPHTQRRKALTHTERVNTLTQRV

SEQ ID NO: 969350 - protein, 55 aa, Homo sapiens
MHNAGSFHCTRGFSPQDVFSLPPNDDSRSRVTVIFFGVHHEQSRTKKSSSPAPHD

SEQ ID NO: 969351 - protein, 130 aa, Homo sapiens
MARNYHRLSRGGHPKEVSFSWEQSFVPLRRQGVEKLGTTPKVNANSGEPLGFGPQPQKAHASPTYYKPQPRPSGEPTHGRSGIKSTQVWPHLKWTKNLNGPQYTGEHIHPHGHSLTTLLAPQRTYPTLEM

SEQ ID NO: 969352 - protein, 273 aa, Homo sapiens
  misc_feature (210)..(210): Xaa can be any naturally occurring amino acid
LGFPPAFTGAGFPLSILTHHSVLAFSRVIPRGAPTPRCGPKSGKLYLGGPLREVPHHAGDLHFWLPTQRCCSPRVPPFSLIGVWSAPPHCLGDCLIETFRKNRYPRVVNKIMTTAVNTPGYSVYNVTGSRTTHKVRRTLQGGEASTPPESQAPPPPETDFVEAGVLPPQTKVPPWERTQSSPHPRQYPNNIWWRHVQKRDLTHSGRQLLXLPAGENGCPPPTPPSTKQETPQIQAGPPAEEPGSQQRHDRGQTDDPDDVLLTRVKQFDPAPTS

SEQ ID NO: 969353 - protein, 114 aa, Homo sapiens
MLRLHPVQANYYDSIDPINLTHGTSYPRDNQPPIPILQSPIIPPIGFTTSDVGSRTIPDGASRVLKVLVCSRFKSYVDLSSDRSNPGRFLIYFKFLPVRKDQRNKAYFTKRLPP

SEQ ID NO: 969354 - protein, 149 aa, Homo sapiens
APGLKGFSAHYLPSQASSTYPGKVPTMTPPRDPHKQNRGAPYPNGVGPKPCSQKGNASDQMATTDLPGNQRDLFRNHRESINNDNPVTTGDLHDRASIEDNPPVLGQTTTPGPWLTPKIPRTLGAQWVDHTEGTEFKTRPAHKGGTPSP

SEQ ID NO: 969355 - protein, 219 aa, Homo sapiens
APASQEHTSLVAKKGFSGTEKVARKKGVSVGFRSRCRNSCEKEPFFGEVINAVVDWSLFLWSILSPRPRPQRLEGLPAWRCSTPPQWADTRDSRLVNIIVGALHCFLGLPYHVSRPLFRCVNKVFPQQCLRGVDHHAFVGVLLWGQSTFGHVFVAVMNFKQPSLGPAVDIQAVYVRSGRFPHAADEIIVSPLLAAQLRNNSRTGSDPLKNGGFNAPSMN

SEQ ID NO: 969356 - protein, 232 aa, Homo sapiens
GGFIGVFFPGAKRVATCFDPPPGEQHTRPPLSALAVLPIFGDFFEGHTCAPLLVPFALPPPFCVLCLRRFSASLEEVGPLMCTHNGRVFVRKMAAAPCRRKGAFFSPWCCLSLSLPHHVRSPPPVFVSPSLQPLCSPRSTESDLVGLTMPHPNPFPSPPGPWVSLLKALSLRFISVRSLPLLTLTRRSVCLYALSVCALLKSFQRGSSPRGVLVLMRALFLPQPLSVPARPS

SEQ ID NO: 969357 - protein, 297 aa, Homo sapiens
MVVRRGSVHLFGPWGAELSSSWCCMRLSPPRCPSVLIWLAVGWFDSLESSLADVPGGSAFRLLACHRGEFLSCTRPRGCRPCFCAEKPRCGALGMCRAPVLGNNGGLFPSAPMGCPPFSALPFLRRCVLPPEVSWAPEGASFLMNGWPHRWGSRFLLESEVCCFSHCLLVNSLVAPAGVGSRLLLHTPARYMMWASPRSLAAAPVGVAVAFLPHNCVNGALSPCSRGFPPHPPFACFNPTGPVDSVSADLTYSGGDGGSTPTLSRARRTPAGDAGARPPLNIRYWQTPPEFTNHHHA

SEQ ID NO: 969358 - protein, 98 aa, Homo sapiens
SLFLVCPHTLVSFISGVLTLVHSFFYAVSSFFRVSYLRCPLFQSVLRISPVESFSPRVFHEPLGPTPPGFPPFHQRPPSATNGVFPDPLATPPPGTCT

SEQ ID NO: 969359 - protein, 183 aa, Homo sapiens
SRVFGVACPGRPSFPANGMSVVHSFCVRVTRPCSWYGALWGPPRRGRPSLLVVSRRAAAFSLRARAPMAVASSGVTCSFLSVFSCSGTFCCRLVAQPVWVCPSRLFYVRADGPCLFCALLLIPVVVSPHPACVRRIPARYPFWRSPALVFIRCWLALLASRLGLRALSTPAGVALPPPAPLRN

SEQ ID NO: 969360 - protein, 372 aa, Homo sapiens
MLYVVSPRQALWFRLGNLALWGTWRCVPRKGVESPVFFIRDLRGRGILPVCMLVYPRANYLCAGAFLSGGRGPPATGGNSGGTPWCQTWEAEWAGIFHSPRLVETWGKRACAQREHKPRPVNNKGLPSWFSGTWDSHRKKAPWGKYKGAGGHTRAQMGVTTPVRGPTPTAGHTRAHGWQTLWHGLETGTRLELDTPGAPDGTLTTCGELHISPTGLPQSSSYSEYPFSASSTASTKVGSLGEGKNRGGTHLVGFYLRPHTLGGTKGFERHQRSLPASAQSLGPKAAVCAIILPRPCLLKESKRERRAFGASSREGGGAAGVWAVGPSGPPLLEGKPTGSEETLEKTQERVLKTEIVLPAPRVDFSVCNCVNE

SEQ ID NO: 969361 - protein, 139 aa, Homo sapiens
MSVTDSPLPPRRQHTICGDTPPCQPDAHILATPRVPSQSTRRPRRVPRRLPNWHGGHDRNPHGGKPESSPRDEDPEPRSKPALSLGWGPSRTNAGHTPTPGPRLFSGSQSCRPQTLSAGPTSPSPGNAGPQRAPATKQN

SEQ ID NO: 969362 - protein, 95 aa, Homo sapiens
  misc_feature (94)..(94): Xaa can be any naturally occurring amino acid
NAHHEGVEEEPLSRGDKYGALTMTKKRGASHKESFLCGEEPLAGAPSHKVCAPPPGGRQTRGVSKRLPGEGDIPGEPILPGPIIIRPPRLNTPXV

SEQ ID NO: 969363 - protein, 167 aa, Homo sapiens
MPTFRCAQLASLSCVGRRTQYLLYGQLGSSSSGRLILVRVHNPCWYIPPARFFAHSTARSLLLTRSGRSVHPHPLSVFIHRLVVGAPHTVSLAHTPRFFSPAHTALTAVGEMCPRRCGCNPCVVSECPAYFAAKQGSCVVSCGGASPVLACLVVPVRSLCGCWVITP

SEQ ID NO: 969364 - protein, 125 aa, Homo sapiens
  misc_feature (125)..(125): Xaa can be any naturally occurring amino acid
MSSPPTICVVPLPPLWCPPPPQSRAPHLCGLLGGALSFRPPLFSVVGTSGADKIWAPPEDTPFRPPPGGDNGFFGKQYTQIRGVPHNRIRTTNDVGVVAHDDGCGGGVVHTRAHHTRNTLRPEIX

SEQ ID NO: 969365 - protein, 102 aa, Homo sapiens
MGDNTRLVEVKVFPATTLCVLPEDATRCNPVFVCPPPLCRNRKFRKFSRCCAQNVLCVRAVIRETNIKWRMEGTPWQLRRKLRRMECRENATMQARFEGEIP

SEQ ID NO: 969366 - protein, 283 aa, Homo sapiens
MFVGVDDSILLCSIFLQCACCSAVWWLVYHCYMVLEDGWCSLSPVSTKGGNRDLPLCADGTSGSSPAPDKGDHPVAPPYIVYPRESLIFVSECPPETFGREALFPGTILASKVRKGSSKECSCGATLLGDTRRGPPPREALGFTSSGDVSWTHPRPNKPRLCPCIGLPHGSQLQAQFAELIGKDVIPLLVKSWKMAPKILESLVNAAHWLNNGSLAKPTCVLEEAFFTSYIHPSWVPLPVRDNEENQNQIARGCPSKASGTKKELAVETWHKSLTPTDLCAHE

SEQ ID NO: 969367 - protein, 154 aa, Homo sapiens
MGGRESAPTARAPRGEATAPACQKGRVKAPETVVQVTRRSLAPEGTPVSSAGRLLATPVKGVLLENGRESSAMRPLAAHAGEALSRQVQENGGEKRYIAVRWDATVNHCCRCVGEIGHHNPSFVLWGTAHLEHLRRLPQICPALLLRCPNRDPS

SEQ ID NO: 969368 - protein, 112 aa, Homo sapiens
PQTAFRPQRRFRFRDHNARSASQRALLEAPLFYIKALSSYKRLYTHMLQGNSPLSTVEVHTPLKIYPPESQKGTTQHFTAHARTMHASHKRLYSLSHTHPHTGRNTARELNL

SEQ ID NO: 969369 - protein, 111 aa, Homo sapiens
MSPGPLLSGFTLDPGVRYIFSPPGARCSSLGPFFGRPTSIGHRAGPHNDPAVCSPVSRDFPRGDYFCWQHPRRFPPPRVLLDNMSQNVASGPPYYDALGEPTATHFLVYPA

SEQ ID NO: 969370 - protein, 189 aa, Homo sapiens
PLTVVPPGGTLSLPLLGGAFFGALGKYFGAVGSTGIELMWLSGVFPCNNFLGEPPGGPTKTPFTGLSRGFLRIAPVRVCEGNTGGVTQQRVICRSSYPPPVSNSLVPPSSRAFWNPAQMWGGNNGVLFGVLPPRVLWLWAFPPVVPRGARVPTVTPRGIFMPPPRGRVVITHTHTRGLLFGGAVYCWGE

SEQ ID NO: 969371 - protein, 112 aa, Homo sapiens
MSQATRRLLNTHFILLVFLYVYTPPQHKPSQRVSLRRDLSPLRTHGLERATFIGRHNTFCCEPHRVPTEHSQCYVIGVNISSNIVRVIPAQLIIFHIYTYAKQSTLGFETPP

SEQ ID NO: 969372 - protein, 148 aa, Homo sapiens
WRPPIVGKTSGQMRACPKKTLPKSRAPTGRGYPPAGKAFLRTGIGLKRVSTTRGFCENDRVGAFQRCPSPCIPNVYIGEGLLRWNLGGQTRWQKGGLGAQEPTAPWYICGKWPFPSCLRVVLLFSPLNAPRDISRGRHCTSQLPHTTH

SEQ ID NO: 969373 - protein, 189 aa, Homo sapiens
GLSRAFLEGLFLSGPGISALRMLPDPRCRLFPQKSAPRVSSISRSPRAPPMCAPSHFLGTLSLYRRFQATLSGAAGFFCGFTCTPGVDPPTFSRRHFMLPPPVTHCPLGNNQISSSALMWDNCPIPKQQTRELPPQRALKSWLRISVLGRNFWRNDDGHPYSPRETTPMGRVYTPEILYISTRDLCRDC

SEQ ID NO: 969374 - protein, 109 aa, Homo sapiens
MRPCGGKGNPAGRRWKKRSPTWGKAWVAQTKQQCLWGKEKKKEGENLLRVLPLNLGGDRLAPPTNTLVPPLVTAPQNDVEARPPPLFCWVGNLLSHLVRRPTPVEPLVK

SEQ ID NO: 969375 - protein, 108 aa, Homo sapiens
  misc_feature (32)..(32): Xaa can be any naturally occurring amino acid
MGPLNISGNYLGVVAAAHLYVDKRVFLWGQEXTIEVFVESLSPELDTNTSGVRHLCLCFVRIYSEHQNQHMSAWGVSYQTPDEDQEKSVLGSHGQEATTKSATQKDSR

SEQ ID NO: 969376 - protein, 83 aa, Homo sapiens
TGLGNTGPLLGSLGHNGLDRGAKGSVEPDSPARYVPALGPTVAKPGAPFRIELIEGFPGPFDAPLGIMGTLSHWGGEASFKKE

SEQ ID NO: 969377 - protein, 105 aa, Homo sapiens
  misc_feature (63)..(63): Xaa can be any naturally occurring amino acid
SSVATLSPEMHSISSLMGGKLKCPYCPTGARTPADWDTHSYSDSYLGEEILLKRGSSHCERLXLSPGKGVSNFHVELCVGFHERLGCRSFHLKGSTLEAALWHEG

SEQ ID NO: 969378 - protein, 138 aa, Homo sapiens
  misc_feature (5)..(5): Xaa can be any naturally occurring amino acid
MPPTXLYTAPRFPFELSRCQSFSPSTGNSGFACVLRLGFHTTMRAPPSVVFFAHDCALSGDKEVYTVAHAVCVYILPREMSSHENPHHVCEFTRSTPRSEKPLVSNLFLEVSTTPRTISRFLARRANAHGHHVKGVAH

SEQ ID NO: 969379 - protein, 112 aa, Homo sapiens
MRSPRCDEDVSFSPALLLCDGCCFCAAVSITRPGCPVLPPPPLPLVVALLGVCFLFGGPPTDEMGAPPPPLCVVEVMPRECCLSGSGCPPSCGRPPNENDIVLCKLGGLPPP

SEQ ID NO: 969380 - protein, 118 aa, Homo sapiens
MWLAPPAPLGELWAPRTHKDPAVSTGNRHIFVERGACVRPCEHSGSPVLERRPPRVLLSPRQLRVWRKEEFRHRRGSSFLVRGSTKTTALGSVEPLCSPLIIYGAIWPTSGTPRSLVP

SEQ ID NO: 969381 - protein, 162 aa, Homo sapiens
MGFSPWAQQAPHVGCVFERETLFSHRRRIVPTPSVGGLPLICPLCLRGRDKERHTDTQLFPAVWGRAHPHKHTLGSTQRDRASPRETPRAHTSATAHSVSRLTRDRLSQREGSYMESNLYPLYYTSATPPHSLYDHTVGCGEDTRCLHRDTRVCVFTIGHIL

SEQ ID NO: 969382 - protein, 114 aa, Homo sapiens
MGLPQGETLKETSTQKPWKEFEETPRRGKQKGGPISHKEFSPLGHVLDRPSCHKQWRKRQHSVFEKDLRENFSQKGPTEFYPEMRGPHTTRRIFWDNNSGYNEKIYLQIWGSEI

SEQ ID NO: 969383 - protein, 444 aa, Homo sapiens
VLLRSSIVIVRWCPRLFRSVLRDDRVARMGRLGGVVDCAAGCVGSVGRVCPPAGLCPRLLSPPFLSFFLFGFYVWVIPPPLFCVPESQPFFLGAGAPPHTVGEFVPPRVLSPLLVRCLVLSSVFHLVYMPLPAWIGGPRFFSRWFLRLLSLAGVGSCLSFGMPPLCGVYFDTVDSFGDVHKIRELECLYRGSFPSGRVPAPLVKQPFALGGSAPHGGGPPTAPTLLTVYTLGMNFFGEYTTWGLALVGVNTHTWLPTPNGCVSLPLLPYPPPTLFCPSLNRVSPNPSTRGLWITPTRYDVGRKFYLFSGARRFALTTLYSPPLGLSLPSLLSRGVPRVSPRVAPPRGIFYGPPLGGRSGYPPPTPAGVIVCGGARMFVGGGMLLVLPPLLCVGGVGVLLCAVCVSVTLLFPHGNVPPLVPTESPISLHHIYHETTLPGSFWGRG

SEQ ID NO: 969384 - protein, 152 aa, Homo sapiens
PGHHALPLLALPRLWARSSPELNGKLTGMAFRVPPAHSVSGGPDLPFYNNLPNMSDIKKVVKHGVGGPPQGHPGLHLSTPVVSSDFITATPTPPPLTPGAGIALNDPFVKLISWYDHAFGYSQHGWWTSLAHTGLQGVRPLDHPAPAQSTQR

SEQ ID NO: 969385 - protein, 88 aa, Homo sapiens
CFPLVNPWHPRTPGGKMGTSQKSPLTGEGPHHRCEVVEKRPCPKTQEKGLSGLYTPRPNKEGPKNGVFGKNFGWCRFSWKRWVFRVGK

SEQ ID NO: 969386 - protein, 105 aa, Homo sapiens
WWIAPCPRGATSGERWRVYCVVIVAILGGVLDPTWVPVLSHPCVCRAGCVSPASSWCRVPGCGGETLVWSAGSLGAFRFCPQPQPLFIGVLSLGLVVCLGGHRLG

SEQ ID NO: 969387 - protein, 105 aa, Homo sapiens
MLHEPPVGYNVVHSSVTHYGLGLIFASLSPVVHRPWGKGRKCMFGNWHYWRLMVFNLLIPTSIPPLTQGELEGTVVSWPLQSMQCHLEESDYHRHRREERGDLFL

SEQ ID NO: 969388 - protein, 123 aa, Homo sapiens
MRASLWSAPLGDGLSPIRGRYVPPYMRDAPCLEKNVLRIGVVQSPPLMEILLLSVPPADSGERMCGRGGGGDKGERQPPRVRQCVANTIISALIFRSPPPLFRHTEMMIIYYNRRYNIFFRGV

SEQ ID NO: 969389 - protein, 171 aa, Homo sapiens
  misc_feature (30)..(30): Xaa can be any naturally occurring amino acid
AFSPDMFFRCVLVILWCTTFVEKVGRTIPXRGRASLASYNEGVLGGGNFFFLGGGDIRFVHLVRPVVRPTIGGYPPLPKTALGVKGLVLLGNAPLVRLAPRTEQKCLGGLGGSKVKFVGPRRDCFSLWPFASCQKKNFIEIPWGNLSTVGNHNFLGEKKGETSPLVKSAPL

SEQ ID NO: 969390 - protein, 296 aa, Homo sapiens
NWGSLVEQNPFPPQSAMYSVEFCAIMLARVLLTPHCLARCVPPRVCALALCPTLGSSPMSTPPLCMSCLSLVLRSHCVCIPSSLGGRSTLLMWTPVCRTPLPRHFAWVPLPQRVPLRLAEKSSPSSPVWSLHCADLSPPIVVFARAHIRRCSHVVVFDTPVLPRRGHPHSIGLVASSPREALATGSAPLDVSNSQGSHSLTGTHRGVYTLCCDERPQFVLIGSECNTRTRRGYSLSGSHPDEHSVVRSQQCSPVTPHRENLPSPAVQMSSHRSSHSCLLRGRRTRMRLLLDPIITQ

SEQ ID NO: 969391 - protein, 76 aa, Homo sapiens
GDSEYTLHGVVHPHNTPQLAHSLCTIASELTVCGATKPPLCPAQMIKDIRLVYMYNWLNTPGAPTNRESNLVFPPN

SEQ ID NO: 969392 - protein, 206 aa, Homo sapiens
  misc_feature (12)..(12): Xaa can be any naturally occurring amino acid
SFFALPSLVFRXRSPLRRGGRWSFHSTVHCWLVGSVCRSHQPCASCGASSAATESLSIRPACLLCSSGGLTPVGRCGDLSRCGPPPVCLFGTYFSRRFVFLCIACRAKQHVWCVNTSFGRLSPPALPPSVVCRRVLALLIPSVCSSHPTGLRGISLLYSWRTNIDFFPRVFHVRTEYILYCAPFPPGGVSTKALCVAPRRCGKLLV

SEQ ID NO: 969393 - protein, 135 aa, Homo sapiens
MRPLLPLGLCARPFHYIYLCPSSSCLVMNERKYWGSANTSGEMSIFVCCLCCSLPVGRKKKNRPLLNTSGGGGSRRKSPPAVRQAIPPPSLRKAGRCVFGGKKDKSSNYLSLSPRGYYHCGVMVLQWLSLRWRGR

SEQ ID NO: 969394 - protein, 143 aa, Homo sapiens
GGEMMCGGSGGVRCVCAVCVGRVVVGVWRVVGVVRQDSYQWASAPPGGTRPIVQAPLGVFFRPSGARPRIPGGGVPPNFRWAPFKQVSPGPVRETYSRVLALSRGFSTDPGGAPTTGQILVLRFLPCGPPVWCRRETPHGPRC

SEQ ID NO: 969395 - protein, 258 aa, Homo sapiens
MALGNPPGQKGSIPSGNTFGGNLVRKGILFVATHGSNMRNQVWPTPPERTSVDMWAPLPGGKTCLGRVCRPSRGLFHTRQLQVSLVPSIMARLSKRPCWGTRFKSLEALNGKGFILGNGPFPGVPHRAHNRCHNGGSTETCAVFRRKNPGPPKYMRLKHFTRKCVCKAHGRSARGPPSQKGHSPGGYHLRGTHGWVLSFLRLFTHTARHTHTSFHPFRTPVGVGTWPSHTEPPLSKVNFLVMTHENLANKQTQGGGDL

SEQ ID NO: 969396 - protein, 105 aa, Homo sapiens
MPSAHIVHPLSYFLSTLAPLHDVEEPPRLVGVEITQGKVFNISNPGFQSHNEANSRVPLVDTHVRVELTANPESSLLGPVPPESGATTRPPGGEGEVYVPQVDDM

SEQ ID NO: 969397 - protein, 175 aa, Homo sapiens
MPPQSLVDKTWGYEQRVYLWGVIETVLSHIIRTGKGGTWGIFSHAAYRSFFGKEGAEIPPALFTNVHATNSFLQGTCAPCFPPLSATAFQHGEKVCSPHLILYLPPPVYTYLPPIPQASLHSLGKQIFLCAPHLSSVLTPCGKYSLPPLVPTLFTPLALSQSQRPLVSPLILSSE

SEQ ID NO: 969398 - protein, 267 aa, Homo sapiens
LVSEGSITKQMGGSILSDSSARCCTREWETRWGVYNQQPAQDSGVTHTTVGATGRYSRFTPRGEIKNFLWCAEWRPLIGEPFVEEKPLLFLGGGTQNMWGASSKEVAKEERGGPVCNRGKGLPRCRARPTRLLPCGVASRARKRKGAPPPPQSGGEAAKHLGLLFKHMGLHKRLGLLFRLGRPPCPDGAPPKNKNARPRRPLMVPRRGLICGGFCRQHHPTGVLNTTIGTNIWQQQVVFVLVKSLAENRGDITEVLDFPPRAVVFGL

SEQ ID NO: 969399 - protein, 113 aa, Homo sapiens
  misc_feature (6)..(6): Xaa can be any naturally occurring amino acid
MALSLXSVVPPLYLSLHCSSREASFSLVYVPGRSSTQPPWGHIYSPGAPFFMPQVSPVLLERLTPNISVEAGSYSLCVNAPPALLDTPLVPEPMQIRSCASPHPSFLRGAPPS

SEQ ID NO: 969400 - protein, 308 aa, Homo sapiens
  misc_feature (91)..(91): Xaa can be any naturally occurring amino acid
LMITIHPRLDATRGPVLFSALSPVAPHHCAGKHPSHKILCPPGLFGPRTFLWPSFLRATCALGLPLYISRGTNTRHPWVGPRTHPGLTSHXPFFQSYGLLELSRLFFRGPFPPTDKKGLSSASPLFSTPPLGAPPWGILTLFQVFSSACRAIVQIAIQQGDTLAPIRCGYTRPLEIHPEARESPKSDHIDCVSSRTDMCGTSWCLLSPPARVGPPGRTKSCSQIVVSPHEHNHRRPIVPPRHFVSVFKRDATLPTRGVSNPPLVSTVGTKWHAGVARHTVRAEQRCRITRIRQGATPPSFAVNNRPQK

SEQ ID NO: 969401 - protein, 202 aa, Homo sapiens
LRYVVCPIALCVLVFRSLVCCLAARASVPLSAVRLVIVGTPPVLHRQNLRFCMARLVFFCLGGAALCPPRVPSVEFFSALSPGKECGSPPPSLITPPPGVGGREILRPRKFLWPPIVRSFVVIWGEPFKNIISGNLQNSRLLPGMLPKCADISVVCPACFPRCWGKGRCLLPKEKGFFLGTINPRHKAFFIGEGPPLYRSPC

SEQ ID NO: 969402 - protein, 84 aa, Homo sapiens
QYVWFVTKHAYMRLDVRYFVENVVSAVSQAGVAPPCCVLRSSPLAAEKLSLQKGVSQHVPPTERVRFSIHSVGGVGEKQELSAY

SEQ ID NO: 969403 - protein, 200 aa, Homo sapiens
ADTGPSDSLAGRRRTRPSRPGENWRADSYPAHHLGQPPWGPPGAKKGVFPSHAIMRYTSGTGPLWSPSEVPFRNTPPAIVAAPLWPPCHVSATCIAPHISSSGFLPQEGPLGTPPPPGDGEHFRPRPYKNQFGTFRGRRPICPANPVSRPNVAPKNHHRFPPSPPGDPPATLAFLVSRCWDYLPPPTVVYPTRSYRRTRY

SEQ ID NO: 969404 - protein, 128 aa, Homo sapiens
GTSVALLGRHSLFMPPCGVGDVYVVGSTLIMWGTTGCSFFNLVLLRAFSLFSGGGWAAVWYHRHVCLSTVSDFLPRWWGSHPSPHVVVVLSLCTLFDPPLCFLTYTPPDVGFPPLIGVSLFCLTPHIV

SEQ ID NO: 969405 - protein, 89 aa, Homo sapiens
  misc_feature (5)..(5): Xaa can be any naturally occurring amino acid
EEEKXTTLLRRWFYQCRFISLLYVPLGLFSKSFSVTSAAPSYQFPVLYLQVTFDIVLYNCIVSCTIGGMCTTNGLFLVNPPARLLVFVH

SEQ ID NO: 969406 - protein, 263 aa, Homo sapiens
CLFAFFLPSEPPVTTLCFGPLLFFSPPVVCFRTCACFPRKGPSGDIGLLWAVCPWASLGVFSVVAPPIICPVGYMAVYPPGAECLLPSRVAALSSPRFSPPTGAVKGIVCPELSAHNPFTRICPFIGKCSFGRQQVASCRAPYGMSNSPFSCDTPLRGGAPWARGTVGNVAPELFSPLLWTCSGDSRPPETPVMCIRLFKAPTVFPHLLSPFPKYGALLILPTLLMEGFYFHLKFLPYFSQANTPLRAPNLIPPTNATFHTIT

SEQ ID NO: 969407 - protein, 296 aa, Homo sapiens
VVCVRVAQEGKDLGGLLGNPQSLYRVSNGSPPLRFLRICSPKTDHVLRGLPLSVGKPFALVGRPLPPRPGVFTTRPPAASSRPPEDLPARCRKQQPYLPVFAQRPVFITPFRLCGGGFINVAVAPLAVLLLCVAAPCEYFPALCVFQLPSGGTTAGYIRNLHVSGDAVTFVFQDTPALEEARSPRFCHVYPRGVYATDKAGVLMPPRVPKRGIFIFARRSPPSEARSPGRLSPAPPMLCIQQFCRAGLYTHPAFSHHAFSTRRPYHAGGLFNLSPVLPWPLTPPTPRKHSWHPPNK

SEQ ID NO: 969408 - protein, 128 aa, Homo sapiens
MQQLIDDSCLHLLWTPTSWVASRMKTRRCISLPRDCYNLHGGGIITFFNHGRSTVVYSLMALFFGGALTYIEHRCCILKKSTGGLDHRCLRELFLPGDCFRVRYTTERPFPLVLVMMIYSWETVSSLI

SEQ ID NO: 969409 - protein, 122 aa, Homo sapiens
MCPARSRPTMWRRKCPQKLDSRNIITQQYLYNYRNFAQTSVNMKKKNIFSPPKIFCDKSPHVLGGNSHSSPSETRLPKMVLFKNLRFLRSVFFSPRSRQSTQIYDNCLDVPAPKQTKILYYL

SEQ ID NO: 969410 - protein, 303 aa, Homo sapiens
GPGIPAGNSWAPHAVRGGATRGSVGHRRLAECSPRRTHREDPPKNMGPVPRGSNTIPIRGYEEPGGAPGGPFLANSSGPGRKNPPGPKDSIAGKSSLFEEPPPGEKAKKGRMMQRKKGKNRRGKTPHEKRGKKGDEIGPKGGQQRAGPHLRGHPVPVCPKQCLPEERPHGETTPPPGDSRNSQNFSPPARIRKGGEKPGETPTLGGHTRGKPPRFRHRGGHWTTKGFLKGLELGWETPRFTSLVLFGEPLETPLRFYTFALPFLAFGKVFLLGLLGESPRLLLVEMASGHTTPRGGYKELEHS

SEQ ID NO: 969411 - protein, 162 aa, Homo sapiens
DPWGEKGKRVLYSRPAFKSLCVGGPAGEHNRVAPKGSDAGVFPGDPPPPVGHHIVGCPKEIRRQGGYITPHRGGGVELGPPPHPPQEDRHRNHGVLWGVAPPPHHRVWASPGVPHRGPTTDFGATRREKGEKKRGRDTPGVPLSLGAHTHRGPLSILICELR

SEQ ID NO: 969412 - protein, 233 aa, Homo sapiens
MSKHRGHQQNSPEHGSYQPSPPSLDWPFFSDPGRRVIQRSTRRRSPLESQIRRLVTNGVSCKKPGRRSTFLGCRCKTTDDPARPGPHQEVSLSPRQKFRTFLLRQGDTYARPPYSALKQAASYRYSRDQESLSGPQTPPHVAAGSMGVQHHVVLTPHTPARYFCFSKTNLPPSPNKNNITVRPPQETSNHAWPHKRNNTMLIEEVPHVATIFRKKNPTDVFLFSRKLFLLCRM

SEQ ID NO: 969413 - protein, 153 aa, Homo sapiens
MRRDLFDFVDGFIPLVDIPVRSGKASPTPSPPPACLEKRLCVCPPVSVRSSSSPTGRGKTAPGCFLLSTTCFPPADRGPWGVAPPVPPPLPCVFLFTGSFFGPPHRGDVLCGHSPLGVARGGATPPGCAPAPRCAQTPHLAPHMIFPLGGPPV

SEQ ID NO: 969414 - protein, 287 aa, Homo sapiens
KGSVKGFRTEPPFGVPGGPGFAMGPAPPGVTGIVRQPYPKSRFCRGVPDAQIRNFDLGRKKAKVDEFPLCGHMVSDGYMSSCPSEALEGCPKFVAQEVTHGKKVVAQRMASTNPGVGVSPRSTRQSRNPTKNVVLCLGLNTGSHKHGTCRGWPFGESPTGTLWATGVLHTLANSYINVHIRTTSCRTKGGTCELRALRTGHKFKVSWPPQRRVHHISQEVGLHHSSNADEIVKNTGGCKSGSSHDGCGVKVQSPRRGPLEQDGGPCNHEGFQSAAPLLILTHKFYFL

SEQ ID NO: 969415 - protein, 202 aa, Homo sapiens
  misc_feature (186)..(186): Xaa can be any naturally occurring amino acid
MSHQGLCSGGGTPAPSPGGNLLCLRQRWPQRSPPDPLAQPGPPGKVFFFSGRLQHARSPPEPGATRLGSPPVTKAPTVSRFLQGSVVSDQPVYQQGGSLRTTRAVSIRGFSHASTASSLRCPPSGARNSSQSSRSPGPHTLFINVPVFDPVIHQRTYKGPADGRKVLSLIAGVVIQGARGPFFKRXSNRFSLGSVLAPHGAR

SEQ ID NO: 969416 - protein, 84 aa, Homo sapiens
FAALSPHFLGPLTMVPPRIKGSAPSFGVPALSARKRHSSLPVCGLVQFWLSPNAGCAPEPRFGEPPSCARRVTLPSRADGSPLV

SEQ ID NO: 969417 - protein, 282 aa, Homo sapiens
  misc_feature (27)..(27): Xaa can be any naturally occurring amino acid
VCRMGHDGVKSSVSWGSCTVSCGVNSXVLLSPSKCVGACTTLQIPVWGGQCCRGSLCDELSLTRRRPPLCPVGGTPRTPSGGFPPEECSRRRHACPVTRVMTHAGFPDVLFSTLFVETLRLEPCCTLEAHLFPRPGGDSTVLSGSPSCHGDFQPPVQGSPHELGPPRIPPRLGNFSMINEAIRTASRINGAPDESPRDFRYTPPLVMAAPPRVVSGHFPELGDTCDKRAYTVDSRVIEGRGASKTRNMQRALDTTAGAQKETQSMIEALINRFFYKTPPNHI

SEQ ID NO: 969418 - protein, 155 aa, Homo sapiens
  misc_feature (52)..(52): Xaa can be any naturally occurring amino acid
MAWKPKTVGWKQAHRREPLGHEWGKPRLGRETQGPKSQLSHSGGIRPPHGFXFPKSHLSAHTLGGENGLFYKMCANPRFSHTPLHAQNPVIHFSRVLIKKRFTRTWCLQTFVCFFILYPPRAHPTCATHHTKIVMGGASGTYTLWFHERLVVNNT

SEQ ID NO: 969419 - protein, 114 aa, Homo sapiens
PECGTAQGPPTWPATKFSLEQEGGTLVCHQKGSLTTLLHPSAPRGPPGSVFDTNTHTPRLFNGDPTPGGSSRKTTPRVSEDKVCRGMAAPLKKTLQWCPPTSSRVIKEFFRPSS

SEQ ID NO: 969420 - protein, 174 aa, Homo sapiens
MGPLTVLVRAPLSESAIVSLPQLYEDNGVCCSSAHSGAIPQSACHFDVVSNMPLPRGVCPPSMDHSTRFFWPHLERNFFFREQLVREPPLVLLDNLSTAVYRPSLLTPFKFCSSPSYKLPQLIHFPSPSLQKSGHPCLVPRCLVPDALLCVFRELDPPPLSGCYTYGLGRSHRT

SEQ ID NO: 969421 - protein, 154 aa, Homo sapiens
LHVYFAELNSGRNSAPGNLWDRTFFPGGDKMGPFKNSKRRYGVCPKGKFRSSVQTTCRPGVDTADKRGDPPPNGEKHALGLSKLAYRVGVYSRGSPLQGPQYIWPSRYIFAAARYIGNLRTTPGALNTLENGKSFVPEGPEKGEKEFEFRPLFG

SEQ ID NO: 969422 - protein, 275 aa, Homo sapiens
WGCGVPSAGCPSYSLTGFLHLVFLFRVFFGLLALPGSPDSSLATPWAPTLVGLSAPSWVPGRNTSARSCIMPPRGQLLALWPRACISSCCQPPARVKDHTVSSSPKRRTEHYLVQDFVRRITRGGLVAMIGPPRTKSLASPEGLSVRLSRASPPTVLSRSCPLGHLTPIARAVFVRSALKSMTPVQRAPHSPLLPRAAFAVSPPGVQLAPSAPPSQGGSVSPRSGTEPGRLATPQQFQARRVPAVGAPPTGGGEQKAFSLSWGGGGSAVAPTPVE

SEQ ID NO: 969423 - protein, 319 aa, Homo sapiens
RLFGGPGLSFRKKIYRGGPPYLGVFGSVPPEMPLEGVIYNNFGKKVESAGLPLGSFLLCSKFSPLSWWVKWVESLPVPVREAPYFGGGPPHGGIDPPRGSVLSDGKRNLHGSIRLYPPRGKGIPFPTCAPLFSGGVPPLFGRHPWDVNLRGNGSKTWDLTALQGPFLGGSSRLSPHILGGIPTGGALHWSPPLHETHGGFSWEIALCCYCEDRHMVVSHNGGVYCASHRTPPPVFNVNGLPHTSNRVYDNTTPKMEENKCFCLAFPPPLSLALGSPPCFYTRSHGPPRVHTTGEILARPPAGECLHNTHCLGYLFWRPC

SEQ ID NO: 969424 - protein, 146 aa, Homo sapiens
TFRVLGVSGKKRAPTPRLGGNRAHNWGQTHYILRTRGPQTGANSCGKRGTMGALPPLRRGHRFPLCHLTGTQRAPVGTSSTDVCGEGESPPQRDSLCPRGPSLSLCTFFWRCSLSVRSPAGPLFVFLGESPPPFLIFFFPHWGGKR

SEQ ID NO: 969425 - protein, 113 aa, Homo sapiens
SQPPLIKSWTPPRPQVGGKDQRHWGVFYNKGLSTEVGKYVIPLWDNHRIPHKRPPHKIYRGGAPRRRYNRPPPAGCIFWGDLRRPHHPGAVSTQRLWTTMAHKVVFCPWEKSL

SEQ ID NO: 969426 - protein, 111 aa, Homo sapiens
MEHTLVAPQIYVGGARLNNEREGVVNHRKSFCVGERPTPFKERTLSGGESHTWETTHPGGGVSLSLRHFCTQHGIHTHSTLFSLTHTVCIRPSWGVGRNFVPSPQRPPPFV

SEQ ID NO: 969427 - protein, 103 aa, Homo sapiens
MCLDDITHVLCVRSHMRTRRREREEITQVRATSLATSALSGDLFHKKGTGEESGKGNVHKEERKERRVGDLQRLRGMPRRDYGKDPCKENEGGRGEFFKRDKS

SEQ ID NO: 969428 - protein, 238 aa, Homo sapiens
RPLISGRYCAQKNYSHEYSQGPATLPPSPRDLLQCHQDRNAQRQEGAHGGCSTCQNRAGRKPAGKSLASEASIFRPSLNGGSPEGEWQSPEWRGPTIPGPCIDGRFMAQHRRMPVGSFSPSLYFSPDRLRVHPNSRGARAEDTTDSGEEEEEVHHCETRGPRDPELALGPPSRDRWPSPISSPVPPYALRRQSSLPGSSVAQTSLFEDAAPGETAEGQERQGQPASKEQQASGQQELP

SEQ ID NO: 969429 - protein, 206 aa, Homo sapiens
VVRAHNMVLARGVNFGGEPFIGAPFAGIPSHHHTHLASLLGENDYHKRAHFGGAFLRRVPSVSIVYNSSSRGAKRVVVISSPSFCICRGAHSLSQKRHVVLTETELKMSTRRYTPLFPSLLHEHTLGAWRTQREGPSGERSHNRGEGTPVILGERGPTEATGGSTAPLLFCETGGVYLACVSGVGRPPGTGGQRHLHVNYNGRNIK

SEQ ID NO: 969430 - protein, 210 aa, Homo sapiens
MGDTCPLRNIEGRIFVQRDKFCGEFSGCSPLCVSHKDIARCSPVDTPHGVSYRRQRGEWAGGVLTGDPPWRGRPTHPLFSSPEERPFFHTLLVAAPQGLWRGKENFSSLLDLWARYKKMCSFVLILIVSWPLGCKKSRGQEEPRLASLCRSFFLLSPTELRLFCPSDSAPTWPRPADRARRGSMHFAAPTPKVFPHHSPAHPLGKKNGLW

SEQ ID NO: 969431 - protein, 133 aa, Homo sapiens
  misc_feature (2)..(2): Xaa can be any naturally occurring amino acid
LXQDTETEGRRRDERRKQSERVANTAPPFGSLPGTRLVTTAPAFFVGPNSGPRPPGFNAGKVETPPVHPALYKESDLDESSQGFVHFPAKGTPAPPQRSCQAFITPPLNCNSRQITGHYNSPIEWGAKFLKSN

SEQ ID NO: 969432 - protein, 304 aa, Homo sapiens
TEFCPQHLGPPLVCPPGVFPPPGIFGSRWVAVFSTQPRGGGGHPCSLKSGQDRFLAHVAAAKPLPREGGAPCPRLARCVGPPPAVGWALSAPPPGRGIILPPANPWVVVARPHFLAALTIPAGGAGPALPRVSVLGSKACGYTRASFSVRPPRPGPAPPPRAWGEAHPGTPSREELVDSAPSSPPIAVTGTVLPPSSPRLGVVYFLFPASRMERQSPPHFLHGVPSSRNLACGPLAPGPAPRVGDVAMVSILDPVAAVHHPGPPGPHLPFAPYKTPLWRTPHQKLYEHTTTTFPLNKDGTRSQR

SEQ ID NO: 969433 - protein, 199 aa, Homo sapiens
RCLWPVCLRERWWKKKLGVTQNRGAFSHLWGGQNTTLARHTPHIGGGDISDLVWRYVIVDTTTWCDRHHIEIETPPSVLHTRGGTITDRSSCVYDGATLIVVLSVVCPQRDLASLPTEEIYIRKEGDTPRGVVSTHTQEKILPPGNQFVFGAGLSTSPGAKYFRWGVFFLTHCVVFLLGGPPLSNSSENNVEMHITSDS

SEQ ID NO: 969434 - protein, 277 aa, Homo sapiens
ALVRAWGRMVSADTCGGIAVAPTLLGAPRLFTHCGCLMCPSVSPPEFVGRHSVFPQGFVALCGAPRWGSQNGNGHLFGPRVGPRDQKLRARPFVGHNNVQALSTMGGPSPQGLPSRAKRPPKTPFWAHWSGPRKNTPAATVWVSPFPSTKPPVLKGKPLAKPPNTTNVDKGSPHTLANAAWEISGCASSESATVVLSREPWLQQSRPVFDADHKNGVPELLSYSPLLFVRGNNACKLCRVEQSPRCWHMSDDQLPLGTNFSTAILPLAPHQQFSRPH

SEQ ID NO: 969435 - protein, 122 aa, Homo sapiens
IQGPLRNSLPGVSSWGPSFGELGEPFFREIPQLHFSTLEWRHGRWPPLEKGDGPTVAWLVAVESFHGTARPHNASLRTFCWHMARMRYRVENYARLSHGPRPGATGPQKGGKGPLEFFNVTW

SEQ ID NO: 969436 - protein, 241 aa, Homo sapiens
CISNNQRCYVIVIFHVLIDALLHVRCDPHIDVLFIWGNPLSVAHVFKLPPVSLPPHNEENDPPGGGPPSPHTSFPGDLQPIGPHNRIGTQSLRGTGTHNSRGGPGETPRHQTVIRGHNPAHPRQFEDSPLPPPFKREEGKGRPPPLFSPEAGPGPREEPRLFLGGPPPRGHTRYAPHMPCALPRSCSIPRDVSPYTPPDSQTPQSFQGPAPPLHAFCPHISPPTEFPGIYIHTPIALSIDI

SEQ ID NO: 969437 - protein, 138 aa, Homo sapiens
MRCHPCPECSGPQKGRPPPFLRLRPLPPTITTAGTQHPVAPTEKESDNLVPLITRTAATPLVRPPKPKDGAVAPPHSQGPLISKRDGPLYPLLAHPFLAAHICPTATLCLGAPCNTTSIEERLAPTNRLGVVNSPLPH

SEQ ID NO: 969438 - protein, 112 aa, Homo sapiens
MTKSGNSSSGDALAAGWRRRTYYVAPRPARRGGTQATQLLHPTPTPSLCTSVLEIWQTLTLVGKHPQACGEARRPGMKHVALWGEGGGLPGNHPSVEMTTGKVFMCLFAFCI

SEQ ID NO: 969439 - protein, 216 aa, Homo sapiens
WSSCFLLSVVGVVRCVVWGGCAGGLLLVSCDRGLCVACFCSVSTWSAVRVVVLSFFGSSQWSSSVLYRVVSQWGVATARSHVVGVCVLAHWFLWGHSFGGLVGVGRVGVVPVCVVIMLWGWSRCLASCDGLYVAIQVPVLSLQWDTWRATDSQSVHAVSPGALLFRVLPRGVHWWSHDSRPVSSASVVVWSLEPVCFCSTDGPSSCFSPDSESPGL

SEQ ID NO: 969440 - protein, 172 aa, Homo sapiens
PQGANWVGKGGPRGDAEDRSGVPTESGSREGACAPPFGIRGFENLAPPESGTSNRRFCPADVPHRGPDEGENPLRTRQPRRRKRESPTCPPGFDLMMRQLTQGLLVAGDAPPGAHARSQKREGPPGQRLSDMKRHTEAGGGRILRTGRDLFSLETRRDPKPSPSPPLSILRE

SEQ ID NO: 969441 - protein, 245 aa, Homo sapiens
GHRGPQCSGGPPLAPPGELCPPDPLFRQPGPTHQARLGAERTTPPGSARRSKAGNKVGRPPSQRMEDGVHLGKTWSRGFIIQIGDRMQWGKWWDPFPPRLTKSAPLLVRKIPGESPEGPTSSAYSHVFMTPLSTGDAVRPQFELDLPPVQLHHSAKMILNEELDGLLDQPTQTVVMHRTEPTAPQRPRLCNWPRNWAASVENQNGGLTTQQGTYGGYFRDQKDRSRQNEGTAPRWYPQQQFQTAY

SEQ ID NO: 969442 - protein, 136 aa, Homo sapiens
CHTRILSSRGMTQTISPGGDEKTTTAACGRSYFARTTCLIAGCAPRRDLHPLVLLDPPWGFCPKPPAVTADSCGKIPGPHRAAIFSSVRWERPPPGWKRFTPKVPLAGKYPGGALFIHTGASTPGCSRVSTGHNQY

SEQ ID NO: 969443 - protein, 104 aa, Homo sapiens
MAHTVGKEAHTVVWGVLCWLAPFSHGGEDNTSVTENCVAHIREYKSTESTTPLFAKVKYRVLLVFLVSSCLFTSRRHRGLEGLSLYEHCSLLWVSSRVHSSPTS

SEQ ID NO: 969444 - protein, 464 aa, Homo sapiens
  misc_feature (333)..(333): Xaa can be any naturally occurring amino acid
  misc_feature (349)..(349): Xaa can be any naturally occurring amino acid
  misc_feature (369)..(369): Xaa can be any naturally occurring amino acid
  misc_feature (436)..(437): Xaa can be any naturally occurring amino acid
  misc_feature (455)..(455): Xaa can be any naturally occurring amino acid
EHNVDQTGLLCWAPDRRPRVSKVFRCGHGHDGGDHHRGPHEQKKPSLQPGGRTTGATTPVCLVGPTPEEKWLGASSRTERPTPGGETHHRYQPWAKKHTKAPGGILLLRPEFSSKSPVPGVPKAKSRTQSPLFGEGKAPILTPHKGPRCEEEFRAAKKQLGPHHIAVLGRIAARKRDRVGDHKPHWRGKEDPPPGAPVEECPTPQRGGPPPLEISQRGGRNNATQGAQPAHYLGPVPPQTPGAGFPQQRAPPGRCPRREELVGAPPHHKRDFNKGGSPPASATAKYSLTWGFSGAEFVEHPPPLSWWENTHTHICGHAYMSCAALISRRPGGXLFSRASLLRVFKASQXPPHNLGAHYDTLFCIIRGEXIWAASATRTHRRVSSSPTETPLSHPCSVITRARLLLERLVCTLCLSIRPLNSLSKMGRLRAPSLSRXXETFLLAHIPSWHTLEREXDKVSPQAEA

SEQ ID NO: 969445 - protein, 183 aa, Homo sapiens
MLPLPFMKFFAHRRSLKTNEKPPRGGKSKTEVSEWPTRVSVAPLKREPSQLMLRTFLPEDGSFRGDRSHPLVVGWVITSERGAPKDSLPPGSPHHILAPLVGGPPRRAGSFGGGYPCGCFVMVPHPPPPFFVGSTSSTESPGFCRLSELAFATKKISRATTTYGPRKIVLAISRGPPEYVLFW

SEQ ID NO: 969446 - protein, 288 aa, Homo sapiens
EVRAPPPARVERTGENIASDGDNHPGYILRRTTRGARATSSRRTKLQKRGARSTKSPSAHGGFAHAKDTHGGVPQLSSPRGTPGVIPRGQKRAPVSPEMLPAEEIYMSRRPPPPGGEGPLHKDDGYTENNIEPRANSTRGMRLRKNPLPPRGETLSKKKEVTHKGQKALLKKPLGGLPKRRPPKLPRGDDLPQRGAAKMEGVSTPPTANNGKKVFPSERSLEREQNEKTRFHFPQKKEVPPGNVHSKYKAAPANMCTTTPHGGDNKKEGPPINRESLQNCPPLLATQN

SEQ ID NO: 969447 - protein, 117 aa, Homo sapiens
MHGCLSTRVVLPSLAAIITFFPKKHSDRRRSWPLFGSPPHEEAQGCRAPKTTRGGVTAPQYSPRGIIVRATTKSASVLFRRQNFSIETQVWCVPSGGIYHPNEEIVCRRLVRPRAQI

SEQ ID NO: 969448 - protein, 131 aa, Homo sapiens
  misc_feature (31)..(31): Xaa can be any naturally occurring amino acid
MPRNTQAPQKMCGSPEKTIVGECPPAPRLRXRRRGPQRAARGAQIRGRRARNDIAGLEDYPTRVGPSRWITLFHSPWAPLGNHFRQISASPPISHREKARLFVKGARRGEKDTRVWESFCGEDLHENTLGR

SEQ ID NO: 969449 - protein, 385 aa, Homo sapiens
  misc_feature (378)..(378): Xaa can be any naturally occurring amino acid
YSFFYHRTSCVVPPSPSLWSHSMIERMCVSPKTHRCLNPSSPDFPPGGITFGTHYIASSRARCCATTNTNGRPYLEIWARRHKRGGPPEERKTWGDNHTRCYLRRKGVGKKKVGKTANSAYSGSQKKKGEYIVGEEKQAFSVPAPGGSSLGGHPQEMVHFSRSRFSQKGVSLWLFERWEVSFACEFFRHENWNWENVWHLFWRKFVLGPGFYSSKGECFSRGCKKTSPPGLKNFSPLGAHREFLYTPGGPQKMVGFPTWGHKENMGHRAHTGAVEMPFTRLEYGLQEPIPRNGGVYLWAFSLLVFSLVWGFLYYKNKRPHPHITEISGEDPLSNMRSQHTTHTGSRHTYLGRREEMRWRNSHETLEREGAQRHTMRPXRKRGGSQ

SEQ ID NO: 969450 - protein, 266 aa, Homo sapiens
ATLLGWAPLCNPQGVYSPPRFNTRFWGVSSPNHSARLRLRALPCCEGVCPCHIGPLGGDFPWASSLLSCAYLGYNPCGRPRNHGVPVSPRGETLTSREGPAPTHYESWETPRHVLKVRENAERTRAVQPLPGEKPGPVSRPLGGSRVAKGCKKRNIGPFTTVKHGSEKYTGYSREWAPREETTEEGEENLIREAPGLGHRRSKSGPRAQRGTHMHSTPRLGESLGPQRNASRRGAQCLRWHRECGEHAFPRGSISAEVAHVGVVAR

SEQ ID NO: 969451 - protein, 121 aa, Homo sapiens
WVVLLSISLWLALLFFAVYILRSSFCVLTTGANFGVLPGGPFAPPSFCPALSCLFSFWVTPFFCGHRGLQLVSVCAHPLCPGVLCPTPVSCISKLSIISFGLIGPLIRSFELRTFPDGIVR

SEQ ID NO: 969452 - protein, 143 aa, Homo sapiens
MGCPQIFGETSYKDCCCGFPSASPPWVKKKGPTDGVFVVVFCPKHRPPFGENMVKPVLVLSTMFGFLGGYLLGPTPHKSFSTGAFGSISPCDYPRVAKGKKLFYLQEASFLGDPPLRGASVLGREKGPFSNSHSHRRSFEFAL

SEQ ID NO: 969453 - protein, 291 aa, Homo sapiens
MASVFRLLWALSSRCLVYGSQYVLPGGEFQTGVLFLYGVVKRVTGVFAVCEISPRAMLVNGALLWRSHNCGPLVENVRSHTQDPGILFMSTGGAHNIWFAPLGRRFVSLVRSPTFFLIEAASLWGLTKGLHQQPPRLVGKTLCELGECSHRACLDEGLGKHTPTFFGGTQRIWDIFTQQGSFAFLCGSLGTPCRNPSFPVLHLSHNNTRGFLTPGSVNLSCRYSSPLLCGGLTHLSRVLCALSHTCWKCRGGTQGSSLFTISCCLPHGRLCFSSLLFLGASCLLCLNFLVP

SEQ ID NO: 969454 - protein, 79 aa, Homo sapiens
DIILAGRSLPVLWIENSYCGLAARIPIHILTGDGEVNYFERIMTALRPPGSSYLLIDGKKLEYLRLVRYMIFWSARLFP

SEQ ID NO: 969455 - protein, 166 aa, Homo sapiens
  misc_feature (122)..(122): Xaa can be any naturally occurring amino acid
  misc_feature (166)..(166): Xaa can be any naturally occurring amino acid
MLLARPPGGQQIYSAHTPPQRCNMVLYGSPSFSGRKSSGGDIITPPSSRDRYKEQNFGVPSCERASLLYFPGDSFNATLWEFFKENHLVFCPRDGFETPSVNIGKMFKAWVCPPPGGKNSRXKYKPPSGDTICLFLERCFTPAPLRLHACVASSGCHTFLAWGYKX

SEQ ID NO: 969456 - protein, 205 aa, Homo sapiens
MPPVIWWKNPILRGFEWSPLQMGELCALPVPLILGEPTPTKKGPGPQPKSPHNPPTAATDNSFVPRNTHLGPWEDHRGEDITGNGETPTSPHITGFLPPRMFWKIWFVPLDDPRCEELGGPTVPQGDSVPGLQISPGPSSNCESLKRGPFLLKHPRIFPSTTHSKRPPSGPQRPLGARPHKGGRRNTHWVHMGRGHGLEAARVPS

SEQ ID NO: 969457 - protein, 136 aa, Homo sapiens
SFLLWPLCVAHPRFVSLCVGCYPLPRHIGGLWLDDLCSSRGFLSDGMLVPACVSPPGCGPSTSPFLAQCPGFSSFVVQFLIGHFVLKCNVANSGPTFGGGTKTKVPCATKGCPPSNCVAKSQSRAPWGLVRSPHKW

SEQ ID NO: 969458 - protein, 255 aa, Homo sapiens
MGRPPAVLFGSPPVRVIFVGEVCHHTQPGVVSPPMLPTVATSFLCWESSLERGETQNLRVSPPLFSGGNKNKVLGRENWGPPPKNFLLEKISRRERCLAPTSGLEYKMGFLSGTQAPTLGGVLREALSLTETYIPHPFLGLSHFLSCFLVNKWRDTQTTGCRGGGVCNTHKAHSGETHREGALARESLGSKRVHTTRVSPPRERLHREGAKWRILIPPRIYLGHTPHFFNTHVWWEKNPVSSRNSVFVLHNCGHS

SEQ ID NO: 969459 - protein, 220 aa, Homo sapiens
YVALVFVCGVVLSYPPSVVGVCLLSSFFPSPCVIFVAVLFRLHLDVARPLFLLCDSPSPFCCLVSFSAARSQGGAPPSVCVCISLFYLVIWGGVNFPWGVFYLLLALVCLSSREWTSLFLSSLRGVYFSPPCRALNKSVWLLVRPTRLAVGRRPTSFVVVVGLLLSSVPPSGVVWADLLCGGGRTVFFFPAPTLFVGPPLKVVCGAVFFPPGESSFIRSV

SEQ ID NO: 969460 - protein, 311 aa, Homo sapiens
  misc_feature (83)..(83): Xaa can be any naturally occurring amino acid
ALVGVAFLVLSASATSFCEGPLVARSVWGPLSLLVLGGFFVWGHLLGGMFSSMVPLRGVFFLLPPRFVCWVRWSQHGRLYNAXCPPFRLIPGGARTVFSRRRGAHPISWALPAVFSKNTHAPPSGGALSPTPRALVGGDSHKGPFQPPKRAPVFGGHKNNRGGAKTCPAPLLGEAGAHYVFYNCPAPAASSRPQPFHPTYVNLRPPCLWVSTGHNKGPPGGVFEVWRLDPTHHGFPGRPGPRGWKVATHSLVAPWVRYTTRRGGPQHRLTGRHHNTQWASLPPTAPGGSPDTQWVVLRTPLGNEGALGPPG

SEQ ID NO: 969461 - protein, 223 aa, Homo sapiens
FFCTFVVDKQVPCPLVWSPLFFSTHSTVLAGTCVLLWVALRRLVPPHFVLLPRSEVWLPSLPHLGVANVPRCLYKRPVGDTPPWVLFPPPGPHTTLFGGGCSLSRRNCCCLHVRLVFSPPDCRCFAPPSVPLAVSHWLLPQVFFRQHIAKDDDMAPGGSGKKCPPKGERMRAPPTVAQKWSHNWAPQIPTRGPHKEFALAQSCLLAHNWRTSHNAPPNTGSFV

SEQ ID NO: 969462 - protein, 167 aa, Homo sapiens
MCPPVYNAARKEWDNTPGGPFAGTPDGSALLNQSHKGRFLEAVPHGQRGLDSSTWAQVPFEQILTLPELKANPFKDRIFRVFSTSPAQAPLSFEDFLDLLRVFSDTATPDIKSPYAFRIFDLDDDGTLDHEKSLSPAGETASPGEGLRNTTGLKCALKMKHAHIEQT

SEQ ID NO: 969463 - protein, 215 aa, Homo sapiens
RCVEWSSLGLITDAASAFIVSSPSYDVFIGWLYSPPTMCFCVLASYHTTGCCFVRGGAPPPPRVCSSLATYFFCMPRWLSFLVRGCSPSLSPLVDTPRLLPASWCGLLLADVSCGVLPSPPVGALPPICSSPRFVLEYLRPRLAPIIISLGVTLILGVPPPPFVLNSTRNSWGGYISSTTLPRVVFFSFMMVSSWGPPLPYFGVPPPGRTKGVFI

SEQ ID NO: 969464 - protein, 235 aa, Homo sapiens
  misc_feature (7)..(7): Xaa can be any naturally occurring amino acid
  misc_feature (150)..(150): Xaa can be any naturally occurring amino acid
  misc_feature (191)..(191): Xaa can be any naturally occurring amino acid
MLVGLLXTLSYNTDKLLVPLVLKSEKLFFSRILEWRTETHDEVSSGVEPKRHHKKKVEHPSPPPQWGDRNKDAWALLDKPLGSNQKRVEYKNVPVETPHMLHGPPRIITVAPGALNRPPPPSDFWGIFGPKNNRGLSNHMWGNKSHKMFXARSEDLVYKAEKKGDCWYFPPRLLSRGCKKKRAWGKRRCGXPASRKLVSRWRNFLWREVLTPAGRTTTWWDNIGVVSPPGQKAAH

SEQ ID NO: 969465 - protein, 322 aa, Homo sapiens
  misc_feature (147)..(147): Xaa can be any naturally occurring amino acid
MAPPPPKVFLRGALLPPQNYHMAPRRQLSRGAHTNYCDPEVFGFRERNSPQRLGCLIYTTVSFGVLPQPRSFERIEGQPHPHLGVHPTQHTVSCLERFGRPRSMVPNALQPQRACKRNAKHSSHGSPLGGILEPLGDSPLERKILKXGHASWRNTRPREGEVGRAPPYRPLPQSGGTGFKRGVPLLAPPESSQRAGDQETPGTEREQAATGPQEVNERPLLKHITRSKAGEAERVSPPYPPALLEQNVRGALNFGECLGARTQTPHAQPLHKEPPTPPGDIVEMAKVVFEETTMSTQDFEALSPPEAGYPLGSRRPNKKFRV

SEQ ID NO: 969466 - protein, 175 aa, Homo sapiens
LFNGLPLPEFPPGGNPPILNRCVCRPPPIGTPPGGSSPSAFAESLIPFMASAGSRRYTMFTHTRGTPPYWPPSRPPYFRGDHLYMNTHLVCTTKKHTRSGDTAFPRNSPRGDISGGTHTGFRRRTLTPQFSPLRKKRRAHETPQGAHIFSHTGGRRKETHTGEREIIFFLGVYTH

SEQ ID NO: 969467 - protein, 127 aa, Homo sapiens
HKPVGVVRALFRVVETPVGVVPPFLRGGSQHPVFLCLLWWVCLPPPLILGGAPTLVIQLRGGFAPPCVVGRTAAGFCRSPAEKAFFVGGENVPDQNPPPHWGTCVEHHRNWYTQARHNHQHVGFSFV

SEQ ID NO: 969468 - protein, 238 aa, Homo sapiens
MGGRGPPFDTPQRGGALQTIDKVDEPNVVLYHHGLSSSEEEEEPAPPMKPSDVYPPLGAFFLPLPLPIGGMRRCFLPSSPPLCGPPPSGGTSSKKRGLCRSVCFSPEARGGAPTCVFRCWIMRGCLLGSSPLLPAYPLLGGRRPLLPQPAGWSSTPLVESPRGVAPPPRRGETPHTGEGGALWPPLRARTTPPAFLLGKSLLPPRRRSVSTTTGEETTAPVGGETRRATPTSSVVALG

SEQ ID NO: 969469 - protein, 363 aa, Homo sapiens
AASLSVCITLCLSVLLFLLVLVLLSRFHTLPCEPGCKLVCPLCPASFPVYVPGARPVSIRGLFRVCRCSWVQFVPYVNFDFELISRVSHGYPGGTKLPSCEDRSHSRVSFRRNISGGYKTLVDVMVLSGPQRISSCYRGESFSPKERRPKMGFQSEPPHFPKGLPGPRYEVCKTHMNSASFPPLVHMANHAFLLTQDCKRNLVSGGTGVHKNFWVQTFWGYWETGAPGPRTCVLKTFFGEPHMRRPTTVPGPAPTVKGGCTTKSKFVKSPARSYTFPLPHVPTEPTVNGSPPEMLYLNLGEASRRPREAQGSTFTRHTVCLSPAGFSGSTKGPPACFLREFWEMCTEMTVLSPHIFCFFGRSG

SEQ ID NO: 969470 - protein, 105 aa, Homo sapiens
RDPGCPRVAEGVLVPSPAPCGLQSLCLSGRKLFPSWIRRVPFLARWVPASRADGDHTRRVFYVFRPLIVCPPKIVFLPPLLHLLGGYPPVLWAENLISLSPKTQD

SEQ ID NO: 969471 - protein, 109 aa, Homo sapiens
TGDGDNGPRPLPRGVTAGVQDVAPPVAPAKLFNGLSRSVAFPAGLIAEEKIAPANGTPPHASPPELGYSLRKKLAPEARYLDYPTWVVTDLFARFRPCIEGYVSPWDVG

SEQ ID NO: 969472 - protein, 143 aa, Homo sapiens
MGGGFLPTVPHATGGFSLGALWRRTFLARIGVLASRVAPRVWRSPDRGLFFQAVPKLAPRPHGFGGAFLGSPSLSGGELLEYPRSPAPRFWGFSPGPDQDWGPCRFERLAQYKRQLSPELKRTWAHQAKFPRPGTSKKPPGAK

SEQ ID NO: 969473 - protein, 127 aa, Homo sapiens
MVLQAPCTQSPRKSQAHPVEAKPGETPLITVWLPTPDERHPSPRGIVIHRGPGRRTPEWWIGPPLMEILVRQGGHSPVSNCANIYRCLNCYWTKHLHVMFPFRYWYPNSCHDNPFHETVCMATPTVL

SEQ ID NO: 969474 - protein, 201 aa, Homo sapiens
EARLNPSTEVKGFRKICCVSFGVVSRGRQTSVLGGKLQWVLVALVATLVVSGNRWPLGMAKTGIVIDGGYGEKRAGYFWRNPRLWKWCDRVMETRASGLWREWPAMNQRITNGGGAGLWPVVVEANFGGGVKLTNDFGGFPKQFQSFQIFGPHEGQEILEAEAVAPYGVEAHNFAEDPETQVAMRVPTSSRSYGQWPEDFN

SEQ ID NO: 969475 - protein, 140 aa, Homo sapiens
VVSSLCAFLCALFVRPPPLFRGSWRAYLIVPSGHMGFWITVLSSWLFVSARSRIYISVYWGTRAHPPFWDGSSGSPWAPVFLALPGFLCQLSPHPGLSPILFCPVLRPQCIRHWFLEIFWFKYTAGHLGHPRCPRFAPGF

SEQ ID NO: 969476 - protein, 257 aa, Homo sapiens
  misc_feature (84)..(84): Xaa can be any naturally occurring amino acid
ESEPGDPLPASQLAAAILGGVDPRPTTNPGAKVFLPRGFLGHPGVPQVSDNRWSRSGLDLTPLEALPPAFWPAEAITYNLVPKXEGAQHSTFPVNRGCLDTPPPNIRIMLTLPNGWNVNLCSNVGPTPTSHEPARLLAPEDAHHPSWRIWKDNFVSFSIIGPTALETPHSLTAEGRCLPPRVRKECHHRRNTVARHGDTVEPLRPHIEKRPMPLVRGKCNKAPPPGEETEIQQLSGLREICVDTVARVFFYLKTHPF

SEQ ID NO: 969477 - protein, 77 aa, Homo sapiens
QCLPLLAGPLPPVSPMVRRAKSSSGVMPARGGSMFTTVPLVPLGPLSRVPLGSRVVAYLSPGCVPRPAFVPGFSVRS

SEQ ID NO: 969478 - protein, 161 aa, Homo sapiens
SPPIPAYFDLSRRRTRYGASLGNRKEGPASPPSEERFGLGPAPPSPPAPPALSLLLLSSAVVPGPQLWRLHPRIQAWGLARGPTGLGPGVLSTRWHHPWAPGPGRGKLVDCRGSSLGTRSFPLLSPARTDGLSVYICLGRGGRPPLVRPQRGLRAPGCVPT

SEQ ID NO: 969479 - protein, 131 aa, Homo sapiens
MSTPWAVSYRPPRSPNCSQDACGPPSPEAFWEFKTTKGGTILAAFSNRFPRPDKSQTCVVPPMVKYLRNAWAWSVSLSPGILGTPDLAQTKKTVTEGSESVNPQYRLAFFTMITFDMELKDPRIYGVASES

SEQ ID NO: 969480 - protein, 122 aa, Homo sapiens
  misc_feature (76)..(76): Xaa can be any naturally occurring amino acid
QIPGERKHTIGGATILVGARHNYPHRKRCGPHEMVPHKRGSLPRHPPPGVGVAPPLEGKRPPHEEINFGGGRRRTXPPFLWMDCDAFHTESGPPHHRERLFFFCTVLLLARKPLFFGGEIFL

SEQ ID NO: 969481 - protein, 134 aa, Homo sapiens
WPLGVCPTRPPYILCAPPPPPIWGEDARRPVGLFLSVGSSNGWTFYSPLGDPLCPPGAPYILYGPPPGLILPPPSVYLGRFVAATHPRGFNPTVGDNKGPNRFFFPWEEPFRKKGGQTYRVSWNIPAPRVFLGV

SEQ ID NO: 969482 - protein, 104 aa, Homo sapiens
MHRGDFLGPFCVLHPQGMGPSLRDSREPHVSGPHIRVPTACLAPGCCGAPFAHPLLKFTLLARPREHRGFFGASVERLLPFVSPGFYGILPPVKKSVPQGAPHV

SEQ ID NO: 969483 - protein, 83 aa, Homo sapiens
PAVSTRLGGETPFVFPPRGIFLLRDGAVVWFCYREAFFIGGGVVITPTRGGALFLVGVSTPPFLYTVQIALWCSFYLWCEKRQ

SEQ ID NO: 969484 - protein, 128 aa, Homo sapiens
MRVPREGTPQLGPSRRIHLGFGLGPLVVPWVGGHSQVPTKTLCCFRREFFFLITPACFPWKKGLGTHSVVLPTRFEGNFWWKARYIDVAQKKKKVVANAPPTRGALFLPQVIFGASESFVRTKYCTTL

SEQ ID NO: 969485 - protein, 70 aa, Homo sapiens
RTAGTGSFFVAEFSPEDICPKGDQCLQEGEVAFNCSWEGVLGKPILFKPLEHVGSYHPTLGFGENLFCTL

SEQ ID NO: 969486 - protein, 81 aa, Homo sapiens
MLGLLPTSVKCVSEILRDTLCVSVEKRVFTSTRMGSLGFQSTLPHVRGTFWNKWRALQLMRASNVLPPFLILTHKFYFLST

SEQ ID NO: 969487 - protein, 170 aa, Homo sapiens
FSTLGVVIHKRGLFLSRCFFMEGGRLYTPCSMVLCTPSLCSELFPLILSPFSCVPWVFAPLFLCQQRFLISYTCTFYYFLKNFSINTLLRDINIWSPFVYIILLWRGRSLSSYGLSLVSRSSLQISVLGVFLFTSSPPEQRGALRRVCPPRFLHTLNIAQFVAHTHKGYS

SEQ ID NO: 969488 - protein, 102 aa, Homo sapiens
MCWVLGRWLVVHKVAHPYRGPRFSRRRKNLCVCATNGGSRRALFLAFHYYVVEKPFYHCLQGPRGFVGMGKKYRYLQPGASKMRGFSLPWKRFNPTVQPELK

SEQ ID NO: 969489 - protein, 268 aa, Homo sapiens
MLLWGRPLFSCVCGAGLMDRTTHGGGGYYCSPSFVDGGESRSLASFLDCCPPTAGLFVVAARPDEVMMCFVVPSFVELQQGGCASINCMFLVGSEEDCYVITFAVCGLSPRVLFIVCSVRLTPPPPRCWRCMFVVFAPPHHTSFVVVVFLVTTGRVSLLFVLSCPQSYCWCFESAPSYLLGGAAFSLSEGCEVMCASSEEEDIVAGGHHHRRVFIIDEIINVWGGDVLYSPRWLLQQQEVADNNKGGRYNKRQVFVDINYTGGAPTPR

SEQ ID NO: 969490 - protein, 115 aa, Homo sapiens
CLCCRPYCRWFVLVLFLFFLSLLAFVFLVSASAFVASPPCVVSALALALALPCAVSQLARVLIRVRSGSAIFPGLVGLCHFVYPWGLLLFSSLVSAARPDSCDFVLILNVPRGFT

SEQ ID NO: 969491 - protein, 104 aa, Homo sapiens
  misc_feature (64)..(64): Xaa can be any naturally occurring amino acid
MPVWRVRSYTWWVTTPHQSDDHRVLALIHTGIIETALLFVHPNQLGPQNRPSTRGGADYPACRXLPPAPPNYAGRFSVFGGRRIGETLLLVEEDVRPPSYVGDR

SEQ ID NO: 969492 - protein, 367 aa, Homo sapiens
MWGFYPNFFLGGNTTWRSHSDSNTNVPLVPFRGVTWFLNVAQRTPLIVPSPISDGTLGETNAHDFLGKICCPLYSGGNFGPFVFTHKGALLREISRGPIVVPHIEGCHNITLPPMAVGPHVPPNSRKSTLWPKAPEDNWFSRGPEERPPPFFPRPFRYRPPVKSSPGATPLESLSDVQPDPDLENQDGETQLIDHPLLNTASTSVPPFPLGWSIQPRCSTQWQHFTHPESALNITREGNFAHFRFLEGCPPMLPQCLSARIGYPTTVAHHVSPILFTHNGEHTTRVLALSVETELHPSHLAEKVRPFWLSPLCLCGCCPRGCCPHQLLLLLLQPPAKVEAQEESEESDEDMGFGLLLTNPPTKANPT

SEQ ID NO: 969493 - protein, 210 aa, Homo sapiens
SVLSFFGVRSAVFYDALRCPLVARGAFISELATSCRFGRLYHTVVHYTSGVARSRCFRVLFLYARRPRGGCFYCCASGHNFLWCIFTPLASMGPDAVFGPPSGGVYPPCWLPMSFVPLGSPFIPATCVLHSCCTVTSLLAFVCFDSPSVLFRAFWAPPLPDVPRNYRPGSNRCKRFWSLPYVSLTHLLGLTPFTPILLIQGEQSNSQLRP

SEQ ID NO: 969494 - protein, 81 aa, Homo sapiens
  misc_feature (60)..(60): Xaa can be any naturally occurring amino acid
RQKHFHSTTAYILGLILKQFHVGYRNLRNFQITSVLVEDDKVGTRYAGGARSLLLRTMSXSLDVAAFPPDFKSILDHGIYN

SEQ ID NO: 969495 - protein, 135 aa, Homo sapiens
MGTLSVGLCPGNGPHRPRRRGRITISPLPLPPSPFGTGRLPALCPSWLARHAKPPGTHGFSSQGLGSFTTLLATHRKATGTDTVGEDTRNPQVTGEGRPRGGPPTEHVKDPQATVDFLHMCPLLCFCQMSHDVSN

SEQ ID NO: 969496 - protein, 131 aa, Homo sapiens
MGPNRTLERKAFSYTVVKKGQHTGGTPHPCYVASPPPYPTVFPAKLEGEGIPKKGAFSRPIFLGCATGEYSTTFARFQQLTFKYPTSAPNFRGERPTTEFDTGEIFTKGDESFFLAPFPERQRSIGHTNSC

SEQ ID NO: 969497 - protein, 167 aa, Homo sapiens
MYTPAFFSVGPLPRCVLRPAPRAHSVATALLRLSLPAPGVSTQIALLSRRGHIVGTTEPRGFPTEKLAHTHTHSRGVHYRRLTGTPQGVVAPPRSQAHTCLTPRHYLTQRDLSAHTGAPHRRYRGSPCVRGALAHKISSIPRVSHEGVPLWAHHNPQPSFTLLPPRG

SEQ ID NO: 969498 - protein, 94 aa, Homo sapiens
HGSHMNDLPQCFLALGGHLFVSPLVARLALYEPTPHLEPRSSASTVTTLVAHLPLWPIHKGPVYLPIIRESFYSARFRPYFPGVHTLRPIHLTP

SEQ ID NO: 969499 - protein, 147 aa, Homo sapiens
RGSVATEGMRQGTGLLARAPTASTTVRLLCGKEDQLVTSSHQRPSRCEYLYGADDSQRACPEATALKQHPPKTAMSELLLDGRMRTSRRHEASALLVPCHPRPSGPDLWLLLPSYCGGRTFVGLRALLWGPGGAGPQSQAPTAFKDG

SEQ ID NO: 969500 - protein, 191 aa, Homo sapiens
PFPRPSPSHWFWTSLFFPMPAYAFRYIGSPHSAPSGAPPCHVALDRPVCPYHRHQSNSLAILESCRPNPSLRFHTSSKPLPARPHIKKDPGLITGTTSQKRASRARAHLTLSGKKRRKLLPQIRLAPKEKTALEVEAPSKPARTSEPQLQRPKKTKAPPDVEMKDPEDEELNLFPYEDFQLEPAFRLHVVV

SEQ ID NO: 969501 - protein, 107 aa, Homo sapiens
MRNLCLPLRGILDTGRTPHLSGTRLAFIPRAPQEKLGNGPHSLRVATTLVADCWLLLGLEELVGRSTLEFGISQVLCPSTPPPFWGHRKQCPRPELGPGFYGGSFAV

SEQ ID NO: 969502 - protein, 131 aa, Homo sapiens
QWAGLVPPTHRGATPVFLLVILLHPKSNVSLLGDAMKMNKTPCNIPLSVIKKRRLCIENNLGGEDTPPCCVSLTVEGSTCGGQKFAGRAQQEGSLAIFPPLIKGPPPIYLRWTGAHQRKWSPLVGKRGPKV

SEQ ID NO: 969503 - protein, 203 aa, Homo sapiens
MRVTTGVTSPQDSPELGWLMQVRNQRLIFGQGLAERRLLEPAYESHNRVQTTVMSANVTRSPTRKVLVVQVSIQQSPEFASFLLCILSGLYCLVLHECPRWGTPRYCFWGHYIGISKAQPSVHSLWCSLASWEYVLRARSCICISIDSAIGVALKHTESIITLKCWDLAGRKFAEKFRGAACFGQNGSRGGADEHAGPEPRLY

SEQ ID NO: 969504 - protein, 229 aa, Homo sapiens
EAHKGHREPPFCVSLAPHEVTRVSSGVEIYSGTVLANERSTPLHVGSCAIMFSGGTFDKGAAGSPVVNSRGICFPRERTHLRAFTEAAQSHSPGDCSTRAGDQAEERNASCHVSLLFWDHSHSSSTFSGDLGLSDGHGGLPFRLRSTNWHGGDYECNNTTGGETGVLAREGGTHERWFESTFPGRGPSSMWAKPSIRARSSSEHLLPSPSCLHLPFQGDGGHLKETEHL

SEQ ID NO: 969505 - protein, 176 aa, Homo sapiens
MRFRTKLLWKMYTEGGCFLKRTVAKGGLPNTPGSPEPHPEANLSKWLHQPLMWRKRHARLHLESTAAGDRPPELSDVLETAADTGSFHVSPGRHVCLGAHVPQAWSQNPTESEPFLGFFLATSLCTQPHGLFQALLMRHKPAASPTGVAAQTFSAPPWEFCQFVGAFRVKSMSFLS

SEQ ID NO: 969506 - protein, 105 aa, Homo sapiens
MYTPLTFSGPRTTGGFGETFPNSTFFSSNARETSCNLKLWGGAPKLIIRKAVLSAIRWSYRGRELSSRLGNTRSVGNLNYLRPHWEYTTRRQRNNVMASTFGGWE

SEQ ID NO: 969507 - protein, 77 aa, Homo sapiens
MPLFLRSLHKALICATLGGFTFLRSSRVTRVVRTFKTVKRVSLTECTLGQSSQGTRFIWAHRHKIGSSSVLVPVSCV

SEQ ID NO: 969508 - protein, 95 aa, Homo sapiens
RSAIQLRTLVRILLNHGGFMGESLGHGRVNATLILLLRKIYAGNGSDMYHPSRERAYMRRATHEKKEGEEEDGEYTEETTLKEEERRKALGNSRR

SEQ ID NO: 969509 - protein, 116 aa, Homo sapiens
MVISRLNPYSWVASVARVSRESSLVNMSGIMSERFRNERSVRSGDAHGGLGWRKGTLPYLCPPVLVHDAVEHLGHTHLQISDTPTPSLCTVTSWNLGTSTLVGKHRSMWGEQNVLE

SEQ ID NO: 969510 - protein, 101 aa, Homo sapiens
LFRGGVCSVQPLCRGAGIIGPPRLCGAPSFCWVVRPTMGVLSSWRTTHRFVAAERSTGGSMLLVFPRLSVGQTNLVRAWAPLDLSLVEICRVVRRPPQCAE

SEQ ID NO: 969511 - protein, 174 aa, Homo sapiens
SGVRARVVAVGGGVVVWCVGRRWGVRGYGPVGGRVRRTAWPGGFDADWRPGSQTGESVEFAGICVRGVMRCGVCGEEHGEGPWVVRCHEVIEGGVFCRRHRGGNFLFVEAGYGRFSWGVRDNCPVVFLPGGFHGGGTHFVGSPTGVWGGEASEGSWGRAVVKVVFVRPVCKAAG

SEQ ID NO: 969512 - protein, 269 aa, Homo sapiens
MESCVTDGLLLGVSPPPDDPLLGKAPFMTARGAPSPPGGGNNKPEQQAPRGLGVFLGHRSSIPQRGVHPASALFPGRSPRGTPPPGGKTTVWWGTNNKRGYYTPNVFYQGGDMMCPRGNTPERGTPREERRSHPLSLSRGGHLRGEPCWPPPPPRGPHTGCDKVSSRGGVCAERDLRGVSSLGAPCSGREWAFFPLLVAPSSKGRPQRLSHTHPSPCGEKLPEKNLTDAPRAGRGGFFVGGEEGGPALLLLLRAPVGGATHQSSLPPQG

SEQ ID NO: 969513 - protein, 141 aa, Homo sapiens
MLCTFLVAGPPPMGRVDIIRPLKFFRGGPPLLGWWIALFGWTPRVGPRRIFSRGARVFQERERIVPRQTGGVTHPRRPELLPEIVVDTGGPLLRKRPPECVARETSPFGGGNPGEISSSAAIINPRSSGDANTPRRNWGTL

SEQ ID NO: 969514 - protein, 359 aa, Homo sapiens
MICLCGEVSGGSQCWGLVASVFRLVSVLFLLRGLMLGVVRLCGAVEGRVVHARVGATLVARAGVFLGEVIIAVEAPPTKPFVRSLFLPGGTNMGAFEKGQEKRGFFHEDVFPVGGQRVVVWGVPPMKVWGSSLPIGSADAWGFSIGYTRVGVIFRLGTSCQRSRNYMGPPGVYVPPLVILEVCTPTGGLPKLRKCKGFGSEALIGEKEFVFSPPLSLGYKKKPLGEKELGPPYEIFSVRKFSRVRIAVAAPCGLRYMGCLSGRQAAHIGGCRLRESRVSLGGVVSHPLSCGGVLRVCLGVSVDIYGESARLRFVAACGVVYLYRTATVGEPPREWALALGELCVKRGHRTRSCAQERCV

SEQ ID NO: 969515 - protein, 163 aa, Homo sapiens
PGAPQEENHLGTWSRKGYTPKFSRRGTKKIRGREEPECSLPYMTKGRLWRPAKTRWTILGPRGTRKKRPKTCEDCRKQQGDTRGSTPRRYSPVSLLSAFHNGKSQPGCEDGGSFPRAAEIYRMRAPNTERILGQKNVNRKNNRNMGLIKRIQNCLEERGKNNL

SEQ ID NO: 969516 - protein, 298 aa, Homo sapiens
LCPPPPVQYDGGGKKPVAYQTAQLCFLQQGPPYSSGCCGSKTNRAGGFGFTHTDALASSPPPSHEGTRKAGDFLWVGPHAPQWVISSIGARAGRAAALLRRYSIDSAVVKKPRQSRRAFPRWGENHTPCWRPHHCCRHTADCGGSALLQEKNKQRGELKQIQHRIKNVNMNPHNPAHTERGRLSHARCRRKRSTTDGDKKSGGDPARSESPPPAGPRERPPAPTARRTRERTYSHRNPRGEVFSPPRPSVASTPRCGYMGEEEDTPPPEGGKARHHTNCVWKHGHTAARRTPRAGGFL

SEQ ID NO: 969517 - protein, 202 aa, Homo sapiens
RTLGPPGGRGHPSLPRGVGHIEHPEVRERGGAVCPQRKGEHAGTILGGTTREKNTPGGVSPAGETHPGGRPRDPATKRGVHPPREERPTLGGPTIKRRRTPREDRVALCAAPPHYNMWGSVDRHHDLGGDVAPISCDPPRRTGTRWWHVAHTLINTLGALYMFYITELSTRLIDRGSAQYYYRGEYLIYRVGIANTPTCMFF

SEQ ID NO: 969518 - protein, 159 aa, Homo sapiens
MVPPTLSTLAQHSTGPIHACWFQRRNFPSHSSPRQLFRPQRPFLATGKHGRRALDAGLEVHPEGRESTTHEMTLVSEVSTHVSTVPPAEEEGEFRARRLSERRWPRALQSTRGKPRETTCESLYSLPRLSCGLFPLCALAVFLATTMLYRHHPLKHFYS

SEQ ID NO: 969519 - protein, 188 aa, Homo sapiens
SYVVASHLVWGGIFFWSSLCARTLLGVLVVLSQTGRVGPLLFSDCIGSSVVCCCCASTSSSLSPGLVYITLLVSFAPSYSVMLIMYASPHLFGFVCCQPWCMLSRSRLFFFVASKDGMVLCGVLYPALCVHPLCFGCGSPLSLPVYSSTVVFVFPGTVYYLSLGRLLRGLSVSSLLPFVLPLFCSPHD

SEQ ID NO: 969520 - protein, 362 aa, Homo sapiens
  misc_feature (324)..(324): Xaa can be any naturally occurring amino acid
IGCVPRATGGASGGPLVAPSELGGPPGWVSPREVSPPMGIIPEAPRGFLVPVDTGPRAAQKPPGSFSVRLKPLEVIKECGMPPSPPKGWAPLGFKRDKLKEILKLPLGGGNSKFSCSRACPQLIGDSRGIPLSVFPLGGPSSQRDMRFLKKFKPTSPESQTPVAGAQRATQGVLKAILLSNRGRQTNGRNVRSWGVISASPKGEVGPPAHIPLGGPHTHTPGHTQTLFHIWSPLVATQKAYPGGGTHRDLGTSPHHAGPPVAHRVNTEPPVRRLWCLVNRSVKSPVHTTTGGTHWRHLCSATHWWPYKRSCLYMRWAVYIEMRXGNTPLRPGGVHTGHTRGHNFCPKATLLRATFLKAYTLT

SEQ ID NO: 969521 - protein, 108 aa, Homo sapiens
DVVVSRLRCCVMVCVLLCCCCLLCLRGALVLFVRCLVFSSSLVVVFTTSLFCAVFFRGERLIHPLVVRSLWYSPWSVLSLPGLLCLWARGVGLSHCCLLRVAHCFGPF

SEQ ID NO: 969522 - protein, 222 aa, Homo sapiens
LIYLTCFFSFCCLVFCAASLLCVWSGCAVSVWIISHCVCRAFLFSRIFAGGAPPFPFFWVRPVFSLPLRPRTLYGGGPTFPWYFQQLLGSRTLIFEIWGDILPGTSGIPVCELYPRGIAQNVTSSLSYWNEFLKLSHVKKLFLGGVSLSYQSPFRWENTVEVPLERRFGNITIRDILGGIPFYAVPMLGNKLSSQDVDPGCILPVQSDVHTHDTVNPHVFHA

SEQ ID NO: 969523 - protein, 123 aa, Homo sapiens
  misc_feature (1)..(1): Xaa can be any naturally occurring amino acid
  misc_feature (4)..(4): Xaa can be any naturally occurring amino acid
  misc_feature (7)..(7): Xaa can be any naturally occurring amino acid
XSSXRPXPCIVYLKKKQTAGERTSVPVSSSLNQAWYVRVSVAGCLCRAVRGSSIYDLYIVLLEEYSSRGGLLISALFFFVIARSVRGPYIRLCGSPTHYSSIFSLQRIFFVPAVVSFSTPYKW

SEQ ID NO: 969524 - protein, 168 aa, Homo sapiens
LSLPLWWLLSLSVSRSCCRRVFPRLFWFAVFFLFTAPLSCSAVFAALPLGGCFLLLFVVPRVSVLFGLRAPDCLAVYRFTAWAPLFVLFGVCTLSLRCVFCACASVTPIVACPCVYSRLVLLCVTRRFLYLWMPSSPLSPTPRGQPATWPPNYFTTFSLPVTQSSEQG

SEQ ID NO: 969525 - protein, 239 aa, Homo sapiens
SLSVFDRVCLLCWCCSPSSLLVVCLVLPVLLLSVVRLWSFFGASLFFRGVLPPYIYGGLVRCFDYALGCSFCVVLSHSSLRGLGGSYFSTGGAPTNGCQSISWRPPFCVGVPAPCLLTVGGCHPTVVSVLLMTPLCFRCVSFLSLIGLPSLVINTNHNSGVCEQSPPWATNRGHSPTIEDANLFVCYFPCVTGSFLLFTHPWFHLAPVFIFVALPPPIGNFVGEFGPPSPGGKLLLGGG

SEQ ID NO: 969526 - protein, 352 aa, Homo sapiens
MLLCVVIIVMLLLMGQTFVGRPSCTISGGTLIFTPLWGCFRGSNQTPFVSLEWSKAHNHKYPTGGDYTTTRRLFLWVCTHSCGCHVQIHATTCGVLSFPLIHPLCGGHSIFLGASFPGGAPPNKGGRDSLVALYRESHPVWHTTFCLACVLENTHFVCERECAPTTAPHFLGTIYVFEERKKVGISHRECYKHHTFFRATPRVGENFIPPWITPPHTPGVLGVSLGHTGVSHGHKMFIGGSCVGCAKNTHRDVGERKSPFHIVEKKPEVSPRHSLVAHTKVLSLCGGRLWEINFLPRERPRPHKGEGLLLERKIGGACRGEKIGAWCVSSTARPWKLLLFEGFGKLFLPAAF

SEQ ID NO: 969527 - protein, 76 aa, Homo sapiens
GFSTHTSSILVAQKKIYGNHWGDYKRPRHHTTRTPGNMAREKIFRVTESFIPEKSTQSPRVPQESKIREDPRFREQ

SEQ ID NO: 969528 - protein, 127 aa, Homo sapiens
MSFVGYSTHPRRERVLEERGEMPRQRAHKVESFSTTTHFPHVTFHETLGNAGGPGLPKEELTCIMEIIPGPWGTERDEARLWGGSRATGAGDLRGLLMLRLYQYHSRTHNLEEKLSNPKGEEKPFMY

SEQ ID NO: 969529 - protein, 284 aa, Homo sapiens
  misc_feature (277)..(277): Xaa can be any naturally occurring amino acid
IRLVSAQYCSVVTVQLLVVSSSYGYSRGAVLRSCRVFCRRPLGAGWINSFLSSSYLCFSAPLWPLLFAAPPIGDPVLCAPPINLRGWVIPGFRWIFPPGEFFFADESPTARLPDMLNILMGVILPPTRPADGCSSYLTRGGAPLVFQSPRRPLVMVSPSLLRVPLSRPNVCENVFHNTCVPDKLRPNVKPRCSFFLIITLMAPPSTLFSSRYPTTAVCSPNIFAPANWKWGPPRCLVLIQPGDGDYGQTPSNPQQVGPPHTKTSNNHDTCGCPTQKXAPAFFRK

SEQ ID NO: 969530 - protein, 115 aa, Homo sapiens
WHLLVSPGIYLNPFRGRHLSHPSRVSTPGIWLKCKKGNYWEYKGEIPAFFESPFPLVSRVPGLPKSGPTGKREGGHMGCGAKKGAPRPPVSRLIFAGTLNWCPELGGPQGHKATL

SEQ ID NO: 969531 - protein, 110 aa, Homo sapiens
MTTPVVEETSLVWWLWWHPGGGEEMVHGDAIMDLVMMEAILEVVEAQRFWGYNTSVFTNLDALKGGKFGGRSSGPYGGGGPYFAKPREPRWLWRFQAAASSYGQWPEDFK

SEQ ID NO: 969532 - protein, 361 aa, Homo sapiens
  misc_feature (111)..(111): Xaa can be any naturally occurring amino acid
RSGANETETQRCPEELNSKECVSHSPFVESPHMLFSCPPLFVSLQNGPLVGTRNTYFYIELDIPFSSRGAPRRIIGTTFSYEFLSYYGSSCQKQKLFCDTRGDFVCSLPRXRQPHLGGREIFSISPHPLGGPYKKQCHYFLNTWGSPEEMFTPTLMSVKALLDLCLTGNVPLYSSCRRKPPLLSHMAAVFLFCLGKMGGSPPHTRRSAQWTTPPRYVVKISARLLIGAIATEWDIFSTPCQIVPNLTHPAAFLWGILFHRDPVFLCIHGLTHGPPRCLIPRKEPFTFATLGNPPRRMRAHLEPIKWGFSHDRAEEVSLTETDLSFFMRDIHNLWHREFLHTHENMREDALSRDVWKGPHIR

SEQ ID NO: 969533 - protein, 255 aa, Homo sapiens
ERFQEARVPPHRSEAPAGPLLSLPSGGPHVGGPPFRRNVCYPPHLPPLFFGTKSLSGVCPPGVPRPMGPPKGEEPANTSWPQRYSGGPPRGPPARAIRRSPRPDGPAASALTRRGGSQTRRNLNKPGVLRRISGHHFAAPWRARGAPGESQHHISPPDRNFHRSRDPRNGLVEKITPAQAHEGGRHRNEAHGNNLPRGVQPRENTRCAPRCGAPTPVSLLPVPLRGTPGPGGPPHAPSYATRTSQRGVSHFHVTL

SEQ ID NO: 969534 - protein, 262 aa, Homo sapiens
VAPPFVSRFLCKRRFPHGSYSDLLAWAYNRCFWYDHFSEICLYLGFPPGKSPLLWTRVRPSAYWVPRYPRILPAFKTLPHAPEPPASQLLDCLDFLDGPSGDFPSISLPFWTPPQEVPWYTCLTFPCVPPPPAPIPDFQVFEPEGVPLDLSFIRPPGNPALLLITIPATHFFTRVMSPLSAARLLCPTGFHAAQLHGPPWEPTFPLGVAFLFTPRFFTDPHILPRPPCGYKLRLTYDHTFTPVGSRRIFEGEHNLPVEIAGT

SEQ ID NO: 969535 - protein, 103 aa, Homo sapiens
MPRQNSSPPLRSMSGFFNHRGGGGSNRGIIILLLSARKMLVGGPPPPAGGVFINHISSPHLLYIFFLLSAPYEAAQSFHTDLLRVVRPQRLFNTRVVAHLIIY

SEQ ID NO: 969536 - protein, 161 aa, Homo sapiens
MSKASFTLMSSWYSRSISDSSSLACAGQPPALRRYAVGINKAYLTIGPLCISHGDLKSHGTAFLMFSISCPQPVDHQVELRNYSLFGVLQVVTSDVVNGDLDLLDLGLVQGFSLSDAPLGNLLVLGTDLGNMLTQFQSRLLSMERTTDVSLTWVCIWDRIR

SEQ ID NO: 969537 - protein, 307 aa, Homo sapiens
  misc_feature (138)..(138): Xaa can be any naturally occurring amino acid
MLPRGRRAMFCFGPRSITAPSLLPASFPGLSLPLAQRQLQKRVPPDPGFCPGPRCFRTPSRFLPGPAFNLRAILAPNEKLALGTRESPQQWMDLKAQAYFWHSILPGRHMQHVCSIPSLTTYDAHWKYKSFPDLGSAXGVLSIGDSPMLGPGLCVGFDIDEDPLEIFNRNPEEFEFHQILHHGSNVKCALLSTPECPRSIPITVNYESLPFGHPKIIKGPDMAFLKTALEMARTTQYIPLPPNPPTREPCSKRKLPEWEIQIDYYSQNFDNDLPSIITSFHQKEIQWTIEVDLIRFSFLKPPQPKSF

SEQ ID NO: 969538 - protein, 145 aa, Homo sapiens
PCCLAVAIDKSTNREDTTEREQEARCRAPLDDRCEDWCPRPKARDALSYPSDGAATTPRDVFLLAKPTKRKGPMVTRRDGPNQRSKRGFPSESGDLIPWRLPPSWCAPAGGIDAQFVALWPHIPVLYRAGRASRSGTNPQEEIIV

SEQ ID NO: 969539 - protein, 117 aa, Homo sapiens
MGEAFGIDFYEVSQRVAPKVRCWFVFERILLRFPLESSALLAHCNVRLPGFNDFHASPSEYLGPQVYDIMTGYIFVNLIESGFHHVELLTSSDLPLLSLPKCWDYRCEPPCLALVCS

SEQ ID NO: 969540 - protein, 254 aa, Homo sapiens
MCATVCVWRACLAFYAPVGGCIHVSGFGQSFQAVSPLAGLPPPAPRAVLFLRGVSLHPPARGGPPAVPRKILEKGAPRDGPYVPRGPHPPPATEFRAGVPPGRPIGGPKPPGHTGHGGPPPGKKRLGAPPFEIPFLRNFGGAVFYGGHRAPPELSPTAPPLSVGRRSQWCYFAPRGAPYLRCHSNPLGPPKASKLQAHSPRKGEGGKGFNAPRPWIPTGGPPWVTPRGLGANSPPSFPGPGIGAPPRRLSVGLL

SEQ ID NO: 969541 - protein, 107 aa, Homo sapiens
MAGLHFCPGANTGLFKMGEDHFWSGPPDTYFVCSVAFLNPVSVGTWNSQTSGVNTPVSPFTRIFARDSPKGGTWKFRQTVGALVERTVRVSLSNISQLNASINKCWR

SEQ ID NO: 969542 - protein, 113 aa, Homo sapiens
SFVVCVRLSLLCRVGCASSASAARVAGDAVVVPRARTSTRVCPLIDGRADLRPRLYLIARGRDISFFHPRSRVAPFAPFFLGQPPLSGHTRCVHPKRHAVWVSPVVRGVSPRG

SEQ ID NO: 969543 - protein, 179 aa, Homo sapiens
MFAHLVYKTRSSFFCPGFILPVCPSFVPIRVLPKPGLSPHFPEFLNHRAVGRLFGAPDKLFAPLVCFSHGGPPFLVFCAPCFSTPPLVGPYGPMTLLSPSMCAPFTGEEQHQKLVCHTWCDPAFTQFLGGFLNRGPFLHTVCCPTTRGVGFYSVTTGDFSLGINGCCFFMGEGFSPLDG

SEQ ID NO: 969544 - protein, 199 aa, Homo sapiens
DAHHPAELKPGTNQVWTPTPSWEHGDDLRDTPNEISEMNRAITEAQAEIHHIQNQPATIGGPHSEAEEPGELALKDARAQPEELETALQRGHRIWHGNCVSYPELMSVKLAWTSRSPTYRKLLEGEENPLAGDGVGTLNNLCDEIPLVAVSWRWHWADPREETTGQQMTLSFSSSAGPGLLKAYSIRSRIRPVARSARD

SEQ ID NO: 969545 - protein, 231 aa, Homo sapiens
LSELLLPRCFLIRAFLFGAFFYDVFFSPCASHNMGVSLVLCVSTGSSPPWEVGFLFQGGTQGFIFCPPLVWAPPCRFMGLSPLGSVFAPSLSNFFVHSLPCAPPNGLANPWPQVYPQDQAWVFLERTSWTHQVQYHSLSPPRRTCGDGPPPGGNSWPWMGPGLLPGPSIPAFYWAAFPRLWGKSLSPELYREALHGTAPFPVSPPHATTWYTLRGASRPAAFYEENLAHKY

SEQ ID NO: 969546 - protein, 161 aa, Homo sapiens
  misc_feature (101)..(101): Xaa can be any naturally occurring amino acid
MGILFSCVNTPPWGQDKKNLVGGGPTIVAAVNILLPLWRGPNDHSLCGEPPSLCGPPLARGEHIFGHKLSTHTLSLCGGFSQRLSPRMSRSHELARGGFVXGEIPHTHRGERRTTSLLHPTVCHTPRALPHPRGDFSLCPLSLPSERVLRPSPTAWPFEIF

SEQ ID NO: 969547 - protein, 72 aa, Homo sapiens
MSLLFSGPLQEAGEVYRQFGKAPRDPAQPPPKPYVRSKGPEVRACPRPDRANRGYQKLNLDPTFLFKRFLLT

SEQ ID NO: 969548 - protein, 188 aa, Homo sapiens
MHASLGENRDELTLEGFNQFFRTTGEERGKLTLWCDLSDTLDHHSAVIFSNPQRKVDWLTEKMRESNFTCILKHGDMPPKDRESIMKECRSGANRVLNSTEVLGPGVGSPSTVSLIINYDLPNHHENCNKTPELGDPRFDTAPAKGLAHLNFVKNDDHSRIPPRDIRPRTIPHSRLNEMPHERLLILI

SEQ ID NO: 969549 - protein, 82 aa, Homo sapiens
DSTLWNNWEVPWHPAGVAWPTPGLPGGGTVRGSVAFPFMFRPFFAASFPLPPPPHSSEHLWVCPHFFYGFGLFSPRDIWGPL

SEQ ID NO: 969550 - protein, 146 aa, Homo sapiens
  misc_feature (94)..(94): Xaa can be any naturally occurring amino acid
GLFPLPAWPRLSARRPFRFPPVQVTQPTGEHNHRLRKEERTGSLDHNSFRQRISRWRNLNTIILRTWGHTKPPGGTPEGILKELGVQNVKGIPXHMGAEARVRHFPGEARVLRRLLTRMLVNDSSDAMPKALILEGLNTRMLIGVK

SEQ ID NO: 969551 - protein, 127 aa, Homo sapiens
MFVGDQTLCMVFPHCYSCAGPPPSVLCCNLISPRISAGVPLLCVRGRLFFEESVWGLPRFCPPRCCGPRVPCGVATLLSCVILGGVTTSIGAFDKIIGISGVSTAIFPPHACSLGPALFLSVCENGR

SEQ ID NO: 969552 - protein, 299 aa, Homo sapiens
RYPLLPLLVFCGLAVRGVVGGPVACGGGARVGQGRGAPWGGRPPVVLSFGAPPVVLALPCGVGWTRVSIVVAFVVLPQGLGGDSLGALGSWGYHRLGVTGNVQAKRTPGGRGNQDVSAPGQGEGRDGGAQGTLDEFGLPVCGVSFNLGVPLRGVPSNTPLGPTRPRGPRRRGRRPRPSVPDRVQHVVKVLLGVLELFFTEVGNELLFAFLGPPGAFSRSAFPKPSTSRSSFCPRGTLPPGDVLPKSVLSVPHGWEEANLGKGEKKAEAEYTPRSYGFANSALPGSLELGQMPVLGGEQG

SEQ ID NO: 969553 - protein, 123 aa, Homo sapiens
RPLGVQPKSGLSVAPGVLGFSTLVSLDLNPGTPIALFDPASTLQAASFGVCKQEFSAPWPSRYRWVATAHTEGLQTEWAQKDLETKWEKAPGRLPPVGKTHNPCVEKHPLHWGTTTCALCVCV

SEQ ID NO: 969554 - protein, 71 aa, Homo sapiens
MCPPPLRVVGVIRALFNTASSLSRTFSRHFACFLPQAGARSVCRFFPGFVTPGSQSGRSPGSWLWSDTFDL

SEQ ID NO: 969555 - protein, 287 aa, Homo sapiens
ALALFAVARVGVWAGRGGARSGVLVCVGGGGVVVVVCVVGGCARVVWGVHRPSSGGVALGCRVVWGVVVVWVGGVVCGVWALVGAGRVGGGGGVVGGGSYKPGFVLGGPVRVFPLVCGPLAPVCLSAAARDDSPGAEVHAFPELSMPYGPRGAGVTMLRRPGYTAIDPFVGLILRGARIREPVLVDPSKGRRGVSAFRGMCPAEYFVSRPTGVPGSARHGALVAEPLFYGKIESLSGNALCLRPHVVSSREKLELGGSRDTRYTFSPRHFPPTTLLGEGLVLRASLY

SEQ ID NO: 969556 - protein, 233 aa, Homo sapiens
MTLVLLCFCIFVAGCNYFARATLALRLSWPPIRSWVFKTPRWSSRRILPGFCCAHARLYYGPPVWLSWLGYSPPGGNRRFAPLSRTTWCNSCVVICMGHTTGLHPWCLFKKNGLDFWRNHIGKSGSVLFPRVEKWGVNPLEKPPFAGVHNVPAVLEWGTVEENSLGDRAHTARESKRGSPPESPFGDISHNRGKKGRKRGVKNGVLRPRAPRVWPWVKYRGWEDLFPTSLYKK

SEQ ID NO: 969557 - protein, 312 aa, Homo sapiens
CTLPGRLLAACVSISIWRCVASLSVGWVAIVYAAPWYAVSHSRTLVVVGEPCRRRWDLACVRRAHCVPGELAPALFGGTPRLSRLGVTLSRWVSRPCVACVACLLLPAWVRLGCFGAVCILVVFYPPVCAGATRLGQRLLVVGSPSVPRSTRRPPVSDPDGPPAPLGGGVPLVYSVGVSFGPTHSGGTVAQFSVREWPLFRRPLFRREATRLPQEVSWGSPRGPASRGSRRFPASGSPRGGDHAVISTLLFGGGDPPPRGSPLVCFLVTPWALFGLPAGHAPVRTGGALPACAPPRGFHPLCVPPHTHCACL

SEQ ID NO: 969558 - protein, 254 aa, Homo sapiens
MSEPPACCPDIVRGLSSRFSYSAAGLPFLTRIPFSPWPFWGPHMTQVVPKATAVSVSGFSPELFWSQRRSGPPLRAPDVAAQLCCNFWPLALLTLPWANLPWRDPLPTHLRGPEFQGSAKPLVHNKGAHPSAVDIRGNHAPPTGVSPGPRWGPTPPGLVYWTDWVFEGPFSRIFDTPFIVVTQLKPLGHPKPSEGPPQTHGPLRDCGPRTKEESFREACERRPANCELYLHWNVAVWAHTQAPGGEPPGGHRAP

SEQ ID NO: 969559 - protein, 341 aa, Homo sapiens
MVPCSYVCCARLSSLVRVGLSLLRVGCRFVSASVVYTCVACVLSSHPRLCGARVGVPPLLCRAALLLCVVSSPQVGVTVLCLQDRGVGGQSRSPRPCVVSSSFAPPGINTRPPAVVKIHMWHVRWRRALDVVCHNVWRVLSGGLFFFRVGATPTESWCSAYVCYEAGCAYTSGHIFWSPLCVSTCEVVRGFPPAGGFERYLLMRYLRANTLPPEGTHLLSKVSVLPVHAAAPCRPPLWEFETRVPLCHPAYGVGPLSPRALLVIVMPQTLRDAPLGHFRVLVLPSPPACLIPVGMAPTRSPPMCCLFPTNGAAVIFGPLSLNGGACSLFPLECSPPKFLHG

SEQ ID NO: 969560 - protein, 113 aa, Homo sapiens
MVYTKKTQRCGTPGLPEFSRRNSFVRNTIHGGPAHGRKKEICCWGENDLFSPPEFPKPKQHTLTFFALGLRKCNHEATELFGEELERNFTENVFVVKNSLRRVLARKCTSPVF

SEQ ID NO: 969561 - protein, 330 aa, Homo sapiens
  misc_feature (295)..(295): Xaa can be any naturally occurring amino acid
FACARVVADFLVAKLCWECLFSSPTTLFVFMVMRSLPLCLSSHLAPRLFARGVSRLFSSGAAVAPCVIHRGGGPPEYTKALFCLGGMGCFSAQRAHAAGGLFPRCVEDGVGVVITGEQKASWGRWPPLYDAQGLLGSPTRVALAAVGGVKGSPAWPPLLGRLFVDLELFAFAALCERTALGHPYAHKRPFQEGGPLSSRVLALGSPPFFCGAPRNSVGDPIAPDVPALSVCPPYRPPACPQRTCRTLDLSLSWWHPMGPIGALEHTSRYKRGVFYAKAPPHIYSVPQGGALWRRXTHIGYNSLCPAQDTHTTGYRISVPLCIGGIGRHHE

SEQ ID NO: 969562 - protein, 183 aa, Homo sapiens
MSRVGTQNARTAASCALFEVGIVFSQSGTCEIPARLSHAVCPKYMLEFLVATAWKTVLGVAHHVFKEASTGGTQCQCLRAFQGSPRRGVIREEPPSFAELPRSHRSRTLLIILCLGTEYHFPHRFWGHPQWRRLVARTGGSLIELNVPLLLWDVSRVRHHLSRTTHGITGPTIRLGVFLEYRF

SEQ ID NO: 969563 - protein, 220 aa, Homo sapiens
MSTNQVVWVHSLSCYEPRVLWTQCRSLLGTTRLGAAAVSAHTSLGMWVAPLVGGPRWVLGATRRRIESPHVFSLAASSRAVVFPDGVRPGHRQFGVCFSRGGVGYFNAGPASLVTLFGLEKMAFSVVPPVAPNRGCPRVEPPNAVRCEYGFLRGRPAFGAPAVLPVVCPGGAPGHQRPRVGAPQVVRSPRFSAPFFSPVGGRPLLELDSTHTARVVRFGG

SEQ ID NO: 969564 - protein, 451 aa, Homo sapiens
  misc_feature (297)..(297): Xaa can be any naturally occurring amino acid
MCCRAPCRTSLGVVAAFCSWDPRGGVGSVGVCVVVCTRWTRGGKETPSRPVLLVDFSLRACGETHAPPLTVFSLPPSPIFVLVRRLLWERGGLQAGKVVEKGRPWAVLGTPAWWFLVCSPWVHVSVRTLCLVQRGGVVGVSLRPRPEPCCLWALRVAPRPQRAGGACRGDSFPPWGGRTPRESARKNPLGTVVFRPPLVGENTSHTKEGAPELKPRASGVSETLLRRKILFEHSSTHKGVEATLPSESVPPQCALTFASPRAQDPQRDITRSVKDTTVAPTKNTRRLPQNARHSTQXWGEKRERAPQRRYVPPSRSRSDLVARRSPHAPPPPHMSFVRAPHVSPRVTPLCFLLGERGLLHGHMGPLWGTPNRAQGPTWEREREHNRAHPLGAQPVAPSSLSTLNSSSAFHPSLFSQRLLPMEWNRVLGAQLHVHTPPTVFPGPCVLFSRDT

SEQ ID NO: 969565 - protein, 512 aa, Homo sapiens
  misc_feature (317)..(317): Xaa can be any naturally occurring amino acid
RCVLPRGFLSLTTAAGLARRSASLPPGLSARPPNSVALVFVWQLAPVPSQCGGVVSLRQPPTWCTTVAPFPGLERERGRRVVVALCRHWSRRPPPPWYISVGAAFLKPSPPLLDVFSAPQGLFLVGNLRALFLPRRDPGPRPGCVTEVSWEKGAALIFRPLFFFPRRQQVTPPACFVPRGTPPRRRDFQFSGGVAPLLGGELWGSGHHFPKTPNMPPPMWRNSLLPTGGKEVSSRCAQICPKVERPLVGPPPKDIPEKGTLWKIPQSAPKCANSALPHRGDTHRGAPFCVSHRREDSVEQHSVSCRTHSPGVIETEXSPPGEAPTEISCLPFLYPAPTHVAHTCRHWENVHATCTPLGVLVHIFWSSLLRTRHRGYIHTRRTVLCARHITYSAIPPHATYSVRGTSPCTERSLGPYMFTQRGAHKHTHMVSTNRGRLVRPTPAVRMGEKELSLEIPLTQHSLDPPLSDLSPRPTRKGTEEPHTWGHFCGWRATSVYTPACSGRRRPLLPESF

SEQ ID NO: 969566 - protein, 141 aa, Homo sapiens
  misc_feature (30)..(30): Xaa can be any naturally occurring amino acid
RLTVQSRRGLRGGCGWCGRTVTCLLLRCLXQAMVRVHRVDSTWLPCYNCRLLCSVNRSVSNIVTVSSVVCPPAASVAAMLFSDVWPPPVTPEGTRGVETDKYMSAAPLSSLKVLPHYSVPGPLFKWCNVSTPVAQPRQVMV

SEQ ID NO: 969567 - protein, 138 aa, Homo sapiens
LDYNTLKIARTQTSFGGYQTNFLIRLQNGARIGFPRCWTRFCPPNSGEDSSHETWGDPETLQELVDHPAYQRGNQRGILTIPLRSALFPRVLSLGPTRDIEQIGVCPKFFYGFGFFPKRYMDHVSHPVGDQLKFHHKR

SEQ ID NO: 969568 - protein, 81 aa, Homo sapiens
GDTLLYDERLPSLMVEQLYNSCRFVSAVRKLSLAERGDGCRKISLLGGTTTDPRTLFPSWGRGFHLLPSAAGEVILLENSF

SEQ ID NO: 969569 - protein, 153 aa, Homo sapiens
PYPPPGQTSNLVLPIILPPFSLAGLVNPLIRVSIKLKYALIRRTASSSPEQISYEVTLAIILTIDIYYYVGSFNLSALITTQDTSDYSPLKSSRTIHDGSYYPHLCQMSPSANPTSQPVRTGQSETYVVQRIPTLAEYCSGSAPSALVFKSRN

SEQ ID NO: 969570 - protein, 216 aa, Homo sapiens
RARGALYNGGILTRANDFPFGRQADVPILENQLSDNGYSGKGEKHISWMAFLLNKMDWFQNAPEWISPSWTIVGDLGNNHTLYSAVFPPLNSGYVSVPSEHTWGPVTKEVSDYIPPLSPGPRHSPRTNQPAQKWPSQRYQQPFYPSSPRLPNGGKQDTLLNSQVEEMEVDDFYDGIQRLYNEDYVSENVGSVCGTDLSDKRDMLPPVHPLQPVSVK

SEQ ID NO: 969571 - protein, 75 aa, Homo sapiens
SGVSSVVGGMISELLGDEVVRCVESEEESGGGADELVGSVARVGRELRYGVQPGREQRGVVCEVMLQGQFVDAYV

SEQ ID NO: 969572 - protein, 460 aa, Homo sapiens
SSALRPGMSPGGCVLPTLCSVSAPPLGPQEGLEYSGPRARFWAPRGPTSGVYPARGPSFWGASCSWGPPLLMSPRGPAVGLPPPPMIPRRCSGDILLVTHLSWFPGRFVKKRGSAKNTPSTPTGGGGGTGQISVRTGANVANDGGCPRATTGSPKSTNSRGVTRGALKIGAPLPAGSRTPPTIGANKGAGNSPTRRGRSERGAGGATPRARGSPPAGLALARGTAPAWRGPHTREMGARYRGSQENLATHTAHHTVSRCRPRLCPHTHTHARGGEGRSLGEKNARRGGSAACVEPLVAHTVALSSGNSHTVGEPGEAVLLARFPDTQGGHPLCVCFLCHDSRGWSTRYGEAPHPGGTPQERSTRAQPTGPQHTPTQTLEKATWRRHIFLHHKPYGVESPLAQGLSSELLRVFGDGDGWRWRGWHRWGALHRATLLAQKNLWGFYRGPQDAFVIKKKIGLW

SEQ ID NO: 969573 - protein, 112 aa, Homo sapiens
  misc_feature (17)..(17): Xaa can be any naturally occurring amino acid
MGADENREKLWGMSLHXGQYIEGLIKGATTAWDPTNTTRVIPTRDIFSARKGYRDYFYRDILHADILLWVSLTHVVYRDMFVEQISGERYTRRHCGGIKKMRTHREIVTPTL

SEQ ID NO: 969574 - protein, 189 aa, Homo sapiens
LGTHKVCVTTPKKYTHRSGVVKHPLSPGENFSPPGGINFVLRRNLPKGLVFILPHSGSLTQMSMNPVVGCVAPPIQWGRFTLGEKPGLTTQSVFVDQKGGHTPHQSVFEAFALKPQGEIGVCSACDRLLGPPLGPVFLLSGLLFSLGDPPPLVAATHELVSTPQGESYFIPPHRRVVKPTYCSGESSPF

SEQ ID NO: 969575 - protein, 145 aa, Homo sapiens
MATRSCREKAHEADEQHPLILSQLLREEDHKYCADCEAQGPRWASWNIGVFICIRCAGIHRNLGVHNIQGPNPVQPRPMDSQDKITSACQIWGILKHRLLYEDPFSRGLSKTTDRSQQWNFSSEINMKEEILRLKCHSYYQLRKG

SEQ ID NO: 969576 - protein, 146 aa, Homo sapiens
VSRAASCVVSQDRVFVLSCSLLVCYVMRVAFMPVLFAGLGGSAFVSHSLVLVVVRPQGFVVLFASALCVVMFAALCCVCFLRAWVITLLWVNIQGGVCVSRWCDDRRRGSSHGVFVGGGPPDMVVTLVWLVVVWMSSRYFCSSCVR

SEQ ID NO: 969577 - protein, 101 aa, Homo sapiens
VACVRFALLLSVCCQFVLPLLRRLLSVLAFSSTFVWAGSSRALLWGLSLCPGIFPSRRDFGRPRLWCVCYLVKSRFRLLYTLLAERVCGWMICHVLRDSQY

SEQ ID NO: 969578 - protein, 242 aa, Homo sapiens
PPGPYVQPFSPGSFTLCAPAGREISLLGSPPAGPTLFVPPLGPLSFRGAHPVLDPTLLSPHKTPRVVSRVPRIFLPREFVLSPPARFRGLPPRVPPLRGPALLSPPQTLVRKRARPAVYIIHWKKCFQNAAPGGHRTLFTHREQQGACLRGREISPLFLSPPKRRSPHTHKNTAGLCSRHICVMKAKFLEERRPRKRGNSPPHSPTARERGERERKERERPHNKGSRGVHTPGDTQRERFLE

SEQ ID NO: 969579 - protein, 108 aa, Homo sapiens
  misc_feature (32)..(32): Xaa can be any naturally occurring amino acid
FLVCRRVSRVRQVCVLSHSSLLRVWREGGRVXVRGSFVLSIGRVFVLFFRAGLLIRGLFSLSFVGPLVCCFTTRRVFVRISAGFFSPPSPPSIGAIRGAPRSGVAPFF

SEQ ID NO: 969580 - protein, 137 aa, Homo sapiens
SLSAVLGDARGAHRRTDVVSCYVVFCRRLLMCCCPSPLLWFLSLVRLHYGCAYSLKRHTRCCGPHIISGFPAVPEVLSPSGLPSLCCRCFPSPWPDIPGVNSGATIGRPLGPLPQMGFPAGCPAVRAPRCVPPPMAL

SEQ ID NO: 969581 - protein, 281 aa, Homo sapiens
  misc_feature (216)..(216): Xaa can be any naturally occurring amino acid
  misc_feature (242)..(242): Xaa can be any naturally occurring amino acid
PLFSDERSRRTEETSCVDDLVCVSLDVYDGVIVSLELIVCLCFASESTSFLPHEPFCPPPCLVCVTALCVYNVFPQLYGGPRVVPPHRVPRSSKSGPPYFSGGPAPATLVFRGAPPPPPFGAFDPFSGLLDTQELRPQVAGVRVPSANPDLLPGESPLLGNRRFEDYFPEFARYTTPGGCLLPSPVEDPPRDPGPKYFNSEDEFFSRIHDPATLEXGAVHTTGYTLHLSPSAPRGAPRGDHXRPLCVHNELSAENSHFTAHMHPLRHVTRLLLKKGDPPQC

SEQ ID NO: 969582 - protein, 111 aa, Homo sapiens
MSPCRGSAAGEYMDAVTAQRPSVYSPLTHVAPPIFVTHTHTRTLLTLRFDVIQLPPLPLMAPLGFACPPPWAPEYGTPDTAHRWKSLSEYGVGHWKLILFVHLERERTGYR

SEQ ID NO: 969583 - protein, 183 aa, Homo sapiens
TPPCRTRHDSTCRDGTATRSPRNLFDHRRVIISLSCFSDSLLVEVASPEWGGDIVIHVCLVSPIRHIRSCADFVSPLVTSLAVFISGGNLSWGDHSTKWFLPPVCGGHASGFPHLGKQGLFATAHRFISGVPHFGGKPLLPRGGFSGPIFGGHLLPLAWCGGKVYCRDDILLCPVPLCRGPPS

SEQ ID NO: 969584 - protein, 109 aa, Homo sapiens
ESSHVGVCGVYAVTGFLFRFIVSCLCPFFTASVCPVLVAPLPVLGNTCCGPPMCMPVQFGNPALAPYGPFTLFAFGLAIGFTSSPYSSVILGLLTIPRVPMPMMAPCYP

SEQ ID NO: 969585 - protein, 181 aa, Homo sapiens
  misc_feature (89)..(89): Xaa can be any naturally occurring amino acid
MSQQLFFGILLLLGRCYVFIRMMLLVPPPTRRGCWWVHLHTASHITTLWGRTTYLYLLMWRYTVCYSLHYTVCYSHRWWHNREGRYSSXGGGDTTQEITRRIISLLHHTQLVLLTLVSSRVEYYTGRFSLSAVSLLCVCGEITHLLLLFSLVRRHTQRGTTLCGVLICVSPHPHYSVGVFT

SEQ ID NO: 969586 - protein, 229 aa, Homo sapiens
  misc_feature (208)..(208): Xaa can be any naturally occurring amino acid
MCLTGVLPAVGGPPHIIFSGGPPRQWYHTVVLPRGGPLPRSPSSPLSQGRPFDTSFSKKTFWGNKQEDGLCDTPVFGRESRVSPQNQGQDSCLPLERKDPLAWGKIRKGLWRELTFPENFRLPSPYSLRDAYSPGPREGGTPPRVNPGPQILSLREMEIFSRIHGPRPVEDLGRSTNWVTPPLVTLAPRGRPSRRTLSARCGFPDELXRGALHFHAQCHPSVQYRDLLL

SEQ ID NO: 969587 - protein, 121 aa, Homo sapiens
MGGPAHPAYNRLFCPHNMGHLYRKRIHHTKTTISLIHIPTHTQYSHTTSHPSLNPLTFYLTPKFTFTLNHHLTPQYSNTTYKNINDTRLKHTTNPPPLPPHTHRPYHATPTYLPFYTNNLI

SEQ ID NO: 969588 - protein, 254 aa, Homo sapiens
  misc_feature (159)..(159): Xaa can be any naturally occurring amino acid
SPFLISCILMGLSFCIWVVGCMVRGSFPYRFFVFAGVLSPALALLWHHEAGPKTGALGLRFLTRVPGFIFERQNLMDFPGHWASNQNGLSRFSSGHLAGDGRWPPPWEAPGFTLQGIIPGPSRPHLAPAMPLYWIAPRLTLQARFAELKEKIDPRSGKXAEKMALKFLGSSRWIARPLVDNRFPRHRPIVWLRDFLQTIPPLGSLCSFVDMRPDQFPVGVYPKPVAPEGLLELARSHPDLAPESSQKALMNIIP

SEQ ID NO: 969589 - protein, 345 aa, Homo sapiens
  misc_feature (84)..(84): Xaa can be any naturally occurring amino acid
  misc_feature (106)..(106): Xaa can be any naturally occurring amino acid
KLGLLALIAGDDIGLLVLFHVGVIPSSSHTYVLWPHTFLVMVRIPFVARTRWVLILKSRFSSSTRGAPNTKLILLLGGKVNTTXRWWRSFVVVSHPQTSCDVTTPXGRFLSIRQQTVVYKYMVWRRRYYRLHYIGGGCLHKYGDRFFFIEERPSCLGEKRVPPVWRGVCVGNKHPPEKYLVVSIKYISSLFANRVYYPPTMRVFHTHRLLLVVSQMVGSDTTGFLVGGGGALGRPHAQQRKSYTPVAKKRRAADTGYCASPGGVEVLATTEGATTGGELVLPLVGAHTHTQCADNYVCCPICHIMCGGSHQHNDTTSYHISLVALVFVSIRVCLICCVYTKRAPL

SEQ ID NO: 969590 - protein, 144 aa, Homo sapiens
MGCPPTFSILHLAHKSLKLVLDWHTHTLVVLAQSGKEKALGYCLGRPLGGALGCPRDGPRARPRRFTPWLEIVGANSQIKFETLWLLFLTTHESLPSVAHGEHPLHPHFARTYPRDSLCFSLHVPSWVPLFSLFPPTCLAGLQS

SEQ ID NO: 969591 - protein, 172 aa, Homo sapiens
NLFFPQGARCCVSFAPFFGGGPPSVETSWCWFPHQNEAGVFPLAPVDIFSRASIFSLSHTLTSSLALPTSMWCARSLSPNYDSYRKVFFSSHKKMLFFSPLPPLINGYFLPYEEYIYIEWAPPLHKYIRRCMFIYILRFLFSTKDEIHSHHPPPLSIFLHREENHPPPHNNK

SEQ ID NO: 969592 - protein, 254 aa, Homo sapiens
RVVVVSSVPRASEVGGGERTSFYKECAARFCRGYFSAQFARLVGRLMSVKKRVAPLFSGVLCPPAPPPPRGVTPRGFSGGGALPPPVGGESPLSWLPGWGPHPAVLFFFVTGTHPRTRGGVPPYGATVWCLPPPACGVLEESSPLPVGVVLFVGGYHLGPSLLWLHSLGGGGLVLLVVATPCVAGVLPSLARPLLYQWAFLCGCILCGAPRFRRRTRHRRQHPKKLWGSLPLVLCPPCEVPPRSAPPRGGAPLV

SEQ ID NO: 969593 - protein, 125 aa, Homo sapiens
  misc_feature (6)..(6): Xaa can be any naturally occurring amino acid
  misc_feature (73)..(73): Xaa can be any naturally occurring amino acid
  misc_feature (86)..(86): Xaa can be any naturally occurring amino acid
MGDIPXGGLCYTPHSGALPPFTHTEYERCLCGIKALSHSVPPTVTTRCCESPTGERYGVSLSFREILEKIFLXWGEKKYTHLATEXFLEMRETTAVCLSCVVHRYISHKAHRERDENYNPVEKEK

SEQ ID NO: 969594 - protein, 232 aa, Homo sapiens
  misc_feature (64)..(64): Xaa can be any naturally occurring amino acid
MGVRVVSTLVPPGWCSSPPLGDSICRTSPQGGGSHTFFFCGCPPLFKKPPLSVEKLAFTGHSNXGLMATIFARNYAPPPSIFCKKELVPHSLHTRNTRLGGDPPFSRNAGKTTMGCEILRTGVLRHRAPTATLGALEAHNRVRVGRPQKRGVLEYFFAPHTQEFYKTPRGCYILENLKRFIDSKIFFLVHLRHNSHIGPQAPLELPRPRAYTEVSLGPEFNPQTQRLFPATT

SEQ ID NO: 969595 - protein, 102 aa, Homo sapiens
TRGYAKLARPEPWKESLMGRRMPQRRGHNCTSVGRRGRMSGGNAAADGPPWSAESGVYGDGVNSGGKGGVLTLLVHKVCSFGAPMWLQPLGGSGHRCVRDLG

SEQ ID NO: 969596 - protein, 274 aa, Homo sapiens
  misc_feature (252)..(252): Xaa can be any naturally occurring amino acid
MSRSCPPGVLSEVPLCPRQSWGELLHGMFPTPVPADSPGDSGDVFSPMGPLCLRRVFSPKGSWCTVGALSWRRFALSLRSKGPTPRNLGLPVGPGVSFFSRAGATRVGPPGAPIWFWGPLHSGVFSIRVPGGGDLVEEVTPWHVALAPPRFSGRLLAPLGHRFHKSWVAPPLGPQFFDAALLGPHGSHPLPAFPFPEICGREGASGGPPKGFSNFLPGTETFHGKPPPWAPSISFCWAQGTKPLFGCHTPCXRTHHRDALSPLSCFTQLSQAQL

SEQ ID NO: 969597 - protein, 288 aa, Homo sapiens
PLWGVFPTGAISTGATLCPQRGGCWGVLSPVVLSCKMVWGQPRGSVSTQQGVLPPPADISRQMSCRSSLWGPHNSSLRKKELGVVRHTKGCGERVFWCRPKERPVPTIGAHPRNMVGAPPHMYLPGCTPIIVAHPQYLFGGGKPLPLKKTQRGKGGHIRTWVVPSERKCETESFSTVPGHRILATGELRFPPIVENGLVRTHIRCHCECHSLKRKSREERPNTERGQAHNSDTARLAHMKRRVTPLRRKHTRLAKRHTVRVSPAYVFENIACHPAIVTTAIYTYSSSR

SEQ ID NO: 969598 - protein, 395 aa, Homo sapiens
FVFVGLVWCDVGVLFVCSSMFCCRLVVGVSVSWLCLLVCRGVFWLVCWLVCCVCVCAVASVVRVLGRVRGGLVERIVFVPPLSPWKPLPPGGCAPADRARGALSPSAGFFGSLGPRGGVITCFSPPAALVVCPPCGSSSCWGPPPYCRARTGAAPTETRARWGWSPVPCGFLPPRGCFCVVTPLTVVSPACFMGAFFWGAPPRFFWAPSTPVGAQGVPHVGVPLSVVAAAAPSCLPRSWGARTDKWGFSPGAPPRVSATGVSRGVFSLIKGGGEHPPRVLFWEHISACCPHRECRPPQDRGAFIIMSFSRRPHSYVAQGRTLSVAHTFLSEGCFSQARFFLEAPPERGVYSPPTECPHTQRGVYTPAHRVCVCVDVLRAHSYVRAPPHTLLWEHA

SEQ ID NO: 969599 - protein, 115 aa, Homo sapiens
IVCAKVFLTGVYPTKALLVNTIVRESDYLRGDDSPGGFPPENLIVISPLGGQRSLKGKLISVPRWFFIKHEGDKKHLIRGAQRNFLLAPQDTPTHVGAPQKVLLQPGGGNPNAPL

SEQ ID NO: 969600 - protein, 119 aa, Homo sapiens
MGPRISGNILTPEFGTCDHATRLVTRFEHGAPIPPHAFHLKGIPHGFAARTFAESFFRVVPPFVVFYLIYTTGGLERVSRDPKRRESTLPMRNEPMRPRIPDDGSLFLKDLFLEEESAL

SEQ ID NO: 969601 - protein, 123 aa, Homo sapiens
LPPPARVSRMRLLGGARTHTPPHRRAWESKYHSTLSPPASLFFPPCFFPRASAALLLSCLSSRLFHSSCRASLASRGDVCPPLFCVYASVCSSSPVSTDMILFRRALPRAHSRVVERARQLSR

SEQ ID NO: 969602 - protein, 391 aa, Homo sapiens
GFCLYSRSPRFSPCQKFSLGEFTACRMGSRGRLAPPDHSCGYPLGLFLCYTPGGLFFSLQDPGGALCGPSFAPGDPFWAVCVGAPPRSIVGRPPRVFFCVPADFLLGVFIPQLVFFARWGALPHAAFVAPQFPPTGTFHSGGGPSLGGGCFIWPSPPLPPSFGGAPPPHPTAVFISVLYLLHTSSREASLFGRIFPLCPSGHCVPQFCHGPSASPRPLFCLVALEPHSFMRHTSQDTRVCPPRPLVWGGPPVPLATIPRFGDKWLHHAQTCGFLQIYLTLLARPNVTHPRGFGITRPPVRSSWFHPPRVSLVRRIHPTREIGQFARYTSPTLAPMGLPFILPPHAPDTPGFSPSGPTPDYNFSHPPPPPPILWVRGFPVGFPGPIKFSLPP

SEQ ID NO: 969603 - protein, 161 aa, Homo sapiens
SASSGEILAHAGEQTCEVCPPHLPRRYNTGGTHSNNKHSGARENIGAGGTVDNMRRGGTCAPKIGDPVARPNVPGANDKVTRPHKMAAIFPQKVPQRFPSGGKKGRKLGGNYPLGAAPRGGSSPREKRGKVSNCVDPLCRALARGIPLEMLRALRRPPNCG

SEQ ID NO: 969604 - protein, 251 aa, Homo sapiens
WESPVCVEGCCFSLPGGGACLFVVAVSSTHLWCWHPVVGCAPCRGSSFFVGSCGVMGWWSSPPCSYLSLWCVCGCMRSQNAPHVWWFGVGGPTKKVVVLSHAAHSSLLSVEIICVGRRCGGLGILVVARALLYVFCPASVPCLHVAHLAWYTTLGGVFSRRSAPLCFSLLWATPTPRGGEDPSWREWWAPAVITPRCCLPPLSLRERDRVCAPLPLPHTRSPHTTQGVAPPRDSVGRPHACCTPQFFSRSV

SEQ ID NO: 969605 - protein, 428 aa, Homo sapiens
MIWVASVLRAVSCCCAWHSHACIFAAVVVIVYSRRARLPRVWEFVISALLVLLVCSSVGPVPSVVFAPPESYPCGGGHDSTLSLWVCLPTLIGCGAPLWGAGSPPLVSMVGGHKLVSTHEWGPPYLAPPCCWIHSTARWWVVSGPRGTFSRGNIPCGSLFGVFCDPRFPHCRVLPLGVEHLQTVGAALVVVGDPPCWALGRVLTAESPCGITTGGEPPHRRAALLRPPGFGAVTSGASIAPGRILIMEVTPYAQSVSYGSTLCVISRVPCGPSPPVCPQPTGPPLELLPDPVMTPLAHIEMISLSHPLCHECPTATPLRNLGRKGSSANYVLTAFNNRISPPRPLRPYFLQIARITPNHLVNTLIPPLYPPTHRSYGTTTLCDRTSPLRLYTTYCCHPDPTSNLPVLYEFVPAYPRFRYDPTRYHLLM

SEQ ID NO: 969606 - protein, 107 aa, Homo sapiens
MGARFSPQMLLPGKALRTQLDLPRFRIYSHPSALESLALIPITGPLKTLLPDWGDSPIAPMSGPGLGSQIPTTSGHQHLCIEVVTNPAGFLTIGADLPFAQGLREVI

SEQ ID NO: 969607 - protein, 283 aa, Homo sapiens
  misc_feature (216)..(216): Xaa can be any naturally occurring amino acid
MSDGRYHVLWAFSGVLLDVRYLSCCMYIVFDRASVCAGRCCCFDHCRLLVLCVCCYIAAVSRQCRGSPSPVVCRSDGKLGVHSSSRCFYAVPPGAVIPCVPPGAPAGPPVDLFVGATLIEDPLVVDTRKYRRWVAPVSRRSFRPGVFCVGDLTRGFLSLSRQWLLTMIEGGPSFHRPLSLCCRSSARLYAPCVGGCYPSLPPLPLCLQPLRLTQVXLRAPSFLLCCDDPAAVLSPRWCRPHLSWAPPQLCHTTPRVCMGHSSLSSQGAHVRKQAETRHLGFSP

SEQ ID NO: 969608 - protein, 264 aa, Homo sapiens
TLSLGSVVDGGEWRSICVCVLSHGATTVLRVYTMVVLSFLHLERPNGRGNVCSSRRCRHGSWTRPFREFTGRKRTGVRNRSCEPPCDWPRAAAVWPCPPHRWRYSGPGRHWPNPLGTISAGQGDLEPGNMYRGYSPRFPQGPPRPKLPLRGRQCKKIKKIKEMRPQVSSHLNVWYRRNFHYRRRRPGTLNPQMAKRPKQPIPPAENSSAPEAEPGAGLSKCPALPISTHHPGLVIPPEEIWNSPPLRNGPKIGAEDLKCLLFAP

SEQ ID NO: 969609 - protein, 229 aa, Homo sapiens
  misc_feature (220)..(220): Xaa can be any naturally occurring amino acid
LATCTLFVVLIIVVVRPCVRSSPSVREMGRLLLLVCSPVAHTLVFFPRPLGYASYRAYCPVTASPSAYLATCLGHPSRTRYTLCGVPPPPGSRGGCPRGRSHSVKRAPPSRCGQPYPVDTCQHGPNPSHSPPFTSSSFLGHPGSEVFLVRKVKVIIWIDWTSALLRGPYWLRDCEFRFKQLLSPEVLLSVTGEPYGRPISGPKEVHGMAPATVRTTTGKXLEGIFHEAP

SEQ ID NO: 969610 - protein, 301 aa, Homo sapiens
PRLSLSGSVLAWLSVLCFWAPFFFPCLLCLVFSVSRCFFLWCVRCSFCLARVLLLLRCGSFLFRLLLLCLGFCFFFVRLGVVLCCLFLVLFLFSLVCSFFFLCLVCVVGLPRCLCVFFLLCLVCCLPCLFSSLSAVSVPVLFSLLLFLFVVCLCFFFLLFVLVFVLLFVAFCCVFGVCAFLCCFVVFAFLFSVVFWFVLFFSVAFVFCLCRFFRLFVFSPPVGRSNYLSPGLSFLVGPRSRFPPGGTPPFPPLFFAPPPPEVLLTRGQRTSVFSSEPFHAFGPPGEPRDSTAWCFRTVPLG

SEQ ID NO: 969611 - protein, 103 aa, Homo sapiens
  misc_feature (79)..(79): Xaa can be any naturally occurring amino acid
MQRPFCGVSTHSVALSLVRYGRDLPLCVTLGGKSLSREECSLESSVGVEKRVNPSGHCHCLIRTLSRGLFVGPETTVPXCGSRGLSTSLYMSPGLCVIFLGLP

SEQ ID NO: 969612 - protein, 168 aa, Homo sapiens
  misc_feature (128)..(128): Xaa can be any naturally occurring amino acid
MFLVLWFLFLSGPTCFFSPLAPLLVAPCLVFLALTPADSPSASHVFPRPVCPLKPGPLVVSGPRVWDIPGDHGLFVPHLRHFFVQPTLPESRVTWPSMAPFANGTSMPVKSRFTVLPGPHALIILAHXGGAAWMERIMAPQLYVLFEKGRYPFPVSISVAQIRVYGTL

SEQ ID NO: 969613 - protein, 485 aa, Homo sapiens
MSLVLVVFSAPLLPGGAPKQSVCFVRVFPGGGLYFLRDISVVERVSPPCWLPTLCAGHKLCRRGGSFRPREGVPPSFSDGWGGPHNIGWCCRLAPFRVAFFCPSALRCVVAPAHPQVWLCGASLVVVSPPPSVGEWFSGRVVPSIHLVGRRTCMSRVCGGRRPPCVFHEYVGCVLFGVVGGRSCFCDQQIMIDYLRDWGGDRHPPTQIRVGLLRIVVVRRKSVHPNEECWGAARSWFVIIISESWAADSGWLSSHCCNASECGCAAVAHSSVRDCSRLGVFSPRVWGRIVCAARRALLCLGESSVCLRATVLLPARGGLSLSSVLFVESVCVSPPTVVMRSGARYLASSPQICLRCGAARYLSLSVGAPPAPVLPVSRHSRLDAPVLCATLAAHRARPFAHLLSLSRPRESLWAAGGGALCLSVRSSCVLPHREACLLRGGARRLFFSERGPRRVLSASHYVCLPPLSSRAHPGPPDKFPHTMFF

SEQ ID NO: 969614 - protein, 199 aa, Homo sapiens
LVGAGRPGLPPGRGRKGILSDIPAPSRCLGPHRYGGVPGAASRGASCPDFRGLCVRLAADLATLGALEQQREAGAEVLSAGDGPGAEEDFLRQLGSLLRELHCPDRAAAGGGDGLRLRFGNPIPNFTFFSFSSQISKPPPLLCLPLSAGAESSGHPFLKGYWRDPACSNNWTLPSKPWGCPDLHQGPPPASCCRSCMLT

SEQ ID NO: 969615 - protein, 111 aa, Homo sapiens
MLMIVVFVLYVRHTEEKFSVELILLLGGYITVILALVVGIYDVCLIMIWGSVSILSYIWGENLASSSFGVHCFFYVWWRSSQYGVYEFYIVSVRGGEPQLCIIRGSSHYMC

SEQ ID NO: 969616 - protein, 97 aa, Homo sapiens
GGVVVVLAPVVGSARWWCVWCRRYVVPRCWVCVVLQLLCVRGCVVVVDGVVFYQRLFVLWVVLVSMLCNVVLLVCCVLLSTSYWGGWCSEVDGLVGE

SEQ ID NO: 969617 - protein, 136 aa, Homo sapiens
  misc_feature (87)..(87): Xaa can be any naturally occurring amino acid
MVFVVAPNLPPKAMNSSWRVYQKIPYRKGSFLFRERAPALCVVASPVSYHMEEVVGPKGPAIGFLWCFLWKNFSTGTRRGYKSTESXVGMWPRDEFHHGGGNPRVKLYLYALRTWAVARHTLVVLTTTEFCWALTR

SEQ ID NO: 969618 - protein, 102 aa, Homo sapiens
MIKGPWESHTRFLATCPWTLGFNGHEECPVAGPQGSQRKTGLAQGCQCPCSCPLPQLPGAEAASRPLVRKGFRTPAYGMCSPSALFPSEGTWFCPPSLCLHC

SEQ ID NO: 969619 - protein, 196 aa, Homo sapiens
IFCDRSVSSISVINPKYNVGAGEKAGYTSRASFFIFWGEKTPSAWNEKKCVTQKKGGGVFCLVKYCWDETFGFFLGRTGSILGFQTPTPVECRTRFLSTNKRGEIVCRQKRFFGAPPFGAFNCGPNPPPQKKGGVVLEGITKGDVNTTCLVVVHNTNKGGAYERHFHTRDKTTLLGLEKFAVFGVFSSDNSVVPVL

SEQ ID NO: 969620 - protein, 133 aa, Homo sapiens
  misc_feature (36)..(36): Xaa can be any naturally occurring amino acid
MGALVPTPPERVRTPKRGRLFEGAPLPRAAPATDCXPPPVFENSLALPGASWAETPPPPRGGRCGAHPPAVVASPKRAPLQQAMPQEKVGGGLSHKRPPTEVGPPERGGGGPPPPRCFCPCVGGPPSGPLLFF

SEQ ID NO: 969621 - protein, 121 aa, Homo sapiens
  misc_feature (39)..(39): Xaa can be any naturally occurring amino acid
  misc_feature (65)..(65): Xaa can be any naturally occurring amino acid
MRDTQNAGSHTLAPHAEGVSTLWSVFCVCFHASSSRHPXTRALSSLNYREVETTCVTPLSWCPLXEENTVTHVKGATLPQEFVHMCRFIVETFTGPRETSWFLCLAQVAQQFTHKFVFTES

SEQ ID NO: 969622 - protein, 291 aa, Homo sapiens
KFGNPRERFHGQNNIAGLQAYLGNPILQGPGTGGHFQRTSGFPGTWEYNKRRKGKGEPHMGPNTPNPGPTPEATKGPRCVNHGVQKGPPPFQTAAHEFNGFKKRAKRPLGGHMAHSLELGASHTGLPCLHIPWRPLKWVVEREWRDYNCRPISPQMDPRTSNMRIPENKNDPTGVKRREYFPLLIENFGWVESGTTFHGRCPHINHKRSSVLRWGIYSQVPESRFLHIFFKMRLSCVDSGAHTWRQRRSCLENIFGHSATSPDICVRSQPTSDIAFPKGIPKISLKREVLC

SEQ ID NO: 969623 - protein, 138 aa, Homo sapiens
FSGTRSQIRPLGGLAHSPRAACWDRSPFWDESTPGARDWHRALFEEFSLALRAPPGARGFNPRWSTTTGVTSRYGRPPYGRLILKGLGPPLYKKATRFLATHMEYALAFGVNPGFPGESCPPGGVNFVRGPQTRLSRL

SEQ ID NO: 969624 - protein, 194 aa, Homo sapiens
GYGVMGKSSLLLSTPHQACAKTHSRVARDTHTTHTRPGAAPLLGGEVIYYRGEFAGWCSHRREKERPHLLGWWKIPPALFLSPRRGVGEKTPGEKKIIKKSIFVVARPEDETPTHRRVVCISPLWNSVVCVRRYNSSWAAAPHPGGRVVSPRRAGESWGGRLTPTTLPPGSRRPLLSCCDYFCVIASQQFFSSG

SEQ ID NO: 969625 - protein, 306 aa, Homo sapiens
VARSRRSVELTARALLCGRVLFIARDWLVGCWRLVAVLHRSGGFGRCPGVACPPRSTLLWGNPSGGAVGSFFIFIGPRGFLHEWVPRWLRSRRCWARGPPRWLLCPARTLFLRGSSSVALYITLAAWCAPTNGGGYEPLFSTGVHKRGLFHGYPNGGGSHMSEPPHNAGPRRDPTKGATKEPRTFLGGTPREHNYATWCRLRVPDAWPDRAALNPVKEEVSLPSGKRCPVSGGSRFKVGKSPPHVGRVVKSHGGSLRRILKTSQETVDSCAAHHRVYILRGSILSRGFIVGAHTEGAHPQGSREAV

SEQ ID NO: 969626 - protein, 114 aa, Homo sapiens
MALLPLKLFLSGHVFFSRVYSAEFSLTERHASPLSHLVGNRREHGHEHPTAHPHENPPLNCAFHAFPGTVLGSKGTEAESLVSLFTGGPTLVSHLWEIFSWHHAILNIKPILSN

SEQ ID NO: 969627 - protein, 71 aa, Homo sapiens
FFEQVPRLLSKFFPNPAPRYGLFGTWQTQLIEDSHRSFMVVFLGTHCHEIRTSFAKRRRQILKALYSQRSA

SEQ ID NO: 969628 - protein, 422 aa, Homo sapiens
  misc_feature (285)..(285): Xaa can be any naturally occurring amino acid
MLAEMRVSFVVVCRDLLLLSARSFVDAAVRMLGDHSMRIVFACFGEWLVLVDVVFFLFVAGLFLVPIQYCASPLSCWSVRLALLLACSCVVVLLMWVGVVLSFSSAAAVCACNITREPSCFRGNPVPGFRPGGGTPQFTTAVCFETLPIRKRSHARGDAECPGPSRGPFLGPYGPLGGPRNYNPGVSTQPRGEHTLYVNATFRGPYDLKVVHTYIGDDTGFGDAQIMHTGWGIPAFRGNSPRGIYIVSETHTRRSREPRVLSRCALSAELLISSEYSYSIKGFLXGKPHKFMKCLQYRDHTMWICEREERKHPIWVALLKRSPSNAHMIMCHKLNNTILRWPTENFILYKKRRTHALKHSRHRDKKPHVEVAHGHVVLRNRKPHMRVNFRENTFNNGLSKVMQCILRTKGSLHLTAPPERDS

SEQ ID NO: 969629 - protein, 138 aa, Homo sapiens
MPGGEKLHIPHGRVHTARLTHGGRPLRRRLIMMVTPRESCMLLRSPRQPREDGRYPRAAVREGPSMEQPTSPRQSSFRAPMGVMTRWQTERSSKLSFLTHGSIGVGGRTALKYVLYTHTHTHTHTHTHDAFNKDELVF

SEQ ID NO: 969630 - protein, 78 aa, Homo sapiens
PRRSPRVAPTKAYTVGGNTRDLGTAAHTHWSPLQKVEHRPPAGSCCWVTPSNPCDTPQGHTWRHLFLAHLVRYRKLSH

SEQ ID NO: 969631 - protein, 296 aa, Homo sapiens
MEEGRLVSSPNKRVAARLCDIVWGGRLVGREYTLRGFCGGYQAALFCCFVVGGTTRARGGGERGEERCRYCVDGCSPRCTAVERMMLYDTAEERRMLYYSREDCGGTQGGRNTLWIAQRERGQHKSGESHRGNTNMRSSPPVRLVYERSIVCCHTSGERLSRSTLSAAVGSVLCVAHYIMCVRKCGRTLGVFLCHMGCEKKVSVCVVWGRLRTQERSRGVVYHTLSPLSHIVSFVLWCVTRAEIVAGGALCERKRLSPYKVYFEHPPSHKFVPHGALFTSHMEREREEKHIYMGAT

SEQ ID NO: 969632 - protein, 150 aa, Homo sapiens
APDVLQTSLPEGVFCLLCGSSPGGFRGDIPHSVLTHTHGGYPRCYLRPTFIGAPLFFYRVGHHPLFVGHPQECLVDPRDISPESVGGDTRVSLRRNFPPPGEKILVLRHPQTGGSSGGEPRPTMCVPHVRIFFAATKVVAREHHTTRGEI

SEQ ID NO: 969633 - protein, 118 aa, Homo sapiens
MSHPPHSESPHHLAQQHRDPSGFWHSLCRTEYVWGHSPRCEETTPRHGVFVDHTHSTGTPTRGHNISESHEGTAIRTKTRANNCAAGGYPPRKHSFKTAYLRLSTFCFPPGPSNLEVL

SEQ ID NO: 969634 - protein, 104 aa, Homo sapiens
MLYVRLNILLFLSSSSPILGNPLRPPIQIYTLLICHHTMMCDQPLGSFTAHIKYLFLASSVLSLEADALYRTMTSAPFHGQKIATGLMCRTTSTLHFLMALRTL

SEQ ID NO: 969635 - protein, 79 aa, Homo sapiens
DLANKGGNRYGPGNSACIPLCMPRDDLGTGAQRGPTPPEGKGGPQGNSGQGSRARCPFAENSTGPKEVDAPPRLGNGWK

SEQ ID NO: 969636 - protein, 145 aa, Homo sapiens
MLCLLLLKPSPLPLNSVLLPFPISPPFSSPPTHQAHEGMWMLWTKVMKEAMTRMETGKVDFHGVMWCLWLLSHVACNKFLLGEHVEQTATTLGSALPLHPSQSLPFPPASTSPHLSLSITPPLPTPPPPPPRAQEYGPSLQIIFH

SEQ ID NO: 969637 - protein, 234 aa, Homo sapiens
FRGRTNHLGQRLAPPPRGVPGEAHRHRRQRVAAATRATPGRFKAPSGEREPPTGVWPRANIHPKGEGWRPEPQNLGELFLSVEIIDGKARGNNSPTARCPSHEPQRGTRAEKEVTACHKLTPPVPPQEKPSGPPRKGRDHSFCLRETENWANPAEPEPVTARSGTSIRKEESSRSSPRGERRISQAFAKFSVWPVPQRPASSAYGPKEPQEAAEQDVEKKKLSPPGDLGSVGQS

SEQ ID NO: 969638 - protein, 274 aa, Homo sapiens
PPTGAYRGKNWGPADSVTNGCPWWGLCPIRAPFSIRESFNHPVKTLFVATGRIHKFVADTRDNWLFLPASVFATSFSLVDRWCFSPSLCGVSHVPCDTPLVGGPRVWHPGLSRLCLLVPHDVFCRGCLNLHDDSVANLTSNPLSNTGDTGEPPVGSHGGGNFSDGCPEGVLTVQIAAQPLHGGRAHPPSNLTKRSHTHERFLLPWIEGAGSWRATPLHSARVGKRAFPRREVSKPHSCVGGPTHTLRPRTGRGFKAPHGLGLHSATGGRGKGLN

SEQ ID NO: 969639 - protein, 141 aa, Homo sapiens
ACHKFLYDEDGMPSPPPRKVLSSQTRGPTHGRVPRGDPLLESLLENQEWDGSSRSKRKGHTCAQGGNHIGRTPHPQRATSHPLGVPGPSAYTGPRGIAAGASLLKMWNCTTLFPRRPRRPTRQKSFEMLFSHTDLHSWRHE

SEQ ID NO: 969640 - protein, 219 aa, Homo sapiens
KVWTPSAYDPALRGLSSCFCRDTRAWTNSKAVLVVPMGLLSPHLTMGPHSQLISPSQAAQSSFGNSLQCTYLFQATKPPSPNAVNGHTFSPHSDTGVPPQPGGALSLAQSRWNNANHADWLLRLILFAPHAPPRLCIHAPGAPCLPPSFPVQNAASTEKSGFAANQPTWPSAPLHPTQPEPAILPHSDHQIIFSTPHPPPHSWVRVSPVCPRPIKSTCH

SEQ ID NO: 969641 - protein, 117 aa, Homo sapiens
MAPFPRVHQDPPGERTGGEKGKGGEKSPVFPWGVRPYSGGIAPNISERVFFPNILGGIYGWTEKRRRGEKEDIFSLGDSDLGYTLTQWPRPPRAPPNEESFRPRVYRRNICVQILSL

SEQ ID NO: 969642 - protein, 134 aa, Homo sapiens
SPRRGRGVVVACPPRRRVGRPACAPGGVSLCPWELPLFVCGSAPAVSRAWRARRSPPPARAWAGCRGGFCVFCVFDGCGGAEERWLWFLSCSSPPPPRRRWGVAALSLSFLSPSLSIFALARALVSADAHRSRL

SEQ ID NO: 969643 - protein, 71 aa, Homo sapiens
APKKGRPPKGGFLLPSVLREIVITPTERGAPKQKWPPPNSSTHNLVVIIDAPFGECNSAYLLLGRVMTISL

SEQ ID NO: 969644 - protein, 312 aa, Homo sapiens
MSHVSCVGIIVVTCTVCCPGSCGLFIPRGATRVWGCATPGGVPRPVWWLFSSVFVVPRATECLFSVLSRWSVSFVVGVVSVRTPWCFLGLLVCVSVSSVCCAAVVCLALLLLCSAHVALGLSLGGFVSLVLLVQGLIIDVCVWSSHRLSHYSTCHSFAGVIVLLSRVPHTEWCGIVVSLAAHIMVYRRGEVEIVSDLRYVCYTPGVSLTLFRVAVPTPPAKEPHAGRLTVEHSGAGGPVSLTSIQALVRPTGGMRVLKGALVPSLSSSQGAWKPTSTHHECDGFTRGRLYYPSLMVCLKSIIELLYEKKDKK

SEQ ID NO: 969645 - protein, 82 aa, Homo sapiens
GASCSRFVVSFCVSITCSASRDDGCAWGSCASLKGWSRWVWFVVTPSTVSWFGFFCLMFFGDPVDETPLVFFDDGLSLSRMF

SEQ ID NO: 969646 - protein, 86 aa, Homo sapiens
RDTGGGHRDPAVLYSRVFIIVRGGDTFVTRETFVPFGLLGAPLLETGGDTRTRLVYPFRVFPGILRNHPAFRGVFVLFWESRPPPF

SEQ ID NO: 969647 - protein, 189 aa, Homo sapiens
  misc_feature (138)..(138): Xaa can be any naturally occurring amino acid
  misc_feature (142)..(142): Xaa can be any naturally occurring amino acid
MTRSVDIPRSSVTSVSLPSAVGLRGDTQRLRVLKRVNLGDTLGASELGHKGSDIESLTPHTLGATHTQALFSRDTPACETVVSLSTRIGVSPLSVCLFSERGPHSEFGLTGHIVYIGEFSLHRREGHKTHLLNTRAIXSCVXETLITSHTRPLVGCSQAAIHRAISRALCGLAHTQGAHSTSQEFWEIL

SEQ ID NO: 969648 - protein, 80 aa, Homo sapiens
PGILSHEEGQGHTTFPQFRGPRALFEATHPDLYKDGADLLTQAGCTFEGRKSESPQEESALNIHFVSSRLGESGNPPQTS

SEQ ID NO: 969649 - protein, 225 aa, Homo sapiens
  misc_feature (36)..(36): Xaa can be any naturally occurring amino acid
  misc_feature (106)..(106): Xaa can be any naturally occurring amino acid
VVLLQLCDHIFRPGTQDTWVGFSASGNHKSAVPLFXMTIEELSPPHEWGGFYIIRQSRTSSSFLCPTTRRVFLLVGEQAPVCPPQKKVFLHHRRTIVGPHSGKFHXTGSNVARRRNMIFSFATQVRAPQSPPAKCEGVSCPPQRAAAWENRRGRVFLSGREKAPSPPWRSHKKGSHNPAGMWGPSASVEPPKESCRCATEAACAKTPWGAPKRAPQMGFGGPLTH

SEQ ID NO: 969650 - protein, 166 aa, Homo sapiens
MAVPEWIDARGLVGFCCRLFGSDCAGVGAVAGVVSVVVVGVSSLVCVFLLLRPSVFCFAAHQGSFVGGCATGGGGVGHGFGGVCRMSLSHVVGSFSLFNMHLSVGGVVAAAVGVSCILVWGSLHVECVCERVFARVVRVLRRVFVRAHCVCTLLARRLGVTHRSVL

SEQ ID NO: 969651 - protein, 164 aa, Homo sapiens
  misc_feature (87)..(87): Xaa can be any naturally occurring amino acid
  misc_feature (114)..(114): Xaa can be any naturally occurring amino acid
MCVCLVWGCDNTRGGSTRRDPTHPLSEAHADTTSVYDRKRFYNTHLAKARAIIYHIYISHICVGAHHIICVGHTRGSTHALFSLVGXDIHTRAHISSHIFSGGGTHISHTHIRXVYTQHPAQMLWERHERHISRSGGGTPRAYIYKGCFVVFLHTQSYKGLLHA

SEQ ID NO: 969652 - protein, 99 aa, Homo sapiens
ACDEMPSFGEGLFPASLLKKEVSPQRDEPGGEEVATRAPPKRGPPRVFPFGAPQRKKRRPPPLIGEDSPGGGPAGAHPRGAPERSLGTWGPPGEGAFVV

SEQ ID NO: 969653 - protein, 75 aa, Homo sapiens
RDKSTPRRSPPQEIWRGKGCVPPPAQHEVWSRGGERRNFEKISAAPDTKGEGIGRSVKKGKGIFCKMAKRGVFQV

SEQ ID NO: 969654 - protein, 124 aa, Homo sapiens
RRLLWCCSAAVVIGARPRDCWGVGGRPHVGSRVSFAALRRGPALFLFWVLCGPRCFALWGVVCPSVWLLLSVAWFMGSLVASFLLLMLVWGCLYSLWVFPLFPQFRIGGGLLGGANLVVADRGK

SEQ ID NO: 969655 - protein, 103 aa, Homo sapiens
RPLQAHSSPNGGSPGAGLPGHSLWPPMGMKCTRFGGNDQVKKARIPLGGGKFVIVAGLAGLGSLLLVWPLRVVTDFYNPLSALPTLSMSLALPLFNWLGTGLP

SEQ ID NO: 969656 - protein, 320 aa, Homo sapiens
  misc_feature (64)..(64): Xaa can be any naturally occurring amino acid
MPGCPPITARSERVKRLMPRFNEQGGVSPGDFSLRAFMCGGLPRGAKEEDVRFLGENLGECTRXLTIPRGTQKVKSRNVGTPNGPRGPLPPYPDKAFLEALGSLGTLGEPLEWRGNLRKDTTPRSPGGEPLSLEHGTPRNVFLWELIPTGPAYNPVIHNPGHLAQNVWEKGSHARETFWVYLGPSRWCELVKNPRPQWLSHIGPLQNISHGETHWVKASKLAPKGALESVNTTPQCTSRDTHFTHRMAPNFRDLGFPLQQAFHMGQSRGIRPKEEPAKPRLCPQAFNGFKEIHIRMAYATAAAPKPPRKLQEAHVKSEIR

SEQ ID NO: 969657 - protein, 86 aa, Homo sapiens
NGVGMLQEENHSTQGTGWKPPPQSWLTQGGTAGPQSATMGKGQHKGIENCRGPAVDGLFNLRGFKHAGKLTVKATVCPRCYTTSPR

SEQ ID NO: 969658 - protein, 253 aa, Homo sapiens
LPPAVSAGYPHTFFSPPRGGTRSLLCPPSFVALIFLYGDPTLSYVGTNHTAVFDSPHTYTTSRRGVDPPLLLLQQFFSRDEMFFFSGDHTTRALSRRVYISAPLSSLCVHSPSLSQLFSLSLFSRGGATHLSLLVFLVSFSVAHTHTAVSLSLCRHTPRVCLSLFVLSEYSLSRERRSSLSRGAPPSLSVCGDFCGAHTQGRHTLRLFFLFWPAVFSPSPLSLGERWSPSLSLRPHSLFGVFFFPLFFFLLFI

SEQ ID NO: 969659 - protein, 135 aa, Homo sapiens
ARPSWTWVAGTPGTLYGFGPRCSTPSLPHVLCGDVSSPLKNSHGGGGVLYKAQDWPHKPFCWATWVWLGASFFGGRFLPSPDLNWGLGVGESKQPWATGPDSISTKKILKLGWQRWLTPVIPATLRGFKGKVESP

SEQ ID NO: 969660 - protein, 291 aa, Homo sapiens
LGVRASSSLFSLLVVSQRAPPGGPRGEHTRGFRHMKRPLCEYYFMMRALFLLLIGMNPPGGGLPTRAETRPSFWGEGGNICSLRHSRDAVGMMAARKAVAPHNPRGVCVWKNPHRRRVGPRGEGNHRVGQNTTVVIRAPPNMAPRKGAFSPSRAPDALLPAPPRGWGEFLAPQREWGPPPGGAHISRKGKKVGAPPIGLLLGWGSPRVGKVSPREVGPPWVEKQRRDGVSPSVEPPGAHGTERVGYLWWRGYNPRGGHPRGGAPPPGRPLEIGEHTHMGREKRQRERGESL

SEQ ID NO: 969661 - protein, 124 aa, Homo sapiens
MHGLLWLEVREAHSPAGGPSLGNFLSGCEFAPLFFFVAVLLPPQTLGGWLSRLSLVVFVSFSSFVLPHAPAVVVAPPHHMFVWRARSCSSLYTSPLPLLFFLRVPARHQEIFFQLCTENGRTVV

SEQ ID NO: 969662 - protein, 152 aa, Homo sapiens
  misc_feature (140)..(140): Xaa can be any naturally occurring amino acid
  misc_feature (149)..(149): Xaa can be any naturally occurring amino acid
WRPPPRPPPWANGPHPPRMDHSGLFPHPTSLIPNPMGGNNWRKHEGEGEEIGTPRDRFPRRPALVCSLEEDNTLCIKEEIYGVGNIFVHIPPHCIIFLGTKKCFRGPTPLFMKRILRGEDTPTPDLFAETLVFCVPNIFXDHFTFGVVXDTQ

SEQ ID NO: 969663 - protein, 122 aa, Homo sapiens
MAGLPWGAHAEHFGPQLRTAHWKWSVSLLLYSWWPFGTIVQLLVLGLSPFSVVLVPVCSYCAFWSVVVTVVLISLRGALGLCALDADTMSAASDGQQLLVRRVGASHRSLVAPLQSSLLCWS

SEQ ID NO: 969664 - protein, 114 aa, Homo sapiens
RPSHPELDRLPLWVGFPSQPRICGQSIHAHPWAPSIFPYTFLAQPGAIAAPEAPYTAPSPHKRFDGVYIAPSSSALIPQLYFSLSSFIILHPRNAVGAQATSLLPPVSIMCWRL

SEQ ID NO: 969665 - protein, 148 aa, Homo sapiens
VYSNPCIVVTSVAVFPEMERARVSAPLLLRYSCHRGNIGALFFSPIGAHEIFSRGEPPLVGPYPALCCCNLALTSPIHFVPGGEDYPLVLCPNFGGSHTRAVCSHSEEEVPPVNLPRTMCVPAVFFLGAPFLGGAFSPFAPPGVAVGI

SEQ ID NO: 969666 - protein, 259 aa, Homo sapiens
MGRIAWLSRMVPRRNVFGYVLSPSAPIVGPSAGVLTFSEPHVILSPGGPLRSRHVVHSTRWMSALSSLLLLHHDRLLFYWCLPLFSHMPHSPLVNFTLGLLSYSERPFSLSRFDVNPSDSGLSSQDSINALDRRTSEQVAPTMLIWSHPSHQSDVSRHVLISGLLCNLCQPGCTTPRTPLITPAIMTLGHNMIYLHTSRDPPYPLRPCRRGVRTSLRLQTSNTPQAPSPYFFIAEYTQTLIIINTPHPPTNSFLGNHNI

SEQ ID NO: 969667 - protein, 372 aa, Homo sapiens
  misc_feature (305)..(305): Xaa can be any naturally occurring amino acid
ISTPPLVCPSCELLFAVFRLSPSVVTYAIISCSKDVPHNLVVYQPPVLWWPPVPVSPGGAARSSSCCLFSLGGAINPLVVLPHTPVWGSVLYPPRLAIYYPPRRCNPKIFWGDAPSYRMGGKGPPTNRGAAPPQTNGGALLKAPGPPRGLRPRHKSPTRVAKTCGDIWSHKWRGICLSERPPLVRGKSPIDHCGRSDLLVCFRPTRCPLFGTHFGVHTTLLSPHVFPTHTVTEFCRGWKRRPYRDVPRHTLVKTHLFSMGAHRRPWGVCRGHPLKPSCVCFPATHTRVSRGSLAHMVPSTPGHMXCGGPLTTAKGACLDFPTVHGWYFLKCSLICEISQHTRIGNSLPATGTSGITRLFPSSCLRTVGCFKA

SEQ ID NO: 969668 - protein, 483 aa, Homo sapiens
  misc_feature (432)..(432): Xaa can be any naturally occurring amino acid
TPPLQRHSRDVVTHNVLQDVFYLWDYNNQRSVFMTHNCCGCLVDYNTSLLVLMMEISSRGQSSIIDERFLLGNDRYTVAKHQLFVHHLVGRHYTRFERTSFVSSGVGKINRRGVSATRAFNGPSFGLFFGEVRTLCGERGLHAVEWIKTWWHGEAPSVVNRGRHLPPAEKRKGVSTRGKRECQEGPQGLCLRKGKGGKKGRGLPPGLPLREGELERKMWEQGRLGLFLEPPQGPKGSTPFGVPPLGPPGVNPLCCLGNEIFYRRSQVNFPIEGSTTSLLVGHTATNIFSGKTHSLIKGVAVGVPSWVNSRRYIALSPRERTSHFTSLFTGGSHILHAHLGKVFHAELGDKSLRGEEIALLPQWSNLFLENHTTEHGATFLGSSWVLSEGHGGLPLPPESSRVGTGGLTRSKQHWRKTGVLAREEEPTNAGFXSNFSWEGGLPRNVGKAFKLRARSSSEHFLPSPSCLHLPFQGDGGHYRELNI

SEQ ID NO: 969669 - protein, 214 aa, Homo sapiens
PKGKFGVYCAHQRQETGKGAPRPGMGLPPGVTLCNRDPKRGKGTTEIWGKKTHDSVPFKEHRGSQVGHIASARTHAPRGPAQNIKRVKKDEETWGEFWAHWVAGDLYRLEWAPLEKNPPGEKPHLPRQWYVLNGHHEGRPFSPQRSLKMPTTFFPRVGDLPTQECLKYFGPHLHMGGLTWKLLNLVAFEKKSLWKIAKILCSSTLCLPHLQTPR

SEQ ID NO: 969670 - protein, 148 aa, Homo sapiens
MPQLSLHSMTTRYSTTDTPVFYRVDRLNQFHLMFPHSQMEACIFAHSNKEGLHIHLEFPPQFLTATHPYEPQTYTPQNPHFTYHIHRRKFNFLPTTHFSRPIRNAPHYNTTRMAHPLINPHNSLHYSSSPQLKILNHQLPPTSLTQAP

SEQ ID NO: 969671 - protein, 117 aa, Homo sapiens
  misc_feature (98)..(98): Xaa can be any naturally occurring amino acid
QVQGVPLRGPPKKPREKRELVTRTRSGGPKVYQGSLRVLMVEGPAFVPKRAIPRGLFGGEHFPNLVVPQKTGELTGKEVFGHLGQKALNGTLNGKCTXLGLSRMARMTCLYLHKRDF

SEQ ID NO: 969672 - protein, 127 aa, Homo sapiens
  misc_feature (45)..(45): Xaa can be any naturally occurring amino acid
RGLPSAWSSFSGPLTTATADRSSSRVGCSRLTVLSGAAPSCLAWXAFLHIYYPTVAPFPGYKWWCTPRSARIFSPPPGEMTPHYHCQARTVFFGAPLVPYVESTPPRGGLWYFTKALLPGGHFCRPF

SEQ ID NO: 969673 - protein, 329 aa, Homo sapiens
  misc_feature (129)..(129): Xaa can be any naturally occurring amino acid
MKGAESLCVFVPPSLSWENPDWGFLPSRVGEAPPPRGTGLCALRAPLVLGAHPPAFFGLAATLLPPPPPLPRGGLSSRAYHLGRPPRRLGEPRGQNNSPLVSSTSTSVSLRELVFTAMATTECPTAVPXPYLWWWCGTIKVVTPHRAVVNNNNSRAGAAAPRWGATLPPLCVSRSPQMALCVSAFCAPTSVLCVRVLIYGVHTCLYIDGGATTRGDLCVYLARFHKPSHERDQLPLSTAFGTHHRGGDLTIRATHAEGATHPSHHSPPQGHTCHTSRPRRESLCALPGRHVSLERSGFRSVGDTGGPLRPRNSTRPPTKPFPMPYSPSE

SEQ ID NO: 969674 - protein, 146 aa, Homo sapiens
VSSLSGSSPPCLCHQSFSLHEDLPGRARPQLVLYDPGLPPVTLIRGLGDPVAEALGRRSELVVCKYLTHILAWAVPLRPSQAPGTEYSILDSARAHPRARILTPGGALIMKVALGRGWCPVQYWPSLASLSPTWLVYRVPQKWEPR

SEQ ID NO: 969675 - protein, 175 aa, Homo sapiens
MVCDRTYFGDRESPVGHAQILFYYGSDLFPATLMGCPHSKMFRGPHWGRKPQRFFCGMNNRHNWGSVAPQSIVFLAFSLKNGINFVFLGFYRVASPPWEYSGIVCVKCRCYIPPERPENGPQKGMFFVHPWGILGLPTNWELTRLLPTVLNISPAPLRWFSRRSVSTLSAHSGRS

SEQ ID NO: 969676 - protein, 273 aa, Homo sapiens
MASSVGAALLFLLPPPPLLGLAVRVLQSQLDVWLSPLVGRTQFLVGGPPFFSLLLGCCLVPLFSHSLVGISPRMARPLRVSVVACALFLLVMCGRRCPSLVNGEGTLLRGIWVCKHTWGPLFIASLSSGYLTKSMSPLVPRVYYRIFGFSRVLFVAIFLTYLHFSGRDHTTECPTQEHHNGPRTLCVLSYLTVSLCAHITTPPPDTPFKARFWAPPALLTTGLHGCSHGLYLGPFPRAPRLHATSTTRDRACPRPYRPTLVSPRSVLPYHKMF

SEQ ID NO: 969677 - protein, 272 aa, Homo sapiens
MKKTSWAYFSPPNIHGEFSPISPLWGNLLSPRVLVKSRSFKTYEPPTGESLAVPPVAAPPFSRVGLFHALLFVGFIEAFTVYSACWAPREHTPLLSHTRVRAGLHVGPRVPFDPLLVGEELHHRCTHTKWGPRWYTRLCSRDPPFVSFLGVPPTCFGSYYKSLNLLMKGHTGPSCSNSKPSRDRSLDLIAPTTMELTLPTRSDAAIPPTTSLKSHFQAPYLVLCNSARASFWKRGLSRGIWRHSAGRSTRPPEASPSSSPGRTDRLFIAHRA

SEQ ID NO: 969678 - protein, 158 aa, Homo sapiens
MSSILPPCSSSLAGAFFRGDVTKMGGYVIVSPLATKGTSGCHHDPGVVVGTPRWPSRQHVYTPGMVKFPFCGNGRPPMEPFLDVEASSFSRGGTNMGGPFTKRPQRKGVPVQREMFSLGGQRGVRGVRPRPRRSGTPRPMGERPDLGLSNLGLQRVEY

SEQ ID NO: 969679 - protein, 66 aa, Homo sapiens
AQWAYPVGTRVRKGAERLFGASRIRTVIVSEYVYRNRFPDFSVWPLLSNVEKCGKKAVITLGFDRV

SEQ ID NO: 969680 - protein, 188 aa, Homo sapiens
ARQIWCVCVPPPIGELPSSFVAESRGLPYPGVCSPYEEGAASTQERRVVSDMFLLRAPPPNRAGGREFYYTTETTSVRVYYSARYGSVSGRTTLLFPGSPSAGPLGPRLVVVAAGGAASRPTSRPPVSLPDKMYPPPLLQVLWWAAVIPVPRHAVGFLVVRGALLTGYVLPWRSSFFMFFFFFVVALA

SEQ ID NO: 969681 - protein, 187 aa, Homo sapiens
MPDMDSRMTRLELQCVGKRITLYHFREKLGVLKGAPYAHKVHCYEKILYESKHTGHSSRRHRHWEIYPSTERQTTPGHTWIAQEVIGGGYSRWMCYAYNKEGGCGLKLAQSPDKVGCRRQHKSGETEARDLSECKVRRELSPTTELLTGDSKERIIEEELRRIKKAQTEDLEYRGLEYLEMGAVILL

SEQ ID NO: 969682 - protein, 173 aa, Homo sapiens
NGCSPHLVPAFFRPRAVCFLPVGVGPPRGVTIRRSRGSPPKSFGREDLFFRPGLAAPSPFFPRESFGGEPLDRMSKLDKYPLWPQNILFLSPCRGLPEKWGHRVGPPGDNIKGGIVLLEGGLLPLCWEKPEIFLGGGTRKLLLVSPTNSEDPGWCQITKEVNTRTHSGPPPGI

SEQ ID NO: 969683 - protein, 135 aa, Homo sapiens
KSEVAEKRESRERSRGRSRYEKAERDAQEGGARGREQRRRGGGGREREAAEGGRIVERRGVGGLGEGRGGRGRWGSGRSGRGRGREAKSREAREKRKWGEKERGEGGERQGRGERATGRRGRERGESAGGERGAR

SEQ ID NO: 969684 - protein, 76 aa, Homo sapiens
HPPLPKVREHTFPKREEEVFKPGGDHKKRVCTQQATVNTNARAGPQPHTERVTTAENDPNGRTMVCWVEKYTTRGE

SEQ ID NO: 969685 - protein, 109 aa, Homo sapiens
  misc_feature (93)..(93): Xaa can be any naturally occurring amino acid
  misc_feature (109)..(109): Xaa can be any naturally occurring amino acid
MEKGEGENFLGERQEKAFFGPPLYCARVRERAQITLFAQYPLRRTPTQGGPYIAPGCLHSTGHATLWLIWGHSVGHRERDCLTYMGENPHKAXIAHSEREEREPHRERX

SEQ ID NO: 969686 - protein, 91 aa, Homo sapiens
GGDLHYSSHESGSTKQHPGGAAIVEALLLGVTRRKLGHNEGLFFFMLKGESFSIGAGGSHTPTTVLPDPHLLVFKKGVSLSIRRRYLKRRN

SEQ ID NO: 969687 - protein, 238 aa, Homo sapiens
MTGGRLGGLFGGAPRLSCGDYGGPLFMSGALFYTGGLPLCWGYSYGAPCCSRAFVPPVAMMEPPPGVPPGGPPPHLGGDIPAGGLWEPPAIIRVGKGPNECNKGTPAGYKGGPPTPRPLEEGVTLTSVKGDNKERDQHVCPTKGENTKTWGERDEAHAPYEPPPRNGETQSTLGPPRKKGRAPLFWGSIFPRRDLVGKLGDKERTAFEVLKKFLPGEKFLVRNPPLMFLRGEGGRDPR

SEQ ID NO: 969688 - protein, 407 aa, Homo sapiens
RVALVGRHTGLAMHRGTQCVGRHRSFNVYLRHPFVKLLGRPPTGCFQRGFVHEPNLLGGRTRMAFFGCRGKGVGPLFVVDTLAKTAKVLALFPRQGLREMAPVGVKSVLGDHHSHRGQQNSSLFFPRDTRWGVPATLMDQRVLWGGFATIPRLRAVGPSTPGPVPPWGGPNSGEFPREESKTLSGKKENGGARKGGEDPQGHKRETNGAPQGQKNGRHNAVVPTRTATEVCGDTNPGLETGGKERGDNWPRAASGALAHMTRPVGSSAPNTTRWLDWSNPGHNSREEDPLKALSEEKPGNPPNALDLRRRAQRKRGPRCAFVVTPGEHPHTRGTFHTRAHAPSVLVCFLKAKKATQRKLLAYRIGVRAQRLKALLSLTPESGTFSSGSRTEPSHRPPLFLELSFGTT

SEQ ID NO: 969689 - protein, 400 aa, Homo sapiens
AVRRLPDMYSLLRVSRILFVRRATSLVGCLHCWVPPLARCLLWLSLVLASSLAFYPPAGSFSLFVGRPSPWWWDAGVPPSFLRGGLPPQWVICLPPWGYSLCGPSALFLCFAPWNFQLPWGGLFYRPLFFSEVFTPVRHHKGFFRVHTLCVIPPAECDEYVVAHFFDEKTRCFAAQIDQFFWLSNPPISLLYLEDDRGSLTAVGERHLLCGKALPRRAPLHGRGGRPKIFFLPLFMSDIFSTERTPTTPSCYDTCGEKTGAVCYTTHRGEMCTTSHTFCVEYIYIVDSHISLLLLCETCATITLCLALTPQIVSPPHFCVLYLSSCRHTHLFSLYMRDTGVYIATLHNREVCGGATPCAHTVCAHKMCESAPAIFWLVAENNIFLPTAHPLWRDHTEIYM

SEQ ID NO: 969690 - protein, 191 aa, Homo sapiens
LIKVFPSEVFSNGGGFAMLLGVPSVCVCAPAVVRPVCDKACGVLGRVVVAPVVVATYVVFQGSAVGSHVETWTDCWAVISTRASDEFPSGCLLLWPSCLAGAHCFAPLGGAATRWGFVCHDEAFVQTPPVDVEHACVLLYTGGGRICAPQIGRASRFRSAPFGAHERLLCRRGGSTKALCLMSGGAVRGAP

SEQ ID NO: 969691 - protein, 291 aa, Homo sapiens
NLPLLFVSLVWGISYVSIVLCLYHLTPAHKCLVCVWCSPPTTPPVILYASLFAFSLPLNLECCLFRPPSLGVSSEWIWHLSFLLSCWFEGSSTHSLCASVLCSASPSLLAHPFSWCASTSCYERSSGGGGVKIVWRADRKKYRVAISECVWSRCITPDGATVRTRVYFSVRLSVSASHARAVAVSLLVWIDDFRFLVDARGVAMRGSSPRSRARALVAVVFGFARAARPPPPLPLRCRLSPRRPLYVSPRLARSPSLSLSLRLALRLCASLFSLSSLSPREPPLSLVSCSN

SEQ ID NO: 969692 - protein, 123 aa, Homo sapiens
SDYFLTTTWGDFSRTWAFSTDVSQHVVLRRHVWWCQHTIAPSRMRARFSSSTSDCFLVTSPRARLIVAGLHSPSFLCGGSTASLRRRLKEVVRCRLTNRELGLRPPCCLIRPGVRDRRPPFFL

SEQ ID NO: 969693 - protein, 102 aa, Homo sapiens
LLVLPGVGLLAYCVCVLLRAYRTSLRAVGASPPLVVDQLLCVCWVASRLLICLVALSRAAGGALRSVRRMVVIILRGAICLVCRLIGRGYRASLVGFARVVY

SEQ ID NO: 969694 - protein, 88 aa, Homo sapiens
SQRVRERLLSVVFYNTRVGATSCSFRTVFVIQPPNKRGVEKVVGKVRPRKLFRSARQISQDQVGEERTHNAFLATHFFLWGVCPPSLG

SEQ ID NO: 969695 - protein, 372 aa, Homo sapiens
  misc_feature (71)..(71): Xaa can be any naturally occurring amino acid
  misc_feature (152)..(152): Xaa can be any naturally occurring amino acid
  misc_feature (207)..(207): Xaa can be any naturally occurring amino acid
TPPAAAPVVAWGVVTKRTSRFLSVKTPVAGNVAPPGEEPPQLSPHSPRCCVEQPPPIKERNLPRGGAPRSXSTAAFLRGKPFVSALLIRGRPRRAGDCPRNVTSDNLVFGHHPTGGEKQPVLYGAPTSEWAAPNIYKGGETTLKDIGETTTXVVGTTTNIKEAPRGPGEVYNTGGLAGEKIFFAARRYISSSRKNNTHGAVSRASLXFVGGDIWNTGLYGDTHKTKALCVRGETRLFSSGALFWVPPSGGSYTVFPPHHFLFVGPKLFCPRECSLSKPPRHSLRTDHTLVGRVSRVLCSTNWGFESSVSLLFRWGEISGRTLGQTTCTLTRGERWCSSLLSSSTAVERRPSLCNLYLSLHIHTELLFFESTY

SEQ ID NO: 969696 - protein, 144 aa, Homo sapiens
ARWCRNELAEMNDLYLERDEHHNNESGVSYTRQQRVVLGWGGPPRDSTPDGGCAGELTYNSPGGESGGVAKTHQTATIPRGFAGGSEWTPPARLIGGNTRVGPFFLRVRVGHLLFLDERARCWATKGSQLKERNTHQGPLWVEK

SEQ ID NO: 969697 - protein, 123 aa, Homo sapiens
ALSSQRDISTKRVTIRRGGAINNKARRQACNRVDDRTTLAAAHNRVVAAENNGCDEDHHLGGNNSPANGGDQKVMAPNNRHLFSSLHNMGANTPKKAFRPPPLDSSESVFARPLRNVVKNRVG

SEQ ID NO: 969698 - protein, 167 aa, Homo sapiens
MAPPRFSEIKGIISNVILIFIGPGPGELRGEEKANPPGHILVPTHCLLGPPVETTALHPFFCLFSQSRRNTFVRSKRGRTGARKDEEEGLDNPAHPVSQAHGHREGTHMAPQGSKGPQKCNSCHHGREVLGEMGTSTVALLGECNTPARNNIAAFLAFSGPHTCPVL

SEQ ID NO: 969699 - protein, 136 aa, Homo sapiens
YAVLVQSRCCSAVLKLAACDCCCPAPRWGGVLIYVPLPRNIPVVCNKDTRAILSPVYTVAPGAGNICFNRGNRLVALGLIFGNPNRRTGCEPKNTGCVHRVSGNFPGGIIVWDPTPVPQEHARAAIRGPALLGGSF

SEQ ID NO: 969700 - protein, 216 aa, Homo sapiens
VVVCSVSHDCWWLHSVILCDGSSLMVIGSVSCKVGITTTVLCLLYCFALFLQVVPNLRGVWCWFLVAHEWGFWVFYKTRVILGCATPLVAPGQPCLCGRENSGCGKAARDLLGVERLCPGGPNGCFSKAPREDGSVATECFRGGQTGGWGDSHEMGPAPHGESTLGCSNVGYTGVIIPWGPLPRGPYLASRAYGPPGIWECANTAAQHIGTGKILV

SEQ ID NO: 969701 - protein, 483 aa, Homo sapiens
  misc_feature (172)..(172): Xaa can be any naturally occurring amino acid
MLTNGSYSLVVRRHDYILSKRRAYAVFTPSAVMDFLSRGGMYATCCSVLSRVVTMCVTSLLMTRRVGSSPSFPGGQQTVGAYAERSVEMASVSSPFLRGEAVVFLYWGAKDTPRYDWGESHKSRGGLTLGEKNTALVLLGEKRRCAAQKYPGGEKLWGLVGVSSHRGRGPPXVEESRGTMFALGPQKKGCTKCGLTALVGLVVDPELPPATGGEGPPSAAHEPPQGNNAGVALEGARERKGAAAPRCVSHRAVYNGGISMPRPERVVSHGGGKPQGRKISLEGERRGNNRGIHKDPGEETHKWGGPTAERANGLGLENTWRAKKVRAPPLCSLVGGVGSNPHATEWFLNTMGTAILTQRPREVGLSNFTTRGETLAIFCAFSLGRGGPPNGCHSGSRSRTEFGVNPQLVCNPREPHLLVTQTGDTNEVLASVLWKTELSPFPTLLKKVQGLFLAECQSAFVAAAPRGCCHTTRCSLLLLHAPR

SEQ ID NO: 969702 - protein, 545 aa, Homo sapiens
  misc_feature (510)..(510): Xaa can be any naturally occurring amino acid
MLVFMWGALFIGGAFCGVLFFVVAFGVGRCFYWGVCSLLLFPGPSSNYIEVSSVGAAHSLALSPHKISMVLPGGSRPRAGSHGCVPTITTRSLRGGSFLCSLLAQRTQGLSPIALPLVEVEGGSARMCVCKTPLCRITNGACWCYLSRRSPVGRNIWGGYSNTPVLLLCFVRESTCQPTGCFLGEGISPLCRGGISSWAAPSPQIFQRARVVSIKIPPAGEGGPPPLLLQHKHHSAARWVLHPLGGGLPAGENNRGDNNMGSTTHPPRRRRGSTAYPLRGGVSRREMFSHSGNTALPGELINRGNSGVVFLEGRHTTGVFSSEIKGAWGESSTRGRFSSLRSHLALLEEPQQLFVGGLHHNMGDPTGEEGGDMNSATFLSLTHSFSPRFIHGGLPSLVSSCCAMYPLGVSLWGGARLFTLYLWRHLGVCSLFHREIILWGFSRGASRLSERESSKGEKRDCVRCSRGCALFLSLTVFVVRRCGVFLPRVSDRTHSGDALTHRERGASLSXTHTQRCTCGGAPTRPTLCCERSPRDRFNTVNLIIC

SEQ ID NO: 969703 - protein, 104 aa, Homo sapiens
FFPNKSTPFFPPWCETRGLSGGFSGGKNVLRRILSILPLVWDPPPVWEGGTKRVSPPRPQEGRTPQGHQMVRGGERPQTTPHAGGLFQEGGPRAQEPRRPRKEI

SEQ ID NO: 969704 - protein, 169 aa, Homo sapiens
RLPKCGVAHNSVRKPLEGGRSPCLGYNAINPSCETFLRPEGNFASRRLYTIWSMSTPLFVVPKSTGGAPTVCVQRKAVSPVWVSGELLPGGGRRLPKRLFPLSRVFFSWGLKKKSLPMPRLLFRALFFYMKVLTDVTTDGVNVKMLHITTGGENKLVKRLFFRGGVLVL

SEQ ID NO: 969705 - protein, 315 aa, Homo sapiens
MRGSPAGPRPGGNTGSLLWVLLIKGGGEARGGCFFRSFLKCWAYNPGGIRNNPPRAFVGPCGGPRHRPHNCDTQNLWVCVPRWVIKEAGGFPACFLPPPRGGPQTPLLSPARATKKSCLSQENSHRAAGRPFREGSPHPSGFYTVGPRGEPVEPNLCAHQMFLAGPPKTPGNLSGHNPWGTLGSHYPPYEDIESTFVATGATTSPSPQMRVAGRHNHFSATESLPQALVCSTPLFEAPSSEGECVSEHETRGTAVGAQLVHRSNICAPAFSCTVRLRAQVHSPHTGLHLHTLWRAPQPTSCLLRTPLKRTGNWNT

SEQ ID NO: 969706 - protein, 236 aa, Homo sapiens
  misc_feature (19)..(19): Xaa can be any naturally occurring amino acid
MFYTAPPLSGVFLKRRYMXRVLLYRTCPAQHSSGAVVWREIVSRGVYTSLPPLWALICNIFYSPHMLKGVDTHLCGHTKGGHILETPHLRGGAPPPWVEDLHKTHNMFHTQTQCVIKWALALFWREFLGCGLFTVALSHGEETHTGHSVPLSFTECPRKGECLLRGQGEECLWRVMERLSHFWTPAGLSLWETSGLPLSAGDLGAFRWWKHLSALSWAHYPPTAPRTPPGTTIIET

SEQ ID NO: 969707 - protein, 104 aa, Homo sapiens
  misc_feature (24)..(24): Xaa can be any naturally occurring amino acid
MRDPTREEISLHIRSGETTAEPSXEEKFSTLGRLFSHSPAFPRPRKMCPREWSSRKGGAYADADTNRQPASAGVLIHTGWRRERLGSTLDVGPTGVKTLPVPET

SEQ ID NO: 969708 - protein, 115 aa, Homo sapiens
  misc_feature (112)..(112): Xaa can be any naturally occurring amino acid
MKDPPPVFLSSEEEMGFPIVRPQDYIKRGGNFFLCAPGGAPPLWRNTSNWTPQQAPPSVCCYNTIIGAYHRGGTTTKRWPANIGGGATTSSFGETTTGLIISGRGKLPLRRXDIY

SEQ ID NO: 969709 - protein, 280 aa, Homo sapiens
  misc_feature (151)..(151): Xaa can be any naturally occurring amino acid
  misc_feature (153)..(153): Xaa can be any naturally occurring amino acid
  misc_feature (264)..(264): Xaa can be any naturally occurring amino acid
KHHGGAASGGIPPPHDEGCITKRRVDTSPPSVASKPLLDLYNPVVARREEGGVANESIIGNSVFTTAVYTTHTSRRKGGENVAPPPPVPLTKVDFRHTRVCASAHEKKPLRPRAQREGDNRCVTQSPRCFLLPSLAARPMIGECCLVPPRXRXSSSPDTSVVYDRIARPLPLYERWFYEVVPPPRPARRTTMLGVRPGVLIHPIGGHTSPPLVSVLLSLKTSGFVSFAALCPQRGRVGGNATTILSPPADLFLYKSSKHLLFFXLGKKNYFPSSGAKNKN

SEQ ID NO: 969710 - protein, 239 aa, Homo sapiens
MLGSFGGASLGPPLMLGFATLCPSRSLGRLHWGGHQQISLSPRIWPLGERLNCGRAPNSRPFLWWPSHLVAPWVGRTLWGCRPPCAFFSGGHCGGPPAPHMGGPPGPPCGAGFVGNMCEGCHTCGAPWATTWWVVAPGCGPRWGTTAPFWIPLLCPPHPEGILGESVWPQTFSVEREMSFFAHRVSPLSLGVGASLGGAPHYWSSHSGGGWCHRQGDRAASAPRSIVLCVREHFLATHV

SEQ ID NO: 969711 - protein, 350 aa, Homo sapiens
MITLLVGWAPSDDAFDIAESFVERPENFFVPPHGGIGGKLPPYPPLLGRLNIVLMIALGAIIHLWLWALVCLPHWGETFLWFPKLAALVKVLFLLLTLQLWEAPFGEDFFVGETIGGGYGRGPRLPSWSTQHPGLSRLVESCGKLPTHAYAHNAWLLMCNPLLPPCLLGSPLTGRSLTLHRVCPLFHCSHRPHCGSCGRVSDSEHRGATGQQCAHWSAQCHRCPHAGGERGPCGCFSALRVSVWRASTWASCLSHTAFGKLCCFEKDYTPQKGERGREPPSVNFCATPCLTLSRVLRMSTSPSHSFKGNSTLWCPSSFLTLLHMFLLESLRIMLTAFSRSSRPSGRRKGL

SEQ ID NO: 969712 - protein, 97 aa, Homo sapiens
CPLRGGAGSSSGGAGFPVAYDLEEVFIYAPAQPFSDLYVPALCCEAFRDGLAPRAPALLRPSGPFSGVPGGPSAGPPTGGNLLPNPMLVALAPPEHA

SEQ ID NO: 969713 - protein, 108 aa, Homo sapiens
  misc_feature (84)..(84): Xaa can be any naturally occurring amino acid
LLCPVVCSGVPHRGCLVITPFVVHTTPPQMMGRGQHHICAERALHQRRAPRMRVVFLSGDATTPPPHMGSPVVHPQHFLRVRVXAPPQHFGDTESPTTCLLWCVSMFA

SEQ ID NO: 969714 - protein, 184 aa, Homo sapiens
AGSLRNDLPFGWAVQSSSVHASAVDCLCFSDAPFRGRFDLRKVGGVVSRRVIIPTARRLSSSNVDLPVCSRLVSSPGPQVATSPGSSVPRVARVWFARFFVWIKGGCSAIGQGPRPNYPLGVGGVVGVSRGEIPLELVVCVLQRDTGGVLGPHGVWSVSYSRGCVAEVFVSHLGTFPSFPSPAV

SEQ ID NO: 969715 - protein, 231 aa, Homo sapiens
FDRKMGWVVAHRHKNWWCTSPFFHRVTICANEEDVILSCGHSTDTSSLDDRWWGGTLSPSPSVGCLCVGTSPPDEVSACFVGTPPLWRTTHNVWSLMGPLCSKIFGGKSVSSTKNYLFDVRGVVPCGPSGEAVLEKVFLVSGSSLYGPLPPVGGVLILSPPLVRSPVANTASSWAAVCLLDLPPSLSGVMAAAFPCLSLCDGRKPNASSKAGNFTPRETTPTIGREGLSLR

SEQ ID NO: 969716 - protein, 109 aa, Homo sapiens
CGAPPPGGAGFPPCSSPGDLFCASYGPRWGPRGMMPRRCCRPPRRGSPMPLMVPLLLAPPIIFKGVDTNPVYVRCDHTRCLVDPHIKERHGSLVLPTGLLRGKFSLPGE

SEQ ID NO: 969717 - protein, 295 aa, Homo sapiens
  misc_feature (138)..(138): Xaa can be any naturally occurring amino acid
VGECTAFSHASWRSSEYSWWMTLLTATLMHRLAPHCSFARRLPCNGSLFRYKHPSEEEHRALAREGEAQRQERAGANGISEEKPLICAPRGPVPAGELPPHDSGCTGGLLLHSWDQQRRIKLLCIWCLHTVTKSIKMXLKEKRLDFSAEEGGERSVSSNFALIFLLLDAGEVVREENLELGLEHEMASMIQNSEPLLKKLGWDWAPPVAKLATRLGLAVVGSVLGASLTTPRLRLAQTHRDALTMLEATPMLQFFLHTSILCTLSTLWLWTHPTARDSLHHPPFGGDAYFPAVRF

SEQ ID NO: 969718 - protein, 229 aa, Homo sapiens
MGQTRNQKEKLGGVLWTQNRVNPSSEIWGDHPLVGNLRRLLGVTPGHCPPLLNCLRARSVKCGLLAPKRAPFFTCDQKGTSTGGFSSRERLSSLLGVAAPPRAQLLVEAGGFSHHNQLLVEGEPAFGRGQRYGETFLPVEECTHMTPPDECGRLWIDTKSGKMRDCVEDTPTHEEGSKTTTFSIFLWETHWIFSPHHMDRGTNFFLLHLKMWDLPSGAVFYTQKVWIHL

SEQ ID NO: 969719 - protein, 196 aa, Homo sapiens
ESLVRFGSLLVVVRRAIAGVVGRGAPGGFVGVRTVVPSCDGGALRPTRGDDHVCAGSPRVVRGATQSGWGVGPAPQVGGQRGSPLVGGAERRAAKLAPPLLVGAPRGPYECAFVKLSGHWRFGYCGSPLAPVWEGVAQQGWEVVPHALCGGESGGRLGRGFWGAAFLGVGPLWRDHLPTRVCAHAHVDTLVWRDIV

SEQ ID NO: 969720 - protein, 484 aa, Homo sapiens
  misc_feature (196)..(196): Xaa can be any naturally occurring amino acid
  misc_feature (293)..(293): Xaa can be any naturally occurring amino acid
VCGGLPRPAVCCISPGAPFLACDPRGGAVPLMYIRVVGFVVLLLRPRSVVGARPSTCRPPALVEWEFPSQRDVFSVVCGSVLSLSSSLKGRGRHKDVIHFPGVCCLGDNFSRVLWVAVSPPIAALWGRLSLPMGSPPTPVGVSAEAAKEKYAWCVEYFYGRRRSAPEGGEVCDLCTLGDDFCGGPAPPMSLPSKIXWVPPSPPRPPVILWPSFLVVDTPGESASVVRREEKSGPFIATTCVSLRHNCGGFYYIFEEMRVLEEKILWPPPSLVADTDIADTTHHALNMGVNRPXFYFCGQYDFFGDIINSAPPLAEYKGEISGCSLLEKSALVDISRIDDVTAHTSRDLFMENTSRSALGGFLWRPPLRYYVEKAVVNLGVSPLSRVICIKRCVSQRGLERWFLSREMFFSLSERGSRAHRDTHSFVGCGCSVQRVARSHSGLETSFHTPADRRPTAVALFSYRLERVLFGPQRTPARRSLYSGS

SEQ ID NO: 969721 - protein, 213 aa, Homo sapiens
MVWPHSWSATKCQPGTGSHIIRGVEMEMSPHVSLSATLRPLSVCPHGRHLGDGPQAWAWCEGWCVCRTLLALLKSHTGICVCERTPALSVKRLHATWARLRRCHARRLSWPRTPSPRKARAPENHEGPRFFSLFWPLRRGTHPRPSRNLHVHALRARTTHLGREGPHLWPCLLSREKALLEVECLFPEATCVSCRLFSLVPTKLPTNNLYGNR

SEQ ID NO: 969722 - protein, 246 aa, Homo sapiens
MCRERISPGGGPPRVCPRTAFPAEDFSYGALWGAPPGVFPAEFVIRLVLHTHTGNTPPYMRPTFMGPQMFIAVTHRIYGTHTVFGDHTREAHASRVNPRFSRNFSPAGVYSRCRRLPHALLSAVSRCLCRPTKHILVCLSALTETHCLGPREYVSLGGGLSHQRHRRAPVGKSPGHRRGAHTSRALPQPPLWESTPPHLSLCVCENVKRLSVFPLTALAQGSAHFVHFAEKEHTLLTFFSLLYFEI

SEQ ID NO: 969723 - protein, 124 aa, Homo sapiens
MVLLAAWGCARCVGVAGCGGGAEVWGVALSGGPVVCAAVGGVRAAGGVPRSWPVAVKSRWRDGDGGRALLWGSRVAVPPGVVRHQVLVRAGEGERGGGVHWERGSEARGEQGGERCGESAKRGG

SEQ ID NO: 969724 - protein, 259 aa, Homo sapiens
MCRIGLGRLFCTRVGCYHGGGSVKFRPGEPPLRSRGARNICGVPGVLIGPPLVEDWGSWAHTNGGVTNHLWPTGPHECFAPWKVLVYRDDNRELVVDSPPACYLGVDYKRRALGKKELGRALRKCSPLEERFLGLEESRGAHILLRNNIGFSLVPQGGPTCVVALRERLFLHETICPPPLCGVARLWASCVARDNMREPQSHAFVARLGLCVTLNIIPTVWDPHRERPLSLESLWRTQVHTHTVLLPPQNIRLSQREAL

SEQ ID NO: 969725 - protein, 304 aa, Homo sapiens
PQVGVAERPRKKSGLTTGRACEHRRSGGVARIRRAKDARRSQRGRRTRAWGAAPKGGSAKCARRTQGYRAHGKVLEGPQMAPAPCEESKKRARGDGRTASKRAYRATGVLYRAPEGGAKGAPQLRRGVSCSCVGCKGGPQAGYVRHLRGLGTAGWPTSGRVPQRLLPCCHGWELFGFVGKRGAEWTKKNSAGAVIPTHGRPHQEREREVRYIHGEHPGNMVKEATERLENSGKDICRGASTNGETPSTPTEMTLVKYTVGEVWALPRRYVHTQGQRPLTRGRDRCHTVGGAQHTLCHRGHTCEH

SEQ ID NO: 969726 - protein, 243 aa, Homo sapiens
MTWRCPTVGGPPLVDGGAPRLVAVYPGSSQYVWVCALGVGPLSRGKCVFGAPLSPVARSVLIGLGPLPWLPWAPGFLAHRVPPVFAFPIRCKPLGPCPCCVRPPRVGPPPHNVGHVGPLQGAGMAPSKSPPNCVEAPGRVDSRLIYVNGVVLVPPPLYSPGVDFPTPGEEIEGLALSAGVLAWGPLRSHFPRLLPTTLNTRGDGRRGGRWASIPPMRGSFHGLLAHTTAVRHPTNILGCGLCV

SEQ ID NO: 969727 - protein, 108 aa, Homo sapiens
MAAYILAVPREFGPRRSKGSWVFTPPNNTHKLRATHRKENRTQNPWNLGPTSALRALARSGMKIGRIEECHPPLPSDTHTPRKGGPRWSPSVNKIPPKYFLLTTLPSS

SEQ ID NO: 969728 - protein, 115 aa, Homo sapiens
YAYTVCYHKYVCPRTQQQPRMWNEHYSVGGVLGSHYTHTVCDFTGLMCAHHPFLLIDPRRRRRAFFSCREKEFYPTQRGAFRYPHGGKIHERRKGVLKSYYPGFEIVAGVKCCRG

SEQ ID NO: 969729 - protein, 191 aa, Homo sapiens
  misc_feature (126)..(126): Xaa can be any naturally occurring amino acid
MKRESPAGGFPRTVSHTPTHGVPREILAPHRRGPLSRGKSLKRFPTAQQGGHSLSPLYTLGLVDTHCWLGGLVPFWVSSERGYIGRDNIPPTKGVYNNPLGFCLHSTENHAPRHFHAQLKWGTPTXPSLHGMKTPRYKFPRSVETWAQACGGPTATTATSRLGFHELLVVENKCGESLAHMVSHLAKKVPL

SEQ ID NO: 969730 - protein, 125 aa, Homo sapiens
MNTPTGGCYCCPTCPPKLGPFHNISNESAHYNPPRRKIFSSRLDPPCRTPPPLLCNIIENTFVFLGKKILSPTEKNPRVCLPQRNWGTAPGEEERGVPLSTSGKIPTRPPTFLFWKDNVPPTSVL

SEQ ID NO: 969731 - protein, 214 aa, Homo sapiens
CRCVFWGGMRLDAGLKELWGRQLFCGPRHFPPVLWSPPGTHPFGGGIPLYDVRTKTVWSPGSLCSGVSPLFSGIPGAPPTVGSVNRIGNVGYTLLARESDGHPGTTRDHTPVSVPFSALARYPSGDLLCVIMHETVLVRLVSCHPPEGGLAGSLFHGALPFLPVDGRALVENPVTVMIVARRHVQCPRQIVGGYLVKPRPLKLKTRPGLILILN

SEQ ID NO: 969732 - protein, 118 aa, Homo sapiens
EGAAGGVFSAVCGFALCGRPWPVVDRVRAVGGSGCGDVIRWPAVAWRTRRWAGGVRSSLVGSLGGQGVCNKGGSPQSRPCGRAAHKNSPSACVFVADRLALRLGTTVDVETPSVGRPE

SEQ ID NO: 969733 - protein, 428 aa, Homo sapiens
MAAPTGSVVFARAPRSRFWCPPNVPRGGLSCRSTEPPRIILPVGLVLLWTILVLAAASKGLFYSILRLRNSKCSVLQSCPPHHGETTHFCCGVAVVLLCGREIIPPPLSPPWLVPPRFYRPRSPAVFVPPPPAWFSPTRGGPAHLGVSQPVNRESAWWIWRAPTIWRVLKYGFPTTQHHIILLTPTALIICSCFLEDFVEISPFTPPHMVCRNHHRARRVSSVGEHFPAPAPSSRGGAYNIQICVPPPTRLCHIWGHRTRAPAPISSTRDPCVLKPPLSLRMPTLFLRAPLAFPRRPKGPCPRHTVLIHRGREVRTVTAGCVRIFLPARAPEEATPLNAPLVVSEVPPPQYPTESHHARRKEGPKFRRKEGLRGREVAYEAFTSLGKARENHVCTLYFTSHACPVACPPVCTLLFFPVHIPAVQTPPL

SEQ ID NO: 969734 - protein, 119 aa, Homo sapiens
MPPPLQLLGGLPFFQVEWEYQQFFRERTPPNCVKETLPPLRRWETPAAPPLCSNIYQGPKHSPNIRKGQFPPSYTAHATSLFFFWGTNLGEWAPPLLGHTQNPKKIPFAPWCPRFRGGF

SEQ ID NO: 969735 - protein, 136 aa, Homo sapiens
GARLLTTRRSIDSRRGCTPSLWVVSPPVWSTTLLVWCFRGYTSSVFRLLPPRFFMLLLGRPSLVLRALSAPPRCLVGGLLCSPLDVIVGAYYLGGGPSSFLLLYAFLCRHALLCVFSPPCRLCRRASWSAGPPRRS

SEQ ID NO: 969736 - protein, 221 aa, Homo sapiens
  misc_feature (94)..(94): Xaa can be any naturally occurring amino acid
APPRKRRVHGREPEPQLTEGGEKGVCPAPEEEMDESDRRWLLAPGPGPRRVTCPRVTLVLDEIKRQYSHSGPTTSLWPCHYFLGDTFDKDGAGXLVVLHEYRLSLKNSPHDLHWAAILTTHWNVSRDWTQLRKNAFARVTPLLETPPIAAPFSGVWVFRGHGACLSPESRLARWNYESYTTERKLDPGSEETPTPGFESTFPGRGPSSKWAKTFNQGQIFK

SEQ ID NO: 969737 - protein, 110 aa, Homo sapiens
MRTPSPSSPIFSYSPPWCVHHLCGVFFFSPSSHCLPAGICGGSSFPNFCCGAVVAALLPNFVLSHTGVSPRHFILLILVLPRTFLLLTSGFIRPPPSFFSFHTPPTTLWV

SEQ ID NO: 969738 - protein, 174 aa, Homo sapiens
MKLLLAVAASLIPDCLCMETYLLCRDLGRDSISTLGVIARLSLLWGCCVLARSLHAGWGVAPTHSSTCGGQSTSYCLETRMDWFPYDGLASSCRAPVVFCVVGGNNIHAVWPVSPPPCLSLLSFADVGISAAPLVLVFAGCWSDSPPLLSLGTPPRGLLRSVLFLSRATAGGFV

SEQ ID NO: 969739 - protein, 131 aa, Homo sapiens
ISDPLEPWRSVRIRIGQSIVGPTSTAGTGDDPHKPGLQYQPVCHPENVIPYFQPELIARFLASRKILFWLPIVLWDSHETKRWVDPDSPVLLEDPQSFVPWPKSTQRIPRPELPCATRCTRGVVVLAQSYP

SEQ ID NO: 969740 - protein, 253 aa, Homo sapiens
PRSCSRPPCRCVFWVDLDPPAPGAAGACQAPPFVAGCARQAGRALLSSSTARLVLCVPPPPLGGEHVGAHHTPTRLSSPPPHAAAAVSFDAAPAALPRARGSSHRRSPPPLVVLTQRRRRRRCGGWSASGRCVSVVKLMGRLAHALPRPATLVGGAPPGRPTYDVPLLSLGCGPHGDGLSPLVCFRQPREEPLWFFVLWPRRGARRWRPPVSHAWFFCWCPRDVARANVGARRPRRPAPRAPGWRCPLAGARC

SEQ ID NO: 969741 - protein, 87 aa, Homo sapiens
LGGVHCFQMKLDISSQPLAARNSLKWTMDAQLRTFYEKRMATTKLLLTLWVKNGRVMWSESRGGGRPNRFPPEATGVLNPWPCPPCY

SEQ ID NO: 969742 - protein, 163 aa, Homo sapiens
MVATHIYIGTPTVFGAPTNIHHGRVSVPRVPREISPPREYISVSSTPHARLRSIRDLPPPFSHKRRHRDPAPPGPALNLRPTAVAASGAPLTRDMSSLPRAGVPLWGGAPFPLPRHGCAALCTTLRALLTSCAKPHRSHSTTRVIPRAWLKCCVSKLVWSEET

SEQ ID NO: 969743 - protein, 154 aa, Homo sapiens
PGGSRVQVFWGSQGLGPDFSSGVVATPGVRSSPPGVTRVGPPFGRAPFCAQRGWGKTWRKNSRSSFRAPLFSLFSPRIQGFMGPQHTLLGGRPTQVNTYREGPPCAGVWSRCFPGTPGSLQPRCWASGEPQGPCTRAPEPPPFAGGIVCTPRTH

SEQ ID NO: 969744 - protein, 401 aa, Homo sapiens
  misc_feature (338)..(338): Xaa can be any naturally occurring amino acid
MGRSPPSLTFYLSSLSCFPAWLFRYAGAASPHVVVSSSSVLGDLFLFVIRVASHACLCVVWGRPLFCGVSYSCGIPSCCFSLLSSLCLLTSVCLLSSVPQRAVVVPATSMGGMYAFAAVFVSSSSCALLSPVVVAFLPVVWSPSTYFFASNTLVRPARTMTVAPCGAGTVWVVPNLSFLVFRRGGNSAPASVGGPNSVRGVGQELFGCPSSLQDDALRPAMMYLSVECAEGVRGRLSLHLSDRLLFPARSLSLSLSVMSSQSIFVPLAPPSSLSVRRVCAQSECALSVRTTSSLPETPLLCVSSVWCVCLCVCALTTGAIPSLPPPSLPTLHRRAVVXPSLVRRFLTRARSSRPLLRHRGGPLLLVYCVGSQRPRPAAGGWTFLLRGASLPRPRRLRWCSL

SEQ ID NO: 969745 - protein, 72 aa, Homo sapiens
ASPPSRLAPCRTFSPVPDEKTHFKSLAPEKSSPLTEGDLLEKVRVPCPVFDYVPPELLTLFISHLGGRLHPS

SEQ ID NO: 969746 - protein, 133 aa, Homo sapiens
FPPPGPSPKGRFLAVDVCAPRRLHPGDPHYFEKLDFSAGPRVASVGAPPEWGFSYIICSVGVLPPVDGVGRRCDTWGHFVYFSAKPSTSTLWSLSVESYPPEHPACSMRFGYEASHVSHPNMVPYVPHIERPR

SEQ ID NO: 969747 - protein, 182 aa, Homo sapiens
  misc_feature (29)..(29): Xaa can be any naturally occurring amino acid
  misc_feature (144)..(144): Xaa can be any naturally occurring amino acid
  misc_feature (170)..(170): Xaa can be any naturally occurring amino acid
MPPPRLWIKGPPPEQWREKGLIPRDNAHXTAEIHLRVCFGDIFGPTSRRPPVTPLVSREKTHTVVVTHTKRKASHLHGEVTHSRTGSVHTRGKIHTPTQREETPLEERDPRREPHADRESEKPPLLMNPRGAAHETHISQAPHXLGYNSSHKHYSTRVSLYWGEKPHENXTEMGTCGCRLYL

SEQ ID NO: 969748 - protein, 132 aa, Homo sapiens
  misc_feature (1)..(1): Xaa can be any naturally occurring amino acid
XTVMCTQARRPLAVDRSRDYCGFSRCSGRLGAPPPVCPAPGWPSPPCGGLMSPIRAIPLHQGRETWACIPALCPGVSPLPFPRVYQGLYFFRHELAVILRTGESPRPREPGVLNFAGCVGLGPPWVPCELPQ

SEQ ID NO: 969749 - protein, 93 aa, Homo sapiens
WRGVVSRPMAQLLSRPFFLRISGGSSPFSPEGIFIFPADILHTRLLFLFCWEPAAPPLCDTLLGSAHTGGNFGPQLGFGKLKLLAPEVRKGLK

SEQ ID NO: 969750 - protein, 214 aa, Homo sapiens
RFARPPRWGIAPHLGTAGGLYWVIELPFRGTSLYPRAPPAPHVARLRPMDDRELHIGGSHTPYEKGVFKLEVIIPEEVTHWTSSDAGGLPRFYHPSLDSAGRIFWMFSDCPPKVLGDPPSHRRCVDLYSAAHVRDPTLMTRSWLTYPPDFNIISPPSSRMPDRGQRSMPDQKPKADEEEMLDNLPEAGDSRVPPLHTRKGEAQSASRHRKEISS

SEQ ID NO: 969751 - protein, 104 aa, Homo sapiens
MSPYFNRSKLLDFCQSKDIVLVAYSALGSPRDQRWVDPNSPVLLEDPGSFVPWPKSTSEPPALIALRYPAAAWGCGPGPELTMSQRIQTRTCQVFEFPVDCRGP

SEQ ID NO: 969752 - protein, 225 aa, Homo sapiens
EHPGHPPRPYYSCWTPARRFRWLRNGYYTNPRATKGWKNIESYLQGMSLTGIEILVRVGETIPMCWVQTQVDIKGQESEGRIHCRSPEEESSVLTTFLPKYYHFESPSSGLLGSSLETLTWNLFHACSAPPEVVMDPALAAPYEPDLEVAPEPTALPDEDDDLLRMKLEPRVQKSSFIGQLSCDVQAVQRVCPLHYYLAKRNMCFICGMLKEMSGLRSECAQFKK

SEQ ID NO: 969753 - protein, 122 aa, Homo sapiens
MSTSTSVPVGVHPKPVDQKAAGAGKVTQSAPGSSRRLNEYYPLYLPTPTLNQWWKNGLQNCLFPIGPFKFSSKRLVNDHHAIVKPFQKERRMFCGPPWFSFLRVASFKLLVFKTPYFLMETT

SEQ ID NO: 969754 - protein, 133 aa, Homo sapiens
PHQPGHSLLFFIPGGYYFPRTVCTSAFLCALVAVGARDTAVFPCEFSAGVLSSPPSPRVFHWGAYTFLGRVLASVWGIIIFLCLWPQHTLLSLHPSGATRIFGGNPSRWGCWVKRTTTNEERIFFDWRIAEEN

SEQ ID NO: 969755 - protein, 127 aa, Homo sapiens
MVIPLPVVPSDEEDGQPRRAVDHEKEGVQYSYSLFHLMLCLASLYITDDPDPLVQALMPSFTSTDPPVARCVGPDQLPLGLPPALRLDPCGSTLSSPRRELHAETSELPRTPPGTPQGLLPRNPYTF

SEQ ID NO: 969756 - protein, 105 aa, Homo sapiens
CSANPGPFKLPATNVRGPLEGYSATHIVQRSRFQECLSLSSPTEEFHPEWPPQALGWSIIWEGNPGTEQLDHIDIILKGPLEIPREKVDNNSQCRPNSVTFSLNR

SEQ ID NO: 969757 - protein, 115 aa, Homo sapiens
CLSPPYVGPPGGLSLICDGLSNMLLRSRIFCPRIELRGSTPGFYSAQWVSRDSGFLLPLVVRSRCPHNGGMRGPVKLGSRSLGPKGGRVGPRTHGAPEGSGHTDQRRQDRGHWSR

SEQ ID NO: 969758 - protein, 201 aa, Homo sapiens
FARVAAGVNKPKRRPLFGPRPSFSPGERHPSHPVVLAAPHISVSPPGGALSPTSPRGFLSLYRPPRRRGITHFFYHHGTTTPFAPLQAPLLCGAHHTYRNRQMVVHQTRAPGACGSPGSSARFSPRVILFLQLNPVFAPTPAGGLATTIACSRRREHTSAGVCPRRGRGSPPLLSPPPQMLLPPKRYTRLLFPPFVGTHIY

SEQ ID NO: 969759 - protein, 290 aa, Homo sapiens
LPFLGAPLPPWRKNCFRPRVFLSWPKGGEKYQLVSLSLRGPLLWMSSQGGLAFFVQLLTRREVCPPPCEESVALDSLPLLVSCTPLGAFQCLLTASTSSFSEPPPVSLNLPSIPAPLLKFLGLWAEPPVEHEDTPPSSRARRYQLVLERSYPRPKARHFLVPSIVDSPMTVVPRGPVSLRGDRAHPIFGGHLHRTLEGFAPPDEWIRDIPDGATRLFMSLFVCNADKDPTGIWGSRTAGYRASGFFFFQFSPLPKSQKKIRAFFPKALPPLMKFFPLCFKPPPPPKQGFF

SEQ ID NO: 969760 - protein, 210 aa, Homo sapiens
RPCILLSPHDPPLPWVPIGHRSSRTSYPDAEEKLDPEPMTSRTGAHDQSDPPAHEELDRGPDKSDRGHDKSDKGRERGYDQVDRERERDRDGIGTPGMTRQTPEEGQERRPHQSPGRSWLPIPRAQKAVSRKDEELDPLDPSSYSDAPRGTWSTGLPQRNEAQTGADTTSSWAPLPAAAVSIPRGCAPGPSEAFRPSSRIEASASWPGLK

SEQ ID NO: 969761 - protein, 277 aa, Homo sapiens
  misc_feature (60)..(60): Xaa can be any naturally occurring amino acid
WLFVSSSLLLFLPPFLRVVVFFLSCFPHLCCVSPELLFSFGGSLCCIALPFCCFAPLLVXFFCAQLFLFFGEHDAATPPLLLFLCSNNYLVVGHSSFSRLLCSLLSLAPSFFSAPHPRGFLLVSTKYFLCRNLFRSLQVVGHILPFDDDFIRRFFFLSLFKFPLFVFVVRRHPSSSHHACSPLLLIYFFCLLNYLLWLGSLSPPAAVHLPLPYQGSMFVFSNSFSASFLRGLSSLFVIVFHFVSLPAVLLLYLMFFFFLPRDFSLPPTCGVFFSHRH

SEQ ID NO: 969762 - protein, 115 aa, Homo sapiens
SAKIPDLFCRQVSQGLLLSTPPSPWASTDRRTSVSRIGNSLLVLVVVLENDVLVNRRYGITRAYGPVCFPLCFKPRKSKGCQRPFSPIPKLRTPGIATLLDPRQTPLPVGPLYCA

SEQ ID NO: 969763 - protein, 108 aa, Homo sapiens
MGGNPTYLGTTTCLGLPTSNMPHGSGYPRVPRGIVPRGIILSRTPNSVFPGLLGVPQSRFSGGMTLLVVPLSSLPCTPRVFLGALVATLAHTSPKDTCVVPPLCPYLC

SEQ ID NO: 969764 - protein, 104 aa, Homo sapiens
MSHVALSVPKPQVSVKSVWICRAQYFRRAKCSTPLFFMGSTAHCCVPKVVATVITVWCPTDFVVIQECCNSRCPLSWNIYEIATEDNHLAHPSCTRNIGDSSFE

SEQ ID NO: 969765 - protein, 105 aa, Homo sapiens
AKSLMFAAHRFKSLLSFQRHQAYAGKEALTYILGENRMMMREEVEEEEDFISILGSVNANGDRDSGLRVTGPQGWASLTRPRLVVWPYEGTGAPPLPPHQCPEWP

SEQ ID NO: 969766 - protein, 144 aa, Homo sapiens
TLNTKGLMSFLKGDRSFDAPLRKLPLWGDINALRSPDGVPICCPQQLCLFCYPPPDKEVLGGLTPPSSHCDLVGCDISCSPVFCFETKFLLTLHDDGFVVAHSWLISLRAPRMCIHHMWVAASLFSPHLAAFYLDVLPLSLSST

SEQ ID NO: 969767 - protein, 128 aa, Homo sapiens
RGPAGGLREMPKGTRVFKKTKMGEYREGTGARMGRKPRSGRELVPPAPQQTSLVKGFRGSSLGPKRTKGSQLPPKRLTRKLENDQPGGGSVKSGSHFEKSFPVRHHKKVAPSLGPPRPGGNCLAREWC

SEQ ID NO: 969768 - protein, 287 aa, Homo sapiens
FGASFVGVRCVVRVETPNPPLVCRPSCVDTAGWIPGCVAVCLLVARGGETIVCTRAGRCAASARCWVPPILSAAVCVLEGSRGGVCTRAVISLAGMCFLDRQRLCAARRSVALCEGFGGRCRPPPIFEGGLVFMLCPPRGARLFMRLCGCHPVDLWGFFGREEEGASSRFVEGREIFVSLWRPSSSLGSRFFPREVLFLWCAPARGWCSPGALWVVLLSRRLGHNMWCAHYSRRRWCFPHLVGGTCMCPQCVLSISLLGSIFLPPPGGPLHEVVFPRGGVLGGPLGV

SEQ ID NO: 969769 - protein, 105 aa, Homo sapiens
MSERRVSPSRCAECPSWPLGGESRGRNGVLYCAFWSFPGVLLAFRLPSPWRFLMEVVPLLGTFLPTGKNFLLKLSKRYGLARGPTGERYPRHVQWKLPQRRPIKR

SEQ ID NO: 969770 - protein, 165 aa, Homo sapiens
  misc_feature (11)..(11): Xaa can be any naturally occurring amino acid
VCLTPRPRVVXAPRVQRTVGGQPARVCIPLWGAMIITSTAFMRALGGPSRSSVGFCCGVGVTVFSLVAANRALAVGGTRAPLVLSRPHPPVGGFFHAGGLLFFLFCSPAGDTNCRSCEVSFVPVTRQTLAIGLRTRPRSPRVSVRELDYSSSTGGPQTSLLRPPQ

SEQ ID NO: 969771 - protein, 158 aa, Homo sapiens
RGVVRSYAALRLITGPPPGRRVCRTTSLSLFGRPGRAPPLPQLQRSVVFATAVALQGVPPPLHDNCFGAILIFWCVSPPHPAHISVGGTPPARLCYFVGLTLRPPRIDGSLECLVRTFGVSHGRPLSCSVPRPHARRQHLARVGTEKGGWWFSLLRGA

SEQ ID NO: 969772 - protein, 127 aa, Homo sapiens
LCLRGVESFLPRRGVVKRVRSRPHLFSSLWQPLVWGGVDGYSAPMVRQQPRPALCGALPAPEGVFFFSSVLPSGGRSTVCWGVCPPSRQPLSSLSMITLVWVRLSPTRESTGGLVLSPRSHRGVFFL

SEQ ID NO: 969773 - protein, 119 aa, Homo sapiens
RCFIKEVSTAWARDAPPTTTRRCAERKFPSFPPPTKSVSPTRINSRRLFSRPLLLNARNFLKRSPTQERIISSSLTSLRKERRGKKGENTNIFLGRLLTPESRGDYFKIESPPHSRENP

SEQ ID NO: 969774 - protein, 160 aa, Homo sapiens
MLGATPRPIIISPPSIFLEQPPGHTYSCWGRQYDLGAASWGRTHPLSLVSALGPALRAPRSHTYTGSPSYVAAPPPLWCCTRLPPYEIFPEAPSFPGGTVGRLLPSSLSGDVAPHLVGFFLPPFPPNFRVKGAPCLFPGGPQGKPPGVFAPQKQNPLAPE

SEQ ID NO: 969775 - protein, 136 aa, Homo sapiens
MFVLPPFFLFVDAERRLALRILLCVATRGGGVFVRLSAPPAVVVCCSPLGVLSLSYCGGSPPIGVVNADGCFSRVVCTPTSVSCGHRPRGVVYRSLAAFEYFGGPPPFFPLFCFPPNFFIRALFSFSPPFSPFGPP

SEQ ID NO: 969776 - protein, 120 aa, Homo sapiens
LEKTRRPLEENPLPFPRKPIGTRENAYPGRFWLMEAVPPAHNAPVTIPTKPLPFLILPSFSLFNLCKNAKRLESSLNELCCPLSHSKRLSEPREARALPFPTLSILSRLAQGEEKDLHCW

SEQ ID NO: 969777 - protein, 136 aa, Homo sapiens
MGSAWRGAPLLPVGARGGFSIPHWGAVRRCTTSPRDGWFVMTTIVRFLGRPVVVNHGASPILRWFLSPLSRPREDLGVYSTRSAPFLCFAVWSPCFVPRVFGEGALFCFRRLRSPVVITRGVAPGSAVAWCFFQEV

SEQ ID NO: 969778 - protein, 204 aa, Homo sapiens
MVQRVFFAGRAQTFGPGEGLIQGRPLGHIAFDQRAPSLGRAPPFRTFQIDYDRRCWADQTISWAWYIGGEALPSKQGPSPPSIPRELKVSTGGPQKLWLVLDNGGGNSWPTLIGGTYPGAQPSPDCKGQDPLSGPLAPFLGAQSRVRIRLPGRKGVAEPTIPFFCTLNRLCVRHQPGGLPGSATVFLALPLPPLPTDSATCSTT

SEQ ID NO: 969779 - protein, 69 aa, Homo sapiens
VLSSTAQAQCPRAWQEAPGGPRRRTSSAKSQPSVPTASQKPAHYPSPISALCLSQIRRPQIPPGENPRP

SEQ ID NO: 969780 - protein, 189 aa, Homo sapiens
WCRPGCGGVKNGCGRVWRPLFPFSWPTFGGGVRPPPLCAGGHTQAVVPPTQKRVFVSAKPGEGPPTRGPWLQRTPPGLFAPPPRSLIPEQVVLQALPPFSAGVFESQGGDPLPPPSLLSPPTLFFAPAGPLWAIYLVPTAVVCVVLRHSGRGLGEPLVLHTRKTTILLLVCGMKTATAACQTTLVVLFL

SEQ ID NO: 969781 - protein, 191 aa, Homo sapiens
SQGRLRGTFGGVSFGVCTPPPGPCVAPPHVSSRGGAPPPTEIAGGVLSLLPDAVVVPPVLVLLRTPPSPSRPRVRFFFRQQVWVVKAPPLGWWRGYDCGEKHVSQPLSPRGVAPPVALTLVGGWGSPFLWARGCYSTTHALLRLVVSPGSPPPSSRAVGGSDYFLHPHSLDNCAPAVCFLSYIVFSLYTNT

SEQ ID NO: 969782 - protein, 175 aa, Homo sapiens
APLVPEPGYSFVVCWCSYTCPGPFLCPATLETVVGGSLPSGQDHRPSCCIHEPSCGGTPPRLSASPRSLWGASTAQVSYLLSVCGEGGTHSLFLRAQWCVFSLVAPPPVVVLAVPPYPRTHDRRGVVSCPPSLLTTSRCHSVCLYKRWRGEIAPLFSPLSVLSPKWGCTPPVGMS

SEQ ID NO: 969783 - protein, 122 aa, Homo sapiens
MILPYKSPRAPPTAAVISHVWDSNAFSQNRLLCSSQCGRSFESLLVRYNRDAGIDENTHKHVGDTFLTDRKRRKYFVVNPLGFFFLACGHVFNFFFLNPFFLGTTGPQIFPRVWGPLKKLIG

SEQ ID NO: 969784 - protein, 147 aa, Homo sapiens
RGPFFFAFFLFGCFCPLSPAPLFSVAFLFSASPRVCRLRDFGLGGGLFPFVEWACFPSLCSRVFGFRLPPCFLCASFALDGSFLPGFFFSSPPVFSFPIPSFGLKLASPVVGHCPFSRLLQPCYRASDYLGYSSHTECCKPLLVPDV

SEQ ID NO: 969785 - protein, 212 aa, Homo sapiens
GGSASGGVVGGGCVGGGAWILWPVGVDGVGQAGATLLLWVGEMLVVGLCATAWGVEGLFVVGWLPQYRIVGGGAALCVCGLLLAPSGVCGPLEVGCTSCVCVVHAAGVGWGGAVLWCVGRGSLVSRCWCASWRAGLVLSGGAGWSPVCGLLFRLRGSAVSCLAVEWGGGVLFARCVSRATIVVRVRRAFWRRMPVAAAESSFVSLDCFLLGG

SEQ ID NO: 969786 - protein, 205 aa, Homo sapiens
FRGGADLFRGHGSSALLASPVVPLLMLASGTIVTLLLVGHWGRLSPLVRRRAFPEFRLNCCAHLVRGTPLPPQRVTPTLSPRPRWVYPEFFPQRSFGYSPRSSPPRAPFWGAPPARRPPLARVPYRKGPPCENLVEISCLENAATPIVSQGPNVGPGTTPYFFCPAPGSHQTPGGIKRSWLQARRQRSSPIQDEQARGFTARSPW

SEQ ID NO: 969787 - protein, 122 aa, Homo sapiens
MRACLCPLSVKVPRSLLATRGEPPCCVLDEGRAPPSSGGGFFIYYKGLLGSRPPVLFPPRSLPSVNRPVFCDTTCLGTVFAMVVCGGWCSLIIKGWRVFAALSAEGTPGRSCPFCPVGPVLL

SEQ ID NO: 969788 - protein, 247 aa, Homo sapiens
RGEAPNRVNELLGSRKPCRNNRGPVENRVYKNFTTSYGRTGTPREDLFDRLTTAQPGQAPPGPMDGLTPTGVPDLQPSIHSAGAHSGPYAPEDTHSPKILSSTEPTDRAILGNHQRATPSTFEKSMQNLPTKIPAQKDRWLRPGQNLRRARAEHQAHRGWQVPECPGEEEAAPGELQEQLAQLSVQALDKEENQPVALGTSQLNYLDPRISLAWCKRFRVPVEKIYSQPSGRGSPGLSPLAGEDFEF

SEQ ID NO: 969789 - protein, 149 aa, Homo sapiens
STSVSALIFKGDAPLCRKPQSVVLPAEKEARERCGVTRGVPGGKFPAGGVVFCVWVTPPYRRCSPGPRTTHTRWGGFFPGGATLLWNKSPPSAPGPPPHRGGPPRQGSVNPWSGGIHKKGLQQILAKGGVNWWPQLTHNKTTNCVGANS

SEQ ID NO: 969790 - protein, 102 aa, Homo sapiens
  misc_feature (29)..(29): Xaa can be any naturally occurring amino acid
RPPFLEVRPPAVQRTKEGCSTTPTTACTXGPHKVGRPGGAQRTEPGARFFNRKNTHSQRSVWFLGNRVYDHPQQRHKLPEGGHKGDVSRVAAYFSPGRRVCW

SEQ ID NO: 969791 - protein, 103 aa, Homo sapiens
MVLALYDPCEKEAPDAIWASRQTRYGRYIHNHRVRSTHLAARCLRPAPLKVLGTWSPLPSKMPKKPKNETQWIHRSDSTKHHLCPYAHERPMEEDGEEKSPQP

SEQ ID NO: 969792 - protein, 232 aa, Homo sapiens
SGQRLPERDLYADMYSAWQALSHQGSASSRSASILYGQSIWHGVSPVDLASRYECSPVVLHSPLTSGMRVAFPDPQETFCFDAFPYLEKVSQITFPVLIIPGPEDEVIDFFARAGALRALPPGRWTPCGWRAPGTTRLSRLYTPVPGAPASRSSSQELPRPARLSAAPNRPDPQPIRRPPDPHPAPAPNHGAACGPPGRPTGDPAPNPRGCGRCTGHRATHSFPFGSPEENT

SEQ ID NO: 969793 - protein, 161 aa, Homo sapiens
LEISLLKSVLSLTKCHVGDFSCRCPIWVPPKIFCVAPWCPTTMWGRSHEFLRKNFLSGEILFRNSRGYVSISIRPPPYHTRGYWRLDLGAHKVVLNWGHPGSCPTCGFHCPPLHSLYGTFGAPHVPPGIFQGWKLLSGALVVGPLLCCRCRKPLEGGPSTF

SEQ ID NO: 969794 - protein, 279 aa, Homo sapiens
GFLFVLVLGPPPPPARLFIPYYPPVGFDALSVELVGGAAPRVGCSVSPGRPLLLCAYCAAVLLRAPSPPSVFTSRGVGVVPLVRRLLVQSRPLVLLWRGQLRSGGAIVVRPPHSIFLSLLWVVSAPPFPRTHASVVFDGPPLCCVGIKMVGAPPSKYTAVRARPLSFSPPPRCASPSLFVGLSSPSSLVRSLLGPPSIYVFFVFSPPHPLAREEGPRSQYPPSLSRPSSQREERRSATYYSLRWGSLLPLITTAPRALSLLPASLFIYYRDKTHPLLFI

SEQ ID NO: 969795 - protein, 323 aa, Homo sapiens
MMSGLFDDSHVRGCRRRDSRACWGGCHRGPPHIGGWGCLVYHSESCCYRVCGCVRVVLYFEWVEGGVLELYDGRLCEWDVFEIGAPLCQWEVGNVLGAARWELWWVRVLSPDGSFPGVDMGARLLVFVGLGIAERFFEGQLVPLVYPVVMLVCVCRCVCEHNLGVSMEGRGLVNGEEMSLSGVYSAALLLGRPWCGALGRRGRHGATFPVWVAPLHLVGRPFRPRLPRLIPREHPPCCRPLLPTAAREVFTREMSPLSLSMTTSRRVSHVCGPPPTLGLILRETLISRVTPPAELFARASTIYFCAQLSLYTYTFLPDSIFRL

SEQ ID NO: 969796 - protein, 175 aa, Homo sapiens
  misc_feature (112)..(112): Xaa can be any naturally occurring amino acid
DVQLIKLETKWEPSEATLLNKLNISPFSFGLVIQQVFDQWQHPTTLKCLISQRKLCILASWRVSANSCPVSVCRLATPTVASVPPFYHQRVTKRVLALSVEERSYTLVSTHXPVEKECKGLSLAEIHICLCGCCPCGCCHPPQLLLLLLQAPQLKVESQEESEESDEDMGFGLFD

SEQ ID NO: 969797 - protein, 138 aa, Homo sapiens
GGCCVVGGCVFSTLGAGLVLKGRCRWSRAVGGACSLGGALLRRRLCRGARGGGVARGRGLSRGGGGSRRAVCFRGSLLCSRGEFGSGVGMFARCVGGPVRPVRPVLNSLWVWRSRPVAPVGAGAKGVWRMYSSAGVAL

SEQ ID NO: 969798 - protein, 103 aa, Homo sapiens
MFYTLSLPPRTLSREFSSGVSLPSPPLSLRARVYFRRPTHILCATPTQVLPRVSHPLSFVGVHTFLSPHLCSIPPLIYFSLYTHPNTYPLGLETPPRIYWPFC

SEQ ID NO: 969799 - protein, 489 aa, Homo sapiens
  misc_feature (128)..(128): Xaa can be any naturally occurring amino acid
  misc_feature (153)..(153): Xaa can be any naturally occurring amino acid
  misc_feature (358)..(358): Xaa can be any naturally occurring amino acid
  misc_feature (410)..(410): Xaa can be any naturally occurring amino acid
PGGVRLPGCSLAHGGEANLSARGLAFCAPLAPLFVEATYLAPTVCVFPNTRRRGLPRVSPGFPRGEIVVRPPNVGSLINKGASSWPSRGVPNFRQYFVWAGRRSGDAPPLYRVKGPFPPPAGYPLTRXWRSIFPCVATRGINHTSCVEKRMGXTTKTLLVCRRLCHTTFSQQKRGLFVRPPETPPLGFPRAVSLVRKGVGVNSPPRDVRLLCDDGRPSRGPAGLMESALSPPPEEKVCEGRTQGETPPPPGKNIGGKQLRHKEVPTGRYNEKGNISPPSEPPRSQRGSYTMTAVGPQGHNRHSSREKELGPATLSVCLRVSIRHTLFSQREREFPSPLSPHLRVSLGLFSRERVWVIXPAECSFLWRERAPLRPRATRDHSHTLSERECGRVPTVDGHPRLSEKICWERXPPHRVSPQQSKEERGRLSPTPRHHTRESVSYFCQEPQTQTCGRIGRPDTSFFSVTITTHTLAEKERSGPPATAGSPAAL

SEQ ID NO: 969800 - protein, 299 aa, Homo sapiens
RRGWSAALGCVEHVVGHFVQRSVAALVGASCVSPLFSAVGYIAPPVVARRVCLPPLFYRRHTHFVGGLPTRGVSPRVVAWAHLCVSEAGFLSAGGFFAPALWGVRPPPPLCVKSGGAFCWEAQPFVGSCFKREAGCVIHSRVSRKRLPLCVGRICSPGEGCVTTRREEAPKMGVSPPGAVFARGLEWAPPHHRGGLYLVSAGAHCCEGELPPEGAQSVVCCVGPPTRFCVDVFVRHPPVRKVLFWGKGAGRRLYIPEGYVLFEPPLCFCVESWAYKIWGPLTHKRGPHSVYRPTGELEI

SEQ ID NO: 969801 - protein, 200 aa, Homo sapiens
QRLMLTRGSTEKLNGSELGGCYDVKKALFWGTIPRLRIQMSTTQECNCKERKLVFYEALKDDPGSQGEFVTTVPASVALLLIQARNYPVPCLLPKPSVTPSGTSGLETPEGEFVSLGVISDGHSYGVPDDLLYSFPVCNPDKTWKFVEGLPINDFSREKMDLTAKGLTEEKESAFGFLSSARLDHDVTKCFQAEESKCRL

SEQ ID NO: 969802 - protein, 105 aa, Homo sapiens
MSLCMLVPPPASSSLRREMLPLIKRLLYVGGFSRPVCTAEVYYSDIVLFSPHTRGEDTPRLIWAPPLLIGPPHLFNREGHTLHLMWSPPRCCGVVPAPKSARALA

SEQ ID NO: 969803 - protein, 194 aa, Homo sapiens
  misc_feature (191)..(191): Xaa can be any naturally occurring amino acid
MIAASGVGPLRVVTLLLLLYYIYFCYVVIVVGVLLFCVVVLIHAIMCRAVSACSAVGCTNGWYCSFCLASGCAVFSPRVVVLSLFSTVCSYPRGVTSLRMAPHASFCGDLLSSGGHNVGLLLILTKVVGSPLRVVLRSRAEPLLVGGPPTRLCSSPPLVSYHGWGCFTFATNGVVFSPLVSPSPRRLIFAXPRC

SEQ ID NO: 969804 - protein, 315 aa, Homo sapiens
MFCGGRPTFVPEPPLRSVFGDPPPHFVGENSLGNPALLLGGNYFSQKGYAPPFGAPLLERKRGKKPLGRLSEHTAGANNSVSLERGFTSREIREERSGALLKRWGAKVSRRRPHSRTRANTLCCLCELLRTRFVWAPTAMAVARSYRNACYTTRAHTSVEERAALIFVVAHKWHSALVCFPRVAALCSVCRSTSCLGVEIYTACALPTYRPVEKPRVCAEHFPPHTLHAALYARLSLLGERYREEVSSCFSLSRERDIPLYTLSLPSGRISRWRYCRRDGLSSASSPPLGNHVKVFMKTAAPRANPRAPRLGWVT

SEQ ID NO: 969805 - protein, 419 aa, Homo sapiens
VCSTTDSRALQSFRVFPRRVVLLSQLVLCWVLTLVDKRGGGRSRGRSLLVPPVGSWGGHPAGLFFPALGVFFADQCGNTSWRTTKRGFYHVAPVLVTGGPTWEVHSSGSPAGGLSSPGGGLTARRAEIINKREDGGDVPAASPAHEDVGGATRRCVVHKANRAWKRHFPKVPPLGGGEEFCESRCRVFVPAIAAPILEGEIASGRNSSVWERCRVSPSGGGAFLSLQTRDWRAVCCGKRIVNVPTVASEKTTDTPAGRAAHGRCTPRGVHQAHFVVCANFAVSLHQMGPTRCALLCVVFIDWPPHKGEVVGALRAHPLGAPSISLGHTACFALSVPPRCAHREAVSCGGGHTTEVSRNIAPHAHLSPLAQGVHTGPLSGVSCACVSAPLDPRATPTGRTPGTSRLLRTPVCAYMRSWLT

SEQ ID NO: 969806 - protein, 77 aa, Homo sapiens
LASFREVLQELSCGTVLGTADGPPMEQLGFSAQVIILDPPAHISARDAPVYWIAHTGLTLHAQFAELKGKSCVRPFW

SEQ ID NO: 969807 - protein, 118 aa, Homo sapiens
MIFMLTPPVCVGERYVLLLVRPARCSFCSLIVLPLLCCAAPLARASPFRQSPCYLRFSPHARGLPTGVSSLSPVSLVSQISQLCAPPQSVFCVHTFLWVSLPRCFCGVAYIFLFAHSL

SEQ ID NO: 969808 - protein, 138 aa, Homo sapiens
PSLVPEYSLFCGALFSSCCAHICHSFSQNSVLLPCLSPAGFSLAPPCSSSSLFRRQHGFVAAGFLALPRGSLALFKRTAPWSYTARVSHTQRGPPPERPRSFPSLRGPSVIGGTTPAHWLKRPSPLGVKTQGVTTFLV

SEQ ID NO: 969809 - protein, 119 aa, Homo sapiens
MALVQRSVHYEHLSNHRAPAGSESCRASPNTAAVDAFPSNETPKLGLLKVDDVPVKEDLFSQSMTQRGARHSRGTHDVPIRQSDLARRHQILGRSVPVLPCAGYHSRVTLEFRIPGSPL

SEQ ID NO: 969810 - protein, 281 aa, Homo sapiens
FRGLCPGAPDLVGGSALVRLEGLVSRPPWGIFGGGHADLSIREVPVSVDLVYPNGHVLGVPPPWFVCPGVPQEFARGPPPPALVLSFCVPSRVSIHAVYPSPLYMEYPRDELFSLFGAPIFKEGASEEEIPDCFQMVMQFWAQRLLRHGNPPGEGLPPCAQSTTRRGRVSADWAPHPGGSRNRLGPRSSFLDTPLCPEGRGEPPPSVHLELVDAESPRPLGSLEEPKNWGFFAKGFRFKRPFYPGWGIFFWWGPRDRGPEGPNFVIVTPTLGIKDFLQAPI

SEQ ID NO: 969811 - protein, 227 aa, Homo sapiens
WRDLSLLPSLLRIPGSLISSWGPLSKDELFKIISCPGISTPAGPAPPRFQRHLLLSGTTMSPSGLGWLSAPRRWPPPFRGAHHPGPALPICPPAPEATGGTRSASPPLSPCQVTRPLRLCAGTPHSCTHGALALVSAPCALESCSLMAGIEWLLHPQPGAALPTLGHFAQAPFDALFIDLHSYLSPRAFWKETVFPQSPYQEFPDPLVQTPPRVSLQRTPAPTVATT

SEQ ID NO: 969812 - protein, 211 aa, Homo sapiens
MGGHGFVCRLALVRCDRRACVVARPAPCFVFLLKRRRTRVSVCCLLGAPLVVFCGVVCVTRDGGGGFKSSLLLVSLCLLALVQRIVRSPFGVVGQARSSRSRLVAAARDTCSVYTARVYSASVVCVRPLLIGCLSLCWMLFWSRASRSVDTSDSYYPPTCLDHSSVRKTIFFCVMMRPPLCCSLYYRNTILAVALCYAGGFTNSVFLPTTL

SEQ ID NO: 969813 - protein, 39 aa, Homo sapiens
MTYTITLPRAPPPPPSGGGPPPPPPPFFLIIFPPGVSPP

SEQ ID NO: 969814 - protein, 179 aa, Homo sapiens
PRGYEVFWACALTMRPARCKSSSVAWQGTKKDPQDGQLSIREAMEAEFEGCKLRLQLKPQARAEIRARMGIGLGSENARGPINWDEADIGPWAQARIPAGARSYKPKPQRVASAQHWCPVPSSPYHVATCHVPAPRGGFTLLVPRLSRHSHTLGSSLALVETGATHHVARSGACGFSYQ

SEQ ID NO: 969815 - protein, 389 aa, Homo sapiens
VIVAGVGVLLLAAGVRVRFFSALLRFCFSFLSLFALTRGVVRSVSCSASSFVLAVHVSARRGGGGVPARLFFAPRSGAVVCGGPPLSCSVFFWLVVVRFLCASRRVFVFLFVLLSGRCRCLVPPLVSVAPAVWSLVWSRPAVRCLLSSVCFLLLVWFGPAAGLALVSVVVSSVLSSLFALWLVSASVFLCLSRSRCLFSSFFLLSRSLSALSFVCLSLYLRPPRLGGVGDLSRGGFSLPLPPFVRVYVLCLAPPRSQLFLPAPLFFLFAHRPGRGGGGRSLLSRACSPLALVFASSSGLATHLSSRLYSNITRLSTTLLLFLLLSRVVPPPLGAFSHTPPLSPARCAFHSPPSLSPPPPPRGGVISRAPLFLFNSFGAPPPFFPPSLFF

SEQ ID NO: 969816 - protein, 70 aa, Homo sapiens
  misc_feature (30)..(30): Xaa can be any naturally occurring amino acid
  misc_feature (33)..(33): Xaa can be any naturally occurring amino acid
SEIKHLYRQLDMILDGREDMSLSLTEEISXRGXGILGHMGTITPPELDTVVKTSPEILRPVNEMENSPWE

SEQ ID NO: 969817 - protein, 174 aa, Homo sapiens
PPVNRAVQLPHRVFVGSAHALLWSPSCGRTHKGNIIMHDPFATAALFCYNFGHYLGTLADALEGRTGGPAAPYLPMSTGSGVTRPGPSCGPGFGENARVLDWICRPVRGGGPCPRDHPLGWCPRKEPLDLSGLRAIDTPQLFSLPQDFWEPGGSDLRSYLNRAGQPGSAPRGVG

SEQ ID NO: 969818 - protein, 245 aa, Homo sapiens
ESPQSSRSLVAQRGAPSHNKEGCGGHAAHTDKTCAGRHHTGGGGTLNNRGAHIAGKHTRRVVNTGGTAHVCHTPREDDCSRPRCLSTKERSFPFSVCQPGVDTHLSHRGGAPPCCPHIQRVSFGAHRMGPLTHSFPTDQRGRRGTTPVPTSCGAWFPRMSLAPAPLPKPLLPRGYAPQGSHRGHLPPTGGRQPHPWGRQLGLPQKRWEDFLAVLVRAHLRRAIETPPDPQKRFSQATPSHQSTFA

SEQ ID NO: 969819 - protein, 74 aa, Homo sapiens
SFWVSTIILVGIHLTYHHLSPNETLLYYQGSFLLLLFSSPAERFIVFFHPKLLFFGHRFFPPILIHCALLLSPP

SEQ ID NO: 969820 - protein, 90 aa, Homo sapiens
HGVCALHDIGVRQPAWFLLAPPIPNGHPCEDPERAMWHPRRVGPGRPAFSQGMLPRSPLSARGLPPPGASVFAAPKVWFPASPHTPVFGR

SEQ ID NO: 969821 - protein, 155 aa, Homo sapiens
GSIINCVLIRDLYEWLHEGSTVSYLLTQWNSPAREEAGMTTSQTSKTLWSFNLCKANQYLTNPQVLYSQPALKFRLGRPRSRTPPPSQYMLRLHPVQANYYTPFDPDNLTHGTSYPRDNSANPILESHINHRVYDLDVGSGHPDGANPLLKVRLF

SEQ ID NO: 969822 - protein, 122 aa, Homo sapiens
MGAAPRSCLSRACAGCFLSHLWGVGCESRRAGTTRYEMRLRECNELSLWSLPHNDRRGGDFFLRERRAPSAADPDGCLHHTWWGFCPTVTHSTTQRSVGGGVYPTAAPHLHLCGFRTHHGGG

SEQ ID NO: 969823 - protein, 166 aa, Homo sapiens
APPMGTTWAFSLLQGDYSLGPLLRPSFCPRVSPLVLESPPPPSPLAKPRFAWAVKGRGWSPRFSGQKTWADARPQFFWNLGDAPPLVDMGPGPAPTGVLEELSHEQIHPLGVAFARSVNNEEHDHASRAGGVTSKAPWTAREGCLESWARVTPQSVPAKAHERLNG

SEQ ID NO: 969824 - protein, 205 aa, Homo sapiens
FLQSSCRSSFLLVFAFSGRRLLLPSLIVYAVFCFGGASCVGLFLPSPSGFSSCVPPSAVACPLLLPFPPFWDFSVRVFLPRGKGAAFHTGIPLFEHAPRGPLAAVSHPWAPSPSWAVKALWMSSPILVFPFRGDLSPGGDIHSGWVFCGIFEVLYSSWGYPSLRTQTFEEVIFVGNQAPESVFAQYWRLPKGPGFPGSLSRIKGP

SEQ ID NO: 969825 - protein, 187 aa, Homo sapiens
PPARCGALDRAWFWCSLLFVGCTTYSAVWCFAVLCFDACSSVSSLSWVFVLFVYFLRGGATSFFFFLLGARSGCFVLSVLCLSVFLWLLVLLPAVLVGVALFEPAGVVSVCSVFFLRRGFFVFVSVSLVILLCVAFWVVGPLSPLTLLCFFVLWLFFFLWLWCAPLFLARCWVCFLSLVVVFRLICY

SEQ ID NO: 969826 - protein, 134 aa, Homo sapiens
  misc_feature (44)..(44): Xaa can be any naturally occurring amino acid
GEYQGHSPVWVLNAPRRCPPHTLGPIILAQLFPSVPPCRQRRTXGEHQDSGQTPHHCPLATGDQAPSAPGAGYRPQSLHPQGPLAHLSSLAPLCPYESCSLMAGIDDCYTLTPAGCTCPPSGTTSPRPPLDALF

SEQ ID NO: 969827 - protein, 171 aa, Homo sapiens
PLLPGGCNQGPFCAASLLWRRTTPCWCAHSVNRGGVNPLWGVFLTPAGGIYFSPRGSRLVDQYGGLFFGCTTCKTTWLCGAQQNGGVVAPCARSILRRGYFSLAPRRRVCLSAPPQSVGFPAPIKPQLTGLVCAFDHPLSSVLSVGCVSFIFVGRAATRGTRLCRHFSPPF

SEQ ID NO: 969828 - protein, 233 aa, Homo sapiens
PLKSLCRHGPPPARCYRYCKDNRTPSLAFFRGVPDPPIRTFDLGGKRAKVDEFPLCGHMVSDDMSTVLLKPLEAARICAHKYMVKSCGQDGFHIRVRLHPFHVIRINQMLSCAGADPAPNRHARCLWKAPGHCGQGFTIGPVIMSIRTQLPDQEHVIEALRRAQFKFLAAQRDPNLQEVGLHTSSMLMNLKTLVAEKRLIPDGCGVKYIPHRGPLDTMAGPALMRASHVLPPS

SEQ ID NO: 969829 - protein, 121 aa, Homo sapiens
MIGKDFIEGETTLSSGPPLSPRGGFLPTGAAASCLVEQEVGEFGAPRCPHDESLGAPHCEPVYTLFVITACVVCFAASFSTTVLTHCAGKLSLLSLCSFCAHTDTLCVRHTLVSVCVTTLC

SEQ ID NO: 969830 - protein, 117 aa, Homo sapiens
LGSIFGLGPFSVWEAPTMCAPGVSPALPAGEKSQRVSFLVVHSTPSYRVVFAGVFSNHAFHICGESVWYTAVEGHVPKVFPAEFCARVDDGTLFSRTRRLLYGGAPLVRRPVGRSVV

SEQ ID NO: 969831 - protein, 107 aa, Homo sapiens
PFVRRCSWGGHSRCGATYKRGGDQLHRGFFIYPRAGYNFFSREKLLSDCWPLFGAAPARCRRCLPRKSDRLVLVRPLVVFSREDFCATNGRSRPLLGAEEFFSTPAM

SEQ ID NO: 969832 - protein, 104 aa, Homo sapiens
MRRTARGACQERGIFWATPPSQGRPFRRPSLWGSGLSPPLFLWDGPSSRLLLEFFLLWPPPARIWCETRGSTRRIIEALALYGEKTPVHTPTWAQRCLGVEPLS

SEQ ID NO: 969833 - protein, 182 aa, Homo sapiens
SLRWLAAASCFSPLWILLLLDLRLLLVVVLSVVGVSSVVRPFWPPLCVCALPCLVRALCPVVFLSWVGLSSWAPGSLVGYFFFASPFVAALLPPALSPFVVRPRRIPRSVASMWRPSTLPQQCRFIDSQSMLLLNCASPPLLRCFGPALESSPWGVSCERHYLDRPLGGFSHQWRLSSFPPP

SEQ ID NO: 969834 - protein, 153 aa, Homo sapiens
GHVGCPPPGGARYPLWGGRRGAPPGGAPCPPRRVVPPADVCLIILGGVSSAPRRRSAPRGGGGDTHRGVWGAPAVLVELGVCSWGPPPGLLPPPPACLFSQRVPLCGRRTAGGTLPGAPPVLLWWRSHHPPPRGRAGARRVVKRAPCPRRWGV

SEQ ID NO: 969835 - protein, 333 aa, Homo sapiens
MSLCSPFFLCAPPLLWLPPVFLGDTNMGPPQRCASPHAFSPRAFVLIWPTPPSARSPIPGPPWYTPPALGNCLLNPGIGLVFPRGPPWRFRTSFVPIRSPACAVPVSGAPCRHVKSPVSRPEHWSRPEETSLFPALGIPPEVSRGPLGILSDVHADPDWRTKWEPAEPLLLTLLHISPFSFGLVTPPGVRPWPHFTTLKCLISPRELCILASWRVSPMLPVSVCRLANPTCCTPYPPSITPPGTNEVLALSVETGLSPSPLLKRSRPFWLSPSAFVAAAPVAAAPPRCSCCCCTPPLRLSPGRVGGRSDRRIYGNLVSLTNPPKATHLARFIC

SEQ ID NO: 969836 - protein, 182 aa, Homo sapiens
MWDSPFKRPQRLIRLTRCQEIVFHNAHVFKKVEPIFPRESEPPLPSTGKLRISPRFSVLKRVITTGAFVPRVDHPPSGAKAACWLLTPSPQKIWEISWPLHALVFSLPPATVAGPTSALPMPPMSGPPTARLFFWGPPTLCALSRKLPLNCLRSALYTPLVASHENGELMFWREKGVFYKER

SEQ ID NO: 969837 - protein, 106 aa, Homo sapiens
SSTVPVSALARLMNSPEYPATWEIGFGASTALPLIGMTSPRDLILNLGLFSREFGWPGDLSDLDLMAPQPGVYPVDQWDPVLDPDLPKNRLPSVTPPRCALMAAEV

SEQ ID NO: 969838 - protein, 183 aa, Homo sapiens
  misc_feature (176)..(176): Xaa can be any naturally occurring amino acid
ASRNWDKPSIRNCPLKLVSDIRYWIVELVADFDPVLKLTVPPGILFNTPDKSLSVHPLVPVALVTFVAYRLRRVPCWRDPSLVALVELSCVPTPRPSEFCCHAVFYAAPGLTVFLGIFFYEGLVPRDHACVLCLRGLVTGWKVPARYGAPFPLLSLMSFGPEPPLGCLPCFEVGEXVCTLRLV

SEQ ID NO: 969839 - protein, 94 aa, Homo sapiens
  misc_feature (54)..(54): Xaa can be any naturally occurring amino acid
MGSLGDHKNHATTYVGDKFEECLKKRSELFTLILPDLHVFLVFDHRVYPLVNVXTVDPWGMDWVNGYYHGTLCIYLCHFSVNLVSIPKLKVYLI

SEQ ID NO: 969840 - protein, 75 aa, Homo sapiens
DQLGPQPHLTTGLDPLTVRPPVPAVWVLLTAGSPLEPPLSVVNPTPRSTPLAWVPCPAPAVALVPARRARDNPES

SEQ ID NO: 969841 - protein, 222 aa, Homo sapiens
MFSCVSPGVAFSGLPFRVLHLGRWRILWTRFSLPMYSAPFQGAQRSTLAPFVSPPFHLGGPRWSVYPPPLRFFSHSPSLPPPVWVSTPWPRFVPLTNCGDPVGGHSRAPHFQGPVTGPRPVRSCWDWPPPPGETRGPSYWPPRGLLPGSSNPRALFSWALSPMAFLGPRVTPLDGCIPGSVHLGPCALSRWFAPPGPTGGPHWVGNLEPRRFLCVTLVPNIE

SEQ ID NO: 969842 - protein, 196 aa, Homo sapiens
  misc_feature (114)..(114): Xaa can be any naturally occurring amino acid
MKIFRPMRSCGITYRRKFASNVENVSGRTYANPADAFKQQEEAVLELEKRIEESSETCEKKSDIVLLLSPKTRPLEELNIQSSPSQLEMPLKPKFSSHQKEIYLDAKKSPAKLXGKEPPPVVNYEEDAPISYIYGKKGEADPNLNLFVTSIAGIIRSPKSALGSSALSDMISISEKPLAEPDWYPGAIPQNRSSRT

SEQ ID NO: 969843 - protein, 142 aa, Homo sapiens
ILVACGVACCVGRLCLYDIASVVLVPPLFCVVRLQRLMSCVRCGEGTGLGCHGLVSSPLVFGNDMLRSVLLCVRCWFMFGHGVPPCSPRCGWVWSILCAVTMIILPTSLRGLQTTFFPRLSPPPWSVLGGHKQGAGTSFFFR

SEQ ID NO: 969844 - protein, 138 aa, Homo sapiens
  misc_feature (2)..(2): Xaa can be any naturally occurring amino acid
MXSPAVARCIKFFVGWGRDRSRERLRCSLHPLRGAPDTHLCYEVSPPTYPCRRSFIYSSLGGPPHYTFRTPPGPSHMLVCLREASDIHAAPSLLFFLVESAPITFPHHIERVVSTPPPALVVTGALPPVGGPTSPSVL

SEQ ID NO: 969845 - protein, 262 aa, Homo sapiens
MSTAWCAALPFVDVIFLVWSPLPCVGGDSSSPMDPRFCDTDLFFSVVSAHTRGVYSRFLAAPPPSRGIPPVEKVLILPAILLPPGGFPKCEPLVHMDPGVNPRFPWDQIPEKRTGSSPYCQRPFDPRNPLNVWSTKLEKSTTEDENQRDTGVIQNSLESYAFDLEAPVEDEKLHRPDVTDEVPPQISGPRCNEIIHWLDKNPTAEKDKNLDLPRKSLEKVCHPHLSPSCTRVQEAIPEESLGDFPGGGASLPLGGASPRPPH

SEQ ID NO: 969846 - protein, 141 aa, Homo sapiens
MSFCGRTPPSGHRGPLLAPHSCPRFSLGTTGLSVFHRHPPARCAHIAYPEAVVPSDDPPRFVAPGRPQGSRGDLWYPAKYEFPLCPARNPPAESLIEPPAGPPPPRVSSTPHAPPHESAHEQMGIPRATFVICPPYLGFIY

SEQ ID NO: 969847 - protein, 104 aa, Homo sapiens
MIDATHGLCPQKDRVLVPRVPGISLGDIFVYDDHALSSCPQHPLLPVWAKDTHAPPFPGRAAPTKMGAPPTGGKSVVVAPPELFVKEEELWVNENEVEKRPPRP

SEQ ID NO: 969848 - protein, 71 aa, Homo sapiens
LVRTREFFRDYTVRCLSMGPCESNCYGRVFPPPAAEGLERVFIFGPPPAPPPIVQRRAIRRRRRVVPPPPP

SEQ ID NO: 969849 - protein, 162 aa, Homo sapiens
VFPPTTLFDPPHRNHWRPSASWLNPPAGGMFLQTSLHLRSWGPTTSLMLVRRSCGLFLCSRQTHANDTRCRWVQDHLFVCTTTHRRGGVIPGGASTFVFQFAAPARLINSSSYEFVRPSRATLLCLVSALFSTRGSTSIDSLFFDEEFAILFVVYYTLNMIF

SEQ ID NO: 969850 - protein, 198 aa, Homo sapiens
RDEGGDNPTQCPESVTPIFVWPIPHQRVVGRTKWGAAFTTQVGFVSQKVLSAFSRPLLIDPLWARSIIWSHRGGSFALSPPTWYDLLRGPRWVGARTRFLLQHRPAVFLCRRRGRFIAPPRLFLRWAAELYSSRNIRGGATVLQSNKSPSSCFLSPLAHPAGGGVDTFCAREDTLLYGGVFYPQEPHTFVVDRPHIIL

SEQ ID NO: 969851 - protein, 152 aa, Homo sapiens
VFVGVCCAFLQAVVRAFTSLGGFRASAPSPPVEGVCLPQLPPAGVGGPNFRALRFRWGPPLGRPMGQILPPPDAKYFVWIRWLHPASLAPPARWWISTQGFTSRAPPSATPPMLLYGPQQMRSTLLHWVNLRIRNFAPGQCTHPHASPPELG

SEQ ID NO: 969852 - protein, 120 aa, Homo sapiens
MSNTPNNVCLFFCVKNVYIPTGDIYILEVLVEVVRYFVLTRTELFPTLKHLYLCPRRSYIIMWVPTTCVIDSFSHTFLRRIPPPRAIVICKIVPQRETLNEHSYQRVYSVFMKSAPLVSI

SEQ ID NO: 969853 - protein, 330 aa, Homo sapiens
  misc_feature (239)..(239): Xaa can be any naturally occurring amino acid
CRVSCCCDVVAVVSLVLLFVVGWSPLLVVGVRDRLLVEFGCCGWLFRGPMMASAVMVQVSYVRMGRVTDGVFSRAGLWCPSLVCSRLGAFFSRAKGLFSSAPVWSGPPVTALCVCARGVWGDTVSCLRAPLSSLGLSPILIPPTPLGGSCFAPDRGGVSHAPPLCLVVRSPLVCVCVCWPSWWPRSIDTSWWGLVSPHRSPFGGDHSSVVVVTQRDESSHWMGWVRSHAWGGEHPFHEXGTILCGEFLQEAYSPRRSFSPLGALGGRSFLDRLLNSFVHCVKTNFARPQGLAPGVMCLKSLTVLVPFGPPRGPQRGFKTLLFPGPLDTLR

SEQ ID NO: 969854 - protein, 70 aa, Homo sapiens
  misc_feature (1)..(1): Xaa can be any naturally occurring amino acid
XTRERAESRTAGVATAVSVSLCSLVLYSLQLIRYIVRPVISVVSSLCLHSVVSTLGVCGSRNYHVCSPYH

SEQ ID NO: 969855 - protein, 169 aa, Homo sapiens
RTGPLLQFLVDPMAGRPSDLLLSATTAHSLWDLGPRNTSSLLAVDFPCSWTPHPRDSKRFLPARGGDTPLWLGLSVVFWTPPLETPFTFYCFVVTRALPPVFLKTQAPFPPLFPGVRLEPEPGLPPVAPKDCLGEKPWPELLPGTGVAPGTSASQFWGKDPWIRLPGLP

SEQ ID NO: 969856 - protein, 147 aa, Homo sapiens
PFFVVVPPPWATSSICVGGPPVFSSTLDFPPFRTKLGKNPLFLPGYFLRGISSSCGSSLSAPFITTVLLCPFSTSYYLAPLPILFAPPLFGTSPVPPPFVFCASRITGGGIPQYPPLWGVAPPPLFSLFNILPLFPPPLFISPHSSI

SEQ ID NO: 969857 - protein, 105 aa, Homo sapiens
MDPSRALAQCGIVPHCPAFPFDGFRQYLGPTCAPPTPVPQYCPHDGRPSVHHGGNATNTPRPTPQQHHRWRQKGPFDYRGLKSPNVSYASTRVFCFPFRHREFFF

SEQ ID NO: 969858 - protein, 118 aa, Homo sapiens
  misc_feature (79)..(79): Xaa can be any naturally occurring amino acid
MSLPVKILGKVAWLFEFPGLVLWTATRTPLVEYSWSRCPGETLVPTLYSRNRHGPRGSPPTLAAGTRATISLLTPSGMXVKFSPRTERHSLEFFQPVSRTHHVFLYEKWENFLTRNSI

SEQ ID NO: 969859 - protein, 113 aa, Homo sapiens
TESWGDSVCGSSFCVITCCAVFFPWVTWALFPGCPLSLCAACKRCAASGFHGSPPCLTKWDPCDTRVRSHFLIKVRKAYFLKGCHPFEIPSSKNFFPWTSVNSQLGILLQHFY

SEQ ID NO: 969860 - protein, 104 aa, Homo sapiens
MCLVYLLLGGAAMLSWFVLAPPVSGDLFMCVGTPVGGSTIVVCWERRGIFGHLQSVWCPPGLPPGVLKSSCKTLGSPVKPTRVTNCLRNVFITPPAICDTPRYS

SEQ ID NO: 969861 - protein, 51 aa, Homo sapiens
MSLLPAGATQHQSYSSLESRVLKPQILDVHVHSLPVPYLLFLALYLKIFDP

SEQ ID NO: 969862 - protein, 106 aa, Homo sapiens
VSPLPLTTYLHGAGYWLNEYADGFDKELVNGDKGCRPIPLYTYCTATLAQLHPNWSAPLAKSTLNLPFTIIIFTNLILLAILGILSPLSQPTFHNFSKPLPARPTH

SEQ ID NO: 969863 - protein, 339 aa, Homo sapiens
MRRWSFFGGSVCCVAGCGLVALLLVGVHAVFSLPSMGLRVWGACLSWGAEGSVTDGAVWRTCGTARPDMLRFCPRVLAYPCQTLPRSGTTRCFLTLCFCPSAQNPLRGGVNFTAPFGGTLYVSAALGGSIEVPPQAPPRLVWGPTSALHAPLHWAQRPVYTHFPMTCPLHRFSQPLSPSSASSVLFSYTTLGFGGAILAPNPAFFFARLNLPEKRPQFPRTRESSSREDSSVSLTSRVSEGPGGSPTPAHPGCLTRRIGRRRPREIPPRDQKGQARPERGRTTLSPARPPEVGGHDGRPMMPEGPADGFRLLGKTPALLTREGPPCLLLLLAFCLLPLS

SEQ ID NO: 969864 - protein, 126 aa, Homo sapiens
RCVSGLGGAVNMVASSVVAGLSFPGRCPLAFVAVARVAKTRGGPCRLFSEFLVPPPVSLPFGPEVILPPGPILGCGASVSSFFALSGLIPPWCSHSVSPGFLFRVLFPRSTRNGENAVRSRPGNLP

SEQ ID NO: 969865 - protein, 162 aa, Homo sapiens
SRGSPLRIVPARGERGSPPPCPRSGWATGSGGTTGHRGAIPNARPVEWPPLPQCFFGPSLAQTPWFYGPRVLTQRYYRTCPTWEDTLWGRARDFPRAGSPGFLTCAVCSISIAVGIPRIGDPLVSPGNSREVSLQGPMGLLLGCHPPLPGGPPSGEAPGFGR

SEQ ID NO: 969866 - protein, 126 aa, Homo sapiens
PSYSSGGNGGRRLCSGRVVRLHRAPWLFPYRLFSSPAANRFGLPEGLTFSVGPILNSPHQEVPRKPRGWAINPVVPFRLAPPKLGAASTLRAPQCPFGWELCFPRGVPQDASRSAMCPRNYWPPGA

SEQ ID NO: 969867 - protein, 150 aa, Homo sapiens
  misc_feature (35)..(35): Xaa can be any naturally occurring amino acid
  misc_feature (63)..(63): Xaa can be any naturally occurring amino acid
MGFPPGHKAAPNGWFVLRESAVLSRSAISPPPSWXGLAFWRWCLGEIYESTQRATFRPVGVFXLSKRPGVTPTEKALSCESLWHTELSRPQVSVPRRKRSTEKGRIYMRDILFLPIISSPRPDTSYNPRWCERDRFSRELGLFSHIAPLL

SEQ ID NO: 969868 - protein, 136 aa, Homo sapiens
TKCVLVCRSSSQRCTRLCLDWSAARLFMGLAPVVKANEAGVGRPPPEVRPWAVPTIFGCDGCSTRTSVSFAVGKNIYGPRLPCYSGAKLYIDGALLDTLQVWAQNCSPRGDRCNPPFLARIPPAYHIWWTHNSPPI

SEQ ID NO: 969869 - protein, 149 aa, Homo sapiens
SLVCLRRPADVVGAPRPVLCAAPALVVVRATRPWCLSVPSSTPPSRVGTFSLPCARRAGVLFYVCVCGSHPREEVGSTLRSLLCDFVFVARSCGRRTLSSRLFLWMIATLSHTLRVALHENNSLSSHRGTFPPQLFVSPSTAKSRDVVV

SEQ ID NO: 969870 - protein, 229 aa, Homo sapiens
GCVSFVFFWFSGLTVWLFARMFGLLGVCVVFCLLRLFVFLFFVLLLFCFGVCWCLLFVVFRVFCLFFLFSGPAVSCRSSVFFLFLECGYAFHVSVGVVSVVLSSRVVSGCASGEGVSVSSFYFEFGFVWVVLVSGLGRWRVVCYEKKKSGARTAPVIIKKTAPRRLLFFFCLPSFVAVGGGGQSPPPPLCVVAPLSFVYYPRGGGVGYSPSGAGVVFIDCGFTAWGAWG

SEQ ID NO: 969871 - protein, 353 aa, Homo sapiens
  misc_feature (195)..(195): Xaa can be any naturally occurring amino acid
MSSLILSCCLPPPAALLVRGMFSPKESRPRAGFSCFSLSGAAPLLSFLPAEVGMRWAFFCRRDGICSPPAALRLVCGVGIPPCCTRWPHCGPPHHMAGFNYEGGSACVCRPTPPGGAPNTWGAPPLLVLSFVGVLFFEMGSPPRRESGGPPPPPATHPRGGSAQLTSSTPGGRRTSLFSPPSSLSPPSRVAAHEXSFSSLCEGAHTEYLRATVARPPLSLSSSLSHRVRTRALSAARSLCVLCVCAPLSLLSPPHPRERSLGLFCFLPTPSAVRSHREISSLLPLFVRGLGILRCVRLVTPQLSPPRGGRPLPPPLGAPLSLHSSAPTLSESAPLFCRASPASLSLCAPASLS

SEQ ID NO: 969872 - protein, 242 aa, Homo sapiens
MGCPESLPPPPVSLQGLLAPPCFAQPLRKGIHGQLGYLWRTHDHIHASLPPRRLVDAPLRGSFGLMAAGALQNIIPASYWRLPRLWARVIPGLYGELTGIAFRVPPAHVSSGGPDLPSRNLPYEDLQKVVNTGLARAPSQGLLGTTEPPVVSSDFTSDTHLPPPFDAGAGTLPSTTTFVKLISWYDQNIGYSKHRVVDLNGPPLGLPGVRPLEPPRPRQSTQRKRRDPHCWGVPATLSPPPP

SEQ ID NO: 969873 - protein, 160 aa, Homo sapiens
PFLPANQPLPCDIWTLSCGSNCKLGSCYTTGPDPPHCRRCPALSSPTQTAQTTTSILPTRPALPPAIATPLASHPTRLLLLVIWNSPSEVFLAGHPSLDPVIPTRWPPPRDLSPSARPISSPPPRNLLCSCLGPGVPGTPNRVSHFSLVDPLVLPLNAVF

SEQ ID NO: 969874 - protein, 147 aa, Homo sapiens
CSPPCSRVKKKLGRRLGPPPNFLSKKFLWWEMPAPTHRVRVDRSFSLGAQSRHYCGCVLERELFFSQKISTPTPLWWCPSLALCSWEYIGERHRTHSVARWGGVSIFTQRNRGSTQKKAWLGERRRAHRVHHHSACPHESGAHRERR

SEQ ID NO: 969875 - protein, 210 aa, Homo sapiens
  misc_feature (177)..(177): Xaa can be any naturally occurring amino acid
TGCVNVLRCLLGCRRRGCPYSNAGCSSGSWFFMPRCGCIMFFRPRAPVVPSAPLFGAPIVDDGVSHEDPSVWSPGPRNFPRDFSVGPPRAPPPPFRKSARHKRGATRKKSAVNPTFLKEKRIGKKMGTHTRLRVPIIREILGKTPSVHPTDPQRGPQQCATHDGFLTRVPCCFLKDXGSCVNLCQTCECKIRTFYEKFPSLSYLREWFQG

SEQ ID NO: 969876 - protein, 327 aa, Homo sapiens
  misc_feature (34)..(34): Xaa can be any naturally occurring amino acid
  misc_feature (36)..(36): Xaa can be any naturally occurring amino acid
  misc_feature (125)..(125): Xaa can be any naturally occurring amino acid
RESAVSCVGGAAQTDRRVFPEHHGLVGGVRRKRXGXSHLPPGVYRVEGEYIMRNQTLGSGRPPLRNMNEYHVLVAVFPDGENSLGVGPLLPPPSKTRGGGLERTRGIGCPSHATGGGANSPPDRXRCLISKAGPRCSHGRVVSLGLRGAACGYLFLRHTGERRVLFTRRVVCVCGDDAAERCGRVCSLVAQTPPVGVADSSLVMWLFYHGRVFWPTGGATSFPLPRFSFSAPGGGLVSFSQQDALGGYPSSLSGDVFFSVLRGRGELFPPTNDIYSDGGVRLIHYMCARSPQKDDLLEECGRPPPPLEKKEEENCSPTLDEVCEAAT

SEQ ID NO: 969877 - protein, 143 aa, Homo sapiens
SEIPTMRFWEAYRDIYLSPDRTGSSFGKNSERRERMGPPRRLLPAGFGEGETLVPTHSYQRNGESQRKSSRPTAGRNLTHAPLQESGRAHPIHAETHEEENEGPPATGPPPGPGHRTGPDRTAGPPQPDPIPLGPESGREEVG

SEQ ID NO: 969878 - protein, 150 aa, Homo sapiens
MRVISAPPGVSRSAVLRNHKKGAQAGGKRDNQVRPLEAPTDIDPWPRKPAAPGSRGHRPSPYPGREPPKGTKGPRDPTGPVNGRRTFPVGNCLTAPDPYVAPPPRIEDSRNIKEGKGSSNLSGKTQDPRQKVKIGPLNHEDLPPPPRKLA

SEQ ID NO: 969879 - protein, 106 aa, Homo sapiens
YLTNPQGPKLPNLPFKISGWGDLGPRTPPPTQYMLRLPPVQADYYTPIDPNNLTHRDQYPRDNQRANPILESQIHTNRVYDPPMWIQDIPDGATPAIKGSRLFHTD

SEQ ID NO: 969880 - protein, 139 aa, Homo sapiens
MCARLRGGATCFWVIVEGCLCLSLPVARDRYRLGVHVGLYCRDWFMQDRRDELVGLHGGAVRGVWSMVVWYPPVTELCCLTPTLLLRDVVGSEKNKNREIDASVHNVLLAHTESIQNVKDLLSTRDQPLNNGSQPKSNR

SEQ ID NO: 969881 - protein, 152 aa, Homo sapiens
MSHHSPRAPSVGATQIFLPRAAHQRALFVVARERDSSADSVYLLRAPREFVSLAPTIDRSAWLVGSPPLSLFVRGARYIDEREEPPRSREGYFSLSHRHRRERRRKTEREKHNHIHSSVRVFPPPVIATKKIIIEEKDTSPHYMRKHFNNFV

SEQ ID NO: 969882 - protein, 128 aa, Homo sapiens
MIFLNLPGPPPIFSMATQSLHLSGAPTTPSQSHTSLALPLGPLGGHLANLVGFAQMLTPVHTRGFFFFSHDNPSFWVTLLRLGETAPPRAYNFKSIFLCLRLLLPLFHWIVPVIHGSWVPSNKEFPNW

SEQ ID NO: 969883 - protein, 210 aa, Homo sapiens
  misc_feature (23)..(23): Xaa can be any naturally occurring amino acid
IQQQPPCPQKAFGYRDISPLLVXLHEVFFLPTGFFLSLFNHSSTPYARYAPPIYRKGTLALPNTALTPPLIPPMEKSHLRVAPLRYLYSHYTGGIHIDPEGCTHIWCYNMRNHTRRPTYISQHLLILPQFTGSLFYPPTTPQSTSSLPSPLSERHLSAQHIFVATTASHRSFTSLIGSNFLTICFIRPLYFTLQPNITLGLNPPLILAFC

SEQ ID NO: 969884 - protein, 117 aa, Homo sapiens
MVLVVFTQAERINANGRRWVVVSPRRSVPLAGISILPPPGGWIYNFLVVLCETRLHYYGASFSARPPTYNRPVRAPSTTRFDRGFFLPTESRTGRFILCVSPPPWIPLSDRKKESPL

SEQ ID NO: 969885 - protein, 321 aa, Homo sapiens
  misc_feature (43)..(43): Xaa can be any naturally occurring amino acid
  misc_feature (134)..(134): Xaa can be any naturally occurring amino acid
  misc_feature (221)..(221): Xaa can be any naturally occurring amino acid
  misc_feature (278)..(278): Xaa can be any naturally occurring amino acid
  misc_feature (300)..(300): Xaa can be any naturally occurring amino acid
MKKVGYYISPPQRWRHPALCAPFFFQGGLLLWVRIVGTPLAPXSLLWGDVFSPKDRGPPTTPQRKAQNFFCWGPYITTPQRKMLLSLKRVWWRPRFFPPLLGPNPARRRIWFLLWRILSFGRYFFPLFPQSLWXEYKPPRGCWSRPKETHPWVSPRIVRDPHRPPGDWGCFPLVVPAAFVSALYQLQSHPLYVMSLSLLLGPWGETQQLGVLTRDVLGGNXSRLFNLVPTQLSRETPPPPPLLGAQHTTRLIFSRHTAAGELGVSLSHSSGESPLSRXALSRESAPREFGPHARPLVLYXGDSLTHEKGAHTTHTLYTPAL

SEQ ID NO: 969886 - protein, 107 aa, Homo sapiens
  misc_feature (11)..(11): Xaa can be any naturally occurring amino acid
MFTQKRHRVSXCSVVFAQPLSQRIVCVSLRISLTEETPLSCHTHALREFASLRTREREEKEGARISLPRGEKLYFPLSLFYILRIHPRERRCGKKCIQRIVKGGVHV

SEQ ID NO: 969887 - protein, 120 aa, Homo sapiens
MPGARYVLAFFALLSSLTQSYSTVRVLGESLGNLIRNPHWDHRAFVNCVVFHQSIPIDFCFCCSRQPPKKLGVKPAPVHHWFVLQIHQSRFPLHPGTRHHLYSSFHEMIGIIPIPLRIPL

SEQ ID NO: 969888 - protein, 197 aa, Homo sapiens
  misc_feature (24)..(24): Xaa can be any naturally occurring amino acid
ACPPTALLPYQLPPDARMSWSRSXMTWLRSYHKACSQAPVPRAAGSFCQDGLPPTWRDFRTLEAFPGQPAGTYAPTAGPTASEPHPTHPFPRHTPREPTTKAHSWCPHLPTNVYTLLLPFIKHAPHVCTRPPLERSTSSLCGCMGLINSPYATRSLKAQEDPFENLVERKAVHALLLVHMCVGQCWCLSFSAELLLE

SEQ ID NO: 969889 - protein, 139 aa, Homo sapiens
SRPGSWGCLLFGRKWVCDYCPKFRPFCVGVSPGTLFEGLWVLCARPLVWEEKLALPRPKKIFEFSRRLPWCSTEGVSLLVYRALLCPRVSCKGFTHLAGENLWGEICLFFIRSEIVAHGKGIWKFGGELCSRGDFSLTG

SEQ ID NO: 969890 - protein, 135 aa, Homo sapiens
LRGSTPTLRCRLSEDPGVLLSFPRFFSLPRGGCVYIFIQPERLLVSPSGLALFVGPSSLDPIVGSHSTTTAWVVCVVRLVSRRMCCFCSPPPSSCGRRSLLTNVWVGSTHHNKLFVGGVCCLLPSPPPSSLVVRE

SEQ ID NO: 969891 - protein, 241 aa, Homo sapiens
APFRFWRRTWEEGAHLMPKKCAETPPLKAPPREEKGSREENQKPHADRKEEQKALPLLLRRRWMKVRHALALSPKAQGPLRSPAPRVPLCWMNFSASTPMRTHSLWHCPYFWEHFDKDGWSPWYSEYRFPGGLPQTFMSCHLITGMFPRLDQLRKNAFAQCHPFWEPTIAAPISGDLGLPRPGACLSAESQIGQVDYESYTWRKLDPGQRGDPDAWFESTFPGRGPSSMWAKAFHQGQIFK

SEQ ID NO: 969892 - protein, 224 aa, Homo sapiens
  misc_feature (128)..(128): Xaa can be any naturally occurring amino acid
LPTSLVVRRGAPPLPSLGPPKGVSHTKSGVFINPGPLLLPGWCDSPPLFSTPPRVSPTKKGCFMPQLRSPTLFWCSPFENLWGNPLVYLESWGPPPPREEFSNSLVLSCNTCLLKPHTGVENLCTTPXPTRVKEAPRAPIGTHTRPGTRRRQPALLGRRFLKMCEMEKSPNTQLPLTPRHPTKVSSKAIPQTLAHCIKIFRVFGGEPLSELTRSHTLSEPRTTG

SEQ ID NO: 969893 - protein, 101 aa, Homo sapiens
RHYIITFPCVNWRPPPIVSHPSSSISRVAPRDRTSPVCLFIGEDVVLGPHHMLWFVCLLLFCSPPLCSAAIVPVCARLKSFVWSPTPHHAPCLVLGQNNCI

SEQ ID NO: 969894 - protein, 276 aa, Homo sapiens
  misc_feature (1)..(1): Xaa can be any naturally occurring amino acid
XLRTRKGDDDERKQRHGKQVALNRTQVCGILREKLFQGEAFHQSDTDTANNKGASGDLAKKKKYPTNWWLFRDGLLPEKKFIVGYNRSRLKKADNPKEKKPFFKATPKKKPKLEDFFARNSYVAGQYNNAASYQRLNKHINTLHLGSQTNHLFYLALPPTVYQAVTKKIHESCMSQIKGWNRIIVEKPFGRDLQSSDRLSNQSSSLFREDQIYRIDQYLGKEKVQKLMVLRCAKKIFGPIWNRDKKACVILTFKDPFGTEGRGGYFDEIGIIRDVM

SEQ ID NO: 969895 - protein, 316 aa, Homo sapiens
  misc_feature (233)..(234): Xaa can be any naturally occurring amino acid
TFRGPLLWGTSVLDPKKRGVGLPFPGFFSGECFLRASKGGVAKCPFCNCMGVRPAAAPLAAPSLEPGGPRFSSAPLLVECWTPSPGPFSPQLWKLFQGVFATVRQCQRPCLRSSELKGPYPWSPAATPPLCAHVGAAASGVGAPPKMLNTARVMATSVPHKGPHRKHATTTRVPTKRALCDIRGLYFLSVYVPLHEDFFVSFRHGLFVLERLFRPTLPTPLWPPYVPPPIYGXXPHWAPPHTRALHTPRYNFPPQKCPHTPLKNTHSALLTVAHSTEGISQSPSRASPTYGSIYRETTPAEAPNKFTATWRYLPNV

SEQ ID NO: 969896 - protein, 134 aa, Homo sapiens
MLGPPGPTPPPDGVPPGALTNYWSLSSLPPVGGPYFFFLARTRGVPLFRHSLPPGAPLVCYPPGSLGLGHAVLYLVDFPFSSVLTTLAASFVEGGHGHNPKGRPLLPPPFFCPRGGKTLRPVYRNLFFQKNFKS

SEQ ID NO: 969897 - protein, 160 aa, Homo sapiens
RGVVFVWGTSGTPVSHLVCRAAAACGVLSPAQGGEKARGPSCAIPEVVLHTALSLRHSHEPRVAALRPRPRLTSTAPLVSCGRKVVPTPPHAPYWGREGRLNALSLASPPLLSRHTQVTGAHPHASPSPAAMSRRATVPPHEDHDLHPTATISDSALGRI

SEQ ID NO: 969898 - protein, 201 aa, Homo sapiens
APPRGCVIYSFVVPLLVFFGVCVVRLAPPPRVFLSLSYVTLLFGYAWRHFLFLSARRWSPSLFVLVLSHLSGRASLLCSLASALSGGGVVAPLFVASSPPFPPASCASSPSAFVCCRLSLSRGGFRSLLRFLCVVGSLLSLSPRRALALLYHSLSLCWVGILSRRGSLLFAPLSRARAPPRGARMALLVARTPAPSLFLSI

SEQ ID NO: 969899 - protein, 110 aa, Homo sapiens
MCFIHGADPCPRSLERLPQGGLKNPWARRDPRGFPGPSLWFPTRFSRVPLFLWCSLLIVSTHGFARIPRGTTRGCVVNTLGVFVLGKPPPRSPPRPPPAATPLLGPPNLF

SEQ ID NO: 969900 - protein, 74 aa, Homo sapiens
GKTPLGGLLREKRHTQGETKHYSVVLFETHRSGVATPNTVRSERKREILRRPFFCHTLTLSLVEIKPVLSLSAC

SEQ ID NO: 969901 - protein, 254 aa, Homo sapiens
RFFFVIDLSAGRAFCVPPRFFSRVCGSSLGTPSWGTPPPLTCVVVLSPPRGCFPSSATYFAALWYWLLLLLSLDSVPPSWLVPTTCVRARRPLFGERGFYHHGWWLLVPPPFSLLLLTQPCWWCVRTSNYVPLLGGHRLFLLPFLPPGTISVPPRGVCVAFSFCENNQLDAFLALRRSKKTAWLFFSPPTTRCVWCGFPPLLFCGGGVPPPWGPSSFSPPFCLAEVEILLPSPVLFFFFGGAPPLHDIVVADHL

SEQ ID NO: 969902 - protein, 124 aa, Homo sapiens
  misc_feature (43)..(43): Xaa can be any naturally occurring amino acid
MGVDTPPYLVGEHPNGVGGDTQQNMHHRGLGVIPRGFPRGDFXPPGREILSRLSKTPQHRAGFSAPHHARFPRFKKWRAHTFDHLVGDCVEKMEIGHFSQRTARVVTHTLIGGGTLVGGPLLFG

SEQ ID NO: 969903 - protein, 121 aa, Homo sapiens
MSPPPHFGPAFVLGDSSRFYGGLDTFSILDPSPPRGVHRSPEKVNLPLMKLLPIDDKRLLLNDEWMMKRFDDEEPEANAALVDILYEILPPECPQVSIRMEKTPTIIDPQIPRPRILPETG

SEQ ID NO: 969904 - protein, 162 aa, Homo sapiens
LCVRLSIVGRFCPTPVPPVFPQWGPPHCTPGGTRLIYDGAPLITTPQAGPRKGRLPDLPGGVISSFVFCSRPPPREVVFFFLPRRFFFLSTTPVFSPSAPRLLPFSPPHLILERAPFGASPLHGRFLPPPLCITSPCRGVLRPISAVNEHIAVVFVFCSLTE

SEQ ID NO: 969905 - protein, 201 aa, Homo sapiens
RRAAVRSLGPLARGPPWSLLAHHTPMFHLVTPPDSAPRPLPCPDRVPFPSFHPTHLAPGPPGQPPPGTSPGAPWSPDPASLALLAGLPADPVPRFFPACHQHPRQIGRRRQNPLLTTPAAVPRLLAEPPAATPAPALGLPLHYYDLNAGPCGLETTPPSPKSPPGTPACLRWLPPGDPPPACVLGPPPPTFWWGEITRLET

SEQ ID NO: 969906 - protein, 245 aa, Homo sapiens
MCRLCFPRVHTLRLPAGRGHFQTDYALFGPEHGPPAAVDTPGTDLAAGCLTVHGAAAPHRDPVFASRRRRASFPHCLTSSTLYAGPGWLRLNGPTWRRPTQLYQEAANGEPQMAVRHHAEPGSEAEVGWATHDAWPRRCFADLRGERTMYRAPTAWHRAWRECAARPTGHVRRLPLSCFLNRPGGWRPSKPCAALLHHPHENSDDLTATGGRGWPEGRGTRELGQGGATMASGSGPQGKTSLVNA

SEQ ID NO: 969907 - protein, 185 aa, Homo sapiens
  misc_feature (158)..(158): Xaa can be any naturally occurring amino acid
MVNEARLSFPAPRNVDWVSHTGSEVLLPAPTHWVTSAHRSTIIHGKKVGPPPHRSPPELAQKDPGNRESWRQRSSPWGPRPAIPGGPLFEEVFPLHVPLLAPPGSNRASMMAQHHHPAIFSSASFLRGHPFLAHVLTQACAIHREALLLDTKFSAQGXTNVPRTHTLNENGTPLHGRLCTHAHFE

SEQ ID NO: 969908 - protein, 307 aa, Homo sapiens
PPHAPRLFLVVEGECTPPPRRSVGPRSFLSSMHHRSRSSSLVVLLGEHPSSSSPSFGGGHPYLGGFGPPPVFVPTTMVGPPVRARSHTSMLCVVHTRRGVVRRPRVPRSRFIEDHLLGLFFLWRAPLLSRCSSKKGRLSSLCSPRSSLPSFLVGRSPPPRRTHSRVCYLSLTSLLLWMDVVRFNIFVIVRVNHPSWFFRLPPQPPSGAPPPSPPSCCVCLFSCGAHNTPPLLPPASLFFSLQTHPPSFPSLRRSTPGGGRRSPTPTPSLLSTCDPQGYTLLLPPPPSGFFPPPPPPPFSPPPPPLFS

SEQ ID NO: 969909 - protein, 126 aa, Homo sapiens
MAHTGSPTCARPGTHIFSPGPGISPDSRVDIRATLLSRPTATYQAPYPDEKGRAGSPDAQKDPLVGNEKDKRGVPVVCLQNARERAFLVGEKRPRQRSQRTHAPWKERPAREENPTHRGEERPAAI

SEQ ID NO: 969910 - protein, 70 aa, Homo sapiens
  misc_feature (70)..(70): Xaa can be any naturally occurring amino acid
CVLSLSRCRGCRYSEFRVWQDMVVGCVIVYADGISSALYVVVVCLPRISRVYVVLVVRCAPQRSGCVRGX

SEQ ID NO: 969911 - protein, 174 aa, Homo sapiens
ARRPFGFPFLGPPPGPGQQFLRPGTLTGPKVGNHRPGFPLLGTCDEWAPRGGSAGLLHFEPAGDVTLAPCERRALYPAQYGRDPFGAFKYYLIARTQCLASHRPPQGRVDTYPEHLAIVKIPGVGADLRGPETPPPPTSHVLMRIDIPHHVQARNVSIHSDWMPITLAHADQLH

SEQ ID NO: 969912 - protein, 147 aa, Homo sapiens
IKVGRGLPHPLVDFRPPHWGGTTKKNPPPCLKFLRGVVGETHTESSLGRHFFGGAHTVDVYKRRDTHVPPHNLCARGPHRRRSLFKSALRGLFGEGVERKRQTPPAVAPLVGAGPPPRGPATNARIFGDPFFFFLNFYNFGVSPSML

SEQ ID NO: 969913 - protein, 104 aa, Homo sapiens
PESARKKGDGVVRGRRPSVKERERKKGPTRTPRVLAQRGEEEKRCIHRAPRSFRGAKFFLPAKIYTRPRAMSFFGKQPPRGTTKKSYFFLDAKVVSREKRPLFF

SEQ ID NO: 969914 - protein, 188 aa, Homo sapiens
LLLSLSLWLLARAGYGTSAAVPRPVAVCCNSPGRWARPALVVCRRPFMVAAASEPPASFLLLLVAPRAALLYSLGRMSVSSVFCWAPRDGWPLFFGVFPSPAWCTAPVFVGGWCPRPLLLFPSPVPWVGIPCGGLFCLAALPVVLFAHRFLCSRGGVLFSASPCVNNYDAGAVVFGGGAPPPLGGGGV

SEQ ID NO: 969915 - protein, 331 aa, Homo sapiens
WVRASAGVLVLRLVARRAVLSSSLVCARVSGGGRWGLCCVRCSGLAFVSFGVGCVLCVVSLLRFASLLARRASFSRVVVLVSLLFVGLSAGWGWVFGLSGVLWLACVCVSSLVFPPSSFPSSPPFARPLFLSLRFLLSPLSLLSLSLLLLFFRLCFSSCSCRAASGLGSSLFLSLSLPRSLVSLCALAPSSPSFLLFALALAPLSPLRSGVACALFLSSRPPSRPSLSLFCRFLVIRVCVLAVVGPLPAPPSPPPSRPAPPRPASPPCPSPPPAALPLSSPPAGAPPPPPPFFFFVCACLSLSLLLFAPSRGPLSLSLSLFFFFSFFSSLD

SEQ ID NO: 969916 - protein, 161 aa, Homo sapiens
  misc_feature (36)..(36): Xaa can be any naturally occurring amino acid
MSLSSAHIVESSCCCAATLLLSYVSLAPLCVFTRVXASPALSGASPLSRSRPASLSLSVSLFIYVLCVVARERILYSLCVYSPDTHTLFCVRALSLARECTPAALSSLARSLPRAGASHTLPLSSHTLLFSLSLCVGRSLSLFCFSAPALSLYIIYFLLVL

SEQ ID NO: 969917 - protein, 144 aa, Homo sapiens
MNREERRNLKRKHQERGLKVKRELFLRPHIGDPHKRISPQNTLAHSCWATYVLSTSLSIELWRTPLGVNETTNMGEKLRRRWRSRSHFTATTGLMFSGAHFYNTSSTLGIPENYRKLHKYHVCMLKDDKSWNHDIAGGSTITCF

SEQ ID NO: 969918 - protein, 182 aa, Homo sapiens
SLCRSLFVGLAFWMFDSRVSVALLPCVTLVIFVLRCCPTLSVYRGFSRCVQHPVCLIQFYRRSAPAPGVPAVLAQLNPPASFLPPRVLPRVESLLTLSPHGTPQVSLVTRYGKEDQDYYPYAQQALLSHGDLDVWSRKLRKYQAEDENRGHQVSSQNSLGVLCPSTWNPLLKMRNFTGQINR

SEQ ID NO: 969919 - protein, 267 aa, Homo sapiens
SFDRSPRRRGEVGGPPAPPLVLSVGRSGSTRPRSVLPFFGRPAPHTYAPHQRAPTFFDIAPLFLAHTGAACRTPPPTHTHVVFVSVSPLRTSCSLSRVVHTPLLFLPPSAEYRRGGLHHTRWCSHTLFFCVKLGGPPAAPYDWDAPRWFSPHTTVVCSSVDLLWVILFINIVVNPLPHFSPTRACERDFFRTAQSISPPHKPFFVRELCAQAIAPSPARYYVWVLSHPPTTRVELYVWGRPFFCFPPPPQKPSFFFPHKKPPQFFWG

SEQ ID NO: 969920 - protein, 174 aa, Homo sapiens
MLFGQTCVTAPRCCPTCWRRVPERLVATKGVSPETPWRCIVHALVPPLAVGRCSQCGKNGSEIRGPTCCDAQRDSRGERKENFFPRCFGICFNSEAAPHTGGCTPLLACVRHLSVIFDTTRLLKRGEGPHQRYTPNSCLVSPHKVLRRRERIFLFLWWGATSQNGEIPPLYSLG

SEQ ID NO: 969921 - protein, 184 aa, Homo sapiens
RCVAPTSRSAAARYGGGDTAQPRLLCRLAQPPPPARVLGCPRARAQAIVLGLLVWSRRPPGARVEIHHCSLSWVYLCFARRRRSPARSLRYARGGRRARFSRALSLGPIAKIPLSALTRRTSLCHGLFSCPLAIVRIFGGASCFLCCDALRRMDGCAVSLPPPASLCDAPFSAGGVHLLCCVAW

SEQ ID NO: 969922 - protein, 171 aa, Homo sapiens
MLCVVFSCLVAPFVLSTSALWSLGAASISVPVVTLSPGGFRNVGLRNPRLGADGRRGLVAPPFLSACVARESGVFQPLTFHLEPPHGHLEFRPRVVEKPLERMPLEGSTKGLGHNSPRPITSILSTHFEFTFRRFFEAPWLPRSMPQAFRTQKLHRLRAPDLESSDLVDPD

SEQ ID NO: 969923 - protein, 104 aa, Homo sapiens
MVNPRRGLVILDLIKHVCSPVAPGNPVWDFTPFIYYGKNFVWSPSPPRVDDTTPNPTPWGGIKSLFKIEWENYLFDKKYDLATIEFPVHLTCKTPWVNLEKSLK

SEQ ID NO: 969924 - protein, 110 aa, Homo sapiens
GSIHITLRLTHIVLNMETHPEPQYIHSPAYYHILTGSLFYPPTSLTRYFEVSLPHFPTAFSAPHFFVAPRLPRASRPLLAQHFLTICFIPPTNNFHFTNPNIHFGFEAPP

SEQ ID NO: 969925 - protein, 79 aa, Homo sapiens
WSFPLELSPPERSNLSQFYRGTKILPPDHREALYRPEPDRKVFPQFFLNRRKYRNFRFSSVPQEEFSSGPVLNLWTCSS

SEQ ID NO: 969926 - protein, 379 aa, Homo sapiens
  misc_feature (257)..(258): Xaa can be any naturally occurring amino acid
MSHACVSLCDVSYYVLWLSLPLLPCGGAWMEADFAPRWWTTHPVVAPYRTAGARHPPGFFTLPRGADHHSHARGPGCPCGPFFGAHLIGTGSATKKTAGLARSSPGFSPREFRLGPHGAPRQTPLGDVRRRPQRGWAAGVLCPKRTIVEESQQAPPFEEEGILYSLVSSPSRAYYLKGNSQERFSLDFPFPVGGAPLFSHKRLNGFSWKEFYAPKCAQEKPKTLRGPGLSAAHPRGFYRAHILFGLIPGGTIHTIGXXHVGFLWLLKMAPPKERWPHTATSHWGHNQSLGHKRLPTSVPTVRAQRERIHGGENTRDLRTSAHHTWWPSATRLTTAALRLLLPGDALHFPRTPTGHLGHFVLPPPSCLKKAGFTDGLVIE

SEQ ID NO: 969927 - protein, 102 aa, Homo sapiens
QFPAARSLLSITEDHQRFKVAGSPALQPVKSFPTPALSIPAMGRRVLGTAAHWPRASSWARLLGCPLEREPPDPQLEPRTWCPSFSSLGVVTLCVSFFLMII

SEQ ID NO: 969928 - protein, 311 aa, Homo sapiens
KNGGVPARVFPELCESTHRAAARRWGNKAPSHTLVCGRAAPHKRKGRLWLRRCARHHEETTRGSVGGEIRSDPSLPPLRRGRLSLEDQQGGLHRAEDREGLPRVLGEHTVFPEGGFLSRLPPPSHEARLVRPLCFLLFCWLGEVVVETHAGSEGHCLGVDARHPRASLCFILLLGGRLGTPSGHVFFSSLSLSGGGGFPAPCRRLNRGTETPRHHHQDMWGQRRTTLADVAQPGVGAPTTTCSFHRTPPFPTDVCGEEDCEEVLPENPHSKTCGKQQKTHGGVLGGPPPPFLKDPPFFLPCGPKPAVFVWG

SEQ ID NO: 969929 - protein, 234 aa, Homo sapiens
  misc_feature (188)..(188): Xaa can be any naturally occurring amino acid
PKFGVFNKRIFYGGLRGRLWAPLEQEFLAPGEEMPQNYLLGGITPTRGFFLWGTVWETLASGGKERIWAAWAALHNLSVENLEGFFHIGRKEGKKKVVSQPHRSMNAIKGRLPNKERGGSFGQRKYAPTCRIVSVFVGGPSVDGSLLTWMWFPPIGAHLFRTPLAHMRDPLEGHTHVVLKRFFPSATXRVKDFGAPHLCVGHPRVILKREQYQDQSDFLSDRCENNQCDKTFWR

SEQ ID NO: 969930 - protein, 91 aa, Homo sapiens
APPVMCPLGRGGDKESIKDEEWPVRLREKTRRGAPPPNEGEGNEPRGGGVSSLRSAAEERPPDRNDAEVDTTVSERRRKGEAPRPPQSVCR

SEQ ID NO: 969931 - protein, 126 aa, Homo sapiens
MVLLAPRHHSWASALTAIPAEAPLGHPGNRGVRDPAAGTPCAAGIEGRVPPVKDEEPGPQDPCPQSTTPWAPRDSGPGNGPGQAGSASLCCLPLLGTGQHPSGEKRSPLFMCTTPPSVIIINLLFL

SEQ ID NO: 969932 - protein, 103 aa, Homo sapiens
RTRGVTSGAASQLSKIRVVRESLARVLTSYYPDSERNLREFYKGQKYQPLAFGLRRHVPCAGRLHKHEENLKTQKQQRKERLYPLRKYRSRPEGRIVQLSTAG

SEQ ID NO: 969933 - protein, 152 aa, Homo sapiens
  misc_feature (19)..(19): Xaa can be any naturally occurring amino acid
QKFFWGTNNQRRRCERVQXRTRRGAPPRRNIRSFAPYKRGHNQAVKKRCAGRQTPRGRRVNVPPPHHLAKPHRETSLCLSLNERVATDTRRRGSHTSNTSGGFGHTSPPPGGDSCWAPPQGLSDRPQSFHPSFLPLCEKIFYFPPPSRCSLV

SEQ ID NO: 969934 - protein, 108 aa, Homo sapiens
  misc_feature (19)..(19): Xaa can be any naturally occurring amino acid
LVRPDSGFVAPGSGSPFGXELGAPGPRMARFRSLQFMGAPRSLGLPAAVLEQCLLSRLLCDPPPPRYACSHPRLYLPPPMAYPTYLRNRMVPVLPPLRANLISYTSDP

SEQ ID NO: 969935 - protein, 120 aa, Homo sapiens
  misc_feature (1)..(1): Xaa can be any naturally occurring amino acid
XPPVGWPPPIVEHPRGVAVYYLLRGFFALFPRGGGVPILSHNGGHWFLSHHGPYFLGGQPLIKTTTTGCVATRTKQRAVGDLARSAVIYPAGNFLLVTTTRGFGCYDTHSLHGGASSPGL

SEQ ID NO: 969936 - protein, 126 aa, Homo sapiens
MADAPHARIILFVLLRCCVSSLVQADRTQNFVSSTDRLSICARPTTTHDLLSHAVLTHPLLITHTLTTRTIQDAAELVFFNIYYATHTKLFWRLPLSTHTTIIGGESLCLILILLIFFSLRRLSHT

SEQ ID NO: 969937 - protein, 132 aa, Homo sapiens
MLSFRCVYYRDRVCRLGFDQRLFCAPYEKIGGRQHKELTTTAVGVSLWTHPLWGESPPSPVPRHNRGGQKPTCPEPTKAFPEKVHNGGTAQLVGPPQGGILQEEFYPQEFILVVFERHPAFGGSRRFPIPLG

SEQ ID NO: 969938 - protein, 205 aa, Homo sapiens
EAVAPESLVPREVEVGVDPRSCVHGTFPNLGLPEVRLFLKRRLIIIIKEEIETQVFPGWSNILALRMIPPHLRAVSQASPGLTRPNNPPMSQLSPSAFLILVLSSLPPETLLEGHVSPAPCQSAVHPAPLGPARWLCLPSSCGGTGPLWGFCALLLGPTGGAGPPHSHGPHSLQRWVKELALPGPPTLGELAPPTPHALFPATPS

SEQ ID NO: 969939 - protein, 134 aa, Homo sapiens
MHVSLVLCTDHCSGGGVAPAVWLRGPLLVVCCVCWRRQHTGCSCSSPCSESSARRGVFFVAVGRRCVVGASVVGGGPRQCLLTYRCRRLSPSIGRERLLCFSPPPLSRGGDVLFSCRLRSWVVVAPRSLCFVAG

SEQ ID NO: 969940 - protein, 76 aa, Homo sapiens
FLDRLPRLCRRLFPAFPCFWPLGRCPETVSVRSRDFSTTSGFFSHAVTSPFSPAASRGVFPNPTILSGTGQIARCW

SEQ ID NO: 969941 - protein, 142 aa, Homo sapiens
MPAGPCITVVHPGEPPLSPLVPFLGPSFEEKSVAHGDPRVGCRFGDFPRGFLVGRPRGSGGFSHGTPTGEIVRDGGKSLPFPRDGGPGETPGGPRGQGLNLGEGQPPPHNTGGKHLTPLNHTGWGEPPHQDPGNSEGVPCAR

SEQ ID NO: 969942 - protein, 315 aa, Homo sapiens
  misc_feature (159)..(159): Xaa can be any naturally occurring amino acid
ASGIGVLIDGVCSDTAIECVGLRRQAVVDLVGRITQPHHRCRAAEDTTRFEATIVVVSRAPLMIVVLRALGEGVDVHPTDELCRSRTERIDTTAGEDKMRLRWWLGNATVGLLCCVAGVGSGGPPARVVVCPRVRKDEVEVVCGRHRVESCCFRSDSGXLCNGCMVGVLLPPPAGRCCRVCLVVWVLGCGAPHLSPPAAVECAPTLCVVLLVFCGVGAYASFVYVDSADGRVFGQGWLVWFVPAPKGGWVDRVRWGPSVFVLCSPARGAAYVVVVKDKFVCGVMQLRLGQYGLCEWVVWWWPFALAAHIAVAVFS

SEQ ID NO: 969943 - protein, 139 aa, Homo sapiens
MRLLVAPRRLLLHMMLVVSLLTGRVVFGLPPSQYCGVPHHVRCGGALLCRPLYVALFSGGVPTYIIRGGSLRDRRLLSVPAVVSQAVWSDAFVEPAPLLVGEKIIRLVVRPTIGGVTPSCKMSGYSPPLIMYGDFVTAR

SEQ ID NO: 969944 - protein, 104 aa, Homo sapiens
MLAPREALIMFGGNKEGNHRKGSLLFLILGARGPCKLNPRGVAKKYKLCGCVEPPPNSGEASVSKAATACCLAQLIKIYIWRRSSISRCFVGYTAPARRCVLPL

SEQ ID NO: 969945 - protein, 212 aa, Homo sapiens
  misc_feature (149)..(149): Xaa can be any naturally occurring amino acid
  misc_feature (208)..(208): Xaa can be any naturally occurring amino acid
MFCPVTVACCSLWQTPACGFGCLHWCYVLRLLLVWLLRSSAPRERLVWGSLYTTLLGRVLLSRCRKHSCCLCFLGDFFAFLCMPPVRSLYTLRAGRDHSRGCGWEGRSMGVRRRPPELECGWRAPPCVGVVVVCASAAWCESAPVEVVXHSSGALSRRGLDIIYRRSPSVGAQSPTAGPSFLIGSFLALRLVLKLPFWCPPRCPRPRXWRAR

SEQ ID NO: 969946 - protein, 291 aa, Homo sapiens
  misc_feature (25)..(25): Xaa can be any naturally occurring amino acid
VHYTVWVPGGGGRGAASLRLVCATXVRAVAGAGSSTLPSAAACDFGAPPLCFGSARRCGGLGESARIVWLVAVPLPPPPAACLLLWALPPPLFLCVSTRGCREHRVVVWGARAPRCWWGGPLDRPRPPSVCFDVLGWGSRALSLRCGVWWPPPRFIFLMRRLASLVARRLLSPSLLIVFFSASCFSSVCCARGAPPRPRVCFVIFVLSARSKPCPPAGVASPRAGGRPLRCSLFSAAASLFFFPPVVGPSSPLLCRPLWWPPPPPRGSFFFFSFPPPQISPRPPPFLWWAP

SEQ ID NO: 969947 - protein, 315 aa, Homo sapiens
  misc_feature (226)..(226): Xaa can be any naturally occurring amino acid
MLSMLSPPAQASEGPVVCAHLPPRPPSLLLLPHSHLGREVHTFSSHGDDSREEAALLAAPHCPRPQQVLNHQGLIPFHRGPPPILCASHPRLITERGAPRRLVFKKPFDDFVGCKETPHHVRGFPAVSPLSMGAPCSLFRRRPSGGPHVLRSTVPRWHAVSHRTARLPFFLAHTCDTQRCLFVFVVLKGFLERYIIYVVLYLLCGERENVVVCFVATGALRPQRLXGTHREGVCTTTLLWRAWGRLSQGRPVCSAQESVVLCPLAPQFRPPSSSIPFVIRFLILVPDVYKNFVFVWHHFFLNLLFIIFFIFIVRK

SEQ ID NO: 969948 - protein, 153 aa, Homo sapiens
MVFAPFWSGFRTVIPSVGATLPAFSGSGIRAACARERNPPGGPRGMFPNGQLKMGSPVGGNSSGPLEVEEPPGPSSRRPFFRRHPVPGCSAVPLRTGLSVFDDVNPRRVVPGAHLPRAYPYVSHELKPCVYNSRLYARWLSTCAPISLSPMTW

SEQ ID NO: 969949 - protein, 141 aa, Homo sapiens
NFHDMEMERRYGERKIEELMEEKYDFGNGTETQVMDESIHLGWELAQISRTSELSEAPPKSLGPEVNELTSSRLLKLEMENPSLTKTVEELRTTVDSVEGHASQIPENGKRKSKAPVKRLRFFENEIVPRKRQVFPELSRI

SEQ ID NO: 969950 - protein, 155 aa, Homo sapiens
SCLWGPALVGLFRRAAGRLGADGVPRPAPFSRPAGWRTILVRRLTFPPGWHKGPFGGKGILASRKKNGGFIDPPPRGVPNVPCLLLRNYGVTKSSGIEEVDIVYQAQEHVIPVEATLKFQASLAADTFDPYTATAETQRRLTEMLPALCEPAWCG

SEQ ID NO: 969951 - protein, 175 aa, Homo sapiens
RFCSGVFGPPGVVAAVPRRGARAVVASCACGGAPSWLSRPRVRSRSFVAAGGRVWLWLAGSVFACGETSRGVAGGAGSFAGAPRGWVVSWSPPLCVYGWSGCVVFRSAGVHDLCAARRALTSRPDVWFSALGSIVLPRGGSVFFILRPRFPPPSGCLCCWAAHVAFRWLAWLWWW

SEQ ID NO: 969952 - protein, 308 aa, Homo sapiens
MGCAPATRETPLPDSALGVPPNIIMGPPSLRDLSPGGRCKLSPAVVFVFGPSRPRERCCVVLFLFFGRNEEGWFFVVEGGRVCVGDAHGVSSEDACSGWPPLLPPSPLLLFMLGGEAPPLAGPTTRSITAESSFHSSALRLVRFVPPPLRGGSVPPPLLRLVVTDTATSPLWCFITSPSTSSRERFIRYLHSRETCQRDRDWLYIERNHTLAVTPQYIYSQTRRRLYAHTYLYSGFSYIYHLSLPETPPGVLSGVFPLLTTCSRARRFIRRPHTYFVEPTQAFSTELSHPPLLASTFPPLICFLPPNL

SEQ ID NO: 969953 - protein, 261 aa, Homo sapiens
MVAVGGAVHIRLARARPPSLCVHGVVYINPGHVSALFQLGACCVGVPSRPLRMVASRLGGGKLFLSGAECCYDARAWLGVFSFLVGEWAPAEVLPPAAPTCVNEGPPHLSCPGASLVCPLMGGVSHCGPPLFYVVCHNGGPAWALGSVRLLGGPTTPHRWGVCDTQKCAHLHSVCPTVAPHTRAPTEWRHRVCDTQSPHGVQTCALCVSVPWGDFSCLPLSGVTRSPTVSPFTWESETSREVCGLCAPTSCVLHSELSVAL

SEQ ID NO: 969954 - protein, 127 aa, Homo sapiens
TDHHGKHVYWSLVGIPYFFGVYHAYLCTYPVDVVFNQIVTTRRCGFARVAPGRFYPAGGCLSGVRIPLTDSPRRRCFSCGCSRTIHGVRVCPGDAFSTRLCGACCSLEGPPLGAERRPPHFCLGGSN

SEQ ID NO: 969955 - protein, 141 aa, Homo sapiens
MGTPTPVNYRRLWKGPRSTSPRGPLCQSHSLAPHPNFLHTHTLAQRRGAWENHPHTQGGRFPVGYTSKSCFAFNVHNTSSRHPPPSTRPAKVMGTKKLSPSPPPEPTRPRPSLAQSLSAPLLSCPGMCKLVCTCNTPPGHM

SEQ ID NO: 969956 - protein, 229 aa, Homo sapiens
GQRAKLWLFPGLAVAVPLLFIEREALVRARVQVIHLPPFSESNVCPCTLAFPLRSPVIGAPLLSSKQSFPPTTIPLSFIYSKDIVQETPSHRKIMGNPLFLEIYILGTPPLTFPQSPLHFRPFPFPLSALPCNTYHDSRVLTRVPSPLLPTSTVPICAPPPLGFSCNLFFEVPPRAFRPGAISFPNLSYKYSSPPRLIFSYETPRRSTFRTLSLYRLSHNLASKYSPGL

SEQ ID NO: 969957 - protein, 105 aa, Homo sapiens
MVPGSPLCVESFSDYPPLGRFAVRDMRQTRCGGCHSKHVDKKAAGAGKVTQVCPGSSEGLMNIIPYPATPNFLIKWWKKRFSELFVSIGPLSVSSKRLVYDNHAS

SEQ ID NO: 969958 - protein, 219 aa, Homo sapiens
MCTPTPHFLPYPYNLAPLEKRLPTRRPKSHFLHKDFRPSPDILQSSHIHYISRALRQHPKSISQTPLFTTFRHSLNAFFSQETLPKLLTPTLIDFFVMNSSSHRPSPITSPYPPTYLTPIWEKLLLCYVTTAFPDSQIFTFPNLPRNSHTHIYVTRPILPLTYLPPNTHMGLNSPTHHLPHIKPLTSPPRKTPLNVHTPYPPFSSYPSTPTIITGFSSL

SEQ ID NO: 969959 - protein, 157 aa, Homo sapiens
VSSCRPRRSRLGCRSLFPFYSSAVSAVCVLVLFRSVRCSLLLLPGGERSSMSFSCSFPVRVSAGGGRLRSPLLSCVCVLVRFRACRCSGRSGWSSSSALFVCSSLFLFSPSLLRVSRGIPAAVARARPSASLVFLVRPGSLVVRSVLRSFAASSCVD

SEQ ID NO: 969960 - protein, 269 aa, Homo sapiens
GSRLLVLTRSAVFRLSFEGWCHPLSGVSALHECAVFRICAVLECARGGPLWSVRKAAAAQVTVLDVMGTVSRDALLGSLERARSVEFILSGRPPLHYSLCALAIGGPPQIPKGIARYTDEHTGRGGLNGSLRTRGRPQQKQQWAKPQRGALKQLIERLTPDFRRGTNILSKHFPRQKTFRPPVCFVSRPQRGRPVESPVAVGPIRVLVISRVSAPHSGDEEVRIDQDGFRHYEGVSPKQEGVKTRGVFSRKVVNTNNHGSTRYNTTRGG

SEQ ID NO: 969961 - protein, 148 aa, Homo sapiens
MSTYEELFNVGSPGVMRATTFCLPNYERNRGSFHALQAFLARRTPIVLPRNLCLPPLCSHDFLLPHPLFTPCPCDPAFFSVDVHQLRPIFLGPLSPPDRGPPPSVWGGYLAPQVYPITLALSVRGRDTHYSTLPSDLPLDPHIYYRVH

SEQ ID NO: 969962 - protein, 190 aa, Homo sapiens
MDTTHFVCAQTKHARGVVSLASRRYPPRRILFVRPARRPSLSLFCTHTPAVGLFSVLVPSGGASIHPPGASSPDCFVYLGAPPAPPPYFVLPRRAVYYQKFLLAGWCFLFLPLAPPVVRVFFELLPLSPIHCARRVFPAAQHNFFCGSPRVSLAASLAILGAASSLHLMVVCPPPRMFSLCTTPHNPLWF

SEQ ID NO: 969963 - protein, 261 aa, Homo sapiens
YGPPVLLVLLSFFGLPSSTCVFLPSTTFLYGGVIHQERSKNHSGAGSLHLVCSLSLVFPRHHPFLQLLFLYRGGHLLFFAPPRDVFFPQREIFCGSCCTTPCALVPSSPHLIGGGCCAPPLRELLPPLIPLYGLVPPLFNTYARCFFCYYRGVLHLLRGCAPSSLIDDHAPLSLYFCSRPCVDLNSFWVSFFFHSPLLQTLARGVFFGVPFTLMFVRVIFGAKPLCGGPPERSSSGFLLLFIGPNCSPTNCVFPPPIIFSF

SEQ ID NO: 969964 - protein, 139 aa, Homo sapiens
RYPITLVTRNHIGQTFSPVNNGPPPHYEMLQEDRNGYSGGAPQPASPDVPRDATSAARPPCLTQWSGPGNTLFKDTCCLGFIAIAYSLKSRDRKMVGDVTGAQAYASTAQCLNIWALILGIFMTLLLIIIPVLVVPAPR

SEQ ID NO: 969965 - protein, 127 aa, Homo sapiens
CFLLMLFFFLWVACCLWLMSPLLSRLWLVGLLVFLVIFLMPYVCALILGYAILIDPSFVWFLPGLRDCSFCPAFPYFVCSCSLSIVAPLPCLGSPRVFPPYGESAWPLAVLLSSNVSVFSFWFPARC

SEQ ID NO: 969966 - protein, 145 aa, Homo sapiens
GLFSRLFLLTFCLRGDAYYSLVWPLLFLMLLGAGSTLLGVFPLASPGLGCPHFAYQANHFIGLHFAFIFRGTHFLATNVCFPKNTMDLVLCLSDFLREFFFLTLTSCRQALAKCSPGRSTPANSPLRPPVWETPPQLFRSPWFSH

SEQ ID NO: 969967 - protein, 186 aa, Homo sapiens
LGPLEDMCHHIGRGPRLVDFLRIFVVTPAARMQPPVVSWFPRGPFVTGGYDSPKHPWIPGNKILPRVCFCSSLFHSHLGSRAAMLMGGVVLRPPSVPFFPEGDQNLVVMAPCPREYGQLKKDLSRRQTGFPFCKFLLGSKGCPRTLDVVYPDPALGSFHREEVTDRHLGPQDRGRMELFPRLGISN

SEQ ID NO: 969968 - protein, 204 aa, Homo sapiens
MLLRLLFAPACNWPLLERHLWPAERFLLRPSLFYEGREDTTLDDNAVGCAYHGNTHRVGPRNFPFSRSIPTYTPALVMVICGEHRRYVERPMRGAATHHIVERKCMDHHSSLHFVDDSTPTCAPVRRKGDTPTWGHSSETTQYLGWDQGGEHHPKRYGGTHRGTQLRARIGGGPGYGVGAELFSFDDKDHPGAPMDNERSASGR

SEQ ID NO: 969969 - protein, 198 aa, Homo sapiens
PPDKDWRPSRRSSSTSKPQSRSTTPTRSQLEIAPRELRHPRECGRRRACEPPPREIAPPAGGADPGAGLHGEEASAGPVRQDLQSSAPRTLKALGSPSPAEEEASVKDLGSWPWHFRGQPAVRVAGAGTGSRPGRIVSGDCSRCRRDTGLGGGSHLGLRSAPALTEGAWLPTPASSVASHHPREDLEVQLLSGLIVLC

SEQ ID NO: 969970 - protein, 71 aa, Homo sapiens
DVEIMEFLLPDYTAPWIQDSHFCPALSFWGFFEIGVSLCRPDWSPMVGSGSPATSTSPGSSRSPVVSLPRS

SEQ ID NO: 969971 - protein, 196 aa, Homo sapiens
  misc_feature (120)..(120): Xaa can be any naturally occurring amino acid
RHITVVYMLLIATSMSLLYFLRVATSYYREQQLLCVVNTRNTHGAVGHPRVLSRDIFSRPGEINFCCCDTLPKRALPASRGNHALVAWEILSFVVKILWPRAFERNALRALVPPHSIGDXLCLYVAAISHMGLCARVCVWLCYKKGRRHIFLKREIFVIFFAGILSWRRGSALLPPRRCLLVPTSDLGRCFNHYGV

SEQ ID NO: 969972 - protein, 138 aa, Homo sapiens
MRFLDPVCARVSDNIPDPTCMYSATSLRPLLGYLNPCVDIFCPPLLSFGLFGPLPNSLRDPLCYGPRPGVSPRTPSPLCHLGSEFGAPPMGAVTPSGYYPAFLCGGIYVSQHLLSKYFSSPIFVTVSTPGGHSDILDT

SEQ ID NO: 969973 - protein, 295 aa, Homo sapiens
LVSPPLVVPPFLEGFGLYVCRGSILSRLDQCFATIAPVVVRHTRPPGPALGEFQGPLFQMLFSGMCHPRHGPFDYPEAITIDLGAIPQKIEGQLFTSEEETPGRDCEEILDIPSETTPLSFPESKLLSRALENQSRPLNMPPPVPVSHQIVFPSLQPVMPGVGIYLGVLTKEDGEKETWKVSNKFHLEAHHQEDERQPKKTARLEEQNDQGETGSLPGQPEKEASASPDPAQKSFICKACDQSFPFYCRLKVHMKRCRVAKSQQVQCKECSETQDSKKELDQHQLEAPGAGGEPD

SEQ ID NO: 969974 - protein, 104 aa, Homo sapiens
MILFVRFFLAASRIFRTVCPKCFLPIFFSALTLPTLLLHNTLWRVGVRFVAHQATLFSCHSMVVAFFCSAVPSLCPTAYFNFVLYFSVSTWVRILWMSSSSCLW

SEQ ID NO: 969975 - protein, 155 aa, Homo sapiens
SPVPHYIIGIGRRCVFIGRGEDHIVRVSLTLTSVALIDDLFLTGGVPFCLGLAATRSCFFFFQRDIFLGAPLCPHSPSTRVGSALLPPPFGVGAFGAPLPGCSSLPPCSFFHCSCASPPSWYTPSTPVFIRPSHRAVCTTYTHPGGPSPSLVVYI

SEQ ID NO: 969976 - protein, 293 aa, Homo sapiens
  misc_feature (208)..(208): Xaa can be any naturally occurring amino acid
MPQRPWLCFLLRRIFGVGEPRWGKCWGTPGSKEIVRTVHKHHGGWPHITTPPLIPQLLPTFCGARQRNGPARGANYFCAVVGDSPLAPLGVPAFFSVVQPPRGISPAQHVPFWRLLEEPTGPQPHENWAGKNVWEPPVSPTLGVIKNHMGLFVMATLGVNPLVVEPLGVCPPNIEMCSTKCLAPTIGATPTFVTILTSAGTRHIPTVXFCEFCVAPPTHWAMYNTEFVATSTSLSSHVAFSHPLVWWCPLGVCEMSPLGTHRGTSQRGRSSVWCHTVSETRHYTLTHRRTLCL

SEQ ID NO: 969977 - protein, 187 aa, Homo sapiens
MAPANQGARIAPRPASGPIRPIVRCPTGSVPHEGAPGRGFSLEELKGGRQFTQKGGPEATRHFSVESEEADKCQESLQAHVQRLKEYRVPTHPLPPESPRPPRRETRSAEELKLANPADRPGHCPSRDVYKKEKARVITEEEKNFQAFASFRMARAHARLFGYGPKEPRKPPEPDVEKKKLSPPGDL

SEQ ID NO: 969978 - protein, 58 aa, Homo sapiens
MHLTWNAATLSHINHNTFPLHPIIFTDSNYLTISRIRVALIQAYVFTILVSLYLDDNT

SEQ ID NO: 969979 - protein, 245 aa, Homo sapiens
GLSPFYGLPPPAWGPVALASVVILGVFIKLRLYHLGAACYQGGAHFLGPAPPSRGPLRALSFIGGIHPCWFPPQKCFFCPRVFLSTVVNPPAVIRFSPPICGGPLFPPPRVFSSPFIFPPHVVSRLSDKNRSAVYFVPLPGEGSHFSPQGAPHFTVLFISNPPPGHHMSTPALVAHRFLGFLMFTTLPPDLSDVCWVVSLSPPFGRAIFAAHHYLLVTNHRGLPAASPSYFGVHFPSLFGVYSPP

SEQ ID NO: 969980 - protein, 122 aa, Homo sapiens
LGVNIKPTPFFFVKPPPHSSPLDVDGPPPPTPVWVMDPPPLWLDNTSRGRVVPYTPLPRSVFIPMCRRAGARVLTHTFAPPQRGARLICGHSCGTIFGGTHTHNEEPPHCWLPHTRRDAARG

SEQ ID NO: 969981 - protein, 99 aa, Homo sapiens
SPGVVYNRASFGVPPSVARGHATPPRGLASSLSVPRGLYLPSGAFFLLLRGGGYNCFSTGDRRLLPHCSPLVGGAHVETPVVCHQTPLVGAPAARIFPR

SEQ ID NO: 969982 - protein, 222 aa, Homo sapiens
MSVADLNEGFSETPLSGGAQHRVGESPLFLCAHTKRFSVVWWPRRRSGRDHTPLVLCPTHLVGIAFGGACACNTPQRFAGCVCAVTTFLVAATTGGSSPPFLSIRHTYSSNILFSARALVVFFGLVPAVVHHPRITVLRELVAREDILVCKHAGERPSFRVESARELLRWQREEVSTPPPFFAPRCPRTTRQNLSSKKKKKKKTKMDCGWSHQGINPRLLEK

SEQ ID NO: 969983 - protein, 81 aa, Homo sapiens
RFGPDRPWVQTPGPALPGDVLLTRRDALETYEGLSLLVIDLRAQPNGCRCRRLALLHYWPRFPQHDLDIPLCGRAFFHPEW

SEQ ID NO: 969984 - protein, 192 aa, Homo sapiens
MCAPVAPRQPTAIRWSPQPPAFLWAPRVAPPFCSFKEEGESPPALSRRPPEPLGPADQSELGPRPTGGRNWRELGRGTRWNPRAQRLRRHPDCQKVPEPPKGPFGPGKALQRPRPTPGQPASPWAWPGAPEAPPGSPSLRWSPTAGAQSLPQDPEEDPGRPGASEESFAPNGECSLRAGVACLPCACALSPN

SEQ ID NO: 969985 - protein, 265 aa, Homo sapiens
MLVSAVILYRRGGGGAHHRCVIVPSLVRLPSLDYFLRVDRHFNYDLFLGVVAPPPSLSCCHINNPSQRCCWWRPPPPSAFLLPPATTDVSPLVFARGGGCCYTINSESIFRLFLPLRIVCGDYFCSGEIFVFSLAGGGSSHTFVVVVYSSCCLYTHRGEVSLCRVLCVSLTQRHLSLFSQRACVVCVSPHRGPPSVCEENFVSLSVCLSSVATPHPPLPDTPRGAQRGLPTTMSRAVPPRARHTQREESHTPWTLLCEEKKRERV

SEQ ID NO: 969986 - protein, 121 aa, Homo sapiens
GVVLFFRSVFPFLPLKLMSFGGTLASSQTSWAPIWRIWKKWGQPFATISRAGPAAFLAPCPIQQRWATHSLCLRWACGSLSGAQHLLPLCTTCSVSTVPALRAQGLVLGAGGCPLFYILFR

SEQ ID NO: 969987 - protein, 121 aa, Homo sapiens
MCCEHVLAVICPPLLCCSAPSRHPSPAARACSGTERGVVTKPPPVWGALPFPPLRSDIVSASPPPLLERHFLETPLRGNDFLSRFFSPLGGVEQRMLFAPGAFFGRAPQPFFIPLGHHPPV

SEQ ID NO: 969988 - protein, 111 aa, Homo sapiens
CSEMCAPSGAHPKVDPTAWSVLRTLRPRMTTKGGRISVQQPTYGEGTTGGPHPPGGPDRGRKNQRLEVTQRCPQTHRDRFQYLTLKKFDAPQRGNPVLKWLTGMYNTAALH

SEQ ID NO: 969989 - protein, 174 aa, Homo sapiens
SRKVFLEKVLFIPPPSPVENIWSPVKGEGVFLGKSFPSAGSLPKDFIPPPPLLWGGGQTTCCRALAWTARPRGGAPKYFFYSPRPALFGSCYPPQESLFGLGFLWGNFFNPQPPSCGDTRGNFLLKRYCPPFPPALGYRTFFTSKKTPFVWGSSPHCAHSLRPRATVPSVTFIV

SEQ ID NO: 969990 - protein, 84 aa, Homo sapiens
KTSLPRPHSGIFGQKVTHPWQANAVDVRTQTHRGPGPGWMVMGCPTQMKVFSLTQGDQSSFAKGLLYLFNICLPNWDNLMYQID

SEQ ID NO: 969991 - protein, 174 aa, Homo sapiens
SVRWCAQCHVSVSLMPFVCRRGCSSRSGVHNSPASPFLAARGGPLLSPLWFVRFPVRCVLFIDSVWGFFSQCVLFISGKKTPLGIHRFWFWALSLHLAFLRGFLPCGATAPYMLSHYWTFVVFVSSSGHMCSSSPWRFAVVLPLCLSPPGRSQSFFCPGALPPPCPGGRPFSAN

SEQ ID NO: 969992 - protein, 59 aa, Homo sapiens
ATIVSPPRSVRRGDPTPEGRRGTSLARPPNPLGGKGGPPPPTEVWAPPPPGQAGGFSPT

SEQ ID NO: 969993 - protein, 186 aa, Homo sapiens
GFNKPAPSFAAALPWSPLRGPTPPTRWCGAPPEGRHPRGRVTPSSRILFTVMRRRGADDTQFFPTRVYTPLVPPGALIVGGTALCGDPTVVCSLSRTQSVVFARVSRSFSPGIFCCSCSPRLSSAVSTLSGRISPSRGLFGVRALVVSLPPAGLLVYNFQVSSVLCCTTKFVTKNRGGACLAPREV

SEQ ID NO: 969994 - protein, 231 aa, Homo sapiens
RGIFLPGCYFRVGTHPRCSSAVWEMKCHPTAEALVGGGEGVVFLLGGGPQICCGGALSPKSMTNRENMVVVSSHKRNGFLAVTPGGPTTLLLLWVGGTAPPRDVVSPPPPTWGESHTWGLFSTVVFTGWNLIPSWAPSPSRLSHFYVFPAVFIGPPSLILGKFGPTTRGFHTPVGAQGHRCVCLEGSRKRGELEVFVVSPPLCLGGGIEKNSGRKIWAPSQIFFSENYSLV

SEQ ID NO: 969995 - protein, 289 aa, Homo sapiens
VSPTKRPCADDERLIDHLVHDRGLPRACGRFPLPHAGDIFGGGGRPPCLVRPPTLCLFVIDEATFLWGGQKTSVARPTSDSVLWWAPALAPTSSVVLAVLLKTVGWIENPHQGGVWSPPPNNVEGGRDTPPGWCVKDPLFGGERRDEEEDPPWWGAPTNRSSAAPVCSPPHTTPHGGFYKCPLPPPTSAPLFYLTGSAPPTSGGDTSHRGGDTPLCCLCFSPPKRWTTLPRVNPTLSHPPPLTHKGSPPPCERIVGAQPPPLFFSLRAPPTYGGPPPPLSLCGFSLSAL

SEQ ID NO: 969996 - protein, 155 aa, Homo sapiens
MIRRAPSREDYSSLLPPPYDETRGFVRAGFFSPRGVVLLLLRAVAPPPLLIFCVVDCSLRPPRLVSLFSFSVFLLCPSCCTHSCVGRQTPSEVVVWRHAIIRVGFGLRALSRRTRKMSVVHHRAAPLSSSPSLCILSVAGRRERREKTNLPSVVW

SEQ ID NO: 969997 - protein, 171 aa, Homo sapiens
MWVVVCPPPVGRHTTERLSRACDCRSPSFFLSSTTLGVVAARQIWCRPTTRMNVGKNSWRQQRGDAQIFTEEGSDAHPTVDGSLLLRSLTKKRMFCSSSGGDAKRAAPPGDKTKRGRLLCISPPRRALVRRGVSTCRPEVIYIDHCPPIDAVTQDEHMVVYGAAPGRRAHV

SEQ ID NO: 969998 - protein, 72 aa, Homo sapiens
GTFLPNFPREVSREVTRQVQFSLDHGRKFFGPGSLKEGTTGEMPSPRYPGVLANHAQTQLFLPEGDFYPRPM

SEQ ID NO: 969999 - protein, 114 aa, Homo sapiens
LGWMFLVPLGRPLPIVVLLHLWGTFAVPEVPWPAFPGYPRLFGGVSEPPGVVPPPPFPTEAIFYGYTLTRYTLCAVVYTAQVFLSCAYLLGLICLIPMLTTPQGELLTSLQWGF

SEQ ID NO: 970000 - protein, 146 aa, Homo sapiens
  misc_feature (145)..(145): Xaa can be any naturally occurring amino acid
GPSGGPTNYSAPLFPGRASPPAKICCALFCRGTFLSIWAICVPISGALLASRDFLENESLRPYVAFCLWRILGAKRPCCLRRSPPDFLGAPGAVFAVLPLYVSPDHFSEGRSSPAPRVYHYVFSAWLLLRYTGRPVLPFGVFVFXF

SEQ ID NO: 970001 - protein, 306 aa, Homo sapiens
SLLGGGQRHTRFARVPSRCLCYTSSAAVPSSARPLFGCGGPCCYRRPPPLGGSLSAAVYGCRLSPTYGAGPPPVWVVVRSPSLPEWPLPLSPRRYSFGGDINLLPPFPGGDVFFRGCSLLHATQQRFSLFFLHRALAVLSIIAALAEWCFRSRTTRTKIIHLCEDVCGIPPRPPRLPSHSGAVPLYMMGHHSLPQGLSDAGPCMKENDFSPRVGPLYDESFRIYSACYSCLPHLARRVLQTGGPTLLINRSFFIYNKTKIIFSFAGRSIPPPVLLLFWGAPPPFAPPTNFAFFFFFFKGGVFFIFP

SEQ ID NO: 970002 - protein, 207 aa, Homo sapiens
MHRTGPQHERDMTPLQHPHHCRQLEPLCASGSPPPDELQPFAPEQIGGGPRLFHSVPVGSCPVRYPVRGGGLHPALEDPEMLSRLEKPAPARFALGSPVSEPPAIIKDFPQPGIPGARHPQGAAAHLRRGEIQHRISARFSTASSESRRLTGLMDSPTPRPSCRCLPLTMLLGPLPPHCSPRTSPAPSFLPHEEGAVVSCCLLGARL

SEQ ID NO: 970003 - protein, 131 aa, Homo sapiens
HRVWGILHGGVPFQCLSRGPLGVRPIICPPPPRHGSCSRSARPTFFRGLMEGFETLRSCAQPSQRREALLAPWTPQRGCPAIVWAPRDRPPLHQTMHPGGPYPQATAGGLPDLRRGLCPKKEGPPSESGNF

SEQ ID NO: 970004 - protein, 112 aa, Homo sapiens
GLVFAHMPFRGECAAPDVVTLIFAPVFWRQPAHVFRMWLLLGDPSRPFFFSVSSARSPPPTQLQQVGCSDLPSSHTLRLLSPSPLPHQPPPLGAPHFGPKAMPCRPTSACAP

SEQ ID NO: 970005 - protein, 138 aa, Homo sapiens
GFFLFGGGVLRGQFFVACDLSFVLFVVACSGLGSCWYALLGFFCLLRVCGGVCLLFSVRVSVGFLFFFWWCEMFVLVGIVAWLVLFWRLLGGCEVIGTCVVVVFFLDSALCSLGSVCLSLLCYLQFVVFPPLFVVFPR

SEQ ID NO: 970006 - protein, 298 aa, Homo sapiens
GFPNAGFSSISLGGLPPLFVVSPPPSYPAVSISGVRIVLAVWPPFCYARCAAHLAALLVSVHSLFLTAGLRAMYVDALLRDVLFPAARLTIICEEWLLMCGATRSHSLIAALSLFVDDAAQHGGVALIFLPPFIRTLPAMIRWWSRTPALGCEFSLSLEWSHRRLLSRVGLDIFYSYLALTYSVAPPYFSFVGTPRGRCGVSSSGAGSRSAVCCFSSAVVAPSSCVLKDSYDHHEDVLPFYGRCHPTKWGYQQEGHFRARLLITPRPSSPANRPRGFFFRGSYFLNFGAHPPLFSPFF

SEQ ID NO: 970007 - protein, 125 aa, Homo sapiens
MLLLPVWKSFSASYEFYRYFENSATQSSTPSVYPKLHQKSRELDNVLPTTPVRSLPAPICKPLLNEVIILEDELEKLVCTKETPELVSEAYPLLGQEILSGFSPTFKPATIAGKRPFFRSTNCYE

SEQ ID NO: 970008 - protein, 136 aa, Homo sapiens
MLLLPRGAQSCWSTSRGRSVVCGCPPSACTMVCVHQITGPPGLGSRSLARDFLSARVVLLPPTPRSRALVFLHHLDLFVSAPSSTHPCGCDARLLFLMMILGEASSHSVDDAAAPLPPGMFVVASSSLLCCRLALL

SEQ ID NO: 970009 - protein, 254 aa, Homo sapiens
MSGFVPRPDAWLLLLSYTAVSIPYYPAYPRCTTNLEFESLEHSAPSHEASCPRNLKEGHQLETGKEKGHLRCPACPTALLARGLCLCHTCPGGRGGTRGSIVAPETPDPMLSPTKWLPIVASTLLSFAVAWLGILGQFPPAPPCLLLPRSFPGPTRCSSCPLCCRATAALEPLTLSEPPALHVPLIAVSLPTPPWPRDPWTGWGWGVCPLCSSQEPQLRMTRVPIRQCFPHWTSFLVFFCHTLTDPFIHINHSN

SEQ ID NO: 970010 - protein, 133 aa, Homo sapiens
MEGKIYITLPRTIHSTALEPHPTVYMEMRRGDPPKFRDHRVCPQFMETLHTPIEKRGHAGVKEVVIFPLDRAKEMALLGEIEETTAEIYVALAHAPPRVGPFSHATTTEKNRETEGCLALTQPTCVEDHHPRR

SEQ ID NO: 970011 - protein, 136 aa, Homo sapiens
MWVVGFFPLSSPPGGWCQPPLLLPEIDIVCVGGSSTPAPRLVISLLLSCGRVMVRRKNFLRRKGRSPCTETFGSFHEHRKTVCSFMYNPSCVDHTPGVVFRPAPAVVEKGWGLYPPSPRGGNPTGDICGPPTPRRK

SEQ ID NO: 970012 - protein, 107 aa, Homo sapiens
MRGASSEELLAPCLSTSLLLEKEEDQRFEDPASSHGCLKTPEPFTGFNFPSPPIVPPDSSVSFSPLLTRDENICNYSPPSDLMREPLQLSEATRNVSRRTTISTWKG

SEQ ID NO: 970013 - protein, 108 aa, Homo sapiens
  misc_feature (81)..(81): Xaa can be any naturally occurring amino acid
MRTYCQWAYSHATAISGHTTSSLRGYFHAATVTIKGAQKVINSEKPRWVTQNAHETTECEKHFCHALCYEKRKPHATQWRXYKTTLETHTLWWVVHVAPFTRYLPSSL

SEQ ID NO: 970014 - protein, 393 aa, Homo sapiens
SRLAAPPPVCVLWRRQCVSRRASGFWSGGLPCLSYFSHIRLGVFPSGTLCVWLISPPYSPGQSGFFAGVVRPTCFVVAVFCLSPLLSLVIVSSLFVVYLLCSVLRVVLCSFIFGLVSFQYECFIFVVSAVLCCFFFLFVCLFLCLLLLVFARVSSPVCSLSCVGPLRCPLAVLFWVRAVPFFSAACASPSLLVVLPPLFALLLLAVSLSFSFFSSLRALSSPRPPSALPLFSLPSFLLPLLLSAPPPLSSRSLAVCSSEPRSSLARAPSLAPSSLPLLPLPSPSLSLCGSAGARPLLRAALPAPLFSSSALFLSPLPLPPSLSSSSPPSLPLPSLSLLSLALSLSLSLSLSVSVAAPASSLVFCCFFFFCATTHTHTHTRTPTSPTHLTTHTT

SEQ ID NO: 970015 - protein, 116 aa, Homo sapiens
MRALLSLTIDIRKYEKFAPTLQQRVGALAASDSPQGTTGGPGPRQGHGGGNLVAVYTPKTMMMTRMAKLAAWPRVHVMLARLDLVPWGWGRLPRRGNHGVRPQPAPFSRLNRSATV

SEQ ID NO: 970016 - protein, 112 aa, Homo sapiens
PSAWIFCLPMPQPPRVLLMSRGSILPSDFCLAPGGVYLSPSSACFPFAVFLCANTLSTLVCTKTHRWCVPCVRDFPPRAFSGDPHRRPLPRGCFFPFPFSCNAALPPGVFLL

SEQ ID NO: 970017 - protein, 319 aa, Homo sapiens
VSLSVSCCPSVTSVSCGVGATTGLTGTECVPYLWCDLLSLFVDIISPVALLRVYSVIVVRHVVLDHGIPFELAAAFRVLAGISAPPCSVIWCGLPGPLAFFLAPPRRGAPGVQLVMMLSPGAGGHLVPGPISPELFRGPRHLGFGAELRNCFMGYKCDFLRLMLPPSLKPPDSSPRGFVIVQALLSFVSPGTPCAYSVGFRYVSCARRSEAPPRGQQAMQQQCANGHVLLYSGRASGHVVPCFYLCQGILLFCLLTPFRAPPSGRASVPLHSGTSVVPPACTGSTWPGQPSGAGVGREGCCLFQLGRNPFNGPLKCLCI

SEQ ID NO: 970018 - protein, 115 aa, Homo sapiens
ARHVSRWWERSSSKRRLRPGVSSRARSVGSCPWVVVLPVSPRAPRSRFWCTPTRFFPPVTPSLMCLLRAAGLFFFCFPPDRGGYHLPSLCLSVVCGSLTNVVVSVRDVLLSAALR

SEQ ID NO: 970019 - protein, 425 aa, Homo sapiens
  misc_feature (311)..(311): Xaa can be any naturally occurring amino acid
LVIFALIFSCCFCCSFSCIVSFLFVWSSVCFFSFFLSFFAVWLATACLILSVLLSFLSFSLVAPLLPSAWFVCFFSFSLCLVFVFVLLGAHCRRALSGVGYNQNFVLWDPLRFLSWWHALLPTPCFWPPPFEKNPPGSRVSSPSWIFTFGPRGRGVTEVATTRDPVVIAPFGRYFNVTTYEQPKLYPKNTVVGDPRPANFPRDFFPTPTAVPPRGTPRLAASPFAPRPPPGPLRPRGSPSRRVPFCLLRLLGNSSSLGPPRAAGPAPLAPFSAWVTTRWAHRTAGPHTLPREFLGFLRLCSRPRGSTPREXPLSRVHTPHSPREWHLPHTPLYGDATRGVFRAELVSAGLRFRYEIWRIRPLKNVEPSQGFNVTILAPSPLLRLRGGLERRSPPTPPPSESTSAGFLYLLGGAHVSAPRGFGVPS

SEQ ID NO: 970020 - protein, 71 aa, Homo sapiens
MGPAWTLAPATLVLHPATEVLPPPLLLLPLRRRKWKAKKEESQESDDEHWALVFLTKPLYNHVPITKLNLL

SEQ ID NO: 970021 - protein, 173 aa, Homo sapiens
PAIHVHPGLARQQLLSCLNWPHKYQTRDQAREETRDSLAPGREEGCWPRGRPHEETPCPSSRSYTVTPLVENQKAQLVVIAPDVDPHRAGCLSLPAPVSVKWGSPYCIIKGKARLGRLVPPEDLHPLSPSHQVNSGRPRRFGLSLVEAIQDPITNDQITIEIPPHWGGHSPGS

SEQ ID NO: 970022 - protein, 218 aa, Homo sapiens
  misc_feature (183)..(183): Xaa can be any naturally occurring amino acid
PLSAFWAPHSSERSVPPTTPAGCPASPDFPPEFCPATTAVPGRPSLFPLSPPPLWCALLSGRGGPPPPNSAAQGYRAARYIAHTARLLALLERPCALALPPFVRRAPMIITDRAALLVGPPLVGGRAVVGETVPLTFCCCAIFGHRLAALPVGDDIPLSPAPSSSTNMSPAQSRISPPPASCXRDRSALLLGETFVVPTPAYFTPPPGGADHLIVGCH

SEQ ID NO: 970023 - protein, 101 aa, Homo sapiens
ELPWRLFLPGMRYDHIMGGCLCLCCLRRRSSTIYDRGGCSAVAFSFVHRAASASPGETPFFFARVPHSFVFVLLLMYNGGGRPSPQKVVSTSRVFSNRVVV

SEQ ID NO: 970024 - protein, 189 aa, Homo sapiens
VLPSVSRVLCVPVVPFCSLSVRVFLPVLRVGLVGSLLLWCCSVVLCLVGVVAPFVRGVVWPAASVAPALCRRCRLGGCFGASVWSRSPHVSRSLVARSLVVLVVFVVVLAGGGGVLITQEVPCFRWTPFPGCPPGGNPRHSPPVVLDPPPFRKTPRGPRCPSLSGGLFKPFRPRRGARELNESGSNSTG

SEQ ID NO: 970025 - protein, 107 aa, Homo sapiens
  misc_feature (8)..(8): Xaa can be any naturally occurring amino acid
SSWLLVLXQSSRVALLVEVQSSLVVRATEVVVVLSVAACCGRDVSFLPPAGVLCLFSALLCFEEASLTYFAHERRGSFSIIVGTTRGRSCPLGEIVCAPLCVWWGRR

SEQ ID NO: 970026 - protein, 167 aa, Homo sapiens
MRMMLSETLMVVAEPDDVCKWRPTGSPMALYHQGGSSLYLVTYSPLGPPSSPDLKKGAPDLPSGLRSISRSFLEEPEEALCSHHIPVARSWLHGKLRNRMREALRPPPTLPYRVTRPWLKDGETRLIGHTSCSPIILVSEGEADYPDPWPHFPPLPFEYTSEGFWHG

SEQ ID NO: 970027 - protein, 182 aa, Homo sapiens
MPLPAPDEAKDMRGEKKEKRHVVCKSGHLRTGQMSSQEAGLLSQKISFRPLTHFPKEERRKKGIIPFRRVREEEIEVGFTSCGPLPLIPARCQPGDWGERAHQVLKFTQGQSFRHEKPRRSGASYPGGSISVPGPILIKVDSEDLRPIFGEARVMIGDYLLSPVDLGTLRSLGEGLDEDQKF

SEQ ID NO: 970028 - protein, 226 aa, Homo sapiens
PQFLPATSCSTAPSPPTGQLMPTPEFYRRRLGSHSQQQLLQPVPSAPGKPIPPPPQVLPQADPGHWWARFFFGKSHPPVHGTTVLESPEHSGPPPASSSMTACGLARDAPREQPGGQSSTPALGPRPDLSGYHQPQAFGGASPPEPLLRPSSPLAHPSAPLPTSHPPPLLTEAAASKQTLLHQPQQDNPKPVRAPLFTARPQHCSFPDTWNCAPGTKREINSQQPS

SEQ ID NO: 970029 - protein, 357 aa, Homo sapiens
LRPFRLSRCFVFFSCVRHRAPGVSRSRPVFAPAARCFCSLVVLRSACSGRLCLLRCCLAVFASRPPAACGGVLWFVLGGAVRVMFVVRFSLSVGLVCRLSSRPVRLGRCCRLPPRGCPALACRLSAFSLSPASCSLFSAGLALPFFSRVPFLCFGSPCLCLSCLFALVACAVVSPWGGAIIFNAQRLLFMVGTAVQASPPLGGLPNSPPPWCVGAPSPPIVKTPPGRRVPQAFPRGFFCAMGPPGTRIFPNFLTTQGVPALLAPFMALYFMVTPRSMAPSVVHTKTPRPGTPVSRRFLPAEYSRLTPTAVSAPPPEDPKDWPCRRILGPLSPPGMPWGHRRPRAGPCPFCLSGALRL

SEQ ID NO: 970030 - protein, 304 aa, Homo sapiens
  misc_feature (1)..(1): Xaa can be any naturally occurring amino acid
  misc_feature (58)..(58): Xaa can be any naturally occurring amino acid
XGERFVRVSCCLRCALFLLSYLPVVFGAAVLVFAFLSVFLRMCSFVLLCPSVSVFVFXRLIFCLLLLCSLRFLFVRCVPPRTVRCFGRPLLCLSLVLRHLSRFPLALSLSVSGVAVLFPWLWVVVVVLCAFALSPGCLCVVCELRRLALVCLCVFLDVCGVFSVYRFFCLWFGVLLFLVAALVGDCCAPVVMGCVVYVVVFLWCMRAWVDSASISVLGAVCLWPWLSPVSSVVFVRLVRLWSGLVVFDFFAWCTRVWFVCRVLGGGGVFVLSCWCCVAVGGLGCWCPSPRGSLPKRLVLVSFLS

SEQ ID NO: 970031 - protein, 119 aa, Homo sapiens
MVAELNPPRGRDTLVYNYSNAGTHCTVVRPHAVLAHDHAVFLGTQSADRVTCLTLGTHNWYKNGPYREAHCLSHTLRHIVGEPHKNEDDLPTPPPTSQNTKGGNPRYRLPMPHATSPPA

SEQ ID NO: 970032 - protein, 194 aa, Homo sapiens
NSSHQPTRETEKDRERERQRRNIVSCLSIFCDDYHCLFSLCVSSTILLVVVFLTIFYRWDSSAHSLSFGYGFSHIIIVFVCVFPPEEGLLSLLFIHKGRHTRLAGVVVRRRAHAVRRGRASQQSVFVFCCTPPSSSFLLVGTLHNLCFFSSRKHDQSQLWGRKFFSDVVLIVARGRIQCAICDNSLKWAFIIVL

SEQ ID NO: 970033 - protein, 171 aa, Homo sapiens
  misc_feature (128)..(128): Xaa can be any naturally occurring amino acid
LARARGRTYLACCVMLIVRRLLIKSPLVSPVFYSASFVFWLRILSQRWLPAIPVSTPPAGIFFPQYAPPCSACAVARTAPAILSGTPKAPISHMRTYIRVKFVESLVDPRDNHVARKPKCPLLPPLEXADKNTQECTGVTPVRGLFPGYHQVPFVSHGPSIGMSQGSFPGP

SEQ ID NO: 970034 - protein, 178 aa, Homo sapiens
RPCVFPRLVGSIAVCCRCLPVWGVCLCPLVMRMVVLPSSIWGGWGNKGDGPVPFRQAALHTRGLLGGSLPPFVGDTLRWGPGPQRYRLALLTPPEKGGISRREGMVLSPLTLLPSLCEPDEKCGRRCTQGFFQTFLKGEHPSWRHKNGLSVANSGVKDVCVPLLGEVYAPRSSYRELC

SEQ ID NO: 970035 - protein, 105 aa, Homo sapiens
LWFPFFCPIPLFPPSSVVSWGLEGPVVFHCVFSAPWSPPAFCQPPCGPQPCWPGRVPPPTYWAYSWVGPVTPWGTISCLPNRGPRNVVPGSVSNPKEYLPPRLAK

SEQ ID NO: 970036 - protein, 184 aa, Homo sapiens
MENLYALYGARSTLRALHHICRSLPCGDVFSRRTWGHKTRSGSNSPFCPGGLYPFFGTHRTNIHQTSHILCGSLGSFSQAQEPFPFSPESQNWPGVTHRSLIPPWPGIPGIPGQRQCRPTNSMVREYLCPGKGAFHSNVAPSPSNTQGTRILHSEQSPCHHPYACPATWPLQGDGGHLRKLNPC

SEQ ID NO: 970037 - protein, 401 aa, Homo sapiens
RGCESVPVAVCGALWFSLFSAPPVAVFVVLFALFPQEISGVLVPPVFVLELAQLAALCALLQPAVLVRDARLGGYPPRLRFFSCQNCTCLLIVGALGLWGPPLGGSPLYCCPTVDRQGVLLFSGGPFLIVFGGLGNVFPTLTTHRVFVWWVGFTRLSGGDHPLGLPCVCAPPTLSQSPLVGEQPNLSREGYWGAPMVSRPCCPGCLVASRVFSPPFRTRPCRVRRGDTFLPPRGDPPGGPRPPSGGHLWLPGEDSLDSCVPVPPSLCSTTICPPVPTSVTPQRVFPPLVGPSTVVFYKCTTPYAHPGHAHVALVPQCVCRLFVLVEWLTGSVPEVLKNSLCRAPTRLSYFPWSHRSSLCFSCVGARSPLPASPRPLFPRHRHGPLPSVIVGRPGLDTLLHE

SEQ ID NO: 970038 - protein, 140 aa, Homo sapiens
MTTYPFPRPSLSTHSSGPLVSYPRLVFTDFSLYRVVLPHAVGCKGVQSGRAGAHDTSPFKSCLPGLLSVNTLLSGGRHASLWKIPPTWGVFVSFDPRSRTPLFTRYILFFGHHTTDSCTCPNALYDVFLEILSPPSLSTR

SEQ ID NO: 970039 - protein, 234 aa, Homo sapiens
YCPLSAYFMVPPICTRRCGPQKHRGLGLPASRNFPGIIWLGPPRFSRSKLCSLAGPPLARLGRPQCMPSIILEDPSRAPGRALPCWSRLLRRCQIPPRPLLICDAAICSLKTIPEVYPPWPRRLFCPDTQVARETHDHPAHGCERERAIEIGPHRGHSGQALLPSAHFAQARPLAGRPSGRPEFFYCDIDTLALRWLRWRGFPLVQTRVPARFLVQTILSFPGTTNSSVKIFFQ

SEQ ID NO: 970040 - protein, 176 aa, Homo sapiens
FSALRLALFSLPVRHHLEVPGSPPVVDPRSGPPWGPLWPPPPPPREFPLGRGNIHGVANFFQRTYSVLPVFLSEFTEGAFTSSSAPLRGFSSLPVPGYSDAPTPLLRPMLDCGAALYIEIPGGALPQGTQDQLSPVSLEFFWGPCEPEPMSFSFAFPQNPGDRAPLALRTLSVFGL

SEQ ID NO: 970041 - protein, 155 aa, Homo sapiens
SHKRSFPARPAPNWSVNPAPRVSPGKLDNQMRTSKWIPPAQCGLALPGTALPCVLRHSRGRCPHPAGDRPLKPLFMPGTAPTGPCSCLGQAPGPPLAAVSSGRLVGEGMDPPWAGAGRTRPIIGHLVALATPPGCLRLKSVGFTELPLLHLAESP

SEQ ID NO: 970042 - protein, 84 aa, Homo sapiens
FPPPSSLTVPQCVTGVCHLGTPGPTVATVLTRGRLLRGLPEGRLGTARAGILASSDFVCLDRWKLFLGVGQRERPWLTRGLLTL

SEQ ID NO: 970043 - protein, 282 aa, Homo sapiens
GSPPPFVPPFPYGLFSLWAPRTWVALPRSRSFYGRGRRPRDKITHRGACFLLGALISGRPPPPPVPQELPFFSREDFLFFSAPPRGFFFPNKNLWAVSTARRSPPRPLLLGGRCRPPTSVCPPRYSPLRVAPLSLTTPAVFLRSSGGVSYLPRGSSPCVLKKPPPPPLMFYAALLSHTFLRCFFVLLLPSLRAESFGGSPSPSFAAGVVRVDPLSFWDDQRCSPAFSYLTIWVGHRFPAHVSFLRAPFSPLTPNTPLFNPPPFRPFLNGFFFFFFSPFFWGV

SEQ ID NO: 970044 - protein, 203 aa, Homo sapiens
MAPPRVQLSLTFNPVKLTCPCKARALPPPDDEDPYGAFNLLIPHQYLTKPPRSPITIPKPSPFKNFPVWGRPPDARDPNLRTPVTIAEDFPPSPKPNITITPIDPNNLTHGTSYPRDNRAILILESHNPHQLGFTDLDSWIQDHPQWSQPAIKGSFVQRLKSYVICVQTRSNPGPVSILLPNSSLYRKDQRNKAYFTKRLPPL

SEQ ID NO: 970045 - protein, 284 aa, Homo sapiens
CFPRRGGPRFFRTPLFPGPEVGAILVPWTTGVNFKSRTLGPLARRRFGLYGNRGATQHLLWDPGSFVAPLERFSARHPCVSTAAASFETLVGGASGWLSCCFTRNILCLAKYPPLFPPGVFKEGEVLSRHTPVCFPTGQSVFLLHPPRFPSFRPGSLTSGTPHYDRGLLFVREGDPPADPEGAWGCYSHGENSAEDVERTHAPFLHGYPGVGEPLLGPRASAPALLCAPHLSSAGHTSVVHNFRRSEFSPRGAPPPEPAPSKAAPLQPRGRATFLEFEFLARGF

SEQ ID NO: 970046 - protein, 211 aa, Homo sapiens
PRRVRWGPPRRLRGEVIICWTDRSILFSRTVARGGGVCLRLWAEHWVCAWVSRAARLVGRSLRGTRVLGGERVAQTALLPTRLWDRGRARPPAFFFCGRKRTAVSARDHRGGCAPLVILPSVNNCTASWGGGTAATPAGGVVVFFCDDGEKWFVQRRLFFWGERPPTGGPPCCVCVVARSHPSPRQHWCGGRRPPPCVVGGGVLPLPPAWW

SEQ ID NO: 970047 - protein, 157 aa, Homo sapiens
MQLPARITEFQESKRRSPNPVSRFVDEDFQELEENFSASRTPYCRRRSTYEEIPDIRILIPPKVPVYQLKYVPPNKLGSLITGAICLDILKIHGPAAMTLPPRYYCPLPATIGQLQSPDDPPDAVVANPVTQPKSPECSKPDQLDFGHQVYSGATRF

SEQ ID NO: 970048 - protein, 363 aa, Homo sapiens
  misc_feature (1)..(1): Xaa can be any naturally occurring amino acid
XCPLCPVRVGGRCLLRASGFKVVHVRGVPRCSQPRRVCCGGPLPGGCTDRLLCSCEAPRRTYWVVDGHFPLLSAFSRLFVSLVAGAPSFAIMPRVGVLAHEPLCPALLSLFWAAPASCCFVCVVPPRELFFSLGVGRVKPPVLSQSSLVCHKWGAHSTEHHHAVVVCTLSRVKNGLVFPAASLHRLLVSPSSRLPRVSHLFRAPRVSPRSVLWSPHRCSLRARDPRSVSVSLAREMFSLYCGLRFNSLVTTGSPRGPVAPRGAPRTLISGRRLDCAPFSLPPYPPGSPPPLCGSPVFGPDSCLPPATFSHSPRAFSPPAVRQPHFVGEPRPPLGIFSSLWGPFYFLSMDLLRGPCPPPKKGFF

SEQ ID NO: 970049 - protein, 407 aa, Homo sapiens
  misc_feature (289)..(289): Xaa can be any naturally occurring amino acid
FFGLCHRCVSHNVGHSCPGDGPTRCRLREGSPDLAPGGFFVAHLPSGPPKGTVLSSRPIRGGPGPSLGCAFQPFAAVVSAHPRRALSHLLFEPRVSHTWAPDPYESCRTWIWGNRCSSHLGPPFLGLDAFLTELRCKTSVVPSPAGGTPASLLLLKDGSAPAALSVEVGSSPQDLCASRTSGGEPNLSQHSAVTTDPTHGNSETTVEFKSIFEVVPLCCYPQYTAGSWATVHHSPPSLFYLRTLFTNSPPRPSYRWSLHFVGPQKLTHVKFLFFGVLTPYWEMIVALVXCCFVQQVSRPRAQLLDTSDTTFPAGYTRHTRASNVNSYYHPPTFHSHMVASPLDTRWTGDPVARHGTLENPRDDAQCPGRNSPGTPRACTLTVLLFWLFFVVCFFCVDFVPGQIFPSE

SEQ ID NO: 970050 - protein, 154 aa, Homo sapiens
  misc_feature (84)..(84): Xaa can be any naturally occurring amino acid
EHLNLHDWLVEEFLVARRVLSHALISGAKKLPLECGPHPRYVEKITTAGSLYREMRFQSFARSTLLMGTNRFNFWKFRKGGSVXVWCVWCAPLFRVSSTGVFVSWCHTIFGAGAPHIGAPRKGRSWKKVPREPQFEVPHNRLPLPHPRVILGFL

SEQ ID NO: 970051 - protein, 310 aa, Homo sapiens
QTVCPALFGPWTDVRRTGWPSSDPRILVPGSLSEESSPRCPAPAPFFVLRGAADGDPLAVCPRVHAFLHSLLGVPRSRGELGSPVFCAPHTVPGLYGGPPVPPSLPFVVGPPLGVPRLSTGGGSYRANLTDGVLPGIPAPCRDPLGPCPLGWSAPLPRAAGVARVPGPPDVSCVVDIPRPALQVARPRAEHWVTFLRCFTRDTRCPPGVGPPPEFSAPGFPEGDPCRGGAPCSQLWHPVPRGLPLSRRPFEFRGPLGGPTKLAQIPWVPPIKPFPGTTPCPPGCASPPPRGFFLEKIIFFFFPKKFQATP

SEQ ID NO: 970052 - protein, 232 aa, Homo sapiens
VVSTIFSGPPWMADAPVFSRLEGGPLSAPFAPRADSAPAVFLPQRVAPAPVSRGVFVQPSALCVVRPPALFLLRGTLLFIPHTGVYTDSLSHTGGVFPSPARGPPLAPSWRTDCSTFCPPPPLLMPACSLPPRPHSTFSGRSCRHYFRRLFCVAAESAAVLPRSGRSFLRRGRDISYSFHYREGAPPNQALLLEEGKTAPPPFCGVFLVCRFFSPWQPPTMQCGGSHATPRL

SEQ ID NO: 970053 - protein, 190 aa, Homo sapiens
ILRATLLCVSDLVDVRGRLGLAAIRWAVSRPLYLRASFPLDAPSSARFPMPPIDPRAIPPWPVGIFQVVPPRLGTFYQRTVCFEVHPSIMRRHRRSLALSPAGVHGAISAHCNLRLLGSRPFSCLPLLSELNYRKLSLAFEENDPATIQDYPPWYITDFVELLGEPARDNIPLSNSVPTTSDENFTRYTD

SEQ ID NO: 970054 - protein, 208 aa, Homo sapiens
  misc_feature (93)..(93): Xaa can be any naturally occurring amino acid
PDFFPAQQFPRPFSLAFLGPIGKVCQDRRGPAPGLRGIFSLPPLWENSGLLHGSPANARGFDPAFPRTFRIPPRQLWWPPSWNATLLRGVTPXPLGFSSSSLRREEPPLPSCVTMPAPLAEEKGRETPVCYPILRTLPSARITLSGAPLVGGPATLPVVVRRAPYIPAPASFGAPPFFGPPKPSLLLAVCLGFPSPDRHLVSSFRVPL

SEQ ID NO: 970055 - protein, 89 aa, Homo sapiens
NPSGAILPAIDPSLSSPVAIPSSDPFTIDQDGGSDDPLPLPIQNPIGPPHGYWNLQKYPDFGGHNFRTSVRYFSPIIPRNPATCKLLDA

SEQ ID NO: 970056 - protein, 126 aa, Homo sapiens
RILVANDTGFTVSQPGKEKALMESSRHCGAHLPCYGSRPYRPSQFSPIKAIYFEPRLQPAKTWIMVFWWLATALKDANSNHQPVLARPKPAGVPRMGLEWLCKNSPRPEPTPVESPTSSQLPPCVS

SEQ ID NO: 970057 - protein, 105 aa, Homo sapiens
MGVPGPPRSFFGGKGVPLGAIPGGVDVPVLEKSVLLLGGWFLPYGPCGSPSPPVFAHEGHPAPSFLPGVPVFTESGLWVCWPHALFPRYPKFLPLSPNPGFHLTL

SEQ ID NO: 970058 - protein, 114 aa, Homo sapiens
ERRAYSRKPSDATNMGAETGGRTGACETRNPHMGTISGTQPGSDEKKCFRRETLERQQQCPVSNSEKAPSTSTRGNQNGCPEISEKVVDPRANTATMVVSGVAGLKMERTLSVI

SEQ ID NO: 970059 - protein, 169 aa, Homo sapiens
QSQTPRLVTVCGPPERPPTRAPELQGLQSDGEENQPRPGDGAALCSSDERVLKDNPEPPLEGDPREPANWRSPSSPPGVPASSQWRNQSEWLSVPGCADEPPPLLTDGPFGGPCAPPERPGAPGPPRGFGGIPGFPHSSCSWASGEERPPFPWAALSPGLVLFLGAFGQ

SEQ ID NO: 970060 - protein, 212 aa, Homo sapiens
FSVSLVVVSCARFLSAVLLLTVSCRGCGVSVWGCALRWCARVVLVFCSPRLVGGGVFLNRNLVFLCGPLRMLPLGWAPLISPTPGVVGPLPDCGETSPRGVPDVPSLSPASFCTLYGPPGGAGVHPNGVPTHTGTQRFVAAPCSRPHFFRGEPPFFCGQPTRVFVHPPINSSPGRGVIHPGVPRGDFSPRGGFILVPGTAPHVPVFSGGAPI

SEQ ID NO: 970061 - protein, 530 aa, Homo sapiens
  misc_feature (12)..(12): Xaa can be any naturally occurring amino acid
FVFSPPRPPLLXFVLLTRLVCVCLRFLCWAPLVCCALDLSTHVCCCVLSVSPCTSVSLSFLRCVAAPPCVCWSCVSSLSVVVGGVGSSRSTPVGGWRCVLTCVAVFLFSLVWLTLDCCGFLPVLFSLCIDWRSCFSLLDLFSVPLLVVPCVLYVSVFSSYSCWLSICHLVSARRPPCVFCWLFWGALSVSVCLVGARCRWQIIVALCFVQCLALSAGNIRCMFGGRLLCRFAFFCLWSLAVTCLRMGVLLLAASCSNSAFPWLFFFLLSTLRSRLRWSFAPPHRVVCVLSHALRLCFLCLCFVFFRCSSTSRRGSSRSVVFFFSFSSLSRSLRACVADCCCLPHSLPSCVVFSSLFSLRSTSHTPPSLLSLLYLYDTSFCFCLCVYTHIYPPRASSLCLLCCVVGFCCSLFLSSLSTLSFARAWSSECVSLYTRSLVSLCLSLSRAARSTLISLLLSPYTPPRARARALSSSVLSLCSPRRPPRSDILLSFFSSLSLSAFLSSRSARAQPIFLFSLLSLGGVSPRARARV

SEQ ID NO: 970062 - protein, 334 aa, Homo sapiens
MLCWGRRKEAVLTPGAAPSGGGDRPLGARHVLGECGWGILLAADMIMEVRMEWDDGNKSVDVCSGAHSLPLVICGDSIGAFFICEGAALCPRTHHVGRLLDVERLSPRGRRALFSKAAEVARCALGENMGERTPPPFVYHLPVLERRLEGVGTGDVRRNSWNGEEAPKHVAPRGYSLEHTTLSAGQCVWSQHVVRVSPHAGYGVVLTAPTLVFGSGGRPLRYSGSFTPAHPLLYLSPLVSPALNLDAPAEIGSPARSPRRVLRPKVVVTIGAPSGAPFEKSASRERPREIPSSWAHLVASTQMYCQGESHISVSRERHATAALHGIERRKEPPR

SEQ ID NO: 970063 - protein, 113 aa, Homo sapiens
MRLVNLLPANILCVPPIQVSPFFVEPSSGAPPHGWGTLCALVVGLPPLPWFGKKCCGSLFAPAILVPTRCCFGSQAPLSPPYLWRPQTPLMGEDHGKCLPNVVVENQRWCRQN

SEQ ID NO: 970064 - protein, 231 aa, Homo sapiens
GSVPPPLHTVWWGTEMWAPTGDTPFLLRGGTERAALVAGRDHPRLACPPSSDPAFCFGPPPCPPAAFFLSVVVHLAQPFVVSAGVSTEECLVPQVPRGGSIPEKTLAQDCARFDSGLYPFILLLRGPSCFVIVLCRLSPRGIHSLHPASVAGPVFPRFGAVAPSSAADAYNIVPNVSGRPPRATPQGRPTPAPDMYNPRKRDFTRGSAAHEELMELLREHQGVGGTPDPRS

SEQ ID NO: 970065 - protein, 438 aa, Homo sapiens
CPPAVLGRGYCLLSGVLVADRARRFLGTLGGHHTYVGPLLLGPTTGGQQLCRCVPPASPVSVHSSTILTRGGRPLVYTFRGRRPLLAQCVHPLRGPLSIRLRVAAPLGGQPPTRGSSVHRPHEEFPGGKDKIKIRCRKVFSPGIADPFSGVFVWVPWCEPPGVCLPPAENFSVVPLFYRCPREYFIGGTPQTPHMGRRPPPRFPGAREFFVVGVFQKVFVGGHPRSLNNWAGISPPGGFLFLSVGRGVPHPETASRYSPPTKRGGPQNILGESCVFWALFESTPFFTHESALPRGLREGVSESATLRKPSHLSPRYGHTKIFLALSPSMSTNPTAPPRVGSTPVGAPRVFPQWPPTVPLVALSLTGIYHLGCLKMCVVFISSGVTIATPANRVPLFPRRDSSSSLDILDSLPPQPSLGLGEHIYLKEPLFPSPVKHPC

SEQ ID NO: 970066 - protein, 210 aa, Homo sapiens
  misc_feature (141)..(141): Xaa can be any naturally occurring amino acid
PPGAEEGLNTRVFRATTGGLRAQRCTRILSARLRPGPPPKAPPGASRVTPGSVAVPDPPPVPLPPSHTGRTDRGLPPLMTGVSPLQRAPRRGFGCDPVGAPAGLWPPGARLLLVPRNRGISLLRTKSSRSVTLPKALTASXPEPPGPGPSQGPPLPLGRNPLLPFPLKTETIIKIDYNFAGNEEPRKFHGEGPRSFPGLAFRTTPVPHCR

SEQ ID NO: 970067 - protein, 87 aa, Homo sapiens
GLDGGLHTGGEAAIWVETFFAGSFARSCAASPVKFAGFRWETTLLVSLPDPGASPECAEHFMGGFPQVSPWRKPWVPRRGTHKGALG

SEQ ID NO: 970068 - protein, 547 aa, Homo sapiens
PAATCCGALLARVASAWRVCGYSGLLFTPHLTSPALPQLLLGHTRLCSAPRRWHCCLRRTMVLSVWCVAASSRRGGVSSRCTLWAHIASCLLVGSPGGCTPHHDGAAVCIYTNLLVCGSSSDRMFVLLRGANVWCGGAALCGGGFLVFPPAGAARSFSLWRATCVPREVVLVAFSTVGGRPDGRVMPGGRPPRVIDVVVALRSRCRSQEGGSPRSVLLGETVWVAELGAPSCFAPSPHGGSLSHAGGGVGTPPCSPPFPCSRRLWGDHWGWCGLTHPPPAGHSVGVYSPRAPPAHARVWRMCPRCVRCSPHSFLYGAHTLLFDTTQVFCAARGTRVLARETPRAHSVGALWGATHSCVRHICVDTPRVCLVDTHACYLQSETHTAPTERYVSPTYRGDTFSPHTPTAGHTPVRVHTLCHMRCRVSTHRSKGVTLLYMSTLPSPLEGWFLGTPSRTTHEREYMPPPPARHSAGPRGTTHTSESPLSRTSILRPNPRLYLTGPAPMEAPYGLALWPLFGLPPLEFSPSPPPRPPRPPWYPDPRIKHLFP

SEQ ID NO: 970069 - protein, 267 aa, Homo sapiens
  misc_feature (157)..(157): Xaa can be any naturally occurring amino acid
SGVVPLSPRLRSRVVLRGEVQPCVLSPSVPGFTVTPSLGYFLANGLHPRVFFQNFVAEISGAQNGPHGRHGLPSPVFFLPSPAPLFLRVFPPFCGVRPPPLPVLRANCSLPCVAKCSSPSWLRTLVDVGPPSFFLLFWILPTSFLVFSPRRPPFVVXLVAFSERMPPLCGSLLSLFLCICSRTPPSLAGGFPLHPVAPQEAPLCRVLRVPHHCAPRESSPGGALSGIFFSLHSLRPPPPSYPLVGESRVLSGQCLFFSKWPAFECVE

SEQ ID NO: 970070 - protein, 108 aa, Homo sapiens
SPSAVRWCIITTAFRFLVGPGSTTRRLGVPPNSPRRGVLGRPPTYGRDSPRGPGFPRLLRDFLIAFMGPPRAPEFTTLCSPTTGGTTSYLSPPFMGPLHFLGVQPPPN

SEQ ID NO: 970071 - protein, 70 aa, Homo sapiens
SVPSGLGDPSSTRFLGFPRGAFPFGEALRSPSPAVRPLGCGLPPVCTLGNPGFRPLCCAADDTWVNFHAL

SEQ ID NO: 970072 - protein, 206 aa, Homo sapiens
HRRLPPSGTRSKCFAPTHGGAPPAQMPWSTHTPRGFPHRVAHTPGFGGPRKARLPSPIIPPPALSPLGSSPAALGKSPPLVLFPGPLVFGAHAHVEYMVMNQRRNAQKGKSEEEKASSLKEECRPKRPPPYSARPTQGGPHTRQWAQAKFPARLVAVACAVVSPGQWNILERCGYTRAPWGPRSPSKVLSTHDIFACFAPSQDFPE

SEQ ID NO: 970073 - protein, 427 aa, Homo sapiens
SRVVYIVRYSLVLSRRHPFLWWYFVSPFCSVRAAPCTQERFSCVPPWPFVSLGPDAFGAQPMLWELCAGGTWGHEGAPLFYRLPDFPGVFPPWAKSRFLAPVISVFPAVFFLFGCPYFLFSPVFPSGVTPFSVGPLSLEMSLVWSSLLWAYLGRPLHVAHVGPVEFPRAEIFVCPPPSYHLGFSSLVERPFQTPLRHRVSPPVGPHCALCSTRVLTTWGATPRPPYPTGARPPWKWGDSTKFFGGTHSHGSPENAWRWTHCFSRVSPPAPRRGISHFGGSPSGDWGHPSAGVPLSHTVRPPPGPPGQHFMRLGLPPPVSPQTVTPRSIFLPERCPPKVCTFLVANTPPGSWALPNSFRGFLEGAQTRGSFGELVSLELSQWPPPRAALLPSVRTSAHALGPATPTHSFSGFGAQKDDEPREASGLGP

SEQ ID NO: 970074 - protein, 65 aa, Homo sapiens
MAELDPGSEETPTLVREYFSWEGAFQHVGKSLPSGPDFQVTSLAITCCLHLPFREMGVIKGNWTL

SEQ ID NO: 970075 - protein, 135 aa, Homo sapiens
VGVSCVLCREWCFLVCLSFSVHHCVLWWVAAALRFCLLVVWVSFWHPFVLSTLPVLCFPFDSLSFVSLLVITCDRCSAFFAILFFKVFWSVFLTCACVSLAGSFFFYITPWFGVFVPLPFVVYTMVFCHCVGKPF

SEQ ID NO: 970076 - protein, 223 aa, Homo sapiens
  misc_feature (31)..(31): Xaa can be any naturally occurring amino acid
AGTPWVAHGAGSHRRFFLLEGVPRPRLATKXYEARRKIVGAPFPPSVHRYSAAALETSETTRCLETHVPIRATPECTPVPRWRRPHRARRAETAGAFAPEARHTLPSLKGALGAPGPQKEGPAPWRRSRRSGERTHPAGNTESILTRKNGGHPLVGVYHTGQTLLTQVEIKTRDDRPTTLGEIFPSHYKPVKHGRPGIGAHTTILPLLSLSSNGSANKGAHDS

SEQ ID NO: 970077 - protein, 242 aa, Homo sapiens
VSLRTLSLGVLLGVGVAFLSTPPASLVVCLLSSVAVFFLVLLCWVALTASVFYSYALSVVVPSFRPWWSSLRCGLLCCEIPTVGGASRLFFVTPRVFCPRHCVSSVNMWVPPLAGVLFVVRPPLLGGAPTYGPLPGGGPTIAPSRRYLADIPPVGARLLSGDGTHVWCLPTGVVAFPFPLPLVLQEMWLFVVNIGATTRVYDHLVDVWWLFVDGFCAEEDVPHAPGAINILVPTGSCIIRRC

SEQ ID NO: 970078 - protein, 112 aa, Homo sapiens
WAPYVCSRALLSPLWELFLLVPGASSDYFSCDGISWGGVLAGPQAVPPPGGPFLLGESSPWGEIFLRGDPLWVLMSLVPPLGEVSTCRSAAPKLFSHITRCVFLETTPPLGL

SEQ ID NO: 970079 - protein, 132 aa, Homo sapiens
MGHAPTGSFLHTLMSRAWHKTTGKRDMLPAPGGMRPLLNIRGQTWRAEESPPTTPRCRGKSAREHFNLLGNALGAAANSHAQTIPKAPTPRILDGKMVLRPRQPKILGHLTTRTRVNLWGTRGPIKSSEFIG

SEQ ID NO: 970080 - protein, 198 aa, Homo sapiens
VSSPATIVICSGPNCVAPACASHGLGMDSLGPHTHCASPEGQLSLVPASGQAPGFPQHPECVPSPHLQRPPTSAPPAWPCLQTINYNPSSTPVCRPRRLEPPPGSGRPPGWERLCPPAPKPTPPLSFPGPAADPGGCPACGRSAFPPSLLFYISDFKGDSSGTCVLVMGVPRHLGLGWGGPLFHIEEPPIIKGPPSGP

SEQ ID NO: 970081 - protein, 81 aa, Homo sapiens
GLNARRADKKFLRALLVPQMTRHGSTAHAQGYPEPSGPNSARLAPVCGLPTRVTLQASLAELKAKIDRRSGKKLGRWPLNC

SEQ ID NO: 970082 - protein, 289 aa, Homo sapiens
LPLSVVDWSLLDSPALVSYVCFHFFWSGFRVAWASSFALLVGCCDVFFFCGFLPPFRRVSLPPWVPPGGGASRIEQPFSLAWSPARDLFRGPYVSALLNLGFPAWPWWVPRFAPFWFPPAPGPPSIGVPTRGCSKPGVCPRWRYLGGTVLAPEGGSGWKMGSAYCSLSPPWYPPPGIHCQSQRVSPMLSVGSPFCRPPFGGNWSGPTSKGYCNNIGSPSRVFSEKKCAPLSTEPVVGTLFRTLPNGGNLCPVCPRPTPLGLGAPTVRWPPKEVAEIFAAPMLIKPPERC

SEQ ID NO: 970083 - protein, 263 aa, Homo sapiens
MSSPFVVPACQSRGSPLCGVAAEYRHWRPWLSSPLAWWKWCGRPLLLRALYSGVVGPVGSPTPEVARVENCGRKRGTPVFCRPLFEDLCSLLLLSRRAPPFCVVPRLLFPLGDVCRILSRGVICENREGGNEGAFCANTFVGGDSPPKEPSAFRQNVLKGSGAPLLGRTSVRGVLRPPTLYAQGEVFCSFVREASRVREATGKFFLSRPSLCPQRTLVSLAPRDTLREGENTIISRECPHSALSRVVEIYPHLLTDKGDTLCL

SEQ ID NO: 970084 - protein, 218 aa, Homo sapiens
LTTALMLCGLLGYDSTFFKMRSLLRRFSGVVQHPRAPASGPRYFCCSWSFIVRLHSILSLCRPWGLIPRVSLPQKLVRGYALPRCSSPARGYGGNVPQGVPRRKIAAEMVFLGGFSYTPLPGTICRGWALVPWKKLGETKKFGKKSGDHNPRHVVRCQNPGTLGPLSKYFRCERTPLGMFSPPPPWVKEVEVIAPAAWLGSAQRWNILVHPRPPQNMV

SEQ ID NO: 970085 - protein, 168 aa, Homo sapiens
MGTGGLYKKRLKSFELACSALHEMPLTRVMSKWTFEEATATGGPPPGQSLVFNGSRPPERVPCGALGAVTWTTTRTPELWSQMAAISAPLGKLYRHQTCNPFDAATLGCSPALATGTGLPEAMGAPSLLQRSAEAAHEVQRDYSLPTDTFFFPRPVYSICFISLTFPG

SEQ ID NO: 970086 - protein, 199 aa, Homo sapiens
MPGGTFHRAVSIALLGTLGSCPKPGGPSDFPGFVTTPPPDTATACGEEFVPPTGPPPNVCAFTPGTFSLADPGTFRGTPASLWLLTPGVTPQPLRRHFMLPTYPCAVLTPDSPLRYWTIALPMHHQGAHSVGLIGGCWLGKFCAMRGHPFPWHTPGGSLPDLYILTRDPEEIVKEEPGFFLRRPVTQEEFQGEWTAPRS

SEQ ID NO: 970087 - protein, 117 aa, Homo sapiens
MIHSQQTAPTWPSPSWEISQGRPELGSGSLPIPGRPILDAPGWDSGSNPANLSQLSAPGWTTPTHPKRLEAVPPETIPVSPATHQGHIEGKALSTLCPMPPGPRAGSKKQGQSLAVS

SEQ ID NO: 970088 - protein, 105 aa, Homo sapiens
  misc_feature (3)..(3): Xaa can be any naturally occurring amino acid
  misc_feature (22)..(22): Xaa can be any naturally occurring amino acid
  misc_feature (35)..(35): Xaa can be any naturally occurring amino acid
MFXPTLLGCFSLLYSVLCSSNXERHTDPQLLCRRXGVCSTTTNAHSWDTHEKGLCSRESLLAHTGVTPTQCLGPTEKSLSQSRGLYNLDDLIAPHNIARPPAHTS

SEQ ID NO: 970089 - protein, 150 aa, Homo sapiens
MNPIFLHPGDHLCPPWRSFWGHPPYKDRPSVSPQERSVGPVRGYSRGEIFLATHVPLLDVPLFPVHRGELTKMCCAKVFTSPAGARVLPTITTRVSLPYKKAGEATPQASKGTLWVPAPRGPPRPPFLRGPLEPKGVFLGPPPVFKKKGF

SEQ ID NO: 970090 - protein, 112 aa, Homo sapiens
MSRCGVRGRTRSYYRSFSHSGVPDREVSSVPQGDLSPMFAVSPVNVWLCQPRLGFPRCDPQVAPPSPRFLFPFLSVFFFCGDAALGHTSETLTPKENFAAPRLEVNLMLPTG

SEQ ID NO: 970091 - protein, 162 aa, Homo sapiens
LGRGRPALALSLFLSPGSLSAGSTTCALLHRVLVHAKCCRLFAVPFYLRFLAVGFSPAGSPPLAYAAHSMNSFLFHWLGPLLCLRPGPPSLSSPCASQCRPLQRPVCAGPAYVPSPPGWQGPVLGAGSLLASSSAPPVDYPPQPTEQKNVTRSIRHIPYMML

SEQ ID NO: 970092 - protein, 147 aa, Homo sapiens
MSFSTSAVWALFMILLCPARVSGAIAFARFLPGARCGMNFFSFDRNPARSPLGHLVPPSCVTPGSSDTSLDCNPRSDVPVLDLATGFYIARPLTLLVLLARLHTLTSVIPVASAIDTAGYRESAAFGQAASDHIGPEDAKRPALGTR

SEQ ID NO: 970093 - protein, 114 aa, Homo sapiens
  misc_feature (110)..(110): Xaa can be any naturally occurring amino acid
MTPNSCSATYQVQPSCTDGDLRGILRFLGASRQAFWETKGRAPQICPTLLAQSCCPPNCERPGLFHHFAFYFPVKDHPGSFTPGQLLFFWVCDIPCLSQGECACQVWSNXIPES

SEQ ID NO: 970094 - protein, 243 aa, Homo sapiens
PPRVYTNPGLLSAAALREETPPFVVCPTYIATHVRGGTSSALPLSFFSFGPAGYWFFSQPVGEAMYTPARKHYFVGASRHTLVCVLILNSARVAPSRNDLPERSFLFQTTCSPPHVLVLVALRGVCVFPILSLCWSLRRESAPPTHHVVLVFFFFLSSSPPRVRVFATFLLSDFSSHATPPPAGLGYPPTPRRPPLFLRPVFSFSHRPVVLCATHASAPLPCLVLVGFSLPECPSASPPPPRR

SEQ ID NO: 970095 - protein, 203 aa, Homo sapiens
LVGAVAASPIVLSPIGAPHRGAPAHVAAPPRIFPPESGVDRPRLRSAIAGGGFLPCSARLITAPVVLSHPEPALVGACFPPPPPACGGATLLRVRPCRVRSSHHIAWVCLLLPRVSSCWGGYQPPWFVHRTPSFPCRLVRPPPVRPYRVVGHRGGSPLSSGRSCVGMDRISVLSSLILMVRPAGVGVRGKITPRRPSVGGAWQ

SEQ ID NO: 970096 - protein, 211 aa, Homo sapiens
ALLLPEVINLRPASCQSSPGPRGLRKPERGVSLNRFAQEFHEEAQDLKEGIPLPTQILVKPDRTFEIKIGPAPCFLLPEGQPTGIEKGAPANQGKRCQPGDPGSMCMRLPAIQAPDEAICPARMYPSSSVVRSIIGSARSLGIRVVKDLRSEELAAFPKDEPSSWLLRRRQIWLPQKKLPRSDPCPPQLPDFKGGSCQSCAHQGRKEVTPI

SEQ ID NO: 970097 - protein, 111 aa, Homo sapiens
GVHPHFLSNNFSSFTTRNPPPKRRLHKKKLPPPSVAPPAHLRADPPASRGPLHPFASPVAHHADRVCLSRHTILPTCVVSPTPIESLAESWGSPLTPPPLVVRSVLSPTSF

SEQ ID NO: 970098 - protein, 168 aa, Homo sapiens
MVPTDSRLEHPLGAPHPRCLDMLQHLPLLLWLVIPPVFDHGSIYHPGVLDIPEELCTSRFLEGVPHVARVCLPIGYPTGASVPPSYHQRVPSESLALFCGERDYTSPTLLERSQAFSGVIQSALCGLLPLWVLPPPAAPAAAAAPRYWLYPQEESEESDEDMGFGLFD

SEQ ID NO: 970099 - protein, 233 aa, Homo sapiens
SVPHPHILPPGGPQQSPVRALHPTMRPIRSKTPRFSSALTLDELTLLHLREFAQKKLISVETDIVVDPLPGGEHLRTGPPTAEGLSEKEDGGASWPRMRNVARGRAVTQREGDPPTGQPNPANGHPLPGDGGLPPTLPAHSNTLAQRPRRSAHSSCSPRWRSTPGHALIQKLNQLRAHTKPRPRLSSAGGVRYTSTTLIAAGLVDDPRALVGRLNDCFQGPGAHTDSQGGQKD

SEQ ID NO: 970100 - protein, 150 aa, Homo sapiens
MHQGISRHPGWLLSARRRSSENGVYVAVSVSCMASLGHWASDSLPPPEQGGPLPPPPGETVYCCRLALVFAPSQDFEGMSGQRHGPRPCGLPRLDVTWRAGLGGGGPPHPRPEMLHFPSRNPTLENCSFHQALFLNGLLLRASREICLFV

SEQ ID NO: 970101 - protein, 126 aa, Homo sapiens
MIFIGVNLTFFPTTLSRPIRDAPTLSRSYPDAYTHHWNILSSVGSLHFSNTPYILIIFMILRSLRFKRESPNSRENPPLNLEVTIWMPPTLPHIEEPVYIKFRPKRKESNPPKLVSSPPPGLHDFF

SEQ ID NO: 970102 - protein, 177 aa, Homo sapiens
PLARRVGLRCPGPIPADRTCFAVLSLGQPPDSLRGPIPKSFLVSADHGPSGIPDYPDKHEENPRPLFPKGPVIQVTASHAMLPTAVSEALIREVAHQVKVPLPDRHGPGMTTPPWDPPWTFLAFRLGLRVLDLGPPPTGPCHSIPGDGLHPRSPPDPHPLQGFFELFPSLSPNLLVD

SEQ ID NO: 970103 - protein, 155 aa, Homo sapiens
MAPRAQRGCINTLHPLGARRGVAGFSAHTHTGRTQGLRGCDPHPLRSSCVRLSHTHRRYLIVAPFHTQGPTAGALPEMRPPSTHMGEPQETHERLLPRSHKEISRHRDATKSPYENLEHWRSPHTTWNPRPSKTAAGPSTTPGIFAIGENGPFCP

SEQ ID NO: 970104 - protein, 104 aa, Homo sapiens
MDKQAGPPTGIDSWRGDLPDGGRNHTPSEFLEKQRLLPDVPITTAVPLADGTGPFLKLAYIISAADGKAWKRGTNATPDIPAGPITVLFQKSSQELRDMSQIER

SEQ ID NO: 970105 - protein, 223 aa, Homo sapiens
NVGTVFCVDLLTRTRASFEASLGWFRRRTLVGFGCDPLSTTVACVVFDGGPQPLVVPPRGEHPVGCFCPPPSLEGGVPPPPTHARRSPLRCVVAEWVTAVVRPLLAPALLCCVRVVFLPPWLVEPTAAPLFSQQDPPGGRAPLRFCMAHPSACSSLVGQGPLPVGEGTSSALHPSRDSCYHHHHHYIPPPRGVRVYYLDILNNNRLGGPAAGGCRFFFAPPRP

SEQ ID NO: 970106 - protein, 201 aa, Homo sapiens
AHNFGGGPPPCAGVGVLPRSQGGWCPRGRSSFLQTRRVCLFSPPPRGVVVGAIPGGPPQGGLLKRVSPRWGWRRGNYTSGVGGFVRAEVVQLVHMRCVVYGCAPRALGSINPAWVAAALSFVAATTDVRCGRARHKLSVFLSSLSVCAPPPARRGVLFVPLSSLLSRRRGEPLSLRRGGVICWGEIIVGARPPMKKMFSGG

SEQ ID NO: 970107 - protein, 151 aa, Homo sapiens
EFSGAALSSRGERPRGDAAHPGSGLKFCPPGVGRGPPDAAGGGRTVVAVSFLGVTAREWVPAEECLLPGAYSSPPVDEYRVRLCVACCGMGGVVTGTEPPQLGALSPTLGGKVVLSSHALPPPLCRSCRESPRAPLVVKAGRPLFAARRPR

SEQ ID NO: 970108 - protein, 197 aa, Homo sapiens
AGPGFDTIFVGRPPGGRGVLASRGWVVPPLVSYGGLCPPPRGVGAHTRGPMQACFIGPSLGCLYTRGGAFAAQCQSAECVLGPHRGDPLGWGAAVRPRRRGSPVQLMVPLLPPPPRDGFFPPRSLAPSAPFVGEVAVGKIYWPPPIVCFCGGVCYTPCVGGVTLVSPCAPPHCVSATGFLEDDNTTLVFHRRGRPGR

SEQ ID NO: 970109 - protein, 289 aa, Homo sapiens
LGPCECQSGGRLDSGILPRPPVWDRVPFSVLMRHESGEFAQTPAGPISRGLRVPNAAAHPGGCQDRAPATPKVALSPPPPGGETSFRVARERNLWGIPAAAPLSLPPPEGFLGSPRRAPASPLPTPGYSPTARSFTKGRDPPIRVVVKRLGPRTACLPHAPDCIMGGLECISIPAAPPFHTPASPPGRLGSCVWERRPALGPDLKPQLPWDPVNAPRQSSPEYACLEIPPPLRESFPPYTMAFACTPHWKWVCPQNKTLHFLQKGNYRGNPGLGPNFVLRKLIFVPPFY

SEQ ID NO: 970110 - protein, 276 aa, Homo sapiens
LASGRVQTGGDRCRRYSCLLVCARLLLGQFHALVVSYPALCVRSPHCCVARPPAPVCHELPACGQVARRYSRGFGSRSDGALRPLYELLTGFSGPPQAVFRVCAARLCRGLPAIGCSPASWRPCLRGRDPWGKTPLLSCKCGVHEENVLVPPEEGGRPRATWVAERGAHPEGPPPDGKGRPWYYGPFGKRMNHFPEVIQYLGLPTWDTRVPRGTFSFRSPYASWRFSLKEETTAPRASHGSRFSARGDPLEDSGHYWPNGVDLETLRRLRLRKSPR

SEQ ID NO: 970111 - protein, 299 aa, Homo sapiens
GRTASSSDQGVAALPCLWCSQCVSCAVVFRVLLLVVVYGGALFHSACSHARVCGFMVASGVFPRSCSVVCTSVRPRAAGPPVNARGPGHPGASFQGAHSRALWCPFVFSGGPLPPLRLSSLEPIGDPPVGSDPLEEDTPVSPALVELEIEALPLDTPSSVETDLSSSRKPSEEPFTPVLENGAGLVSSTSFNGGVSPHHWGDSGPPCQKFSEGEEANPDHGPLGNTLCGKAKVLCTEKNGKKICTLPSPPSPLASLAPVADSSPRVALPRPGLVTRSLCIPFPRPAVPNPPLHHASSAW

SEQ ID NO: 970112 - protein, 116 aa, Homo sapiens
GGGCLSVPIVRALSLSWGLPLLFQRECFCLCPHSLWLICWCVWRTLSFFGVSARARFVVFCVVVCSVLLPICVTHATVFILFLFLLESQHARSPHTPPLVEGETRRVIYDGPTRAF

SEQ ID NO: 970113 - protein, 72 aa, Homo sapiens
CPRNLPPRRHHRDYFKVGEEFEDQTVDGSPSKTLVKWESENKMVCDQKLLKGEGPQTSWTQRTDRHDGEHDP

SEQ ID NO: 970114 - protein, 144 aa, Homo sapiens
  misc_feature (82)..(82): Xaa can be any naturally occurring amino acid
MLETRGPQRTHRVLITNHRALFSRDPRRRELVCEFSGPPHTLGHAGHTHQRSTAPHTRHMFSSVWARLTHTLWLGLALSREXGESRRCLSSENSQGSYSPHHAIERDGEGPRRSTTRCPLVFVTTPPHGLNLESTTARGPREKV

SEQ ID NO: 970115 - protein, 109 aa, Homo sapiens
MLALFGGLLVGGGQTRRLEVVQPSGGGSHTHTARLWVVVADRDRTDVVDVSSLSHSAPFVEGGGPYIGGNNVSPHEEGAFVEIFLTRSALRPEIVSPSSWGKFSRSLEG

SEQ ID NO: 970116 - protein, 121 aa, Homo sapiens
SRYYSAIQEYPITLRLTNSLNRETTGTQYIHSTCLLPFYWVSILPSYQPQSTSSLPSPFPGGIYGSTFFVATRLPPKLHVNYWVNFPHYLVHPPTNISLYNLNITLGLKPPPENWHFVELV

SEQ ID NO: 970117 - protein, 237 aa, Homo sapiens
MRARRQVCVCGRPLPAGGCVVRYGPPPLGWFVGLWSSLAVRLYFWSFGLGLGVPLAPAWCGVFSVAQSAARGVCFVCSCTGPLVTLCFVLVGGGLSLAGERVSVFSLSLRMLLTLARGVLSLAACFLFPAPLLAPPPHTHPSSVPPPCFSPPHTRDRGARARAVKHLERVWVLLSLLLVPPLFLFLLQRGPPSREEAPRPLILSPPPARARPTRAASPARARLCGRARTASLLSLCV

SEQ ID NO: 970118 - protein, 222 aa, Homo sapiens
VRRVPPRSWWCLLCVVAGRASALCLPPRSSGYVCVLSFCVAGVCVLLFLGGASLWLFVCPLRVWCLRRVSFWVLLFSSVLRFLWAAPSPSSCVGRRPCLCACVPPFVLFSLPAGEVLVPGLRTKFVLFFCLVRFVCCSSCVCPRSRLGGVPRPSLWGPPRPFCSDAVRPPSLSPVGGRSSPFEIVVWSRPPRAPTVCFSCSLSSGSSPPSHSFARLFCGGCR

SEQ ID NO: 970119 - protein, 84 aa, Homo sapiens
VALCHIAMLADGTTRKHIPGPPRPPPVHKGLRYGKSYVITLRSFFLRRIFLSLYPSRLAPTPPFGGHWPPTGITPRYIPLESHS

SEQ ID NO: 970120 - protein, 292 aa, Homo sapiens
WEAVPPRLRPVFSTRVQTAVVWCETPLALLVAPRRAPLVGPRFTTGVSGCVSPERHPVVFPPAGERPAFMLLPPEQWRVLRDPPPRMCSPPPPLGGAGHLLCSCVCASTPPGGRSHFFFRGSFCTPAAVYLWWARGRTITHAGGRLNPIGAKKWIDPPPPVGAPTAWARSSTQGTPPCCVLLCDPAVARCDGGGHPISNRWGAAAPPSPRGWGPPIFCCGGIFFGRPPPAGRRFLYISPSAVFPPTARGVSPSVPPGGRHAFGVSPLPFFKAPKHPPFFFFSPPPPKKSGAP

SEQ ID NO: 970121 - protein, 106 aa, Homo sapiens
MFHAHPRCTRLVRDFVGRFHTSYCGRYPPCHVFAAPSGASVGSHPSRGKHSPPPLCCVFTHGDLSPLGDTPLCSRGPIGQPLCRSHVYRRGSCFLTRERGNPPHRL

SEQ ID NO: 970122 - protein, 237 aa, Homo sapiens
TACCTPVSRSATPGGAPLGTPCRSSFGIFPCPGAGLPIFPPGHAMYPFALFWGTHRNKRLSKGKTGDGFPAPGILPRRIFSPPHGSAPGPRVVWRPDAQSSLGVPPLEAVPAHDFVGRTRTTPQISGLAAGKLSLFPTPPLLRGWAPRYDLHLWWVVGQHHHHCAPPPREGRERLPSRDGRGNTRRSTPNEKIPPPARNPPRVIFVTQQKEIFKRMVKIPPPASYPQCLGTAPRPPV

SEQ ID NO: 970123 - protein, 323 aa, Homo sapiens
LNAQLVTPRHAQGSPRVPGSTHVCALILATTSFFGIKARVVPPPQWSPRGTASSPGGHLVKRRPLCVGRLPEPPQGRNVVFPSPQGGPLPFFSVRRTYGCCCPPTAGRLVFGGRNTPAAPRRGLDRLHAPQCCSPFWVWPTTRLAELLSLAAPPLFFVPQQRGGTPQTGERMQMEGSGPPPRVLRHSAGVADRHTKGGSPCVEGGVPHWAIIREEDMHCGKKYIPAWETPFFHLVPPRGAEREFFVGPAPPADGNGWPTQRYTSMQPPSRPFRVHEDAPPTTLPPRGPAQISPRESSAGGPKVFPPPPGPAWKKKGFPPPGGV

SEQ ID NO: 970124 - protein, 261 aa, Homo sapiens
  misc_feature (222)..(222): Xaa can be any naturally occurring amino acid
MQHAHSRRDSFGDVLWLRHPLLLSWLLGGRADAPPPTLCVLLLLRRIKQEGGTHHLLFVWVLLILAPPQIATLFIPLVCCFLLVGEGRDYRALQRSSCWVDKHTIIVMAGHDLDFFLSYLALLLYRLHLARENPCSPPRWWCVYIESTQPRAVADTAAQRDTHLSTSCFVSLCSSVSPPRSSLSLAGRGVGARALPLSLRLALLSLLARARARASLCSFSLXFLSTHRRERERRARALALCGCLSLSLSRARSIARTRTYI

SEQ ID NO: 970125 - protein, 219 aa, Homo sapiens
MSLFCPHRQGCALFGCKTRLFLPGGLHGRRSTHSALGSHAGVRGACLPRSSVVEKFVPPVSLVGCLLDDPRGFLPQTLARGKGVVPHPFGPRALPSGWKAFVPPPVVEGTRCRICDHCVQQSRSGLSVVALSLITCAPGTFFGLNLEDFPEFLFRVSPPLPGRGAWWLSSHWGPRHKPWALPPFHSSPGSLLLSWASIVTPGPLLIQHRPCGLFNGRYP

SEQ ID NO: 970126 - protein, 126 aa, Homo sapiens
MYYVSTGCFSTPPWGEWGLLFRVRHAECVSGVSHKRVPPVCVVSAEKTRPLFHTGVLFCWGVIPAGGVDTTPSVVVMSGKHPVFNTCLGRHSAPLVVSPFPGLYKSLVGMYSPPGVGVGLFLVKSG

SEQ ID NO: 970127 - protein, 69 aa, Homo sapiens
VVRLLARSTSCGISTLSARPVAHTCDPGPLGGRGSGLPELRRSRFRLGHTMNSVSTEDPRLSRHGGVRL

SEQ ID NO: 970128 - protein, 97 aa, Homo sapiens
GFLWYFPDVRFDVLRASCVGFSRPRQVRESLGSGLSRCTTGRDKCWRPSIGIFVNSAGIPVLPIAVYHKACCWPNLAGHRYTGDLKEIVVGMNSGKI

SEQ ID NO: 970129 - protein, 149 aa, Homo sapiens
MHLDHDRDMDWVSNPAPRPQANVHQSAFNDWFKWTPPTSQIEHHLFPTMPRHHYPQVAPLVQSLCAQHGKSTQSQPLLSAFADIIHSTKGVRAALARCLSSPIPQPTLPRLEEEEEDFWSPSRGELEGPCPYSLILRGGWVWGHKASDS

SEQ ID NO: 970130 - protein, 258 aa, Homo sapiens
PVTRGAVVEKSPRPPWRKPKMATACAGPLRHPFGAKTTSIKMLHQGPGQPPSNSGRKEGRPLEGGLEARSRPMTGFENDLGPPPSAGPPNTQSQPRPRDGRGFIWTRDDASSHTGPQTAHKANDLRCQGVAQHSRKPGGLWVETTKGTPWKATQIYWAIGVIHSEDVHATGPGLHISISDRGPSERAGAQTARGLAPQPHSCHGRPFPGPTNQTTSGRGPHSLQELLFSHGGELTEDTRRLMTSLEADRRCFVMIPST

SEQ ID NO: 970131 - protein, 190 aa, Homo sapiens
  misc_feature (181)..(181): Xaa can be any naturally occurring amino acid
  misc_feature (184)..(184): Xaa can be any naturally occurring amino acid
SLCRVLVPRDSPELSCSCDPLRTPTHLELITNPGPPKAGVSPGGLVGETYPCTVALSRKRMFAPLLVFWALRNPLLPRGACSENPRMKVVTHAESAGSPQGEVPLYKESRRPREIVRKEFWALGAVMREGARTTGATGHTEDSDPDHPVSPRRHKRPRPRLSKIHPHPAFLERAPCLLHLXLYXVTLIHR

SEQ ID NO: 970132 - protein, 90 aa, Homo sapiens
KVHNTVFLNRDRYDGSTRVHCLLLLTRGIDLPVKRRALPRQDEKTLWSFNLVNANRVLTNPPGPIDFPTCIKISVGATSEQNPTSEPSTC

SEQ ID NO: 970133 - protein, 209 aa, Homo sapiens
RQVVSVVFPLSLVASSVFSLCYPVPPPPLILFLFLFFLSLSPVLVRSPLTLRLRGLGVARLPLSSLRARSLFLVVSFSLLSWIMPSLLRSCTLLLCVVFPLAARWTGVVVSPLPARRWVIHLLFSSPLHAASLPPPPSRVVPFSLPPPVLAFLLGCPFLPPSASLCPPPLSFRSPLSLFSVSLPSFFCVACPCRASVPPPLLSCAGIQY

SEQ ID NO: 970134 - protein, 108 aa, Homo sapiens
MYRMSGLPPPPFFLGGATPTCFYEVLPPLHVRGWGHTHISPPFVLVVGARRGNQALCLSATAKACFSLRRREAALSLLCGRLPLFSAPATILFVVARRRPAWGCGRDI

SEQ ID NO: 970135 - protein, 200 aa, Homo sapiens
MGGVSVLSVRCFCLLSPSCRGSRWYCERCFCLWSVVRVVLSLQLRVAAVCCSLGGLWSCVSRSCPLFVCLCLQLSCSCVGFCCRVCVSVPLGVLALLFVLGVLVVVIDFVWVALVPTGHTVVACGPIVCPHPVGGPVIGVVRCAGVMCGRLWIFSVEIFFMLSMVGSILVGPPLLVGLSMCGAPLGYFNKGVPQMSVENS

SEQ ID NO: 970136 - protein, 181 aa, Homo sapiens
  misc_feature (1)..(1): Xaa can be any naturally occurring amino acid
  misc_feature (115)..(115): Xaa can be any naturally occurring amino acid
XTDAVPGGFNARGVGSCAPPPPPWGGATPSPVLSVWDTQGPYRGRPHAVVVPPPEFSPATGQVYPPPPEGGAPRSSSCEPPFQWALEAPWPRKSVRAFWPKWGLPPWGHKRPVPXPWRKGVTQRCLEGHLPGERPPLVGFVSATEMHTIGSAFPAPCDRCTRGFSFGEVATTCYEAPAASR

SEQ ID NO: 970137 - protein, 110 aa, Homo sapiens
MVPPASPRVGTSLRPGSSLWPLKKSLEESRVTFGPFNPVLPSLLMAKMLHSLGGEDGYVRNPLLRAPRTSNLSVEAYRSWISCRGVVAHACNPPTFFFKARRSHPEVTGV

SEQ ID NO: 970138 - protein, 151 aa, Homo sapiens
MTLLTRLDRVFCVAALLLPSFSGCSFLTLLRSRRFRVFHPSQAFLSSCGCRPTTVLQVFLAVPAGFDAPPGLTLGCACPPSPGPRNLLRPPLADCTLKRVTTYSRHGTEDYTSILRIQLTVVMKTLTTVQGIADDYDQKKLVRSFLKEICL

SEQ ID NO: 970139 - protein, 141 aa, Homo sapiens
ARVLSVCLRPSLLRRARGGGARAHALFSLVCVVRSSRASPAAHTRGLLSRSPLAAPSPLSFWVWLAALSLLPTTFVFFLVVHVSPLSAPHLSLVVAPLPPGWGGVPPPLPLHTPPPLSSFLLPLSLLFISPLTSAPLSLLC

SEQ ID NO: 970140 - protein, 180 aa, Homo sapiens
SGYFAWSLFVGWPRGSPRTRVGETLGPAPFWSGIYAMMLLLPFLTQEGARGVPPRTHLVPSPLPLGCLTTPQVVFHCSEVPSRPPPSQAQAPMCLVPGLPGPSEGPNRGRPPTNLTAGGPTPAPLPSLLPRLTCPCPEMAPTSTPLFTQRTELANRAPLNRTPSHQPRPCFVWPHVFQIF

SEQ ID NO: 970141 - protein, 215 aa, Homo sapiens
MFFRFFVWSSSLFSFWCCCVCALLGCLFVLARLCLFVGWLIRADWPRSFAVLCFAGGGVVAALYLLSVVAALFFAWLLFFLLAAVCAVSLGFFCCFWWGWSLRVFFVFWWAPLRPVSVFLVVRSISCAALFGCWWVVSAEMVFVVLRRLFLSFDARCLFSCWLVRRVCRGCWLVGGGAPPAGPLCWGDLFPPPPPFFFFFFFPPPRPFPPSPPPH

SEQ ID NO: 970142 - protein, 110 aa, Homo sapiens
LDNKFCTMGVCARLLLEDLLFLVTEPSICVEVSQCKMFVHFFPGVRVYPVGFVPYCVFPTMFLCERDQLYWVICCIAPLSTVTVAGMFVLAEILCKFPNIGVGMEVVLLY

SEQ ID NO: 970143 - protein, 198 aa, Homo sapiens
MCRGVFASRVRPWVMWAPPAVVRPWKPRDGRSARVSNLVLRQNILSYTTFFATDTALPTGGIFMYNHPLFCKHLIFAWAPPTLSLSSRGSSPLSPPRSPTSPLIRPLSPVEYTFDSPAFGMGFPHAEVAPLGPRCCPLPQSVRTCVAPPPTWVILESPCSRQRYATPEALSRAAEPICVVHTLSLTHKTFPPHSIFSL

SEQ ID NO: 970144 - protein, 125 aa, Homo sapiens
SCVTSLSLRSPVFAASLAGTVLRGPCLVERVRRFRFCPASNCLPLVWWFALFARVCLDIVGSLSSLLQSTAVFPHASLGPTLSVYGPPNVYRGPPMIPVVIIEGSPPLLGQNLLDGSSPIMYAPL

SEQ ID NO: 970145 - protein, 204 aa, Homo sapiens
RPYTVSARETSFFQAVGITPEISRGTLGILSDVQLIQTGDQVGAREATLLTAHISPFSFGLVIPPVFDHGQPSTNPEVLDITEETLHSRFLEGVPQCCPVSVCQIGYPTVASSDPHSIIHRVPNESWPLSCGGPEFTTLSPTCVKRVKALLWLIPSALCGVLPPVACCPPTSMLLLLLCQPPAKVEAQEESEESDEDMGFGLFD

SEQ ID NO: 970146 - protein, 155 aa, Homo sapiens
MKDISCGGLQRFGQDSPPTCSPLSSVYKCQLSSFLLLVTPSNPESHSGATWQSVFQQPCCTLESCSLMAGIDDCYTSALGLHLPPWANFGQGHTLKQCCGDLDSYLTPDLLEWRLYSPSLPIRSSLTPRQDPHQSLPHRTQAPAVVQNRVFKQEN

SEQ ID NO: 970147 - protein, 152 aa, Homo sapiens
VPGLCPPANPPYLARRDPPWLSSRLQEKPSDPPRVTLMDVVEYFTEAGFPEPATAFPEPEIDGQSLLLMQPPDVLTGLSIRLGPSPGNLRATHIQVLQHRPPLRMSDPEWLLMADAPRLNRCPRPFPAPTLTPRVPPEVHGGWTGDTPHALQ

SEQ ID NO: 970148 - protein, 181 aa, Homo sapiens
FTAFTRRRKTSLASVPFPPLLRAHDYRQSNQKNGDHQPRGAPAECAEEYRLEPWDYPLPHRSTKERAQGHPPSYGCPEPAGGPYGAGEALGTLIDERNPSFALHPESASRSRELTLPRRVSEGLHLRGEGWGQSATLCLFLLCPRCAPPPPTPRAHPWGKREALAPFPPIVLSLPGSRPKL

SEQ ID NO: 970149 - protein, 110 aa, Homo sapiens
MTLLLRATVRISLVDSILTPVLTVLLYCPPVRSRTSGPLALSRADVITTFSSGCCSLLTTFRSLGCRVYSLLGPHDFGSVLAHVPGARSREIFPAALLLLRRSIVCFRFS

SEQ ID NO: 970150 - protein, 166 aa, Homo sapiens
GVCGGSFVAVEMLCLCWLLRSRSVALLGSLVTFAMRWSSRSCFYDVHHTCSGCRYVFQTHIVYLVVCLIHSVCWCACCLVGPIHVVLRCSPVPKWFMVSPVFPASHLLTWLWGTFPVRALGFLVAPPQNCSSRLLGRYFWWSLLPTLRLLDVSPGGYLLSLCNCGT

SEQ ID NO: 970151 - protein, 152 aa, Homo sapiens
LCPDDVALKNFAHTFFTHLMRRGNTAEKLMKLAETHEVAESSFRISRNPTVMTGRDGLVIAMGVVPLPFGKKIVESSHLLGTATKLAHCTKNDTPICGDIPLSTTFLNEPVKALQELGDPSDPLAPDGSARIWLGRNISLTSTPWETSDNES

SEQ ID NO: 970152 - protein, 175 aa, Homo sapiens
  misc_feature (91)..(91): Xaa can be any naturally occurring amino acid
CWLSISTGGCSVVHVPSRLLPSFVCELCPIAGVVGLRFLAALCFIGVRLPPCGRQLLPYLLSGFCFTTSLVSVCGAPFLCRFRQVFPTRIXCMRLSCVYVYVVGATPTRVPCSPSAGCVIVPVCLLFTIMVGEAPKISLVWLSVCGCLTTGSPVLAVCPWCFSLPAGFGGMLTAT

SEQ ID NO: 970153 - protein, 70 aa, Homo sapiens
SGLISLPNSGSLNWSRCAIAPPGYLGVATTGVNKCDCESLFVEAYTGGKAIVFSPVLVVKKDLGSTGSPC

SEQ ID NO: 970154 - protein, 53 aa, Homo sapiens
RTRGLVPLGLLCSDGKRGLWVLVSLPLKNGAALRETLSAAFIQMLIKVIAIPD

SEQ ID NO: 970155 - protein, 321 aa, Homo sapiens
SRSRFPSFADSVLPAVSLYTVRVASSGLLSAPVLWRSAAAARLSSRSRLVRLSVLHARHLCPSEASLVRAPSLCFSPPVLFRHSAVLPSLRRLSSPSWPSRAAGSASALPALAPVPLVRGHCPPPRRCSSALGLPPPASPSARASGLGTRRSAAVVWSRGARALRLAEGTRRGVTRRRLSSPSAAASCSLLFLGRVLAVRPSRRGARRPVSLLVFAFSPRPPAVPSLWFRSLALLSVLSVRLVCSALPFVAAVLPLAWRLACGAPCSSWLRSAGAFCRLPRLFFPRPVCPLLCFFFWCLSGAYRAERVPTSSDLMNLPKLK

SEQ ID NO: 970156 - protein, 180 aa, Homo sapiens
SPAPFQCGCPPQRFRVVGSLLWCPPPPRGGGRNTFPSSCVQILCLDVFRARILFDSGAPVPRGIRLQCDWRHMVVGAVLSHICYSPCPNVGVPQYPLVPPCVGGAHPSLRKGCLIVPPCSRGRPAELSPLSTPPRGVCGPKGLSPPHFVPTFRPLLFTVLPHSCCPCVAPLPRVFTVGAL

SEQ ID NO: 970157 - protein, 86 aa, Homo sapiens
MEVRPVRQGFRQGDLINHVNGEPCAWHWCTRRWWSMILKSGNKVAISDNSPGDTSIRWATRKGSYKAKMALKEQEDPGKDGQKKIK

SEQ ID NO: 970158 - protein, 144 aa, Homo sapiens
MGPGLRTPVVLDHFGRPANPANGSSIQVNGRPLEMIEPPPRSQYQLLEARSASSGQEPICWCRPPVSRVKGGGHVAPDLCYPSVHLPSPGGLITQKYVDEASQKEIQDILIPYDRTLLVADPRRCESQKFGGPGARARYQKSYR

SEQ ID NO: 970159 - protein, 134 aa, Homo sapiens
MTRARTGKGPDPRIPRFPDLELEKEFPLPTGYLTPRRRIEIAPRHSACLERPDPDAGSQNRRHEVEEGPTQLKSMSPGYQLAAPFSPEPAPRSPAAPEPVPPPAWPLPSSPLCRRPAWGPVPPSLPRLVLRYFV

SEQ ID NO: 970160 - protein, 100 aa, Homo sapiens
VPFAFCYLWFASLPPGGCFAVLTQPIRASLRGTLRGRLALLCPRGPTGPGGAGEACSSPRELCSPWRSLFPALLFEACLRLVAPHPWARKTGNSCLSRGF

SEQ ID NO: 970161 - protein, 183 aa, Homo sapiens
PAPEEEMDGLTALAAEPQAQDPFAHLPQSTLVLDGFKRQYSHEDTLSVALPYFWEHFDKDGWSLWYSEIASLRTHSDLHELPSHHWMFPRLDQLRKMPSPVSSLLGPHHSRSLSGVWVFRGPGACPSAESTNWHGGLRVIHHWRKLESWHARRPTTPGSRVLFLGGGLPAQWAKPSIRAQIFK

SEQ ID NO: 970162 - protein, 148 aa, Homo sapiens
MFLVCLSPRIFLSLCLRSLSLSLVVEQLTLHKDGVAFRLIPQRGGRSQHLSSSKCGRWRRAPLRARRLLVVISVRDLAASPVCVFSASSPHAHSHLIFLVLFLINSFWSERIDNVALGRAPKMRFVRAAFSPSLVRCVPVFSALLAGR

SEQ ID NO: 970163 - protein, 198 aa, Homo sapiens
CLSCSRASAALSLLSFVSFRFFVLLRAWLQCSLAFCVCFLFSCSCVALRVDGSSSAVAYCGGRLALLLGRSLLVFLCLSCRGGGSRSSVRSLFCSLVLSLCLTFVILFFLPLLFSCRFSLLFLCSFLSVFLLCCFALFCVFPVCSVFVMLLVAALCVTCTALAVRCVVVLLSAFPDRHCCRLRPGRRVPAWVRFPYNI

SEQ ID NO: 970164 - protein, 289 aa, Homo sapiens
  misc_feature (205)..(205): Xaa can be any naturally occurring amino acid
  misc_feature (259)..(259): Xaa can be any naturally occurring amino acid
MPAECGFVYCCGVEATPTATRWGSPSAVVVCFRLDAARKAGGCCFSRLQKRGVFIATHTAATVGRADQKERRPAGGRGGSPSPPALDDFSRAGGHTQRGGVSLRSTTRRLLRICGSPLLAGRGALTTRRGHDAASAAPALFAHTRGRTHTHFVARTHIFARAARAHEGALVCSFTRTHSVVFVGGAHSCCAHAARPLRAHSTLSXRHRGFTHPHTFLSHTHVHRARHTVVDVSPNPPLCSYKTPREPTACFAVWLHPRXYPPTHWFFMAPPPPTPFCWGKNKRVIKLKQ

SEQ ID NO: 970165 - protein, 194 aa, Homo sapiens
GAAGWARHRAGGVRRRLWVPGRGGGWCSRVRVLVVSGALWVFVILRARGVDGAYRRGRSVVWGSLLARAWCLFVCSGQRVGGGPCPAVWCRLGCVGAGVVSAPSAVLCVVVWGCGGWCVGVGGAGRFFGWKKSSSMRSTNMSAKSSARLGDSPFEMDAPVFVWQTVRKRSVIHGATSEHYAFVSRPLTAEITGG

SEQ ID NO: 970166 - protein, 180 aa, Homo sapiens
FGWWEWRGRGGRRGVCCRCVRGGGGKMVGGGLVWGPGRARVAAARPVWCLAPGEPGAAMACVVGGRCCGHVFFGGAVGARSPCGPRRVGSGRWGVHSGVFGHVLWDGPRECGVPGGTQGTPWASGPGAWSAGPEVAPVARRGARVCRPAAERNLVRHCFKSYPSLQPIEVDLTQPRYAES

SEQ ID NO: 970167 - protein, 293 aa, Homo sapiens
GGRHEGGVTRTQLSVCPRGMWVCDTPDWCDALPAPRRGEYAWEIFCPRSGGAAAAVWRRVLPLMRRAGGGLAVPRRGWGACGEPAGAPRREGGAGCPSGEPLRGPRGRRGGGSGASPRDGGGWPTRAIVSRGRCPRGLSMETSRPVGHTHGGGHVPVSRAPRVFFSRVGCFTNPPCGASMVPHDRGASHHDCVWAHQHCAHWCIGAARTVEMNLCWAKDVRAESTLGRDLTTRSVEGDPLSQGVPHSVAPLWEGDSRVCVPLSTALDAVLGETPREKRASRGRALYVCCACAL

SEQ ID NO: 970168 - protein, 127 aa, Homo sapiens
MSGGGDHTQEKRPQGRGGVPPRGSSRGEFSLPAGGRYISRVLEDLPHGGVSHGENILWGFIGWPPAARVWRWPFSCGLERCFMRDPRVSRRTQHTHCGTPGRGRRAPPQRRWPLIRPRILPWGEISL

SEQ ID NO: 970169 - protein, 292 aa, Homo sapiens
APRGWEYVCCDARSQWVCVVLPRPPCTLLLLHDECVCGVFFRVGCSPATAVVCGARVSQRGGGKRPLVRAPAMITGGWLFLVSVVLVKPPPGCRRTPRPGRGAPRGASYKKGGLLLHKKGGRPPFDPAGDYVCAPHKGGKRGEPREHTQGCCIFLEKGGKTGKREMWERGHTALSRNCGRCSPPSEGCHPPHKEGGRKKPPCPWRGFPLGEIVPSAALQGPNFNLLCTPGYRTRKGHVRTPSASPDISVCGYRDLSPLSHVPPLSVLSEKEAPAHTHPLWQRSGGEKRERHM

SEQ ID NO: 970170 - protein, 287 aa, Homo sapiens
  misc_feature (230)..(230): Xaa can be any naturally occurring amino acid
MSSGEGRPPLSDAGWGARSPRMCVRAAARFFAGGDQQMVFSGGCRRDLFELVAVAGRKNVHPTLEGGFFKEVVVARQLGTNPTPNCVPPVISSSFCGAQHWVLGGNTMEAFRAHGCEPCQNPEGPPVSLPTGHKAPGAFGDTPPQNQGLAFGAFGLTHVVLQHRVIAPGRFEESDIKAENCHLLHSVSTREKVLVNHCPPPWGSVPSTTPPLVPPLSREVVPRVPRAPRXRPEAPPRASPLVALFLEWGTRPRVTLGLHPLEAHPLHNGPLLLKRPNRRYFPRWPSC

SEQ ID NO: 970171 - protein, 125 aa, Homo sapiens
PRNGCARGEEDPPPPPWGTPRPRHPCRVKEGMKSGEILAFKSLLPAFGPMQWDLIPWVSGHSLVLIQTLNPGRNPRLSVAQWSIIPPIGCLPASWWAFLGCFRGPQGELLSVKIHLCPYFPSLDT

SEQ ID NO: 970172 - protein, 223 aa, Homo sapiens
  misc_feature (110)..(110): Xaa can be any naturally occurring amino acid
  misc_feature (158)..(158): Xaa can be any naturally occurring amino acid
MIGPRKPARREFSGTPRLCPIAHHKPLVAPAVFTPPLTKDPQLFSPPPSHSSGPTAPRVGAREDISTHKRLSREPTLSPSEEPPRRRVSHTAQRHTAGALKCAHGHSARXEFTLKTHPTARGRTLCPRRSLSLAERASREPTREREGVSGDSGETGRXTAHTLHRPARNPQGLLPGATQINSHTGWATTAWRTRLLSLWKLELRECPSGEHRHSCVEGTPLPR

SEQ ID NO: 970173 - protein, 148 aa, Homo sapiens
MWHHPCGCVRVYHPPEGGLQPPPNPGARCCNCLPMCWGNTPPGPPKKIPWDCEKDCASYKHQPPTGAPQKKGVGSEQSEGYRDPRNGPKRGPIGESWNGGVWKTSPPELWLVWAHTEVGVLKAHGESESARMPTVCLPPAKKEFFPVS

SEQ ID NO: 970174 - protein, 135 aa, Homo sapiens
MPAIQTYNLYFRLCQTSFPGDPGIWRKSRSPVPNPPSSKYPEFDSCYPGPVYHQDSLHASSPEVSLHQHLVNFVDTYPRSPHALPRGHTPTMDLEMATFDFLSLFTRWHFTPRGVFLSQNAPRSSPTPLSLVPPY

SEQ ID NO: 970175 - protein, 109 aa, Homo sapiens
  misc_feature (88)..(88): Xaa can be any naturally occurring amino acid
MAHPLMGFHQSHQLPSSAKPACDPAGHHFRPRSPTLQDAVQGHLTTKLGVKGHFTVRSQLGEWTRVWERHLEGPLDIELTLKNNKNKXARLDILRPATYQLSLYKRGGI

SEQ ID NO: 970176 - protein, 207 aa, Homo sapiens
GRVRGFYYIFGLVVGGVGVVAAGLRVWRYVFDVVVAHCLSPRWGPPVYHTCCGLGATRVWVVGSRHGVAEWSPRCEALLPPGQEPPFGSQNGVLGLRRMVSQWGFLRGFMCGGGTTGRVCPLGDCYVMAPGGQFFDRPRAHECFRLSPPRGCLEYFSWRCPPRPPGEPLSANGSCWPSALWGPLGSIDLCSVFSRPLGCALDMASVI

SEQ ID NO: 970177 - protein, 282 aa, Homo sapiens
CTNLFTTGGPTWRCMLVCPGACVKAFVGTHNRRCPNVCAERRYFFLRGTSAVSFHGFPCAHNGGGVFKGSITPFPPVFFTRAHRLFQRQGCCAPKPPASGTHWGGPHPAERLRLFALLVHRTLGAVVLGQFNLGHLVCFRGGFGGPGPLGGPVSPPTHTGPTPPSACGCPQRSRKRRDTLGEGLASAPCCPKLAPVGLVREKGESVRRGAPLGGPHTPTPRGDPPRGVAPRESPHSGLERLFAHHSGPRDHPPTVVSATHSLPAPREPHSRVSQRPQLVPEE

SEQ ID NO: 970178 - protein, 114 aa, Homo sapiens
MRSPGNGNSVEEEGAVKGVWCPCERVWDTGIVRLGLRRRRKGRESTKEPCVCRRMNDAHGGRTPVLGADKRNVGSPTVSGVGAPPLVFGGVLEKWVDICLYDRRGGIAHGGRLW

SEQ ID NO: 970179 - protein, 66 aa, Homo sapiens
  misc_feature (47)..(47): Xaa can be any naturally occurring amino acid
KGTAKLFARGVLRPTMATPQREPQEVFGVPQFVRTAQLTHFTACTVXHSGIAPLHRTVFGAHNNNM

SEQ ID NO: 970180 - protein, 370 aa, Homo sapiens
LSRRRVLLSVCVRRRGRMLLTPRRRFGRLWRLLGSTVRRGVCPKRAVVPPFAGFPGGMSCRPHRLPGLFAALRGGVFHHRRLWVYNPAGVHSLGGDFVAPPSLVASTDELSPTARCVVGQKCVLAERDSDSRSARCHRERLVARTPGLISGGKCGGHGARPVGARGAIIKGGVVSRLGEDLLRGVDNTTKEVGRHHPSCPSVRASAGESTALSVCDSLSSWRRRMFGGCVEQRTSAARGGAKHNWVVRKRGPPPGQLAAFFRGARVLAPVVSRPPIIIEGRTHRGPVSCFVRGGFGVCVVCRTKGGVGDASSWGAFFGPLHLGAGVVCCVENKVWGEETVFHGEGTPLLWERTHPVLGRPLLVTRLCVST

SEQ ID NO: 970181 - protein, 140 aa, Homo sapiens
GVAVDHDGVVTRWVEAGMIEGCVFRGCGGGKLPLGCDVNGSYKWGGLPIEDVAPLGMLPVVTWAENPGLLDRYEAEREDGALPSCCVAVEPRGFCCARVVQRGGKRYFVVFQAVEGVFLRGSVSPLMSLYFRGRDIGISC

SEQ ID NO: 970182 - protein, 104 aa, Homo sapiens
MLWELGWARLLLWWLGPCGHVALFIVWDAVLMVFVSAHWCGGCYACLFVSRREELGGYPASGAEVWCVSRAVSVVLPVMSDEESCVSICSSPLSTVVDSVLTRE

SEQ ID NO: 970183 - protein, 105 aa, Homo sapiens
FHAAVFVPLWPFFGRLIGRVCPQKTGGGPGSGVSRGKCRWAPGGARKCGVTPSPLAPFARGARFWPPPVCALPGLHQGECERPGRGYGSFSARPFCPSPLARMAR

SEQ ID NO: 970184 - protein, 185 aa, Homo sapiens
  misc_feature (106)..(106): Xaa can be any naturally occurring amino acid
MDLHSSEETAHAFQGHAAHLRFILQGSQQGPTEVCPTQPGKKADIQTKWAATRWAQKIEPEKGKPRGPDFDRFKVMKAKKMRDQRYSRNEVKKLPKAALLKASPPXKHLVLRVLLLLLLLLLLLLLKFHAKKSHRREEKGSSPRRFLPTEATTATKARACSQSSEGSKSSTPKKAPAPKASGQKA

SEQ ID NO: 970185 - protein, 232 aa, Homo sapiens
MCLPLRRSGVTPPSSYKWVVGVWVCVLATALVVSLPSRPLLADPTRVAGVGWCSSSLVWVDGWRTRHGACADRRAFVVLLARSGGFPPPWAEWARSHAPRRGGGPVTRRGGGFCVGALPALRRLFFFPSLVAGAPSLSAAVFGVGLPQRRGPPAPRPRSVWGVCVALAARRVALRSSCALPLASRWVVGASHTCRSRPPPVLSLTRPACPRLRVAAWCRPTRRTRRSSAIFV

SEQ ID NO: 970186 - protein, 131 aa, Homo sapiens
TLKFLAAFPLIQILHPAHLAPPPIRSVLGTGLTDVPNIQRVERVSILEIPLHGLPIPCLQNTVGIHLEMTVTPAQDFLSDQFVWSSASTYPASHSPRIRCGPQPTTAERMISALSASCGQSTPAYYKDTHF

SEQ ID NO: 970187 - protein, 327 aa, Homo sapiens
  misc_feature (25)..(25): Xaa can be any naturally occurring amino acid
RCTRCCGSSPLWGSHPAGGPRPVTXPRSRRSGASWPQRGFTNISGVPVSCFKKPGRWAGRRTSPGPGPPGAALGPTREKPRDPGPEGEVPRPVPPRGSEDHADGRRDWEGGGGGACHHAPGRSQLFLEFPVEEGLATVTHVRGNREDHLTTTPTLDHVHSKLDHARLGTFCEGPSVAILFPDHCHGGPREQTTPTTGMGTQGPPPKGARNAQATPAAPGRHRVGIGTPKTPRHPERLSRDQTPDAREDESEDTTSSDWGKRRHSHTPTPTATPPPLPTFHEPPDTPSCPSPLLCPCPQRPRAPQHLMKRTKKITTPSPFCPPDHSPF

SEQ ID NO: 970188 - protein, 361 aa, Homo sapiens
  misc_feature (273)..(273): Xaa can be any naturally occurring amino acid
  misc_feature (341)..(341): Xaa can be any naturally occurring amino acid
SLFFVDHQVPSPQIVCPQKVDRFLESHLGGNKRSSKRKGGRGSHPARSLFWAPRPRSGDPLATQGGATGRTSVRPNPSLGRCQTKLCCRNFGKRLGFSWRLPPPHTEGLLGKSWAPPGGIFLHEGPNHWCPTNTPTKARIYFLAGPKKSPGGAPPHFSCHRPRWFSHSVWPLFFEGSFPPPPPHSPTVICLHILVPPLSLLGGALKVWGFAFPTGTEKHRPQELQFSHGDTLSREAQIETRGRFNELFSLGPLLSMAHASRGRSSLFWRPPLXGEGHPREEKGTKGPLSLLVLGPRATREKERPRGHVVAHHFNKPACTAPERKPPAHTPFPASRNALPSXREGCARREERGPRHWGFWVL

SEQ ID NO: 970189 - protein, 60 aa, Homo sapiens
MLLPPLTFTTYFRHYSNTREKENDHVLKHTQTHPHFLPHHLHRPYHATPTYFPFYSLIIL

SEQ ID NO: 970190 - protein, 196 aa, Homo sapiens
  misc_feature (143)..(143): Xaa can be any naturally occurring amino acid
MCFSASRGTTTLCGGRYPRSVCRRRICGFVSFLSTQAKICCCRFVSVDGTHDPSLCSWGVDHTAPLISLCAPPPPILGKNHYCSWGVLFNARVLLQGVGCLCACVGNHNVPPGAPLYVIGSAPPRLNIGPPPSVYISGGRLWXTNTNTGGVTTQMFGPHTTQEFFVPWERACRKVRKKGGFLYILAPRFLWGYIKI

SEQ ID NO: 970191 - protein, 345 aa, Homo sapiens
  misc_feature (302)..(302): Xaa can be any naturally occurring amino acid
  misc_feature (334)..(334): Xaa can be any naturally occurring amino acid
VPMCEGGRRMGCCASCVHVSLTMVWAPRDALWDARHHKSSLMSLCETTMNDSACRSVYSDTLMCVAAPRGGDAHTSPLARSSAFFDSKTVGGVSRLLSGGKRKEHKCGAPSLRGFVARGRSPGGLPTVPVARAPLRMVRVVCVPRRSVRAAFVSRRYPPVVVRSRGWCVKSFGEDISPPRPPGVFPQTRLLCAPPRLPRRPHGGRGRVRPFCRVGIASSGAPAWGGRAPNVIRWILLLGPPGQMCVGVPPRCCGWGDVAGERPPFETCLGGEPPPAARGHPQWRQHTRTPLARPQAVCAPPXDGGRRPLFFQKALFAPTEREEARTLLLYMGQXFFSTGVPLCWR

SEQ ID NO: 970192 - protein, 356 aa, Homo sapiens
GRPLVVPLVVLEGRVFFFSGGGDTTHSGGSFHTDVFKKKIVCVGVSQEEEFFVASDGGHTTTFVVGGGYHSPSQVCGVALPPPSVGGRRHTRLGGVLCHHGAAVTRAVWEFFFSLLLRGASLCLPAWGPPLNIFVPRLPAGVFVAPPPLCVYLCGRVLCPNTTPAGVVTPTGWGNIGPQQGVGGLSVESFRSMRVIKYDVVCCFPRPACLCGVYKMLLRRNEYGGRASSKYCLLKTVFSAVMIIVSSPHSPVLRIEYGCFPLAHTAPHSRVCSLEELFLHRAYFPPLSRGFASFVSVVCEIIWDARPHFSACGVCVYSHTHHAGRHKREGVPGESLRTQSLSHMCLSPRNSLSEKG

SEQ ID NO: 970193 - protein, 333 aa, Homo sapiens
  misc_feature (302)..(302): Xaa can be any naturally occurring amino acid
RGEQSDDVLRGGSVRVVSGPPQMSLVGAPLGSISSVCGGQREIKLEGSVHTKCVVHRRGEHTFGGVVWLEGVVCRNTSVQTPLLLEWGLFCREERTVFVQTLAAREEKTSCLFKRPLTPLHPPEGGNLYRTRVLKIITWLPVSVPPVGDFNVFLFPCLLKPNVRTLGRNRRGPSTPVSLLAPGPGPGEGGQRRPGLTLPGPPDCPPPRGTTFMASHFAEARSPQDALGEHPTLRGARLSERTPALRFPGSCVPGDCVLYTGHKFLDNRTHPRGLCVCELRSRFSIIPPHPLVWPALTFPAFXESDNRGEYPPGPKYSSPEALPGWLSHKPVES

SEQ ID NO: 970194 - protein, 104 aa, Homo sapiens
MRRGVIPPPSAFSRLCEEIPQRDSSPRVAHTPTGVVKREFFNGRGSHGLERPRRRAGKTGPHQFLREVVTWRAREEVWPHPKRWPGRGKRNPRPPGSVAPPERQ

SEQ ID NO: 970195 - protein, 131 aa, Homo sapiens
KVRGGGPPHNFGGNDASRTEPHRVVRQNKGVGPTRGNTTNRHWGANRGETQHSPPWCAEGDTPSPEGGFSPQQKRGETNPLTSGLHTRAAAPTGGGDKCIHIPGDQVCCPPPSPPGGLAGPPPLGFVLTPL

SEQ ID NO: 970196 - protein, 293 aa, Homo sapiens
WSSSCILGWVCVLAVVVFVLRSFSFVGVYVVCGGPARWLCRTVFPPYCVMWGQKHGGCPEGGCLEAPAAPIIVVGLFPPGAGVSPPPVVEPLRGPAFLALLCTPTRLSPRPPFLGPTGKNVEWERGPVTKPKGLQGKVTKVEEPHVSSQELIVNTGAYIKTPRMFAPEGPPPRRANECMPYVGGPRRNERYIYRENSRGRLRTPRGLNSRTSIRLGTARERLRCDRTASTPPGDTPLEPTKSAPKRHLNATPSPARVRISVPLSRRLDARRRGLRKNGPAFYHIFVTHPYPVF

SEQ ID NO: 970197 - protein, 302 aa, Homo sapiens
MGPPSRVPPRNVVSPAAMTPNYRGVAPGTPVGGYHTHEGLVVGLGAVPARTALFPRGHPQIGGRRFLVDPQKIEEGALIRSRKKGLSLSEPIIWVKISCGERHTLKSVICRHSSHMAAHMGLEDFLLGVHTRKRKGDFEIPPQSLVCVTQVYVARAPRVRTKEVTHLGGHIHTQRKFPRTDVPPHFGEFFGIRGPKIGTVESRVYIKGRYCLCHTPCPSALPTERPPLTPYTHVPINHGCSTRGFAGTDPPRHKPHGSPRTPPRLPTHHAHNHPRDLNSDSERVCTPLTPYPLSHHGLWSTF

SEQ ID NO: 970198 - protein, 142 aa, Homo sapiens
  misc_feature (59)..(59): Xaa can be any naturally occurring amino acid
MSPPVGLNQWNKSGCFFGERARPFVCFAVGRPVGPWPPQRHFSAGVRPHRGDPPSPPPXRSPLRGLLKTPSFYSAHDNFIFRGARKFFSLSREGGDTQKYFWGLKMFFLGEREEIITRAKPAPLGVLSSGAPHALRVKWRTH

SEQ ID NO: 970199 - protein, 164 aa, Homo sapiens
MTSVVCSAPASYIYCPRGGVSFFTRDTVVAALRLFGAPHGGQQCVAPKTACVVPVPGFPRDIMLGPPHGVAVPDPREVRTVVTELALILPYKGGILIIPPPRVIATTLTAPQIIGLKVGPPPNYASPPYCNVHFLLAPPRLSSQLGFGHGAKILLKAPHMGGDW

SEQ ID NO: 970200 - protein, 88 aa, Homo sapiens
RWGVQIRWNSRSYSQKLLECFTRCGEVGGRASDDKIISARHCSCGGEDIILYTSLGVEPHTGFLISILLAVVGYRVIAASRRLPPFLG

SEQ ID NO: 970201 - protein, 135 aa, Homo sapiens
PFIERITFMSPLIIMVLICFLVLYALSCHSDQLTDTTSQTLRNRNPLTILPPIILVLIALPSLRILYITDEVHDPSLTHPIHWPPMVTETYEYTDYGGLIFPLLHTSPLIPRPGDLRLLDVDHRVVLPIGAPPFV

SEQ ID NO: 970202 - protein, 160 aa, Homo sapiens
  misc_feature (156)..(156): Xaa can be any naturally occurring amino acid
RAPSPKVGAPAGGFGCPPSWFPRHECFVGRISCWRRTPTFFGRRPILWRGDAQGGLRDAAFIVSSSLVLLCGVFFLGERPRGFYNLVPPCSEGHPQRRGGQEHSPPPVFYNWRAGRWLVTTPGVLFYNKSRPPYSSVGRLFLRRCFLFPSLNSPPXLFFS

SEQ ID NO: 970203 - protein, 44 aa, Homo sapiens
MFFYKVEFEGFLKISAGANTNTSEERVGKLLEIVHPRDTGNGRF

SEQ ID NO: 970204 - protein, 137 aa, Homo sapiens
MLLDLTWYKHQSLEWVSTEVTFAVKLTMGYGSLAANGCIEDKFWPRHGGGGTKDLVTEATRELAIIAPDTGIRKHTYDHLASISKDELDFFRPIHECPHTARGTRLVPVLGVEQTGSDVLCPPVDNHIPIASIEDAW

SEQ ID NO: 970205 - protein, 327 aa, Homo sapiens
RLVCSWWHVMVCFGCVSPVSCVVFSLCVVSVFAWWFVTSVPALMWCALSSWWSAFLAVPSGPEGGSVPRGVSASTLTVCFCVATWPALWRFCGVHWLSLPIFRVVTHAYAVPSVSKPVAPWGKAQDSGSQGASGCSGLLVVPACGLSIVIGDLLRQIPLAVLFGIFLDMGVTSLYGIPFYERLHLLLMPPQPPPDVTYSQKVRTLRMHPVHRPCKLLCLALLWAVNVHHAASLAFPFILILTLPLRTGGAHPVSSPDPRDENVWSANEGTKPVFEEAGGVLDRVHMRMPTACVTATRGTRRGTDGRGDTAGGIGVPPPTAPPSFLFK

SEQ ID NO: 970206 - protein, 174 aa, Homo sapiens
  misc_feature (139)..(139): Xaa can be any naturally occurring amino acid
MPATAPRRKLLERGNPQEPSHFRVELKRKSGPPKPKLRCFGKLSLFGKDLGKEIFRRGGSKGLFPKGWNSQHAMATKEGSTMGNAFGETEYNVRVETLGVWRPIMKRGIREFSEDVYKNCWGKNYMCCERTWLAIAPHXVFKGVWHSTVCPFAHAQSLYFAHGTQYFILLQWRF

SEQ ID NO: 970207 - protein, 69 aa, Homo sapiens
LSRLLVMVNPPVTACFPPMFWCVSCFVFLPPPRLFCCVCSFRCLFAPVSLVVLLVLGYLRAPFEPRLVF

SEQ ID NO: 970208 - protein, 159 aa, Homo sapiens
MFSLICLCPLVHFSLWGVCLLCLCHVCGLVPLPLWVRSCHVAVCSYNPGVSCSGDVSLDVVLATEGAVRRRVGARLVYDLSVPGVGEALVSRRWSPRGRSVRRARVQQQLRPVSAPALVPPPAGVCVLLPMLGVWEPVLAQWIRHDVSVVLGDMTTRCL

SEQ ID NO: 970209 - protein, 123 aa, Homo sapiens
LFFSVCVVVVCCVSSAVVVCAVSVLSFCSHGCCSWLRDCVCVLLVRGRRSFSVVVCFGWVLCSRAAVRCVALSSCPVFVGCRLSRRWFCCFPVLLRCLLCCYLCGGRFSFLFDCSSLVCVLVV

SEQ ID NO: 970210 - protein, 365 aa, Homo sapiens
FVGSRCLCYASFSPLRFSLLCVVAVVFSFGVDVFLVSLVFRSLGLAVPPRVRVCLRVAGCALVHDLLMSPPAGMCSLAVNSFPLAPVAAMPLGGPYTGGPDPPCARCGLCIPARSLKVLELGVPGHFGPERLALPVEDLGPLVLPVGSTMQSRWLNNLGNFASTVRQPFIVSASSFDVLPLVEFYLEEGITYEDPISLIDLEVLRPQRDAPAQLEIRQPPAPQILAAEVETQDSLGDEDPVPQLKLSFDARWLQSSVPRGGDPGWFCRSLSPRDVLIQRWPPPLRWPYFRSTAACRLPYPVPLLLPRCSLLEDYELSGASSLAAAPTAPRCQDDPGPMTRHPGDGLPPSAPLGVCWAVKENKEFN

SEQ ID NO: 970211 - protein, 138 aa, Homo sapiens
MKSLLGLLAGKAPNRCRTRSPNHLGDFFGMSHSYAECYPAPMDDMAVDSDEEVDYSQMDPGDQKGPLGPWDFDTPEDNTRVYDHQEALPQAALPVMVSKCLKGGETRRFKENPGPSTSLSRPWKKISAILEKTEEDGS

SEQ ID NO: 970212 - protein, 122 aa, Homo sapiens
SRPWEPSEMNLDPFQELYLGTSSVDELREKLSESSGIPLDDIEFAKGRGTVPRDISVPDIHPDLDWNPKVSTLNVWPLYICDDGPVIFYRDEPEELMELTDEPRNELMKKETRRLPKTWTLV

SEQ ID NO: 970213 - protein, 326 aa, Homo sapiens
FAVVSFAFVCGGLLFDSPCFAFLYWVVRAWIWAGYFLSSFSYGSSGEVALFASCWRIFGATVCARRWCAYGVSHRVATFVWGSGVYPRGIFLSVCRGGPWVLGCSCVSSCLPAFRGEWTRGGVVAHWCECPVEVSVLALAPVGAQWLNSRRLFVLLCLCYVSCSTCRVQSDHSEICWYRSVAEDPSDCGLCDSLVPLYRGEGLLGFFPGLVPRPFMVALPFFVAGVTPWPNLVHILVHLDPLGLFIPRSENEEVISPKLVHPDFFGEVLLTLMPSVWLCSSHSFWLVPPTSLVLLCGMPSLYLPHYIRFLEYDSVGALATHKEGEY

SEQ ID NO: 970214 - protein, 74 aa, Homo sapiens
GRCCVLFASVPVAEVLLTVLVVRWGRVRVTRQCDRGRSGGLVWVAPPSLAVASENPSVLMSAPRSHYLSGTLIP

SEQ ID NO: 970215 - protein, 114 aa, Homo sapiens
CLYVFYSVHRCVSLDACLSVCLLCLIRRLSVLVCFYVCVLAVRVASWSVVRRVDSCRSVFSCLCSSLSCVLFSFFCSYLSLLSLFVLDPSAVLLTWIPPTGLGGWVPECTIIAV

SEQ ID NO: 970216 - protein, 115 aa, Homo sapiens
MTVVVFVVISYSESQQYGDRLCVVLMEGVLYCFHSSYSCSLLCSWFGCVIFASSSSCLAFVSSLLRSLVCCVDASTSLATNPLPLGFFAYIHLLWVVGGGGLLPMVGSLCDIPGS

SEQ ID NO: 970217 - protein, 127 aa, Homo sapiens
MFGSFTYKCSLLVVWSLLVCLCSAVCLVLVLRVLRYHFVLCLVGVNPSSAGLVLCVLGAVCSPRGFVCQPRCAPPPPRGPLSVQCWGTPPRLGFRGWRALCFPTRGAAVRVGCNIGGFLLRNVPTWQ

SEQ ID NO: 970218 - protein, 74 aa, Homo sapiens
SVCGYVTCCFFASRVCWCCVSVYVCVVPSAYHWAGGGAGVLMIDVANVPRSPSEPVQSRAHAILGLPSPWPDIL

SEQ ID NO: 970219 - protein, 178 aa, Homo sapiens
VVVVGGVTDGWFVLLCCGRVVGRVCVCRVWVLLSVRSSVVCALVCVVVMCYVWCLWQLFFVQFLFAFQVVGMVVTVGYSFKKFLLIVFCGCGVRGSQVLGPARACGGDAGVLGTACLRFLVRDVCRKFSLGETFFWPRGPPLGRGEPCSCAFFGGEMVHVGGSPWGVFLWVVIMGACF

SEQ ID NO: 970220 - protein, 161 aa, Homo sapiens
  misc_feature (84)..(84): Xaa can be any naturally occurring amino acid
MLSGALPTVVALWVVLRVDQTPYAPPLILFCRLNDHADCPLLVPPPWLRSSLCFGGEGKLLGGKFLLMWTHILWWGGFPLFVCXCSSHNSPVFVGSPHRDFLRLPPLCVVGESVSRDCECSYVGGGCPRAPGAGDRCYAIVLLPPHCGFMGGAYPGVLGFI

SEQ ID NO: 970221 - protein, 133 aa, Homo sapiens
MWFLCEAPSESAGGALAVRAIIVSARWFLATYDPCGKRKPLDSYLGHFRPDQPTGRIIHHQEMRQPQPCGSLPSAQLHKVLGMDPLPSQMPQKPKNENPVDYPQFQIPTQHPPMPLTPLKRPMEEDAGGEVAP

SEQ ID NO: 970222 - protein, 254 aa, Homo sapiens
MFDARLCSPLGVFCSLLACAPPCCCPPRGNLMKCAQYFLWDCGPMPREEEFSKRAPFIPVPRLSGHTYVCQPRPHLGRWKKLCGTPQCGPSAQESGTGEEFWCWNEPDLYSLISSGVGTLLPSDYSYRGATMDVHSVNEMGPLLLPLMPPLGVNEERLFGSSKICWFPRWGVLLDTQPPLPMITLVKSIAHPALGVLREPPPCRVATSFAQEFPFSVNFPHYHLCHAYNVSPHGDFPPTNSRFATQIIRGLFSL

SEQ ID NO: 970223 - protein, 105 aa, Homo sapiens
LVFGPFAGCDGRVMFCVWLAGLARGVGWPPLACPGLFSPRFLGGWYFCGSLSPRFSACASLNSSTHTFLVLPFFSLGLVWRRSRGLGGLSIHALAPPVCGESPPL

SEQ ID NO: 970224 - protein, 101 aa, Homo sapiens
WTLEGRFRGHVGLNAQRMFLLKKFFLANVGGARRIDPPMEAPGVHVLQGIIPGTIRPYYARAIPPVLDFPHRRQHCTSQVCLRLEGERLIARSGKKLGRWP

SEQ ID NO: 970225 - protein, 161 aa, Homo sapiens
MSRRGCRPPRLCCAVRPPNLRGGDQRLCVVCAYVCWARRRCVRLVFSSPPPPPVWLQCYAPPSWGGCLSKTCGTRLVVVRGGFLLVVRLVRCPTNIVGAVFATPLCIDDIFPGRVWAPQYQRTHPHGLFVCRARDNEVCLPPARDPPHILAGISPGGLFAL

SEQ ID NO: 970226 - protein, 132 aa, Homo sapiens
SPSVWMCLSLFVSGLCRWIPPKFMPSCFFRKLGEPTALCVIPGVVFQAIAVLGAPLLWPLALVSATFPAVGRIPSCLCRRFLGIMALSPGVLSNIGRFSQESNVCVCGRTHVSFLVVVPRGALFPRFFFQFG

SEQ ID NO: 970227 - protein, 207 aa, Homo sapiens
RHDSSFRTGLCLPTAPAHTMGLDLTVKICGPRIPGVPEQLHFGVRLKAPIYPEDRRARLPAASWLSHPSGVAAAGPGSPLPARAWAPAARSCWWWTNATTSEHPGEDYQGRRQHLRGAADADRGPPESRQLSGLEGVPDDLFWLIFEGKPLEDPLPLGEYGLKPLSTVFMNLRLRGGGTEPGGRSSGPPPSIRAGSKGPEIKAVVKR

SEQ ID NO: 970228 - protein, 113 aa, Homo sapiens
PGVDLWVLVVCESSFLVYWCVGLPLVLVLGPLSAGVWLSLLPACRRRSPGGALVPPVLFSISGPVSLHVVALRPLFSLGPAARAFWGFGPRTRTLGPPTAGWPPAMGWAPPGS

SEQ ID NO: 970229 - protein, 122 aa, Homo sapiens
ACLVIVAHLEVVGRSVRLSTSVVSTPACCGDTRCAPFDVFLADFMCFVRYLASWVCWSRAFFWGGNIGEFFRLFQELVAFLQGVFSVLLVLTMFSWVSLCWLVVVPALSCWEIHPLVFSSWV

SEQ ID NO: 970230 - protein, 156 aa, Homo sapiens
RFFFAFVYSCVVSGLGHIGSVWWFRVSLGGRRGAFLLWLSPVGRPVVWVLAGLFFVVNPALGVVRIVVVRLPSLCIVDLSVGGGRFGTMSPGVEGPTVLVIRGGRRGLTLELCARALIGLMLGFVVGLLIVCGDHGVLGSALWGFTMIGAVVVIPS

SEQ ID NO: 970231 - protein, 152 aa, Homo sapiens
MLLPSPKVVTLLRRGPFELEAFYSDPPGVPYPRSQNRPLCSSECVLHQKDGEKSRVKSQVRSPQPTGIFTISTASMVEKVPTEENEMLLKLTLECLNQRPPETQTLIKMSSKTTVKLGHSPRYQLMLNQPHSFPLHLDLPQKKTKSPMLTKP

SEQ ID NO: 970232 - protein, 181 aa, Homo sapiens
MSQMGGRSPPGPVTVLLFGVVRAHVCWWRPVPLSVGPGPVSGDPPVPCPRCGPTRPWDPLPSHLQVVVLMFSPLPIVPTPSLAIARCPDPRSPTWFMGSQESPRPWGLGLSAPLCTGLSPPVFLQTTPPEGGPRFSAAAFLLLHPQPIGQAPPDQPFVLLLAEGWETPPGHSPPSPLSAQL

SEQ ID NO: 970233 - protein, 373 aa, Homo sapiens
RWGDQWGRSLCSSCDLRAAPSRWYTRRVYSFAPGPRCPIAPFFGPTYSHGFALNSGLFPCWCFPPGFWSSTRVSPHRVPTVPGAFLWGSWPPRCALAGTHVASFRGRPALVRGFQARSFPPRTIHGAPWVNLGPSTRGFVVHPSPTWPPREASPEVTHLSSSNLHVPIRLRFGFRILAFPCIPVRETTEPRGVYRERIHTEFRPRGYTRSNFDNSFSPRFSALNRGDVRPTPLWEIGLKIPNPQGTGHFLWENSPLTSWRTFRPSFLHSTQNGCVVKRYRSPLEGAPGDEEKDLPHLFLAPHTSVWPRPRPLPTALGGLPPGTSLTACLHNLLVGHDPEIHACTPARREGPLACWAWLGAPNPWLPCGNKQTN

SEQ ID NO: 970234 - protein, 187 aa, Homo sapiens
HYPEEKVYGIEQNPGYRKEEKKRLPLLLEEEMDVFEQALASEAQAKDPFGVTCPQSTFVLDEFKRQYSHEDTLSVAGHIFWEHFDKDGWSLWYSEYRFPVRTHSDLHELPSSSRGMFPRLDQTEEECLRPVSSLLGPTHSRSHFWSSGSSEARSVAFPLSPRLAGGLRVITHGGNWILAARRPQTLV

SEQ ID NO: 970235 - protein, 134 aa, Homo sapiens
YAVLPLLGNWLVTTRCLCYLPVLFTAPGFPPRLVAHWAQLCCRDVNPRRKAPCNCWVKLFPGAPLGLQVQEVCLSRLFLRATFLVAAYVPPPWEHLGFMGQVIILTLPGPISLRLIAPVLDCQHGSQLQASLLS

SEQ ID NO: 970236 - protein, 71 aa, Homo sapiens
HGVWSRINEGDYTPFVGGRRRRFVTVCVETPSSSVFPRLVYRTPSVCWNGDVSQAGAQQIVADGIDMGEMR

SEQ ID NO: 970237 - protein, 178 aa, Homo sapiens
PTWFVTYAYICVEWFFFLVGCFDYNFFITVRPLRALTPFFCVVPAIAFSAVASSFIVFFSSPPRVISFSFFWSHADVVFSSFSLFFRPPCIVLWHTTCFDYKRYNTGGVLLFLERGTTLGGPPLFIIHTHSGGVPFSFIITHSSLVGFVVLISTPVEVFFFVRVCSRRVYMCLSARVF

SEQ ID NO: 970238 - protein, 255 aa, Homo sapiens
MENGKHGGTLFMAQMYENFCGGSGYLVDINGISPVGTGGSLDMPCPASLSARVARLYSYLVPLPVPDPEAGFKRANGSGSRGVFAEIRFLPTQLAANPGLGGKGTLPSDSKVEPTMERILETGEKGAMSLEGASLPPWKFGLSPPQWPLFFVIYHLSHGWTRGEYHVCAPGGPTSLPKPAAPATRPLAGFSGRGPGATVTWESLAAFSVHMHSRRSIGRSPRNPQEGCLEALARATPWPSAHTSHQFPSLIKPSI

SEQ ID NO: 970239 - protein, 112 aa, Homo sapiens
VLLVLLLAVSNYGVSGVECVVSVFTIEMVGLDLIAFYSMVCYLCLIFVWEAVLFCVPVSTDVGGVALRITSLFNGVFFSDTVCVVFASLSTTLCCRPSAPLVVCFLPQWGGL

SEQ ID NO: 970240 - protein, 189 aa, Homo sapiens
YFLFFTALRTLGWSQMLVKCLTCMMLARGSVHLYRGLSVSLLAFLAPYAIVFVLTDSLVCSRARSPLVFVQHLPVSCCSTWQIQFGSSRRVTPAAYSSLRPVGLLAPSTRYLLSSCLAWEIRTFGGFVLFVGLVGWCTVLFVRHVSAAGLVSGCCFSGALRRVFWVLTLFSSGGPALSCNFFVSSSTHY

SEQ ID NO: 970241 - protein, 413 aa, Homo sapiens
SYLVFLLLFSPLVVVFCCVGRVVIVPSPACVGLLSCFLDICCTMLLFALHKVFSLHVTGLLTGSFLPRGSRRPAVFLSLVPSCCGSPCGPLPDFPLAWSLLVPFGPFLMGLSTRGSPRCEPFFFPDFSPFWNWMYPRSSALGVGFTGAFILVPFSPRLWKGPGLYPGLVKNEVSSLGPHAGSTGPPPHGPLCIGVLLHLRPHIWEAPPRPLDYPPSLLPTPEEECTERMYAPYGPLFLAQMSPIGGRVGTKREPGTQPFRGRGTGLTGTVYSRRKEWAPRMPLHPVVAQVSSTPCFGNFTKPLGMNEDPEHWAHAGGLCCAFIPRLEAAGSGGLPNLVPAGAIQVFRESYTNSRVWWKDDHGGDTNLLEEGGSPQFEGGTRAQRCRISHAFHTRILKPEVCVRARVREALSPI

SEQ ID NO: 970242 - protein, 110 aa, Homo sapiens
FCFSLFAFLFSLCRLTSLLTRLFFFFFFSWSTTPWFLRRAFLLMFLCLLATHPVSSLLVVLPPDLPHPNVLLGNRRCSILAICTLFPSRPCFGENFKALYLLGPTHFAYS

SEQ ID NO: 970243 - protein, 140 aa, Homo sapiens
MSSFLYGPSCGSSPMFLVASGVCFIPIDLSPGLPYGPLFCGCSPMVSPAGPISVGIFRLGLVFLAPLLFPLGPIRTHFYRSLYSSVFRPPRPRVISGHLSGSPFGLLVFLLGMLRRFCYRRHGGKNWLPKICHPASRNTL

SEQ ID NO: 970244 - protein, 126 aa, Homo sapiens
CFLCVVKKLPPPPLGGGQGGEPLFVKPQKAPQVWEGVNTSLLPLGNMGVCVEIGTICVCAPICLCGGHSCDRPHATHHEASYNSGLRERVVFHKRENEKPHSLGTHCGARHAHSGRFPLTLSTPSP

SEQ ID NO: 970245 - protein, 94 aa, Homo sapiens
  misc_feature (89)..(89): Xaa can be any naturally occurring amino acid
IAYRDISLAVYVDVEARMVFSATPPWFGSRIDGLGPPGAQQWGRATGGLEYRARCEHALWRRPFTLKVFLYREFSSKALGRVGSGDVKXVVMKW

SEQ ID NO: 970246 - protein, 224 aa, Homo sapiens
FSPQGPPRPTHALGSRPSCAYSALSYSLFSCAPSGKRPPSQFPLKAHTFATGALFWRDPLGPPKRGEAPPTGPPESAPPSGRGEEPRFTRERFLCGARRAPGVAPLSPTPRGSWGRAPPPPRGVRPIPLLPLLLLLPLGRPSLPLFPTWLFTNSLPWTTWPRAFPLPGPLGLAQGWLEGTPPFFCTPLARRAGLAFPHASTSHCPLGGFGLLQALPPGGWTVSV

SEQ ID NO: 970247 - protein, 220 aa, Homo sapiens
VSVRLSRLLASVAIGTVSSLLAGVVECLFLCCSVCLSRLVLGSWDGLRSPLLVCCKRLLCLCKSCRCALLPLCFMLLSLSRHLFLWGVVCLIPVGARRLCSSLCSSLPTFVGVCLCGAVLCVALFHFGFGNLLAVPSSGLWCWGQCVLVSPRGLIRVRFVLPGGGLGVLFGGRAPCARLVCVCSPAARLVAVFGGPASAGFCTAWDLCVALWSYIVRPVV

SEQ ID NO: 970248 - protein, 355 aa, Homo sapiens
  misc_feature (53)..(53): Xaa can be any naturally occurring amino acid
MTACAGRGGWTWLELVVVLAVFGSLGVGAGCCSVSRRVLVGVLRSAGGGRGAXSLRLRLASRLERFVGAGARCGVFPGGSAGGAVGLTGLCQGVSILVAELFFTPGGRPDCGHFRVVSGREQSPGVSPVRLRRVRGRYRTLPPYGLASTPQGAPGPRECVHPPASQVAPSAVLAPTFAIGKGVTLGEGVRLRESICPPWSPFAGAHVFLHSIVGWGSPVGPWARVEGTPREPLPPQIPEPALDRESLFQDGKLLPAIPLLGCRVRIPAEVLILKLDCSATPRRLSRSFTNPITPLSRAATKAPSSYPPPLEAAACLASLCPERNQRKPRLDRHNAGEPMWMAWGTPGFFPSRLPN

SEQ ID NO: 970249 - protein, 134 aa, Homo sapiens
MDLFWLVRCVGLSCLVRRSMYAAALFALVVYVLLLQTVWCCPAPGFCTALLVAVVFPALEEGGGASPGPLCFGESLSCFAVPGILGSQGSMSQTGDVVVLGQSLWGVIGLDGGGWADLLVGTYVFLASLVMYCN

SEQ ID NO: 970250 - protein, 114 aa, Homo sapiens
SVLTCSCCRCCVCCCMSVLRLLSGARCCLLCRTFASGVCCGRIQFDRGAVLVGGAFSSLPSCVLRHACPLLVPAVGLVSLVSPFPSPFRSSPVRAPLGRTTCVWHPGRWGRLLV

SEQ ID NO: 970251 - protein, 131 aa, Homo sapiens
MVPLPEPLENQEFPELKFFPVKKFAHKMLRKPKRNFIYGKLTPVPGYLPCTELDSNARMPESCHFYVPAGPPLAFVIRIRGIHGVSPKVRKVFRFFAFVQIFHGTLVKLHQASINMLRIVEPYIALGVPPF

SEQ ID NO: 970252 - protein, 137 aa, Homo sapiens
MCTGFLRRVHPQPEKVMLPPAALTPARAPHSRIPPQGQGAQDSSTFSRPQLGPLDFPSKGLLALCSSLLPVPRKGPKKVYRHFRPRPHGTPHHTTTPTLTSAPRAGKFRACPEGRTGPPRLPKLNLDPTPFYLKDFC

SEQ ID NO: 970253 - protein, 158 aa, Homo sapiens
  misc_feature (13)..(13): Xaa can be any naturally occurring amino acid
  misc_feature (31)..(31): Xaa can be any naturally occurring amino acid
  misc_feature (42)..(42): Xaa can be any naturally occurring amino acid
  misc_feature (49)..(49): Xaa can be any naturally occurring amino acid
VGLELYQSVLSIXFSSSCVVDLMSPLLWRAXCVSRTRGLCVXFRLSAEXVSLSVLVICMSLAAISAGDWLERAALDQTEFGGRQLFGHELNSVFAASLPMVCFDCVLLEFLFCGISRPVCVGALQFVLRVRTVSCVAVAVRPFSVPLLLVLTTLAYAA

SEQ ID NO: 970254 - protein, 242 aa, Homo sapiens
MARAVALVGLGADSSLCAALSHGCVAPFGGVYKLSAERCEGVRGGCAAAGRLWASACLLRRGQGVPPCRGGPDFDRTLVRQVPVCFRRFPEQIREASATIIEPAGESDNPLRFTSWVVWLPWMVMPPWSTVHGFLQRHLLRSRSYIPMARLTMIPPQPADFRNPGPGRHPAHSPPRCYSSRHHPPWTTRHCPRVESEAAAGLPTSQCVCHSHKCPWMEGGEMSTPRWKPSHRGPPFPFQPSL

SEQ ID NO: 970255 - protein, 229 aa, Homo sapiens
  misc_feature (108)..(108): Xaa can be any naturally occurring amino acid
MVVRARRVGVMSVVCGGGLLPLRRYLSGVTAALLVFGRQTTAVVGWLTSPAGVGTYDGDRVAVCDRCSLLPPCHMRRAGRKGDAPVLERLAPDVCATILAAHNTFMYXVCGGTTPLIFRIVEGAAGRRPPVSATVVCREIGYDMYIIGVGAPPSCGGKQTSYGGLLPFCVWVVFVVPTQTSVVHRRKGCQNEGGASCERRGVVVHEQDDLLGSRVVTAKTKDFGGTPMR

SEQ ID NO: 970256 - protein, 118 aa, Homo sapiens
MARPFHETLLYARVSIGTLGWYTPPPAAHVSPRVSYPALFRAPQPGALERVLCCPRRSETRGPYSRELHAHEPTDREEGKESTTTLFLESLEGTFLVGMRKVVPTQAFHWNAELLWFL

SEQ ID NO: 970257 - protein, 392 aa, Homo sapiens
RVSLVGRRSVGRCRLVFGGELFTGAVLALLRLSPGVQRPGSPPFPRLFAPGPPAWLGPPRLLSRGAGSTPLGARIKSTGVFCPSPTPRSPHRLEEVLPAAASVLRTELKVCPFQGDGSEGRVCKRNGFQLNRLQQGPDVSINLPRLDSWKSSAIDQTGENFPLIYDPQGRFAVTSYVPPEEGPRDPSCGPRGGKDSLVGAPKGRFPPTFWVNSTDGAATHFRAIPPIPSHSPRCNMRYATFTRLRFMKSCAHEIILRFHITQCRHTLGKPWCIVGTGEVSIHLWREIGVITPPRERAPLESFERGSHVRKNAQMATRFATLELSTPHVLLLAGPPTTGFLFPAGKGIPLTHLLKRETQRLAAQPRARWVKMGPWVTCQIFVRNLKYCGRIYS

SEQ ID NO: 970258 - protein, 476 aa, Homo sapiens
MASVWLVGWGVLLLAWPRLLCCVFEVGALAGLCVLAVVGAGAPVVLRCGSGPRTCRCVPYAWCSSLSVSLRLGMSPIHDGVSGDAVSRSVGLLAGVHACCGGERQFGLCWMVWEERAVGSAPGRFVCSTAVESPGVGSGGIGGDGFGVLLQGGCGGASLWAGPVGLGNEGSLLCVYVLCSVVSRVRDAVQRLPCALDPCGLRVRRVVAGALSGSFSALGGVKGRCLAKGGGSSCLFGSPVWLCAPNWMGGVSFSECFDAARSGGPKLCLRKFLALNVASEPCRGGSKSQVANTMLVLHKEACGGDVAVGGAVLGKSSEVLGPPWESWGPSGPVPGPVCCCVPARRPLGVRLLYSWLKVYAGLARPGGFTASVPSGPLRSALWPTSVGTNGGSTTMHPICPAGLVASIHRRSHVGTMGTPDRALFSARFEDQTITHTSVGVHPTTPQLVIALDFTYKPTVGHGPPLFYTKISNKFLP

SEQ ID NO: 970259 - protein, 311 aa, Homo sapiens
ALRLLCWCVAVLCALLVVVAVRVCVRVQVSAVPILLARCFRLCALGPAEAPRGWAPYPWWAKCAALFARGVGSRLTVVAPDPGVRCASSAVVLVGAPAGPLRILCARIASRGEIEASEESCSRDLVTPCHPSSMLHESQIYDVENDTGFPEGYPTPIPLPCTYWPKPIFDPPRLPPRSASGPDDPVCFVASALAQARLLYGNECPRFLEAAPGGSEALGPEWNVSVPFLVFHTGYPPRPGTLNEGVTEIWPRVELTTTLLLSRTFWCSPRDPQREWLLEPRWPRLVSQPETLQKVFSSIFALVLREREDPF

SEQ ID NO: 970260 - protein, 483 aa, Homo sapiens
  misc_feature (1)..(1): Xaa can be any naturally occurring amino acid
XRFGIGMWARSCVPCAVLCVASVVWGGLRPLVLFALFVRAFVIVLRCSVRGRWFVSGASGVVFWLVADLWCLVCRFVLVVVFVGRRSGVASRSIWPLCCVCVRPFLFAVAFGLLLLFFVCLCLFLWAGFCCSPVVSGSGFCVCLLSSATMVCSDGGVPLGFRWLSALLVVCGVVCWLGCGVKGAVLIQSDVGGGGVNVVRPGLMVRVVCCACRSFVSVVGVLSLFLRLARVSCVGGGGVTAWCVLRFRLGVCVCALVRLSVACRRGVLPVSAGLGLGEGCVRLGGLPLWASVWRLMCLLGLRRPCVGPAEQWASAGVLRRGVGSLGVSSLVCDGRACVQALGRGCCISLLMGVLALVSPWVGVPRCELSEFLSGRRSVPGHFAASPILSYVLSCGACELSTRLTVDLSEGRRCGGACLLRPPGVPGCSLMAPACLRPARAHGAVAFSYARFGASPFLVTVSSRRKRRLLVGHVRCGGHWEAPS

SEQ ID NO: 970261 - protein, 284 aa, Homo sapiens
PLSQATVMADVALTVRAPRPCVCRSMSVFLRVLFLGVCCTSLALSVVSVCSLAWGAPRCHPVVMALPGDFARCLERSGQVLCVGSASLLASVAMSNLLQTVPDCSAKNKEGRNMTDHESQEKDFRDPCISENLIQFCAIGRAVGTNYPKDMCDPHVWSEDSYYEALAQAPENEMDQLEKAQKERTKIEFVTGHPKKAPPTHATSTTHSAPATHTLLQNAQKRKEHSGIRLFPVTTDMPRPPSSPPPATPATLLSLVTPQRHAAPRPTVISCCVAPIVKKAQPVT

SEQ ID NO: 970262 - protein, 133 aa, Homo sapiens
MGTPRVREGRWKDEHFSPLSCSRVNTSLEGPEMHALWSPTSCTFSSAVVVEALRGPSLFALHPPVFPARAPPGTPPTLWKWPRSLPGLLCEGEKILFFTSYATLTTLTICFETAPKFSYRVVCLQFFKNKTFN

SEQ ID NO: 970263 - protein, 127 aa, Homo sapiens
GGVPPHRARPSHMAPPLLLHVVPQHSVAGGPKRAPRSSPVSQCVIAEAILLFSSPLRLFPCVGPRPTCRSRPVAAHFPQGGPRQRTCCLPLGDVTLRGAPPPILDPPPLSSSRPWGGFLSPPARNGL

SEQ ID NO: 970264 - protein, 126 aa, Homo sapiens
AIVRVLVRECLVWGSAWLLVLLPRFSAPGLGLSAVRPTRGVASGSLCLFVPPLLLRPPGMDRPCLLDERPMRFVWCSVLGLVDHVVLPPAVVLLMCPPTGCVVPGVCSVAPLMEVGRGGCVCVGWL

SEQ ID NO: 970265 - protein, 216 aa, Homo sapiens
VPLRSCKVLCIMDADRPRSNNRCLNNQQSLFQPPPGFVFLFSWVSPPRVFSWCIPASPACVHVVEPWWLRRGPPILAFGGFQPWTAQVPQVAKQQESNSFPRVIETPLRLPPCGPKYSFPRQKGWDLLTPFETRGNFCPRGFLFSPAFKEKFLGAPKTDRNRGFTQGGPQVTHPRRGSSCGRLIFVVLPGINRPPGVLGPWGDPPPGSFTPQHWFI

SEQ ID NO: 970266 - protein, 150 aa, Homo sapiens
  misc_feature (111)..(111): Xaa can be any naturally occurring amino acid
GLSSSFCCFALSPSVFVSRVLYLCDCLSPALLLCFGCYYTGHFPCFFSYQSACSTVFLPGPPWATSARLCPTAPLGCLPWGGLTGRASLSCALSAFPSRALPPSQPPFSCXTFFRAGKGPTFCFCLPISGRYGYPSEGAGLRPEFPLDRG

SEQ ID NO: 970267 - protein, 150 aa, Homo sapiens
SAVMSATPAAEVLLKDGVSPRSVTPLRAVGALFLEARFFLSPPFWPRCLALSCLGFPPPRLGSPPGSSEAPTGIAVAKAHEGPTLVAPGAFVQPGCSADDHRSQRSMDPRLSVPNEPRPSREWFPERNPGYVRYSIPALPPTLRLESLWY

SEQ ID NO: 970268 - protein, 404 aa, Homo sapiens
VRHQASLQGARVVSLSVSSFFLRVGVTWCIAQRPSSVGRSLSLLSSIYIGRTTLVMCCRVCGICCFVTPTGGFVCGARSMSQCFFQRVFPRVPWAPYGDPVLGRIGPVARPIGVGVECWLVTGAEYGGWTQGALLGGEDTVVGNPLVVPVVLPLICRSYTTSQEYRLRHSGALVLSNAAPPRVLCLLGSYLLLEDCDIRTVTPTPESRVLSSLTECCLIGTCLALGPDLPVLLACSLLAPSPGVWPLEPLPCVYHTLPALDAPCGRRLAWGRSASPVRIPCHPGAVWIGQNPGPPETFAHTHSFPLSLGHSPWIVPLCPRAVPFLHGGLGHWVLGPSDPSLLSMTQCCFGQDVTMQWVTSTTTVSKATPTLLPLCLPVQKQLNLFHIVIHPWEFFNEYIITMKA

SEQ ID NO: 970269 - protein, 149 aa, Homo sapiens
MPAGTPRTYPQLRRVFQDDPQSGKPDLDQVLDLELKGDLEKCLPAFVKCAHQPTQRFFAREASIQPMKGVGDSAHKAIDPGLWFPQFLKLTMDDIQRHSYPEECMVSLPFAQPSLDETQGDYEKIPGGSLCGGNLTIPLMVSSYDPEDL

SEQ ID NO: 970270 - protein, 106 aa, Homo sapiens
MELKSEDESTPGSESWPFFYECPTIKDGPPMRPLPYFRYPESRRVAPLSTVASPLLGVALRVDRYVCEVVYIGSISLHWPAQSITSDLCGRSSGAKTFTSCPGGKY

SEQ ID NO: 970271 - protein, 155 aa, Homo sapiens
DSHPSAKRVFFTGTPLVLCLPKGFLPLELGGPTEGRPLFATLLRGLGPPSPGPAFAWAWPGSPIVRGSHPSCLLYVGDVNDPHQVPGWKGWAWAIQPRDCPVTRSFSQRSYQKISFPGYINSLPPPATLFFCHHTGAPAIVQNGRGLYQGETLVP

SEQ ID NO: 970272 - protein, 329 aa, Homo sapiens
LAARWSVLRGGASAMICWCVRWRVCIAAVGGCWRLAVVCAHVLVGRACLFGVASWWLLEGVVSRFLAEMEGPRAVRAGGGGVRVWRVRSSCMGGVRQSCPFVWGGVRLAWSGAEWRCVGGGGELGADCCPPWGGRVVAAARVWEGWKMRGGVFGRVWLVVYDGSRSLLSAGPPVDGGTIVVWCERLVVMAPGAFCVGGCGTTHRGEDSSRRGCVSAGRRGGAPHRGWWKVSAAVRRCVVYGQRCVVASIERGGEIGTARGKNGCVCGKRASLVEGGPSSPVSRGEFWVFVLWETPRAYMVTPRALSLIDSPLSLGGGHTPRAVSIDVSL

SEQ ID NO: 970273 - protein, 261 aa, Homo sapiens
  misc_feature (87)..(87): Xaa can be any naturally occurring amino acid
FVCGTGVGVGYCCLVRGLFGCWWWGVAGFGVVVWWVVVFSFLCARVGCSVGACCWSALWGRGVVCVSLLVGGAISRVCLCVTLPGPXGVAASRPPGWWRSRLDVPPGPGCRLLGTFLRVWARGTGIHPMFEQPGGTQAMAPLMALFKGTHRFRNHRVCNPQKDTRLVNPVSADFSPGIILFEPTGCPRERFGPPTPMGPRVFAPHKTPLERKGRAPRGAIQYREEVMLDTGRLWGDTQRLSQHRGTTRGGVGCGEGDVSPP

SEQ ID NO: 970274 - protein, 193 aa, Homo sapiens
GELWVGGTRCCGSEVWVGGRGCVGVLGGVCGGWVSRRRVCMSAGVVGGKKVCGGALRPSNPGTGRRRLVVVGAPRVMGRWRCAGWGAAAVCVCCGGRFAGEGGCVLARAGRCRGPAEGGRLAEGWGAERKTERRGAPGEGRVTHRGREERGGALCKKGIGPPLPAGAQEVKPCVSGGPQKKGGCGSGEKNPRV

SEQ ID NO: 970275 - protein, 225 aa, Homo sapiens
GAVGPVRRVWSPARVVWVVAGGGGGVSLERCLCSGARMRVGGNVRCGGLWSRVRRGGVALPAGHLWLLVSGGCEFAAVFRRGARGVGVLDCPAGERGGSLRGKREWKGAFPVERGVFGGAFWGSRPGCRRGGRGQDGCERRTRDAGPRERGEHRGRHKICVAWVLRKETPGPKNGGERPFTGGAQEGVKWEVSLEEERRCVEIMRRVRGPMETRVLRTTRSHALL

SEQ ID NO: 970276 - protein, 144 aa, Homo sapiens
MGLDKTRGNGRPAQKYSAAPPYAQGPRQERGWMVVWGGEEQVPTAGDRRCREIVQEWPAEAKRYPGPGHPKGTGPEAPRGEPHGGRPRGVAPGRDLCCRPPPRQEVSRRKGEAPCPKTLRGNPWGEGARAPGVASSAGPTWPWR

SEQ ID NO: 970277 - protein, 281 aa, Homo sapiens
MFSCLFLGGLVGAHPVSVDVSFVVSVGPTGRGVNTTLTATLCAHTPDVAGGPRGAHRTDSVCPSAGSPLRRSGVLRAKKTRVLEHEVRAPTTTGARQEDAGLGHPRWLGTSGPRERWESLANAGSDHTAPQPGVRPPPARCFSTRRKGDYEQRPRGTTTRFFEPLSSLLEFCYAAARPGPRHVRRVAVAHPRFPGFYKRARVPPPATQPLLNSERRPGPAAFPRFFPRGPAVTPAPPQTPEFPHGPSQVPGLPPPQPFHRVLTYLAPEFGAKPEPIKGLEP

SEQ ID NO: 970278 - protein, 111 aa, Homo sapiens
MSQQEVCVVCPDPQRRCPCACAPRLQVNCLVLEGHHHEGPSHTSGVASRAGHTLWGPFVPTGCSHLEMCHKVGAPARLLWWPPRVCAHCGPLLTRALSQSERFVCVISCRL

SEQ ID NO: 970279 - protein, 112 aa, Homo sapiens
GAIVSQGTVCPIAYLVRTDDQVWSQKTGWGPCPGNSRGIVVLPHRVAAAFWMTHGWFFIARAESWCVDPSPHEGARVLCGRGPPLFPGESPQCCTPIWPGVFTNMRGTIFAG

SEQ ID NO: 970280 - protein, 106 aa, Homo sapiens
GSLEGNKVGGCSTGAVLRALPGLLDPPLFVNGGGSIEVGCLGGGARRGAPVRGRLLLVVYFAGTFFFLGICCRLLGVNWEEGGPGWRMYACGPLWAGFCPREGRGV

SEQ ID NO: 970281 - protein, 282 aa, Homo sapiens
RGVVYRGPESGHKWLPGDDEEVNHQGFAEEFLRFPKRKGDGPLYGGTRDTTAHSTSEEHATQIHWGPAEGGARTGDNTSLTPHETLVDSVGDVGVRASYRRNALLLAEVSPTFPPPGGDELSERKGFFLTKRMCSHPAREGSCVSRPRVSLGSRAPRRPIWHIIWREKASLFRGGNPRPRESAGEIFYRERRMQREFGGQQPFFKDVVGWENPVGPAPAPHPICAHAFLALHPELSMHTSVARRFYSREGAPHMRHAPRALRPLTTPGQANFLEFEFLAAGL

SEQ ID NO: 970282 - protein, 149 aa, Homo sapiens
MHRRAFDITGESVVCVFTAGNTPGGGENLAPGGSSCAQTPRLPRPDVVGEISPPLSGWSPAVAPHTKEAGPTRLFSRDGGKKKICYSPTHVFDIFSRENISIKERKRKMRPFNTLSLREDTFPTNGTRFVWVAHLVSTENAGKHDGRTT

SEQ ID NO: 970283 - protein, 67 aa, Homo sapiens
NLLTSLSLGEQNWMGGAIPHENPDSALVFGQGLSGNNTGGFVSLDCEQVSKCSPKMLIHQPLLFSNM

SEQ ID NO: 970284 - protein, 314 aa, Homo sapiens
RLPAGGGLIQDDPFCGDRPRVPWGRHQRTPCGGPPAKEHPGGALYTSSRAFFLFESRAGGMKVHYLPPRRNSPSVPPLAAFFGGAQPFESTAVLLRNEQTHAAGGSSRSPVMYLAGSICFAPPSRSGVALYIAPPAEYGGSRFVYGEEAPRPPPPAWLFLPGVPPAPPGRIVFVAAAPRRRSHPWSDLLPVVSRGDNTNARGCCVRPPGRGARVGRPPEECFFPRLTPPSGERLFFDSLSVAGGPPLWLSLFEGSPHRGSLLLPPRVGVLRGARLLPPPPNGGPPPKILGGFLPPLFFFFGGGKRGSPKRFFPP

SEQ ID NO: 970285 - protein, 300 aa, Homo sapiens
MPLGDIGNPRSPSLSSADLDWTQGNGETVENVGNTPSVGVCPGVPPPRMGKLLGLVIQGQLHGKCVTQGDSMPLFKPRIHRGRPIPLREPRSGNLGKASTPEDLLNSSLTPPRNENPKDLTYSPLRFSPRETHAVIYKGVPRYPRKVDPTEFSTEVPRKIVFCKMGSYPLSYMWREISLTTGNHPPPLAQGMPPYPTEYGDHTLHHPSLTIHAPTAPPSSSFTPPYSTDTHPRTTTEAQIPRDYTDVHDYDMRVDDFLRRTPSCCHVAREKYDPPERDPGNESETPLEITDETESEIEDV

SEQ ID NO: 970286 - protein, 144 aa, Homo sapiens
VLFLVGSSVHRVGLLGELARGPSLRGFVVPVPALLLCFPWAALTGPGRALVWGVSSVGARVRSVIAPLRARTHVSVQVYWAPVYVPLRWYVRCPPYCARISVYVQRFDCLVSAFPLSFCSLWISFDSTSFPYRRSILQPDNHKT

SEQ ID NO: 970287 - protein, 119 aa, Homo sapiens
QTSFGRPIPGDAPPRCGAPYDEPPGLVSAPPGIFTLRPPGGGMTNFLTTGAQACCATLAALLGAHPPREPQVCCDHRNTQVGPAARNFPPGELFLAAAAPPRPRCGGDHPDFLWCLAGQ

SEQ ID NO: 970288 - protein, 66 aa, Homo sapiens
AALAVSTGHGLTKVIARFGTQPAFFNGYPPQWACPPPAVVDTIAALGDFVVFLVFLVVVWLKLVIF

SEQ ID NO: 970289 - protein, 102 aa, Homo sapiens
MCRHAVVWELPLLVGAQEYYRGGCIISVLRSFSSVVGVFSKRRRPRSRDWWEEALSFFVSAPPHRGGSSPLLGGARERYIDVGYLSSPPGGRGAQHPISSSL

SEQ ID NO: 970290 - protein, 169 aa, Homo sapiens
  misc_feature (123)..(123): Xaa can be any naturally occurring amino acid
LPHFWIGATIADTPKPCLSRTTIIPGANHMDKGPRYLRDDTMECELEPSLLGTHGCEYGRKNAEELIFGTDPYYHRCFPVILIMPLKYAKRMVTQFGMSEKLGVMTYQDTGELSPRNPICPRXRNKDPSKGLHMTSQTYLETHAKEHKNLAEALLTYETLDAHRDSNCS

SEQ ID NO: 970291 - protein, 214 aa, Homo sapiens
VAHDQLFQTLSTQPSPPQSETTLLKRAEEIHDEESIYEELPTPPFCQDLQCCREKAEPRPWPFSPRKGTRMTSSTQPWPASPRGHGQTARQPRTQEEGSPQGDQSPPPPENPGRPPEEPRHDPHPETWCRAPWGGSGTQTHPGRAPTRLGPPHLGAPSSLNPSQPQLCTPLRRPPLTLPRHATERLPARHHPCLMPHAEESAGAGSTAPFPPLR

SEQ ID NO: 970292 - protein, 125 aa, Homo sapiens
MGGMKDYGAYWGSFRMPLMAPDHERCLVLEARYGRPNLCVSIEFGVPRETFLERPLQKSGVILKRAGVLNWATQPGEFACKIFDGAPCTRELAYCIKYKFKKIMYGLVMMSILQVYGYKNMSDPP

SEQ ID NO: 970293 - protein, 158 aa, Homo sapiens
MSGGGSIGRAPPPSLALSLVARPHGDTLSARSSVCAVRSLHQCARAAHCLSIREARARAPSLPLEGCLFWALTALSYAHTTRDTTRRAPLSRAYTPQRPHSVFSPLGVPHRWGVEGELPVSGCVPLFPLSLPLPPLPSIPLSPSFSPSHGLSSPLWFC

SEQ ID NO: 970294 - protein, 285 aa, Homo sapiens
LVISLPRTWDRDPEDIFRGLPPVCFPGTLRVIPPLAFRNQGGSLEPYLCYQERVPPPGFQGDPDQPRISPHGGSRQHSTLLLVPPGLDNTSFEPHSGIIWVHQYRIPILEPRAPPPPVERYLSAARDLLRKVAALTTPRMLCSPRPPLRLVALGPPRAFLKTALPKEPPAPQTLAPGIQEELFPAPWLLLSPAHLALAPKQPPWAGLALCWSPGIGQGSREAVCPSRHPASSPEWKAPLRTARIGTWTWGWPQAPVHVLLPFWKTRFNPESPLRDFLCPPGRKSN

SEQ ID NO: 970295 - protein, 102 aa, Homo sapiens
RWVSRCIPSRLRVVSVSVTLLFVLLILVVLDWCVGLYDAPLLCFPALCVLSRGGMCASCFVAFVFCFGVWCEFCRSPVCASRRCVWWLLCWFAGRGGLFLRK

SEQ ID NO: 970296 - protein, 137 aa, Homo sapiens
MDTTDFDLKAVKGICVPLVSVKFLRCVAVNVKTDDTLCDSVCDPACFFLGTPQHRIGGICSRFARTDHWASWLSGALCCTYHVQRCSQCTHPTSSTSNQSCLKLFREKYFIHKYPFYSHVPKFVEKIIASYKLPARR

SEQ ID NO: 970297 - protein, 105 aa, Homo sapiens
MRCWSLSGSGEVKIYVGVRKQTRCIREVRERLYGIFGLKDVVPTRYERWVRGKIKRAKRVPHRCVGYSTDERPPRENEMEPVTRSLFSAVVVGARCLLLPQYGIL

SEQ ID NO: 970298 - protein, 282 aa, Homo sapiens
SGVPPVVVDARRGADFLGRLGSVVFRPPRSISVSLNGSGVLVGALPPSEAVLMAPFLKEGCGGDARPGRGGQPAVGVNFLPCFPRGSPPRVVAPREVRALGESAFVLPIPTLTVIKLCAPPFSRPPFHGPPKSWGPNKPPRVGLFGEKFFSGKRGISPSKRGKVIAQGSRQNFGKKILCSMEHVSFITPSLWGSLIRYLFGGPLNPLVGPQIVFQNGIFTLGPTAHLWKDYIPLCRPFSLWELWLNNRRQRSFSYPEIFFLWCTYEVCKTHRWHTLERAHQI

SEQ ID NO: 970299 - protein, 249 aa, Homo sapiens
AGAWVVAPGAFDPVCLVVVGGRPVGGPAAVLVGARAVSGVGTQASEVCFECERRRVGPVAPWGSSRIRCHPRDCGARVARAPRCALGRDSECPGGGNPPGQSSGRGERGAYSRGVVGAAGTDARASVGTCWVFVGRQLRGSQPVCTSPLARCYPLEGCGEREPWDHPVLILRGAGSGEPGSVRPRSLDEVDSRTPGRVSEAAYLADVGLLALAASRPYLSTAAWSRHRHVLEFQVIFSPPLVFFPGLFP

SEQ ID NO: 970300 - protein, 207 aa, Homo sapiens
RQDPGVKGNPQSGTSHPPTLCPPSVLGRVETRLTRATPGGWNQLTGPDAPVCFPRVDTLSRSLGIPRNEKIAVAPQPDLRGARPERKILGEGVLKSARSDGVLRKKTTFSDNWKLWCLGVPGTPSIWVIQIMTPDNWYFTAWTFLCGAGLEPGFPAIRQTKRQRQAHFGPNTGIHPKERAQPWFPQKYYGIILPVPINFPFYPKETN

SEQ ID NO: 970301 - protein, 139 aa, Homo sapiens
MRALDYPLSKTQCLINSWRLFIQCLLEMETPGLLELRKKKIEEAMDGSETPQLFYCVAQRREPAPVGGGPLMGSNPTIYDKSPGYEPGRAPAPELQVWKWRWRLKSCELDPMALTPKYEEHVREQQAPVEKEDFSDTGG

SEQ ID NO: 970302 - protein, 284 aa, Homo sapiens
AFPAWPDFVSAHLGINLLLTSTLFALATDGLLPPVTRSPQPPDTCPQPSTPIRLPLEGMPTLSSACAAMMGLLTAPGAAWGPGPLDPGWWNHVKGPSSGRTALEGEARTPLPIPPYPLGPDRPEEEAEDQLEALERTEKHWGVKTRRSLPEAWGLLDDDDGMYGEREATRVPRGPGSPFADGPRAPLSPRLLIRTLPGSDKNPGEEKAEEEGVAEEEGVNQFSYPPSPRECCPPLEEEDDEEAVKKEAQQNLYFCLVSRIPAPPLGVLPRGGKRIQPRRIKKEK

SEQ ID NO: 970303 - protein, 281 aa, Homo sapiens
  misc_feature (25)..(25): Xaa can be any naturally occurring amino acid
RGGVAVVGAWSSAGFQRLFCWAVFXSPCGGNNMGRKIACRDARIGAPRHGLFEEELLSIVSWRRRVLLAAVLGRPRMGELGAPLRSPAGAPSSLRRPLGDVFFFSEDCSPLTGPLSVFSTFPHAFSRWSGYNPPRLAVCGPKTGVGASSETVSHEGHARCSARAQQFVLVLWSQQPQVGRTPLAGGDNPREFSPPRGVGEFLASPPRCDFLSPDEREQSYSTLSRSNPGASHRVIGEFFIPLLESPPHLREGYFVPPRQESGDRGPLEGEGAHPTSTGTLF

SEQ ID NO: 970304 - protein, 344 aa, Homo sapiens
YRPSFLGRRAMFSPWGDPAIASAWWFATRALCVSPPPGVAGVLIPLPRELFYSLKVPPGGAREVTTQNVCSKPSHGGRPQLCIATPILRSPLYFLLRVDTHRINLGDPTELFVDTQKKISQSAWGLKHRLPPGEILPRAAGIISVLNPPTTVFPPGNRPCGREPHAGGPTHEGPEPGPHKIEGENPGGSGSGPRRCGEPRGGDHPPPIRGDKRKAREEKAPPPFVVSSETLRETHHSRGTHSAGNSRPRGRPPFGSLTGRGSLWVDTLGGTTKLRDMRAHAGALSRRGRDIGGSPRPRWRVSQPSRHGLCASQRLSRENTLSRAHSWDTEMRVGDTSFVESHNI

SEQ ID NO: 970305 - protein, 294 aa, Homo sapiens
MLCRKIAYGGVCCLARHSVGVMIIFVFYYQRTTPTTFVGSTKVCYNSKDDAAPSRAVVVIKKRAARPPRLLWYEVFGVGAARPALCCLALGGCCDERESIAPPPPPFLLGAVTRAVGRREFFVLSAQDIIFSVCVVCVLVCCCDERHTDVVSLCVTPRARGRGPLGRRALCVSVSLSVSHTLSPLSLARVDTARVVSLCLCLPLSARVCLVRSTHAERAAPHTPARANFLLRFLERDEKRECFTHTLGPARVCCVRTTSTLPQWASTPPSRGCPHTQCGGREKGWEPPLSPPHK

SEQ ID NO: 970306 - protein, 214 aa, Homo sapiens
GDATERGVLRHQCVQQKGASHAVWGGRSFVPPREVAPPPRPKRCQSASLEEPPGGPHKERGSTNEEVAYRPARGEGGGKTPPRGGKCVIKAPAVWENTRTAPPPTERGVPPQKKCAGAPPAGEVEKRRRVCRPPPPADKMGEVIKGVCPPPPRGGDAATTPLPSENGKKYALSRNLIVVERIEEKYCCRPLTRCEGLNKKVSPLLSLWERIWKY

SEQ ID NO: 970307 - protein, 212 aa, Homo sapiens
VGRSLCAECVVAGGAWGLVAGAFAGRSGGTSGGFSPRGGPGPWGPGDVGVGLGFIAPPVGRFVFLGPPLWVVCGATLAMVPGEGARDPHWGGARKLAPVPCLRFPLRVEAPRERRCRPFYVGGGQKAKSAFGSPGGTPTAGSSPPAVHRSARGAQRPIVRENCEGGTTCLRLPRLPSEGPRSSGGCSWCVGGTAESPGSGVEESLATLAASS

SEQ ID NO: 970308 - protein, 201 aa, Homo sapiens
GWGRRGGGQGAGGRAGGGAGGEGVRGGERAWEGAGGEGGGPEALAGGAPWAGRPQDGAGVNGDRSLEGPALEDDPGSQGRERAGEPRWSSSGAHEGRRASVQSVDGLVALWLPGGGVSAPSCVVEIARLRFCRVRSRSPDLVGLIRAEAAQSHTRREEVVATDSWALCRPVSPATPAPVSWELTAPGKTWAVGGSRCGPLI

SEQ ID NO: 970309 - protein, 209 aa, Homo sapiens
GRVSGPVMGRGEWRATGRRPEAGSGGGRCARAAPVEPPGIELSHAGNSTPAGSSIQRPDGVPVTPPPVRIPPRGCCLPWSDVPEERSMTQMLNVQTRPASYFVEMDPPPIVQNQPSVTYPTSWPPDGQSPSLAKPQPIPELFKRISEPDSHAMFRRKAFLPWDTGEGMDEMEFTEAESHMTTSSLSISRTRMPPPKRRRISVRRPEEEA

SEQ ID NO: 970310 - protein, 138 aa, Homo sapiens
LGLDVCEVGFAYRSVCVRRPPHTDVVVVRCPAKSYCVLGYFLRAMSVRVFRVRVAGGFSSIRGERCRVAPPQTLVVGAQMVSGVLPHQRLPKTFFFVGEALLCGGRCWAVAIYGHHKVLSNRTSLLGAYSLVARATLF

SEQ ID NO: 970311 - protein, 170 aa, Homo sapiens
ASSARLPSVRLQGGISGRRLVVALRLDLRTRHPGYKPVLLSVFPPAGRLCLVMPLGRRAVVIRALGPQPAPHLAREIHDPEPAVWKGLSEGCGHHQFFDDPMLLETCPTGCCARLPPVRCVDSWELLLPTRGLHSCTEAETSYDVGLRVVRECLEAAVAILRPLYPPPTP

SEQ ID NO: 970312 - protein, 118 aa, Homo sapiens
FALCSSFCVVRTDVSHEDCFAVVSRFLIPPAISTLRVNDVAPPCLSREAPVVVRTVLLRILSVSNSHSRWGGASTTPEEGRPPPAHRSALCVWVAYDGRFGVFSTPDKIKPTNTPMPT

SEQ ID NO: 970313 - protein, 68 aa, Homo sapiens
MKEVSTRWAMEEDLHWEDEGETHGPALENTMTTRKEEESPELFTIAHKRRGRCCKRRFEIQKKLKTSP

SEQ ID NO: 970314 - protein, 137 aa, Homo sapiens
DQIGRAPTTVSPARCQAPAALCWYASIPAAHGALAIVSAPVPKKLLMNGWYRVSCYTSARGCTATPGQTSPRPPLEANISKTNSYLSPQTFWKETVFTQFPYQEFTDPLVTDPHPSFRATESGSHCGYNIGFLYQEN

SEQ ID NO: 970315 - protein, 192 aa, Homo sapiens
MDPLRALEMVEKPPKGPYMPPRGREVAPPLARPTKRAIWGDPLGVHSPSANGGELIIRHALFGEIRESPTIEGPPPNRPLHTQGAISSLRCSHRGYGLARTAEAPLWRDTLFWAPSARLACCVKDPEMLPLTCFVRSPSTALGEEPSWGSPTASFTRPRVLVHPLHKERLRTLRTRTSPIHFTHVHLKGFLV

SEQ ID NO: 970316 - protein, 139 aa, Homo sapiens
  misc_feature (70)..(70): Xaa can be any naturally occurring amino acid
MKSLFVLREDRWVKLPPRIVFGHPPPPVFALSVWGPFFCLKRQDGGERPPRPSLLFGGGGKICPPRLWGXGPPVVSSVGSKRDKSFSSPQSIGAVHREIGEPLLPSWGLSYKVSLPTRRPLPPPKRPRESVVWASKKSE

SEQ ID NO: 970317 - protein, 145 aa, Homo sapiens
  misc_feature (21)..(21): Xaa can be any naturally occurring amino acid
MWEMSSVSRRLSPHTLRAFWXVSHREHTAHADSREFIGALSRGDTLGRLCGGATLENRRVSLWASLAPLILVRRSFLRLFGALLTVLHTAGLSTRLHAHAWSLHRTPPPPPLTPSHLFSPPIVPHPSTALCWYRAYLYVHYPPWS

SEQ ID NO: 970318 - protein, 171 aa, Homo sapiens
  misc_feature (48)..(48): Xaa can be any naturally occurring amino acid
MVFGGIEAIAGFGPNGHPARVPLLEGIRRDMAGNHCPEVTQRPAGASXQFRHNLVTSRSTRAHSTGSWMNQDQQLEMVSVSIPGSEAMSGRVGEELDDQGIMLDAFAPEMDHTQSRMDGVLQEIGPSIPPLTSEPPTTWCATRRASGGASPRFHSYYSLFEPQPSLARLVP

SEQ ID NO: 970319 - protein, 145 aa, Homo sapiens
MMWWLETTSPCGVCYCVSHLCCESLLEVYLLWACCLKTHPRCVKETILVVVWESLLLWTPHPLRWSATSDYLVVFNNAPAPLARKVYFSDTRPAFFGGIDVSTPTVVTPPRGGCNFVPHSVSVIAATRDIGCSLFVLCGVGLCCK

SEQ ID NO: 970320 - protein, 332 aa, Homo sapiens
TLLCFKCGTPLRSQGVSAASVVVDSAPQFRTNPLVVLFATRAAPHLCERDLPPPGGSAGCSSSELLSSGDLSLRPPFMGPPPGGAPGGIITRDGCAPTTGVNPSLYCTPHLRAAVIFKGWHPPFFDVNPSVVVHHTHNIPRALGWTPGPPAEIFPPAGNIPVWTPPTGCSPPRGGKKSWEERSSPAFSFFAWHTPGVFLWALCLPTLGATIALKNLGCPPLVAESCSRFCGPKRYPHTQTSLSQKICKERETLGPTPKALKMFARGQGTFSRKPPLGPTYKLCGAQAKTLSGAPSLGYTPQETPGPSRGAQLSQAQSLEAPRPTTLQRGLPA

SEQ ID NO: 970321 - protein, 218 aa, Homo sapiens
MWGGKIPTGLVKPGRRPTRSWAPRREKSLWGNLGGPPRSEEEGASFVKPPTPTGVNTPWLGRTHNKEWFVGPHAKLWRRIVESGTRSSFTGGGGHPQRAAPKKGPCDHQKEGGSHPRESRCGPHPPPARKRPLSPPPPHERHLSTPVRGTSLRRKTGVVGPSGIFFGGRTIWALSLVRSSCCYTPRLISALCGHNTAPLCGATQKEGRYTHYVTLRPL

SEQ ID NO: 970322 - protein, 225 aa, Homo sapiens
DTANRFAGPAEMGLLWTPQGGAPPLEKGEGQLEVDIEERPEELVRKPYVLNDLEAEALPFPEKKGNTLSRDLIDYVRYMVENPGEDYKALAPDEKNYYPDTPKPDSGVRSNSRINAFYPSRVARLPRFFAEEEDGGGVTGLQSQTCPQAEASPGPSEDWSPGEGKEVLCGSRGAGPGPLEIQKVTPPQQCTLPASGEGTVFRGSHLYSSGGSRKSQNLLFSGWVM

SEQ ID NO: 970323 - protein, 117 aa, Homo sapiens
RLFACMCVLLCPSCGRKRGYILSAGLATLPPPRPLSQKDVGGCVDKSSLIHTCCVVVVKMILWWGGPDLCVPTPLLCGWGSTPPPSREPTLTTRGPPRESLISPSSLPPRGLCWGPD

SEQ ID NO: 970324 - protein, 51 aa, Homo sapiens
MPALGRNHISLWAASGLLEPHGPKAKGEWAQKAVFGLAQFPIIKLSLTAAL

SEQ ID NO: 970325 - protein, 566 aa, Homo sapiens
  misc_feature (67)..(67): Xaa can be any naturally occurring amino acid
  misc_feature (106)..(106): Xaa can be any naturally occurring amino acid
TGGCRTPARHSVERSSYTSRGGGDTSAQRNTSKEEGSGMTQQSCRRGEHRQEKRRGAAAHKPVVRGXTQRGCCRRQLTTTPVGGTNKGSPPPRRGAADTRRDHAVXCGGVCAQRRKRRRGRDDQACSSSWGGQQPGEYPHWRASYAAVEQQESVPFRCGPRPRRDKWLAPPPRGGEKAPLKEVGGRGNAPPRARKDSATRVHERCNPPVGAPTYGATDSSAESKKEGPTKTTSGGRSTWLVRPHPPSGEGGRTHTHGGCCCPTPPEEGGANNYGQREEEEAGGRLTTGETILHERSVRLVALARAAHQRTTSRAEYERGRNTHPGGPPPRGRGSTPHVVGPHTDGVSLYTPAGVCVSQHTFFARSALVSNSTVVCVCAQREIISQRRECVCATHHTGGCVLHTPLRHTDGCDARTHTLSQSASHSLTHSGAHRARTHRAPAGGDNTPTRGAPTERDCFPHKCVCEECERPATCARPLVGEPDREIPGHPERRPEISPHEKEQKERSTQPGSAREIFFSTFHTARHTLGPPFLLPTAPRRTLPRPPAPGWGHKGFVCEKKALFFFSP

SEQ ID NO: 970326 - protein, 70 aa, Homo sapiens
FFPTEDIDPSGELFVVDHNNTPGGAPTKIQAVVSAGPEIFPRGYVFGTTPLFLYLIGFDEETYTSGCLSS

SEQ ID NO: 970327 - protein, 298 aa, Homo sapiens
PSWGIWILFLFICVIEVNGTLSFFALFVNPVFPAPTFPFLPAPPGPHKVVPLMGPCPFLCFWVWIVHPRGFNVAWVSVFLTGPTPEGPPSGSLGDPGRGFLKGLPNFGWAPPPRGFSGVPGFCAFCCLSSSTPVVRPPLSWKIPVPLFSWDSASLEVHLLGLSCLFVPFSSSFLCSLWEHKGSNAQRLGPTALGIPPPPRIPPRPPLPLLVFSGGPGARNGTPSLGLPEGGVPSHALQSSAAVRPCSPRGRGLETHTRNAVVAPGTLTGDPHAAATPWFFWRISSLLSRKILRLLVPL

SEQ ID NO: 970328 - protein, 212 aa, Homo sapiens
HLSCCCSSAPASLLSFTPRCSVFVFCLISVVFSRCPLFCYLVGPSYFVCRGLFVSIEAHLHCGSLTHRVARFIHYCRLLVSQASPLWVPYHHPRAKLWVFFFKPWILCPSPPPPWGKKGSESVILTRVDSWVFTVDAPGNCWFTLDGTLPIYDLAYPDFFRHTSVKHHAGHRANCSGSKALPWKIPASLDGIVPLWDPRTGRLLTDYRGHHG

SEQ ID NO: 970329 - protein, 150 aa, Homo sapiens
  misc_feature (127)..(127): Xaa can be any naturally occurring amino acid
MTPIALIVPKPNYRQLIFVEMDSPAHNSWKPAVLWTIRPPPGAIKMSRHPCQLAHQAPATSTGEPGSQAAISEARVTGHMFPAHKALLLQLVTPGEGHMELKMEFTPKGREHNTEMTSVSEVTTHVXRNATTAEGRKGEFEEEARGRKVA

SEQ ID NO: 970330 - protein, 107 aa, Homo sapiens
QVSRTNFDEMDTLPGRLCTQLIDEYPLLATPATSYILLGTPEHVSPPRNREPSFCLTGWPQPCLTDHPPHEHQIRDLTHLFFNNNTGDSLLACQTPLNFSSYETIYL

SEQ ID NO: 970331 - protein, 180 aa, Homo sapiens
YPFCIYCLPVGGSYTRISKGGAAPPHPKICVIWVTHTAGPTPWVLSSSPHEGLDSEPPSSQSPNRVCFLHSRISPICFLCFPLGTHPGSPQPEPLFAVAAASQKTPRVSTLVSAHGRPPPEGPPPGKHTHMGVEKYIGGAHTRTHTARCTRWASLWGDHLLAPPRENLTLERIKSPPRGE

SEQ ID NO: 970332 - protein, 157 aa, Homo sapiens
MPLPFVLRHPPLGALLVSTPLSVFFVGCPRFLGAPSQSRTVKVSPCASSRRCSPFFDMDILGFFSDGGVCLIEVNEGVIFVPILCSGVCWKDIGFLGGESSCRLPHSQCLYFDTQHEFSVPSLPAPPFPAGGYQGPLQSPWSWEGGMGDIKPVLSLF

SEQ ID NO: 970333 - protein, 80 aa, Homo sapiens
GTTPRKCGNQLGPWTNRDPVRPGQTTHAHGPPPGVHHDPTGGMERNNFLGFHERNVLIELNMVCQTLFLFRLNLLEPPPQ

SEQ ID NO: 970334 - protein, 136 aa, Homo sapiens
HQLVIIAVFRFYGWRLLFPLYTVYLFALSLLFFFLFSFSIVVLLATFPNVALAPNYSWSFDVFRVFPPLASAPLLVLVFSAPKAHYSVLIPGHHISGLYCPTVPPDVDFQPGVLRIRGSYICPPQWFSYRYFCRMS

SEQ ID NO: 970335 - protein, 390 aa, Homo sapiens
MLLSLVFFPFFSVAASIYLLYVLSVSLRASFCARAFSALHIFVLLACSPPGVFSVFLVHHRVLPPFFPGGTKVYPGAISSGAWISRSFGRFSAEHQSSWSPFRSRSPKRRAPSTPGPGPLPVTFDEISFDRVQGAPLNAPGSVLTTIAELNLSKRPVCQGEKVLFLRISGPSQAAGDKPREMRLQEPTLSSGGPLLPDTPSTSEEPSKPLAQMPPFAHLVSALPGPSTHAFLRARGVLSGGAKPTASLTKAPSHVLVGGEGGGSPPLSYSPVPTNLVSSTFPRTHFPRMGSQLLPKWCRVITFWDTTPGHVRAHGFWVPEVHFPKEPLVGKKSTPPHWLHTHNGSHLTKGRRSACFTERRHAYTQRGNSRKKHERQRMEKIRDQKPTNTD

SEQ ID NO: 970336 - protein, 373 aa, Homo sapiens
MLRSFAPDHRAAVSLDRRSLLVGFVAARPPSFILMNCGDPLHNDGFQQQGCRLDMNVLRPTTSVFSPRLDHPGWKIFLRTHRFAFVFCCIKKGDTTTFSERRTSFGCGDNSKKTLLARRDFTHEVAARAPPVFVYRQRVDHRGRENKGGGPTITVETTGRCREKKQQNGLVIPPPREKPVYPPDPEALCRPTGKWLFSAAGNSNTAATKVYTVLEPTMAPKGRSTRDVFCGRTPPGRVFDKKGGDPPLVKGKFAPFPRHQSLNFSFEESGARPHTTKGPKNPTESLWSSLGQQRGKVVFHFSHRPPRIKRVCFGRTLPPHKKRHLCRIHSEIYYGVFFPRSCLEKNVEHPRRRSRYISQQAHHLLISHRRERL

SEQ ID NO: 970337 - protein, 199 aa, Homo sapiens
MHVGSAGSCSLGRSVGLGALVCTRMLCVLLPPGEFDAVLTLGFRDDKLSSVFVPLFGAPLVFQWVFDSRAGSCVVAILVTGLTRSSIAPYVGSVGVAMRRAMVVVTLEVDQLWAFTIPLQVLAWFVMALMWWMMHMPDQAYLPGISAAAAAAGVGLGVLQEMPLLPRDECLTSRDNPGTSSPVGADEETGCFASHVLST

SEQ ID NO: 970338 - protein, 219 aa, Homo sapiens
LPFCRLSCLSSFFFSLLYVSLCSRFVCLTSFCVRRSPSRTCVCSVSALLFVVECHHRVLLGLTPVGLGIGFGFRSIRDLPCLGTSALPLLCVLSGSHFHIMGFLWAEPPVGFLCLIGVNVLQHLAVTTLLLIWNGAPGGLCGFLMMPDGIGELFAVKHTAQQSESHDDKLLHWIAGPPLLCATCPHLTFISMCGDCKMNASYNSESDVMKLYVTHDTYI

SEQ ID NO: 970339 - protein, 105 aa, Homo sapiens
VWVCVVPGVSTGCVDVVSGWEWVPGWDLGLGVHVRGYAVGCCDVPAVAGGCISWEGGVCGGQWGWVVRSGRGALDCWAKGVDRIVGPEWGKFDTLVVRGPRLGPC

SEQ ID NO: 970340 - protein, 168 aa, Homo sapiens
MPVARFLLHACGRCFFVAPRGGAPSFVGCVALFLFVSSPGCGCTAPHDVAVTLRLLARVAIGSWGFYGTPRVRSRGFISGLSCRGHPSCSRLSFSYAPGGVLTFALYWVHARTLCGLNQGHILLRCEFSPRWCAPRLFIACCGGVCRESIFVDTCWQVPPPGGTPLCA

SEQ ID NO: 970341 - protein, 225 aa, Homo sapiens
PLVVGSPSPLRLCVVSNPLLGWFGWVGPSLFLFGVLPPGLRMLYWFVKDRLYFVGVCVSAFPLLSFFRRRTCRNGAGVVCALFSALMNVFFVEIGGGKLSLGRWLFVSSSRSEISVLGVIVLPFCLPHFLCRSFSTRVRGCLPATQLFYLCSPPLFSRLFLRARRVLVFLLCGERYLFSPPSLLLPICGYLLSPSVSSRLLSLSPLSLSPLSLSLAPLFPCEKRA

SEQ ID NO: 970342 - protein, 150 aa, Homo sapiens
PDMKEEMARYRRGYPDLLNVKMAPWTLRLPTYRKLLEGEETGFLCLFPTFRCPEPEGTNLDSLPLVDTPLQKDTSDLRRLKLEMDKVIHGTFSASRWTLDKNCTHSGQPYMYPPEIKKRIHILKKPAFKCPSASFSGAPDRFGIGISSSS

SEQ ID NO: 970343 - protein, 102 aa, Homo sapiens
MSLVCYRGICRIIPSWWAPSSVHKRHFVYVCCVSSIFGDPAPVRVFLKPFCGPAHWKRQILTRATRGSWFGKKGPDSCKLEEVFYGPRTRYTRAPLGFNFSR

SEQ ID NO: 970344 - protein, 70 aa, Homo sapiens
FVVSVLGFFCLLCCVCSFGRSIDSSLVHVDFCCPLCRRPPVWCGNNGCLTDGGVRAPSLVVVAPWWHTFW

SEQ ID NO: 970345 - protein, 222 aa, Homo sapiens
  misc_feature (113)..(113): Xaa can be any naturally occurring amino acid
TTCGYLYSLSCPREDRPTYTRGPPLKSLSVGPPPPTNPNRWCLNNSVFIIFFWGKSFSTKGTPEPLDLGFSPGIPGPPKGFPLSAMEGEGEPEMRFGFFPPGPAPTPTHGRLXCPPLHHAPDSNELQEPEWNRETSGTQRQRLGFVECPELHYAAEESHPNGAPPTPTGNAHHWRLRLGENTCPLPRVGWPNHGWPASTLPTLPDTLTPTPALKSMEGEPQS

SEQ ID NO: 970346 - protein, 104 aa, Homo sapiens
PERRALGGKQPHSSRDYPLEVVPPYGSYTSPRIVWGVVFRFRRSLRPFFVGSSLRGALLAPRRDTSPHHPPATDSPVGSGDPLASAPPRWAPPSERTPPWRATD

SEQ ID NO: 970347 - protein, 180 aa, Homo sapiens
LGGSCLSWSSPQDRATSASWAKTLAAHVSPWEQEVFWKKCALSAGLCGQKTPTLVSRNFRGLTLQVSHSQEDHAVVVPRVLLPFLVFKRGPVPQSSHNTRSRERPLMGPALTPPQPWAPGHGAPPGHSSSLLRSVRSVPGPTGLAPVPPRAFMCHPPPGRPFPVPRHGAKQGAQVQATTC

SEQ ID NO: 970348 - protein, 117 aa, Homo sapiens
MMLLHELESPSLSYVCLPEYASTVRRASTSLVMSTSRTRLTIELHPDGRHGIVQSGPVFPWPPKLVDLPLCYGSLKPLIKNFLPRQLISVRCLYPPLMVISILLWRSPLLALILKPA

SEQ ID NO: 970349 - protein, 159 aa, Homo sapiens
DQISVSGFVPETPGGLQGAHVLQFTTRTAQCRNTVAALEEALDVDPMVLYQMKKSVKAIHSSGLAHVGEMKSRDTPALEKFGGNCVCRDDPDLGSAFLKFSVFTKEFDSTFPNLIQNMTTYISFPLDRFLKGDLKGVKGDLKKPFDKAWKDYEPTITQI

SEQ ID NO: 970350 - protein, 174 aa, Homo sapiens
TFSCLLECPLVASPPLEPLGGIIFPPVPQSGRKTSQRSVVFLRRGAHLSLVFFPRLCCATDGRPLVAHISCVGDLFLWHTMFRTYSPARGPPCGTQMDPAHRLWCDHTGEFWRARSPSGGLFFFSRAGSCFRAPHTRSLSCGAPRTTRRTPSRGTHLDQALWVAPRLTSLGTQL

SEQ ID NO: 970351 - protein, 120 aa, Homo sapiens
MPTPVTLEDKYLDWAYRSGGYQKARAVFKSLPGDPTHFPVTFSRKMIQFEKEPESLPYGDIREYYERALENLDPPDSDLWMDYMKEEIETTPPGRPENLWTDLLASDENVATGESARGTL

SEQ ID NO: 970352 - protein, 136 aa, Homo sapiens
MFNSSSLVPLPESNAYYFIIAIYLKKSQDLSRGEDEFKFPYLRIYNQHETSLLPVVQLAQMYYTGTMKERHQPNYPVSPENAPKPIFGPVYLIPCGRKGTIPMYHLELNVINLALFFGRNHFFKEASLALEKFPTI

SEQ ID NO: 970353 - protein, 120 aa, Homo sapiens
HKRSTLGLNRIFLGTILHRTGLSPRRNAPEPPHRRRSHLTPSGHRGTDGREEIHFVEIQGDDHLQWGPTQWMTKLLDQKSNPGVIPATRKVSQAHRPNSGRNHPDHHILFIQAQGAGAGD

SEQ ID NO: 970354 - protein, 132 aa, Homo sapiens
MEASGFTAQVIILNHPPHKRRLCPCIGVATRLTIACQFAELKEQDVIPVLVKSWKMRPKFLKSGDAVPLLIWFLRQPMCVESFSQTTPPLGSLCCSCYEHQPSSRWVSSNPVDQKAAGAGKVTQSAPESSEG

SEQ ID NO: 970355 - protein, 207 aa, Homo sapiens
RGVQALLPLGGTRFDLNFGGLDVVPAPQLGNFLGEEIFGGFIWRGDYVTSLEILVARDFWGRCPVHAPAALDRVAGAQPMVGGYYFAALSPEGASGVRRRPGSGCGEHACVSCDAPRASPVRTPPGLRLIITLFFARCPEAILLCEPRLWDISLCADRAPTSRDRPPKTLSPPEDFRPRPLCLSLPPPIAREHHLYVGATVFRKIKE

SEQ ID NO: 970356 - protein, 70 aa, Homo sapiens
PLCRVIVLVYDRPFYPCVMSCELWGYMISATLYIDEEYKIENDITSPWVPVLVPMLCTAPEVSVAAADAT

SEQ ID NO: 970357 - protein, 33 aa, Homo sapiens
MLELNPTLTVFQAILFPHRIGPLGPNKVGILPP

SEQ ID NO: 970358 - protein, 96 aa, Homo sapiens
LWMFVSPPVWGVRVRVSVCVWGAPPLLCHKPLFIGGSARVPFLFLSVPCSLQTRFFGEMRLFKAFYLVGAKPRVLNPWTFGCTTIPMVVFLVKPKA

SEQ ID NO: 970359 - protein, 76 aa, Homo sapiens
LVSSPECVVSLYEMCLFVVVGPRCGHDAEGVFLYGASLGAQGRFFVSGLLLEARVPPRPPFVGTPSLNFGAVYSAC

SEQ ID NO: 970360 - protein, 103 aa, Homo sapiens
MATGIRLGGSPASFVLCATPPLLSLEGARPANSGVVVLNKGGQFGREIVAQNLIRAFIPRLLCRPPISTSRYNLLFLTCAAMCCAHPSLTSSFPPCFSKASKK

SEQ ID NO: 970361 - protein, 147 aa, Homo sapiens
TSCAPYFAGNQKQLERPCSSSTSTAASRTEKPSWLEDHELLPAQLGYHRKTLGRAAPGCGRLDLVPPVVTVALWLGLLFLLGPDTRFAPPCYGGKRPGGPEVAAPSIFLAHRASFPIFSFHFTAHGYDQTTPGPWHHSSGWGVLPDP

SEQ ID NO: 970362 - protein, 105 aa, Homo sapiens
  misc_feature (1)..(1): Xaa can be any naturally occurring amino acid
XLRRWCSLVVLAGRCSLTVGWLLVTLLLPSSFASPRRLPPLVCPWWTLSRAGALSRRTRVFLFAPPGGEPFFGRWSRVVPPGPLFLSSRGCVPLIRRGGGLPRGP

SEQ ID NO: 970363 - protein, 176 aa, Homo sapiens
  misc_feature (67)..(67): Xaa can be any naturally occurring amino acid
PTFLTPTNPRLSGLCKPSVCPFEDFLGVGAHLGITTAGPGPVSPTSMPGELSHTEARNRPRSGRCKXLLEKVPAELICLDPRALAEVEVISLEQGKKDQIERLGYDPPGKGSPSQPKPIAEGPQLHGKPGEEEEEGHWMRHTNGTRSRRAFSSSIIKEAKAQPTGARPSAWTEFVR

SEQ ID NO: 970364 - protein, 72 aa, Homo sapiens
PAAPGLQTLGVPCLSFPEKLGDFTSCVQPPLSRPILGIRCRQVPSPLTWEPAPLSLPGSGGLYVLRSRPSIL

SEQ ID NO: 970365 - protein, 172 aa, Homo sapiens
MPKILSLNLVTHPKATEEKEEEIIWKDIFPFMGQPWDTQGTQLPVLGGPGWAQPLGVAPRCLAKLFGPPPCRRPCPRPMLPISLLEEEDEPLRLRPLSEPSLDICNPLVHRKVLGLKPWFLPTGFPGTSRVGGFAEAPRVPSRVLGGKAPDSRRDPRTVGTPFLGFPAPFPS

SEQ ID NO: 970366 - protein, 87 aa, Homo sapiens
PIGTFTYWGSFRAVFTYSQKIPELWIKVTRVEGNLGPLDITVIDGPEPCAPRRSVVVTSLPEAGKGLRASDQEPEGDPISGGARYPA

SEQ ID NO: 970367 - protein, 106 aa, Homo sapiens
LFRPLWDLEVGSSPLSGSSFWDVGRPCLPAPSLVRAPSLLGSHLVHEDGILPTALFHLMGLDLAPLVCPDTLFLESTLHWRRDLGKRTEARVPVDHWGGEGRCPSH

SEQ ID NO: 970368 - protein, 112 aa, Homo sapiens
MAFSPPRGNTPAGGALRAASGWGFSPLCVGDARRLRHSFVVGYARCQGVRPRADRGGGFSVWEGHEGGALRGGGPPSSPPAVFRAADAVFCVQWPPCRLAAREFCFRPHFGF

SEQ ID NO: 970369 - protein, 131 aa, Homo sapiens
SVRGCCKCSLIDYIYRWCVWIVVVFASASVSVCWCWNTAQVGGLLSLVGVVPHCGLAVVDLRRLRPVVHLFWMNPLGVVCTHTAVSGVRPLCCVVGPASPLVVPAAAMSIRGVYSLVSGAVPAGSSDDYHC

SEQ ID NO: 970370 - protein, 117 aa, Homo sapiens
CDAVRMIWTTHLGNFLANGSSQELLRGVLCANVGATRTPPLGQLGSLVPGGFPFPLPRLYAPRLSRFGGPPPGPLAKPSFLWRVGERLCRPVLGVQPGRRGPPYFFGDHVADAPRCC

SEQ ID NO: 970371 - protein, 205 aa, Homo sapiens
PGVRVFACAHVYNGPPFCRGGFFLRFLMRVVGCAVCRIRVLRRFPGGCSPAAGVVVGVPPCVGGFALLAPVVLHRVVFFCVAGGVYPLFVFFSAVCVWLGAPPQFFFGVGWPSVCVWCCSLCFVLSLCLFCPCAGWGASVFGGPSFEFSGFFLVVLLSVWLLVGLPPGCFVRRSACFVVVSPSRCLFFTAIVCCVALLRVVALRL

SEQ ID NO: 970372 - protein, 93 aa, Homo sapiens
MCYLFPVVMLSLAASAVAQVPCLLPVCVPATQGHPLCRLADPAGHPLPSNDVCGWDLLYSVLMANLLHLGWVGEGVLAFFVGFLFLKKHSIIL

SEQ ID NO: 970373 - protein, 225 aa, Homo sapiens
CRAFGPLGQGGANRGAGRIPELLDTGLPQGCPQDCRRAVFVRAVGVGGPPPAGAVFELARPPFARAWPTQGTHWSAAKGACVPNRANTLPGRDSQRRKLRGGGGHINRRRVEGTIPPHIERKEHSLRGHNSTERKFVTTRRGSTSPTRESSLSLEERKLSRVGVICDDTTHCEPTTNTRVNVELSTLGGARGATHLIVRITNHGGVKAIGRGGHTTTTAGHALPL

SEQ ID NO: 970374 - protein, 115 aa, Homo sapiens
AQDFPQGFRVWGLHPAPSTPWSTPRTEGDTYSLAVGPLCPESYGGTPVPLPHVNAREGFSPRPGPARNLQHRPLEGPGVSPPAPLPLGTGRYCPLCWLCYHLPPPIPRPSSGFFH

SEQ ID NO: 970375 - protein, 203 aa, Homo sapiens
QELLLASGTGKTLWPGLLINGGDLIPSLALNWSEIHEGKGQNGEGAFSPGTGDLLPSIIFMDESTPSAPPGLRGVLEGTVKCRALMLELLHPLDGFEAPQDLQVILATNRIDILDSALLRPGRLDQKIDSHPPMRRPRWTILKIHSRKMNLTRGIHLRKIAELMPGASGAEVKGVCTEAGMYACENRRVQVTQEDFEMAVPRS

SEQ ID NO: 970376 - protein, 108 aa, Homo sapiens
SQLSLSLSSLVVSVCVCLISFLSRHLLYHLHLLVAVCSCISCVVGGVSGLCQRTCCCVLSSPSCVSVFVRSLLRLWRALIRVVCGVGRAPPTVRGCASVPTFESSVLC

SEQ ID NO: 970377 - protein, 345 aa, Homo sapiens
YLAGVFCLVPRGRGFPVFNPRETIVVAPFRPLLLGGHPFCGHKRLCSHIYIPGPGFPRFSGIFPPGRCPVVPHPGSGLVALFTVAPWDVECPGGVLDAPPYVTTGSSKRAPSERPGNSVPLGPRAYRPTAPSWSPTAPIPATHLSGGHEFFGDHSRTRNVEGTMFPQYHARTGGFTLGRILEGGALRVRHHSRPNKPPEHTSKVCLAPSSTTRAGDPCHCCAPRGGPRTVSTSFVGTPHPHALGVPTITSEGPSRETTSTWLVWWTRVPRASRGHRTSPLAFVETCGTPRPRHAHSRFLGLSGHEDRVTLGGPRGWAPELHKKCVLDPDEAPMEAVHSLPCRPCK

SEQ ID NO: 970378 - protein, 459 aa, Homo sapiens
  misc_feature (241)..(241): Xaa can be any naturally occurring amino acid
  misc_feature (371)..(371): Xaa can be any naturally occurring amino acid
PPPRWCAAPLLRTSRGSCILLPLRSSITSLVPRGASAVHQVLSAPPGDPTLLCCALLCPPPFFRGDPPVLWRRERCGGPHNKTPGALWLPPGFLREISPSPGGNFLSGNPSPSAVSHCPPSGVFLDMGVGGNTHRPPSSSPDGGDPPWVMLARPFLTGGPPAAVLYVGEPPSPWGGIGPPLPFRRCLCPNPGVVSSPKGRILVLPWMDLWRGPHTFLCAQTPPRYGISHVPLPRYFRGKAXLFFAGAALGRGPAFSLGRTQNDRVGAPPREGTSFFSRERARTFLPPADLSYWGPHKTLFIWKNLWKKVLFCRSGYRDSHKRATGGKFERERRQSPTQRDFVDNLSSLESLGFINCVEILLVTRFFPLSIXGAHLCHRSLWAYETLRENSSREFSGEYTIFRHLYSLEKPENLTPNMTPTLAPTIISSAPVIIPGVVSPGWRRNACLKYPCDIDLSDSP

SEQ ID NO: 970379 - protein, 320 aa, Homo sapiens
  misc_feature (1)..(1): Xaa can be any naturally occurring amino acid
  misc_feature (9)..(9): Xaa can be any naturally occurring amino acid
  misc_feature (277)..(277): Xaa can be any naturally occurring amino acid
XRCSLVGEXKMVVLSVVVLFGVRPPPQEWVVRSCTVVVSFHYSLVPACGAGVVASLIYFSSPWGGAHQFVVKTVQFSPFFFLVAGARYLRPPPPPPGVLLRPASLLCCLFGGAALRERSGTTIFSDECSSSPPGACILFVATQCVSRQHAVCFRTTNNRPCGWSSYTMIVDGVSYSSLAYLPLLFPPKGSSSRDFNIFGGAPRSPPTRGLYLTNLGGLSLSEEWRRPPPLGRGAPSWGSFEHHRGSSSGGARLRVVRPPLVVSLPADFFFTRPTPAXVAHLSSWETLLCPPLGGFPSDKTSRTLSVAPSLFAALGASCTH

SEQ ID NO: 970380 - protein, 368 aa, Homo sapiens
  misc_feature (208)..(208): Xaa can be any naturally occurring amino acid
ARLLPAPCVFCSGSALGCVSHVAPSISPAVVFYLLPPQARFGGRVVLQLSSSDGWWFGAVPPRGGRLFFFVGGLLAVDVAAHRVSSWAWLCLQQWGRPALVVRCVVTGCVCQGWGLPPRVCCCLLCGAHTLVVAPCASPSRVVLSVPVRRVSLLVSHPPTVGGPFTRLLPGVRSSSFYSSCGVRPLVDVSIDDMGGVALRSSRSIVPXWCVGRLCAPPMWGPAHRWGADHQGGCLFPGVFSVNAYYYRGEDFFSVCVFSFAPRCFGVICAAAPVVLVMSCCRPLTTVCPSSLLMMGGGSAPKPVFFLRGQPIMPPLCVPQRVTTLWGVGVVDTPPRRFKRKGVFGVSSGMSPACSTGSAPGFVHHIVV

SEQ ID NO: 970381 - protein, 135 aa, Homo sapiens
MFLWYLPTSCASPPSECSLRVGPTCLAPGVFVTPPVCTPVDSPSARGAVVKENPWCVLTPRGKGRWPGPGDPCGATLGPPSWRHFERFFFCWFFGSSGFLLWWENVVASWVSREPQSDLLSRPLCGFPPRKFFLS

SEQ ID NO: 970382 - protein, 82 aa, Homo sapiens
LVVFGVVVIGPVPVPVFGFFAFVLFGVYVVVRPKPDVACGCVGWGLDPNPFRWFGPSPTRLCGETHAGLFSTAESGGGIDAA

SEQ ID NO: 970383 - protein, 104 aa, Homo sapiens
HLLDGSTHHHRWTTPLLTWLAPDRHNGGFQSANLHRWGGRLPQDVVTLPWRGVNSPFRGDGMPPPCLIVSVPVPLPVHVPCCHQPQSNLPFSYCLCHHSERWAD

SEQ ID NO: 970384 - protein, 105 aa, Homo sapiens
MTKSIGPEEETLEVHFQPKRKVSQPTRPSNRPGTTRVHQILYPSRPKIRELGLKDPWSEHQAIRRPDPSPDMDSRALDLIAPRILLPSPSWPGPPAFTSGSPRCS

SEQ ID NO: 970385 - protein, 275 aa, Homo sapiens
MGGFLSRGVHASGGEPGFRCFVGATWFRIGVELSKRLPRARVVCQVRGWPPGEWCVHQGCVASRVVVLYSGGICALCVPLARTRTERRWCPPATVVPRAHRVLLLCPRDGIEECPPQFLALLLEAAPTVVGFLVGCCPQPSLCPPPGGVCTPAPMPRPAASATHVMSTEGVCVVAVWCASFLFFEKRAPPCSGSTTHLCATARGVFQFSHAKPLHHTTDGAPTGNPAEPSLVFSAYPFTHSHFLLMDAVKLHLLGDYSAFTTHHDEGTFREPFTK

SEQ ID NO: 970386 - protein, 183 aa, Homo sapiens
SRSESAEDGIHVDSTKGSLFEKKRAHKYFRPGKYDESQLTAYHPGLDARSHIIPCCPPTERPAYFRLEKFAVAESDCIYAVALDRSYTKAYSRRGAARFALPKLEEAPKDYERVLGLGPHNFGATNGLREIPQAFSIPRNSYPKEADIVIKSTEGERKPIEAPPNKPPALSEKDRGNGFFQEG

SEQ ID NO: 970387 - protein, 169 aa, Homo sapiens
MRHLISRCRRFRRTADLTGSRRGPEKLSHCGPFGIREEGANGGSSEEASRRKPHMMNAIKKYPERRSLINWISLREIQKPLAPAPEGRSPRPSQMRKGPRAKRRYENPKFGFGGKKKGSKWHTRESYDDVSSFPGPDQLMAEASRGLARKGPNKRPWETNQREDEEPTP

SEQ ID NO: 970388 - protein, 140 aa, Homo sapiens
EGDAVLPGCVSGGGGGGGYIYARRGGAEFVRTPACLVVAQPVGVGVVDSSCGGHEGAWFRMFSLWGASHLMFVPPSVCVRYTQGGVALARTLLVAGEENPSPPLCFLTEIAWGAAARHGDSLPPRLGGGAGSPPAGGGLG

SEQ ID NO: 970389 - protein, 118 aa, Homo sapiens
  misc_feature (8)..(8): Xaa can be any naturally occurring amino acid
MCLDVVWXPPSVGERVLRGLKDATWWCVLACVGVFVRLVLSPRMCGCRGVCRRCGWSPGGLPRGGVECGASCLGGRRFFEGGRCWLLCRHLPRVLSFVGTYNLLPASVFEEPILSLGI

SEQ ID NO: 970390 - protein, 136 aa, Homo sapiens
RGYIGGKLGPRPSFFLTPAAGRLPLRSRAPLFSTVSPTNSTHPHICVHNLFHSGVGVSWRAPPHPEHFSPHGVSSPHPVKLSVINHATRRVGTGNPPPAQGCGHPPLATHEGKKNFLEPLRGWGKKNGNFCAFNFF

SEQ ID NO: 970391 - protein, 109 aa, Homo sapiens
  misc_feature (59)..(59): Xaa can be any naturally occurring amino acid
SEVRGWLVVCPLAPPVAVNGGAPYYYILAPHTPRFGGPDLFFCCCKDGLVVTRGVVVCXPCVRAPHIYFVVGAYFFLVALLFLPAEEPTCIGFLSLASLSIGFVAPLYD

SEQ ID NO: 970392 - protein, 107 aa, Homo sapiens
LVSHVQLLILFRAVLSFVVVVSCTSVFCVRRLRVCCSFLHPFFCPPAVFTRRGDRPGGCWARGGLSLLEVVPSMSPFLHVVGGAPQEVRCFGPPPGCFQQPLWVLME

SEQ ID NO: 970393 - protein, 282 aa, Homo sapiens
MGRTPIGGAAVVVVRRQCFADALGACLRERPLWVGCVECPAAGSLGLVSHGVVAAPALWVYTPCLLCALSHQYVGGGFWLICVAPGDSICMWWSRISPSVGLLGRPRLGRAFKANWVVTIRRTNRDGRLGALFLCAAQGSAPPLRRSLWCTRPCSLVRTLGGATPPPCCGTLSSLSPQVSPGGLWHHLPAVGAIRWGAGLFFSPEASSWRNFSRDLWSPEVAPLIAGRFALPEGPFVFYSYPGFPPRAMGGGFKCHFLVLDSRGPPHRGGFFSLKKSTDKPK

SEQ ID NO: 970394 - protein, 146 aa, Homo sapiens
  misc_feature (133)..(133): Xaa can be any naturally occurring amino acid
PRSPPLFYPPYWGAPLVPMGLWDLFLRPCDYFGPRDPSFHVAAPGVFNPRRAGYYTPRDAFARARFMLHSGGPRGFYKGEKSDFYTGALLLLFAPRRPTRAWGENNMFVGETHHLVGWFWGGAPLENNHGCGXNTRLPCLYRREYL

SEQ ID NO: 970395 - protein, 95 aa, Homo sapiens
  misc_feature (48)..(48): Xaa can be any naturally occurring amino acid
RLTLFCGVLRALTVRPDPPAASGLDPARPGGSPCRAPQIPSLPPRGEXLGSLELALGLTSCFVTFLLPRGLDTVTTLETYPEATSERGPFCPSPL

SEQ ID NO: 970396 - protein, 104 aa, Homo sapiens
MLSSPQHTECPPLSMQHTHTQCVCVPISPTHSPCHTDRNTHSLAVLSINTLFPTREKKKNFFLCVLPTSLYCTREHTIFAWVVKNIDEEHNPAFCEQHVFWFLF

SEQ ID NO: 970397 - protein, 154 aa, Homo sapiens
ICVGCLLLPTYTFFSGGCHSLLIWGGEGDSVCAAVVRTVSVDTRLGGLYSLWVGILLPSQLGGEEEIVRLLLVCGGEGGEPPSPLLERVLVCLPLFLSWEPSLTPCLLFLEERGAPPPPARREHLSLPVCPHRPHYISRSALPLSSLCERESFF

SEQ ID NO: 970398 - protein, 85 aa, Homo sapiens
  misc_feature (6)..(7): Xaa can be any naturally occurring amino acid
LPYAEXXAVIPAAAMDGFWGHMRLQCGLWNGVNSPVVSLPELNPEMGTDHDSENWKEVHKMVVESAYEVIQLKGYTHWAIGLRCG

SEQ ID NO: 970399 - protein, 104 aa, Homo sapiens
YPALGHHLGAPFWEPPVLGAPPLAPPPHQVLTPAPLLMWGTCSHIAATFSFEASAPLLDHLDFQDFQLALATGPVRAPVAPAFGGGSSVPGFGSPGLTFSHCFF

SEQ ID NO: 970400 - protein, 134 aa, Homo sapiens
NHCLGLPLLPRPSMGPAVFWKFQTLSPPTSGWKSCQVSPVQMETARYLLVARLGPGPDPPASGDALSSTGLHGPGFWVLVKEVHPQAWAVASCLPLGFQNPTVEPKVTPRGPPGWSPQDTLTLHEELKLTRVPC

SEQ ID NO: 970401 - protein, 82 aa, Homo sapiens
MPCAALRSRFQNGHGITHVWEKECGMRNLVVHRCTICVNVYVCDKLHVCNVAITPYRRVVVSLTGIFDGVPHHPYPIIYVGW

SEQ ID NO: 970402 - protein, 290 aa, Homo sapiens
ATVVPGVCSVWALTGGCSSRAAVGEHSRLPRPVLLWLTPASGQAGCVPPSPVVGVVRFFVLLGSLLPPPARVGHSDASMARRGAPPPQLWWCAPTMGAAPPPTLLPATLISLCVWADRRLRSVHPLFSSRTPLLLSPRSLSLTTSLRPCLRTHLPPPSVRDSLFVAVCVYRGTPSSLRGAPPMHTHRRVPPPSLIRGGSVCCLPPALSLSVVVRSPPLTAAPSAFFFASASCCAPTSSSLVVPPPGRRRFFSWVWRPPVGCGGRPRAAPLKNPPPPYFPSSPPPQHSQKI

SEQ ID NO: 970403 - protein, 169 aa, Homo sapiens
MACFPLDGHVALSEVPTLVRAPDLSEDSPLPGRESIAALVDLHAHCDTFLLPPTSVICFVMSTPLPLSDPSLASQRCPDPGAQQWSMGMPGSPPWALLVLCSTSSPRDCPPVFPDTPTLSGGTPVFRASAFPAAPAPSGGPPSRPLYFAFGGPGRPSRTFPPSPLLPSL

SEQ ID NO: 970404 - protein, 104 aa, Homo sapiens
  misc_feature (43)..(43): Xaa can be any naturally occurring amino acid
MSVLLYTQGENLFAVVSIEGSACSGSPICAISKMNAVIYPDEXRYLISPLGISPYHQSLYPYSSRISPDRLEIFFSVISGFALLSQPDIFLSHFDATIEETICK

SEQ ID NO: 970405 - protein, 164 aa, Homo sapiens
VLLHAARAFFLVPLLVMFSLRVGAIRPPPPVGVLCAAPLLLLDLAAGGRGFLRCCAGWFVCRFVDPAAGGGGVFASWFCPPGGGARLCGPSRVAPVFFVCAPLVLVARSVVSPSFVTPGVFSRRSRDIFPARVCVVGPPPSLFARGPSPARVFFCSPRSFFLVE

SEQ ID NO: 970406 - protein, 157 aa, Homo sapiens
MREGTRLWGLVEEGVVHGDVYIEETRTLMGGPAHTLFLGYDSVAEIDMDTLLLSARPHLTYTTTGEMRPRAAHTGAGLRDLLGPQEDEVAYGHTAELSHMHQRLTHEVFSLLSVISHEVATEHLWSVFVHERDTRLGRHAAHVPSSVPTLTFCPKST

SEQ ID NO: 970407 - protein, 133 aa, Homo sapiens
SFLLFVACFLFFLCCLLVFFTRREFSSAVFFVFVVYVLLLAAAALVFVCSLSVPAFVCKRGEPSSASLCFVLVVSRPVCVSWLHVLCLLGGKQLIVVSFSSLWGDCWPPAVILGAWCVVVWEGMFLVGCAPGP

SEQ ID NO: 970408 - protein, 67 aa, Homo sapiens
SKAWTGLYSVRHECGPQLALALGCTKEGRLGVFFLPRSAPLARSTSSLCVNRRERGGPPFIMREDNI

SEQ ID NO: 970409 - protein, 231 aa, Homo sapiens
SLCPGQGPPLIRCGSLRVGMGNGVPSAITPEVLAFGRPPANQPVYQVSRVCPALWCSRSIADGGIPNVGHIAKALGPLGPPNQYDGLSPGCPPLRPLVNTSFPMGSRLKKYPRYGFSRCPGPAPQQPDQSISVKLTKIQVAPGVSGAVPGPRVHPTECCPLPDCWPSHTQARTIGAQSLTPVRAHDSTLGSLSLRRERPQPRWKVASTSLPSYENGFSEKGSRTPPRFFFP

SEQ ID NO: 970410 - protein, 146 aa, Homo sapiens
FPRPRFWCHTWGARKETRATVFLPLDALALPGATAILPHSVGRRAGGHGYHCPGPPGSPSPTCHAPETLHPIVLSHAAEEGGAWSPLRPTPTGRPTPAEDGAWAKVPQWLKLPASHEVETASLRCPLRQPQDHLLLPARNKDLCIP

SEQ ID NO: 970411 - protein, 192 aa, Homo sapiens
PPAYTGHFPQCSQAGTLTPCTRSNALLRHLGRPLGLYGKDPPEAPLVDLVNDGLEASRCQYVSLIYPHYEAGQDDYVKALPGPLKPFETLLSPEPGRPDLHLWETRSPSLTTSLLDLLLIPEVLAPGCLDAFPLLSAYVGRLSARPQAQAFLASPEYVNLPLHGHGKPEGWGDSEREAEFAFLSPGPIKFLR

SEQ ID NO: 970412 - protein, 141 aa, Homo sapiens
MMFGSDWGLSDVFGGSVCELWDFCRSVFLAVLPGARSPAAQHPLVCTGDCVFLLSRMCGQACAYLLQMCFLPRPGTCPGGWSSKGSPWGGVSPLGYLGCMFCICQPRGVCLGATTYGTSGSKGPVPSVISFLAPASPTSPS

SEQ ID NO: 970413 - protein, 111 aa, Homo sapiens
  misc_feature (110)..(110): Xaa can be any naturally occurring amino acid
GLFLGRPCPRVGEFSLPPPTSGGALPLLRSPGVALHRFGGACKALLSGEVLSPGGPPPLGRPLAGAPGVGFAQAFRASRGGRVPSGLRYSGMPGGFPGVSPRCTHSLRDXC

SEQ ID NO: 970414 - protein, 313 aa, Homo sapiens
FASVLPSCDVISCARVSVHTGPLLCPLIFSPPFPAFGPLRLFTKRCPSLPGFSPPVKSRGRGPAGSGPVYALSSPRFRPRLSRGHCVNIEASHCVLPIRTHVRAPEEPPEDSSRQNPRALTVPIWDLDPGRPRTCGPTESNLLQTFRRWPHTAQMDAVRIMAKDLVPPRRYVPQFVLIRAHIPAVSPQIPDHSSPTTDGPSPEGCPPRPWATHGPDQLKLPPDPRRSMMEFDPRRARDPGYEGGDDEVIALDDPLGDEEDEEESDAVGVPRFLDELGLSLHQMSFLTPSPSNWGLPLVWLLVGKNPRPPASSP

SEQ ID NO: 970415 - protein, 113 aa, Homo sapiens
MALTRHTFPPSCSPRAAGPPCTPCILFDQWIVLGWLSRSLLEYESSFSGSFPPWSRSVDVHYLGPGNHFPRLLPPPTPIGQDLALASGPIGCLPSDFLPPLLPSFELCWAWGS

SEQ ID NO: 970416 - protein, 73 aa, Homo sapiens
GATSCKWGSRGAKTQSNGPGVLGAPRTVSGESVHGYSLCWGDDSASVEGAPGKFSGKTVSSTVSPDLPPKGST

SEQ ID NO: 970417 - protein, 209 aa, Homo sapiens
PKVYRHMTWIPLGNQLISFQRALSDQCMMISSSLNCGLAKKLTCSCTVSQGLGQDHAQFSPSGHQPQLQAPAQTSTLLEPLEGEANCGVEPVLLTLVLLRCTEVPGKKVAELPTPGWIPSAEKSSRDEKLKKRCEAVPGFEITYIFSVESTRGVAPTDVLVSEATPSNCWGKCPRFLDELDCGSDGLSLDASEATLKLWVLTDPPYKDC

SEQ ID NO: 970418 - protein, 162 aa, Homo sapiens
CGLRFRQKMASEGYSVWFSCFHKTGDMFLLFCLWAAQQRLLSLVVVVLPSPLLIYVLPPLPPPRCGGAHQRLVGCVHTLGLPRGGGVYSSLLVIHPFSSGAPPLICCAPSLGGVNIVSPPPGVIFVGEFLARNTQPRGRVNTTVWWPTTANKVVVWSRKSFS

SEQ ID NO: 970419 - protein, 478 aa, Homo sapiens
  misc_feature (230)..(230): Xaa can be any naturally occurring amino acid
  misc_feature (390)..(390): Xaa can be any naturally occurring amino acid
ALFFVCVPPSWGAHHTVFVAPTLILWVRPLLLLWVGPPSPAVGAPAPPLFVASPPARCCGRRHSFWCERDGGVYLLFWRRHSWGVLSPPPPGATTTQGGVEPPRHIFSLRFGGTLLSPPVGCLTPAVCVPGSSLYVSLPLVVESPPPRSALTSSSLLCLVRRGGGVFSQQAAAPSSWWYLSGLKRERAVIFFPHSRDIIEDMFYLLHNTAHTACVVVNSTTRRALSSSSXRVKRETLPLSAPTPECLSSRGGRAHHYCDEREETMLCDDTTVSSTERRATTTLFSSLMNERADSSSFSFISTTSDDTILCVVFSSSSRGVALISVFVCVYVYSPVAPRASLCALSSCGRDYTRRVCVRAPESAPPLSLSSSTARAVPHSLPRDLSRARGXFRVCEREALSCVSALISRVVISLSRGVYFVVFLTHTERRFFVAVSPPPRDEEGALWGAGRRVPPLGPARLLFLPPPFSFFVYPSLLSF

SEQ ID NO: 970420 - protein, 110 aa, Homo sapiens
VPFSSHREFKMALCVVAHEKRGWLYSTLCGEPYTRGCVNSSFLLGVVAPPPPGEKVVVLHPPPQHHDFWLCPNGLTTEGVFPPTLLLLPPRTKYAARFLEPQCPPVVTTG

SEQ ID NO: 970421 - protein, 460 aa, Homo sapiens
  misc_feature (209)..(210): Xaa can be any naturally occurring amino acid
SPFVCLGGGLLFAWEGFAAPRVFRRILFFSELSALGRPHIGVFDLAVREDFCHFLFGGVILQPRPPAVFVSKRPGTGNFVPVRILLSEPTGLWLFLRTADCRTCVGSTWGCPLSRKSGPTEGALTPPRWWRARRWMMDPMEMFPPHGSWPHRPPAAVIYRCFSPLCPLTEREGKEETSFYEKTRPHLEMSLIRCGCNLWATHTPPSALXXTRGYRKKFVPPSIGRIEIVVYRERRELSFGRNPLGGLYTQREKGLYLHKLCTHIFSWATHPTECHSPPSQPLLTFNHTHSENIVSVVEIVESVPSVVCVSHTILLRATHHYCVSLLMKTHYWPHLSQGLWRAALASTHPRVFPRHLFGRAREARREFSREVFAEVFERDHALETHTTRRGYPLLSLSIKIPQLCRGAGGTCGLIYSHANLGGLRPRRNCLKPRRGARGFGEVEDCALALRPGPPPAKLRF

SEQ ID NO: 970422 - protein, 158 aa, Homo sapiens
  misc_feature (142)..(142): Xaa can be any naturally occurring amino acid
MLLRKQSVLLGRREGREIIPQGLIFRKGFTVLKLFFLKTDNRVPHLMCPALSRTGFINRGRGGVSPATVICSVLPAVCAQFSRALPPESLLDSLCERKSFCVSRHWCWSAQSVGIPPLPPRLWPRQDCVLKRSSLLVDSSHXACRSVSAPAECSQREK

SEQ ID NO: 970423 - protein, 220 aa, Homo sapiens
MPWYKGHMSASPPWHQVFPARASRLQVTIEALRDPILEGLFPAWNSFWGGLSLPAPPQGYFLTQSFPPETWAPMARFASHVLQEGLTAELGIRHVLLTLQCLLSPPLPRVLHSTRRRAPCFWRTIEEYFRSGPSAHPRIPGGPRGPTRHGPKPVGPGPWQLKRSSPEPWGPQGAPERAEGPHGPEAMLASAIKKLAAQKKTGPESGRCGGCRWAFFLLPP

SEQ ID NO: 970424 - protein, 134 aa, Homo sapiens
MLGPPPLSRVFSRVLNLFVLTPPSVSLSSLSALAPRDLPTPTGFPESPETSPMAPGPHRAGVRGRPTGLKPPEPRPSTLEGLSLWLCIAPSLALRRHSLSWLAPCLPRGEPPPAPHGEPQGLLRGPLSTLGPRL

SEQ ID NO: 970425 - protein, 246 aa, Homo sapiens
SFSWLFRVSYCLLFLVCVVSFWGYLPSCVPPGPLGAGVHISLVLLIPPQNSGYAPTPVWGFCSPWSLPFRSFRVLHGRFGTVRFANVFSDLRRRMATSAWMVQTALGLVAQLSPTLPHWKCERVLLALFCHGPCRAPAISWLPTPPFPWTRPVAHPGFDPDPCPPSRRICSPPYTLPHHGVCPTDLGPMFQANSTKLTEAQARRASPSIWPAALFLRRAMNEAFWDPQFSAVLVEPPPDEPALVLA

SEQ ID NO: 970426 - protein, 71 aa, Homo sapiens
RCYVAPFLTSDFIFPAVIHLYSGEYQLRRHSSYTAESPTVTLMAVLSDSGSTHPLLHLCAQSNSCGKMFCL

SEQ ID NO: 970427 - protein, 79 aa, Homo sapiens
MGVVEVRPTLNCCTPFNVLYEKEGEFVAPFKFTTLLLMPHGPMRITRGPFEPDLYKSEMEVPDAELKALLQSSASRKTP

SEQ ID NO: 970428 - protein, 143 aa, Homo sapiens
MLYNYYMRRAHTRGPLLSRLHATPRGANCLTLSWAHTRRNFTLGPNTPEGARPRSTTPSHSAPSHKPPRLVLCHFRGAQLLRGGLSVGIWRHSSGILHETAEASPTLTPLEDGRLFNMHPQGLTRWEPPSHPPAHQLRSPPPH

SEQ ID NO: 970429 - protein, 130 aa, Homo sapiens
MGFFVDLRHWPPGPILRFSKRGSSPCAFDHPELGLLLRLHMASRYPEGPRIGALSLGPSAGPLAHNLPFSSQPPCGQTNLVFPHQFPPCDFGRPLPCGQSILVVFDVSQKIRCSLTVTNHLSSHLGRPNS

SEQ ID NO: 970430 - protein, 351 aa, Homo sapiens
  misc_feature (54)..(54): Xaa can be any naturally occurring amino acid
  misc_feature (229)..(229): Xaa can be any naturally occurring amino acid
DTSYLTLGFSVYMWYSLCWPFVSRVGTMVGARVSHNRWWFSTAQLEFCGRIYWXWPRKHRSPSGDTASVVPPCHRATLGPPGRPRDPLRPPESWRDLPPRKEKKVTQAVDPLGPPTSEPSQAEEDLCKAPPGDLDTGLLSVFSQGHETRTRRGKGIGVPPCEMPVMSHRLCPIGEVYTQPKPTKGSHLMDFTNWGVWKFVENLLKRCPLSHAPPKSCLSPLFYRTLPSXTTGESSLRGLNTRVSLGRTHSPQESLPSCLSPRLLCTLSHPLHSITHPPHSGDLRPLVSHTQGHTSAHTPLGLWLQSLTDFRRTHTPHRRQPPPTRPHPLARWRSHITAITHPHVHTFTCTG

SEQ ID NO: 970431 - protein, 252 aa, Homo sapiens
  misc_feature (160)..(160): Xaa can be any naturally occurring amino acid
MVNVVVKTREVFVPQRAVAYPLVSRRFFPRALAHSPPREVCLRLLVCWRKFPGLGGGFFEDPLFVEHSTRYILVSNTSGATALSLREEKLCFPPAVVERETRGPRDWNHSSHTHGFRPCHRCSPPHGALSSQWALLHIVCGYKCEELFSGVPCSQRVVSXHMSCEKKESSVGCPRPSGARHTQASGLSPVSPPQATGSSPPSFVGLHFGEPHSASLLHAPASWPRSKAETTEPLNSRGGEGGPRNAGAESRR

SEQ ID NO: 970432 - protein, 452 aa, Homo sapiens
DVARCCRLRWLFPLVTTGCCDLLGLFSPLFQGHPPGRGCRLHPHRGQPTSPGAPGGSALRVTLVVCRPHPLWGDPSLTLGGIPRGKSPPRLKEGRPVPPPHIFGGVFCPKVVAPATPPRSPWEPPVDPTLGAPPLESPPRCSKKPSFHGEASWFLRRGAPRRSPHQACPRVCAAPPLATPSRWNRSPLGCSPRLGKEGPFQRTLAPLLPTALPPPDFGEELWGHPLALLAQARSVCAEHCTFGAPLFEVCPPAPRFVTPGAGHEGPSRPSVIPTMAAPRPPLAPSLSRTHRAPTVLSPRSHRALYYFVSGALGAPHARPARPPTHSPTQMRHTHGYTNSVGTAPSILSVENRAETPRAQPPLNGPPETTGHTRATLARALSQSRRGDTPRYRLEDLHSKAVTPRKPGTAEENTGTTGTQMPAHDTLKGPTCARTFATCTLRHPRTGLKGPVL

SEQ ID NO: 970433 - protein, 314 aa, Homo sapiens
  misc_feature (208)..(208): Xaa can be any naturally occurring amino acid
  misc_feature (271)..(271): Xaa can be any naturally occurring amino acid
VITGGGGAWWGVGGCAWRSGGRRGARRVALVGAGALPLGASRARGAKLWRDMTTLFPLPRGVVATHGCVVPVYRTPGVAAKGGPTGVLVVGGATAACLRECAVCNSRGRVEPGFRPGVEWRRAVVLGRPPVVAAGGGRVALDALSRQALWFKPLSWGALLFGGGVGLAHGRLGPKAFWFGLRERAVPGGHPSFLGNVDCPRPRAECAXNMRGKKVSGDSVTGGERGYGAHQAPTWRGPTLGKAPRVPHSVTEHACGASIEREENTPLDTQXPKCNIVPLSEVLRGGPSTHNPTHAWGHCLGWLARCVLRVCFVL

SEQ ID NO: 970434 - protein, 153 aa, Homo sapiens
SVRPLLSRLVLWPQKSFCVGSSVCSNSPRISQKVLFLLLWGTLFLWRLGLSWRSFFGRHQKGFCMILCVRCGHKGVSVAPYGPLLCAHFCCRVQRTLHTTPPILSALPAVFPTPELELSPRGDWGPVDESPPTASVLCLSRVGLLRRRPPRVC

SEQ ID NO: 970435 - protein, 170 aa, Homo sapiens
VVAVVRARVGRATVGGCVGRWSRSVRVLVGVVVVCGALGCMGWLLFVLRVVLGAGVVFLRRAVVCVVRRQAVGGGTWLVLPRSAWVVSGAPPFVPPRGAVVDAAVVVCAGKVSGGVGAPPPCGSKRGPLSVCRGIVCETRGRGVVCPPRKCVSHARRREREDERAARCVE

SEQ ID NO: 970436 - protein, 222 aa, Homo sapiens
MGNCPFNLGYYPEVLALFYLLGPPGFLTRFSAHFPPLHEKLCPALRRLYACLPVSLSTSRPRRASRESCRLWIKPMDTVSEPQSSEAWRALMSAPMGADFPFLFPPLGIPEKYLATLEPQSVDPESHCSCSNKVEPLESRMHNPALGKVEAPDGRLQTPEQVPPSQSWRAGKGIFSSPKDFWPQSPTWCPARTTPHTVQMVSVSFGPRPPEIGALVLFRLLM

SEQ ID NO: 970437 - protein, 118 aa, Homo sapiens
ASSEIDRRREVLSCEFCILCAGGGIVLIVPRRGDALLPLVRASFVGAPPVRGCPRGGVSRRARAVVVVPGRREVSAGGCVLVCDTQASLPTILLFGGAAGGLHVAPGPCVCCCCPPVI

SEQ ID NO: 970438 - protein, 260 aa, Homo sapiens
DDLVVCEAWWNSDGVEHAGCSGPIGVVAATVVRRCVADGDLVALVCVLGACVVVRLVGMWRRCFQLVGGDKVGLGFVLSAGAPHEWAPGGSSSAGGWEPPALGGGPQGLWLVFRDQGGGFSPRGGVDPTSTMPHRVYPQKNCCRLSKGVVQRLRVWEDSSLVWEEEEYLRRRVVDEGGEEGVWAGQTVNGQLVRPPHVFKSNGGYKEAPSWWGPPQEGCVVPRTPVVISPPVHCTTRGRGMPATDGGCALVCRPPVGVVW

SEQ ID NO: 970439 - protein, 212 aa, Homo sapiens
  misc_feature (133)..(133): Xaa can be any naturally occurring amino acid
MFFPPRCFSHRELSGGPARPISPPFVGAPPTACGRYTLSGPYEMPRLSFLVSPPHSIWGALWRFCSLWRGSHALLGPLLSVLSDTPRCGHHSAPASLLGAFLPPWENGAPGCVGLWLCGVGPLGAPPAPCVGXSLCLIRRPHSSSLTCGGRDPRAPLYTPSPPRVLYVKEKKKVWGVEGEILVCFPRLREGENIKREGSNLDFSGTPASRSL

SEQ ID NO: 970440 - protein, 73 aa, Homo sapiens
TGYSALYDCRIIVEYRLGTTKLFMWLVLVAGNSKCLAQQTEVVLNCWVEAGGAQPFLTQKQPPSSVVFPPGGN

SEQ ID NO: 970441 - protein, 146 aa, Homo sapiens
VCPPLRLSRMSYENGHNKNALNARSLSMPPLGLLRKSKGVFGIWVATLLVYMRVCQPRGFLRKGALSASDLEPWYTVLGPIIQKGAYLAISSPRKELLWWVSGNFGEDALVIAGKEQQIWGPTPVNGTFLTPGVFSMLLISEARIR

SEQ ID NO: 970442 - protein, 287 aa, Homo sapiens
MFCALGLTSMAHKFSNFSEFPRRVTRERTLESPLGTFQAFVEESLNKVQPVACPGKWVHCHVCSGCRQHFLIVPTSGDSRPILGRYNEESPKPAAFKPPRQEPESHSSMKTRIEDPRRLGGNLRDGRVLGVLRGFHRVPLGTGQYQRLPVSNSCAPTIQTAAQRDPSMTRFILLACDGLFQVFTPEEARELHLVLFPRMKRSRPREGKSPADARYEAACNHGWPTQAVHAGARPTHVTCDVWSRIWAPEGVARRPTEHRTGIELKRFTFVCVHPCVFCVTPVGLPWL

SEQ ID NO: 970443 - protein, 385 aa, Homo sapiens
CVFDMSVWWDGVVLCGRACSCAYRCVLVSVVGPLSRRLFEQVGAWLFERALISRRRGVSSRVSSERYVCRVFVRALGPFARVVMYGVGFLVGRALSCSWGAATHSWGGARSVSVLGCVVWICVCSPRRACSSKGVFFLRHERSGGAACEVYVTWEVRLVGGGSSRWGGLLTHRLSHTHVVGPLKVWRHGKLLSSKDKWCLDKRGKQPQREKNGGAARRRQLGVMFCSRQLAEARSGCLASWEEGVLGGLFLWWKEAGIGGEPTTHSSWWWFGRKYTTCAPPTSSSGRGSHREDLVPTLEHHQQKRRCVRDASVVWFMRVAHDWSCGGAPHTPPGLSGRALWHAVLCGGHSSRAHRRNTLVVYEAPPLFFCRLGTGVSCARLSLIE

SEQ ID NO: 970444 - protein, 240 aa, Homo sapiens
GWCLSSGGDARCWLLFVAGVVRPGVLCGGGGWLWCVDGVWCVRGRLLGVHALGAAVGGAGGAGGVGGGREVFAGGVFVWTGLWGGRVFWVVLWCVGVVVCRGCCVPFSSGGGGAPRGVSLAACCQLWGLVLLLDLGSALVGGCCVRLLVFGGVASLAPSALAGGATLRAGGGDARRGGRADCGRQRFLWGWNRVMWGCPPRAGGGRVFCVCVATPPRARVGPGGGTRPSLSLSVGAARAR

SEQ ID NO: 970445 - protein, 239 aa, Homo sapiens
LCPARLSNVSGVAPWPTCVGAQSVPRCLPPWKVGFRGVPTGSAFGVPTSNLSPFVLLGGPGGNRWCVHPTKNVGVDPSNDAERVGCPCVVGAQGSRACWCPGLEFMCDPCPSVIPQSARVPKFPPLAIPRAVLGNPGAPWTHCPIVVGATGLEAPWTSPRVRQRPIAGVTTDWRVWPSGTKNVMGPHGRARCALGVEKDSGPIGPLCGGDCHRVSQREALGLVVTITCGRCHIPRDHAR

SEQ ID NO: 970446 - protein, 239 aa, Homo sapiens
MGNYEVDLFNRPEEGVISLASEKNLPWDLNSAPAERPIVPLEALNEPSSRTSARERGVCFFHVGEGVATSIVFDPPVHYFSIPKRENQVFDPVCKDPGQRKNRRGKKNKIMPAQEDFQTMMEEAKFNPEPLLVNLPAQHAKDSRFQAIEKMEDREALFNEFVAPARKKEKEDSKTRGEKIKSDFFELLSNHHLDSQSRWSQVKDQVESDPRYQAVDSSSMREDLFQPYLEKIAQNLDSR

SEQ ID NO: 970447 - protein, 189 aa, Homo sapiens
ACCLLLPGHSAALARRRTPPQRVCGRAPCSSRPPGGAEVWRRFAGCSLPAWGRRGGAGLAIRVWSCSRTGETTDVFLRPPRVGPEHVCSGAAPPLMLEGPAGVCVYHHEEAHWGLGESRGCSHGGVLLRPAGVIFLLSWRSAPLPSPFLLPREKAWCAPPTLWPGQFSTERTCGGRHNPHEVLMGNPLL

SEQ ID NO: 970448 - protein, 195 aa, Homo sapiens
MLASVASLLRRVVVARPQLGELPRGGVISSFRRGLCLLGSRGGRERTTSGVHAPRGPTVWCGGPVCGRPCFLGGHPLLCDAPVVCGAHEIHTGVVVCPAGVRGDVFLPRGVISGVRGPTEVVVSEVIGSVVVSHVGGVGCARARSPPVRRVFVVVCVPPHAPRCFLRGDKSSGVVFCRAAPSIKAPPEECLWRGG

SEQ ID NO: 970449 - protein, 103 aa, Homo sapiens
GKRQKRGRSDLGFWTKGRAGGAREKRPGATPSWAEQAWEGPQPWGNNFKGAGDHMNCPPKVGRGTPPPDQRPEILGRTRVPQGTQTKQSKSWLWEITGNSSGG

SEQ ID NO: 970450 - protein, 106 aa, Homo sapiens
MWRGKSCGETGCSVFGCKRNKWPPDKYPRWCSAERKRVEKASLLKKRGGPAIERDLGGELSLVSLCWGKKGLIDSRLYPQRKSDKLRTTYRDIERLEGHHPRHMFL

SEQ ID NO: 970451 - protein, 116 aa, Homo sapiens
LGRKSLCRYRPDGPQPNWDFASPEPLLLHIFAGKSAQGTGSSVTMLVGYPVDVDKILFRQYDSPWVKAHRKSGRSPVKDFIWTPTRHPLAQLSRAPDFRTPSPPQPLLPYFPPPAH

SEQ ID NO: 970452 - protein, 110 aa, Homo sapiens
MGTIIDHLAAGLVGGAGVVLVRAIVPEYAVFETGAPAPLCPGSGQGYSPSPAMLLSASHMLRHLNLEYHSRMIADAVKKVIQVGQVRTRDMGGYSTTTDFITVCHRSPAD

SEQ ID NO: 970453 - protein, 103 aa, Homo sapiens
  misc_feature (28)..(28): Xaa can be any naturally occurring amino acid
  misc_feature (43)..(43): Xaa can be any naturally occurring amino acid
QFNIPPPPGQNPIVNHGYSNPAVFISKXDFKTPRNCVAVTPLXHGGTLDRIVYLFPVAIIEPLMNLVNSPKIPRLFWFILEALSNIFQAAEKLGETEKLSIMI

SEQ ID NO: 970454 - protein, 123 aa, Homo sapiens
MPAVPSPCLGVCRGSAASCNRPRFGVGATTNRAWGPRHFCFDRESGSKQNFLRDPRVHPLPLRTGALLSALGVWKKTLPSPPLPQNLRVGKPKPDVVAPNCSPRKMRTSVVPPAPVDSDGESD

SEQ ID NO: 970455 - protein, 246 aa, Homo sapiens
PRAIVAIPGCLSVALSSDHRQNFSGSRDLPSSYGIRWVCANTLSRMRAPPSGFLCPLFAPPPPPYRSVSCGWGKLVKGMEPGYTASWRPTTLGHHPANLTPVSCLSTMESLCASGGQEWPGPVNGSLHEGTTPFTRYDGGDNHSTPCASALYRYWLCAATTAPRKSRVWEFMRERSLVDELKPEVNHVTTAAKAEPPPCTSLAWFADGPDFVCWVHGQPGASVAGDPWHTLEVYGRAFTKLPKKLA

SEQ ID NO: 970456 - protein, 180 aa, Homo sapiens
PHFPAGTWPGLGPKYTLGFHQPPEFRRPLQLGGTHGSFVPYALLPRILSLMPWSPGVDPRTRSLFAAYACGGVEFYEKLLLGNLALRPSLGPRGGEDCIHPAGTSSPDTCSEIQPFTLPPPPGTLCCRCGGGCSIRAAPDGLITRTLPACADTPLPLSLEGPVGALGPIAPGPKNHWLWN

SEQ ID NO: 970457 - protein, 70 aa, Homo sapiens
PGVTVRAHPGHVGHGEAYTARASTCGVWSCPRGGPSVVWEQANPAALCPRLPPAGRLRGASSGFLSPFMP

SEQ ID NO: 970458 - protein, 107 aa, Homo sapiens
  misc_feature (107)..(107): Xaa can be any naturally occurring amino acid
MVSRNNPREAQRSLATPDVDPPDHEDTKYTVDQRFGLDFKEIELIGSGGFGPVFQRQTTRIEPGRLTLLNRVKYNNEKAGAVKYKALGQNLITVNNCSIPMACWDGX

SEQ ID NO: 970459 - protein, 78 aa, Homo sapiens
KGRTVIWRPRYNFQRHPIDNKGVPKPTEHRRWGHLVEDGKARSIQKILETIDKKHRSVETEEIPAPKPFGKSAVGPPR

SEQ ID NO: 970460 - protein, 319 aa, Homo sapiens
MANNPRVWCVSCCRPQCGRPPGWVGLCAPRLCPGAAPPRYAGAHTFPQSRGGTQGKPFCDSACLRRICAQRGLTTRGGGLFGVSVLGTGVVQRPQFALRGTPSSRGRDRLCLEGVSPLGPQNDIPGCTPAHSGGLPQRVLLCVPPTKKREMCYIYISSGGALPHGRTQGGYKRALRISMRAPALEKRPGPAYTLSLVKPPRGPLENWAHENSVSPVLLFAREMECEKVRECECGVRWPACECAPWRWRHAALVHIYPNPRVGGPLCLRPLTTPRHATEIIMVVPIFLCGPTKIYTSKGLEAYFQEGNSSPREHRLTHRS

SEQ ID NO: 970461 - protein, 134 aa, Homo sapiens
LVCVLWLRAGCCCGLVVERVAGVAFAVLPVCGRTIRSRGVGGPAFRCVPLIGSTCGCVTRWLPGDLCGLMPVLPGWAAGEWRPVVGLRDAPSAATLSMPTAVPVPWGSPSVFPWAGCTRPLACWGLLDLNRPSW

SEQ ID NO: 970462 - protein, 344 aa, Homo sapiens
VRVRIRAFPLPFLYCVKSSLTPLGFVAVLVAPQSPHPSLRADLGPRHCGALVSMVKLFIRNLPREATEQEIRSLFDQYGKVLECDIIKNYGFVHIEDKTAAEDAIRNLQHYNLHGVNMQRGSAGKNKKAKALQAKFAFGASMQSPGWQQIKGACEGKFVERDMVAAHRNVDMRGTDLLTCVTAWEAGAAGMAGGRAHPGGPLNKQQQFSKGKAKWHAGKFAAPRPGSRDWRRGDWGEPEAGLLYGWRGKEGGPGSKRGVAIDSFQGRAGRTLNRGNINEAIRSSCGTPLEPWSYGGFHCISNNAVRERSDGYYQALAVLLGPMEAVAAAAASVYNYAEQTLCQL

SEQ ID NO: 970463 - protein, 283 aa, Homo sapiens
  misc_feature (223)..(223): Xaa can be any naturally occurring amino acid
FPSGSTVGGGVLCATGGDVWCSEGVAPGVSCSRGVFAGVLCVGPQLVFSCPPGRPPLCHCCVLDAPALWGGRSPTGVAPRRRGLGVGAILVQVVLVCVRAARVFVLGGGGVCRPVRPSSQSVVMLVAGGGPFFVAQWSPPRGGATHTCLSLGAQLLCEGPLPPLFVPTGGHAPGDIGFTRPLFFWPHASRGRKTLGGGCLHRMSPLHVTTLESVRMTTLMRLXRTGLFTLWALHDPQRAKMSPHEAPLHSHILPQKGGPPRYVVSCDVFVHHSFFVSFFFTHA

SEQ ID NO: 970464 - protein, 114 aa, Homo sapiens
MRFKHTSIVARPPALYRRHHSASALGSAFRRGQYPGDTLVFSLRCIGKHLSIGTQNLHPTEKAFSQIEYLSTLWKDTLGALDTTIWDTTDGRIYPCPTGKNRNIGVCKYPRIIR

SEQ ID NO: 970465 - protein, 75 aa, Homo sapiens
YSRVLLVLLFVVVATTLCTQYTAVALCECTQVVIGLSRGRESPVFVLNPGVGHTRAPISGTPEVNSRREMPPMTF

SEQ ID NO: 970466 - protein, 117 aa, Homo sapiens
SAGRCWVFFRGLHGVVGVDVWCCCVGAERPFVRPPLASLGAVAQRLCCPPTRGPQAPICCAPLLAWGNRAAVFWVVLGRKCVGNGFSPRPVVRTALFFGGRGLLNAGVERKVFGETP

SEQ ID NO: 970467 - protein, 121 aa, Homo sapiens
MATLLLLPSGCGGDLDPRGLGGSPAPVSGPSFSRLRPSVAGTYSISSSFTRQNLALPVAPYTCAVTHISLEEPLGARTPVVPPERRTALGVIFASQLFLLCTDVPGASETASTYRTWAASG

SEQ ID NO: 970468 - protein, 104 aa, Homo sapiens
MGVLAKELIADSYSHFARHYPTGTAPPRNMGSRLCDLKGLCCQLICNFRSFKPLLDQIYPGEHPLRDSTPRPFPGNPSRILWPTKSSPKTAWQLRFTPPRGVWC

SEQ ID NO: 970469 - protein, 179 aa, Homo sapiens
VCVVGAALVCVTPSVVGMHTSLGGVVAVVLATVVREVGHTPSFVYHARLVGSLRACDLSSCSSPRLVHCFVICLLVSAVCSSTLLDLGGDPVFCPATIPGSGRHFWYRYIYAIQEFLGEHSHRMSLWWMYGLFFPRKCVVVTPLDCYSSARCCYKGIPSCEEKFEFPVVGAPHVEVEPV

SEQ ID NO: 970470 - protein, 292 aa, Homo sapiens
CCAVFVCAFVRVVPLLAVCRWATGSKGRSFSQRTFWGGHTSRHCVRSTQAPPIVWARRFLRVFWDLDMPRPRGIFTHFTCPPDPQDGIRVGPVPDVILQDHLKAAPLLRARGLAGWAPPDFVPPHALRKMGARRSRSPPVPPPLFSSFLSVVLSSPCPLSSRRRGGVPPASLFEDLPLSEMLVMALVPPSGHLFWFLTLVLFCDEGEGGHTSESPRLRLEGPLLLHAWTPTLCPTPRPCPNAPVPKFTGSLLPRPPTPAARRPPREKHQKRETPPILGTPVPLLISRSFLKK

SEQ ID NO: 970471 - protein, 211 aa, Homo sapiens
GGVGFLLFAVVNLCVGLGHIEGRVVCLLFGVLFLGAVLRELWWGECVFCVVLMPPVVIAWGRQGWLFYRLGLVLICGMSPGFECGIAAGCVFSVGAVVLCARLVLETARFYVYLLSSAWCVNVSSARWYHICVGGGVTDFIPLTLRQYSSWWGDTPLLVGGGWLLSQVERFVVSSSLSRVATSWAGSTRRLSCCPPPYCVEPVLCCDRAPK

SEQ ID NO: 970472 - protein, 186 aa, Homo sapiens
PDRSQTFGTKKVQNDCPRRIPDVSPTGPERWAGPPREADPSARRPKKGLTKEEEILNEKPIGAPNDVFPPTYSGRGGRTTPKPEKSDSKGSSTHDVSPFLEESKSQDGCGQSHGNTWTMMETANVTSRNSWPLVALVTTALPRVLLNMSEIMKAAQPFSCTETVMPENADTQGFSLVGAEAFPAVL

SEQ ID NO: 970473 - protein, 83 aa, Homo sapiens
DNLEWYVIVFRSHSSANRGKSPQQNKQVKHGCPPHSPDPYLVNSGFYQCLWAHFCTDQIHVEKCSVCRTPRYSLIVLMSRNGQ

SEQ ID NO: 970474 - protein, 229 aa, Homo sapiens
  misc_feature (30)..(30): Xaa can be any naturally occurring amino acid
WTLGISFLWEPCSWGGFPYPSDSSKPGDLXMPLPASARPCCMRIRPSLPDWRVFWSPFGPNSIHSGGMRKPSPKKGPAPWKNLNGPHPFNRAVQMNGKFPPGVHMWVFPAPVKEKAEAQARGPPEGCPPRATVSPRSPFTQETTHPVALLRMLPAPPKSFVWALAFPALCLHLCQHGGLAWGAPHVWPTPTHGHIPTTFWFEGADTGREVKGWGLENGGSPGPCPLLFS

SEQ ID NO: 970475 - protein, 100 aa, Homo sapiens
  misc_feature (6)..(6): Xaa can be any naturally occurring amino acid
IDLYVXHQQRVCSDHSAHMCRRRACVAPAWLPYVYTSSCDNPAVFAPRELLIRVLPRGFRLPLYACPPLRPRIVAPNSFGPIGGGPAHPHYCGGCNPPTW

SEQ ID NO: 970476 - protein, 109 aa, Homo sapiens
MPLVHTPGCSLLLTHTVCFLVLYRLSSANCSRGPSTTVIARWVPLRGQVLVLILLVAHILSYALPRPTLRVDRKCTTLFCLKHVLGFAGYPANLSISGLLQLGTVFTHI

SEQ ID NO: 970477 - protein, 72 aa, Homo sapiens
MTTLDKKQQPERYTPRDRTTGRGRPKEQWRVEGSSPTPPRTNKGGFSAKNHKRRSGCTSSLRERPTPHTRQH

SEQ ID NO: 970478 - protein, 113 aa, Homo sapiens
VLLSLVFLTAVVSQVSLVCLHSCIYGRVVLLSLWVVVGPLFTELCVSLIFVPGDFPRVMLVLHCGRAKPLRWLRALFTRQGPVPSIFIMWSSSGCSARPLLGNYPPGVYSWLL

SEQ ID NO: 970479 - protein, 178 aa, Homo sapiens
MRQTDTSETAEDEERKKREGDQDETEKEEKQPHNQATPRKRGNRPAGRERTPGTKKRTERRKELEKTNARKARRQRTDGTQRTEPTSNPNKRSSRKSKNSPGRQRGREPRRGRHRERAKRAEGESTEKPRSRTVSGRAERKAGTYTEQERTATGPGQQQEDEETRRRRTQNERRDKQN

SEQ ID NO: 970480 - protein, 90 aa, Homo sapiens
IWQTTYMMLVPDKNQDILREKVNEEDVYRKVIGYNGDSSSMKVICVWLELIRFETSPSSIIYQLKTLIKIVKKTLQGLIDCRVCRKEALN

SEQ ID NO: 970481 - protein, 134 aa, Homo sapiens
  misc_feature (64)..(64): Xaa can be any naturally occurring amino acid
MACHGNRRHASRAEHDGPSNSLDTLGGQTPSARCSQHRLAPTCTSMPMGTQHAHDAPIPQNNKXTTNATNHKTKETNTPGSERDPQQNRTTTHNGQEARQGTKSKKQQTDSTTNEEQDEQGGRTTKVQRTKDQT

SEQ ID NO: 970482 - protein, 268 aa, Homo sapiens
YLTEGDQNRESTVVIIPDKRIVTLNDKVVSSSRHRAAERASQASDGAYGARLPEDARGATEVQPEAPGNRATAGELETWEADEENSETQEEDDHLRDIKEDGTNAKAGRAAVRCHWRIETVLCRLRLPMLREMSSGWRGLNIRTVCVPPGIPTKTHTCQATDGNMPDDTGRQPQGHGGNRLKPSSALERGAPQESQAANSWSAKHSQRATTHSIQGYCKEERTLTETDCPPESTTTGRLQAHTDRRARGTPPRHKVPQGDPAPSARAT

SEQ ID NO: 970483 - protein, 185 aa, Homo sapiens
  misc_feature (1)..(1): Xaa can be any naturally occurring amino acid
XPFILYLLQRTDKITSLLVQTLPCQSPARFNPKVKRMCPKQNTPNRPSPIGFPRTSYPRALSPLRCPTPQMCLPPIAKKLGRTPPYSQTFFIYRPQNPAGVSPRVPHHSYLCPISGGPNTPIRGVSTKAVGTTDASSPGWASPRCPPTVKSNGVLPPGRRESFSTKSGALDLSPFQYRPLGVSDH

SEQ ID NO: 970484 - protein, 259 aa, Homo sapiens
IGEVLHSEKAMFSSDAPKIVTAQWRASLARVQSPGISTVLSLGSLENATSGTVWRPPASSGSMTSFTRQLQGHIGTRLRRLGQATASSITSSLRSPGIPSTPGTHRFSTRETHSRKFPGASGQRAATSCAQHTHSFPRSAAKAHRYRFLLSIRDTKQAQQHPHRPLKRPNSDPAQRTGPGQPTNHTMYHAPTNHARHSHQRGKRDPGTHRSPGNPGTHMGRAHTRGQASAHPQTYPRAFPRTKRRSHTHRMGDGPHPYG

SEQ ID NO: 970485 - protein, 145 aa, Homo sapiens
MIPPWWTKEGQRSGIQPRGNEESLCDVFDTATTVPERCDYCVAMSQNGARVTPPMTSYQIYKWKLTSWESQKKGKSCPKYHALEIGFTGTSPREPTTPMRDKELISATAYKEHHDVIPRETTSLAQGEKVSCTPSFLRRIKGEIC

SEQ ID NO: 970486 - protein, 216 aa, Homo sapiens
LWWMGGRAGVSLVCLSLLYLLSSVLVAAVSMWSVSLCETSCVVCSTRAVFVVVVDACVLVVFHHCRAWGRSAFFLHGFLLCATVSLRCCGFLPPPAGCFSFLGESLSSVRSPPLLLEGVSPHLCLLGVVRSGYGACVPRKKVLVCCFLFASVCEDSRCIISVNGGKMSPVVGMTVPRAPSPWDHKKEGEERTLPEDRGFTNRIRRNRIVDSGPRPW

SEQ ID NO: 970487 - protein, 269 aa, Homo sapiens
PSTECAWCCHGQQSLRSASWPSLGRPLPPSRPNLWYRPVGGPPPAKTGVLFLVGPAPALVCAAPAPIPVPPCVPDDTSGLCSFAGPHVGRHIALLCVLLRGSLFGDEAESSTNSHACLRSPRWSSLSLAPRQCVVCRNLVSSQISFHFASSCLSSASRYLCHSRHVSLPLVTGGAFCVSPRTCVPTGSSLTSSGYLIAPCVLVHFLLGRVIKEKAESHFIVFPQPSSAAGPCEQKAPEAALPLHVPHGVCVCPRVRTQDKALFVPSWNH

SEQ ID NO: 970488 - protein, 88 aa, Homo sapiens
SLSMSLLAQPVVCVVLLPLFSVIGSVVVLTGMYAGGLIDKTKLFVGRRRQYCAIHVVVGHEEHTIVEQRASKQQLLAGALPNELGCVL

SEQ ID NO: 970489 - protein, 133 aa, Homo sapiens
MFSEEDSAFACTSIYQAPSLLLGYRPNGTTHLNYTSRASPMATTARQRQLRAGTHKGRHLGNTGFPAHQATNTNFLRAPGGTPKTGPLRFSNDPIATLEYPWEEQRKQETQTFLNKRQKPGKPWGEQALGGSG

SEQ ID NO: 970490 - protein, 97 aa, Homo sapiens
RLRHVCGVLFFLIVVLSLLLHNCALFLSAALVLLSRSATLFFHALAFPLVGLPRPVPVLFGPLLSTFPCYRLEVFPDLRILPLSYITGSARVSRFED

SEQ ID NO: 970491 - protein, 201 aa, Homo sapiens
ASDNSFGTAMSFLSCSIQFVVLVGLLSIIFTTLCCSISIVRSLSHSSSSSGCIFCKRVPFGHSTGTLSKTMHAHQFLTLLFPKVGVLIHVLILGRLPSKHKCSLGSTIKSRLAPLSVAPCSTSSSNNLQGGTQQFRGHPNFVQARGPNFPTNRSNQLGQIHRFVLTTTEPAWRPHQGFSGNNSVQVEGGPIQPSVNRSKGL

SEQ ID NO: 970492 - protein, 167 aa, Homo sapiens
MDGALRGVSRQPKARTPGEPVTLAALFYGRICACVAESLTAVSVCEHGKGYLRGLRGVGACPPNLHESQNPPGHGPVLPTYPCIPSLDPRDIHGLNNGDTGSGCRSSHPTLSHFTHVTVLGNKVFTFPSLGFLICEAKRHPQQPVSLVYIADMEVLQPEVLHKHQAT

SEQ ID NO: 970493 - protein, 216 aa, Homo sapiens
  misc_feature (78)..(78): Xaa can be any naturally occurring amino acid
QCGDPQYGAHGTWTGWEYHVAKGRPRLDLFRMGLLEPRREHWAFEGLSPSRLALRGPGVYLGIAGCLALYDDPLCRGXHQGLLVWRPPTALLEARGTDNLLKCEGDSEEVGRAIPRRFMGKILRTQGEDFPRIHEMTPVFPRLDLRRTPRLVDREEGGGSHEERFNHLLDCPLPRKKGGRKNKKEARIKSARSREFVPRGLCGGIGEEEKINLAGS

SEQ ID NO: 970494 - protein, 126 aa, Homo sapiens
MCARTGKPKWEERTMKAFGTGWHNNLAQARRNNATRRKTNDTTPKRSPDHSPLRTTGSEPTTHHAERPRRATAAEMGPEKVHTSPQKRNTGKQHSGARQRPRRNQKRKHPQQRSKTQEQDTRGRGH

SEQ ID NO: 970495 - protein, 101 aa, Homo sapiens
FFGPPGVAPNSRGLTPGSPLGPPNRVVPPARPPLLRPPKMGKEPSVGSPGKLSPNSQGNKVAPLGGKRKLAPQKKEEKGGSIDTMPPPRRVTTRTCPGSAP

SEQ ID NO: 970496 - protein, 80 aa, Homo sapiens
SQITYGDGCGVWITRSGWIEIMLANSVKAPSLLGIRNNYVSVVYEAVECSDNPHDITAGALMDTENGMNPPVDGRRLDKW

SEQ ID NO: 970497 - protein, 154 aa, Homo sapiens
MVTHKSGNGRMRILYQEDLPWGQDDLLLDRWKILMDFRGEMAFLLACLVPSHCLTVRGLDHGIDCNREWVDRHQSRATIQPSDGGSSHDPKYEAAHHYPRTKPSPHTGRRTQEPSSAAHKKVSRLELPDNAVTQGGFTQTGDQRAHTRRSTGNR

SEQ ID NO: 970498 - protein, 126 aa, Homo sapiens
  misc_feature (1)..(1): Xaa can be any naturally occurring amino acid
XGGCPRRVSVVLSYVRCLLLVFMLGLVVSCLYVVVLLFRFSVIVVSDAMHLCRALLADSYDRVVCEVNPPPPRLFVFCGPTRGCLFLMVLYYSPCGRQFASPLSWPAWRKRGGSLPIGVLVLFLPP

SEQ ID NO: 970499 - protein, 320 aa, Homo sapiens
TCRLSAASTTQPGPTLGPTPALYLTQLHTQSSLGCWLRVCPVTPMTTQRRPDAHGSNSALQHRGRPTASARRRPNDSATTCHLSSPWRCNSLRQHLRHRPHRTHNKTHRVRERENTQRDTPHRRGARLTPYPQYRHTWRTNRAHSYLVRTTHVHTCEHTVTTHYQTSTTHATAQHTNVVAQPWPRRNLTTHNTHPADANRQERKTSEETTLTSNQDAHNNPSTQHNLRQHTHPSSSYANELVANAGQTTTTRQPRNDRQTVASERPHGGAHNKQPTTPQIRDAEQHPAARQESVRRANDTHRYKQGTQIGQAKRAVGPEH

SEQ ID NO: 970500 - protein, 164 aa, Homo sapiens
  misc_feature (1)..(1): Xaa can be any naturally occurring amino acid
XAPSLLPTQLVGTTTNVVFSFCSHKSLAPTPSRIRVCPTLLDHAGGACSPLRCLAKQWFAPTRAVGSSHGTDTMVGRAYRSTPACAWLCFKDWRIFISRASSGASLASAQTPTVCLSSRLSLGGPRVFLADVRSLWPPSVFVSTDPPRPHIQVADPSPAPTMYP

SEQ ID NO: 970501 - protein, 363 aa, Homo sapiens
CARAWRSLFPYERLSLFHRCVLFSRACSFLFGLLSRCSKTQVVPVRSPGISGATHSPSPLLLVTPHPPWDPPGLAPPLAGVKGGMEKVKFFALRPPLPFCACAIGTCWPWGFGAHTLSLSPDHKSQGLTPGLLWFAHWVIIPHLGGLPLPCVAFLGFLRGPPEEKLIVCMSHPLPRLFCLLITCWCEVCPHAHLSRANVVFDEEYKAEMFTKVLYITTTFRATPRMGGILFPRLTTPPPLGFEILGPTELHGTIFKVLVGALLNYHHELGGENALSTSSREPAGSPRLLAAHLNVNCWALGIKFPPQKANPHKEGCVGEEIVGLAEEKNVLVVGCTHALGIAFVEVLGIVFACCLVKSNHESG

SEQ ID NO: 970502 - protein, 134 aa, Homo sapiens
LAYSSLFITTVSPDPGVPLVCRTPVTFGGPPKVFGTTDTWGCSQSGHGRVPLRCKAGPGSNLLPVEGNIICAGGVNTNAAFRSPVGPPVHRGSQKRGCAAPGKRQKGGAPPAMKAFKGPNHVMPPLMRRPQSHA

SEQ ID NO: 970503 - protein, 335 aa, Homo sapiens
VRRDSGYGRAVFVCVSLICRVLMAVLVVVGLRSEVMVQSARWRHPSFWSSAKRARASLRGIMSGCRWWCFLPDCVSFVSVVPVRLFVRFSHRLVVPPVGFVSRESGWADVGRQLLCGGGLSGGRRRMLLAFSCYFPRRCFPPHTVVVCVPPPLFGSSVGGAAFFYRRVSMDGVWFSATTGVLGLDERCDDLRGHRGGHSISSGDVFVSLVGSCFCLAVVGGRTPVVPRVFVLFLSPRGVCRMHLPAQHFFMCAPPPPLGSPGVATPPLALVYWWFTEFSGTPPCENRFCPPLCGTFARPSRSSGGPKAHRFLWLPRCFLSFVSHPPAPPSFFWWG

SEQ ID NO: 970504 - protein, 249 aa, Homo sapiens
MCFLLLALSRTFLFVSGVLKFQPILSLKSPAFHFSSHSLPGTPSSFQSASITCLSPGAHVGKPQPDVLTHPSHAATQINTQHHVSATDVGAHLLIQLPAAALHPSIIANPGVPLLAASGHTPPTLYNPVTPALTHSSGTHSYATPLPFPRTQFGSRTTLVNRTPLVGLAPLGAQIMLYIRNWSTTSHASSPGPFIHYRLLKVTHKPPLLPLARNRTDDSPEVPSRLSATLLLPPHQSTQCTAPRPIGKH

SEQ ID NO: 970505 - protein, 135 aa, Homo sapiens
MDAGRIPAASWKRFPRPFWITGYALRTVGTVLVNPCENAVFRLHPDINVATGTTLLPLVPTEELPPWSLFPSVSRPPRLCAESKDWKKVEGKVFPLLWAPPGESPRSPGFASTDLFCDPDELASPVYLAVPRALF

SEQ ID NO: 970506 - protein, 306 aa, Homo sapiens
SSGADYCIIKYSFEKNEMKNLTELSDGKEAHAKHHGQHSSKQACNLASRSTAYKSASTIPHSKGQQQQHKAVICSTHGTSSTWDMMPPPFMWSSNLASTATNGKPPDFTSLNRLHVVTLPSRRHYSVRGTIPIKILLAQIGITLSPKSTQSCTHLPELSGTPTTQPHNVFAGRLWHTDLAMDEPSLYNSLSMAMADSKQQHAWEYKVEQVLLHFSARPLPTAIPSQSFMALTPRTLTGRTTSPVSDSASPCTTSSWRGTSPETRAVPRYRQITPYSESSPLISAPRQSAKPTTQRRLRYKIRPHRR

SEQ ID NO: 970507 - protein, 178 aa, Homo sapiens
MPVAGESIWLTFKIPKQSSMKSDFNTICPKSSCTEYVVQMWCIGTPTSQRDPLHANNKQTNNQHTIIRVPPNLPNSVLTTYPSAPGPQGQTGTPALKLAQAATGHTPRAEQLQKTHPRPAHSPQTSKKQNPTRIHSEPRHTNPQALHPETTDARKQSHPPPPSNTRRNHRTDHTRRTT

SEQ ID NO: 970508 - protein, 247 aa, Homo sapiens
  misc_feature (145)..(145): Xaa can be any naturally occurring amino acid
  misc_feature (178)..(178): Xaa can be any naturally occurring amino acid
MTYRAPGPGCPAHIGSCLTTQDKDPEVVFIGTPLVPTQAPHARFWPNSSLLCKHLTLALVVTAHSMYFGGCENWGTGTHPAHRFWWSWVGPHNPGHPAEPVTGGNQGQLGQLVNELTTPHGPGFGAGPASAEGPTIPNPHFGKKXPTTVKRSCVTGRHTGWHTPFGPTLPKNADPSAXVQHSQMAPTSRHSLTLYDYLHLRPPGLHTLFAGLCNSLLLRSAGPRTTGQRCSPAGARTLSILLPSHNI

SEQ ID NO: 970509 - protein, 154 aa, Homo sapiens
LCYCHSSFCLGSWLWSCVMSFSDSSSVHIVLGCVLSFRPAVYPRVSLCFAGYVFVCLLCSLSLCVFSPYVAPLLFFSPACSLGSPGFWATCFMCHTNAFPLRAPACPLGIFGGPSSTVDPSGSLCKCVWLPTCTPSELDYLGHAYRGNFLRVFN

SEQ ID NO: 970510 - protein, 231 aa, Homo sapiens
MQIIQALALLQFILGLYCTLLRSLRVLRVSLHPFPTAIYGSTFCVATGFHGLHRHYWLKFPHYLLHPQLIFHVYSPNYHFGFEAAPDTGISVDVVLLFLYVSILLMRVLKKKKTANDIHRHIFSAEEESLSGKTICEERTYSVGEPQEEPKSRKHAKRVLPTAGRYENTPPDSGTKGMRIHQPDYEHPPGGKPCCDANDSPQGAIESNHNVGFNHTVGEQANLLTNIRPAR

SEQ ID NO: 970511 - protein, 67 aa, Homo sapiens
KQHDPEKLWVNNEIKAEINKFSDNNENKGTTYQNLWGTDKAVLRGKFIALNAQIKKSDLKLTTYVHD

SEQ ID NO: 970512 - protein, 124 aa, Homo sapiens
MGLDVRFPHSRERDPRCIDYTIRLRHTWLLAPTAGVAPQNTGCCSGHSQGVKSHCLALGSPTLGERIGASKRAPSPRATRGGTLLRTPRMRYLPTHPPLSRNTKGWESHEAALPHAPRHVPTTH

SEQ ID NO: 970513 - protein, 402 aa, Homo sapiens
GVCVGVRCELWFVLVVWLVVAWLAVCFCWFGVGCVVRLCVVCVCLSVFVAVCLRQYVFVLLVYRVCFGVVVSSGAARCGVAGVCGLVVVGVLVWSVAMCGRCFCLRLVTVVRGRGVLCWVVRVLIAVSVVFGVSGVVCGGGEVGSVCVVGWVGCGVVGGWWFRGGGFVVGLCVFVCGWLGGGLLLCEWAVVFALLGWSGVVGGVVGGGGAGWGGSLCVCWWSVCRGVCGVGGVGEGRGGGVGCLVVFVWSLAVGGVFCRWAWCVCVVCGVVGCGGRALGLVRLLVARAVAAASCFRLASVGGGVFVCVVVVCWSGVGARGLLWVSCFVLVVCGGVVGVFVLVWRRVVCVCVVCCCFGVLGLARRALRGGVWGGGGLVLGGWCVFCVLFCAPAGGGVGSVLGG

SEQ ID NO: 970514 - protein, 270 aa, Homo sapiens
MHVGVVSPRSVEKAGGPIYYDRGGGRHPKEGYYILCRRHAPGVGCEAAPANMWCSYHSGVVCTTSDRDGFVVTTRSPSPEMFFSWPKCALSCDDSHTPIVGFLTHTPRGRTKGCQSPQWTKDLFGVFPVGRGKPFIVVPPPVSQCAIQPGPPQKTFVVNGAPPPGGILLGRLYGPPRGFLTRDNCNGPWRFLILWAQRVPKGLVVGPKGFNSPLEALVPAERCFHPGTHGPLPAGAPHTGPQRVCPHWVGRHSRPRPLSIEKTRSCAHMM

SEQ ID NO: 970515 - protein, 332 aa, Homo sapiens
PCTERRAVPAHLLLRQPPGAPTHATTGQPLHPHFSQPLCLTACLSAMRRADTDTRRCTALLVPGFPLTPQPRGSLAPALPSCPPGHVPPTAAPPTHTHTLPAPHHPPPLLHPPTPPLPPHDPPHSPHSTHPHTHPPTHATPTYTRLLTAHPPSPHPTPHPSPTPTPTHNPTPLPHSPPTPPPPHTTPNSPTPHHHSPPTTNLHHTTSNTTAPHTAYPTPTQPPHYPTTSPPTTTTNPITTIHHPTHHPTTHYQPYTPPPSHLTTPPTPHHTHPPHPPTPPTQQPPPHPTPPNHTPPHATQNPLTPHPTHPPPPPPPPHPTPPTHTPHNPPPH

SEQ ID NO: 970516 - protein, 126 aa, Homo sapiens
CRRCVCSERGCVGRGSRRLLDAVGVSGDREALVVTVVRWGALSWWPLAVLCLLALLNCPAVVRSPGVMVRRRVCAGRAAGSVRWFVPAFWCAAPLGETLVGCGSPSCIVLTYMFCVAGAVWGARRV

SEQ ID NO: 970517 - protein, 349 aa, Homo sapiens
SHNTFSALSGMPRRYSDYPDCIHHMKHPTHPVRLISLSLTAVTINYIFTDSCTTPFALRHAQTAPYIRYKQPLPYTPLLQLTYSCALPPTHLHHHHSRTATPAPTLQHSSTNTHSDSELDTTHTSLAPQPPQPTHWAPPTAPFPRNTTPTTTPHHHHNPHNPPPPPPPHPPHHPPHPHHTHPMTLPLPTTHPPPLYCPHTTPPQRNPPPPPTPPPLHIPTLHPTHPLPPPTPHPFHPTHHSTTTQLPNNTTTTHLSTPTAPTPPTPHSNSPPHTLSTPPPPPPPPPPPPPPPPRPHPPPRRHSPPPPLRPTPPPNTPPPPPNPPPLPPSPHPTPPPPHTPTPPTHPTPP

SEQ ID NO: 970518 - protein, 96 aa, Homo sapiens
PEWASPHKKGGEKGKRALLCPSTPKVCEHPEEYHPSRPFHQPPYPWEWGFQESVPPLGHIQREFWKFAHVRENGNIPDSAAIDHPGVQPRLSGPKE

SEQ ID NO: 970519 - protein, 159 aa, Homo sapiens
MTGIQQMNDEKVHAIVDRSPVGPVTGPAKKLKPVIVPLTTDTHWAGTWMRYQGNSSLSRVTADKRDGTQELIGTDGATREGPADIRIKTQTTLCRRTITTTPKGENSTQPASLEGGEARIGAPGTQTKHGRTIDGSRKEGHADTATTKPGLTYHTRNPG

SEQ ID NO: 970520 - protein, 157 aa, Homo sapiens
MVRNFLLGKPQPPLPLRGDKQSPQSWSFPRWTPPPWGGRSCLPPGPPDWATPLGPAEGPQVGPREFTEPGTSWGTTISMFVYPCVARSDVVTLLSHEPILSYVVTAENTTFQIAPVIAAGPFCKEAPLYEAGEQPRPRWNNDELATIIITRFCCGTI

SEQ ID NO: 970521 - protein, 353 aa, Homo sapiens
MVLALYFPPPFPALYLPLALHELTSTLAHLMLAMQQGSPIYIPTKINFCKVCQGSTPPGVPHTRTTTSHTDYSAPQHHSWLAHPREPAALGGTQPPARQPPPLPAARPCRTPRAPTPPGNPWDPLHQGPQPSPSCKYLKRIGATKRSEPIGRHPIHRTPAPCPGRLYAHNCDSTPKRATPNCANIPWLVHTPAHLTTSGRRQRTAKTNTRRGHGHPLPNLTGPRTRTSAPAPCPHTHNAPPPPADPTYRTHTRGKTFNARKLATSPTQNTVGPPVTQHPTICRGIDGTHTKDPHGSRAHDKAMDVEHHTITHPALRTHLAQRLHLHARHARNTIRPHTRPNPRRLTTTHDHDT

SEQ ID NO: 970522 - protein, 322 aa, Homo sapiens
MSWSTSHSLDSCTCFSFTTQATIGTIQAIHQMHYSHHIVLQVCNSLHRGASLRYPQLIRALLPGTTQQSLRRNSSHILPYLPQLNSSHLAPPPSASNGQHLGIVLTFSAHIVSIPLGTAWFPGRCQGSVTRFNPVVPFDSSPGIIKRSNIKPGNGPRGPIHSLISRSGVRRIPRDDKGPQGQKQQLPQNPGNRTPPAVCRSPLPVEVTGTPYRASNRHLTTTSSTRCGNTRRRQAHSAPLTVTFFSCETTALLLRITPHKSRAHTHPIATYCSEISMETRTVAYDSIPPSTRTRLLCCHFMICAPCVNEPATRLDTVPAIDP

SEQ ID NO: 970523 - protein, 144 aa, Homo sapiens
VRSYQYADLPPDHTGETYQPFVIIALIIISAVICVARSRCMSLCLYIVSYTNVIYYYDLRRIIEIESVCAMLPAIILVLIALPSLRILYITDEVNDPSLTSNQLAPMVLTYEYTDYGGLIFNSYILPPLFLEPGDCDSLTLTIE

SEQ ID NO: 970524 - protein, 258 aa, Homo sapiens
GVCSHLCVCAAWVFLGVPRPWLLVLVFPLGALPIVRVLGSLLRVYSPRGVMSGATAQFFVSSFSLLAYHGVSPPRLCFALSGESHAGGQAGAEDSPLGGRCGSTLTLGYVVNSARGFGEESPPHCGGLCEIVRYRRASPQDDLSGRSLLAGMCVAPPSWAFRITQWSQFSLGPVFCSNMALLIPRPFYSPPEFPSGIKPVTSSPRYRRVTTARYSMYDSSLLFRPTRIMPGISLRLSRHGPAPYLHAITRTDDTVCKT

SEQ ID NO: 970525 - protein, 144 aa, Homo sapiens
EHRADSYAGVTVIDETIMSLQGTFSSIILSPCSKPAFEPSHYVHSALQHISATISHSVACHFHSLQPASITHPSSLISSVPSRITCTALISLRVSTATSCSAPISLLRHSQPSHASHRAHFFRSHDTTLGNFARAPLTFLVTSS

SEQ ID NO: 970526 - protein, 39 aa, Homo sapiens
MPAEPDGTTATRRTPRAATRTPGHRPQNRDNKQTTHHTR

SEQ ID NO: 970527 - protein, 117 aa, Homo sapiens
  misc_feature (37)..(37): Xaa can be any naturally occurring amino acid
VLVSSGTKPGSSDTLEISEGRFFHKRITELDPSQVRXLSDEVTHFNIHSTRLPVNSMRFCITQYTNETLLLRDTVLGSSTDSQPEEVRNDEAYGSIQTLPTPVPMEKAFRITGINIR

SEQ ID NO: 970528 - protein, 242 aa, Homo sapiens
PDNVCIFFIFIYLFGGRKLRDEGNREGGGGEGGENWGGHRTSPGDTGACGAAVTTRNNELTQEQDGENKKRAPGNTTTDREKNERITGGATHGGANDTRERRTRRRGANTPRRGATQRAGNRTDSERPTTKRGRQEETGAGRDDTHQGNGRRRRKHTAEPHTRGNKQQRREEQEREKSREKRKPEYEKHNKGETWGEEKKAEGAKNTRQSRQKTRANANRGEKHKEGKHTKDPQKKKKNKNK

SEQ ID NO: 970529 - protein, 192 aa, Homo sapiens
DTEKELSKEKIQEALISAISRTEGNIVQQLVGDGPPRANDTRQEASTYPPAKSLKNERSERMQRLLNNVVRKRSITNTHLRNTRTADRQRDISIGHDQHTSATTALHRNKQQLTPSRAHNSRQTSPNYRGNNTAKHNYTVPGQTQRVYNAPQPTPKLKQTQAQQQRTGCTARACWETARAQLGQQAHHTEHW

SEQ ID NO: 970530 - protein, 113 aa, Homo sapiens
CYVVEQGINFVYSVLVCPESRHALPPAVVKSSRGVNIIRKVERNVSKRLKKSGNAQNTYCFLQGYKTLGGRRPTNSLRETGASTALCFGSPSRGVTTPLFDREIKHIVRCSAS

SEQ ID NO: 970531 - protein, 131 aa, Homo sapiens
MPFMATNSLNKNSTDDICVRIKTSPNFTTYHQHRDPALTTPYDPVACFLNPARRGIYGLIPRPPDYSTIHTGVKQTFAFTLLFNGWSPRTSTSSFSRYDLCIPHKSLRTASSSAITASTTNVTHRSISEHA

SEQ ID NO: 970532 - protein, 271 aa, Homo sapiens
GATALQPGRQSKTQSQKKKKLLARHGDGACTPSYCGRPDGMRNLAEPRRLAVASSVRDSVPLCIPAWVVDHARRNSGPHKQQRWRGGEHTCGSHVSCRPEAGGLCLSTGVLDMPAAPSDHVPPWYFTRMGLDKECRADQAFPPQTPTLHENTNTPKLVADNRHQPKNDQNTHNPMCARASHPKTKKHTRGPNESHQPGPRAIQQNSARELTPTQPTSAAWKPPRARNTTTKALSSTTVRPTKQRNGPHHKSTTGDTEQDTEEARDTHRTNG

SEQ ID NO: 970533 - protein, 117 aa, Homo sapiens
NCTGEWPFYSTFSVILYLVKMDEKSCINALYGNFGSSANYFYPFNKATPIWSKHIYLHAWHIGRTLNLWAFGIMVQTKNTHTKKTPKTPSCVSPQNEGWSLWFHPGFPTLYCECVHY

SEQ ID NO: 970534 - protein, 197 aa, Homo sapiens
MATPRPWANKETKNSGPQKQNDKTQRKQTQPWGGGHRPPREKRPQQPQRQGKRAGHPKEHQKNAAHTRPKGNTRAQQARRSLQPQRNTAGEKRTRFEHQTNCGSSEGNRGSKHTDAHSTSNKKSPRARTNKEEKNSHQNTKHKPARPTKTQDQIATTTKRTETAEKQNTTTREKRHDTATITTKKTHQHHKTKNNNY

SEQ ID NO: 970535 - protein, 123 aa, Homo sapiens
VLYVCVLLVDGCLLYVVLCSVCRLRFYECVREFCWRQDFGPRGGPLRLSGYPPVFYASLLGVLPFWLGVPSSGRTPPQFFVRHYIEVPFPVPAISRVFSPLPRGVNYGQSNVNVAISGTEPAI

SEQ ID NO: 970536 - protein, 115 aa, Homo sapiens
MYQLMHNLRPWDRLLQQWRKGTLHLLLTDGFLALLKHRMLTTSDAFCTLYQGLENLLHKKQSPIYTMKFSYLCGPTCGHSSHCLTLTSSSELSAYTLTTPSNDQKIDRPGIGYIH

SEQ ID NO: 970537 - protein, 115 aa, Homo sapiens
HQGVNTCGPLISSSLRGGCLLPPRVFPRPSLGDICWPLGGLTPGCEYVQHTAGLFGTPPSERRLVQMLMDNPQQGVPTPPNVATEIAGGLYKRRMPMGGLVSLVRPSTPKRTRRA

SEQ ID NO: 970538 - protein, 435 aa, Homo sapiens
MSTGYRRLWLARDYSILNLTVTSYLSETCISTLTGLAVCPQIPLCQLDNFHYFRATSSVLLNTYGAPYIHMLINALFTTSTPPTFITLTPPHNPLSIQSPGRLPSRAHRGLQTEPTLMRPSPHPHWRTCIKQTFTLHSHTTPAHTQPFGSTLHLTRSPQGGRLHTLPMPRGKTTHMLCPTTRMRHDAYPLVHQRFPTMRGPYTHSLSTIVSGATLFAPPRHRATIHPYPTSSTYWTLLRTLATAYPLWPRALDTAHIGHKHSTARPPLVNTTKPVSLHLLRSIHNYTDKTHQMHSYRTNHTWSSIQPGHKCPTANTHAPLRRPPSPNATTITPAQSTTQHQHSTTHQGKTNNVRQKHHHHRTHTTPRTRHTNQPQHTTPTPHRQQDHPTTTLAPARGTQNTHYTATYTRTNTPTHDPSSHPQQHNNHRPTQHKQQ

SEQ ID NO: 970539 - protein, 347 aa, Homo sapiens
WCLLLIHHSSSCWYILSQYSVCTLLCCKAQTAGKMLTTIIEMYTHNCSIFNNQYNMALALLLYLWFFSLTNFVFSCWAGSGVLVLLTRARSRARQASPVTSCSKPSKIALYLSSLQCATSQHISLSRALAPQFSSHLARTHLPVHHSHKSSQTSTNWANAKPDSAGILGQSYGPTENKLSFKQLVLGIYLILARRAVTHLSTIIFGTKSLCNLDLVRRAPANEVLHGHFQRFIEHRTNSFKLTIPLTLCNKQHPADGQSDERRQLELFGLGSIKASSQVKPPTGMRHTEHPTDRKPEKQQGKTETERNTAAAGATKVNHHRVRELEELTPKQETTPNCHGAQARADH

SEQ ID NO: 970540 - protein, 72 aa, Homo sapiens
FVYKEEHPFEKRRSEGEKILKEIPGPGAGAGVETAPTSSDRRPGQHEIPGRLLISQLAQFYFLIRKRIHLRS

SEQ ID NO: 970541 - protein, 211 aa, Homo sapiens
  misc_feature (170)..(170): Xaa can be any naturally occurring amino acid
  misc_feature (177)..(178): Xaa can be any naturally occurring amino acid
QVDKVNFHMFDVAVAQRDATHASVIPVLQTHVEVPIHTYVAGPASQLTTPASIPSAGTKPSTQTQPCQAALLQRSFQADHLATHTSTAACSQPILLIDTMCPSTPEATGIWHTTSSKQLTCTLGQTSATHLDGTSHIAHDTYVASGLTQHEHTHGAQWHNIRADDHRARXAARQTLXXVRPQVSSTSCRHGTGKTITTLRDRGRNYTRDDP

SEQ ID NO: 970542 - protein, 185 aa, Homo sapiens
SELSGCVVDVSEHPVALASHGLTKLHCKQPALPGDSKAQPFFPTYFCTKSMGAWHTHTQTKAHSRANIVTMPASYLAAPSTIPNQQQPAVHQATIAISHCDSQALGLPMGLNMGATKHCGANLFPPHWAIFSSFGNQQMAIGGPTRQPTTIGDTRQPTRGNQGLATSPSTHIFQPGKSRISRTAL

SEQ ID NO: 970543 - protein, 186 aa, Homo sapiens
MPHELKPGATERGPAPNNIKEYEIPSQATPVKYLTSLVKYLHQRIGIVLALQLAASSHLLFQFQISAQHPTGLRYSQDLATNNGSTALTSHTTLTTLHLVRHTFNTPRTHGLHIHYDTNLQMPKGTSNFSNGYTSFTHHFTHGSSHSGGPGLHHTTINKLSGLSHFHHRQRPGLVYTTNLKTYRNV

SEQ ID NO: 970544 - protein, 203 aa, Homo sapiens
IPATFQQAAGGTASTQGSGSIKHHPGLNHGATPQSLGGVAAATHVGPPQRSRPKARRLQAPKGSQHATGCTPPVVDRVAARPIGAQVCKAARHAIWAFGPNLRITFTPKAPMGRPENHKGNGNAKRGTNFHPGGPKERAAPRPAARKHATRSTHNASRQHSEATPHDPNTHQPRLVRRDEAKAPAADSTRLRAGTPANAQERK

SEQ ID NO: 970545 - protein, 236 aa, Homo sapiens
SVLHGLPNGYHVRVNRTYVCCGLLYRRRQSPFWVKAPCAVIPLLELVLQTFFSVWDLLLPRSTVSGHSERLLRKTRARILRAFFPAAPCDRSSVRATYTSCTRWSRKTAMDQHGGVGCTRHPGSSGAAKLGWLVQKENRHRAWEGRKSFYAANCCTHAFASQYSPAGGRDVSFSNSSHQDACLVLTPLPQKSGGKKPAVRTTIRPPKRRPNTSRGNQNSSSNCCQIINLNAGYLRG

SEQ ID NO: 970546 - protein, 95 aa, Homo sapiens
MYSRATHNSCSSSLAKKIISDASSLPRGPQEQQPCPAGRALTLGRTNQVGVVVTPCKCCLPGIVNNIVVSCIGIGSIRKQPGGGVNSNQKSLQKD

SEQ ID NO: 970547 - protein, 202 aa, Homo sapiens
MRHRWRNDSVIGSFAVALLSRVIYCPCDNKMFLPQGVPVRCLWGLVTLLPLLLAVVRLRPSTNSFILCPHMGVSLTPLSGLVYIASEVDLSLGEMIRSARGRMLSRRPLFSLSSRLCGDEIGGGRDYIWRGGKLFADRPWGATFYVAPPLREAMYLQTPTAVVCIGLRRRLSNIGTGGLLKRECTKRCPTAGARELDSFARG

SEQ ID NO: 970548 - protein, 120 aa, Homo sapiens
RGRKGYLETGVLRSVLCHIDVASCCLQNVVFTVCLAILLLVAFTYTVGGSRRRLIFAPYHVGFFGETNFYPPPGVSPPARPHVVAAASAQFPGVSSNLVNHPGCFPSPRALLVIQGAGGT

SEQ ID NO: 970549 - protein, 319 aa, Homo sapiens
  misc_feature (2)..(2): Xaa can be any naturally occurring amino acid
TXIDKKKTDRDRAKATGNTQVCVARTVKLHDVHNMEKSLGETYYIASSRVSAQCCVLRNLGVNIQGLCPSYVGAWYPPRPGDVPSDQGTQHAGTRPISPLGAQVFTRRSATRICSPYKLDKTALAVLAGPTRVVRNHLPRKRKKPSARVLAPRFHMRHIKFLASASDGFSCRWPAPRWWNQHGVETRHGELPVNTVGPPPAAPAHGVPPESPCNSLGARHTHRRKPPTRWEAPPDPRPDHELRCGNPRPLGLTKAAISTRAPRATQTGRQDPLHIVVERVGRRQGTRKTPKAGGLVGQPGSPVSETPGPQQGNPLPQKT

SEQ ID NO: 970550 - protein, 132 aa, Homo sapiens
MPVREPTRLWAPIFSMRPRRVTPVLTAGLFGDAPRVCVSAPGSTGLFFREKRFPMFSRAPLGQSPVPPEVHLAPSPDPLPAKSPRPSLLGKPLMKGHTLPRAHKEHGVDNENIAGPKEVKSQMVPQWGPMSQ

SEQ ID NO: 970551 - protein, 185 aa, Homo sapiens
ICVTPCLCRRYVPFQMRRVLSYKECCFQHRPPVSYKRRPWYNCPALLYRRVSCPYLVFARWATVLWAPPNQGVVFPQGRYRLGSGLFVRDSDGEPPRWGSRCEVSPPLGSAGRAGVIPCVHPHSGVPPPSQLTATHESRANPSPRAWASPQPASRGEIGGAQQKQRTHPGTNGQTPHTKVFPPRG

SEQ ID NO: 970552 - protein, 184 aa, Homo sapiens
MAFIEPPASLRKAKTDEQAQVCNRGAISVWDNVLAPPRKGCESSAAPRAPARKNDEGGTDTQDTTQEGGYYNYQGDPLCCVKICGMGQHPAPPRSGTNTLHALTPHCELVELCGVCPLTLHTHIYEGCFEERNTFIWVGTSIQQYCLSHANNMDCSTSQWCTAQQFLKKKEVGKKTKKIPTKNH

SEQ ID NO: 970553 - protein, 157 aa, Homo sapiens
MWFPRLSVVWDTTIGHSGGPAPSSPTRKERFRPPKRALIPRSSPYSRGSPLVPLNSCPTEAPDCPHLSFIRGRVRTGVSPHTLSEHARTKVPATAYIGKSPQAIADLTEVKHPIHFAQVHTYLCSRTPREYGEIHVDKSSDRHICWSQNRQILDKGT

SEQ ID NO: 970554 - protein, 214 aa, Homo sapiens
RFSGAPRGRGAAQGVRSLFPCCAGCPWYAKSCPRDVLGCGPRRNGPTVFPGNSWRSVPRFAIDVFPLRDGVLFSRRGNYPPGCVLRHDALGVCLPRETIAPCVWLTRPCTVLVHDNSDISLAHPVTGVVHHQSVHNVSDEGSPWCSPPDKYGVFPLRSPPAVPRASPDASHENHHVSLPRHHPRFSQMTPILSPPITIFRAIWGFHKITSPTYK

SEQ ID NO: 970555 - protein, 136 aa, Homo sapiens
VGHDEGEADVSSEPDVLSFCSRVVATQGSYTLLVQGGLNKGVGFLKRERWSHTGLKKAVSGPKQDSHRLGTKLPVFFRPLFLGKKHRPPFASVNAPREENIAGGQTSPETKTGTAVVPKAPQPPGFMKQHLSRDPS

SEQ ID NO: 970556 - protein, 93 aa, Homo sapiens
KSLHIWEAQEGGSHRGPEVQTRLANNGKPWSLLKYTHLPRVVVVGHPIILLLKEARWHGRELLETPGAEAAVTPKSYPFTPTNPPWVKKENLF

SEQ ID NO: 970557 - protein, 243 aa, Homo sapiens
  misc_feature (87)..(87): Xaa can be any naturally occurring amino acid
LSQSAGVAASSWACLVVCCVVLSGRELVRAGGETRPRVGAAAVVFLSVLLEGLLPTLRVGVVTSWWGTRPSVCGANTVRGFLCRRAXIARGFAPLARRCQIVSYFNRPWVGVVIPTPVRAVLEVGRGLVPPTGDLNPFGAEIPGIIPLGVEQIYVGSKNKSAMCWYRGYVRCALTRYGFCPLLQSTAHSAPYVRSPRAPPSEGRAPRLDSGFWPPSAYLGHLANTSRFVSPPLVAGLLRTSDT

SEQ ID NO: 970558 - protein, 95 aa, Homo sapiens
MPHCYLAEVIRGKTSIGAGDGGTHLGERRLTDLRSGDTRREAEQNIGERYDRKRIRGIIAGELEELNTTALLARIKQIDNISTRNWPKKKPNQKQ

SEQ ID NO: 970559 - protein, 68 aa, Homo sapiens
  misc_feature (20)..(20): Xaa can be any naturally occurring amino acid
LLRSGHRFLRESRRKNLPFXGGIDNVFPRRGYTWVACTPANKQGTPVSPLANGVFIMVPGFRFPQAAN

SEQ ID NO: 970560 - protein, 114 aa, Homo sapiens
GVFGPRGGYFLEHRVVKGFFSAHANRGFFPPPGKQSFPPPLFVGERTCLSARGRRLRAGSSLELVFPLWEELHTVGGATTLPSDGEKVRPLPRLGPCSQLSSLLLRSPSPPIRG

SEQ ID NO: 970561 - protein, 244 aa, Homo sapiens
MCVLWWLCILSRVGCFVCGCVCFVVALIVCFSVCSPRVVCAVADVCVVSFVWVGMVLVVSRQFPGTPFGERRFPRLAVYPLPQLCIALPNGSSVSPHPSVRGAGSSLCRRYRSPKFWFSKPFITKVFTVRVPDKISPDFFPPFPPGANPLLNQSSKYLGEKLLFVKQPPYPPPTPLSSNLGFPQIEILICLTCNNFSPTEPCFIPPSKFTGSPQRATLLLDTKDKTPVRRRVYITLNNPIIGRL

SEQ ID NO: 970562 - protein, 279 aa, Homo sapiens
  misc_feature (1)..(1): Xaa can be any naturally occurring amino acid
  misc_feature (85)..(85): Xaa can be any naturally occurring amino acid
XWGAGVRGGGGGATGRGAIEGSPKGVDPSGSGVPAWSERRVAVVPYRRPFCVAGFPAIGFFHRAKGPGVYRSRWCPPIIWCIPLXWNPLLNCQHQHKLVVPETRFFIRPENSSIKDGWEETHLRALLVEFPASVGNTRFPGRAPVHKSGQGCRTSAPPIGALQGPRVVGLLVSPRLLVSVWPPTPQFREGPCDSSFPRGAASVLSRIPRASLLHPGKKLPSRRLVTVAVHPAVKVHALVGGLVRPDGTISRGPGELSRPPFSGHSGKSAAIAAYTKIIS

SEQ ID NO: 970563 - protein, 295 aa, Homo sapiens
RRGHGGTGWRRCVSVQCGVCVSTRGAGCRGGVPCQRPSRAADFAALAVGGAVLGIGGAATLVAPPTRYAALECRVRLVSGFSSAPFSRISPCADHRVRAGAQIVSLGVTTRGGFLVRANYLAAESQSGVFFNPFPGYWGSFLPSRRPPATGVPAVHNCAVISARVAHPKLRLVGIAVLPPPHTFCAAEHSFARAASMGGFLEHLLAPSVRTPNKLLPQSFPRTVCASPLDVSPPYSHGLTRSSHYSRRRRSPPREVSTLLLAVDPQVNGFAYSLGRLFASHSPWVLQKRPPRPPK

SEQ ID NO: 970564 - protein, 44 aa, Homo sapiens
MRSVPFLGVSVDCCTSRDPWCLPPIMERSLASPLPPSPPQAKIT

SEQ ID NO: 970565 - protein, 102 aa, Homo sapiens
MLLAQSPFGSLSHNSPLARENNTVSSPPQPHVSRLIPCECPPARFLGGHSLGVAGRPPTGKHLLSSSRTDPIYIFGVHPYNFQICPHYRIKHTFSFASLEIP

SEQ ID NO: 970566 - protein, 134 aa, Homo sapiens
ARRILFNPGKTSVPPIVCLGHPRVTLGDIGCDGVHTTAGVATSPVLSPPPCGIEQLLPTVVRIDLMDVPPPRKGYQTRKQQFPGGSILHAPLCPRYTQPGVNTHGPSLSKTVGTPTPPKFFTTPFGSLKNDFPL

SEQ ID NO: 970567 - protein, 214 aa, Homo sapiens
LGPLLTRRGTPPTCAVLRGLLARALSSAPVWIAHRPCRPKEGPPGVSFPAPPLACPRWSPILKRSSGADPQKALYEPPGFVQTTSSGPRFPFRAAPLALSGQPPRIHAKRPWWPPGVPAECSGVQHNVKRVWRILLDLRPPIYSVSQLRDTHSSSLPRTPTPLLGDRVSPPCGLLRGLHHPYCRAGPPTDTRMRMAAHHWGTLCRFKKITPPTK

SEQ ID NO: 970568 - protein, 254 aa, Homo sapiens
MALGCEVHWTLPSGTAERCNHPNGFFPPCRCRFWGELRKLCEPIQVSRCPARTIPGVFASFAGDNYVLVMANHPLGGGGKKHNFGQTHTTTGEKLVGTPLKGGKFGGPNYSPPTGGGGPNLANTRHHKGGIGVVPPPAPMVFAAAARQEFYMRAQQMLFADEWRRSPESLSRTLLSSPKLCNSPPIPMAAPEHSNLHPPHRTTCFYATKAPRWFWAQKLDAPSILLAYMCLQPFYLLFSPFHWKLKTNPPPKGF

SEQ ID NO: 970569 - protein, 123 aa, Homo sapiens
MRYIVESQTVHNFQGDPPMSFHGYFQYSVYNPTVPTKSPPPICVAYTLPRPLSIHPPCSAPPVVQFPASVPNTCSHVSTPTSTQHFSQNPKRLATAPINCICKKIIPNKVRHWSSTTPYTNAC

SEQ ID NO: 970570 - protein, 88 aa, Homo sapiens
SFPWMRATRDRGENEREEGATTHCRIRVDSLHESLHSVFTLLDSPLDYSLVQEYQSETLSYHVGTHTLARTQEILRGSLPTPPMSTLW

SEQ ID NO: 970571 - protein, 139 aa, Homo sapiens
MLEFFHFGFPCRSLLSSRRKSRSDPPNPPFSNCWLLRLPDCFPLWVLCPGFLPPDPRSGAHDEARLGDHTKDPNFRYTPCVGLSPPGGCAAPNFSRGPLGGPDHGVEYGKNPWGSLQKLCQCSGNPGKSFRCPVNLVGY

SEQ ID NO: 970572 - protein, 213 aa, Homo sapiens
  misc_feature (1)..(1): Xaa can be any naturally occurring amino acid
XRASSCHPAVLCLEGTFRVFYMWAASQTSGVGRRNLGARPSVGPLRRYAGGATTRRASSVKRVHHPARSSFGWSGEPALFPLGSAVYQDRSLGASTTPPPVAPNHRWVTPTPVAIDDTALALISHPPALLWSGASPRDIPPGSFGVGAIGALGESLPACTPGVARRGVSLPGPAKICIRARTVVLPPPLWAKPAGGFSHSLSRSRNNGDMSVF

SEQ ID NO: 970573 - protein, 287 aa, Homo sapiens
AHLFGGSPSYMENFSPGRPDTSVANCVSLQLLPEDVTTLIGDKIPVLPGDCETLACWVKRAEFVFRSPPCHEAVISHLLSCTSPPQQVLLVDTLVSHIPHLCGIIVRRDNWYTPPLPLVRLVSPSYSLMVVPPRSLTLPPWCEHRKSPPFLFSNKNKIIKKTTAPFLSTKRNEMTPPSSSLVQDTHKVSISINSTLSTTTRRPSVFCAQGRLKLGSESRMSRVVSQAVFSQAAPRLFLRTVFISGAPRNTSGAPGAPWRNIPRRDSPPPSGAPHGRSALAPCVSRRA

SEQ ID NO: 970574 - protein, 71 aa, Homo sapiens
  misc_feature (35)..(35): Xaa can be any naturally occurring amino acid
LTPPEIYYPRILSYPSDESTLLVTHTHFSPLTYAXINSVPLSPIKSPNFPRNIKCPRHHIADYNQNWRSSF

SEQ ID NO: 970575 - protein, 192 aa, Homo sapiens
MPWFLMAPVSRLVRPVGPCVCRGNDSAYAGAPPVVGDIASDAGIVRPSAVSMRPLSPVPRITWTSHLFRLIKVAYQGGARPLGLSPMCSPPWWGVSWACQPPGPSRLYHAAFLAPIPPEIPWFTPHDDAHIAAVGSSSRSRTSGAAGLPREGRVPSSAPSLDTDVGGPRDVPLIAGLRPPSFPPRAPTAPHH

SEQ ID NO: 970576 - protein, 89 aa, Homo sapiens
MSCRAPGGSMPPRWPTHKLGGTLFFATTHLYYYRVSPCAGPPSFINPYMGRLSWEANSCDVGQRRRVSEPPCCGPPPFPRGPKQFAPMT

SEQ ID NO: 970577 - protein, 128 aa, Homo sapiens
MCRVNPPFSGGLSDQAGHRWTTVVPTHYMSGGPPPYYHHEVSTLCEKIKPLWPSPAPRRIIEMGGVNITTGVGAKKNRGAMGGVTKEKYILDVLSVSDRESGVQEDQLGRPSDALSTYCLVAAPQTHG

SEQ ID NO: 970578 - protein, 73 aa, Homo sapiens
MFTTHTKTHFHNNDINSPPRPPPPLIFSIFKRHLMREPRSLPPLPPPRKQVSPIHKDYSDNEQTPGTPNKCPD

SEQ ID NO: 970579 - protein, 33 aa, Homo sapiens
MKTNGRLWGPNNEVSPREEVPRAPPVPPKKPPK

SEQ ID NO: 970580 - protein, 108 aa, Homo sapiens
MERTMRDRPPTATHPAPPPHTDRTSEIDFVTAAVLSVYNSPPTLTHTCFVHCIKNKYNTLIHSALISVCFAQNTSMTDRSHDPFDHPLSSPLINHHISEQVRSPSIVQ

SEQ ID NO: 970581 - protein, 36 aa, Homo sapiens
MPVGDTGPSSSSLCFVPAPANDIESSPPNTTTPDIY

SEQ ID NO: 970582 - protein, 287 aa, Homo sapiens
CADMFRPVQIGGACPFLKHTAWGCRPRPLGGEEAPAHEVGSTKNHHPGSDKMSTGAILDTLVRSAPPGGDTNATITLLRVAAATNYKWDFFLSSTYKSVGNPLLVAPPSMAQSLAHASTRMSHRHLGPLICAHTIISVKDPPNICSSSRFTTKQSLLLDRRNCFGSRLSPCCKRGVTKSPPLILSCRVMRNKPPATLCGLAQRSHDRVHRRTTLLQDTSLEPPTLARGPPPRTQNEGAAAREAYNNHHHATLGARDGNDHARAQVVSPAPTIRGLKQTEKNKHKKQR

SEQ ID NO: 970583 - protein, 50 aa, Homo sapiens
MPHFNTPTLHHISLRPFHKICRSPLFRSSQFQRSTHPFGQRTKTQGLNHK

SEQ ID NO: 970584 - protein, 85 aa, Homo sapiens
ASVQCSALSGSGSPELECVHMGEALIFGGPFIRGKLCCAVDPAVWGGSRHALPVLPPKLGGTITKILSACSPFAANPFVTLVQHR

SEQ ID NO: 970585 - protein, 218 aa, Homo sapiens
MAVVLCPSASPGGPPGVVGGPNFGGAHTKGSAHGAQVAPPQRGMFGHSNVRPVFLVNPSRKGFAPLCPHIGACAVRRLLPRRCAAFFSPSSPTPSVNKLSPENNHRNVGILLQHIITPPCPNHFNHNHRGMASPIKGNTFLRDTPFFSKIIFSHSGEPRYHHLLCQKVRKYRKHLSWRSIALHRPHNFCFKCRLIAQESVIYHRGNCHTDFIVPSVIR

SEQ ID NO: 970586 - protein, 132 aa, Homo sapiens
MPIIYISINKNMKHSIIIPLRQEPEYTIWAPPPPMEPQFLHHKLSSPPNPDSPSPRGKLFKNNRAERDPQRRLAQPHRIPLRGTKNYPPISHYIKAPPLLVPARDFPPEGCPSLSTPNGLTNTDGGFFKGFA

SEQ ID NO: 970587 - protein, 169 aa, Homo sapiens
VGGGGVCSGRCCLRGSTRDRALPLPPLFLRPLWASVLASWRLIFGDRLANLVARTFSTCSLAAGSGDILPRVCVSLSAPRGNRVFHTRARTAAGFNAPPARFSNVFCPPGGVTHSYPAPPSLGRQLAGWHGLFRQQLSARRILVVRRTAHGLCYSRVCGALPHSLAPGT

SEQ ID NO: 970588 - protein, 107 aa, Homo sapiens
MFPREPTLAPQRACCTTPGFLHNPPPLIIHFSYNWRVFKPPPRALLKSAFHSTPLPCPHKIGFTTNLCANLMFQLPRFSASTSDDHLFRRPSLSTNTLIGFSLLVAT

SEQ ID NO: 970589 - protein, 120 aa, Homo sapiens
LSGLIGARLLPQGPCALMGVYTLPRLFCQLGARPTPGNLFSRDSPGVPPPPPCSFRAVCRTFFPVSGSPPCTRFETPTGAYTRPQGPPIELPLFLGPKWRLIFLLGQQSPPGYTISVAHD

SEQ ID NO: 970590 - protein, 137 aa, Homo sapiens
VNHCVPLPCSSGCCPPPYNWGAHCSLRRLRIPRGLVVFDLPNRAQISPPPLSMAGPKLQVFEDTVNDPGPFSPPTSGILGPPLRMEHTLPLLYEDAVRVNPHISWESAPLPLFIGPLFKRRSSPWSIIPPLRTTPLL

SEQ ID NO: 970591 - protein, 157 aa, Homo sapiens
  misc_feature (1)..(1): Xaa can be any naturally occurring amino acid
  misc_feature (80)..(80): Xaa can be any naturally occurring amino acid
XFVLRCVVVPCVGRGADGCWWRRACVIPVCVVIVRRGCAVCCSLWLVRLCVCVVPCGRKVVWCGPPFFAVRRSGGPVAPXRRFPLPPVLFFTPHRGFFPLLCWPGPQNFFGGTRPPKLFGVGGHTLYQGFPVPGPRANSPREFRPIICAGGAPSSVA

SEQ ID NO: 970592 - protein, 113 aa, Homo sapiens
AFLPLGGPTNGVPWTTRCLVAPPIFRKPLSISPMGDPRPPLAVPGAPRPRVQIVLGRWLDPVCFGALMSTPPLVSSRPDSGMFLRPLSPRGFTRVQLCTLVRNSPPPCRLVGG

SEQ ID NO: 970593 - protein, 146 aa, Homo sapiens
TVFLSPRAVVHCKGGPPVSTRGPLWGVLTSGTTLFCRAIVPHEGFRVLARNKVPPEDQSSVSHLPCHVGPLICVTQRTCQANDLCGATPITGDPIPFCGCSTKTFCRIVRRFIPPAVAVLVSFSSKALPAGRFLRHFLRRAGGHTG

SEQ ID NO: 970594 - protein, 144 aa, Homo sapiens
MGPLINWPSLHSIPGPSYSRPLPFLCTLAPLFFSRIPQEVASPPPLGELLRISPLWCKRTLEALWPPTTLGSEIMFSCPPGAVSLKLPKSHPPPMFFGNSLDIASSGLKKNNMCYSIKNPTCNSQFYDKSLESLSSSCKNATLI

SEQ ID NO: 970595 - protein, 204 aa, Homo sapiens
MWSPRLARFTFNRVAAPASFFHRAPPPLPIYTGGPTPPLPHLGEHPFLPRKLGNFSTGQPHWFWAPHPYFHITIYNRLNPPVPLSTVPLSYHYHYSYCLTHRKYLSNSTPRSRFFSIAPRPPLVFLSTVVVTHDCPRSLENTSSPHMSNTISRRLPQSCRELSQCLLISSLLSTGHRQVHTPLYPTPLGAANSRVTSHQSPGEQ

SEQ ID NO: 970596 - protein, 175 aa, Homo sapiens
PRGVCGASQGVAHKHVVASHTCISLVDRVCPNLERKFGVHFSPGASCPPRPRLSPWGGPVAEFIQTSGILTCIRELLPTGSLFLDATPHPAVSVMFASHVPAQYVSPNTGYSTTSPHATIAHLACVAPFLRARLASHRIACRARHAKLILALHLVDAAWLPTHEVFLAQDSLSPF

SEQ ID NO: 970597 - protein, 229 aa, Homo sapiens
HGGAVGTKRCVTFLVRGITFGWDNPAGFGSALPPFLTKWMGCTKAPAALVLAGNRDVARNTSPFVAAVPCGRCTHPQVCAPAPQFLSLEEIVAGPLRTYIAEAAFAPHGVSLYKQVRFLFPGRQLFLFIPPLFRTPQKICSFCYSLPHKGDIYVPHEKGEFSSTQLCSLSIQACDRSDDPPPRRLPLTNTQVFLPLIDNNSSQVPTDPRPNHFLPFISKARYFTITPSL

SEQ ID NO: 970598 - protein, 159 aa, Homo sapiens
QLRCDVVSLLPPLCGFSPEDFVKTPVIRCSAQTPGVPPLWRWTGVFPPRCLSPWGVEGSYGPLPREPTLGFIPFALSRAPNQGRRVARRHLFPCYSPSRRVVPCLFLPRVIKGYYLRHRVKKAVTKSFLVEQGLLPPIVLVIPPRGGVPPVSGRPQEIG

SEQ ID NO: 970599 - protein, 257 aa, Homo sapiens
MCSVAGPEYSPVLPYLSGLIFRVSMPHSSPFAGPQPSVVNRSLAPRLASSTRGRNKGAFPPPSGDHFSSGGPPPHEAPLLWSPSLESVPLLPCPAPPWADHLCIPDGFVTASQAPIFVGATNPWGLPRCCSSGGKPPRARLLSPLGDRPGVAPRGSRAPSPLVPRVGTHITGTTSSITSAPWGPGRVGHLFSRPFFHLPSPLPRPPPVMIAPQSAPPPFLPAVEEPSCVSPGALFFFRPSRRRVRLCARKGAPTPTK

SEQ ID NO: 970600 - protein, 86 aa, Homo sapiens
MSCNHNIKQILQKPLATPPYNGHATNHVGHPDSCPPNQIHRVIFLSAPLPATSVLCLQLFEQQVEFHSSPHTGFFKSFRPIKTEQN

SEQ ID NO: 970601 - protein, 181 aa, Homo sapiens
  misc_feature (93)..(93): Xaa can be any naturally occurring amino acid
MSVAPLKSPCVRGISGAAITFSVMRNTPYYREFFPRLCRVPGQKSPRDFLAPFLRPAADYQCSGVYTWLSLHNLVNSVEPRTFSKEGELLFPXKGGVNTKEDSLYLEKYFLCETLRDDTKSSTSPRRTTVREHQFSNPEIPPIGDHNPCGVTSLLYKGIRCHRKGTKKFVFGGNNKGKPKK

SEQ ID NO: 970602 - protein, 114 aa, Homo sapiens
RPPLVWPPTLSPAGCPPPPPFFLPPGFWSSTFSATPFWLPVSFTQGGYVKLLGIVGKSACVSVKFAAGDHQCKCSLLGQSGILHGQSISCGVVNPGAWLYHSHRSNTFSTVPPS

SEQ ID NO: 970603 - protein, 66 aa, Homo sapiens
MDKQTNKYRGEDLSTSNQTMVAGGIVVAQPQKTPGHLFGQGHKARWEQRMLGPPPPPSTPIPRPTR

SEQ ID NO: 970604 - protein, 273 aa, Homo sapiens
RKPKFGAPIVLVIGLPCVPPCVLRPVFACLGPPRATLVNCVLPSQAVLRTHPVYVATKTGGPHWVGSHATGTKRNLWAFVPTRATTNAGCLGAAKKVAAYIVCRAHPPDKGTTCVYCSTRSTRVTSLSGPSLQPLLKRSILLGTCRGVEGGPHHGVVSSEKMLRRPLVINLFKCCSPLDVEPTKDHLFCLAACQTQQPRFLDLLYCHYGISRQKAARSTKQVIYVIPLQQLAESRSRLCKKILAGKSSAPRSSHTRPGKWGPPDAKSGNKKQN

SEQ ID NO: 970605 - protein, 150 aa, Homo sapiens
  misc_feature (28)..(28): Xaa can be any naturally occurring amino acid
MSLSPPGMSSPRRFSLASCHCQESPLSXASLTLTRLLPTTKRGPLFYGQGDILLGPPPRALCLIAVMPTAWLSLTKVSCVLEPPPPPMPGSGTLEGGNIVAYPHCALRADYWCWSLQAVLTTDAHREEHSLYPRIDSTKKGLIEHPSVPP

SEQ ID NO: 970606 - protein, 229 aa, Homo sapiens
MSSSASIMQVCHACGLMYSYQWFDACPRSSVGIHVRVMSALDYLDACRGAALYPDGRPVIFVPIAAGTRSSFPPQMTLAPRVLSLGGPSPPADSWAGQGSPEVSVSPRGSPLVSTAVLAVSSCMRCQRPRRLVFQDGGTARPGHTKADRSYPPDGALIYHNRLGVCGWHTPPQRSSSSLPSSPRVPCVGEGGGAPPLPPPPGRTTAPAPPRKTQKRTDTTQKTKKTNKH

SEQ ID NO: 970607 - protein, 78 aa, Homo sapiens
PDALGPHNGGVDYLPPPGQYTHREGAFHPHTAERDTSPPRGGEHTRPPGCQTSESDEARDITQQRKAPPRRSVSPPVV

SEQ ID NO: 970608 - protein, 294 aa, Homo sapiens
LWVYDVFPPSWFLSPQYMPSVILCCKVGLYCAPPLFDIVSVGCTITQDEPPSVSGTPYAGCTDLPDLLAPPLQTSRRAPISLVDPLIMAPAPPLAAFTRRRLSDQPTIVALRKPVLSLSEWPRLSRFSFVVPPPGRASLRDCSGPEVFLRHVLSGVTRELSCSPSCFALVLPLVGGTNIMRRLLAAPQPPPCAVILAPPPCLLPVISVCLAAALPLTSLVALPNIRAALTAVSAPNISGPLLLIPICSYYVRLTAGRSTHRSRPDGAGDVQSTVEYTRPHNLLFFAYHLLRPSS

SEQ ID NO: 970609 - protein, 312 aa, Homo sapiens
GVRLGIARGSSWVGVWRCAGSVTCGFAAWVGHSFGVCEPLLSRVKCCCSASIVGGALAPGGLGFGLVASVPPEFLFSLVRKGAPVGRVSATRFLWVVCGSVGSLGVVVVLPFVLVAFHEGVFVHPDWVVLSLMVAPLVSGGHHLVSRHSCCLVPVAALNFRLRRRVDCLRVAEAGFSVGINWWVRPPSFVVEVCPGRADSPLLDSFWGAPFAPPAYTFFTPGPFGLTMLQFLALNALGYWGMDNRSAHPSHDGRGYTHERSKYDSSTSPHVQQLARGYAPLSSRTSRGSRARRPCTRSGRTTSDYRHYHEDH

SEQ ID NO: 970610 - protein, 114 aa, Homo sapiens
TGPRKGGGDFCTTMEVHPLQIVEGVSSLPWGPRTPTPVLCAPNMGSRRQEGVSCPPVTSRGDRCATTSRFWPIETEQPDRWSPQSFWARPHAPGGKAAPSGCEAHRDHQHGAHS

SEQ ID NO: 970611 - protein, 215 aa, Homo sapiens
LSLRGFVVGAVERVVSRPGDPARVSGGNAVWPPLLAGFNLRPRGFWYTRAPQLIGWLSSSPKFLDVLAGRPRDTPCAERDNRRATNIFLLVGACPFVYRDGFFRDRGRARTNHAAGFRPLFPPAGDIHPLVEPPRENRPVGSLLPIDSQDKQNNQLNSGVGGRGPLVNIPSISPQRSTAPRNHAANHVEARSSSPQSTMAPAFPPGPKRNFFSNN

SEQ ID NO: 970612 - protein, 206 aa, Homo sapiens
MALSSAVSESSGRLPAPCRGKGCFLLPPTVCITKLRLRRSIVCCAASQWDADISILVVYAMGRAHNHGWERFVIKEYHRWSENSLLVVRCRTPRYDAVTKRTALNPQCIGGSNHSVIFEKGVMRGPALVLSSYTRRHQERVQDVAIRRRKNSSAEVPSQILHSLGQDSTPIVCVSLVSVLLECLLQFGSDEKCVATLALKMCNSEG

SEQ ID NO: 970613 - protein, 67 aa, Homo sapiens
RKKPGEGTQHEVRGLPHRGKCGQPAPQGPQKIRSSAGVPSRWRSPQGGQKQRGEKIPPQDEHTKEHP

SEQ ID NO: 970614 - protein, 122 aa, Homo sapiens
MTRAARDNALRSPGGGEYSGGETTVVDFRAETTPLGEEEKFSLRRPNTPRRNSQRAVDQRRAHFNPAPKYVPAGLSRELSNNARHNRRPPRYTTLLEKFLRPLIPGRTPRQHHLAPHGELHK

SEQ ID NO: 970615 - protein, 238 aa, Homo sapiens
LDHPQMGSAAVFGGLGVMYIARSSGLAFARPSRTRGPLALRCRPIGPYGRLLLRRVKDPPFYPAVAPDHVRRAVAPPPLEPGSRFAMIEERFFSRPPAMARPVALGLPDGGTPAECSQNTGTKFRAPPRVLCADALTRAQQHSTELGKGRGERSRIEMKGLQEEGTELEPDPHTIRGELSQRAVHTHSVNNKVTGRELAAQENRKSGSRPAEGGPTRRARPEQRQASTRDTDFRGEQQ

SEQ ID NO: 970616 - protein, 258 aa, Homo sapiens
RSDTRGEENVKTQTGGDPPVCSSRNRAQWKKKCREPRSCPQVRRPRPCLKRDAQNLTGSAVKKANAIFRRVFQRVTSKKVGMAGTGASPPRWRAASKVRSQAASERSPSGIILKQRPPKKISFLAWGISPIKRGLLFVRSPGISAMLGVSTTEETVPANVRENLIPPLLKRFAYHIVLPHVRSGMSAKRTTAPGSNRGKPTSIEEFYHKGCLHPRFKQVYMPGGTLSYKTLFNNIPPPKPFMDLSNGHNALVTHTAPE

SEQ ID NO: 970617 - protein, 296 aa, Homo sapiens
  misc_feature (1)..(1): Xaa can be any naturally occurring amino acid
XLSTSSDQIDKEERVNQAPKPARLLIGSQIGREELLDSLVQVSKIKGPKEQPGPITQTICRTWLSPCVNLGPCGRTIKTPTRCSCVAEHRLCGPPGGNPPVTSGAVNSRGDKTNWGGTAEAREATADSTRRQERGMLILRKKIRAPAPPKVAQRKESDRRLFVWKQQEGPAPNKARSLLGGGKMEKRVIPLSRPVAPLSGRIKKVRSPRTHPLCEILRPRILVRPYRHKTEQLSFCSLLLKQALNRQFFCTRQQNNALFQKGALQKYSLGSANASLMRGNPGCPPYVSRRNHNNQN

SEQ ID NO: 970618 - protein, 109 aa, Homo sapiens
MGIFIELGPPRQGDKTPTILGEIMFPKARKMFEGISCRFSQTFAVLFLSNKWGNKVQTQPIGCLGQERHHTTAKHAGRWRAHISTSQSLKVAPDEMLTASICAGQDHIS

SEQ ID NO: 970619 - protein, 121 aa, Homo sapiens
PLIFITNKLSAQLPPNVALPLCYRDLYLRIYLRRYPWAPLFRKNLLYSPLLLGLPQPCVSTLFTRETEPFSKPSPTKRHPRHNPPHISLSWPMPRGKKKMVMLPRNNLFRGRIPQGPPPTQ

SEQ ID NO: 970620 - protein, 207 aa, Homo sapiens
GYVNNNITQSPEDPFIFGEHPRCHYVPVGARIPIRVYSKVSFERRPAGGADTPLRAWKFICYKRVSDVTNWIIPRPEGPPLVFLQEECFLPPPPNRDLSSLDRQSNICVKLELFALLPMVLRNCEDNSGEYRQNRRSSSGGTEPGRSPTKGLYITFPPPGKMNASVINDPERCSLSGSQRNCYSLVWPLPPGKYHKRDIDHTRVGRE

SEQ ID NO: 970621 - protein, 180 aa, Homo sapiens
  misc_feature (26)..(26): Xaa can be any naturally occurring amino acid
EKLHTKWHVHSDCAKDYDIEMLNGGXLAQHTREHDRRVLRLTPAHPTTLVRAAGRLVKTRGPSRPIHVYLPGAKGFSQDASTTGLRIHADNHTPGNWPIFINRVNGGPGKSPQHVGARDEHHGLRNSMPYYPVFVGRAEKGSASSGGFLIKGAITMEKLESFSNLSIDTSSSCIKSNLQF

SEQ ID NO: 970622 - protein, 75 aa, Homo sapiens
ASKDKVRTDRQTVSVENHVGSMQAPLMSPEDGLPQGDFSARRQRQARVRPDEHTGRAPPPQLGWKPLGAHTLGKN

SEQ ID NO: 970623 - protein, 165 aa, Homo sapiens
MDKRETRNDRINRPVQLAATCRACGGSNTATRVKHEVNTQTVESLVLSREYGINQVVYLAKRNVTSYISRKQCRGRSKCIKRRKVNNETQWAEPEGSTQQSIYVRSRQYTSARERWSHAQVNGAASSERSRWVDYSSPQSSRPTLAHTGETAVSDHRKSTCALVT

SEQ ID NO: 970624 - protein, 240 aa, Homo sapiens
  misc_feature (1)..(1): Xaa can be any naturally occurring amino acid
  misc_feature (3)..(3): Xaa can be any naturally occurring amino acid
XLXPEEIQSLKQEATRRRSVVTCDERPLGRVNTCGGSGRHRRGRPPQGGYLSGKKMLVPETRLRADRGGAQHPAQTGAHVGPPQAGSIRDARQVVSAAARARGPLCPGPQKGRPEESSPGVGKKSWFKQGGCTRAAAQACARPKKKHWPKIFPNRDTKKESCQRTSEGTTLVGEKATNSWGNLQEDTTTQLERFVFIDRPRVSPVGFDDQDTMLFVGLYSTRRMNAHDTSVSERSYGADQ

SEQ ID NO: 970625 - protein, 124 aa, Homo sapiens
MGPAPRTRGGPCGDPPRRWEEGRPLRGQSAGQIVRKRLAHMWRVRPTGLPPKICCLNYVGPKTLINGAPMNCRKEVAAHSWARCNGAARQQRKFVWETVHKPWTHWSAMLLAKQQKAPMLVLEN

SEQ ID NO: 970626 - protein, 217 aa, Homo sapiens
VICVSPPFWARYFCALRSDGGPRSSLARGTRPLSFVGCHPLYAGGYSRCPVPASISPRVFSPLIPPPVGSPLPITRARFSPYERPPTKLGNTSPPEISTGWLVAHYTSPTIGPLQFLLGDKYKMPRLLVALNRPLPVGVYSHHINCTRAVCENSRRAVCCSTSKRWSHEPVERFSKDLCCIVLSTPGAARWAAEYGKNVASRKSVFVLAMTPQGSLF

SEQ ID NO: 970627 - protein, 83 aa, Homo sapiens
LNTRIWFNNFRGHFSTFFTEARLKETPRGTPLGSHNPGRVKTTTLSPTFYFQNVYLQIYSAKRSIALETPILCLSFLTTPNLG

SEQ ID NO: 970628 - protein, 111 aa, Homo sapiens
MFAPYCVVGPQPAHCACACCCCRAQVWAGGGLLPRCVEVHRGWSAARSSTISRSAQPEFADNNGGNEILLQLAIVCKAQLRPVTENVSQGGIVCRPSQVEQEIGAPTTRRL

SEQ ID NO: 970629 - protein, 81 aa, Homo sapiens
PRPLYPEGRIFVLRRVCPLFRKYSCWLTEWPVCRNGQTLILLLLKGLSPPGVYTKIPLVDTPGGCRHRTDQPSVYEKLPHN

SEQ ID NO: 970630 - protein, 217 aa, Homo sapiens
  misc_feature (32)..(32): Xaa can be any naturally occurring amino acid
AVPFFVGGVCSVFAGPPDTKCRRGFSAPYSGXARGCTTTPSCVTRTGLISVASSPAPLCLAPCLLLSPAPRLIGIARLYCVSSSPHCFLWVKSPPRMIPVCTSPVPHPCWAPRLLSPRLMDRNHLMGLQNDISLWTPLCSLSPRNHSPRGLSKFSKTTLRDSVHTIYHVTPPNCIEQSRSPPRFLFYLPTLSLSCHQLPSSLSIALLKRKVFKNNVI

SEQ ID NO: 970631 - protein, 58 aa, Homo sapiens
MVRLSSSERMLQLTHVAVYVLRAATPRTEPRLQPMFMRCRWNPDRQNIQYNIPYPPLS

SEQ ID NO: 970632 - protein, 118 aa, Homo sapiens
MSRYLREPLAAPLSWGASSAHASAHQFSGPPCFPRVVRRVDTQVVVRTGSVDTKHFPAGQRAVWTGTLGDSCVTDVETHPGDPHPSGGRLTKGSVRSPWRVRGSRHPPSGQNRPPFRK

SEQ ID NO: 970633 - protein, 190 aa, Homo sapiens
MSSAHSSCGVFHERQAAMFPRFCASRLCQVYPFMSCRGHGLHSKAYCVSCHACFTVLGRNAHVYPTPVPRAPLYTCTCVLRPRAYVCRASCISCTTDARPHGGPPARWAVCSCAVNEYELPAPQFSFISPLATNGAAVCRGPGVDTTHSLCLRYSPPPPVRAAFVSMTILIERHLFDFRVFKSTPLPPTK

SEQ ID NO: 970634 - protein, 124 aa, Homo sapiens
SYLLLAWPFLGDLMLSRLRHHFPSVFAYNGYYTIRWAQYKNLSYPSATARLFITNIGGKSQPSGFVRPWIPTGVALYPWRLAYYGQQQKWSRATCIADRRLPMVRLIVSLRMLATRATYSGLPQ

SEQ ID NO: 970635 - protein, 139 aa, Homo sapiens
MCCSPGLFVTWVADPSPQIAHSALGVHHSHASGGRLSCVFDAPPWYARGRGYGPTHLRHPGVGAAQCRYTGRPHSGSRIGSADRPRPTFRDVNHARSAYVVRVPPRSRKNGLPDVPLARLFFDRNRAPCFPPLAPGPQT

SEQ ID NO: 970636 - protein, 104 aa, Homo sapiens
MVLPGLGEQLRLGAKNLVRRRRSQCARIAMQHCRKRGRCARVAFELNHCLLRLVTEQIRCWRRCVSRLVHRDRESTECTTTVGQWGDAIIEHCGADDRFESSGE

SEQ ID NO: 970637 - protein, 291 aa, Homo sapiens
PDPPRVTAVLRPESGFRPPHNDRAVPQPHPSCGAALQPGDAVEPLYSGRAQCHTPIFVRPSRWYGSLSTRPQASRTVLRSPPSTKRSSANIPAGTYIFGPRYCFSHRRDSAALCRTTMIAAHSWNGESPPLAAFRPRHRDTFLARADPPLGSPPPLAAGMKTPCRRRTSVPRNILEIVIPPLQGVHHLASTKPLRKTTSDSLWPCIHFSAIELLLPPPGLPSVARFFKPPQIPTPQQFMRGTPTYHLFPNMCVGFPIIIPITVPTPHPRHHVITTLSSPPSIMKFFPPHMT

SEQ ID NO: 970638 - protein, 54 aa, Homo sapiens
MFGRVGGDHTWSPPRVSAPLLFAPAAGSAAAVPPVLDGLLAVCLRKKATRTNIT

SEQ ID NO: 970639 - protein, 139 aa, Homo sapiens
MWSWRPALGSVLRTTAGGFSRVSTQEPPPPYRVFHMGAPLIMARMARTVVVSPCEARLLGPPCARISAFFYGVLHRRPSPFATPLSPTPPSSLVPLQRPSLSRPPLHASTFSPSLLERHHPKGPLQLNKRAPSPFILLQ

SEQ ID NO: 970640 - protein, 104 aa, Homo sapiens
  misc_feature (75)..(75): Xaa can be any naturally occurring amino acid
CLLSSSRIRRGPPLCPRVFPICVLPRTATTLCDCPILYEALDVPCRPTCRDSPISGAPLRGLVPSPRGVLKLRKXPSCGSPTGLPTSPVVGLESIRRIPRPGPH

SEQ ID NO: 970641 - protein, 133 aa, Homo sapiens
NVHLIGVLGGSNKAEPGQKKKKKKKKILSGPPSGPRKRFLKPFCVGGGGPGEGTGASVVPREHRAPGIHWVRGGSPTKKKKPPRGAAHAGRCCETNSQRGASGGATRRGRLLTQGRCPRGAPDTQNYPAAARG

SEQ ID NO: 970642 - protein, 50 aa, Homo sapiens
MKGSREAMPSCIKNYRGANNETRPGPKTKRAVTRGPNGGSTNTGCPGDAI

SEQ ID NO: 970643 - protein, 241 aa, Homo sapiens
  misc_feature (88)..(88): Xaa can be any naturally occurring amino acid
MHFLLLRRLEPTRVLSPRRAAPPIEPRGIQDPPALAHPRNRAPGARSVFCLAVACKQQPGGVTQQTDLVGGLYNIHPTCRIDTNTKRXLSFLFVGKGFITDRAHSWWAPPLGDGRNPPLSQGGFFPKSTRLFCPPMTICCLDTAPLLLSGRVLEEIATHRWMAPPRVFALGAHNTPVEIPQYLGGGWGHGGPIVNTRGLSPKGYQLCEHCGVYRRLPLTLRLSGLDIREREIPLSFNRTRK

SEQ ID NO: 970644 - protein, 134 aa, Homo sapiens
MRSASRATNLTPVWKQKQTRWGPRPAALRSLQLLGPELGLIKERRTPPHKKLGAHDVAPTPTWGPAPGPGSSTQAGAAKDPAGQAQTRSTAIPKQRGRPRQQTCHSATAAQPRRQQRNTQQDTNTHTQRPHTTT

SEQ ID NO: 970645 - protein, 175 aa, Homo sapiens
MVPEKKHTPGSRTFCVFVSPQNNPPPRFTTFLYLDRQVFSGRLTGRQCHQGQRQGVLYARGGRDQTRFRVNLPGWASYRFKQGPSTKLKRARLRGDPKPGCQPPGQTHGSERCTLRNTHQMGHLLTKPNTKPPDNRRTEPFQSRATSTCCHTDPVSTSKTGFKNTHHKSTKTKIK

SEQ ID NO: 970646 - protein, 104 aa, Homo sapiens
MARGRESGTIRANMGEAPGLLKTAKSGPGWMAGTGGPSYREAEKENLNQAEIAELRSAITQAGEEQNFRLKNTTVRLWGLNVGSSLRILANVFVGPGFNFLSAT

SEQ ID NO: 970647 - protein, 154 aa, Homo sapiens
VGLQDATIPVSYKRLISLHDLAHHKHLPVSVSYSGVPVSERSSRREHRVRTNEASSTAHQEDRKNVSENGMRPDNESLLVSIIGPVPSRTSFLYRLRDRGSSIPSLTGANQMGIIVNVNLRVHRLRGLIFNSYILPPLFLEPGDLRLLDVDNSE

SEQ ID NO: 970648 - protein, 115 aa, Homo sapiens
MGLPWRNPGAMDNRGGGVPHQREKTRPGGPQDGVSWTKPQKGELERGSKTRAILHTARRVQSEQLRNYKNTRPGHGGRSKDTEVAAEQQQRPTARQHHRDEQQQHSTEHPSATQE

SEQ ID NO: 970649 - protein, 122 aa, Homo sapiens
RYKRFSQSHDNPLSGIFKASTPELIACEIDCYATPSYKQLRTVSLTLLSLLDVEIHLDADVLTINYSHESKNNLILASLQVFKILTLQAPYTPIYDFYSTMTNEATSFHSHKPMIINPRFTT

SEQ ID NO: 970650 - protein, 192 aa, Homo sapiens
MSSWDPGRPAGVPQAQSCEYHGAREESPRPREKPPPGAQHGRDVSTKRPKGELGDHKPQMRHKRRGRRGARKNEEFPPGGRGVITLEQPAAEKNKANHKKQKTEEGTETARKKTAQGDEKSSEAQSGVSEHDNKTTKLKITQNDTAAENRVLTERNKNQVTNHKNDPDQLTNNEPIRVRHIINAQASIRKRR

SEQ ID NO: 970651 - protein, 250 aa, Homo sapiens
MSLKTQSIITHRVNPLLQLSKKAFDTGIILFMDLRSRDFAGYSEAGDESRLSPYPPNEEGHLGPRGINTGKSPLEDNQFLQRSESVILAIKEYPSAALSCDHESDIENKRTQKFNATKFIPPRGGSLIYPPTSLKSTSKSPSHFRRESTVNIFEAQAPRTHVINGQFLNIWFIATSIHLHPTSRDRNARYWLVMGAIGATREPNKKTKKRGAADINAAGPRREGKNEGAQTRRHLGSHSPREEAGEPYDT

SEQ ID NO: 970652 - protein, 165 aa, Homo sapiens
MLQSPYLVTHEIQTSMYNQSPGMPTPTSELLAVRMEQAELRILLLQMGLSLVNGVSSPTLVILHLIDNISKTIQTPNSFKGNSPGRKPNRLTLLGGRRELMRDKVKAPPEATNQTMGLPSRLVISHNFKMRTGYPRGRCALSQASVATLEVSPGWRRAKKNRARE

SEQ ID NO: 970653 - protein, 183 aa, Homo sapiens
GFLNGGLPLPGWVMIFSPCWGAPLFWWDVWRSLGCPCGPSVICCLLVGSLSSCLQGRVGCRIDVSHSGPAPVPAVFFRLVPHVSLSHCGFSPSPASLFVVPVLQSLPHCAFSGPPEVGVAGGFSAGCAHPSCSNASSLVTPLVWVSPPLLAVCSPREAYSPRYGCSIFDPNVSSPARQFLHNF

SEQ ID NO: 970654 - protein, 271 aa, Homo sapiens
  misc_feature (271)..(271): Xaa can be any naturally occurring amino acid
MRKSIVTDDTFAGAGARAKREPLRMSVDQGRETARETLKKMREPKLPGKGEDHNARADTEETTRRRDEREEINHTTPRGIKKKRTPRGGRQKTLVEGDVTISENTDMCRESREGEEHPPGGGRDQQTHGGRAVCSYQPPTTREESPKKRKRARREVHPKKIESRPPRGGCWRVVLTQNIRQKRQSRPRESRKKHARTDDDGSVWMDKARTTIHTKESGHPQEEEGRHTTKQGGQTLLNKPTRRTEARHRQSARTAHDNSQDDRRRPRGEDX

SEQ ID NO: 970655 - protein, 147 aa, Homo sapiens
MGLRWPLDRAFVYCQTLFFPRVVFSSLCGFLVAHNISPPGSHARRLSARGLYSALSFPCTARVRLPLWSPRGAKYRLSPADPSGQRGPPSDLHGCHPQPSSAPTPSWLTTRALSLPSSPVFTTLFISSRKLMLSPPPLVWTLLCCPL

SEQ ID NO: 970656 - protein, 181 aa, Homo sapiens
RSRKRFYPRILLQLLSLLEYCDLMHLPVLVTSPVCPFAERSGRRMNEYCAFLEEAHENHKNVPDDADGTINLCPLSASPVSAKSFLNDLRNERLDGSPSLTMRIQKGHSLGDGKPTKLHPELRGGTKSFSSVHYVPAIIPEIQGDLETFVGRLTTRVRYSRLEGPSGDELVASQHTVFAII

SEQ ID NO: 970657 - protein, 83 aa, Homo sapiens
MHRRQLTSSTHFSAIGCPSSRTTDVPKKSIIVALLSTGLYSDGGIVEEALKTPPGIGPPHERYQRAPADSVKKKPRSGRDRPN

SEQ ID NO: 970658 - protein, 260 aa, Homo sapiens
MAHACNSQRQLGVARQADHKFRTSKTSLANMVKPCLYYRLRPVELGVVVGTCYCSYLRRLGTWEAGGCSEPRSCHVYVQPGVTEAERLASKNILTEKTLRSPGYTEHGRGLRAKGTTGGPRNKPTGNTVYAGVTFLPVSGGTLAVATWVEGPRVTAGPARVARKQGPTWRGLQENHSHGRTTMVKAGLGQRPRHGQPNQPGGLPLGSINTYNKTEAAKCAQTVQMSREHAKVEERVTSATRNSKQRQTKTDRTKRGHETR

SEQ ID NO: 970659 - protein, 105 aa, Homo sapiens
MRGGGARGAPERSEDNTGPKARYPREKTGATGTKGAGIFSYPIITKAPRGGKPRRRSVKQTPKRGEVCEGGPNRGELYHKEGDPQRRERAKFQNKTPQPAGRKRQ

SEQ ID NO: 970660 - protein, 116 aa, Homo sapiens
MAAAEEQLSTPHGGGRARRPPEEKEHTGHRGTHKNRKIGAATKNRAAAEDLSTHTTKKHAPRAGSTSEAGVVNSKPPKRRNTNGEHNPRGEQYKRRQERHTRTSNTNNKKHKNPRR

SEQ ID NO: 970661 - protein, 158 aa, Homo sapiens
FSDIQLGRRCESFRQRSSRMADTIPECVHSSPYTSGATHQFVYRTDICGHTEFVPTFSVAKHTCRLVEPNGTQQRVLSVEPTTDAEQGCTAPAHMLFLNLAKNNNSNSGLGRSPKTTWGLSQTSLTVCVPDTPPARCRKCWENHHPRKGPRWVKQKPV

SEQ ID NO: 970662 - protein, 112 aa, Homo sapiens
MTLNHNTKCMARMIARAKLRLPIGHQNHHLFANKACETGESYILTSEVFLLRWDVSWSLYGHSIRSSPLPAQGTDGVVPYPQLALSNPVASPGRVKQESALSRDSRSNPCWA

SEQ ID NO: 970663 - protein, 143 aa, Homo sapiens
ADSLWISHSQGNRRSHTRHIVIRPGVKPCGASRRIPPAKQVAPPRPTVFGTRLPRMESTPLGVHRKPLKGSFPKCSHTYVPMRQKPLGVSGPHNARGWNSGKRCSTACGTTRKVGKLPALSFKRQRGPNTYDYGSPTVRDTLR

SEQ ID NO: 970664 - protein, 278 aa, Homo sapiens
LCFCWLLVVWDATGIRGSLLLVAHDYLVQLVPCPFVVTPPVGCTSYIARCCRLMSRAWMSWLGPPGILVETITLYIACREIPVFSLFCWRLVFTYYVAPGHARAGKPHLGVADMSPFCPEGLLFLSIMLLCYVDIAAARYPNMSPMPNNCVSPYGHRGRNPLWSNTTKKWRVLRKKTLNLTARCNACVRGDFATQARALAGKQRAGDRRLPSASYFGGMTAAVLLVSQRAAAALVTVFDQPLLAATAGQNPAPVNRYSVGVFQPVPMGPPPFRGPSPN

SEQ ID NO: 970665 - protein, 283 aa, Homo sapiens
CGDLLVCARVPLWGRIRAGASRVVRLRWDTLNSRWFRQRGSRLRGVHTRLVVHTFVVKVRVSRSLWPRSICGLVCCPHRWALLCTLPTGRVDVLLVFVVSGPEISCLLVMRQPPDQVVGVPPPFGVRIPLFRTPAGRFRPLSLLVYHLSWPPPGARELVCCLPHIRWRTMFSRLTQRTSPPPYLLGTQRGHLDISSVCMYTPLEGYVIPAVCDAPPLVIKQNGTRSPKAFVSTPHEDWLAPPHRGVSSTRLICLREAVCTPHYVFALGSHRRGGLTSPRRHRW

SEQ ID NO: 970666 - protein, 222 aa, Homo sapiens
LLKLIFAHAQYVLLLSAALSVLWFRCAVLRCLAAGPFVAPPRAVVPRLSEGGLTVLLPSATGLSFAHNRPFVACWPQPETMYALGCVFTAERSMHRRHNLYAVLLRPLRRGDFLIDVPVRIFLFRPGVLDRFYQGAVFAFLALCVGRYGPPQWVAPLGIPRQCSLIRRTHPLLTSLRHGDLKTPPRPPRIVSSTLSAVPPMMYQPPWERPNCLGGLLCAAPS

SEQ ID NO: 970667 - protein, 188 aa, Homo sapiens
MNQAVTPDGPRFFAPNGAITWYPVHKPRVLSKSMVPRLLTLPRYFWVGGPHIMLGRYTCDIVGHPNRDGVFEPSVTCSSSSCRMHVAPVCGPNTQWGHQLKNGLLGPLRDANTCVCSSCELHCPLDDIREDWMMLSFCHNSRSAINIRVRFCFRSPVSEVLLRAPRSGTASTHYMSPISAKKDQTYTV

SEQ ID NO: 970668 - protein, 97 aa, Homo sapiens
MELTPKRVARLIIALKCEHHTPLGKPGNTPALVIKQPKVYTGVSRGTTTRHAHDYSGKGEEGSESTRVKTHSEAEDVPRRLEPPPMWRHHHPRRSVS

SEQ ID NO: 970669 - protein, 101 aa, Homo sapiens
ATLCHNALVGRCDYLGVAYYSRSRNNTRSLSSISAFCLRGIITACPCYRPQDRFVFSRQELFLEPVAYNDRRCALPAPHYVAGAQCPHKRGLPPALDIPRS

SEQ ID NO: 970670 - protein, 172 aa, Homo sapiens
MLLPLEGLVSLATPPGLSPRPGHSGYSHILGGFYCSIATPFIHCGEALLPWNHQVFLPKAPMFFPAPPPCPHPRTSWAAPWGKKQNSEVPTEDATDVSPGSPISSHSHKLFSRVLSPTPPPRVWEHPSPPATEELKWAWGDTTDTQLKEGPKPRPGRLKIVDLGRLFYTMLS

SEQ ID NO: 970671 - protein, 179 aa, Homo sapiens
VSTRSVLDTHFLAAKFREIYNGFPPPFALPGHVMCPTPAKSAARQFALDTFLTPRLHRFFTKSPLSRLLTPSLSGGPPCRCPLGSGPVYRPHNAGSSPDVAPVFRRFNPVARSIAPGPWFSCPYCLAAVILLLVSQPRNLVGRYPPDSAPPRFLAAVPPDGAFTRPVEHIPLLPLGGRH

SEQ ID NO: 970672 - protein, 170 aa, Homo sapiens
  misc_feature (2)..(2): Xaa can be any naturally occurring amino acid
LXSKSKEMRKRTRRRSVSSRLVRSYAPCCWSPVVTPNSLVLNLSVSRIYVGPCQYWLLQHIALLANLHWLETLLFASWVTSDSQPVGRHQPRLVKFSIQRVLCILVSLRNFSLHRRVKRLLQAMFLPPSLPVSIFSGDELPRPCKLWRPPFPTAFFLGRHSPSEGSIKPG

SEQ ID NO: 970673 - protein, 289 aa, Homo sapiens
AVAPFGRVITARPQVVFFPRLLIWALCSPPLRSVQGPPRSHLLRGKPGRHTFLVLAGPPYIRSVFTVVRASPDIFVARGFSRHYLAPRGYITPGFHLYKTAWLVLNPCSLALPARCVGNAQVWAPHSQQRVFPPPSGDTHGWAPNTLYMFPMFAHTTLAAFNIRAIIPSSPFIPIGLNIIGRPPHCIFIAPLHDHVRRKTPTCWDDPGPRPCRSVLGACSLLVGLVGPSAPAPLFVAGVPPPVFADRPLAHRPALLSPITRGRSPCPHSLGLSQDARLLRRGPPSPNKT

SEQ ID NO: 970674 - protein, 228 aa, Homo sapiens
MWLGSLFAGPCFNNLWGANTCGEFISVPAPGAVLCAALFFPRRQFFLPVQIAGVILVVKTHPWVGLTNCVEAPLLPPFKPSATRNPRQGVTAKTTLLLIVVKWARRAPVVPPHAEGEPLRLAGLPNVVFPTCSNHFSPARNEPLLPTVSKNNCITPHTTYPPPFGTNTRINTRPLCALRNTNTPVAFYIPQQCTNPPPSLYGRTNLPKSVFSHRAYFKTRLFTHVPTA

SEQ ID NO: 970675 - protein, 283 aa, Homo sapiens
RALLVRRWPKPWVVAPEPWLRVLGGSTRGGASKAQPRWAVHAPSCLVGQLLCAWAPRSVVCARATGTSVRPKRCRRPLSGPCRPKPQVRSPVAPRACSPGPPLPAGDVSPHNPTGCRPRRPVPCAPGFLLPPTGSIPLALRCWRDNPHRASPAEVRLSRGHRPLLAVWCFPSRALVLCVQLPSGSAPRYLGPRGDNTREQFLPTVPGRPRASCAPPCCPESLLRLSRRQYFGAASSRVGSPLCPRVSSCVPGSCLEPSPRLVEFFPAPPRGKYAPPPPPPTKT

SEQ ID NO: 970676 - protein, 173 aa, Homo sapiens
PSIGYNIPLTHTLMAPCTHARNHDHPTRKRCLTPLIHSASCASQERRTSSSSLTRKILSYAPIISTSAPLTHSALSSVLKRTFPLPATHTCTLNFGCPAHGRDSAPRLLCNQSRSPFCKEELSPIYYVGVISPTPTSYVSIVSHTITNIPLSRSAHTRHVHSLYTVLSLPPQR

SEQ ID NO: 970677 - protein, 259 aa, Homo sapiens
PLRRIPRALAFVFFVVSRPRVASISLPSLYVLAAPLALAVSLCLLGVAPTPPPSLVSMFAPLSPPDGLLSRRLVGRAPSPERDVTVLWRGSLLSAAADTLLVMSVCLALVTAPPALVSLYALLRGNLLLLCWVVPHPPMFVSSFSSHLFTTMPLSRSSSGSSPHFMFCLAPPGISLLSLSIVARRPHTHTGWCLALSPNPSSSPHETPSFSPLVTHTPPVLYPTTSLTPSLLSLLLSLSPPRRLLSLSPRRVLSSLCIK

SEQ ID NO: 970678 - protein, 82 aa, Homo sapiens
MSKTQLPGPNTAGKPRCFYLKYPNTNLAAAYWHGAYVPTTREARATENGVKPAEARASTCPEIGPLQLPGLGHPSDDCLQTK

SEQ ID NO: 970679 - protein, 80 aa, Homo sapiens
LSDGPPALPSRALCGAQRPTLARRPSPTMGSACGPPTPLFGASRTTPPPGVWSPPHCSCAIIAPPPLSPEERVARPSLGL

SEQ ID NO: 970680 - protein, 80 aa, Homo sapiens
MVWSAHYTPSNVVSAPLCLHSSICLKAPTLLPAAKDVTYENRFNLRDPALVPSRRGFTQRAVAPATLVFQASINVSSYGD

SEQ ID NO: 970681 - protein, 190 aa, Homo sapiens
MYCPTWPQKIARDRPSLSNWGRLYKGPQIIQKFFGDPTRVSPDRFWKTPFPLFRPLLTNFWHPVKVLFRHPPRDSILFSFTRPRLIMSKRPAILSSHHQSDKSTFLPLPPPPAAPFCLLFRPPETTFSHLDLSHKLIFSCLLQYTHTCCGMNKITPKPQWNQKKNTPLSNPQKSWRPQNSEINPINPHNK

SEQ ID NO: 970682 - protein, 262 aa, Homo sapiens
  misc_feature (247)..(247): Xaa can be any naturally occurring amino acid
YNAPRAPPRVSPLCVRARDTRAPAHNLSLLCVSAHTPPVSRRDVCHPVLRARVVPPAGSIIIIVRPPPPGRNYLFFAARSSLLPPRRPRPRMFVSFADQKNFHTGAATLVNLWSSPRHSGVRHGKHCAGAFHTPHVGGTHPATSVLAGSHAVWRLSASLSLLARPPRGLVRPPPTPRLALGPPPPHVRFVVSNKPCEAAPRSMLCAKTPPTVVLAKVALHPHRWYRTGATTLTLGVRRPQPGSVIKXCGGARTVSATHPWYE

SEQ ID NO: 970683 - protein, 239 aa, Homo sapiens
GGSGREKMRVSKSRNLSHVGRRLVVSLIGLHAQSKVVVFYGVEVARRGDVYFSLVVGIQSLRPVEDVRSPAGYNDESPPLPRSPVSCYKEFIILLRWVTPKRGDLFTGTKLEYTIIGEMIIGAIVLFPAGYNFTAPLHHSGAIFLAPHRYAPPSPEEIFVGPTHWGPSTHTGVAGHTHRPHVCLRDNSVGRVARFLCSEQYIGPKQFCWGGHSLRHVTPPTMAHTFLRKVRNPTEPFLI

SEQ ID NO: 970684 - protein, 170 aa, Homo sapiens
PPRFTTLGPRWNPNPLSGNSCSIALITMCTEIICSEPRSPQSPHGGEHLALEYTHSILKCFHGRCTPIPDCSNVCQTLQLRSFAPLSFKSSQVVSTAQYKPCLTLMNVLDNPHNVNLIRVKVKTFQCGVYPDTALDTIVLWESALFTYPCAPPGPLKTYWFSLAHPAFMS

SEQ ID NO: 970685 - protein, 101 aa, Homo sapiens
MSRCPVLISCPQHTSARVGTHAVLSLVTPRVLIFGVCRTALLPLTRGQTLPLLPGRRYLSPHAREQNRQNNRLVGPSERDLARPESTINRCCPLCHNNYNN

SEQ ID NO: 970686 - protein, 77 aa, Homo sapiens
PDFSPPSLKNFSPLEICPLKLEDFSPPVFSSSQSFIKNYSARAYKSVYNELQVPHTRVLLNNNMPSEIMPFVKTHPS

SEQ ID NO: 970687 - protein, 224 aa, Homo sapiens
RVLFARRTLLSWPKNSCVVVFNGVAPALCFTTPPPPLVVVVSPPLASSGWFGGVTGYLPSCLPSGGRSHVFRICAPPPHRLVSRPSLRASSPHTMPGGVVARHAPAVFLSHPCRVWCSRARPPAFYFVLAARLATIDVVFPLRRRDTPPLGGAASATLLSRASPRGFSPTRMCPSSFLPRGHPLSLGKKPRLRPHVVPAQYVARCPAATLFIPGGSPQHGQNST

SEQ ID NO: 970688 - protein, 184 aa, Homo sapiens
FPNPFPLSGWLFALAFLFPLLTRAFPIRFVSPLYGRFRFTVVSPSSLPITQAPLAPPSLAHSCGVGASSRLFMTPRFFSRCQNHDSVPASYAGSTTVFVFPAPPLILPSRITMLCPHAPLLRVSHHPPPPITHTLDHSAISTPYEHTSSLLLLSSLPLPHLILRLSSPHLTRHILNFTGIVSPR

SEQ ID NO: 970689 - protein, 96 aa, Homo sapiens
FDPHFSRTPHITLVLNYHGLHHYYVIAPLLTPFNILYQTTHMGSISKPHHPRPTLITPLSYTENHPFKFKTPINPPPFVPFPLTPNITYPGVSSLY

SEQ ID NO: 970690 - protein, 232 aa, Homo sapiens
LLADFSAVLFVPPLCLGLLPKAACLGGVPGGSRLYGSAASPTGHSVKAEVRISVVSSSPLSSRAQSGFGCVIRSLEALFAQERVGRTLVGRGSPPLCMAPHGFIAPDHAACRCRPRVTAGCPVMLSYVPHSLRGGLALETRAAAVGNTRAGGPYFFSSAAHPPVWWRFASAPARVHGPAKGRTSTLACEVEWELMSQSAPQGGPQVPMVLESNKAVWCKKQLFFLRPSNVKQ

SEQ ID NO: 970691 - protein, 160 aa, Homo sapiens
  misc_feature (1)..(1): Xaa can be any naturally occurring amino acid
XGPLLLSACCAALRSARATTSIYSLSRAALLSFSPRCLSRAARALCALSLRARTIVCVALHTTRITRARAREIVQQGAARPAAASSRLQQKRFVVSVCASSPPVRAPTLLCVWAHHASCVSLSVCLCVVLCLETRCARAVRGAVVDYYLVRFRRAVSFAA

SEQ ID NO: 970692 - protein, 212 aa, Homo sapiens
NCKPRECPMGPPPHARRNTLRAPHPGGEKPTCDTPATQRYRPEIILPSPTTCNAPRTLSLRRPPLPLWISPGQWLPPAGVKIPQCKSPPCCAQSNVTLHPSLSVAPRAGTSDPHVSAFNSPRNSLPPRHFLSPMTTSDHSLTYQREVYTRGQQYVLKISIGSTTHPTSCLTHIYCLMKVGFLPEKVLMKHAGPSTLCPRSAPPLPPFNPHKT

SEQ ID NO: 970693 - protein, 65 aa, Homo sapiens
HGVLGAGQGAHAQRPARAAPRDPGTLPPPPGHTRDPRKLAPGACHTVTHSPPSRDLRSQVQQLAP

SEQ ID NO: 970694 - protein, 43 aa, Homo sapiens
MSPHFHNVIGHRTSFRQLGRGAPPVVESDLETHNFSPTIVQTN

SEQ ID NO: 970695 - protein, 105 aa, Homo sapiens
ALRARGAPARFSLDLGGGNSAAAPSLIVLVWFAADPRRLYDKGFRLLFAGVISRATLIVPPRARFSGAPLCRAARELNSRCAGTIAPPTEILVRQKNRRFYTTPW

SEQ ID NO: 970696 - protein, 68 aa, Homo sapiens
EWTSMDEKCGYGTAGACHHARLIFCIFSRDGVSPCEPGWSRSPDLVIRPLRPPKVLGITGMSHRAWLC

SEQ ID NO: 970697 - protein, 129 aa, Homo sapiens
  misc_feature (82)..(82): Xaa can be any naturally occurring amino acid
VLPRRTALGGRRSAPWGAPPSRFLPFGRAPWDRPRGSRAIIHSLWYVFGAPSPAVLIAASGLSRGCARARVDLLRAQHICLXPGDMSSARALLSPAPRRCHNTLSRTSALLSPQYDLFKQNKEDPRTLR

SEQ ID NO: 970698 - protein, 130 aa, Homo sapiens
MGCRETKRGGFRSLAVWCSGRYWARGCVPLGGRDSCAARRSRGCRSCGCVLRGGVVYVGAFGWAAHPRLFFASLFFGDFRPAHLQFRGYSPRVSLRALLSLTLSSLVLSRGWGAHVSFSFASPARGRYFL

SEQ ID NO: 970699 - protein, 182 aa, Homo sapiens
MRITRGVLRGLLFNLQNTLVENNKNGLSHGAVTYIVRYSQGYGHASPRFFYAEDTVVHKGYGGMRIEKSFGGGSLPPGVAMSKDNPNSGGGVAEEPRSIEAPGDVITSKKREEKKLRQIAEGLGEGGGTPPPKDERTGDILNQYIGEKAEHPRGETSNGKNRGLNFFMFNPEKFSKNPKKHN

SEQ ID NO: 970700 - protein, 263 aa, Homo sapiens
RGFVGGGFFGLGCPGGFVVVRRGFLWARFVSTSGCWALFPGPLFLGVVVWGPRSSAGAYPFAGVSPLRWWCPPFRSFPSFPFGCFCGSRGVCPLNPRVVGPPRSCGIRWYPYPARARHVDSLGPLAGGAPMFFSGCVLFGPPRSCPSPSRWPSWGFSPRRPRMSRARVFVSRRSPPLVVCLPRGVFPGAFSPLFFCALPIFSSCLLGLSPPPLRISSPLFHSPHPPRGGLWRTPPLCYSRRSLCERDSGVCTLVFVDCVPSSI

SEQ ID NO: 970701 - protein, 130 aa, Homo sapiens
MSHVGGTPCHRVTKGPPPTCQIVTDKKLALLKGSFQVVPLGSQGGTLPTLKATGKGAPSVQHKKDAEKNDPQATTMLGTKNCESVGHPPREEKTLCFRSRPQGVKKSWHHHGGLYQDTSGGHLPLASFPP

SEQ ID NO: 970702 - protein, 57 aa, Homo sapiens
AATGVMILYKSLYVGHSYEDPFFGFDGKFLNLENPPLPGGPKMGGPPPSPHLEEPQK

SEQ ID NO: 970703 - protein, 296 aa, Homo sapiens
PGDAAAFEEVCRVSSCSTRGRSRRFRSGDEPPLGVRSLPQPHGRGAFLFWARYTADPPGVFFVPFTPVLFIQRDMGDTSAVILWHREPSVGTPPLKPSVAAGRFHGPALRGGPPSSDKGRSFHERDVLPLLSPPAWLLWASFPRTEPSLGSARCFQRMRCGSLASLRLTTVSARSRCYSASMGVWGHPAPHKTACSAVWGPADIYTKTHRVLAGGSPNSPAPYEPSPCNTGHCGVITHHLSRYCFRCANIPVPKESAPLLTLDCYETCHARRMLSHPCMLSVYRHDAPNKSVSRQQ

SEQ ID NO: 970704 - protein, 269 aa, Homo sapiens
SVCDESKSVRSVLCCVISFVCCAVVGLVFVFLLSLFLCRCCLVVASSIASGDAWPLLRGAAARVLFTPPIGRCSPLSVPGARFFVQCPPPYLWLDTNCPGLACPVRENFCVVLPLARPRGNLSGLFRAPPWVVPPQIGLVSKVRPGDATLVARAALPLSAAAEVSQNLYEVFLLATLLSAPHKWASSLYSYRAVFAAHTEELSGRLSCLGAKVRPCQVLATENTPVVNLVKLRTHSVLRVTPPERLLGGCYASLPIDALSSRQSRESNN

SEQ ID NO: 970705 - protein, 129 aa, Homo sapiens
RATPRWGHIKGPPRKIIRYTAHPPLLWAEEGPSAIVGHPTGGGCSPAPPEAPPAGGEEKKWAEPSLLSVAQHTCVCITPPLVVPRVPIESPPPPFFPRGAHCVCGEAPPPLEVPPRLFSYAVRSLSGPR

SEQ ID NO: 970706 - protein, 230 aa, Homo sapiens
LWCIKVKDALAQLFSHVAVWVARTSCYSLGRNNVAPEETFVEADLFGGILVMPPVALIMRRGAPYCEDNITMLLKEEPVAFLTSQVRPQHSENGLLVTSHNCLYGTFPTPWCQRKKVHSAGSKSHPSWGSSPPAEGRKPGVQKNAVWGRATRPVEVKMGSRNVGQRTRPVQTETERSRRATERSKEESPTFVPGEEHSEIPLGARPRPTIVFIIPYNNIPRNTPQFRGIE

SEQ ID NO: 970707 - protein, 121 aa, Homo sapiens
RNCQLTHRGPPPIVWGALKQRHSGFVLYLSCCTSLYPPNSRALTPVVSIFYAQSFPPPVFYFAKKKSSSIKVSSCCLFCNYKDIMNPYSLVTQKLVVALPPSEDLRLTHRVLFANEGRSLL

SEQ ID NO: 970708 - protein, 203 aa, Homo sapiens
LVDCVLCYLRAALLIRGRPYDGLLARRMARSRAAGWFLVREYSLCSLGNLGSPLIALGVVCATLSVVRQCFILVPGVRETPMAPRGFFAAPSFRRRACYANICVPTAVHRGPPHRPPLLCAPPGLAARPLVRCKFSWLASFYWPVRGPLLVVVTPCVESPGRPRWEFSILLVPRSHLMLGHKSHCAGGTASTRAVVKSRREGF

SEQ ID NO: 970709 - protein, 172 aa, Homo sapiens
CVYGIISAVLFSLLFSRQFAFFTVFICYLLVAIFLPLVGRPPLVDHGCESAKRPGWFPAGHAQFDFRGGANRGRYSLAALCPGVRLRPADFRGPNPGLWGGPDVLPRYIGPPAAVLVSECVRRSSCHAGAGQFTSLFKVLRGKRKFDGHELVPPGVFQTNMFGPTAIIVGRG

SEQ ID NO: 970710 - protein, 115 aa, Homo sapiens
  misc_feature (20)..(20): Xaa can be any naturally occurring amino acid
  misc_feature (69)..(69): Xaa can be any naturally occurring amino acid
LACAQLTHMALIARQVRRPXRSGAGASCISTLTRMHVISSSTVPEAPVSHNRRPCVGYSPRTQSVTLEXQAGSTAMRLREVRVPRAPKADSGNLAVERGVVTRWTINQGRLKIDS

SEQ ID NO: 970711 - protein, 65 aa, Homo sapiens
MMYPHHNNIGGSAQLTPPPSDQTVKRRSMYTHEDNNTPHMVYNPSPPFFPFPPPPNSFRGFLFNK

SEQ ID NO: 970712 - protein, 138 aa, Homo sapiens
MARRLRVLFACVGERQREVSAVLSGLSNQRHEYPTGVVSDPPTKTPCGVKPGLSTTAEYTCSLPEALWSAPASELMGLWSGFFPWPPDDTGVFADTTHAEVNGVRLVAQAPVLVSPCGGGAPLPDHRNKVSCMRGTFS

SEQ ID NO: 970713 - protein, 160 aa, Homo sapiens
MAPFVIYVRRTIVILSRTTRRRVHKGTLLGPHGEIVRAGAISAQPFALDTYNARAKNIHDSTSSPPWCIKETHRVPVVFPKDPRLKSAGRMVSKNVFENQKDLGEGDAPLLPPYLVGFSRVYACALPSPLTRMRESLSRKSIPINLRDKNPHATVPTGPL

SEQ ID NO: 970714 - protein, 151 aa, Homo sapiens
ATMLPLRTLSLLLGAVAGKEVGYERLGLPTGDDSPSGQECTGKTTIHILAYASPNRCLTPASSYILMTRPKQTFNEVAADTSKDISGSNFENTSRRRRRFISIRGLKTRSPNLRNPSPHLSTGHRTPDLEGRAYLASCKVGPLRGTEVSLA

SEQ ID NO: 970715 - protein, 113 aa, Homo sapiens
VCFSRFFPTSASQGVAQHLVSLWVFCCRETSSVWCRAGGVGRQLFVARRGPPFGCQSCWARRTVVRVLCQPRRLMASVTAGGHQGLVGLWAQQEVCPPQRLRGFSPLWAQRVV

SEQ ID NO: 970716 - protein, 154 aa, Homo sapiens
AALCCHPRRRGINNIFVIRAAAGSPLRFFISCCHTSGKTFYRGPPPLLTTHFGGDPPLIEGRDSQVCGVALVISGCHPHHIEGSSATLCVAPRYSISLHSFGQLLSFIKESPSRLLEGTQENNGRILLGEYRAKESSHTVRSPGIRGELCELGA

SEQ ID NO: 970717 - protein, 205 aa, Homo sapiens
  misc_feature (127)..(127): Xaa can be any naturally occurring amino acid
MGRRVPAPLKGGKNLTPRGFAAGAAPPLLNDSRVSLTSSHWVVEVSVLLEFDWHARALFGSSCKVVVSLPALSLAPLDFMGSSPPPVHSLQVRTACSPHPSSSRALAPRPLSPLGAPCLPPPLPACXFVRPPNVAPHPLLMIPPHDPHISLLSTLPALIYAASLLTPLSINTSLSCLTHPRALELIPPTLISSLCSLPPTNNQKQ

SEQ ID NO: 970718 - protein, 135 aa, Homo sapiens
MRLILFLVPILGISTVKKHCGRPSSVSMYQAMKNEIKKSATSWRLKNISSCDFWKSPTTQGDSQSRVPFVERPGSQSVLGVPGIAYSIMIEDVQVLWTKRMKKCSLIGEENGVVTSIWGLPYPGRDFPRKWITSW

SEQ ID NO: 970719 - protein, 309 aa, Homo sapiens
SCRAVSAGGQGRASCTGAFDRRSSPGHHAGLDTRGATCAVATNKFFLDALLLPVGAQIVARPRFHAVGYGLLHPKGIWRRNPCSMVLCNPSCLEVGISNTPELGNTSLGGGPCVPLRANALVVLVFLTPGAPAPLVEARRPNPNLALFPKAVLGSLVRALFPRAPREVSQTGRGSPIGGAKRVPRVRVELLIGPWHDIGAPKGPHIVLGNAPWRPLGHNMGSTNELRADCAHTPSVGEHFAPGADRDEAPKYRLALVTRGEPTGPARGFLSWHSPSRSLAPTTPGETSAAESENATTLETHLRRDAPPT

SEQ ID NO: 970720 - protein, 117 aa, Homo sapiens
VAYHVCLQEVCLFVAGRLCVVVTVHARRCYLSLFGARCVPAGGAPWFRCAMRGSLSICAWVNPPKQARLGGVICMAGFGLFCGVTGSRARCLVSPPRVHPQHCVVNLPATRVSPPLR

SEQ ID NO: 970721 - protein, 203 aa, Homo sapiens
PPRVLAWRLSSLGDICEHCLVGGPPPLGRIASLASRSIWGFPPPLLSAGSFVRVPHPCAGRTGFPTERLPCSLRDFVSTVRVLGVTPRSSHLWGDVLAPPVSLAQAAVSRYARCRVHPPSGPTSSVGLLAPEGSCCPLASGWPLFYFLQRIPPSSRPGSALFVLLVGSSHHHPCEWLGSFFRAPVIGVKNINTIWGALPRENN

SEQ ID NO: 970722 - protein, 196 aa, Homo sapiens
  misc_feature (90)..(90): Xaa can be any naturally occurring amino acid
PSSVYVILLPVAPILWRRRWCCITYAAAPPAPLDSKILVLLFSMIRAAPLPTLYMGARPYVFLSPHSCSLLYLRAPPAPRSASVVSGERXTRRRNDAGFVPQPPLAYASVSSLVVGGPAKNYAPPGIAPHLIRRREHTWVFLTPGAALLSPAALPPHVVFSPPGGLGVLAAPPPPVGTPPGGRLFLKTHKGWCVKT

SEQ ID NO: 970723 - protein, 81 aa, Homo sapiens
RHPMIVPLGPREFLLVREGKCAPPPKNCSVVGTTTFNNDSFPPLRSRFPRDTIFPRGFLRPSFPSAGVYSSALRSPPTICR

SEQ ID NO: 970724 - protein, 198 aa, Homo sapiens
GPQTGASTRRVDAPRGFRPSVETTTGCIPPSRRLLPGPRGPPHWCVSIVSPRAWPRYSAVPWRVRARLSTGLFMFVPPLPAPLGVFCVPPVPLFPPGSFPGAHHISCEAPPRVSHGVLTRPYLWAPPFAPPYWCSPPPALGNVSLFTGPTPTFGLEEPPPGDTCAFFYEKRVFEDNILEYGYSCFLCGRAPAKQMTKK

SEQ ID NO: 970725 - protein, 300 aa, Homo sapiens
LLCVVLLWCYTLWLCVVARLLLLAESRGVGGSPQSAPVLGVFPSPPAGCGIRARPFGRGFFRARLMLARGVAECSFWPSGVRRGASLLLWARPFYPLLSPCRVSRHHCPRVFSPLSPALVMFMPPSPGLSDRVILPVAPPRVGSFLLLDANWVILGRLSFVSARLTTSSQQGLFIVEIGCFVEQLGWGALNKRGRNSFYTPPAHDRLPPVINKGYMLCLGAVKFIICVSPRMRQQFNVALCLREERLFVVELGFRGLFFATSQCRKHNYVGANSCGALLLLSQRTQKPNPGGLQKTPPHK

SEQ ID NO: 970726 - protein, 130 aa, Homo sapiens
MEQDLVGTFSTRGLPRSWSKVPGITERRRNSREQILLEQIGSGDNFPTFCHKSNTILTASERRVIKQDHSKSGGVKSPKREKSRHIREFCSTHIKTGLIKHQEHQRLRTNKLQRVRPHHTLGETHTGGDS

SEQ ID NO: 970727 - protein, 152 aa, Homo sapiens
LLFPVLVWLDRRVRSYGPSAVEYHSRLVLGNRVLRGQGRQTSLRLSVSRGCACGRSPVVLPRVCFLCAWVCPWLPPRLLWFASCLVSQSRGFGASWRQARAPGLSLGTRSCRIFIAKSARVFSVRGTGSPAWPPGCDPACEPPCVYITSPNS

SEQ ID NO: 970728 - protein, 563 aa, Homo sapiens
MRMKQEREREGEERGEPETEKAGPRTDEHRDEQEPVSIPQSRDAPQTDTATPRSAGRYAATEHEERSIATRKERPHEDDRSDNQRSRQDTQSSHSSPVSDRQEDTRQRATQTERTTDQTDTLRTHEREEGGQGKTRRETETRRANDRRMRERREKMSRTSHERRKNADQPNTNGAAQTEAETTPADQQREEERGWNTQRRTGNQTRREIEEPRTIDMPPESKAETMPTRNKHTAARAGRHERHRQQETTSIPWNGPSKDRKQEEEHGTERNACTGLTTHHATARAQQDRDRQRKRHEQRENDTSPRPIQPCISQPPDPPAYEHGVDELARSHPPCTRRAARERRHGREERSRQTTAPDRAGDSHPHERTPQRGKSETTPRRELTSGPQAGRVGDTQDEARLTTEPDDTGRQEQRHVYEENESGKRYARMRPGHKRRRPEQSVGETRSDERERSAETGQAKTRAADRPEDISYQQARAHSSRRKTLRQADTRQEREEQEKDIEHAANTQQKLPPAQSSIDADRAEPRGELTRGQQARPLRQTDEERAERRDDTTAGTGTKKKGL

SEQ ID NO: 970729 - protein, 137 aa, Homo sapiens
MYGPRKKSHYSPDPSKVFLPTTPRVINTRRVSHPARGLKKMKYRLPQSTQEDGQQYTSWEHIPQGGPDRNSGDIEAFSGAQQHVILTTGEVTPRPPSGAIQDCTPRNPPVDEGELVSTNKERCGAHHKNPQRPTVVA

SEQ ID NO: 970730 - protein, 255 aa, Homo sapiens
  misc_feature (65)..(65): Xaa can be any naturally occurring amino acid
LSVNVSPDGRPARCSFGGFGGSPGSARKFVFLLWFAGTPVYIAARVISRLAAGVSRGKIFSSPGXFLAPTLSSALAGANLSSHSRRFPAKIFFGNWIISGSSTALEACIVVAKHIFGSRDTSCIFEAKHIMWTHRFARPLDFYKSSLSVEIWCSPPPVRYIFRGETSGRPPLGVLYARGKELKDVSLADTFPRGASWDTTPSKLFVQMCAHHDVSADLSVYIVFVIILLAHISLLGPRGRHSTRSYSPTKKQITK

SEQ ID NO: 970731 - protein, 232 aa, Homo sapiens
FRRVILYARRGRILVFRRCPRCVSPPVVPRPGFLVTGSIKRFEESLDPAGPATPPGPGSRRVFVPRPPLPVARCGCHGSPARQFSGVEESFPPLCVKAWRCRLFSDGLGGRAPLVRGFPAKRPPCAGGLSRAGPTLGAPYRVRANTKQQTDQRGGRTTQKPGDHTEGALATSSRHSPQWRHRRASHEGQKDHHAACDGAPPPALIERGGKDRVFQATLGSLHRRRPLNSTHV

SEQ ID NO: 970732 - protein, 110 aa, Homo sapiens
MLLAPRFSCGRESGAHFFFVAGPLERVFFRCLAVAGNIISAGFFVGPCCVCWAGGLFPVDGLFLALVALIKRLRFLRGVARNWLHCRASCVLSLCGKSSVANPLLISRCR

SEQ ID NO: 970733 - protein, 232 aa, Homo sapiens
EGGRDGGAARSRSGGPRVQKGAADRGGKKRRRGAEPTVGRGPYPPATRKRGRSRLPGHRGGVPESATSGAPTKVGPTAKTHDLPLKGGYAGRTTLCCGGPTMPPTMGVYPTSNCCRYIEYIPHGWSDPPIVKRVCLRVVQRAVKVSQRSVGGLLKPGEIPASGWFNGPCSKFSPPGVVERASHEEIIRRPLCLKAARVPPRVGERHNVVQRGRGKTGRPRAPRSTRGVPQRR

SEQ ID NO: 970734 - protein, 200 aa, Homo sapiens
SWWLLPRVSRACVVSPPWLWCERAGVSFGRVPRGFRNWLAAVWEVRVVSSPRTPFVAVVFGRAPSCVVKRVGGAGFSSVRYTMTAHLSTRYCSIIDKCRSALPGEYSRLVCYSVSNKEVHPAIVYVAEVVLPSAYVCQESQNINVFYFQGRRGVFGSSSGVSLLVLTLLISNRNKFINIKIHRTGKKTVKEKQQPDKDAK

SEQ ID NO: 970735 - protein, 264 aa, Homo sapiens
RAPRTPAVCCAGAPHNVSPGGPQRVSQGRPNTKWCAKAGPDMPNRLVSVCGTQNKRERRPRGNRARGAEEKRTHKSFARGHTYTALRWVTAPQTITSQRGLVALIGPPRDQESPHKVSPEERVPPQRDGRRPPKGACGVCEVESLMWKTVRKATPQGGNKRPGGRLLWPYGEARQQRPHEFEEARSHDTRQKDTLCVVKLSVDRIGRHRQCAHKWSDVERKFVFHTRRIESPSGYGYSISRWARPEELCTAPTIKPKLVLATAR

SEQ ID NO: 970736 - protein, 182 aa, Homo sapiens
LLAGESSCPRLIILLVLVAPPPLFARRVVFPIWSARLLLVFNIFWSPREYFLAAPSFCRRAVESTSRLRPPITLVRLRCAFAITTFYPLGLSIFLVARRPSSRRPPLRVSLSVGPLPLPHHKCLARAPMYFAALTHTRCCVETPHGGLPQRRSQLLALYWWAPNTSSAALDWCFSYPPPLYR

SEQ ID NO: 970737 - protein, 304 aa, Homo sapiens
ACWQEPRTLFWVVPRYNPPNDGGNPRGGPKQACPAGSAHPGRAVLDRPQFGPQRRGAPIALMPLDAAEKTDDQVVCAPAGRKQAADHAPPRGHPRGMLSHPGGFLSPPKSGHSAASLFGPGHQGGLRTHAAYSGAHSSTGERTPTAATHDRIVWWGDTQQSRRLVGTHPQDRLLQGGGVQGHTSGASNRLHVVLRRMYGRREYSLSGESMTGRYAQSDSSRFTPTPPRREPRTRAAPHTRLQRRVSAGTHHNECCGCQHAQAHRTGGELGGRRGSTTGRTRPSNASWARAALPEEKKKRTGENQ

SEQ ID NO: 970738 - protein, 101 aa, Homo sapiens
LVLRRPLLLCVTGLCGVCLCVLSADYCAGVCFRLSRARVVVWSALFVSVACLCPFVVMLRGVLATYTSCVFPPAFCFCVVSTSRPVAWVVVPPPGWSAGPV

SEQ ID NO: 970739 - protein, 280 aa, Homo sapiens
  misc_feature (26)..(26): Xaa can be any naturally occurring amino acid
MISRTHPGVCNGVQNDPPLRKYPTRXCKVSLTRKSVMEEVLLPRAVVDLPRNVRCVKSLSTEHLGVVLRSHALLRDTLLKETLLFAVAAGRDSRMGHHTVAGVTHPRVCGGLSLPPSPSRLSLVSCGGRLLVPPPLSLPVSCFWVAPPKWGPHTCCGEECSLTAGGRTWGGSQFMWLTHRTLDVCAALKHALALEELSQMCVQQRSTIMSGAPLCGSTLLRTNKFANTWENSTSTVCADYAESTAPTFLVSHPPRVRPLSAALSSLVFFAPFISLKDPLA

SEQ ID NO: 970740 - protein, 102 aa, Homo sapiens
CFESSAATLHKKGFGGSKVMVVPAGQGLHGCHSIVRWSPPPRCYVVGSPLSRIYAAPRSMYIRCRSEFSQEMCPPNQRLLRAFTQNTTVRAVDPSSLWPPQQ

SEQ ID NO: 970741 - protein, 40 aa, Homo sapiens
MLWVDVYSFLMSPTEDFSAARFCSVAPGGHCGSLGRTIVR

SEQ ID NO: 970742 - protein, 127 aa, Homo sapiens
AAYTSFLPMPDLGSLGVPSARFSSLCAEEVNSAPARKNFLGVVCEEHTVLTREVSRTVWPRVSSASKKIRRARDFLGPPYYSRAVRVLTNGVSLTRRPLRWRPQLTTTSVLRTPHSVVRLKPRSVSG

SEQ ID NO: 970743 - protein, 115 aa, Homo sapiens
  misc_feature (53)..(53): Xaa can be any naturally occurring amino acid
MRLVRALAHHALFCRQLSPSGYSHHSCLRWCHHCTASHSPFVSLTLCSYVWRXPHMFSLLTALSHLSSPLLRTLYMFLFYHFPHALSSCSILNTPPPETLALFVLISRVCLNYIE

SEQ ID NO: 970744 - protein, 111 aa, Homo sapiens
GRVAALVVGHWVTQEGAASWGFSACCAESHAIGEGCDMENPLCCGPPLFCGVKQRGAFGALVRGYMRVSPGEKEKKRRGTVMGYGIEWPWVRAYGRECRCIDWRGARSCCS

SEQ ID NO: 970745 - protein, 169 aa, Homo sapiens
MALSVGSRPHCVLSPALDVSLFSVSRARAVSSRRARECRCWCRSRGTPRACRASAFSVFALLYSRRWVSGCSPALSPRASHTLCSVGAPPLLRSASRCCICEALAPPWSRALSASSPATPALPLPQRLYYFTPESDSLLLYDLAVSMYAPYRALYYLSSAHCVLLPPFY

SEQ ID NO: 970746 - protein, 84 aa, Homo sapiens
  misc_feature (14)..(14): Xaa can be any naturally occurring amino acid
  misc_feature (42)..(42): Xaa can be any naturally occurring amino acid
  misc_feature (55)..(55): Xaa can be any naturally occurring amino acid
  misc_feature (64)..(64): Xaa can be any naturally occurring amino acid
RIEEGIQRIAYLPXRVKAQWHRCIRFVNDRTARLLPINGSAXVTHRASYYGCRSXLYTISMSAXLPHATWCGLSDFRPASPTLR

SEQ ID NO: 970747 - protein, 176 aa, Homo sapiens
SAHVAVSVGRSPPRCGSVSNRSMGSAPPRFVPRGDIRNGEVYLPLVIIVLCFSVIIWFATLLLPETYGFPPPPLNRSSLGVSTLAARLVWAPASELGGARTNCGIVVYLALTDVGVSPRPTVLLSGIAQDERGSAPNTPWFCAARSCGVRFVPPPPGMALLDPRCIRSFVPRGTSL

SEQ ID NO: 970748 - protein, 130 aa, Homo sapiens
VVLGVPGCSGVPVLFLSFADVRLALVGACVAECGLWSSVSVGGLGVSGSLNRCAVLVSDGLLLVRPDGYYGGARDSAARADLNLLVVYSFVLLEFCCCPGVFVVTFLVCDVSAVMYLAVYDAGFSELEMA

SEQ ID NO: 970749 - protein, 156 aa, Homo sapiens
MGSSAKWVRTEAPPVLNLRRKKAQCAPSSLWGAQDKKSPAGVNSEPERRCASATKEANEEPPPNRVVVFLPTGKRSLPPPSMSDPGGAHHCQQRAPDLSRQDLQEGKKNRPGSQLEKDEPPGFIGAPGHPPHARDTQGTRASNMLTGAPPPPARVR

SEQ ID NO: 970750 - protein, 178 aa, Homo sapiens
  misc_feature (176)..(176): Xaa can be any naturally occurring amino acid
MVKRSSLYARSPCLIPSYGISYGFSTYLKSAFRTIPTEQNSVKTALDYLRPVKYPSGGYSSPQMILLTDCDHPPSSMHVLITKPPRVSLLRGCSSSSTRTKHTGAPHMVRREHLVGYIRGYTGRRKKMFVKTLRNTTVARRSYSALDPTADTLGQSPLCTLHRTPGVGHPAVRAPXYC

SEQ ID NO: 970751 - protein, 129 aa, Homo sapiens
MYIVGTCVVLAALRSTLCWCVGGVRLTALIDCAHLFERGRLPLRCGAHLLTSSAATLRLHVCRVDAFLGSLHCSVSLALLISRTCSRPKRCDIYFLFPALVLCPPSLSLVLCGVCLLRSRVRPLLSLVL

SEQ ID NO: 970752 - protein, 120 aa, Homo sapiens
MAPWGYATLRGRPRTGLRLRGGKTAWCTTPEAALTSHESACRVMWNGPQSHLGAPTKVVGYQTLCADAELIMSEAPGPRRLSYTYHGAHSNKACFNIKDTLLFFRDSRISVIAPRCTTCI

SEQ ID NO: 970753 - protein, 244 aa, Homo sapiens
FSVGTVGRTGRCNRVGPSWGSRTNVRAGCLRFRALFVLRAANVGACWRQIWAVGSSTRRTRWWVGGVNSQAPGSERTNYIGRQFVAALFASHLAAVCASTRFCVRAGGGAVRARLMEGQGTVNLDVAVEVIGARVSCQVLTDSELASWPPGGCLVWFGCVARWLAKGDSGTCEALAGCGRSPRTLAVFSLLGCHGPAAVIAACLVCPHRDCCGLTYGRVLRLSTLGLSLLVPPLFCGPSFRPCL

SEQ ID NO: 970754 - protein, 185 aa, Homo sapiens
WVATLSFVVAGGFQLGCESFLASVGGRSLAAPLWCLHGGGPGAPLLGGIGCPSVRPPATPSFSGVTYTSMGSDSSTGDSARCGPLPSCVLSSRPPRAHPSPLGLAFPQGAPLMEYTAWPPSNVSRASAPRPVRVRPFYGSSFSAACTVLHELFSPRLSAFFLRPHAATEIMSVIAGVTYLSPCQK

SEQ ID NO: 970755 - protein, 240 aa, Homo sapiens
HEVLFFAPSSFWPLFFLRHVGWLLGSLRGTPLCGGGGILPRRISLSGLGARLRFSRDGFLPSVRGCLRAHTIFVPRGLSRAPLFLALSEGIGGPTLATREYVPLLPPAHGGAIHTPTAEISLFSRPHKHKGWCCSRKRRQQGQLVRHTAETRQDISATHWWEVHTRGRYSPCPAERDLHTARRSESEQRRSAFTLYQENPEEIHVRQPVLPPPVDPGGGHHRGENALHHQERPRGVPSKN

SEQ ID NO: 970756 - protein, 176 aa, Homo sapiens
SGCSTPGLFSPNIGGGIQCLYSSRVPPGGNQLCPQMPAGNYPFLVNGFTPWPPFSVAPFPSQPRGVPHRPAPFNVPALQLFVSALVLPVRLPTRSCASLCVGWPLASVAPPPTRFPRGASALSVSTLWLTPLECGAPPRPHTPLPRVYRRFEAPRVSEILEGEKRWYFLESLTTTP

SEQ ID NO: 970757 - protein, 130 aa, Homo sapiens
MAQEAARQKGTRHKTESSLPPETPPKAGPLEPPFLGPQGTLEITATVEIRERKWGGQNLKGAPIQPNAGPRPRRPIPGQKRLVARSAQNHQERCSRRHEQARYVYVAFPRKVFAPRDDAIESLNPVCLVT

SEQ ID NO: 970758 - protein, 94 aa, Homo sapiens
RAVARVEFDLYAPGSPCALWSPPESLYHMSCPQGAFAYPKIMGKAESVGVHHLGETCRRHLCVNVSWRNNKFGGFLPPAEIAMFGCSPPNSVAS

SEQ ID NO: 970759 - protein, 229 aa, Homo sapiens
MELHEDVILDKTSSVTVVPALAYAAISPARFFTLAPSTEGPFPPVLWPFSPVYRGFNPSCYRALLRRSPQMAVGTLARKRVLPFFRGRTPRGQSERARNHRRGAILPFPGRQEAPPRRWWGQPGLKTKQQGALQTAGKKLEGRPLGRGCPPVRPPARYRSPPLAVEQACREPPTPKMWHARDTAHLKDRGDTAGLNSGSQKIGCARKTRLVRKIRSSQDTTPARAARLN

SEQ ID NO: 970760 - protein, 116 aa, Homo sapiens
MTGYSRKYVGKCPPWTPGTHSEHLNHADKKGGGPHREDTHNVRIRLEVHVLKSWTKGELFQVLPVAPSTVHKMHQSRSGGSRLVNPTAREAEVGGSPGTQRSPGPKPAWATPKTGL

SEQ ID NO: 970761 - protein, 250 aa, Homo sapiens
MSAIITPGATRPCYTAEPRVSTHRVVGRSPPPKKKSAAARTRAALFRETTHHEKRRSPEARAQQRGGANHTHGEGEHHEEAHHYNKIIKRPPRDRERRHDPTHRRQHTETNTHTPTSEHHDTPMTIDRPTHANRSTSHRTARRKTKRTSTRPTETHMKAPKEEREREPEARDYDSSEPAEDRHTQNKPARDRSTTSDHTADAHASADGAEQDNSDDTSTHRPQTHEQPREATTQHNTAARHTRRQRQERT

SEQ ID NO: 970762 - protein, 131 aa, Homo sapiens
MQASTYGALCVSLAHRQAMFAGLLSSIPFGLGGYRPSRISFCCVAQPLLEQCFSHSPGFRDNNCPRGFRPPILVPAGGLLFFSSVPTSCPVTTAPTASVNIFATTSRRLKIFLVWGGPSSRGRDRPPSRRP

SEQ ID NO: 970763 - protein, 275 aa, Homo sapiens
LTVVGIRSISAHSLIVRPYIVPERNNTSRVFIYTLLISTRARTPHSPRIPTLLAGRIAQYLRSLSPTCRKAAALRPYAQYIASSHSSKAHYCAPSTYTLHYTPTHPYLPTALTHLHSLPHTHSTYYNLTHTEPPAHFPTHTNHHYPSPNSNHKHTPTMPFTALYPHSHHCPSLPPQTQTHPNPTPHHNNTPPHHHARAHPPHPTPPPTNTTSHTPPPPHSERPQTPTTTTNHDPPAPPASHTQHHPSPTPTSPSHHLADTNRPPPTETDDRNTHN

SEQ ID NO: 970764 - protein, 125 aa, Homo sapiens
MPPAFLSTTENRVFTRDVGTKTRHPRDTVGRPIFLVVNGSFPPCALIRRYNPLPPRHDLPPNRVQGEAPILHTRSGSLIRRKRPFFIKKDHTRISGARDVHELYRGSVHIPHVLLLPPRVVLKYE

SEQ ID NO: 970765 - protein, 70 aa, Homo sapiens
NPAVVVQQGNNVPILAAQQHTKCPNTVYSRGGQIPSPVKWYGSPLVDKSGCGAPGLFTPARRGTVCLPAK

SEQ ID NO: 970766 - protein, 189 aa, Homo sapiens
MGETALFGEHPPARKGADRYRTPGCTYSKPPPLPPPPTGSTPMPPPPPHRCESTKTLPTTRQRTKRYEDNSTTNNGGGDSLAQKNKGISNSRVQSGHRDTGHHLPTAALGTPRPTGNNPMSTAGANTATKKLIRTRSREDTTWTREAYGVVGPAGRQHHDGVSREQRHPPELHQSEGPPAGPQGNFSPK

SEQ ID NO: 970767 - protein, 160 aa, Homo sapiens
WSLVFPRGVLVVCFAAALWLLSCCCRVAYHFVRVLIPRTPWGPARGSRLPAGVFTDHNRATAQPVRRPPILVPSRALFFVPPGYKCPRCPGFGKVPWVLPISPPSCECQGNSLVTKSENVKPRGQKPVHRAGITAPVGRDRTDAAASSRGQDVRPTNPVI

SEQ ID NO: 970768 - protein, 91 aa, Homo sapiens
  misc_feature (1)..(1): Xaa can be any naturally occurring amino acid
XHVSVPSASVTYNTQAITAQRAVEHLPQLYAETCCFIGSHTRYRAHWGLAPVLRQSGETGNRPHGARINDTTLGALTHKQGANTARDRIRS

SEQ ID NO: 970769 - protein, 45 aa, Homo sapiens
MSHIMSPCVITLNHDSLATSLAALVFTHPHIYTDRYKTHITTQNH

SEQ ID NO: 970770 - protein, 251 aa, Homo sapiens
KLNNRRRCGAPAWMSPRAAKGCPGSHFGDNEDQTGSDPSRRSQKGGKHTQTKGRVFTKPGQAEKAKNCAPKIYGWVKMKGPVSGTIPGSRGDAPTKGAAHGTSGTNIIVKSRGPATCRPHPRAVNPQGNPGILWASVPARFPGDHWLATTTCGEKQTIFEGGEPWKTINHREPPQRYLGQICGQSSREDLYHDRALRNKSCDVLYLVHTWAAGDIKGTSWADHQKLKGAQSSPTSEKKWEIPDPDRRMRKQ

SEQ ID NO: 970771 - protein, 182 aa, Homo sapiens
MRPLIVPTTESPLPKNGPPPFFPKKSFSPPSFSQSSRVNFLCNAGALQRKPILSQDRVRSRLIHITRPYFHAAFLYKKTHCLTRAALFLPKTPRGPSFSILPVLHKMPPKPLLIYKNYLPIYRQPPCKRGEIHTTLKKIIFSPKQQHPCKTSRAAVLIYPRIPPLFVPHTHPVHAVLSTTTT

SEQ ID NO: 970772 - protein, 71 aa, Homo sapiens
QWLLNDCQTTAWAQQPDTPPINENGQHHTGKNAVEWPKQRTLRPIETVLATQNGDKTPHLGSASGLAPGVG

SEQ ID NO: 970773 - protein, 103 aa, Homo sapiens
MHRASHGEETPVGGPPEGETGHTLVPRRPYTPSQYAHGGPNNGARHSTPALLILETIPTIAACQRVEEGTWHTPYEATAHKGGGKLSPPALIKIKIFQKNPHD

SEQ ID NO: 970774 - protein, 171 aa, Homo sapiens
VLGTRPVRVECIPAFLFTPCLGPGFLTLEKWRARCSPCGGPVLPGPRWALPCAPLGAFSHESPQGQAAQIIDGRCTSVLTARGVYPYWGRCEYLLGMTGLGRVSAGDPGRHPRARESPKKQGKIKGAKPRVQLQIIMYPSGAAPTTPSPDKKDISPGGERSQSGAPRNTGL

SEQ ID NO: 970775 - protein, 195 aa, Homo sapiens
NGAQISSRPSSFAPLVWSPPPAMPRSTHPPLRPSVAIVLSTLVAVFASTEALWWGPPLLFSSRVLLSLLVGTAPCACPAARIYLLSPHALPRHIFLGQYTHSLSASLSHSSPGGVVIAHAGERHFYRAAPSSAVPPHEAPPLVFPPHRGREGGNTPGSHGRVISGSNDHGGRRPPRAHAAPGLCSRLNRSYLPDK

SEQ ID NO: 970776 - protein, 183 aa, Homo sapiens
MDEKIPGGKKQGGGPQELFPEPGREAPEFGPREIQSTPGQPCQIKGYTENKTRFLLREYKEPAPRSEFQRRPFEPGIATHARGDSGATIKEMWEKPTQVKHKEESTKGHPPGVSMAERSGPSNSSGAPTMGNPLSRMQVRRPENPPRGGECLLPAPYPLWGDSLLAAHGQASSKKQQRGIPTK

SEQ ID NO: 970777 - protein, 133 aa, Homo sapiens
MHHYCVGRLSPTQRGRHVCCLPLSSLEASSFCWVVKSHTVVANIFFSPREMYPAPALICLNNARILSNCYTAPPIFSSHASAPTPFLVISPHPLLIHPPTPATSLINRRSAIKYITTRILRLTYILPPSFTLT

SEQ ID NO: 970778 - protein, 268 aa, Homo sapiens
MLASVAEEPHYTICARNWVFLGEPSTDLGTLTACPPEYDKIWRNTVREFCHNGAHTVTTTGGAPSQEPGVIRPDAVTSQSTVAWEANTYLPGDARLSSTCPKVSVAPPIQLRLGGPNNSHRLVVRPLAARRGNNAAAPAHGQGDKRPPDQGDAQETSSADGGHPSGSMARKPPQPDGPTAGGGRTDVLSRRLMGEPPPPAGDRPTQTSFQSGPPTRGEAKTLPPRTDHRAAPVMPRGKHVTKETSSPRGWSAVAPEQATPREETPPRG

SEQ ID NO: 970779 - protein, 248 aa, Homo sapiens
  misc_feature (9)..(9): Xaa can be any naturally occurring amino acid
LHRCVLRVXGVPLSSSSSQKKLSALLRPLPLLRVWHVFSFLSRTLAVLSSSSLFRATATSSSLLMCVARCIKDAPVLMCAAATTLRVAGVPPPPRLSVKIKCHSALLVPGSPSALFGLGVCPPSPTFLWARCPPSPRSCSHSLSRLSPHWLSNPSTPLRGPLLFRSGRRSGASPTRRSGPARTSARLVLHWAAPSPLRDEVLVPRRTCGSEWLRLGRRAPPPRAVRPFGGEQAARACQRSKTTTGHNN

SEQ ID NO: 970780 - protein, 311 aa, Homo sapiens
YDCSRSPYVRRVETLGPAVTCCTRFQAFGGCAPGTVSYYKCACAPPFSREGLPDFSDPPFLEDGRPPFYMTARASTIFSKGAHNFWAPTFKCRRLCEQHAQRLVYLLRRNHGVQAPRKGARPPLKKPDWAAATRGSLQKGQKAPCQPEPNPRCESPAKNKYLFRRGTRLKKYLGVASPLMPPNWVTIAQGKKDGPPRISLGEAGTHAHKRTHRAQKKRVVLQIQQHKKGAPAQQTMHTGVLVLERRIQRNGAVPIVRAHAYTTPPLGETEGPEEPPCKPREAKGIAHETLGAGLRNEHPPGAPKAKPRSKK

SEQ ID NO: 970781 - protein, 82 aa, Homo sapiens
RPRPKILCKNKRYHNWMTRLSPKHCSRSTRCDIEKHLRDLSSLLILQFSPVRVGCTPPLSSLVGGGGRTLRALYPRDILKLL

SEQ ID NO: 970782 - protein, 179 aa, Homo sapiens
MLLYLICITYRYLAQGLCSIEYISGEMRVLPDPKLLVSWTASPDDKHFGVLERSCPPGRKLAHTGGLPYTNRGFTSTRVNCPLPAVTWGQHPPLILGGGFRPFVFAAQWLVSAPPPLPADSCLSQGSVMLHKRRVVPPPRLVKLAAWFAPPFVLEPPALRHHWAHHCPSIFPLGATMYE

SEQ ID NO: 970783 - protein, 308 aa, Homo sapiens
TPDPYLGGSCSWCPLDDDDKIVGATSVRRIRVPYLGVPVIHGNTYFCAWHPFIEAEQWVAQVEQATCVQSPGNSRGENWEMHRQCRKSWRGMEQVHESQAKESSATPNTRVKKLNNDIIVTQALLTCSDQRPGVHQSYCCPPATPKPLARGASSLAGALTESSGRRLYRRVAVPCDAPVLTRGYSVKLLTLERVIKPMYCVGFLEEATDHVRLIHGGPCGLMDRSRSVSGVMGVPRRQLELPRATPSEGYERKVHRKPEFSQQKDGPAKKQKFGPAQVYTAQKRQSTDGHTGTQGAQRHAGRRAQDSD

SEQ ID NO: 970784 - protein, 134 aa, Homo sapiens
IEKYCCYRKLIRIVWMLIVLGTDVAGVMLMGQPSGTPVFFPQLGVSQRAPDILWEPPPTLSRSLRMFCLARKIQGSSLFAGAKLGAQPNNKVGSNSTPCFACACRRKGGQTRIRLAWTHSVNRGLRVDLDPSEG

SEQ ID NO: 970785 - protein, 235 aa, Homo sapiens
VRSRVCMIRYRHELTWSHGPYVGPIYHKVVGADSDPSPFLKTMVDYAIFAYRDTLNVGPKQRLWNTAPPRATPGSLFFKDPILAACAEICNPANFGVRPENYTITRLVGPHAGGPPPRPPPRGAKKTLANTINRGGRNSYAPLTVGERYTNRPINWHLQRIAEGRGKCRPQQTESPRTCVVKIKGESQSFSLQVERANGFVFNSSGHDALVPPKSSGPYRRQQEKTQIEVYRSKI

SEQ ID NO: 970786 - protein, 285 aa, Homo sapiens
EAVARKQFMPDVTGLMRTPVVSPFFPPLEGQSRGLKVKELPTVGGAPRWGSPPGWAPPRQGGHTPPKCARTGLPHTGTGWAAPFGTCPFAHLAGTPPADVAVRPPKGVTPGGFCKPNWAGVNHLPQGIPVNKARRATWPTVKQGDRPPEGIHSPLPPGGDGVSPSPPGPRHLTGTPREKKNHAPCTVKDHLDDASPASHEGSSAGRSPQKGAHVCVEPGTETQHICKGKRAKTHTCRGPQGSTMELPPGWKESEEGCPIRLTACRPEPEGESAPILIKNNISPNM

SEQ ID NO: 970787 - protein, 116 aa, Homo sapiens
MSVKCDRTFLANLVKGQANCESHAWTPFQNFLAPLRVSPGFFKYHWGFHPKAALFRDQTGDPLPQKGSACPPLRRGDYTSRGKVFNLGARRADPPRAGTRFGFSLGPELLRTVKSP

SEQ ID NO: 970788 - protein, 137 aa, Homo sapiens
RKKQSQEAKKRMEADKSCTHVENLYASGHLPGQCCVHRATLPPLWKVGRPDKFWEPPRIMRAVKAQPLFPKAPLKWARQRRVFFREPTPPLLKNLLRTGAFILGWLPTPMPLPGILHPPCQPAMGRTTPGVPPAGIM

SEQ ID NO: 970789 - protein, 167 aa, Homo sapiens
MMLRLLSSLLLVALPQAMATLPLTLPARVSMVRMRSPTAGLEVSLLYEKSGSFYHTCGGVASFAPDLGCDCRLTVISDGHLTYQVVYGEYNLAVKEGPEQVIPINSEELFCIHSGTVSCVACGNDIGPHHALDAAPSWEMPSSSPHPSRGDILPKKNPVITGGGVYT

SEQ ID NO: 970790 - protein, 196 aa, Homo sapiens
MRWAETSRIMISKNARMIGGPWCVTTIWGFLPHRLFCCLSAAPIKRPVYRPRGAPEVSAPLVKKKQRLCAQYKARVEEDFVCLSRAPRRATLGKKAQPPARHRGFLRAAVSGGIAIGRLAPAAAHIIGGIDNGPWLIFKPRGYLLGANAPRIMRYKYKGGAVEVRSTSCPMAVVITRCTADNNFCCSRDTPRNPTK

SEQ ID NO: 970791 - protein, 130 aa, Homo sapiens
LLILTFVAAAVLPLDDDDKIVGGYIVGGESVPYQVSLQSGYQPLCGGSPHQTNKGVVFSRSLLNKLPGIPRLTTRCQKHPTTETPLERGHRQHSHSKCGPNTLPDNPKKTTNPAYPRKNDNPPVRQAPHP

SEQ ID NO: 970792 - protein, 278 aa, Homo sapiens
LGRFAAHHTGPPDSGRHKLGGVHPPTKGTNGVAYTQGPHCGKNFDEITELPDRGEPPTILIYLGGGGMYTSLPKLQRTRDLRPPRNPPLAGMSGDTKKTRLLWFANRALHTRRADPKSHAGFRRPTCWANSEDARTPLGRPQRTRQLLDRRGGKPNHGVVWVPRYPHTEGIHGGLGERVPSLREPPGAEGGATHPLPRRRGLSATQQHSSSGRSPEGGHKEFPPHGEIRVAPHGATTAKQVTHKTVIPGAKLLMPPRKNKAPRGGNTPRANQNTSACE

SEQ ID NO: 970793 - protein, 105 aa, Homo sapiens
PLGFVSNRAPSFLPEGWFRGVQKHLPSVANNGFCRMTSDFPACYLSAAPAHIAAVSSWSPTPYCVVWRDPTRRCSTTSASTAKNTELRPWAHMRLPPTERAPQRR

SEQ ID NO: 970794 - protein, 37 aa, Homo sapiens
MGILRPHLPRELLRIHEVWGTRVSEHTVLAITPSFTN

SEQ ID NO: 970795 - protein, 292 aa, Homo sapiens
MMLRLLSSLLLVVGGLRLWPTFLSLFQPRVHGEDAGPLELGPGRFTLSGHEKQWKGVLTHKRVCRDSHSIAHTALGLCLAGHVRSRRALTLSGGVRVKYNLLAVKRGASQSSESPIQHLEELCVHPFCEPFVCGPGVIGSSRSSGSRRCVQTGRCRIHASDLQSLHAGDYPFAINDILVQSPVAARRRIANGPHAQDKSSRRPRWRVNYRAPAQVYWWGPTVQENQVCAEGYLRSAGKVTLEGPSRPRRRGEWPGVTTLCGLGDSRDAEEREAASPEGAHSRTSWAAHQKVD

SEQ ID NO: 970796 - protein, 193 aa, Homo sapiens
CFVCTSAPFGPARVTRGPPTWVIPWPHSPKGFYPVERHLRGRPMRFGVLSSALFSSGPPGSCEGAPRLGFIGITRHVLTRFSTEQTTTLPLVTNGDPPPKGGPHSNGQLPRDNKQRWGPPMCWWSETPGGGTTGDCSTPREDNKVYRLPPTVVAEKVSTAKQTTKTGFSLRGKYYGILLNPVTMKIFTPASLS

SEQ ID NO: 970797 - protein, 153 aa, Homo sapiens
LQLSQLPSSSVGRLPRGYGPIFLSLFCSRVVHGEDWRSPTAGPWLVSLAVCESVASFYLTCGGSLDRSRSWVVTAGAPWFSRASELPWWLLGEVRWLAVIGRSHEQVSPSFNSEELCVHPMLEAVVCGRVWNDIALIKLSQEGRDEEMGPGSP

SEQ ID NO: 970798 - protein, 246 aa, Homo sapiens
MGGPHNQTGGTQRPAKFPHRYDGGPKHLTPCGHDPFSTPSLVSGPPPLAVGNSVLHSSAVFFLVLGLFPPRCCSRAPGGSQQRLLWPPLAPSHHSGATTQAPYYFRAAGTHSEDSSGSPCLPPQEGLPMLLRHALPAVMTPGILLDSPFLPCGRHTAKMCSWGVLTREGTDIHSPGVIEWATHLVLPMEQEPHTADMCHGGECRRTTPERQNTRGLYTQGAHQTSKGINQPPKAARSRSPPVFFQV

SEQ ID NO: 970799 - protein, 78 aa, Homo sapiens
  misc_feature (1)..(1): Xaa can be any naturally occurring amino acid
XDRHNGRRTFKILTVHRYKHVCQNLGSPHCVGTKWAVPAISRAAVISPRVVVPSSSTAKTKCVPFKKREIVSPKEERC

SEQ ID NO: 970800 - protein, 193 aa, Homo sapiens
RKHQPGRRGAPRDLWAPPCDPGSSRPQLPTPRGAPLRGRQNRGGEQKPPGSNVEPRPPPAHHSVEEVAGEPSSPRYSKADPPQVFCPTCPPLPPKWGSLGTRDQKRRDTSVKANAGGAPSQSKRSGSGVSQMIPGKETRPQAAPSDRQAPHFARPQEAGGKTQRRHVAGARARVVPQNPTGRERHPKPNPPTK

SEQ ID NO: 970801 - protein, 105 aa, Homo sapiens
FVMNVLPPMWDAMVMLQASRICAIKDVGLAGPGVVDRIFGSWALGRGTSLMLGQRVRSVCKLRVLSSVAIRTGIEARTNSEGRFRNLDGTQTRRPLVESDASGMT

SEQ ID NO: 970802 - protein, 287 aa, Homo sapiens
TSPTNNRLWTPVCTAVTTTVRTHLGHISNPLKSRLVPIWASENTVTNYALEMLTFPPKSITSAPLFSSHSYKTSRPETYKNCSQTTFPRIISTRFPSLNGNFPNCKSVALSPLQQSQRRVLPNRCVVRVSPRPLFPPSRGPPDVTRHNAGEPSRNELCHGRRRHYPKGILLSPQTASISSANMPEPPFPPRNLVDREAWSPQRAGGKQPSFPRNKATEVLRVKPPNSVSNLGAEWDRPWGIESTPPHGRTQDSMIESTRRPGGDAGGPKRRCVNTRYFPPDILRGII

SEQ ID NO: 970803 - protein, 113 aa, Homo sapiens
SGRGVELTAVVPRLVRGVWRTSGRAEHGGSGTAENKELRGHRSHKWARRDKGGILATELGSRVAPAGNIGMNGPTKGRFPLSMTPQGHLLRKTMPEVVQRPGVKAESKGPGAL

SEQ ID NO: 970804 - protein, 282 aa, Homo sapiens
GFLVVIRAFRSVSSFWGAPFCAGVGWSSPVGGCVSGPPAVVTTCVSRPKNRRSPGCHKVGGARPAWVSTTAGSSVCLGGVPHYRGGPQRCGFCTRRGVVRPLYCSHTWRRQKQFRPPRAGKQRGRGAPARSGSSVAQLWRGVHPSELKVLRTGHFPQPTLVPLLARGNCECSEPCGSLWGSPPGGQYVYGDEPRGVRPRRLVTSAGADSFRTVFFGGELTLWRGRRALAVVCLSRVPFRRRVRVLSCLPASPGLSGGRRRALFGPTCVGTFPYRFTGDNPQN

SEQ ID NO: 970805 - protein, 107 aa, Homo sapiens
MGKSKAHNWKQPMCCIIKSPVEIRKIIQCVMLLVITGILKISWMGFYSPPRDFWKGAGPPDYPGIILRKWYKPSALSFTWYVKPDWAPTLPGDPRVSTLSKNLCVAF

SEQ ID NO: 970806 - protein, 142 aa, Homo sapiens
QLFRRTRGSRSAGSCEVRPLLPADSRSPGPSPSGFSPGVCYGHIPRAQYMDLCVPRECARCYSPLRGSQHSFFFLGPTFKKQPLARLLEMSLIMAPPPPFTLSHPSNFLFFKAAPSFFLRLQKTRLLDIFHPDLGNSFLPPQ

SEQ ID NO: 970807 - protein, 264 aa, Homo sapiens
RRGPPLVFRPDRGARVCLPPPSPRCLWAAPPLFLPRACVLYGEPPLLGDREWCGPLFLVRYRVSSVPDGHAAHCDFPALGWANTLFRAAPPAEIAGQVVPWDPPLGSERSPPFFGGAQPPGPLSCLSPHGGGTHSWDRLFSRPYYVLGVYAALRSHSLSPLLVPAPAAVGSRPDGFLAAPLRRGLVGPPHRGRPAHGGPPLHPTHQSVGIFALFIVRTVFPEGPRCILYPAGCVGEIVWHAPPSSLSQRVFLLVALYPRCGTPL

SEQ ID NO: 970808 - protein, 220 aa, Homo sapiens
GPPPCAPARPFGRRGVCGQRILVGEPPFRRGSPPPVLGGQSPVWGFLVPAGRTGWHPHASLVAARYRVPSSPVGHTRLHMVAAAEVALFGVALGEMAAPSLGLESRSAYYGRVNPSLMSLPVGEFRFSRHAHGTILSWWVSDLPPVEGEAQEGFCYFFRGGSLLWEGPPRWSFSPMGPPLSPRTVFLSPGGQSRPFPQGPTPAGVLPRTGDAGSRVAVGL

SEQ ID NO: 970809 - protein, 150 aa, Homo sapiens
MCLYRFWGQPFVAVHLSRDHLGGTPRPRGFPPVPRGVCWPTAPVAPPSSWHGKGPFLFVSGPRGRGGEPMEENPRSGGASLLENHQSGRVFYSCVLWGKKGEEKPRISSCLHVQDHPRSRPPPRAPYIMAMPESPQFLQLISKKQDFSPD

SEQ ID NO: 970810 - protein, 163 aa, Homo sapiens
  misc_feature (56)..(56): Xaa can be any naturally occurring amino acid
MAGRRTRRGTHPTGRFIRGEVDLSLPAVPKPTRNVRRSKRVHPPQDTPPAVFTKCXALRGTHHGSCTTSVVPTLKKAHSPVDNHPGQEMGVSYPRFLVSTQSPNVEGSRRTHTSVTGPRAMEGRKTPGESCAWLIYETEVQVSSTCGGDKKKSRLLRGVHYKM

SEQ ID NO: 970811 - protein, 309 aa, Homo sapiens
SSGVIVRSPCSHGPFVRLRGCPPGPRSPKQGLPHWRAPPARWVFAPRFRGIHPPVAVGEHPLLVTRAATVCPSTLGENCLATPGEPLLGARVWTQLLLRCSVMLSRTEPPTGVIPWAQRALQSRALGPSLSRSTPPRGPFACVASPVFHHRAPSPHTACHHCPGLTRRVQVIISAPPSGESPLWRVSPPREQDTPVSSSPRCILVPSDPARFCGAPLISPPTGIDAARRHSGGANTIVCHGSALPLVFGAHPQACSASGSPSYMRRGWGGNDVTTPLGPSGPPSAVPQLSVPTPHQKQQVFRNSPPNKT

SEQ ID NO: 970812 - protein, 262 aa, Homo sapiens
CHRRRAGAVHATDRSLRGKIGRNIPLPPQGGARKCMSVAASHSVGTPQSEARGGRAARGVGARVGGRTSHHRRRETALCGEAPPPSHLGALDARGDACSHRRAEPGTCSRATRVAPPARGSIARPARRVAPCGIAPARVDVREHAPPEWNMFVRHAPPRGELEEKGPRLPSPQKKRRAPRMCRTPRGDRNAPAGNPRGAVATANDAAADRAANGRASLCKKQESFTERFHLPRPTPRTESLQRARVDPTPRVGQKSATAAPT

SEQ ID NO: 970813 - protein, 271 aa, Homo sapiens
RGYVFGPVRAPPLVVVRHGGVAPAFGSAGGVCQAPPRVCSRRTIVLLVRRTQRAFCIGTASGGAERASLSTCPGWGRGTHNLLRNIVCGARGSSLATVGAHGLPLRVQTAHTSFLLVPPRTYIVRGVASSRRSSVADDCIPPAAPSLCFSCVGGPSPRAGGGTQPMFSLLSSRRRSFFERRHSSGCIFLRQPRAHTNLFHLPRVCVWSGRRPPSAHHTLACGAAHSRTGSFTRFSVEQGWCLPHLVVPPPRDYVPPAVAFLSRSRSFLRTP

SEQ ID NO: 970814 - protein, 243 aa, Homo sapiens
PKFRFPSLALPPPPVGPPSSPLSVGPHDWEPVSLSDDQCTVSAVHFGPCLFSPGHVAPLLPGLGSFTTHAGLSRLCPPHAAAVYLGLGSAPPVLKIPPVWAPPTRVNALYVFSGGFIPRLLFVSLQPPEATRGAPPPRARGLLVIPPPWVPYGLPPGQVVSLPGQVTLWGLRRAPTDQLVRGVTGSLRPPGVFLRSCVGTTGAGLSPPPISHQGIQHFSPLPSGVQPRFPFDLIRCSPSSPLV

SEQ ID NO: 970815 - protein, 199 aa, Homo sapiens
GKFKCAATNTAPLSSFTSMVTPSPVPMFHPGDIGHTQLPLGAPNHSCASSGVHPVAFNVAGVGVPAPPHHVLWRTILLMEGGTYSVAVAATNNIIVGATTLWVASGELLLRWRPPTNLRGRTRVYLMLPPQPVDGDEAHTSFHTMLGAANKGGATRKLVLSLASRDDNKGRVIMIVGTPLDKIGRVSLCPINNSGATRL

SEQ ID NO: 970816 - protein, 127 aa, Homo sapiens
MPIPLEDDEFRLDNVAKLRVRVSRPIFAGTGPSVRLPPCWQLFAKPEYGAPALPFMTPCFMPAPPGGRLVRAPRWGSPGLTRRSSRPVVSQGSREASTKVARKWKTPPQLEKEICTKKSFTQGDLFR

SEQ ID NO: 970817 - protein, 193 aa, Homo sapiens
PPRLEAPSGTPQYSGSLRLFRPRSLRRLVRTTQGLKPGQEPESPSSLRSLSFDPTGCVTIAIHAKPGSQPNAVTALLFPSSTIGGDSGGRFRPGSLTLSPRLEPRGTTSGHCRLDFPGSNHPPTSASQVAGTTRCMPPTPRLIFVFFEETGSRHCCLGWKSWASVILLPWLPQVLGLQAMSPCAWPELFFLLY

SEQ ID NO: 970818 - protein, 233 aa, Homo sapiens
VSPHPGLVRARPAPVVGRLGWYGPLRPPWLLRCVGAAARGLDGRPYALGRVLCSRAEIVLSFARRNMWSDAPCLGFGAGVRGSGAPSLLVWLHKRRGWGATWLWGWNRPLRVDRVVLVVRCDSVLADARRASRELLIGPARGAPTRSDAVCAGGRLDSLGPCSVPQGGPAIQCRCQRWYVFLRDIRPPVNVRFLLFRDSARLRGATLRCVTALPGASHCGLRRVDPCGHPVLG

SEQ ID NO: 970819 - protein, 137 aa, Homo sapiens
  misc_feature (16)..(16): Xaa can be any naturally occurring amino acid
  misc_feature (100)..(100): Xaa can be any naturally occurring amino acid
AGKHTRSGNTHRCVRXPTRKEWVTLYTTLETKKYSRTPSWQESTGKWYKHELPFLMGDYFNFRPLSGVFQRCPPTPIANAHTAHNHSGLFNHLVKNQTIXIPSWDPTWDTISYSRPPHMGDFTHIHRAKLAGDWGPE

SEQ ID NO: 970820 - protein, 289 aa, Homo sapiens
MLDTELARVVPYILATRSRVHVCPLSALGVLYRGHQVSGTSLSRPRVHGTRSLRGSTTPGGTPRICPGPIFSRGFAFFSSSASRYVLYLGHINHPEGSLPTWQPKVTLLSLSSRSLPFGEQPMSAVVAGSSPNWAFDAGPPHSVTTRGGVPLQWPGHIVVHPAHHVHATGLAPAAAFKSSPRLFGVQLVIGGPWIVRRVARSLPFTHGDYREPLCLPEKGHTPSGAYYRFLSPGPPHCLVRAPHSCDTGEAQLNCSPPASATPLLSRPSEAPQGPPRPTPNPARLFPKI

SEQ ID NO: 970821 - protein, 202 aa, Homo sapiens
PQRAVAYAHSATKVLRPDKPVRPTAGFSALWAFRFPKGRHSLSPPGAQNPDWAVTPTLRLFLDRLPPKWPPHLFACTIGTVIFSGIHLVEERPTQGVPAPKPRGLFRPTAPGFSPVYCKKRATFPPVQRTQRDAVWKNNEENPTFAGLHTCWRCTQFCQPVVLTTVVLLDKKAEEGGTYFLRDVQAVHHNRRSPSATGGPLT

SEQ ID NO: 970822 - protein, 315 aa, Homo sapiens
DCGRDTLWEARAIVRCADPISVPLCRSPHILSGFSPSAPGIFLRPAGGRDHPTAPGGLWSTTPGATSSGEPLGLVATSVAILSGHLCAAACYSPAPSLHALLFRQSILCAPRGGRGLPPWSDNVLPLLFPPPEAHESLFLPTPSIAHPPLDLPRASSGFSAAALWPAPPALAATQWGRPAFLRRESRCIDGDASLFAGLTLGWCKHALLWLINKQRQKITAASELRRGHHPLSLPPADFSVELVRARQDIGEDTLGAAALPLQCHWSAAPPSVPTPHLSDEQRVASTPCPPTNKRRKCPPQVNPFRKKKFSSHKT

SEQ ID NO: 970823 - protein, 226 aa, Homo sapiens
CCRGPIHCLQGSCPPWRYPWLISMALLSSAGLCPCLAITPVAVFPQFRTVSLIAASRPPSGRFLRASLTRMPCASSDPGFLALLNPRVATPPLPGARCLLATPARARVTHQYAFPRSWALPHPLGITKGAPPPGLFFGVTWSPGYFCPPVVDPFPRTPPLAGPRCMCSSHTGFSPVVSERVSRVAFCREVLDPQRFLRRVTRQCPSGPRVASCDFTDSLECPPPGS

SEQ ID NO: 970824 - protein, 102 aa, Homo sapiens
MVRGKHPPGSGGSFQVHPTPRERTYPGRTKDQTKQIYSAGGSYQKGTRGTTQSPGASTESQPVVARQMLTEGTRSIIPRVESPRPPLHDNTVVEQHLITTWL

SEQ ID NO: 970825 - protein, 235 aa, Homo sapiens
NRPVRVLCRGVGGNNPFWVPGTFFGTGPFSWGEVFFLKRERGGSSPSYHGAWLGTERQNKRHWGGEPAQSLLLGALAAPRRRDDGVCLPWRFTDGHCPPMPRGTQQSVLSERQQRLRIGGAPPHKVGGDNSGLFLLDAPPTLGAGNGGLSTILAPPNKVTQSVSPAPLAVSRAPSHTAAHILIGAHPRGFLGGVHHGGILWLLPPQSEALFVKGYAKGVFHGEAKTGEPISGEVQ

SEQ ID NO: 970826 - protein, 170 aa, Homo sapiens
MANLGFKAVSFHPRFPISAWFPPHVVGTRPPSKRGAAGSLIFPVGPTPLERFWVPTYPGRRASAAPWDASPLCVYTPRGVLGTPSLPGAGFPATRFPLRASLEGTAQEFLPPVIFLVPPVVSRGGGSPELFPGLLVLLPPKDHALGSSPTGPPNQFVSRHSAPPIRPPQA

SEQ ID NO: 970827 - protein, 275 aa, Homo sapiens
RGPRGSGQCFVPPLCLAGWSRLPPGSVASTIVIGERPPVLSPFVGGTHADGSSVGAPGPPAPGVVLSPAAARFGVKATTRRVLQVVHLLAVVCPPPFCPRGEVCPQGAAACPREQPCGALLIAPQRPPISGAARAPQSQRGPLGSCMFSEERAPPLAIPLATPGPKGWVRPSRRAPAAPLVMILAARPVVRSPHPAPWGDTLVVSCCYWATNTVHFPVAPVETPGATASSSPPPALVSRSPARGEPRLSCQDHSSGHLRRHPPFGSPRQDHGPLK

SEQ ID NO: 970828 - protein, 113 aa, Homo sapiens
FALSPCFAPIRSLPASQAMSLLARVPRCMSQMLGPPVRIFPPGPEFATQTGGPPPPTNGGSNRPAVQAFPPLGCGAGPTILMLLWASLPFLHIPARVLSRPPPLFRSEYLLAQ

SEQ ID NO: 970829 - protein, 302 aa, Homo sapiens
  misc_feature (1)..(1): Xaa can be any naturally occurring amino acid
  misc_feature (8)..(8): Xaa can be any naturally occurring amino acid
XLCVGVSXDLYALTKRYWSLPPVVPFTNLSPSCGFPCGLPLVGPGHAVPYVQIWATLEILPPVRILTHIGGPYNSQRWAPGPVQPPIRWQSGPPPEFLPGCHPSLTRPVLAPPYSQSGLVAQTPRLEISVAFRPVDGNSRALPASSGQGPAQPTGGPRDSLISGGRGNTTMSIVDPSYPTTGLPSPGCVPCLSARGGRVQPPSPGQEFPPQVRSGFPPWGAGILCPVIFRCAPGVPRRQPPREVFPGGMGAWPARQGPGGFTPRVSQHSWAWVYTDPLSAPRAAKPPGLAFFNPKSPPFHKS

SEQ ID NO: 970830 - protein, 103 aa, Homo sapiens
MVGPPPALLNSTADFWGLPRVSSLSSVGPKRPPPPFSMSGAIPGVYLGAPIPGHPVLHFLCVPRPPLGGEFLPPPPPRCRQCPCSAPRCLSNKSWGGTPPNHN

SEQ ID NO: 970831 - protein, 89 aa, Homo sapiens
MGTNYLGAGRMKPPLRETEILKGAYSAKPQVPGRLKQKTIVQILAQFSKSKHTFFLKSDKSNLRPPKVVDPKPTLGHIGPKPNKKKMNK

SEQ ID NO: 970832 - protein, 154 aa, Homo sapiens
RGVTEINAGEHNVGDTRDESQDVHRNGLLGTTHRSGEEPPRGQSPPPEGELPPIARHTYRGSLKLSRQNVKEKCGKNPASHQWRANIESLLTPLGTERPARGDYPQAVQWDGVTNHLYGGSFQVRPPRVVYPIDKGGMPLMSENEPGGTSITRV

SEQ ID NO: 970833 - protein, 176 aa, Homo sapiens
  misc_feature (50)..(50): Xaa can be any naturally occurring amino acid
  misc_feature (164)..(164): Xaa can be any naturally occurring amino acid
  misc_feature (174)..(174): Xaa can be any naturally occurring amino acid
FVGCCLGPAVTVWLQWQRRHSEGEASSAPGCAECYLYGVRVLAAVSCAAXVEPTPSGRRQFFMPLIGASSPAPRARSLGESPRTSLLCSPLSGLPLLGLRHNHPGFSPLADDNTVPRPTFLSAHGGACWWWNTRGHHVLGPRRRPSPSIFGGARAPFPPRSSHXGGTKQGLCGXPL

SEQ ID NO: 970834 - protein, 166 aa, Homo sapiens
  misc_feature (145)..(145): Xaa can be any naturally occurring amino acid
MCGWGIFVRRDRSARVSPPGFLTPLGVFSLHCRPPFLAGPPTSLLPTFTRFPVRLRAIPGFPFLPCGADHAHLLLNRGPFRPRARPGVSRIFTPHTPPPVCSLLRAAPQAPRLCGANSFISRPVGTPSPSLGTLSSSRRVAPRPXLTAKSPLTVGVGFHGVSSFRT

SEQ ID NO: 970835 - protein, 80 aa, Homo sapiens
GVAAWYKLVGPNTSKSWTHFKGQSPSPLRGKRIIRPVPRKREPPPWFAPKQCSTSCCAYETAQDPRSCIPETARHRPDVG

SEQ ID NO: 970836 - protein, 119 aa, Homo sapiens
GLCHVRALQVWVWSRPLMSLSRGAMRAFAGLSCGIGRRCASVLVCADLCLAYVGPFVYGGLQVCQCGQPLEVGFISPAPLCPDFCRPPPGRGLRLGGGLRRGVGAGATFSEAALFLEMF

SEQ ID NO: 970837 - protein, 122 aa, Homo sapiens
  misc_feature (1)..(1): Xaa can be any naturally occurring amino acid
XPPRVIYAKEVRQLKLSLPRSFNPVEPRPPWENTRWGPITPCVPPPPVSQPRVNPRSLLRYPDFPALCGRVPLSTFALWQAVVPPEIVTYILGWARTVCPLALSYHPPHPPRGAKNVSPHKT

SEQ ID NO: 970838 - protein, 62 aa, Homo sapiens
MTNMRQQKVTYRSNIKKTRISPTCGEIWKKDILFPKHLVVMKNPPFQGSKKPSKKNFQPLTK

SEQ ID NO: 970839 - protein, 94 aa, Homo sapiens
MSILWPHQPHQLYTLLTAPHKSSFCKVRDTSRLTFKGLPIASSFKDDSVQYRTPANNTFVINPHQAGFPTSASPIKNPVPGVYRDSPKNKPPHN

SEQ ID NO: 970840 - protein, 103 aa, Homo sapiens
MVAHRRCDKWPDCSPPEGGGPPPTTTRRGLVKINKSSTNRVKLQKLSPNNAGDMRSTACMRAQPAEESTLVLRDQYDQWPLFKSTGLEKYKQEEAPLLLVGAA

SEQ ID NO: 970841 - protein, 298 aa, Homo sapiens
AVCCRSMSAGREAQLSGFPVWGEPGYPPVRVLTAAPDVCVTRPPYGLRLPPPVVPGPPSVSCAGEPAPNNVWLWRSPPNSQFPRCPWSSGNISARGVVRALSLPGGPPLPDTGAYFNCAPLYRSARSLLFRHGPLWCCVPPSPPRYECCHTSWDHTPPPPTPSVTPQPSAGVTPPGGPPPSTPKRAGAPPAFFLSPHPTTSREAKGPSLGPDEACAGAHCVRDDAPNTWPQKRPPAQERGPRSCGTNRGPHKIGLTLPPNMGHVLRIQPAPPARSTPHPPPRPLPAKKGKKPPPPPQN

SEQ ID NO: 970842 - protein, 88 aa, Homo sapiens
NRGAPPMGETPAPAALRHLLGEKTPWPPGGPLKHSGSRWTPPISVRPGRTRWPPPTKGAGRWPRMKTHGQPRYTARVLANPTPLWGIF

SEQ ID NO: 970843 - protein, 103 aa, Homo sapiens
PPRVPRYRLSPLPCRDGSPFFLSRAGVSGPLPVAATRQWAPRRCALGLLGNQLRLYVGTRFCTVVTPFPPVFVRLQGHLELLVDVLTPLAGEGFPLASRPPYC

SEQ ID NO: 970844 - protein, 163 aa, Homo sapiens
MPTVGLTPEEICPHHGRISAPLVGAPHPEMGAFYTGRVCKPPTRVGRGAHNIRFSSSGILPPFLSILPPAVFLPRRPRSPRGYLCGQEAITWLNGFSTTARLINSRPGRPPTTVVPTWPPIHDVWATARVLIFPGCGRNNPGYYSGPRLPTMVLPTAAEGFPG

SEQ ID NO: 970845 - protein, 168 aa, Homo sapiens
MLPNNPHILFVPRTHMGVCYHNEAGSLVGAPNGGHAGATCSPAAKVSGKPHVREHSIVRAFTTVRFSIPNIRTGVPPQHGAPVREKDFTNAPAVHAATHKNSRETLFPKEHPSDVENLQGTYEPYISHFEEIDLSDENITFWDTRPKEGLHDSSSWPPSTRFMLPPEA

SEQ ID NO: 970846 - protein, 199 aa, Homo sapiens
  misc_feature (143)..(143): Xaa can be any naturally occurring amino acid
METTPTILVRSFLEPSVRPAISRDVCGNTKDGSPPRVQTSGLPMYFFGPAPGDSCGTRVRFQGVPSGTAQAAGCLSVCHQPWQSAPPGFNPGVLRPKPRRGGILNSSLPQSHLSPTRHRLAPPGEISVTIIMAPDLFKQVVFXRGHPPACASRRVREQVFFLGSSGERPRNYPTVETTTLLLSQEFVANKSAVNIAQVV

SEQ ID NO: 970847 - protein, 194 aa, Homo sapiens
RFFCWAPVSGPLPHHGRPGKALFFPGWAPFLAVLSLATPLGDFPPPRSMQSSGPYGSIALSVPETTVVQQAFWLGAQICLRRRLVVPAALDIKPPGFQSGALCLFSHGGFSGHPNRWVIFPGATTSPPAGSSLFLSPIIIRRASVSSPAAQGQGTPTGGFYSPARLSREKAESFKAGSLFHHRTMRGTSGTRTC

SEQ ID NO: 970848 - protein, 125 aa, Homo sapiens
ECVRLAFQQMGHFWWLFLLHNVGQRVLLLQDKCFPEGEPRSPGVPPREFGPLHWKPLSTKFLRSGPPGVAKRGETPDHPTIVAPDIKKSQFAGHMPAAANGRHAAKTNDRNTGLPEQHPYQIQGH

SEQ ID NO: 970849 - protein, 85 aa, Homo sapiens
MTVGRLRSQPDKLRPLCGKRDTGGTYEVPENWHPPGYNTSGKTPRSMAIRKNRKKRYTSSGNKRHPTLPPRGNKPNPFPNQNRQN

SEQ ID NO: 970850 - protein, 61 aa, Homo sapiens
MGPNNPTPVRPTREFLTLGGLTPSYVHAADYEEDSSSQPLLFDPDAPPTDARSELGPPTNP

SEQ ID NO: 970851 - protein, 298 aa, Homo sapiens
  misc_feature (91)..(91): Xaa can be any naturally occurring amino acid
  misc_feature (168)..(168): Xaa can be any naturally occurring amino acid
TEEIGAHTGPGIMETTHGGGPKHNEHHWVDTTGPLVTVPAPMEDWESNKHTDFPVPGNDTAFHHITDASVSLAPRPITARGNSCPLTLHGXKQSASLPRGVVSLAAPGGPTSSVAPPRPPFKNQVGPKQGPFLFFFGGGTHNAEDLGPPIHSPHRGSLPCALYPLPVXVDPPLITGESLSSSLGNSLSPANTLFLCGASPSGGCHKISNSQLAVALRAPPLVCLNEQTPTQQVVVHPGEFSGGSPERTNTLGFTHQVATTYSRIGHSSPRVGCPARLIPPPVLLSFLNPKRTPFPPQN

SEQ ID NO: 970852 - protein, 329 aa, Homo sapiens
  misc_feature (149)..(149): Xaa can be any naturally occurring amino acid
YAGALNVPQTAEVFSQHALATCATTPRGVPLAHHVCSSDVPRVCVFDWTPYAWVVSRRSNLYPAMDGPSPHSVCQHSLCEQGGSPPHFPQGSTLLVGAPQGHPRCSAQTLEKEPRCWCHSRSGARTHFFAARSQCAPRYPILAGWRLEXCPTTQPGQRVLSYICSHTRGPGPCRLCAVLPPACFQRLYRYVRAHTRGLRPGVRILRSRVEESWVVSLRSAWKLLCAAPQYILPRRFSYAPPLGTGFPRRSCTGFEGFTLREVPMRYPTDPALSQPRVSPNYTRPGPNPRGWATVQPPKKSPRAGPNSGKEVPDRANKNKSKRPPNRPWT

SEQ ID NO: 970853 - protein, 60 aa, Homo sapiens
MTWETHNLGEPTFNSFRRPRTAAGGKSCHPPPPPPQGRDVPVVAPEQFLTKILQGERKKN

SEQ ID NO: 970854 - protein, 245 aa, Homo sapiens
  misc_feature (32)..(32): Xaa can be any naturally occurring amino acid
  misc_feature (49)..(49): Xaa can be any naturally occurring amino acid
YCVCCLSHCVVMICVLVGAWVDNKHPHFCDEXPPPPRLHDRGETLVPKXQCMGLFHRFSRSDRPVCSKRRLGPPTLFVAQTAPLLTPPGRNRADPLIFSVWGHNHMENLGRPEQTPQRRLPTGLGTVLLWCCNPDGEIMWEPPSPGKVYPATQFRCGPSLRGRQRDSHSRGRFWGALVLPRHAHKEICSSGDSCDARQGQRLRRVARHSGRYIVIANRLKGATKAPPLSPPLCFGFLNPKKTPEI

SEQ ID NO: 970855 - protein, 143 aa, Homo sapiens
MILTQRLPTLPHDDAGMTDGRYRPPPTLLVRGAARATGVGVTPRAAPRVFNRLPAGHKCDDKRHSPFVNKSDDIRHPAYWLRPVHAWRSDSICRRRYNTAGGGDGVVGARKSTRPVTLATRAVGRTRLDTRGWPTQNPFAQIT

SEQ ID NO: 970856 - protein, 277 aa, Homo sapiens
  misc_feature (124)..(124): Xaa can be any naturally occurring amino acid
MGNLVVSRFTEPRTRALQLALSEQLGHPLGPGLFLGLQQPRSRWERPPTGLLRHCSPQGEIYTVATRHLCSHQNTGVAHSPMRRRIQVRSAPTQALLLLGGLPPNNEEHPPHQRWGEENTALPXSVERTPGRWIMPPSRATTMVVGASPHPAGARRAAESHPTRRRQGGGAATPHDCGQWIEKSRDPPPHGHNTPSARRVTNLAETPPTLHPLLCALGHTARPSGISPLAAPGGRSSTPRHHTGGEGHPPPPVHIWKGKLIFNPFGKKKIIHPAPNK

SEQ ID NO: 970857 - protein, 158 aa, Homo sapiens
MREIAHHTGLKYMRTRPCVPNPKKAPTFGGSPTGGRDTPEGHRGVLTPPAKHGETRGDQENTGTIFDVGDVVGRPPRCTLTLARVVTNKNMAVTPGEAGTCLVETWSIAARHPPHGEPRDQTRWPRKKTNKTKSENVLSFPALPTLQPPGKYLNPPKN

SEQ ID NO: 970858 - protein, 118 aa, Homo sapiens
GWNDAAPVHKPLLAEQRPRVSPLVRAPPRDTTICAPGRGHHHRLSLVVHQGGSLDTTRRFKAPPQVRSRQDRRLTPVRVLSARDMHTPESMWVFSRRQEIPPMYRAIHSEEETLFLRD

SEQ ID NO: 970859 - protein, 230 aa, Homo sapiens
FDPAFVNWPPRLETFFPPLFFARYPSAIECAPLSLVQGISGPKKFPSRLQIGSPDQGSASQTRSSSISLEPPNYCGPRAYTDAPQGALVSTHHSGTPPVWLRPPPWWYAAPQFRLFSAGNKVHPTQQRGRGPIVYHRSQLFSHSRHTPRLPSRPAPPCAATRLTPQLCATTAGPPRQSGATPPPLWPPLQGPSTTNVPPPTHGVRSASWRGESYSKSRPLEVSPLFLYTR

SEQ ID NO: 970860 - protein, 143 aa, Homo sapiens
MCRSKAANQVRGLAADTPVWCGGRQLPLGGATDLLGTSPFGRKLNEHAVWAKEHTGAVVVRKSTARFGRYRESIGVPVGHGKLFPPRPSDNAGMFLQPHEVLPRDTPKFFPVECGPPVHFKRVSLGINTRYYPQAGKQHRRGE

SEQ ID NO: 970861 - protein, 173 aa, Homo sapiens
  misc_feature (4)..(4): Xaa can be any naturally occurring amino acid
  misc_feature (29)..(29): Xaa can be any naturally occurring amino acid
GRPXAKPPERTSRSTLRVECPNEQAGQTXERDARRGHPRKLVRTNTTAVNERITVGQTRHTAGAVWEHTAKVIQGGPHLSARSGGAPRWATGDRKTSIDRRGGAQRRRQCSAGGTVDRPDTGTAGAPFYGRRIARRSEDWHHRIGEYDNKQRGAQVTGADPPQEMLAYVKDTA

SEQ ID NO: 970862 - protein, 206 aa, Homo sapiens
MADGENGSTTDKRRKTTRHTTTRITGAPPPGDTNGPHILPGGGCPQKSPPQGRKTEIGKSDSLAQYCWATNGAGIGPPARSGSAKPTACLQRLPRHTAAFPGQQCGRPPQGVPQLGHIPRTQTRGAPKLCVEHRGKTTNGAAPREKQGSHVPTVRRKGHTTHNNQFSFSRNHREPVKPIEGDSQAPAPLQPGGSLMPRENSETAQA

SEQ ID NO: 970863 - protein, 275 aa, Homo sapiens
KGREAGNTGSPRSRCLSRGGVLKKRPCRGAAMALPPVITAPVAVARSPDARAKLWPAAGGKGARQRFARPRDLLSPNARMRKAAQHGVRNAHGRHTRDEAVPAAARNDLPTSLGGVILFKEETTNRETVAVRSKWAEDASIRAATRVRGLATEKSSGKYAGCYEKEKLGLWIRRYRHRRPLRETPLLRIRQQALLAEGLAGNLNLAHDPQDGHSLPRMVILKTATIWGEHPVFQGHLCRQSFVGDKSRTMRRAVIPGDTLLANRLGFCTSSLGET

SEQ ID NO: 970864 - protein, 285 aa, Homo sapiens
MAQTRLEPSRLLSARKSVSIRTPRCRSTMEPRCPVIVTLGDPWRILPPHGAEFGTTIRGPPTHNQGRHTRQSRTCPHPPVGRGAEHTYLPRGDVSTVLHMQARFCVAAAIMYTGGFFVANTSPCMSEFCHTAGRLNVRGSPPILVGPTAHYTMGGPRRPPLIFRAGAPKTLESCGHDQSPAGGPPWSLEWVLVGVTPGRAWLKAPLSPAEALARTNRRCLAVSPRRSAEMSPPRVVLRQPHLGPPTEGESPRQMFLPAGNMSPEPPEIERTPGALHTKGIHTTNE

SEQ ID NO: 970865 - protein, 293 aa, Homo sapiens
MSQRLLCAAWDNSGAQYRGVRPQRAHVSTGGNSGGKNASKWAHGTLEDEAFAYTTRRATPWNRGTVHRGCCGTRSAGSQVFWQDNAPSGAQGRTPPKGGTQRDRHPVTPNSGGPTSHFRPPGVGTHAVGHRARNNRFHAPPTAGAEWVHDNQNKPVWLRQYERNSPAPSGERFHGAPCPSPVDVACSMNVYADNVRFLWEFSKWHISTIMEENQGGNNPTCTLRRREALHKIFTGELTIFRERRLSTVVCPRTPRTAEEKFSLHPAAPRAGGKDVQRAPSGFNTNYRGNPHKT

SEQ ID NO: 970866 - protein, 113 aa, Homo sapiens
MSPLTTLLNRLEFVTARSLPGCSDPLCGYNEKRSLKELFKAPGTMKPHSRQRSYPASFSKNSTARGVLPPQTESVCYPTRRDHSYSCMVAPPVAPEPPQGGHKTLLRQSRGVV

SEQ ID NO: 970867 - protein, 201 aa, Homo sapiens
RGPSRCLPGIAFPRAPKQPPNGGPKLLPPHHGETKAPGKNPPLARNPGERQGHTHTVGTNKRLRTPSWTRSNGQGTIQHCLRRQCIDEAAPHGGRLQGGPPHTEASPNRDYSDGNLMEGKTQDKKKPGGPKNRGKHKVRAHPTGGLTRNPRAKLGQTRDSEEKCREADLWARRGQVPAARIPGYKGERHSRKKFFHPRKQY

SEQ ID NO: 970868 - protein, 182 aa, Homo sapiens
DRNLNTTFFDPYGGVRPHYYTNTYSDFSVTLKSIFLSLPGYRTNLPYQYTYYSGNNETQGHIGMVCRYDINRLSYGIIVWAHHIFTRPNRRRHNEPYTHLRYQIIAYQQPDVQVYQLTRHTSTEAPYDLTPTADELTEPHKASNPFPTSTRSQMDPDNGTSHYSNTPNQPNNHRTYHRHKNQ

SEQ ID NO: 970869 - protein, 65 aa, Homo sapiens
MNGEPEQLIKQGVAKNPRKPRIKIANTQKGSNKNTQKTYTRHTVAETLDPAERCNAKRERYTHNE

SEQ ID NO: 970870 - protein, 212 aa, Homo sapiens
MSVLGMFVCQYAPEGILITLSCCCLSTCQRHYDTTLEKAVPLQILMIAMPKCRMNLSLLRTEPQTSNQLNNRELSDAASGEYHIPACAISLVHQDKYPKCHTPLSGPGLAEHPTTQWARSCRSTITLTHQRMPCRQNCTFYPGWPAPQNCMLSAFDDNPPTKCIKLNPHVAPGPLGCEHGDTWISPISWTFRGTHPFATRIHWPNNSTLSIT

SEQ ID NO: 970871 - protein, 68 aa, Homo sapiens
PSENTLIVIAVYGARPRNDAQGETLWTHECGVLGQGCRTLRKKDGKSTVPKGSKKDFKVYLRGMVLNE

SEQ ID NO: 970872 - protein, 161 aa, Homo sapiens
MTLRTHDPTHHYSILQHEGPALLAPNLDAEHSPGLAYPDNLPTRTCTRAFPQLACVHFFMDVNLGPQYLLSWGWKYPLDTATGLRAPATALAHICLPKPHVEAPGCNHLNFSYLHPLAHLLRQHALQPLCTPPYGTLKYSIVETTLDHHVYTSTIPLSDRN

SEQ ID NO: 970873 - protein, 154 aa, Homo sapiens
VVSSFLNLGEGLFFSSPTIGGPIARVFCAERQTPPPRGVNDKLFCATPPTQLGDQRPGAHPLRRREIFVDFLEEATRAPPCLPHRAGVLKTSVPFTPFAPRGGPVITLLGVSLPGPPPLPPAPPARFLNGSPPLLFLGQPGVYRDASSRKILPL

SEQ ID NO: 970874 - protein, 223 aa, Homo sapiens
MHLMTGYIVILDQCGASLLVSCVGNRCPGMCDDLLMTWTPRGPPLDSSPMWLVGEFSPKGRSNDVATQYSIWYQRLHASRVAIQAQYLTPQKRSIEPIPKSIEPTKPTIRDIRTLSKRSSSSAPLYIASRTPYVSIQATNPLEKRFANTLKIPLSYSLDPTPGAMVMCERPSHVKLNVPHSSVPTRLSLLSPPPLRTAHNRPTIGADTCKYYITGPKRVTLDH

SEQ ID NO: 970875 - protein, 277 aa, Homo sapiens
MNATRLTPSTRLPFHLGSLQTTHCNFHTRHHSTKPPGDPTQEGPPQLHTNPNSRTRGHTCRLTTTLTHVDRSCTSTHQATNPIFYVPQPNARNGLDLYTNSHLPPRGPTPYYTKQRTTFPTRRQQGALYTTRTPLPHIPNLNRPRATQNYAALPSVKHKPPLTTNLATFHPYTSPTHNPPPTVVPNPISHLRASCGNTNTRQRTLRGTTPMPHRPLTSFHTTPRPATTHTIRATRATHTANNAHSTPPTKHRSPHHTHPPPPNRPPPHTYQTHPPQP

SEQ ID NO: 970876 - protein, 236 aa, Homo sapiens
MSQAVVHLRNSLRICSWCVTRGDTHDCWHLIYRLTVITSKHRSYFQGSSCPHLVGAAYPIYERTRGLHLTLARNSGESICLRWGTHNLRYQNVRHARATLAKIFLVRHSKREMLGSHGGHTHEILRILRSATHKGANSVSSYLLKAPGRCNRTLRLSNNTCFTYRTGMNLHSHQSFSCAFCLVNILGAAARKVHSHGMVKAACNYATRRGFNGLVQGPRVTKVDPPTGFISYFNRD

SEQ ID NO: 970877 - protein, 107 aa, Homo sapiens
MVLAATTSFLHTHMSAYTYATIDASTHPLNTPPRRGRPHPHPAFFNNQVAPAGAHHPHTTPPHTPIAQPPLRGTHSPCQEPTSRASTTPTHAPPHTQRASHTRRAPL

SEQ ID NO: 970878 - protein, 31 aa, Homo sapiens
MRKAVEHSVSSPKLTVFPHRGIERKANTVVQ

SEQ ID NO: 970879 - protein, 228 aa, Homo sapiens
TREAEVAVSQDSASALQPRCQRKAPSQVITEKKKTKGRRQWALQTGNNPPPHWEQDRQSGGGTTTAKRTREHSEESKPCGKPTRRTSSPSLTTSTYQQRDAATHDTRAHQPARHRQRNTSRGAAASLLVSTKNILARENHHWVMRLHNVARPLIVPPRNQYYVPVVGVTPQTLVRSNINRTFVDIPAHSSTHPQNALIIARLDYARKRCAAASRQIGSDTKLTRHIVY

SEQ ID NO: 970880 - protein, 160 aa, Homo sapiens
VPPYCSPYGFFPPSRGRSFCVDPRNLGWHHFEFTSGPRKIPGSAPSLARWPRDFRCTPRGGEGPHEHKHKARFTNQPFVVTPARSSFPKSKKKKRPRPTGSNAVYPRNLGRLKRADHPRVTRILRTSPGQHPWNPLLVLENTQVAHAMLAHSPYPRYSGG

SEQ ID NO: 970881 - protein, 361 aa, Homo sapiens
IPPTQETEAGESLKPAEAAGCTSSLGNGRLQTPKTTQQRGTKDTYHAASQTIIIYNHSSYTQKNPTVHQPTKGTNPEQHPGHRYKEPTGGAQNQYQTKHTTRPNKAPQTAHTPRHKTKGRHEPERTRAQDKREQIHVPPKVNIHPKTNRYYKQERRRQHQTGEERKHTQPLRQCHTGHTNHTQTPHKPKGHHKPNTASKHHPAQEHNAITTTTQNTNHTNYYPIDRDPTEGGDAGDNTDRHNNPPEADHTKTRNVAQPQDTRDSNTRQKAEHETRRSETHPRRYTRHERKAPYQATRQSTTAMSQPNHKEDVEPGDHNDRRPSNKQSRQNPIENKQQTQKTATKNTKRRNTRGTRRRRTQN

SEQ ID NO: 970882 - protein, 167 aa, Homo sapiens
KKELANLAQLEALYQSSWAQPVSEMVGRTVLFIKSVLCTVKAQACNHSRSNVHNTPYHLSLTLRTKLLFTSESKHHCNMLSTHLQPVSSIGHTLGGSSRTMRNGYPEQHVGRSSLTQAARASIRQLPQSPQIPVGSPTKSTIQATLTPSAYEIYTLKSLITTYTQQY

SEQ ID NO: 970883 - protein, 319 aa, Homo sapiens
MTHYPVTKSWQANATYPVNHYHEKNSTISYTTLPTHLLELKPFTATELIISISFIRNHTLSPTLDYHQPDEDNQTERLNRQAHTSYCYTLARLPSPTHRTDNTHNTLGSITILLLTLTAQRHYPHILTPTNLTTDPAHTNSPNQNTHTPRQGNPQMTAQQPSQKDPHIARDQIRYTGQQATSYNTTDGLKKYTKRTKLNHQNTRQHTHQDETTPGTNHNDHKDNTSNSHTHTDTNPTDTHTRTKPKHHKQTTHENTAGTTPTDRPTTNHNAATTKTRTNDHPTQESPPATDSQPVAHKQKRRATHQQQTSTNHRTTADA

SEQ ID NO: 970884 - protein, 86 aa, Homo sapiens
NSFRLIFTADPCGTHIQQTAYGHRRTFYNSPPGLQPPLQVGYNKNLISDTTLQWRLKIPLLQRTLLILRPHQIVLFVVTSLAQTVR

SEQ ID NO: 970885 - protein, 71 aa, Homo sapiens
TFSPVNSGQPPNYEMLKEEQEVAMLGVPHNPAPPMSTAINRGDSVCHVSGPCQHLFMNTVPGLHSIAYSVI

SEQ ID NO: 970886 - protein, 111 aa, Homo sapiens
MVKMQIFGKHRFTGKTINLEVEPSDSDLKICEGMDPVMKEGHCHTSRQRLIFAGKQWHRGPQVVSELTIIQKGVDPAPGYLRSEEGGYAESFVKTLSHDTLVTVKRRIAYT

SEQ ID NO: 970887 - protein, 101 aa, Homo sapiens
MGYSLHYVNFVEMLVMCSNSKYGWATVCVSLRRLRYVTGYAEDCKIHRKNVKKEFFYCEIWGNVEQVRIGLVGVKALRGYAFNLGSEKSSEAWAKYVGGQM

SEQ ID NO: 970888 - protein, 171 aa, Homo sapiens
HHHHFMSASSLPMQHGLITMPSSLHRGHRHFYAPNGAHFFQPQHMVRTDQSQPPNGEFKGACKPYEIAAICSLKNCQPVSSWFHLIIHCKHNYFLQLINQAYIVCSVLIAFGTSVLNSISFIGTGTIFHAPAFCFSNHDHMRVYVPSNQLVNHSVNAPDLPYILISMLNVV

SEQ ID NO: 970889 - protein, 340 aa, Homo sapiens
QQVNVYGVCVPGSEGKVGMAAVQLAPGQTFDGAEVVPGHVSRFVHPMDYASPTHFIRIQAAMEVNRHVPNLMKHTDGCDEGLQMWRIEDKTPHAQYLEQPWPRSLTGHMHGTHNVTNGLRCSRTGTLGRASESTMDHNQLEIRDITTPHDKHHHPKNKTSVDPISNSPWERHLESEIAEAWAQIPPSKPSQVGLGTKWTRMETPGTHRQGNDIHNSREGGSTAKTNKQKNEKNKKQNYKPGRITAPTKTHYHDKNTLVSEETRKPQAREEATQWEPQSGETQGKTKATTQKTSEGHSTPPHNKTSRGILHLTQQQQQQQKTVRQKRKNNTTRKTRRRNLY

SEQ ID NO: 970890 - protein, 156 aa, Homo sapiens
MARCKHEKAHTEGHHDTTWYQKGLRYGINPNKINVRKTTHVRKGQKQSDVQNTQGQSAPKPTKRKEGTREGTKQRHPNPQDTTITHVTTESPRVAIRTQTYSAVKYGQSTASSSKTNMESTTKKKNIKKHNEKASKQQKERHTEHHTERGTKTRQT

SEQ ID NO: 970891 - protein, 113 aa, Homo sapiens
MRHAPRIYHMTGRLFPTASARPHKSPRSRPTEHAAAGGPFHETTETDDRIHCDPRPGSQDYTWNARQRLRRMGGKVPGPARQTDEDRHGLHSGCIDGHAEYGQTDEGQERQDG

SEQ ID NO: 970892 - protein, 378 aa, Homo sapiens
MPSKSPPTEGTAAVISDSDGFRTRKGQTYTSHKQHDSSRTFDQGCTTTWAREPVQKSTARRALVALHNLPTHDNSHTELYLPLRGIPIDPNGNYTPSLTTRRTGSRDKAPPTHTGPDSLPLTGPDPTLNNPQSPPLSDPPNQGPARTWGNRRDATYRSNLTGHTKPRRARSPTHHQTRRPPPTQNEPRRQPKPYTTTLPTGMTTINHKVPPGNPAPHNHWQPLAHQHTPHLRPTPHPTQPATPENPPRQSPPRRHTHHPPKQTHTGAISSPLPTSDHPQHPPATLTPSPCPTSLTLTTTPLLAPSRDKQQQDGQTTPQEHTRTHPIGPTTTPEKTIADRGDEQQSLPSTNHPTLTPDNSPHTQMIDQPTHTRHPHTTP

SEQ ID NO: 970893 - protein, 496 aa, Homo sapiens
MHAHCLPFSCCILLQQSQACYAKTHAAGHKDVFLGHVLVMHIMHSTGHPAFTRVVAAAAALCPSTIMHNPRLSSTVLCRHAGSSMQSLMRTQLLRMHIPHTYIVGTAAVQQFSIHNHNIGARFLRSQTLRAVTEISQKIVAHLSIGSPPHMHKSPTKSGPQFPHYFLSNSVYQRKHLQCNKLRPAKMVEVTTIPCTAHNTDKWPVHVTDKAPSIKSATGTPWHTPGEMTGALHHCKKQQTEINARHQHEQTHRMDMHNQAKPHLCDGTHKAPEAPTRHYLTQPYRGTQHSEVATPHTRYPHNDKLTHGLNSTDSHTLTTRTNALYLKRHQAPDDTGDNEPNTTDNNHAATTPAESAGGRRNKRPHTAKRHTKRPQEPLVQEDRQNETTARANNERTRAAKEERQRHGKDEQTEAKERAEQRQRNANKQQHTRRATTDNGTTKSTSAQAPDNNAEQQRAMQQHKGADAEQTNSQRANPRTPTQARTKQHSQQTAQPR

SEQ ID NO: 970894 - protein, 598 aa, Homo sapiens
GGTQVLPFLVILIGIGNICQPSMLVSQHSPIIVNTSFITISSSVLICHTSFSRCFQHRFSYPHILASRHAITISPSFTHYFLGAIDGHITYADNIITLYVNPNPVFLGTTLVSTFLLTTYNHQTQLLTKKICTNHNHIVLATSTTHLSTTHTIPLPSHIASSISIAPSPLRRRRSTHGTSTHTTNTTDTPPNPAKIATRQRLHTTSHRPTNPAHTPRHETHDTPTPTTTRPLTHAPHAAATPTDPVHTTTTRATYRHRTRPSGTHDGGSQCADLNHTQNNNDTNKTQMDHQHQNTQQQQRMATIHARAGLGHPHTYLRLRHQRAARLPQQHPTRTTTQQWLSQMSDPTTPLAHPNADTRLVSPSTTLPSSPTQHPAPAPPPTRHPATPPHAPLQTAPTPVPSATTHNLHSMRRTADTARPTPHTNNATTATHHTNNNTKQSQHARHQTPPNEPRPAARHRSTQPTQAMTDQMAEAPRQPPTRHKDKKRVSERHEHQSLHRHSDTSCMKTSDNNNMVATRVHARRLTERGRTSRYQSKAVRDENRQPHSKREHHYPHYCTKQVVKQRDRQSMCVLLIVAHNEQVESTYITPYFYPEQAS

SEQ ID NO: 970895 - protein, 451 aa, Homo sapiens
MPSISTLDIGQVCAYSGAYTFPPDWRRRFVQNACTLTTSGGIQHPFLTLGLRTHHNTLHTVYTHSMTTYLYLLNLSLTGIQTVHSWFQHSISHSIPGDAFNLGPEGDRQELTASCVRRASHTATFIQSHTFRSHHALTAMGTQHPWDVSHSTDGHQALHTHCVYNHRIHSTTVFRGQQHNYGGAQHNPHTTLTFHTDSHEASNEFTQHLAHTTHTTDTITPSQNTDTEANQQEHNSEAKNRPTSRTTIASTTEFYYTQHHPTEPEHKRSEDPTHHAPTNPSTQRRTHQTVAHPQSQPPPRRATSNQADMRANSNHHQTNNPPGRDQPTDQTYMAHNHRQHERHKQSRQTTSGTNTPSARPTRTTTHNTQTTTPQKSTKEKHTDQDETEHDAPKQQTRHERTRSHTTNNHTQASTKYQTKTPEHRRTRPRDDQEHTEPKNTQRQSDPSQDPP

SEQ ID NO: 970896 - protein, 144 aa, Homo sapiens
MARLSGPFVSPGSRGNNSSLQASSNYLLASNKRKSCSLHRISKALFVSEEEQNSYSDGGLTSNEWGYEKAAVRRDAQYEPRLCTTVKGHLRGGHPYGSCRYLDGVSPIMLEPKYFATGDPRTAPLTRSPRERRSYQSWVYSGGE

SEQ ID NO: 970897 - protein, 450 aa, Homo sapiens
  misc_feature (377)..(377): Xaa can be any naturally occurring amino acid
MCSDTFHLLGRSHLGACGQSNVVIATESHRSRQPLQTNNTVDNDYTTPMGTPKQPIGDQRSPIPHRNNTQKHKTNTKKGQKVRDNKQQDKQHRTGAAADRAAWEHKHRRRNGNEIRTKEHAHDNEGAAARSRKSAEESTTNRKEHREGQHNESQTQKKRYGHKDRESRGENATAHSQAEQKPTEQTDTHQHTTDQTDVAEKDPHTPTHRKDTHNRTTAPQEVRTTLRKARSTSQNTRHVTRPKHVRPHKEGGAHNKPPGQNTRADKKTNKQPEQKTKPNKNNNRRTRNGEAESTHGEAREEEAKKQKKDARQRDEKDTRRTRRREAARESGQTSETESEGVKIRNEKGAAERITRRETKQQTDHGQTDTASRQTATXNEREKKNRSGGSSMKQEHRSHAEAQSTRGDGRAQDGEADETHTRRTPMETRHDRHAQRRHERGEQKKAKTEEQ

SEQ ID NO: 970898 - protein, 67 aa, Homo sapiens
MPIVPEVNPRKNRWKKGPKLPRLDHVIPLNGDNSCHTTPWAPPPKDRQGGEAAEEQAKGQTGDRPAK

SEQ ID NO: 970899 - protein, 145 aa, Homo sapiens
MEIQVQSSRSSKGGNISKYFMRHCGIECVNYRKLVTFPVDITVGLHCCHPKLKLWTSVLSLSGSTLTTLEALGQKGDVVTPNWGHGASHGLAMVCPQRLENQGIYNNKANWLRPDTYEGRFYKVPTQAQLTLEQNARCNCERTYL

SEQ ID NO: 970900 - protein, 41 aa, Homo sapiens
MVDPHGGGGRVTQARDSHPRLSNRENPPKTQTKNTSGPPTP

SEQ ID NO: 970901 - protein, 98 aa, Homo sapiens
  misc_feature (9)..(9): Xaa can be any naturally occurring amino acid
  misc_feature (62)..(62): Xaa can be any naturally occurring amino acid
TAQLLEIIXSMTYIKVTSDYNYNGAYIDHTCDAESLHHMCPSNGRLIAVSDLPLTRIFLSYXKVQECVSTSLVPTGVTRGTPFAMVLMGTIKMKKHVR

SEQ ID NO: 970902 - protein, 362 aa, Homo sapiens
VLVNFFGRKGTVLIATMARGGGRGLADTWLHMLQVICTQLLDKFLLVSQGKQSTAQRQQILQAGALSHTTHSKHFYHLASWQELLHGQATTPHHFQSAAHSLPTTVLPHRLSCKIQTDTQEQTHFALSQTPGGLTNSNLYGVYDHGFMRGQHNGLYTVINHPPIVHNEYTADRLITISRPFSKLQLPCTNDHRNAHSHLATIGTRLYFANRDFTSNLISPFPPVKTLESTKHSSFTPRKEKIQTPPAGRPQPGQYPHTNTTWQAKGRQSSSTCKRASVRDIEYTPIRTTTSTTGHVKSSPDARKAPTATPAHPETSDNYHTDIFRERPHTPENHTLGAPNGPATERHTNSSLLESLSHHPNA

SEQ ID NO: 970903 - protein, 334 aa, Homo sapiens
MSRSGRGFCGSGVPDKYVMHKSGIIYMKMKLANFFHEDERTKTFIKICCILDETSNKEQTILNTAVSQHPFSFNTTHRMSKQSQKTDQQNFIRNQGCTSVMHRRPYERPTDNTSPLATHFHDAYCNHPTGLLESHELATPTHTLTSDSHLTYLHTIQPRTTPLRHVCDPLGTYPKNKSRTTLTLCYTVLPTIGEPDLFHPCSGGYTQKYPPMPAPSAPRYQCKHHQTHIAVIPTRAYPCVPQPPDGTATKRTSMRQNTVITTRTTTVRTGTPHQTTHIAHTLSTRYSFDDNTDMPHLIPPILIKRPPPNTLSTCRTQTLQQQLYYYNNLISRYY

SEQ ID NO: 970904 - protein, 87 aa, Homo sapiens
QPRHAYWPTMKWDNLYTFTILSYSISLGLSFQEELLLLRSEDNATQQTLTRLTQIRALTQIYRATTRTHTSHTKTPIGDSATTSGHF

SEQ ID NO: 970905 - protein, 456 aa, Homo sapiens
PVLASCLRPLIELSAYPRYSICLSVNSYSTGILSRIHSTSPGSAYPLHPHETTQVHLFHIQPWTPTHSVLEQQQLIPQPLRTRSLTLSLNRNTLAEQQGTHHPCLSARIHAPPSEPEQTSDTNSDLEALKELRIHVTAPAHGIDTFGKTQNLITHTRPHRSVQIYPSTRARSPPPQKSHQHVRHSIPPFPLPPFPIATEDLQYSTLLSPLTHLTQHNQTPIHFETHFSTTIALKFHNTLTPTLLRTRNPPTNKAPTTTLNPPHSSAQNVLHPIHPIAPPRTHTHQYPNASANPLTHNTTTIHSPIRPHISSSPICPNTATPRDHSDNQHHSHFHHPPTRHSNVALHTYNTLPHTLTNVSHARPSLTVEHTLINTRSSSTTSQDFPQHPEQLGHNAPPYQTEATKAHPPNQPHIYPTPAKSGNITRQHNASSNTVHHTSNSIRRQIGRHYNRPPLKP

SEQ ID NO: 970906 - protein, 210 aa, Homo sapiens
MVSRHNPTGQAIITHNCGYYGNIPYAIDKALKHKSFVNYSNTFRLVRRHIQQHLRGYQYPFDTTLAPTSPWGCFKMAELTFDHYTYIVTRPLSNNNSKKYTQQPHYKVTQQLNSYYMDIPSHITATVLNAYNMDFYDGNTNCAVMTVELGYRSKTISLYKDKTVYYKYQHGISPTLLRHHYLHTWLPRHEIIGLSAYQIGGIRTREPTGA

SEQ ID NO: 970907 - protein, 71 aa, Homo sapiens
LDMLVWAALSDVAEHCVKDSRWGALDKRGGRDFAKMFVDVVAPPCCEKERAVNSPPEARLQRRGLRIAVDS

SEQ ID NO: 970908 - protein, 235 aa, Homo sapiens
LRSLWHGIGNTGTGTDIPQAHMAGQDLSHSPFNGTRELYGGLWLSELTYVLTAAHSIHMMALTTGTLNHRLTRRRGAQRDPGSIEASSLISPQLTTINGNKQNQRHPEITLTIDGTPDQQLNDITLTHIGQALIQASIIYYPLHREGKQDPSLYERLPTEDKQLDKPITTGQTPATPMTHRDNQNDSMAQTQPEQTRTKHTARDTQNTDDTYNHQDMQAKHNKAPNDDNNDGPHK

SEQ ID NO: 970909 - protein, 382 aa, Homo sapiens
GQGTFKLVELANIPFNHVICLTNMSWRITLSTYCNTSRYIIISYGPRPLHSNHFTTSHQSMHHHQAHTSQFSLICAHILFIHPLQSLVSLCQISSQYYLHTHSSAHLKSPRMFNAFTHTPRACNISAVSPSPIIGPPHFFTLHQGRYTQRWGSRSRGSNTGSLPRVERYTPHCYTANSTTESPNPPTEPQYPVVALHTIVLQISKRKNTSDTPIIYTAVAGNIFPQQTMYSYKTFRNSRAPIQPERILPQEDRVLPTLSSTTYSIVYDHTTIPTFKDKKGTYATSYGEAHSPATTLHRRRDYTHRGRTQILTVAPHAYHPTSADIFQIDNRKSGSNFLDTWADGISRYTSTHFVVKTTHHNSIIADTRQMSGQTHLYSTEDN

SEQ ID NO: 970910 - protein, 148 aa, Homo sapiens
MSWSLHPRNFNSLTSHALFIVSRSNHGVSHMFATQQTNVLPSYQHDTAFRSAYLVQLTWWPLQHFPDLTSSTHAKVSNKRILPRTSWQRPSSHPSLTPPQHHQERQPSLASHQAKSDTPLCIHPLMDIPIPKHSPTITRHPATACRYF

SEQ ID NO: 970911 - protein, 459 aa, Homo sapiens
MSWSLAPPEFNSLLLCSLITLFNHVSAIMLATQQHNCCIFSMQSIPVSILVPTHLWPLASIILVYLNQHQTISTKRLYSIIVASTICTVNALHTRKNISKLNTSVTNKPIPEHPHSLSPCMHIHQQTNIIASARMAHACNVPGTHWYRKQELCNIMHSHPDNDTPTQCTSHRVITDLLSGDANTFIFNVSTPYKFYTRRTPHHTSDDPVGKKLRHPWHVKAPPNAPRPIAPPKMPTTKDSIEHIGEEKKQPEQENIYWHTPMAGATATCNQPGTRNNTEKHNSRPTHTLRRRATAQTDQPINQEHTPPNETCKTTRKQQTSQSRPKHTKDNYQTPRNEFNIEQTPSTDSHSTHTEHSAVATTHATREMNTSRQHTTRDNTGYKRQRPTTQRPRVGTNTNNHTRQTATTKAASTSLTRPSKRGNRSTDQEAHQNRLNNIKQDKQQTSNREDHTQPTTGRH

SEQ ID NO: 970912 - protein, 65 aa, Homo sapiens
MVSRKGNASHQARTEQKMGGRKQLAEHTRQQQSKEKTRAGHRTRHNTRRPTRANSAQREKPEQTG

SEQ ID NO: 970913 - protein, 131 aa, Homo sapiens
MSWSLHRPELKYLYFYALLISLFRMSEHMLLTRVQRAAILDAQIRIVIVQSTCGICRFPVLSCTRNQEYDKDSTVLLEEQSYIKLKTKSIRSQTADNKQSKSLIIPDESSEANMIDACYFEVSRKNVRNEN

SEQ ID NO: 970914 - protein, 336 aa, Homo sapiens
MPSTLYHLAYSSPKHPSTDLDSLPFWQLTLTGGLGHAPSPLPHGMAAAAPTLRLSPEHHALHQAKQVGTLCRYNNTASTRSLLTLQLPSAPSPISRPFRLASSHLPAPYLLLLPLDPRRTPPLLLSPSPPALLAQRPTPPPLPPHRTLPNTALTLTHAPQYCHERAAHRDPPHPPPLPTTHAPPDPYSRLPDPPKHAYPATHPLTHHHPHRLANLPRSRPHAPHPRTPPAPHARARTPRPTRGAHNPQPCAAWIRTPRSTDRPPTRRRTLAATHQTTHHRTPHHDHPPTPRPKEEEARNMSAEPHTPPPHTRPQHGPTPPTPDAQQHPPTMTTHPT

SEQ ID NO: 970915 - protein, 214 aa, Homo sapiens
MTAQADAAPGWYMSSHSGAIRLVNLKRTIPCRDNQSSERCDYLPPNEQKWPPAAQEPEGRCARFKSCTKSGRCDSSVQCNYRSPDLTHRRVTTMLNDDDYILTFTGPDLGGTTPTPEKPTAQTIYYNATTQTRVAFPSQPRLTHTRHTTDPTSYGRTSQANLHIINLQQTRRLAPHATTYHRGTRKTTHKSNPHCVPTPDTLADDHGPPPPPQH

SEQ ID NO: 970916 - protein, 223 aa, Homo sapiens
PERFFLSVAHMGTLRIATCDFSVDHAVPGGTLPAARTVCPSLKNAAFLVSRGIAGNKDLSYRAAHLVPVTTLPEYGGQVRYGLIPEEFFQFFILKLVYTGPYVTRNWAYSCYALSQEIYVIELQRPSLPYTELGVKVYGIPKYGPFVADFCLLNSNRGKKQPQQKEDDARYQSKHNPRNCNWQTRERPHPGTRVQTAAIQLSEAQRHNNDNGSRKHHTSGTTR

SEQ ID NO: 970917 - protein, 134 aa, Homo sapiens
  misc_feature (89)..(89): Xaa can be any naturally occurring amino acid
MALSREVKPEHYQRNQQRGYNYGQCSRETREQTTVQGNWTTNKCRYKCGKRARIDPKAPGLSPVEEKTETKQRGARPRSNTRGAGPNKXRTAQDAKRAPHKPGHGGHRTGEHSAHARERETARTRGEARSSKAH

SEQ ID NO: 970918 - protein, 83 aa, Homo sapiens
QRNTETTQQATANTKTTQESADSEEDKTTTHETGAAETEHRQRHKSKKKSRRKKTTPKPEKAKERKKREQTQQQNASQNDGQK

SEQ ID NO: 970919 - protein, 95 aa, Homo sapiens
RVPQEVPPRARRQSCRGFQKPLEKWRKPKGVNKPGALKECPRPGKPILSGGPAHNGKWGVPKKKTPARGKRGPHKTPPRKPSGDSGPTRFQMAGR

SEQ ID NO: 970920 - protein, 134 aa, Homo sapiens
FHIWVPLRCPSILVLMRSLPMPPCETVAHKVLVVQLSSASWILKPVLYISSPPLSLVSLPLPLPIDSPVKKHKRGVNNASPLRHHKNTSGAPPGGPVNSFGYPRASGGSYFVHVPQQNGPPPLCGLWRPTRATS

SEQ ID NO: 970921 - protein, 113 aa, Homo sapiens
PGGPLFLGSYSPIGPGLAPPQGGYFRPRGISSHRGGNLLCPPPRRRVLLVDGPASPLVGTPPLLSAIPRHPSSPRVRIPRGIFSSMLPPRCSFYYLGPRRFLYLPHGLGTLPP

SEQ ID NO: 970922 - protein, 120 aa, Homo sapiens
MVAWTFRVLPFSAGLFSHVADKRFAAPYLCLYPGGPCGNSLLSRVPTTGELCPPPVGAAPPSGLLIAIPRAALPSLRVGPPPLWRFTTEAQFSRTVLYAHPLSARVHRPRGNTPRSQSSL

SEQ ID NO: 970923 - protein, 112 aa, Homo sapiens
IVLPHGPAGNTPLSSKPPLFHRHSFFNICPPRLISPLTIGGAGDKSSTFKRHTHNLALIIITSSHRSFQNSVCPPNKALFVRNFFTPQPPRSLPPPFPRPYFNPLWRKSPLW

SEQ ID NO: 970924 - protein, 185 aa, Homo sapiens
LPGPYGLLRRALRAWSHPWLCRGRGPAGTVFAKASRVAAVLPQTPDYVWWAPSPVMAHSIGSCIFHTIEPSIHGGPPLFHGTPLGANLRPNRRCAYLYSLRAWLIRTLCFAPPPTRFSARLSPGCPRAAYFLGTYPADGALHPLDIPHHSLSLQSHSLTTPWIINKIFHRIEKTSSLFETKFPLY

SEQ ID NO: 970925 - protein, 203 aa, Homo sapiens
YPSRVLCFLLLKRIGGYCRNRGEHGGHVRRCVKGARVPAPSCVDVGSLSYQVFVKFWEPMGQPWVEKGVVRTTSYILWRASRPPNCSWARHHGFLMGRQFDMDPLSFGRNWGFVTNVGLLLRWPPEISSSAYQGTPLPAISWTGQALNYVITRICHHTNPWFGSEVLTPREHLEMKWLSKRSGPRPLDTRSYICSSFFFDFPS

SEQ ID NO: 970926 - protein, 128 aa, Homo sapiens
WAERDFPTLPWFHLESLLDLGSGQPDTAVSWKISGVDPADFAPQWRQSLPEVPIPWSFFSTAFWLCGNVVKSRIPRPLVTTTNPCPCGGGTHGIIMFAPHKFGVHWTLLEIRPQFDSFSRTDHPTPPC

SEQ ID NO: 970927 - protein, 131 aa, Homo sapiens
MGRDSQVSCCITCLFYTCWCTTHLWPMSVLPSDNRFGRQWPPMWLSALGPITGDCVTQKSPWTPLVGAPNPGNGPTKCETSGRKDAPCGAYLSRGASPKLWFTGDPARSKSSKASTETLCDKRHIFLLLDV

SEQ ID NO: 970928 - protein, 107 aa, Homo sapiens
MSLASGFAASEFNLVLFRAEGPLWRVCNPNRASPCTCVSSRQRFTVVACTGPPYWAPSPRIRVFAHNIGGFTIPRMFRLIFRGDPPLGPTLAGPNTLLRLSKILSSR

SEQ ID NO: 970929 - protein, 148 aa, Homo sapiens
MHQGFHPLMSFSRPGFFCTLGAWGFNPSQKLFSVHLCEAFLLGSRDQLGSLLFCPLMRTPFLTGGCAQIFSHGRGDILNCPPKGPWGVLGPKNNHEIPRGYLPESFAQCSEDILCALTRLPNNWAQKWPKHPQLTFRTPRGACPLEIH

SEQ ID NO: 970930 - protein, 100 aa, Homo sapiens
LCYLASDQLARPLEIRRDIGHTGFQKLIALSPMLEKDDKIGPVFEKKYVYRILRNSFHHDGCRLALELPKRGTPTKGGKINSLLELEIVEDTHSCRGPIV

SEQ ID NO: 970931 - protein, 281 aa, Homo sapiens
RRRSRFTGSPSGVGADCALQFRRQFPVGFRGNGSSVKRLPFIAFRCLEALIRSLVVLAGSLCSSLRREVVLSLCRFRDEYRVCVFVPPPIVMVLRCPSLSRGVLFSNPAGVSGRSLSAPNSLGAPHWGRVPRGRVPPRSARAYFSTSLHDCVSPLMSLLTRRALGNSLGGRTTSGCEPPRLCAPPAVKYYHSTKRSCTLNETCPTTYGLNHNAISRSRRKPKPRCRPRHHTRGVLTSVTILLNSVDAQPPPFHMSPPPTKLIPPNFLIGALFSPFPPLSPF

SEQ ID NO: 970932 - protein, 71 aa, Homo sapiens
CEVGASTREKGRGYTGVQMAKPVDRDVVARNNVWATLIRVPVPVNGGGWQEEGTGGAYKKCSASVFQTGKV

SEQ ID NO: 970933 - protein, 118 aa, Homo sapiens
RAKDPPDILRYIFAVLRVLLSEPGECVYTRCSAAQSRDVPRFPRSICSPGPNLSCAPPSSTCQCGGFPASDQLAWRQVALWPVYARVALDRSGRRNRFWRVPPALALDPIRALNSRFS

SEQ ID NO: 970934 - protein, 111 aa, Homo sapiens
MPTARILSCSRCMRGTTATLGYGSYAPEYRIRQCSWKNEDKKGLPKCTIYTQRGPHDVGRYDLRASWVKLGTHLRSSANGADLYGVTEEATPGAFQALHKAVLSHSNEKGL

SEQ ID NO: 970935 - protein, 149 aa, Homo sapiens
MAFSDPFLTGSLRLYRRYSVSTPMALFPADVVVTGLVPGLVASSWLRTQYLMYPVAVPCIFSGVLALLAPGGVFENDTLLPQEAVGPCVLPEIIVVPPRPLWVTTISRRDQFTRGPTREGVRQVFPRRVFWKVPDATLRPKLTTWHTTV

SEQ ID NO: 970936 - protein, 118 aa, Homo sapiens
GVLSLFVCRGVWVLRIGRCRLALVTSDVSWWRVGCGRLLSVTAWLRRPVVRRLFFVRRHVAVVACFALVCCLSVAVSSRVLGVDLLSARCGGFVPPLASRQFVCQLSSVEPTLGGYES

SEQ ID NO: 970937 - protein, 110 aa, Homo sapiens
MESLFGGGPNPHPLNGLMASVLPSCLCDHPQPPGFFSPPRDVSLDPRKLETSWLLNWPQKIRVLFYKKIVPFAFLEEIESLLSKYLAFYKEPTNVNYGRIIPRRSVIKYN

SEQ ID NO: 970938 - protein, 209 aa, Homo sapiens
MPINNLRADTKTVSAAADDSPDYPLDASVHNGRSAGPQSQRLGCHHKPVPPTLQGSKTIEKGPQVGRPAPEECPRQKDINPGPHHEMGWQGKPPARPGPHNAAHKTPGVTQDPALSLLAGIRVQTKTSPKKILWRDPSPLPPPHNNGPPFFGEEKPHTKEPHPPPVVRVRRKHHRPTAKPKEATCKLFIGSEIPPGAVGREKTSRRLQI

SEQ ID NO: 970939 - protein, 133 aa, Homo sapiens
LWYAPCPMLPGPVGGWAPILHICSGVRIGRLRGPNCMIWGFSAVLCISQGPPTLRRARALGLPTRCPQKCPILGKLGPLWDSKALGGNPQEGGVHAPQRMWADSPARVAQSSPKRRFNSGAQKIPNFGRTPAL

SEQ ID NO: 970940 - protein, 158 aa, Homo sapiens
MRLAAFLFVSAAAIVAPSYSYVLRRNLVPFPAPVPSPGSNAAPGFQPGASPSWDANPWAPLSGPFTQPPAQILRKGFYSPGPSFTEGPLNPRLGGTPPPLVCVCPPAQPEGAVFFQGCTLTARARAFCTAPLPDVPPGYVGHFSHKILGGPSTFAQRW

SEQ ID NO: 970941 - protein, 193 aa, Homo sapiens
VLSVTTPHRCCRRVFGRSPVGPSFTHDRVVARRGLGPTLLPAGFWGTTIVNRWALPVAGPPLVAGLLRMIPRLCVTTPSPRNPPEWGFVFWAPSCGSATRCYWGHPTPWRLFAAPKGGQPYNPRVATTPCGNKTCLNCSRLGKRAVCAPTLLHHTPRVMALTFDTPHRGGALHQRSWVTGGTYLYNGRKGAGT

SEQ ID NO: 970942 - protein, 111 aa, Homo sapiens
MRRMQNRAQRARRNGTTHGTPGANIAANLCGNTRGKRVRCAKHDAGENNVWSTATSAHPTLPPALVRHNGGIDVPARFLMTQERNTFLEKTLIMELPQGKPHSRSTQRDLV

SEQ ID NO: 970943 - protein, 213 aa, Homo sapiens
MLHVHLVSLLIYVLAAIPGAFRDSVSPVNGCLFQPGPPVVSQALCHYTGPYHAPGGSRHGFFPPSRTRGTIIRSGIAPRPRVCFPRPSRDPDVFYEWSLTLPRCLALLLPPASLDWSARGKLAPTPKKHWGRKTFLVDIRELFSGHPKTLQRVVFYTVHEGGKTLGAVLFFNRSQPKHGPKGPLGGSFSKALDVLRNFPHARSRVPPQVGEKE

SEQ ID NO: 970944 - protein, 198 aa, Homo sapiens
HPLSFPAPTTIFHMLRRGLYPPYMCALGQIPMLRAPLNWLLINSSCSKDTHKSLVPPPKRPSFCETFLRKLLRYTCALPPPRFHTPWELLSLANKTTLFLSSHNTASSPLLTKRLSINNSVVHALIIFLLIHNFTTQNTQLAASHFTTTPLTLAHHMQTPLLSHREKPPSLGFTKSSFPPFLLFPHPRNLSRVFPEKK

SEQ ID NO: 970945 - protein, 84 aa, Homo sapiens
PLLLLDAVLLCVAVCVVCCLFGSLRPPFTLGAATGLAWARYCFTIQFPSGPQIRLPLAGRLCRTPRFFKATGLGAPPKVFFSVK

SEQ ID NO: 970946 - protein, 202 aa, Homo sapiens
CSTPRCGPRGFFSAARVFYAPGSRRVHPAAEDFFFLFPLHESLFYWALRKHIGGNPLFLSTYEEEPPIYPSGAEAKKILHIAWGGTSCKLPPKGQPGFCGRPETIQPIPPEENNPARVFGHEVGRKTLALNQKPPHKYGPRNGPRTPRPTAAALAAAGGNTETVPFHHRSPRDTGREPPGRETKPGEGPQGVFKKNLRGPKK

SEQ ID NO: 970947 - protein, 207 aa, Homo sapiens
KLCCERCQHGWCTYRDILVYAIFTPDGRCPMRDAMRDWHLVAHISVLSVRNSRLPLARLGVIKHRPRMLFAFAFGCIVCPQNVMAPHNGALPRPRPNGAHVWCTLKRSPPPENPRLFPSRVFLRRPRPPKKGKKYWGAGSPKAGYRVNRKGPNDARPPGKKNGIGRQVYHKAQGPGDPRKGPGSYHQKNLESGYTERNPIALLFPAY

SEQ ID NO: 970948 - protein, 147 aa, Homo sapiens
MGALVIAREGFHWAAPRKALLNRLALVTPRLLERSPWVCCNEYRANARADFFPALMKGNNSNRGNVPLRRRSVPPLPGNEENTKGFPRNKLTPTRCQYPGNLIFLEPSLGQKANTISCFYTKRRIHPLLRGLTQEGNPLEAFSKPVE

SEQ ID NO: 970949 - protein, 67 aa, Homo sapiens
GAITAPPRCMGPFYYNRRRIVSSGAEPPTFSRAPLGPESFSWKRSYRLWKNEPRFQKCCRNFSEFKA

SEQ ID NO: 970950 - protein, 245 aa, Homo sapiens
RHAGYPRGRAPRGLAVGNNRTLGGPRVRGPPPVGGSKLGKGHAKVTSGSERTPSENKYSGCRSPLVVVARSTPPRGRVPPQRARKTWGAPRDTNVFQFVESHGNTRVPQEVYPEPAPFPPIYAPPSEEESPIQRPHRTLVGVRGTTSPRPPKSPPVKLCYWKMFPTRFLLEKFCTRPAPHKEDLALPEGRVKKNFCSNSQLPYGTIHSPTLKPLLTPLPLKGYIRKQNERIYNTYIQSVFLFRLV

SEQ ID NO: 970951 - protein, 137 aa, Homo sapiens
MRPYLGSLAPLSHGFGTRFLLDLGHQGQVKNLAAGHRVHHDWARPQKPMLGNPFPGLCGPRLPPEYHPAPISDGHTATWPTGSFYESTLSLGSSRFSWSKCAAWSDTRSLHRAPMHLPRFAGVIFREIGVGKPEPAV

SEQ ID NO: 970952 - protein, 105 aa, Homo sapiens
PPCGCPSATRGSSSPVFRGWGAALPRANCSRGLSKTNSFWSFYFRPRLYWLWKGADAPFPPEWPEGVRRARCHHAFFLGECRNHGAWRPPLLFPGDIQENRPALE

SEQ ID NO: 970953 - protein, 192 aa, Homo sapiens
  misc_feature (36)..(36): Xaa can be any naturally occurring amino acid
PPGGQIFLGASPPPAGPNFYKIFCPCVLAPVEANQXVFSTRGAACWRLVFCATLLLVDTLVYPAKRYTFVEAHRPPNGAFSHIDRFFSPTINGGVFYFPGWSPPHFSGGSTPCAPSPYSPQIARSPTQYFSSAGNLTLSVPPQNVSRHLRIAPHTCHPAYPHDSAVHTHLCYTSSITPLRVQSQFFSHPLYK

SEQ ID NO: 970954 - protein, 234 aa, Homo sapiens
SGKTSVDQNLGPHLKTSENLGTQYPMAWQMGPNQPVCRPERRGPPLCGVPKPGKAHQQSHTVTTKKSLCRRLTNPGPARQKMGCQRRPPAMAESPHKGHENTGEQPDPTFSISGESVNKKPLPQSFNREPFPPSPSRLYAPPFLRKRHPSRHHTPNLFETLVNTQAPGPPKTPTWKRFYGRILVHLCRKMPSRPADKETPFSQGGLKNTCCRQIKLPLGAYNYSPLLSNLRPLP

SEQ ID NO: 970955 - protein, 104 aa, Homo sapiens
MVWRRIVPHLLVTQSRLYHSRLEEVFHHPGGSPQEVFICEHPPARPIIFSRPALISPQFIWGLFILPPSSLRVSSSLPSPISDGIFGSTFFVTTQAFHRNFNVT

SEQ ID NO: 970956 - protein, 158 aa, Homo sapiens
NFGAYRLIGCAGGFPMWRKRFPPRLSSSSNPAFPPTGLDAPPFGVTLWRRTTGAEVSEKSPAWGPPPPAAIGQPGAVHNHLFLFVLFSRPIIVLFESRGPHLFSRFVPGEAPGFTELSPLRIRKPSVAGPPVFSPRTIPETPPWKNEVGGKHPPTAPP

SEQ ID NO: 970957 - protein, 80 aa, Homo sapiens
PLMPAGVTTAVSDPSRPGGFFRAIQFSNSAPRACSPLPLYCLALVAELTTVLEALHLARPYNRPFPGVSKCLVAHQKRGF

SEQ ID NO: 970958 - protein, 109 aa, Homo sapiens
MGTQNPKAPPKSQADYLEPIPKLPGRGDQSKTLASPKTQATHTWEVRTVGKARKGEHQDQRAPPKNIYRGPDHSKVVPREDPPRAEPPNAQKPFVDQPTKPFPTPGKLD

SEQ ID NO: 970959 - protein, 269 aa, Homo sapiens
VPPLRRNTGGTMCREHTVVYFINEGLSSSRVILSRWPPVAFYYVCLVIHTPPDVPPPGGCVVEYVARRPPPSFSSSRCGGVTLSLGCVDPPAGYLLFVFFVVRQRGVCCDSIYIRSSVSPAVFIVLGTLCVVVFTATDFVPPWAVLLLLGVSGGGTPTSLSPQVRGHMEWCFFSSPAQEEEWLVVPGAPSFVGPPPRFFSPPPRGWTAHPFFCVGGRRTPPPLPPSGEGGVPPPPRFPSSSPSHPPPPLPAAPPPRPPANQRKGGGGGK

SEQ ID NO: 970960 - protein, 189 aa, Homo sapiens
VLSSRISGFLPGFLSNAAARFPVAPFSRLTLLAIEHVTPTAAGCPAPENIMCAHISGPTPPHYLGGPPNVSGRPEPKYPPPPWEASLFVSATGILSTGLCLPRNYSCRPDSFIPIPGVSLIKKGTWVATKRTRLWVPPKTAPCLCAGSVATVSRSACKIFGATGVSPGFKINLESVSRGFNNHILSLPL

SEQ ID NO: 970961 - protein, 133 aa, Homo sapiens
ALCVQAVSAFENRTDVFISHSHLLGFGALCYLSPPISLVFCAPSHSLRICFQYTNEGLTESPPFPAQTHLAPPQGVVDPIEGTPHIRRGVIFFHSLLKKLLPPYCSLRTPRRAALCIPLCTGRHIRGWCPPRL

SEQ ID NO: 970962 - protein, 100 aa, Homo sapiens
MCWRCRYFGQSETRDELVCNRGDGGSFAVDANCTPGLVAPHGENSGLLPHYPFNQYHVTTSTPKLNTHYPHKVTPKAQRQDTFVTHNYFGYPPIPKKLTH

SEQ ID NO: 970963 - protein, 243 aa, Homo sapiens
TLGGRGVCITRSGAQEQPGQYGNTLHLYSRKYRKITLGVVCTAAIMVPGRTLAELLAECSMLESLGRQEVDSDARDHARLYSEPGNPMSCDSISVILPFTSTEEFYSSQYIETKEYYPRSYLYPWMEDAGLPSAKQKEHRYLNNNQVSSGAHSLLMRQQRQKITRRDTTLVIPKWGHRGVPGKTRVWHMRPRESKTAPKEPTVTRGLLKPTECAVYHGPMNREHYTTYGDPLAGTILKVPPHE

SEQ ID NO: 970964 - protein, 59 aa, Homo sapiens
MPTKTRALTPKPPDNTPARNLHPRQPQPQPPPTAPSHNPNLRPGAGKASTASTQSVTQA

SEQ ID NO: 970965 - protein, 161 aa, Homo sapiens
WGSLDSPEFSSPGSFASLSLMQWLQPSNSSQVLQEKQQQLCEASATRKQSWQAKVHIRQQLQQLPARISSRSLFHKLCAIPTQIGLRPWILAFNPSECSYATPLPINKLPSSVYGASSQVHVAAPNGKQVIPVCDFKCPNLCTSFSHPRGSSSTLDSLTQG

SEQ ID NO: 970966 - protein, 201 aa, Homo sapiens
KQANTAQKRLKTPEQTNAEGQDTKNNTTKKKQETEKKKQQDHNKRHQRHEPPTNKHNKREKNDDEQPKNESKEKKAAGTHNSPGRGKRKTASHQSNKRRGRHMTNRRIEHTKKRRKKATHNHNNTPPRGHRATPQEHKQDTKIRKAQKDAKKNAEDTKLARQNTETNKDNRSTNTKKTHRPQAENNPTKQQTGTSNNQETA

SEQ ID NO: 970967 - protein, 32 aa, Homo sapiens
MSDFNPVGDLFIAQTLLGGNEDKHPGKTGTPL

SEQ ID NO: 970968 - protein, 293 aa, Homo sapiens
MSSRAAYRCCALAELQILRTRLKPLFTAQHSPATQRKTLGPLTLLTLTVPQLHGSQLLTTVLSAHNLLTNTGCSCTSAHTPRGLPLAPLPLDRAHNSFEIHTSPLSPHTYPPRGTRPTHSTLPLTTEHTLAPRQTSHPQPNPGRGATTRTLGPTLSPTDRQLHTFSQGAPLGTARRNSHPYARLSGHLTLPPPTSLPKRHQTPALRGTPKRAHLEPPQTTAAYTLTVAHRGHADAPASPYTTAHHAGNPALSKPHRAAAGAHPSPAAAPTRHRATNNNEEEPSHDPARAHRAK

SEQ ID NO: 970969 - protein, 102 aa, Homo sapiens
CSSSSLMYTNAFGVFAHTHALMAVTSRPTNSLAAREFGGHSYNSAHSRVPTPHACFPRRPTRLGDGPPLLVIRLVNTHITKDALGGACYYIREQMFPGVCHS

SEQ ID NO: 970970 - protein, 105 aa, Homo sapiens
  misc_feature (54)..(54): Xaa can be any naturally occurring amino acid
MADQLTEEHDLQNFKRQLYSPKFDQQMADCEPITNQTDIGEPVNCDSLLGQKSXQKAEDYRSSECKLRGRSCVDLGLTWGGTNQIVKTFSHLGKKEFVSLGDKRV

SEQ ID NO: 970971 - protein, 282 aa, Homo sapiens
GPPWSFRCRARPNVLSALPRPPALLMWLFRARNTLLGVSPSGGGSDNTWWGTRPRGVAVTQRRREKYNLLYPKAPPCVATQHPCGATHPRGKGDSFSLRLNTLQCAGPTSLRGLYPSFSYKKWPITLFFQGTQFTRANVRVLLNKCARGQSKFYARRVTNSWARSSPTHQCVCLLRKCRAHAMSTYARGGIIPHGTLSDSPHVVFLVHPVGVFYTRDTNSFFCNVFAMLANTSARSPHSISPLCRRPDFPHDTALPKLATIFLLLPHQLQNATTFTPTIYKH

SEQ ID NO: 970972 - protein, 103 aa, Homo sapiens
MRRSIRIHTAQRTRCLYITHERHISICKLIRIQSNSNKLCNKGWNSYNGITMLRTESFDEGSWTKSKLMIALEQVIPSCPTNKEMPVISKMQSQCGFETPMAS

SEQ ID NO: 970973 - protein, 118 aa, Homo sapiens
MFPCLRRSCVFGTLIPDSAYTISSCLLYPRLLAPKSQSLILVLYGSSHPSPTDFCKTYSVPLLYLFAVIFHIFLSLPLAQNCFVLIRDEKMDQQKNLNKKQKITNNIPNKIKIQITTI

SEQ ID NO: 970974 - protein, 219 aa, Homo sapiens
QHNITSSHHQYLAGTSRCPADTLFYPAARYPNPCNTASHNHLATLNFRGTMILNWPPTTAISTHASSYTYSTPQHAHTRPLHPVKEAPRAHYTNKPQHARRTAILGRPLYHYKTTNPPNTTLTLNTKQHPNKEYTVEPAYNTKHTHRPLSTNTNYYRRYSRDDGNATTAERPRQKPRRKSTHFHGNDHMADDPTIAHHYGYTLFHAHKKFPTNVPRTTP

SEQ ID NO: 970975 - protein, 307 aa, Homo sapiens
MVFGYLSPSMMVISTPNSEFNPLLSISDLKKIQIINLTWTTNGSFQTWALYVANRYDYSAGALLVSGKPPAGAENVGYCTQIGIFRKHGAQGNRIMSFQTSMISMLINARHTHPHTQAHSQDKGSHHLALGSTDACSHTSCDTPKAVKPTLPQGRNRHRPAAPGGGYRPNDTGRPTRPLDPLPPHHDTTDGRHPPKIRRTYPHNTRTGAATLTNSPKPLHTSKPIRNPHDRQHGELSHTVAHSKKAPHAHSQTQHVHWHSKQFDTTPHDRRKKTRTTHSTYTTRHTENHGPTDTQDHKHKRQAQDHT

SEQ ID NO: 970976 - protein, 201 aa, Homo sapiens
GSGVRPRLRGALTTTVWEGWSPFVRRMGAGSGSRLLLARPPRGGGASSFVKPPILMSRQSERDYVRPVTFFVGHDTLVVARAALCAAPHYASETQCADGRRSAALSHDIFLAAPLQRGIKFVALAEFSYHSAYCGESAGRHVLHQGLLSSTRASPTRPRLGDDVAGSGRVVISRVRESTPSLVPVVVCAPPPVYPHKGPNK

SEQ ID NO: 970977 - protein, 194 aa, Homo sapiens
MACYHSQPCCKRLKKFIASMVFSTWSNVMCLRAPFGGCFNRTRVGPQFNSSDTTTFGSPSTVQWRYIALVCSVVLKQRALGMKWICPPEPDFLPHCGQETHLAALCSGATPGVRSAAPRTTSPSLLSPCEGVPRCAEQPNRSIVRTLGRETPCLPTVQVRSSTTWATKTAGRKNMGCAPTAYPRCGDSPVSPRC

SEQ ID NO: 970978 - protein, 239 aa, Homo sapiens
HNSTIITISLHNTLFSKEHSPSYKSRSITVSTLTIYQHHRLRRHHTWHETLTAFQRPHNTATHQRASVASPAQQANHHAKQVSHSMVALIGRPASISAAIQQSIHISISISPILCLRTPQLVSHPLVHGLFSPLAGTTLNNALHYSRNTICMVRGIAVVHRTSSAQLPVTMVTTLFQTTSFTIGRPLPKNAFTLHHWPQAFLDYSAYTGLRKELYRVAVGSSNATHLPLVHITSTYTQH

SEQ ID NO: 970979 - protein, 72 aa, Homo sapiens
VYPHANSGSHMVNNLRKTSCPSLGPPELFRRHKGFSRPSISQSLQGEKRGAGLKGTAAPGLFTCRLQHRAPL

SEQ ID NO: 970980 - protein, 127 aa, Homo sapiens
MAQATLTPGHPWATGGRPHRTPGTPPATQGTPTTTTSQQGKRNSKTEQNWPPGTKVGIMDNPQEKNEWISKRRQSQYPPSATHRNYGRNTCRKTLPHTTHTHPNNTPYYNERHTQDTPHNQHINKTS

SEQ ID NO: 970981 - protein, 507 aa, Homo sapiens
AQALTMLWSQTTVGKAEIELCSSTPVSLPPLCMHGQADHTCINKLFNTRQSKNIILSLKTQTTSTKHNVNLHCTTTTLVAKLLLGTTVYHIHLRLHLALLQLSPHTLSTRECSYVSEQCFATPRLLYISAALSNHYSALPDKRYVTTATQEGLSHWIQLIDAAPTVAAETAKPYTLATPLTPQTRRYIKLAQGIRWTTQWRHSTFSGTAHLKDFPLWIHQLHRPSACKHRVGSAKQDRPKHTHAYTHTGLHYSKVVSNIHRGRSLIKPTNRLGLHPFGHSAITPHRSANIAFAGQRNVTDTRLGSTNTRSLSTRHAGNNTQSITVTQTPMVPIPRPQSYPPTLGHPSGMCTTTVVQQQYAPTTTQTPRQARQIRAQAATPTPTRRTHKRPAAQRNTRWARPNTDRCLQPPTQRNDTALAHTPDAPHPHAHPTLDNNPMGPPTPRAHLPPAQRPSTCAGDGRHYHPRERPLTRKHNAADPTRRTQQHNHPPQQTRAQPTPQTRSTPHA

SEQ ID NO: 970982 - protein, 106 aa, Homo sapiens
MRMVMLGTPHYTSIAPRHSSLGQPGGGGRPILQTTTNDKTTKTHHNPGSGVTTRGTLRRSSSQAPPTKGRPGATTEQTSDTEGDNQAAPERTGDNTTPPGHPHHNT

SEQ ID NO: 970983 - protein, 118 aa, Homo sapiens
SQHLGRQRQADCLRSGVRDQPDQHGETPSLLKIQISWARWHMPIIPATREAEAGESLEPGRQRLQRAKIVPLYSSLGNKSKTPSKTQTNKQKTQKTARQKKQDGRRNGETKTTLRGVQ

SEQ ID NO: 970984 - protein, 84 aa, Homo sapiens
LNASKQDGPMPKPHSVSLNDTETRKLMEECGRLQGEMMKLSEENRHLRDEGLRLRKVAHSDEPGSTSTASFGDNVASPLPSLLV

SEQ ID NO: 970985 - protein, 121 aa, Homo sapiens
MCGVTSYPGVRLMIKIPSAITRTKHINSDSSRVPALALLEASLIPISHNRQSTHTNVCQCAENLVRTNTMVRDRGARYVIREDHTGRYSGCSRVKDNTVKHRMQCPLGMSYRNRRSIFEGF

SEQ ID NO: 970986 - protein, 293 aa, Homo sapiens
LSDTKHADPGFSGKVRPPWLWRSHHMYRLHSCLILNTCCVHGLRIHALPLGNGIHGDTKKYPSVQASWTQHQFPQDSQTPTLTSQPTMHCRRLDILHHQGAASAKTHADTHIQGSNRRAHMATTCPSNGTDNPKAQHPGQHVTTTTGDKRTKMPHKSRQNIPQQWATIQPGTWDPRLAHTHRANTRDKPPHNTVAHTHGQPQHPRHENAAPHKPNYGTRAPYGRTTWAQAPQLHTARHHRTQQPNIGKRHVHTDRRHGERTKQLETARPKDTKKDSEQTTNTTHHTTDTTNTT

SEQ ID NO: 970987 - protein, 143 aa, Homo sapiens
MHVFTKIPIYKNSCLARPTVCWLCSVPVTTGLYSYGIRISGIIGTKYKNKTGLSSSKTNTQQTKQKTKHTQMNKNKKRHKKEKTAREGTATAAQRRQSSTRERKNKHIGSDEEDRQRSEEDHKRARPQIEEQQENRADITNRS

SEQ ID NO: 970988 - protein, 177 aa, Homo sapiens
  misc_feature (20)..(20): Xaa can be any naturally occurring amino acid
PKGTTLKSLKEHKSDESKVXTLEGNYEKQEQTKPKFSQTAEDNYTNDQTPRHLNLKPDNKQNYKRLPVDNKHTPCSPLETTPTKTKFKHPRGAKKPSRPTFKGTTPEYLKAPKRTLQNAPEKGANFTAANKRTRARGNNNEDFPQEIEPSFNPELWDPPFFAPLDTTHRRRFVLHNE

SEQ ID NO: 970989 - protein, 210 aa, Homo sapiens
MRAFDISHPDLLLTSVKPTDFFLRTLFMRTQTFLGRWWQTQETLSLNKCPDKMPKRTQDAGTNSRSRCSQPSTLCVSRGLTTCPTAHDDPHSSRERATTLNRGTLKGKTQRTGHQHSPNAIPVKARTTYPKNRPTRHDPTRENNTPPGTGTQNQTQPVDLTHSTNDMDTKGHSGRAHKGNTGRHTPKTQHKGPRGNRNNQQNTGTHTTAA

SEQ ID NO: 970990 - protein, 102 aa, Homo sapiens
LPVLKQLYCLCILSHPYLCTSAFIDLRNLAFSSVSDVALYVAAITVRVDLVQGTTNFVISRNLAQDHGNSKHNSVLRLYHDNGLDLLSFYRNNWLLCMLLGF

SEQ ID NO: 970991 - protein, 108 aa, Homo sapiens
MPRQHNQASGHALPRNNQRANPIRSHIPPRYHTSPAAPAPQPSAHSNSNRKTRDKHRIWAHRDNTPGCHEHGRTKQKTHPRTTNANNNGAAQRAHTPPTTATPRDTEH

SEQ ID NO: 970992 - protein, 167 aa, Homo sapiens
CVFTDQYCVCICVCSQISTVCAPVCVHRSVLVCMRVNRPVLCVHMCVHRSVLVHMHVCSQTSAVCAHKYMFTDQDSQEHRCKNTSQNISQLSITETPVLHKLTQRCSAVPLRAPTAFLEMGTQSSKACVEMQMTWETQNNSLTKKQDFKTYQKATVTKAGGVSMRIQ

SEQ ID NO: 970993 - protein, 107 aa, Homo sapiens
GERESGSIARRDGGGIDSRLTGNIPPPGFKAILRASASVEKRGLRAHCHHAQHNFGILGRDGVFTMVGPGGVCDSLDLVILRRWVSQGCWGFTGGGATGSRAQNHKS

SEQ ID NO: 970994 - protein, 105 aa, Homo sapiens
GSVGARAPVPGRCVGSDLCVGDGVEGWPLRVRFCGVGGAAGLPLLPPRYARSLVLSLSARPVPPPGPGKLRARDLSAEETRYMLVSFRRAAYAIKAGWEETMQGG

SEQ ID NO: 970995 - protein, 215 aa, Homo sapiens
MPLLPHAVASHSPPSEPTAASSPTQHTHTLLPTTKQNYTELPSYHVTSTAQAPPPVIRHSPTQQLITHSRPWHPLADHTQPTRTHKPKPARTGRNSPTAASRAAPYRQPPELRTAHAFLDTTHTLSEDKYTTLAPPPNPPLTPTAHPRLDHRANRAPSTHLNQIYHAQSSVHTSGHPKHYNLKLPPTTTLTQLYPSHPGTLYSINHHITFNPQLP

SEQ ID NO: 970996 - protein, 61 aa, Homo sapiens
MVGRVSVYTVIFFHFEEDKDQAALHVSPHRIYLAHHIVPLPSILVHPPPPFKKPKKAPNKT

SEQ ID NO: 970997 - protein, 187 aa, Homo sapiens
MNAVLRPAIIQNGYSDLMLIRTMENQAPVWFAKDGLKLGVWTFNQSLSMGDLKFQHHVLAHTFDAPPALPKAHSATGIRGHCHSAANTTQALSTVHNGRSPLQQHHKPSATRCLRAPTIGLTLQHRPALTLPSLTSSCLLCPSATCYRRYYAEATTQEKLVRTSRSSAPVRGPYERVSAATGCKASR

SEQ ID NO: 970998 - protein, 263 aa, Homo sapiens
MRLNVGVIRYFVRQTDTTVFSRLQNSNTHLLGDHLLNRNQQQPSPHGTAARNPAHQTNTPADIDTPADLPTPTRLHSQHMRHNRLPNRTAEHKTTPQHSVPTPRRNGYNPTQQTTITPHTHTARPHYQTTHTPATDDPPTTTPSNHNPPTNPQPTPASRLVGLVSCLRLDRRDSTHRSFSSLTHHALLTYFLSHYPSATHLNYLPHTHHLLPNISLLTISNINTPQQYLVISRHPITPPVTLLHHQFLSYLPIPTASPTLTLT

SEQ ID NO: 970999 - protein, 235 aa, Homo sapiens
MCPGSKRVDTKQGLYLAATRVRHRFPICVDDTRNRERVFPGVLLTTRRHCPLCRVCCSRKVGHPFMAKAPSCHTLGAGHKCMYYQPSLGDVPARPHFWESTHTEILAVELRSGQDRPAGFSWLLLAWRGDTLCRVGAHLTSFVPEVLQNRVCGAPALELGGARLVGVDALVTLSESADDVVKLESASAPLGWVFEELALVRRFCYSYLLFLTWGDPTSQTLLRHNSIGLLKSTSC

SEQ ID NO: 971000 - protein, 153 aa, Homo sapiens
MAPQQQYGNHLSLSPPIHTPTSRFLVRLSLSARTTRVPGSPAPLLPPFAPFAPPPPLRWFATYGGFSIQSSRSSVLPPQRLHRAFSSPTSRSVFLLPPQRLAPQLTALVGPIPLALGLGSFLSSLPLPLLPYTATRGLLALFVCPPALLSTTP

SEQ ID NO: 971001 - protein, 108 aa, Homo sapiens
CAVDRAGCCLPALLVGFYCSPFRSPTMGLNSSAVSCVDKLPCVCTRGVGELAPRIPPASSAECSCKTANFLFDMLQSARRGRTCGRTVGRAAPIAPPPGGKGPISPHT

SEQ ID NO: 971002 - protein, 200 aa, Homo sapiens
NNRQRTPLAMASNFKKANMASSSQRKRMSPKPELTEEQKQEIREASDLFDADGTGTIDVKELKVAMRALGFEPKKEEINENMISEIDDGTGHRNNMNLGDFVTVMTQKTSEQKILKEEILKALPSSSHDLMKLGRFRATDSENACPRSRGENLTDEDAASEHESMTLIDEEMADGHVSKRFLRTHEQRPASIKISVYYLY

SEQ ID NO: 971003 - protein, 115 aa, Homo sapiens
  misc_feature (79)..(79): Xaa can be any naturally occurring amino acid
SSLRHQAGDPGLSGKVRPPWSAGEVSCPASLLLVLDTAWVRAAWVQALLAWKLEGIPEARKFTSGETIWTQTSAPPSSXVHLTVNQYDDGAGILTTGGGVTIAGDTSYVHGVPYG

SEQ ID NO: 971004 - protein, 174 aa, Homo sapiens
GRRRLGCAPLGVFLLWRPNPGGVHPSWRRFRAMFCPPHIGLQRFAHSTGPPLWSSVCGPRYYSLRGRSHTPVEQPVRSGRSCVDVSRKRVCSREKGLPPFCAPARSVEKRHALHGDIRSPPSGPPPPALKAGLNGSPPVWQTPWAAPPREGDHTTNSRRPLDKGRPNTARRATT

SEQ ID NO: 971005 - protein, 96 aa, Homo sapiens
EGRGSKNCPVSCQAVGMISLLALAENLRLVSTHRKDGPCLCHVTAVELAVCRAYVNLLRHYKYLLLYGYRGILLMAFGSYKVIYNLIAVEQVPVED

SEQ ID NO: 971006 - protein, 306 aa, Homo sapiens
MVLLTEVRSDDQNGETDVMRVKKNIQESEVLDEIKLDVSHARVRIAEHLCVSSQAGERKFPWSGDFRVVFNLGSSKRFRASAKHVNWGHSFHGLNAMVFTRNPIFRHCFTEFMDEKHKEIGIYYEYKRDKPLIISFGMQMSLILDIIPQHQHEFPIWCKSLVVRLRVAGREQPFAMGATGARGEKKLWTLGGHPTVQNPVGQNLATAAPQRRPRTQHGSRPATQRRPPCLHTRSPRPHTPPRQRIRRTRHTDATRTPPTQRGPQPHPNTGDAHRHRDHLPAHPHRHHQPLTRTTHNTHRQQPPPPP

SEQ ID NO: 971007 - protein, 452 aa, Homo sapiens
IPALWAGRGQVDHLQVWQFADPTWPNHGANRCLSLNTIPKTFILGMVCGAPVIPAHLWRPQAGAHRLEPHGVIPCYLGQAAGQEHIAVKPTECGRLHVKATASMAILTRTGQSTEQQPLSAAQTPPHNTVVYTSCSIVQHTKHRLVPALQYLFTARFCQQLVRVSQRTTVYATYSPMTDTAILLQNRRDVAFRDRDDTITRLSMQIIIRYYGCNSHTSLRNAKKVQTMERVRLQCIPLERLHSVANIHRDSTTTTVENRVSTLLVEIRTHPSELKELHVTPQPRTASTANKHAMDPTPQEDRGNTNKGKYEHKTKAETRKNVTTGKHTDNHVTTSTEINTPPQTTTTYTATQTQPTRARTHQNSQSMDEPTYSRDNAKNANSEDDERATNRGSETQNTRLNGHHSQQEQKHKTQQRTEPDTRRTDNTRRSKARHSSSTQHEQKKLEESCNDY

SEQ ID NO: 971008 - protein, 134 aa, Homo sapiens
MLPCPLQGVLQPPCPGHSWGTHPRKPPTLGGPTTSAETHLASPRFRSPPAPHNTAYRPRVGCTLRPHKRIWRNVSRGNRQKPQSTTTGGVAAQRNRSQSQNLREHHRACTLSRTDGHPPALLHYGASPPPSHKT

SEQ ID NO: 971009 - protein, 105 aa, Homo sapiens
HGETPSPLKYKISWAWGRMPVITAAGESLEPGRWRCGEPRLHHCTAAWATRVKLCLTKKKPKKQKNNTKFGPKMFTNRNPRTPWVDIGKQFQPPLNTSSGASSKS

SEQ ID NO: 971010 - protein, 237 aa, Homo sapiens
MKRVDEMKDEMMRCKKHAACNMQMHANANAACNMQMTINEMQKTCKIMQMQDANSHAACMHTFTCMHPAHIHANGKMHAACSMKMHAACNAARTMQHATCMQHAHSACRHATCMQMHAACRHADMLKCMQQAHMHASMSHATCKHANMHMQQHTSNATQRKNRKLHHHASMHNASITLQQHNQANMPCKVHTRMGILPCKVQQWTMAHMPPCNPQCTMHTATGPCDHGHWHAILARW

SEQ ID NO: 971011 - protein, 217 aa, Homo sapiens
MLGQMGGIIWSRYGPSGRIIAGADVTIMKAGDLIQSRCQVYSFDSDHSSVSHHEGDHFTPAFLAAAIRGLTMDPTVPEAPPLSINGMRLRNASHGGDNFEEFPLIEETISSAKHQTYSNGSILYSITSGCNWIESNISDHINKKSMWSADISMKFPRGRGMREWEIGDETPMHVEYKKATYSECNILLNYEGEEHEIVNIGCRIRKGPIWDAIYYGA

SEQ ID NO: 971012 - protein, 187 aa, Homo sapiens
GCTPPCGWQPRVVLGLSVHYYCSSLRVVLAPACVVIAHPIAVDVASINWGRGPPAGVVVAPLPCGGPVLPLPPSTAANTLGGARLTLVMTCRANSRTCRVWVITSVTPYITTLCFVVVNASATEWCHAVSLYASVRARIETLLCLLSLGARGVSVFLSPLGPRAVVCSGPRAVIGAPFGRGVEDPYL

SEQ ID NO: 971013 - protein, 106 aa, Homo sapiens
LAQEVVRPPGHCPTKYGVPQDPRGHNLLWGPPFGEGRHYLALTRYSLVPNFTGGLSFNNNTRRGPTHANGSTRRRNNNRTCYLKHTAPSVTQEQYQSSLIIYQSSH

SEQ ID NO: 971014 - protein, 70 aa, Homo sapiens
RSMWTSLEKDSRENFNYTGGTQTGVVKQKEGPICAAKQTIMRGKPPRPPVASPRMFRRSFFSTPTVDLFE

SEQ ID NO: 971015 - protein, 265 aa, Homo sapiens
  misc_feature (83)..(83): Xaa can be any naturally occurring amino acid
HVLIVVVDQRAGGCSYHWFVSSQQQAWRTLNDSVLVDTAPPRISVALSLPCVLIAGVREELSQSVSSRKASPSFYSMNKYLVXLSCVRRYQHMGRNNSVRVCSVSLLEREMILCAHLHGEDIALHIYKISALSAVFAAPRTFAFLVAAPLSLECISRRYCLHYSSPLLYTDIAVDKYPTLLTRSSRNSSSCIYHSLIRLVSISFAQLFPLMWRTTVVPAACEEVSPFSLSIAPCIVLYELLHKGPTYGSQRRPPLLWRNKITEQT

SEQ ID NO: 971016 - protein, 61 aa, Homo sapiens
MERIDRIYSLSHRGGRTEADARQDETEENERVSEPQMTTTLPRSERFHTPTKKEKRSNKRT

SEQ ID NO: 971017 - protein, 60 aa, Homo sapiens
MLWRVVSKRSFTLPHPSECRGALPTCDVCDDVGARTTRAQCEQHLECKRPCPGHTNRQDK

SEQ ID NO: 971018 - protein, 109 aa, Homo sapiens
  misc_feature (89)..(89): Xaa can be any naturally occurring amino acid
MGHTLCASPLECHTPLTRIRAVDEYAVRVIPGRSQPCACNALFTLDASGTHAETSVNLMVKLTSPLRFIGRTQKPITTALTKYTLDDGXAAAGKKNTIINNNTYTQNHT

SEQ ID NO: 971019 - protein, 110 aa, Homo sapiens
GISLNGGFSWDAYRPRGCARKEFSRGKPPICLVKKGVYSKVLAMVWFEMDPPSSVKVLPLLRSPHHGSRDLLKTLWSHNGVASLLGPPFEGPTTLCVRSFKPHCSPPPIS

SEQ ID NO: 971020 - protein, 94 aa, Homo sapiens
PGVKRPYLSADCARLTPGSLCGARVKVAPHGISWRRPPWRADGFIVVRKLYKTGRIYRGEGPIWDAIRRITKVGWCPPLPPSSAETLVCAPPPK

SEQ ID NO: 971021 - protein, 110 aa, Homo sapiens
SYVNATRAQYIYTTPDNLSSGGAHASCCTPPARHVWSSPSSVSATPVGATTPSCGNSTPALSQHSLILFFTTTLLNYHHLSSEHALTTNSFSCPQQQSPTSCFLNHRLNK

SEQ ID NO: 971022 - protein, 118 aa, Homo sapiens
VEKGFGGLSPDFLGVSFRGLVPPRVYNLCYMGDPKLVVLVSFRRGNVPSPTILVSHLGLLDGAPSRSPPLCVKTWPKTLRMVPASPPRLLLPSPITSPVRSFFRILPLVARSLNVFIE

SEQ ID NO: 971023 - protein, 103 aa, Homo sapiens
ERCVCRAGLVLSLFPAPLVVRLFPLVAPPLCADLVGVVLPPGVVSPGMLGCPLRGHVRAVGGVIFFEADCLLFAPRVVVICLRVVFYGAETGGVVCLSCCRET

SEQ ID NO: 971024 - protein, 71 aa, Homo sapiens
AAATCGRYVRKKYAWDTGRSPRVGPGIEANMVKLAGFPKGSLISVRRSKLFEQICGDTPALVSVCITPQRG

SEQ ID NO: 971025 - protein, 117 aa, Homo sapiens
  misc_feature (112)..(112): Xaa can be any naturally occurring amino acid
LTTLHFCRSASPATTRVSPEFAGTSFWCSMGKYGFFLGEVVAPKDICTRGGGNISSAFPTPSPALYSRCAHTLAAFFPPVEPPCNSSLTHPFWKFSFATGIICLTNKNLLIXPSPTI

SEQ ID NO: 971026 - protein, 69 aa, Homo sapiens
MLFVGIHKKGKAGPDVSPQRFLLKPIITCPLSMMENARINSCVSEYVVFPTIFSNNSPIYRPQTINKHN

SEQ ID NO: 971027 - protein, 235 aa, Homo sapiens
CCIPRRPNFGPRVSSPPPPCRSSVAPGSSVCVPGSRSRPPINVLCVFERGARSCYSQVVSHSCCSRVGSCATYIRPAGGFSPAPLLARRGGPLVSYSRGECSPADCLGGWPAALVGWHLLVGHQQWVVHTPPASARHTLWAIPRSSPRVYYPHVLSPRVAGGATPPVQSPPTASRAEACGAREEFPPVENPGGHQGSRQSRVGVTPRRCAPALGLATGLNFCCSRKQNNPHKHPN

SEQ ID NO: 971028 - protein, 147 aa, Homo sapiens
MGRIIGVALLGFFALLGSGRVLLPSLGLRAPSPLLARPLCPPVAAQSCGASCLPTRPLPLYEVYWRLPIIVLWWAPGVWLHHPAVSLRSLQLRRPQVWRGVPRGPKGFAPHSWAPMSTRPPVFLSKYWLPAGCIEISILHKEKQYQR

SEQ ID NO: 971029 - protein, 232 aa, Homo sapiens
RRGGPSLGFFPPIMHARVIYCAKINTPCRGRHFSFWCRIYCPLACDLRLCVCRRMDTRGGPRSILSRPSRPGAAPARCCLCLVSTPPLVGDLGGGRFGLHIRWYNVVCDSLRSAAPALCDTALCVRCVPSPPSCVPLPRHVYWLFAGALYMYSPRAVHLSLLLATLFASRCVALRHQDSTQFHIVGTHSISFSFSRYYCSPCFSSCSAPHLSLLLLSTKYDNKTHHNKYQTK

SEQ ID NO: 971030 - protein, 236 aa, Homo sapiens
FPTALLSMKEAVLIGINERHRMLLECISLVHGRGAKLRVSKCGEVPPLTVYTRCRPPFRHSPCSIVTLRPALTHNMWVLCRHLPYFCCPRKIQALGHVTHDINARSEFRATFCLIFKTHQGVFVRSHRCLSCSPRQGLVAVGGGHPEVSHTPSSSMARTRHPFLLVDSRSVGTPYVFAPIDRLLLLALFGPQQLFLHLDLCHIQNKPFGQASVRETTPPLFPTVSLPSSPRPTITN

SEQ ID NO: 971031 - protein, 92 aa, Homo sapiens
CELTLREIISAPAGVPAHESAPPLLVRCPSSNAMDRSCKHACPPHGFLAPKQPVGTKGVMSMRGPPLFGRHRMCCLPGSVSSGPSGGKMYSL

SEQ ID NO: 971032 - protein, 207 aa, Homo sapiens
RVLGFSKRVPPGWYAVALLGVAVCVLRWGGRVLVVGLGIMGSSRWSVAPPVEAVFAMVCSITLVSLCVVSRAAPLLILRVLCTVVWLRRRARGASMSSRDGTHVVIFRRVGASHFFVSPRADSPVSLGYLSPGLLAGNAPSFAPSPRQSTLHAAGSATFVVIEYDALTAGVIACVCAPGSRLFLPPDPPRSRVWELFAPTLQGHPFT

SEQ ID NO: 971033 - protein, 218 aa, Homo sapiens
QVSLLSAGASSCFVSHVRASTRGVYLRPPAPRGYAAVMSYWRPPSLCLPRLTPIVQAATHVWVAPTVVSPPPSTSGLLPAHPWVCVAHARAARRTRHLGAASLVYAPPDMSCGGGALFLRDRSRVCSRLGLFPRFYGAVDRTHAWCLFLPARPSLGVPGALPLLLPPPLLQMRIFSRIYFSVNPLCPLHNIKEDDHLSYCGDGGCVERGTCGRTHNVQ

SEQ ID NO: 971034 - protein, 149 aa, Homo sapiens
FAEQSLYPHGGSIGQHDANFVPPRGQFGRWGQQMRYSCPIESNKKCDEPEKSVNKSICIPHPPIMFAIYSNPPARPTHYLDVPRPRGELDGLSDSPPVVLAYYEVFVAGFLSCRLYVRAGWRLRAALSAPWPYGVCLSRSPSRRSHVVS

SEQ ID NO: 971035 - protein, 83 aa, Homo sapiens
IGGGGMRIVGSDCVASLCCFDDLPLWMFGKFGFKKTSQCGFSLNNLSRNKAARVVRLYGGHTKLRGRIIVSLVFALTRKLTCR

SEQ ID NO: 971036 - protein, 123 aa, Homo sapiens
  misc_feature (79)..(79): Xaa can be any naturally occurring amino acid
GRPPPACPVVERGLDFVAPRLLRDAPLVRTHTPGQHAPSTLANTKVGNLAPTRFLSFSGRCGLYRIIIQTEINQVRVPXLVSLAQTDVLEKIMWLFLTQRCHVRDEHISYTILFFLSRAPAHS

SEQ ID NO: 971037 - protein, 171 aa, Homo sapiens
NRRKVAAKNFRNEPPVNLAAVKPPYGTSIPPPSIKMYKRAKQRLLCLPTDSNVPRTTLGIKGHAGTQDHLCEAHSFVAGIFSLALAGRARFFANPGGEAPGFFVDHRISCGVVFRQRQALDPSVWEVMGDGDDPSSTPTDGAGTPQRLREGDAPAPRPPWGRMSGNSPSHK

SEQ ID NO: 971038 - protein, 87 aa, Homo sapiens
LFIPRRGVFFQNSCAHAVLVVAPPRWGDCPPLGVFHNRRRLCPPGLWIFPRDPFWPRGFPSVPPGWTPLRFPCESAGLSPGNNLPGR

SEQ ID NO: 971039 - protein, 194 aa, Homo sapiens
MVFSPPVEALHRATKRCSALIFNRILIAQRVEQANFRTLERSLWERQLTYRGVPSTLNGGVEEEAVSSSGGPEKILFANSCGGVTRPSRAPAFYIPLVKAPLLFVHFKKREGDISNPHYISDHFSNSARSAYSREILFKGHILFITRERQPPDEAELTQITAVLDHPPHPGAIPHRYIPLQSHTILLRPHSLNW

SEQ ID NO: 971040 - protein, 184 aa, Homo sapiens
MCGALVLPPCDPPPLVSAQGCVAQVFRGPAFPRGDLSPANRGLSRESPSVAQRSGSCGSHLFVRHGPGFWEPSYTWSPPGTSPHNGTHQRSCPFFRQKIDPPCRAAPLVSQRSPTGSFPPPPMNPLGCKFHINGKYYNSFIAQDPHSSNTCLLEKRLQTPPFENTQELAEFSTNCREVNSNTIT

SEQ ID NO: 971041 - protein, 164 aa, Homo sapiens
PPVYLAPPYFGPFLPKPPPYPCSSRGGMSPPLLTLFPLIPLICVDQRLFLKCPTKPTRPSWSTSTIFPLPNNTPFCVKIITASIALLLNTDSVPPLHYPAHDLRNGFCNLSPPTRQHPNFPRPISPPRTFSGEYFNPPKIPEKFFTRKMMAHKPPTNRSLIITG

SEQ ID NO: 971042 - protein, 102 aa, Homo sapiens
PCSRVGLPVVKTSLQEEPSWVRLGRWAFDLGFCQGIPPWCYKLPCRPPNSSGVPLWYSGGSPHLVNTPGLSSPPLNNGGVTITLFGESFRAPTVYSLGLPLG

SEQ ID NO: 971043 - protein, 156 aa, Homo sapiens
GSSRERFPIGRLSMGGEIAFGCNRDFLRGSCSKTPALSDLTAVVSAPPLGPKVNRVCFGGSSRAALFWVFLDLRRLLGLQKSAPQPEFVSPRGPPPPRQNGGKTTGATPFSPTGGVKGTPAPIRHCGPLNFGANKEASPRPRRYWDRVFTPPCEQL

SEQ ID NO: 971044 - protein, 201 aa, Homo sapiens
TINVLPLTAGALSFPWTVLRGYVKKNFVWNPPFSEKLSVQWVNIGNALCVQKKVVFPTPVLLGAPSRRYPYIGILIENSLVFCNLAKYYTPPFILPLKELSPCNNTPVVNQHTPPGYSTPGIAPNGTVPETVPKFPKATTRRRSETHGRIGGNIQGQDTSKKGFPLSKASMRPHRASMWAKPTSQKSFFVNPPPPSISFDT

SEQ ID NO: 971045 - protein, 187 aa, Homo sapiens
IDVCRPLFNFLPLCFSSRGAFYLLFRAFSPPLLSRAPPLSRFVTPRSICSPGSLYQTALSPGYRRCHVVAPPRPRTVSFDNRHPVLFQCPGLRPIVAPPNIKLAWKTNCGHRRASLTPEGAGTQPPFPLLFAVEPTTVFPSLAAIPVSPPTDLLGEGPGGDNPPVVVIPLLVPPPVVHSCNVATPPY

SEQ ID NO: 971046 - protein, 138 aa, Homo sapiens
VVFSPPRPGSNLPPHTALWGVNPRRRSGFSPPGFFLGGVPAPNTVPAPSASRCVSRQDTVVGQILGESFTEDRQVGDCLRRGSFCRDTRRDTPTRMGDINSSRGNEDKSRILPVMEDQYTALLEASALSSRSAVSNNQ

SEQ ID NO: 971047 - protein, 111 aa, Homo sapiens
MYNTSQHMGGEEILRGKIYYNALGPPHFSTRSAMREVGVSSLRGAITLRGVHASLSPKKGCCFFISCGGTLHATRGLLLDIDVAREFNTLPSASVYNLEHTVPHKLHALIM

SEQ ID NO: 971048 - protein, 112 aa, Homo sapiens
MAKPPHWAANIITSTPALLRRKFFTKEHFNEKIRNKPYFPKVCLSILHDSCNIPHLAVPVRTPIIHWWNFPLAYQSSQHAHFMYRLAPLIFNNPLNEMAGNKHSLQTSSKYK

SEQ ID NO: 971049 - protein, 169 aa, Homo sapiens
MCAYSLLTTSVSVAASTCGWEIPSPRYCLVACSYKNFLVRACPREKCRLCFSVPSPAGEFYVTGRPLGVGFVTRRQRGIRFRPAFVPSRLLNRILLSFWTPPEGCLFIPYSHFLPYSTPFVPKLFTRRIAFDTSNVLLRASIEKIDWYTHATPVLFVAFEFDGQYHELD

SEQ ID NO: 971050 - protein, 172 aa, Homo sapiens
GIPEMCWVRGWLAPERCAGVVPGSSVVVAARRVSGSCKWTKVGFGAAEGPVAPVPDWKGECMKRELMAVEDTTAFGSYDVGSLHRQQVSEAGVCWFLLHCLGTQDYVYTTSLCGFAVQVASVGVIEPDGHELWSLSPRPSALILLGHNNHILYGRHGAHDDGHYWNPLYLDV

SEQ ID NO: 971051 - protein, 93 aa, Homo sapiens
  misc_feature (1)..(1): Xaa can be any naturally occurring amino acid
XRTKKKETSNTSTFVLTPLSTMVKAGWFSPIVFIGAHQTLACDICVTRFVNPDKLRNDVGITPPVSPGDIHFSPRPREFRLGPNLLGMGRHRH

SEQ ID NO: 971052 - protein, 121 aa, Homo sapiens
MACQTGVGERATGIKKVGEKKATRGVAKTRWGKKKGRARATPHKGPGVRGTEGRTVRITEPSILGPPTRGHRRGPPQTGIASKEGVCPPAKVVRKDNVFGPTPPVVVFGDPSGTIKVPMRI

SEQ ID NO: 971053 - protein, 205 aa, Homo sapiens
  misc_feature (195)..(195): Xaa can be any naturally occurring amino acid
MAVCDVVCVGGGLRWGCVVGRWLCWKKACGSVSKHVAFTPSSGDALSRLSGVRTPPRWVLPPLIWPLLFPATPNMPVGSPEVPWAGEPGPANLSGLARALFRMFSVGLCFPENNFSPDSRPISGAGYDDGVHARWGMLFPPTAPGYGNRLCLYKRRSNIGRQDQYRFSKSGTLRQVSRVELPQEYRAECLQGPGXKEDSPCGDIK

SEQ ID NO: 971054 - protein, 120 aa, Homo sapiens
MQLGTTRRLRLGGEETKIWRLPSRQEVIKRPPPHNKSLEKHVRDRSNGYPLTQKALFCLRSSERETLFKKIGNHKRGPFKKRVSCATTGIYTGKIRRWRYFKEALQSTLIYRISARSPDN

SEQ ID NO: 971055 - protein, 283 aa, Homo sapiens
MSTYLFLTCVLGNRCENTRHTHLFIIRCPTGTCTPQGDAVTLRPRPFGDPGHILFAGGHLLTSDTHHGWAVRPSTGLNGDTGLDKVPLCRPHKPPIADETNLLVFDLKTTRELSGSAVRTAPTPRRRVLLHLPGLNRGLRATGRSTRHGYICDRHYNICLTRAAGTRIWSTHVVFSPQEQDLLLTASYDPTIKAWRSPRTMRVLQSPRPRPHTFFSWLATPEALRSCWSALEPPGPLEDIARALSTFSRAGEFGDAYSSYALGRGHTRPRHTLTHNLLTQLVM

SEQ ID NO: 971056 - protein, 95 aa, Homo sapiens
GRPFAHKSNLGAQMRPRYKMGPRGRIYARSREDKAGQPSATASKRKMKSSVRHHGGSRQAPREGRHPRRRCLSIRAQFCEGTDRRRLTSPKRAAV

SEQ ID NO: 971057 - protein, 172 aa, Homo sapiens
MPIPRGSRCTCPPAVPMFQSQPFFLMRAVRLPARTKRFLVQDERWAQRCTNRRAQTKEPQLLAKYTFMQNHLSGNRLCVHKMLRVLSAVTCVGGNNLCGIAHSILVQEKVLCVKGAKLWLAQHNRYFMSIIARAVRVQRLPRGAKVSSCATKAAMRILTHHVSTNARVLFVN

SEQ ID NO: 971058 - protein, 169 aa, Homo sapiens
AGATDQVGVRFKRAPGSDKRASTGTRTRKGVEVTPYLPLCGVGPGAPEAAAPPSWEKSVTDAAESVTGRQNTGGSAYLRRGSSPAQSGVSSVVSLGGNQHVCGKESVSSKLAALPSPTETEVRLGIKLSSQLAGDPLERVRIVSKRARARRSDRNCDLYLIGAATGGGA

SEQ ID NO: 971059 - protein, 56 aa, Homo sapiens
MGVTPLRNTSPSHSLLDTVTRIFGKTALLSPLSGYGIDGITSVLVMTTHKPCLGKA

SEQ ID NO: 971060 - protein, 130 aa, Homo sapiens
MIKRGVLGETPSCSLPKYQLMTQTAHHICGPTRFARTQSGSAPICVDISPRVENFFLLRVSLPHTQSISPPTPAPARRIKKVTSPGWVYTRGGFRPKIVSPSVSPPVGAKTLYTRFLPCQNLPCVKASPT

SEQ ID NO: 971061 - protein, 111 aa, Homo sapiens
MDARVNKQCCLESSLAGAPPRGVFVRGPPPAPFVTELCSNVLGRRLCEVFLLPLLPHALFHTIKLCASMSGIFSRQEVVPPQLFSEKEGAIYGAKRLYSEKRALHGGPIPV

SEQ ID NO: 971062 - protein, 49 aa, Homo sapiens
MVLGVVHFLKALATRCDAAVDSYKKLLFSEFFVLRKLYVLSGSPIEQQK

SEQ ID NO: 971063 - protein, 108 aa, Homo sapiens
GYRFLGEYGSAKGRQAGAQGYPGRSVHGEVAVLRPPENKEGVTHTLAQTHKRCVRPLQTRSRQEYGPCQNMPTAGKNLCDSPPPAKTRTPGQVAPNKARNPHVWCNRD

SEQ ID NO: 971064 - protein, 133 aa, Homo sapiens
  misc_feature (14)..(14): Xaa can be any naturally occurring amino acid
  misc_feature (95)..(95): Xaa can be any naturally occurring amino acid
MANKRDNITRPLLXKGTNMWWSGGHHSGRQTNPTMEPPHPLVGHATRMGGEIHLRPPQVMCLGPSPRGTTIYVETPSSSDRIEQLRIDYKRSLSXLSPRLIIYIKRHHVVNKRARLHARFCQRIYTSGGYTPL

SEQ ID NO: 971065 - protein, 112 aa, Homo sapiens
PLWCTIKSPRPQLPNAPAGLICPIPVGPSTPLWERPPKFMRNFCCFAQNDCAPPLNLLFQRQDKRGNSPSLKSLCERSLAVLLLPHRTDAHSFRFKPGAHTKRVAPNNTKDA

SEQ ID NO: 971066 - protein, 151 aa, Homo sapiens
WDGGIARPTWAGNTVGPICRSSGVSHKNVAAQFGRTTENRCPFWRPPGVLAVILKRELYQYHRPGTTGNAQTPLFATSTQVPAAFILAALLIRCKRTPPGAIKIIFVHPSLCFPANNFLPRRSPFGHKRLLFLTQGPIAYRFVNHGSHTSR

SEQ ID NO: 971067 - protein, 114 aa, Homo sapiens
MGYSVPPPGPFQVLFMVLTAGDSCRVPPRGGPGLVLPPPSLHGLGWQPGPVCSLCGPSRLSPSNQSVFIRPQQGTLLTPLKVPHFSARSPPRRHNYRPAEACLYVFMSPPCLFR

SEQ ID NO: 971068 - protein, 150 aa, Homo sapiens
GGGGGGGGGGGGGGRGGGGGGRGGEGSGGGERGGGVWGEEEVEGQGVGRGRGQRGEGKWGRWGGENGGRGGGARARGGGAERGGAGRGKGVGGECGRAGEGRKGGEEGFAAKHGRRKRARARRARRAAAVVREREAHTGDEHTNKEQKKK

SEQ ID NO: 971069 - protein, 134 aa, Homo sapiens
VPPPLRGCLDPPVQVLTRDTGAFCVRLPILQGWADRLGIFCAPGALSMKCVRCEDPVMLGANYVPPPVLAVSSGVLQPPRRASLPDMCPGTAPGVYHPGESCRDFIRTISLRGLPAASFILRKTLRKDVTTITF

SEQ ID NO: 971070 - protein, 209 aa, Homo sapiens
MKTDTGARLTSVIKIQCCLYLSVYLESLPPETRLVCKHPLPAMVALRLPCGPTRCPQNRGMLNSRAAEVTPTFALAGMYGTGGHILFKKPRLFSSFMTTGSILPALFPAWTTTDNKVVGQTAPPHGARGCVAHRAVAPHTSGGTPRGPPQIPGKLMDSLDITRGSYHQKFQHAPCFLALAPPKECWSPPAAFYKAQGAIKQDVFYKPPP

SEQ ID NO: 971071 - protein, 290 aa, Homo sapiens
RGLVCSRVFSSGEFVHPLGAASGAYLVWVPVCDALHILSPGCAGAPLSPGACIRLAPRRPDGGLFLCWWSSGLPVCFLVLGWCPTAASVPRFVLCRERLVYLLMGLPSSCGDIYRLVVLPLPLLAGGPVVTAAVCLGVGARLVGTAPLAVMLLSRRGLEAPRWSVAALWGLYLYGATISRPPRVVVCSQGAVSFLLQRPPSWGSALAACPLGWSTRAEPPRRWTGYYYWRRRSHRPPPLGGGTQRPQSLLLGWSYFRSGVSPPGETTERGPRRSHGHSVPSQNRQPPTNK

SEQ ID NO: 971072 - protein, 106 aa, Homo sapiens
MLQTPRRTPVVGRTPTRRSNSVTDFFRRMGSHVVTSPLLAMHVVPPLLFSPGNFPPNFQDSPSSICPLISLYVLRSPPRESDLLVMDVEQENNMVTCVFFVVIDAQ

SEQ ID NO: 971073 - protein, 221 aa, Homo sapiens
MYFPGSKCALNNCEKVTRGDMSSPNGSRFTRRRDNASTLNGFPLTNLGLTPPSPEILSSSKGLLLYPAHQIIVPPPPFVLMHCLPSQKVNQTSSLIIANHPKVECLPPTHPQLRSQTFMRVPTPPLEHYRGSLEEKTQNFSTTTYYQKEVLRSYFNLEPHLCKGPVGTYKIFFILSFSQPPKGPQLFLLYMPPVQHQWWNHYAAPQRIPRHLLCRPHIIRF

SEQ ID NO: 971074 - protein, 162 aa, Homo sapiens
MQRVKSCCYMVRNLYVFGLVMLMSLGNHKSIVLGAPPGIFLAPRGQCFVRARFNVAENKDSRRIGERDTCRGLRKRFPLEVTPRGVHPGQQEKHLMRVPAFAEGPFLSCLIRGRFCPEAPCSCRPSWNMLSAMSLCVKPRCGSFNGVSAPSWKDSVIVLRVQ

SEQ ID NO: 971075 - protein, 99 aa, Homo sapiens
RVPPSPHKSGGFVPPPRLPPDVFGAPPSPLAVGIALAESPPGGGHPPSTGAAFIGTICFRPRFYIFHYDSPRDHNMFKQEYWSNVHKSVEAHLWLQNRL

SEQ ID NO: 971076 - protein, 211 aa, Homo sapiens
WGATWRRIYVATLSFCIFRGILYSGVTPWVDHTVVCSYTVFRRCNLVSRGSGVVPPPVAFSVGPSGRPELRPFVPTGTSAVLVPTLAVFVLARKVLAFGPLFAFSFSIGGFCALPQWVVAPGVPPYLSRTITLLSDFYPSERVCASTIVILGLNVDLFLVATTVFRRVSRSYAGISMGAARLLGKSHPHNCFHARLATSFFLSTRHLRIVK

SEQ ID NO: 971077 - protein, 136 aa, Homo sapiens
MGKEVIKLRYLPLDMYSPLPGIGPVVKCPHPSLDRAHFHCGASTDVLLNNKIRSFLEQILLEHKQLRNNNVTRLPLFQHTLLLRVVVTTGRVNSFTSKACTYEYIGLSSHAPRSYFVSATKNSMHMVTRPFLIFTI

SEQ ID NO: 971078 - protein, 110 aa, Homo sapiens
MPEFLTTNFISNTSIFIKDAGVEPCEKVLPLIIPSRTRVFPRSPGVEGDQLIAAFSSEREDIFVGIVGEKSGEVSGLSKKGLTAAPFIACGTIHDGATGIGAPQEARLVR

SEQ ID NO: 971079 - protein, 103 aa, Homo sapiens
  misc_feature (51)..(51): Xaa can be any naturally occurring amino acid
VSPLSPPRGCCFWVTHQRGCVCRRALLGGYLFWCDDVPPVRCATGGEGCRXACCRLTGAKYFHSVGGALLRSAAERAVGYALLHSKRGVILGKTTYARVYFNR

SEQ ID NO: 971080 - protein, 220 aa, Homo sapiens
LTYIRKRSVSTQRFTNRQQESAAPNPVTPETPSWGFNNKTGTGGRPANTSRVMENLTQEAVAFQTRIQTPSPQDSGDPLCYKHPSRQEVQNEPPTRHKNGSTRPHAARPHTGASLTPRYGQRAHIAPTHYRRYINREPRYATCPGQHVIERMMAKIIPSKQVPPSDGSPEACSWSPQNRYRKHTGGLKCAFIKAASSNSASCLPTLFSPPKKKTPKKLLT

SEQ ID NO: 971081 - protein, 127 aa, Homo sapiens
AVCPPFGAEGSCCVGRRDCWGLPCVRRGGYGPLCGREPSCAGFGERAAAHFSWSGPSGNPDAAGEGLVEARCGLGRLPCWDSRPLAAGRSSRGSSPWEVDSTHRAIHYGVPRISPSVLLLIPPPKEK

SEQ ID NO: 971082 - protein, 180 aa, Homo sapiens
HSAEEQMDKQRNNLEMSASFVVLYLTKAYLWHLEFETLCVGKVPCKRNGCVAKSAVPTIGRFPNRGIFFGNVLLSFQFLDTPKLVANGQPPLENDVSPQSGKYLRNMSGDSHCRKYHFPRCTDRYPPIPATPVSTPLPHSPPSFAPTKHLKSNYCHPILHEHFLPPLPILLRETSSANPP

SEQ ID NO: 971083 - protein, 223 aa, Homo sapiens
  misc_feature (41)..(41): Xaa can be any naturally occurring amino acid
MTWGDNMGRPPSRGAGVCSLRSFVQESRGSYPAYAPMRFLXSSSPPVVVVHPARFAGVSPTYLGTIRRGIPCAPRAVPRAFLNPRWRLSPHDQGALWDAPPPCEPPLVQVMFPKHSLALSAVAPVSPSRKFAPHTHTPFIDPSSFFISLPRNHRVCYTTHTIHCECCGFEIPIKPHNSLRITPYATSMSFLPPPKVLPQTSLHPTYVTQAPSFGFPNYNKPTK

SEQ ID NO: 971084 - protein, 140 aa, Homo sapiens
MLCADATSRSAVARAHVRRGRLIAATHVSTCVTVSGIPPSLTYRSGTPEGLFPRSPKSPTGAHPPRGLPRPKFPRRNKKRCPESLPLQCGGIPDLPHTSSVQETPPHACQQGGLNIPGDATAGRVKKQALPVTPQKQQTK

SEQ ID NO: 971085 - protein, 110 aa, Homo sapiens
MAPTDFSSGGVPLSRDDCGVTINLRRVLTRVPPLQYGAPPGSRRQAPRGRVVHACQGLLKFRATSILAPPWHAVISGLHDFAAPSWHRRPPDTPFLPPPRRVQKTPPQQN

SEQ ID NO: 971086 - protein, 119 aa, Homo sapiens
PALWSTWRFTCSVSLWSRLDIVCRFHGGFRTVRLYNWASPFSRGCFARPVGCCVSRAGATFVSWWGADWMSPWCVLSCMVRSTPSGSVPSEPSMFIHMCPSQVIFFNTTPRFDHHPCKK

SEQ ID NO: 971087 - protein, 147 aa, Homo sapiens
MSFSPPRVGVRVWPIRRGAWVAVSPSRLGGIPGPWCPLTIRAFCCVFLLENGSSFVPCSTPGPWKLQWHDLCSLQPLPPGSSNSPALASRVAGITGTHHHDRLIFVLFSRYGCYTMLARPVVELHTSGDSPASAPCHPDETPPPTKT

SEQ ID NO: 971088 - protein, 156 aa, Homo sapiens
MRLPGFQKDCAWPPAHLLGYLGIHHAARLPPHNPTDILVVSKRTTGSFSNWRQVRCSEYRGLPRVLMRSPVGASPNVGGNKGWHAPTCPSPYRTFMAYKTRASPPLSMRCMPGTSDEKYTIVYEVHGNICLNEEPSIIPLVEEKKIQRGRGGQSMT

SEQ ID NO: 971089 - protein, 63 aa, Homo sapiens
MYPRGMQGGQHPLMPPRPTARREEAPKKSKWRTPGGHEGPPNPGAPPLTPPRGPGRDSFPHIT

SEQ ID NO: 971090 - protein, 92 aa, Homo sapiens
YSQQQNTKKRRHMTTGRHGDHVPPACEQSPILSPPLKAPIHCPGKANHCGHPAFNGTPTGNRGLVPTGGTHVSVARCAPRVNPHVWRRKVKH

SEQ ID NO: 971091 - protein, 114 aa, Homo sapiens
  misc_feature (100)..(100): Xaa can be any naturally occurring amino acid
VAPLGCSGRHRDVCDSFPPRPGLGLCKANNGRLAPSWKPTCVVCWIRKSRRLLLFVSPLPANYLLSACVGGTLARTLVFVARTSHDALVPTLLGRQSCLXLGALLSSIHTSAMI

SEQ ID NO: 971092 - protein, 207 aa, Homo sapiens
RGCLQCPGTASASRARSWSWRDGGRSRVVCVWRARAQTCVVCRRRGRRPVSLCGGVRASGCPVGVVGLCRPCVCWCLSFLCLVSSCGCGARTVYRVCRALLQTRVLSRGIGAVARQRVVLVLRWSGGSWDWRWCWCVFVGFGLCFRDSCTEGFVSCRFLASAPTVFVLSRCGSDFCGCPAALVRRLLRMSRLCVGLAGGGLFLFCCV

SEQ ID NO: 971093 - protein, 149 aa, Homo sapiens
MLGEDNGGTPNLFLGQPGCIAKDNCRPQRCFLSGGRFKWSLVVPRGTPSARVVHAALSFGVSWATSAVLFQAPRSLGPPPDLDIRGQGPPNETFSETTCAPSFSIWALVVSRPFMRGEYPRADTNFGGLASWRNHVGRSLHDIGALGQT

SEQ ID NO: 971094 - protein, 205 aa, Homo sapiens
  misc_feature (1)..(1): Xaa can be any naturally occurring amino acid
XLMIINQAVHHTRDNNKMRSSALDPGVLNIVPIICAPSRQVLAQRLHLFPGCLPITTGVQLLLWGILTCPVDFLHPVVADICSHDKHPGCRAYLVWTPYNPCGGKPPRFERQGCDPEKHVDKSWCRTQLLVAPPGGPAPHCFVGVTMGCNPTGAFPIHRGLLSPLSPNGVGEFLCRAPHPRGNPRVDSTPGWVEFPRPMYAPTTL

SEQ ID NO: 971095 - protein, 299 aa, Homo sapiens
YVVASWFRITDTARVTPCRACYPYMGLSSARHFAGPRLLVQPICFLSARNAGLPFLRPKGWGHIYAGITGGKTTDPPGGIPRFPGILQSGGCPRCPLSPAPRFSLAPPRRCREQLKRPCGSLRNSCEEKEKRPRRTRNSHGRRWDVPHGSTKNHSSHQGGKSTEQVLTKRGNSVLRTQDHPKTNIGAPRLSWRQPPVEMPPPPPGNKASWARHPEGSDSQKPPTGQNRGNHPSVWVEEYTNYNRRSGGQRTNRPHSRQERCHTASRFRTPRRRGPCPADPDAADPHPPPGAQNTPLQQN

SEQ ID NO: 971096 - protein, 124 aa, Homo sapiens
MIVVGVASRRCLGDGRGARRPPSGVTAPLGVYRALYWLFFFPPPHCPPPESLVRRNGSPNFLLNKHQNQVFTSAPGPPPKNSGVFCPLLPGGPTLASISAHLISATFRKLRGSPFEAHNPPVLQ

SEQ ID NO: 971097 - protein, 301 aa, Homo sapiens
WVFSWRRCRFCCGGARPSLWACVSSLLAGEIETKKKNRKKETITRRKKRESEKEKETRRVSGTACCLWSRLRLVSMLMSTALTFAVLVGRFPDLLSIGSVVRLVLSIFCWCVSYSRLRCVCCRLVWCGVGGVCVVCALWLGLLSSALVFVAVMRKYVVLCFGLGCVVVLALFVFVVCAFVCCGSAVLVWLLRSRLVVLCLCRIALSCHGVVVGQFRSLCCVAFCSLWSSGLCSLCCALVLLGDFFCKLSVVFLAVEVVARRWAPFVRCRVVSCLERCIVEVRRDSFDGSLLVCSSMLRFVL

SEQ ID NO: 971098 - protein, 120 aa, Homo sapiens
QLLVNGSLLFIPRRRFNPVPAPLPAVFRAPRRSLLGTFPPRSLNTHKSRSHPRVVPEGPPRARPLCVLETSHPLGFSARQFSSPHILRSLCCAPRDEPVNIGSVSSPPPALLPHKRLSHH

SEQ ID NO: 971099 - protein, 114 aa, Homo sapiens
  misc_feature (31)..(31): Xaa can be any naturally occurring amino acid
  misc_feature (82)..(82): Xaa can be any naturally occurring amino acid
MLGGARSPRGVWEHISCPPLAESVPHVRNVXADLRNCSLSHGDSPRPRPAPLGPKGISRGALSTRERYIQKTLRLDTAPLFXSIDREVSSLYRAFARTAWGAPPLTLAIEPPSV

SEQ ID NO: 971100 - protein, 111 aa, Homo sapiens
FAHNPSTICGPHTWSPSRPPTRRVSTKWRTFKRLFYQPSSVKLLGIPERFNTSPPPAGAPTLNSGLRSHPKRPLLLPNMLPQTSLLIHAFCLPNIFGNLLTELPTSISPQL

SEQ ID NO: 971101 - protein, 423 aa, Homo sapiens
MTGHPRLWCGGSLFLSLWRVVSGSRVCVGVGLALVFVCLSVVVCVLDWCCSSCVLFSYSLFFPYSVLSVRPLVVGLRVSFMCGVYVCACCRFARRVAVCSLGVGGSAWSRRVSCGVFDSYCVCLSPALYGGVAPVDVWVGARGVCASPRISSVSWWGVVVVGCLRSMSPLSLLIGVCLVCMFRHSAGFSSCVWSFLLLRVCLASAFYGVLCAYGSSCVCVAIAVYYLSVAVLFVFVLSVSVLLSPIRFAVFAFGCGGCFVCLAVLVFSRFSLLVFCSLSLVLLSIVFFLSCLLVVASRFFFAHVLGCVSFCCVSVCVVVLLGVVWLFVSVVGVVSCCVLVCCIGGVAFLLVSVRGVFVWFVRVSARRSGPFAPRLCIALTSSCVVWPPRVPLPTVFSQVAFRRIVPPSYIHLLDLCGPRHALL

SEQ ID NO: 971102 - protein, 123 aa, Homo sapiens
MLPPRVCSRREIQYGQTRFPNFSLNRRRISICSPPESTPLGLFPTPPPHYTSSPEKILPLPINLILKNSSPFRVFFSNYVRPATTTCRTIFPHNPPLCRGEIIFLGDSHGIKKRGNILLPLPL

SEQ ID NO: 971103 - protein, 35 aa, Homo sapiens
MIAMGTVPRHSAEALRALWRALKKNFFFSPNTTKH

SEQ ID NO: 971104 - protein, 299 aa, Homo sapiens
  misc_feature (1)..(1): Xaa can be any naturally occurring amino acid
  misc_feature (11)..(11): Xaa can be any naturally occurring amino acid
  misc_feature (104)..(104): Xaa can be any naturally occurring amino acid
  misc_feature (145)..(145): Xaa can be any naturally occurring amino acid
XRQQANSIAGXTTPRALSEHRANEGATQLYARETSCGVSGVVGAPPEIGRRRTLSMVATRGCSVGFGPSQEGVVTTNGATAREAPAVAGLFSHRMFDTSRKGVXDMNTDGRQQRRQMRRACAPWGLGVYPPPLLVERDLMPFSPXPTGYLPVEFSSPLEVGAPRPTFVLLLPAYGAIPRQGEISPTKRDLRYSLSSLVRSQPLRGSSYLCVKLAECLTRHPAEYYPLLMMNRDTYDFPQDYTEENYLSSRPVDDVAFIAGKPVITHVLHDGPTFGATKFSRPCTIGVFSPGGPFRTPLQ

SEQ ID NO: 971105 - protein, 216 aa, Homo sapiens
GGTAVPHGSWVYRPRRCVSLLGRLAPSVVCLCGLGDVCFLAPPLRGGRSSHTPGVPPPMCACRGPPPWRSTPIVCPARSPLGRSLAVCSTPRGAFVPASWCVRTRTELFFWGTYLPAMCTHRRLIVLVTVPHCEVTLLPTTRWNTPLHSFALDGRYASRFLFRATPTQDSMILIVLLARCQRAEAPFAPLCPAPDSICLQLSWRRTPPAHPRGGEK

SEQ ID NO: 971106 - protein, 110 aa, Homo sapiens
WTWPPGGTGVVAVMSRLVSVPFWPLGGPDGALVWASGRVSARASPGVFVASVYIAAALVRRLTSRPRMGEELGARGPSSPLSAGAGHGGGVHHREGGLQRRGPTRGHSDP

SEQ ID NO: 971107 - protein, 62 aa, Homo sapiens
MVFALFACSARLRLISGCHLLSVCALLILMTASAGSYLSDAFCPANDCVCSFRVTTPTPNKT

SEQ ID NO: 971108 - protein, 286 aa, Homo sapiens
  misc_feature (38)..(38): Xaa can be any naturally occurring amino acid
  misc_feature (47)..(47): Xaa can be any naturally occurring amino acid
GKHPFLRVDRTPFPCGFLKPPPWGVHQVMFALRPPLLXPPLLCPRPXCTWPPPTRPFVGVYYPPGGLSPENGAIPRRSPFCLPPTVIALLPTYRVSATMFPPSRLLLRHDCLICFVDPPRDGFQAFPLTPRDLYVGGCPHHPPVLLGNRCINFASLDYLFQCSRLFGATESLASPPLVETWPLGDDCPPEGGRWRDPTVGLARTGGLTPPAEPPPKRTYAPPISGNRYEGMHHDRTRCEIASTPETECSMAPWRYERRRHKSTQVQQHTSWAPLTDPKLRAAFPKT

SEQ ID NO: 971109 - protein, 108 aa, Homo sapiens
MIVARVTRALSLRSSCPPRFLPRIHPRGGPVAPNAMKVLSPRSLLLQDFIGPCHDVALQSFLLVVLLPARRRLFLIPLGLFVMGLTAKHMFRQKWERFSFYDNPLGNA

SEQ ID NO: 971110 - protein, 187 aa, Homo sapiens
MHAQRFGPCFVNPWLTPLLRAFFAAPRPLGVHENCLFRPTIWVPKTYRVPKGRQIVPDRMCKFWPKTVWPVFGQAMPERGCPSSRQRRDCYGAPPRKGGPLIQGPGSAPVAVGPARHHMALGHPAGNIGAAVPQRHTGGVVPLGDHCACAPRLKLRFACRDTPSQVCVKQGASASRSRMGALAPMRL

SEQ ID NO: 971111 - protein, 189 aa, Homo sapiens
  misc_feature (8)..(8): Xaa can be any naturally occurring amino acid
RHQYCGRXAEGPLLKGRLSHARLTIFGVARIASYSAAGQRLRFRDSKRLPLARKPKMGAHRTRAVGSRPVCRANVEGLPSPQGGTLGAGVATQCLCCAPQPEWVHVGFLEKPFNTPVLGARPLKFANSLPRPTKSFRALISGPTKTIAPETASAITLRWVHRPVAPILHPCPMPTSETIFRLPLVHNIR

SEQ ID NO: 971112 - protein, 90 aa, Homo sapiens
RSRGVFTCGGLRGCPRDVPLGPWYNLPDPYFGPSVCRAFCVTVGIFALGRVFVSSGATSFSGLSKYVTLCSAVRAPTRVLPCQSAPHLGV

SEQ ID NO: 971113 - protein, 206 aa, Homo sapiens
MTLSVVLCYVCGEVVFSVSAILVVRASVTRGTSPLECSAPGCQPLCSRVSPLAAVAMVLSGASLRISLWPLKDGVSPLGFRHFPGLCAPLSAGGSGSFATLCPPLLAEWQMVELFLFGAVFSSPRVIFGGPFSPTSIGCVRRLSMPHHQLCRDEPQAPTVCPVVPLATLFSRDVVLLLRAASLMLALNSPGKMHSRDTNIRCEELI

SEQ ID NO: 971114 - protein, 188 aa, Homo sapiens
  misc_feature (92)..(92): Xaa can be any naturally occurring amino acid
THNRRRKRVDIDSAQLRYKLRVVTSCAAKQVHSRFETMPAHKVVDTLPDVSRNYPNKASGIPRTCPEKDPPRSVHRMHNQGAHPGTITHLVXACTNGAHKVRQLQRWQQHGGQDTPYMCSVAPKGCVQKKKVAVMESSLSGVCSSETGVISEVLPPFLGQRFVPSGGTMVGEQPAYLEKRFPKTGPRR

SEQ ID NO: 971115 - protein, 156 aa, Homo sapiens
MRCPHKVLGTHGWRDPPYQTRTTIRERNRGKKPMLTIVMDRSKPKILLLPDEWVRTQPSLYPRLVRKTIFIRPPIVLDNHNPMARSSNSQVVILSCRSHSQSAKHTQVLVNQNFIVTNLSARHLVTYLISRRSPKQKYRKKNREKIPQKKFRAHIT

SEQ ID NO: 971116 - protein, 268 aa, Homo sapiens
MFALWHDSDLYRCGGRKDDYLDGAPYSEAVKPRLRCYVRDACVKPVCFPRGLPRHFWGETPFARPLSPVFIRPPPPEVFCVKPSPLIWAAFSYPPVEQRGAASRVPLRVARNTRRRTKFFLVGRAPILHEQCVTTRRCAPTHANNFPLGDFSSPPPPRREFNYSTGGPPPTHCGEGTKEGALQRRVTPHGLRRPNRRSGPPPGVMTFWQAAAPPTVNSFHAQRLEEERVGRRNEERMGRIKTLYRNTQPRRIQQPPPGTPKKTPPDKN

SEQ ID NO: 971117 - protein, 309 aa, Homo sapiens
MDNAARAINDCRRTRGQKRVNTGAHTRCGAPPLSRRVVETEVRTNPRGGQMCPHQDQRGMPPGDCKVFLTAATPRNFGRRSPSELGDPTNLWAVGASERALLRRPDASLRPTKTSAKSWCFLLKEFLISGARHPPPPKEGVNLLPGSLSAAEGKKLRGETGIAILIEKHKVTRKSSVGEVAQKMKLFVIGERALSQDYDGTIGPDDESFSSRTPSIIAGKKAPTGLTMGAPVTKGDSRTRSGDKGERIEIVNGITEESMKKTGMKKGASLAGVIFAEEGAPPETEKNTGKFPLWAREMVKGGNLNRPNI

SEQ ID NO: 971118 - protein, 240 aa, Homo sapiens
MLSFSAACVLCHVRYTGLSGDRSGCPLPGFLARGFLLRRLAHRGQTGGSSPPILGSPAPLGVNFGALLRLTDSVQAPCEKRSGLKKKPSSGFTAKNTGPAFFFNAAKKAINGAHSFQTKKSDEVGNPNIARRERLPRDIQGKPLYHESSVLQHHYRHLGVRDKNVSCLKKAGVRTIKPPDSPQGDIDNPPHEMGGPTGRNQSGDRRVPHLSRAHSGAKTGRGICKLWGFLFPPVPGECSH

SEQ ID NO: 971119 - protein, 112 aa, Homo sapiens
NRRTGAITHPPCCGREKISRNRPPPLAESTGESGDDKSRISVLSWEINHTTPAAGGRPPDRLRPRSHQRGAPTTRCDSASGSETKLPWGRNSSIEPLADKTPPAGGESPPRI

SEQ ID NO: 971120 - protein, 269 aa, Homo sapiens
  misc_feature (1)..(1): Xaa can be any naturally occurring amino acid
XLDRLPLALAAVSVWSPRMFSPSIGVLICARHSLVVAKDALLCAPYASPWAQQTPPGRRVVPGVFPGLCHKGPVYNAPLLSIFIWGPRSLRRVNQPRLSWILAPARFPSLISPSGSPMGRHRPPPPLRQGVQILPASPGPPSGGYPRLVVVVPPVAQLLRNARSDLLKLHPRGFSMLTLNFSSSGVGQKFPHDPIFSQPLYRSPVAPCHITCPPDILTRPWCTPFPCAQHLGGRVVQTTCRAERTLVPLNRGPHAAPPPTWGVLVRQLP

SEQ ID NO: 971121 - protein, 104 aa, Homo sapiens
MSPLHAGGFSRQVLGAESYGRVSENGEMGRIKLGGVLNATFTAVKILGPPRTRRNKALALWRETNGPGHQDHNTGGVPLPLGARTPQMIRRNRIPPRGFLNMIK

SEQ ID NO: 971122 - protein, 268 aa, Homo sapiens
ERLLREDAVGRAQVMPTSGTAGLGRNAVMGSRRPRLAGTWGDPPRRENRAGFTRRAKRVLGDSLAKSPGVGRQVGPAVDGPRPEMTPGRSKGRHLPGAGTNSQGPTAFSRRKYLSPTEFWLCALKNRGKGPVRAKTTSRRAFIRRLMRVPGCASRTTEGGGVIAFSPPPPIVEDRWGTPIKLGGAPQLDSGAEMIIAPKKQSGRAPRKAITRTVGGKVLYRERGQHGQSTLFVGEKENMVYATDAGLRRKKVNLLDWCAIVASKKRGL

SEQ ID NO: 971123 - protein, 103 aa, Homo sapiens
MVSAYRCSKPDGAFPTNIWEQYSCTFLAENQGYQLFKRSCEKPPFAGELKGRQVPLFSAHFAGCGNTVKWAIHPHHEGCRLQRPAFLHDKYSRCTVSEPLTPL

SEQ ID NO: 971124 - protein, 147 aa, Homo sapiens
MRCESYTLEEESRRRVVRRAWMLKGVQRPAAGHNEVDESSRALLKTTKIEAGAVGGIYPLRPREYLLEEERGRRRKNNQRSKPAGERAERGGSDDLTCRLSAAGQRGRLNDAVWIDDEVARPSSRGRSSERESNGRQAREGRLSEGT

SEQ ID NO: 971125 - protein, 120 aa, Homo sapiens
MGDSPTNTGRRHQTDTVAGSNTRRQNSSSQTPRGLHPREGRDMGLKKAAPSYYRQNYGTLIKTIFVLTQQCLPAPTLWFQPGGIYPPDPRNKRSESTPYTYVEHVCRGNVPINESESTPG

SEQ ID NO: 971126 - protein, 123 aa, Homo sapiens
MLVTYHVNGHAYSCHQNDRKSLCMGTSDNIRGPSRLPRDAILGPDTRAQGGLVCGHGSGPKSSVLSFASQNLATNSNRRTTAPFPGTGFTTHAVTKRSPTKGGKDFSTTAYKACALDDNELEK

SEQ ID NO: 971127 - protein, 74 aa, Homo sapiens
IPAFKPWPPVEPNNEVLGPPTTPKALYGSNPFYLGSYNPAVERLQLLLDRVLAFQEMGRTPKGAIYIDHVPREG

SEQ ID NO: 971128 - protein, 148 aa, Homo sapiens
MLGESPHLRRDAHSASLEYARVYRMTMRPFQMSSPWFRTRDRIVLETVRHRPEFLAVCLSVEPLMHGDSQALLRLVPANIGRTEHSQWRCCRIVLIDKEAVLATGNPIEVWTPARNSVFRAELPLTSGRTGYKQPALQQKQRIAHELD

SEQ ID NO: 971129 - protein, 210 aa, Homo sapiens
PLARLFVVKRALVLTHHCMNHGPRTLPKEVLVMGRPFAGGNYLLIRVDAIACWNNCWRVIVIPGCYLYNRVKRISGSPTYVGGKDLFMIGEQPSSCIRIVARDTPCPLVGNNTGEVHISGVMHNALFLLTEGFHSWGGAGTPYHVTAERPMYVSPRHQAGASPCCATPHSEDAYWYVHVWERCWDVLPPDTVFTKGVVFPMHLIKNPPQN

SEQ ID NO: 971130 - protein, 107 aa, Homo sapiens
GAVFLGKSPNSPHIIFVDLSKGSRGFLALEFFYCQTAVRTNKGGVVTHRGCCTLGFSHVLLLCPPDCGQSYAPRHTPPRGYGSERLCGRRSVITKEYTVGPTSFPNK

SEQ ID NO: 971131 - protein, 86 aa, Homo sapiens
MPVQNLGFYGTRGSAMAQGSKPDYALLQLPVWQSRTAPQVESAWGNMVQGPRLGTARSAVSARSRHDQGARRTGRTRADHTRRRHT

SEQ ID NO: 971132 - protein, 214 aa, Homo sapiens
  misc_feature (78)..(78): Xaa can be any naturally occurring amino acid
  misc_feature (162)..(162): Xaa can be any naturally occurring amino acid
  misc_feature (169)..(169): Xaa can be any naturally occurring amino acid
  misc_feature (180)..(180): Xaa can be any naturally occurring amino acid
HHHTEAGLVRTPRRSHREAYNSCARTQKRRKCGKEGTAGRVLSAAPVGCPKANCTRKQCGETRWWPGRRSHGQKSPTXSPESPEKLPQSMETLGHNHAEDTDRTRRIMGNGPHTPPAAGCTHRGPSHNVALWIEHMRDPANKKAGHEGAWPLQGTQAASSLXCVPSRCXVKHRSTRSLAXASIVRTSVPDTKRTRCAGVKFHNSTPPARRPPQK

SEQ ID NO: 971133 - protein, 232 aa, Homo sapiens
MMSSTWRLCSETYQHRRPDCTVESSRRMTCDEEERLSRTFNSSDSDSIINNWTRMTGVYTPSRPEMFTRGTGDDRSDEEWATSILKMDMSEPETELEGESAEDALDIANMRGACPAPGMRLIGKRAFQATVLNDRWDAADLCGMSSGAVPDMSSKLKGGTGSTAGRVCACATKGPRATWRCRYRHTCGGHTTQTTRATGTPKAARREDGKEGTKAGNPRDTHQGPQEGAHHA

SEQ ID NO: 971134 - protein, 181 aa, Homo sapiens
MLNNVVKLPKNTAQSKGDILPPPPSDEKPRMVPEEWPPPPGWLHARISVTKSPSYSRWRTPREERIVSPRQEVQACLTSTSHRSPEAAAAAYNLRHDAPSRHAPDIVDQTSCVPNIQIGNVQEEWAKLNPQRPPVCDKISPRGSLTGDGLFPRRPANETYQQPNRRQRGAKIKRGRPTKNK

SEQ ID NO: 971135 - protein, 237 aa, Homo sapiens
MIMAPYENVHLVANLLPELFDMVMAGRGGIRKAGKGRLAQGVFGIRDLQTTPTNTTKQNNKLGRGAPSAPRKKSFTKPTSGGGRRRPSGLRSPRPHGRAQGGNSGGCDTRSRRFPTQKKEGGGGERDGLLEQIPKGARRAHRGVPNTQGSTKGQPIKEPAAAGRKERTSRCTSEQKQHTRTSDDNTTKKNEITEKQQTYNSDRQKYKRTTQKHEHEAQIVQNRDNNTRRRTIEAYNC

SEQ ID NO: 971136 - protein, 205 aa, Homo sapiens
MFLKKSEKLESWTYLESCKTSCTIVAAREQIRPFEMGKPPVSTGFTGLIMSVLASCDIWRFFDAVIDFVLRQPAWFLAPLASYESIQRLQHFMASVRIQPPLISSAPIFVPGIGAHPTSCQTKTFLWLFGNTPYSGAKHRVLIYIKKEKAPIYTTASRSYAHRCFSLETRLIIITKGIYTSDPLNCSALCFTIASTPAIDYISWS

SEQ ID NO: 971137 - protein, 292 aa, Homo sapiens
VVRVRVPPPRPSGKRPFQEGGQPPNPGGPGTLAPKCGAARRPPDVATKNCCVRSGMETNGLVPHVGPPPQPQEGDNPVFHPPLCRYNAFRGGDVAPKGEMCPADCFSHQRGHAPGGKSQGVPPPWGKESYPGNYQHAVSSAPKFPPKRRGHPQRGGPTTPGATPEFIGKTSLMDNRNNLQAPTQPQWVHHPVRPRHTSVKGNRGAETNKLTQREGTHAGKTTGVNARPVSTNAANIVPARVWGYPKDPSDSRDVVKPYEHMVLKPREGAGEPQARWYGPHPPHRGDKGACPQ

SEQ ID NO: 971138 - protein, 222 aa, Homo sapiens
MWRIPGGTPRGAPASDPRGLKEEGVVHTGPKDNRPPWQNRSARVAKGSDWCGVGRPGRRGCRIPLAHTKKSEQGVGATINFPTAPGKRRGVVTPQASTKTGRRGSTKVCDEDRPPSAVVGTPAASHLPRAPQQKIPAGKHSKGTIDPPPAQTSRPRFEGGTNKQSTRSDNLVAPSRHATMWRLPPAKGGPPQNPYSSITWHPFPISTSGSRNPLSILDNLPR

SEQ ID NO: 971139 - protein, 164 aa, Homo sapiens
VDRLYPSCVACDCSGHDGGEYVLLKDMAIICQLSQVAPVISYPQYLQSIRAFHTCTSSMNMLSLGSWMATGTFHDIRECLDTAEVTEPSLIVQSPDAYKACGTKESSICAQAAQCIGCQSRTQLDVRCLRRVQDKCLDAIKLSMSIWDYRGPLELWGYDLGNFT

SEQ ID NO: 971140 - protein, 202 aa, Homo sapiens
LSWCGSLPRYPCGLARVGFPIVRPLWWRPRALVCFGPGPGNQRFGSPFFPVGRPTLVVLPQFGCPRRPTVPFVSPPVVGPPALFATMAVGRQLEDISFGGDLARRLPPPLGPEPLQPVGAAPQPEIKNVCRPALWRTQKWGPPGPPLECHKGPPLKRREIGGGGNPAETPRTSWEAPPPGQRNRANHPHGEISSSRPPLATI

SEQ ID NO: 971141 - protein, 298 aa, Homo sapiens
VKNERTTEHGKQERNGKGTGNRTETEQNNNTNNKKKKNLVCGAPPLAPYREKKSALHTDPFWRWARRAGPQYREKWTNGRKSGVTTRKKPVGTKTQSAGGNSLTPKTQKRPRGGDNRAGGPLSNKNSTKRESITGGAHHNGRTQITKREGATKEEAPARESQDMRKAARGNQRRRTKQTTQSKRRDNRTRHTQQTTKAQKERDRRQDTTKKDKNKTQQHNRQEERSEKKKKKTKKEKQKEKKHRGRDETKNNKRRENRRRGKRRKRRTRRREKEKEKKQTRKKERRKKKRDRKERKRK

SEQ ID NO: 971142 - protein, 311 aa, Homo sapiens
  misc_feature (244)..(244): Xaa can be any naturally occurring amino acid
VIVHSCVGCRYVVTQARDITPGVPGRDWGPSLCATQVSLCAGRPMSPCRVKHRRGSGKHWFVSRPGDIACCALAPVSYELPRWYTWRVSSENMMCGDHPPEVVSGCAPPCRLIGATPPLGQHSSEPRGFGRFLYAPRRVCSLLGRRALSSFCSPEGPQGGGLEHLPVTRRAWTKPTPLGTISHHTISEHFFLYTRKTPLRSICLLEPDDSPSPAGECLTAVPIPHLSYSRGNNTKHSRTLHPNXRWSSPAHPGGHTMGAPPPSRDASGGYSPQRKGESFRHTRWVRRSPWLTTYGKHRGPPPPKKMSAQQN

SEQ ID NO: 971143 - protein, 217 aa, Homo sapiens
RRYFPYHEKELITLHDHALIIIFLICFLVLYALFLTLTEQKSLNVILDISDAQEEEEDRSELSVARASILSLNRPVPIPKRSFTQTDEVNDPVPYHQINWPPMVLNLRVHRTTGTNLQLLHTSPIIPRTRRLRLLDVDNRVVLPIEAPIRIIITITRRLALMSCPHIRLKNRCNSRTSKQNHFTYTTGGLLRSMLWNLWSKHSSCPSSLELSPKNLE

SEQ ID NO: 971144 - protein, 109 aa, Homo sapiens
  misc_feature (67)..(67): Xaa can be any naturally occurring amino acid
ALSMVDCVTSTMCRSCVRCTGAMTASPRFGAPSYPKSRSYSVLSPSTLFVPLSPGLFPPRCILSRRXPGGPSPFIVGQTFPKTPNRPVVYPRNSLGSDSASSMVKHGVK

SEQ ID NO: 971145 - protein, 261 aa, Homo sapiens
SINPRSWVLVTAPLRYVSFGPTILPPQICSQRPAWFPFGASFFFSAASRAPGVLSAPPRIVAPPFGPRLGLPSGRVSFSPVLLLPPFVPGWISHPASCLDRLNFPPRWRPSSCLLRAPAFSPRAFYPPPLPVVARWTYPSCRFRLSGPQVVALRGGPPFLYHRALQAASSWPRIPGRLGGPPHSLCSLSSPGEELSPLAGRVFFGRLNSTPSPCMESSCCTEFFAFQNALVRSYETPASPAESGEPDPRRECPLQGEYGPP

SEQ ID NO: 971146 - protein, 104 aa, Homo sapiens
MRKSESPKTPPLCQQDPPPPPQVGQGYDTTPSSEEDIYCRPEHTRKSSVTSLATQKYAHPTPMRNPSHPPVDIGQSVIKSGNPTGCWRGSGENKEHLYTRLVGL

SEQ ID NO: 971147 - protein, 95 aa, Homo sapiens
QLLEFSVLLEADKQVLGPRTMYRNQYDNDVTVCEPPRPGFHLNLRLCDGTLLNKGSVTVGLYIKNVMQFGALSLYKGRISELCRLIRNNRILHVD

SEQ ID NO: 971148 - protein, 225 aa, Homo sapiens
KCPEQAPRIPPKNGPDHPQTLGRPITRANPAEPPRPPGGHGNTGKTDTGRGPPQPPIPHEGSHTSDGETRRSFAPPGLQTRIPRHLRAEPLRAPQRCSPACDTIKPKRRKYRLQPHTAVLSWDTHPPPEREASTKRPPKNLPGGHHGLEAPHGSKRTRGTPQLLLKSGLPGPHEGGDATQKCLIPEGGGGPRTFDPPPWSCIIWRLWIHRDRPPQKQTSPDSPNM

SEQ ID NO: 971149 - protein, 162 aa, Homo sapiens
RLHPFHVIRINKMLSCAGADPGSKYGMRGAFEKALGQHGGLGFLQIGRSMIMSDPHQMPAGIKERCELEAPATGGPSVRDVHGLAEKHPTIFKEESWGLYTYSSQVLDEMVKTMDGWRGRVIPDWAVGVQYMASALDHLELEMVRSPAVLMSGFQMCLARAS

SEQ ID NO: 971150 - protein, 146 aa, Homo sapiens
MARCADCHMSSRCGPSRWPGPLACGHPVGRPRNSDPCLCGHPYIWVRAGPVIPFLGPLLPDFLTRVGDLFGPAVSPISVDLRVSRPYVPFPARRYISKVCPRRIDLACHGQHVGRTNVGGSPEAHRVRATLGDIVSPPSLPNTSRV

SEQ ID NO: 971151 - protein, 197 aa, Homo sapiens
MLYLALNGSPLAVAPIKGPRLDHAVLPLPLFAAVYPPSRGDQGFPPPPFVCPPGTDFMVVRFRAPCGDRSPFIPPRPWGVPPVHYHQPGPLPHGLSTNRGCLAPCLVSYHPPRVPPSPGTVFQSSTSTSCQSVRQVPFYPVLLVDECFTTTQGVKPKGVFVLEPQEELLCVKSNTHASRSLAAPNNRPTITSGSHIL

SEQ ID NO: 971152 - protein, 111 aa, Homo sapiens
SWCPLVLAEEPLDEPRKAGQGGQALWGYQNRSSNACVWPTLLDLSRDESAKRNSSKIGIGGIMLELSVHFGHKGDLTNGKERSSGRTIRKFLASQQNATVLKSESSKPMNG

SEQ ID NO: 971153 - protein, 270 aa, Homo sapiens
  misc_feature (47)..(47): Xaa can be any naturally occurring amino acid
SLGSSPPSYSPRGRILQWTENPGSVKIGPFFIILQPSFTGSLVPPIXEPLLPKRSNPRGFKDRRPLTFYQIKSARLWNQTLDIIFLGGNSGLDSSTHSTQWRPRDFKERISIWLFPRLIESPIPLHHEIAPVSLIQIRRIPAPFLKIDQQIVGPLLILHIVRTTNISSELTFYPRPVPSKYFVPTKLHSHELGYIHHERHTVLAFTPPQPKLSRSSRTLVVPRKGKSHYNIPSTSHTYGRTTDHVYPYASSRKPHHDFWGRNKIFTDILR

SEQ ID NO: 971154 - protein, 121 aa, Homo sapiens
ALPPVVSPGNFFASPHLERAFCPIPAPSPRREHSVLRAKLWILPPRSTPAELNITFGAPRSPSTNHESSHMRIALLICIPRYTVPLGRVLKPHHQLGSQYIFIFYDNHNLRFISPASCDKI

SEQ ID NO: 971155 - protein, 65 aa, Homo sapiens
MNIPRKVCDEQWGGDPLRPTAPTGEAREPKEYRLETHRRRKGPTKITSSPPRPPPRGQKKTPPFK

SEQ ID NO: 971156 - protein, 125 aa, Homo sapiens
MFGRESRTRVLEGKSCINTILTGNPMVLPKIIITVRICAIPSRGSVRGQHRYRTHALIIGLTRWAQQLQVVPLDFKESCSKLVSPWSYEEQPILQIAAVSPGATPQRVRDLDYFLQKNPPVFHRH

SEQ ID NO: 971157 - protein, 260 aa, Homo sapiens
PQTPLIEVAALLNKAWGPPPLSFQKMSRTTFVVQSPPSLWRQYNSSMPQYMADPAPPPNLCPKLAPFGSPQQETVSLPREIMVVRIDIVTEPHARSSLIRDMSKPHITDLPLFAGSETLQHTKRIFSFRGGPRTLFSQRAPGGYYPPPPDTVCGVLHMVNPLYWVTLIEEQRKSSGVYVKHPPYTTMSCATREYMFLEAPKNLAHERSHNQYVRTILSSPSYRPARGFFVLYFVVTRICCKKKQFYAVAPRQASRKTRPY

SEQ ID NO: 971158 - protein, 139 aa, Homo sapiens
MLGSQLFDGPCSPVPPMMSTAMWARTRLSELFLCAYPVPSSNGRHTLAASYKRFFVRALFSGLHLCHDAPRRNLGQPSWPGHGPLFLPRGLQVGLPECTTHIHGVNYSPLMREVTRHPADIPPGCILEVCPPRTHFRSL

SEQ ID NO: 971159 - protein, 94 aa, Homo sapiens
MTAWDLLELRLALLEGPSLDSAAFLVGQRGVISIGYETWRLPRLAKIRVHNKSNISRVETMQTDAPTAASCSRCAPPPPRLPPVSPLPFKNAKH

SEQ ID NO: 971160 - protein, 220 aa, Homo sapiens
RATKCIQPSPLCAQRRGNAAGGAIPLGVVNSNPLKVKVGGETLAGNPTGGLLTTASPHLGQPPPPLEQSGALSERKTGAPALPPQSRETHSPLELAHSRDRQHTFKRANTPQAVLGTLPPDRWAREAHRFSGRITSRDRCAHSTNMQHTGCAPPPIQHPGCNNPARGNMRGKTQTLGPPSWTHGTTTFLRERNPLYMGEVDTKFHGECLRTSRCLETAVQ

SEQ ID NO: 971161 - protein, 238 aa, Homo sapiens
GPREAWRAEGGESRPQGRGSDAVRWERAAEGRDCGGVKLTPYGARARAVGVRPAVKEMERGGRGCHPEGRPRCVEQTSEGGGGRGEVATRCGSRTQGLRRPCGARGKPPWVITEGGGAIPQARQMCEMSWSRTEEEMMGERWSMDNGGVRVGGEKAERGREGGAAGGGESATNAVHEEAAVNQYEGATPVRRRKLPTGPHGDKPLWAIVCLGAPCGCQTARMLNPGLIKNMPRATGGN

SEQ ID NO: 971162 - protein, 286 aa, Homo sapiens
  misc_feature (107)..(107): Xaa can be any naturally occurring amino acid
MCLVRVEGPPWVYSPPAWVVPRVAPPLTFGWPHGGVVLCHISRERRLISGQVSPVWAPQMCPPSGPYRGFLRPPGHRLFSAPHAVTPPLLVNMAAGMPQGLAAPSKXTPSAFGPLGARGFCLQPPQSATFLLYTPRGPVPRPYPSPGGPHGGEVAGLYKQIDHRGKAEHGPAEIFGGKMVVARRMPFFCYAHGHPLETLREGFCSHFPDITCYHARHIYFKLDFLRGSPHFRGTILLFGPGVWVHPRAAGPPHVGMWVPVRSLASRGILPPPVARDPGPPKGPPNI

SEQ ID NO: 971163 - protein, 162 aa, Homo sapiens
MGGHPRHVSPPVLRGVSKRPLITFPDPVPPRPPCWSTRRVFIPNSVGRPSAVRDQVLLCGYPRAWRYPADVPQGRSTTRVGVGLPHTDSCSLLPPRRCGGVQPSRTPATLRGQVKYPAPPPPPHSRSNYPPRPTHLMVNSPFLSTITCPKHIPPRPSMRKPP

SEQ ID NO: 971164 - protein, 70 aa, Homo sapiens
MVQPPAVFKSKPTYYCRFMTTATCSGPHYREVYWDESCERLGDEGRREKDPELEPRPPHPGQQRDPPPTY

SEQ ID NO: 971165 - protein, 288 aa, Homo sapiens
TFVSVGADAAARTRWGRLPPLVVPPPRFLPPLMPVFLPPGVLAPGSFVPGEPPPDIFVCTPSYRALPLPGSRQKFPAVLSPFSLRGPGFYPRGHPPKVGHTHGEAPSNLGGLLGHAKKRRKLWNRRPPPTAAGSSPPIPHPPLAAPPRGGDPPSPRHQKRTKGTYSASLLGSCSEVDPARPPQYSSSTRHGRPVAELWVNHAHLRGCKPARISHLGPTNLRPRLGATTCGPRPKCGNPRTKPTLRAAQQTLDLHHHVIGGHSSAGAHTGTPIPRDRDGPPEGVPFPTK

SEQ ID NO: 971166 - protein, 207 aa, Homo sapiens
MPETAVLCRPHLLFCTPKNKPLWKTQGPQFPQITVCPNPLFCTPHFTTSHTDIFPQNLKSCPTSYNILYANSAPPNWGPPPSCLAFTPPFSPTHTLWKAHYSATRQTNDGHHDDMSTPPSGQTHAGETPPVAAKKHTPAHLFSRGARGTAPRSTHETPQEAREAKDHYGVDTIAKGRELVIPRVPENQCPVTATPQGHKNQNPPPIT

SEQ ID NO: 971167 - protein, 188 aa, Homo sapiens
MTDNSYLNPYTCSRPQHLTDHNPAHYILGGTTEGYQQRAGTTPTGDNISISPPENQGPPSPSQHTRDHFKSATSVQHISTAKARTHATVEHLDGLTNRTGPRRTHTLFRHRPPKTVHYAAAHATCTQKHIQPETTSHQRLRNPWHRRNTREQNPTSSAPYFTHPAWQPPRVPTHSSAANLPGHAQRFR

SEQ ID NO: 971168 - protein, 39 aa, Homo sapiens
  misc_feature (1)..(1): Xaa can be any naturally occurring amino acid
XGAASFHPWTSLYPVNQAPPAPPGPPSHTRPRRSRPSPG

SEQ ID NO: 971169 - protein, 116 aa, Homo sapiens
MRELGDPSEVCPGSWLMLVRGCPVHSRTNCTVLTYTERNRRRDVETYGAVQELGLGRQGSGSRLSLVATVEYHPALNEVVTIWPGGVGTIVQFVNSPLGEMQMGIETCKRVINGRV

SEQ ID NO: 971170 - protein, 101 aa, Homo sapiens
SSLWWSSLHLLCMPRCAEPLPCVHSNRLTTLRCEIRTIGWKQMQRQRPTVPQDLSGPAFMLSFFVGSRVTYREITLAVCLATLRSGLGLVVHACKPNTLGG

SEQ ID NO: 971171 - protein, 288 aa, Homo sapiens
MRVSFVHSVVHVVFSLFFTEVRFRLVIRSNVAANVWLAPIFSDKFLSRSLSSPFWGPAPLTQFPAFRSQRPVPLQASEVPGIHVQLHRSSWRVLSGLDFLSGGKGATQNPPEEASSTFVPPRRGASVPSAAVPKLLSELNRLDPRLYYSPLVNHRGLSSVTIYFLIQRTFLHPYWATQGRGKPLGASIGIPTKPPLPRGKLADRPPADIVRVSGPPRPRPGKRGGEWIMIGKRVSTQLDAQGSRKATKDQPSPHPTDPLPQATAISGRAPPAGPTSTHFYTPPNPEKK

SEQ ID NO: 971172 - protein, 221 aa, Homo sapiens
RNPCASLCGTGVVRHHRRASAEAGHDYGRAPQISVAILLDVDVALRQCRGFLLLPAKVGVLGRKQTKGVNNGFIVKRGNPPGGSAFTICRGCIPPPPPGGEAQHSPPAFGETNKDHPKVKHRCGTHKRGPPRGNQQCAGYTQRDSATPICLVLKYKTPRLGYFFAQVIEKRKEIISLRKTVKCLGGAPLYPPMVLIEIRALLLGGELREAHTAFGAEETDI

SEQ ID NO: 971173 - protein, 120 aa, Homo sapiens
MALLIGPSRLLDVLVGLWARQQILRWTPRDARKSGRGPVSEIEKSPVAVERYSLLMEHIPPSVGHSRDRLAGCCLGWELSQAGNSEVCRPSSQWQSRRRPTSVGENCIIQETGEDLKQDD

SEQ ID NO: 971174 - protein, 97 aa, Homo sapiens
FFSEETKVKIEEKKKRRTEGKVLCDHVYEIVSFMVTTCLLATMHFWVICDPVVNRPTLLVRCGTDILRAVRPIPMCTVIRNPRFQTVRIKLGNWNRG

SEQ ID NO: 971175 - protein, 75 aa, Homo sapiens
RHLLAEIAEKSCPPGCVRSISSAGSADFVGGLTTRPRLSFSLGVGPFPPRWLRGMPRVNGSELVCGSRRTGVDVG

SEQ ID NO: 971176 - protein, 44 aa, Homo sapiens
MTKTQAQNHTKNTNKTINKTDANTDRTKKKRQNTRRAQLQNKDK

SEQ ID NO: 971177 - protein, 103 aa, Homo sapiens
MRVVAVLVSACVFVRRLALWIMGRRFKWERAHCLRLGSTVCPRTGRRGVRARVPGALTGCVSSASINGHSADRSVKGDLLERLLFVDSTVTGRGVPAVPARGA

SEQ ID NO: 971178 - protein, 60 aa, Homo sapiens
MANQFFAALVGGRPSSHGTFGGLTAHRRLQFSLPGDFVGVVGGRSPLPHPARQKDPRPQK

SEQ ID NO: 971179 - protein, 115 aa, Homo sapiens
MSKYIVVYGYSYRYFLEGIIVKKGVMSYDVHPRYTFSNEGLGLDECCYENGKCGMYLVRTREVCAQSNVKQPMWDSSQSLSKHRWCLIGYYTVGNSLIVEDHPAFYASRNTVMAC

SEQ ID NO: 971180 - protein, 296 aa, Homo sapiens
PLYRGAGGRLSVLFPPPLCVPWGVLLRVAPIAGGAVVSVVGVVDPPTAFVFRRVSTRLVPRLGASAHLFHRVATTGGKTKFFVGATHTRVLPALSRVTPPMVVSAQHLLGMAPRAPPLSPRGTLPAPPPACSFFSSAVGRSSFGGSYHAVRTGGTPLALVLSRWRVIPLGETNLSGCFNPHRCGALPPVGILCEGRAFARAKYCLLAPSLLPSVQDLHNQFRHLPRGTPTTTAALLSPRGERWYSPLPTLCCKDTKPNSSRRAPTRTHSGVTNWDPGVDHSYESLAKKNLGQNKNN

SEQ ID NO: 971181 - protein, 118 aa, Homo sapiens
MAPLYLLMSFRRMRPPSSWFTTPRWAAQKSRYFLAYSIMPLAPSPLGLHDLICCSLVGPAPTTCCGFIYKPTPPHPAPGSRSQCSSISHGVVIPPQYWNIVYQSLFSTEGGIVNGVVS

SEQ ID NO: 971182 - protein, 295 aa, Homo sapiens
VCMLRCFVLSPVVFSVEVAVGTPFGQAGGCSDVLVGPSGDVRMSGVKRPGGSLCESVSNDGGAPTGAIAASLLLGPGLIPGPRSRVDVPRAGPVCHSLGDVGSVVEEAVFFALNAPTHKVSVHLYFLLPFRAAKVPPPLGGRVPPSMLLAHNRGSTPHIRRPAVSKEIGPQNILCAHSGHPRTPTETWFDDTLHLYRRVPTPIHISPVVVIKSYVNNHNVGMRRKKYPSSGHGHIRPHNEVIPLLNEASLIFDTLLTKTTISNSSPKAPLIHLHNSDKAFKSEIPPQNKYKCKHN

SEQ ID NO: 971183 - protein, 177 aa, Homo sapiens
  misc_feature (160)..(160): Xaa can be any naturally occurring amino acid
VRGGGSGEGSCGAGLCPPGGISVGDWGMAVRVAQEGVAPVGVPGGSVGVGAHEGLVVCPELVPGVLWWARCGVCCRPGWQTQACGRREFAVARGLWCVARAGGSGCKGRRVVVGRRARVFFFLEGRPPCGGGRGVWVGPSGAGNGFVVGALDWRGVRWCXAGGAPERWLPVESWSAS

SEQ ID NO: 971184 - protein, 97 aa, Homo sapiens
MGFRLVVLAGVERRVLMLTQSGLASPSAGSTPYGDRAACPHGGRVSLCRLGYPPLFGTPQFPAWGGPQVSFQRPRVFNRSGDPDREGPSTGDKKKLC

SEQ ID NO: 971185 - protein, 131 aa, Homo sapiens
MLWGPPGPKKKSSTETPISLGERAGGPPPAEDTTRHKSVGTNPASHQRERQPPGAAQDKRTRAAGGPPPNTKKKNTSRPRAEPPPGAFLARRTTSTQRAALHTGSTKPRRAPHTTRGPPHKATLQITHIPP

SEQ ID NO: 971186 - protein, 112 aa, Homo sapiens
  misc_feature (4)..(4): Xaa can be any naturally occurring amino acid
WYVXTSLPLPPNLSSYGSLTERPDSAGRHTLSHIISSCRQCRICIRGDHTLYHRFRDYSRTSPLGVSHNPPPHMANTNHRDWWANIPQTHGCLFFSPLNLHIALSPATSVLE

SEQ ID NO: 971187 - protein, 97 aa, Homo sapiens
  misc_feature (41)..(41): Xaa can be any naturally occurring amino acid
SRYEVVIGINNNLAGVVSTKKTLTRCRRSILYTLQMSARIXHRVPMKAPSPLCVRTHDLSSKRKKQRTNHFGTFLTSHLTPNLTGTLYSDIKHKSAI

SEQ ID NO: 971188 - protein, 239 aa, Homo sapiens
  misc_feature (1)..(1): Xaa can be any naturally occurring amino acid
XLLLRVRFPSPPGRLCGATPFCSAANLVCDLLVGGPNWRLPQWSPGDKNFFGSALTVFSQVIYAFQRGFFCVPRVCFAVTRVCRGRRMTPVVGRTFEGTTPLCRYNTHTRALYRPPAGGGEHGSPSWGLSHIRAGRPLVAVGLDAPSIAVFYDSLSLRTVPPPVCEFFPGEVVIRPPRPSWETLQSARCHACCAKIFLTPRHYTKGDDMCPVTTPPSLTLLSQYHYNLIPGVISNTLFL

SEQ ID NO: 971189 - protein, 104 aa, Homo sapiens
MKKIYHRPALNDCHVMEDTDVSIRVESKLSREDSSQHFCRLLNRVIVPSSEITYGMVVADLCHSLWESVQNLVYNRFRALACQMNNMYPLATRFSLLVFYADGC

SEQ ID NO: 971190 - protein, 186 aa, Homo sapiens
MRVVDAQELVEDRRYMLQTLLNRCDSKKAYHLQRSTLTFCDYPYMNMSRLSPGTSIFWTGVTEERIQRTHLKCPSLTPLGHYNNTAVIKYSLCPIVLQTNCTNTTSYYIAPGCLRKQLKDATSRGSEPGFLPCSRRKTPQAWFPDRYPNRCPTSEERYSMEWRNLPRLGAHSGNNPPSWHPGATMR

SEQ ID NO: 971191 - protein, 141 aa, Homo sapiens
SRSIRSAEDTGRNGPVVEQRGRVRYQGPPPEGGHSVHGVHTRQSLNGELKGEQGAKQEVILLCVNRSAAPWQGVFPRAGTVGGAATHEASRGSDNISRLPGRLQYAATGAGWTTKCGVVSVVKSEMAMPQPLLSPQLMGVF

SEQ ID NO: 971192 - protein, 115 aa, Homo sapiens
MGATARCTQGAEGGGCRAERGGRGGGQGGREEAEVARRGEPPDCGGGSGRKGQPGGRSPGGKQQVRQGGECLGRGRRRTWRASRQGGRQGAEEATLWCDAARKCPKGPKGDNPPK

SEQ ID NO: 971193 - protein, 45 aa, Homo sapiens
MCLHAIQRMSDENEVACAPRMVESFTVSPSFAPQHLSAWVTEPKP

SEQ ID NO: 971194 - protein, 182 aa, Homo sapiens
GSFKTHPVVSHRGEEPPFHRVSRGGTPTPHSRTHQGVPPPRGERSPPHTRTQAGGRHPRGNARKSGTPRRWGETFPPPCGRDGTTGGTYQGVLATTRDCEACPSGTIESPSVGARQNERITNDPKGPLQPLDPPRKKGGMGAGAKAPRRSFPRGAPQKRRVYAHTLGGTAPPTHTHKNREKN

SEQ ID NO: 971195 - protein, 78 aa, Homo sapiens
VKFLLEPENVSRVTACANMFQGPVPDDSVALMLALVEANRFGENALLAHKFAQAMRTTVCTRNNLGGLWYAISWDNEN

SEQ ID NO: 971196 - protein, 253 aa, Homo sapiens
DKAPEGRRRPRPAQLGAPPPHKGGACSPENIRSRKKCGLHTTARSFKKETDRYAGSRAPAKWGCEETKPRRPSSNYLQRHGVIKNAPGGRRPPVAPPAARDAIPGASPGGATTHPPQVGLLPSTRSPQTRRGACICCVPTRKRHAPRGPPQEHNITKKESAPATKNTVQNTYFAPPQHDIRQMERLKEERAPRARPFARQEDPRGSRLLRRRSLNMVECFEAPWPGETKSCSSEGDHKTTRRVGESPVQTKTK

SEQ ID NO: 971197 - protein, 204 aa, Homo sapiens
VCPYSVSNKLVSTFRKSYQRCERYRGCLIAAKIIVDSETLEYWRRFPLYVVGLTVKPLGGGSIPPPRGMSRLNYRCEGRSCSPSDVHRRDGLFVKTKVWVLTPHSIVAWITKHHSAHTRESTVTPVARSPPEVYSAFFAFHWQTRPRRFGGNKKFQTTWMSSGNVHCPRNADEINARAPRCTYPKSCSIQYKQAANKLGVKHSK

SEQ ID NO: 971198 - protein, 135 aa, Homo sapiens
  misc_feature (46)..(46): Xaa can be any naturally occurring amino acid
NRLVRGITPDKKNMMGELYDRSPLDAIHLVHRLQYNRDCTDIYDRXKKDTLKGISSSLVDLSKMILLWRSIMDGRISGGGSRGTVLYLIDYIGINAIYWESIGDVSSPGEEIENVYEEVYVGSIDEIVSYEYPTL

SEQ ID NO: 971199 - protein, 288 aa, Homo sapiens
LSSDRYGERDEADATHDASKSGHRRIHIWGPSPKLAGNKAADLCRLGTHDTAIRGPIKWDKPPTMKGGKDTPFTQRRPGINRRTPHLWRIQTHTCCIAVVAAAPHEGKGPQYRRPGESTKHVSREMQDWAKPLETMGSNAREVTVHATPNPMPMKTQRRIARDRNKKLYRGVVCKAKGTVNQSVNQTNARECGENVVARIRKPYATEGLEIPRSFHGLPTRSTCRNNKAKGDGAKGPKNETILQKKMKISRAHQQYGKKRSTIHLNIRGKPSKTKKAKPPHSPKMAII

SEQ ID NO: 971200 - protein, 120 aa, Homo sapiens
KTDTLEDLYPSQPKSQILDFRDYFRCLLHRALHPREPLYPLIHDSILWNMLNPPAEVTTEKSDSSSLIIKTLFPLIEEPGTKDQVTAQEIFQDNHEDGPTAQYINMTEQGGAHFSVLQSG

SEQ ID NO: 971201 - protein, 121 aa, Homo sapiens
WGANPKTGHKWPRIIQKHGFKCVTGKIAGSHIFALLARKDVVTTTTGGERNNAPHSGEPGSVPPPPESVDNPGYKRPPAWAHPPMVVGDPLQGFYESHFAKTTNSSGPHYLFRPRLFALFR

SEQ ID NO: 971202 - protein, 101 aa, Homo sapiens
  misc_feature (1)..(1): Xaa can be any naturally occurring amino acid
XVLLWGGYRVGSATTSLLDNFVRVFHLVPVSGLRTGWSTYQLPVVCPRSPPGGALAPPESGGKLVFLAPISFLLVGMAFAPLGCTLPLCSIISSVGSLSHT

SEQ ID NO: 971203 - protein, 279 aa, Homo sapiens
PQRLRCCCRRWRGRQRTVAAKGGGPRWVVNRWGAAAHCAPWARQRCGACPRRSKRVRTRVGSCWSHSAEREMGTHAGGRSMRERRYPVMRAEGAAKSSTHAGCVGLLGGGTGRARCVDRTLGEEGPACVGECKGAPARRRGGRRIERVMEVHRNRWLRPPGIKYRPRWPHHAGDATLWMRGATARREVHSACEEGCTREYKKCVGRGDNKGAPPRGDPLLEGIGAPGIIAHCGADVLPGTPQAVHNLTGCGDSQYLLPHCFSPKACQKVCCSSRKHIKN

SEQ ID NO: 971204 - protein, 222 aa, Homo sapiens
RPVPPNDPPPLLNLANNLGPFFLIDRCLRRLVYANSPFERYHEMTKRFQPPPQALTGTKHSVKVSIIPHQGIRCVHPEAANTKVQSALNRDALDPDTLPHCGGGPTAGPLSHTRRAYNMMRPHCRRPRNQKRGIPLERRVPPPRSDPHHMENGLRPRTNLLCHMRYFGAIPWHAPRTSLVVTPPQRRTLSSPRFLPPTSSFFLSPHPPLFPPPFSPTIAPHN

SEQ ID NO: 971205 - protein, 161 aa, Homo sapiens
  misc_feature (3)..(3): Xaa can be any naturally occurring amino acid
  misc_feature (11)..(11): Xaa can be any naturally occurring amino acid
  misc_feature (45)..(45): Xaa can be any naturally occurring amino acid
MEXSWFNIRAXLTLILGARYLFSRPRRESFLPARPLRVSLLPEGXTSPANTFWFCDSSLLSDVIPFRRGPRTHISRRGFSRPHFLAPRGDHHNPMLRWRSLLRGKDLIISGRRTSFVQPRDESLRPPYTLVVIQGTFSSGRSGSHNSQGRHRTTCDTCLST

SEQ ID NO: 971206 - protein, 161 aa, Homo sapiens
MESSESDDFGPRSTIHILNQRLSYELFQSTLPPVDSDFVYNWNPLLYPVSPTPLYLPARSTHVNGLPLGTLTNALAQEFARCLGNANRTDGAKLKSKDPGISYAQHSDIVRLYTHGVMKPGEYKTIARCPGATEACGHLNGQTVGGASAFERTEATSVIRL

SEQ ID NO: 971207 - protein, 71 aa, Homo sapiens
MTEAPPTDLLHEQDEATRARGSTPGTAATQPFVGEAPEREGVRDPTQAQRKFDEPPPADNNTGEPPASPQN

SEQ ID NO: 971208 - protein, 157 aa, Homo sapiens
RVPGVECQPVVVSASGSSSPARPPTGEPPAPQGRQCTNCFPRRLEYIGPQPPALGRETCGGVPVHCEPFPDPVGDVPPAPRLFTRVYPQQPHLWPVMDGPRTFTALMRAAGPSLYLGARTSPGPPRRPGGAPFPAPGHLPPPGPPHWANPISNFINQ

SEQ ID NO: 971209 - protein, 307 aa, Homo sapiens
SVHYGRGGYAGLTGAGLFRTEAWISEVPELLERVCGAPQRICFRRQGIRRLAAGDSKCPHLAEVPGNLRTTENRDCRWLGSPGGDRCTVSGGATGIYGGLISLHGQVNCPLMLMAHILSQEQARSPQCPVQPCCAVKALFHDSMRRSVRWGGRGSRVPLSLSPHTRREGEGAQGRSGGNIRNKQAVRSSGRGRRSTLDGVEKPVASLFCTGAMEMLEDSHGLGRHDLLGSSITQIGDAIGPTCKKAPQPHVLETNPGNISTGQLKTKGLRDARGRNSKNNDRHGHTGPRNKLAEDHRQDTQADTTPP

SEQ ID NO: 971210 - protein, 247 aa, Homo sapiens
MGVLPLSGGQSPFLESNLFWPPPPSWKLLYPRKGRISLRCMSVHIHALIERGRVFPRERASHPGREKFPLGSLSHNGRTTHHPLSLYTLARCAHRLCRPRLGEEHIRALGVTEAHRESSTVATPPPVCATTPPVGAVIAAHTETTFAPQRNSLLTEKREERRHSRYFLGGEKTTAAPPRKELLALVTAEQEKIIRNGRSLTGPRGAPRATRPTYSLIGRSSRSHHSIGEHRRRPSPIREVFEAPTKK

SEQ ID NO: 971211 - protein, 173 aa, Homo sapiens
RARGGPKRAPWGHPMREGRGTSTGSPHLDKPKDLGSSAPRPDFSHTHEHICFCPHNETNTQEGRVYPHRENTAVYKRLSQRTPGIQRVTGTTFYAARDEQGSTTRKEGRPQGARNDPRRLPRAEILIPPEVDRPQASREVTPYKSGEAYSHGASPRRECRRFPPGNIPTQGEN

SEQ ID NO: 971212 - protein, 94 aa, Homo sapiens
MCTLCNYWLDKLGLVLGPLRGGRVLPWHVLADLSSELTLSHGEGRVGSGRVALLVPSFIVVPLCTGDACWLTGSGGTGGRQCGAVGMGWAGALC

SEQ ID NO: 971213 - protein, 313 aa, Homo sapiens
  misc_feature (33)..(33): Xaa can be any naturally occurring amino acid
HLGGGNADATPPSATSRRPEACARPKRAKPKGXPKVSRPAPTGKRPLGLPRENNLPPEGRIKHPTAHGHLLPGVPPTLHKSMLAPHTTTRVPAAPKTHTGALATPISASLGTTRRPFTDSWAHSNRRLTRRTGYSDTPPPRTLLGMSAAGSAKIGAPTGGVEDAPRADRLREVAVDLHRRHPMSDWVITTAPARRSSPHKASYERMNVKGGDCEHGRLQTSAYLGTRYVFLEPGASQNIAALHPEIRCTFFRDKVDRLSTILRRPYRECILELGKASAELSHPQVKCHMDPVRNHPYKEANRALPKKKFDNHN

SEQ ID NO: 971214 - protein, 121 aa, Homo sapiens
FGKKNSHFVTHSGVQGCDLGSLGPLASRVQAILCASSLLKLAGHCEAPATTPGLISVLLSPEERGNASIVEAGLKLLNLMYLRCLELPKCGYSQARSRITLNSSSSGNLGDVFKKRSLGIA

SEQ ID NO: 971215 - protein, 118 aa, Homo sapiens
FFFAVSRRFRGETRFPGPLRRFNARAPCVLLMTDPPNIGALFLSSHSEELDAPPEVSCAEGTGARQYFLVLAIPLIPSLLPLPVTPNNNPPGNLCPLSGPGNCLSLKEGALLYNGKNG

SEQ ID NO: 971216 - protein, 102 aa, Homo sapiens
MKIGGGGGAPAGVSDERLMWAKWAVAAPRRKTRRGDKQQCGVGGVSRTLNNKSARRAQDEISAEQQSRRRVALGDTKGLNIETTRTREDGTLKNNTPHRGGR

SEQ ID NO: 971217 - protein, 115 aa, Homo sapiens
SHLVETLHSEAEISVDTSCELVRDMSWGMIVLELPGARLAINSMPYDISCSTITKGTGNARITTVCDCRIARAYRSSSSITLTSLNRSTTPVFCDKWSVDTSSLQNNALKFSHAT

SEQ ID NO: 971218 - protein, 279 aa, Homo sapiens
GHPNAPRVTGSRVRGFATLRLCPRSPLVGCPPPATVKADIVVVLERKVFARRLLVQSRQIAPMFLQAFAGETPQWVNNGLPGHTTSIWVCRQRCPKGNTPQGPTSSGSGNNCNPQILRGGCIATKRTGAHNKVAGGHAAKGAPPDVAHAEGSTRGPQLADITPRVGIAAPPPAVLETPGVRSKRAPAPTGLGNTHRGPSLQASTLRFIQTWGQGEHTGRCHRPHIDQIDSLGGPTLASVFIGVRWHRLMLIVFLKRRSPFWRGPGLSPNDTLPICRQPP

SEQ ID NO: 971219 - protein, 115 aa, Homo sapiens
MKEADNDNYEVLFNLEELKLDQPFIDVSELLQSEKICGCKKELKILKHLLCNYKAQRSARNGSFFPECVQFEWVHRTEEDEDVCILPPSRGTFAVMTYIRALWVIQSNERFYQKK

SEQ ID NO: 971220 - protein, 276 aa, Homo sapiens
MLRTTLCREFSVRGRWVCVMPWGARIPRGAKNRVVPPKGLIRFFGAHNMGVTGPIISGKGKHFPLVNVAEEDPGTKWAGTNNEQGAKNQCPRTSSVKRWVPPRESPAKGRKTGPERDRETKPLLPELVSKRCPPFHGGSIYPPASVVKFFRVGKVLCEDKYERGQNKFSVENWLNTGGREGGEDRALGGNRGPLSAPRRGLNPPPGAILPPWDPEFSRPQVVNPQEVDDPCTVPLGRGCISTITLADDGVSQSFFVSVVCRTFFIFPAKKNSPKPH

SEQ ID NO: 971221 - protein, 139 aa, Homo sapiens
MAPASPPRWNNSLTRDAAGLPHAPKRRVMHLPMSATLGRQRPASEIHPEGPPISPCATRETVLRAYTPHENRVPLGDPSVRKSSLPPLPQLFGVQNRRYQKPQAVIGGAPPEDCTPDAGWPADTRDNPGGKKKSSPPQK

SEQ ID NO: 971222 - protein, 296 aa, Homo sapiens
  misc_feature (1)..(1): Xaa can be any naturally occurring amino acid
XKGAARSIRREADMAFPFDLVFAIVALVDTRSVLHKYRGDFRLKGLFVTPGFCFTPMSVLGPVGYIPPFSGLPQVLAKLPYQIISGLQILEGPAIWVPPSGGPPRVTTHCMRLGISEPVPQKVDAPLPPLEDRPVLPSQPFGGPPLEPPFDGGLMAPPPPPLQMVRQLSRESLLPPCKSRACHHTPATRDSPRARSMRACCQQSQVQTARAEIAPPPPSLLEKTMRGNTFYSWCKTLAPTSNSPSRTPSSKPPPRPIIDSQMVCETQDTPTLLGLSPPEPGTPWGAGGPNKNSKLH

SEQ ID NO: 971223 - protein, 106 aa, Homo sapiens
MAVTTDQGAVTSAAQSPPPGKFYQTCRHRGLWHDNPAQIGNPVCETIPASSALGKLATDHQSLVSHMPSSLVTLQPHHLMSIVSWRPIINALLPLYNTTTTGTNFI

SEQ ID NO: 971224 - protein, 118 aa, Homo sapiens
MGRNRRERLLRCGGPSVLLGETSRGMFRGELEKRRDEAFVRVPTGRDVVWPLEDAHFRLVVWGTIGTRFSLRKEELNYAPGVLWLMDADGNQLPVWVTFWCRGGLKGCIARFTKATGW

SEQ ID NO: 971225 - protein, 52 aa, Homo sapiens
MTGTRTQADSPSYPFIVAPHQTVTLTGETVILVGLDSSIAVIMRNNRYKTGT

SEQ ID NO: 971226 - protein, 231 aa, Homo sapiens
MADSRKGLALGPKFGTRTGGLDLGVDMGLCALPGSKARCLFCHRCFSVQHGWRTWGVPLPPIYLWALSFGEFDIQKRVGDEPACFAGQTRGVMLKCHWTINGVVALTGALRKIGRRIPRQKGLKKMFQGITQGPDKIESSHWSREISSIRDYLGKGFRPAELVQGIERRRDSPKRLNPKFTAWRDKPLYQGGSCTIEGLLFLHRERPGMIGGGEACPQYTLAYYTCLLTIL

SEQ ID NO: 971227 - protein, 228 aa, Homo sapiens
MCLSLATSTAPCCLLYFLFLCWCRLFVLSSLWGARARTVDGPSVTPRFTPLAFPPVGRPRLVGTPPTCCPYRVPSPSAYAGPPRRVRYPVPLTLRAQPSLSGPESDPPANPGTLSIGQPTNLNLPVHTPQSDPSCCYPEEYSGERTKIQNGYEYPNLSPASHRIPPSGRRGEEITRVRVHRSAGHGNPSSDPITVWWTPVIPYWTAEAEILTQGRFLSRSHSPTYPGN

SEQ ID NO: 971228 - protein, 141 aa, Homo sapiens
MVTIHSATWERPQVKPATIWVCEGLLTTSVRVLKNTNKRPNFYSDICIYPLPERNEAVPQNPFTPYTPPKDISNSILPVDLLSEHAKLGKILPVGLLYPLFEHSTPSFWYARNNESESNPSWIPTQHQRRILPASTNIDTI

SEQ ID NO: 971229 - protein, 393 aa, Homo sapiens
  misc_feature (106)..(106): Xaa can be any naturally occurring amino acid
MTWDDICGRYGLSHGVSTRKGDTASVEATLINRNAEEHSARRTLGRTLPYHLEGAIHLRQSSSVHHEHGESRKATWEERILRYCQVWALLIRSTLQRHAREAQVYXQPADDETQLNFRVTNVTWTLVSTTFSTRLRLKIKRYGNLWKNGTGRLLVELNLVAGKLREPEPTRQFSDAPRGATPDHRELSAHSLEPFHLRHSSKAAFSMWRTQGLSRWDTRTPAHQMQRTTVSGIQIVLTSRWTGQHFLTFNYRPIKVAYRLRYQTDLPQRLSPTAVSGATEANIQTLYHPSTRYSYPSRNTATFPKHSRDLKATTSLMAHHLLSTRRAEHTLGSPIPGTLPAKHVTTLSCKQQRSRQRQLSLVGNTQFHRRAGQSTTTTKRKEAPRDHTPLFTS

SEQ ID NO: 971230 - protein, 150 aa, Homo sapiens
  misc_feature (118)..(118): Xaa can be any naturally occurring amino acid
GSLFLVVLAAVVRQQGLFPCAVFPPEMSLGEITPCVARLLTAWCLNRAAPLMIAVYTRPPPIIGRAYSSLSRQLRDRARCRQREVLLSAEGETAPARIPSVVAQTTYNESVSTSAGVXGQLYRPGESRAPFRARGGTTKSTPQASGVFCW

SEQ ID NO: 971231 - protein, 319 aa, Homo sapiens
  misc_feature (9)..(9): Xaa can be any naturally occurring amino acid
FAIVGQSLXVTRRGLVRPISVLDSVPPLGSPISWPCRGYNTGPYNTLFGAPLKLCNPTRVCPLHLGFSRLPGVHPSHHQHTIWGGPAAGHSPPCGAYYPPPCPTPGDHPACFPPLPHYSLAVVVAVNLAWYNPPPFGSVELTQPGGFLTSGPHLKHLSVKMPARLQIDFSSGGAPGCSRHPFRIQKGLVPGPLGWVQPPPNNPPRHWWGQEPGHAQTPPPPGRSKPPRIAATRSGKPPPLSFKEKTTQNNNAQSGRAKTPAKSHHTPEEDEQHTGEYHPRTREGGRKLPEEQEECRPADPPPRGQGRQPFPNKKTTQQK

SEQ ID NO: 971232 - protein, 45 aa, Homo sapiens
VVRRPARPPALLRSIMAEPSGSPVHVQLPQQAAPVTAAAAAAPAA

SEQ ID NO: 971233 - protein, 141 aa, Homo sapiens
WGPRPVLPQRHSKSARGTDQFCSDCPWTMGLYSEFPMVYKEGPSPAPPQIPENREPRSPMGARKHKRMFFQEGGSEAALGPEVPYVVSSEYDEECSWEEDDVTYVDVVTRGLQTVSVARPQKRVTHEAQDQCFVVTALQYT

SEQ ID NO: 971234 - protein, 87 aa, Homo sapiens
SGFSSLKQQRCVFIGDSQFIGQEEPHGCNHKRPGSAPHSPREENWKSRLSSTRDATPARSQAACAVNRPPLLPRLSLDFPPGLPYLQ

SEQ ID NO: 971235 - protein, 109 aa, Homo sapiens
MPKKSGNRKIGARSQAEPIRCNVCPARKRSTNSGSAPTDLETRRFRLPVYTTPQIAPSGAKKHGIHGGPPPECGDHNIHTTAQRQHEREHTDNSPPNDPTGTQPQRQDA

SEQ ID NO: 971236 - protein, 115 aa, Homo sapiens
SLKKSPCRGSTSSPQNKAEQKDGSECKQVQDHATPYAEAEKEIHWAIPYECSQEKQESENVKSVQEEYRGQVPVAISAISQRERPQSLEASRFCRPVLECTGPSVVTAALTLELK

SEQ ID NO: 971237 - protein, 33 aa, Homo sapiens
MLVLLQDSLFTGSSDFTYSIAFSLCALLPLSSR

SEQ ID NO: 971238 - protein, 441 aa, Homo sapiens
STHHSRPNTAHTPRLLLNTLHTHTLTPTALRRATAARYAPQPTSRAHALQRYAQQPAAAHPWRSAAHALCQLYTHSTLPPTCHHLKPLAPHPNACSTILNGRNTKHTDTQTNTQKHTHTRRARAAGPSARPPPRDNTPRPLPPTRPLCAPAAARRAREPPLFGRLPRVSHRCGPTIHPVCRVLSLAAPTSLPAPPSAPPRASPRGSPLLSPTPPPSLSHSFPPPLRRRLAHTPAPPATRATTPIFPHNLALLSPPLAPLLPPASLSSTLLPRSASHTHTHPLPQTSPLPLSPHLPLLLGRTLPPFPPLPPPPPPPPLPPLQLSAPPPLPSPPHASLPLLTPPASPILPIHPFHPLPPAALPLHTIYITTSSLPTTLAPSPLSGSRAPQAVKIGRPSPAPCSLCVLEPFPLLLAASIPGARRLPPLAACASLLSLAPTHRPS

SEQ ID NO: 971239 - protein, 90 aa, Homo sapiens
RRPTSVRYVTSGELELVIHPKLNSMNAFMPFTITSAQGCIEVLRNISAVLSSPLSDGLTGHTAMRCTQFVWAVRWSIERLGPIGLSFLLS

SEQ ID NO: 971240 - protein, 82 aa, Homo sapiens
GGKKSMSGPSGLGHIINPGGMSGGGNFAPGGASRGPPIPPGGMQGGFGGQNRGSRPNDARFTCRYENLESCVLFRGNKAMFC

SEQ ID NO: 971241 - protein, 71 aa, Homo sapiens
ESVESHALTRWNSCVCISPDIKAKGRRYGSVASKCGHKELRTTLVREPMSKWNVNEAITLTHLSPQGDSWS

SEQ ID NO: 971242 - protein, 138 aa, Homo sapiens
MPLVLSSPIHAYTRSKNDVQKGSIISSSKVLRMDGLAREMAYAIGKPISRQISVVKSAVLIDSQEVSTYMLPPESPGEGVDDVQQGGPKIHENFLVVFGENLQCAFFVKRGVNGGMVEVWSAKLILNTSRRGREFSSS

SEQ ID NO: 971243 - protein, 30 aa, Homo sapiens
ERQRIKEEEKRAAEERQRIKEEETIQQPGS

SEQ ID NO: 971244 - protein, 108 aa, Homo sapiens
EVVGQRILPLRRTTGLGNLPLYQAGERSGLQLNEVDLPTPLRAREAFENRYSPTMMATELPHRRFAEGAPRRLDASSINVIVIQRGNVGGFHDNSGTHQVGVSTRPRI

SEQ ID NO: 971245 - protein, 107 aa, Homo sapiens
NPSSFVPGGVSNDVMSPSVRHKPLVMEIDGPFPIKFWVVVTALREGLPDTDLVNVCLTGSLLEGLGDVVASLAVDEKNGSFLLGQQVGGLVNDLGRRGREFSSSRRP

SEQ ID NO: 971246 - protein, 305 aa, Homo sapiens
KCLPKKLWLAKRKCVRTVNALRDTMTPPRLGPPHTGGTRRAALKCDQRAFCLRAPKVGPRRNRLGGKIGRPLFSNHSLSGDTTGLKRFLSPGNESMSKPLVRQEGLFKDRPLLESAASPRSPPPESCGEFFLPRPLCGLRHHKKNPPAATTPEAESAPPGPHAQKTGGQREEERRLPPPGRTKPLGVELHPQGSRALGKYKQSSQNGPAVTTRRRANSYRGDNKAPRVSHDPCKRWTDQKHVLYMRYHGQCGINMITGGETPPCARNLRPSRCAGVSCKSDPPPTPKQGSPTEKKFLQETIKRTK

SEQ ID NO: 971247 - protein, 80 aa, Homo sapiens
EGAKRRNQMCSKRCERQCTKRRWYNAVTPKARGEKCTQEVDLTTKVGPPKAGSGGEKMRPKGCPAEKTVPHAGPKRLHGV

SEQ ID NO: 971248 - protein, 161 aa, Homo sapiens
MAQPAGSHSGNVAPSIGGPQEKKRFADAPGVNLSSGGKMAHIANQGATHGSKTSHMFRPIVVGLQAPRRDGAPTRPGPVYRTLRGGSFVVNYRLPAHGFQALLEFVRVFINPRGQYTTVVGFFRNRPRIPELPMPHLCGLATTHKENPLVGGPPVFHPPVV

SEQ ID NO: 971249 - protein, 174 aa, Homo sapiens
MVRGRFGRGFTFCFPGCRAGAPSPRPSGCGRTRLCAPPSGVFCIVPGCGVAQFPWAHELGCISPTPLWGPAHVLSRAKMLYVGLLPGPRPPAPFFNTASAFLMGTLWASPPGPASWGEIRLSRARFFETGSRPRPGPCAMPAGPFSPAFGMSGAPSPPRGAAIVRLRLSTLPRV

SEQ ID NO: 971250 - protein, 112 aa, Homo sapiens
MSSPPPGVSPPPSCGAPRLLTLWGFLSPPPAWWVLLKKNPYLPPPCPPQWSLFFSNALGKPRKLSLLPRATHQPQSLKPPPFSHRETNFSQRAHKRVFFACTQHSLSPHKRL

SEQ ID NO: 971251 - protein, 119 aa, Homo sapiens
RGRVDVTFALEEIEYSRGCKGLSRLSNWLAPRLMGNSCSRSSSCRPQSQSLSRAWLASSCNSSSQGLGQSPQTRRKISGVIRVIIQVIEQGFAHLIGALSVTPLSPVDAAANLVVVGGR

SEQ ID NO: 971252 - protein, 52 aa, Homo sapiens
GGMISIEGPPEEYSNKAITLIRYLRHLVSRVTIAYGSNYQRGMIGIEGTSGK

SEQ ID NO: 971253 - protein, 146 aa, Homo sapiens
DTLGHHGPGRVDLRTRQITRSDKGVQQRQSTIQVLMGGVQLVAKSSVSSIQPISMQNQVLMVEGLSGDSGVGSSVVPLRTNIGCDSNVPERGGIQLPILSTKTCQSSISSIVDCHVDSHSNTMSSVQHGSGVILPRVEVDHGPVST

SEQ ID NO: 971254 - protein, 102 aa, Homo sapiens
VDDRHRERQRDGGRNGEGYRDRHRERDGEGGDRDQEREREREREGGRIKEGGRMREGETETQRERWERGERDREREMEGEREKDRDNPAGRRGREFSSSRRP

SEQ ID NO: 971255 - protein, 124 aa, Homo sapiens
ALDLSLCPHPVPLSVSMPCPSVPTLSVYPCPVPLSPPCPSVHLHSVPLSLSPPSLCPSVSLSPVPLSLCPCQSMPCAHGFPSQELSFSHNEQANAALGEGRAPPLKRTTQSVDAAANLVVVGGR

SEQ ID NO: 971256 - protein, 88 aa, Homo sapiens
VGDDHFLDVGRADGKPGVVATASGASLPAGLRERTWYENQQGFRMPDPFLYFTFLPSVVLLLLVFIFYTLAIPQRYIAQVWAEENKVF

SEQ ID NO: 971257 - protein, 93 aa, Homo sapiens
QAACGSRTLPPFPRCPLRERAATQACWLRPPLGQALAQPAEWGVVGQSPRSWAPAQAHRARPHPAAPRTATSGATPYPIAKSTDTIFGVRCLL

SEQ ID NO: 971258 - protein, 394 aa, Homo sapiens
GLGTKFNKRVLKEQNPNSKIQLCQGNPCLLLGGRRGVGACGRAGLVASHPYRLRESGGWVGRYSLILCGFSKSASRWLEARGFLIGRQSLPRWGSRGPSNDIFTFEVPKKQPLFLTQQVWPHRQVFNALEIVINRGLFPGGETHIGAQSKKTFSGYYSAFVFPRKFIPQKHRDKNPFERPLWGPHEYSFQGCRHRGKAHTIAEGAYRENKEKAPNKRRVVEKRQKGTLRARSATGVDTQKDPYKGGAHSIYTSKIKRPTKKECRPSGEKRHKNASSGRTQTGKEKGRQEKFPTGALYYLPIDKPIVLVSREVGAKHKSELLGDPGDGEVNMQTTNKLRRRVRILRGNRYPEDKNNTITRHNPKKEYSTMKEKTSPNQEEKKGEAQMRGWASRGK

SEQ ID NO: 971259 - protein, 569 aa, Homo sapiens
MREIVQLAVPGQCGKQIGAKFWEVTADDALASDPTVAPTTVGQLTVQQWNCINCVLLMMATCTGEVLCPCAVALLDLGVPGTHCDLLCCICGPFRGMTLHVPGELSVIRVRRWLLGKQLGAIVVHLPPRQCCVQHEVGTSVMHWHCSADWTCAGMKKACCTLALAEAFRMRDTPQTYPNMERLWDSSATTLWATLGEEHRGDQPTIPHPKSNSQKEQSQSEHGQITPTRTNGDIHIDTHPPSNGCTSVRTNTLGTHHHKDWLHVRTKGMEMEERHPINHKRGTHHATYTYNESTQYTQGPIQASRHKPTTHQTPRKQPPVTTRAQESERNSTSKRDRPVQLTGNKQYYEAMSHETNTPPKQQGRRTPHNAQTPKTWDLHPIRKPHTDRNGHHGIPRPENELGSVTNHNNPWAHKRKPDHHKAPQRDRNETSATYAHTNSHGARAQHNMYDTRHINPGSRADTTIKRTPEPGARQRCNHPGRNNHATTRVGAGTRGPETDTPPEKTDIDSNNIQPNIEKPTRENPPAQTPDTDKEYTKQYIRATAYHKQRANRSITTTRRRKTTHTRAKK

SEQ ID NO: 971260 - protein, 461 aa, Homo sapiens
  misc_feature (328)..(328): Xaa can be any naturally occurring amino acid
MRQAPTTHNQRYTDAGEETHTESAPLYTAAHETHKDKSSFTGKDAPQQTAARSTLPEGEPDHKLSPQHKNTPQQERPERRVRETPTTTSERHRAPTERRRTTMGGGDHPPPQKYKHTPSLLRPNETGGLHGGTHQPKAGEEEQNILSYTTTSTSSVHGRWVNTPQTDSDGIHRVTKPPSQDSGTDTTDPPQDDTNNVRWRPPQAMSGATSSTQTTTARPRKLLHPKPNSFSTHDPNRRPWGGKNKNDNQLHHTQHQRPMVWTPTRQTDCRAVQQNKGDESELPPGKEDETRKTTPTADNRVATETRRTNQAIVPTEGTQAPTQTLYEXERHEHPPEEGTHPTSATRCEQPDTREEISGWTTIHQSPRSGIHPGREGTTTGQKRPGGAHSGKTPPGVVQQPPRRKRDKRRAQQTELTYTPPRMKRTRADNTTEHNTHNRRRKHTAEKQRRNADNRANHTAGQ

SEQ ID NO: 971261 - protein, 156 aa, Homo sapiens
MVRRQLPVEEPNPAKRLLFLLLTIVFCQILMAEEGVPAPRALQRIAPNARHPWGPPLCPPSSSPFNLTSEPIEITLWSLSTFLHAKTARSPSNCDSPHSPNNESEKSTIETPGVPGARERIPNGDFRGNLNSEALQLEIATRWLVGGTEAHRERGA

SEQ ID NO: 971262 - protein, 593 aa, Homo sapiens
  misc_feature (432)..(432): Xaa can be any naturally occurring amino acid
  misc_feature (475)..(475): Xaa can be any naturally occurring amino acid
  misc_feature (508)..(509): Xaa can be any naturally occurring amino acid
WLFKVKTGLHLLARMVFNSSVTFGDSARLRPSQSVRGIYRRVSHRRPAPFYFYTYKVPCQGAASKPEKNRTWRLQRGTLLPVCVRALWCVYTTFIEGPRGVFPLWPSEALGGHYLSHPNPNEHTPLEPTSKPQCGLSNPSPKALCGPLSHTERLKRYSTHRAESLSPESPPRGNTQRVCWARRVGSSSLPFFYRSRHKAQSPPYVRPSAHAPQRPFVHGGTPKGHTPRVVITVACCVAPKPPIKFPQHMWGAVTSHPEVGGPPLVVKAPPLFSPTPQNFPHLLFGPRGHSTPRRALLWGALPCGALPTRAVRSLQAHMAPPPPPAAAGGLPPHPLWPISSWHSETVVPRPFNLAAVGHRGRKTSSKELTQRGGAPSKPFPTENIRPSALVRAPWRSSLRPPKDFRHNHTPPPHTTATVGSVLPHKQVLLPIXHSPLASTLQARHQLIKNLRANNSQPTEETEDMHTRSPLQTHKXGVTRLSALRNISSLPRTTRQRPPEHTTLGVAHXXQPETPPLSVGTAYAIQNNTHPPMRAKTGQHITDSNTHSTYTTVQSTSADRPPITRNRPPHSVITAARTVQHLQTRVANNTNYTA

SEQ ID NO: 971263 - protein, 181 aa, Homo sapiens
MYPTIIIITPNTSLILSTRPKSKYKTLTHTYTQNYHNTPIIFTNHLTYHYLTIPAHTHHYRQHILYSMTYPYFLSSHLLLAHISLSSYYTIIKKTIIYNSIHQANYYIITNIITILTKYINPLSSISLSQLHYTTSRNISDLYSTLSFTTSKLTSTNHNPVITYHTYQINSTNFKINSLHI

SEQ ID NO: 971264 - protein, 146 aa, Homo sapiens
IRAVETPLRQLVAQCGLRGARVEATWPATAASCARWPGRRVGTPRWHPPPGLWAGSWALVRRLIPVRESPRRSRASGPPVSPPKNDSRFQTWQTFIFAKMNRLSHMGPARVDEVPDGAVKGKRKTKIPILRLVELMRGDLCRDQRI

SEQ ID NO: 971265 - protein, 56 aa, Homo sapiens
KREGKAANKARSKGDTTAKATARRRGANEGRQSDEANRGQKEENEHRRTHVDARTR

SEQ ID NO: 971266 - protein, 309 aa, Homo sapiens
GGDESDPGSFSGRCPLVWCGTLNGSSLAYAVPQHIPVLLVAGASGLLVLYCLLLLLFWIYSSCIEDSHRGGYRAAALHVAISAIAVFLVLVLRMYPSIWQPGLSVKSIISLNTTISCSEAQKIPMDDPLELLCSYTVNLHNAETSSWVNWVLWCVVLGLQVVQWKSEATPIPGSGEEVTLIWSSGDSMLLWVHASPFLKHKRSASGQPKTLCPKCLGKARHDSRDHVTVGKPHDGRLPTGREGRDNIETRAPASLPTATCECQRHFRRHPTTDTHAQSRRPKPGTTHTNATPSAAPPARRTAHAPTHHG

SEQ ID NO: 971267 - protein, 204 aa, Homo sapiens
RVYTTRGGGRGRSSAPHSAPLLRATPSRRQRTTKLAGRQTDTDSRRQAPGVKQQEQARETNSPQQHRGRYHPSTEKERHPQGKRTHTRRERYHAQSNRSRAAEQGAPTQPPTSGGDHKQEAGPRHTAGLSHTQYEQEEKQEETAPPPPPRGRDTRGRHEKSHAGTNRAVDRHAAPTHRQTEYAPNATHTNRPGGAQRDTENGKT

SEQ ID NO: 971268 - protein, 113 aa, Homo sapiens
KAQKKKPRTDADSCQLHESRTRQRRTRHRHAYPQPQHHERNESTLRAAGPLPTRLTDTRATPPRHPTDQAPDPTSPTPGPRHLHTATNPHERRPDNEKPSHTPHRTRTPHHPP

SEQ ID NO: 971269 - protein, 152 aa, Homo sapiens
MKTVTSDPWEDQRPLLMIGAAWSSECRPVLGQQCMGAQAWIYKPSCWARWGQAVARASSTYGCQSRSLQLPSKNAGHAVWTWTYQYVVAGRNMMPENTVTLPWAALGSGGHHRIWTVAEQARILQSREVPRHLCCRNPEWLFRIYQDTKVDI

SEQ ID NO: 971270 - protein, 352 aa, Homo sapiens
  misc_feature (316)..(316): Xaa can be any naturally occurring amino acid
MWHERVYMRGGIGSSCAIYIIRAVGAIYNVLLQICFPLWRGTIIYLYIGAHKWFSTIFYNIGRIYTFIIGGVNGCWGRKKVCVLRIRNRGGDVGRWGVSTRRLYVGKGFGPGVGALFVLTLVGDLHVRGKQCGCRRNGSHIGTLWIQDTGGLLGVRNWNPLGRPPQFERDRHSGQYGLSQHVGLLARSHRGSYQSATRFLPGTQGVAHPKKKVYGSRTKCLWRHKSVALTIPTLTNKRGCQPTTKVGGPEKRIGRSRGSEKWDTSRNCTAHLLTTRRQHWSLTRRARNLGRAQKYNPTTAERVQHALNKAGPRWKXFPQKERGDKGTVDTGRAIDTQRNTPTNTPAIEHYAV

SEQ ID NO: 971271 - protein, 68 aa, Homo sapiens
KTRIRHKADREDQDETQQWQDEKDKDMGRRKGAQKLQAHTTEREQKQRKHRTGNEHAGTRRNKTQEYT

SEQ ID NO: 971272 - protein, 213 aa, Homo sapiens
QGSNEEACEGSEGARYQVRAGAQEEASERTTEPGHTIKPLRVRGTPSGAYQPAGRSLAPKKIKPYPQGRKAAKRESAKVSTSVVEPPNTCHGVAAQPCKGSIRQDSEENPLGKHWQQAQTAQGAQESEEDKGLKYLSRDTEKGHTRHKKAAAILKARQGGARATGQKGAAHTGKEPRQPSRQTQAGQQAGQGAAGHTRKRKTNNKLEADETAE

SEQ ID NO: 971273 - protein, 111 aa, Homo sapiens
MGLGPGLLTGLLSGCGKHGGGSIVTTKLTRRVGEANQQKRSPMTDAQEPVDGHSLVRGDPELDETQEHREEEQQHRNEAYKNEIENMKEHYWLTRTGAKRSRNRHGNKSTV

SEQ ID NO: 971274 - protein, 56 aa, Homo sapiens
MSNRQYSRNRTAGRKRLRDREPEDGQGSSNERSDAGRQHAPDEGVQEEDDKEEGRK

SEQ ID NO: 971275 - protein, 132 aa, Homo sapiens
MGRGLGLSSPQDWSSHEVGGIGKPGAQGRISSWLAMTLSFPWGKQPTGSGVEVLAGVCGTRCPCPPLPPACTVAASLEEMNGIAWESGEREDTRDLREPVTSPSGSVPSRQDEEPGSGGAAESRSGTRTGSH

SEQ ID NO: 971276 - protein, 159 aa, Homo sapiens
GLKHKLILEGPQHLVSLSPGTVWVPRRRSVPGGQQCETHFGGQQGHSSVGMWVEGFAEWCVGGVPPLQKGCASTRDSQWPTPPYILGVPESVSLLLALYIFVVDSARGAQPFSRKWCVCGTILETPLSPEPHTHTHNTHTELSVCVARERRRYNTLLCV

SEQ ID NO: 971277 - protein, 256 aa, Homo sapiens
KISSDIGQGTRIPKQAFTDVATGSTGPGPRGPLCEMAYTAQTTIDTGQLTEIYCLAWEMAELSEGHLIWREPLDLQPDTLLTLGQALMDHSYEHSNRLGPRRDPGTHLHSTRTGPSTSKQEAQAIGESNMTINRKNGQQQRDRHMRHSATNAPMPRHQATTTMPSTSKGPRHHRENKHHGRRHVKTNIHQQPWLTTHTRRIHAKPHATNSNLWNPQRAETTYGPSTSPQSHSHTTKGTNTHSIRGTPRDNRPTESP

SEQ ID NO: 971278 - protein, 534 aa, Homo sapiens
QRHMFPSGSRYFSLPQPLPLAAAAAAAASPAPPFARSQLRPAGGAAWAPAPTSTAPASPPALAGRGVLIHRAGLLVRRPASLTAAHFQHPSSHNNTAPPSRIASRAPGTLLRQKTTPTMRAPGSSTLMGQAYIANAVTRPHHQQAHLAQQGHPHSIPTSQPQPHPARHAPGSHTCIHSAGIASMGHHQAKQHKAFIGTKQVTIWINPTFLAAHRIKLRHLGHSNSQNTPSNPEDPLSGPASHSRANIGAITGEPYIPHTHRLGLKKVSQSPGVYTSGQTWPTGQTHYKTWGLWGPNHFGNPAFPPHTGWPYKPLLPPPGVHHRQTGPPKQQAVTSARAHVAIWQAPPGHHIISGKGTPQNLLQPANPIYGAAPFSGASQPSCAPHIIMGTLFPPHWGNTTKTQPNLQQAKPRQIYQEDDNSHQYLHGRVTHAPGNTHTHGGTTKRHQYPTQPWGPGHNRVHHTHVDTTTPKAGPNRTRHTYTTHTRRATSVLHPCTCNHEETEARHGTQEPESNTRGPPEVNTHYSTGNEHNTT

SEQ ID NO: 971279 - protein, 162 aa, Homo sapiens
LGSAGKGRATADNLRTSEQPEVPNAEAQRTQCLIWNISGHQLVSLTVNTHGHLNYGRKPHIVHYASPIPTEVEQQEKQSVTHLTLERYTCHTARTCEPASLTTPHAVTNPPTKSAHNARNESYGETPEKCPEHIRVATYSIKQEQSPDKKNHYHIDEKYWHT

SEQ ID NO: 971280 - protein, 106 aa, Homo sapiens
MWWGCGVADPPEAPVTMGTRVTDEYDYLFKVVLIGDSGVGKSNCCRCFTLQLMFNTVRRNEQPFGCGVLPPAASRVDWQRPIKWAARILGHLLAMDAATCCHHLLR

SEQ ID NO: 971281 - protein, 208 aa, Homo sapiens
MEQKFDENDADIHVLANFEQCMKSATLGMLTNGQRSWRRLHHSVRTVLAGTATVSRMCSATICAALTYHCPGQTGNSPYFPHYAEEYTYIQNVPLEDRSQRTTSGPERERTDCERCADEWFARSLTKLSGLLSHACMNIQGNITFLGQIPLWLKIDRRQGCPKPHGAYGKLDTAATSPRGSATYEMLPRNALTSLTRAARPRQPVRAS

SEQ ID NO: 971282 - protein, 209 aa, Homo sapiens
SGTFSGTSTPERIDITPVSQSSASYKLASAYGARQLQGLLAARLFAILLPAGPRRSMMPLDLYAYARGHMGSPAGGERRAYRFLACELTMALELQGDGLVPVSPQMLLHLLLPEERSGWCRQLYAGPTVRPCDILELGWSVPLHEEVEGWVETDPVPNDAPLRRSLSCRFELCHVLGAKRTVYQKEDSVGLVCNSTIVPFQVVWPVTKA

SEQ ID NO: 971283 - protein, 221 aa, Homo sapiens
RVINQEELRRLMKEKQRLSDQSETDRISISLKYNRLGHAELLPCVTLRVNELSSCGMLTVLVKCMHLREQWPELKCALKEASHGFCPASSDAISPVKTDKRLDRRPTIDVKQSARPPLVPQCTRPSTICVDHQLLTKLGKEFIRANPSKPSGLTLLPDYEDEEEEEEEEEGDGERKRGDASKPALRRTVTRSTQISSFTGGNKVDVLAKDSYRYYSSQGPQ

SEQ ID NO: 971284 - protein, 111 aa, Homo sapiens
MGKVKVGVNGFGRIWAPGHQGLLLTTGYSGYELAINDPFIDINYMVYMFQYDSNHEQIPWTPSRLRPGSYDINGNPIQHTSRSEIPPKSSGAMLAAEVRRGVPLDVLTTTW

SEQ ID NO: 971285 - protein, 167 aa, Homo sapiens
MFVTVAFGYSPFLSFTDGDIAKGPVPCPAGGDATQAGSLSPPLGCWRMSGGFMDMSGDEMNDLIWKHGDTLTRLGGNCQTFSSFHMSSPYSNTGDGSHPKVYQETSRDCRSAPQGGTPGRQGRNCSRIHTVGTVRRLYIGPFTIRGTGLNSFSAPQNTNRHGVTSAG

SEQ ID NO: 971286 - protein, 345 aa, Homo sapiens
SWRSELRIENNCEIGCLAKLTNTYCLGSDTEAQRTSTDVYRGLSSTDTIPVVARYYRRAAASYGRIVCRGTGTVSWYPTSTTDQETATHSNSLPDTVQITRVEERLSDLGTRVTTCNDYVAYGHNQTLDRADRRNIWQMCSRCAQSIHTDSGRTSVLVRTATGVISALQGRAGCIPKTFNSEAPGCKLSFLYFIQDPPLCADRLVNPEDSERSTACTVDMAGIALTWLVSFWFTHGNNTQAHVPVQCVHYLVLPKPDMKAKAIAPDEPTNKQQIPPTEQATPKKTHRSKALGPKRGTTQGDYETTGGQTPPTHNIPPHKPGTKKRNENGKKHKTRHQGSSRGERH

SEQ ID NO: 971287 - protein, 121 aa, Homo sapiens
LLHACVGSMSGNKRLLVSWGNACSVVPGGLAAGVPGNARWRNVPDSAGCDSGANPIVVAGKMNDVRSPADSESESLAPMECPDVKEGCDGSDACDVKLATVKMKACCLCQMLYLEHAPVMQ

SEQ ID NO: 971288 - protein, 70 aa, Homo sapiens
MVCLPETANKHASALTRRALGQHVVVPTEKLVTVVLVMRNRVRSMSLFDCKRRNVIVGAHGVGRPREAEG

SEQ ID NO: 971289 - protein, 594 aa, Homo sapiens
PPPPPPPPPPPPPPPPPPPPPPPPPPPPPPPPPPPPPLTSATCADGPVCLAELCALSAPAPCYFHLHTCCDYLAADAHMLLPPNLCHMCATPTVPTSSTFPLSSMQHFTLLHCCTLHALPTFLSNCTLWTHFAYTPVTPLFSPTSHRMLLPPCANATRPLALLASAPPPPFSTLSPLLHTLLPPPCTLLLFATAPPPLPTLLPPNSTALSLASLALLHTPLSPNCLSGHRNTLSLTALCTPHSLPTPPLMHLPPLSLQRTLHHHCLCACPLHALALLLLRPCLARVQRPCTLAECLDTLPLHHPNFTLFPLGTNSCGLACLHTPLGLARTSCGPFLLPCALPRPLPNFLLLRLPLYCAGTFSDTLLPPSRTAQIAANRLRDRCTFAQHRNLRNPLATRPPFFHTLAANFNPPTPLPWPPTFFSHLKPLGPFHKRPQPHRQPPKLLPLVPQRRLPLVSLKTHRAFPQQTPSHTATFVSTQRPLQTLLVFSAPYGLSGLSNTPPTVPPRGLAPLVEALCATFNPKTRALQTSSNTLAPQLFPRAQAFLQTVGAPQLPNSKRAPKQRSLTLLVSSPLLGQDMGLPPSRRVQKLSPTL

SEQ ID NO: 971290 - protein, 471 aa, Homo sapiens
MWTNNKNADNDSASDWSPTRQGPRLVRHKLLVYSTDRPATLLQLLDIARLTLPNHISIRTAPATLCSFPAAWNGKRPAKRMYHGAGQTHYCPARHSSLNTLLLRPTDTVPNTLSGTLASLLTGPILGAHGDSTGPAPAGHNSPLHLLHYQDRGRLTPKPTTHEHNCTTHNPTQQTQNRTPMQAANGSPRKGATRVRHSQRPNRTQPLSTPPHGRPLATSLPKPVPHPTTLRHVSATGGYPTDPHIHPNDPVPINALGPETPIKRPSSALAHRDLSRPPHFGPERRQNRRTSIESNASDSESHNKHNDQSLGDSPIIQHYAPRIQTTGTTWAQPTELERPPGAHRHTAKPLRPPRSNGRNRHSSYTATALQPHTNIHFPGPHSPQAGLCARQDHIAPTISTMGAAAHPRRPGITSPSTHTRCNHKPAERLTPPHTRHGATHLRAKHSTHPQQATHTNNDTPRQHQHRTTQTH

SEQ ID NO: 971291 - protein, 229 aa, Homo sapiens
GGAGSYLSLPNSMWMWHALCVPQLTGGSVYKYASFQVENDQERFLVTCINESASEENKRNYGSRPRGPLRSYDVTTGKGRDERRQHMPGRRTRRRDTHPPNDTAGHTTETAQADTDPTTQHTQHKQPPAPRKPAKNGKQTTNDKRTEGVKQKRRGRNERWKKKEERGEKEGPRRPGKPEKQARRGREAHGVKKRWTSTQPETEKETHERKQEAVNTHTQEQSNHARKRT

SEQ ID NO: 971292 - protein, 209 aa, Homo sapiens
RDAHVVWAVVLRRSLPSGGRLDPVRTMGRVHESINRSLIVGLKISTKSVGRDEREDITQHLQIPRGVLRGEGGLHKGETTVNNTGPQKEDDRDGHADPCGPEHEHGQLTHGPSLTTSTSNSAERVRPAASCSVPAPISYNGILGPECGTQVPAQTSTGALRLSKSVPLGHRSMSKVPVTAYTGDPNTHHRCGALTTLAARLSTSIPAGC

SEQ ID NO: 971293 - protein, 173 aa, Homo sapiens
DVSPCLGVRLQLPRCGVCCCCWRSVATGVCTPARGLRWPDCAAAAAPCYRPGKAWHHGLDRLRPAVLPLHLQPLPGLCGLRHARSVAALLYYVPVHRDLPVLACASTTDLPPQPPSLELVTNDHEKVELTWLRYAVTVVANITVYGACWLLLHLHGLVAGGAHQDISISDQLR

SEQ ID NO: 971294 - protein, 342 aa, Homo sapiens
MGRNIRGLYTHHITPLCTEAVAEYTHTTTKDNPICAHKCNLRDSQDIKITQDRPHEYGTPSIRTLLKTPLCEKGNATHQNVTNSTCDVPTWNRGIYNTLDTLGPTTDDLDTVPTLAYITIPSTTRPQYTLYPTIIASTPQYKASHIGQCEIQRHKWNEEPTGAKRKTHEHDVPHGETKTPTIGGSHKEAQGARSHTQTPSDAHIHTAMGPVHQTTHHKRVNAPDYEHPHQHQRATATETHETKTSHSTDQNKDHTTRAQRNHRVAHTKETIETHPMRTTYTNTPDKHTKLAPHTNNRRRPQQDATNELQTQRAHDKTHRNQNATRGAHETKDPREQKHKPTT

SEQ ID NO: 971295 - protein, 293 aa, Homo sapiens
PVPFSKDELVPSTDPFTNGVMLCGVVGVGHDTPWRARRQTATLCCRGREEEGTGQTHRCCRADAEGFRSCRGRRDIDSTVISGKVLNLSRKALQETITKWEEEAILGFLVLNGSCPPKMRFGLCQGTYTGLVGFSTAYSTGSPGDPPPKAERCNEKRTDRTRRRKNAERENTEQTLEKKKDRDIRAADGKRENTETTGHQISTATEITGQKGTNTHTRDTSDNNTGRTKRNRENTQIGHETNNNSIHGSNKPKTPQDEEKLNPSMPQITQSDEMGEKGTSGNPKHRGQLERES

SEQ ID NO: 971296 - protein, 346 aa, Homo sapiens
YACGVLHKMLSVTRCCGRGSAPFLGRAGLVSRNALGSSFISCKELSMPLTLIFQQALGTARSMSSILASSVILGADTSADLEAHTGRVLSIEVIGHLPSRTMALQDMYQASKQHGQQYFYIQAFNRVMSIETIGNLHNVRVVCPMHTGHNCITHLTSHSAQAAYFSLAQQATGSPNAGTVPQYGSQGSLVTGRTASTGLGIDPLMGVKYGLISHWGTHGVPTSIGSGATRQQPDHSSTPTRLTMNKSTPQRIIHIYAYPTELRHHRWTIEQNPKSGAEHHGADSTARTTAGESRPAGIATRTARTRPQPPKPDGNTMDLTMRGMEPPDHMPNEGGQTRKHQYTKDV

SEQ ID NO: 971297 - protein, 135 aa, Homo sapiens
SRGAPRKYGSPGLGTPRLGGVWAVFPRFFPPRLVPFPPAPSADLSRLPCCPSSPAPTAVIPGLCHLGMCDASRLAAWDMLMAHTWACGPAAWMCHTGPVLSCSWSPASPMATLEVAFPRMARSPPWGIGHYANCP

SEQ ID NO: 971298 - protein, 120 aa, Homo sapiens
MRTWPRTPGPRDEARRRRERERLELAFFAFSSAVEPWWGVCARSTMTSAGRMPRMPATTWELSLYELHRTPQEAIMDGNERLRVSPLGHMQFKNSMCPICLDMREEYDDTHKECLHRFCF

SEQ ID NO: 971299 - protein, 66 aa, Homo sapiens
RSAAPPPEGTLSPCSGHPGPRPADQLTEEQIAEFKEAFSLFDKDRDGTITTKEYGDSDEIHWTEPH

SEQ ID NO: 971300 - protein, 564 aa, Homo sapiens
MAPGRFLEIVAGNRCGQLMPANHNLSDYYSTGVVGSRLLIIIFSLQDRVHAAVLSLGPFYLYISMLLYATTPAIHTGGASTNVILTSVTSNIERKYLYCSIHGNRSSHTRYYWTEPNYFIFATHSAGGTNTASQCTSIDALKANNYATSPLAPVAERALANHALTPPPLASPRRHFPATSNQPSPSTTRPHFALRSLRSLFNPLSDAKQLYDVLLLGYPHAIPSKWSLPSTADTHTYTTRAKQHLISAAASSSPPGHLNNSYMTPTYTSTRPQTNHKPLNTLPPQPVSPITIDKHTHNPHPHRRTIDIHLNLRHNSQLPSTIYYAHPPSSKQQQHHKSPRTHLIYTKLHIHSYNRSIHIEPLNLASSQTYCLTSTYRPTHNSGDPLEQRNHSLTIECYILTTYSSTIRTHSTFVHTHPHFTIPTIITAISTPPKYFISLPPIRYTPYPHTHPSITTTDSDIKSPSSNGDIYIDKPTEQMTDTTEARKRLVLTTINSSLGRRPESNRLMLSISDRIRLQYHHHNTGSSHTTHLTSKRTHNLNHPTPAHHETISRRIHHMTSSEAP

SEQ ID NO: 971301 - protein, 137 aa, Homo sapiens
  misc_feature (92)..(92): Xaa can be any naturally occurring amino acid
MNIRNAQPDELMNMQHCNLLCLPENYQMKYYLYHGLSWPQLSYIAEDEDGKIVGYVLAKMEEWTTPQRNDVPHGHITSLAVKRSHRRLGPGXPPPPKKRGQKSPELGPGPPEAMIENFNAKYVSLAQNPGGFSKGTE

SEQ ID NO: 971302 - protein, 278 aa, Homo sapiens
MDKDVMNFVNCSELEVRYLTQTTYLWVDREDRGSLISKETFTYLLALKANWPDRITLLRGNIMRVDRSTQVYGINDDDKPNMDNANAWRYCTKVYRHAHRSQLSIDEQIKSVHGGHLLDIKNMAPHTSHRTESRKMRNTVKQLRRPQRRAHEPGRRETPREQDTREKQREKEETPATQDTDNVEEYKTTLEEHQKQADTTLQTVYHATYDNNLLTNIKPLNEKNNKNTQSLSKYANTSCTKNKVTSNELKPYQNNSSINLKQREDTKKNDKRYKQNTQ

SEQ ID NO: 971303 - protein, 225 aa, Homo sapiens
EAVTGTLFLSACLTLFSPYLFGHELRARSRAVMCLVRSYGEEGRDCSLVAAPLSGRVIPRGVPILGVRGEVSAFEASANGVRWPAWHPAGMCCPAEWYLLLQSARGNPGQDFVDRGAAAGRLGADALCCPPALWSTQGTQYAQEHGLNFHETPGTSHGTYRGGLFWEGHDPVWGEEKRQADPRLLSHGRLWRAISQPIWLVSDSTESVYIQWCREAYGAVTQTVR

SEQ ID NO: 971304 - protein, 131 aa, Homo sapiens
MHKTGGAANKHELKDTQGALAQARRPPGTTHTSPLHTQQVNRTTPTPPSIPHQNTEREHDTKQKQLRPQQYRTPHKRATQPPTAHSTDKKQYNKTTTNKHPHDTPNNNTRQHTRSPQTQHTKTAQTQTSAT

SEQ ID NO: 971305 - protein, 150 aa, Homo sapiens
  misc_feature (111)..(111): Xaa can be any naturally occurring amino acid
  misc_feature (130)..(130): Xaa can be any naturally occurring amino acid
  misc_feature (135)..(135): Xaa can be any naturally occurring amino acid
RGSGLGTVQLDVGFASFHFAGVATAEKNLLSQAPGPQEKDKCHPEQSHLQLHSAPEAGPAGPVHLLNNVLYVPVWQVARMQLNEQQTVLSRTALCFPGWCCAFIHLGSSSXAASPRLARNIGRAPQLSSXARTPXIQATQRKEEGAVGIY

SEQ ID NO: 971306 - protein, 121 aa, Homo sapiens
AHSRVENISGIDAAAWYRAFDDPPMSYVQKLDKARTSSGWCQGPTNPAINGSAPRDLYDMKPFKMLIRSASNSPDRMSMAEQLRGETLDSMEKLSRREAEALLQLNGDFLVRESTNTPGQI

SEQ ID NO: 971307 - protein, 160 aa, Homo sapiens
MPWIIGEGATCRIRKSAGTRVQSSGTVDRSRLDVAESSEEERFDGMLLAMAQQHEGGVQELVNTFFRLPSTQNRLFHWRRRRDGEEKLITHDFHATTISLCTGKTLAVENESPGLDGLSWVGESAGAVAVTRTGQGSQCQETSCGPQIKELTDEEAERCS

SEQ ID NO: 971308 - protein, 209 aa, Homo sapiens
MQGGARGPWCGPGIGNRGGFRGGYGSGIGAGVAALDGGRGRGQGARGGKAEDKEWMPEHQDRDNWSKDMKIKSLEEIYIFSLPIKESEIIDFFLGASLKDRGEKIMPVQKQTRDLAAARRFKALVCYRGLQWPSQVWVVKVAPSDVWPHAIRGGHHPGQALHRPRAQRATGVEHKIRKAPKLVPCKVTGPCGSSGWYSLIPVPRGTGHR

SEQ ID NO: 971309 - protein, 90 aa, Homo sapiens
MRGGARGGPEGDKGKRGHKGGPKGETGGRGKEGRGISPQYIKKRPGGNGGGSWEKNPRRGGIRGRIKGGYFHKGGPRRTPNFKLQPRPGG

SEQ ID NO: 971310 - protein, 200 aa, Homo sapiens
RVPPFTLELQCTTSKDEAGVSEHPECPCERTFENGQPLSKEPVAQWRSHCVANKAQGAMEPGRACADLPSCLRALQIQDGLSRGETSCGPSDTVVFREKQTKGGDGSAISRSCSNIINSSQLLNQEYSDVVLNKEIPEPAAAGRACPDDTPGLTLLEGTPREVPWFFHTEYVACRCASPCAPADPSGQGNSRWVLQQTPC

SEQ ID NO: 971311 - protein, 165 aa, Homo sapiens
MACAISILGKSLADELCSCGCLEDKLKGEMMDLQHGSLFLQTPKIVADKDSFCDPNSQDMSDGNCKESVRKEGESRVNLVPENNVNVFTNSIITSDRPSTVLIASSIVVSKSSGHSYVCYLDTKWITQNTAVIGRGCNLDTAIDNRYLMADKTWKFNPQQIAMDG

SEQ ID NO: 971312 - protein, 32 aa, Homo sapiens
MLANPSPWQNPQADFWAVSCSKPQLNAMNLSN

SEQ ID NO: 971313 - protein, 122 aa, Homo sapiens
  misc_feature (1)..(1): Xaa can be any naturally occurring amino acid
  misc_feature (23)..(23): Xaa can be any naturally occurring amino acid
  misc_feature (33)..(33): Xaa can be any naturally occurring amino acid
XSTKVSLFPHVALCLSPFSPDLXAHTVEKFTFXSAPKIPSTTQTIFCGTCVKVVVRECRPPSLKKKKKKKKKIVCGGLGPSGELFKTPFRGAAGASMSRAQWWHKWSQETRCQATGRGFPPR

SEQ ID NO: 971314 - protein, 298 aa, Homo sapiens
FYVCMRPEVLYRLRGSSPLAIASLTVNGLPSGQGGRGRARFGASASAAAPSLRRKPEAAAGSGTLRAAAEPGGRPVPRAAAGCVPVRTTCDEGTGDLWLPFPVTEELTMAMSYCEGMTSSESTLKRKKRVPGWDHLPTCVLKECCPETWLHPKCDLPMASNLGPVGRKPGLQRCKVYWPRITTMLYTSSGGNNGGFAPWVATKPNATTFPHKPLYGTHLVLTGYLRHKTAGHPVQGVENHRTHFRSLGQRIAQTGVPPGNTGKPSVLLACRGECPCHWPHTAEIRLLVHGEDRSVKFT

SEQ ID NO: 971315 - protein, 297 aa, Homo sapiens
TRTTNCDSSKACLEAGEEERTMIDYAEKDEYNIKHEKGQNKGRTHKDTTKQNTEDETEATQRQETAPATQNHNQDSSKEQNSHTAETKTNKDTRDQDTLKKKATKQKDKIQQDKKPKKRTKSQTDRKNRHAHDHPNAQHITPTTATTQTTKESTERKHQQTGQHTKPQEEGTEEQKTSSYKQAETDTESETQKREDRKPQNTNTRIHNHKPAKRQSGTQGNNDKETSQRVVTQQQPPKRTQTTKHTTTPPKYTTTTHLNNNHQHRHRNMTQENENKHQHVNTENTHDTKPTTHKHTQ

SEQ ID NO: 971316 - protein, 97 aa, Homo sapiens
MAEEKREGIRDDLLEDAEPAVVDRILFPGSISEAMLYDVVGRIPMDAMKGCHGSCADKKLELEAFMDLHALGYLREGNLAVMISWRVNNLMRSRSLS

SEQ ID NO: 971317 - protein, 142 aa, Homo sapiens
MCFVVFLGIRGVFAKVLKFPSTRGELGKNFDRRRNIFFTFGATTGDWGFNNTLYIPWGRVLKKHKEPFLYREFYEQRVWWQTKNSGALTTQLKLVWKGNGKNCTTGALTTLAKGFKQVERVGHVGNTISIIGGVTSQRVIKR

SEQ ID NO: 971318 - protein, 219 aa, Homo sapiens
HPLTNPRISPCQPYHTPSPKVTVMLNNAIWPNYTRTTLLSYHTLYKTTQKITTKQHTHNNECRAPAPTTTPPQTKTISPHPPPTTRQHTHHPTRLIHKKSTNVAVTRGFASSLPLSLGPTPNTTVLIVLFTTHLYTQYTDGGAHPPRKELDACTTPAERKRTIKTRDTYSTTGAATLLHNNNRILSLIDYNVPHRQLSTTTLTAPPAITQTRVPTIILY

SEQ ID NO: 971319 - protein, 68 aa, Homo sapiens
CIDILIEKEYLERVDGEKDTYSDLAEPFCERSDCVTRSQDQFMEDNECNNNSGAIAVSLPTLYLPFKN

SEQ ID NO: 971320 - protein, 148 aa, Homo sapiens
MREETRLVGIGAKAPESRHNPDPSSRIHVGTRIPSFGTYRSIKVTLHDDDKLFQGICILFIGNSQQSWSAVSVLPSLVQGPVVLWFLPFVNVLHVFDLVYMSFGGELCDPCGSGRLLHEFVATIQEADFVGPLPKRLCLTCAPFYSLN

SEQ ID NO: 971321 - protein, 104 aa, Homo sapiens
MGNLVKETNRKGNSCVSRVSNVILKWPEIKTLITCMQKSAGLEPRVFGKQIIKFSGHVMPYSHLAILSTISVPRVKFGENYSELLEPTSFKPVEPLFKGCPDDI

SEQ ID NO: 971322 - protein, 92 aa, Homo sapiens
MERIVSPVKKEPNVSVGTMRHFSSHKPGSINLELPIAAISQTTNVFFLHVTKQAALKEHRVRNRITACKNHLSDKRGRVTDKKGRPNIGAKE

SEQ ID NO: 971323 - protein, 208 aa, Homo sapiens
MPHIGEMAVTWRNAQYPTTSTGRTKRTSHFWHTDKLLIPISIRPSEERQGTIWHDKGDDDQTYVHQGARMHTHRCRTTNINHWRRDTTHRRDGIIPHHQDDFRYYKDRTGACSTTRRHAEYRSTAQAPSPAKNNKHPRQKATTSENNRDEPQIKQNGHPAHTQRRKTDNHRDPLHHSKNNGRSTLNKLVQHHTELNKRIAHEGENAQT

SEQ ID NO: 971324 - protein, 196 aa, Homo sapiens
RTIPGCPSPVKCHVLPCYCNSHICVSRPTLSPASVMPLMPHGEKVERAIKISGIVATVFGAPGFLGRYDCQTTVGTHGVTGNHTRIGVIKYDIMHLRPMGDLGPASVLEWDDERINDSIRRVVQDSNGGQSRSYWTRLGNQIILIGRMSCEDSPRQWLNCLKEGGVVKTSIHVFRSEVRTITSSSRYREITLWRAE

SEQ ID NO: 971325 - protein, 114 aa, Homo sapiens
  misc_feature (39)..(39): Xaa can be any naturally occurring amino acid
MVAGQHDRRKQYSDKRGEEKHLSNHLKETISAQGATVWXHPPCDFPSDAQLARVPTIPQTAWQAQGRDNACSRGRRLRPQRAGPGTGSGNTSAHRARKGAKPTQTNRTKATPEH

SEQ ID NO: 971326 - protein, 152 aa, Homo sapiens
MQNYTTNKTTNKKNQANEQANARTEQRSNTEIRELQVKKQEQENNYQIKRRTDNSTTHADKKETESRARKEHEQNETDDREGEKHKKVQREKRTNKKDKEDNDTKQSSDNDKTSKQEKKCRDTQRKTEGNKNTETEHKEKYTTNKKTDQQTR

SEQ ID NO: 971327 - protein, 120 aa, Homo sapiens
MGSQASIQATHYRGTTHPPLYTESPTDSITKNSRQPTDNEKQNYRGNHRQYQTATQTEGHKRSRTRTTLQCTPRRHMPNDRRVKRTHQAKTEAPRQQRPARTTRTNHETNGQSQRNRGPA

SEQ ID NO: 971328 - protein, 75 aa, Homo sapiens
MNTSKMTTRARKAYSSLLQAPIEENSGREKPGTHTPGGPHTRPEASEVPPGRCPLAGSLLRTGKDASQTQLRAAQ

SEQ ID NO: 971329 - protein, 191 aa, Homo sapiens
RAWICSGVGMGPRFFRVYNKREQQHCKRSFKNFKEEKQKKEIQKTQPFLGPAFRPLEKRFKKTQCCWRRRGGHIGHETLGPNVWLLQRVAGPGDDGLAILHNKQPPGETAGIAFRETKLQMGHDRRDRKVGALSRTGEVHMVIWIQILALRWDCNYVAIFIISIISALYLHMSRLQCAMTVLTGPCAKVSY

SEQ ID NO: 971330 - protein, 221 aa, Homo sapiens
DTTRETHGTTAQEKQGHTATRRTRPHTKQPPPHYPHNSTTHTYNPSAQQQARDGGDDDGGRNGPRKRDEARGSERGARDAAGRGHRTRAGRGRELAAAGARRERVAGTRAEGGSERDQRRSEEGDSEKGEGGRSGSDRRDHAQRGRRERATGRDSEDRQRGQRGGGRGASEGNAERRHTRGSERQTRHARTQTAGGSTETTRGSGRGAAGQPSPIQGTQHS

SEQ ID NO: 971331 - protein, 118 aa, Homo sapiens
MSAVGIISRLAYNRHLLQAQSTQCTRATPSVMCDEKLVTKYGRLRNCCYRCGNIASIMVLKGCKYREPKVIPGSARFRDVSIPSQKDDASISCRGLRTSPAELILLSLFLPQVAGITR

SEQ ID NO: 971332 - protein, 157 aa, Homo sapiens
MQQPEWRVSVEAAALSLSHGVYRELSTQGEHLITIGATKWTSLMQSVDMFSKVLEHQLLQYYQTGGSEHGGSDSSINAGIRWMRMNWNACTDERLQATRGKLTQCSKTIAHGFPEKGHGANTEKSLVNETFLLRDSHGSTCPCGVPMSYTRTSTFEV

SEQ ID NO: 971333 - protein, 83 aa, Homo sapiens
MGTSGHTGAKAGSLRETRGQGTKGGEVLPPNIKNAPGGHPGGVLGTKSQEGGSTRGTSRGSLITTGGSKGGPEIPNISPRPGG

SEQ ID NO: 971334 - protein, 127 aa, Homo sapiens
MTSPQPTPTHEDEDHQHHQKNDKTKHQTTKNEANNPNTNRQPQRHAPKLLNPTNSSHDTHTLTLLATSSIPAYHIHQHYYITPSHPNHNTVTYYTLIAKQSKIKNRISNRLTLYISITTTVHYQLLN

SEQ ID NO: 971335 - protein, 119 aa, Homo sapiens
MKVMYYLLLQEDAYACLEMYVYKKETIHKVSSCAGLDLDVYVVNVRSILHAVLRRMPPSGRASYVHIQRYAILIMLTSISFGELVLDPSKMYLTIYGRSRSQHKSVLSPSMSILLCMVA

SEQ ID NO: 971336 - protein, 105 aa, Homo sapiens
  misc_feature (22)..(22): Xaa can be any naturally occurring amino acid
  misc_feature (101)..(101): Xaa can be any naturally occurring amino acid
MSDVDDYQLLQRIPSSHCSLLXYAPCFVGPFHMNLLAAFSVDFRNSWPELRIEPKSRLQNTSLVREHIWLPFRYQSVISTKDDIYFPNTFWKQVAVSRLSXLNVL

SEQ ID NO: 971337 - protein, 104 aa, Homo sapiens
MIATVWRGAYCLAVCIYCLVWQPTCLAVALLSVVAASVCVLGLPVCVWAYCRLCAYSLCVGLVSVVGLLSGCWAYCPWCGHNCLAVGWPVDRAGTCNEPVFVQP

SEQ ID NO: 971338 - protein, 143 aa, Homo sapiens
PENPKFSVPPITPQKKKKKKKKILGRPLAGPRKKTFQKNHPRGAAGGPQLGQQSATGGHKRRSPRREHPRGHRNQGARGYLLPTNIKKKRRGGEQPRSGLSNTISAKEESPGRHIQAGPSNHNRGVTARDAPNYTNYAPSRGT

SEQ ID NO: 971339 - protein, 281 aa, Homo sapiens
ESSGENHHSDRPHQVAIFKAFAMIIDQAGGRYHTSLHDQQERGPGGPRSLLRLVVTAQPVRLPDLGKGGCKIPKRSARVRGAQVFQVAGEYAAQSSERAITIAGSCPQSCATECVTADLPGHAGDRSPSLRKGEVSEHSRYQPMPGPGSPVIWAGGKIGCSRTLRGYPPCAMNVDGEPPRRMTYFDFHGPSNTQYLPAHDHGAKRDTRLALNNQSSALPLSDTAGHGIRPELTSRSPEGETVVEATRMHIANTQNYRSHYSLGSSWGHTATNEIAKLSQNM

SEQ ID NO: 971340 - protein, 186 aa, Homo sapiens
MKKKESSKNSKSTRARQTNKKRRRESEREQKKEKRSERGERKANKEEQRTREERTRGRKRRRGEESKEEDKRRREENKSDERRSKEEHRKASKTQQTKRGRRQKNERTKQRKENTQHRNRKSTNETKKREPQEKETESRGGREDEKRKTVAQRQKRTTKYTLTNKSTTTQKKQQNIIINNIRVKSN

SEQ ID NO: 971341 - protein, 285 aa, Homo sapiens
MRWGGGPRGRGTGALYGVGVPIRENPWPIDSSAWGFLTKLKNGRGGNRTGSLEQFKEGRVRSVIHGASYHQESKGRARIIKLTPRPGKSDAHIYAFRRPEQWETPLNNGGQGVTHRELRTRGDYQAHPGGHLGGEQNIRGAKWAEPTGGTQKNVGPPMWEHGVTHHDRGVNTNHSGAGRDTEKKYFSQKRPLKGKKRGQAITRDTSAKLARSFGVRNTARNKSAGDLNTHKAEKQGFRSGPVKPPVKGRHFQISGTFNANTSRKKFTPTNVKPAKGLTNRESPTE

SEQ ID NO: 971342 - protein, 148 aa, Homo sapiens
HSWRVYPFLREKLKKPLREEIKFMFKLNVVYGTGNTSIVVTSSGGNPYMDTFSFWGRSPVPFFMREHTSICLIAVASGIWNEDPPGVMNKPRLSATQENTTTKTGWRSGVKDPHIHVNQETLCPRSTEKENTLGQSRTNKSFSTGYQP

SEQ ID NO: 971343 - protein, 39 aa, Homo sapiens
MGSVKKLQEEGARRLHNGTPYSPESPDRTDITKINAPGE

SEQ ID NO: 971344 - protein, 116 aa, Homo sapiens
MSGDPFDVLQDEGGGCPLSSYAAGTHLGGTLNLDFHGWNRTSIKGKVMAVYIDKSQEDLGEAFCMASSCNCCHGKALLMSVLYASRNTGQRAVLKFAADTGDHSNCWPFSLLVTFD

SEQ ID NO: 971345 - protein, 209 aa, Homo sapiens
MRGSGSANYTGNSIIKQGSSTRSSDTKIYGPARGNKPDTAVETSTQDNRRRGRNKHRQKRGAIPKHMRKSANRAKKRRRRRAQLGESITKRSKWNEGEQQTTSRPTRGAPIRTKQSGGKNSTREPGEQTKNINSNDNNTEGQKKTRNTSRKATNNRKNKEEKRANTNENNERAERTAHKKTRNKNTNNHKKDKDKKRKNNEHEKAKTRK

SEQ ID NO: 971346 - protein, 68 aa, Homo sapiens
SVGATTVAVAAGHLDGRNAVRCLGQLETVVAELKYTLPRNGNAYCCESYLSSYDVPRMAKCDYGEQSR

SEQ ID NO: 971347 - protein, 211 aa, Homo sapiens
VRMCTRMRMRWGCAIHEKLSGSRWVKREELFIVCNLWCSYHEKGLVNGACRVKDSSATIEAGLSGASILFHWGDWFYSLGRNFPIDESGNVVPSDTKFWNVGGMEELVDEGLVKAIWHLQLQPSPGGDDLKQTWLESISLQLTRYECHPYLTQEKLIQYWQSKGIVVDRYSALGLLTGLGQAPRTLSLLEDPGSGIAASTNKLQPGLIRSH

SEQ ID NO: 971348 - protein, 225 aa, Homo sapiens
GGKAEDKEWMPVTKWGRLGQGHEDQVPGGDLSSIYPAQLMESEIIDFFLVGLSPKDRRFMKIMPGAEARTRCRTMRTRCKAVCCYRGLQWPRRSGCKCSKEVGHGPSGGAIILGQALSSVTRCAESYLGEQRSANAPYLVALQGDVAEEGSVLGTGLIPAPRVRMVIVCEPVPKKLLKDGWDRGLYTIKPGAVCNLGKYQGTLDAISKTKGTDPTLGGDVSQVPL

SEQ ID NO: 971349 - protein, 148 aa, Homo sapiens
EAVAVSFSWLKLGGSDGGPARRDTGLRNHCTHGGCALTYNTNVCDLLAGACSMLRMHGLGGKQRNYYLLPLLLDVLLSFTGWWTYSLRLHAAHFIHTTEPDFPTPLITTAVCVSIGKPSTPLQKCINCTTLDLRPQSAALHRYHTTQG

SEQ ID NO: 971350 - protein, 466 aa, Homo sapiens
LLANFIHTHSCPHMRNATHHTRALHCHTMQPSPTRAPPATLAPPLAAPPYSRPTALHNKRRRPHPTPSTPTTPRPHASHHSTHPPCTPPPHPALRPAHRTPPTYPLHPPPPPPAPTHHPPHAPPHPRPTTATHSPPPPLIHSRLPPPPRPHPSPSRPLPPSPTPRTPPHAPPPHPTPHRPHPPPRPPHTAPRTTPPHPPHPPNTQPPQPRTPTPTPDPPPPPHPPQRHRPPPHPPPPRPPPTPHPPPPTPPTKPPPTHTHSGPSPLTTAPPTQQPPHPTSPPPPPPPPHHSPTPATPPTPAHPTSPPTPPPHPNTRPRATTRPPRRTPALPLPSPPTDATTAATSLRSQPDSRRTPLTSPTPADTPYYPPPPTSHPHLSHAYIAPPPPDHTSIPTTNQLPTRNAPQHPSSHAHPPLTEPPSYPSDWATHTRPPPAHTHHPTAATHIPRTRYRNTQLNTDTNTEPAR

SEQ ID NO: 971351 - protein, 104 aa, Homo sapiens
MLFHIHPSTPSSVTSILTYTRHSYIYSISITPHFTTPHSQLTASHTRNYLPSTHTPSHPHTIHSTHNYRHRLHRQLNYQSLETYYTHNIQIKLKKQLSLHFLST

SEQ ID NO: 971352 - protein, 308 aa, Homo sapiens
MSYHNFREPTDFNYELALQHIAFIAKRVPRITELANYDSLKPSVRSRPIDLVTSSLRASTSCKLGGYGYNYALTSSFSTHLSKTDEHYPVPCDLIPDEAELLTKLHLAYRKTRPKIRSCAILFKSGKYASVVTAILIQYTLKAFTGRTIILIIAPRHLNPHYYSCTAILTIERISSRINDPLSRTSNSIPIKALRKTLLQIMINIAFTSIINHLGEPSVSKTRYPSQYDEQKRNQNKTTFNPQFPHNGHPHIMNKLSENPLELQYNTHSVLKKNGREFEEAERFHHLHIIDEQQTEHTLYALLPKSKH

SEQ ID NO: 971353 - protein, 85 aa, Homo sapiens
MATTPDMSMATDTPPGGPLAATTHVRPTRCPPKRGGQNSSPPQANSAKTPTNWWATNHRVTKSAGQPTTATRTHKHNDTTHNSTE

SEQ ID NO: 971354 - protein, 293 aa, Homo sapiens
LTEEETRVMFEKIAKYMEENLQLLVDRPDGTYCFRLKRPGVLCELRKNYWKAWAGQIISGGPSWVSLGDLLGKIHYNPQVSVCTSQLVDYLAPYARYKVGIKPGAEQSFLYGTHVLKSGLGRITENTSQYQGVVVYSMETSLGFGVAANLHKNGKVDPWDVVFHQARHWGICADEETLIEKKHSNDRRVYGKGELGFLCCVDSHHSMLNRPQSDIFQDFLFKNPNHANGGGVHISGCHRGPTLENETVTWNKACREWNLDEHVVRYTYTGVKPTAETRNKTHTNRGRTKHRTQ

SEQ ID NO: 971355 - protein, 78 aa, Homo sapiens
MRLFPPSKADAGPFCGWISQSTQISAWVCFRSPKIHTFEISTISTSKMYTHLDCGMQMCNWKLNEKLRFLSNGEYFAL

SEQ ID NO: 971356 - protein, 67 aa, Homo sapiens
MGSPSGAGSNVQRQGGNTILTGLNLALQKDPEYTSLELGKDHFGPGDPRDHYPGQKYYQCGPHRHGV

SEQ ID NO: 971357 - protein, 171 aa, Homo sapiens
MGAKRGVHQKGEELRGNRRKAGGGASTHTHQTKPPGGAHQKASKGDKKPPEGKYAGGHQKRGNLITKTRGESQKREREDKNTPTSRAPRESGQQTNKKKKDNEETKKKERKKEGETDTREGKQQESEGEKGGKDKDGENEKNNEKEEKKREAAAKSEKMETERKTKKRAKE

SEQ ID NO: 971358 - protein, 186 aa, Homo sapiens
AALFANRPVPPTSAGRSPPLPRITRCRHGKARFSLQVHARLRRTRAVGNDLPDSLRLARVTNLQQTLLPSPPIGHRISQRLRKLSDSPDGDQTDSTTTTVWGHRRATAREFPRTGPTDTASLTEEAPRDNHQPVITTIPATEQISADDIYTSEAWRRAIQGELRNGAGEAAYGRGTKCDPGTRHTD

SEQ ID NO: 971359 - protein, 191 aa, Homo sapiens
MRDNGCTTAEPLSPHYRQTVREKTIKPLTPETSPRRQLTTTEATNPYNAPYNTTINPHQKCPGPRQHGRLNKVTPDDLTNNPPQWPYRRQKNGTAQTTKHGNNRTGVTNQHQKTITQTVLAPKCMHERATGTTRQSHLDSTKSPGSGTHREPVRTHTNLEHIQELETHRKGQREKPKRATQTPDHYFQRLR

SEQ ID NO: 971360 - protein, 199 aa, Homo sapiens
CASKNILINTQVLSEKKKKKPGFSTIKITLEVALNSNHLRILGDITVVAYFPLVTRHPVLANSGSWPSGLPPLTSPNLDLKRPKYAYVLGELHTGLLGKKPLVLRVTTHSRHRHIVAFWAAETVSGRGGTGGPLFVTLPNSAVLQKPQLPIANYDEKPLRLIVSRFVTKHKDGCGGHNVFAARKKGQTFRVINDNGSER

SEQ ID NO: 971361 - protein, 76 aa, Homo sapiens
MTWRGVHARCLRDERFILCVTLMNVHCDGFSNYTGILESGHVAVGSTVNQHASLRFCSWVVITTQDPSVEALLNAP

SEQ ID NO: 971362 - protein, 126 aa, Homo sapiens
DAGSRTLGVMYYKVYVVFIAMNVRVMDASGFVSAYSPQGLKPAVIHRSTTYHIGHTNYTELRFHRCMIMLGKNKVPGLQKFFQKADGVPVYLKIEASLTKCCYRITMALTVGGTIYCLVALYYGFS

SEQ ID NO: 971363 - protein, 148 aa, Homo sapiens
MNNRGVGSSSTNNNKTRRGGETRSGLREKISQKGESPGGAQYQGISYYNKGEAAQGEGLSDISLKHLYGPPGPVGEKIGTGRETNKRDRQQARLKQEKVHARERNPWQRNALLASKAQTNSSTDHPVDKKPTNRGTTEQQSEPAVELN

SEQ ID NO: 971364 - protein, 261 aa, Homo sapiens
MHQRNTEAHTHRPKNQHNKGQNTQNTEKKREPKHRPENNTHTKTQNTPSRDQPPSDATHTQTETTATTPKNQTARNDPPQHTKHKQTQKNTRRHTPRTAPQKHANSKKTKRPPTTTQPTKETDGSTPDDDKPTAPTTGGKQREHNKTAKNSGSQTQKQANQHSTKEKTERTTTRKHKKAQKPNTKTKTQQAVSRDKGKKRQEKPANRQRRNPQTASGNTHTLKNGQEGSKTHDHHRAAKKTPNQGHRQKEGQTRDHTTESP

SEQ ID NO: 971365 - protein, 240 aa, Homo sapiens
LLLATLMCSDYISNKKSSHHKKKKKKTKKTWWTATRAPRTTSLKHHRRGRPRGPPPRDTDDTGSHSESPNANTRRHENQRAMETTLTQIKQTPGRKPQTAILRNTKFRKEGTTQERHKRAGTTQTHEGHIPKTTHPTNQKLQPPTPAGPHTRSTEHEKTHKRQQNTHRRHKHRKRNTHPTAGTRRRRTRDSARGRDQRPTKTAQEEQKEPKETASGNNKKPKRNQQRATGRSRPQRDTHP

SEQ ID NO: 971366 - protein, 268 aa, Homo sapiens
ACNPSTLGGQGGRIMRSGVRDQPEQHDEAPMSTTKYDTFRPGRGGRGGLVSSQAYFKDGLKDREKFRPTHLTGRTVTRKAQEYTATGTARPWRDPERRTSILNNKKQTKTTNKQTHRHNTRKGQHPQTQSLQQNTAESERAHQRRTQEKRKRRTHGRNKKERPPQRDNNGVNKGRTITTNARAKRAHTNTKQPHPTAVQKKQQTTTGCTDTQKQETKPENEAKTQRRRANTLHANKAMTTHNKTDTTTSRKPTEAKHYTKDNNRRTHQ

SEQ ID NO: 971367 - protein, 275 aa, Homo sapiens
LTCHPPSTTTLLSKLPKKKKKKKTKRDSPFFLGGLGRVSSTPNITSTLHSWRELRLVALRRPLGFKFPLEGLWRTLGLPQKVSPIRRAPWRYLKLISGVRGANQPLRFELHYEVLLFNRGFWSRRASGELFSTLYKVPPIIVGATTAEPGTIAELLVTTTNEAKITPVEPENSSPQRECVHKTSGQTIERKPPPKEKLPDRQMSRPRHEIFCAPWALIAVRHHLGGQTHHCTHQQSVGEANLITERAKEHTSTYADTLRRLGDKTLSGHTNEGVL

SEQ ID NO: 971368 - protein, 102 aa, Homo sapiens
MREKRRARVNYTKQYYSEPPQEDPAGGARRTKETREDSKHHKKEQKNTKRKQRRKKKQRHHTNSHIKDNTSETEKNEKPDKRRQQKPKKRHTHKRAKDNHTR

SEQ ID NO: 971369 - protein, 321 aa, Homo sapiens
MLKPTTHSIYYHTQRHHDRLRNTRTDRPHSRQTHHAHKPHTHQTRLLPPTRTAPTQRTRTQTTKRSHTNKSQRQTQIQNKMNQHGQSHTRAVMKAANNRTVDKPYHTDKHNTETAQYPIDTGHHYSNYTTKNTQSHTTTPHQHSNKARRKRDTKPDPEKQTTNTKKRLEKHTNQKQKGTTTDQHLHTTTAQYTKKHHEYNTPNTHQQDIPTQQDNKNTNHHSKPPETYKRQNKQSEQKQNIRKISRNAQTKQQTGTQPREKDTHKETHEKKTQDSNAAQHKQPTHTNTRRNKTKTKKQTKTIENKEYTTQTTHTKSANKHK

SEQ ID NO: 971370 - protein, 139 aa, Homo sapiens
KELAKDIASRRDRASEATIRTETAHATNRNQQPHNNGHRAPDKEKRQKTQHSAQQRTKERREREGKTNSSRDGTEGPRTKKNDEEPTRSEHRKETQHTAAHQRREGGREHGRAHHQQPRRGHTGRHRRPSACLETHPET

SEQ ID NO: 971371 - protein, 122 aa, Homo sapiens
PTVSFPSHDAFTDRHEYTAYTQRHRQSSEMIFCHRSLEINKNSWPCLKGTSFASTFRVWLLVPAMAIMAGHYQFFLRFGFGSNIYILNTLILFEKFDLFNEASWGFVLLLFFSVVGGSGARC

SEQ ID NO: 971372 - protein, 307 aa, Homo sapiens
MANSWLQGLSQGPDAGEFSSTNAYGSNLLTAEDANIRNPIARLSFCCGPACKAFSSLTIGQFPQGDTTRSQPCAMRSAAHAHTITNTNVPGRPANVDGARTLRSLRTPLETNTTPTPPHLPSPRIASPHAHAAGPHQRGHMVLVPGHSRTVHPGAHNDRNAKGKPEPKTPPDTENAYIRGSEPDKYTRPHPTYHRTQAPPPPGHLHNDAHAPARHRGRLANKGDNSGRPRPAPWASYHTAQENDATPTTHERRSHAKRDDKLPPGHTRAHTGTAHTPPQTTQCNSNNTRRGDTNAPQQSHNRQHTHH

SEQ ID NO: 971373 - protein, 610 aa, Homo sapiens
PPAGTDAPRPQSQKRDEHATPQQPRTMTATHALRPEPQQNAWRAEHRQDNTHHAPTGSSHRGPPARTHRHHTQEHTRHPTLSHPREEKQTARAQAHPRATRTERRRTQRASETARATQPQAHRPRAQKRHNAQPNTRAPPAARPDSTRPSTQDRQPRATATPGERATDKSSHSSRRHPAHGAAERVALYMNEENRGHEGRQQRHAPPSRQRNAKKMANDKEDETEYDKDGESGEKRAHRAPTRPSAGPLQPPGRHSRPHHDARPAPDTRATQPRDEERTSHATPGRTSPYQHAAPDTRSARPRPRRPNTDDTTQRTADEHRDRNDSTGQHTGERPPSNARPRPPPHPNTVQHPESLRTHTRSRRLRPTTSTHDHQPSSYRDAAAQISESTTIKTTTRVPAPTAAHGARRRAATTHTPPRAPRHSVNAERLATARRRSLHPQLERRRARTARAEDQDRGDAGRRKRECGNEADCHDAHGRRPERGDASTQENHAAAAERHARERAPTDTTTRQHRDADDRGEARRDERQTQQDPNTTHKSRRRQRIERTTNQDRQHARSEPGRDAAASYSHARQSPAQEMPGEHDKKKREETGEEETVQRQQSETHTLREA

SEQ ID NO: 971374 - protein, 297 aa, Homo sapiens
MRALLFGAAGLLLLLLPLSIFLLLQDTCGPCEPALLPAPMPPLGCHAGAETQRRVRLLPYVRPRAIGEPVRGWRRRPGGHCAPGMECVTEPAHERRTTGTSPGASHAWRHPGLLTRPADAVCTEAATPRASRATTERRSHPKPRDGPRPTWRPPAQAPARGPEQHRRPHPKGPLKPKSVTPNASHTTAHSQLGIRCPTTDEQPPPQVPPLTEKMAPPLELDPKGRYTSGQHGLTSPTSDKPPPVKTIDPLNLLENTHQVKPQQIAPLYSRTIHHSGTQTSHKQMASNQRHNPLDPFQ

SEQ ID NO: 971375 - protein, 143 aa, Homo sapiens
MQFGLTSLLSRRAYRGCTTTERIINGCTQHTQEITGPREGWGLQASPGPQGSVPQPWAEPCVLNKLTTYTSRRHKLKGAPPNRNAGEHNKVLLKHYLTALDITTERGQQNLVATPCHTSPTRPATTDTRRHARAQLVTTPGTR

SEQ ID NO: 971376 - protein, 189 aa, Homo sapiens
TFIWQHKFSKSGGTSCYHHHISLSSFHILNNIFHFMQSWACVVIIGFSPQQFTLCSHSTTVTLITTHQLTQSAPHSMHPVCNSAVHTIISAQQHTNPKLPSIIHNTSQSPITATHLPTQQHPNTWHTWFLASTTWAYPGQAKYTQHFGHTRYAYSPHDLPLIAHFSTHWISSYRAPASIWIFLTAFGEP

SEQ ID NO: 971377 - protein, 31 aa, Homo sapiens
MPLSSPYCTLTYSRYSYSLTIILLYISSQSC

SEQ ID NO: 971378 - protein, 185 aa, Homo sapiens
MPSLTHTTTNSRDSNLNPTILRSPNHNSPSMHSSSHTHSQHIFIQSPRQYTLPKHTGTLHHTLSGPITLHRTTTAPDTGPPAHPGPCADTNSTTTQAPPQRNNSIYTTNTRAADSKTRISHSTKTSDTTLTKTPPNPPPHAHKTTPAHTAPTHTPYPLGTHTKPHNRTDKQRHYHHDIPSPATSS

SEQ ID NO: 971379 - protein, 320 aa, Homo sapiens
SVECNCFCIGESDYELETPKKKKKKKKKNSLGAAAAPRKSFQKPIALGAAAGPRSATGTGAIACTKGETPGPDNVAGTLSPQYKKRPGAANPRRFVNQIQSEVGGSSGDLHQRGTSRGAGIIQNYKPPARGTNLTPPSGTNNVHALATHSWKHHQTGDGVKPVQPDTTARSSHDGPPPLTQQTQEPQQASNTRGAQRTTDHTEHDRTNQHRRKPHPRMRRHTTPIRNPTPRPTARDSSGRGGNDKLGDPTVARTAPPTAHNPKRANRKSGTNPMPPRQTARTGTTRDRKRRQQSSPTAPARYNTRTRDGQTGNKPPRTAR

SEQ ID NO: 971380 - protein, 171 aa, Homo sapiens
MKNLRALVDETVTLGIYERYKQAWNVEVPIRKMNAKGICGDDCIGWMGTPGDLIEEVMSPKLNVMRNAEAMFGTRHGVRDRLGAYKMQNITGRSPLGQDTFSLVKKEYAPPYCPNTALCVDEVAPQDCKNIPGLPTRNLQRPGGKHPRGDNWYRNTGDVATPENPKALWRE

SEQ ID NO: 971381 - protein, 51 aa, Homo sapiens
MTLTPTREAHTTTSAITQHHAPHPPQRTNQTADDTTPPLLLHSTLEHPNTN

SEQ ID NO: 971382 - protein, 78 aa, Homo sapiens
MTTRKQRKQKKDGKVEDKRDEQQEKERRDGGKEREGKARTTNEGTQKQRQEQKKGQKGQERREQRTTKRKKGRKKKRE

SEQ ID NO: 971383 - protein, 202 aa, Homo sapiens
MLISYHMHHQSAPEAQAPSKTMGAHPTTHRHPRHTHTTAVRHATLKSYTPPIPLGTRHFLVLPDTPLPSHLTPPAVHTSHTRPQRTSFTLHHLHRLAHTWRKPRTQQASAKAPSSGHEHTAPSPAHHHHNTPPHPRGQGARAEARGHTQRGPRPARNTAQRPTGTPAQPRAHTHDRGAETKHTPTPTAQTNPRDRAPPPHSP

SEQ ID NO: 971384 - protein, 286 aa, Homo sapiens
PGAMSRAPRAPGPGSLPLPPQFSTFRGSFIVIKTEWDFSTKTKQKPRKKKTLLRPRPGPLEESLLRTNRVVAAAGAPEKRLRGETVWAHHPVFSLRGETPGPDLAPHAAGEGSPLTQPYNKTTPAGGGHHREPDVLPRHHTLPNRCETTDQKAGHNHRGAIYTHNSNGGCHQEKERSENSQTINTGPRSQEMVHPHKQHTPPNNRHTQDRNPTPPNTQPTTHHQDNHNTNINTHDHTNNTDTHPTQPHQPPATTHKPETTTTPKRNCSRHRANNYTRHYKQDNTNT

SEQ ID NO: 971385 - protein, 112 aa, Homo sapiens
MRVGTKKFFMNVDRYKMVEMLPEKIDLCRVESKMKLVGSMFYPRDGMIDLYQKSGIYWIDRLDLVLPHCQWVYSRTRKLHRGTIAVDLSENQMVVYYAFANIKIEFSSEDIF

SEQ ID NO: 971386 - protein, 321 aa, Homo sapiens
CRGRLAAGSGGTNVGYQGYFSHTSASEPISTSVCCTSSLNVFVKSEDFSLPALYGSRVTTPCRQVAHVKHLSASQKATEGRQDEGPPGAALSQWMQKRSTLALAPPPPHRPEPPADTRHPGAPPTRTSAHTGGAAARPPHPPPVPTAAPPIQRAPPTPPTDRNRAPPSPPTAPRHHPHAPLRSPPRPTRRTARHHLTTADPPQAQLPYTPLPTLGDLTDTTTPTPATHVDAHCTPHAPPGTLAPLRHSTPGPMPTPPLLAPESNLAKPPGTTPNQHAWIPQLVNTTATSRTPTKHQSTTKEPATPESAVTQAPPRTTRHNS

SEQ ID NO: 971387 - protein, 291 aa, Homo sapiens
EYVNLVEDVDTKLNLATKFKCHDVVIDTYRDLKDRQQLASIQAANWYDKWITHEDGRSIDARFSASSHNSMARIYSGIDYLEACLISSSPACAKQSELFSRESCGITSLGPITLAHAARLLLTPDNFRLTLSVHGNIICRLDDLNAPSHETDFSPPGAHLTAGVIPTEGPYWRKISLGCHTVTGPDTDRGMPQPKRKPNDPHHSPPTTPALAPANRNTAPTRTHTEPTGPRHACQRTKTIWKRQNTASTETPHTATTTQTSSHSKTPDSHNTPTHNDTPDNKDRPHNTPQP

SEQ ID NO: 971388 - protein, 163 aa, Homo sapiens
  misc_feature (33)..(33): Xaa can be any naturally occurring amino acid
  misc_feature (115)..(115): Xaa can be any naturally occurring amino acid
MECCVAAIRLLAVGVSASAGTQELRHWRTRLSXERLSAGTRQLSDDTRDSVSRASLLGVSRVDDEVEHVEFTLKTVSLGVRASTRSDARCLLRESSTGAVLSVASVGAVRRSVRXQCASWLCRLRRASSIALGLDRARHLLLITCDERFARWLAAVAACLSSS

SEQ ID NO: 971389 - protein, 258 aa, Homo sapiens
MAPSRKFFAGGNWKMNGRKSGVWGSSSCSSERGKVPGDDRGGLCSPYRPISTSPGQKLDPKMAVSCQNCYKVTNGALTGEIRSWHDQETCGARWSGPGCTSEEKACLRGVTMRLIGQKVAHATGERGLGVIRLLLGEKLDEMGSWHHLKNGRVRAEHKVSRRITGKDPAQGRSLAYEPEWAIGTCSETETSQGGRGSTTEKAARGWVKASAIMMRRLKSTRLRMAAPGTGATGSAVATSPRRLLPGVRPTTGSGSHAK

SEQ ID NO: 971390 - protein, 104 aa, Homo sapiens
TNQGMDEICSRRQSYRVHTMTISNNINKDDIFSTIIICMLQYHSGEHTFSTFYIRVVVEYRVHSCNVIGTRSITMGILNSYSSFTLGKAKFIRRRIAGILTLRQ

SEQ ID NO: 971391 - protein, 108 aa, Homo sapiens
MMNADMDAVDAENQVCTGGRKQDLLSHSVGNSNTHCERSLCKSRCSEGRPSEAKIQKTKFLDNIKKDLMSVRSVPKATDTQKRKRKKGIDTLLFYGMLLIISFFYKLG

SEQ ID NO: 971392 - protein, 476 aa, Homo sapiens
ELGPIRGTAPEWHGRWNAAERSDKMYQVPLPLDRGCGPMRYRNPASPLVSPESTVMLSTLIALHSSAIHLVPAHSTFKGDKQRPHNMMGDAPNIPDPSRCSIRPSDVGECPQTLTMLAVYMASSTATSERTIRNNQYEMSPYQTSHGENNIHIQACNTSHTIDYTDYSGHGIMEQAIKDIETINKYRWTENHSATLAYGWHTHYIDSYTYQYQKGPIHPKYNQKHTLHYPTRWYTICPFQSHIRRDTHLENINTMAHYLLGAGDWDPHKDKNNTEKHEAHETGIRQKIQTHDMEKNQTGRNNNKHDNSERQPPTNQYEAEQSTATHHKQRDTKHRTLAQQRRNNRTHNKTDEHNQEKSQRMNQTNTHNGESNKSQGTEVRTNAQHSRDASDNTHSDTQARNSRRNTQTKRKRARREDKRPHTTRTHKRQPRQTKKKTGEGKRRKDRTRDTNRRTTSNNNGTRKRRDKKHKRRRKTE

SEQ ID NO: 971393 - protein, 51 aa, Homo sapiens
MGAYRKANRNGPVGHRRPPALARGRNQKSARGERGGPLGERHMGNVSHGVH

SEQ ID NO: 971394 - protein, 255 aa, Homo sapiens
  misc_feature (43)..(43): Xaa can be any naturally occurring amino acid
MSEETAGHGHQARVGHSSPNLTKTPAAAQPDAFRDNNTPDWDXPGDATKQRALLEQSGDSQSEDLAKYPTLRTPRDTGVHYNTHHSHHNQLINNTTTRHEPTQPPQTNHTTTKQLTHKPPLTNHPIATHLPTNHTTHRYTHSNPDVRIIDQPTSHSYSSNTHRARRLLHDIVLHYTLHRHFYTAGVVQYEKQETQDLTRTILTVRTHCSVQERQAAEYGVTSYDRQAYGSLACRSCLSQSLTDGRRCVPASRIAR

SEQ ID NO: 971395 - protein, 76 aa, Homo sapiens
MDTMGYHVLWQYCRGIESNKQALTSTHSTHVGVQSYSRANKGVWNKNIACLACLETRQADHANTTTKREKQARNHT

SEQ ID NO: 971396 - protein, 347 aa, Homo sapiens
CNPSTWNIKVGRSLEPRRAKITQLYSSLDDRVRPGSPKKKKKKNKKKHLGPAAPCGPSQESPLLRTPFRGGAARAHGRGRGKTGPESWFPEEKFRAREQSGLGFSHPLKNAPGGNRTAFGTHHPKEGRDLGRRAIKGGLTTQAARLHKASGLGISQNITPPQGRGDTPQQRRQQEVEQEQQATNSREDTTHSATQHHTKQQARRTHNNEVATDKNTSVRPQASNTERQRTNETRRAPTTAQRASRQTRNARTEANTQQHKTERHTRDKRRDTQRRQHAVNNEYKDRSTTEAQDSESHNNIEPHRARRNTKHQPEHATQEHNDRDAKQELDSNSSRDRTETPSRPTDD

SEQ ID NO: 971397 - protein, 315 aa, Homo sapiens
MFYPSRHRGTLLEDHAYSKSCVQTLAPTTANRTEGDQEATADRNATQHWCEHPGLSRKQRAWLGEQWRRSPKRNSRTQLLGPFGRHAKVKAPGQHHLWAWEAHKGKAIDALGCVGSSDYRTVVLPLSEALGLGLCLCTRRPWLICYTHWGAYPFLNWGDFHPKRGGTHGSQRKLGGPSELKFPTLGNNETFVQHQLCGGRYPTHPWLAKLSRQKQRHQGGRLFMGIKTDLGVRRNALNPMRKPKDATKEEDEVTALEETPGPGNLKGEVRGHMEPYGAPRKRRSRGEPRYSRHHSAPDTQGGTRGTQNLGHIKTG

SEQ ID NO: 971398 - protein, 496 aa, Homo sapiens
  misc_feature (176)..(176): Xaa can be any naturally occurring amino acid
  misc_feature (201)..(201): Xaa can be any naturally occurring amino acid
MMADSCQETSRARRHGPTKSPKERSHRLTNNRLTINFATVAAGSDWVSVACSFNDLTEAYTTVQATTYIDKAYLCNLNQRHLFHTDELELHNFRMLERGQPKSTLENQDSDPVPQVVQHGTRLHTDYRTLTCCPATDATHRAHASLVPWTMQGTPFALSVLYTLTHNVLDYRVLHXEAYTEVLATFRCTTSTAHKPLANTXLGGSEPQLRTNVPLGTRNINPRRTYGFCTPFDNSSFIARSCAPRPPCCAAPKSSPVSCNLRALRPRLRTAALTTPVGALNSAWLGPTQQRPVCYASGHDVRPTALRRTLCCSATGRAHAPWCPPLPLRAAQQPFSMRGHSSGRTTLPTISRAGHQHPRVTSRGARPPTLTYLTRRQQLPRTEQPNTNLFHTPPPQFFTHHPINQATWAPHAARPLYSPAPASLSHAQRTTRLLRARLEQHATTHSYEAPTNLTACASPTERNTTSTQHATPPSAPYNATTIVAEPSPAGLYNAGA

SEQ ID NO: 971399 - protein, 101 aa, Homo sapiens
ETIRIRRRKCPNGRTYLTLYFWDVERTNGTPAHVEHLGTTVMDEETHCNTTHHEVDKNRNGHAVQTGACRYGSSTWTIWFWRHANLHTGIDFLSSNSINKI

SEQ ID NO: 971400 - protein, 468 aa, Homo sapiens
MEISQKRDKCREAQEHSISHSPVTLGMSHAQTDNLVDTLVKASSDSRGQLRQEAHLGILSPRCVEPNRVMYCHITEAPARGLRRTIDKRLLAKKRKMTFNLQVSRPLPGVTPFLIHFHRWRTPRWVNLGTRKWVWPHPRKRGRVCQTGNSGFPFGCSLRWSLHGPNGPRAWASSGFMRNTPLKTPPRRSQKGNKKAGGRRIFRHSKPPHKTGATPAPAESKFPFPPSDKDHSLVDPCGEPFQKWSLPHAQRALGPVKAPQYVVAIRTDGECYPLLREMRYNTIKMPPLGSIFLTSGQKIICGGRMAQVGQVGLFRRKDTILGDMSSDTAAIAGTTRGIDHVVQLKSNRVIHRHTRLGTNGTCTYGNTLMNGAPKPGRSTPTGSDPCGHATRGKTTKGLTPGNNGRSHTQQQPRNHTADVCDDRQHPPAVQSARTPPAARSDQHDDTHQERAGGETKTHNSPTSSRAAM

SEQ ID NO: 971401 - protein, 342 aa, Homo sapiens
ELADRVSRVWQRTGTDAHGTTKKDKRRDHTNTHKHNTQKEAHDAQNTTLTQTTTITPTPHNHTQTTKQHHTTRRDNTNIQRGKKKKQGEHTLIDISAREEDNGTNTGIEDRDKYPGSTDGEISHTTQPRILSTRQERHNSARAQQLREQRLTAERTDPEDNQHMKKHHYHQTHKEHNNHHKDYGSMHNTREERDEDDDRRTKVPNESELKMKMNKSSTTTKTSRHRATKKKERRGKTARETKRRTEKSETDQHANRGEKKKNDNSRVRNKPHNQQRTLNAPNRLKIKPKPLTGATHKRGREHITPSTRRDDAGATGEHSLPQRLQHTINTDTTNDTTQNGQS

SEQ ID NO: 971402 - protein, 299 aa, Homo sapiens
MPPHRLPSGTNPRTAITTPTVAQSTRVLNTWYRHSHIHLILITASPSHHHSTFSVCLSNWNSLERTRPYYGLFRTSAGNTRFPLNTYSYSRRQTTTLRLHRPLGTRGHRYTTLAAFGPPPPPPTLNPTHSHPIRHRNRPGQITPQMPLPKGLPRPSTPLPAHTPPTTARHTRTPAAHAVTATHRARHPALLKKKHQPSPQPAHTTHATHRCRTRPRGPHSKRPRTTTDRPLPAYTQTRPRNNTKRRNAHYCGHTHQPQNWPAEKKTTNNDNKIKPGHERNKRAHTTAMAPTTHQNDAHT

SEQ ID NO: 971403 - protein, 71 aa, Homo sapiens
PLPGAKRFGVSFLCRGDEWNIMMTILSEERKRGLDAVYNSKVGLVIHLVTESNVVFESVFSKMISNRCISV

SEQ ID NO: 971404 - protein, 102 aa, Homo sapiens
MHSRRRIPLVHRMTRCSCIWQDILTALTIIKSRWVSDQTDMPKSPKSYHGKICITAISSQSITRTYSGTHGAYSLLLSIRIISSFNRNNPSIHISSWHGKIK

SEQ ID NO: 971405 - protein, 152 aa, Homo sapiens
FCFRLRYHVVVCVLQEAGSVLLPHVCFKNTVLTSLNYYETKFTTSDERRPIKIHSLIPAFLSSCGTNESPMNITMQTCLPMTPSYQCYAALLNIAANSPIRKLTLSATTIGILSYRSQSTHRQCAPRPSDPYSPISDPPSATLYEPSDKLQH

SEQ ID NO: 971406 - protein, 369 aa, Homo sapiens
QEAAIVGYCDAKYVWAATAGGVFQQHYSQLEIDYDATENDREGLLYQPVSTLGREEMLSVSEHSSITSLADLHQLDTPGHTELTGCGEPHTTTLWHARATTPWLARNSGSLRSLGATRATDAPTANAATKPSTRTRQTANSLHTSAILTNPGTLATRSLNWLLQGQRHHSSPPLRNPFSKTMGSFSSSTSPTCPLTPLTGGYAANLAINPSAPLGASATAAKPPFKPFYTATCLAPHQTLYYISLKHIGVSPLRQLFPPLSVYTVDPPQHHIGRTISPTFSFFALTTWGLFNNTHATQPMGHKSERHKQHARRTTRHQPPLSKHYTLWGGDSKHRTFITSSLVRGSPARRHTHDQHVTNIHYVGTTSYS

SEQ ID NO: 971407 - protein, 104 aa, Homo sapiens
MQCFVWKKYPRGHRKNQNISMGTDHWPDTMISTNIQCCVGNIDLTLHANYTSPASCRYRHIELIQRRFIDSLQIGRQTRVAIGPEKLLHSTHTVASQKISPHRA

SEQ ID NO: 971408 - protein, 99 aa, Homo sapiens
MSPTKPQSISGPNKEQHITKTELATDRIIAADTETPRPPPRPALHIGAPLNTTVGPNTPRPRIVTQHNKPPSGSNRPRIRCRHTIVPRPPSENTRPRRP

SEQ ID NO: 971409 - protein, 69 aa, Homo sapiens
IEDACHEDEYNHSLHGQCTEPEITQRHSDTIEEQAVFYYYRHNGEKTTHKLTKEHKLGTKARHNHTTLV

SEQ ID NO: 971410 - protein, 314 aa, Homo sapiens
MLLVEYIPAMTSTFRILMPSGFVARTLPNTEFPPRLAWLMPILGWGPHARYIRSCKSRNTDYGPVRTDPFHTPVRAHYRRTLASKKLHALREANVYLLIHLWHDISQERMSITPESDTTNATSAKLMRIDCPSIYSVRSHKVNKGERINCEGSLCPELLSLPSGLPRNEYTTSRRYLIYAESEPSTIDGQAMWSLYPRRRLAIMVGGKTSNRLVIASVIPYQYVVYLITILPSQKNKISIGEMATLKPETASLWMHPGTLAPADCWPQDPFVDFLLAQGWWGAGACMCIEHADPAARIPLAANRPLSRRHAMST

SEQ ID NO: 971411 - protein, 118 aa, Homo sapiens
MRTRSTRRPEDHREDKHMADQDAETDSGNTQQHEQNTPKWVEKRQAHGHKQTKEQNQEKADQNTRRKHTQEQNSYISETNVTKTEENKHKTGRTKDNKKINKGHHKQQQAAKRENNNN

SEQ ID NO: 971412 - protein, 118 aa, Homo sapiens
HLGDFNLTEPLEPKKKKKKKKKNTGSGAPLGPAERERLFSRDTTSRCGARGGPPVGSRREHGGPKARVFPRGRHRGARNEGGGEFSSPDIKKGPGGQTAERVLVEPKSPEGRAPRRPH

SEQ ID NO: 971413 - protein, 67 aa, Homo sapiens
MERTGSTSTPIISDQARDTMAVERMEPKKIHAHANKRSHTHEPHSEHTCRDKTERDATTTQATRQPT

SEQ ID NO: 971414 - protein, 90 aa, Homo sapiens
VVADGGYTGTAERGPVHRRLRAMNLFRIHSDAVMVWCRVIIFIDVADDRYMTSDAEHSTSRRFSKEGKCDEVDEYGGIFGGSLTRKPSTR

SEQ ID NO: 971415 - protein, 152 aa, Homo sapiens
RHALISAGNMICSVEVVEGMSALTIKATKVHNKHARTRSQHCRAKGLVRMRTMSLEQDSRRGGRTLPESESSLCDPRGGNRHHRERRFRGNLCKTGRKGGQYPNLAGRLAGDLRRERVYSRNPSPYRPDHHTLDETSPCCPVRALFRSAYVQ

SEQ ID NO: 971416 - protein, 295 aa, Homo sapiens
SARTPAAPGSQAAAPCARARGSVAVGGGDVRFAGVLGSGTAAGLRRSAARGTAAHGARVLGCPTPGSRSLGFLQPCDMTGQVRALACHHVPGQPWASSCALQRPLDVPTGAYTSWSPILETTYLEIMGARNKPCDPHSSTHRQVPAQPGWHRMTASSTAWHMHFPLGALYETSRRHQPGLPADQGTWPSHLTLRIHKPTSAEPTILLSCHPRMPTPDCPGTLPPHASENRVSSRTGPGDTDPDTIAQSEYPATEHRRTRNHSHNPNSNTDAQYRIRAHRQRYAAPSHQTNNPRSP

SEQ ID NO: 971417 - protein, 578 aa, Homo sapiens
MLRGCFSAQSDASFYSSAPAVPLLTVTLRCRPPRLERIIDCDTGTTAALLQCPQQLTSSLSRSAAHPYTRLRNHTALYSTLSTRAWHYTCTAHTLHATRGSYSLFYTQNPRSTLSNRGPLAWRHHAHLHGVWHNHLQPPQHPPRKTATPAHFYPHKAPTPPQTLLTHRLNTNPCGPHPFSGHQAPGCAGITQRPTYNLSSIYSPPNMAEQKTTSTGKTNLTNTPPSAHGPGGSSFSTHGGYCHTTPSLAASPHGGRPKAMRDLTLPNALAQTQRHETTPYPPHAPRTGATHEHATWPTAHRPHAHRNLDTQQPRDTAQRRHLASANQRASPSYNLYLHFPSGNTQRPRASPCSRLPMLHAGLGTLHRPTPGPSPNPPTTHTHGYTTTPEPHRPAPATRHMNLQPDTPTSTLPPPSRNRPAPAPHPAQPPRLPPHPTPPRTSTSTPPRPHPTPTPPPSHANSLPHPNRHYPPTTRQHHPHATPTALHTPHATRGHHTATSHHRPAHRLHTPPTHPHTDHTATNHAHLSLTRQHHTDTPDTPIPTNPTQPSTTNTSATDQRTPSATHTPTKHNLNTTTHA

SEQ ID NO: 971418 - protein, 255 aa, Homo sapiens
MSSLNCVRRIPTGRVGSAWSMHWSACSTLRGLPYSLRIVFWASRSTCDDVAREGVSHFVPVDRHVRIKRGGLTSVSCDDAKWRDDAAAHSSQEQSKEVQPAHEWGTMRACRGKVAVALWPEYILNDAWGSSMAGSARRDPHSLETSLGISTILQSRKCRDPAIWGDQLNKPAERGGQRRWKKPPKINATGIQALRQNNERLRKKGMQATTPRSLKAKAAPKNRGQKKESGRPNYLRQKDEEQDPTEVHTVQTETV

SEQ ID NO: 971419 - protein, 112 aa, Homo sapiens
AARGSAGRMKVALYAAAVRPRSTLPSPALIERSYPGAQELAEEALTGWPEAEGMVTGCCGCSGTSWCVMRIPLREASHAYTTLGSGVHGELSSRAVRVKKPTGKVCALDDSF

SEQ ID NO: 971420 - protein, 413 aa, Homo sapiens
MTLTLFSPDLPRRPRQVIPIDQPLKAPRPAHQARSDISYSPYTNTSDPSLTNLGGRPLHHSYLVQSVITRHISHPVPPVHITRASNSSNSVQPHAKARKSTYLVCTIHIGPTTHTFAVNIHNPCNIRHETPQRNATWHKHTMSINTHHKIRKQEGHDRYQCQQLTYTECKHKPHNVRPAQVLTSEINAHKTVQCDSQHQTSRNRQPKTELKHCQNTSSRPHKTETGTQADRRDAERKIANDTQNVSTEDDRRDLSEERDLVSDRQAQDDDNTTRYTTEHSKTSTHEASYSQDNTRYNQLSTHLTSDTLSQASSTPPQKQAKTQEGKTHKTKGREMKPQHHHTTEQNRKTPNTERNTPKRATPTPQTHTPSTQKGNITHISAARPRISEEHSQQKEGKNSTQSTRTENNTENST

SEQ ID NO: 971421 - protein, 131 aa, Homo sapiens
  misc_feature (4)..(4): Xaa can be any naturally occurring amino acid
  misc_feature (34)..(34): Xaa can be any naturally occurring amino acid
MRSXPPTSHVTGTSPIDYSDQDLEVQDQEYAHSXFYLVQHLRLPRPSSRFGVKLGTARYLDVKLATGGLIWGLLAFLITSLWRNASLLNYESLTPVAILSVAGETAHGTSTSGQQVRLCDWLSQDNGNAYA

SEQ ID NO: 971422 - protein, 166 aa, Homo sapiens
GKAGIRSDARHQVGRCVKEHEDQCPVEEIISLLPAHEGIRDHVISSVGASLKDEVWKIMPVAERRTPVAWPAATRFQGAFVCAMRGTTIGHVGVVRCKVAPRGSFGQRQIRVGGHSSVAKAPPIRPRAQEAYVGGHTDSGKAPKKFVPFGKGVGPGPGFEGYEVVE

SEQ ID NO: 971423 - protein, 192 aa, Homo sapiens
RPRAKAGRLKKCIRRVMIMSPARDPLLSRGTNQACVCRHSRIAHEGNASRKQSFHTNNFTTLRWDRAGSFPDQCCLPGVQLKLASLQFHFGACGQATVRVWMGSVRMAVGTGVGSLMHRLCQEAGLSKQEFFSYAILGLRPWSEAMGHIRFDRSASSYLFRHVRLQWGVTGRVVLHASSHTHSRCLAMLLRL

SEQ ID NO: 971424 - protein, 39 aa, Homo sapiens
MREKCSKVAEGGKGWGGRTVREIKNPVSDTGGGPGRKSR

SEQ ID NO: 971425 - protein, 113 aa, Homo sapiens
  misc_feature (98)..(98): Xaa can be any naturally occurring amino acid
SGLGARSSFLRKVKGSRKVLCKLSLEGDRLYIPKVRYGSVRKPDIVTVDAERDALNIGNSQSETKGGGMRSSVVRTFGASRQASATEDEGYGLCAYPXERYQIRQLAIRLLKV

SEQ ID NO: 971426 - protein, 286 aa, Homo sapiens
MCPINIYIIICLYLYYLFVRKREASNRGTPGAGSSGGKAHKGIKNNTHTSRRENTPRLLNDTRTEPETNNKNASTNEQTKQRMHEKKHTTERHQLTPKNDGARYNNRKRADEENENTTPKLRTHTDAGETHAKQSGPDTTREGLREQTHKPKQQRSLKRRTQNKQEQIMATQEKAEKQERTADGTRHRTGAKPKPGSYACPQQRETRKEPTASAQPRKTLCETAQPPPDRTTKAAGDKQHRQQKQTRIRPHRTAGDQKTHNQGRKTTPKEQRAHRPTGPYLHSNQP

SEQ ID NO: 971427 - protein, 78 aa, Homo sapiens
MNDTVTIRTRKFMSNRLLQRKQMVIDVLHPGKATVPKTEIREKLARNVARPHPDVILVFGFRTRFCVCEHRTKLAYGS

SEQ ID NO: 971428 - protein, 130 aa, Homo sapiens
MSWNIEKYFSVSLQNMMSAKCQGFTIYIFLTYNVVPFFHNGSYHEHIEVSLQDTRMSCTGGDLKPTRWKVNHCVLQKRAAGMMSPSQSTQVYSCRPGSGHHPNRMQTRLGHTVRAPHYTDANQTSRNHTN

SEQ ID NO: 971429 - protein, 48 aa, Homo sapiens
  misc_feature (45)..(45): Xaa can be any naturally occurring amino acid
MASTIEPKSYLRVDSKLGAVDRSCSYSAILAPPLYWRVLNRTATXVSS

SEQ ID NO: 971430 - protein, 123 aa, Homo sapiens
MWQGTVEFRGQTNWGGDKNTWDNLRRDHSCCIRVNVPILGPRITSHKPSDNVGRCGHPPHISGGASLACQGKNEALLFVRHPIHSRMSWISQQPSLMQTVFHTKEYAIRLLTHLTQVFIAGIR

SEQ ID NO: 971431 - protein, 72 aa, Homo sapiens
  misc_feature (9)..(9): Xaa can be any naturally occurring amino acid
KVHVITTLXSSYYWPELNVRYTLTHFMVRNITNRELRGMILSVSDGYLVRPEHRNQSRNSNQYIDNIINITL

SEQ ID NO: 971432 - protein, 201 aa, Homo sapiens
MWAGSLETRPIQRTTAVIGKHEANRPRGDTQAPRGRPHVAGTYIFRPTWLATPRGPEPDVGRSRWGTSYKVHKPAWTHHQGMRCNRQQKYPKYPFGDKRPRARTRKRHRTEAHSLWCKQRADKADGTYIETPERCACASAQAFPRGPPSTDIPATGTAAQETREVIQAEICTRAGAPAHSAPTCRHTTGIGDRAERDIKRN

SEQ ID NO: 971433 - protein, 99 aa, Homo sapiens
MEHRALGKSHRYLATFGDLPKGIFSRASERRINRGAYGHSWFRASGEVSRVPFRNWGTGARKFGSHRRVPITTLSRVNSVGLPLRGPTTLSGSKSETVL

SEQ ID NO: 971434 - protein, 144 aa, Homo sapiens
MAGGGGAHNPTTNEGGNPYYPIYRKTSYSPLEFLVQHKPQPMCTPHPFVSPNTFWEDDKPLLFVRHLRGGTVLVRFRPRKKKIGPPPRNMVPFNYTGLPGGAEGSPHARFSDNQVADHRGGGNQEAAEGDAPIGVFVASTPVVL

SEQ ID NO: 971435 - protein, 155 aa, Homo sapiens
MQPITETSTHCRVGCAADAEITEKRNMMLACTQLHTHNCHTTTGFHENRGIIVLKNSLHESYIVLTDWNISSDALFYNSVRSTRHNISYSMFMKSATEGSPPDEVSIQHDWIRLAPMKVTLFSHSSIAPVNYYPVTSCEVNLGRLIEAVTLAIVV

SEQ ID NO: 971436 - protein, 104 aa, Homo sapiens
MDIGAVGILLTNKKSARGAQRGVSGKQNLPGGELLGGAPDKGDLLINTGESPERRLRNNKNFGPPTRGEEYDARYIAVKQLTANIDADRGDRTTRTGTRENEQE

SEQ ID NO: 971437 - protein, 268 aa, Homo sapiens
MVCSHNLRMGPPETPIESPTLVPRADPITSHPDKTEQTTSHETRKQTRPTAWQAQGAHLDGKRNCVDKDTERKAGSTTKQADEAALDRRKRFRFVPVKKAQRAKDTYLHGIVVEEGLKNNDITKAQRGKQRMKSERCVARKPREKGVKGQISLGEGRKSNLYANPCINKGTQYGLGEAQNSTAWNQKHKWHKPTGQSCTKHKPWGDDRAADAPRTLTSREHAQAHIGARSRPILGTPNTQQDLVEALAPHNANPNRGAPNNEEHAPGS

SEQ ID NO: 971438 - protein, 109 aa, Homo sapiens
RRSIHPSRSTCRDSLTAQLSVSLPVAANERKPVEGVTIANNDHIHYAGRPGARNVILSSCGRLSTHRQEVLFHPNLMMRAQSNMPLLVATEFEVLSTRTCHDHALSSTI

SEQ ID NO: 971439 - protein, 230 aa, Homo sapiens
MVFKLLTWSSARLGLPKCWDYRNEARRAMGPWTMVIAGTRVCASGAPQGWQCTQRHRWLNGEGSRPSLAQSKYWRSDHPRKWGLTGWVHTPGPGQIAEVPTPPDGGSHTSVFPNEESKTRGLQHDPCQPWVPTGGRKYTAHTAMDPATLTELHHTGAQTNVPGKCHPDNGLNDGPKHTTLRPAPTTTLRHTVSTVAHEHHNKRDTDTPPPDTSHTATTRRHRNKQTHPES

SEQ ID NO: 971440 - protein, 429 aa, Homo sapiens
QLSRILPKRHESAAEITDLAWRLASSSTDSAGIWYTSGHLRHQTCCRGLYEWTGTVSVHTHAPRIQERLNAERALTVFTSIIGRVLTFHHPPCCAKSGSGHTMCSEVREKAAAFRGGVGCSRSGWAIDSAVGWVKCWATNAQSLTCAEDLMDKSLNATYELCVAAFVARIEGAKRLPVRVLSALVATLNVSVRGVVGRIKLAENKAHTIPTSERGVPGFALETLRAHSVGRTQIERQLYRDPFPRGHVRRGRDKGEKERPGAQRGPFLAPFYERLGGFRNNLPNYLGRLRYDAVLWVDPPKEPFQRLPPSCLGGQTYPVMKTNVPKRRSGENTTGSTTDQRRTRGEDTHGALKPRNDTFGQDEHEAGALGPKTRPKSPQSAGNPPRSAGNPLGRRHGYELGAATAITTRGQPTDPPALGGNTGAQNNFH

SEQ ID NO: 971441 - protein, 189 aa, Homo sapiens
LGLPTLEPAGCCTVNAVPACHNCCCAECRLCLRPWLRWSLTVCLLWHPLEPVPPRDACAGTPVCPAAPHALTLRVALDPVPGRQSTATLEAQQPELTGDTMAWHSMAATMGHKEPRTTKSNKKENTTTRSIGEDHTEHHNTEKPSTITKKETDRDKTRNDPQKLHTTLEKAKQDNHKKTDARTHTTPTE

SEQ ID NO: 971442 - protein, 252 aa, Homo sapiens
MLLRPNVWVLVHKAEKENNLVDICIPDVVVYGSYSLWRLEGSVRRQRRTKHLREQQCVPSAAGPQLPKTCIRADARIVEAPSREVRVGTWRRGVGQSSSLVFSGMHLPGPKGVAYLTRFHEFMPMVTVDLTKGDALYFCSLKYGGDSLWLKYVFQRMHHNILTMRINYLCRPCPVLLKHKTENTQQGKIHTEQKGNSSGGSDLPFQRCLARWRAPITFRSLQPQIWAGSWLQPRLGKYNVPTCPPIISPGDP

SEQ ID NO: 971443 - protein, 156 aa, Homo sapiens
MLAFIPVLTKTNKPSVATEAWQSSIVLTQATASIILLIAIPLQASSTSSGPSDTSNQVRSQVEVASVSVTKSVSGPKPSKQRKDIGPPFFTFLELSPAGYPKGDPVVSIPALAVLSSPVTTHNLSAPESSKLSYTQEVSSTFRYNRYQPVSSVNVS

SEQ ID NO: 971444 - protein, 119 aa, Homo sapiens
MAKPESTGSIKDGAFYLFLAVPYSSHYTELPRTTAHQSKTNCVAPRPKRSYQNGAGPSRETRIRPDDRLPARPHQTRARAPPGREGIKQRRSGGTKRDDAAASADVHDTLHITKSTPRR

SEQ ID NO: 971445 - protein, 114 aa, Homo sapiens
MGSELDSLSHIVLPASNVNCSDDYTLVVGHGVESRLKEPGTESAVAKTVTVKKQDNKPRGTSAGASVAEPKVVRMDYDTGRIADFKLNRSPGGKGRPGQSKEIRGGDDHKKSPK

SEQ ID NO: 971446 - protein, 251 aa, Homo sapiens
EPRAPKLHKVIGAQGASMPMCELVLLHTMTLPGPAGELMIRLPWETSRRNGNGGFLAAGMGETFVGEGDMGQDLGVLQRGIYVLAGSPGLVDRCPSSALSVAARQCALRAWLRYPGCMWQAGLSRVSHLYVMGLASCHEHCADPVSNEDGLIPLEIRFLQNPDAAQGFVELQHSSPPSRRFYKNEGGTWSEEKVIQVPPKKVKGWLLPEMPGLITDIRALPGRPFPLLHATGLHGDLREYDHLLTQETPVH

SEQ ID NO: 971447 - protein, 104 aa, Homo sapiens
IRKKEDGTKGLSRCFMVFSVLLLKLELNLQLLELCRNTNRKQAAAKFYSFWVLKKQQAIELTQEEPYSDIIATPGPRFHIILRGLEPYYKHSVDSLVLTNCPHV

SEQ ID NO: 971448 - protein, 41 aa, Homo sapiens
MWSNEASGSGSLVFKYKIDYDSLLESSQVNCKMKIVETSDG

SEQ ID NO: 971449 - protein, 43 aa, Homo sapiens
MEGGVPHITRGRTHTHESTVTSDNGADERDNWEQLHDDCYQTP

SEQ ID NO: 971450 - protein, 140 aa, Homo sapiens
LKSVEHTAALYMAHRPTHLIVPLKRSVEIGARYIPYRQPALSPQSYRKKNRNTQDDKNNDSGSECPMRRILKPVSVRGTRRARGVALHWVFSGLLKISRVLPRGAFLSTVHKTDTGANTANVSIVLVRSGVCGVALFVGD

SEQ ID NO: 971451 - protein, 106 aa, Homo sapiens
GCCRTVAPRRRVARHVSAIPCGHFLPRADPQCLPAMLEERAVSKFICVLVPVKAKLFSTKFHHAMHLLVTARAIVIALYFLNRVLTNGPWFCSRLGPDRISNKETP

SEQ ID NO: 971452 - protein, 630 aa, Homo sapiens
MFSVCLFICFIFLVCILFIIDLNSNYYFQNIHTEQRDRRSAVRTRRRTEEISDSTDRHRKNTDRRDGGAAPEERITRQQPQRDARETRDQRQHDITDDLRCATRSNYLAKHKNRNTETKQTLHDDATKIAKHTRRDEDSNTPKQLCCNHTSHSNTAQHSEPRYNSTKQRKKKHIAHEAQKQNRPHTKEQTRRDAKRDHTHKDQRQRTQQEHNRPKRNTDDKTAKHNTRTQNTLATAADAEAKKETTTKNTARDTLTDSQKQPPQRNLDQLSKQHTHSTQTPHNSERRPNKISAHQAIETPTTHTNQPTQMRANIRTTQPDRAPHERRHPKPKHTQNRTSTTTKPPQNIYALTIKPTQNPYTKEPQPRRPHDGHHRPYTNTTTDDHNYKPGTTPTFGPSQKHSTGAQNKKKRMRTENQQHKKTTHNAQTHGDADQKERVENQYTTKGNPTHTEAPTHHNTYTNTHARHHRRNRTERQTKQSSRTDKHRNRTHCRVKNKTNTNQQQNHTAPSTTPEDTTTQKQNSPSTHTQQHQSEYPQHHARPRHSKQIKQLTTDDKLTKGRQSTNSPHTERTNDERPNQPTHARTTTTYTQKTRKEVIEDTQANDSKTALPIKRTDHSTSNDTAQPHTTI

SEQ ID NO: 971453 - protein, 434 aa, Homo sapiens
MGHQGEVTIRTFHCTLRPTRARVWKPMDASIGTPRPMEAMELTTNSIYTSGPYKTVTIGDSTHLETSPSKRTRDIYRHIRRRPRTFMTDRFLGVVGIKKFEEDSCRELTFESALLASVNPYTTRCLNGTQSGESVGIKQCSYDDYQRYTSVIKKEVNEIIFGGQENVHNESETRKYDYMTEHVVTNSAQTYSEHSNTLYAVARQKSNQHDVEDREIEQARIVRSRTNSIKEPAREDTKTQNQGAYHYTITAESGPEHQKTTHETSPHTYEETLEWVTATQNPHRNKRNHQQSSRHSQRTMDKYQTMTVEQLYSTIRQPVAKQHHRCARRAEPDQPRTEHTETDQRHHDTQHNTNDHRLNSSNHRRYAIEAQQTPLENEGADGDREHATQRARTQIDKPVRHSSNEPAQDEPQTTDQIDRTRRSDRQQKTSTSTA

SEQ ID NO: 971454 - protein, 190 aa, Homo sapiens
MDEAHIDQVKRKALCEEIDRESGNEEASEHQEVDGNPCLVTLGYCVVSEERRTNTTRTIDAQDLIGLGHSRYHLVPILFPGLDARDAGLSDVRMASKLWALRSIGMRWCDQLCMAESCSGVYEPGSLSLGSTGPGKAGAARGVSPNSVLTSETQSCLDEFGSKRAKLAFRQTVQGSTRTVRERQFKFNPP

SEQ ID NO: 971455 - protein, 217 aa, Homo sapiens
MHPGIEIRAWSSEGSRYSFREDACRTPDGTSERGRIDTKEDTGHLAVGPPRWLTGAGMYLVICHSLCILQGALVVHDRLSLYLGRREPSLAVLTGGDEAVKADRECESLTDMHAYVVLPRDVAPRGARSWVSPARTYRNSGPQEDNRTKTPGAGAQSGPQSPWPLGYEDRAELRMSSPSPLTASSQEGGSPWSPVCEPRFLNRSAGSYTLPFMFDLG

SEQ ID NO: 971456 - protein, 103 aa, Homo sapiens
MRIICTLKAEVPVSRDHTTALQPQRQSETMSQKKKKKKFGGHTGDFPSFQGPPLKFGFSRGETVLFNRGGTWGTFGLNSNGHRRWNIPSMEETHIALWFPIPD

SEQ ID NO: 971457 - protein, 458 aa, Homo sapiens
MCHPQSGQHFQLQQFSGHMFWCTAVCALSHSLHIASTFPTQDTSDVKFSSDRSSLIYLKHIPIVHVHNKCQHFTCLHNTFCTIHIFTIARYRLHTFVTATGYSLVVQHTILQHNFHPRIISTRAPTHYNCISPCIHISRHKGFQLSQPQALSKLHTSWDSHLVVTIGNGLTGGNIATPTHVPTGPLLTSQATGRWFTTPLAHTTDGLLTLTEVPLSSLLLNPPTIGPIVDPQTYPFGYYQAACHFWATESRDATAFYTLVAAIHRAPKVVRYGLQGHRTKHMDPQTRENKTMLRMGNSSATDPDQTSARTQPRPPQQHTTHTNVGTRKVDTQPGSHHSVEQHHKAQQMCKHSPQSARREKSTAKKNTEGGARHELDPRKKQPATAEKANNRRQRVNEQGTEQHRNNGATNAAMNGETKIERTNDHTKREKTRKDDRTEGHTTRLTRESTIHDGRVMKQ

SEQ ID NO: 971458 - protein, 83 aa, Homo sapiens
CPPERGTRCAPGLALPGRSPRVPLPGRWPSPRVPVPRSRARLFSAVGAREMAPSRQVLASRAAALPRMNGDFSAVDVQEECVW

SEQ ID NO: 971459 - protein, 360 aa, Homo sapiens
CSGFFTFAGFASPGQHSAFNSFTHVNCQVTRLEWHTASVSASSFIIMHTHVLRCPIYMRNFITCTHNCTLLPVCCISTPAASSLPIIAGHKQCTVGTFTTYIHKWGTPQPPFHLHSHRHPSMPIGHSGMVTQAHTILLPHTTIASNHTTLADDIQVGNYCFCLYTMTPPLNQLYKWCRLIDAPSSTPSHNRTTTAVTICFTNNATPSAPACHYYPHLLATTLFPRSWPLLSHQLCSRATVSLTTTRPPFQLVGLYDNQWTPHNWLQAPPIMKLVSNHNHISNTLYAVLLPVITLVPLSTRHHTFSVSASTHGFVSQAPHTYSLVLATQLGEAHWAPQQHNHPDVPNCPHNSHQMPNCTDV

SEQ ID NO: 971460 - protein, 172 aa, Homo sapiens
MTLLPLSEKELISFHDHALIIIIRLSAFLVLYALCLTLTTKLTNTNISDAQEIESRSELILPAIILVLIARPIPDGIRLPKADEVNDPVPYQSIVRVGAPSGTEAYECTRHTAERNLQLLHTSLHEFRRSEATMRFLDVDKSSSTSRIEGPIRHNNYITRRLALMSCPHIQA

SEQ ID NO: 971461 - protein, 77 aa, Homo sapiens
MVNHLLSTYVEKEELGKCYTKGVESKIFKERIYELVKVQRRRYEYGGGEIRRHDNYREGCEEQKVGIREIRYQEIQI

SEQ ID NO: 971462 - protein, 94 aa, Homo sapiens
WHAAKVRAGCIRIEGLRPKLDPGGNETEDAQELNDDLPRITGNFAHLTWRFLSEVYIHSISNSKYVHNDYYEMDGGDITIIEICELHECNAALG

SEQ ID NO: 971463 - protein, 111 aa, Homo sapiens
  misc_feature (77)..(77): Xaa can be any naturally occurring amino acid
IGSPVVALFCLVSLQLSFSCSQLQGAVECGICANSELQGTVLAGSSMQEAGSYYSLMPYEEGETHDLTEEGIATIPXSTLECEILLCWPRLCQDSIRHVTSGGIHPMDKYQ

SEQ ID NO: 971464 - protein, 102 aa, Homo sapiens
MISRDRIDLAVHPAGYLVDNPRVLAVSKESPGGPNIGRRSTTAPTTHVDVHHHSHTHPIHASITCLSHRRAVRNKNRRLDPTLRAACHVSSLPECVTDRLAQ

SEQ ID NO: 971465 - protein, 182 aa, Homo sapiens
SAPNWKRHPSEYRTIEPSLYTYHLQRMRRVLADYSVEIGVSPLHSKTYVCHTSSKAVYLHDNTLMNPPRSQCRIIYVKTPALMDPINTGPFVSAFSNWTLLGAEHMVISSVSYFPVNAPFEYRKSAYLSAESELNPVVSKVIAPPSGIHRRRRITTKGTPTEQPTVSQEQCAVSTKRDKSVF

SEQ ID NO: 971466 - protein, 88 aa, Homo sapiens
MYKRGGYPEDCHDKGWAGYTKRESGVRTAEGAHRRDASREAATPSRKRHTAAGTNGTRNHDNGGEGPREEAAHTRHTAGEHNTRGPRV

SEQ ID NO: 971467 - protein, 179 aa, Homo sapiens
MGVLASSDPSSPTLVACPKVRLRLHNEESSEAERGGYGRAVGSPGEKMQWMLACFPHRVVVVARAEFHSVFWRLLSRWMARPCYWALCVAVDMGQRSFLFFASRPNGRLSGGSSEGRGGSLGWLVNGRVALVPAWAASGFTPAYTRGYGHVCALSLGIFVPANSVWAKRLKWKQLPGSL

SEQ ID NO: 971468 - protein, 571 aa, Homo sapiens
  misc_feature (240)..(240): Xaa can be any naturally occurring amino acid
QPLTAHLAQGSFLYLVAVPRLAPAGPRLPRAGSPLSSHCGTTTTHSPHPTHHLHTPSAATPHTLPLPAPSSHTHAAMPSTHTLTSALAHRATTAWPTPHSHPARAHAPNIATTIRRPPAPPATPTTPPLRPHATPTRLPPNGPHSSRLTPNSPRHRPSRTCLPRPHVPTPAPRHPHTPPPPTPPKPPAPTTTQPPRPPAHHPPPPCLHTRSDTRGTSPLPPNWRTTTHTPHPGMAYPRTXPLEPHHPTGSSPRGNHSSPNTTTHQAAHQPPQPAGPPPQRAQHTPTRRQPPHISPRQHKHTKLPLPSTPGPQRPQRAHTTAHGHHFPPRTNTTTGHTPTDPAQPSTQRTPPTQPPAPGRTPNAHTHPPHTHTPTTGPPRRPPHRTHHTHLRHNIHPTAPTSLTEPLDTHDQAHTSPLTHRGTAAIANTSWAHNNTSPNHATRRDPNHDSKSTHQETTYTYTSASHHSTGHTHNLATTGHTSTTRRHTDTHHERPTQTLTPTATHPKNHTHQRPPTPPGTNHTHAKQPHCTSPTTNPTSRAHTRHEQQLTKPNHITTDAHHSTTHTTHTRTH

SEQ ID NO: 971469 - protein, 127 aa, Homo sapiens
MAFLMLTERRILGYIQLTLRPQRCKPLTGYYNSFADAIKLFTRRAPKNRHIYHHPLHPPPRPLALYQIALLTYGTPPSTRYPNPPWINHQHKVPPYYFREPNFLTVGRNVVKGFWIREDAPITEVGK

SEQ ID NO: 971470 - protein, 261 aa, Homo sapiens
LDWTASACLIEMHKKRYYVSVTKATYESHFRTEFIRPPTPLHIREDELAWLNPTEPDHAIQWDKSMCVEESTGVEIKRLHGQEPSKAPYPLPKKNHSYLARWHKTPKYVYHIGLTPAKLPDFVENNPLVAIANVLHIKCAKQITESALSWSLMEHVFTFTGSRPPTTYSSLIYLREFTTPSHLIHIALLTAEQNPRIMYLQKSTCCDHECCVTSTRGTRKNIVRRHGAVLRTPASGIEPPKQNCGLRRPTALAAPPDRNNP

SEQ ID NO: 971471 - protein, 295 aa, Homo sapiens
MSKRSTTTPKRTNPASSYHSVSLNSFFYCHRLTLTRHVLTVSSLYSQRSPSYSTKPYAMGQYPIIDARRSDSYRLSRHPTDGNKCTKTHTSSTHKDTTLHARVSPVPSLAYRKPIERYLQFNASSTVARTTYTANITARPTYIMPTYSHSASLATITIHTYPLTTTHPHTAPHRLRDYSYTPAAALKPQAPRYHNTTQITPPARPHHPQQTNTDNPTQAQPHARALDRPHKTDPDDQPATTQTNTSSTTKNTQSDANNEHPTRTARHRNHTHNAARKRATSTHKEQTTNRGQSST

SEQ ID NO: 971472 - protein, 66 aa, Homo sapiens
EMTSLDRYRNIRHVVDMCLRGRCTSESVWSTSHAFKRGRSALRAIDMVHNEFDIVPSLFLPVEKLL

SEQ ID NO: 971473 - protein, 140 aa, Homo sapiens
MTCVQQGLGLEARGARIPTPGRPDHSQPVRPPLHARPYGLAPKDPRATESRQPKRDNLHRPDQHCNIHSFEDSGTGQVGEHGRYAHIRTRGSQREKHNAARGKLEEGRRTQVQNRRRKKYQRRGGEAVLETGRVPRLNGS

SEQ ID NO: 971474 - protein, 411 aa, Homo sapiens
  misc_feature (33)..(33): Xaa can be any naturally occurring amino acid
  misc_feature (87)..(87): Xaa can be any naturally occurring amino acid
MACGVLSSRDLGFRPRLYCAATTDALVRVGEVXVVLLEGMTDVSLQSVRAIDVSKHKVASPGKPSFMTCSYAHCWLRTTHADECQSXYDVENMISTENIESTSGPSCGACHCVLTFKDSLSASNHPYGCRSAHSFIMFQVTGSFNYPLRNSACVETRDSLLLLLTIFASDCTKEEYATFNASFAFGRRAVVNCLHYHNPTKGTLAPDHCVPNVVHLSAEGGPMGLKGRTSGWGPLHKGTNFPGTRGGQYGEGAHSHIIARFMEPSLPCGRLRCADSHRCNNIVPELHEISFRILPKSDVYITDTWRIRSANFAFVQVTGLPPIYSRGTPPVCGLVPFLAFPRCAQSENLDVEISLTLCLGRRNYTLGVLTPSYRPLTLLPNLRVGAQLRVCVGPRYATGPLPKPLIEVRHT

SEQ ID NO: 971475 - protein, 150 aa, Homo sapiens
DGALSRSRLHVSSPPVSADQTCKIWRTSNFSLMTELSIKSGNPGESSRGWMWGCAFSGDSQYIVTASSGPNLGPVLVVWRAGQRSGESMGEHQNGWGLAGPSMTVCWASLGPLGHCLVPVVAAWRDPCRPRSRADPPLPGLRQFGPDGPL

SEQ ID NO: 971476 - protein, 235 aa, Homo sapiens
ASSASHLLKKQPKQISCDEWHALWAPMPLYVALGQRKEERKAHLTNQYMQGDGWNESTILARVPILLKSVCRVACSRGWHSSCARESHRLQVQASIFIAPKPVSTDDGPKSDAWGSKVFQGYGRSAIRRSGPRTTLRHLCPNWVVLRPLAGLPLAIHFGESGLSARYRLCYGTLVGLVPTINGLIDSCQLEAFPQSVEKLSATRLVLLLVLPGAVGPYRYRLQCPEPHAAYGSGM

SEQ ID NO: 971477 - protein, 616 aa, Homo sapiens
  misc_feature (263)..(263): Xaa can be any naturally occurring amino acid
  misc_feature (561)..(561): Xaa can be any naturally occurring amino acid
ACALTMYARTEPLRILVVWCRRLDDELYGTLLVSYDLGVPPVFAGLHVSPSKYLCAGSLCRGQAKMYVALERVDATALESCSGSHKGRGHMGGIGLVNHCRALSSGATAPCRRLQSSNVSLAFGYHVEQGGSGIPRENNCSRDSADRLALKCITHVDHELRWNLSQSISDSACWQLAPLQLASKRVHTGLPCGKGLSTGQREVTRLREGISIIWRRGTLPIGKGPPHANKGAASVPVSTAETANMWDREQMGFPERKALSFAXRNPLSRGLVPSGRGGQRHRCSGGATRPGDRTSRRSEERHWETPSLAPGVVRLTGALGVSNGGVSVQPLWTNGKSRFSTHETRKRSFEDAATYERTIRHIHIWLVTYKNSKLGACNTREALFRLHLVQTFDRGYAGAIGGGSFHWEPFERTSYGAPVGVRNSLYKPLRVRTPYGAEASALESGNATDFPIPFRYRRCHGRKLPEHRGGDKVLSSAAVVIFPTQTVFFGKPRVVAEALHEPHFACRSKAGVIHFEHMGERPINSACNRTPHCTGNMRRAIFGHNPRPRAHALQHLCDHQXHEYQWPDETSTEETLRTATRRDNIQRCVRPDETYSDHPTCMTHQHDIHSQRRSTS

SEQ ID NO: 971478 - protein, 104 aa, Homo sapiens
MGDQKKDRVLRSVPHYIAISTNVSPKHKSTHVTVTVRYGKIVPRYVCSAHGFTFAVGVLCEPCDRVRGGHGKELASRDQNILGRWAKPSCNRVGKYITLTCIVL

SEQ ID NO: 971479 - protein, 123 aa, Homo sapiens
MSECLVPLPTSMTSLQWETVDSQAIPEGACAAGTRGGGWVEVSQWWLGWTWDLANESRSDKVTKSMNDAGMKDSTRIVETCLVDANRIWLESEGNISCVSVEVVTCAFGWTGCGTSSEERTST

SEQ ID NO: 971480 - protein, 98 aa, Homo sapiens
MSSKDGYRRKCSKILEDLEDLVMLACLFHGIDSRISWECVVDLELHDRSHGGTTDASYRSSGSLGRDRLDHPCVSVHSVEARGLDVVRIAERRLLAPA

SEQ ID NO: 971481 - protein, 147 aa, Homo sapiens
MNATRCSIKCDEIDVLLIYDHIAERRPLEVNLRDRPFLASVFRRHHDRVLHSGARPTNKGLLTESLRVLSYLVASTWLSGSTHKSLSSAIPAPESMKVNVFELCPTTTQKIKYERCRTYLRVPAQALDTIGRCQYRIGRVYGTIICA

SEQ ID NO: 971482 - protein, 324 aa, Homo sapiens
PPFVAYSVFLIILSFSFLSVCSIFVLFACSNFLSLLRSREAEVAGGWGRAPGRPRSSGPRAVRGGGGSPLCAVPSVDAARGAGCMRPGPSGLWAASSPQDDFTLKEPEGGGEKPVLEIFLGQIPDGQLHGVRVYRGVYVAQSNHSAVQWLEQFQPWLVPNGELYRRNFWTPTWMTDGEWWIAKQGGTRAITDNDMQSMDLRSILTKSGVSTSSSMEYMTLRCRAGNELKNPGLNPAEEDERGNIDTNNRADVVRPRQEIGPRLRHTRRRAGAKTNNHHGRNVLRVSPELLHRCRTSAHWTIAMTTTPGAEHTRTSTQLRPQNKQ

SEQ ID NO: 971483 - protein, 270 aa, Homo sapiens
VDYWRCARSSALSYCAYGTSTGYMVEPVIKYRGFVCVVTKRVLPIEARTESNTTLMLGSDAAAPDVTALRCGYKLDPGAFLRVTLRIELSIGGPGKLERNDDSTRCFWRRRLITASKHFAAVTSIPSKTHSLSVHNWEVNRNGPTRLVREMWNMKEFRSPMGGKGANPWSENCLINRLVHTSTSSNCLLVRSERTIACVGLRLKWAANVEGSWWKEIDRPVVGVRGKRIRGRRNISVSLRRPMKRWFIWDLQRPICPPIAPLDPFGTGCS

SEQ ID NO: 971484 - protein, 162 aa, Homo sapiens
MCRIDDDFPAGLHCSEGWKYAKYLPHSAGRYAVKRFQTKLSVPLCERLTNSMMMHGLIDTAKKLMIVRIVIALFFGSCIHLLTGENPLSAAGVNADSIKRDGFSRGGTPKRNCGSDRGTVEDKVSEYVLPPDACVNRGILDVVDRRIVKAVFRNIKSIVNDW

SEQ ID NO: 971485 - protein, 109 aa, Homo sapiens
  misc_feature (44)..(44): Xaa can be any naturally occurring amino acid
MKYLSTTYIQTRPLVTVMVLLHERRATKKKFKSEQQTLLRMILXGLDARNTHLTVIRTCKQFSHHSTLLNRVWFIVFTLAKCFQRLSPAGLTLNTHFTHQETDTSEINS

SEQ ID NO: 971486 - protein, 31 aa, Homo sapiens
MASALFDVVATHSETIRDIAQTGTHNHNELM

SEQ ID NO: 971487 - protein, 44 aa, Homo sapiens
MVVFTTPVAGPSGKPGLTQRGSRGRPNAARQWVLQLPVGPGPSF

SEQ ID NO: 971488 - protein, 228 aa, Homo sapiens
VCEKTKTERLWSTVVDLQTGKMQCFSTQNPGVGHCHEIDLVLSASPSGVDFPDLQTYMLRPLVRHAIPIKQEWAMGTLPNETDLRSMNSRVSLGIVSTLVVKKSDVEANLVEVWQKLWACFVYIRACLRSSMLMREMPGVVCRQGEGWQHVIAGQVWRYYTVAAEQEVSRGNSRCETDSCQGDCTAPLLLDYDFPPGLLMIGCTVHPERVLHPPPMIGLVVTSKVRCI

SEQ ID NO: 971489 - protein, 150 aa, Homo sapiens
MAHTSTGYWTTTHWNRSSPLSVKSALDCSGHQASQPHGPPYSHRPYHGRNTSAPRLFGRSLHPATPLPQPYPTSVHIIHPSPTPGTLSPQRSHSIAVNPSSKSISQPPHARPRHHEGLTPCAIPNPSLREHPQTHANFPLFYPPHSRRRT

SEQ ID NO: 971490 - protein, 115 aa, Homo sapiens
MVASALQVQLAMVGLYGHVSRLLTPLAVAYVTYLCNLFSRLLEAISAKASFRHSCCRRHRPFSSTFSTYEKNLTCMAIIVLSAFVNCHKTLTSNWDKINKISPLRGSSLTFFSQI

SEQ ID NO: 971491 - protein, 178 aa, Homo sapiens
RKKADLLYRERAVQIVVPLGGPKPLMIAVFVGLVGSPNEGDRLILDVSQWRVASNNSCRLGANVGSRGSFGERNFICGACEQISGKYSHSKDCYSVSRGKIINTFITGVFRGVCDDAKAGNRAGGRRNNMAPMGIFELFSKVFFTSGSDVKINSKSSYDLGYTAAYTSYAPYGTSFVP

SEQ ID NO: 971492 - protein, 254 aa, Homo sapiens
ISTMKVMQFNGYETQEASSPVPPTSSQHTLTSPPGPDVPLTIMNRKLMNTNDLEESRQLTEDDPAASEMPMAPLLMNVHVAERSSPVLADVRRADVLDVNYLVPDEEPRFTGARASLTTAGPCCSFRTHMLQHGHSPHVRVCSGDIFVRCWVYMLYVDKAVSGFTRIRDCPLDHTVCLWSLLEELPPGSFPKCDRPNDCVLIRDWRGWPLRKSPVLGPSWGAPDPAARSQRPSSHTMTLSLLTCFPQAFLKTTH

SEQ ID NO: 971493 - protein, 187 aa, Homo sapiens
MADHYILARFRYCISHILCIIQGDNGGSRVKVATRCKGSKGERYHTIGGKLVEGPRPLSDKDENRSRRDDNKLKHARTQGRIGEADNQSRQEGTNNHRGLAQDENCGECIGGPTDECCMCLDPANGSGGSLSRYLGGPEEEKRAAGPGASGSRSQGSQFRPPSRHPLGEARYPTEVGMLQAEEEQDS

SEQ ID NO: 971494 - protein, 114 aa, Homo sapiens
MGVPQVAFGRHLVWESSGFVGREGPWGGGAEFPLAQVFRSHQDWAELGSSGSLAASCVAVPALFGRGESLRKGVQNSSTHPRELGAIALCCPEVGGRERDRSRGGGVPPHPLVD

SEQ ID NO: 971495 - protein, 107 aa, Homo sapiens
MPFVFCHIGRFGAGQPRGVCRHPVLGAKGAFRTMWIKTLRGRHMWRCLRRKEYLSLIVEGFQRRLYAIFCYLQLLTPFSSTRDVIKDTVLFLPLFVSQKQTGGPWAP

SEQ ID NO: 971496 - protein, 305 aa, Homo sapiens
  misc_feature (143)..(143): Xaa can be any naturally occurring amino acid
RRDLVAMQLVPLYEIVMLYVRGRGMTASSTRLDSVDPAQWLQCSLRAYSGTPQDTWNGHTCRGYLDGLNLGTPSIDLRIVAATAKKRRLPTAARIHRAVRLCWHRVGAEKSLEMIPVVIRSGILSGPYPCQDPFWHHAYFGGXGANDAATRMAWLGDLIVAWGWYSHLPSLGPDISHETDDLAKISRRYMKHGNVQGMTTIGRTWSAEGVLLYVSRKPEGKQTFCAMEDRITQGTACVGPSASKQQNAGDVMGAPSKPQVRWVAGPPSASRSNDLELTNVVSTVKVASQERQKEQTLGGRGALKR

SEQ ID NO: 971497 - protein, 131 aa, Homo sapiens
MGANNRSRFSSCCLGESPACWERDLLKGTDVWIRLWSKAIDSAGYNDGVSGTMGSDTALLSTLKVFTRRDETDILFGPRDALMYIKAIEKRLVDSWRRILNGKAESIWGKVTRAHGNGGMVRAKIPKQSSC

SEQ ID NO: 971498 - protein, 82 aa, Homo sapiens
SLTFMQCNDLTAEEDGHNTERREDPMELECYLNAQTGTVYETATGSVRHTETVLIDEDFSGLRADARQTKEPERFAQASKHD

SEQ ID NO: 971499 - protein, 115 aa, Homo sapiens
PGLDRPEVLRGLQNSSSHLPKMEKSARDPSREWRRLQYPRDIGSCEVAYGSKEQSPDRQRDVFCVFWRTLRHNLAKTRVLVRLVTCRGSIVLHAAVESRRWMAGTIFRRSFLVYG

SEQ ID NO: 971500 - protein, 52 aa, Homo sapiens
MGFSSALFCKHDGQVPWGCSGATPGGGGPCFTKQLPAGLHSPLGLLLLLGVV

SEQ ID NO: 971501 - protein, 107 aa, Homo sapiens
MILTYGMTELHGCDVKKAMTTWHEFLNSMMPLCSRYAWASSLTTPWRLVMSLTTKARPPGASSRREETDGRAELSCGGALTQALDVSVEHDRRVTSNSGCETERVDN

SEQ ID NO: 971502 - protein, 235 aa, Homo sapiens
  misc_feature (33)..(33): Xaa can be any naturally occurring amino acid
MYPTSGNPTYRAWCKPRETTFFCRLRDGNKIGXLGVSGNFKEKRVILTQGAPLVYFRGQSKRLSLEPHLWWLLPFYALKTRLLRGRFSFCVPRLGPMFCGPVVYNSRGGGVGGSLGPLMAPNHRVGGMGLKGVVPQAEPVRGAPYPRCVSPNTPTAEESSLPNNPGGGGQLPKKRGPVEQEPNTECHSEDDSERGSGGEQAPIGTYSRRNAEESPVKSRTESSDQSKDCTTSADE

SEQ ID NO: 971503 - protein, 368 aa, Homo sapiens
  misc_feature (227)..(227): Xaa can be any naturally occurring amino acid
  misc_feature (229)..(229): Xaa can be any naturally occurring amino acid
MGFVGSYRPTPFVYIITCPFPMILEAHSRVSVKVGIGVKIVSAHPSSGTNLLSGYYDDRSIMDNLSPISVAAGCRMYYVAESTVTMCSKIEKIHTNSQGTMGARVKTWSTRLKIIQTVQYLQGSHIGALNYKMLSGWASRLYWPLGLQIYKVGFWEEEPRKCMSLRATFGGYELTERVRRSGGSKGRLSGGKRRANATHDSGGDCAYTKTVLGIGFPPQEVVTARNXTXGAIVCVGRKWSQRVRSMQGNAHSNALATRGVNLHSERTNFLPNQWGGGGGGEPKGFPPLRGGAPQKVLPPHEMLDQQSRLYVANQAGGRLGPPEIQEENGHEKKYRGAEGGTMSTQSKLIEKPRLSVERGGKHSCGTEQ

SEQ ID NO: 971504 - protein, 52 aa, Homo sapiens
MLVIGILDESQAIYVIDVSVIRYRMWYEDPYSLTDDLSQNCDDIRILVVEVE

SEQ ID NO: 971505 - protein, 130 aa, Homo sapiens
PAHDPYQEALLSPPNDLRTIHVITSSSSITLLILRTTNQHIESYTNDGATATTDTEHCTNGPHYNNTPESTQKAFSIRGYFSILYTLQKGFFSSICYVQFLSLHDSYLDTSYAWHREGALLKTPTQTLKA

SEQ ID NO: 971506 - protein, 107 aa, Homo sapiens
MKAGAIREHIAKGEQPNWSPPPNCVKTAGCGKVRQTKAGEQGGPPLCGKRNPIMPGGGGAHTNGRTHNHATTDDLSDATAGHNNNNQTGVKKQDRNRTPERSRETRN

SEQ ID NO: 971507 - protein, 172 aa, Homo sapiens
MNSDSRLLHRQYVSSNLVPSYENDHCRLTMCEDGESEPEKYVSQSSRMACEWRQYVHSLLCRLESRVLVLVRIPEVAQSLHAGFPQRRIRVTLHSTEVHLIHSCSARVREMLNEVASADGYKEAHKLTYERGSVREGAEDSYTNVPVTILYTLAIIFFPKHNQGRSLEAPPL

SEQ ID NO: 971508 - protein, 74 aa, Homo sapiens
  misc_feature (53)..(53): Xaa can be any naturally occurring amino acid
VRIALTRCFFRRLRVEGRALGTCHPYETVVQNNGSQQGAAKREILSMRHACMXASEERAVVGYYRDVLACTSEV

SEQ ID NO: 971509 - protein, 206 aa, Homo sapiens
  misc_feature (8)..(8): Xaa can be any naturally occurring amino acid
MAWRGRTXMEEGVAWARRISIDTKGLKQSSFCTVYYGTGIYSALARLLKPPRGRDSTPFKIAGDATSILVPSGHRHNVLVSCSHKSAKERCTWGRTGGMSNGGCVVEQKNVVGSLIKWRHGCVSRTCVTNYKTPTKWRPAPHVVVTGVRNKTAHQWRRNTQGPGKKGDTNLTWTDQWPGRRGGHKPQGDDTTKQKGEDERTNNRYK

SEQ ID NO: 971510 - protein, 271 aa, Homo sapiens
MASAVSARTQCTESSVRASHHRTRSLTITDEVNDRSLNIKSNRPPMVLNLTSTTTYGGLEYVQLRYSILRPHYCLEPGELGLPVTLTIEYYSRLEAPIRIISDEIDKHVIALMSCAADEAYTNRCGFPARLNQDTCQRYDDRGYTTVNALKSVEQTQFHAIVLELIPLEIFALRARMYAYRTPSTPLERKTSQTMRQETGSRRAETQRGPTTRKIERHGASQHDPSEAHREEDTRRMSQGASTGDMCTQETGTQGRQTEKRRKTDTRRART

SEQ ID NO: 971511 - protein, 119 aa, Homo sapiens
MYRKEIDNELMYRGRGTPVPGPSVVVKHNPVVVWSQISAVQNAEGLEVARTLLGGVPLGYRAVYSHVLLTLVGSCVVARMLLLWMSVRFLRAPLLSAVDAPLIPWCTYAKRGLDTIDCA

SEQ ID NO: 971512 - protein, 111 aa, Homo sapiens
TCNDMCVSYPVNSHDINEMRPSNEERLRAALSGVHDIYTYDQSYTVHALRACTGAHAGLIKYIYEHANKVQALVCVSTSSCAKVIHDSATEENIPCTLPPKHLCVACVVTH

SEQ ID NO: 971513 - protein, 246 aa, Homo sapiens
PVTAFIQTQSVCTQTMADTSLEHMCRLDIDFSTQSEGRNTEQYICTHLGPASRISGDVERRLIKVWNECAARLNFSHGTHEYHAETIKNVRTRRRRSLLHRAPSSYRPVAVAAEDTLQDLRSREVGVIKGQGICSRWRRKNGNARCLQNHRLDNVLQMEECDENILLVDYKNICKVVEVGGRIYVDDGAKLSFPGERGAGVELTWIDGGGETPVPWAARGCELRGAVGTACVSRRTFRTGVGGDRT

SEQ ID NO: 971514 - protein, 38 aa, Homo sapiens
MSHVHQALNQKRAPRENNKRRTNDGTKPHIKKKGARGE

SEQ ID NO: 971515 - protein, 109 aa, Homo sapiens
SEPLPECLLGDEAAYAGPRSGLGCRGRGGGERGRGPMAWDLAVAREWRAAPGISGAGLREGALRVGARGGPGRRGKQPCRPRGTVAGAAPAGMCEGPSRISGPIPPDLT

SEQ ID NO: 971516 - protein, 272 aa, Homo sapiens
MWDPGCGVTKGLFGQHALAWECSGSRPKYHTGIQPGGHSRHVDRRHGVGGPYPGDRRCETTGSGGVVAPRGLAPLGSHKGRKAPRSGNGESQILYNWWYRTALVAPIYKGRGDESTRLWARLGGRSAKRGSKPPERLVMVRPALAGGAYSKGNRRKPEAPKAPGTKRGEIPRGRRYPRKGGETKPVSRETLWSPRQGITRKGGTPTQGLNNLPQKKGGHKPGGLRYSAAGRTRKSPARAPGGSKHKAGGKTPGAEHATSAKRHSRATRTEKQ

SEQ ID NO: 971517 - protein, 301 aa, Homo sapiens
MLVPQGLERPKIHPLKNERTDKSQENLGNPSKNEDNVQKRASTVPGSPGAERRRSVLSSFTLPFRGVRRLIRHPVSRPAGVHSECGRLDYSARCSLYDFLAVRLTTTRGHGSKMSFPLYKNTNSSNNFQPILCGRKAQSSPCTYSSCLCQGDNRQHAPAERPVAQDGGPRAAVLSHQQRGRDAHTACIMPRTPSTSHRHTLPTPRPLLDQRSLSPPALPQPAPPRSRARCVPATHPQPAGLKPRTRQTANRPPNRRTNTTGPTAPPPPQRPPPRKEDNHNPPNPPAHRTHAPKTKPKTHTH

SEQ ID NO: 971518 - protein, 146 aa, Homo sapiens
MNLEIYTVKFIKNTKKHKHTKQNTTQTRGARPPSGRTPHPTARARHNTRGPPQQRSVRAPHLARPLFPTVSHTHTDTHTTAGLSQGEIYTPQRSPTPAGITQHPSSFSTTPVCIGRAQNTVSLVAGLEATPPPILRGGRQIPHHQD

SEQ ID NO: 971519 - protein, 101 aa, Homo sapiens
LKTHQAVSGCFTGGLEVHAGDRTWIIDEVQCILAKLDIHGTRSKATYRISIRSWMVFSKQNPFPPLLPRLCEQYTVVPDGRYSRCDSGRSLLSTSSKEALR

SEQ ID NO: 971520 - protein, 217 aa, Homo sapiens
PGSAVSRQMMHMERRLSRPPGDASGGRKGGPGNRAEAEVGSLNRRIQLFEARCVDRAQERLVTGLLKAGSIAEKAADESERGMKVIENRALKDDEKMALQEIQLKEAKHIARRRQIGRHEEVARKKVIIEGDLERTEERAEPGRSPYAERWMSSIRTDGPEPEVSELLLQATVTLHTSRYNSEGSKLHALLTDYNSTDAETRAEYAERSGAKRHKHQ

SEQ ID NO: 971521 - protein, 108 aa, Homo sapiens
SLIISVYWSTDRVDGSRSDTRAIERTVRRSAWVNFIKHSRGWWSHSSREGRQNYHIPANNTQGLPLPPQENSNSGKPKVNQSLLNLAAAKSPTISRVIPISSQEICDN

SEQ ID NO: 971522 - protein, 147 aa, Homo sapiens
MWALIISKTFSILSLSHRGCFSPQWSHHNLSRLPWSGVSSSNTLSPSASRRVTTQVVSSDKIVLLDVGSNTISLKVLPLLINDLSAHTTAVGSTKRVLTMLWQTHSYIKRRRRVLSETQPYHNKMYVHSFNDKQPQSRHNDYADQLD

SEQ ID NO: 971523 - protein, 145 aa, Homo sapiens
MHVRGKIASPGRSGPSPGVALRGGTCQGLPHSPSRPQKPCVSPLGASVKEAPECRLARPRLVFASERHTVGKALATGVPRSGGYLRRAGSFQASQRRALMLYPQGAGLCYPGTKGYALSTRRRGGLSPGRGCPFTPGARASRSFS

SEQ ID NO: 971524 - protein, 91 aa, Homo sapiens
ASGTLVTERSAVPFLPVNPEYSATRNQGRQKLPRLNAREFATLIIEAFSVRPSGRRQGKEPERAPQTNLRAVSAGARVTSEEQKEYDSVGL

SEQ ID NO: 971525 - protein, 232 aa, Homo sapiens
MSVICQALSKWLYEVSRKAALTSAVVHSSQSGRGSHGAGGTHSKDRGRLTVPGRPSAVVESSGGPRVDEWGYTRTVQKGFLAVVNQGVSDSRKAVLERSAHSSVKASCADGLRPVHTSGRLVEGASTMGTIELGGKLGREYRPLYLVRQDTVGITFSFTGKVKSVQGQMVMDPGDIHRGTNVTKELKCRGSLATGGCWLSPNAGNLEKQAERITGYTGGLYPAARLVAGAQR

SEQ ID NO: 971526 - protein, 219 aa, Homo sapiens
GGLAFGLKSNLLSNTGRVQGLEEEVLVGHNGGGTDLDGSQPTGGNAGDVIGRGGPMSHSSHQSVLSGGRLGFSKTISKKGLGVSRHQQGGAGSYIWKKRARERGTIWCVGGRTPPEPPRDTTTGGEWCTSLGVSRGHTQSLGDTLWGVCAPPKRARTGAPILSFHPERNKENLSTCVGVERSSPRPRREGEGRGVAPRGAHWARPKLVGEVRVAFGETR

SEQ ID NO: 971527 - protein, 286 aa, Homo sapiens
WKSKDPLIKHLRYGDPGGVTWGGGQTSRSCILPRDLNLGQGSGKGPARGSGAEEQGPHKAQSAHGVLVRGHGVGPREGLLPPRKVPPDLQLQGRVKDGPDGRVGLRRSAWKGTGPEWAPRGCPGLGRPWWASPASLSGRCQMSRSQPFSLKRGSSRLDPGQLSASAGAQGEGPSPQGSVATWWISLLCVKVGRPPVDRTHSPEEEGRRRGGPGIRDPGSVRAPKIAPVKLKIHGAITTASLSGKHSGHKLTAVIPQRGAKPGQENRQEKTGIASKTGPGKTGNKKQ

SEQ ID NO: 971528 - protein, 138 aa, Homo sapiens
NSFLKGGGGGGGRGGCLGGGLGDVLGEPDQRGRGRAVVVAGASWRARGGGGGGGGTAMTHPRRRSFSAHYRRRRLRKYNPEPPPPAEYTPTLRPTRVRRSGSSGDSLPSWLGDDMEVSAKELMTILNKVVDRNPDLHD

SEQ ID NO: 971529 - protein, 252 aa, Homo sapiens
GRLGCTLLDKWWPKSVGLEALGPWNPGTELEEAQNLQGFGSEATKRVGEVSQGKKGSACRTLESSARRLLLLVLYPAWPLLESSQGVILQGIVLQQGSHVLQTIQCKGLEEGKTDANKTRVIRVAVPGRYGNRPVNRAEQAEGYLLAVHKLLLELGSPDSDLKYSLTWVSIPCICVGRTRNEGGQEMNAMGGPHYHCVWKGLSCQSLDVKMTVALLRGTLLEQVFDCLGLLKLPAGAATLKMRKTAVIPKEP

SEQ ID NO: 971530 - protein, 106 aa, Homo sapiens
GLTQDLKTGTVKVTAVGWSEHLPQSFTSVAEDFVMCTLGCFCIIVIPNYEMHLLQEVPLPSIKATPFLSKEKWPSPLPSPHRGGDSIASGVNYVMQNFLNLRLNTF

SEQ ID NO: 971531 - protein, 76 aa, Homo sapiens
FFKELNYKTNSESPSVTMVTLLSNLGSQWSLWFGSSVLSVVEMAELVFDLLVIMASCVEVEADTGLQAEGAGVLRR

SEQ ID NO: 971532 - protein, 310 aa, Homo sapiens
VRSAAGVEARARDPPPRTEQSSPPSAWVQPWAEDDGGQAACGLGNAPTMRLFSCHWGAGRESGSAIPLAHKVKAVLIQGGSIEPECPQPFGTSVLGEEGPQSARAFFTYTPMYILCKVAGRSGLSRSRESRVDVRTALSNVTIAGSMTKGFPPDEDGGRVPNKDDMKTFPEEEVVKETSYENDDAAVFRMCAHPVMLSSLRCMVPVGWQGGQGTGGGGAHWESYNDGGARAYSREKPKLGGEWELGGEPGAIIKATGGTVWTQGGATKQGHKRPARGTVGGGGQAPREGQGESGGPTRYVGEERSARDRE

SEQ ID NO: 971533 - protein, 171 aa, Homo sapiens
MGSEGLETIVIATSVPFWGWRRDKAGPLVGARGRRGLSELGEGDGLQFLCLSRGRDRLHEVWGLQQAQVPGRHVGEALRPPKWSREYEQVDLGARQAPGGPGGKSGRQAKASIQSDPTGRRNTRVGQAKGQGPPAKPYIWGAPEKRKLEDQAPGPRNDPGQGLQGPKLGEQ

SEQ ID NO: 971534 - protein, 43 aa, Homo sapiens
LPEDAVQADGDQPEMLNKVLYRVRVAAVALRDVLGWKEDVLLG

SEQ ID NO: 971535 - protein, 129 aa, Homo sapiens
TTEEDRAAEAPERSCYFFMGRSHCSGRLRGLQLLLSLLAFICEEVVSQLYLMWRTYIFWSCVSCSRFLLSLLILMCVWTPFYERVDTTKVKSSDLILLVGTGCVSVGIHHLVSTHDRIQLRLLQCVWDL

SEQ ID NO: 971536 - protein, 85 aa, Homo sapiens
FLFQGSLMAFNLGSSKTTGDIYSPVGHPGKCTARLHYEPLEPSVVVNREAQTRDNRSGAHYNTICKMLRRRANEGPPRAALGLSC

SEQ ID NO: 971537 - protein, 160 aa, Homo sapiens
MIFTFDAQNTLCLSNTWRTAVSTVVVTRSPLGINQAIHKFQGLSPLSSEFPRNQNSKPLGPILMMNRDTIAGPPKESPPRSWYRRDSAWAMPTKDPLVATLFKHKRSKVALVEEDKTFFELYSKLVPGIRRPFYTKNILWSGGNHNDFRPWWGKPPLNSE

SEQ ID NO: 971538 - protein, 330 aa, Homo sapiens
MGHRRRSEKRIPSEPRSPNVSADRPPEARLWMVPRPAHKVPLCIALVPQPHALLDHYMLDWAMAGSEEGSTYRPNCAPACWEQDSVKFNAGSAAAESCGTAIFHAFVPSALVKGQFHEVPRRGTNWSGLPHTDCLPGLTQTGQGCEDRGDHQSWHREPVSTALGPQCTNRGGPVFAIVVYDITKTDTFARATNCVKELQRQCQPQHRHCTRGYKADLASKRARGIPVALGCWSARIHLEARTSRTAKHQKQSLMERQQVGVTGHIRKTATERVHEDLSVRWLRGFPKEAPKLAVWPGANHVCDPMEENTAVRRPAVSNWTPLVSLDRTPR

SEQ ID NO: 971539 - protein, 239 aa, Homo sapiens
AGGLVGLGWGTAVVPREVTAVDPGPGSAAVTGRAEREVRRNAPGKEWLPVTKGLGRFAQGPLKITFLGGDLFSFFACPIRGTQRSMISSVGGLSSGMRVWKIMPSAEQRPRLRPAHQVQALVAIGALPCGPPSTLGCKGCLQERCDTGQFAVGANTIRGPKVFSNSSPLVATGGTTRARDTRIGKRPKFGPLQGSDRAGYGLLCLGTPQSYAPKSQWVSVSARVALKRLHHDGQDFDGL

SEQ ID NO: 971540 - protein, 306 aa, Homo sapiens
PGTAWQRVPVCVSWWALRCGWRMRDARNMGADLCRQERSEPTTSGVDADVALTEPNSLRLLIQQNKNVIAPLMTRHGRLWVELLGGSQCRLATIARSEDYVDIVQGGGGVGVCNVPYISKIYLIKGAVAWGVELQSFQISSKPQECVDPDMAFCAKIRAARIVFMFLSQSGTPFGHLVSLDRYPNNHLKGTSGRVFSNPRGLAREKYYSTKKLQQSPWQGNLVEASPCPWMVIGSQISRGGGPVIEPCCENGPLWPRCFWAHNQGNRIHGGTRQRPEFGSHDAIVWRVQTILGKCAKREVPGLTGS

SEQ ID NO: 971541 - protein, 97 aa, Homo sapiens
PEDQGNLYIGYTMQVGSFILHPKNITIVKVPHGTEYGRGVLAEPRRQAEELRRRQVLRGSQVGAYLGSANCPGRPESMMRCSDLLLAPPTIREAKRK

SEQ ID NO: 971542 - protein, 276 aa, Homo sapiens
WFQALLPCALQRHLQTPSSTKPGPESSMFLLQGARPSPFCWPLCEISRGTHKFSEATLKIGDGVACGLRATGLVMRNTGVCCDTELKENADAESGSAREPSESFLTEVEQLFQVNVSPNIVDFAGYCAQNVPSTAWMYVASCSQRLPGGPSPRARPRLSNSLLAQRLDMLLCTARGNAVSTSGTAQRHPWRHQESNVLLDERLTPKLGYVLAGPVQALVAGSGPPGRSRIGGPGYLSPVRCPLAYLPKASLRPRRVLWDRDPFSLGGWGPTLLREA

SEQ ID NO: 971543 - protein, 246 aa, Homo sapiens
IRPHGVHMVLNQQGRPSGDAFIQMTSAERALAAAQRCHNEGDEGALRRTRGPLVPQHEMSRVLHGEGTLGPAAGMSPSTLQPALPLTSYLQQLPSHPKRSFPRRRQLLYPSSALLPVARVPAWPKPCGLLIPVPATQLYLNYTAYYPSPPVSPTTVPYLTTPTAALASAPTSAVVPVRSLGPHAAVSHYTAGMKDLLRRLPGLPANRLMTNTGLMAWWVTQLRTGRHKPPKAMGAAAGTASHEAKT

SEQ ID NO: 971544 - protein, 440 aa, Homo sapiens
TEDLFTLQLYGTQPARRNSAGTAEHWPIILQAQCATHNCFDVNIESLLTTNVPNWHTTIWYDAVLTNHSPLLLAAGNQKAGTTLTRQRTQLTARNTPLALPNRNSKQLLSAEPNEPTLSWPTQANLTHPSDTQPLRFWALLKGQASTLGTTPKPYGTLLDLAEWSLVFPPSTPNPKTGLGATRAHPTNYLGATAQPSLLGTPNRKRSNASGLCPPKANQKPLDVHYARGPLGNAAPWTSPPPWPAPHNSQHRPWRRRPLQGTGFLQANKASLKPLSQLHGGPRPWDFTLDLANSRSTARRRGSHARPGWAVPPTPLPTFESSISLKTFKTAPATHNWVGPSTNSLRSARLLVPLVTHAGRQLGKAVGVPLLPDGKDCDTLRFGAPKAPHHDAHTHTSKTRFPPFAGSPGRTPPWADSKFYSDALGALLSGDNPAHTSSPT

SEQ ID NO: 971545 - protein, 95 aa, Homo sapiens
KTSRWKLPWWKGGALLTAELLRLQHGSSPQAELLGCVSHEAREAPLHEQLTPRGPVTSLLSCSFLLAPCPHGSPCWYVPCFSSWKFLGGPRDLLP

SEQ ID NO: 971546 - protein, 103 aa, Homo sapiens
MYVVDGEYNQKPGKVVKERSGGQYNIGPRKRGLYIGITGIIKGARQREIFQEKRRGSTAYKFGPRVNIRVGREQINSSPSVVVYRTAERHTVKTYRRAVLVTQ

SEQ ID NO: 971547 - protein, 96 aa, Homo sapiens
MGEGILPQLVQSWEHSSDEMAAHEGLSESSGKRYSEYHQGPAVLIKGLPEIWQCPESVSSWEYWRLNSSNTRYSGAGERRGPVAYGLRSQACSIYP

SEQ ID NO: 971548 - protein, 144 aa, Homo sapiens
MKYGKRRQVSNVDRPATTHRNNIPHKKWKRHTKRPKKHNRQAQNLKGQKTHWWYLARNQYCNKTTKGTPTHGYQHLGKIYLGATKPGNLAQRSPLEITPTQIGKSGLKTSLPSMRSTSLGAQYATDNYKIHAERGNIAPRQLEH

SEQ ID NO: 971549 - protein, 204 aa, Homo sapiens
GGPGGPGMGNRGGFLLRGFGSGILGPVVAGPMARGRGPEAGGATQEGKGRQDTGSGCPVTQVWARYAVKAHARSQSLGGESILITPLPDYRQSEHHCISIHEEALLIKGLRYWEDILPRCRKAKTPMPYTAAPEVQRATQGCGFTLRRTYQMVPSVRGTLRVCITGLASQVGRDWAQRVASSLMEGTHSIPFVRRRLHSKSGHH

SEQ ID NO: 971550 - protein, 116 aa, Homo sapiens
MYRASYRPRGSCFIWAGSLLGCLDIGPQGPCNTPTRYDGGSLGQKGASPSGVPPSQEMCPPRVRARRMQQPMRLPHGPGRKRPMKIMLPAGVCPRRHTLCWAHNGRIFSNRGGDTE

SEQ ID NO: 971551 - protein, 77 aa, Homo sapiens
ADAWVLAPGTGSGPKPMLRQAQVSPRPQPQQTRKAKGEPGGLRLGIWQLAECETGPDHNIIVVKLPSSTPAYQVGKE

SEQ ID NO: 971552 - protein, 353 aa, Homo sapiens
NIRSHFQHVFVIVRLHNPCSDRCLFIVCAVTTSRDVPSFGASHFLKGYTYIPKSNVSRDYAFYGRTVIKCTEKCCSVNSDEVSGPMDNLVTSPGIPEEIWHEKNVTNDPISSPSDKFCRSSTLASKKKEQSKPYRRSRATAALWGHCTEQIRDCKSYYKAMELDCLVGISNEYISSSLEQDTKSVGLQLVPSRACRERWHFTLTHQTSEIFAMTRSSTARPQSRLTANHTFEADPKQIAQTVDSTGTHKRLRTPVAHDVLQTNGAYDTFSPPTGPPNDGHFVRSKCCSPPYRVIAPSKRQRNVQSPEHRNDPMCEQTFENRVKITTTRVTQTKLNNTPCKQSPPRLNSGYKYP

SEQ ID NO: 971553 - protein, 107 aa, Homo sapiens
MRTPTLTQCDSSLVRAPLSFSALMSGAASSLCVSLRSGSSGRATPLCGVAETVLHLRCRFIYSGMRSLPLRLSSPPRGRLHFDDSGLVPLPCPRLSAVALSHVMAWI

SEQ ID NO: 971554 - protein, 281 aa, Homo sapiens
SRSCNAPLTDEIERLDMAPEIGPGGQNADSWRLQPRVAPSVLLLIRGGRRQGTWGAVCSQTRDIICEQCLKNVSCLVVQHYRACLDLPSYKRLATGFPLEIELCTLESCRVNFEALIITMSVVGGPLLLGIANLLLCCCRRKRSRKPDRSEEKACVQGEERPEYGREERRAEMKTKTDEFRKKYGPLREENRYARFETQTRGAPRTFSPDASCEVAHYLQAKPRRETHVGLAGFMTLAIDLQLQDRAGNALRPALASTGTLSGTPLHNMPLHNTWGAHNSL

SEQ ID NO: 971555 - protein, 121 aa, Homo sapiens
MARMSSSPVPQWDFVAGYVDGQTEGIQQVVGALSCATTIALAIYAAQAYAVPNVDEDIKGLFAVATQGARLSSRCQWKRQDEQLSLQVETLNLDSPAVIHYAISNFLPPSSYASLPADVGQ

SEQ ID NO: 971556 - protein, 208 aa, Homo sapiens
MGVRVELKGGAKVHREEASHSQDRAPKLAPHMGGLQRKGIGPKTHRCRGAPCRLGEVQVLSGYPKAGSRAPVTLVWDNHLDLVGVEVASGQRAGRTPPGLLSVPGKGINAGEEEILSRTLSKVRTLFWGGRQHAWFTESGGPAGRRERPDSYSSRNSSGQGGGLDVRFGWVAPLKQPAQVAGQKVQKLWGQQGVARKSEAAHVKGLSD

SEQ ID NO: 971557 - protein, 356 aa, Homo sapiens
LLLLLLLQLLLLRRDAAAESCASAEEASLAPSRNPPGIGGQRAGGQGCPERSGAKGRRGLPRTTWSGDGPTGQNFVKAEPDGPVMSAADNTEKLTLWTPGFIDATWGRVGTLGTGGRPMAVPQLACPRTNAQREPFVKTPQLETPRQGGWVTQNRVEKAMVFPYRGTGVGPTPIQGKMTRLNRRVPPKEMPRLLRSHSHGQLPKSPLMGLTAWGSQELPVPADRVRVYRGPGWYRVGWSTFVAQFGTSSPFQGRGVKLCVVTWGELDITCLDNLAWMGIPKRVFDRDCLHWDLGPTTTNPGRKSDGLTRGPPESDMATSSRARSPSGAAHTTENTRLYSTKEGLVENPACYDAAAA

SEQ ID NO: 971558 - protein, 121 aa, Homo sapiens
DICLTHAVWNARTAGACRVSSALVDNDGLYDPECDPEGRFKARQCKQSVCVCFGAVNSCVALCLHRTKGDLEPTLAMQLVLHPTISSLTCCQPPHSAGCRSSHFDDRGTPELEAALPRSAY

SEQ ID NO: 971559 - protein, 145 aa, Homo sapiens
MWPCVAALLLGSAVLRISSALFNKHKIVVEFTFCNDTVVIPCFVTNMEAQNTTEVYSKVPNLKEEIFTPFDGALNKSTVPSDLSSAKIASLTITKRRCLFEDGLRVMLSHTQETTPCEVTEFNPEKVKPIIELKISVCFMGFPPK

SEQ ID NO: 971560 - protein, 37 aa, Homo sapiens
MHEHADTKTDAPRTAAADQEERQDRAHEQHRARAPTG

SEQ ID NO: 971561 - protein, 315 aa, Homo sapiens
MAARAARSYSSVRFTHCSYHLAQENLSYGHKVFSTPGWYRAKRMTALSVIRRPNIVPFYHQWLVLDRPSSVRYYLIVNEMIPNEGSPKGAPHPDSHAHSAAAHCAIDATASEHAPRHTLAHRRTHTRPQHMPPHTALAAPSTFATKPRRAPHIAHTGPEHQRTANTAPPQQHEVATKKKPPGTARSNPSHTAPTTHQTESRPFRAETSSANSGTRPEISPGRHSCLPRQTVTKWPRARLSTTNGSYKTLNALTGHTRGLSDRTSPRELQHPLLHSGRPYPAPTLRESNITNARNSLDSAQHQTAQAPTLRDAPGD

SEQ ID NO: 971562 - protein, 127 aa, Homo sapiens
  misc_feature (125)..(125): Xaa can be any naturally occurring amino acid
MSHLKILCPDGRFVPNCWKAPFPRKSTRREPAFGVPPSLAEELHVFPASVCFDLSSSHRAQIVELSEKGQVSVASEDPEFQKIGMSLLFGVGFPQKWDETHLVAERAISLPLTRFLCPMSVWDTXPR

SEQ ID NO: 971563 - protein, 152 aa, Homo sapiens
  misc_feature (107)..(107): Xaa can be any naturally occurring amino acid
GTGRESKPGYTKRMKKTKVLWRAVQLRMRKTTACVASAWIPSSRCVLRRVCGTLVTLHQGAVKPHEVECPNSAGQGMLRAEAGATCVSNRPLKNRGASPSSTQVTMXSPRRKMFWSPPKYIFEVAPGEAELGTSFIVPEAARGAYFKQTFIL

SEQ ID NO: 971564 - protein, 280 aa, Homo sapiens
MPHWVHPKHTPVGIPPWSADHLHGNDLGTAEQAATINQNFIIAQPRRQLEHKPLRKITRTRPCETTPTADSYRRTDTPKRTLSTRRPRAQTYHPRVSMREWDWGNAKRQVVPKRQFITPPHDTRQTLKLGASSFVKPQFGRENTCCTRSRRGRTPQADDPISHPTVESSPVDPPIADITALTPGAKGCGEHYRQSLKLFTTTHENSLSGPHKRRPPPFGPPVGNPTYELLPRLCAPHQGKLPQAEAQKTQDRKIPPNGSGKPPQRGHQARTRHHSPYATG

SEQ ID NO: 971565 - protein, 497 aa, Homo sapiens
SSLAPYPPIQEGTGPQTGITPLNPLEDPARFSLAIAMIDRCLTPIASFNDLGPGRTHTTVHHLEIHDSDVPMEIPGRHGHIHGDMTLLIPTSYRPADKSTGARRRWVLRILTLGTHRGDPCGLPFTSCATTPTTPGPGPTILCTLKTPILYVVRKREAGRYTAVLDSWTTTAAALTEPVCRTNAHSHSDWDDTHDAEDFTRTTFPTGYDPRYSTHFLTNPACDSHEAKDTQGKHILQRYMDRFPLTHNHSNISHLPHVPIRIGRNDPFSQTSEVPTSTPPPGDGISTIQPYVHRRARLIRTEEYPLTQDTPTKRNHPLSLMNCIPGHITRSTGPHTGGHHRVHRYKGTHLYTTLRPYGVLTTTAPTNCALVTRATQLGQDRAQYILSRKHLWHTSAQIQGLDNTTPRTMPRNNHPKPWQLPSGSRAEEDAWDTCEAANRRGPPTAHTVASQRDKHERDTTQRRHHSQRSHNTPTNQHKETQRQTLLYQPQGDTSRIA

SEQ ID NO: 971566 - protein, 117 aa, Homo sapiens
MPFYKPAQLARPEPLRELKAREDGQRKHLVLNYGLPCCELALGALTLLCSPKNLTTPDLSAAPRRQAVTQSWSHNCGLPSSTAHRTRIISTPLNSTHPFRFWMERLNLGLRIVCRTE

SEQ ID NO: 971567 - protein, 149 aa, Homo sapiens
MRPVTQWGIGGPPRDRPGQAVWPQTRGQAQPGCHNGGHSGRGDKEGETPHSSPPRGAKKTGYITRPGANPGGAPATYPQFPGCAPRRKGKSGPRRDPSEGPPQKQPSNAQWERGSPKCHRGEAGMQQAHTPAHGGSERAGQRAHSEGPI

SEQ ID NO: 971568 - protein, 204 aa, Homo sapiens
LDPPDTRVHRLYLEPTWLAAPPRLARPPRFYEAGEELTGPGAVAAARLYGLEPELTHLTLQALGSSHHHLLRPREPLTFSARPHREPYKEGTSSACARPPAQFPTIGDPGPASGMTGEGNGEEESGHSSIYPFLNPGPRAEVFRQGLPGPRSYTSPATSAGHGNLGNQHASKTTQHQAITWRERVTRESQGQQPLEEGSRGVCI

SEQ ID NO: 971569 - protein, 195 aa, Homo sapiens
MTPVQRGGAGGLVALGWGNRVASARFGSGIRAGVAAWTGPGAMAAESRRQCRDKEWMPVTKVGPLGQDMKIKSLEEIYLFSLPITELRAIIGFFFLGASLKDEVLKIMPVAKARPVPAKRTRFKAFVQSENYNGPRRLGVKCLQRRLATAIPVGAINPGTSFFHRSPVPQEGYLGGTRSESPKVSFCKVDRAVRV

SEQ ID NO: 971570 - protein, 174 aa, Homo sapiens
AKQHVPEQHPKVQANAFVRARVKKLLAAGVVSAMVCMVKTESPVLTSSCRELRLQGLLGFVEEVEDRGTVVAQGGGRGADPAVPGRHGRGADKGSPRPLPKLTITSKPEMTFPGERIYRGGPGPVVSLFAPQRAQALQNFEALMALTKLGWDSGEEASGQERILDTEKGLVPYE

SEQ ID NO: 971571 - protein, 151 aa, Homo sapiens
RTERYSFGERALRRGRDPSSLSSRRDPVPRLGCLAVLVSHPGHASRSPGSLPVPSSRARAQDWGPRKVFGVRASDCRRQKGKFLGRSLQDELLSVDQLNKAGRKNCLGELIIPSVPGYLQVGGTKEYLVLCRLQRGLGLPNIVVVIAGQAK

SEQ ID NO: 971572 - protein, 75 aa, Homo sapiens
RSQGSGNEAEPLRKGNSRHEHRRQPTRLPAQKQRRCQKSRGFLGDKVPPRPRPILKSPGEGSTLKTPRRPRALPG

SEQ ID NO: 971573 - protein, 166 aa, Homo sapiens
MFALLGDPSTAKSQFLKHVEEFSPRAVYTSGKASRCCWLNSSCCEQHEESHEFVIEAGALMLGEYMGVCSIDEFWYRRTVRDPSWSFMKVLAQGDHYFLHKSRSRRVLLEGRRHILGAENPTWALRRSIFGTESIGGPHVAGTSKLGEDRADILPAEITTKTDLSK

SEQ ID NO: 971574 - protein, 72 aa, Homo sapiens
VSTSGITPGRQCHRFDTIMVPFGLIYIFFAVPVLPLIGFSHEDDRQFRELKRAGESRPAYQDQLDHERGTNP

SEQ ID NO: 971575 - protein, 117 aa, Homo sapiens
MTTAGDHGGTAQGEHIRSGPNKAPLWGYLRTKGGKRPPLYGVVASPQCVGGGPHVGADTQKEASRYYPAVFSFPTNVGAAREGILFCYDPPQAQRWFAPFYIGYQLSAHTDDKDAFI

SEQ ID NO: 971576 - protein, 183 aa, Homo sapiens
MHCLRKRRMTPDVQPSGAQGPRPFVEGLPLKAHARRLELMPRRPPGEGTQVAAAKARGGSLEVLHPGQKSGKGSKRNGNRKRAPKRGGHSFWAQANREGAGGLFGTIKPRAARDYRLFPFPFFRVDARGKRQLPIRGTWFAGGGFKGAKKQTARPTKDGFPKCPKRLSFKKRGQEFPSPRGAP

SEQ ID NO: 971577 - protein, 71 aa, Homo sapiens
VDTKKQKTDEDDYDSKKGTVKLKKKRRGLFTSIPVSEFKRGPPFRKLKRPARPPWQCHPQMTRALHHQAKA

SEQ ID NO: 971578 - protein, 390 aa, Homo sapiens
ERCCAHGLRMDPKPWTLPCVALRQLADATVRETKVVMQPRRTPGQPWPQSSAGALVLDGRVQLASQLMARAALRTPPGLQPQRNPLPAGHWHTAAPPDRPRREAIVTRAAHGDQGKAGNEASQYDSSSRKGITTHFARTMTATVRDMLVARTAGCQWRACCMGQEDALPHGPCRHGPRHESSISPYPGTSGAVRVPGQVHLTPSLCPSQRGPGCPPAVHSTEALRLLLEEPDVALSRDASSCSTNWSCSNHKPARIDDACSTLAASAHRRHCTPSVKPSSPTYKPQSLHTPCSYTHTSLCTPPCHTHSAHRQHPLFNLPPPSDHTPLPTDSPNSFTRPTLKHLEPNLPPSPTTPTTTTIHPYHTQAHTPHHPPPPLHTIHNLSSQHHLHP

SEQ ID NO: 971579 - protein, 49 aa, Homo sapiens
MHGMYYAPHGFLKGHQVNNHGLPTKYTVLGLIVRMPFDLCNSGSAKRGK

SEQ ID NO: 971580 - protein, 164 aa, Homo sapiens
MKNPVGPIVLYLSTLPPYSDLGEHSNFVGRQPSSYIGRQTKHTIFSAVAYDTRAGSWRGIYQHFPEAMFLKLLGPPESLTRNMSDIYSNFRLSKKTRFRNVGQTRRRIITAAITRLETAGQKDNLLLGEIYYLTPCRHEFGGAGNKELLIKKSGTEVPGASSIQ

SEQ ID NO: 971581 - protein, 189 aa, Homo sapiens
MRDEFRRAPRRELPVYDQKCSARERNLGASWDRGKLREGLRGVPINVSRVLHSGGALNAGSSPFSLLARGGIVCPFVSDTLDQAHPSCVPKVFFPAPLSVVPFVGCSPLKCTIIFPWKQLGDGRLALNPGGLGGAPGGMRLPPSCPEMEPWGTDLGVASRRNAGGAHKYPGATVVEGHNPHQWGNLRRT

SEQ ID NO: 971582 - protein, 635 aa, Homo sapiens
MKKQQRTHKNNKQTRQNREPEQKTQNKKEMRHTTHGGPERETEDMSANRQQKNIADTPVERKKQSIADRDRTVHKKTQQRETREKKRQQQKERHRTTHNTNHRATGTHIKRRRHQRKEQGETSERRGTKATRRIQTRARPPGRNKHTQHNTEEEQETQTTHQNRPHLSSNRHTSIVTHTAQQENRPQQAARDERQDDRKKDDRRPREEEEHDEKRSDEHSLAIANEIEGSGEEDDSRQKEKKEMRSKADAEEVEEATTRIERERTRIGAERRAEKHKPAADRTSERRRTDNEEKERTHNTRTTEQTNPVVERATTKEKKNRARRDSHSSRTAKQQRARQSRQAGSTRQRDAHVGLNAKTKEKRRTKQSRHTRRGTDDPQQNSQRRHEPPRGPPRHNETEQTTTQNRNSSSTHLVAKARRGQHALTHTRRRKTRIDRERKRTTKRMRQRDKEDERRRGDSTTKKQDETKHDTTQHYHATSEQTRNARTTKKEPSSTADAAVADMQRRERTNVESDRRSDKNNERENEKQQYDTDKCKKSEVVDMQERKAHAEDHHASMNYQPKARGEHTRHSKRRASDAHEPRYPHEDIAVKLSERRTRHKRNESNRKILRAAQQTNHYAVRRVDGIATYKQHDTA

SEQ ID NO: 971583 - protein, 374 aa, Homo sapiens
KPHIPGEREHEREGMLTRGPDGRLRDAALQTKRDAPHRPSADRGAGQACWRRERACVQSSPLLSCVLGSMLACGGSLRGANPVVRQQIGRALRRGARGPFSGCQAPSPGSSGGKHAASCNDLDPGGTGWALKPSGPSAQGGPGRGEERQLVGGVPGRGRDQPLSELPMQQPTPGEGGHMRANRAGPPNGHPRSPFPSGRGSFQHKVCSTKDGRRLKLPFEDGVKPAVRRVEGQKEEGWTPTDARGSRRTPMREATGTGRVRRTERLHSQGTPLGGQESITVHHTRIRGKGAQHAQENEASGEKAKHKERQQEEGTGKPTGRRKETPPERRTRPHDERGVEEEGSKRNETNTEDDEDAEGQRTEDEPQRKKREQK

SEQ ID NO: 971584 - protein, 183 aa, Homo sapiens
CNAPLTDRATGDHGARSGPRADAVLEVAPSVAPALLAADSSRLAAAQEPSPELLCSQNDKDKICEECLKNRLRVLWCNTEQRLVWDYPVTKRLATGFPFCKFELCTLGSLVGEPCEALIITMSVVGGTPPSWACQSVLCCLQEEEEPEAGQELRRRACGEPVGEAEYGRREPESRGLKDKDHD

SEQ ID NO: 971585 - protein, 191 aa, Homo sapiens
  misc_feature (66)..(66): Xaa can be any naturally occurring amino acid
  misc_feature (76)..(76): Xaa can be any naturally occurring amino acid
  misc_feature (135)..(135): Xaa can be any naturally occurring amino acid
MDGTENKSKIWMLNGPFWGVSLDRLQSLVPLRKGVPHVPRIIARALDWQALKSSCQSRRFKWSFEXARFSCWEQAXPLQGSFDESSQSVQQTSEEAMRIVSRRFLPNESLEGTVITEKYGKDATNVGDEGGFAPXDPGAINEGPWGRPCVEKHLWRNSGAKGAWDLTNLDTGGHRHGRSWPPEFFRVWRTY

SEQ ID NO: 971586 - protein, 112 aa, Homo sapiens
RVRGARYTGITGRTHGWRRHPGAFAPAQDVGQDRHFRSFYSASRLGPKCGHERRLSMAREDTNAPSEGSTLHKVRRYDDGGTTSEWWRRDLPTEGSQNARQIRAQKFNRGSI

SEQ ID NO: 971587 - protein, 89 aa, Homo sapiens
  misc_feature (26)..(26): Xaa can be any naturally occurring amino acid
MGSKSGAPAKADLPGHLAKGNPPSRXSHQGLEWAKYRILSCVKQALHGEHLQARPRVKKYSIVLLWTRRGRVFGGSARPGVKGLGVLRP

SEQ ID NO: 971588 - protein, 176 aa, Homo sapiens
MLGHKLLACANGHRPHSHQVVRVASKQSLGHQQDQAREVHWGWSLACACWVLDNFWLQFIYKDLSLYIPDLDAGAVEHTASSGIGLKHRALMMSPPSSGVKGVGTFVEDPITVAGPFLVPPESTEGSIWEKTGQPGVSEIRPGGGPMWVGLTSFGRYKPKGLLNTFVTQLGPQATG

SEQ ID NO: 971589 - protein, 151 aa, Homo sapiens
MISLIDITRGEISHIRVPYNSKGTNLFGKVSVGSEGYTHVGPHQFISTNTTRENVKRNFFVGKKEGASASDFEETQPRFVATGLQRSRRFPPFLRPYHFLVNFFQLQGGCTKGSAIRGPVAETKVQWLDFGGIAHPSGPMFTQGMCVARTA

SEQ ID NO: 971590 - protein, 34 aa, Homo sapiens
  misc_feature (31)..(32): Xaa can be any naturally occurring amino acid
LLSPELLYALARMGHGDEIVLADLNVPGAFXXHR

SEQ ID NO: 971591 - protein, 209 aa, Homo sapiens
GGPSRQVSFSLLCHRDTQAAQAPDQNGKPASGRSSVGHEPLLAQFIWIPTRTTKATLKLWEASDAVDMKPVPRRLCGAQLVSPGPNMNLRARRQLRTKPMHKIPYRAPGPMPGGINYGPWELGKTLAQSLTVLTSIPYSSSFTVVPMWDPLVWGPPGTPIMPSPADSTNSSDNIYTMINPVPPEAAANFPNGSRLGRSDGGMGGMEHTT

SEQ ID NO: 971592 - protein, 302 aa, Homo sapiens
GEAKSAASSRNARAKGVLVTSPAVLSLNPVAGPPPLPPTLHTRPSPVPETCYTSTMPYQYPALTPEQKKELSDIAHRIVATWAGASWLQMIPLGSHCQAVAVHVAPRTPEENRALLPASCLLTVDDRVNPCNGGVILFHETLYQKADDGRPFPPGYQIQGRCCGHSTVDKGVFPLGRTNAEITTQGWMACLSAGAQYKREELDFRQVAVCAERLGETHPCQPSQSWKIAHCFWPVMPVSAKQNGVVPIGEAEKSSLIATDLKRRQNFDEKGGGAQAEGPHSGGLLSQGPACANSKDRRAKQS

SEQ ID NO: 971593 - protein, 198 aa, Homo sapiens
SKFKNLHYEGRSGGRAIDRGKQMIDLGGDSEQVWDYKPQVDFDHCGPVNTPFWAPWGQPPALVESWQGSSHSLGSCGNAPIKVRGAPWEGLEKCGALPFAVVVTTQSVEGKGALHPWVVEFPPEGGVRGMNFVPCPYYSGREYPRKIAWSVLARMWAKLPCNTPQGALKECAKSQSGGPRGAVERPLCGEGPDNSWPR

SEQ ID NO: 971594 - protein, 143 aa, Homo sapiens
FFFAGNECLYGWYGTNMKTRRKASRDGKLSDNNIRPRRKKTLNHRGTNRYTVSAAVRSVTWGSHMDEGDQGRATPIKELNVQNTQKRVAYEEIEEKGRTKPQRGWRSPPFFRGENVGEEKLSNTLWAQPKFFHESRVARFSLL

SEQ ID NO: 971595 - protein, 206 aa, Homo sapiens
MWRRVCRSPGEPEREEGPPAVYSCVFSPRARPAFVRAHAYKRGRAVARALWGAAAGGKFRACKARGPSGVITILKGGHLCLPEGTHLLSPTRNPGGPRGGARPPFFAHRGVVSSRGESREIFGVYRTRARKAGKSCGYPICARAHERGALFFHPRRGPPSLLWGRLMCARHNRKRGPHKFLPHPFVGPMWWWPPPVLGGAPTPMLP

SEQ ID NO: 971596 - protein, 338 aa, Homo sapiens
  misc_feature (248)..(248): Xaa can be any naturally occurring amino acid
FCCLVILVGLLLLGIEHRILDHRQLARMTRGSIAPHLYLHPPPQHHLFTLVSHGAHSGDTSTSGAPLLTNRNFNMMKQMTIATKERRKKRISTTPGLARTLAFRQKYQARSKEKKNRAPKKDARNGEKTRNSTYESKTNRWTQRQKEDGTNAPIMSNQEAGATIQQNRAAYGEANSDNEERSRSGSTVERLTEERNSWLTPSDNIEKRQAGTPDQVSKVKNEELTETTVYPSSSRTHQNELITKRREXAPKKYLHADTIEYDLTKTATVSSAKTSQQKNRAEKKLGDYPPVDKHKGARGRTQLYARGTTPGGGEPPSKTRTTQHARRNAGPYQKQGTH

SEQ ID NO: 971597 - protein, 162 aa, Homo sapiens
MVHTLTHYRDSSNKYTPSLTNGHCRDGERAHDGDQHEPNEKALRSAVDMNNTTRKSITSKQHRARQRRQNPRRKAPRLRLETQEDEQGKQTKACVEEKMGMRKEEKTTNKQTVSGGSYLRAREVTERSKPAPRQSIRVAETAPGGAGTMKYAAPAEERGTQK

SEQ ID NO: 971598 - protein, 94 aa, Homo sapiens
MREAERVAFQYFSLPRRVSPCLSRYNRIENPRSQRLQSTHTIVCRAYYTRAILRANQVVSEHGVPKTHRMERTRVWEWSPGGLELGAHKQEARG

SEQ ID NO: 971599 - protein, 160 aa, Homo sapiens
MHGFRIRLFHYGPGPTDKGSSLTVLVLVVSPCWAHAPEATPAKIRCTRSSCPQGYDGSSLEHPIQGNGAWQVISPTRQPLRITRSAAASPQKAKVAQKQLTSTRGTDYTAMGLCPEPHWNRGAHNTGGKEERTRHAPGRGMARTPVLPYPGCPNRCKEYT

SEQ ID NO: 971600 - protein, 130 aa, Homo sapiens
MQILGATGEKPVAKCWRFSELADLGCRLLMFTGSTVGATQVVLPALGGISYLSVEGGYSGWWCMTGEGQQWDFQFYRLRCPGYCVQWPYMEAIKAFVALGPKKSAGTRGSVPSGCRPTELSTSYGGEHRR

SEQ ID NO: 971601 - protein, 123 aa, Homo sapiens
MRTGANEERVPSHSFREKEKKMSLAAKRHAQMPNGEQERTTKTEREQTKHPDWDMILGSHHTNNQSHHKVMGDSEQKKHTHNIDASEHTRADQNKKIRQKKKIKLAKQEGVNRATQVEKKIQQ

SEQ ID NO: 971602 - protein, 105 aa, Homo sapiens
MVGMPCGTQSSGGRRRKVKSSRGSVLLECRFLLTSEQFVALGSPSLVLTYFKSSVLGQGLATGEVLPPVGTLGVPPFAAGVRGRSIVGPATCAELVLAFAGLRRR

SEQ ID NO: 971603 - protein, 114 aa, Homo sapiens
MGDSPGYTEGKQTLRTRVKTPRPWPPNDTCWGAHTTQRKGQELSPAQRDGANLKPTLRATSGDGDSTLREQTCGNKRDRAERAPPGEPQDPQAENCGHQGISPATTRVDETTAE

SEQ ID NO: 971604 - protein, 173 aa, Homo sapiens
  misc_feature (87)..(87): Xaa can be any naturally occurring amino acid
EQKVEPALFPPVPLFTAVPSRSFFPRGFLWDEGLSASVDGFNARGDPSLTREALVHWLGLLNADGWIGREQILGDEARARVPPEFLXTDGGKFRRPSPQAYFACSPYARGVVTLYDVGLFPFLDRPLAPACMPGFPGSIRASAGPLANYFFNPAGPGTGTLPYQPYWNPRTYP

SEQ ID NO: 971605 - protein, 108 aa, Homo sapiens
  misc_feature (42)..(42): Xaa can be any naturally occurring amino acid
MLSPIIQRQQKSSAGSNKGLPHAVFPREEPPARREILRGGGXGRPSPHKYCLRPEKKRPPANLSPPHLLLLNLLSRRGRRQTPAFLLMRPPRKNPRNVFIHPPRKNND

SEQ ID NO: 971606 - protein, 98 aa, Homo sapiens
AWQQESHEMMEVDEAGSSLHRIRRWTKGTETRAVAIVAAPLVNRACKAWGRSGGRRTQQEEHELPVDLANHRTVDRDAEDVDLQSTIGIGQALKDLRY

SEQ ID NO: 971607 - protein, 217 aa, Homo sapiens
AFRYTAYLTGRVQVHPGEKPCELEECGKASPVSSSLTQHVRIHAAEKPCECKECGKAFTGLSGLSKHVQTDPGQKPYECKDCGKACGGFYLLNEHGKTHTREKPFACVVCGKYFRNSSCLNNHVRIHTGIKPYTCSYCGKAFTVRCGLTRHVRTHTGEKPYTCKDCGKAFCTSSGLTEHVRTHTGEKPYECNRCGKSFTVSSSLTEARKNSIPERKP

SEQ ID NO: 971608 - protein, 511 aa, Homo sapiens
  misc_feature (162)..(162): Xaa can be any naturally occurring amino acid
SDRALEEKVQLLKNDSLCLINARHERKSSSTVKDRSVDDEHTSKPWLIRLYCLDVAISLESSVHKDIIQMIISQQNYNYYIDMESLGYSWISHTLISHNSPRTACSLQASNSSASFCTHSSAQVFMQTLCKHVRYKLTLHLYSVRKKTKEQYTYGTTVPPGXKTTTCKDILISSRITSYSPLLRYIPCSTWSVRYYGYENFKSFRANNHCGEKKRGTIPTQHRKPTARSRAHTIVERGRMTARTRFTDHWLALQTGITSNHARSPRQGTRFGDSTLSAPKSHRGTLQLGHQTSQGQQKHTHERRHAVQHDPTGTNPRQEHRTNRNDDATKPQTHKARHSTHTAGSQQHNTGTAATIRKGGGWAQRDEGRISADTYDGDAAVTRGRRKNVTTRKQGTQGEGRPSREGGESQSTRLEEGSKTKRRGRGTHEQQGGNQRIAAEKEEERKASTTKANRKATQRLRRERRRRREAITNTQRCERENEYRETKTAKETNEATAGDERQTRNKNGDPT

SEQ ID NO: 971609 - protein, 126 aa, Homo sapiens
MTSNYKLYSPSQLHLFATPYPPIQHIYTTIPLTNPLTPNHSPPTLYFTSKGHTTTRPPTLNTHFSIDSNGNKHHPCQWAPPPTSGHHTNKTLYSAHTHHPTSTPHPATHTTHTTPPTINRTTTRTR

SEQ ID NO: 971610 - protein, 290 aa, Homo sapiens
MSSPYTIAGDLRLVLGAIKLSSQQVIKYEKPPMTISHKYQSDPVVRLDPSVNHRQILRSPESLPDPRLLAISYTTKQTDKPQHHPSFDPAGGGEPSVCTKHHILSFSVTHEDLYSSSYQASDIISHMVTYYSGNQEPFGYMRYGLSYDINRIPRDTSGGTQQYYERQAIDVEHRSICNLRMTQNIAITTGTRNTLTRPRRDATRTDLRTRMTPKEHQHNTKCLQGRIENIPRTQKATENENTHTMAQSDTMTKKETETKRQQKSHKNSTTRKDHTQTTHNENEKRHNKRR

SEQ ID NO: 971611 - protein, 226 aa, Homo sapiens
HSFYGDIYYRNFRVNFPFAQTPRCPPLVHAPFLPGWGGRGGGRSIITFCGNEFRCSGLDFPANVTVARPFFFMRGYFFPCIGFGRAQLDRTLCHGSACHVKNVIQKPYGAQWFPKYSHTFKVGDREGKVSQKAVGFCVVPGQGEQGRIQKNWAPRGSEFSEELGGSHRPGPPGFGISSGGRGRLSLEVEDGDGIELRWAHSRAGATGSGWMKWTSVCTMAWIGGVM

SEQ ID NO: 971612 - protein, 175 aa, Homo sapiens
MRRKRGADVTEGHDRAEHRVGGKGKLTHSDNKIRRGNTEGHPYIEKKSNPTQLSPPEKRDVIDSINRYVEDTKGVEINEENNSAPRVQHNNNCVKKRDRGGPRTAYLRNKRTQHKGGGGEPTHTPMSLIDSRFSRPKKDYCPPRNEKARPLSNLCRKKKMVAAPDNGQPTDSRRR

SEQ ID NO: 971613 - protein, 51 aa, Homo sapiens
MPPDITHYSNSPLEGKTLNLYALPDSNNIFFGPYFENMPGRFYATLHTDVQ

SEQ ID NO: 971614 - protein, 140 aa, Homo sapiens
MERVVLGGMSIFLKKLSHVIKQLVSDEDKAQLASTVCPLKDEPMAYTSFETRSLIEVGLYCLNLGMIAFIGPRMVTSMWVTITSRYKTSQWLKNNRVQGKNWYGKKWAPCSVENNTVFNVCGKALSIMGCCRNGLAPKQA

SEQ ID NO: 971615 - protein, 203 aa, Homo sapiens
MLHRKRQTRGGAHIKIKHRAKIPLYPADLGLQSGEDVKILSENSQRTRGLTPYTYLPRYRATFVPQFPNIFLTMGTPGFAYRQKAPTACNKPCPIPSHEDHKGAHNLTNTSGVPPQADTLSTRAREEQTSHVPQLFVRRHTRAEFDQQGRQQTTTPGPNLIHRSKSNQGFRADTAPPRLPTCAPGGTTGQSTKNRHEAARHNR

SEQ ID NO: 971616 - protein, 144 aa, Homo sapiens
KCKRTEIITNYLSDHSTIKLELRIKNLTQNRSTTWKLNNLLLNDYWVHNEMKAEIKMFFETNENKDTTYQNLWDTFKAVCRGKFIALHAHKRKQQRSKIDTLTSQLKELEKQEQTHSKANRRQEITKIRAELKEIETQKILQKN

SEQ ID NO: 971617 - protein, 40 aa, Homo sapiens
  misc_feature (23)..(23): Xaa can be any naturally occurring amino acid
MMQTNRLSGLESPTLYHVCRRTXHHTAAHEQDSAEDSLIN

SEQ ID NO: 971618 - protein, 340 aa, Homo sapiens
MKLQEERHILEAGAAQRASDKIAHTKVSHTGEEAHRRGQVERTRITRGDTHSTTNMGANLSRASPPNNGTPQRRRRPQKVEKTAGQKRGPGAREGATLREKNHPEEKADVESNRSHHHDNAQTRQSEYQTIGRTIRTDQTTTGQTRPATRRTQGKRTRRLGRSNSNEESHQRTSNPENGGTRKRAETKPPERTGARNQPEHGKVRNTTGGNHQTAPHATTHGRSTDAGEHTRTVESARKHQAAHYGHAQRQSREDTPAKRGGSADALRTNTERERATHDPKTPHSAARRPRKEQDNEGRATRQETHNTKDTRERSHTKQEEDKHRTRAHAHAREETTPTN

SEQ ID NO: 971619 - protein, 207 aa, Homo sapiens
  misc_feature (196)..(196): Xaa can be any naturally occurring amino acid
MVWEKTRPQDRWPINLCGREIIHPCVLKGSGRVDKKDAHHSVVPTHTYSAGYEECSTVFSRKVCRSYQHTYSRDLSHSGGGGGHSLYCSGALGAQEVAFIIIDDEEETRKCSDGYIHTTGNGDTKEAHHRVVLQRKPAGDSSIDMLKIDLTSDVDKRELVPIYKNGALPDERNTMCVFHQTEAWCGTPSEKSSTNXDHAGGVEKDGW

SEQ ID NO: 971620 - protein, 524 aa, Homo sapiens
MCPKEPKGDPDLIPSRQSSRNPNILITEPVMIPTFGSKAIEGIHHLIPETRKAAPPFIDTSSARESQMMDHGTSTIPICQSIDDSSGSLTYRGPYFHMPRPTGGPHENKWALLSHRTCILPQAPVPASPPPATGSQAQSTARSEQPPPPRARAAAAPIAAAQPSPRPPTSPRRPRPKRHTRHSPLTLHPRQPSPTHHHHPTGSPPGHTHTRHPPPPNCAPPPPPRRSPNTAHHTGRPTHTPPPPRTPTRPPTPNAAAPATPTHTAPQTRPTPPPPPHHPPAPPTPPPQPPAPPPLRQRPPPPNPTPNTRYHAPIAQPPHADSATPDIHTASQDGRNTRQPPADDPPPIHTNRPDDPTTPPQSTTHIAPHTPTTHRPQHTGPPPAPPLPTPSLPPTPDQPHHPARPAPPTTPIARAPPACPTHTPPNTTTTTHSHTPPQHPQPTATAPPTTAPTPPPDAAPASRTPDRNRPHRHPSPAPGTPHSDHATHVHPTADIPPHGAPPPPREHTTRTDSRPTTATRTTTS

SEQ ID NO: 971621 - protein, 380 aa, Homo sapiens
HCRRRVGTAYSLLLDSRVFGDRGYSPETEECRKPINVRVTTMDAEPGVCNPAKYQVENSFLIRWSQTIGLREVWYFGLHYVDNHTGIPTWLKLAYSTGVCLQAGQARQNPLQFKVPGTKFSPCKHVAEAAPSQGTSNPSTTLSSIRQCTGTGNPFTRMQDLTAPTCSTALMAHLRVLNASWPGATVGGHSRHDKAQLPPQSWGSPPRLLGGRARIRCQQAAGHGDPKPHQTHCTQGAAKVGPRAPGHSQGWLAIGVPTTRLAACAPQVSLAFMVGKFTCQQWAPRATLGDTMAIADFKLQYPRKYNATTRTTGNTPPQVPPAACRYGPWARAQTLYARQHAGGKGNRETDWAIPCRRNTPAHHPTTGNQRGPPHPPPEQE

SEQ ID NO: 971622 - protein, 36 aa, Homo sapiens
LGFRGSAVLGVCWQLRSPPSRAARMMNRTTPDQELA

SEQ ID NO: 971623 - protein, 128 aa, Homo sapiens
MNEQQGVIKGPGGRKRKELHTSLTQRNKKWGHTKEWNTEEGRGTNALQKYGGVHPNAKGKEEPQGGYLPGEKLVGANNRAEDGLPEMYVRRRATMKSKKRENGAATKKIPHKGAQSKRVTQALRVTTG

SEQ ID NO: 971624 - protein, 257 aa, Homo sapiens
MDSVCSQQHTPIASLMCSPCRQLRGQVTPSRPAAQGGASGVQLRLIPHISAPRPVPWVFPTLGIMHHNKQATAECTGGSEAAILGLLDAILARTRTISGGLNAVQLADITVVCTLKWLYKPVLEPSFRQAFPNTNRWFLTCIYQPQFRAVLGDSDPGVRSMASLIVPKFARDPSYPGHTTDSEGHTAPTSSSPELNKRTATQGSMPSGSDDSTWAGNDNERWKGEAKGTGPLRNPAQNPFGDQHKARHHSGPHRETT

SEQ ID NO: 971625 - protein, 219 aa, Homo sapiens
MKASGTQKGGSRLKGAGDHTLGGMRYSHKTWCIRRTVALGGHRGRGVGSGGAQAGRKEGAYLFLVGPLVWSEAHTPEVCGSNTPGGCAPEYSHKCSQHTAGGPTLYTGTSLWADTTAGHFTQISPRGGNRGVYKGTTGGYVCDTEGRTSVAQENPVGHFHVVVSPASHKNTSWGRSPRRGDTRGTDTTRELSPPKKRFTENTYRHPTKRVVGGPTSENH

SEQ ID NO: 971626 - protein, 363 aa, Homo sapiens
SASGFHLIIIRILPTSDFSQIAKNHESQPDGSTATARRGPQLRAEGRQDSELVLGEVVRCTVMSRAMDIIALRQVWTARGSGHDMHLAGTAADRVKMHAHTTSERLITHRLTGSWVPTPDPRNLQRVTQGARLLTATIIDLHQGNHSDQAADTRDSDSGTPRRRRGLTDPGIRIQHPQTAEIKSTFTARRRPLRYLQDEPHLDVRLKTHSTQGTRADTHRQIHGGTQTELTVTLMRSYPKPTHRPDSAGQTHAPTRDAPTGDPFNLASQPMGELQACTAHWDEDEGDAPLILTTPITQITMRTSRAGATALPNRRLISQSFLAQRRARSVHTKWTKGVGGILNIICRTTCLGIGPSRGDTHAD

SEQ ID NO: 971627 - protein, 110 aa, Homo sapiens
MTKHGGRRQGTTGQANDDKEKEDIRDRTADERQEPNARAAEKTSEAEAKQRKKQRRTGGREQRRRQQRKQTVERSSSDTGRRKEKDKNPEDREIRRDERKRGKNKKERKA

SEQ ID NO: 971628 - protein, 217 aa, Homo sapiens
MLRANPRNTPRGGGHKPSRGRTNSGYPAVRRENAITADNLHPSRDNTVVVTNGGDPTLRVVTNYLPNHALNYYKTAADAPDHKDRWGTPDQKEEKFHHIMDRGDNKEGALAPNVGAVPHCGEAAAFEKKKNMGLTYRTLSVDPHTWEEEPPETFQKLPDVHETNLTWLPKRSREQGAIGSAQGGAGHTWCKRTRPASGMQRSHRDMPHTREGPPDRA

SEQ ID NO: 971629 - protein, 139 aa, Homo sapiens
PSQRVSSFIKNTSAINNSWVIFRARDMGQRQLGYQAINKQLLQTLPFFSRWTITKNLKKRHIINTQWNVSQLVECLVNTEGKRVIEGGGLCTYSPHIDRPVCGLSHKLFLHKSPTPRETYLERQSVHTVNTEVDRELNL

SEQ ID NO: 971630 - protein, 150 aa, Homo sapiens
AVRRGGLGKKVRDCCADSGTMNIFDRQNQLDALDNVSYNPEQRSSQLKKVYASFALSMFVAAAGCYVHMVTHFIQAGLLSALGSLILMIWLMATPHSQMKTEAEQDWDFLLDYAFLTGVGLWPMPLEFFVLRVNRQSSFLTAFHRARHMI

SEQ ID NO: 971631 - protein, 216 aa, Homo sapiens
PIGVFCASVRGKRRGPVFLDLPFAWFDGALMTPGPLTCLQFRKLRCAPVLRPVAVLACVLPNLAGKMKRLPGGRDAAAGQRGAGRGRRHKQGGRGPVVGIDLGTTVLLRRRVRRTCRVEDHRQRSGPTDFTPFLMSPFTPEGDRLIGRCPPRTSSTSKARGTPGPLGTGQSRASNSGPVHPFGTFDPRFLVATQGQHFKGFLCPVPNRCVRTTDHL

SEQ ID NO: 971632 - protein, 272 aa, Homo sapiens
KGGARDPTQAPGISCSPHPRSRRYPETVTPQPPPTSGPLGTPLCRLTHCALAPGRVASPAPAACIRTGHPGSSSDDRALLRLLLPRSRMDPGLGDPPCPGPPGGPPPRGRAPGGIPQALSRPPGPLDARVCALGCPMKPPNEMSRAGALPCCRQGSSTIGGHAASLRVPTCGATRGHGRGQGLTARPTRTAIDRTAKESLPTRGFGTTRREAPTFSSTRQPPPGEEVFYPPKGGSSISPRGAPPHKGSPPTGKAFLWAADTEPHTNITPGGH

SEQ ID NO: 971633 - protein, 227 aa, Homo sapiens
MLLGRKLGTWSHAWTRGQARGPTAPTTTPGEGGVENRSQIWGGVQAPERRFTQEIVQFSGSVSNHAPAPAAEPPGGGSMYTGTEDGRKRGSSGPGYDGNNGVDMRTNRRTLSSQEVTRGPKLGRNPLGTPDKRVLCPTWAAERPRGNSNRGGQRLSGSPHGPHTVGRLVCSALHRCGDHSHHISRRVAKKNNIDPLVRVQNRATDHLVRAVEVPTFWTAYEAKPILV

SEQ ID NO: 971634 - protein, 407 aa, Homo sapiens
MREILSVCKERGHRETQEDDVDLSLTCEPCVLSQGEIQLCVCPTSLLCRAADTPFLTRERAHVHITTHTHSHTHAHTVEGVKRTLPDIVILWCCATIVVRQLLWQQTKLRSSTPTLLLCRTTLWRKQKIFWWGDIHNNTNGVRPTCRGSTPRITAGLETPHTTYMRTVLTPLRPDDENRTRPLEPMTDIQRAPPVERSKSKDNKPQHTRQPRPRTETLTREETRGTKAPVEKKYRGDQQQSKRRLPPTRTYSKHSGAPTPTNESGTSAAPPTNGAAVTGERQHQIISTQDNNSRPLTVWHHKHNSPPEQTEGHTYITTRWRQLIPRTRADNITQPVQKHTKQVRTQHHSRPMTHTQTATSTKAAHYLEKAAHPTVPHNQTSLPARSSDQPQQTQEQDKPHPHISTRL

SEQ ID NO: 971635 - protein, 282 aa, Homo sapiens
MLCVACALALGAPNTNATVSEFPTGRADAARFGLPGTRLALYSGGALGPRAWATWRSACGLHLFCLRRTGEGSLSCPPVNFEAARFPDALEAPCPCLVGVRTRFIPRKALPPFLRGGPLICQPGGRPCWPSPSAAEATRRVGALGQGLFFPEGPEGFPPEALQKLLPRRGCFGCRSASREPFFPQQAVLPHKEMKSPLVCNKRGFPASVDKSITHGEYYTDGFFNQKGWAGREYIIIKCFCFAGANTKNNRAPHKISDAAQVDIGPLQDTTRRYDYIIDALI

SEQ ID NO: 971636 - protein, 575 aa, Homo sapiens
MKTYTSFAEHHSKSYDHHASGYSTYSTTSDTQSEGATPTSPRREQLTIKHTTTTMTTRYPQRTASHPTRTDQMTRTTNEHTTANPPTRPGHTQSTQHHTPERTTDKRHTKQQESKRRTQTHQTKKSNNKQRRQHKQHKTRTTPGDTRHTQHKTTQGDANNNNPNKKKQRTTRTKRHEETTKDQNTTTTTNPQQRAAEKTTTQAHNKKQTKQADDTHQTRGQQTTKTENEAYSTALNNDGQPINERRAHTQQPRIKRTEGKQNRPTPTTAVRKTTLTPARHNTAPEHRHTHNTHKQPKKPEPTQKPTTRHKHARAYNHTGHNNAGTRRKHTHIPYPTLSHTTNPSTTPHPLHHNILNKTTTTTYVLDLPILTITLQTHNNPHAHHTKKPPLKPYNNTHNTQPTHNQTTSNNNKNHHQPHTKHTTTRQHAEGAKLSGTSKLTNSATEKQESQKECEESLETMTSRTRPTTQVSTDNSRHISKAKNEAQAHHEQESKHNTRPPHSHNTADHHPKRTHWRTSKHASNTDSAATAEETRSQAHRTRQQTQYVESKHTNDTHTPTHSGNTQGGQEHRKTKK

SEQ ID NO: 971637 - protein, 115 aa, Homo sapiens
GRPLFDFIFSDQKRIILPNQLYFLEFKTVRGEKSFSWPWWENPPFFLYFFGEREFWLWCGSGVEVQRDGNLSALQREHLSVPLQWVLKCDSSCAFSPPEDSVGLMRRVCATSAVA

SEQ ID NO: 971638 - protein, 478 aa, Homo sapiens
MCVNSGDITRMWPQCPIYLEIIVYNRVKPSSYISHLYAHRQKVGPKSTNCAGGTCGLSEDPNSSPVAQTYNLWRVYTRVMRVSRDCEYVCSLHNIDSVGAILIHTTRFVTTLMCALSPPQEVYPLLYNTGDFVSSSLCGAHSLLLCETTQPAAIRQCCETRDIRSTNPQKTRGDKQCGHHLNAHKPRHLAGERLPHSCGNTAPTQPWWCSTTGSSYIFPPTTFVPVEKAAHTRLVLYHDQQHVLHHLPPHMTGVFLQDAANDERPTNVDKSCGGTALTTRRQLFLWPPKLRHTPLQRLKRGSGSKLSPAYNISRRLPPDFVWHKSFTPYNFITDRPPIIEVGAHYAASDQDTAGAPPRTNHITTPDAARLPPLLNKTDAPTAGANSTAHESTLRNTAVPKPTPARGPRERTTERRPPHPHHHNISGAPPPHIMIAAERPQPNSRRRPPKHMPWRTSTQHITQNRPVGSDASHTPPASP

SEQ ID NO: 971639 - protein, 661 aa, Homo sapiens
  misc_feature (323)..(323): Xaa can be any naturally occurring amino acid
MIHTTHKQLPVGLISSRTITYFPPPTLRSLRALRRADDAASPRMRPPPVRHAFTTSRAASPLPRRPMPRLRHTASALASPQFCASPSSIQSSPTSLTCAPRLYSIVEQPQYPTTHPYHLHLPCAVLLLQPSPTAQLNTHTYILLIPPDPYNTQSIILTSSVLHHYLADSCFNSLPPPLLVLPTRTATINTILISIYTTHSTTPPDMDRPLISILTYLPPHSPPPQPQPAPPARGLPPPPLAIPLNSTIVVPNSITNPLHQRTIHTTTTDSSAELRVAPQMTHARAMDRRAVRSSVVRASRPLAARPRGHGLCRHALQLAKLSXARDSAARIASQREIKSARQRIARRMLGRSSHVSHSSAWLGRSALRWPLTALVVTSPLMLVSSRVPSHRPALSLSASSRRAAPPPYHSVAQLVTKTLDLVLLADDHKTARHHISPFCYSELLSYLRRLVTTPTDSSTSRLALLSAYRIHRPTFTTRHRSTNLPSTLRHAPLHPPTPYSRTPPHPYTPSHATHSTHHTHSCTLPTSPLQSYSGPSTPCDYPSQYTPLATQPRAPAGSPQPEPPHRQHASTILSPTSPFLVQTQDLHIAHSYRLLPHPPPIPYTSHPTTSSHLSPHAIHHPRSACPTHTIALSTVSTNAHARMLIFSLLMSGRWSNTNTLM

SEQ ID NO: 971640 - protein, 127 aa, Homo sapiens
QWSSEFRIGGGGFPARRVGASRRMRSPSAGAAGGRILLAALSPAVAPSKEPIDPLKEEALLVRLMAHPTSLETELQLKQSFRVDEFSASVLTWKTDHVSSFQLSNTIVFVVGLPSKRMALWVLLFPN

SEQ ID NO: 971641 - protein, 64 aa, Homo sapiens
MDEKTIALLCAGLVITVIVIVGAILFVPGEYFIKECTGLGLICDFYGDININFILIVRYRDWIN

SEQ ID NO: 971642 - protein, 371 aa, Homo sapiens
  misc_feature (179)..(179): Xaa can be any naturally occurring amino acid
PHALPNRNGSLFYDSLLNPGLRLVATPALSPPRQVERGRISIHPTLHPGADGRTVTVPTPAASAPCMWTTGRAEPSACAATTNLVLGTIMAIHPRSCKDKGGSVSRLLRFPGQSHSFGDSGVYDAPRFPYSLLAGPVCCPMVPRGPALRLWLQRRPCGLEPGLRWRPATLPLRDGHVVXPLVQAPVEPGATAGTVGRSVLAAAWIGARQASAPGAHGAQSVGSHTGVTLVSSQEGLAPLPDQGFPQMSSNPYTVGLKKLSPFIHTRDSQETNGPLFDPPAQALSSRRISSARLLGHSARGPAARSGGAPPCGCAAPFVGPPGRALFPGGAPQCGCFSPPSRRACSGVALPHELRPPATRCLVRLTAALFVA

SEQ ID NO: 971643 - protein, 298 aa, Homo sapiens
MNREAHTRGPSPPYTFKAVYIVTQDCGRFSTNVFHSCGRSPRGSNLSHRALWHVIRDVYSNSVVKQNRCIHSQECPKNPLENTGQWVLLLCGTPTVGWDETQRYRKKSVGKWRHPRVHMCVISPHTVTTGKTYRRKAQEHRHATIRWGPREALVVDPKGKSNGDTEGPPGNENEGGGTTSKQQAPQGNQKRTTNKMWEQLQWGPLGNRGPIVRNMAPNTRNETETQRLEQVAQERTENTAALCEKSRSDKPPGEPPTPGRTSVVVTQGVQQKLGKEERALKEKLSPLWKGGPQESYTR

SEQ ID NO: 971644 - protein, 430 aa, Homo sapiens
NSAWTEPGARSPPRTAAHSQPSVTSFTAPIGHAPRTPTRRSRRRRQTPTNDRPPSSYRSTRHDGTAIPPRQDAPEATTQDSEAAHPTDTDQPWSIIRLHTIYHVTMIITYIKTRACHVASAQQRNGQHHVTIPPQLVHAGQQRQPVPAATHCMQACAAHPTHGGPDIISIPGIITAQPSHCGMPLRDSTARPAHAPLTVVHTPICNKPHVQSTQPTNCETSDPNWDTPAQHTMTPTHTQVHHDRRRTPLTHAHMTPRVNRPITNHIGGTPTMTPQIGSHDMRNDDPDNPARLRRNSTSTRDHARPMEDNTRTKGDTHKQTYGPHTNAPISRREGGQPQWLQPQGSVSTDQQGEALPYTPSYDKDGNHDNPITRQRSGTQHYRSRQCETAEKHNTKIELERNKLPTRPRTKTTASNKANSTLNTHATTNEA

SEQ ID NO: 971645 - protein, 72 aa, Homo sapiens
GGKKKPRETAQGSRPREMDEEDTAFIASNTTIEEQKTTRGSVTSEMAAGKWAHWLQVDLLNLGKEVELSPCA

SEQ ID NO: 971646 - protein, 138 aa, Homo sapiens
MCPTWGETESVIRGAGTYKREAPPRNHEGSAASLCKPTLSRNSLIARPHQGRHGHKPLQRGPSVLLGREKPKREKPPREKPRGGAHPPIGWRTRGHPRRALYRGAPNDKLQRRIKTVRVRPCGAPGLPQYDTNQFFLL

SEQ ID NO: 971647 - protein, 65 aa, Homo sapiens
MPLTATCETQGPTKTIYTRAHRSRPCPWEHTPAQQLSDHHYYTRVSRPTPAAQQTNASTTPPCSQ

SEQ ID NO: 971648 - protein, 93 aa, Homo sapiens
QRSPVSPLASRRSVSPLPAFSRTRADANSAGRCHARNKESYRMSDIPEPPHLFDPLQLMQVSGDEPDSRWHVTDYIHIRIHTEKREEDPYYCP

SEQ ID NO: 971649 - protein, 146 aa, Homo sapiens
MSIMGSVVLAYSGGLDTSCILCGMKRSNGLMTVTCPNLAKQWAMIRDRTFDGMPRIEWHLIGFGGQHKGCSIEGDSQSCGSVVGCEFTLGAVTLSMITVGEHDTEEIRVLSLATSFFVGLESLDIPSLATTIRGTIQSPEGVGWCR

SEQ ID NO: 971650 - protein, 313 aa, Homo sapiens
TILSHLNQHIILQRSTSVPGPWGTPSREKVYQLPCPSQGSFTARGANRRCVNTTVQLYNRARRIKGGGAHECLLHNRCRGAAHKHRSRPEVHTLNTDGPGRHQGHSHSPQNLRATKYTITGAHEEQRCPVHHPHESRHPLKQSLCETVQWSPPVKKSHLMGVCATRENTQRATITFSVSILTDQREPYNIFRNKPRIMRHHMWAGNTHRVVPHAHMRRTPHCGQESRTKTERTQPWDAPPQLIQKRGPQRMKPKQRTRHRLIINRRQKRGLLKALLAAEGRHTTSFIDNPKRKAALGRHTSERQNPNNKPWRS

SEQ ID NO: 971651 - protein, 244 aa, Homo sapiens
MWERVGERASPPASHLLCDPERVGQTSFTECRPVSGVVTLCGCTQTRPGCGYLPKWCWPTYFSLPPEEGRETHPQREPLFPKAHRGARGPKRFVSVAEPEDKRPSPFSQACLPRRHEAFPLVGHFPSGCVSIIRGLHTPCGVCFLLTFFLLNPSHLLGLTVKFGIQTQILWGMRVVSPQCRPILCWDLFSFCGRTLIATCSNTVCFSTPHHFGARYTPFSRVTHSRATSSFHRFPLSIKDHDES

SEQ ID NO: 971652 - protein, 366 aa, Homo sapiens
RSQCGWLQAAGGGIAHSAPWQQQQQQQHRRYPRPSHAPALVQPPFASLCSSSTSRRTSGSISLDRENQICMKFKECLSPYFDYRHGDWHRSPIQTDTCEPVTDVSAGVQKAATNDSVNVLARGLIDVETDNRRDVLLTWVKLAQTRLSDLSPAGKFARANRLLEVGPYGKNRVAQRQLPRELGLHHALATRFPLAVAFSLERSRFLGPITGASEPTVGLLIPPPVVNGHRKSVTGIKQVRLGTQRKPFIAGMDAPRSRYAEWTLAQLPRAVCSTFARSMSGTSPSDVQPCAHGTFTLSGQFDANENLVNRRKAAPSCCITLGPARVNTFVPASRPSRAFSQLGCTVGPLTEPSWDTLQNTPLRRLL

SEQ ID NO: 971653 - protein, 118 aa, Homo sapiens
  misc_feature (68)..(68): Xaa can be any naturally occurring amino acid
MSLPRVATVVSLWLCGPPLCTGGDDPIHRLSGHKSLEAYGGTPPFKRVDPSYSSSNVMAPQETLCKGXRKPTGGKRPRVGPCSKRPSKTPKAKGKPRRVKCSRTDHIIKEEFSTGLYV

SEQ ID NO: 971654 - protein, 283 aa, Homo sapiens
QEKNPAGVYRKHVLSSDRLSVKINPSMSDPDGIQGETDELVKRSEIAGYRYSAGTAYSVLPVTTYSSAIGNSYSKMMYVRNTYYTWLHGVCIELSFDDRYFHTLGGYAHGPLFRLLRAYCLRSHSASTGSRGMSRGQSAALHCPYTDRKLLTFIARKREELLTQMSQGAKVTYDFPDIIVVVRAYVDVPSDLETNIKMIFAANISHDEAIDARHGLTLRTEQVDPRVHAAELGPTAERVRAACSFWDALVSCCSVAFLGHLIGTDRKQSDNIDEERTILGHTT

SEQ ID NO: 971655 - protein, 246 aa, Homo sapiens
MKERCGTPQGGRGGNKFLELLWLERTRGLWPIVLPQVRILQKAEGGLGIPFCDLRGQKGGLGALLGDPLCATSPQGAGFHIPPSCLRGVAIKGFTLCPWQSPLKFTPKWWLNLQGQINTVTVQAGETGGVTERHQGVLPRSPQLCKLSSWNPVGALCCIPQVVFTPSRVYICGLYLWVAPLERGYTGGLGRGSWARAWLTSQRNVFILGRQALACCPTAKIFFPLVPPTGQPLVSSHNFFVLGASQ

SEQ ID NO: 971656 - protein, 263 aa, Homo sapiens
MGLPPLWLFRLLLPQLEFSRRNGKSLEETLENTACVRLLCSPSGSPGVVDCGVGESYVESPRCDHQKPVQHLCCAIVEGRDKGVTFYTSSFSTILQNFSHCVTIPIYICVGRPPPVCVQQCDALVMCVCAFSCGAFSVRHLYLWCSLWDNNMCVCPQRRVFRELLCGPVWSVPQTISRRKTGTEVCYIFLNIFSSLCVSPTNEKKPFILAQRYFVFVSTHLSRGCVAWSENFRNYFPQGLEKNLWRPLKSPRFLPTAGPWNQI

SEQ ID NO: 971657 - protein, 279 aa, Homo sapiens
FVSIGHLSLVVKDIETKVLRPFFEPRMLRICNGWSCGIAPVADHEDISRPYSTEPNNLKARNSFRVQRTDSPQDMWAWSRQRRAKCVVVVIKRRSGAEEDCHLLMCGPPSTRMLAPAQQHQTMIRKNKYPPDLRMAAIRRGPRHPAQPEACDGEEEAEPGHTKSILSPLTTEQKRSGMGFSSKATATKQATHQKNERNRQQTDPTTPEKKRLILEHHGSRNPKQTKRAKTQRAKTNHERPEQNEPQTPKDSDQYKRETANQETQTNAETTKSAENHGGH

SEQ ID NO: 971658 - protein, 352 aa, Homo sapiens
DPGIAREKAGVPTLKVRKGDFRGLWNWGASRRRRHLNARRSIARAALRGFPKPDRRRPQTGLGGVRLRVLAALKLGQWGHLCGLKGRSRGRYLPPGLAIRLLPPRGGPRRSGGHEETGSTPRTSCPGVSNALVRTRNAGEHSTAITLRGHQWSPRRRSPWPGMGRGVLRGLGRRDNQEIELTLDPKAWDAGFQRQMWWPIVVNKERSWHTGGWTCWPNTGIKTLAGREYSLSCVPEVGSPKKGQGIPDKTHFQGDIVHLNRRIRWTRQRSRGAPAPVTFFPNGGTSDVEQGPCGTYTPYYERLRAGRIRNTDTRREEGRMPRVHPPQRKPPGPGTGGLRRRATERNTLGTRH

SEQ ID NO: 971659 - protein, 194 aa, Homo sapiens
KLRLMPRRLSELHCPPERFIRKFCTGIDPISSSARTLSRYECLTQTQKGGWSQDPQTVHWEHFSYKLYLPAVSYQLPWEIQVLWAYVVSCPTRKLMSQEFDSYTSASLYRILSKLQKYLVTNSCELCGRYPGSHSLQGAKAKMDWKWAFDLLSLQEWHFTQRSTLSAHAQSLPSLSVPLTTWSSQPRDYVRKRR

SEQ ID NO: 971660 - protein, 264 aa, Homo sapiens
AGKPVRVIRSFKGRKHPANICSCKQGPPASCMAISSQVVQHHWPSRFPSKPSGIHCVWPLSLCQAQQHACLQPCVHWHLMHRHISTLVHRSIHVFTDYHMVIPARVSALIEHHTAQRHSTALQPGHQVHTAQRSAQMVKHHHTHRALHLSTHRMHVGPQQVPLPKGVGTHTAQSAAIPMRKPKATLGHVAFARQRSKHTPSETQRNTHSSPSEPATRIWVRKKRRRQQALGLEVLFVNRLGHIFTTLFPLWIGRQQGHSRREWL

SEQ ID NO: 971661 - protein, 82 aa, Homo sapiens
KGCGFVVRSSCSDSPLSLSPRNKSVRKPARKAWFKGYRKTHPGAGGAIHRIRITLTRRKVKSLDTGCVPDLIRGAQRKRLSK

SEQ ID NO: 971662 - protein, 295 aa, Homo sapiens
STSSTQSLARLGSPDYRQLSPAQLAWIPRHHSQFCSSFPGRVSSGAPPGRNELLHGHVARMSLSSWMTWNRMQSCSSAIECAPQSEDLLSPGVQAFPGLGTITDEEMKSWRPPRDPAPSAVMQPIQIAEEHGHQHPVAAQTGLPRAHKAMELSESKKAPAVCHAHDSPKTTLKGANRSTTEAQKKAGSSFLLNGPDRAPDRGPAAFLNSSTKKAREQALLAAGTAFKRRPGPRFPQNSQVDPPSSAASNHTDRAPWWRHGATLEPGTGTNYRAGQSATGSRSGDMGRQGFELHIR

SEQ ID NO: 971663 - protein, 307 aa, Homo sapiens
  misc_feature (46)..(46): Xaa can be any naturally occurring amino acid
TGHQGGFKGHSTPREVHTFSLVVWATSHRGVRGCGGPPVSAPQPLXETWAVPRVQPAFPARAPECENNTTITRSGHVHENENPKEAAAASPNNHRERGRARESSKPRALCGRRPLCGGVAPQGEPVPAQRETQRVELPKVVTPRGVHNYTNSGGPRGTEAQTIPVGSASITERHCEAPSIRVAASPPCEREIRGDTALGAPGGHITPPVGEEENEGEERTNTAREQAQKVCRHKRAHNKEGATHVVLENQRTNHTTPMRTDHKRREGDTPVQRETPESGVAPHPLYAASHVAEATGVPCTGPPGTTT

SEQ ID NO: 971664 - protein, 650 aa, Homo sapiens
RVILLEYLLPDAETPGTGDPAASIPSPILTLPRHTERPYSTYPLSHHHTHNDRAEKLGAPQKNTRAYRATPDTTRTTPQGNETNNDKTSSPQKDDRTREPHTAAQPHTSSDTPRITANKRQTPTKQHTHPDTHHTNTRDNSTKTTQTHNTNRTTNAGNTTHNRTRATTTNIRTPPQYDPTHPQHHSTENNNDLQTKQRRPNTRRHSDKRTTPHSRHQTGSSHTLQYKPKTLQKYGTTTPEHRIRTNNKEPNLKQHISTSKQRCTNKNDRHKLQRRKTIAQQDAQQIIADTLNHLEHGRSDQRQHSKDRDKSSSKNNTEAKNSNSIEPPRPHRELSRPQYTTTTSPLSTQKAEHHGTNNGPTQHSDGKHDHEATRRQTAEPPDAKRAKTLRETKGNTQTSKQDHMGSLRYTSHKQPKQINQGTQYKRGPQYLTNEAHEQMHMGNNNTDKRTSTERHKMHETRGHNSDTAHVVRRDIRKQHRAAAPKRSLLTNDERDRDSYKPKQQKCETAPESRAKHPRTTRRQNSDDAEHSSTGISTAGQQSTTDRYVKIDKSNDMDRARRTYTQLTRANTENGKQRKEKTINYRGEIGLLDTHILSKSKTKAIDRESKDERARQQGTRRSRKKHKRRNNTDTSEAREAVVEAQYYTMKR

SEQ ID NO: 971665 - protein, 195 aa, Homo sapiens
MVDPGGAPRVSRVHTRAIGALLLPTLGGSAGEGLRGRKARAAELCHVGRGTLREGTRNTSSQYRCLDLSTTNGPGRKLGAEMKGSGQPAPRAKVGEPQGLVTCSGAGVGGEAPKGARVSQTIPDDNPRGGVLPDDITPWSRLYHEIYRARVLSPAHHTASLPVEGGTPPGPGPVWTSPHVRGHHALPAKFCWPDE

SEQ ID NO: 971666 - protein, 299 aa, Homo sapiens
MYQLAQDDMMASKPYMDVPKSCPAHRPQTPKACDSKLTLMLNYDSGRSDVFKDRFYMRTNPFSPGKLSSNLHYSVLSGHNLPNGLCKLLTTFAAPAACKFRLFQPGNTYWAVQGTRNVPHTDHPKAILQLLWLTLRTRESIIECCTWLRNKHRHNHTFSSSSTNHEEVMRNINELWIPGNPQQLRRHEYSQALGTPRYDAEKDHDTHELKAHTHTNGKAQTNTNIRNHIPTDPEQLGTTPRQGNYDGTTLNGKNMTQYNKDGDQTHETENHSKEGTRQKEQQPGKKTPTQKEHQHKDHK

SEQ ID NO: 971667 - protein, 213 aa, Homo sapiens
MESAHIGPPFEDKDGLPLALFFLEKLVLVQNMVGHSGAATAGSVNANINYKSTPSQFNEFYTSSPLLGGLQPSRELPKEKTPMCLVAQKKSPHNPKVVLAPLVQWERPHCGVHVNLHRWFVVPPMGQRAHSKEHSITLGNKRHNADNKTQAKGLAKMTPSCAGGVEHPRGVVVHAQYHQVKVVRNTTGQGGGNETLKTANYRASPRPTSQTLE

SEQ ID NO: 971668 - protein, 234 aa, Homo sapiens
MTCTRKVQEVTDASAKASPILIVIHIREVSPSTVTERGKSISLGLVALGMVEQRSCIADRGPKPRGLPSDIEHWQAELTKKHSVDITLDSQLHLHVAAAGLALSDITPVLIIIIIGSLIIPAQHRLQATAQGRMQAPARAGEVGPSTGADLGPWHALVRRRSWSARELADGRAESPVFMDHSLDVNLLATLMDLWMCLTPDFLLPRIGTASARSVIFPKEPTRYPGPVAVMRTP

SEQ ID NO: 971669 - protein, 269 aa, Homo sapiens
KTPGTPFRGKEKKGKKGPKGGGKRGRCPTPAGKGMRARTPTSPRRSSRVVIKKSAPRGGDDQRGGGDNTYPRGFIVRGGRRENGKEEEWWYSRSFSKTVSPSRGGALTQEGRPTGGYYNTDWWCRTRSGGGLPPTQRAGGGRTTRVVVVPHIAPQDNPHSALLTHKNRDKVSHSRVVIIEANTTNDWQHHNKDVSSRQHKSNVAPSLTKAATNLKRGGGQHNTGGNNRQRTVKHHERRQTGAPNKKVLAHPPHKIDNNPGGGLPPKKSV

SEQ ID NO: 971670 - protein, 88 aa, Homo sapiens
MRGRRSSAEPGSQSKRRPNKTTDTPRDDTDRKTPEQHRQRTRHKSNNTSRPNQERQNQPRGVYHKQKTTQHYTHNKHENTLTPHNHTT

SEQ ID NO: 971671 - protein, 302 aa, Homo sapiens
SLACSLSPLWGSRGRRAAVATASPRPPSRSPPGQSLPPAHPSSEWPRQGLESTRGAGWMVKPCTPEDFTEDSWESWLSGSDLRFISNSYKHTRTSLNESSSAGFHMSPLSEISWTLLDELPNIHSHTAVMMLANDSGQEESPNLASKPRCMYTLLRQEVPGPTGSLKADQGYTRTNHRQHYPIINGAPAKTPPLQPAHRPPRSPPPRHTNHNQPQTTTPPLTLRTLLAPKQPTPPHRTPPAATRPTNRPTARPPPPHAPPHNPNPPPHPHTKHAAPPPPPPPTPPPPPPPTPPPNHPTPPTP

SEQ ID NO: 971672 - protein, 321 aa, Homo sapiens
MARPGVESGSGRHLSPTPELDAAPRASAQKQSHPTTRAKRRAPPPHTRGTGGAHAPAPRGARTRHRPQRRRPQQPPGPTTAPSPRAPRGHASALKQSTQERHTRAPDSAAAATAAATRRPRPARGPPRARSQPRHRRRGTPGPPAAPARIRPGRPLHHGTPATRARPSRPRDARDAPVAHRPEPAPGRLPGPRRRAGSSGPGRAACGWGAATRQRARRRAETRAAAARDHAAPVGRSGPTAAGEADDAGPPGPSPAAAALGGVPRSGGPRPPPPPAAADHERRADNAPDRGSRGGRAVPAVDRAAARIHHKSRRAGATAPD

SEQ ID NO: 971673 - protein, 463 aa, Homo sapiens
WGGRHAAAGTPDGSAGGGGGHKKKGREHHTQRGGGGERRREKRARGAPARGGEKKRRENLSLSHTKKGETKQTGVRRRTGGGGGEREKEREKGEVRPARERDTRRGKDNREGGVPLLQSAEEREYKRRDVVREECSPHAARGGGERKERETHTRGGCSRESARTEREEKTEAGEGGVAHTGGGAHRKGSNREGAPTQYSITNKNSLPPTKHKLTHPDKDTCRPRKQREAKPNRPSRAAGGGEGGPKNTKNTADEEGANERRGGGRKERIATQTGRRRSAPPREDASPRREKQAGETKPHQRRGRAEQYKKAPVTTLVCGNTKNPTKQSRARATRRGGTTTHNRGASRQQHSIREERQQRDTKIHKNTEGNTNHKISNTEREETPPQKEREGASAPPEGRVDGRTTTHPQERGTEEENAHRPNRLPREATPGGGKNTKGLTTRRKPPREVVGQPHRWYRERRNT

SEQ ID NO: 971674 - protein, 388 aa, Homo sapiens
SNFPEVSRDGQEVVWWTAIYMIPGEQGELGIRVESDVCCALRAEMSLSLAAEPSPDPVPTVVHANHFLAMQLPPASQTAFLPPGGWPCAAEVKKPAALKQLLCTAEKYEPQWLDTLAERSAWLAIQLVPGHGQGPGSGEHPGCHTVVRGLDRLVALCQLARQSWPQDVRKAKCSAGDAEAAAENELTVHARALGRAADASTPAKIHGRRKGDLGTTGAASTRYEHPGTTVHPPASIDHHKRQDKTKKAKHTWETDTPKTHIARKTRDHSDRKPKQTHGHAAHKTHRNSDRHCARQATTQMETGRTGDRDKERPPREVNADQYQANATDRQMEESNHQKTKEGNQRRSKCKRRQPNRSGASHITTPRNPTHTNKREEEQGSREETKSHA

SEQ ID NO: 971675 - protein, 111 aa, Homo sapiens
MKVLLLTMGWGALFFCLLFGDDNFDPAQPPVERDVLLTVGQRWCWLSELAYHYARLGSQLVLTAHTDGSPAEGTGGSQLVVSTLGRPRTSGSPEVRSSSTSLANMAKPGLY

SEQ ID NO: 971676 - protein, 450 aa, Homo sapiens
AVPAAEECHLKLVWTRVSLAVALERTAPDPGLLVQRIHHAAVLMLLLQGFRRLEEWFGAWCMGLESLCVAACLRGPHDACRWPHDMYHAAGWPLTHDFCAATWQHSCTGGDARGPFAWPAHRRVEGCLAVLDMPGSLRAVALRTGAEPGFASDPGQTVGGQALQRGSVTARNILGVGDNGLGPLACPVLNGEETAQEGLGRGAQGSEPTWLRHLPAKPETYCTVSNLHTPFVAGREYKAEGGYRRKVNALSGSVYAGTFLALTFRNEPAPPHVSMPGTERHPLGHHRVAVQCQPKAQTLSARRGSGMADRGPQCWVSDRLLQTPRKRPKTQRLTASGETHAPPTRRHTRTTDATQAQGESDSQRRDEQHGTTLRERGDQTRAKTTAAHHTPGGHGAAGLRRTTSGADRAPKGAGGQHTTATPTGAAANTEPDAHSGVRAERGRDRARAET

SEQ ID NO: 971677 - protein, 391 aa, Homo sapiens
MHSEPDGYNRTFWKGEHHTRKPRICVPAFCKSGQVRSCLPPQTRSTCAANMLKCTKPVTTQPASALISAVSTVHIMQGAQHSEIHNLSSHFKVRFASVFYRKRTRFREIQILYNTYRHQPDQVFIQPHSIVAAVSSSPDREEGPCAIRHKQVTLHHIGVCNQSFLSQIPFPLHSAYGQYCTRVEAILGGLFRGPFKSCEPYHTRLSTPHGRPFILHEGEKVHHRQGLNIAVSQILDCLTKNQGIACSTVMDLVSNVGTLGRQEGSTIKHTVHKHITEPAHTENPPGANRENLGTGTTGNQTQAPVTIETRGTKQDIPRTTRKNTQHEAPEKTRNPRKRSPHTDSKEKHKKKRRDNKENKKGTRQNSSEPTGQNSSKETQRGTPPQNAPTPD

SEQ ID NO: 971678 - protein, 242 aa, Homo sapiens
  misc_feature (36)..(36): Xaa can be any naturally occurring amino acid
FKMKLNISFPATGVPVNSLHVDDERHNFSTFYEKRXGHRQLLADALGEEWKLVMCVRHQLVGTDKQGFPHDSRAVCDRMGVSRLLTAVTGHFLCTAPQETLREQTRRNITSRGVHCEMANSETFSTLDYGKHKGRERILPRHCHDNYTCTRTPWDPKKQLRSNTTNLFKSLLKNDDCPPDMSYRKPVKYQKVKKTKEQEQPTDVSVCVDSHVSLQHTTAAYCSARSQRSKEQITEERCTQSC

SEQ ID NO: 971679 - protein, 457 aa, Homo sapiens
MNYLGIIFTIRGHTTEYITGLENTTWIIPLVRFTKDGVTMGIPGEHKYSHYGKPHSYKTKSHKKYTLSWYPPMEYGHGYSNISCYKMSRDTGYILSHGVNTISHSYMANIPNCGLTILISTTQLEVFIKRSFQNVASGCTNITILFSHLQGRCFPWKLFGALWGHGGLTPHIGAEGFLALGARWYTQGEKGPKYTGGGGRRHYYPGGRTLTTPWHVYRESPTKGGTGKGRKRGPQPAGARWAPQLGRRKDVLTRGALGKASWKFPRPKMVLFLQKPVLGIRFCKARKSRGALSTDRFAKRPRVHGTCGSVRPKLIPNGEEPHNLENHHNWAWDSKHPRRRRERKQGRAERQLADNGKTGTHKHNHEEARPRSTGKPRGPPRSHTRPGKRVENTNAVGHNKRPQTPRAPNWNVENKSSNNARRDECTHDKMPALELLNKQRSRTGISSPPRSLVSLTR

SEQ ID NO: 971680 - protein, 73 aa, Homo sapiens
MAIYLQGKMADIQRERAYQKQRPSFKTRRGSCGRNWQEKLPRYYKNIGSGFKTPKEAMEGPNLKKMPLLGNVS

SEQ ID NO: 971681 - protein, 140 aa, Homo sapiens
  misc_feature (30)..(30): Xaa can be any naturally occurring amino acid
  misc_feature (57)..(57): Xaa can be any naturally occurring amino acid
MPYLPRDEQYKGGNSGAKQSRFYMGFVAHXHTLVRLSHIIRGASDWGYPHGNIWVYXSVRVVNQKAWLDASTGSHGTIGRRAKKLETPCDSLIYYCRDPSVAQDYLKAKSYISHDVVTQGNPPRLNRLIPGAWLLSSPVG

SEQ ID NO: 971682 - protein, 129 aa, Homo sapiens
MCCHTRGEQSSGIRHHPRLLVDTLLTESEHHNQALTRADADEQLPKEASLEEPPRRGMIVAPPHPAKVGGLLNQARDEPPHNRGHQRLDQPHCRRPVEQQDTTQASSSHHQTERDQHAATRRGQRRAHS

SEQ ID NO: 971683 - protein, 425 aa, Homo sapiens
TPRFSLFFFLLCIYKTPLCVWPPRTGGRARARARGREEKRQGGGFREGGAERHTPREREREKQGGKHKALSLYTREREGGRREREREGCLIKREGRSRERVPRGRERERRAEVWRERAHRARAGERGCTHHPHQHTHQQPSTQAESSRVYILRETTTERRGARRRKDQRDARESAARRREREKRERERVCSTHTHSRRARARGARARETDSCCGEEESGEQQSERDVSMERETNMCSGRHHHHKQNTPLHERRSSAREKQRERERKRGGRATQVREEKSSARAKSRGGGGGGATNHPPPAPRWRGQQILHKKPPPRKRKQPGGGAATRRMAIATSPPRTRRQKTKQHKTGHGPRTAEGKGEPTRADDEETQTREETTTQSSTQERKGSGRHTTNTTHTQKKHTPTTNNPTGTTNAQRRPHNKEEK

SEQ ID NO: 971684 - protein, 378 aa, Homo sapiens
  misc_feature (92)..(92): Xaa can be any naturally occurring amino acid
  misc_feature (102)..(102): Xaa can be any naturally occurring amino acid
MAILNIRAKRKTSYAWEEQRKFGLRRRQNNRGGVAAETLGEGQGGGREPSYKKDFPKSHTPQFRVAENRGEAQPAVSYTLREREKARNPLEXPIDVESTFKXLAESTNSPFYFFYKKRGLTTLCSSPSLSHSSLVWRTGGRAPRGPILCLFSFHPKRGPRGSSSREASKKGVPPGAAVSLGFPLRVAHPRGLRGFRTPVGGVSPNEHTWRINPIIHRKKGPPGIKKTHPHFLDPPRGAGGEGNPPVEEAEKHGETQVGGAPPKRGDTRSYEAPEAPHKEPNLRARFPDGKDPGGKMYRNAQTVGGSTTTKNKHRQRGKKPHFEPVQQNTNYRRQHARLTWHDETRIYKMSTQHTRQATTLDTAHRRIPPQALYHPADD

SEQ ID NO: 971685 - protein, 155 aa, Homo sapiens
  misc_feature (93)..(93): Xaa can be any naturally occurring amino acid
  misc_feature (133)..(133): Xaa can be any naturally occurring amino acid
MGEMFYAPGAKVIISPRGNQFFFHVKSQRLERFSSKNARHLFKSHFLGGTSIPAKRTSPLSKKHHTNPLCEEPHIQEDVNTGGGPPHGGPPGXGTNTRGCFAPTKLISFSLTIARTHSAQQGGVPPHFLIPPXISFHEKKWGGTPTRSLSGGTPN

SEQ ID NO: 971686 - protein, 298 aa, Homo sapiens
MKRGRQECAWGSRGVASDVEAMWDGRPQARAPAPSVFPFGEMWEAYASFPSSCKYGVRVSLKRWERKNTEERRLSHSPEDRAPKPPNPTCGGSARERGKICATKPSVPEGAPLLRLWGAKVCECGSLSVGIYPQEKLLERQGAQCALSCGSVGPISLCALVDKRRVARVRLSWGPHSGAMCAVNTPPGVSLTHQVWPGPGDHLNGWGGHRRGKHFFLPRRTPSLPKCHGRPSILGGQGRTTARLVGLSTRKFPREDPNVVANKGEPCFFEPGYIFPSPERAYLRGDEVLGLVGLAEHG

SEQ ID NO: 971687 - protein, 100 aa, Homo sapiens
  misc_feature (95)..(95): Xaa can be any naturally occurring amino acid
HSDTYLITGKNPKKLASNLGMSVDVRTLAGVGFGRGRSATGRWPQPGQGTGIYEMRLWRDLLLLVFISWVVVLSGIYRFSINSAFGPKWASGDAXRGEET

SEQ ID NO: 971688 - protein, 260 aa, Homo sapiens
MRWAGIQSEFFGHVTRGNKDFFHLETSAVQGKKWGGGSFPIKKQRLGQVLSTFVWQLNTNNRSSVCYIITNVLEQEIVRGMATCGLRNPSIGAGGIQSVDNHNQHVTTRDNTQPVVCTFRRTTHLCTPHDDLFDSPRTICTTPPRHKKQVQTITRFTHNPREHNRESVVGYNATTTEAHQLHTETTVATPNTCRGARTWHTPQHAYDSGCQRPRTQAGRYAPTTRNKTERTAKQEHHKNTRLKPAHPRMHGKSPYYDDAY

SEQ ID NO: 971689 - protein, 285 aa, Homo sapiens
  misc_feature (280)..(280): Xaa can be any naturally occurring amino acid
MTAWGTHEHLVGLATPILQGATRAGHQRDSNNQLAGAQNKRVRDYSIHTRMDRHNRGTHSGPNEHSGPHNNGKEQTDKTKQARCSPHTMGRVEHGGNTQRRGLHTQAGESSTQHEWAHLATVVTNILGGTTNPGPTQPTRVVAHASTNIPEHHVRYQNRYRNRRAYEHTRTRHQHTTTPTHTAESNTTAKRNPKNREGNPGHRNQNKTTTHTSTPEHHTDQEQADSETTAGPQSNLMKQRGHTDQMQHTQPSLEPPQSAITQANTQRHNTDEAGTAHRAXDSKHN

SEQ ID NO: 971690 - protein, 335 aa, Homo sapiens
GVKMTDLFNLKGHRGYRRNQGVVPNRQATYVVSQQHYHFIFFQRAFVSPSRGYSVFHIKQKLSLFKPECVGHPRVLQRHNFIRCGPSVYKTNFSRVEQFTILQIHKCGYVRAPLWIQNTHSVDYKLYSRDINHIIDTQRQPYRECPYQYKSTKHESETIFIHTHCVRHKTLSAKYLKEKDKTRSIFSLCPAEKLFLKVALSVKHHTLELYIAVERAERGSVSPQNAAGRRGGYTRGKDIIDGTTTTYHTMSPQNVDTLSITTHKTPAGKKRDTPHEGLYHRVGESIERSVSKRGGEPQRRRGHYTGWNTQKRCRTRPQGEPFQHNGGGGIRAQAE

SEQ ID NO: 971691 - protein, 271 aa, Homo sapiens
  misc_feature (135)..(135): Xaa can be any naturally occurring amino acid
  misc_feature (172)..(173): Xaa can be any naturally occurring amino acid
FFSFQGRFNRVLFHKKSWAKYVLASLYGNNSNIKNVYMPGEVFFSPLAWKRGFSSLSGEVFSLHERGLGFSGKGVVCALIIHPHQREVFSCVVFSDNTHPHRDRDSLSLFSPFSIHSHTPESVFCVRCEQDAGVXLSLSIVVSSVRACVCECRARVVSCARSARVVRSYILXXPAGELVCVTILRRARRVRRHQHSGWVLPAGAARVGLSVCHYVVVYIKTTFSTHSSGTLSSESIFSTRGVGGRPLSSLEERTLSREQKSGGTLISVRGG

SEQ ID NO: 971692 - protein, 205 aa, Homo sapiens
MKLLGLGARRETVQRTKTPHDEVLFSQLIFSFWPQLSSRGSPTILKGRVRGEWLNIHRAKIVRGTPWSGSPLEGLPVFPHYCRVVKDLRNRGMGCETKKAAGYFRRCTRRQRLNLWSSFEKEFIQYPREWPSEYPWEGIGEIRARTLCAPQGRNIVRPHGQQGVEIQDTEKGESRRIHSGIGCPVSRKWAPRTVQGGTHSKWGKP

SEQ ID NO: 971693 - protein, 485 aa, Homo sapiens
MPNRDARPKPARTPTKDDTQTTAEEQTSNTHRQTQHNTTTQNTTERKRTEHNNTEEATKKQNRNTTHKRKHTTEQDERRPTNQNQTEPRQETNTKPAAPVTAQHNQTDAGEQHRTKERETHTQPYTREQHTGTQTEKKKKRQAQNSTHTPQIEEKRKNTTKRATRETAQKNSNSDDKTEEQEDTREDHDTRRAHTQEPDADDRRQQRETERSTRRTRSTKHDKRNETSKRQQSRDRAQGRNTEQQSEKHSKEPSTPETRTAQQATERARNTSSKTQAHQTERNQNQRTEEKENEGGEATESSSDNTRRHGDEDTHTETKHGQTTRRQQQREQTESDQRTQRGTERKRHESARQRGRHNKKKTKTEKPTTTDENKDRHTDRTRRTKDHSESRKEREAKTQPSKKSSGKRAEQGRPKTDKRQEQRKVDEKQGRANTAREKQHGSTHTGPEHGKKSKRDAQQSKETQKKQQRREKSAEKREQQERRRE

SEQ ID NO: 971694 - protein, 189 aa, Homo sapiens
SFLNYSQKAAGNQKGSCRSRVLKSIKTTTEQLKQSERERERETRSNIGHWVLSTRFSQSSSGNWKAKLLLGKHWSSQYTGRGSLSGLRPTEAGSGAVRLGGCTAALSRRGGFGPFFHPIHPFPRKFSSLTETRGLCAGCALSPRQRGLGHNTRATGQPQSRNPGGDPFLHQPGGGRMVNRASTSHFPSP

SEQ ID NO: 971695 - protein, 278 aa, Homo sapiens
MWCLPDVSCVCSCMMHCLARTPVCSIQTVTMHTCDQCNVMLVITHFTLDVVVQELTWSNKRGHDVNTRYITWVQANEHSYGPYKTTKSEGMSQTITQASVGVSHELVVRDQNGMAWKGSPSQEWCRFPPLSYQFECRVVRTNWRSKELSWQGPSELHTKMFKFQNPMPSVPPRWFSNAGPQRHIGAQYPEGDTQRPKILNNVTLFDQPRGSVSWASQSAGRDQYPRGASLDTYPNNDYRTRCTTPHVCEERPPTANQFPLRVGQSTQRQVPYRVRTPN

SEQ ID NO: 971696 - protein, 259 aa, Homo sapiens
MFVGLRGQLKFIWREKRGTGGRRRTLKHKFGFFIYPQGLWVPRGGPGVVAPNVGENPFPSVGDAQEGKFFSKTLKTGATGCFPPKSNPRFGTNISISARNFCPLSPQKKNYIDSVSGVANHNEFFTDTNIIRLTQTSGVFITLCNEISLSPLVLPPKIPPPSHNFDSLRGALTNSRFGRPRGGGSPFVGGYPSCGKQVSCSRGEFSLVEALEWRRLTRHYQHSCSRGPCWLTTLSWGEGTLDYGRIACSLSSVILFLVA

SEQ ID NO: 971697 - protein, 295 aa, Homo sapiens
MTLEDMTCQVRDMQSGIYYRRRGTNTGQETTAPKAIITQIQTERKHQRPRTTATTKTANKATITATNSDSNKTKQTPTDKHRTHANTNPQNQHKDTQTRNTTHKQPHKHNKQRRYTSHSKDQEKTKTNMTRTPQKQRRTKPTQQQKQTPQEQRTSQHDQPAQTDTRPKTNKHKDTTNEQNKKDNRTTSTQTQNKQHNTRRRKQTQNKQDTNTPEQRPEGRTHRNGEALRSDTTSNKHEYEQEASTTNGGTTAKNRQQRARNQGEQSTEKKQTDRPATGATQRKGKKHPPDGAIAR

SEQ ID NO: 971698 - protein, 76 aa, Homo sapiens
MWWTVAYTTGGNRPTTFGGPRMTVFTHKGAHGRRQKKWRLNQNNAPGPGPPAIRGKAKRKARKKNPGAKIATTFGQ

SEQ ID NO: 971699 - protein, 99 aa, Homo sapiens
MGPVSSTSTRWRTRQESASETGLQKFTGSSCHKAIYVQRELGLGGRRPVREARTGTAARGKLARGPSPLPHPRCPQFSSSLVIRGWIAGLVRLVGGARW

SEQ ID NO: 971700 - protein, 395 aa, Homo sapiens
IHIYKKREEGERGRGAEREREREKKKGGGGGRALLLVWGGEQRKKEGGKDRERGGGGGEKSGGGGGGGAGAGEGGGGARRGKKGGCVCEREEEEEGERREGRREEGEEHGARGEGAGRRRREREGERRREKERGRAHTHRRERERERGSEEERVSATNREAEATEHRRGAQGEHKKKEERRERERQHERARARSAVRRQREREREEGERKRKRKRERREKHTTQEQHTPTAESRERERQTRTRRGQNDDTKQTNRATERGRETKKKTPESNKRTRTDKEKKKNTTRKRRKEKRKQTESTRKRRKQRRTERKKTAKKSIQKKRHMSRSQGPEHATEVEEASKERARSDENTDDNTTRDDEGRARRKPHPKQQIETKRDDEEEREKEDHNKTRTEQG

SEQ ID NO: 971701 - protein, 150 aa, Homo sapiens
  misc_feature (117)..(117): Xaa can be any naturally occurring amino acid
ANTVGYTETSRMATMTGGPELDDAVAYGYTGMRCLLQDGWIFMVLLQRLLCPSDCVLLIPHAWTVGLDALPYPNPNRREYTSKHEDKIEREIAGTRTLLRSLIRVTSVARESAEHIXGLFNMHVVSTRYSSSYHKTLTCVSQHTDDCTSM

SEQ ID NO: 971702 - protein, 102 aa, Homo sapiens
MTEKEGEQKQTHPRGARHQHPTTPPHRMTRQEKIYHHPHARGATTAKNRAGVETPHTTQKRERDQQTPSSGKQQREDTTHQRVGRWPTTAENPPPSPPDERG

SEQ ID NO: 971703 - protein, 121 aa, Homo sapiens
MARRQQMARPRRSPLHQWRAERVRHAPGGGPRARGARRAGPPAQPGDVLLRAQGRGPKGGAKKAGRDEAASGATHTVSRRGSRRTKVRQGAGAPLQKPPVHRTQTARTTWATRPGTTEEHG

SEQ ID NO: 971704 - protein, 357 aa, Homo sapiens
  misc_feature (128)..(128): Xaa can be any naturally occurring amino acid
MGVLLRSFFPGKCGRVVGGLWVFLSLTQGYGAGWKIILNQSFINQLYPSPSSHWRISRPLQKEVGWSQNGVGGPGVNPQESLLRGVAKDVTVEHYVSLLFLNTCKHRGPSCGEDVSWTRLKVFGENNXSRGVLVVQTLHTETGRDISYKCQKSPYIFQHALKVSLSRVGVKLFTYLLLYNISGSSHISRESALGCVTGVLRESREIIYTRLHHVEIGGSMKRGAGAKQKGGTYNSPTALYKNKNAPTGGNPERAEGGTRRQPPAGGTATTTNTSEQTGPQSAHFPKRGREQGVFPKRANGAHRPRRQKTFLSHNTERGKDQHTQNSLTPARNGNSGRNQRGTLLRILVGHRRSSPEM

SEQ ID NO: 971705 - protein, 368 aa, Homo sapiens
STFMVTYNNNATGGGSRPPRTTPSSEDRDVALQNRCLKGQKEDPRAQRDQATAKQEYQEHGRQSSGRGEDRGAPGVAPAPSILVSWRAGAWVPGPSPAREEHQGLSVISGNPWPQKALTGLQSERGRGVHRDRGCRAREAVPGPQLREGWEAGAFSSQTGRGLVVSLSWQLAKGDTGLRVSCKSSKPIESTERQTRGAEAASPTSDRLAHEMLLPGLRDGMDPERAGGLSKTGRQWPGMPIWFGGTLVPPRVPLKGSQTERVERHIQGGPWAFEELGAKWCHEHGEKGEQTEGNAWRGVSSANTPRGGGRKPTKRESKKGADRCVVTPVSDITKRRADSNGECTARHATQHPEAQANTRNQRSRAAAE

SEQ ID NO: 971706 - protein, 107 aa, Homo sapiens
MCSSRGFCGWGFELWVVGFGVSWPRVTRRLLQLQRGVDSCNLRAPAGSKRFSRASGPPEYSLRFRVARHHTWAIHFGYLIQIRRRGFHTQCGGANRRRDHPPLTLQG

SEQ ID NO: 971707 - protein, 327 aa, Homo sapiens
MVAGNWCSLHYWKRHIGWDNIPAPYIIAALNPEAHFSTALLSGPEYFPLQGYGEPGALERWARLAKPVEPQPRHSWLYVVGPLEMCKVANFGAQSKPVGGVPHKRGPQGTLHPRIFLRKNSATFFPSRDHFLGALAGGASYCSYSNFSGHMLPMGCERYSETGSNGEFKTSGAIGSIRTTLPNLAPLSEHRENSANTRSSPILAPLGERSHKQRPKRPGPPSSNSASNHLPARKKVPHTGHPAHRAGPPGTKNITTKRATQAQQREPTKKEQQPTTGVKPEKLAPASDEEPKSNTTKAKQLGINTHNPTSTPESPPCRAQPETTTQP

SEQ ID NO: 971708 - protein, 222 aa, Homo sapiens
RQSWQTVAPPLSYLLIKFYWNTIKKKKKKKTHASVLQLGGNPDSLAGAGALARRTRCGFEPGGGGGGPGPLWAGESRAPVFPNWGKPGRDGEAAGGGECPGFLPGALKFESKGLRAPGAPRAGPLWRRVSLPVCAAAGPCVPSTPVVPGAHASGVQPSPGDQLGPFLLRGRIPSTQVTEESGHCLYRAGKLVLGCNASGCPEQLLSRANVAGVALGNPRRTG

SEQ ID NO: 971709 - protein, 50 aa, Homo sapiens
IYVWSYEQHSRMTEEAEHVNEYCACYDCIPGRTEAGGGKRNILMAERNIL

SEQ ID NO: 971710 - protein, 343 aa, Homo sapiens
MPETNLDPASTMNSHGHYPTQPNYPVQPPGNPVYPQTLHLRSGSSLYLMLQLPTQSSIRPELCAARVLPHDPLPCTACNFLEPLCIFPWPSLVASTGLLRFHNTPWLIIQSVPSIHLAPQLLCGTGAVCTAACHDFGAVVLLAWATIPTSTYLHLPSQMLTQLATPALEPNVLVNSSRTGQLLHGLDQHGASHLNRLTATTGHPSPPANSPHHTLAALSSPPLTCSPPLNPDASLHPTPHLSDRRTPAPALPPASHHHYLNLHFTAPHCYSVSPAVPPPCSALSVPRPRAALSHITDLHYAVKPRHRSPTQSFPPFYIPRFTIYSPQSGAHCDFLPLIQSIHG

SEQ ID NO: 971711 - protein, 156 aa, Homo sapiens
MKQCLAGMTTKTRDEAAGGMIYLALDLGLRGEGACMRTPPSPEAFTAAQEPEFYPIALPGRLSAYPAPRECSYNYVHCSRSWFAFCTHGISAHKYLLDRGRALEAFTSVRKVSGTVESTVASRGSSLDNLNGVLHPRLLAGLIHERNHNIVGHDYG

SEQ ID NO: 971712 - protein, 332 aa, Homo sapiens
MCDQPVPFGQLTCVSYTVHGFLTTITNSKGQAPRVSCLVIPRPLRGRLEAGGIHLQVQEFENRPCTKLWCTTLVSHCNNHQHNIAQAEVGTSLVQSQAHWARPEARQQSTMNPRQVEGSSAAETHYQRHSQAGRTARDEHLSNNNTYTTHRTQLTVNRSARTEGPSNIHNKSTSYTILPLHEMTPWTSQEHGHATPSHVQTSTIIQDLFVQDAEVHLTPQPSWDMCLANPYTPVRASTRDGKELDTRTQLTGDNISSRGPPGYDKTQRTNKRGEYSKRNATIERAYAPTRTEKMEHTPNKQKTQAHQPAKSRTTQTNKHTEINPYRPAAKNK

SEQ ID NO: 971713 - protein, 111 aa, Homo sapiens
LLFCRRLRHQADREDGKRLQRFTCQTCPYCAHHHPQGNECVSSPKLKIYDDYRALVRTTRRALGSTLVELLPGRAGTVGSARVANNSNPSLTISHYEWRFITEHFHCVLSE

SEQ ID NO: 971714 - protein, 386 aa, Homo sapiens
VNTHAPWKLEDCAEDAHSGLSVPRCHDILLVSHVLRSLRPHEEAKVKTSGYVDERAVSILAGAPGCHAMRRAGYLPGVHFPRQMHTGIVDTDLGLVEGSAKISESLVHYVSHIVSWCTQDSDRKHTPETSKSNIWRYTSWKIHVWSPHTSSRWQQAASDPWGNPGSYEQSMYANEGDPYSQDAKAGLAKEGEEFCETGSWGMGNRAGCNCSVTADDLLKQNVGKATRRQSNYGRQQKLGSDGSKHSERRPIRRTRQHTHGHPRAMGEDTPRHYNSACTAQKAHYIRGHQDRDKWDRDQRRTGKGTRTPGREYSGPPRRGTATKPRPSRKKPAHAENRTRRHKADIPQYHRDRYDTPTTSGTAKQQEGTTGNKPKRRHQTQHKEKVS

SEQ ID NO: 971715 - protein, 193 aa, Homo sapiens
MPPRDVAHQANNTEHLTSSDPRVLLVTNYTIATPTTKSPRTHDDPNFIYDRRVPSHGSKTKPPIFTSINRTCCIKLAPHPQQHKHFPPYSVKTIFWAQCHHVAPLLTPSSLPKPRDYTVCYTHRPENNELLTARDKLCPVATTRRSQDETSSSDRTAHNPTFRTHRTRHRTIRCQPLSTHHTQHTRPPAPLIY

SEQ ID NO: 971716 - protein, 284 aa, Homo sapiens
MLWETKNIFAGHFAGCFSQIFSQRTCEGVEPPQEVLTKSLKIKNKKEDHPRKEVQGGVGAARPGRERHPPKQGGAPTGGGGESPPPAPPRRKTHRGVSKNVFSHVCGPQVTHSEWEEECGSVYDKSDAIKESPQKNSLVFSPPLTNYQGGRAIMWCSPPRGGPSKTQKVGGGKTPLRQHYIGGDPRVENAPQCEARGERPNLCGENKTDAASIRGPLCKTFGGPEKYMYTKGGSNNKGCIRRAAHTYWVAKKTPEERRTPPSGGGAQHKGGTTRGFLTTPQKDK

SEQ ID NO: 971717 - protein, 131 aa, Homo sapiens
MGRAESTKEGRAQLKGGLLSFLHTISYKEEALQGGNKAEVFLSPPRSLPLLSPREPMKCYTQQLLNKNAPFTRGGVGEETPLPPQKVAAVVDKPEGLHKVLQGADRLVRLHHNKRGGRGVTTRHWGEKALF

SEQ ID NO: 971718 - protein, 82 aa, Homo sapiens
AEQSAVTVERGASSVKAQSYTGHRGVQEDPASRVCRGSGAVAVSFRERGQCRACASLVVAPGYPEVRRFLISTLGILYPPKM

SEQ ID NO: 971719 - protein, 265 aa, Homo sapiens
AQARTFLSRRPEAESASSDRAPRPLLAPGGPQLGTRFGDSVPSIAGLFVPRPSGLAPGWPGGVWSQGVKAGSSWAKGLRAAPLCPPARPSTEAPGTGARARHRLLTRPRRQASQGPGENLQGQSRGRDPSGNRTSAAPPHQWAGGTPGSWDQSLVQFPPVGEFRSQSHPIVVVPGHPPGWRTDRKAHVRTPRGSERGKPPQTDGYLVRRWFCSTLGEGDIPNVRGDHKTDQTAKDETRPARPESNDKNATSGRLIRTFTCTERGV

SEQ ID NO: 971720 - protein, 514 aa, Homo sapiens
SKSKLFNYHSHIFFIKKGIIAKGSRLRVVYIKKLQVCGGKLAFLIHSWEAGAVLPDISGRKQLCTVCFRPPLCDKIARPVAHTVWHTPTGARQRRKQLFLGQERCALFAPLSFGYCAQRDRRAALCAQEIVQPARARQADRMCGSIPYGARSLHVSVERPHIFTQQRVERAPVCTPGVCVCTTLRTRSESSPPLPPLTLGLCALWRIISATTRGETPRGGATTAHKAGRHYVFISTRNETILSTFLFDRRSPSLVFSHTKHISPTIVEQTQKSVLPPHEGEGGFLSPPSTLCSGDRHNLTSERRRLQQQKGHTPKSTTQPHNQNAPDGPSSWLPHNFLSTRTVHTSCWRSHHLKSRRGRYSAGIRHITTNRAYIYNGYNIFVQARTDKVGAWHLRASNTPKSWSATNTVRHISYTPTTWEGPHKLARTEAPCVVTAWHPPCDAILLRHTGVLPPSCATVLYSPACSTCGVSAPPRANREGVAPISHAVVATTSVASRATKRCVGRNTPSFCVHR

SEQ ID NO: 971721 - protein, 348 aa, Homo sapiens
QADSLMTSSAFDNSQVKDKRDTINGRFQKIKSMAASRRAKLNESHRLHQFFRDMAVHAGSPGIQGSTAQLLVGSSRHYGRAPQLACQHTCRHSKHTAAGNAELAAHAAGSFRVVLDTWTRQLVRMTNTHRGKQADPDSGWRQSCRRHWQQSCKPAGQNAQGSARWKSPWQSSAVSRQMWKQARSLASMQNMHLVAQRRHPGRDSCRHPRGLPARTMDSSLDQTSTAPQGIRRATDVLAPRGTRHSIHDEACTHAGSTSSLHSMTRPERGQATDPERNKKGDPTKDTGQTHRNAHPGHVNYANTSRHRRQMANQHATQGTRRTDGTPEAYGTDTSTRVQTHTTHKQTAK

SEQ ID NO: 971722 - protein, 506 aa, Homo sapiens
IIIIYILLYYIYFYMRGKGAQNADGEEVRIEGATHNTTTEEQGEEERGEWRARREGGGPSRTTNTRQRGRKERRGDVQHTQEEASTQREHTKWRHRENKKRATILITKDTGGETETQRREQRGGEEEERRPKRKNNREGGQRTKTQKREQENTTRRGLTKKKEGDSKKKNILTKKTTRERHGGKTKGEGEGKEREKIEEKERETENNKKKRMSDTHEEHNKREKRDGGKRQEETATAKERDEKKAKEHTNGEKKKGGGMEEKKKEKEKSKKTMREKRSNKKKQKKKEEQRGKKKTVRPKTERGRKTKKKKEEKKKRQNKKKQRRKQKKKKTTNKKKRKIGKKKTKRERRAERQERKTKEKGEQKTRREREETQQQDRATGKKQKIGRRARERRTPETRGEERKGTVQHTKKKAFRRRKTTEDKRDGEAAQQGKGKPTPPEQKQQKAKRTTTKTKHDRQERRNTEGKEKDDRRERAKHSAEDKQKGMQDKIERQPKQEDEQNDTPSG

SEQ ID NO: 971723 - protein, 508 aa, Homo sapiens
YCLYILLIYILLTPLGREKRERRGEEEEGERERERERGRADLSSGNTPQNKNTTNASTKTKNRRERERESEQPHTPKRESTTKRERCGCASVTKRERERERRRASEERRDAQRERVDAGDETRKERVKKTQKRRQEKRDDESRKHNNNIQTRERKRERKKGSTAPTREQKTEEQEEKKSESTHTNMRESRKKQKRVETEGRAAGAATRKSEKNRERKTSEEKDTRHEQRREATKRQQETQTQGRERRRDEERDESEERVDRRKREEKRREKRKRKKRRKETTNEREKEENDEEKKEERKRQAQEEQEREHEKQEPKQQRKKTEARQQVTQRGETKEDARDRDGGGESDTKERKERENTRRRKNTTRNNNKKQKTEKKRTKQRIKNKERRAKDNTTRQGNTTEGKEERKREERRRSTTHKNRRTQTRRKQTQDAEREEHAKKTKQKRATRKQEKEHTREQDRVKLTDERKDKARKEKKKNDTRSERREGRDDTKTKSTRKREPNRMGSK

SEQ ID NO: 971724 - protein, 158 aa, Homo sapiens
MPGGIVLLVKSLRRYRAEMSFSMWYPHPAHEKALHQVLWHHLQTCPHFGPRLRSHMVPCKGAAACTAPGGGVNTRQAGKKPRKRKLVLKRERRPANTPAQAHHCVPVKKETYADNSEKHGMRDKYQNRPSAPQPRRHHHQDRYSASHTNNGNTQGRCR

SEQ ID NO: 971725 - protein, 244 aa, Homo sapiens
MGGLFYPFNTQWGKLQCVGLGHSPLPTFIGHVLCPTRALHNFSHSIFPNYSCITQRRPSIWPITHVGRGKLIPHVKYVAHRTLWHPSNLPNSHTTPWHLRTHSGDRDTNPHHSDQTVTAREATHMEQHRGTIPGIQGARSPPNFRKLPIGRGTLHHKHAPHSTPTPRSLPAHPSVKTGEPHSLHQQAALQQPIEPTTHSQKTAATTITTTIEENQTTTHSPTAPPQPARQPQPNSATNPTNTHT

SEQ ID NO: 971726 - protein, 172 aa, Homo sapiens
MKQALGVGHTKVAPPGVNPLVVRGSPKEPGKKDQHTHGGIHLEGIFLFHPMKSNMATLVATAIFWGTFPKDYFSHPNGNGTRHHNGGPREGMWAHQVFAPRGRFSGDSKVSSSVTHNQELTSCEHPSDRPNEKIFLRENNFSGGRTKRAGDDTTNHDTDDMQQQEATTNNMH

SEQ ID NO: 971727 - protein, 281 aa, Homo sapiens
YFQRWLGGPGVVGPCLRRELKLSSPSSTGAERFRIASACLDELSCEFLLVGPELVPWRGPGLDRISPHGGRCLGILSASTATSGSNTLLCPPNLIGGGHDEPLTWAAVLERLVAHRSRGNTLGYLQHLKRTHSSDPGGNLSYNLLSASQNVGECWNQPFASKTRGHTRGGNGVFQTDREIEENALKGAQEKKFRFTYDLAREGRAQAERQKKIVKDCWAWDKRKSLGIPKEEHIKRHPEARIYLHLRARVRIVRPMYGRIKRPRDYGGPEFHGGTMRQLVT

SEQ ID NO: 971728 - protein, 260 aa, Homo sapiens
MEELDQAPLVSSSDSHPGRSPRSKYQFVREPEDEQEQEEGGRGRHEAEDCRSLEVLERKPARVLSRGPQCPNWALARPGVPPEWDLSGQLTFVPGGGPRGGPRCGDGYPAVCDAGGGARFLGDPAGRGGVRRNWVPRCISRVCMVAAVLSSFQGFLEGTKGGLPGPGPVRTCRPRGYNAQDPYEEILLLGTAAKRRGCPSLAPCLPGQEGRAGPLDSTEHEQLKEKEGTRKGHGAQKGVKRENNEQVGRTEIYNREAREL

SEQ ID NO: 971729 - protein, 259 aa, Homo sapiens
  misc_feature (121)..(121): Xaa can be any naturally occurring amino acid
FKNPKHYIGLTNRDILKKNGMLQQLPPGVKGWCPSRNSIAVKSRRLIKNFKGAFIFRPSLRGVFSVLIALGTLQYNTLLIAAGQGYPTFCHRVRLSLKVVAPIRRPSGRATHCVWRVLKLXETVYPQQQIRLFPLYSLYLTLIWRRLGETPPCLERARTLSGRPGEKGVSPSAAPGIESARPLVVLAASTVAHWGAAKNHKDLLGYDACPDSKHQVDSWRVDLLRVATSALGRGEPCPQRDKHNRHEYEPPAKIDRATH

SEQ ID NO: 971730 - protein, 120 aa, Homo sapiens
MAILVGNLPTTNPRLCPGTWLGGLYPELPLPLMQESRRFISELLTTPWVLNKEVLNCKIAVVATDTIVAEKNGGPPGFLESSGGGTRKKVRPIKLWPKGDKTTARKSGPPEDKKERHTII

SEQ ID NO: 971731 - protein, 269 aa, Homo sapiens
  misc_feature (113)..(113): Xaa can be any naturally occurring amino acid
MCCITPSPSVCVCTNPGLCFCAPHPDVHGFRVLKNLPRGTCAPYKFDKSNVFYTPASRMCLPMCPSGPKISVFVGIRPNKKIFRLVVKNISFYNCGRVYTPERTEASSFLSLXGGQFPPAGVRIVRHNGVPAGEKRLPLGLPTIMYRCGGPNAAKCGTPGFGPKTFSNTRDYTTHNPGGVFENLFQGGTFSRQEGVSTRGRPSHGVESLSSGFWSPSHAFYQRFSSLNPWVVANHPHVTRVAQQLISGFIHISFPPEQLSSMWGLLWSL

SEQ ID NO: 971732 - protein, 176 aa, Homo sapiens
GAPVKEGDILLEGSRGQGAGAGGWPFKGKEQPYLDLLLGTAGGGCGPHFFWRQWNSQREGAEGEVYENLGGRIILVSQVCIFGAKSWAEEEEVSISGHSGRGRKHRGGRGCGTSFAWEWCDEFVDEEGGGHSLTGVVWARHKYQNAVGGARRVGEITLPVGSWQLGGLLANFFKRA

SEQ ID NO: 971733 - protein, 30 aa, Homo sapiens
MAERPCNLTSDPTRSTLGIYVLGDIGAGHA

SEQ ID NO: 971734 - protein, 290 aa, Homo sapiens
  misc_feature (43)..(43): Xaa can be any naturally occurring amino acid
  misc_feature (125)..(125): Xaa can be any naturally occurring amino acid
MQPLFCCATDNTNAATPRARAARNISAKQPVENHNYYNALWCXDAAPPTQQPKMCGPRAVGTPPAVKTVVSTHKNAPTRGASQQRVEQQGLLLLPHKTQCSLFFLHTKTKRLFYMHGGSNPQNKXLFCGMKTSPLLPHHNIDNYIACEVLAPARLISELLVGHTPIIHYRPSAVVTNPPALAYNNATSPPTDRFPHRWVIKRPPPKTVVAPQSQRASRHSLHPPLYRSHNQATLSYEHNHLLSGPHRCVPTNERESPNHTWEYYRPHSTRNNATLARHPPPVVANNKQQP

SEQ ID NO: 971735 - protein, 452 aa, Homo sapiens
  misc_feature (151)..(151): Xaa can be any naturally occurring amino acid
  misc_feature (192)..(192): Xaa can be any naturally occurring amino acid
MQSFTFVGHTHSPAWRCKQEATWCKEAKFSLYVPEEDSSNKHISGEARDEGTIYTGSPNVEAVRLEAQAPSVQAFLSPSRGSPRRLSVGGGNAVCGGGRLGCVYGLGDLRNHSHRPAHGSRPCAYVCKNKRVSVGPQRLFLKPHKPRRMCXVSTRPSWGVSSLSRADASRALNGRGLEVLGALGHMRPVCAXISVGPFSEKIPLGGGTTRETATGHRGAPQYTSYARERTLPSGNSRGGTHRTTRGEMCITHLAGSADLAGATTSPLQKSLHYSPGAHNPLPSKKQRPSPLPPEETAADHGRQQQRAENLWVVRSHAATPTASPGCQPHPHRDGGPEKQLNGGDTCRHQRRHCGVELVVPPGEREIRGGTTTPPQTVDWGATQQHHETKEKKKTRKTTTAVDTTSRDRNREKDTPDTEPAKTASGEQSTLPTETCEHKKAQPSDTPSRAVSH

SEQ ID NO: 971736 - protein, 125 aa, Homo sapiens
  misc_feature (94)..(94): Xaa can be any naturally occurring amino acid
YKQGGVHQAGPGHITGGQGVQRSAGPTGQNSVSTKNTKLGRGMGGHMASRSHLTVGRAWSPGKMGWNLGRVQRVAQWSARVHGHLGTPRPGSGXVERTRASSKTTKTQNNRGAGARLKRENTPRE

SEQ ID NO: 971737 - protein, 137 aa, Homo sapiens
MGHADIEPPSKCFNEFLRYQAVYDNLHYIKTQSSLDGLARTDDPADEIILSEFLIALDNWQPAEYGTIGTNLPVKQSLTSPIRLTGQHYILKRSTSLACAVIRWGLTALLMCASKHLVRNIAEQPEHTEKNHTRITG

SEQ ID NO: 971738 - protein, 459 aa, Homo sapiens
ARALIAGSVFFLLLPGTFCGRMQTAQQGAHKSTVQGVIIDLTQFVSMTACQAWVHLLVSFGKALYPHTTDGITFLVAISITGAAPGILAYEHNEHTFPSVVIEGTIHASQARQHIPPRGQHGHQAGTSSTSSRVQSAYPTEQQKTSTHLTRTYGDLDMRPDAMRHNDRPKEQHKRTVHTESYPYDDTVTAQTLGQKHLRHTPLGRMITANNATIRTRTVGKASGMRETRRRRRTPAHQEQEHSPARHNKTPRWKRGTGATINYRPRNHDVHKRKSGKRHGEQHKATTHEDTNSSTDKGVRINEEAAPRAATPTLVTISKQRSSTTRQRVQQASHHVGKAIPRDHTRTGGDNTMSNTQATMGAPPEACKWATTHRAMDDAAEARDRSTHSHGKLSAAKEAPKGEQRPHTRGYTQERRYINEDMGAKKQNTKQCRKEEKTTDQHNRKNKKTKHTKNCTTQH

SEQ ID NO: 971739 - protein, 108 aa, Homo sapiens
THFFLLVETFCTVLRQHRATHGLLVAAAISNTVKDLHYNQPPPAEDFSPQTSTQFIQTRLLAETSVVYNGMKPESTIWLNCTACLIYIWLFWCTFELSLICKVKMPTF

SEQ ID NO: 971740 - protein, 68 aa, Homo sapiens
  misc_feature (18)..(18): Xaa can be any naturally occurring amino acid
DAKSVKIKKKLRTNVKFXSSDAQQIPFTPLVITDKEKAEKPEASPLLPRFGSEGTEMNPDTLIGTVLY

SEQ ID NO: 971741 - protein, 40 aa, Homo sapiens
AAAYYYFTGCKKTTEKIGQFPKGPKNPRPLGLTPLKIVIS

SEQ ID NO: 971742 - protein, 215 aa, Homo sapiens
  misc_feature (100)..(101): Xaa can be any naturally occurring amino acid
  misc_feature (209)..(209): Xaa can be any naturally occurring amino acid
  misc_feature (214)..(215): Xaa can be any naturally occurring amino acid
MVGRNSAIAAGVCGALFIGYCIYFDRKRRSDPNFKNRLRERRKKQKLAKERAGLSKLPDLKDAEAVQKFFLEEIQLGVKSLLASSVNYVEAAVDPSDNMXXLRGGCADNAHTAPYTSQVSLQANFLSHPPGVSQDGFRDITLSTQFRSRRIVVEVIHEARVLDKIRLSRNRRHTHIVHTIILDRCVQVYAHTTSQNNTNQSNINILAGXEKGVXX

SEQ ID NO: 971743 - protein, 107 aa, Homo sapiens
RPPTTTKFAAASTARVLGAHWGCISVMPVCWGLTGGCISVMPCAGGSLGAHWGCISVMPCAGGSLGAHWGLHKCDARVLGAHWGCISVMPVCWGLTGGSLGLHKCDA

SEQ ID NO: 971744 - protein, 143 aa, Homo sapiens
RPHTTTKFAAASTYHELVDVGLPLVLVNGYSPSITVPQISDDDVSAMDQAVAHLVGLGHTHLGLAIGPRRYVPVQRKEQGLRAAVDRHLEGRGRVTVSNTVFSVDGEARAAVDVLGQRVNALNFGGSNLLALGAIFAARAQGI

SEQ ID NO: 971745 - protein, 73 aa, Homo sapiens
AAAYYYKIRGRVDAWPRTSAAHSTPSLSTLRGLNMERTPGEGQSEFIIDTGGERASGTWDAVELEAVEGRADL

SEQ ID NO: 971746 - protein, 42 aa, Homo sapiens
LVRVDAAASTLARANNSMSVQVSQGLNATAAKAFASEIERNP

SEQ ID NO: 971747 - protein, 129 aa, Homo sapiens
RPPTTTKFAAASTVPFHSCFPFHLTPFHFTPLHSLTFHSVSIPFHSIAFHSFLSTSYHCVTQAGVQWHNLSSHYMSTFHCIAFSSVAFHYIAFHSSQFHSIPLHSTPLHYTAVHSIPFIPFYSIPLHCT

SEQ ID NO: 971748 - protein, 39 aa, Homo sapiens
AAAYYYYYIRGRVDVKLNEAMLMRVRREWSEQSGVSGGW

SEQ ID NO: 971749 - protein, 65 aa, Homo sapiens
AAAYYYKIRGRVDIRFGTRNLLVHGHSQGGAIAYLITAWLRMQQQSGSLPADLRIKTYCSAAPKP

SEQ ID NO: 971750 - protein, 90 aa, Homo sapiens
RTTRDRLTFSSMPLPESRCKVSINLNSISPNADVNIIERRAFASNLRLLIFELVLSIIIRANSKRHSLRQSSEAVGVVPFQTGQGVLSHE

SEQ ID NO: 971751 - protein, 102 aa, Homo sapiens
SGGSLIALLIIAIMPFAGCRPTQAARVTTTTPRACYKDCAPDECSVKMGIYFSPFLFNLLRIEEKQKRTLRTVLSLFFASPSLNTWKLWKLPGIRLERIHLD

SEQ ID NO: 971752 - protein, 134 aa, Homo sapiens
MRLAAEQNGHVAGAALTATTGGHDAHVDGIHADQPPHAKAGDHHCGHGGDDGDHVLHREGAGELVPGRHGDADGEQQRIGHGGAEELVDREGARLEAGGKNPAELQQDRDEQHGHRSRPGPQLLRQGAHEVERH

SEQ ID NO: 971753 - protein, 100 aa, Homo sapiens
CPAMLHPRAQGTPMRALASLPLITDPRVSPLPNRTTELQQARPRRAFKPAKGHAAVRLHTPTHSLGSRARPFPSSVERDQTRGPAPAQSAAPSEAGMQAA

SEQ ID NO: 971754 - protein, 79 aa, Homo sapiens
METKAGQGGPRGRGFFIQVGDLLVKSALRFQRPIPPKKPVGVHVSLCLPGIRRRMWRGRAGGSQSHAGCVVPRVSPEGG

SEQ ID NO: 971755 - protein, 165 aa, Homo sapiens
  misc_feature (13)..(13): Xaa can be any naturally occurring amino acid
GRRRARAKPFLGXQYSPFLGTACPLRPGHPGSRAPGPSPAGAPPHPISAPGAEPPVSAAGPRAPQRHLGAGRRLPPSGAPPLLRKDSGSPQFSRQPDPPSLGRRAALRIPSPPPVPPRGRTGSEERLGEGAQRRPSPGLGAGAEGVRAGAAGGQGEPGDGSGGRP

SEQ ID NO: 971756 - protein, 127 aa, Homo sapiens
GCLLAEWHWRAREVAPVPGRRPEDTDALPARGIAPAPGEGPAPLGGGTGARRTPDDQDAQPAREVAPTPSEGQTTRMPSPPVRWHKRPAKARRPGCPARSWSGTRGWRRPSPLVKWHRRPAEARGPH

SEQ ID NO: 971757 - protein, 182 aa, Homo sapiens
SFAGPAEVPRRLCPEGVHPNNRRISGRHSQAQRTPGNPKEHKRTLKWGRTLSCGERAGGRVTEGPEPHSDQALSTLTSPGPGAGDRQRRPGQSLPFPLPVPSPASTEANSGPAPELPPGAPSPKGGSFLRSPALGRRRRGAAAAAPFVEELLEQGRGHDAAAAAPAVALGGPAAQRAAGGGG

SEQ ID NO: 971758 - protein, 109 aa, Homo sapiens
GHPQPGARQQVPAPERSMHLLVGGTSLTLRSTPPTFICKAAVRRLRLTLGPARLLSASSAATAQARPSGSRQLRQPRGAAVPVSPSDAYSPDDLRSQTPGTRARRGVAA

SEQ ID NO: 971759 - protein, 52 aa, Homo sapiens
SVCEELGHMSSVTGFSYDLFIFLFIIFIIWIAQGVVSVCIKARVVAGVDLAA

SEQ ID NO: 971760 - protein, 66 aa, Homo sapiens
FGETTMNAEIVRVNNAAFSWHPEQSGWDTAQVVSHRNEPWFTSDDCFVALAPGDGSTTFGDAGAVS

SEQ ID NO: 971761 - protein, 64 aa, Homo sapiens
KPHATRAHGVSMCAQCVRDRTKRAFLIEPPKIVVKVLKTQAQSQKAKEKNETFLSNKNEKTLEK

SEQ ID NO: 971762 - protein, 36 aa, Homo sapiens
MSPTAYALMLLTVMSSHLQRTQSHGECHNKETCSVD

SEQ ID NO: 971763 - protein, 52 aa, Homo sapiens
GHLMQNQIGAPPPQQNFSDPKKKAWLFQIITIVAVVSLGWYLFNNTQTNLQS

SEQ ID NO: 971764 - protein, 177 aa, Homo sapiens
EVKPHPAPPGVGRNGCFGPQGSGPGMAWAASPTPSSLSFPASSLHRPHTCRHRERPDQGVTLRRVGPHLFPYLKGKEAAAPAPGPDPAPGECARSVHGAGRVSDVLESAAGTMQLLVRVPSLPERGELDCNICYRPFNLGCRAPRRLPGTARARCGHTICTACLRELAARGDGGGAA

SEQ ID NO: 971765 - protein, 43 aa, Homo sapiens
PNTGLGHNSMILMIEAQVTYILDALQQMQRHRIATVDVKPTVD

SEQ ID NO: 971766 - protein, 88 aa, Homo sapiens
VDNVSKMNSVCLIILGTVILLVGLFMLVGGGYLITLGGSWYFAIAGLGLTLSAVFVIQRRLIGAVLYLVVFAASIIWSLWDVGFAFWS

SEQ ID NO: 971767 - protein, 34 aa, Homo sapiens
MRPPQQANCLCLLSFTTEQVTAAVPACVMLCFRR

SEQ ID NO: 971768 - protein, 46 aa, Homo sapiens
LLLNRLIARGNLVNVTSLFYLVPAVTAVMDYLICRRGREFSSSRGP

SEQ ID NO: 971769 - protein, 140 aa, Homo sapiens
RTELYAMSRIFQQQVVDALKFTSFSQPQGVPGYPWAKIPVFDPPQKDDLYPNRALNFDGLYEQPHDNYHGWIGGDMADNAYTAFDPVFSSYHANIDRMLEVWIRANPAAQYTTQCLLQPFAGSEASTVTFTSADAWRYSR

SEQ ID NO: 971770 - protein, 174 aa, Homo sapiens
IIGKAHADIVHVPARPSRVLNKSFPNQKWALKEDLSGIAEMFKTPVKEQPQLTSTCHIAISNSENLLGKQFQGTDSGEEPLLPTSESFGGNVFFSAQNAAKQPCDKCSASPPLRRQCIRENGNVAKTPRNTYKMTSVETKTSDPETEPSGPVSFCKQVRKVGRVQEYSEGACAK

SEQ ID NO: 971771 - protein, 101 aa, Homo sapiens
PGSCSEDSIYGCDVGNHPLLSMGEVCDRQHLWTLTVGAGGVTMWAMGRSEVLCPREWQVCKMIEDPGQIKFDPKSPAQIRIIRGPFDDDLSGLPAVPTDYK

SEQ ID NO: 971772 - protein, 191 aa, Homo sapiens
MQTIKCVVVGDGAVGKTCLLISYTTNKFPSEYVRAVFDNYAVTVMIGGEPYTLGLFDTAGQEDYDRLRPLSYPQTDVFIVCFSVVSPSSFENVKEKWVPEITHHCPKTPFLLVGTQIDLRDDPSTIQKLAKSNLKRIAPDSVEKMGGPFKDVEYVECYALTEQGIKNELGEATVGAVERGERKECRRCASI

SEQ ID NO: 971773 - protein, 80 aa, Homo sapiens
  misc_feature (51)..(51): Xaa can be any naturally occurring amino acid
  misc_feature (80)..(80): Xaa can be any naturally occurring amino acid
NKQKKNQTKKPKNKQETKYNPPPKTTRQCTWLVHFTAPDATFPDGRGSRQXASMHFMWRQLAPPVASCSAGRPAPTIGPX

SEQ ID NO: 971774 - protein, 72 aa, Homo sapiens
  misc_feature (5)..(5): Xaa can be any naturally occurring amino acid
MLVLXIGKMIYSRESSLSACTSKGMKHSIGRLTLGVCSLMVSLRILVVGLASSASGLGSRPGLQQVGHRYPS

SEQ ID NO: 971775 - protein, 91 aa, Homo sapiens
MKNGQNRPNEQAASGARYLAREQKGEFANMDVTAVPINGHRYSQVKTLKVFSNQCPLHNSAFQRKHPSNKIKQILKEWDHYCILSAQINQE

SEQ ID NO: 971776 - protein, 68 aa, Homo sapiens
RSVLRRLPGLLIGVVRLFSFQGLFWTGARSVLQPQVLLAADPQGYGVGECEKVGLQTLEEVLALGIPL

SEQ ID NO: 971777 - protein, 170 aa, Homo sapiens
ENVKRRVVVTTNVRGRDLGTFVTEARERIATQVKLPTGYWIGYGGTFEQLASAAKRLQVVVPLSLLMIFGLLFMTFNSAKDALVVFSGVPHALTGGIAALWLRDIPLSISAGIGFITLSGVAAVTSVVMVERNRDLRAQGMAIDEAIETGALMRLRPILMVALDASLGLP

SEQ ID NO: 971778 - protein, 32 aa, Homo sapiens
  misc_feature (27)..(27): Xaa can be any naturally occurring amino acid
CIPTITIITSTTISTTNIIIIATNSFXAHAFS

SEQ ID NO: 971779 - protein, 59 aa, Homo sapiens
YLLEKEAERERNRQLEREKRREHMSWRGTGREREKGSGTVGTDDRRKGNGTDELRQWKW

SEQ ID NO: 971780 - protein, 74 aa, Homo sapiens
RRLNAHQERVVPVHVVRRQHVLAYRSLRMSTSHFMIGVEGGLADRARFHTQEGRLEQRLRTPEPLIANGDDLAI

SEQ ID NO: 971781 - protein, 40 aa, Homo sapiens
MLAMHESQQDYSKGFWREVWWCRMDLDVIMNAVNLLRIVT

SEQ ID NO: 971782 - protein, 51 aa, Homo sapiens
ECWGTALLVSRPDCRALLLFMRSMQAAGEAKVDEVSIDALELVLLLLQDEH

SEQ ID NO: 971783 - protein, 80 aa, Homo sapiens
GVTGYTYWQGEQRKEQAHQTAQTFVEALENQDHEQLSAMLSASSLEEAAYTREEVVERYETIYGGIGASEFQAADIRLAE

SEQ ID NO: 971784 - protein, 45 aa, Homo sapiens
  misc_feature (12)..(12): Xaa can be any naturally occurring amino acid
LPSVLCGIAIPXHIRELTQWLDVGGCWLGKSCACVAISVTPMGGH

SEQ ID NO: 971785 - protein, 45 aa, Homo sapiens
MEVSVTTLQATYQAVYSSRTWSSSTPSILQQKEQAGVSSMEEFLR

SEQ ID NO: 971786 - protein, 38 aa, Homo sapiens
MLDRCAVMNDGTGPVPEECSAAKAWCTKYGVRYSIFKR

SEQ ID NO: 971787 - protein, 66 aa, Homo sapiens
VAVSRELTDSVSHNATGLVSEFTVRQMSQSLIFRSVSMFSGRMTGSTGKQLKMTPLSTEYQKSLEG

SEQ ID NO: 971788 - protein, 84 aa, Homo sapiens
VSKIRDRCVYLLRQKIVVCLDLHSTLGSITSLAYGGGESVDQVVYGVLMVKDNTIYLEAKLYVLIPREIEVLITMTDELEDTGI

SEQ ID NO: 971789 - protein, 42 aa, Homo sapiens
RILESWCCFSLFPVDTNCASRCVDLLFPVGVVIGQLLASVQD

SEQ ID NO: 971790 - protein, 41 aa, Homo sapiens
MKLTSCAKKLLVLAGTVYNICRFRYQEAEMSRKQHFTNSLV

SEQ ID NO: 971791 - protein, 37 aa, Homo sapiens
SKTLATRSRLHSLTRHKHWQSLPAVAIHCHEAGGNPK

SEQ ID NO: 971792 - protein, 97 aa, Homo sapiens
  misc_feature (41)..(41): Xaa can be any naturally occurring amino acid
DVEDPGGDEDSAELQASDRVSEYTVSVVALTRMICESQPLXWNPDPQLIPCTNWTKKFTQCHTPQALSAHVDTHPIFSIIWIFDVRGDPPSEKTWNQ

SEQ ID NO: 971793 - protein, 40 aa, Homo sapiens
MAWIPHCYGCGIGQRLQLRFDPYVWEPPYATGAALEKAKD

SEQ ID NO: 971794 - protein, 56 aa, Homo sapiens
TGRAVYPCSVWKFPARVKSELQPPAYTTATATSDPSCICNLHPSSRQRWILNQTAL

SEQ ID NO: 971795 - protein, 37 aa, Homo sapiens
EDRRMSQWILKTLYVYLQRMDTHEDASGTEAGGHDHV

SEQ ID NO: 971796 - protein, 60 aa, Homo sapiens
DSRVYDGSLSALCVPHENGYTSSDAMPQYMATLLQASGGSCAGSFLVCQQDLVTPIVAYC

SEQ ID NO: 971797 - protein, 56 aa, Homo sapiens
LTYALLELVASLPDGVHVHMECVRCHPTSLKKLTMDGNGRSPPRKSSQTYIHAQVA

SEQ ID NO: 971798 - protein, 122 aa, Homo sapiens
ANPVERLLQKYIRKTISVGKRTTIAASTSMLVLGSRSSHSDSSELFVSLMGSMRKGEEREIVRTQAALAREQGELERSTDNGKSGREKRGAVKVGCISPSAAACSFREEEAGIVYSRSSHRK

SEQ ID NO: 971799 - protein, 128 aa, Homo sapiens
  misc_feature (51)..(51): Xaa can be any naturally occurring amino acid
  misc_feature (119)..(119): Xaa can be any naturally occurring amino acid
AADQDWRQSGSSEATLVNMLNISPFSLGLVIQRGVRQVAASTTREVLDITXGNSAFSLPGGCPQVLPCVVSCRWATQSVASCTPIHIIKRCTKRCPWPLSCERRDYTFPILLKSVKAFXGVIHRALCG

SEQ ID NO: 971800 - protein, 66 aa, Homo sapiens
GPVRDHRPPESISPSFDFAPAKHEIMVAPDIDYFLIVIQNPPEVAKGRPEERDVLKDEARRGGSLL

SEQ ID NO: 971801 - protein, 73 aa, Homo sapiens
TFLYVWLGRFVATVERACGRQVCWLGESVWPAASDLCMVLIVSRAEVFWDFSRGWREPVVLSCGSVRVGKSKP

SEQ ID NO: 971802 - protein, 68 aa, Homo sapiens
EPSLRCCLGHTVFPGFATVMHKEIIVLASMHDADQDQFAPPERKSSVWIGGSFLSSLSTFLLLLINRQ

SEQ ID NO: 971803 - protein, 86 aa, Homo sapiens
PLHLPVTNGKCVILTEHLTTPALADSLHMSTPIRLVVVKYAPSGFYIASGDVSGKLRISVYHAEQEHLLNYEYQPFAGKYQRLCLD

SEQ ID NO: 971804 - protein, 102 aa, Homo sapiens
ALYSRVGIDEWPWARSLSSPRCSQVLGNPKSDERNVMVLDFELFLPMLQTVALIKDQWHLGAIMSKRLRVFDKVGNCTVVGAEIRHVLVTLGDKMTGRWLGV

SEQ ID NO: 971805 - protein, 69 aa, Homo sapiens
SRGSPSVSRCGDVTEGPGPEPYQRRVAQGPGRIPTRDEMNVKVLDFDHFLPMLHTVATNNDQATYYDYA

SEQ ID NO: 971806 - protein, 109 aa, Homo sapiens
MSLFRLLFIVSYRMTGTGCLSRPCYAGWCPHNTSTVMVCHCMVLGVVVTGAEDMHTATLRYCYQEVTSVTLYVNRLHIYLLNIITYNDLECDYLRISKPSTVKVATGVP

SEQ ID NO: 971807 - protein, 50 aa, Homo sapiens
RTLMSYHCLYRLSADEMNSISRVLRCTLRLQLNNPNMSDMFAFLTSETGS

SEQ ID NO: 971808 - protein, 205 aa, Homo sapiens
LEKCILGWDNAGKTTLLHMLKDDKMGPTCSNTTSDIREMQIKTTMRYHLTPVRMANIKKSGNNRSWRGCREIGILLHCGWDCKLVQPWWKTVWRFLKDLEQEIPFDPAIPLLGIYPEDYKSCCCKDTCIHMFIAALFTIAKTWNQPKCPSIIDWIKKMWHIYTVEYYAAIQKDEFMSSVGTWMKLETSSQQTVAGQKPNTHVSLI

SEQ ID NO: 971809 - protein, 52 aa, Homo sapiens
VPTCERKVELGVGLAYWADINYNYGKCTSCWASYRGGQVWLLSVYQMLDILY

SEQ ID NO: 971810 - protein, 34 aa, Homo sapiens
  misc_feature (3)..(3): Xaa can be any naturally occurring amino acid
MNXVPESEEQDSTQATTQQAQLAGSSLKLMNEPV

SEQ ID NO: 971811 - protein, 30 aa, Homo sapiens
MLLLIGHSGSELQRIMCRCSSRLSQLMQFA

SEQ ID NO: 971812 - protein, 49 aa, Homo sapiens
LPYHYWWSSRLGLALLFDTFACDMTNSMFLTYKSVSSIPYSSLSSWWEL

SEQ ID NO: 971813 - protein, 37 aa, Homo sapiens
MNTLPYYTCCPRYDVGVYSVPKAVAYLHSMQPKALIH

SEQ ID NO: 971814 - protein, 34 aa, Homo sapiens
MYKLEEQDSTQATTQQCPAGWQQLKLIEEPVSKC

SEQ ID NO: 971815 - protein, 67 aa, Homo sapiens
TGNTIVKSVPELEDQDTTQENTQQAQLAAAAEIEEEPVSKAKQSRSETTARKAMSKRGLRQVTGVTR

SEQ ID NO: 971816 - protein, 67 aa, Homo sapiens
SGCSRGSQHCLSLLYTWSVLAAVICVAMSLSQVLDLGLPVPADSTGGVAWPGMEAWHGLVVGTPLLD

SEQ ID NO: 971817 - protein, 69 aa, Homo sapiens
MWSLLLPPQPRTPTSSTTSYFRSFRAAYSSTFSFFSFRSLALNSAAASRLISDMVPGVRGRGWRGEARR

SEQ ID NO: 971818 - protein, 48 aa, Homo sapiens
VRKSSTPEEVTKRKAAVLFCLSECTRRTIILEEGQRKILVGDVGQTVD

SEQ ID NO: 971819 - protein, 37 aa, Homo sapiens
RVGLPLISVRLGRVDHAVEQAPVPVPLQIAHLAAWEE

SEQ ID NO: 971820 - protein, 36 aa, Homo sapiens
VGEAPDEESAYVAGEKSQHFRQDVIVSIDRLVRRGF

SEQ ID NO: 971821 - protein, 53 aa, Homo sapiens
MACRLSSNRSLRSIGGLQLVLQLFQLASIISSTCCSRARLDYLQLVDTLAPHH

SEQ ID NO: 971822 - protein, 39 aa, Homo sapiens
DVGLVIVGASQDGLKSSKCGLQGLHLLLDALQGGSQVLG

SEQ ID NO: 971823 - protein, 47 aa, Homo sapiens
FLLEVLEGDVYETRDSTASGLSRISLYVDQHLAGSGPVPHLEGTGSH

SEQ ID NO: 971824 - protein, 51 aa, Homo sapiens
MQLQAFYCNVECQKEDWPVHNGWEMFSHVLFFGGNNLCKSLRKIWEDDLIA

SEQ ID NO: 971825 - protein, 46 aa, Homo sapiens
SNLSFPDMPTLDTSRSASSVSQHCGESCSGLMCNLRKHRVQQDHEF

SEQ ID NO: 971826 - protein, 71 aa, Homo sapiens
VHLLFNSSSSSDHLVLGVSSLSTTDESPPASDKASVCLGNKACLIWFVFITFFLFLFFLRILHQTWFQVPT

SEQ ID NO: 971827 - protein, 75 aa, Homo sapiens
MWTQCDEISICGYVDIAIPCKNEGISLSVVRCAMDAGVGKFCAWVAPFPVNTHGRSCLICTSTEILQCSLKKKDA

SEQ ID NO: 971828 - protein, 51 aa, Homo sapiens
MQCHTMGHKIHQNDICIIHNFIKVLFVSNNGGSIYESDRAVTCNACALGLS

SEQ ID NO: 971829 - protein, 65 aa, Homo sapiens
EDTKTVDSSERKEYGRGHQSPWAPYHSPDLNLRLGTPTWDLPGKRRGVAEWAADRAMLLHFGPAQ

SEQ ID NO: 971830 - protein, 70 aa, Homo sapiens
STVIMTGFCLSSTQHQDLRTNGTDVILSSSFHLDCASIWSGGISIQAPTCHVRLSTGSHASKLIETRMPL

SEQ ID NO: 971831 - protein, 45 aa, Homo sapiens
SSYPTLQMLVYEVKEGLCVDIMHLPFLESMNPELGNETKCQELTG

SEQ ID NO: 971832 - protein, 69 aa, Homo sapiens
HDAPRSSWLAVTFQQMWISKQEYDESGPSSRPPYSASRRTMTYVALHPFLDKHLNLRQKTQMTIGTGFI

SEQ ID NO: 971833 - protein, 56 aa, Homo sapiens
LTRLTFGEQEHNLTGSFWNDSFARLSLTYERVFGTTVTFTFLLANQLYPVSCPGTG

SEQ ID NO: 971834 - protein, 59 aa, Homo sapiens
RYPHAKILSGEDSPDGLDAGDDLAGDDTIREHICLFIIGLISENLRYIQNGEPTTASFS

SEQ ID NO: 971835 - protein, 58 aa, Homo sapiens
MRAQIHRHAVCFVGRLEEDSSHRQDMFILSDGEGKIWNQSNGWRAPWMNEISVNSGKW

SEQ ID NO: 971836 - protein, 34 aa, Homo sapiens
MSKNAIPLPHSTVGYIAENNEEIASLARGIFKVT

SEQ ID NO: 971837 - protein, 36 aa, Homo sapiens
MEQRSLIFDILLADISQNKEISLRFLSLSMCRNLHT

SEQ ID NO: 971838 - protein, 56 aa, Homo sapiens
  misc_feature (14)..(14): Xaa can be any naturally occurring amino acid
PALFASSESAADLXYLWTYAPAPGADRFQIYYKSITSSSSSSICLCIYPPQTTNVL

SEQ ID NO: 971839 - protein, 72 aa, Homo sapiens
KVEQYDVKSWKPVATKNVDAVNAVEKWLNGETSNVTTERLLGVVKLEHPAKSCNYSTCLTLFAFRLVLLLDY

SEQ ID NO: 971840 - protein, 88 aa, Homo sapiens
DVDRAACLHPCHWPVISVPPGLEKPLRDGCFGLTVHQVNEDRTSSSTPFVLILINFPLVINPYKLISSTHCKLVGIGRIHIDSYRGTE

SEQ ID NO: 971841 - protein, 84 aa, Homo sapiens
HKERPPKCGTSRCSIPVEYSDSVYTERYMGLPTPEDNLEHYMNFNIMSRAENYKQVEYLLIHGPADDNVHLQQSAQISKDLDTM

SEQ ID NO: 971842 - protein, 41 aa, Homo sapiens
MWTQRKIQRADFSPTCVHADVRSGHGKVPGLKRWDTDLSLK

SEQ ID NO: 971843 - protein, 97 aa, Homo sapiens
MSPCVILVSYHLARSLHLLVMEESVHLIPPCSIMSMDRKSIRTNTFARRFSQIDPIACASDTCSYYLHIVSVLVKPLCGTGQEADKENDYDGVIMKG

SEQ ID NO: 971844 - protein, 59 aa, Homo sapiens
MTTTTPSLPFKHHQHNHIYHHYHQISTPGPITDLLHTIASNTNVVISTTMPYHCYYVHT

SEQ ID NO: 971845 - protein, 49 aa, Homo sapiens
PLVHIEPGTRAVLYCFLDCKNPFRQSSRQSRRFFCRCAFFRALRATYAP

SEQ ID NO: 971846 - protein, 34 aa, Homo sapiens
KSVDSATGRTITLEVEPSDTIENDGLTSQGLHED

SEQ ID NO: 971847 - protein, 44 aa, Homo sapiens
CVESGRLGILAGKLTLQTSRWFRSPYSLDQLQLLVGDEISRKGL

SEQ ID NO: 971848 - protein, 41 aa, Homo sapiens
  misc_feature (1)..(1): Xaa can be any naturally occurring amino acid
  misc_feature (38)..(38): Xaa can be any naturally occurring amino acid
XSWGDGKMAARRAFGAVCRRLWQGLGNFSVNTSKAQYXPKM

SEQ ID NO: 971849 - protein, 44 aa, Homo sapiens
CVRVPGGLGSWQGKFDPPDLTLVPEPILADQLQLLVETRFLEGS

SEQ ID NO: 971850 - protein, 87 aa, Homo sapiens
GLRDGATTWSVPTPLGPRGSLRGPGQPGEALGGIAEYTESMCLLESELEAQLGEFHLRMKGLAVFARLCVGDQYEICMKLWASGVEN

SEQ ID NO: 971851 - protein, 101 aa, Homo sapiens
AHLTCRYAGSVSPLCTSRTLVSAFRRKLLLWICNPRWNSLKQFAGDRGLGQRHPGIPCKQSPVHLAAGSGLACFLLWPAANGPLTFNQQVTRVTCRCVFPG

SEQ ID NO: 971852 - protein, 185 aa, Homo sapiens
  misc_feature (99)..(99): Xaa can be any naturally occurring amino acid
  misc_feature (101)..(101): Xaa can be any naturally occurring amino acid
MSVSCCWERQSAALSVSVILERLYGELLTYLKWCVGRVSPGDPSCELTFDVLNKSYVVGMELYNWTIVRYVVVDWKRRGQGQLVLGLWLQGRFFADHPXMXLESTSMPALTYQAFKDYGHCGLTLNRETDDTLVLSFVGQTRVLMLNGEEVEETELMGFVDDQQTFFCGNVAHQQLIQITPAGCT

SEQ ID NO: 971853 - protein, 37 aa, Homo sapiens
MESSLREDQAEHNKPLTDFWVSATAQVHIQVNGRSET

SEQ ID NO: 971854 - protein, 102 aa, Homo sapiens
VVCSILSMELVSVLGNLLIILTITSDSHLHTPMYYFLSHLSFSDICVNSSVVPKVLVNIQTESKAITYAGCITQMFFFLSICVLDNLLLSVMAYDRFVAICH

SEQ ID NO: 971855 - protein, 97 aa, Homo sapiens
  misc_feature (23)..(23): Xaa can be any naturally occurring amino acid
MYDKAVAKVIPELKGKLTGHGLXVSPTAKVSVLDLTWRSRKNLPNYDDIKKGVRSKASGGPPSGAFRGIHVTTRLVSFVISTANTHFFNRALSAGYG

SEQ ID NO: 971856 - protein, 58 aa, Homo sapiens
TSMLLNGSYLMDCHLNGCYLNGCYLNGCTSNGWYLKWQLVHRQHPAAIKVTAIEVGYL

SEQ ID NO: 971857 - protein, 34 aa, Homo sapiens
  misc_feature (26)..(26): Xaa can be any naturally occurring amino acid
MRTMDEISSESYQWPIDNGYLLIIIXGSSFFRLK

SEQ ID NO: 971858 - protein, 63 aa, Homo sapiens
MPATWLILERREVCRLWRHSDKDTRRLEKLSMYINVSGRYVHAQCRTCEASSNSLMHLAQSLS

SEQ ID NO: 971859 - protein, 61 aa, Homo sapiens
  misc_feature (36)..(36): Xaa can be any naturally occurring amino acid
LYEDPRYFRDLSSMNQYQSLKNSDSTRGNHTTMPSXLAGSLKSDDEPVSNSKTESGVKEKA

SEQ ID NO: 971860 - protein, 55 aa, Homo sapiens
KEARRAREERLQAMREEIIKNFIQGGGDQEIKPPICVCTSWPLCFLRSAIKIKQA

SEQ ID NO: 971861 - protein, 76 aa, Homo sapiens
SVTRLRPAGLGTKKARKRGEERLQAKKEEIITNFIQGGRDQKIKPPTWSVHTGLCNYLDQPLKKTSLIGAYLICGG

SEQ ID NO: 971862 - protein, 58 aa, Homo sapiens
MYQSLNEQDSTQATTQQCPACWHVVEIDEEPVSKAKQSRSENEGTEAYVQMWVFGRLH

SEQ ID NO: 971863 - protein, 55 aa, Homo sapiens
  misc_feature (2)..(2): Xaa can be any naturally occurring amino acid
TXLVSASLVGLDDLLLLGLWRSSRCWRASLVLALRASAWSARRFLRAFSAGLRSS

SEQ ID NO: 971864 - protein, 39 aa, Homo sapiens
SSLALRRSSRRMRAPCVLDLRASAWSARKHARRCEERLQ

SEQ ID NO: 971865 - protein, 105 aa, Homo sapiens
LTSDYASGARVTHVGGERITATSHRSVELSHSFSPQYGKFRVESRKEKTQETPNNNNNKNNNNNGNNNNNNNKNPKGCMNGFKLSRPGDHGSGLAYISTVNKTSF

SEQ ID NO: 971866 - protein, 43 aa, Homo sapiens
QSAQAKKEEIIKTLSKGGRGQEIKPPTWSGTYWASVITLDQPL

SEQ ID NO: 971867 - protein, 36 aa, Homo sapiens
RGSRGLTRARCTVHAYIISSLKKEMPNVFGKESKKK

SEQ ID NO: 971868 - protein, 85 aa, Homo sapiens
ELRADQVEARRSKTKEARKRGEERLKATREEIIKILSKEDETKKIKPPSWSVLTGPLVITIDQPIKIKQALSGAIPYLALCHYLA

SEQ ID NO: 971869 - protein, 44 aa, Homo sapiens
MISSFLAGRRSSRALACFLGLRPAGLSRVSQELLAGLYLRRGTE

SEQ ID NO: 971870 - protein, 48 aa, Homo sapiens
LICPCLICGANKAGKKLLADQAEARRSKTIDARKRGEERPPGQEGGDH

SEQ ID NO: 971871 - protein, 35 aa, Homo sapiens
LKAEAAGLKTKEARKRVKSAPGQKEEITQDFIPRE

SEQ ID NO: 971872 - protein, 44 aa, Homo sapiens
MARNSPVVILEDQTTPIGITLPFLIKSPSTLTTQSKTPTDYYVH

SEQ ID NO: 971873 - protein, 32 aa, Homo sapiens
MSRWHAVMLAVRRRPGRWLNESAYGFDNTSMG

SEQ ID NO: 971874 - protein, 85 aa, Homo sapiens
MYDMSSLNYTDASPPSTATAPVDESTTYHRSPGSTPTTHFPARLHNLRATVEKSTIFHTQPSMQDGTTPIICPIHNHQRRGRIHN

SEQ ID NO: 971875 - protein, 46 aa, Homo sapiens
ADKAAKNLADQAEAAGSKTKEARKAPVKSASRPRRSEIHQGTLSKG

SEQ ID NO: 971876 - protein, 52 aa, Homo sapiens
HFLFNASNNCGQCNRQPKLAVCPFEYQHLSFLLNFPHYFSRYSVKLLWPSFM

SEQ ID NO: 971877 - protein, 51 aa, Homo sapiens
PDPKDMVLSFDFKRQAGKQQYRMSLRVSAQKQYILECPKQGSDATSISTER

SEQ ID NO: 971878 - protein, 62 aa, Homo sapiens
VKNFLLLSLARSSLCCSAGKLAQPGAGAVQHSPRGSVRPSVVSGPILTACCHMLQSCVLYYI

SEQ ID NO: 971879 - protein, 139 aa, Homo sapiens
RGKILPQKFLPSGVKIGRRMVVIPKIMVAPTTSKMASIITKSIIAIPMATNINNHQGLPPKATKDNGSFLNGPEVVIPNGNHLQDQPPKFPEPLRPLGLDEALAISGLEKGLSNFTVVAIHSMVLLNDNLIQGAWVVKG

SEQ ID NO: 971880 - protein, 108 aa, Homo sapiens
MAKATQLLKEAEKESGYRSASTANIFPDSPGGTSYERYDGYKVPDGCLDDWHPSEKARYPDYLAKRERCKKRRRESGDREVKQLQEETPPGGPLTEAWPPARREGAVG

SEQ ID NO: 971881 - protein, 39 aa, Homo sapiens
TTKNSDEFANTMPVRPPTEKRKMNPRAQTTAQEQNLSRP

SEQ ID NO: 971882 - protein, 107 aa, Homo sapiens
SGRASLSLLPVLHLSSCSSVVMRGIVVGFLRRPQEVAGASSQILNSQVVATERDICDAVEHSQTWSILHVSSTVAEIFSGLLSGLPYSRTRQRTLIRVQEHKLSTSI

SEQ ID NO: 971883 - protein, 42 aa, Homo sapiens
LLMLFKRIPLQRLNYRLGGGSRAECEILTQEHHNIAPKGRAE

SEQ ID NO: 971884 - protein, 81 aa, Homo sapiens
MEGPNSSYPCLLIHICCKVDSEPRIGPADSTRSILRSGGAMILISIVLGARAVISFGIPVAMPGYIVLPPDSTVGNPLKST

SEQ ID NO: 971885 - protein, 127 aa, Homo sapiens
FACDQRIPTYSAVRLELINDVPPSISAPGSYRANGVDAYRPALSYPGALMNPGPLEITGKNNKFPSPPALIFMMEVSYNAIRTGLVRLLGEELKSLVDFLPREGGAEESAIGVGLVTYNKALQVGYR

SEQ ID NO: 971886 - protein, 83 aa, Homo sapiens
YLLGFSCYGSWGCSRWSPCFGGLGGRGRLDGVHCREVVSHGVASRVDPFHGCRKSSWSHTHDAGGISVCGTIELRMNGWRVNN

SEQ ID NO: 971887 - protein, 166 aa, Homo sapiens
KVGNPPGAQSCGTRKTGIIDVVYNASINERVRTKTRVKIGFVLIDSTRYRQGYESHYALPRGRKRGAKLIPVRKKRFNQKRIYKIQRNYDEGKRIAKISSLREEQSQRGKLLACFVSGPGQWGRADGYVLEGKEWESYLRKFRARKVKGAVGKGAEGKGAEGKGAV

SEQ ID NO: 971888 - protein, 68 aa, Homo sapiens
MLYPEDPTYSAYIEGSYYLSQSGQCCVDGMLSEQHPPRPQGHTHYCPIPCGHGSRELNQQKWRWSAHN

SEQ ID NO: 971889 - protein, 49 aa, Homo sapiens
MLIYPRVLLHAMLQYRSADEPMTTFYKCCNAQCGHRCEGLEAEDVPVCP

SEQ ID NO: 971890 - protein, 50 aa, Homo sapiens
PLALSTFYLPSTLIISTILILLDYPKKSAGRPESKAYVSTLSSKALSGAY

SEQ ID NO: 971891 - protein, 70 aa, Homo sapiens
LFNGLIYVITEASMYSHSGRFNSSVSSSLDKVLMISSFLGREALFRALACSLGLRLGGLSRVSQELLAGL

SEQ ID NO: 971892 - protein, 77 aa, Homo sapiens
WVDQAEARRSKTKEACKRGEERLQARKEEIIKNFIQVRKRPRKENLPLCVCTYGASVDNIDSAFKIKTRPNLAGVPE

SEQ ID NO: 971893 - protein, 58 aa, Homo sapiens
LVKSTGDTGLDKVLDIQVVVSDATYLGQLPTCPVKSSVCSSLNSVNSSDSRSSGSHSH

SEQ ID NO: 971894 - protein, 57 aa, Homo sapiens
MNYLDSTFSNLVSASNKGLLGNVLATKFPKYANIYKKDRFFIIIEFPHNLPISQSII

SEQ ID NO: 971895 - protein, 52 aa, Homo sapiens
MMNVFDDFYSSLTVALPPRLLTYWENVSVLVTTYSCINTITTPYYRGHTTIA

SEQ ID NO: 971896 - protein, 92 aa, Homo sapiens
NMMNSKGAEMNKDFQELNYSGIRNESTDLEDQQVYNKIVTCLSHPVNQTLYLFPFKKQVSWINYILFYGCAKFVTGALFFAFSQTIPYQNFP

SEQ ID NO: 971897 - protein, 105 aa, Homo sapiens
SSRMTNDPDSREDIRKQRAQLVTDYGLQPKMDKGKGSQKLHPLEVHKRKRWLGGHILFLSEDRYGQQMKGPAEEAGEGGLGHNGGASPEKHGKACPEPPAMHRET

SEQ ID NO: 971898 - protein, 43 aa, Homo sapiens
PNGRITFIPKKTICPIEAVKVIRVHKVSSFSTKAFSFSARETH

SEQ ID NO: 971899 - protein, 62 aa, Homo sapiens
DGTDPFLGDSGAMFTFGLNQQQYMVSRICEMLSVRLKDALIQTLGTYQQIRLFKTHGFQCHL

SEQ ID NO: 971900 - protein, 68 aa, Homo sapiens
RYVQSIQVYSRHPAEHGKSNFLNCYVSGSSSITTLKIDYTRRMERVIEKRGAFTTCLSDKDLVFLIYL

SEQ ID NO: 971901 - protein, 128 aa, Homo sapiens
VSGEMDNTETRLHVQSGTSRHLVLSRVSSLLLATSFTHRVSRTTEGIRNSKFSKQLQYFQYIVGDYYNWFMARKGSAPPTHRHWSRFLYLASLYFVGPTQTATLRLFSAAISWQDSTSLPIPWLIRGG

SEQ ID NO: 971902 - protein, 67 aa, Homo sapiens
MTSEIWLCGFVNLLKTWRKLELTGLKVFGNEIKLRETNKEKTVRKQRDAMNTFGAKQSPVYRCSNFV

SEQ ID NO: 971903 - protein, 46 aa, Homo sapiens
IAAHEGLRSSSVKRYSEYHSDQPSLSKYSNEDTLSVALPYFWEHFD

SEQ ID NO: 971904 - protein, 43 aa, Homo sapiens
YIYELELVPCDLGHILVAEGALLGEVSEDEGLFSGTNLSFSTR

SEQ ID NO: 971905 - protein, 114 aa, Homo sapiens
CEVTVPPQNTGLGPEKTSGGQASGITTKISRGTIEILSDVQLSKTGGQVGAGEATLLNMLDISPFSCGLVIQQVSDNGSIYNPEVLDITEETLHSRFLEGVRDVASVCLQIGYP

SEQ ID NO: 971906 - protein, 113 aa, Homo sapiens
PVQGTGNGHPGIWRSNSATELTNGKNICQCLVEMGRAKDDQLKVQGFKVLVAHCSLSEDFLAMEENFPSLPGHRFKNLTAGLMVTIGGPLVTGTSGTCLHELLFSRVTGRGSE

SEQ ID NO: 971907 - protein, 71 aa, Homo sapiens
AADDNDKKKLVRAFKKKLAGKGTGNGGIRNIGEVIQLQGDQRKNICQSLVEMGRAKDDQLKVQGFEVLVAH

SEQ ID NO: 971908 - protein, 56 aa, Homo sapiens
MECEHEVKSDGCFRAPVPMCPSRLQVECRAPMGRDGVVMGHDPDPGMSSPLEQGHH

SEQ ID NO: 971909 - protein, 36 aa, Homo sapiens
MSQSVEWRCFYIVHNSAPAIFYGYMLVQQVNRVDWQ

SEQ ID NO: 971910 - protein, 113 aa, Homo sapiens
TGHVTHCVRGPSEDKTISTCPSSCRDGVLNTDGMILVHVLDPCRHTSPCPRWLQPVTSLTHTSGVQLSASPETGFVLLGTGFASLGDQPAFLGDTRGPRIASEEPQNKHRPVD

SEQ ID NO: 971911 - protein, 51 aa, Homo sapiens
LGSSAEALDDLGGVAQLPARLSPIICEEQRSTALLLVSRSGGLCFPQNSPM

SEQ ID NO: 971912 - protein, 44 aa, Homo sapiens
RLVTSCKGSTTSTRGSLMDTSLMHDMSKPSRSPTSGSSSLCTDV

SEQ ID NO: 971913 - protein, 51 aa, Homo sapiens
MISFLSSKPAVIINSPQLRSISKLACGKTDPGTVFVMNKNISTPYSCAMHL

SEQ ID NO: 971914 - protein, 47 aa, Homo sapiens
MRCSRFICSYSTAYMPYFMSPRTPGVAVKGELLTSRWSLARSFRIVS

SEQ ID NO: 971915 - protein, 54 aa, Homo sapiens
TCALVVHTGLAVHLPADVISKQEYDEYGPSIVHRKYFQADYNLVCVTPFLDKTY

SEQ ID NO: 971916 - protein, 82 aa, Homo sapiens
PSNTKRVYMLVCCKKPETEYKDDVTLIKFQNEGNTASEKQSVAEDARVSDAMYQNIPQATHHKPSCAPQRYPRCCSILPRSP

SEQ ID NO: 971917 - protein, 63 aa, Homo sapiens
SLAPDKSNVFPGITNGQQMNEQLSDCSFCSRLTIQKTSCQKHRKEPPPLLTPALVPSAAVPAA

SEQ ID NO: 971918 - protein, 34 aa, Homo sapiens
GGIMSPSRYTVGNGGGAREHGILGIKPGQLLDFF

SEQ ID NO: 971919 - protein, 32 aa, Homo sapiens
LILSVEGTIDSDSLGLKEETVYQEGRYKLWLV

SEQ ID NO: 971920 - protein, 83 aa, Homo sapiens
  misc_feature (1)..(1): Xaa can be any naturally occurring amino acid
  misc_feature (48)..(48): Xaa can be any naturally occurring amino acid
XSIGSPANSGAADSSFLRALDILVKAAQKSAAFEEQENETVVPKEKMXSCIAQIIAAQEEMLRKERELEEALKKLSQIRQQHH

SEQ ID NO: 971921 - protein, 86 aa, Homo sapiens
DIRVLLSCKYDPGQGFVHREALQKVQWRGSGATEESPLPTRTPNMKSRPQGLPPFFLQQRELPLLSQALFWRLTLVPGECAPPPSL

SEQ ID NO: 971922 - protein, 79 aa, Homo sapiens
MAGLKHTRISPKDQQVFIPCMTSQTLLLLLRLYSDYPRNDGGNATSKSNLSAAPNSPMLLIEVVAWSPVRLLRQYVRQR

SEQ ID NO: 971923 - protein, 48 aa, Homo sapiens
DKAGDTYFTKKAPGQPGETHSNLIEASEEVLSKSHRKKKSRLVRPREG

SEQ ID NO: 971924 - protein, 49 aa, Homo sapiens
MRANEVCSKAKAVTKNKSTGHYEYEPSTKAPARIPLAPARIPLAPARIP

SEQ ID NO: 971925 - protein, 51 aa, Homo sapiens
GVVIITEQAPLEEYEAPPGPWSLKLVARSGLGEQFWWIKLVEVNGLSMGYR

SEQ ID NO: 971926 - protein, 173 aa, Homo sapiens
IADRVIGECNWIWQGLILDHNLPENSKIKGRVSSQMEAPEMRHINHTNRTESVGPLPKSREDLQLTHNRITKRGSLEGWVNLTFIHLQHNRLKEDAVPAAFKGLKSLDYLDWSFNQKPDGLRVSRSLYKLLLERDQYAPDVAELIGSLMEIGNIRLKVARTYLLDPYRIWSGV

SEQ ID NO: 971927 - protein, 95 aa, Homo sapiens
MGHQPRGDVSDIYKIGEIAAGGAWEVEGKRVSRTEGNMDDSLMGGNASVEGPEGEGPESTVFTGVDMVMNQFTGGKQVFTKEAYKRYFIDYMKPI

SEQ ID NO: 971928 - protein, 101 aa, Homo sapiens
VRDGGRIAHQKVVRLLRPGLDDGKPRLGVPGKVVMQGGMAGVGKMAKYGREYFRSLEELVSGMYRIYDMENVRLGHHFTNFQDSIQYVQKNAGKLTTTMGK

SEQ ID NO: 971929 - protein, 82 aa, Homo sapiens
GVSRQLCNYEGGFSEFHSRYWLNWNLVFLDSVLVNSKISLMVSSFSLLAGGKLAVSGVIMPSLGLRAASNPGNWLAVLQSHR

SEQ ID NO: 971930 - protein, 95 aa, Homo sapiens
TDPLLYDGRKLQRTTCTALSYLQRSLSLYTLEAVTTLSVPPNYRDIMVRHIWYKGHFKSNYMVLPYFKTWMSQRGVKYVRRRCKVSVSVCYESSK

SEQ ID NO: 971931 - protein, 165 aa, Homo sapiens
  misc_feature (6)..(6): Xaa can be any naturally occurring amino acid
KRQGRXLKKMNLGSLKATIEDMRFKAKRKRVLEHQGQVRLGMMRHLYVVVDGSRTREDQDLKPNRRTCTLKWWEYLVEEYLDQNPVSQMGIMVTKSKRAEKWTELSGNPRKHIASWKEAVDMTGQGEPSLYNSLSRAMQTLKHMPGHTSREVLIIFSSLTTGDPS

SEQ ID NO: 971932 - protein, 73 aa, Homo sapiens
TNRLLLEGYEAPPGPLSLKLVARSVLGEQFWWIKLVEVKWQSIVGVSKSQLWVLSYVCIQYMLKATSGSQSTG

SEQ ID NO: 971933 - protein, 84 aa, Homo sapiens
LTIHILPPSSFRKKGSWQRQKGGGVGIIHHLQVYHPGYPGLGSQASRRDALRGNRGKVKGGSHFTDKEAFLTFFPSTNNSLHGQ

SEQ ID NO: 971934 - protein, 49 aa, Homo sapiens
TLETRLPLPKSTIEAEPNQSFQGEGRLLLVHNLPQKSVLANIWVTKCAN

SEQ ID NO: 971935 - protein, 170 aa, Homo sapiens
  misc_feature (150)..(150): Xaa can be any naturally occurring amino acid
EKYMEYLDAVTYSGDPAPGPDPFSLMGESTINWWVTIQGGVVLLQRVKGSNVDFQSRKGKTDIRIGKKILLQSNSYVGMREGFYLDGSDTMVCDSNSTGDPPVPKCLKGPRPTYKPPVSNNPGYPKPEEGILDSWDVGVMAVMVMAIVVXVAVICVVPYRYLQRRKKKGK

SEQ ID NO: 971936 - protein, 33 aa, Homo sapiens
MIVIVHRASVGSVERMIAILTENYGGKWPFWLS

SEQ ID NO: 971937 - protein, 34 aa, Homo sapiens
GWSDDDVGAFVTARGGSEVANTLERCNWEALYHY

SEQ ID NO: 971938 - protein, 46 aa, Homo sapiens
LCCKHGLSGCSRTLVMVKALYALTGLCQEGLLQKPQVIRNRPDDIG

SEQ ID NO: 971939 - protein, 136 aa, Homo sapiens
MGAKKKKERKKERLAEYRGVNDKRNREGEDIGLCKDFRTKTPKAIVTKAKLDKGDLIKELRHSKGNDHQSEQAIYRRGEKFGNLTTYKGLISRIYKELKQTYKKKKQLHKRGGEGYDQTYVDGSYIQNPSYLILSK

SEQ ID NO: 971940 - protein, 88 aa, Homo sapiens
TYKSSILANSGHPHSEHSVGPGHFIGHTFLWGGHQGYGAIGSSGSVFTQENQGYKEKKAEAKEVGGETIVGEGNRYPLRTRIPLKCVL

SEQ ID NO: 971941 - protein, 149 aa, Homo sapiens
MLYQEDPFSTLSTTDISRLDNLTGMRGDDEGSVVKRDMGFWEATQGFNERYVHTHERVSSSSSKNSRVLLIYHKDNIAGLQSGSWVSFNRECNLRAIFHALVNDELLKFSSLELSSFRGSFYIYLKDGSAPQGPGTPGTQTKGAEGYRS

SEQ ID NO: 971942 - protein, 114 aa, Homo sapiens
MDPSSNISLTPLIKTLSSRQIWGPTTWAAPLAILKAKGFSGQALEIPHLYRGGLVERAAVSKADLANRFPKLASIFISNTGEITKKVSKTMATVTTNIGSTGYPQVGLKVLKGT

SEQ ID NO: 971943 - protein, 61 aa, Homo sapiens
MAYLLWVVTKARCYGLSALVHTRDPGYKRKSRGQELEGEIVGEKPVSIKTRSHQMVRGTEL

SEQ ID NO: 971944 - protein, 71 aa, Homo sapiens
MTLIVQHVLCIRLPGGAGPSPGGGFINGGGSNLKMSGNPGDPPGQDRRSEAAVKPISHSQRYAPGTLRLNV

SEQ ID NO: 971945 - protein, 37 aa, Homo sapiens
MGRDVDDWYCDLRIENGSRVGYGPAFSRCPDTGLSFW

SEQ ID NO: 971946 - protein, 81 aa, Homo sapiens
MKEKVHVDLNSYVQSPGIPFTSRRPLSLHLGFSSSSAIFTAKQEQQRGFWGKKGHTGVGITGNNDMLLEPGVLLEMDPIPI

SEQ ID NO: 971947 - protein, 124 aa, Homo sapiens
  misc_feature (120)..(120): Xaa can be any naturally occurring amino acid
ISIKPGHQVLQGMAGFKQVHLEGSKNPFRSQTGSLTFLKKFWYYQGTFHSRFFLRVTVQEDGRWTSKNPMVSSFNFLGLVPFQWIPKGFKKGSQSIQRERGDFLQVSSRQISGSSKANSXFLDL

SEQ ID NO: 971948 - protein, 69 aa, Homo sapiens
SVIFTVNTQGPRAFYRHTFLWLVTKLGAIGHLLWFTPENQATREKAEAKSWREKYVGEEPGIPLKTRHN

SEQ ID NO: 971949 - protein, 34 aa, Homo sapiens
MGERDIKMDDIQKWKVRANFIYESLRYQPCREVG

SEQ ID NO: 971950 - protein, 66 aa, Homo sapiens
SDMKQSYVDGSRYTNSTHYDEIELYTLLGIRGKNPLVSWHWIVPLDVYKLPIGQGNLKDHMCIPCV

SEQ ID NO: 971951 - protein, 178 aa, Homo sapiens
MVWALASGVGFKSENGGDRTGEKVTQCYGKGWIAAPDTRSVSWFSRLIPHGKAPYCGGGNIKGNPDGQWVERDIKMDDIQNLRVRETFIYESMRYQPVGSWVRRKALEDDVIEGNPVKRGTNIILNMGGMHRLEFSPKPIEFTLDNMAKYVPNRYFQPLGYGPGGCAEKYIGMVMMKA

SEQ ID NO: 971952 - protein, 68 aa, Homo sapiens
IAISAGSLCSVTHHLTPGIYCPETDNCMETSTDRMMPVTSSAVGSVMSDAAQAPADIEDLVCMPDVKL

SEQ ID NO: 971953 - protein, 45 aa, Homo sapiens
TRYNAHSLPWPPWGLKFAAGRCRACGVSKYKVKVKCRICYLVASP

SEQ ID NO: 971954 - protein, 73 aa, Homo sapiens
TYRTWKRVSHHRLSHTSREGGTGGEGIIQKDQGEQGDDMIKIKGEGCSLFCRQEVSFNGMGTSFPFLAAFMKK

SEQ ID NO: 971955 - protein, 73 aa, Homo sapiens
GVAVFRSNTAEVSLHSSRVSVSSISTAEEILPMVDSFPVSLQGGVWEPAVGPSELAIEAVVQSVNGVVHDDSW

SEQ ID NO: 971956 - protein, 163 aa, Homo sapiens
VNSSGVLKLCMGYHELYSAAAGRLHTIEVRADEVPMPGRRSIRSSVARQQLETEKKRREIVEREKEQMMREKEELMLWLQDYEEKTKKAVRELSEQIQSGPADGGGDGSGHRRSGELPRCVDRMAELRAKEELERQAVDQIKSHEQLAVEAEEYTAKICLLEE

SEQ ID NO: 971957 - protein, 79 aa, Homo sapiens
VVIKSRYEKSGDRVSPMKHGDSMQAVVKWAGSVLPEDEDEKEDQEEEEQEEEDDDEDDDDTDNSDELDTAQLLEAELEE

SEQ ID NO: 971958 - protein, 49 aa, Homo sapiens
RSWLAALGIGPLISHAMIPVEEIGSACSYYNRENGESMRDWISAEETLI

SEQ ID NO: 971959 - protein, 30 aa, Homo sapiens
MSSPIAGSIVLAEYSKTSGMYIARFISTLK

SEQ ID NO: 971960 - protein, 36 aa, Homo sapiens
MYLVQADDAVHILPQLRDKLVRGLVEQCGDVVILDL

SEQ ID NO: 971961 - protein, 93 aa, Homo sapiens
QEMLGTSSFSQPATSTSTGLGLGTSTGTAITWLGTASTGTSLFSSQNNALAQNKPTGLGSKGDITGVLHLIIGLAYGMCGLFSVFLCSSTFFS

SEQ ID NO: 971962 - protein, 38 aa, Homo sapiens
MHFDEPDCEHSFGLDKAPVLLSSVNRRGFGTTSRRDGK

SEQ ID NO: 971963 - protein, 149 aa, Homo sapiens
  misc_feature (79)..(79): Xaa can be any naturally occurring amino acid
  misc_feature (95)..(95): Xaa can be any naturally occurring amino acid
HFLRLTFEKTKLVVAAIDDSGAVRTSKDVGVKKEERKSPQLRVGWGAQESPFLAVAQQTVSQLLDAQSRKCAPFSQVHXRRYWATPQEVVIQDGXEELISPPIISFVHVVQQEGNFKIRAEMSVQRPRAQRGDSPWRSPNGVMSKQATS

SEQ ID NO: 971964 - protein, 64 aa, Homo sapiens
VPEDCCNQDFITNVVFQDVGKFLGISQESAPFSWWQGSKNRISIYQPLASLQLYDLDTLLLLQR

SEQ ID NO: 971965 - protein, 37 aa, Homo sapiens
MINMMNRKGAEMVKDFQELNYYWNKERINIDLGPDRF

SEQ ID NO: 971966 - protein, 92 aa, Homo sapiens
LRIAVFVSLGLEISGVVISLKEHAAFKHLFNKAHLALPLIHLTLSGHSTCFREHRVGGQVVGLQHSFYEQEVICSFPAAKILGHLKWLFTLL

SEQ ID NO: 971967 - protein, 33 aa, Homo sapiens
PSPSVLTSRWHPHVLWFLLTAPSDGLSFTHSNE

SEQ ID NO: 971968 - protein, 53 aa, Homo sapiens
MYRNRIFTVSMELRLRSTFCGPLTLVVHTHLQPANFGNFYPPASIVASLRKYV

SEQ ID NO: 971969 - protein, 117 aa, Homo sapiens
MLDTDTSYSGKGLIGNDIATIVFQDRGALPFTPNSIRSHFQHVFVIVKVHNPCTENVCYSVGVSRSKDVPPFGPPIPKGVTFPKSAVLRDFLLAKVINADNAAHKSEKFRAVTELDI

SEQ ID NO: 971970 - protein, 36 aa, Homo sapiens
ILALRERYFSGLIYTYSGLFCVVVNPYKHLPIYSEK

SEQ ID NO: 971971 - protein, 85 aa, Homo sapiens
TQTVVLTLPRVLHVCPVNPGLRAKEAQDVSPEKLAYESLEYPSIFSAKYSSFETEITLAGIEDSARLLLWAPSRLHLLTSTPKQE

SEQ ID NO: 971972 - protein, 105 aa, Homo sapiens
MLLSNRTGSIHALDEQQGACGDTLDGISVAFPPCRRGVGIDSEQTEGGLGSHAGMNDYLVLWDIGIFKLLVGVNGQMVRAMSLEHSVVKKPGSRTGLDGTSLLKP

SEQ ID NO: 971973 - protein, 63 aa, Homo sapiens
LLKASQYLNSVVEHSKSVTVQARYDRCRDWAHMHLHHGSIETLTWLSRNSRRSFHGKPAPEYP

SEQ ID NO: 971974 - protein, 42 aa, Homo sapiens
IADDPVTLNVLYGPDLTQNYTYHITYYRNREKSYYLILFQRH

SEQ ID NO: 971975 - protein, 90 aa, Homo sapiens
LGIKRGAVIATVMKNNSYKFGPVDLLCFRWAGSEYLKLGYVSRYHVKDPSRHVILGTQQFKPDEFASQINLSVYACLAAFNGCRLKSTIS

SEQ ID NO: 971976 - protein, 125 aa, Homo sapiens
MTEASFHSVIENLEMLKYQRRQQQQSWTRRVLDQGDGLSTSVAGVVNGESLEDIRKNLLKKQVETRTADGGRRITPLCIAQLDTGDFSTAFFNSIPLSGSLAGTMLSSHSSPQVLALDSSTPNSF

SEQ ID NO: 971977 - protein, 70 aa, Homo sapiens
MIDNYPDVDGQKVLPKDDIECPLRWKWEHEEWSTDLYDRAVYDQGCEYSITIPPERKPNHWVPADKMYYT

SEQ ID NO: 971978 - protein, 66 aa, Homo sapiens
IYKAKEPHPQAISWVKYQRVHAVVCQFEESYSVGNAWKQSTLLETNSFICIKKCATKESLWLAYSY

SEQ ID NO: 971979 - protein, 48 aa, Homo sapiens
QLIEHRPGIHPGLNSDHVGLYSLNKRTFNSGCTMDCPRSNIEVVNPYV

SEQ ID NO: 971980 - protein, 69 aa, Homo sapiens
MPSAITGLISSLVQFTAIHDHGVADVSQAGCLKVCILDEHKVHDIIVAVTPREGSCLRSVDVLFTTMSL

SEQ ID NO: 971981 - protein, 52 aa, Homo sapiens
SNRYTPIILTTSSGFLSDFYINCVSFVLFLSPHRLVNSCPIIQSSILSIFFF

SEQ ID NO: 971982 - protein, 36 aa, Homo sapiens
REGDAPSRSGSVTVYSRVEEEVITEVEYVVQLRVGL

SEQ ID NO: 971983 - protein, 101 aa, Homo sapiens
IGFSGRLGKESVDQAPETSPGPSVNRRTMLEVKKYNVLMAGKMYTFVIPDKEQCRADWLRGGLPALQPLTATSAGLERYLEKLSSAGYRINTTHRALHKCH

SEQ ID NO: 971984 - protein, 42 aa, Homo sapiens
LSYSALTLCSGVLYFGGRLVVALEVCYGGGLGGGYGGAPMEV

SEQ ID NO: 971985 - protein, 70 aa, Homo sapiens
IKRVKENIGNQTAALNNVGEQCNFEIVRACSGKPCTEAGHTDLVVYLAEHVTKSRRGGLGAPVSRGVGVS

SEQ ID NO: 971986 - protein, 107 aa, Homo sapiens
GDMSHVSDEGAFLNLHQPQQLLGSHGFAAFVPGDPGAFCYTFYGQRLVTYGSTLKAGNGIAYTTKNTWKRHQEYEEEEKRRYKTLMADGWELHQEMSLGRTSSLPPY

SEQ ID NO: 971987 - protein, 51 aa, Homo sapiens
SRGSSDLGRDFGGLTAASDICRQNSWRIGRTLSDYNIQKESTLHLVFAPSE

SEQ ID NO: 971988 - protein, 110 aa, Homo sapiens
DALLASPGGRKKAILARDTLFLGLGGACVHLLTLATALKSTHSSDFSTMVRSRSSSDYITLEYCTSRAEISSRTSLKVRIDSCRWLKCCEEQLAGTRDQRRIVVHGEVDE

SEQ ID NO: 971989 - protein, 113 aa, Homo sapiens
PPTGDLVFRVSKLLLTMQLWPKTELQPREKFGEDLSDNTGEYISAIDLLCCHQKWIWSHDNIIGLVILLIYIKICYCKVELLITESRLESFLSFKCVRQMKHLQITPFLFYKS

SEQ ID NO: 971990 - protein, 130 aa, Homo sapiens
RGRKEDYASILIFVATHDDASCKTEHTVNPKIINAKYSMYIWTHHYELLVAGCHFSSSTQIPHPRWTLTLSRIYLIHDRRRSGIIGRRISYLTEKCSVPPARARDILTLLYPDQWRDRCQASGAARPGAS

SEQ ID NO: 971991 - protein, 88 aa, Homo sapiens
YNHIRGHNQKNHILRYPGQQAALSTPTLLADITKNNIPSTQCKIYRGQLPTGCMILSNTTRLLLALPSTSNPYPSPTEIRVVPISTLD

SEQ ID NO: 971992 - protein, 74 aa, Homo sapiens
MPHHLKHVIALSCHIGVDHDKCNTEVSMMITRWGATFMPQQRLREANTNWIAPELKKLLHQASLHGAEPLMQVA

SEQ ID NO: 971993 - protein, 62 aa, Homo sapiens
MTKEIAAYRAKGTSEAGEKAPWQANRLTEEAHAPEDEAGRQAGKKKHAKMQAGSRHVAYSKS

SEQ ID NO: 971994 - protein, 66 aa, Homo sapiens
MVMEMTASISTQGSGRACESQAWRVAGVNMKELNKVKHEMDFDAEWLFENHDEKDSRVYASKTADS

SEQ ID NO: 971995 - protein, 49 aa, Homo sapiens
CWLLSERRLRLHRVCVTEFGPEVEPEFGTKVEPEFETQLEPEFETQLEP

SEQ ID NO: 971996 - protein, 105 aa, Homo sapiens
MYFIKSFLFYNILIVLVYLIFSFFDPSSSSSHHPPRHLSQVLPGPLGHSSCFVETGEELEDTLSVVIQVGNLTVKEVQAFQTFNFFKGSKVLISFSLFPLKFRCV

SEQ ID NO: 971997 - protein, 38 aa, Homo sapiens
ARYQNTRFMRGTNDNLLAIAAFVSAASLSHGPATRAGL

SEQ ID NO: 971998 - protein, 67 aa, Homo sapiens
IELGPGVSSGVRGVNFSHDSDKYVSTWWAVKPPGNVISVIQYTNSLSRSNSFERSESVELVACTQDK

SEQ ID NO: 971999 - protein, 104 aa, Homo sapiens
TTLYVATEVLHHDPHTSAGAAIAETASESPKKCCRIRPLRSLIYCSTKGSRVSASHSLVPCLLHQVPLGIQLLCLLLQEPHLVDEGGKLVVEGLDLLTLLGPHP

SEQ ID NO: 972000 - protein, 198 aa, Homo sapiens
WLGPRFVVGGVCLAVGQWAGEHCSRSVYAIVRRHVEDVLGCCPVRWCGIPPAAACWGLGLWLTARCPSRGKLVCLSQASTNTEGWPPFVAESPFTANMEVVYREVCGSCSPRLMKNGCFMASSAEIRFRPSNCNSLVEELSAPSLSSRGAWLKRASARYLRYLYVLNSSLDRMPGHVSSVGVPKIRKMILAVLHRGAG

SEQ ID NO: 972001 - protein, 40 aa, Homo sapiens
SSSVPECRRLVFLMWVAKDTDDADNLVQASHTVRDVAGVT

SEQ ID NO: 972002 - protein, 200 aa, Homo sapiens
ARYRECSSLDLMSYYYDSLHGDWLAVRENPTEPGSDGTDEDKEITHDVKAVCSLVRAMTGPCRAVMPRWYFDLSKGKCVRFIYGGCGGNRNNFESEDYCMAVCKAMIPPTPLPTNDVDVYFETSADDNEHARFQKAKEQLEIRHRNRMDRVKKEWEEAELQAKNLPKAERQTLIQHFQAMVKASEKEAASEKQQLVETHL

SEQ ID NO: 972003 - protein, 41 aa, Homo sapiens
EPGAWPVLLQQVGLNVGAHDVLGNIKVDADEFAESGGVLIL

SEQ ID NO: 972004 - protein, 100 aa, Homo sapiens
MSWCVANPVIDEEGEVNGFVGAMREKDGEAECPPCIPPPSAFLKAWVYWPGEDTEEEEDEEEDEVTVTLDQMRKREKLRLPLPLLLHGVFLKSWVYQPGE

SEQ ID NO: 972005 - protein, 176 aa, Homo sapiens
MIMIYRNEQTNERMTAFVSKLEEAKKKKRGCPNVRPGSQRQGWRSSQECAIETMMVLWEECQPWLKQTCMKFYCSVCGSGSGLVGRQLEEFLNQSSPFYFWMNGERIDSLLENEREETHMLDVMQDRIQPRYSIIDELFQDRFFTREPHDTYHYLAFRLPHRRPHFFFPKSRIVRS

SEQ ID NO: 972006 - protein, 110 aa, Homo sapiens
MSATASCASSLEFARQTSNEDVRPWAIMRMTILPSQTQTTQRGSQCCESSIVLSSCIALSWNAISTLLSHSQSYTSSVPQSHNSTFSMKHFLIISDQSESLPLPILMVLY

SEQ ID NO: 972007 - protein, 55 aa, Homo sapiens
YFWMRRLFFGGFSIFKVHSSVLLLMPVRCSWPWISGCACRVPAAPRLAAKTEHSL

SEQ ID NO: 972008 - protein, 94 aa, Homo sapiens
VYLLEEDGDGLPVVVLLVAFLEEELGMASLIGVVLVASPEEVVDLVAAGLLVGVALSEGHHSGSHHQQRVEIAVLPKVMSVLTLLIYELLRVSS

SEQ ID NO: 972009 - protein, 94 aa, Homo sapiens
WRVKYTPSSDFFFVLLRGAGVVSQCTLSCSLGAARGEAPLTCGDSLPLCACVSPSDRHKHCTSKLFRPSRLPLESSSVMMVRMGLRYMPPMQEQ

SEQ ID NO: 972010 - protein, 42 aa, Homo sapiens
NLSLFRICSSDSCTSMKDWPWWKLFTTERLLIEVQLSEEQIR

SEQ ID NO: 972011 - protein, 69 aa, Homo sapiens
CCCTINLSGQKDSGISLETGVYAALCCLEALLLQTVSLAVGDRICCCINGIALDNKSLNECESLLRSCQ

SEQ ID NO: 972012 - protein, 74 aa, Homo sapiens
IRHYYRITYYSTINIQNHNPTTISHLKQDNMTNTLIIPSTLHSLGGLPPLTGFKTKWAFIEKFTKNNSLIIPTA

SEQ ID NO: 972013 - protein, 41 aa, Homo sapiens
MSLSEFLRPRARHFYYLDELVTCIDSTAGRTNWQQKHMLDV

SEQ ID NO: 972014 - protein, 30 aa, Homo sapiens
MDEVQMPHFHAFTPSKEPHEEPQASSKNHT

SEQ ID NO: 972015 - protein, 94 aa, Homo sapiens
MDGDELRTSQQPHQAVMPTMVTHDFLIATARSSCKATGNNTFLLRTRSSYCKSVNGWGLLSANIEQTLTVPGDVLGPKPFPDPALALTEIQLGS

SEQ ID NO: 972016 - protein, 99 aa, Homo sapiens
QSSRYQECRLWFLTPQPKFLARPCIRALAARSTQISYNSCRDRISSALVLRTRSAIAPGRCLDLLSLEAGMVSSITRVVIIYIAIRICPLLVDEVLHTL

SEQ ID NO: 972017 - protein, 55 aa, Homo sapiens
QQSYRFEESFQQYGKVVGAKVVTNARSPGARCYGLSRCPQQKRPQNALTTSTRTT

SEQ ID NO: 972018 - protein, 61 aa, Homo sapiens
RQRAEDGGRLYTWPAPKSSGWGQCCLGKNCFFNSLTTATTITQISLSLYFQFFCCYPATNH

SEQ ID NO: 972019 - protein, 41 aa, Homo sapiens
ASCARVVLVMVILLPKKRTLLSSALLGYYPSKELGTCALNS

SEQ ID NO: 972020 - protein, 36 aa, Homo sapiens
ACMSCMYGRAWRSSLHPCEITALSQSLQPLRKLPFR

SEQ ID NO: 972021 - protein, 123 aa, Homo sapiens
ADQDGRLPLVDVFVTSSLAFTLGGPWRWLLAVPLVSWRKTHEYSPHWASDYTLNSVIWTEAVASSFSNKPPFSQRCPVTSVALSFKEQVEEYLGAKVFYGSEDCAGSPGGSVGAQQRESQHKN

SEQ ID NO: 972022 - protein, 40 aa, Homo sapiens
RTLYLRSPGDSGNQDDGPSGRYHQYQEAISAIAPPPPFQN

SEQ ID NO: 972023 - protein, 33 aa, Homo sapiens
MSQGFMYREGEIGHRYIEVFKSSQEEVRSYSDP

SEQ ID NO: 972024 - protein, 75 aa, Homo sapiens
IVEKIYRVRRHTYRSLVIACCRNVLIEVQHILSPVIPLTRVLNVSGESTEARLFGHSEKTSGRESKKFNTHSGPK

SEQ ID NO: 972025 - protein, 42 aa, Homo sapiens
HCPSEDGLAQEELPVHSQLTKHRWMRCNQWLQRLALGPGTCN

SEQ ID NO: 972026 - protein, 36 aa, Homo sapiens
GEFVVLLGEFVVLLGEFVVLLGEFVVLLRRVCWRCS

SEQ ID NO: 972027 - protein, 73 aa, Homo sapiens
EYHRWSSVGVLQEEVIWVSLIWSLTGVLYIWYGDKSRLRQFTSLSVHLRCSSSSQQGTHMRSQDQQPPRHSPG

SEQ ID NO: 972028 - protein, 45 aa, Homo sapiens
LFVGEALCEVAISLVLSYRQEFEVDRNRPGLLRSETQFTVHYMQS

SEQ ID NO: 972029 - protein, 34 aa, Homo sapiens
MSGDVWEAGQLGKGSTKVEDEALPSKLCPVHARG

SEQ ID NO: 972030 - protein, 71 aa, Homo sapiens
RAQVVCSVVQQDDHECGPPYACFTTFLYVILFAGCARRQVRSNTDTLAVGTRKAMPVSFPFSSGMSVAHSL

SEQ ID NO: 972031 - protein, 96 aa, Homo sapiens
MRSRYCKDNVWSLALAHCVLIIIILTGKSSDVGWRFEAGEALTLFGFLLEAVPFAVIFVTLATISRYMQACMYRACMLPGCTGIQTPPGINYHSDK

SEQ ID NO: 972032 - protein, 49 aa, Homo sapiens
SDFGLAKKYAGRPQPGGDIPYRENKNLIGTARYASIKTVLLLASPDDQQ

SEQ ID NO: 972033 - protein, 48 aa, Homo sapiens
KRSSGVPYLVSDLVLYIRYGESKVLTSTTPYLCSELSGGARRPPDEQD

SEQ ID NO: 972034 - protein, 33 aa, Homo sapiens
SGGVGDRCMNMKVFSRVNEVFYDSNVVGEIASL

SEQ ID NO: 972035 - protein, 72 aa, Homo sapiens
RYRRTFTMGERIGAIKQEFQEPPTKKNRMPLLDDERHFTCRDLISFPFLGPDPHQASFWLAFYLIPPLTTGY

SEQ ID NO: 972036 - protein, 55 aa, Homo sapiens
PSKGSPAATDAQYYGEIGIRTPPQCFTIVFDTGSSKLWVPFIHWKLLDIACWIHH

SEQ ID NO: 972037 - protein, 97 aa, Homo sapiens
VLSNHVDRGAVYSSSWCQEYDVLVAGEFTRVGAGIRHGQSTGVFITMKRGWGSLAGGMPRGVIISAPSTDAPMFVMGVKHEKYDNSLYIISNASCTT

SEQ ID NO: 972038 - protein, 54 aa, Homo sapiens
ATDASSFHPGLWWGQKDHGFEGASTSPEDEYPGSNPQPDATPFHEGLRTFYQLD

SEQ ID NO: 972039 - protein, 61 aa, Homo sapiens
MVIIGGCCHTSSWVTPVMKHGGVSRGGRDDDPYGSPLQMSPSLLHGGEDASGLHDDEFRHH

SEQ ID NO: 972040 - protein, 67 aa, Homo sapiens
MVYAICLVYSDDDHYEFGDDHEEFRHDDDEFRHEDDEFQHDDDEFVVVVHGRFLVGGAICLVHSDND

SEQ ID NO: 972041 - protein, 66 aa, Homo sapiens
ATDAAQNQARFSDHTCSIGISPTLSPQSRSPSLFEVLFSKRILGDSFPSSLGSFKWLEDTNQKYIK

SEQ ID NO: 972042 - protein, 86 aa, Homo sapiens
MCACGIVVVVSEEADDRGFRYDFFMGAGEVVAQASGEQAPPMGSRFRDGPPLRWIQAWISGEPTRRGKSTVDHDVQLKPSDDGEIR

SEQ ID NO: 972043 - protein, 145 aa, Homo sapiens
RYGRLISGYFNLSTLIINTITPMITPAIMTVGHYMIYVHTAETNRTGFELEEGESELDSGFNIEYAACPFSLFFIAEYTNIILVCTLSDTIFLGTTYDALCPEHYTTYFATKTHTSNLPALMNTNRIPPIPLRPTHPPSYEKTFY

SEQ ID NO: 972044 - protein, 45 aa, Homo sapiens
MITSDDLQFASALKAHREAAVHVLFKGSQEHVGVASHFHHISFDD

SEQ ID NO: 972045 - protein, 136 aa, Homo sapiens
MATGPAADSTLKPATGADSPSARAKRDHMVSAGDDSKNIMAKGRDGMRDQRCTGPLIREEKIKEPLMRNVYNIMRATATSSQIGGATDRNAPPKAKIEFAAHPDQRIEKTGPLRRSETQLPSSNMEIWAYRVTVCN

SEQ ID NO: 972046 - protein, 60 aa, Homo sapiens
MRQTGALTVCGGGLQKLLQGPWAHEDVRDTVVLHLQVLVGPRTGVRKGIRAGDHHALSAV

SEQ ID NO: 972047 - protein, 35 aa, Homo sapiens
IALSTPGWVGDVHSGDGTLHLAVDLSRILNEMRDH

SEQ ID NO: 972048 - protein, 45 aa, Homo sapiens
  misc_feature (32)..(32): Xaa can be any naturally occurring amino acid
LGCSFGGGFAGGDGLLVVQLIRCDHAEPQLTXCAPTVDNGAVLCE

SEQ ID NO: 972049 - protein, 133 aa, Homo sapiens
  misc_feature (114)..(114): Xaa can be any naturally occurring amino acid
YSALLLLAPLLGPALLRAIILVPITGRGLRLLSSQSWTLTLLIYELLKSPPSDITKGTSSWLTSSSKSWAELKASRATDSRIRSILQKALLSLPTVCSTYSALTYSFVTLPEEXVDLVAAGLLAVVVPADAII

SEQ ID NO: 972050 - protein, 48 aa, Homo sapiens
MGLLSPHLTMGPHSQLIVLVSSSELLRHSLQCSTYLSHSHSPMLCMAT

SEQ ID NO: 972051 - protein, 86 aa, Homo sapiens
MVSKSSGTIFGTWLTRLIRKRPIVLSADTFPDSTSSAYCNTVLRASWMRPDAPPTWCKSLESPITLLGLKQVFMIMVNSDAFSVVV

SEQ ID NO: 972052 - protein, 43 aa, Homo sapiens
MGLLKAYTNFDAELDASNIETDIKTKGVDEVTIVNILDQRAAM

SEQ ID NO: 972053 - protein, 172 aa, Homo sapiens
SPKLTRYDHPPLPGFVLYVNFQQPADAELALDTMTFDVISESHIRIMWSQRDPSLRKSGVGNVFIKNLDKSIDNKALYDTFSAFGNILSCKVVCDENGSKGYAFVHFETQEAADKAIEKMNGMLLNDRKVFVGRFKSRKEREAELGAKAKEFTNVYIKNFGEEEDDESLKEL

SEQ ID NO: 972054 - protein, 121 aa, Homo sapiens
MYAVAIVREIGAALTQELQRHARTWWRTSRTTYEDEINKRTEAENEYVTLKKDVLLAYMNKVELQGPGQTTTPRDEINFLRALYGEELSLGCRPHISRHNLWCLSMDNNRKLDLDSIIARG

SEQ ID NO: 972055 - protein, 56 aa, Homo sapiens
  misc_feature (17)..(17): Xaa can be any naturally occurring amino acid
GVLSQAAYSSMLMHMPXKTPGQERVARVGWHMYRGTGGHPTVVQAVHNLILAIHVP

SEQ ID NO: 972056 - protein, 51 aa, Homo sapiens
ANPTSTLGIYFEVVNHAQLPRSPKEAEEPSMFVTHYQHSSYPENCIRVTTI

SEQ ID NO: 972057 - protein, 38 aa, Homo sapiens
AVHELWVSEGTPPSDCQILRLPRDIIENYLYENENKTH

SEQ ID NO: 972058 - protein, 37 aa, Homo sapiens
MYEPQSWDRAGRGSLLHSYTPKMAVIPSTPPNSLILR

SEQ ID NO: 972059 - protein, 35 aa, Homo sapiens
LYQLSNYLRGIKREEWVAPMPGPAMLYGLVGDGEL

SEQ ID NO: 972060 - protein, 31 aa, Homo sapiens
MVEQHISKLKKKQQQLEEEAAKACPSHEKPV

SEQ ID NO: 972061 - protein, 102 aa, Homo sapiens
SDYTALLRWSRSVYPQAGPGPVAGMEGNGPVAVHYQPAAPRGRLVYSKQYCEENIGKLCEYIKNHDQYPLEECDAVFISNGEEDDTNLETTGETLEMDLRSG

SEQ ID NO: 972062 - protein, 67 aa, Homo sapiens
AEFSRDMERSSAISTAMNIQLVHVTLSSMSPVNGLVTTVTSTGACCSAQILTFTLVKEPGLPVQNLG

SEQ ID NO: 972063 - protein, 102 aa, Homo sapiens
MPAAGDKGMSQTGGDEQLCLFVVTLSKLVVENVCYDQSFPISHVRYLGPEQIIFVSVPTLLYLAHVFSVMRKEEHLNKKEEALQVAQTDGVNVDMHLKQYCI

SEQ ID NO: 972064 - protein, 37 aa, Homo sapiens
TASGDGRLYRYPHFTCAVYSEIIRALCSMTVVTAFLA

SEQ ID NO: 972065 - protein, 56 aa, Homo sapiens
FRTNRQDLKRYQSTILDNLNGPAYTKLIYISMSCKRLLFLESGRSSRIDFLRFFQF

SEQ ID NO: 972066 - protein, 72 aa, Homo sapiens
HVYYEQKSEGREGYDQRSHVEKGHSDMSEVVEEGMGTFSRNLQCPLAQRLCLLVLAPFAIEHSQIVECGSHL

SEQ ID NO: 972067 - protein, 41 aa, Homo sapiens
RALSPLDNKCLFKGYDGKKKISTVVSSQEVSKVSAWSYSTP

SEQ ID NO: 972068 - protein, 58 aa, Homo sapiens
VVLKTKSIDVKQEHVRVAMVVMCAKCVRDRIKRGFAYRGGENLRGPIYVGNLRGTARI

SEQ ID NO: 972069 - protein, 84 aa, Homo sapiens
MQLAGGSVSGRGTPEQYQILKENYGQKEAEKVCRVKALYEELDLAAVFLEPEEDRYSAHYGSHWTVRRNPCPRRLSGGWAQNLT

SEQ ID NO: 972070 - protein, 131 aa, Homo sapiens
DRMNRETQRKRERSKKSRPHASHKKKQLLSIKDIQESIQLHHEAWERHHLRKELRSKNQIAPDSRPEENFFSRLDSSLKKNTAFVKKLKTITEQQRDSLSHDFNGLNLSKYIAEAVASIVEAKLKISDVNC

SEQ ID NO: 972071 - protein, 75 aa, Homo sapiens
ITRINPYLSSNITKYSLPTPINTYTIITNPSYSSHPQSAILTSIADPSKTLTKTSTLDPPCRMILLNSHRCSISK

SEQ ID NO: 972072 - protein, 56 aa, Homo sapiens
DILADGKAGEMETTLGTITTTATTIFKKETWEEEWDPEYTPTNARSITCMIDRISV

SEQ ID NO: 972073 - protein, 65 aa, Homo sapiens
PLISSPGSLGPKMGDSSAEELKLATQLDRDLVMPVRKVYKREKARVITEDEKIFKRFDSLRIGSG

SEQ ID NO: 972074 - protein, 71 aa, Homo sapiens
IGLGVISDFNHSPSTDSQETMVNDIKPLLTLSLMQTTIQNEYKNSIDTDYKALCIVSETWGVSAQQMGTIQ

SEQ ID NO: 972075 - protein, 46 aa, Homo sapiens
LFSQGKGLDLTIELAWNGMVGELVYGRADVAVAPLTITLVREEVID

SEQ ID NO: 972076 - protein, 42 aa, Homo sapiens
  misc_feature (41)..(41): Xaa can be any naturally occurring amino acid
MRARYRHPMVQPLLRSFVTIKVLRDLSSDRSIQVGFYLLQXS

SEQ ID NO: 972077 - protein, 71 aa, Homo sapiens
SRTEDAALLIPESNVCTRCDEYVTQLDEGEFELDSHSEQSVQFISKLRHGFQAGDLGVAVDGGEFGTGEGV

SEQ ID NO: 972078 - protein, 54 aa, Homo sapiens
MVNQRYYRHIVLSLRLKVLLLRSVLYAYLDLFALIFLQLQNYVSDFFSLLSNNL

SEQ ID NO: 972079 - protein, 40 aa, Homo sapiens
DTSSHLMCVEHGLKVIGNYFRYLVNQDSSVKRPTVLLSAS

SEQ ID NO: 972080 - protein, 34 aa, Homo sapiens
GPKYPIMRGTKITPAIAPSSPRPRCPTARHARRF

SEQ ID NO: 972081 - protein, 41 aa, Homo sapiens
MTVIPENQNERKSSNASFICPHNPKAYPPQYQIISINPLLY

SEQ ID NO: 972082 - protein, 36 aa, Homo sapiens
ARYPNLFDDDDIEEGYYFQQANELSKLVNQQLLADP

SEQ ID NO: 972083 - protein, 102 aa, Homo sapiens
MAMDGSWIITMSSEACCYPWVESFMLVTCNVAKMKILERHILDIEAHIVPAEKSFDSKLHVALSDRINFRCNVDWIQRCPPYRVRELQSSTRTPGTVSIPRN

SEQ ID NO: 972084 - protein, 48 aa, Homo sapiens
LEDLTRTPSKTPSLSQVSTRATFLKTVTETHLSLASLTIEVLNSALTK

SEQ ID NO: 972085 - protein, 142 aa, Homo sapiens
MTRAVSSVQISSVTRMWACVLYLGAAVVQRDWGLSEQYSQSAGECHLARAEASGGLRQLQRENQELNAINQELNNRLVAEITRLRTLLTGDGGGEATGSPLAQGRDAYELEVLLRVTESEIQYLKQEISSLKDELQTALRDK

SEQ ID NO: 972086 - protein, 107 aa, Homo sapiens
LTTHSTLLYSHRAEGHPRTYEKGACQIMIRGEGSVKKVRLGRKIARCCPEKMRHFMPCVTANTMVNVQKAVAQIRNILKQGIEIPEDQNDLRKMQLRELARLNGTLR

SEQ ID NO: 972087 - protein, 72 aa, Homo sapiens
MWYVDVKWCIVLWEDVSLAAGECVQEQGYGWSAQFVTGAWPIAGVQDTVQISRGGIPGMARVDDTSKHFRVS

SEQ ID NO: 972088 - protein, 60 aa, Homo sapiens
MTFSGYISSKHNRSQQIRSFIWLRVPQAPVDTHRIVALCLSHLVELDVLCGGEQGVNNGY

SEQ ID NO: 972089 - protein, 55 aa, Homo sapiens
LERNVARRKITGICYLNKKVKQAETLYTEISLVHMKGSLVLEIDENKPICCMLKK

SEQ ID NO: 972090 - protein, 44 aa, Homo sapiens
YCRCLYSGSSTLPVPLLRFLYSAGSSTEQDYHGNNTSSVEATGS

SEQ ID NO: 972091 - protein, 183 aa, Homo sapiens
LVCSLRIPYWRCLYYGKVFIVAEDGPGFYLSQVSCAHHVCDVFRILHEAELTRLMLGSLCTSFGFPVGAGSLINEVRPYVPRINASHKIWAKSLRETVLRSEHRRIADTSIVSTGYHYVSVLWNLVGIYQEGVKRKDLNSDMDSILASLKLPPKSEVSSDEDIQFRLVTRFVNEAVMCLQEGI

SEQ ID NO: 972092 - protein, 43 aa, Homo sapiens
SASCHIVVVLGDTLADTHEQAILRLQVTNVLSQPLTQATVKLE

SEQ ID NO: 972093 - protein, 107 aa, Homo sapiens
RLVQTGGLTGEDQLHGGQERDRGGGSELRPTTALQPGQQSETPPQKKNKKRKNDPKERTQLYNNFLKLRHGGTWQPLGRPRWEDNLSPRVQGYNKLRSHHYTPAGVT

SEQ ID NO: 972094 - protein, 64 aa, Homo sapiens
MDVISEEKAFSQKGSLIVHIRVHTGLKPYACTQCGESFHTRGNCILHGKIHTGETPYLCGQCGE

SEQ ID NO: 972095 - protein, 72 aa, Homo sapiens
  misc_feature (16)..(16): Xaa can be any naturally occurring amino acid
SPHWTETLRSVRIVRXSFRNQSSLAVHRRVHSGEKPYRCDQCGKAFSQKGSLIVHIRVHTGLKPYACTQCGE

SEQ ID NO: 972096 - protein, 72 aa, Homo sapiens
LCTIVTSSSLRGTGLQYKGVLSSVQVEELPENYQSSVQVESHCVWDRCAPENSYLRHQKEAAGAPGTETASG

SEQ ID NO: 972097 - protein, 34 aa, Homo sapiens
SSSIGHKRDQSMNRKVMQFMGKKVDETVLDKIVR

SEQ ID NO: 972098 - protein, 47 aa, Homo sapiens
MGIVKSDEERGKVMDETPKIFNEEIIICTNLGDVNVSVMGTRARNSV

SEQ ID NO: 972099 - protein, 83 aa, Homo sapiens
MGPIPEVRNSIRYNVTDITARLWAVEPAADGNGVCVCVIKRRSGQRKPDNSYVRTTINKNARATLSSIRHMLLQEQVPPPTCA

SEQ ID NO: 972100 - protein, 81 aa, Homo sapiens
GGNGPRAHGVSAEKMLQVVTHSPVVQSRSPGPGIPGLLCEVGWCRWGLLVEAPGKKLTTVKGIACLTVNAGLTSSLLCIPS

SEQ ID NO: 972101 - protein, 38 aa, Homo sapiens
MGEWSFCSWRSHPPADMGRRKSKLKAASQEEDDMAPSR

SEQ ID NO: 972102 - protein, 114 aa, Homo sapiens
SVLLSGVGLFLYQHHRLLAAQDGCWTCGWHAMRRSGRYYVLADHVSDACERGSEHSCMMVVRTYGVWPASCLCLDLRLMTNTTPLPSAAGSTAHSLEVESVRSSGRELRAFKVI

SEQ ID NO: 972103 - protein, 80 aa, Homo sapiens
MRPQSWCNLSLPLWPPPPLLPKAVYSTFATSPLNPVHPLCTSQCRWVGKASSHTPELRVTESQGHSPSPLLHQSSTRASE

SEQ ID NO: 972104 - protein, 78 aa, Homo sapiens
PNNLNDRISFRYNGLIHRKTVGCGAWQPDLQMVSVVVIKAGDPGHVECLPPSYVAGPHINNECSLALLMQHHDTLILQ

SEQ ID NO: 972105 - protein, 102 aa, Homo sapiens
IELGPSLITTTETTFTQILHSLSSAIITTETRSHSPPIFTSSITTTETTSHSPPSFTSLITTTETTSRSLAVFPRVLRESFSRSSCARVHSVHMCALCFHSL

SEQ ID NO: 972106 - protein, 53 aa, Homo sapiens
TVLGHFLGIGALIWSLCAQPRVAIDACTICQCQLCCYASCPLYEDYRRGMNEL

SEQ ID NO: 972107 - protein, 62 aa, Homo sapiens
LKHWVLELVTAPAELCYPAWSGQTESTGHCSDLGVSSWVVDAALITSECMLLCVCPVSEWPA

SEQ ID NO: 972108 - protein, 35 aa, Homo sapiens
MYPNGPSVRLRDSKLSHPHLRMYFPMSCSIHWYMK

SEQ ID NO: 972109 - protein, 100 aa, Homo sapiens
AGPMVGGPKRAAEFVLHMLKTLEGNAELKGLECRILVVIETYPSESKHLTMRRRDLQELMARIKTQYMRLSRADIEEDPLRENGTGLFLKPRRVRVAHLR

SEQ ID NO: 972110 - protein, 39 aa, Homo sapiens
ANERYLGHGGGSHMNSGLRTVRVLLMDLHMSVHVPTCDI

SEQ ID NO: 972111 - protein, 46 aa, Homo sapiens
FEYEEGINTLGHQYTVEVKEIIDEKIYKSDLVCCQTMADLNSPRLN

SEQ ID NO: 972112 - protein, 55 aa, Homo sapiens
SAEAIMTWQGLCPDNLHMIREPSNRNHFPAEYPFKPPKITCKTKIYHPNSRVLSS

SEQ ID NO: 972113 - protein, 35 aa, Homo sapiens
MRDSSCSTDSGSRFCAVALIIIASSSGCTCAGPAK

SEQ ID NO: 972114 - protein, 49 aa, Homo sapiens
KVEDLFLTIAKKAFCLTTAGYEPAEEDLTDPVRCNILGKKYKARVTTPR

SEQ ID NO: 972115 - protein, 40 aa, Homo sapiens
IVLEQKLQVTPATMEDAAAMEAFDNLKPKRVQKASDSVGE

SEQ ID NO: 972116 - protein, 44 aa, Homo sapiens
DLEDRLVQTHSMSGQTGTGCGQSSGTAPRCPVKSYFAVSPRLNS

SEQ ID NO: 972117 - protein, 46 aa, Homo sapiens
MKLREWQYRDLKKPRHDMVEITGVLPLVMTASLVPATPLLNIGGTE

SEQ ID NO: 972118 - protein, 39 aa, Homo sapiens
  misc_feature (2)..(2): Xaa can be any naturally occurring amino acid
SXCGIVERGCEAPVGQAEWQVVVGESVARVVKNLGEKAR

SEQ ID NO: 972119 - protein, 78 aa, Homo sapiens
ADYRILRVMREYYSIVTVKEVTGRLVLGISGGRYVGVEDEAADESVYSYVHNHWWPTDVMRKGGIESSAVMSRLRSDG

SEQ ID NO: 972120 - protein, 118 aa, Homo sapiens
LSGEISCEVRPHRRQGQKREEDTVTLEVLVGPAVPSCEVPSAALSGTVVELRCQDKEGNPAPEYTWLKDGVRWLENPRLGSQSSNSSYTMNTKTGTLQLNTVSKLETGECSWEPRLES

SEQ ID NO: 972121 - protein, 42 aa, Homo sapiens
MKPRSISPALNSHLKQANMNKILNSIHPPRERRVDGIKGVPS

SEQ ID NO: 972122 - protein, 47 aa, Homo sapiens
AGDYDHLPEQAFYIVGPLNEAVAKADKLAEEALIVKGLCPRVCFSPC

SEQ ID NO: 972123 - protein, 49 aa, Homo sapiens
RIPASDAGNKQGTRNRTKGSPTCALITVIVDVSTKIAFSQEISDASVVA

SEQ ID NO: 972124 - protein, 49 aa, Homo sapiens
RAYEYTAMGAKEYVRQGYYSFTHLEQVVNVVPLVPWAPLDWLDPAGVFL

SEQ ID NO: 972125 - protein, 50 aa, Homo sapiens
YVVFYESMINTVNYARDTWLAPDGLIFPDRATLVCDRPSEDPAVHKTTMI

SEQ ID NO: 972126 - protein, 41 aa, Homo sapiens
VIIHSGWSEAYVVARVEACQKVLSSMVQALPQDIGTGRCAL

SEQ ID NO: 972127 - protein, 65 aa, Homo sapiens
AGLYQATETLMLEEMKLKLNKMLRLYFRPENLNGGQMKKSLSPIFGTRMGVSFGDRVLDKVHDLY

SEQ ID NO: 972128 - protein, 81 aa, Homo sapiens
MYSQHRAVVCVLRCECNHLEAGGVHNIGKRLLLEYGCGMNLWASFGGAPPAHRQASTIAEMPCCRKVCLIAAAGLDVFGSF

SEQ ID NO: 972129 - protein, 107 aa, Homo sapiens
DPTRPKTEILMSLSVSVTEGWTACQKLTSSWSLTTDSYPAQKNDVCRLDAITNSQIMESSTTQNVPANSNRTQLGKLSGIWGTSTHYGYCTGQPCVFIKMNRVSSGR

SEQ ID NO: 972130 - protein, 58 aa, Homo sapiens
MRALATLTSEVLRSWEPKSDEINVKVLDFEHFLAMLQTVAKNKDQCTYEDYVEGLRGV

SEQ ID NO: 972131 - protein, 119 aa, Homo sapiens
MGTPTRRFDSCWHRACVRDLLTGDYYNAKERCSIKHLADPIDDLLLAASKIPGISSTGVGDGGNELGMGKVKEAVRRHIRHGDVIACNVQADYDVIADVSNWGGYAMAMRTLHPVLMCC

SEQ ID NO: 972132 - protein, 61 aa, Homo sapiens
RLTGLWEGSQSKLEGVWCFHLETGEVVRELLVDLVEATSNFLKLSAQVERATSGRRLLTVI

SEQ ID NO: 972133 - protein, 70 aa, Homo sapiens
LEDLNDPKDIIRAKEESSCVLRTSLYICYTQIQLFSIVRSFTFYHLIMDTSVFCIKVFSMIGCSLFRSYW

SEQ ID NO: 972134 - protein, 39 aa, Homo sapiens
DPFEDDRKKENKPVYFSSNITKKLLSPPGCTAFKKCDTS

SEQ ID NO: 972135 - protein, 81 aa, Homo sapiens
DSEIRNIGPPQSRQQEPHPAPSNVLHFFNAPVEVTGGELLLEILRMSLGSWKRAIFCEKYSSGLKVGAAVPSGNWLDVGNP

SEQ ID NO: 972136 - protein, 114 aa, Homo sapiens
KIYTCDSTLEDFIRHLMQTIVNGSYTLTIQAHSQEYEEAETNINALYDEEAHSPGIHITITTDKALVGHVKERKEIPFLYTTVAIFLPLYRTRVHSREIVGAGLQTKNTLLWYF

SEQ ID NO: 972137 - protein, 120 aa, Homo sapiens
PNYGPFTLSSDQDEHHTQDYALIGALRAVSPDNLIVKSPYAIILRSTLQIKWLHLNIIHPLSQTQEHTHEYTSMTIMNPRANNSEYIITTKTETKPRPPIRTIAERESPNLDLRASNIEI

SEQ ID NO: 972138 - protein, 36 aa, Homo sapiens
YGYVVLKSGSELVGLLVASSDKAQPDGRERVQGFLN

SEQ ID NO: 972139 - protein, 63 aa, Homo sapiens
VVSSIFTGRTLAARCISWSTSQRPGGIRRCSRRSLSWDGLLVEQSTDKISRHLSYWSFIRIRP

SEQ ID NO: 972140 - protein, 84 aa, Homo sapiens
MTGEDSAEEEHGRVSHEEIQPSHLWERRMSGGSDELSDNITQQQTAPREIKDPKSVDMSTCNAWERNGDHGPFPLMRKIHMPYP

SEQ ID NO: 972141 - protein, 35 aa, Homo sapiens
SRIHTIRDPDPVIKVPDTVQIDIGTGKIIKLYQYL

SEQ ID NO: 972142 - protein, 38 aa, Homo sapiens
SSHTTPADSYSRARRGPTRNPTPSTSLRDEYSRGYSTS

SEQ ID NO: 972143 - protein, 42 aa, Homo sapiens
MHIYYVDQFPLGNFSKVKTTRTSYPIYSYIIARKIVYLEAVH

SEQ ID NO: 972144 - protein, 105 aa, Homo sapiens
VFVLCDGVAEMIVAAYSRIFLQHPFSAPHMGQVAHSEVNSMSEVRALKLALLLSVQQPSPLYPNCINESQVRGDIGRSMVLLQVVGSHTDKLGLSGIASAQGIPL

SEQ ID NO: 972145 - protein, 81 aa, Homo sapiens
YTHQSPVLKLRSSARRVVHTHPRPDELWHGNSGLMHTTCYQKHQHVWYSSPAITDQYLLQTSCSENYGIFPGTARQASYSR

SEQ ID NO: 972146 - protein, 104 aa, Homo sapiens
MLLQEPPAGTITCNMVQSICMYTLNKKDQYGKLWCQLAQASTLSLEPKNQKNTSTFQQIRLCLTTSLHCSVLLAAGNPVATPRGALLFSLFPLVTVRCEALGWR

SEQ ID NO: 972147 - protein, 141 aa, Homo sapiens
MRESHCNTLVHCSIVLILLGLLLFNNVTPLMSDDVRRQNKKALQALRDEASSSGCSETDSTELASILSGPATLPEATMQKATEGIQDLSAGLLSSWTAGVEEGNLRLKEVAQDTCCAHCGAGCSVASCLPSACLWGQALGL

SEQ ID NO: 972148 - protein, 130 aa, Homo sapiens
VELERCTHSRNHVLGKPESDEMNVKVLDFEHLLPYAAELANEQGPGYLLGSCRRTSGVLTRKEMAPIMGAEIRHVLFTLGEKITDDEVEMLVAGHEDSDGCINYKSVSEAYPVVVTVPSGADLVRMVLNG

SEQ ID NO: 972149 - protein, 53 aa, Homo sapiens
ACVSRDPHDIRSVMHSRSHPCERTIHLNGALKEPIHIPKTCSRHNDRQGMEVM

SEQ ID NO: 972150 - protein, 35 aa, Homo sapiens
LRWTRNGYQFNIVLQRIYTVNLRGQAGFHMLLLPY

SEQ ID NO: 972151 - protein, 36 aa, Homo sapiens
MTSIIDVGTPLVVRTCEVLQSCGILCLIVYHNVRCT

SEQ ID NO: 972152 - protein, 75 aa, Homo sapiens
SALTVAIDICVASTPDRADCLKLGRACDDKGVTGDATTCSGAEVSLRMWITVDIGVAESWGAPSIATSCSSLSIS

SEQ ID NO: 972153 - protein, 102 aa, Homo sapiens
MHTLASHTRSEVPRSRPTYEPKPAPTPPRPNLTRTAMAKTSPQHRISTSIISSTQKGIIELYFLSFFFPILILLTILVNRCRLYPSLRFHTVVVSLYLRDNT

SEQ ID NO: 972154 - protein, 36 aa, Homo sapiens
TWQVSDACLESQILLLVISFDKQQGGVILIYLKKTS

SEQ ID NO: 972155 - protein, 77 aa, Homo sapiens
AARMVYGPVTTMRDVRRQNARSSMPLGLRPPCTFSGFERLRLFMVTGRLSKRKRPRGGEKEQSIFGDHRNKEDETHI

SEQ ID NO: 972156 - protein, 46 aa, Homo sapiens
PASNRHPARINPALLSFSRYAASYTIKVYRKHHPIISFTYSTDPTS

SEQ ID NO: 972157 - protein, 66 aa, Homo sapiens
VQRSVGLPGLKCLNTSYQSQLIKPSRMRRLPQMRPSKTAPPHERSCACPVESCDRRYSRSDELTRP

SEQ ID NO: 972158 - protein, 63 aa, Homo sapiens
MSFSSSSLSVSLICSASSSSRSSVFPGPSVHPFCTKIALSYPVHSKKLPLPPAWLFLPARFLS

SEQ ID NO: 972159 - protein, 150 aa, Homo sapiens
  misc_feature (121)..(121): Xaa can be any naturally occurring amino acid
YLLERGQVLGDQTVSDNELQAMSKQERKDGNRKSKKRQRGEQIKTLMEETNEERKTLLSNLEEAKKKKEDALDETRESETKLKKLPGVCNETMMALWEECKPCLKQTCMKFYARVCRSGSXPGGRQLEEFLNQSSPFYFWMNGDRIDSLL

SEQ ID NO: 972160 - protein, 42 aa, Homo sapiens
YCAQNGFYCLVYGFLPNGSLEDRLHCETQACPPLSWPQQVAT

SEQ ID NO: 972161 - protein, 68 aa, Homo sapiens
CHLRSVFSGPWVCVRLFGAVGMQGSGSDGSLGVCARASAQLRGRGLVDRAVLQCWGSRSVQAGSSTTN

SEQ ID NO: 972162 - protein, 50 aa, Homo sapiens
MEPTDERMLHVGYASGIDPSNSGAVPDRPTKVSREETLAFTASKHHEIRR

SEQ ID NO: 972163 - protein, 43 aa, Homo sapiens
ENGDSSNPGDQDVGTKAHTSAVLVAEEGQRHTLPKPTAQPTQH

SEQ ID NO: 972164 - protein, 55 aa, Homo sapiens
TTELDGVYSSIFRGHLGISQLDGKSAVKSNSFCPKPQLREAHWLGPTPSSTTTYE

SEQ ID NO: 972165 - protein, 48 aa, Homo sapiens
MRQAREAQAYTPDVLRACETACSGTSPCGSSTKYLVEGPPHASTQTAP

SEQ ID NO: 972166 - protein, 63 aa, Homo sapiens
SPESVSVSVIAASWGNGHAALSHGPDSLVLEPARIPFSTSTNSAPARIPLAPARIPLAPARIP

SEQ ID NO: 972167 - protein, 74 aa, Homo sapiens
VSTVARGVASSRSSVASKFWTVVLTLRCPSKDFLSEQILLVAEQDHRDGAQPSVVPDALEEVQSLLQNSLSTRT

SEQ ID NO: 972168 - protein, 40 aa, Homo sapiens
MHPAVGSEGPPDIRKAMSEQQDTHHGQEITIDDPLWWLVL

SEQ ID NO: 972169 - protein, 147 aa, Homo sapiens
  misc_feature (70)..(70): Xaa can be any naturally occurring amino acid
MVHGLLLLLHVSLASSVPEPRSTSGYTTTHIFWLTSVSSSMKSLKHLGFVASKHPGNRQALLSAVMAMAXCHYYQPALYHMADRPRRQGPVTAQYMMGNTQVDSGLAAGDYHGFFHAKDYLVQHTVTPIERGVDEAHIVDECVHVAG

SEQ ID NO: 972170 - protein, 67 aa, Homo sapiens
RSCLTGSCNYPYDAISRCPFPLVSAFLCLLSDARFDSRCSVSYCLTGGSWRFQLYGHRPIILNVHQH

SEQ ID NO: 972171 - protein, 54 aa, Homo sapiens
MRAVLFFFEVPAQQAAGFLLARSVSSISTLAGAVCCCSKSGCLLLQGFQLQDIT

SEQ ID NO: 972172 - protein, 42 aa, Homo sapiens
DWNLYWNQLCYVSLETETGPPNGDRIPESCRDPGDCLGDFTI

SEQ ID NO: 972173 - protein, 52 aa, Homo sapiens
FSTDHLLLPLGPKLLQSGCAVPCVFQLLSLRPPAPARIPLAQARIQHQHEYP

SEQ ID NO: 972174 - protein, 101 aa, Homo sapiens
TLAAVSYMLAGHWGSVVSPVVPFSDWYMITEICTRNLCDPHRYNILEDVDSLHGPVYPDHLVPVERQGSRCKSTMRRAAQLPASPYVTIVDHLATASGLFH

SEQ ID NO: 972175 - protein, 44 aa, Homo sapiens
IWGRGYPRIYYLSPLITPFEQTHHKIDFFRSKILDAAISTLGPG

SEQ ID NO: 972176 - protein, 49 aa, Homo sapiens
ASRASPGEESDEQTHSCTHMASRWDGGCRQLIIHNWHVIRHDVIRLLLD

SEQ ID NO: 972177 - protein, 102 aa, Homo sapiens
SDHKAWNKEVFIEAETVFWAGTVDFTWGNGTSTGSSWHLIGQQHVPVISEEDPPCVNTIALHSPVICRQQISPRAGVVFHGALEMALRSHVCSMRNHLPGNS

SEQ ID NO: 972178 - protein, 52 aa, Homo sapiens
MATQQPYQAILYYRLGDIGYILDREHDYIRTLHTHRDPQQIALLNAISKGDP

SEQ ID NO: 972179 - protein, 96 aa, Homo sapiens
LSTPDFYPSGSVRTLNMCHWAGSASNTGDARGDVLGKQAGIRFAEFLILFLTFPYAASCVGLTVQGQSMTGLLALVDIGLYICPASSAPNLHAGFM

SEQ ID NO: 972180 - protein, 51 aa, Homo sapiens
KISLHDQDAECVRAQTSSSTSWYMLVHKHTMLGPCEPPRPRGHLPFLGTSE

SEQ ID NO: 972181 - protein, 103 aa, Homo sapiens
ISTINVGLNSIANYTKVKETIKKLELSDNRVSGGLEVSAEKSPNLTHLNFSGNKIKALSTIEPLNPLSPLKSYTLFHCEVTNLNDSPRKCVPSSSRNSHISTA

SEQ ID NO: 972182 - protein, 80 aa, Homo sapiens
MSLQVYREGSSTIRTYRFEAKASQIMKLINITADREMNEPTDDRMSHVVSAVGVVRVHRRGIPDTARETCRGKNFLAYRR

SEQ ID NO: 972183 - protein, 57 aa, Homo sapiens
MPPRRPQHQVPGWTLYLGCSSTRESAAILQLFAGKYQTLLVRWDTLLVFEYMAFDIS

SEQ ID NO: 972184 - protein, 36 aa, Homo sapiens
MVSNSYVVNPVTLSEDEEVDNLIALDSKYYMYQLYS

SEQ ID NO: 972185 - protein, 64 aa, Homo sapiens
VSALPVYTGVAHRRLKTPVGLLPVVVSALVLGAEALQTQTSYGDLIAACCCSMDLAECGVWLPL

SEQ ID NO: 972186 - protein, 97 aa, Homo sapiens
TRVKAAEISGGTAKSDESCMARGEKAEAVHLMDLHALVFCPDWIPISVTSVETHFLDERSECLSMKMGDHSDQASTVLVWPVRLWLGRVSRSKRLTS

SEQ ID NO: 972187 - protein, 33 aa, Homo sapiens
DEGMTAGSHAVIFQDRGQELVDGLKVCLQAALR

SEQ ID NO: 972188 - protein, 63 aa, Homo sapiens
KNRMSSPVGDQPTRPRLAPPITIHKWPVSNWIKWIIVPVPKSICTVSFTLYDRIWVARWFRAS

SEQ ID NO: 972189 - protein, 103 aa, Homo sapiens
YRRISHVAVQIYCIFLQEQGISAPPAAAEAGGHIRAGGHIVRNSPDPCSPGPHGTDFVIRGRLLSLKFHSPPGASLSLAENQSPIAAPGFPQRWSQRSSMVCG

SEQ ID NO: 972190 - protein, 59 aa, Homo sapiens
VAVVALFNRVPAPSSTIADAMRGVGEREEESEANVVYAGKRRYSVVHRFHIGATMSVAK

SEQ ID NO: 972191 - protein, 94 aa, Homo sapiens
KEPTKALDTASSVIVENEDGDFMVYECPGLAPTGEIGGAQAYLYDHAALYLRPYRPPATPPALAMTWRQTDPNYSPTYEAPWKAQALELPTQNM

SEQ ID NO: 972192 - protein, 89 aa, Homo sapiens
RGCRYGVCLPPGHGMCRRVSWGPAGARTVRRDRTEGCAPPFPRSGPVPGHSYTVKSPSSFSSSEEAVSSSLSGYYMPLQAQHLLPLMLD

SEQ ID NO: 972193 - protein, 49 aa, Homo sapiens
EQDVFPVGDHTTRPRLAPPITIHKLPVSNLIKLIILPVHYLTCAESLHL

SEQ ID NO: 972194 - protein, 48 aa, Homo sapiens
YARTVRPVSWLLLHSVAEQWELQTSLPVADSAAPQPHIEGTSHVLYLK

SEQ ID NO: 972195 - protein, 69 aa, Homo sapiens
WAKHNEDHDHCSILSASTPVWIWLAPYLGSMSRFQQMWISKQEYDESGPSIVHRICFQADYDLVAYTLS

SEQ ID NO: 972196 - protein, 81 aa, Homo sapiens
MAIQTAYNRQYSTLSRGTLTPAKPYRQKQEYPSFHSLINLRIHCEPFTNLSLHTHLIGCPTARLLPYALTSLSLALRLVTL

SEQ ID NO: 972197 - protein, 116 aa, Homo sapiens
MLCWRRDARVCVARLPEYTRGKTHNARVGYREPSMLLHTGGRRLLRPADFGNVVMLRECVQVSVKSSTLCLWVLDAFFRILSICRFSCIFSKAAWAGVRLSRPRRFSSSFFLLVPL

SEQ ID NO: 972198 - protein, 42 aa, Homo sapiens
SWMYLGYMRPHGEAGRRLMTVHLGIYVTKKKEREGKHWRAES

SEQ ID NO: 972199 - protein, 82 aa, Homo sapiens
YSPTDQSSCPWLLTHKFIPFTSSLLSKSCISITSLQLFITEFLYSFPQISYYQSYFLCYSYDTLIAGESGSRALPLVYPPQY

SEQ ID NO: 972200 - protein, 91 aa, Homo sapiens
MFFIDSSDIGQQQKNTGVLFAEPLVCLEDRYYEYLMTLHGVVNESTVCLMGHERRQTLILITMLAIRVLADQVVIPVVANVTCYYQPAPYV

SEQ ID NO: 972201 - protein, 107 aa, Homo sapiens
MIVIERIECVNQSPRSHCELRGMLAPTDCCHRSPFQFLNPESSQKKKKNPKQKQKKQIRPVPFSFGFWGQVRVGLKKGCTAIKLIVRPKSFGGGDEERGGTRHTPAG

SEQ ID NO: 972202 - protein, 81 aa, Homo sapiens
SPLVSTCSIQVCAIEDKMSSVLWSPRSNSVCDFQKAYKLTEEEALDVSDHFPVEFKLQSSRAFTNSTTSVTLRKKTKSKRS

SEQ ID NO: 972203 - protein, 128 aa, Homo sapiens
LVEYVRILRSALRLRLWACWSTRGAIASVWVPPEPATSSVMVPTITAVLSSLGEESFIFLDHPVKGREEDWLLRLINELFKTILVECGVGSSGLKPVSFEQEPQVHILALGLLAQNLSVLVMADVHVH

SEQ ID NO: 972204 - protein, 84 aa, Homo sapiens
  misc_feature (1)..(1): Xaa can be any naturally occurring amino acid
XRAKYETDWNDGDHPESKKLATQGRLNQFSTWTHPSSPKDYNDRRVHGSQTAWVGLIIGRGGEHINEIQQDSGCIVQTSPDCGV

SEQ ID NO: 972205 - protein, 67 aa, Homo sapiens
MYPGIADRMQKEITALAPSTMKIKIIMLLHERKYSSSGYGGSIRGLDCPPIQTDVDQPSSEYARVLA

SEQ ID NO: 972206 - protein, 51 aa, Homo sapiens
LAFVEKVEQQPFQYFGISVHSGSSSSATTGILRRWHPDWTRVSLLLQYSCI

SEQ ID NO: 972207 - protein, 102 aa, Homo sapiens
TGDFYVAISNKFIGDLMPVTIMRLMINNTKAFIHHELLANLYSSEDHSRLMERVADQAQRWDDMLCIYHALQGGAQESSVTVMTSRCVHVRYGDPESEPSGH

SEQ ID NO: 972208 - protein, 68 aa, Homo sapiens
KCKCIRISILNSKRAEFGIHPIHYAASSNLHDAAYISRSHLTILGCDKVTWFTRAGILISFQWGVNSV

SEQ ID NO: 972209 - protein, 137 aa, Homo sapiens
RTWHFPELGQIISDHYNILATVFTVNVGIGRTMPLPSFLSCCQKKLEAEVKAAAEISMGTGVSEEDVCNILHLCSLVIAQSLNIEPQLYEYLLDRMMAIAPNVTVMDGESVRARFIAHAGSLLNLATHAASTVQILG

SEQ ID NO: 972210 - protein, 43 aa, Homo sapiens
MILPDGRSRLLLPRMHRPLRHLISAKQLLKASHILDTHRKTLQ

SEQ ID NO: 972211 - protein, 45 aa, Homo sapiens
RIPVTGIHCGHRVIEFLNDSIASTSAVESNNSQTCQIEISRPQVT

SEQ ID NO: 972212 - protein, 53 aa, Homo sapiens
DIEEEVVLIFLYSKRSKGARRGINSNALKFQLDLLQKSAQTAKLVFPDHYVRL

SEQ ID NO: 972213 - protein, 75 aa, Homo sapiens
KRRRFSSRIYTMDSENLIIEINLYSYIIYQEHHSQFVHLLREPHFLLDPIGGHRLAVGVQLACQGLLEHFGLCLR

SEQ ID NO: 972214 - protein, 56 aa, Homo sapiens
IAVDVQDTPKCLCHLQLTCVMNSRVTVDCSRLGPVSIPHDHDLYPGLQQPEEGKAV

SEQ ID NO: 972215 - protein, 43 aa, Homo sapiens
HLLEKRCENGHSDSAPYLVLWKSGSTVRLGAKHFIDVGAGVID

SEQ ID NO: 972216 - protein, 31 aa, Homo sapiens
MSWEMGTEGDENFMLDEGFTTVMDLLLEYEV

SEQ ID NO: 972217 - protein, 67 aa, Homo sapiens
RTAERAKRTTAINMGTGVEISWIGVGLRQKMAGRIVNLVVQKLERETTHCNISHSIILNSEDREILH

SEQ ID NO: 972218 - protein, 40 aa, Homo sapiens
VVPVYPHQELCSETAVQELLPRRTIFSPSRSTETSLEEFR

SEQ ID NO: 972219 - protein, 59 aa, Homo sapiens
HSQKKRKYIKNEVEEWCVSEPAQHGRDFRLPSRMSGCIGLLGVSVYLDLEQHLNELMLD

SEQ ID NO: 972220 - protein, 81 aa, Homo sapiens
FQRIPSSASRQQMLCLERHKEPPKELDTASSDEENEDWRLHVCTECPGPWPLTWGNGVCATRLFDHAVTVLRPCSAPSLTC

SEQ ID NO: 972221 - protein, 95 aa, Homo sapiens
VSLNLVILIVLISEAGKHMQHIHRLLISNIHHHPHHSSSINPPHPPHMTYHQKTGKKAAATSAKKVVSFPNKTGCRCHTSQARSCHSRLQGSSNT

SEQ ID NO: 972222 - protein, 35 aa, Homo sapiens
DPPRPVIMNLKCGVDIGRSTGIAAGRWCHTDKLVS

SEQ ID NO: 972223 - protein, 49 aa, Homo sapiens
ATKLPTVSQHYKKDRSIILIEFPQTSPITSILSGRTNSHFTDLKLVFNI

SEQ ID NO: 972224 - protein, 134 aa, Homo sapiens
NIQSKQNEYTDTYGANIRHEPQYDTAHESTSVFSIKKFSGTSKTTAKAFEVNHNNFFSCPYQFLRHIALTRFHWVSSSKGQHSSQSIHSHQPHGSPTQQVTIHSKGGQLANHLGSTILIGMSAGIPLSSLHLPG

SEQ ID NO: 972225 - protein, 120 aa, Homo sapiens
PKSPLLYCDADQLRWRKVCSPGDVTGLVFQSNHSTYEPVLLAKTRSSESIPHLGADAGLHAALHATVVQDHGACTDGIQRVLFGNNLNYWLHKLVFVDAVAFLTGKLPLPAIGPLHPWWT

SEQ ID NO: 972226 - protein, 42 aa, Homo sapiens
IDDSLIGGNASAEGPEGEGTESTVLTGVDIVMNHHLQDTSFT

SEQ ID NO: 972227 - protein, 35 aa, Homo sapiens
MGLFVEHDGKLSWELFSIVLWILGLKPSSGGALKP

SEQ ID NO: 972228 - protein, 85 aa, Homo sapiens
MNRVRHEVGALVRACKANGVTDLLVVHGAIGATPVGLIGQPPALRSYCLLHACAIVVMRHDIPGEEERLRRALKENRLIPTELRR

SEQ ID NO: 972229 - protein, 58 aa, Homo sapiens
CIIFVVQQQLSHGHRTAQTTLQEALKLFKSSVQQMVRTISVILSYTKQDLLAEKVLAG

SEQ ID NO: 972230 - protein, 76 aa, Homo sapiens
RSADLKEEKKEVLIIVTKLEHKDGFILPEVSHKGSRREVLGTRRNEFGREKVTMGGEGSQGKRTTRGTREEVPGAQ

SEQ ID NO: 972231 - protein, 67 aa, Homo sapiens
KGKQTNLLLILGGDASCRDLFFCHFEFYLIAHEAELSPTKNVRENIIHATTSAAAFPKTLLSNQSII

SEQ ID NO: 972232 - protein, 56 aa, Homo sapiens
VPPFHQRRVVGEQLWGWAGPLLSPYSLPGSVPDFCGARRLPSLSRPPTSLGELVKW

SEQ ID NO: 972233 - protein, 114 aa, Homo sapiens
KKNDKTIPIRPNWRAHWWKKREHFSRLRMIHPVFSQCLQEEEGKTWMHLALNPLGPSLLLRSWGWKELPLGTHLQRRARRSEDGYCWSRHTANYILLERASVTWLEQQRQQRKP

SEQ ID NO: 972234 - protein, 61 aa, Homo sapiens
TEDKEETIQKLETLEEEEEVTSEEDEEKEEEEDEEEEEEEEYDEEEHEEELIHHVYFDNGE

SEQ ID NO: 972235 - protein, 68 aa, Homo sapiens
  misc_feature (32)..(32): Xaa can be any naturally occurring amino acid
GNVAYTEADYYHTELWMEQCPNGNWMNGEISXHRYSLCSRIILSYAGISCRDDLDNGTFCSQMKLLEL

SEQ ID NO: 972236 - protein, 114 aa, Homo sapiens
CRRRTEYLQRGFNLPYQDARKCLGLFGHGEIMPITIQLSKLSGGQKARVVCAELACREPDVLILARAKPITWYIKSIDALGEAIKKYKGAVIVVSHDARLITETNCQLWLVEGE

SEQ ID NO: 972237 - protein, 107 aa, Homo sapiens
MYFSFRMMADVMVFYESSCAWLVPLTIRLCWWMRVMVCHDHSVVCENPLATHPLIPKHSASVHTPHFQVFKRWEISSGGPQVIIPMVTDQAWFFSFLSSFVAHVARV

SEQ ID NO: 972238 - protein, 118 aa, Homo sapiens
TTYFRGAGAAVGEFGCCGGAGTLTVGNSDNKLTSSCGKPSSKRRSLQGTAVATFLYAGVFVVLLLCIPFISPKRWQKMFKSRLVEEWVSYGEIFFVVLMVIAVQLVIDAVREIRKYVV

SEQ ID NO: 972239 - protein, 56 aa, Homo sapiens
CIHRCKQISSPAALVNADGNALILHSSSAFGYMPSVGSQLVQAKTVSKRQAYKPQA

SEQ ID NO: 972240 - protein, 199 aa, Homo sapiens
MWSLTELVKSVVTVGKWRISQSTVEENTARHSSNKLIDYYSRSHMECHDGDQSTHVTGIRRGPLIIIIRRKRQSRAAFQTPSVSCRPMFCIVYIIIQASKNRLSSILVVHRTQYRSETHHQVFPNFVCNIYVRLTFPLYIIPIPAFVLTLYDFWGIRITTSCASNTFQLWDGIQPAGGGIAVIVEGKAFTSRSNILSGS

SEQ ID NO: 972241 - protein, 168 aa, Homo sapiens
NPAWVLCVWTSDWLASDDLAGGGCHHSQSYPARCATPTFQLVALVHVAVGCQPNTLGSASPAAEQEAQNRMSQMRNLIQTLVSGIAPATRSRATPQALLLDALCLLLDILAPKLRPVSTQLYSTREKQQLASLVGTMLAYSLTYRQERTPDGQYIYRLEPNVEDSAAP

SEQ ID NO: 972242 - protein, 68 aa, Homo sapiens
NDIRDELQVSEDSDSITQVCKVTTAETSLPAGYSDKIDVLSMKSSGAFSPCLLSQMPRIEASARRLLL

SEQ ID NO: 972243 - protein, 105 aa, Homo sapiens
MEDSMDMDMIPLRPQNYSYSDVDTKGPSERVITFQGGIMYENEHQFIFRNGQFRGCCKGVRLHIVEAEAMYLRRQIHIDIVNTWQAFDTYVAVIEAKRGFTLCVA

SEQ ID NO: 972244 - protein, 78 aa, Homo sapiens
PRLWNHLENTTTLNVASYETADYAGTGEFGRSSPGVDYRDEGSMLLPQMESPEEELSSLIMMSHHFHAVRHSSTGPSC

SEQ ID NO: 972245 - protein, 41 aa, Homo sapiens
SLARVRSDYEEEHELLWTWKPSTWTGDAEDVDLNHYRIGKI

SEQ ID NO: 972246 - protein, 106 aa, Homo sapiens
MSVYEPFNKGNWITDIVSDTKTNIAIFCETRAVWIIAAQACIMYQFAVDDSYMPVVGGPASSACIEDETEVTNIITSKELLQTKLKDIVSLVPRLRHIITVDGKPP

SEQ ID NO: 972247 - protein, 50 aa, Homo sapiens
LPLISTVLHPRPNLLPKSISLIIYIGVNLTFFPTNFLGYPECSDVTRTTR

SEQ ID NO: 972248 - protein, 36 aa, Homo sapiens
HRRLHSLISPILRLHLDRLRKIIHIISSGNYFSQFS

SEQ ID NO: 972249 - protein, 56 aa, Homo sapiens
RCRIPSNIFVRPVGEKDTWSGMRTRVNSGSPMASDQRRTRTLVYKPILRQKKHFNS

SEQ ID NO: 972250 - protein, 103 aa, Homo sapiens
TLPLQDIKKGKKKDPNAPNCHHLPYSCIALNIALKIISEHPGLSIGDTAKKWGEMWSEQPAKDKQPYEQMAAELQAKSEKDIDAYRAKGKSEARKKGPGRPTR

SEQ ID NO: 972251 - protein, 50 aa, Homo sapiens
DLSQLTKLHSFLGDEVFLRELAKTKQENKLKFSQFLETEHKDEDQPILHG

SEQ ID NO: 972252 - protein, 68 aa, Homo sapiens
EAYSIPRLFKPRFFPKDNLSPATQGENQQNLEDLIQKLTFSMVIRLLFIFKISFCFTGKEKMMLRSKR

SEQ ID NO: 972253 - protein, 99 aa, Homo sapiens
VEKNEASHHGRPVGNISRNSKRTYRQATRENLRPMIERKIPEAVQAIYSECESQKRDSFHRSSVMEDVKAIVTWAAKEKPSSFVETVARAIPGEGLAGT

SEQ ID NO: 972254 - protein, 157 aa, Homo sapiens
MMSVTCSRGGSDYDWTMDSESPHECTTGSLSILGLLKRTQAEEHEFDHVLMVGLCLIDRNDDSVCYNRVIVNGVRIFVALRVGGRSESLENSAWKALRQIEVQTKAGPKLLVNNCADLVDEMVLGKANGLAIVGGSASERTTKWVFNGGLVLVHVAE

SEQ ID NO: 972255 - protein, 96 aa, Homo sapiens
VCRTTERTHLALAVVDGDEIPITKIGAIRAFRTDLITESSRLQSHLIIRFSLQNDYVKKAKKITHLVSMDTLNRSRPITGLGLSLQNQERKSRSQL

SEQ ID NO: 972256 - protein, 192 aa, Homo sapiens
MQARDPVANTNNDVSEQYRVLINASKPCLLAVHTFKSMCLSVFCSPLFRSSLPQSTQSRQHTTRHYTTTIPTHNRGQAGKGEKEGRTKDRRQGKEQHCREDRQQKNAETEERKRSERRREGNRKENRRRRARQTQTEGTRKALRVTTARQESSKNQHTEERQQRAKNDNEEAATREQRHEQHEEQSDKDDEE

SEQ ID NO: 972257 - protein, 154 aa, Homo sapiens
GDAGFYFSMDIMHDMLVQSLNVRSKSSVARDEHKYIMDSGSLVILGVQEVHGPYEHGIVRCRANYVSRRLSHPYQYHSAILSSERIRDSYVCIKVTTSSITNYIDELSCHGPAIEMRVGWSIHLTQPKVMLAKPSGEHDILRSRPRKMDNSVEA

SEQ ID NO: 972258 - protein, 77 aa, Homo sapiens
ILRARCGLSNLVVQPLFLSRSEKRSILSGSDPIFADECRNGLTIHRLQGMEEDSLVKRSMEKSEEDSSENRGRFVHA

SEQ ID NO: 972259 - protein, 73 aa, Homo sapiens
APPDATAIDMFCSCSILSLKPDTHWMTVMPAGTGEWDQLLGKVPFTSSLISVRKYVGMLLLSFAHPDDICKEA

SEQ ID NO: 972260 - protein, 113 aa, Homo sapiens
TRLPTGSDSEASLVIGVLSCLVLFPFSLVTLLDSYSLSSSDSDSQSEELSSIELHPSFEESEGVHLSFSFSPSPESLFPWAFELLWAALWLSRPDYPPLSLFCSLEESSLLDS

SEQ ID NO: 972261 - protein, 59 aa, Homo sapiens
DIELGPEFPFTNPAVEGTIDNGSKITNFLEGQVAFSHPSVLSPLSWHIGEKFTNPAVKG

SEQ ID NO: 972262 - protein, 111 aa, Homo sapiens
MSVYTEGTAGLVRCRNIKILDPHEPHHRDGLFLVQCHPGTGHAIHQQLVFCSGILYVVHNSQYIDISLSHKSGLQECITLCALHGGDVVYQHVILIEQHLVLRLDVRGGAD

SEQ ID NO: 972263 - protein, 48 aa, Homo sapiens
RAEPLPRWNLPEVGLSCALCDVGLQLTLLCACAAGMLDGVVGAGDERD

SEQ ID NO: 972264 - protein, 209 aa, Homo sapiens
VELKYRGLVKPFTHASGKPWGGTAPQGPQGILATAGQDPGAPQRCRGGTNKERMYSRPVNKYTSGHEGKCNHPGGPTQSNKPWPRPPGYTSSHPLCKGHFHARSGPFWDDTSISARRPRTPLVAGRVFRPLWVLGNTGGSFLLGGPVLTAAFAPRRTVSFPPGVSSVLFLKPTFVTKCGQSSLPSKQGFGGEAALPLQLVFLLRHLLPQ

SEQ ID NO: 972265 - protein, 46 aa, Homo sapiens
CRSLFCNSINPDQASPPLAQPIYRLHQGFAERCAVYRLSNEVVRFT

SEQ ID NO: 972266 - protein, 174 aa, Homo sapiens
APLEVIVGPLLELLCPIYPGAPLRTRCLIPRGGSLPPPASNLLTKFGVTFSQFFFTPLSNKRVFPAKPLSAGLILPRRRQRGVPHALAPSAGATIPYLPSAALAPVVASRQPRSRCIRQTCTPYHTRPYIPREHLFWASSPHGIQNLWPLVPPSRLPHNPSSLNTTGPPPFLHH

SEQ ID NO: 972267 - protein, 72 aa, Homo sapiens
ACLRVPLEKVLKGSPRAEPCEREVGMALDSSTVESRLRKGSGEGFHRTYNMGSHTGQELDQGVQALHHGIDQ

SEQ ID NO: 972268 - protein, 336 aa, Homo sapiens
GFVCEPLFWVPRVCARVMCAARIVSSSEARHNMEHGSQGTFLYIPGQVWVPVDNPFGRPQHPRPWCDSPAFHNGPCPPPLFGVWVPSSSRAARARPLHAGGLSRLCWPEDTYKTPAQQRATTMRTVAQFSSAPRILLRAPLFPRPPELPYGATRCSQSPHLWGPFFPSRPRRMRIPAREPRAAIPQCTITTPLAEFIERHSCLQGAQREPPPSFAPSLVYTREEGRVRARPNTRRAHLWQTAFLLPIPTLGGAHPAQPLRAPDKEGGQTTTKEPTKRDGQNRGRNTPEPASVVRHRRRRLDEMRTWGLRRRTSSTPPTLSPPPAFLKNRFFFPTTK

SEQ ID NO: 972269 - protein, 261 aa, Homo sapiens
GAIPEGWYNPLGYAPGSPRGGSAPPGKDCAPAPRPVSARSRPVGTATTEKPCPPRSWGPTNLWGPRRSPTSPKAGPPKSRLATISPMSTNPSPISVLLRGRPDCLEHHRAPPKSHPSQIPPERGPPINGLLLKGGDITCYPPDRGGHPPNNFQQRAKMMKRSRGPTASNSVSIMPGPLQRESLTAPMGRPPPRASERPGDLTLACCRSPPPKRMLRTGAPPYILPCLMGAHSDETLGVATLETNGEHTNRTCAQGRAGEWR

SEQ ID NO: 972270 - protein, 122 aa, Homo sapiens
YTLLSGTRVPNSSETWHCCLSEVKTKDLPPERQHDTDIVEMKPSITSRPIVYFKNYEIKNEADRTLIYITLYISECLKKLHKCNSKSQGEKEMYTLGITNKPIPGEPGKPLNAIYAKPANKQ

SEQ ID NO: 972271 - protein, 168 aa, Homo sapiens
  misc_feature (64)..(64): Xaa can be any naturally occurring amino acid
AGSRPAFQGCHPRVATKGEIGGSALCRPRAGQRGEPPPSWIPGEDALDPSWKDGNTSWPRPQNXVGERIAPKDGGPPKGGARQHGHGSLGNTDSLYKSGSRPLICPNICGQTIIVESTLFKGPSLPLLPVYTAVSLHKKPVLFHQYKEKSPPKKLQFFFAQTICQGTS

SEQ ID NO: 972272 - protein, 164 aa, Homo sapiens
TVSISGSRPPSTEVGPPTGGSEKFPARVVPPRNVLCRGATNNWGGHPFLGDENIVWARWYRPRVALPAAVTLALVLVDLQGVFIFLCALQPRELLNQSWPAGVGPTPFRWGRRCPPHERAPQNGARHTAMRRQVGELVYNRQVARTIGRGAGWATGMFPLSHRD

SEQ ID NO: 972273 - protein, 80 aa, Homo sapiens
NILDYNTRIPGSKPTIPVTDIPNTGQQPKRRKNHTSNWWVTNRTVLDIEMFPDSTIADVVAHIGIYSTEGVVQDVDAPVT

SEQ ID NO: 972274 - protein, 118 aa, Homo sapiens
MAFLYVKPPLGEILILAFIAGIKKQFSPHKILSCQWRTTLSFKNESLLQRSGPPNLSFLESNAIHYLTPTTLLLSRETLFCPVEGLQSGQAIYSTNEAHSLGKTADSLGPPTLVIDSY

SEQ ID NO: 972275 - protein, 83 aa, Homo sapiens
MPRNPSLKQQLFSYAILGNTLYEAMGRWAVRWYAFLILFACEAPWGVTGLLLLELQPFLVLGCGQALPLSTTCVKTGNTKENK

SEQ ID NO: 972276 - protein, 98 aa, Homo sapiens
IRCERLTRCNQVYQRIREDILCKLMILPNMRRRNNGRTCGSLMSIHLIILKIHIASIAQLIVPIANIEVYGDAVSMSYWGTIRPHTISLMSNKYGTSK

SEQ ID NO: 972277 - protein, 299 aa, Homo sapiens
  misc_feature (167)..(167): Xaa can be any naturally occurring amino acid
LGWKYGARPEGAPFPMVEGMCAPPPLGVVHPLVPGKDPQPKVIVMVVFGAPPCRPPHLRQLPLPLLGSVCYLGALRFASSFSRRKAQNTWARARGEIPRQPEHSATRSPGVLLGNAPARHALCHNPAGVFSGQKGTAREPEPHTAFTAQRSQSPSRSLYISGPTAQXHGSPTEMRLHLRRDTPRWLSDSQDTHTNRLGRWNRTTARNTRLARCLSVGIETGTWSRGDTNPCATATNRPACKRGSTHPHTCGDRDRGTLSDDTHQGDESGHQHHYRLFTITCSGGTPPKTARPTRREKQN

SEQ ID NO: 972278 - protein, 256 aa, Homo sapiens
KCSRCAQIVVFPISRGPLPGRSPPFVAACACFSAGVHPFRGARVAPGGPPTEPRVCGTPSGVPRPFPPAGAAPCPLPPDSSLQAAGLPPCVGGRFFPRVVTAVTSPGASPQSGQLHLLFSCTLHAERPTRSLRGVSESSAPERSQLPPWPGPPGSSLTSLPPPIFVPGPHRIGSLLVFRHRNFGVYNKPHDLPAVTTSSQCVPPRPRGFWAHSCRAATQCAQYSAIEENLSLHPDAGVLFILRKNPFGGAKKANKT

SEQ ID NO: 972279 - protein, 160 aa, Homo sapiens
MFVHNMISLRGRTCPGFRPSPRLKKLCCRPRLAPRLVLIQHFASFKGNNLGRPAEHWSSRLLAPAGVFGGQGPRIRGGDSAGGTKTGVPPCVCAYVPLVLALMVPLLPGVGWHKIFACISVCWVKRHRLFGVFQIDSSCLPPRVDLADFASVLLSGTVVL

SEQ ID NO: 972280 - protein, 224 aa, Homo sapiens
LVAGPACPQRLGLIGGSYWAPGRAKQSVDSRLEVLKCQVSQGLQRPAGFYRSSPECPMSISGWVRLSRVSAPSSKGQGSPSGTGECPDPPTGTLVLLGAFAPFVPPWFEKKRGFALFPARGAHVSPTLVGRIVLTEAEGPKGIFSKYYLARRGDKFFKRRNGPNPKMWMTHRALLTNASYVSPRLTSARFPCSVIIRRVSCLSPFLGHEITTVCHPVSLLHQQW

SEQ ID NO: 972281 - protein, 84 aa, Homo sapiens
INDTHIVSVWFSSELFRELFGDPLGVTHECLQQFCMGSACLTTCGRVCGGPPPDLVRPRLCVGGALQVRQCLVSHRKPAVCLAQ

SEQ ID NO: 972282 - protein, 91 aa, Homo sapiens
SLFAFRLYLCGPMLCLFVEVVARVAPRGTPLWGPGVFAARRCSRVIAAFPLESPREPAGLAEILDRAALCPGDLGGEAPPACFFRKPPSFY

SEQ ID NO: 972283 - protein, 65 aa, Homo sapiens
MNKICWGFAVFIDISAGCQCRAAYIAEVLHESSCPPTGPGAWHVCIRAAQVIPPTNKMTPPNPTK

SEQ ID NO: 972284 - protein, 114 aa, Homo sapiens
SRVRCPPLPWYLQGAFKESCPSKTCAPVMPTPKIPPTRRLISGTPREDFFHRTVLVLNVSWQIGKGALSHARNAFLLQDPLYKAMVRETRFEKSIIILTLGCRDLWSSYLPVAN

SEQ ID NO: 972285 - protein, 106 aa, Homo sapiens
MSPSPLLGPASGLGWKNSLEKTEVFKRPLRSLQLEHNNRGECGAPPSGVVKPVARDDPSQASRCPQEPHRIIFFAERHEMERLGRFFYAPRFPRGQPPEEPKPSCS

SEQ ID NO: 972286 - protein, 256 aa, Homo sapiens
SRIALACGCDRPGLCVCARQLFLWVWSPVICPRGAYNLRVRAGFEWFRLSAPVPVADLFDCCHALWPLGLLCWCLQPIGARSGALFVPTSSPWRVWVSPAPGCRVWPPPAPEVPRANGPLFLPSIRGVFTYRGGVPPVVLGVTPLVPPCFVRPMSRSGHNKLSFGRLFVTFVVPAHTAHVLGGLIFPRDLPPRRFSSRGFPREALHPPMVTLSYQSVRRLLSHFSVQPGEIVKNVLMKMCEKRLLPSEKRENRLNM

SEQ ID NO: 972287 - protein, 209 aa, Homo sapiens
CVGLAICFLTRLVCFGAVDGCNYVCPAGRYERNYANYSSVGRKSGSPRGVTTRNGYQGVPRYRAFPSGRPSNILRMGLYPVCPCRKVPTQRWLLFPFSRVPVFAAVDIFCRARHSLVVRAPVQFLSLPLQNRTRVNGMRLRCHPSHGAPPGAVPIRGPPTFGARLMLANCLNKNLFPPLIVPCNPARDLCETSADAVTPLREYGIFPAL

SEQ ID NO: 972288 - protein, 70 aa, Homo sapiens
CSVPADIVFSRVPPGPAHAEVVGVSPGVLKSGIIPAIVCWTPLGVKLLGEGVPTQTRRIAPPRTAGVVNP

SEQ ID NO: 972289 - protein, 72 aa, Homo sapiens
MFLVCWEYWCRKSSTLLVDNFSESAPLKGVFQKYSPLFSCFWPHNTKAKRRGKPKSKKFKGETPWKKILKPK

SEQ ID NO: 972290 - protein, 103 aa, Homo sapiens
SRFVPQVLLPTVSVVPQRVTRESFFGKVTFFCAPPPGAPPRDFLREEPLYVGGERTGPYVAPIIAHSFVGSPAGVFFLSNRPPHIGGQAPHSVTRPPSRPSTL

SEQ ID NO: 972291 - protein, 116 aa, Homo sapiens
CGCAVVGRTFLCSVWSLIFVSCWFCLVLCSPSAAPCGPTVCGDLAGLCPRPEPPGSMLLPFCDRACGVTRPTALCTRAEYLGSPLSLCTAPGAPNLTGRLLRFANQPFMSLRTTFS

SEQ ID NO: 972292 - protein, 197 aa, Homo sapiens
CRLPCSRALMLVVCSAACSCTVCQLASVCGLGPFLSFPPWLASRAVLGVVTVPLSPPTWVPAVILGACFPPWSLAPSFLCLQAFLAASRVVNRIVTQTLRFTVPNNFNIRARDSTPNRIVVCSHNLLISGRSSHRCEYKILLSNRDVPQHLLAHPIKAVVEELFYKTLSDKPLSLISPPRLTAPGEIFCGILNTAFV

SEQ ID NO: 972293 - protein, 90 aa, Homo sapiens
MFQFVAPKEGIGQMNDALGDFPQRTQTRETTRFCTQPRQGIRRPREHLQQNTGGEITKPPGEDAKQTYKPSHQGYYKRQSIKTPRHTASY

SEQ ID NO: 972294 - protein, 163 aa, Homo sapiens
MLCLPHPPPRWAKEHPYHSLSPPAILPVGGRIPSPGNLSHDVVPSRRLASVSQSPAMTAHRVSYRPPRRCPHPAPFFQGSLRTPPRPQVSLVRTLGCPPHLGGSCFLGARELENLRLGASTPLGIARDHPSSCERHRVSSFSTASFCGVFPFGEPLGRLLSEM

SEQ ID NO: 972295 - protein, 117 aa, Homo sapiens
FRVVISRSVRQLPPPKQPKGIAPPRTTKGGKNKHRGIKNRAINKIAVKYLKRNHVPEGVYIYGSACQRDGPHISEPKGGATTEGCLPATRVCIYQAEVKIFGDHGSPNFPLDSPSRD

SEQ ID NO: 972296 - protein, 131 aa, Homo sapiens
MWCRKAREHTVVLYRRSQIMISLPKRGRRHRNINEDIVESQYQIIVWYSILSGRYRGHCGLGFSEVEDRDGDGDVPGRGDDDDDDDFTDLKVQDDSESDSESGERRICWRTPSCEHLMKVEDPHNKDARAY

SEQ ID NO: 972297 - protein, 125 aa, Homo sapiens
  misc_feature (97)..(97): Xaa can be any naturally occurring amino acid
MSAQGSRKKRGSSSPPGGTPSSANNVEEIASRSVLSPEAYFQESSLRPVRENLLFIEKSVLDTQKLVKKFSRAYIQSCCNTMKILARPPFIKAEGRXFPLRSVVVKCCHRVLISPQKCGVHTAPW

SEQ ID NO: 972298 - protein, 319 aa, Homo sapiens
LAEAGSGAEADMLRCREHRLPMNDERHKICKRVAMALGPCTRMDPGLFALLQYVPGVCLGRRHVISREFVGGSCGHDEEVHGPGGVAAVILVTRGAGGWLALVLLGLVGVSPWREGSLSRRNKILSREYVRVIDRGLLQYHEGILAHGVSLMTDSEGFIEGIRGQRLCFHDADVRLFPMQHSVGGGELVICCPPKYQSREPFKRQRCWECRRKRQAFLTCDLQRKLPGPLQHGNRAPGEWQWSNGHVVWALGALQRRGGKIAPGEAEIARHNRTGMPREKWAGVKVGENIVRHDEPSEQESAATRLASANNKAPSEEPD

SEQ ID NO: 972299 - protein, 122 aa, Homo sapiens
LWAPTGQKGVFSPKASGVYGAYKLWDGDLSRSPPHEVVSFFASKTPPRIVGRRGRALLTPNFEIPPHVVEFPQRFVAEMQYPSKKRETCGKPPPPSEKEWSFLSHPRKRGEIIRSLRGRAKS

SEQ ID NO: 972300 - protein, 105 aa, Homo sapiens
EVYIPPFLPALIPADTHHICPRAKIFCVPHFPPARGTHTLCGRIYRARAPPGICGCMRGEFVWETHPSLGDTEWGAHPVPPLHTVCVTHTESPPPLERVPLARHK

SEQ ID NO: 972301 - protein, 117 aa, Homo sapiens
PECFRAPSFFKFCPPGPQSSHKFCGLAKLHLLTPLPHSASTYTLFSKHLQLVTPPQKTVLKNLLDTSLRLNNFASLSPPSFNPLGKNLSFVYNPPFSRSKIPLSFLLTSYNTMPSCP

SEQ ID NO: 972302 - protein, 108 aa, Homo sapiens
MVALGGHYNTQHLRFAAQCVDPTAFVQTPITLLPPGAPQNPKPLPTGTPPNFAYYVRDFFLKPNNRRQPVKTSPLTNMRKPIHHLHAETLLSSTKRVLSSPNNPSLIS

SEQ ID NO: 972303 - protein, 142 aa, Homo sapiens
MTCLFGPAAAGGRLVHATEKEGGRTNSPLSFSPPPRVDEAPHLTSSVALLIRLHTQIDAFCEEERSNTTLFFPPPTKLVFFFSSKKPGRLAHNASFPCCYPPDSFVIISVISALRIVNYFRSVTILVYHSTPSICSQLNIKQ

SEQ ID NO: 972304 - protein, 256 aa, Homo sapiens
VVVAVSVCRPAIYRGQLSLLSSCANVGGPPSYVLAARRGSLVAPMCWTRPVVWLLPPSLVGLFCTGTSHSSDSVGSPCGGVPSARGVASVGCSLAPLVGTLVFRRGSAFSYLRCGQEVRRLCGPPALVRAFCAGPPWSVAQSRVSDAAYAPPFCAPRRLKLAGLVEPRRAAVVRLYHVPPAVPIVPSNYVSGQPINQPACLKCSPHPPGGAFVPPPCVLPLRLRLVDPLGGHPLFPPFPPFPPSPHPAPFPGPPPK

SEQ ID NO: 972305 - protein, 142 aa, Homo sapiens
LRLSCRLCGAGFVDSSAAVSLPLTPSGQYFPIFNLRLFVPPPFVYARVKAWRPLPGYSLGASFYRACCALAHRSLVCGPLRSAVQSGAAQPSGGVSTPFAFIQNPPECVSSAGTDNFLKFVPPGLKSLHLCILCATANSTIL

SEQ ID NO: 972306 - protein, 110 aa, Homo sapiens
MCAPAPALGVPPAVGPAVAGYHMDPRRGPLFAVQLPRLCTVATPPFCCRHRVTPPDEYGVPLAPIPLPEILLLPAPRVLYSPRSGPTKHFGVTKMELVVRNILVPNFTGQ

SEQ ID NO: 972307 - protein, 119 aa, Homo sapiens
LGDAMGDPPVFYNSADSVGLCPRWLVLPPRHAGDFLVSINGCRENLVPRDVGDSTRVPGCQASLFGGGVSLPTQGQHILVRSPASSSLSQERSSQGGLLSRPQPTRRPLVLLMGVLLKP

SEQ ID NO: 972308 - protein, 170 aa, Homo sapiens
  misc_feature (47)..(47): Xaa can be any naturally occurring amino acid
MALVFLEKYGRGGKQPQERRVFPCKPITRVLWAKNAAEISARVAPRXYMCLGFLPLSDLYNVGAKARRTKVPPFQTPKGGPEHSRERSPEPHTRVRERIPGEYHNTGSNEFRRTISQQTRRGQPSVYNIEGSRAPPFQKRDATQRATANKLAPISGVTFDSPPCTQRRDS

SEQ ID NO: 972309 - protein, 101 aa, Homo sapiens
MTIQQTVLSEIYEDAVSPPQCRLKTRCHFSRVLTPTPPFFPVQPTPGYYIPRLNPLCETFGAQPHISKPPLVPKIYSPSKIFLKRPLFPLAPPFPPLNPKK

SEQ ID NO: 972310 - protein, 195 aa, Homo sapiens
RVLCVVALPRLIFGPQPACFGPAFFTTIGPCRPNIRVSLFAGVPPPKSGSKAVSSLLAVPLLCSRLYPFSYCVLCPDARLLSNAPRDGALCLSPFSPLRGILSAFLDDFLRAHSILGWSFAALPCPRRSLLNNPGGGSDSAPSRGNPIGAPPMGLGPFRVSPGFAAAPNFLTSPTKQFAPPYGRRTDPGGPADLP

SEQ ID NO: 972311 - protein, 208 aa, Homo sapiens
TGPNIRSFYADLLVRRYCAKTPSLFEGGLLCTLNRVCNTRSRALLQEDPFFMKDLSALETLCFPSSGYLFCAPKYPWEPPIRPKMRGTSLTMSIGERRSIFSWAKRCPRGPGRGDLAAPNLGSPGKSRPPVHKMCFCAPASCEGWASTHTRRIFCQHVIKPRTADTPRVGKNRGEKCLRAPPMCCARTQAPQKHGVFTGRATLPPRLV

SEQ ID NO: 972312 - protein, 112 aa, Homo sapiens
  misc_feature (67)..(67): Xaa can be any naturally occurring amino acid
MDRGLYCPLLLLRRGEGLNRASIMISAGLSVPGFNKRAKTHVFRMFDLVVRANWLRTSSCAVPFIGXSQAATDGVAPPPCCTARATDEGLANCLSLTKLEAGLSVRVAPPNY

SEQ ID NO: 972313 - protein, 80 aa, Homo sapiens
LLLAISLIMFYSLLYRPELLCDNRYLHAIRRCQPTIQYDYGNNELSYEATAYAAPQCTKTRPSAHHDASESHATPPPDIV

SEQ ID NO: 972314 - protein, 270 aa, Homo sapiens
LPWFLRLRTPLGVRGDKCGRIVCLCGVGGFMFTGSSPPVLGPRESFFRRAGFRVSAGQVEAGGLLSHVRIASVLFARPLVRLVCTRAAHRLAAWFSLLSTQFVGIHPATLFFRPENAPEVERTLGTPLEGSGPPGESQAHTLHTRPARGVNTRGVPREAKPSGGACSGSSGETCSSPREAVGQYEGEPTRTGVQRLQIVDSRTATACGLSLGFERTPLFHAHMASVDGGTQSNWPLPYPSSRVWGGPPFPPVTYTGKKGPPGGNPRNNKT

SEQ ID NO: 972315 - protein, 218 aa, Homo sapiens
DTVWRRVTTTGACVHPKKWVAQKDVRIHSPPPHTLCSRLCRPPPAQGGAHRRKKNRQGENNAHHKRGLRPPAGTNPRGGNAVCASCRNYCHTHATGAVRRCSQGRPPSDCALPLRGAKTRGRTATSGTDPPAGKNMWHTEAGPPRRSSARPQESRQHQRRVGGTHIIRITERLVTHPARGDTPEQFLNMRQENKICAHRREALSRLRNRAVINFFLDL

SEQ ID NO: 972316 - protein, 289 aa, Homo sapiens
  misc_feature (207)..(207): Xaa can be any naturally occurring amino acid
LSVPTEKQPDHLSKARREVLLGETGKEKLPRYHKNIGLGFKTPKEAIEGTYIGQEMPLQRGKCVHLEGGILSGRVLTMDEDAEDPLSSGEIIGTYIRQVQRFEKRHKNMSVHLLPCFRLRSMICDIVTTWAECRPLSQGQLRFNVLKVTQGLRHQEGRFQKVQRLGHRAVSPQGYEVVFVIRRRGGLSVRLCLWGNPVTDNLRQQGXEERPRDEKPAKWPGNQGPQACGHQVKRGDRDANPVGGRQAQQARVINRAGGCEHRVRGGIRGGTPEPQNARQRAGTAHTQHH

SEQ ID NO: 972317 - protein, 146 aa, Homo sapiens
MTRVHYGGHKRVSRGNCLNKKFGGVIWVTSLACLGPEGEENYVGFSNNSGGIGWEHAFSSHRSEEFNQTGIGHNMLVQEDGQPSEKDFGKKKGVLIPRGDGNGGVFQGVERQLVGLVEGECRDRWETGKLGEKGTRRSKCNGKRQD

SEQ ID NO: 972318 - protein, 67 aa, Homo sapiens
RNDDAVLPWLQNAVLPCAINCVLVEYSGWTIVIRESAKDIDRRMLTVSQESPGCKICHDGTYLLSMA

SEQ ID NO: 972319 - protein, 196 aa, Homo sapiens
SRVGGGARREEGGEGGRRTRGRRAVGGGRRGGEGGVVGAAGGGAASRRGEGGGGEGGGGGGPPGWTQAAQGGEERAGRGAGGGRGRGGGGDALSWRRRRKRVGGAGLAGEAEERGSRKRESRRMLLNPPQNLRETWGNMGEYRRQSVSCCWETLCLPHVLVVRRLLGAPFFRDLKANKKLTPEYSGISRSSAANNK

SEQ ID NO: 972320 - protein, 75 aa, Homo sapiens
  misc_feature (49)..(49): Xaa can be any naturally occurring amino acid
SRGSTLLEARGRSPSSNVQADKPLRLPLQGVSTTFGGVLVTCILLAGVXDLGGFLENPTGDWGRCNALDVRVRRV

SEQ ID NO: 972321 - protein, 150 aa, Homo sapiens
  misc_feature (1)..(1): Xaa can be any naturally occurring amino acid
  misc_feature (87)..(87): Xaa can be any naturally occurring amino acid
XKTGGSPSRKPPQLRVVGRGAFFHEGSTSTPLGGGATLFPRVLRVNHHGIHRSTCSKEWGVSQSHKAHSRGHTQKSVSVRERCAQQXSATMLGAPRDSPPSESALYTRSMYIAPYMLLRAPPPLVESHWGWKKTRLFSQTLSWFVKTVAP

SEQ ID NO: 972322 - protein, 103 aa, Homo sapiens
MKVERLHVLAAYQDLCPGHGEGSFTDSEIDRCNGDLQMVISESRDTLRVRGFSCTHSTDVASGQCRYNWNWSVYMKGRRDCGTCARRTFYQDNEDIARLRQYQ

SEQ ID NO: 972323 - protein, 75 aa, Homo sapiens
  misc_feature (12)..(12): Xaa can be any naturally occurring amino acid
MAFKDTVKNDPXGARTVVRIAARTCEVDLLTMPQRKILGSGVWLTLITEARRSNKQDLEKLTGGPRFAMAFTKTC

SEQ ID NO: 972324 - protein, 111 aa, Homo sapiens
  misc_feature (70)..(70): Xaa can be any naturally occurring amino acid
QQDGMVAGPCELRGLVPAARLSAAIVSMAGTGLWYPGCVGATETIFACRLKGRASKWRNSRRETSAIIGXMWEVNIHPSMDIEHGTGQGRQDIVRKRSKESAEELLFADKQ

SEQ ID NO: 972325 - protein, 121 aa, Homo sapiens
GLSLASTVVGDGEQILWYSLSSPPYPSLRISVSVLADLRGTSRSSGASPDFWGPGAGEPVCMGVIGDPFHLAKTREREWEGVLKKLRSEKSVIYAARIVGAGAYVRYKSEALGFQNFGYPL

SEQ ID NO: 972326 - protein, 204 aa, Homo sapiens
  misc_feature (133)..(133): Xaa can be any naturally occurring amino acid
PERFPTLTIASNKFFFHGNIVHHGVKGRTGLLCRAFSVSSRFNHSFECPPRMMIVPGDLPSDIGSPAGHRQGMSGVNTPYGRHLEIRPHGSSGERKKESSTAPWAHLMCEQSNTPALRCVYFTPPTRPLLSSXLRRCLLGKGSTLSLRHTRGGDRSEPGHLHKQIQSGGSQPPGSRNSSPTRVQWVCPSRDKVGSVRDDYFSVT

SEQ ID NO: 972327 - protein, 151 aa, Homo sapiens
MSIVHYHTLFGRFYFNVSDAISRRFGHYALSANLPPHCFSTPRGEDTLSTLWYVCYPLSSRLESTTARAYDYVLATTDTIFAPPKRSRYLNGFPADVTRGLHHAPPTQVRILGNRPVKPSENLPDILNNSFALDLPHAPTPNLRGFPANMD

SEQ ID NO: 972328 - protein, 126 aa, Homo sapiens
CVTRDHRVVSMTHIVQCFSPVNSGQPPNYEMLKEEQEVVCWGCPRKPCFPRMSTSRSEIRQLRPPCLTMWSRSLFNDPLHEHLLPGLHSIRYSVKSRDRKMVGDVTGPGYAPRQVPETSGALDLKG

SEQ ID NO: 972329 - protein, 292 aa, Homo sapiens
DRYFLRLPDRIWTVRTRATKLRPQYAGFLFAASLWLSVPSPPVLRKHGDTLSWTPPAPNRSWRGRTQAVVLGGCPTNAAPGVLPRGDHSSSGYPATPPRGVDPCYTPFFVIGPCSPRGIKRPTQNCLRDYCATIKRVLTDSAHGARGNESPPAPSGSIKHSCGPLHWWAITFSAQFRPHIAYDALGGPILVPARRVSLGGGTCGTTGSCPRTILCSRCRISANIRPRPLCGHRVPATRHLSLAPFPRRHPPEFVDGLAPPPEHGEEPRTTRTVVSTGARDKRKMFQGPPQHA

SEQ ID NO: 972330 - protein, 110 aa, Homo sapiens
  misc_feature (45)..(45): Xaa can be any naturally occurring amino acid
  misc_feature (74)..(74): Xaa can be any naturally occurring amino acid
GLSLCFNMCCGTEAESVVDSSSSPPIRPPISSPLASLRDPSSRAXLPCVRGTVPRHRLYSRFSVPFVCRDQAMXLPRFVQRCIPHDRGRASPGFRKTKGPLGGFPKLFVD

SEQ ID NO: 972331 - protein, 162 aa, Homo sapiens
GDLLCSELQLYLGKRGTACGVNPCMYLVEKSWASCRSEELPRGAFLAPIWGPRNLKKKASREGTHGASSPRARGRRTKPKSANSAFNLQTFFVPKRGFEAWGGDPMGGKSGGFSYYGYGGAWGPTRGCLSTNESTHFFINHGEEGGANFNRNHHKAVYYKDL

SEQ ID NO: 972332 - protein, 284 aa, Homo sapiens
SAERAAPLIWGEPPRHRGLRDQTPHVVAPQTKRGGVLSPKEGTGSSSTKTRLFAKPARSAAPLKERRHRGVGPPHKTGLNPVSSSVKVVWKRPRQRPPSTCSNTNTHGAVKESGTPTRSTHAMSGVRLKQEPPPRDGSLRDGTPPHRGGSARVRRAHNIRKIVCRKNNPPLCLHICCGTRSHIRLVLESVTTSSRPNKLLVACHHTTGLLPTQKRNSHPHTLVTLPVLTTLVATPSRRSNSQGLLSPVSTTCSDAPTALIHINSLLFHVGVVNEQVAATDASRK

SEQ ID NO: 972333 - protein, 71 aa, Homo sapiens
AYPRVCAYSQVVHPMIPLSTNRYVALARPLFARDKMIERIMNQEKLAKLQAKVRIGGKGNCLRKNVRKVVS

SEQ ID NO: 972334 - protein, 287 aa, Homo sapiens
CEGRNVVSFSAYQAARSSEKTRSSPLRWRNVSDANSAGSGVQSSSALVTRMPSGGELSRLQLRQREGRQVRTEPETGHLHLSHKKYVHIGFYRGNDSGSERLYRNIYLTTYVEDHLKKQTRALPQDLHLSELAGQTERYTKTTPIVPLACPTPSIQWHSLETDQRLANRGRMGVIFSICIGASHIAWGPSEDNNGSFTEHSVTKKPAFNRVFADQERSGTRVSPNFSMEGHRHISGEHIASTRLPVRQTGNVNRHKHNIRSKPPQHTEQQRQRNSLDSQNTNDDCHD

SEQ ID NO: 972335 - protein, 138 aa, Homo sapiens
ILSRTTISDRRPRASLFFTPSELRTFEQTRGRYYGRGYHITTCSIFRADPPYVCFSRRQWHMAKLLRSTILGTSTHPTAIVLHTAFPWLYQQDVTGRVYNDRLPHTDPGTHRDERHGTSHAQLLDTWLRSYMNSNNVC

SEQ ID NO: 972336 - protein, 188 aa, Homo sapiens
MAPRFGGNVSNSWKSFPPGTHPRAFSGGNISSPLRPHNLWQKLIYYLGPLGPSKYVLVKCSPLSAILSDWGHEVGERFLFDEKRRETTLTKGVIADKSMNCGTTRIGAKTSTATLVCLEEAQNILKGGRRTKRRPTQRLLEKTNGSRGGTTTSHSPKAVVAAKQQDEDHARRKEPPNKIKGGIRPPQT

SEQ ID NO: 972337 - protein, 34 aa, Homo sapiens
MDCTILDGALLYSAIKQTRVYVSLFLSDTTIDRE

SEQ ID NO: 972338 - protein, 135 aa, Homo sapiens
MKTDELPPRCATQQGRPRWVRPPPPPPSSQGNTRRDEGPRDIAAVSMGARRVNKQLPGGALGPQRENSLRATNIFPLTPLVVISPGQAAPWGTRSGLLSLHWGLRRCIFNGRRPASRHPPGDGFHTPPHPPAPPC

SEQ ID NO: 972339 - protein, 174 aa, Homo sapiens
RCGLLCGPCDGSVTLASDFCGLEKERREVFGDLYTSWNPRANGMRCVPESLTRHWGEAVQPPQTTIWDLAIWEAEELGNEAEKPQNVLETYGLQCNMKEHTGDLVNKEITESTSHFRNLGTEDKNLNDTNWQSQYQQSMDSNIIRHALSATIVDLAFSEGSKSHDGSNGDVAGA

SEQ ID NO: 972340 - protein, 129 aa, Homo sapiens
  misc_feature (87)..(87): Xaa can be any naturally occurring amino acid
MASPASECKSLENLQEADVSQCEPRTDVGRDTGDKRHPGSTQAEIVWLCLHSTSVMHNVETNDHRMCIACWRKKVLVIEKRIETPFXKEGMPMEILMTRKCSALVVIDIGLSILWGTDVHKDEWEVDTE

SEQ ID NO: 972341 - protein, 266 aa, Homo sapiens
  misc_feature (25)..(25): Xaa can be any naturally occurring amino acid
MLLVVSLVVAPSVLGCDVCRWAERXAMEARPLWVPPNGPTRPIGASPPSQRSSQSFCGSPPRICCVQPNVGIRCPRPEHFPWFLPFPPGGFCLFSQLNIPVAASISSGYPPPGFLLGPALSPKPDFEQSPPPPFGDLFSSSLFSPQKPWVNEHLNWGSYALTLDKYVSNYSPFSRARTDSKGVTTNNSAKSFADTLDQGSNFDDPLYAATRGHGLSVHPHRHRQSDPPPRTVGYSSYGWKVGRRHSSINSLLCGRTPLVTPTLRIR

SEQ ID NO: 972342 - protein, 222 aa, Homo sapiens
AVVRAANQGVSNETASPPGKGTLDSPLRALFPRWERTVGPHSWRVKAVDHHSPPPPGGVQVFTHTAAHKRRSLCPLSTRPAAKNLVRQNPTHAAVSNTHNTCVGRPRHGKDSKEDIFPIRKERALSLEVFRQCLSTYFDATPCVSQSDFKRAPKEVRTVKPPGFIIDEPQVPRLCGHNIKSPRSAPTHPHMAKWDNPPPRCARMQKILSATNPQKGVCYHIT

SEQ ID NO: 972343 - protein, 295 aa, Homo sapiens
IYTVILDMPPDALIFPAMRSSRGFSQTLRCRHGFSPPVGLPFPLNVRESSTPPWEPLFKSCYGGTLKTRFWGKQRATLGPLPGQPVCYTLHTPIRGVFYCFQTRQPVQAIWHHRGRPTIYWWGSGPFSRNGDLSWSSPLPQALRGRPPPQVFWLPRGMHQYTCSLWFGPKTGPHQREFPPTPRCCTKARPPLRLSQREARRRCRSPFARVNNQVQQPFMRQIHHTTPLICSGPDYTPKPLFGASKHPHVAVGPHELCPHNTRLGPDHRCAPGQVGVGKSCFFGGFFSQKKFPPPT

SEQ ID NO: 972344 - protein, 132 aa, Homo sapiens
MGTVPRARKRSPKVHGGKQSGRDNKKKIWLEAEGSLWLENHEASRVGKASNVLARTLNLWTQREKMALLKWGPPMWAGKSGGPLAFGNKEPPPAVEKVKVHLDPGRHDRVRSAPRERSRVGDQLKKAISRLR

SEQ ID NO: 972345 - protein, 185 aa, Homo sapiens
GSFLWVKHSATGRPGGPHVFFGYSGLPIIHGIRSPLPGEKTLGYPLGAPLGAVDEFPLPLASSVAARCFYCSPLFLDPPGVHGTLGVLSPHSLLCLVSAHSAASGAMHVLAHRMGVNAPEPTTLRCFLSAPYVYKGTTCLQKTHGPLLSNAPSLGREGTPLEKIATHWWGSWLDYDTLYTERATQ

SEQ ID NO: 972346 - protein, 185 aa, Homo sapiens
PVVGGVRVDEVGVGDASGALCSFVVRRPWESPSRLTFPRGVVLGGDPFFREAAPGDAPVFSRRSGNYLLGCLRVEPPGAAFLPGGLPRPPLCAGEVMLRKLISGAPSVCRPYILVRSPRFFAPPRTGAAYPPPPGISSSASPLRFFQGTKAPSSQTPGGIPLPAGPPPGGSSWAPLPPWGVPRVP

SEQ ID NO: 972347 - protein, 144 aa, Homo sapiens
DVLRQLLLVDACVRLYCALAVLFQECISCGVYIFATTHFVMGLPCEGVCSHTGCLTGKTLRDPFGGSLPPGWSKGRYQNCAAFPAFPPSGTAIHALLCEPLPYPPLGLPLPSVSSPLGQNFKEPPPMFLTPPVHNAFRHKHVTV

SEQ ID NO: 972348 - protein, 121 aa, Homo sapiens
MLGRRSKGRRREPVELCRCSPCVVCLLAPLGLPSNGVCHTGLRWEWPRLFVPPAGWDQQQLWDGSVVLPLPQEVCCSSSAGDANPPRRCWVPLMQDLLARTLSLCSQEAPAFLSFKPAPRL

SEQ ID NO: 972349 - protein, 114 aa, Homo sapiens
MAVLLGSSACPRVRLAVAPSLSCHAVALLPRDEVPPARIPTGTAPTALSFSTPRSIASSSGDYFGAPTPLILVSTPSSPCVARRTARRGIPPELLLVKNIRVVSPPGPSELHHS

SEQ ID NO: 972350 - protein, 140 aa, Homo sapiens
RCCSPPPCILPCPGVLSVYRLRPSHNAGGFFFTPPPNQSAISGDSLSPSVHAAKGASRQMRGGPQEQLLELSRTPLACRQVHRDAVPHRVDVLSAMGSHGSSLPSGRALVARFSHRSLPCVLLASPRQQVLSPLAHPPAG

SEQ ID NO: 972351 - protein, 297 aa, Homo sapiens
  misc_feature (83)..(83): Xaa can be any naturally occurring amino acid
VRAWKTERDEAKTQQRVAYVCITASPRETVVCRGPILVVIPPPFSRRDAIGPLPRYWPFSEFPGFSSVSRAAFKVARMASTLXRGVSPFLRGGTLQAVWNCPTTNDGANFSSPCCRSPPLPLLGPTGLRYPQRGALHLRGRTWERRPLAGSPPSAPSPDLGAPLSGGLRSSGTLRTSVVGDALWMHARLDRWVATPCPHCCSRVGGAVVCVLAGQSFFSEDPPSRRPAWLSRDSSRGRSFSPQPSGGGISRVMPNARAKAHVGGLPLTPLYERRPPTHPPSGCRLAPPSQKRIGRPT

SEQ ID NO: 972352 - protein, 271 aa, Homo sapiens
HRRVGRRVREALLQCVVTSTRLRWSPAAVLCPFCDYIDVGHKRIPSRGAHRPVVQGFFRLSMSRVFVALAGSCCCSTSPQAPVCPTLPRPVPVESRFAVVWRYSRLVVNPCPPVSRVVLCAASLVVSLLFKSERGLREPPLPLRNSRRPPRAWTLWIIPVLAAEFFRIRPTSCLPRTSLRSPRGATWWTPLQGAPHPGCTSPSSPPHFKILPPRNSCTTRTFPTHVAFNTESHFPSCLQQDTITPLTPTPGLKTRPTTFAILCGAKPPPFH

SEQ ID NO: 972353 - protein, 325 aa, Homo sapiens
CGVFSPSNESRVIEVGERGRGETRQQKIADATITCMFTVRLSHDTAVGAQPDCVRHSRLSVGAFVHFVNRPAAPRVSPVPPAEKFVSPGPRVPHEASSQNRRTSNGVVDLPKCDAVCFSAQQPSRGRCCFSLLCRPLLGCTPGGITSVLRARMFQSLVPRRVFAPLVRSSRLLHRVRPGSLRLYTDSGLTGFQNLTSCPSVVRRLTECRSPVAVTTWSSSPSMRMLRTSFQTAASAHEFATTRRQVSFFLFLLSRDLNPPIVVAPRLFDTQDSLPQCFCGIPARPRAPPRVGWRHPRFTPRAALLPSTAGGSPGFFLSKPNKTFL

SEQ ID NO: 972354 - protein, 108 aa, Homo sapiens
HPSSLTFPPRLFYPLNIMSLPAPQGFFSHSTESPLSDIMCVSPTGAHPHLPTRHIPFCGTHTPHPSATLCFVSLTGKHTPARGPIFEQSFRPPRYIVFYLPPTHHRTR

SEQ ID NO: 972355 - protein, 155 aa, Homo sapiens
  misc_feature (102)..(102): Xaa can be any naturally occurring amino acid
MVRAGTELECPQLGFVFRARNVSRVRTSPALQFFPRLSHAPPLSTHGVFLAPPLVSTHAERHSGLPHPPRGVVLTLAPASRSLAPSMGARMHSRSRKSRSAXSASPPTILPRPRIFLVKRISPRHVHTLICTLIYLFPSPSTLICRLALLTPPRF

SEQ ID NO: 972356 - protein, 182 aa, Homo sapiens
SLEPFFWGRDTLIWCIQSRGVTQGQRVPCPALCHRRPPQRGDPPSPRPLLPKGGSLHGRTQNIRGKRVRVTRPSNKIAPNRRPHRGGPRSRRTRTGGASPATRAYRVPQTAIILQPAPTRCPDMNRGSETSEYSAKHPRKGVSPGRKGDIKTGGPDALWRPDEGDPPNKHPPGVAPPPVAAP

SEQ ID NO: 972357 - protein, 238 aa, Homo sapiens
MFRIPRWGTRSPTRVTPRLIVIRPLLWAYLAYAKYGAARILWRGSRSPHTSVAATTYNSSVSKLAWVSGKKYCPGNFAPHYDSGGTTSAPATTVLSWGNTLRAHPHTPHGRRNHNAARCDHPPKEEYHDLRRPSQPPTLVPPRGRPRRLEHVGSPVPREGAGTHVWAGKVPCFMQSLCHGAWFNFVSPPLVSHLPLVAPPGADIHQAPPGVSLPPGPPLDRFWVFFFFFWPEVPPHIT

SEQ ID NO: 972358 - protein, 152 aa, Homo sapiens
MPLPLRSGDSESLDGAHTNAALCPAGIRIAVIFPGLGWFQMECTPPRGFYEALAWSPLAFTAGFYRPPGDPELGIILVFKLQTPINTPKSRKPPVNASTTQDMLCRHQFILYNTAQHKVRHGPGYIPIPPPFLQQETTNNNAGFPQRNTRKE

SEQ ID NO: 972359 - protein, 130 aa, Homo sapiens
MALDPFGNKNVRGMTLHVVGCPPSMVSVTNRVQINKPVFAKTFQRNVAQRISAHLRPMTSRFIKAALCTHVLANRQQFMFLDTDPPNFRVQCRQLQTHFSSNISGTPLFSPRSFQKISSTLVDVAPNKRS

SEQ ID NO: 972360 - protein, 156 aa, Homo sapiens
MAVDTSRNYRVAARSLGAPAPGHPMFVTPRFGHTDRPFRGPMFARRNPVAGDKNILGPGMAPTHARFVLATTRQRCGPQRCHRLNPGPTPSAFVPAILRHISWGQPLHQRKLAGPPPIAWGDLHPWSPQRSERPPSSTPECCHIIPITALTKIVGC

SEQ ID NO: 972361 - protein, 210 aa, Homo sapiens
MSVKGEKDIVFLPKAVLHNTLGSLIQSGSTKQKLLKNLIMPASASIHLYEGDILRTSQDEEVLTPMHLCRKTPPSHIFSKDTRPRQLVLTNSVSYEATVATLNMIVGSPTSVFQGAPLEARRVYDISIFEGGVELMSPLNTVLVQRVYTCAHALGNKSVVPTLLCNPPPKPRIRFSRVRVSHTRKSGGVKRKSFGNKTFLKKKKRTRLQN

SEQ ID NO: 972362 - protein, 281 aa, Homo sapiens
QKRNEEQRRQDKVYQRIVAKGPVQPVPHGSPRPWARSALATGPKLRTDLSTLGRKNNTQGGQGNAPKGVTTVGHPRDHARTHGPVPSAPNLGRTPLANHSLGTPPGRKSHPLSSLLAVTPGKVFNDLPGDHLYSARTLVTASNDALSYLTRFVRIADEPHGGALSPHKCNAAQGSGVHISTSRSRGTPQPGGYTLRDSVLFGPHNAQGWVIGRQLYPSGCLATPPPHVGPIAPFPNPLSRGNNTLPLGPPYTKDTHFATGDMWCVTHRDQIFHLGRAFQKK

SEQ ID NO: 972363 - protein, 118 aa, Homo sapiens
VKHAVLHHNTNREPILYATSPFVKPPFEKHDIKQCVSRKTLQTLPVYQGPFAHTVVSTTPRFVPPTVMYHTHKGCFYEASHTQYVRDNTTTSTAFRNIETAFFISTRKIIVNTPSIRI

SEQ ID NO: 972364 - protein, 180 aa, Homo sapiens
MGVNRRERRSYLAEEIDSHSQRDGLFYPTTVGAVDCYCSALVVWSSQQSCVAYCDFRRRESCVMSELQPPCVAYGQLLCGVAASRTTPSVWAVTLEEARQTCIELVLKGEEWYFLLPSRQQLTITAGEYIMYAAILSHYTSWLPHYFLPPSFNFYISDLSVFAVPHPHANNVITRSPSLT

SEQ ID NO: 972365 - protein, 191 aa, Homo sapiens
  misc_feature (15)..(15): Xaa can be any naturally occurring amino acid
SCGLARCQVEGDVRXHLHCWGKREWWRPPAGCRTREFVRMHRWLPARCSCVFRGSHPCGETLVGRPLFSRKVCCVGQGIERLKVSRQNVPCGEPRAVSLLGSAETPKSGDNSRYVVFYTGRTINGPRPYTSGYKSGPHNASVKASSEPFSRTPRPIQATMLHTSTKPLYQIPTSGRYNTPVSKRYIYDLSL

SEQ ID NO: 972366 - protein, 299 aa, Homo sapiens
AVNSCPGPLVRAPRKWVSGEYTPAVRADGRERPCPASPRGGLTKLANGPALSGKKRMDPLRLQDPNERLLSWGKVQPARGHLPLGDPHVLSRRYDQVMPGARPFKKSPLLPPGWPPETIAPPSGRWSPLQAPRVGPPFSTLTWNRCPTSYSAHFWSESHPPCPTVPPFVRTDDNLPPPHFSASRSQAVSQGATGRSVSAFHHEPPMVHAGRSLRTPPAEENGGCDAVQGVPAIGVVEERIFRLEAATHRRDVAANALLHRCGADCCCLDDPSLAPSRILWSHRFPSGKVGRPKRHSPHD

SEQ ID NO: 972367 - protein, 132 aa, Homo sapiens
  misc_feature (52)..(52): Xaa can be any naturally occurring amino acid
WCDCLCDLLVGPAILSAGFSCPGPPSLSVTGKFSCPLFAPPGPRHAGILLLXHAGDVCSVCTAPAALCRSWTAAFCRASLAPPQVSWCDGVCPLPPVRPPHSSHLQCEDCYLPRDCPPHGRRLFSIILSTTL

SEQ ID NO: 972368 - protein, 176 aa, Homo sapiens
  misc_feature (30)..(30): Xaa can be any naturally occurring amino acid
MSTLRMISAAFCLCGRNTACVYPRPHRGVXEISVCESRPQHLALAAPLCVDLGFRLAKCWGSFAHFCVNAVQRYRPPWGWFKQVRPLGVNNYHQGVKHTSSQNSGGSPYGNLNRGPPEHPRAASRHITAEVDALPMRLKGHLIGRSIRRSQHGLPPLLKFPGPPRPKKVSREENTK

SEQ ID NO: 972369 - protein, 274 aa, Homo sapiens
CVCPPPLGVPPFPAAYLPPGAFNMSAPFLYLAGPCYTVPASWVGSALPIADRVPCGVSHPKLSCRHSLFITLGVLIHRCCRGCEKIFGAPRRRPPLGHLMSPPRRLPCSPLPPGVLWPPLRVVIYEASPPKSTRLLYSRAAPGTPRSPVLLRGPPSPMRDELPGLVFPPPSQMSAPLTSSLCAVSPADKHLLCPRSVLPLQGTKKVLFFHTGRRSRCDSLSPAVRVLPPRPGTVAKQADDPNIMAAPHDTRGEQGAPRGKTCEHRVQIPKTRAG

SEQ ID NO: 972370 - protein, 309 aa, Homo sapiens
ALCVGERDYSCALHLFVPCCCVPLSASLDPVFTHRFPLPSLFVGPPFFSPYRFVPPAHIRGSPFPANSGPPRATQSGFQSAPSCVFSATAVANAACGVPGTPLVTGGFYVSCAPSGFPVLPPDGVFTRAAASVFSNYGPARPNMLGSFSPRPCPFPLDIFFIDRGVNSPSKTHKGWATIFRNALPWPPLASPERFCRTTGQALLATLPANILINLHAGHGEVTRLALSLVRKNRGVRTIGGVWSRPLHILRSDPHLWPPQCPHSPSPYRRFLQQHAPFVFVSNEVFNEYENAPSFLKKPKQKSLTTHKT

SEQ ID NO: 972371 - protein, 132 aa, Homo sapiens
  misc_feature (23)..(23): Xaa can be any naturally occurring amino acid
  misc_feature (25)..(25): Xaa can be any naturally occurring amino acid
  misc_feature (109)..(109): Xaa can be any naturally occurring amino acid
  misc_feature (126)..(126): Xaa can be any naturally occurring amino acid
MPGPASFGGDPPENFCSAPLYKXSXSVPAQNSPGFFPFSAPGFFSQDAPPSCVRGLRPHFLLWCPAPAVFIQVLPSNRLPWRSKCSTTTYRARSREEGDLPLILRPANXAAPLQLVVRRAFVLDAXSWVASR

SEQ ID NO: 972372 - protein, 84 aa, Homo sapiens
  misc_feature (3)..(4): Xaa can be any naturally occurring amino acid
KLXXHVGSRPSVVSRVYEVHSVRDLCLRMQRAPWLTTAQGNFRYPGPLFLSPDSEVILGGVSAKYLMWARSITLCDIMPSSPLL

SEQ ID NO: 972373 - protein, 307 aa, Homo sapiens
LEVDQRRRVEQKRTPTANNNSRTSFLASSVSMHSGFPPWFASLGHPLVGPPPVGGRCGTPGARVRYPPWGPSPPRPCVPAASKTHPSWVLFRRHIAPASVAPFFARLSAWDKDFPGFSLSSCVMATTPVGPAPFLSPATHRPPLVQGDGSYPPRPLIAPLAPLGVTLVPPPPSGSITPRGVFAPAGAPPSSWEGSPLGLSLLPRRGGPANPFSQTRLGAPPATAPREWVAPGVGLATYLLWKRPLSQHGVRAPLGAPRKVFLSGAPSLREFGSLPLRHVVPPSGPGGAARSFIVARTRPGCAPVGNI

SEQ ID NO: 972374 - protein, 140 aa, Homo sapiens
MCKATPLDLGSLQQSLTGRANEFPNRGRASEQGPFLGRRVYFLQMPKGSGSNALYEIVFLPLAARNNGKNLASDAINNVPPLFPFGSNLQPSPIMGRLRHRRSVLDPSAENAPIICYPLAIPKRCAPKRPVTRLCNSRPS

SEQ ID NO: 972375 - protein, 127 aa, Homo sapiens
MSFSKQEGAFCEFYRRSRAVSPPTHRGPHVMRAPVEKKDFYFGGLNAVCVHHRIGPTSVPQDLLQCPTAWDGAPHFSPGCFARRRGIEGGTRHPPMPRQGPARESVEVHPQTNKRFFPDKNTLISIC

SEQ ID NO: 972376 - protein, 152 aa, Homo sapiens
YYRNKTRTRYTSISNGLCIPRPYPFMWCHPICPTKLGVFSIKQVFSPTQKWVHYNQQIPGNLRHHFTKLPVVRYNLCVKISLVPRHKYTCWCPHTCTIRAAEVPRAQQCDFAFMFLPQQKPSGGSNPGEIATPKGGKTPLPYQSHLHEEVSL

SEQ ID NO: 972377 - protein, 184 aa, Homo sapiens
MLPTINWGYPPVCYKTWLLLYTLASKILKLGATNKPPAILPPLTPGYNGPFDTPFGGRQEPRTFFSRVLAPPYLLALFLGYVPPRISKSRAPPAPREVLANAMVPPWRASLETATLRSHLVRPPGPLHQSSGRPPRPRFLLFITHTTKGLISVAYPNTYHSFSTQKSAILTSSHTNAISSSPPP

SEQ ID NO: 972378 - protein, 240 aa, Homo sapiens
  misc_feature (15)..(15): Xaa can be any naturally occurring amino acid
RRTQQSLAGVPCVVXHRVMSLPPRPRFTPGFLSARLCPHFLYHNSSAEFRFHPPALIPGPPPSPLVRALNPGCARFLSAFLQLFFAPSVPPPPLGPGIWPLCPRVVYRATPLPGSHEAPSRVFSPVRVTPRGVCPPPAAFVSTPGVFWFMGQSSSRFRVFLASPPANTKGLRDFFSPEPSQAPTGENGWDTHLALCGLAPPLFAPSAALCSGDPFPHALLFLSLDRSPAPPAPIAVLLCA

SEQ ID NO: 972379 - protein, 37 aa, Homo sapiens
MRYVYHKFSPRTCPVENTPPLANFNPYTLKPFCLPHK

SEQ ID NO: 972380 - protein, 159 aa, Homo sapiens
  misc_feature (150)..(150): Xaa can be any naturally occurring amino acid
PPASVCISAPVAYFSRVLPAFPRWCPGSFRVYGFLPEAEARATGFPSEPFLSRAFSPPWLRPFDWGLPALLPGPPWVPSPRESLADSSPVLKRPAGSPPLSSSRFVISAGLPNRVLFRPGHTFPSVGLHPPNAPAPRMVVWAKYVHPPRXCSRSPGRSR

SEQ ID NO: 972381 - protein, 295 aa, Homo sapiens
QRDVSQGRPHRRLCARGFARVLTKLRLQWFSGRVETSKVRGPGNESPGDGSLVRGGGLRLCRRLPVWAPPVAPERLLFRQKGFSPSFKPGARPYLLELAVKPPRLMCVLRPPPRLESFSSQATPAAHFGSATIQTRESRGACLQDHEVYQGLWGIGEESPLVWSRISHERVKEIILSPVVCAPPASCESSGVSKTACKTCMDVPMRHLKTVNAVYKRGSMDDHKAMVTAFHRYRRTISGAPWRVFYLCAEADYVDMSVRNTRDRFCDWEGSSAHQIFAVEDSRRTPSKSNGPHDK

SEQ ID NO: 972382 - protein, 293 aa, Homo sapiens
PPLGASLRAASLVGSPGCSSTTHLPLDARMLKGFHEVSIAFAVGAVNARGLFRVSAAASLLPDQQGEGSLPVCALPRSRARLSSPQPGGFPFSPSGAHLVVGDPQRRLLPPGFGEQALVPLPPAGAPLSLPLNGEDFLPGFQGPQRALSQTSVPTGGSVFSERRTVRYHKFVGQKVSAPYVPTSMRTPQSSLSRRPPLSIHEELDRFPLPPVRAQFVPHDALSPRICFAPQNPHLFLGDIQGSAPPLYRSRLDLIIRDSCTAEQDMESGRTQRESSGGPKTTRQTPHLDNSPH

SEQ ID NO: 972383 - protein, 142 aa, Homo sapiens
PAAMSLARSVFLLGAKPVYFFFDAVLVARASPSRLLGPPPLSVGVFPGEGPNCRLHPNWAVISNVGVPAYISAAIFTLPIGETLVSTFRKRVVPTTRVPTEVVSLRKSLVLGRTLSFFLVVPQSVFLTIGLPAIIDYPSFFR

SEQ ID NO: 972384 - protein, 288 aa, Homo sapiens
  misc_feature (105)..(105): Xaa can be any naturally occurring amino acid
ARPAMFSVAPPFLVLETPPARFFWDTRRRFVPWCLGPPPFCRRAVPTSGAVTEIARRRSCSSSLYLREPPLLVAHSRGRALCHSAPTTIVARALKEDRRVSSLYXARCRRRSRSNLIRANTLLVGTPTHTLPHHNSRAFARTCAGWYVETHHSFFLHPPPIYNHHTCSAFPVPQHVASTSSPRANKLILLHDAPYPHHSPATPTCGEPTSFGAHSSASPPTIILRTEATQKFCATLINSPPPYCRFIDKPLRHFNASQQFYFLYTTTIALNYHMTTHKLQPENNKIDN

SEQ ID NO: 972385 - protein, 203 aa, Homo sapiens
ALVRFGEHVLHLPVASLGARLDLGVLLPVSALAMPLMSPACPPGLLLRVILGRLLLSPWRLFTASCLLAPTIVIPRSVMFVSSTLTPPVGACPGYLRPEVVQPCPYLCVCSIGPGCSSPAWRFLAGSDSSGAGYSTPADPMCALSSRRSQECLDLPSMGCLSWAFFPGRSCKAGACPPRCASPGDKLLRWIHPAFAGHRSCFR

SEQ ID NO: 972386 - protein, 131 aa, Homo sapiens
MRISAWGSVRPHILVSSLTSVVAGFLMGSHMRGSLETRHSFSAFSVPCRSEFPGWSFRREPVGTLRKRRFLCIWPASSVFPLPPQVWPQPTVAGRRDSAYSTLIVPVLPRHSPPLPYFRLYTASSPPAHVP

SEQ ID NO: 972387 - protein, 274 aa, Homo sapiens
LLVVGLSCLSVSSARVVAAVVGSSPPGCSVRPLSVGTAAPGFRAGCFLALFGVFPSTPVRPIFVRRSRAIFLCRPLNQVPCSVPNNYPGLLPLPPGGAASFWVALPHRVFFRLAPPGEIRFPPFPAGGLCRHNQWSAGIIRCPPPAFLSRPRSLPPAADYYVNSGGILGPPRPILLGGVSCPVYSQHRQLCFVAHHIDFPRALWNHTLGGPQRVTVPPVFPTWRGWETNPPDCKEGDSPSFLVRRTRFPYNTGVLRIKGSHPRRPHSARNDSRP

SEQ ID NO: 972388 - protein, 309 aa, Homo sapiens
  misc_feature (52)..(52): Xaa can be any naturally occurring amino acid
RFCAEFPHRSGGCGGALVPPPAGWVAQCDFGQGIPVFRGRGPGGPDGRRGGXSPVLCAPGLWAGSPAGCPGPPESSRVAAGDVFGPLWLKSRRRPPPFPIVFCVGRPSCHVASPAAPPVLEGFLQEFTPAGAAILVLRYLATPFLSGGLPTHPGAPTRCLGDSSRRSHAVFPGPLRKKALQQRYVFPRLGSASPPPFLSLCGGKTCVSKLSAINRGPSIQQGRVNNQAVYGNEHTSTVQLLCSDESMEMSFVRTPHVEVCTVFGGPRSSARRVLIKHARYLLHGPNPLPPDICTPKFRAPLQNVKNKKT

SEQ ID NO: 972389 - protein, 147 aa, Homo sapiens
MDMPQAPPRGGTLGRAPFSPGLFFALRARSCSWFVSTPGAAAPESGSRRGTGCCPRTFLSLSAAPVLRPPRVCEQPPPLICSPPLKGPPYVCNRLFRYTTIYRVFTPPPVQKTPEMTPFSLIPHGPTPFPPRFTHHVVHSPCRGKIP

SEQ ID NO: 972390 - protein, 75 aa, Homo sapiens
MAPNRATLAYDESGTLNEESVCLRLLWVKAVFVVTNRGRQCSALQIGDRRCVVEYNISPKWGPKNILRDNFTATE

SEQ ID NO: 972391 - protein, 143 aa, Homo sapiens
  misc_feature (29)..(29): Xaa can be any naturally occurring amino acid
MVTPATWRGKPARGRNHDEAPHVPQRVTXEQVCSPHAHKVMRAAGLLLKSPHDSARGHPPHEETTNSSVAVFVSTIRHNTQRAHEQYPAAYMRGSLHRSTRPFPPHRVCWKDPPQSCPWVGALASDRASFGTRGIPAFFKVVM

SEQ ID NO: 972392 - protein, 266 aa, Homo sapiens
MCSPLENVVQHVTPDMCGYPGAVPPNRGCPKLMVLENTYPWADILGISALSTSGPKFPLSNRKFTLRGNTVCTTRYTAPPRSNTFGGIHKKNSWPPPYPPQYFLREWSKNQEVVHGPVCQNFGPPLTGSGKECRTPQCTTRTFSCPRPRMHTIYLLLAKRFMILLPSNYWREQCTPFRYKKSIWAHIVRVAPGSRLRIEFKSTRSPHLQGSDSYHNPKVVEQWLVQVVAPYTTRVAIRDNIYNTRLGSHSHEGPSPGRINFFVGDR

SEQ ID NO: 972393 - protein, 199 aa, Homo sapiens
SGIKHTHSIHMDYTLLIFPRKIFRVKQYVLPQATDFSSHTFFPLFAFFPGASGLKIWPLLTFRYSGLNPPELVSFLSAPFYTEYLLTPSLFRIISPTYQNPGLRIPGPQNGSKQRALKVPPGTHCDSLHLLRYTDRGGKKPHVGGAPPMLIRGVQWTPRPSHQEQPPVCARSVPTKPPGVGGTLPPREVPPCHDTSIRC

SEQ ID NO: 972394 - protein, 131 aa, Homo sapiens
LTLPLCLLASPVIGVLWRPLLAVSLILIRLPCSYSYNIWPLVPQILAQEGRFICASGKEGVTRTPRLLVPPHVVRSSDTWGFPPKLPCLVSPRLLTRVLLHSSVPECGNILTSRFLGRSPTTLGGEFNSLL

SEQ ID NO: 972395 - protein, 114 aa, Homo sapiens
MGRLFSWHPACRAFPGPRRYCPIIYLSIRRGPDTHMDSAPDIPGIRPPPTGESPTTAPGTSGVKRGTQEEVGLGPPTLVAISWPQGDLPGGMFPPTARYTVNTVEAPKTSHGTN

SEQ ID NO: 972396 - protein, 98 aa, Homo sapiens
VRHSTRQTSIPAAKMGHYLPGAKVQRELRSWGPPRIIVRAPYLLARTLKSGQLIIPERTPGENHAAPAQMRMYKIGISGRRDDPGNETLRPTHPEENL

SEQ ID NO: 972397 - protein, 302 aa, Homo sapiens
AVGDNNNCGGPSKNTNGGGMTPRRLERWKQTRGHKLRADRGGAPKCRKVIGATHKHSLPRCCARLSADPAEKRGVAVKNERVVWHPRSTEPPYVVSERHTSPPRYHLGRDKIREDRAHPPASKMARWPPPLASPRGVLSTHNQVVHPPGGVSSPEEGLLKILLLVTPAPKAPRQTNSVGAPPRRPVSGFVITHTHAAYESVDVTPRTTTMFSLRMARSHKSSNNITFACCAPAEIMRQSCCPPQNGTSYTPRYSFRKHSFRGTKCSRDVGDNARNSNGGRGIPPRTKLTYGAGLERTPANKT

SEQ ID NO: 972398 - protein, 279 aa, Homo sapiens
SAPEKGVFTPKGKVCRKLRANTALGRKPTSRWGETPTGSGANVRTRRVCRKNKCRQGDRQYNAVGVQNGTHIVGRGRPDTDHDMAWGRRHTTPACHHVGPPTYGATTIWGQTACVGSTNAARVEASITVVRAAHGKPTEGYLAGGHPKAANMVRPPRPDRVGEQRRAPRGPPSGGAGPPQEVPLGRVTNAGHHTRALRQVALTAHIGAQKAPWPLPLTKRKTISSRTNNTSRCGGPTNASGWSLCRLSIQTHGHKSLSPPIGGTCNTLPPRAGVCRSKI

SEQ ID NO: 972399 - protein, 140 aa, Homo sapiens
MVSASPVTTPTAQQTQGPTASQCWAPHQAQSVRGRHTAARPHILSSEQQHTTAPADTRHRPQRGTSDTYYHGCREPNNGATTGAHSHLGGTPPEQAPAPTAPNAGTYELNREHRRPHSWHQDSRARKTILNIQRPSDPPT

SEQ ID NO: 972400 - protein, 269 aa, Homo sapiens
MVPLAENTCSRLAVSSRWGLASACKVFAGMYTHTRSAVITPRTMCLWAGAPNFSKRAGIHAGGYVLPRHVLLPSCVSPPFCSPPSTLPPGIIYGGRYPPCALLVAPRLSGIKCVHAVPLVAVVTPACGFSPRGKPPFWLLGFPWQASPPPLKVGVILNASPSHNGGDHPRPQFSRASSGGSRGRVRVCVEAHFSERSRSQPPMEKAPLCSLRPTGCLAAPQVRAYSLGAFARKRLTAVPRIMRGGSYTFSSIPRRSGPKGKKIFEPPHI

SEQ ID NO: 972401 - protein, 281 aa, Homo sapiens
VIHITGAILKANVHKRPQRSRGTLRKPCVTKTLPEKGPPGECGQAGTMAPRPASMCFQGLRHFQFREAKSTSGRAHRIGQPINDLGPKERLSSPLPAHADGSTPPPAIGKTGHAQPVGRRTSTTQMARAFLVTEELIRAICSIVKYAEERWLNTVARAFSGFARFLREPDIFVNKKGGSLQFSHVRAQRAKRIPPHHDKDPTKSVFWKKTSGGGKPPRNTVNRLIVSWLLPAYTLHVRGSSKRPFVTGRSIGHGPSRCQSAGPPGWRPKYFAKKKEPTNMT

SEQ ID NO: 972402 - protein, 309 aa, Homo sapiens
  misc_feature (1)..(1): Xaa can be any naturally occurring amino acid
  misc_feature (36)..(36): Xaa can be any naturally occurring amino acid
XSVSVSRYPLSPDVRSLSLSLWRVVVSLLLCGVLRXSVRSGTRSPLRLRAPSCYPPYGVFPSAVPLAVPLVVNPPPLSVRTPFQVPSPRPEQLSRGFLPLLSRVGRLPRFSLPSQNSRCPPRAIWAPPTPFLSSSKVPPSCSRGLKNSPTFLPRVFDMLAHQEPTIPALGELKRAMAPRLWRKELLPHDSQRLDNPPTFKVINLHECSESIYINSVDFILTNPESPPFFSFSHHAALVYLPLRFILSILVLPPLQDPSTKCQPTLYPTRTPTGIHMYGKTMQTAQNPSLGSPPGSPPGGSMEAPFTPHK

SEQ ID NO: 972403 - protein, 307 aa, Homo sapiens
VDQKNRGGKARQRRAQALRSRISRPPSLVWRKVRPARGRTPPSARPLVDTTRALNRAGKDVLNGNQGILLLNGHSAIYTQTVVQCPRQRTAESRVVPYLSPGRGPALLIPPPREGEICHKGGSTASPRPNHVRGRTTLLTQRLGKKCSQQRAEQHDRVSTSAAGTPRSARGGHRKHRPRPTIHTCSLWEYTPHVQHQGQSACPDWYQKPQHFQRNPLTELLECQNNPLSSVVRLKLNKSGVYRPPYSAQKTGIPDNSPGDLEGTYETALIMHYAPEDSFSASRPVVTNFLGETLRGKKIGTKRFSTK

SEQ ID NO: 972404 - protein, 81 aa, Homo sapiens
MSGDSGAITAQGTHPAPSLDRLTLSGAPSGDEVTPTLGGARADEEATEARREQTGSVEPQRQRCDDRGGGPKKTVISPTNM

SEQ ID NO: 972405 - protein, 110 aa, Homo sapiens
MYWTVPGIPGQPTFSGRRYPPVVRLSESRRAPISPNLGHGPSCCDTYPATSPIGGPPPIKRSIWGLPPQPSWQQGVISELVPSPGKDSITLLETVTSTHSTPLFPIPPSR

SEQ ID NO: 972406 - protein, 81 aa, Homo sapiens
LAYQTVRPNSLDSLRGTRRIILLGKKFSRTTVFSTPDVVPQPKGSPCAQGPLIFEEGAQPPLVVIGASHALSQLDTQGLEH

SEQ ID NO: 972407 - protein, 143 aa, Homo sapiens
KALQVAPGPLVCRPPAPRETGGEPPRHGPKRGVAQGKVAHPNLSQEVIDTHTRVLRRCRSLGLDNTYRSSWRVKILRAPSLAIALTIKGFSSWHHTEDHIFPLIDFAYFVPSSTRIVLRFFHSNHLMSPLCLYIANSRFQPHD

SEQ ID NO: 972408 - protein, 302 aa, Homo sapiens
KVQRDRVYCMESSPRMFFSRCVDPRHGGLIKRPFATVARLPQAFGGGQTQGCVLPPFGEFILAASPSVYQGCVPRPDLASLHDTVFVLVTSARMSAPPGPKNRAPRQRENYKADKSSVNGKQAAHLVMPHRVRCLPKAPKEGPQPAKQGETHTSCPPGVMIALMSERLAKALSHEDCNSPKERNLRGRRGGPPPGIPRTHLRRHQGPAIVVLQTLVTYKNATLRGENLGSNPTRDRENATKHKAPRLGGGAPESTEHVVRGPRWTREKIQLQNLRRASEVANRVQVCPPAPTPWVKRIPPHM

SEQ ID NO: 972409 - protein, 231 aa, Homo sapiens
MSETRPADLGVTRDFGRNFWHWTIIHRTCGPRTDAPGVTVNKQGGTPKTIETHLAWTPRRKTFVLSVSSPHSCAFKLCFFDGSTNAAAFWCRPSFLTLGSVCSTRGFNAPLEQRQLFSIDSGSRRTPEIILSRGGGTPPCSMTSPRGGETRQAPDPLWFLEARHTALSFLDPPLAFKSRGIPAAPLQNSVESGLSFPIIAGSIVANGSRYRGPRYACMLGAVKPPFTKNMT

SEQ ID NO: 972410 - protein, 66 aa, Homo sapiens
MIDPPTPLGVHYSPTPPLTKQKIPASHLHTAGHTTHPYWFNTPPFPPLFPDVPKPRNNPGFPLNTK

SEQ ID NO: 972411 - protein, 139 aa, Homo sapiens
  misc_feature (51)..(51): Xaa can be any naturally occurring amino acid
MQPKKTVVVTLYLHGRPPLLRLQKVSPGSWRPTIEEGVNKKAGGAFCGRPXSPYWGTLCDGGFSNRPNRGVTKVLPRMLARKILSNFWIIGPPTQVILLRTPSIVISAPKSGMFFSVNGRQYTLGPHTPLRARAVSPPR

SEQ ID NO: 972412 - protein, 231 aa, Homo sapiens
ASEKDSQRTERGGKLTGSERRKSRDAVKCPVRPGNHSRLTRIDCKRGYAKPTTTRVLPDAKDMGHSLVKKKRFLKKDACGVNIQGSFQAIWGTNPFKQCGSCPGRHNGWAVHKKAIHTGDNSTVDPGKWEESAPCCGTGRGPREIAVWHKRGGPRGRRPLGTPPWGRRQRGQTHGGEQPQNHHKLSIAYAHANITVFHQGTRGNLTRRRWSTGEHHISATGNAELGFDEYR

SEQ ID NO: 972413 - protein, 58 aa, Homo sapiens
MRQENANRWVHNRGDPYSLFGFSVDKTPEDRFTKVTKFGFFEQNTPIESGKPENNYIT

SEQ ID NO: 972414 - protein, 325 aa, Homo sapiens
  misc_feature (1)..(1): Xaa can be any naturally occurring amino acid
XQCRAEAAVFRRVAGVVCVRFLWVLCSGREVVVSVDHAVRWTRSPSGSPAGVCNRPMGVFSFRSGALLLGGTPRTTWCSRPLSALPSRALALIPGGFSPFLAPWGSFFPARTEQRGDPRKHGDNAIPDGSGTTLGGYHRDSGPGPPERPVIVPPVGDWPPPTLCGRRHYYLYHVSQVMVSLIKGAPKLTSRVGNHQWPGQGAGCRGIFNEPTLRELSWGTHAPRGSGGAPHMGPPPLSGTWKQTSPTQPRDTPTTRARHKRESYRVTDAGRPLSHGQTTDICWQMEEPRVHEHWDPARVPHTAKPTDPNPAFSGPAQKYFFVPQN

SEQ ID NO: 972415 - protein, 250 aa, Homo sapiens
PLWQGTSRLHMPVRLDYTSPPKNSEATSTLNALGPLPLHGWTVPDIISPERPLQSSSSVANRGDECPSVGNRDKAMATPVPVLNNYGLFRPHLGPRSPVFKYSMSPRRGRNNVTWEVRPRRGSGRIFRAYSYCCTEKKWRPPPQRSPVWRVKHLGSDSTRGDNLPPGATETQGGSSGGSGPKRLLPPLLRESPKAGIVGERPAARKRGGASEDTTGPLKAEKTAPTPRRLWERKRKKSSARAFNKKEPPF

SEQ ID NO: 972416 - protein, 120 aa, Homo sapiens
ERAAQAPPLGRPRGPPLVRQRGMVSPRRPALLRAPARENPRAAPTPVEGSAPPTRGGPHGRKRTRQTGVRGQVSEASESSAREDNSTALSPVWRRQSVEWNRRGMNHHVIVLGAMPQEQL

SEQ ID NO: 972417 - protein, 77 aa, Homo sapiens
MEKWSPPQGEYLNRLLLPPRRMGYGEIPSIPGSGVYNSGGGTQQTYDTTGARQQGMRVTYPRSPGNWAPTKKNGHTT

SEQ ID NO: 972418 - protein, 106 aa, Homo sapiens
RKKQSKRVRTSRVAARSGKSFVMSLRQVHTWISNRTSCGPRVSTEFWSTEGWSLTRLQTTEVVYIQRGITFFERRGIICPINTLTRAGTTSLVSHLASQHASSRSW

SEQ ID NO: 972419 - protein, 271 aa, Homo sapiens
CVERAEVCQNTCGSQTEHRMTARCGRVARGNTEGRLDTTVSRQNKMRGPHKHDVGAGAAAPTARVKRPGTMEPEAAAVPKMGQRTGRNRRRWCRIGTPPEPCPLKKQGDVGKPLGGNTTRRMDSPTEADTHHVLAHTGGESHPGVIKGGEPPPQCAAGMLANESSAPWVPSEEGSVGLRVRARPCPVSKVVGQPGRQHFVRWIYPESFRRDAVASPGNVFPTKVRAVMDYPFEKRRICAVVAPTKTVNVWVISSTRDPDASGTSFGKNTGC

SEQ ID NO: 972420 - protein, 105 aa, Homo sapiens
MSALVDRSPQSGGVGNSGGECTKKVVVAEHKNLETARICGGDHSGPPQWNSSPGVTFKEGRVSPRTPSLSGRNLPSWSAPSVGISIPSAAPSAPTKCCFNSPTRL

SEQ ID NO: 972421 - protein, 103 aa, Homo sapiens
  misc_feature (57)..(57): Xaa can be any naturally occurring amino acid
MVGIDDKDTVWFSQPAGGNNEGCMIHQQDKTQVAGAHQFPRGDWFMLLECNNHAGNXHRVCGVCISAPQKRLLYEEGVFVPPQRDPRPQSCGVPQQGTRWVKL

SEQ ID NO: 972422 - protein, 35 aa, Homo sapiens
MRCSPTGDRKGGGTRLVPPEGDPRPNGGTFFPKHD

SEQ ID NO: 972423 - protein, 251 aa, Homo sapiens
  misc_feature (1)..(2): Xaa can be any naturally occurring amino acid
XXPGDRRNDPRRLPTQYLRRAWAIEKCAGNDSSGPSMLPPNWPGEKDRPRPRGLGPPVEVKATTGFRKTQEPGRKNHWCLGWRRPPAPQSGNRAVPKRPEPGGWFPNDKKEEGGPPPRQHIDEADKPRRMLIAAKDTPLGRPNWTPPSRVRNTHTLPPARRNQRSLRGAPRGGATEENNNAHLISATQESKHKRVANNKKADIARYKRVATHTSALCGHEPDPDIPCYHNWSPKNWVNKTYSDPSIGQAYQ

SEQ ID NO: 972424 - protein, 301 aa, Homo sapiens
  misc_feature (2)..(2): Xaa can be any naturally occurring amino acid
MXHDSLAVGGSLCGHFLLALMHASLAAYLFKNLSAHNSSRRLTNTISCLAPPYSFISVYKPEFAVKIRRSGPKRPHVHTALHQCVMTCPNHRCCSTNPILSTEYAPPAEVQKEGIHQGLDPIDKPRRRQVCYVNVICPVLWHILTLYKDAQIDPLFLPTPPTYSSATVLTPGDTRLYNIERFISRGVDKIHYEFPPAVEHIYTSQGRLSPVMSEINPSVPHCVGISSTCSHDSICIERPHHLCLYDSQQALSHAVLSVKKSCNIRGVHLIKKGPAVSWEKSQIFDGAQNSLFRHKKNPLPH

SEQ ID NO: 972425 - protein, 60 aa, Homo sapiens
MQKVSATIADYMMATHTRTINVPPGEAKQGLAPLVVTSHNKQGFTKPQGHTPKNTFHNPT

SEQ ID NO: 972426 - protein, 236 aa, Homo sapiens
MWGKPGQQSLGHACPWPPGTFFQGAKAWRHCSRGAHRVFPVSGNPDSFRMVRGNNHMSPLCGHFHNAALPAPKGIKMAQRLCPNTLGILLTSGVNYSPNGVCNPAHAESRQHTGVLKPAPPRMSAPLFKWNRKGRTTRCPLKGGNMNEITLACIAGTARGSHFLHQAWPPHVLSQPREFRIPALWRILILSAQATPPGWAGDQEIIAPRPLSVPAVVSTFPGHTIKSGTKLFLYKT

SEQ ID NO: 972427 - protein, 261 aa, Homo sapiens
MAHGWRQDQSAHHGEFARRGPIGAPPRGGTHLAGGPTWESDKRGKTQHVGHTPSGLGTPGTGPAPANGMFSPWITQPRRGGASPQGHRQDTGRPATILPPWLRGPTRWVCNLAPPRCMMISPGRSGRIISISTAAPNAFVRVTKGHQHLVPFPQQEQGGLIPLPLAAFCIICYMLAARNDFSLRTYVRSQRRVFRWRTTNSPGVDNLPPEYLPTFKAVANCTGAFVDARLINNHDDRMGYADGQSSRKSIMSHIVLSVDCV

SEQ ID NO: 972428 - protein, 247 aa, Homo sapiens
  misc_feature (1)..(1): Xaa can be any naturally occurring amino acid
XRKNQIDRETQQRTKGGGSRGPAEFAQWFWTHKCKDPDLGANAAVPGPAGLRAPANARAPLWGPRVTHKSLPYRNSGRPSGPQVRQGPHLYKSGAPPDKGPRHAPLVREVVHQYRTPWGRRRARRTISHTTKRGFQNTWPQQGMVARGAHTAPNRCSPDKIQEREQQSLTPIHVAPALLTTVGGHPFAKQGIVTHWRPMHVESVKTSVVRGTKRLACTLQSRTKRIIYCEAPTWRFTYCARREPGSY

SEQ ID NO: 972429 - protein, 244 aa, Homo sapiens
  misc_feature (9)..(9): Xaa can be any naturally occurring amino acid
GVSLIDERXQQLELTSRYRSRPLGPFSHNSLPNGSSPVKDCTETVCVKHPRVPSNRVRNHIYGPPEKGNHHHKECRVPEKPGPFPERLVNLQQKLKGKDTPGGEHKSWKTPLRKAPPKWPARKPVYKSGKKQSGKQQRGGNPTRGKQGPKYHQECPPGSHLRKPQTPNGRAQQKMCFNKKFFNNALRIFERTHLLTPGGNPQMCDSPQGHRDFGNLMYLLGSLYRCGQTDLSTNKELIGDRTTI

SEQ ID NO: 972430 - protein, 274 aa, Homo sapiens
VGPNSGMERDKGRKRRERKKKRAKRAGSSGPHEPPWSQEGPLTRGRPPLLRAVPFRFRPSGSAVPGEAKGRWPAQTRGTQPGPGVHVPKRRMSSPQMRSERLGPPVPARGPWRTPRGTPQGTKGGLPYNARVYSGYKQLMPRGTPEAPRDVSPPSAKPPRAREVGVVGARPRTRAIENHRPQSQSLPEQPSACARRLHSSRQEEVLAVSAHHAPRKDSIVDPRIQGQFEYYGHRPQRSAKKLGVPQCVPRKTKRTFFEPREASSRALGVRRAEW

SEQ ID NO: 972431 - protein, 107 aa, Homo sapiens
MYTSALCTLRTRGVRSYLYVRITKFMGCRAPDGWRNNTTVVVSVASLRTFVGYVHRLRVRGSSTTSRRSKGLGNTCLSLSADTVVGGSSSSEFMRWYTDYSTSLKRS

SEQ ID NO: 972432 - protein, 188 aa, Homo sapiens
MYPTRVLLAGLGHDPAVNCWAAVEVWKNNSKGSSGWLNEAICGAQLTLCSCVPTARRHDSRMLLYLMRSRRPCLSYKQPSPMLLRSPQDTSLRGPTLRKTLLERATMLFYDVNAYTGFVEGTETRTSVVVGDSTMRDHRVVGDGHSTKFKASRPSLPPPPLMILGGQEGRPHCLDNSSTVSSDPPPAL

SEQ ID NO: 972433 - protein, 158 aa, Homo sapiens
TGVVAPHHVWRTPLVNFHTTIFVTQISPLLKYLPWCPQTHISRTCSTNYIFRHLHTNIVRSLTLVHLHAPSNNLSHTSTLETPLVTFPTVRHLNMHSSFSASSSPPMLYVTTCDSTNTIFLITKSSPFKHRKEQQSSEVYKLLSLFRHHAKKKYYHGT

SEQ ID NO: 972434 - protein, 115 aa, Homo sapiens
RLLRVVPECLCSGPPRLFVGEHWGGAPRGVVGCRLVFACASASGKRVLSDRVLAPSPFVVWLGVALALPRVQSAVMLASGERLLLVYGSPRRVCARGIDYRWVHDTVLLPPASPR

SEQ ID NO: 972435 - protein, 38 aa, Homo sapiens
MLFGFIKHIIFTTLLFTDNLLTIILSYKKSFFNQPSYT

SEQ ID NO: 972436 - protein, 106 aa, Homo sapiens
MYSPRFLCATITEHLLAAKTTDNVLDKRPSFECHPRGVWLNNGSVSNGLGAFLSHPPEQVLLEKVLVWFHPPKGFKDVSVNQAASTIAACFKNPWEGYESDVFMNS

SEQ ID NO: 972437 - protein, 96 aa, Homo sapiens
VWARGFGVGLRVLVFRVGFAPSVVGPIACVWLLRVALQGCLCCVFSGEYASPLGVGYKLVTFMGDFFPPSLPTPFEQSYINGVQITRCLKLCALEL

SEQ ID NO: 972438 - protein, 155 aa, Homo sapiens
VSSRGRARNPGVFWNSPQSTNAMVPVDNRVGTPPTGLCPKEVTVHFFFHASHSWVKKRSRPRCKQPRSVLQKQPNGTTGRGVAGGPHTKKTSCVAHAPRSYRKNCRGAKNQRGVLPKDNRVKNFGPIVQEPKQLWRLWAHRLHERTPAPLRVVLF

SEQ ID NO: 972439 - protein, 109 aa, Homo sapiens
YRSVCLAFRGCALDIWDCASSSFLASPVFRGWAPSLVRMLLCSGTPMSRSPLCVDPTTPEELPTSLALAGCILIPPAVAVNFGPVTACLPDGGVRSKSWHRCTRWNECR

SEQ ID NO: 972440 - protein, 275 aa, Homo sapiens
PLGAPPPLRAPLVNSRPPQSTEVLHGLSVAASWELSPPLSLCMNGCPSVFSPACFTGQFPPRVCLTALSSPGGAAHLRGGLHGIVLLDEIVGKATPLSSYVSWKHLFAPPGAGLPPFLVGTYDHTVGSRSSRDGPLALSLDHLSSPVPSLLSPPPRHQDRVPLGRLPRERESLRSPQADPAPLMTPESTRDQASYTPRKVFHTLCEIAPPPPLPAYFRFAFYAKPTVCSYAMLLDCTAMHAVTHDYLSADQPLGKCFITREDTQTHKKFYSVPKT

SEQ ID NO: 972441 - protein, 216 aa, Homo sapiens
PYPRSSGCLPGLQRVLPRRDVFHPSVTFGTLVYINPLRVFAPPLGPRRRPGCPALRPGCTVPSPPFPRVTPLLGPPTRVKTHELPVRVKAEDAAPLSCDTWVGGPPHVLEVPGGHHIGEGAFREDHQRAKASTRQHPPRQAQHQSAKKRNPTHITVGWIKPTRTGRKEHALSESSTREPTQFAQEDPPTEGLYTRMIIPEWHRRHPPGVKPRSGRA

SEQ ID NO: 972442 - protein, 180 aa, Homo sapiens
MSGSTEYSLSLSTHHAHKVFAGLEVKLYLSKVSNPPSPHSFFCVRTHCRVHLSYVGKEMSGHSLPLTHMLAGGRPLGDTTQMNASLLRVISRPQAQNLLYSTPRFRGKLILCLYVTPVCAYHAQGRGQPPLMRTCMWWVCCAPRRSTQAHILFGWGSHTAAGICFVIRQHKKIIAETSYS

SEQ ID NO: 972443 - protein, 130 aa, Homo sapiens
  misc_feature (48)..(48): Xaa can be any naturally occurring amino acid
MGSQFFHVSGAPPFFLLICYSRPPARTKIINCRKRTSLGDHTYTAVSXADSSFGGEFSTDKVFILKDVVKYDIQFAVVEVSLVEHAIIVRVCDENDWGPFIALLDIITSLRLGTHTTTTAINFLPTFTPP

SEQ ID NO: 972444 - protein, 216 aa, Homo sapiens
CRNKLLCVLWYMISWIPREYGNHRSSRGRHTQVICRDLDPPTVIHLYHSRGALPNSPRNLLLSLYICAAAHLVHHALKYTTLVLARQIYLPHRSTHILCGEHHHLHGIAEDISSLYNKLFVSVYNAIRYMSAAGGTLGSHPQQITSSPVLEQGTTPCGFSVNTSFQCRVCYKIGDDTPSHARIVYSLCSDDMTWAALYTSGQKFNHVPTQDTTNGR

SEQ ID NO: 972445 - protein, 249 aa, Homo sapiens
DESRGGAHHFGSKEQCVAMGLYRNRPAEDICGAPDERFGGGRPHASRLFVRTILSQYPPRAPLISAGAKIEPLDMLVAASLRTVADMRKRGVFLVYETKARSGGVYFQPPRGSGPKTGYRPRSAWDIERYLAQAFSQQQFPRTWSSSEAHAQSSRPRVVRRGASWKAPVAVSTSTAYPWAQTWCECTRVLPAALLRRLLREVPHSDGFDSNNCLLIEEAVHGWEITVSVAGKPVRVKHRGPKVFSRQHN

SEQ ID NO: 972446 - protein, 123 aa, Homo sapiens
HFYSLSLLFSTLFSPTSPLRRAQFSSYCTLPHSTHLLSPPRALSFSSLTIRSPHCAKASSHIETQHYTYMVSPLEVLFFFSKPRAPSSPSHHQRDLSLWVVEHGSPRLRVSRLVTITTPRVCC

SEQ ID NO: 972447 - protein, 98 aa, Homo sapiens
MLPSMTPPPTGDSIMNVFMGPPPVFPTKAPLRHSFILFFLQDVFPRLSQGSHPLPRPLRELSHKDAWRRTCEELSSAGSHPAPSFNICRCYSQTTMYQ

SEQ ID NO: 972448 - protein, 116 aa, Homo sapiens
MPVGKISCASLLPRSWVEPLVPFSKDRRLCPGPPQGAPVFLLVKNPSPAALGFARPPGCDNSQRGGSLVPPTVEAPQLLADCIVEDTCGSRQRGRHPPGGNLHILLDTLCKKFPFL

SEQ ID NO: 972449 - protein, 225 aa, Homo sapiens
MTDLKQRGGPPKPRLTDTGVFIPSHLSDCPNLEYNCPKISATTKRAPPRICPPGVTPKIQYCDPVLVYRIGDGYTPPNREKKYGGASKHAEQAYGYIFARRRKKAVILDRDKLSISISFREGNKPRYRATTCAMAFKPPIEQIIIMDICYSVVASCARDSYKIASRWGTPSVGKTTSAQPYRVTGRGTTHRARGKGRGRPHFRDMRYRLRAEKSTYNMTPRPKHR

SEQ ID NO: 972450 - protein, 201 aa, Homo sapiens
RVVRAMSGPFVVNAFPLRVTGAPEFRLLLPYGRFLFSPYKSWSSDSSVVAVTWPPYISGWCQHHLFRVFFLVAVSSGTHLSSGILAPLFPPAGLLKNGLPPLLEVASAHILPHLGNVPRPSPAASLEATHSGSPQAALTPREAVPPCLVHQKLRGKTSLPHMVLSDAPPVVLISDIMWYYSQDLLLWWVQHKTTRRYGTRN

SEQ ID NO: 972451 - protein, 110 aa, Homo sapiens
  misc_feature (110)..(110): Xaa can be any naturally occurring amino acid
VLPFRVIIDLNKASRACASKLRVFHTLVATPSHGPMGVGRNSWRNIILLCGRPTNRGSPARISVGVPHYRYLSALHRLIELVYAAIAPSLFFTVCAFMLLAHLHRMVSYX

SEQ ID NO: 972452 - protein, 126 aa, Homo sapiens
FGPRGPFCYSWLFLYTVCPRVFCTIIRGPSISPPWFVEVVLSQFLPPCRPQAVRVFIVGPPAPCFAQCAPNVGCLALPSLVGVSHLTHLVLVANRSVGPLQAPPFGGGQWNFAASLPSTFSLLFLY

SEQ ID NO: 972453 - protein, 274 aa, Homo sapiens
SHRGQRAMGIFGGNKGPHTEFQGQQLAAPRRVGPTPRNPEGGHTTIPVAAPQPIRASGPRGPHTKSPFIGGRHTNPGAQITPTEPCCAVRTRGPPKRTVPRTPVFGRRSAPPFPRHTPGGTLEDFVSFRHNSRRFHKRYAFHQLRRLACHSDWPLGTTPPEVPRGGCTPPHHCVPHFFPHGRTLVCETPICFGTIPPSSLSVFPPPSVRRRHLFLPPVLLYSGILPVPPRPQTHHHRVFPSPGHSRVPSASIQPTRCSITPKKIKAEFYRPTIN

SEQ ID NO: 972454 - protein, 117 aa, Homo sapiens
LQVRFPRSLSVGGRILYTGLPRVLACFHCGGFCTRALVVFSPRVFGGGSRPTKTRLFSVATHQLLVGATHIECCSLSVTDGSPRLAKQHVVGCRRRASGVGTFPSAYVGRQNSSPCK

SEQ ID NO: 972455 - protein, 289 aa, Homo sapiens
TTPDGLEKGPSSDGSQGRKTPGLRATYKGGRARRPSLYQARRVSLFDKPPRVTPKGAPHLLVAPGDHARSGRAHRKAHSATPTSTVVDHTHAALKTRHNKAGGIAQQRAQQGTRLGAKDNSRLTLGQPHQRCSPTLWEISTPHGAVYGAPPLRRSLQTPTALPLRARGPRLVGFEASSTSPCAPPSVMRGRRYVRIPSLRALSPLSWRQRITRGLPHVLRSSRSPWGSWQPHQAPAPSQGSGIPVVIALRPTRDAVCPVPTRRHRAPSSVVLAHVSPQRGTLRTVGPNH

SEQ ID NO: 972456 - protein, 67 aa, Homo sapiens
MVENTRYTSPTTGTGATRNADHPSGTPPWGTNEEAPTNPRTGAAHTAVATPPDNPAQQTFSPPPNMT

SEQ ID NO: 972457 - protein, 289 aa, Homo sapiens
LEPSHSAWVPKSPKGPHLPPLHGFTNQWLINPPLSKVKVIPLICKNALYSLKLNNNKGAFFLSRRTNPSPSSQAPSRPRVPLPCGRNKKAFSFRRLHFINRTLSPLVHHWSYTPTCARDCCSHKRWSSGNPLALRIETTTHSTRIALPPKRPHATFVLLSDRHTLEPAFGAPLFQSRTRPLDGWPSRCTPQHSISSKQMCVVTAPIRHNHHMPLRESRRSLDSRLNKDHALSTNTQGVGKKHPTRFIPLAKRYALVSGRHWVPEATRLYQHRSQGGPTPRTSLGKAHPH

SEQ ID NO: 972458 - protein, 296 aa, Homo sapiens
YVRDASRPPLAVVGSPAPKAAAQGSPPAIAQGGDYHRAKKTTGSSGALARRTSVTPAHIQRVGSATTKESNAVLERHTRTKLAHLSSRLLANLCVYQERARPPTRSGENHPTGADHTKSDLLEAHPKNPHQGAPTGVHYIHTEGRGRHSGAHQETCIITHPTGSIIKLRRPPAARRRPVVGAPPAHQSMTGRMMTPCSPGKITTPGKIRRGYIDLPKDDPLFLIDMTSTACLGAHQSQYCARSHPGSPRAVWWQASPLHVEEIPGAFEAMAHNSFWYPQHSLTVDHRADTGNDRPQ

SEQ ID NO: 972459 - protein, 169 aa, Homo sapiens
IEVLPYVDEKCVCPSNGACLFYALSRSGEIMARLPRYKAAWRSLPPERWSVITASAPHEIRGCTLQSPMESFTAICGVLNILCPALSRQNCAPVLGLAQAICLLTTKCFFRYTAAAPLPDTRAAPLSSLARHLFSTQVPGCAPPLLRTPMLITRRKQEYSTFCDRLPFV

SEQ ID NO: 972460 - protein, 173 aa, Homo sapiens
SLGSFFDTEPVEPPWGGAMRQPLSVVKRRPKCICVSHCGRGECVGGGRQHKMAGGGPSHPCGRTLALGAWPHTPTDEGGFRWTDALALLQLRDDCTHRPTSWDPGQSLYRHAWGDEKNSQCPCGGPRKKRSPGTGPKRNNKGACVGRKEHQTCDDQAAGGLNKKKVMMPPQQD

SEQ ID NO: 972461 - protein, 222 aa, Homo sapiens
YPVTGTNRAHGPGPQEGGPPPGFAKWGHTGLAAALSLSLTGSPERGTKPSRTGGPNSNNKDNVPPPGANGDGTPRRGFAAPGPVNTTPLLRIRTVRRWRNEGVVARPPRASGKNDVWRKLSTPSLRNMHWLAPPRDIKTRGKRVGMVSAEISYYKRWPTTPGVGCSLFAGGLVTEECENSDHAFERPRTLLSLRKYYMGARKPARGVNHALESGDPLPISPR

SEQ ID NO: 972462 - protein, 288 aa, Homo sapiens
TAKCVKNAAWGPREAPHGGSAGPSATGVVPGPPPGPLAPRVAPGWVFPPGPPLKQVDRRRAGQEHSDMSPLIGDKPRGGGPPKFHEQSPVAGPATHCGKEGGACRGNHTHVVRWEASFFTAVTTPGVCGATKQVSGRIVGSHAPQSRRGSVTQLSTTRHDTQKGRSWAPKAHRRHHTGSRSLALGSSQQRVTGDSSRPPLDLARPAPPQYTQTGGQHNPLLPKKPRMYSQRAPSYNAVCGQTCRGVQEKTAQQYCFTPRPETGKRNILLGATPPEVSLYRRAASSLLA

SEQ ID NO: 972463 - protein, 117 aa, Homo sapiens
MRYLFLAFVIKGCEPAHSTVPNGGIYTRALATSFCQCQASKNVGQTLYYNVPTFIQHLPNSVSSAYFPPSVQQSKISGVFSDNVCPKSRDVRGESLPIPFLQGSRTLPFKVRPYPQL

SEQ ID NO: 972464 - protein, 250 aa, Homo sapiens
IQRRHKGKEKGRGEMRDRRLASPPRSRGETGEGVPPPIALEILWVEPPPHTWWIRRARGANTHTVWVVELFSRSDSARPAGADNPRSGATKFEHNTHMPLRGFLPESRGVSHNEESFQWVSLIGSTTSYRAPKKSSERGYRRIVFSLMSARPAPPSWYQLRGKHGLSENSWLFRTMGDINGRRSCKTTGFSTKKQTSLGDTSRKWQERYKFLSWPHILSFFNLGAGHDLNAIDIRSNPEQFGCKHGRHHN

SEQ ID NO: 972465 - protein, 200 aa, Homo sapiens
SVALYQFPSVSHIPRFRPSPGPFFPRPMSHSTCSQNNRNILPPTPGAPTSVKWRPLYPPRFYPPFITNRYLPPQSCLSSPTLWLKTWRSVYIMVPRIPRGGTTHHQGVPPHEHGGFFEPHGPVSRRLATLDIKGHSSPCAQAPTGGILAWETTNRRAHSLPLSVGVFHPSVRGAHISLQPVCLPTRWCVFVENNEQTDKD

SEQ ID NO: 972466 - protein, 135 aa, Homo sapiens
MSCFTIKKTVLLLVVLCSKASPLLFCSPTTIKFSVISSSCSAYFAPCAVIFNKKNNVTPPPPYIRMYIIPLFFKKIFFFLLLPALACPISKIFYLIFISSAYIYHLPTASCLPSRTAPSRLFVIAEKRRHLLFKS

SEQ ID NO: 972467 - protein, 88 aa, Homo sapiens
GLGPTGKKECGSSTNTSGSKWTQQGPIDFPVIKGPQETRGDILKRTVIHEQSVNKSSCEETPTGSPPPQECHTSRSPHTENLGERTPP

SEQ ID NO: 972468 - protein, 183 aa, Homo sapiens
MAAAKLVVDTILLPSCPTAQEAVRSEDTPALAGPILVCYYKVLLFRLALREWRQPHSRLAEQISAGVLLPHVLWAGLTKNKVVLVSLNVHARVTKKDKVDKGTVHKKQNSQMARRAICATTPPTTGRADTAVVCIHDWTAATPLGAVGAARQTASSRGPRAEQAAPAPTLGNPPFGEKNHIER

SEQ ID NO: 972469 - protein, 336 aa, Homo sapiens
RQIAFLRSCGFTSDVVQPRSGPGTQGDPLRGVLFLRSWVSPLLMPGFCSARVLFPEHVPRAGIAFLSVLVLPVFSVPARLCATGSFARDLANLCAPPRNPAVWGGRSHDDPHSAGRNPQNSLPPGPPHHMKQVVATSRTPAFFLWVLPQTPVIYGSLCQNIGLMGFPIPPPFLPLLGMSFCVVFKTNTDAALMNSRVRGMARFLVGMYFRRPALGWHRWEIPAPPTTRSLCGRVVPADNPTHVAIFLWGDNLRSSLCKALYYFSVQNLPGMAPPKKYSRACSKRGVVDRANKDGTNDLSGNSSGCFSYRKEIFFTKSPPTNPSSNPGKQDPFPPHN

SEQ ID NO: 972470 - protein, 211 aa, Homo sapiens
HSLRVLFSRAPYDFRPSVQCGEPPFFPRTLSSRRHSPPGVSLRLFFRRALLNHHVMGRPAVFGLPRGLLLLPPPSYTCNEGAEYAPPGPSLSIPPPPVALVGINTAAPCPFLRDFFTAPRGVYFPPPRTPPPPFLGTVPSRGSTPPLSVTREWKIRRVSYPHKQMWGRQPPRRHSSPRTAVGFALRQRLERGGPYFLFEWASSPPHTPGLV

SEQ ID NO: 972471 - protein, 83 aa, Homo sapiens
IPFAPHPQPRKIIVADSSFVGEHHPPAVLCGRLEKISFAPPYMPPPPGKKDVFERRPPSPRNSDINMGGGNTPRESVLYCRRT

SEQ ID NO: 972472 - protein, 186 aa, Homo sapiens
MPALSLATCAACTASPESTHVPAGGEAQCDRYCITQNTQGLESPPVLPPRGSVNDKKAAPSMARGVCPPTVVISRRELGETPATAACIKKKCGVSPSPRAHKPPSGVVEMTSRWRPFSPLPPCPAPLSHTELAGVRSCPYKEPFSSPIWGVFLRKPCGSALPCSRHPPLFLLVEEFPPYIVEIEGD

SEQ ID NO: 972473 - protein, 120 aa, Homo sapiens
MLIIYIGARYLSAIYLLSGTLEDGTFVCGSTHTYVQGHILFVYYCGNTRVVAPTHKEGGYRDVGVAAHHHAVVSTLTPRGTLACRPLVLQKRGFLLVQPLGELDGCRRTYVLPDPRQTMS

SEQ ID NO: 972474 - protein, 296 aa, Homo sapiens
PSVGRRQFLCGPYSFESVGYLPIVPSRGGDHFGTAPPAVRRGTTWRRGLLGNSGSALSVRIFPGSPRTVYSWVRAATPVPSGGPAPGTRISWGRPSPCSGHRLVWPGGPTDRPSWCTTLCRPWGFNKTTWDDFLEHGIVVHRRIASAVMCPGCPAHIAPPPRQCALLKSFWAPSVGGILPWPLVLQPHATPNGGGPRRPQLFLAQSFGARGYDPPERASPGLVWLPDGLPPAPTGATEVFPPSAASVPLVARLPSFGILRPLRGRVSAARPGYPPRLFPGGSPTGKRFSGVAPKHN

SEQ ID NO: 972475 - protein, 71 aa, Homo sapiens
MLIGVTAKVGPRTLCRLYGNALTLVRDYPMDNHIEDPIIGGIIPKKRNNHLSGKLRVKKAKVKTQREDGAP

SEQ ID NO: 972476 - protein, 133 aa, Homo sapiens
SGSKEQREAETKTFHSRGRAGRHHTVHTGPIAPTRAGPPKEAPRPRIDAAQKVAAQACYTKRVVACPPLHGGKKQNRPCNNIQRRHATAGSPTRPAGLVESGMMVSTPPVLARTTQPRADGASGKTNAPPTNT

SEQ ID NO: 972477 - protein, 282 aa, Homo sapiens
  misc_feature (46)..(46): Xaa can be any naturally occurring amino acid
LLLAFAVSARCMVVSKCRYGVVRKFCLAGVFLPGWCPDAVPGVACXNGLCVAFSPRLRVARGRSLIGLGVPRGPLRFFPRGGTIGPGFPRGSKVISWISDASSGGPSPVGCAFVLFWNLGVPSFVFVTRPRGAHFGASGVCLSALWQSGRTIAQPVVEGVSPPGSRMLLPPDRAPYLPLLGGAAHSRCCPLYCPGRSSSDRTVRASPQIVAILPRLLSARLRSLYRLFYVRPNASFRRIPRVSPRVSLGVIPIALIGSTHSGFSFTSGGGPMFTFVVDTRNR

SEQ ID NO: 972478 - protein, 225 aa, Homo sapiens
MVLGQSENRKATGRVHLIFDRFPPMGPLKPRCQDDPDDQKRRPVVVGIGENPAQVTPPRCGGRRSVTQQFSHEVMGSLHSLRVVRPKPTMTVWDKLIVVGEIYLHYVGWTALQVYDSFLRYLPHAVVNPVTDLLCVVVPYHAAVAASEEKGCQQQAWRRRFPAGVNLCREDSEKWAADTVSPADASSENAGGDVPDSPAPPGAVGRGRPFPCFEPQKENLGPRHK

SEQ ID NO: 972479 - protein, 149 aa, Homo sapiens
MIGQISELRRYSASTVQHRALVGSLNPEQNMASLEMERSIAFYTRTLPCCVVMICCTPRINKMSSTHPHGLSSLGQAGTFGGRIKALPLSTRSYSSVPVPSFTKDRLKQSRAYYAVKFHSANREPGWEILLKGRQSKAVVVPSLRGSWP

SEQ ID NO: 972480 - protein, 37 aa, Homo sapiens
MRVFKTRTSFGDEDHHRDPQIVPAKVRGAPKKTTNKT

SEQ ID NO: 972481 - protein, 32 aa, Homo sapiens
SSNPRNDGIACKSLKEFNEILADIDFSTATIE

SEQ ID NO: 972482 - protein, 112 aa, Homo sapiens
MKWILHKENRIVLMGEALIECRLELDSIREMISPRGLVNLGRSLGLSGFHTWTSETTTRMFGSIVLSQTRGGICGGDTRLIHSYSVGVRTDVTLACVFGPKNRITAVVGPTK

SEQ ID NO: 972483 - protein, 101 aa, Homo sapiens
ARSRRLCGAVPMHIGDRDIDALATARALLYDAREVLAGTSTDADRTDNFDCSTCRAPARIATVVAVPLPILSFFRRMLRRHVCLCPRPALLKQKSNPTATR

SEQ ID NO: 972484 - protein, 82 aa, Homo sapiens
MASEDELLEQVLSSMKEEAKVGIIGKIHTPMEYKGELVSYDMRLRRKLDLFAKREYHVKSLSWGYDSGQQAETVVIIREQTE

SEQ ID NO: 972485 - protein, 111 aa, Homo sapiens
MRLFTHARTHHVCCSRATGRVVLTTHTHRMKNVLGVGRHANRPRVSMSVYNSKGVAFIVGERVFFSSYKNQLCPSSRSVLSQRVIRQTQHRGVVESTPSRGHVRRRKELFQ

SEQ ID NO: 972486 - protein, 189 aa, Homo sapiens
MPSIKLRDVSDGMRYLKWMCEHCQHRLCAPIKHAMWTDLGMDDEGDDDPVPLSNVNAAILKKVIQWCTHHKDEPPPPEDDENREKRRDDIPVGTKKFLKVDQRNTVFELQFWLNSNLDIKGLLECYMQDGCNMIKGKTPEEIRKTSDIKNELTGRGGSPGTPERNQWCDEQVTWLWLDTGNHWYGWSPY

SEQ ID NO: 972487 - protein, 79 aa, Homo sapiens
MIAGPAPQQVCPREDLRRFPEHVLPQRSTNSFSSAFPRAGHRALVARRGGDRGNYYSQPNRGVSNVHRTRICKRRRNKT

SEQ ID NO: 972488 - protein, 215 aa, Homo sapiens
AWTRSWIICALRNFNTRSLTRSASRQPLLATPALAKPSRATALLVLLPGRNLAALLASFLHPPSDPGFSTQALNKSADTTGSLDDSLYTPPYKLLLTSCLAPEARSLALAANFSSLTQLGHLPSFTHHDETYTTTTTTTRTTPKGPRRPSTHTQPPYTFPKISLHPSFLTSTQQHAYNYNSLTASLYDPRVSLLSSHSPATLTPTHHVLYNFAYT

SEQ ID NO: 972489 - protein, 130 aa, Homo sapiens
MRLHGYIPPAHISATICYFSLNLPPCIVLIVEFIKTPPSPVLHPRVNNPNINPPEFPPSPQNLEATLNPPEQVSCRTHSSCAYGVLFLPPRLSTRGSEMEWGAPLLYHNTSPLLWTREYPSEHPQTLLAH

SEQ ID NO: 972490 - protein, 297 aa, Homo sapiens
PKRKSPGPWAKKWEPARGENVSQPAWGLPDARGCVPDAPPLAALQTPRGCGDSKQSNRRGTNSWAFFPRRTTEGRRMWYNDEAPSQGKKLAKVDREECTGPPPKAPHVITRAPQSEGASPKIAPQRGECQERWAHTEAYHPDEIAAHEATSVGVATKPLRATRSSRTPKAALEEAAALEQKVAANKCPEYSSEPRQTDILMGEGTRRSHLHRSSRRGRDHSPPAEERRSARTAHTDTTGAPEEQRDSVRNYQKKDHNALIEKTKKTNIPQRKPPPPGAKEEPTGPKRAKTAKAPPTK

SEQ ID NO: 972491 - protein, 196 aa, Homo sapiens
MGKAPQWGNSSDLGALLAAMMRASPCCTGPTTGGGPLPPVMVLFSPHVVPTRIRGFVPPPACEGRDKVLCIAAGVSLGSLGPSLRTRGILFPCDHWYDEHPPVICHRGGVHRTSQRDLLGASHTYEYRAFLTHVRESPSVLVTKGRESLTHSAFPPYEGPTGYPCRALVETGPISLIFPREAGLIPMIIGTPKEHN

SEQ ID NO: 972492 - protein, 107 aa, Homo sapiens
  misc_feature (30)..(30): Xaa can be any naturally occurring amino acid
MHLTPRPFDFTLDATYFEYQEKQLKIFPPXNYRSDPIENTHCWRAWAPKNIPTTQPGGGGPRGSATLASFPKNSGHDRVVSPKKHAGHRFYNPRGPGHRLPRAHEPL

SEQ ID NO: 972493 - protein, 102 aa, Homo sapiens
MFGSSRGGPTIGGATLYITKPHGLVVCGKNKVYPENRGDHPGPGRYKILRNCREEELHLYGGVKKKVREHQNTRRHTTGDGTTPTLLNLCETGGPPKATNKM

SEQ ID NO: 972494 - protein, 378 aa, Homo sapiens
  misc_feature (12)..(12): Xaa can be any naturally occurring amino acid
SGRRHDRLPISXPLTPDRTRLRPVIPVYVCGDTGQEHEARSWRHVCIMELPQLCQGESAQTRVFDIRRLYYERYSYDHVPLECRSVAVFAIDSMHRLPLMRSCEGTGSMRFERWQLEMSSSGAKAVAQGEDPVGWRLTDSEFRFHCSLAVALDGHRFMTLTVDPKRKYCCKTFTLVHLEHQSTGDLWHKLCSNLMDWGASRGNTTRRVGQCVKRGLHKGSRCAGIPLHTTGHNMLDFTKLRSLVGFPFLGFPVHYRDPTPEINRGNAVLSGKVVTGLGPREAHKRYQGDAVETPATKSKRKAGTENNGVATRGAPVNATDRRKVASQERATTVLTNNARCSSHTNQGEKRGGKDRTSRYTMKDNAKRLSETDEQHDRW

SEQ ID NO: 972495 - protein, 77 aa, Homo sapiens
LILRDKPNGSWGGNTVSAGIYSAQFGVPPGSGVFPARPGTQRVFDVNRAELRQSGCKLSGLLTAKIMIHRVLLQTIV

SEQ ID NO: 972496 - protein, 150 aa, Homo sapiens
IVVCRHVPVCMKLVCETVSAVCEQQLLTSPCLLSAVSPRSSLSDSIGFLRPPAFLCHCSYDVAAARARSNCGWGKADHKRQISLAVVVSRGNNIVLSLAGDDHEQNARRYGKIASYQGYCLACPHRVGTGLLRTISRPPSRTVSGALSFY

SEQ ID NO: 972497 - protein, 99 aa, Homo sapiens
MVRECRASNTSCGVSTHTEVCSINICCFLTTGTCTAISVVCSTRNISRLATRPGEVILAPRIAPVRENPGCNTFVGGVVVPQLEIPPPFFCGGYFLPHK

SEQ ID NO: 972498 - protein, 283 aa, Homo sapiens
MLTAPHQSGERIVSDAGGALSASGVRAAQTLTDEELVTGRGGDRLPCNWRPPTNICLDRLENWITSLSENLKLLDPRTKLRNCEELQAKSSPTKGTPLYSTGRCWRRAIVELCRNLMTSASGVERRALMPECIPDRRLVIKTGVQFTTKVRWLVKFPEENYQVMIKVWIERTLGTWQLSEIPEINMLGTNDEQCEPWENPQTELSGEWKLDLRSEMCDWGPSQWRVLIGTTTWPSLGTRVTRQMPKTPAMCPLHEPGALEGQQRFPNRASTRGPKLRKGFRAT

SEQ ID NO: 972499 - protein, 141 aa, Homo sapiens
  misc_feature (23)..(23): Xaa can be any naturally occurring amino acid
PCVIGVGSCTRVVIRKYELGSGXGEPATGYRPTGTVLAKSRNLYSCDAPPVYWGPTCARRLVCEGRTQRRAVSPEAGLRYYVVGGPKVNQGHLGSQKPITAVNLAPRCSYYNNAGVCGTKSLKQGVTRRPDFGLFNYNGVV

SEQ ID NO: 972500 - protein, 201 aa, Homo sapiens
WFRVPVVVYRATLVFHRAPCVFIPPSSWALVAFEPDGRAAMFCCVRPAPKGLLLHRLLVVGSALAGFVVHVAGVFVPSLAPQGFLPQLPYACWVEPPTAVVVIPSVRVTLRLCCLRSPTALFAIGLDQSSGFPPVAPQVEMPNQCYPSGGVVPPHRGRAWIYIPGFQTVEFRPRVIAIIIRETSDSRRTTARQYYDPALLG

SEQ ID NO: 972501 - protein, 42 aa, Homo sapiens
MPHDRRRMRDCGSRPPRADGLLTEELNTSIAPHVSRHKTDNH

SEQ ID NO: 972502 - protein, 249 aa, Homo sapiens
  misc_feature (15)..(15): Xaa can be any naturally occurring amino acid
LSITLCPAAVTLMKXPTVSASHNRKLFLAGSTLRGSSVINNWLSTQLFLWRKLVSVEPSRHSLFTCGHRTNGKDCLKTKHSTYPRLGSSGRPHKCTTHITRRGERSQYIDEEPHHVLSAAPPSKKKQGPKNGPPRPYMTSRPVVGNRSRAYTRVPKHMVGTNKSVRPRRARFRREQASPGMFRALLQFSRAKCFCGKKLWVSRGRINKTGKRSQLRRFVLTLLSRSDRLLAESLVLRMVAPINEFSRPH

SEQ ID NO: 972503 - protein, 84 aa, Homo sapiens
MAVYGGVRCEAAGFVALLRVNDCYTTRWRVGVKRSHPRMLYRVGGPHNKDKKALQAVPLMCSVTHFFAVSPNSAAGGFLAAQHG

SEQ ID NO: 972504 - protein, 95 aa, Homo sapiens
MSPASASRDSGDGGGPVTTRGHNFGGIRYEHGVHRVGQEGLDLLDLVIRPGRPPKVRGYGREPPTGPDSRFKNIPTFVGKGRMCPPLTTRFVPVG

SEQ ID NO: 972505 - protein, 284 aa, Homo sapiens
VVSDNVIFVLAGYVPPPFLTVRCIICMAPALLFPDVELSAPVCKVGQPPCVPGVSAAGVSKVLCATRDRMGTRVCFFVIRFIRSTCLYVAARSSRRLDTLHGYADVFGLPSVAISTRVDTRDGVDTPPTVMVLAPFPRSRSALTVKWEAPSLRPPNYDGQFVVTPTRGVALTLFHENWFSLSLPVPLIGRCLNICREPTLLAGLLSTPRLAGYMRCSTLSRRCQPAFICSNCPRHSKISNEFPRGYGYNVLIDGKPPRYNSFPRFGAPTLFVHPEERLHDLVPP

SEQ ID NO: 972506 - protein, 192 aa, Homo sapiens
MDSTTSVVRSREDRDAPALREHTLIFCCVTKQEKGRTIEIKMSVWGAPAKHILFSVRRYITGGAYFISCYRKGVMGQIMCSRLVDNALWVHASPLRTRASNTDVPPLFVCLKRGVLGTTGEQLLWEYFVGASLRFLFIRHQYSESDERKSPGDHVCLTQCFLMCAGSLVAYSPLVEQHIQEVAPPDHNKCPN

SEQ ID NO: 972507 - protein, 62 aa, Homo sapiens
MVNHESHKAAGRRMKKVSARAHTERAPSVWRGISYTGRPMFSVSNLKVFFEDDGPLAPQMSE

SEQ ID NO: 972508 - protein, 276 aa, Homo sapiens
VRFPPPGSLFWVGGPSHGLAARTKRCGLQSRRGGLKYPPALGGVVSPHCSLRAYYLNARDWCRAARITRRGCIYRCDAPRVGALSPTHDLFDIKGSTLNAPMRHPRIYMSGRPTLCVIVPRPDMYTRGVFPRIGLRLPLYANRHSPRLSPLRALFCPAYHALVSRRRDNPFRVSQHIMSSVGRTPHGGSPRVGYNSAIHVVGRAQLMGPSVLGDAPPALGNVPFYHWPTEHRWCGYGRSPPPDNLATCVSKKMGVANYSDMAPRTLLGSGVFQPTD

SEQ ID NO: 972509 - protein, 191 aa, Homo sapiens
MSARRQKHQVARGPYSPQDNTPSQGGVAPLRGTPPQGPNRPYPGETIPRAAKKIAQAKGQHTVVRPPTVLKGCGTRHNDVGATAQEGLLADPRKEFSTDDDNLGNPPRAAGAQAHQRGQQDILRAKPSGRPYTAKYDIPPGTPNIGPRFGGNTVREHVSAAWSAKSGQEITPAVKSRGGGERERDRHGKNT

SEQ ID NO: 972510 - protein, 110 aa, Homo sapiens
MSLPITSSRKHASYDDSPTPYVLLHPISLLPAAPPSYTTGVRNNTRRSLCRHELCVYQGAPYSNSVRPCQAPAFTDATQGLVADPPPLRRKGRQFCFGGPTLPIIMVVTE

SEQ ID NO: 972511 - protein, 144 aa, Homo sapiens
PIIQQAQKVVGWRHTTPSGCPTLLRWEAPRVCLVKPFVRYLIECGPQDYPDVSAKKRRLFGSRQTMALVLPREDSPTAKQIERLSRLVPPRCVNIQLFELAPYETDKTCDHTSSLVGYAEIIRVLRSPHASQWGTSKSVPLVFE

SEQ ID NO: 972512 - protein, 129 aa, Homo sapiens
MDHPRGERRTAIANRKGRIVFAHEIRAPHRVLSAVWGSVGCGEGHSHGGRQVATLRGPLPVCEGRSRPDHPMAEPRHPPTSTQGTLNVPPPRRLRGVYGNMATRQRREAPVREQQQGLRKASATTAETR

SEQ ID NO: 972513 - protein, 303 aa, Homo sapiens
VGPRPRKGRLVSLMEFFAPAKRFIPIAALDRAAHCSRHGLLLLYHTTAQGARYYSSPQARVVRSHNELPRGPPIYGAAPCSLHVPPGDVNAVAGLALDLLASHRETLFQDGGATRPLRKAQASLKSFTNTPRCTHGTRKTTLSCTGVLRREPPHYTHTQWVPRAGSRPPHTHIRGGTHAEVVETAARTRLVLNSAPPPPGRSRVNPARTLCACSVHTRADCVSEGALLSAEHSDEPTCRRAGDERRDSMTSQGVLRTPKPLNEQDGAVGTRGRPQTHPPEQFAPRARHTTLGQPLGHPSPHNR

SEQ ID NO: 972514 - protein, 196 aa, Homo sapiens
MPGALAQSDYGWAPDGTSKACVIVPGLPPRPGKNQDVTNASLLRHVKLPNDVFCLWAGSLQTCTVLDIEPTTLEYMFWREWSHIFTLGDRKHRGWLTEIGLNPPSAPARYNRSHCEAGTWSLHEDHSEQCRAEEPSMVLLNRYLSPPEKAHPATHDVYGLQRDDLETGDARCEAVGRKEITYGSTRGGVNSRPNMT

SEQ ID NO: 972515 - protein, 308 aa, Homo sapiens
EGRAPWKQGPGPHTASPKWRGATCATGAAAARQWYPEEPAFLPTRLRRALDRHTRTGGPTKPRSTGTQGVENLRRSRHDRSAEMYAMRSTRTSGSPEIKPSPDGGVSTSLAGKMGIQPASPPGYTAPQDTPRDGMESKQRDQGPQVRTAPQGAQVPAPRQSALNTKNSWGDRRTFTARLVGRTTAAPHFHAEGENNIGRQSCVSRAGSKCPPEMSLSRQAGSVHREGSPRYRVSKHAGVDMTRPATLLKEGCSSIPHGNYGGYQGGSQRGINIRCGRPRKRRSSCHPEPETIVTLLIVEKLGKKNLHN

SEQ ID NO: 972516 - protein, 55 aa, Homo sapiens
MRSQAIGNVFPAWHARGIPLETEEFQGDHEVTHTRRFKKIDFCPLSILTQTLRNI

SEQ ID NO: 972517 - protein, 73 aa, Homo sapiens
MHARAGARKDSSIIGECGAKPPATRRGPLPPPQTGKKGAGPRRRRATSRDERAPPPPPAGFNEERNIPVSPRR

SEQ ID NO: 972518 - protein, 107 aa, Homo sapiens
MPNPWRNSSSGGLILHTAYRSPRRVHEWPRPPRPWQAGNKRRVEPPNIEQTESERCAQQRDHQGCYTPRPPRRHRWRKRPDADRRGYVTGATRRRHLFSEAPRRNPG

SEQ ID NO: 972519 - protein, 73 aa, Homo sapiens
MMTPPLMWALYHQILFFKRDLLFPTRVYSRHTVRSPHRFPHPSIMRSFDNQGSLHGPGPNKVTDNYRPSNVRK

SEQ ID NO: 972520 - protein, 172 aa, Homo sapiens
MGKEEEVKILEYDYESCPVFLTVWNNQFELMCMSVVIEMKALVCKVEVRFTFGVFEIEKRSSIDVGCNHLWNWVIVGAKGEHSCTRYRGTGRDPPQSGYRGRGAISAERTAATRATPSEGNESTQWGSPKTYDERARKRAEHIVCLQQCTPTRLHKTTTEALSAAFSSPYTS

SEQ ID NO: 972521 - protein, 109 aa, Homo sapiens
ELWDTTFGSSFFQLYSPPPYLLQGVPALAFPDLAPLSPETYCWEHPAAIFPNLLAQTVSSKFLSGTNNVTQKSCPDLRAQNRGNESVGEQEIPMVNTLVSPRHSSDYIL

SEQ ID NO: 972522 - protein, 296 aa, Homo sapiens
QCEWLLEHPLEYTWAALAQGLPGAMSPGTHSPSSRGGLPFHRWCSTKYLVPRCVPQGPPASLWPKVFLIGRAPVGGPSLVWRVTDHRPPLRLECGTTLVFTDAPNIRGVSGSAPPQMARGTTRPPCRGLHAPRPSFSSGKLAARACFRPHKFLGVGGKTRVEPPSAPSRKGVTFSTAAARPTNRPCAQEATDPARAIVMSGCLAQRRPGASKCLVYPAHAVIRAWLFTNASRPTQHGDSPLSPIPITEGPSPPSGEVHQFGLAHGRSFCTSETKLVLVSDSFWKHPTYPLFKGPPQ

SEQ ID NO: 972523 - protein, 237 aa, Homo sapiens
ANMVKPRLYQKKKYNRFSQAWWQAPVVPSGWDYRCVPPCLTNFFGWLVWCFIDAVLKTSRGQHSETRGLYQKKKKRTCVPGGQVFFLGKVPWEGIPVNNLTLKLAGKTNSSGQRGEGSDDGPVIIPLTCKSLVLEPFLVHFIYKNTYWELRRVEKCRLYAGSIKSVKTLAGVHHKTCPKVKGPLQEGVSKNTGSGSWELRNWFQTALIGPSGPSPPLDPPRDANEKEHPLCRRTRRK

SEQ ID NO: 972524 - protein, 321 aa, Homo sapiens
  misc_feature (10)..(10): Xaa can be any naturally occurring amino acid
RRGGERKQQXVCPNIALGDWHMSISDYSDHTEDAAVQNAGRPAHVVGQDIKWDKKRGGKESAPHAAQVVALLKPPADCSQQRSARERSLWPPPPLGPRPWRTSRPGRKTARPTRSGFGKSAKRPANTRGVSQPAVETNKWAALGNTQYQVAATRSPVTTQANTASDGIVKEPMTRSEEEMFEQPIMGFNTKTPAAHRFTPNIPASGNLRITQGTPPPTRIAVCSTRPVLDKHRQHRVTGRHPRKHAGSGEDELKETPGGDKTGARGIKDRSPLTSPGRPPRARLSPLRLCPAGKSKEALQRPVLMSMRTSALRPVPEDRKV

SEQ ID NO: 972525 - protein, 268 aa, Homo sapiens
MREKPKILWQINKQNPGNGAFDERNEGGEPASTTDDSGSAPNVPRRVVGSKKRPRTRGQLSEHGLTGGTEKKTGANGVENQGNTQAVAFPGGNTINTRPGMSLEDNMKADAGKAQKAGEPPSIVEERPIRREGQNILRAPSSRRRRLVRYTRVPAAPPQRGGPSPLQRNSVESGGQHKRTVTVERPRGRQPPREQGWNHRRETSRRPPGIHPPPGRRTPPRVPAGNRGGTKATIFELGAQVKKTPPMLANSRAAGPKNKTPANSSHMT

SEQ ID NO: 972526 - protein, 278 aa, Homo sapiens
MDTISNESLAEVALMSHSKGTDPAKDCEIDRSVVSWEFSRGRDLTRINVMDPGTRLDIELKITPHICLTDMYECTGSIAGTIMECERSPGIAQGTRVTDARARCPPWYERDSLLVEGDIRQLRVYHILGVDIPGVSNAAGGLNSHVLTVGGYHADRGPYQLPALSGRNLSESAHDARFGDRSLTEVWVPKHGYAGKGPLSAGKRHGATSVPDGRPMLKRANHYKGDKSNSATDATVYKAQNAYPSTTDDYHSKIMDTEHTNKKRLETRDFTLSVTRAQ

SEQ ID NO: 972527 - protein, 269 aa, Homo sapiens
GPEKLWVAVKRRHPMGRPTHTSGQYRGRTSLLHSEGQAWDAAPHVVKGELKEKKYVCRRTPVSAARTGGGATAPAVRDIYARGAGFVQPHQPGMTVNCVRRNKPPHMESDVYMRQTHTDEFLHTYPGETPPPCSQMGGRHTHICIDIEDRMGACRHTRMCSCVRLHFTLRVRRKHVRTGKSPARGIIYIMYVRSHSCYVGYIWVPRRLLCIDATFMMVLPMRFLMMLPCRAHASCGRQSMNVAKTPASGFSGRHDGDMAETRRQMVRLS

SEQ ID NO: 972528 - protein, 225 aa, Homo sapiens
MCHTRAPCGEHTCVADNTSSVYKDHRASYVIQFSYATEWLVGNTKYTVIVSYNYEGSSPYRVDDPTPCGENKDAGPLSARVIFACCRTTHRGLVGEGHHFFFFPRRHAHPPGGGHYIMSLLPSQELSYVFRSVLSSLGEKLVAMGFLTWRGSFNHSGDPQRLLCPRKRPPSGDITLGVSSRFLYMGEHYDDSCSGAFFVSDERCGVDPPCNQVSKIFIIHPGQEY

SEQ ID NO: 972529 - protein, 104 aa, Homo sapiens
RYVGEDQPERDRSDEVAGSIVLSVVSVSVQIRSVIGQYVLIVSDLPMVCVLRHKRNADTSCTSRFETIKDEQANDDDCYDEEIVAYVITNYPQGSEQSGTNNYP

SEQ ID NO: 972530 - protein, 113 aa, Homo sapiens
MMRRFGITTCGRPVACRRCSKVTRMACNVLVAWRYVSQSSRLNPPMLTVTIRPQQLNIREQYRSVAWNYSRVACQRHKWACTSILASGLSFFHYLNTGDESNIYGLSFSTQNR

SEQ ID NO: 972531 - protein, 140 aa, Homo sapiens
PSLLEGPKFVCRSLEVPVSHQANWIVFSGRVPRLARYTLSLRPDRQYVCSEASDEVDAHGCCPGVIVSYHKLSEGAQRKLRNRGCCRDNPSLAPLRTRSVHTMDKPRALYQFFAIGRRYMCVCNGEKSFIMPSTRYFRIV

SEQ ID NO: 972532 - protein, 324 aa, Homo sapiens
LGYYDEQMSFRVAVAVSAFPPFFTVTNRNVDTREKQLAGLVLAGPVLLPSCTNSPAVTGDGSRHGEPGSSTTSKLQRIAYLWMSIQIDYEELREEREPRVVGVRASPASWIMWRRPGRTGGNSVYQVGFQEWAEPTPIFTLYERTEGGMTQRMTEFHGLDEASLLRALTGPTDEHKARSSLSRDGRGVKSGYAGSLVSRWTCVTFTTFSGGFAHGDRPVVPRERSGSLRCKAPGRRGDRGWFPPGCPLGGAGERVYCAPSRQRQYEGTHQQHVYHGSYKNAGKFHPESRSNTRDTALVGSSHSCSPSPRTARANNSHSTAPKRN

SEQ ID NO: 972533 - protein, 190 aa, Homo sapiens
  misc_feature (93)..(93): Xaa can be any naturally occurring amino acid
MGSIWATLALATARITGFSLLWPPPPGPIGAIPQAPRDPHAHKAIPLLAEPFVTESPPPDPAEVPRSSSPVQLQKPQGSPSTDISRTNEVTLXVTTIRGQKELSPILANSFKRFLRQLARGVVLWLRTPSSVSMHLFCAPSGVCPPQINQTWVRGSLKKEKYTAAIFNLPLSRLPQAMIATRATTSYGYH

SEQ ID NO: 972534 - protein, 242 aa, Homo sapiens
MRATGGAQIPGMCDFPMKYIHPTGTLMGFCTLMIVSTYTPGSKTTGIHPGSYDIATHFILGTPNGGPHKWSDTQYGGGQTLQEVCPPKAGGDTGGPGRHGVTEYPGNLGHSGRLGGASDNSPPQCHSLPRINPHHYKLTPLLRSHVYYFLFVYVYLSLAPSIDRRKAKTRPSDETNDNNAQEDQATEQTTNIKPRNKQHKSNNPKNNEPQKRADRHQQNTHDHQQKHKTEAEEHTTQTTTTR

SEQ ID NO: 972535 - protein, 244 aa, Homo sapiens
PCDAPRCVPPGVPAARGVGAPGQDRQLRREEEAPLLPLSPPSAGGGENILWRPLSSGGAPTKSGKLKSALTPLGGRRQRGVVARRHASACGGLPQQILVCVRSLRDIPVQTPGARGAIYPCGEGPPAFALWVKLSRRRVSSRRRWPTVVCTRHAVLRTGEPCPYVHQIHASPCTASDTPRSGARGTLVLCIENGRHRKWPHAEEALAAPRSPRPDAPPRPLYKPPSYYSPPRVTNRRRRLAHKT

SEQ ID NO: 972536 - protein, 257 aa, Homo sapiens
  misc_feature (161)..(161): Xaa can be any naturally occurring amino acid
MEQRLQQKESATKGRVLEKAVGTPAGPDPPGVGDPHHVGGVKPPPRVWERQQRVARDKQAYTGREERHHQHRESHSGEGAGSIFPTKIIEKRGRALPIRCNKRAGGNTTHHSARATMGTEDRLDYVVTDPPSFFLCVVFVFVCLRLPCRLSRKDTEHKQRXAGSEQNRSRVSHATGGAGSRRRRRGRTSTDARAGQQAQTTKEQRGTTDSEARGNEQQDRSNATAHGTPGQPSREAGKADSSEGHEGDQRRTRSHAQ

SEQ ID NO: 972537 - protein, 122 aa, Homo sapiens
HVTQAARMRSRCASGELSGTGSPRHSRPAREGAREDAPAQPARGGMCSCWVILKEQNYNHDPKLNWFQVDLFMVLMGRICWSKKYPSCGGLLKSPPIDLHSGHSSSNERQSHAPRDSKANNL

SEQ ID NO: 972538 - protein, 102 aa, Homo sapiens
PPDNVFFSPQSCAGPLQKKRHQAVPGERDDPTPGGSLPPRRGPPPVVVAANKKKEGGPKSPTTVGVLHRRGGAAQNTKWSPHERPRAPRECRSAAHWTPLAP

SEQ ID NO: 972539 - protein, 241 aa, Homo sapiens
IPPPTWFKDVAPPPLLPPTPRSFLGNPPRGRCFWLPPQGGCPPPFGCVITLGEAHPILAAPPPPPYCRRVLYSGQGARPHPLMRRPNLYLAGRQHIILADPQRGFQHHQPPGNSPVGWVPQQRARAQALTQHRREYIYGGQQTICGKKDSGRPERTCRGVPPHSLGLVSPTPSATPRALGIDTRCTHTLIVIVGQNAGATPVRPASEGRMPPWPHPTKKSSSQQSLPKKNQNMCISRDIKT

SEQ ID NO: 972540 - protein, 121 aa, Homo sapiens
MSTELRDTRQSCVDIDYCRELRGLLKCTVDAHSNNWGYLPYARGAIDTNVLRDTMQETVHGQTETDTHDSGTLWTHRHGFGPLHLLGNDKTGAKGNTGPWSLANPFPGAHTKRAGVPVFRP

SEQ ID NO: 972541 - protein, 141 aa, Homo sapiens
MSPRWGFYSFFPPLFFPPRGGVPPGGPQHPWELAGSFLLLIAVPLQGRGPFFRSHLYTARGSLGYISRLPTDGEAHSLCALLTRSMVKHCGFLLYPCGTILAQYPRIPLETYTRHITLDALALEMHPLITPFRGLHLALSL

SEQ ID NO: 972542 - protein, 231 aa, Homo sapiens
GPPGGKAPKKTRGLQGSITKVSREECGEAQNEVWSHAVVMLEPAPRPHKDVVACEEGVINMYIGTVVSNDGREGQKQQVRGERKSPASQEEAPVGETSKKWNIAPLTPNNGVFSLGPHRDHSILRESARRRSRSAGPWANFLAASWNPLHWRFHTPLDLLPRWELKRRVTPIRCVEQRPVRSCNYSTISEVGRVRLARNPERPKRTRRHLVKKTGTVGPHKRRIAYTTTKI

SEQ ID NO: 972543 - protein, 66 aa, Homo sapiens
MATPPIIHKPNPFGTTTKLKGAPQGHPPFVRRKKWKKRARRRTKKNSPQASKKQGTPSNKILGGHN

SEQ ID NO: 972544 - protein, 148 aa, Homo sapiens
  misc_feature (139)..(139): Xaa can be any naturally occurring amino acid
FYRPKPFCDLCQKNIGLPPVIALVIEHDFAYHTRELLYLTERVGKAADSSQQRILEYSGFSSDNVLASNGPFLIEKPECLWRDNKEEYGGYNHYRGGQAAVSGSQEADSSPRISLRQETMRSPRRRVITPRVMRANRRXKPPEQQYTN

SEQ ID NO: 972545 - protein, 113 aa, Homo sapiens
MVCSASPVESCCFKSGGPTIILGYVCPMGGPVPFEFGQGTLVAPNFSGLRHTQLVSLSRWRPHTSCVGGSSPPPHSVDPSGDYNGLSTRRARTPRSWFTFLGRKINEALIPQI

SEQ ID NO: 972546 - protein, 245 aa, Homo sapiens
  misc_feature (223)..(223): Xaa can be any naturally occurring amino acid
VKYTVRSHSGAQMGERTGTVKRSQVSKMAPNFLGNTAGKEAEQHCGHNANREPHRFSVGPPQWRPLTPLATRSTDEVPPQTCTNHARQFLSASSTVTNPGEAFSPDRIKKKSRSGPPPNVGEERETGPRALAEYRRRFTAANTTEGKSRPVDSPPHSLREEGKVAFTLHGATRVMHASLTGRFPTTSANTPSWSGAMEQKERLYFGYSNLARRSHIILIVFAXLSHSTSYERNQSWEHFLGTTIA

SEQ ID NO: 972547 - protein, 77 aa, Homo sapiens
SGGLSSGILAHPWGFFVGPFPPPVFIPGARPPPRTSGPNVDVALSMSQFSPRRSHDTSLFVVPNQLLCAVFYPSVTK

SEQ ID NO: 972548 - protein, 294 aa, Homo sapiens
MAEPDAMSSKGSDGAGLQWRPGDLVQSSVWLKEQGYDVIAYLANLIAPSKERLRREARKKALQLGAHKGVHLRIVKPREFVDGVQSGRPCQLAAHLYDVTPLTSWCNLPHRQRPLGLCSAKTIGWNIRLQAERMGRPQVNVLTHGTHTGTIGESTHALLALSSAVLLHVDPPQINGSFASPWMDALNFLQPRAIVPVTDLALDVTHTGNGRDYPIRVSMFTKKTVEGSGLMDSSYAHLLTYGWDIPGKRQRKQSASRVSTRNEPGPSHRLAIPCTFRDRVHHGRLGCATLCVAH

SEQ ID NO: 972549 - protein, 164 aa, Homo sapiens
QGRASARGEKPPHIAPPPEGARRRHIKEAPHRPQKTAPLLISGRARSIWGAHVACVCERREHVCLVDPSRGERETKQEAPSLSSGPTWQVCDKYTRLCFLARSCLFTGRWHLLHPGVAMYLHLLAHASFFIIGRRSCFSLPRIRLTSRENKGHNNNNSNPEMVF

SEQ ID NO: 972550 - protein, 70 aa, Homo sapiens
MCWPHVGDMIRRVYLQSPAVLFQGPRHGPPDGSSLVLPPVAPPPLFLCGNKGGPRAGGGNQKEPYTHIDA

SEQ ID NO: 972551 - protein, 179 aa, Homo sapiens
MHATHDPTTTTTERSNVPLSTTTYPASQAGTKNKLLRRSYIGSQQKDDFWLSKRRKKERRWEQQQQHQQQQQQHHSSSSTNTRQQRGEKRAQQQERFHSTTKVTHTRATSHTSQRREKQEESRSSHVRGERERERRARGEKGEGEREREQRHLQQRAEEDRDKTEETPTRKPAHNKEQE

SEQ ID NO: 972552 - protein, 216 aa, Homo sapiens
RPKAQNGTKQSEEMRSNPPPTHQPPMCERDDRAQSGAGSRTIFRVPRGADWTASEKGEGKLIGNAGLRGKDLGADLPPPHHRATRIDEWDLLPSRRGGRCGILARHCRRRCPLVCGMIPGVFLGRCFLLFPPFLTAFPYPSLSFGIFSCIRPRAPVPPPPDPISLRYVPPTLPGAHSSRARRERGRHASGKRQGGKESLSLSVRERELSTTKNAEN

SEQ ID NO: 972553 - protein, 154 aa, Homo sapiens
MAPPARCPQDVTAGNKEASANPRWEASRAPTQGPRRQNRGSSGDNWSPHPVLNARHNDEGENTHQAQRKVFGPAAPQTARGFSLVRTTPPITRAWGAWSPKTTPRFGKTLCWEKQPCPRFSFMWIRRSPAFKGSVCIVARQACHSGADETSRKS

SEQ ID NO: 972554 - protein, 264 aa, Homo sapiens
MCARVFCPALSPGPVGTRCRPSFPGLFKLSVQNSGRCTYLRAHLRTWHVWLTFAVRRHFALFDYPHQPRRPLCSCFGRPSPSVWWQISGVSPRPRFGKEQRLGSPKSAWKVLSTQKTTRNLYASQHTWELPTKMLARHRDKKRSTASPRRWRTDAPPKATTRLWGDVESRAHARGPSDMDPPGRTNNRDPTTLGKEKLGLERIRVVCTDRRPCCVPDTAEKHNGSGERYSASTRRERTLAREAKGDPAPTDPSPASPSFVPPQN

SEQ ID NO: 972555 - protein, 106 aa, Homo sapiens
MGKIPRNCLMEPHTGNSSQAVVSALKKTCTKKFKYPTVFNTEAAFIGGFREKGVACLRQQCWNEPQLGGSYKSSTAPIFNIMKLVLPLNYRGPKNNKNTREHPKKT

SEQ ID NO: 972556 - protein, 295 aa, Homo sapiens
YLRHLVLPLVFGQIRRIAPAPVCVATFSAVGAFTYHKPFRAPPVLPEKMVCFAQLKCNVHKISNRTFFMVNIECAISNLRRAALLSLCGSHVLRLHSPPRHTVCLTTTHQFITVLGKKSHLLGGFGHTRGTISRQENVYRERSLAPAVHPTVASIFTTFYLINSARPSIICGRHNFITVSSVEEYPHLSVTEKQHDDNSTDIGTRNHTSVTYSSTGRPNTRGLREVRGVRTPKEGTNEDCPKEKGIFCHPPPRVNTYAEPVHSGTANSEYKTHVTLFINPLKKRRSESKPARPHD

SEQ ID NO: 972557 - protein, 108 aa, Homo sapiens
MATMLRLHNKSFSSPHRSTAKGHTRQPQLIETEEANHFTHTKDCVHHGDRNHHTPTKGVLGPPLVGNRRLLVAHTQKTPQNLVDIDRITRKASINNDRKSIISSDNTG

SEQ ID NO: 972558 - protein, 236 aa, Homo sapiens
CLVISKSLVSRLFDTSLGLSTTALVEFLPGRHKVFLIEPPLGLISPMGLNSFTNVSLLSYAGCFDTELRALYLSAHLQGLLISLSLPCMSALFKNYSLRTSVLRLYSYTPPLRFYHLLVEKYLSLVCGITPLLSLWCSHKFRLSLHTVTGSTHATQYSPPPENLPLHRGFRDPLGGHYRLPPHCPPQASLLVTPLLRPPQPTIVRHPYARRCIGHDASVINPAILISRGHPVLTIA

SEQ ID NO: 972559 - protein, 152 aa, Homo sapiens
CRKIFLDEGDATGTMESPLQTYSAVPDIGGAHQQTPCGGPPRLGGQYVGFVCVDAPRQADRVSLAPPRGVQYLLVAAPHLFISVGLTFRDTPGALEPLWVAPLSCWNQTQQISTLGERILFETEWFSLSFLYEADLTKSGEQRNGSIYVLHT

SEQ ID NO: 972560 - protein, 211 aa, Homo sapiens
MFVTNCSRDPVISLPAVILKGGPFDESSAHTHFVCPPSLRLPLCLSARHRVCLVHPRARLPPYNPPWPATLAPGCSLDTPHAGVAPHPGSKTGGTHILRGRPPRQTVDSADKNGLHNKWTPVPSYTCSRSPGALPLRTPLCIWRNPTRVVKPRSDKDHNPPGGRIGGRIKYANITGPRPGLFAPNAGATLKRALLAQQSAGTPGSSLAQLG

SEQ ID NO: 972561 - protein, 129 aa, Homo sapiens
  misc_feature (101)..(101): Xaa can be any naturally occurring amino acid
SQDGLHGWLIQKEGGTLVGACSIQWMREDGSTPHHQRSLMLCSLRCMRDNETFRPSSSIQEARLEEELRRRKETRLVGLFPACGGAPLVLGGVLLSFSYAXVSVKSAGDAFVVVIADDDDDDRQVLCVV

SEQ ID NO: 972562 - protein, 311 aa, Homo sapiens
  misc_feature (88)..(89): Xaa can be any naturally occurring amino acid
VGTIFFQISKRGPKKRCCPTLGPGKFSPETPFSGFYTPVGVPDALSVVGPPAIRLWGPSVLHRGAHSPLPPVAFLRCSIPSRGLSRRXXVSTIPQRCTGCALCPPPERPYWISPQGPSRLPPQRAFCCQKDLLVSPLRSAKKLCTQVLVAPHARKKPPGGDEPPRAGDIIERGIYLVHKLPTHRRPCLSNNVNHRTRSLPGANPWGTAAERYGGTKEGAQQIEEAKAGWVAPADNTQEISGSDQLRAAHYSPGGSLNARGDAHRDEGELTTGGTLETPPKGPRATPIAARWILTPPPPSPVDPNLLSSNIE

SEQ ID NO: 972563 - protein, 127 aa, Homo sapiens
MVGPQTYESTFKQSFGAVIVGPSQQPAHRAQSEFSFRLSSGRFFIYHTTPPTSHILDHKTRPPSFLHNAPPPPPPPSARKKKYNEAEPKHHMINTIVKEITHTQRTDISDHSAVYFSSLSMLLSERV

SEQ ID NO: 972564 - protein, 267 aa, Homo sapiens
TTRSVLEKELVSAFGRSVSRKVASPKGFWGPTYLGRVLPGRKIVVRPPYFWVMRVSPQKVGVGALLMPAVDRRACEYHVGGAATSIVCELCAPSAKQDDSRLSAPIREVSPPPPWTKVVAAQTKTSSLYVKECKSCARKPGFSACNLLYIPYHAPCETYYASEMLTVACDSPPPLPLRSRNTNNAYLFPSCIMSGLIITHRLRIGGSLTFLSDTFLEWWINHLSLETTSGPRNHEGQPEYVRGTCGDRQGKPGVTPFYTVWNIAGQR

SEQ ID NO: 972565 - protein, 142 aa, Homo sapiens
MCPKQVERPRGQTIGTAETPGGRGHTDDTSPLEHKGAKEKIGDHITHYRPGPSPWDNPRPGKRRRNLGNGKKRGVPPAWPMEGTPGRFPRANVERSATGRSRVKIYRRGLGKRIEGETPVAREMIVSVGKPEEGIWGYNPHN

SEQ ID NO: 972566 - protein, 203 aa, Homo sapiens
  misc_feature (58)..(58): Xaa can be any naturally occurring amino acid
VCDGQRKGGDVHARYTVSSPRLIAKTGLDALHFLELLHPLRKFGLNYTVVNSGITWPXPAGIDFYWLIEKNWDNEYIYDVAYGDSSYVKRFWFKDAHRRLYLLKDDKEVVTGPGVFQKWGEQPCGRGSKAGSNISPGNPFQRKSRIRAPLERVLDKERLRLESLFEICDTTGTAFYLSCKITICNSVNHQAQGRGEQYAPPIM

SEQ ID NO: 972567 - protein, 136 aa, Homo sapiens
IKRARGNNKTHQKNGGGPPRRKMGGEPPRGPQIVHAGICGGPPLPQGSVAPPPSPGEDHDSPILARQTRRPNQSPAGMANPPSLFTPRSFLRVFSPISLPTIFGELLLSAPHFITGPLLPTPREVCWRGTRPPPNC

SEQ ID NO: 972568 - protein, 104 aa, Homo sapiens
MLVQEAYTPTGALPLAVEKQSNGRPWRGGVNQRQGSKKGVQAVVRSSSATSGPRRTTLIGCLVDRSVCTLPLFAGPAPLLIISAGGGTPQYSRIWLVSRWRPTG

SEQ ID NO: 972569 - protein, 79 aa, Homo sapiens
SCENLLLGALCGRKPPGYTGAINTWGAHRTVGKSQTQGQEGETNGPLRRTLSLGGKTRAQVCRRPTRPSGRVGHVNAAG

SEQ ID NO: 972570 - protein, 118 aa, Homo sapiens
HKYAQEHFLGTPRPLAPDTTEIMEGAQRMPHNITYEGMTALAPLGRYACENTAHPWGAIAPRQCPHLQGRGDTDTTRRFANINAGNHHGVLHRRKKLRKIDPAQLCGDAAPRGRTAHT

SEQ ID NO: 972571 - protein, 289 aa, Homo sapiens
  misc_feature (205)..(205): Xaa can be any naturally occurring amino acid
ASLPFFYYRGGGFTFYRGKYALWSVFWERFCIFERGKSWGALLLAAHLCLSPSPVLFGVSPPIIYHWLGLIRTAYLAVHPAVSNRPFTWFFLLLPAKFFSSAGIVSGPCSPRSLGWFPAYLVVHWCPHMVSSLGIPLWVPRRTTSLLFCAPGVSNSRWVPPNGFIGPARRPILLARAVSHILWGLYFSLSSSLLAVRLSVPSPIXEGIIQGQTIVVKPHGLFPGAFYASTFGVQASPPQSGFIPAAPHMFSPTTPQHNYTRVETPPLHAFFKRLHNFHNFPFLQGGPTK

SEQ ID NO: 972572 - protein, 255 aa, Homo sapiens
AAKQARRKRTGANGRRNARRQRDKRRTTARRGAQIRAQGNAPQRWGGPHVHEAARYTEVRWRPAAARRYRRGHGVPPRRPSPGQDIWANIVGGSAKTQAVCKQGWFVTFSMEIRNVRRHRQGGARPLKTQDQEHASKETRRVTSGSIPNGSTCGSPRVGAPQGRDPQHKHGTYCLTHLGKHGVEIWQTDQVPASMPRRGRCRRRSQFNPPPSPRPYGKGPRDRHHERAWRPQGQPLSGRRLTTSAETTTIRGPFT

SEQ ID NO: 972573 - protein, 294 aa, Homo sapiens
TKAGRANRYTSPEDFSPENPRGTPLVHPGVAPQTVSRHDAFGQKPSSARVANSPGLLWGYPMKTPVSRRAGRWLNISGRLTSKQERLSPTSMERGPRAWPQKGPRLFGGKRGGPAKSSVEPPPQGGSATSTVPANIMESKVLQKRSLQGPEAAIAQRPSFCRLGPPHKGRLHPPTGGSTRRDSEAPPFLVENLTQTAGPYLMQTTPWFRGGETSNTDVAHQRMISHLQRFFPKMGAPLGRYTIGGHFAKKWQHATSFVCLPRSRIPVPPKKQLRSCAPFWKKAPGPGPQHPGDF

SEQ ID NO: 972574 - protein, 243 aa, Homo sapiens
NLCGHGCNCCVQGGPPQFVWGAQKRGSSFGEKSGFLLAHDGNAVPKWVFHRNRIAPSVVLRCKTTPVLPWRASSHQDYWLAAQVVAVPFFVRRAKAALLRGPNVVRLFTDYHHQGRLRCFMKVPRKYGASTRISVESPNGTNYATIVGEDTTRESVSVRKLNTSQALRRLCVYDSPRPLCNDALVKPCVFVSKERGTQDPLVSQRKREHFITKYKEGKQKCGSRPYHNGVCRIIVYYCPPMRV

SEQ ID NO: 972575 - protein, 127 aa, Homo sapiens
MPRLSGLIFPGPPASPLVGTLHRRPNVALHTLAGPPLCVNSQAGCGHLQQWCRPQAGTIVDHRGQTRGSETRRSSEQTLTPPALLGMAPARHWRKNSRGELPPPDTPCPPPSPPFPKKKIFPPPHNK

SEQ ID NO: 972576 - protein, 118 aa, Homo sapiens
MATVLFSLGRGRKPDKRFQIHREGQLVFLRQIDNTGGINNRLLCLFSNRRSNLKSFSHTSTHRGSINPSETDATMIHGPSFHGVYTHLLHEDGSPYPTFGAAPAGAFLPKYSNPKPQT

SEQ ID NO: 972577 - protein, 182 aa, Homo sapiens
  misc_feature (74)..(74): Xaa can be any naturally occurring amino acid
CTKPIIRVVIMGCPPSLFRNYQRGSCLVWATLFVSLLVIRERDIRTMLCFKERTPSMFRRATPAINSLRHSLIXWSGVAAPKFGETEKSLPNAHTHGGNISRRREKKEQCFSADTTCELSSQVLAVFYRAHTVAPLMCGVVQHKSTHAGSYIFHGGTHVCTASFVYRQIEHVGRVQHARFPS

SEQ ID NO: 972578 - protein, 262 aa, Homo sapiens
AESAGGATRIVIPGCGLDARKSRHEEHKEVGPRKGEEGYGPASETASPLQGACERSEQECVNGEQAESNNRYAVRRPLGGPLLVPPPAAGRGNEDKGEPAFRGTNLAGPKCGDKKFLSEERSFGKVKCFPRGGTPSTCAPRSPRVKRQTFIGGRRKVGNRTRANVFHGGRPPLLARTESKTPDLFTISLAHKVRMGRPIEGNIEGQSIRSAFIDLFENVSLMSCVTLYGAPRVLVKRGCCHRANSIKRRPNCEEKCWRRLHL

SEQ ID NO: 972579 - protein, 116 aa, Homo sapiens
FNAQTMHQRAPSRNSFHSGTFGAPPQFSFQTGFFYNKNIYTRYSSAFCSPPPLNTRALLFYIRRHNKISPLTVKNCPLHPLSQVYNMNNRTRLIKTYRRPPHRMRVITPVLAQIAP

SEQ ID NO: 972580 - protein, 185 aa, Homo sapiens
MCGVQILVLCSSVPAPKLLRHWSLVPPGLSPHSRFLGPLMGPPASFTRLSRARCEPPFCRTGIVRSCRPSNQGGSPRTSTAGGQKLVQPPGCFIHPRFAPWSGKLVMQNQQGAGLFPRTSQGTVPTGGLLMKADSTDRSVFASHDPATLPDIVLFAKKFMAPLQQQRGLLGYKDVDYMGAGSGPP

SEQ ID NO: 972581 - protein, 213 aa, Homo sapiens
MRHTVHQTMLCPIDVANSRGKLVKSHTNVAEIKSWGPHYIGEKLIEKPRFEVALPRIYVAIKRLFNLQGGIVQCEEYKESPRLGVRNNKLLWGRILTLPKCSCHCGDDTLVKSSQDHVSLRPLWPRHHHLGEYSGHLRNSSDRSSTQVVHFFGQPSVIVLNRGGEQVSRPPSKLWSTKRPYSNKFLTPPSLCLGRYSRVSSNGLIDSKEETIS

SEQ ID NO: 972582 - protein, 253 aa, Homo sapiens
DELRRTEWQGGPNRMVRWKGGPTLRAPETTTGGRPQHSCGDTRRARENRGDVAERPKVMPNDGPLWRPSCPRVARPHDNEVCKTVVEAASPTGVVTGGTGPPDGDCPNIPAGLAVAPQGAEPRGAAHPQPCERLRGFYHSGPEQGTTDISPADDGRKHKGRFDTKAGPKGIFLQVHGRPPKDVSQDSGKSLPSSNMGRIQAPQARTVGTRTQGDDRRTKSRGPHSKDPEELRGDGTNTMQPVEMMEQHKPPRG

SEQ ID NO: 972583 - protein, 130 aa, Homo sapiens
MANTSKHGCGLVPEGSFIGNNKGRALAKCVAPDNIVARLFSSGIFFIHSSPRETPCLVSETGLVDLVALSKCYGCAPPPPVDELLGLPGSAVNNLQLLNKAFLVRTTRNGLVYYDRHRMPNLLPKMFPAV

SEQ ID NO: 972584 - protein, 138 aa, Homo sapiens
NGQMAHGGDESAIENPRGAQPKRRRVKDPKSDRDTPRGAHRDKLSERAPEGTRWFTKKLDAPGEEQARQVDPPRCYYHTGSEKAAPALLQEAAKKTAASGSGQRTQPPRARMVALSPAQEEHTHFGAIDHRFCLPTLC

SEQ ID NO: 972585 - protein, 276 aa, Homo sapiens
KISRQIGPLEKARNHRGRKPGMRNSCAPRKAWPNQKPQLSAKSAPQNGQICGGSTDQQDNQGRRVCGPTPPCRPTLGRRPSLARTIKVLDAKSCVADTPGKSVNKKTQHAGGGIETTRLQEGNTCSTKPGTPGTKSSRLAQSRGGIDPERLRGRQGPGTFSQQRWGGSESTIPGGGSEPTVTPRNEGFEIAIVSETMQPPAQRKRETRRERVRRVSPQGGTQRYNRFYRAEHPDISVLLAKASTWQETTPRNTQRCAAKGKKTIWGMKKSKEGGQH

SEQ ID NO: 972586 - protein, 78 aa, Homo sapiens
MYCKQMVSLAELEWSRAHSTLHGPPTVYTHRWIVVANQGWAGKLDRRTSTSPRAPFLRLPRPDSSPKKFLTRLSPQKN

SEQ ID NO: 972587 - protein, 297 aa, Homo sapiens
  misc_feature (2)..(2): Xaa can be any naturally occurring amino acid
SXGAEQKERKRTEQKDVSRHTTGRSNKQWKAPSYSRRAESAPYRVLANVNRHQVHETDSFEIRDAGVVPGGGSPNFVDWRNRRPEMFPPALRPRKGPLQGGPQQNTNLGPPCDIFGSLAGRPIVKKCGAAAARSPAPVMVTRQELSCRHPCKSRIFIGPTTRASSRLCPRGLSWAPSLHMWARPGEAPVFLDESSRAGNPAGLSDNPTAALPASEIIFTGERHVSSAPLVRALQMGVADSRGMSPDERTRDISNNANDFWPPRKERHWLTTRPKFKGREDKPLSVCCFLVPWNSKWR

SEQ ID NO: 972588 - protein, 109 aa, Homo sapiens
  misc_feature (11)..(11): Xaa can be any naturally occurring amino acid
LKQIKQILIFXRVYNLCAADDVCTYSPTVDIVAAHLVVFSLLVVYIPHFVVPQFVGVFHKCSQIFIAGVHHKLSRCTHFTRSASRGERIPPSASKELSDGLHPTPGGQM

SEQ ID NO: 972589 - protein, 205 aa, Homo sapiens
  misc_feature (68)..(68): Xaa can be any naturally occurring amino acid
MCLFACACVVLYVSGVYVRCCVSLCLLAVVVGGVCWLIGLALDLSRLSGTGSVCASFSKFFPPVFRPXPGGGTPFSPLSPGFSPPPPLSLVVTAPPNGRFFAPPSRVDSGPARSLFGRRNSRPRKPFLCDRRPVDFQCSPVARFPEQIPPRDFAPLSCAPGEHTCENWTQLLLPALKYVMAAPLSYGLSSLSRGRAKILLVGPPR

SEQ ID NO: 972590 - protein, 117 aa, Homo sapiens
KDRTGGNHGAYGPPLWTPLSGTNKWAQEEAHSHKGPPTSHRGRKAVLGGKRLNEREVTQTPGVPPLTKDWRPSFRTSRISTFPGGLPPTGMSYGPEGSKTGGITSDFSEDAFGWSPS

SEQ ID NO: 972591 - protein, 181 aa, Homo sapiens
  misc_feature (25)..(25): Xaa can be any naturally occurring amino acid
  misc_feature (44)..(44): Xaa can be any naturally occurring amino acid
  misc_feature (47)..(48): Xaa can be any naturally occurring amino acid
  misc_feature (57)..(57): Xaa can be any naturally occurring amino acid
  misc_feature (67)..(67): Xaa can be any naturally occurring amino acid
  misc_feature (83)..(83): Xaa can be any naturally occurring amino acid
MGTWVETRHGRTAGTNACHKVKARXARPERTLILNVCRRPRSSXPEXXTERGGARGXNTLRRTHNIXQVAKRRWCQELHENWXHVLRRKQKNGRLRKNTRWKGGLSCTASYSTSPNERGRRCATNLVRSRESSNQKPSKVSLHERSHEDARDGITQGIFSMEQRYRVHEGALTKWEELTRS

SEQ ID NO: 972592 - protein, 173 aa, Homo sapiens
MRADGADCETRPRRSFPRRVETTNNWETAPETTGIIRRRTTKNRGLKETLLTVPADAQQIPPGAYWTKSSRAVAGYTHVLRTLSREVDTPLDHYGKRDNTRLSREEKLSRKLSHVVRPTPGGNDRRASTHHHHKAQERGPPSCQEHTAQQIPAGETQRTCKTLSEVLGRTNNN

SEQ ID NO: 972593 - protein, 294 aa, Homo sapiens
  misc_feature (145)..(145): Xaa can be any naturally occurring amino acid
SPDYANKTGHHMHPNVVNKRRVSPPRKYNPPCLKGDHSKPGATPTRGHQRPGAPLGGENAHLSQRRTFTAHKSVLKEPPGHRVFTHTGNSCAATQHYLHGLITAPSLALDKKNCGPAHLGQPPMKAQPPWGGSKHKSMHLREEGXYTATTSRRNKPEHPTSCIRRQVAKCIPASHKLARLSPLENPSTTLGARVTTRREREMGTHRGTKASSWPPGVRTTLTSTTPGATSSRDVKGLTENDATNTMQRHVHDADATLKKPAQGGIRHPPPPGVGSPPGVRPQEMEKYKPSTGPL

SEQ ID NO: 972594 - protein, 135 aa, Homo sapiens
HTIGPEGISVPSYGVLVTTPGFQNIGLIVSTDVSLLRSQCPCRRRGVPTWRVTIGIFCPAPPTQFEGSDLSTPRGCPPTVSKPPVGAPHICGSPCDRRYHPFLSCASARRICPAPPDPRKRSSPVSSPLDYIPRR

SEQ ID NO: 972595 - protein, 162 aa, Homo sapiens
MPTPRGGTPLCVLCEKYVGPPVRPRHLFCAELLWCTPPDCLGHEWCRLYYSCLVAHPHVVVNFYAWRLEALFTFRGGIEQNMRAPSGGTTAPHRGHLWDQKGSEHPASHSSRQALPSPPRREHPLGSPRQEEAHRGARRAPTPKGARQPPPLKKKKARQQKQ

SEQ ID NO: 972596 - protein, 86 aa, Homo sapiens
LSRLSALLGHRRCGTTPIWHSLLEAGPPRMPWVHKGTHSCESRRRLASRQRHKISPASTRSAERSNMSASKSTPWVTRQLVRRSYL

SEQ ID NO: 972597 - protein, 95 aa, Homo sapiens
MGVNIALHALLQPPFTGDCGTLACKKIAFTIRPDFSQRYIAHSAPALGDCSESSTAVHALIQQLRRFPHNTNNSFRDEFRKLEPPKKYRQLNPHM

SEQ ID NO: 972598 - protein, 144 aa, Homo sapiens
LPSLLCRVDGARANKVAVLNPSPPGCSRPYEAFISPPRKACQDTLKRFPLGQPDEEKYPVPPYANTVVGARSRLPRPTNWEQGAHVSSLSTKYRGTPYGMGTAEAFPPPYFGPRSPIRATAVPPEYPRLDPDPMCQETPATVTQ

SEQ ID NO: 972599 - protein, 220 aa, Homo sapiens
QEPRAGASKPTLWPAFHKPPEAPQVPSSGQTQASGDILGSDRPGQVHKFLRGRAAHREVPATRRLGPTPAPPEAPPHGRGGPPLTPAVAPPLLRNPRSLAAAMTTVADRLMFRVATARLSEETILHNVLWVVYRPLSMGRAKMRLPRRRPQGEATLLPCSVVPFPFYRTGTAAFSSAAACKKQAFPIGGDEQEALRISEAIAGARGRAVARITPKTHKNN

SEQ ID NO: 972600 - protein, 227 aa, Homo sapiens
  misc_feature (1)..(1): Xaa can be any naturally occurring amino acid
XERQATARPIENSTEEWDSPMRAGGIGNPAGSPSNNGGWQHLSLVRASRLPGVQRITGNLVTPPENVTMGKNRGNIAKSGSCALHQQGVGPDPAAGAHAPAVPRGKKFAPNKRATPLRVEKPSLKLGGSKKGHHTLGASIIWETTMAPAAFQERINAARIAPPGEETLGQPALSYVEYSPDNILSTSVCPHPRERSLIGGSHLDPRVFGTPSVFTIFQSPASGLSYK

SEQ ID NO: 972601 - protein, 111 aa, Homo sapiens
  misc_feature (102)..(102): Xaa can be any naturally occurring amino acid
MQLFAATVIRILPPIINTRRDLNYFSSTDIVEDTLIRHPFNIETSSSSSFFAISYKRVFNNHPLEFVEQPLTHMKVTFVLIPLARLVVSRYSSFLLEQPVSXFYVRPYCAS

SEQ ID NO: 972602 - protein, 141 aa, Homo sapiens
ASPPVGYPRVNRDTVGGTNTSVWAGTPPTERHGPAQNTGRGKHTRPRLCPRKDAPPGELYTRRREKTLILDEDRHSECPPQGGVPRGAPAAREHVCFERHPTACEKPVGARPLNFEPPPRAIVCHAPLFRGGLFPSRGLPE

SEQ ID NO: 972603 - protein, 143 aa, Homo sapiens
MSELAAPPQPIVLPTPLSVLDPSFIGFNPPRMSKYATPLPGGRKPTEGKGDESTFSAPVIPPTNLLCDTNSDPVSGQNTAYGGACSYLLAGVCYPRDLKIDCLRVVSKSGLDRIYLALRSSLPDYVNDCCPPIVYHVLCSRPP
